United States Patent Application Publication US 2011/0183924 A1 - sequence listing, part 71

SEQ ID NO: 253244 - DNA, 484 bp, Homo sapiens
cttttgaatctttaacatgtgaaaatatctttgctggatgcagtggtgcatgcttgtaattccagctacttggaaggctgaggtgggaggattgcttgaggccaggagttcaagaccagcctgggaaacagggcaagaccttgtctcgtctcttgaaagaacaacaacaagaaactttaaggcatgcttagatttccttgataattttactacatacagagttaaaaatggaaactactatccttgaaattttgaagacattgctccgttgtcttctaacatattttggatatgatttaattttttctttttctccctggaacattttagaatcttaagattttaaagtgtcacaacttctgtcatgtacttcggtgtagatccttttaaaattatgctgggtattttgctttctccatttagtctggagaccattgtccatcagtctgagatatttcctaagttttcaaaaaaaaattcttct

SEQ ID NO: 253245 - DNA, 371 bp, Homo sapiens
ccagcatttgaaactgcagtcatttttaaactgagtatgtttttatttttaaactaaatgtactatgctgtttgcatttcctaaaaatatccagaaactctggtagtttgttgttcagtgctcccctggagaattcatgtgaaggtctaaatattttatactgttgattttattaaaatgtgaagatccattttgtgaccgtgtaaatggaatgtcagtgtttcccttcgaagttcacattcccttgcctgtgttctgcatattccttttccttgctcagaattcttatataggtaaggaagaccttccaaggtttcttttgccacgcttgcttctccaaacactacaataaaatcattttgatgaagtaa

SEQ ID NO: 253246 - DNA, 239 bp, Homo sapiens
accatctgatcgcaagcctctaatttttccagaatgtctgccgtctccatttgggaccactgagctgccaacagtgcctcagagaaagattcagcaagaatggaaactactagtacattttctcattatgccactcctaaatttagtacattttctcattataccactcctaaaaacagaataattagtaatgaaatagttcataaaaaactatcccaggatattattttgagatgtgc

SEQ ID NO: 253247 - DNA, 394 bp, Homo sapiens
aagccacgtcattctgcttttgggcttcatgatctttgccatccttacatgtcacttgttctgaaacttggccatctcacttgtcgttgagctgaaacttggcatggtgatgattgattgggaagtggtttctctctgcttggcaggactcagctgtgtacatcctggcccagtcgaaggctttggctcctgcaaggtaaagaggtgccatctttcaaaactggagaacagccagagattcagaaatagaaatatgttatggagaaagtcgacttcttatcactttcctttcctctcttatgtggaggacctcatttctctctgtttgcagggaggcacaaacaccagttttattcattcattccttagtcatttaagaatacatactgaaaaa

SEQ ID NO: 253248 - DNA, 408 bp, Homo sapiens
catctttctaatctctgtcttcttgcttttttcttctctgctgtcattgtttcgcatgggttgtctaccacgtaatcttcaggaatctcatttttaggattcccagaggcaggctcacctggcccttggggacgtgactttgattaaaaaaacatcagggattagttgaatctgctacttctcagttgttggattgtggctaagttacttaggttctctgcgctcacttttcttatctttgttctttttttttttttcaacatcatattagaagtccttctttatctttaaatggggctgacaatactctgtacctcactggattattatgaagaccgcctaaaactaatttatataaagggcccagcacatattaagcattgaataaatggctgttacttcttctgc

SEQ ID NO: 253249 - DNA, 393 bp, Homo sapiens
gttctcagtgtgtgtcttgtgtcatttctgtgatgcttgcacatcgtcagggggtacctaccactggaacctcctcttttaacaaatgaggaaactgaggcacacagcggttaagggacttacgccaggtcacacagcagtagagctgggctggggcagggggcagctcctcaagtggaacctggagagcccacggggcaaatggcggaggctggaggggctggcaagggagggactgcaaagggcctcacaggggctagacgagggccctgggcaccagtgattatggtgcccccccatgtggattgaagattaaacctcgaagcaagtgtataatgcccccaaaaatcacatttggaagtcatcacttcaataaaaatttctatattaaat

SEQ ID NO: 253250 - DNA, 513 bp, Homo sapiens
cagacgggatttcagcatgttgatcaggctggtctcgaactcctgacctcatgatctgcctgccttggcctcccaaagtgctgggattacagcctgagccaatgtgtccgtcctggatactcttatttcttaaagacaagatctaaattatataaacatttatgtaatatggaatgatttggcataaactattgatgtcggactttttgttccttagttcagctaaatctgagttcttgtctcatgaccaagaaaaattaggaacatggactcattgaaagtttttcttttaacagttggcctcagaagtgggatctgaagtagggcttccagcaacccccaagtgatgaaatgaagaaagatttttagtgattcactaactgaggacaatcaaactcttcatgatctagaacccaaagtttgagtcttctggaaatgtcatcagaaaaaaacatccccttgccactcacacttcagcaaaactttcatacttcaaaccttggatccgcatct

SEQ ID NO: 253251 - DNA, 425 bp, Homo sapiens
taggctttggagtcatgcagatctgggtttgaatccagccctgccacctatcatttccatgacctttagaaggtgatgatattgacacttcataagattttgtcatgctttgccttttcacaccgctccatgccacctcacactttatggctacagattctatccctctggccacagaagtgggcccaagataggtcagttagtgtttattacctctggtcacggtgattggttcagagatggacacagtatctaatctgggccaatcagattccttctctgagattttatctttttctatctggagctagaagggaagaactttttttcttttggatgatgaggctataagcaagtaatttcaagggtgcctgcagccattgtttcagtgtcatgtgaacagagaataaagcaattgaaaaata

SEQ ID NO: 253252 - DNA, 403 bp, Homo sapiens
aggtttagataaacttgtagatgctttatttatttgaattgtcaggaaaaaagatatggttgtatggttgagaagtttattctttactttttggagttcagggaaaactcacatcatgtggtgacacagaatatttgactaaatggaccaacatcttgactcagagtgaaaattcttaggaataacaacagtcttttaaaaagtatctttcctttcttttccaatataagggaaaaggaaactttagtcgggtaggtggtaggaaaaattaccctatgtgaaagcttggtgttcatgttgaaaactatataaatgccaactagaaaagggaaaattgaagggggcaaaaggtgaagctcagaaacctagtcgtaattttgcataaagtctagattaaacaacc

SEQ ID NO: 253253 - DNA, 558 bp, Homo sapiens
ctcgaactcctgacctcaagctatccacccacctcaaccccccaaagtgctgggattacaggtgtgagccaccgtgccctgggttattttctgtaactaacccccttctctgcaaattatattgaagatattttatcctagtctgaattttaacttgggttgtagtgcctttggtttgatagaaaagtttagtgttcatggaactgaacattttttattaattgtgttttatatcatgcataggaaggtccttcaaccctaatattttttaaaaggtagtaatttccagtacccttatagttttgtgctttgtgtataaatttactatcgatctaaagtgtatcattatatatgatgtgaagtttttttccaagtagttagtgatattgcaatactcatttcccatagaaacatggggatctttttggattcaatgctctgttccattcatttgtctgttcctttgctgtacactttccattaccatagttttattattagaggggccctagggtccttctcactacgtaatttggcattgccactaaaatatattgt

SEQ ID NO: 253254 - DNA, 573 bp, Homo sapiens
aactaaagggttcagaaacagcatcagagacttcagatctaaagcagaaattcctccttcctctgagtcacacagatatctagctagctttttttagattcctttcagtttgagaagtctgttactttgtatagcaactgattctattgttaaacagctttaatatttaggtgtacttttatattgagccaacttatcatgatttctactaattggtcttatttctgatgttaagggtcacagagtatttttattttttctatcactataacttttccactttccaggactgctgcatgctaaaaactcttagttttgttcacttttcaccatatgacataattctaaggtcaacactgaaaaacttcctagggttactctggtttttttaattaagattttttaaagtgccaatcagaaaaacataatattaaaactggtgtcaatttataaaaaatgttctgatgtattgttttgtacaattatctaaacagaagcatgatggactctaatatttattgagcacatgtcacgttcaaggcattttcacatatattacttaatttttatagc

SEQ ID NO: 253255 - DNA, 298 bp, Homo sapiens
agcaactgtgtaaagatcatgtggattgattgttcattttactaacttcttaaagggattgagtggaaaaattatacattgcactgttcattgtactaaatctgctttttgataaaagcagaatgtggaatttagaaatgtaattttaattacttgttggaacagattttcttattaggagagaacacctttgaaatcagagagtgaatctaattctctaaaaaagtttaattttacagtcttttggaaatatattggaaactttgttcattagatctctttataaatcaacttacca

SEQ ID NO: 253256 - DNA, 459 bp, Homo sapiens
  misc_feature (403)..(403): n is a, c, g, or t
  misc_feature (410)..(411): n is a, c, g, or t
  misc_feature (413)..(414): n is a, c, g, or t
  misc_feature (427)..(427): n is a, c, g, or t
  misc_feature (433)..(433): n is a, c, g, or t
  misc_feature (436)..(436): n is a, c, g, or t
  misc_feature (443)..(444): n is a, c, g, or t
gctgtggtgtggattccctgctggggaacgtgggagatgaggctgttagggcggcctggggccatttcgtgttaggtgttgaatgctggggaaagaagggcaggtcaggctgtgggaggcttccctgctccccgcctcccctagactcagggcagttggtaccccagttagaatacaaaaacagagtcagtcagtgttatacatgaaacaattctgtaacatttgtgttattgtgatttttattaaatagaggtttggggcccaagggcctttgtgttggtgaggcagtagataatacccccaaatgtcccttctgattggtaatttattttatttatttattttattttattattttttgaggcagcatctccctctgtcgccaggctggagtgcagtgatngcaccanngnnctccagcctgggngacagngcnagactcnntctcaaaaaaaaaaa

SEQ ID NO: 253257 - DNA, 422 bp, Homo sapiens
  misc_feature (366)..(366): n is a, c, g, or t
  misc_feature (373)..(374): n is a, c, g, or t
  misc_feature (376)..(377): n is a, c, g, or t
  misc_feature (390)..(390): n is a, c, g, or t
  misc_feature (396)..(396): n is a, c, g, or t
  misc_feature (399)..(399): n is a, c, g, or t
  misc_feature (406)..(407): n is a, c, g, or t
gctgtggtgtggattccctgctggggaacgtgggagatgaggctgttagggcggcctggggccatttcgtgttaggtgttgaatgctggggaaagaagggcaggtcaggctgtgggaggcttccctgctccccgcctcccctagactcagggcagttggtaccccagttagaatacaaaaacagagtcagtcagtgttatacatgaaacaattctgtaacatttgtgttattgtgatttttattaaatagaggtttggggcccaagggcctttgtgttggtgaggcagtagataatacccccaaatgtcccttctgattggtaatttattttatttatttattttattttattattttttgagatngcaccanngnnctccagcctgggngacagngcnagactcnntctcaaaaaaaaaaa

SEQ ID NO: 253258 - DNA, 469 bp, Homo sapiens
gcagaggacagaaaatcgtgtttcgccacctgctggcgggtaagacctgagcgtgcgccagcgcaggaggaagccgttgggggcctgtgagagaagttagggagcagtgggtgtggggagaggcgaggcgggaacacttagggacacagcaggagcttcttaggtgagcagaaagtaaaaccagagtctccgcagggctccgtggctcacgcaaataatcctaccactttgtggagggggtggcgctcgactgagcctgggagttcaagaccagcctgggcaaggtagcagaaaccgtttttttttctgtaagaaattaggcggccgtggtggcgtgcgcctgtggtcccaccagctcaggatgctgacgtggaaggatcaacccaggaggcggagtttacagtgaaccgagatcgagccactgcactccagcctgggcaacaaaatgagactctgtctcaaaaaaaaa

SEQ ID NO: 253259 - DNA, 210 bp, Homo sapiens
  misc_feature (157)..(157): n is a, c, g, or t
cattatgcccagctaacattttcaagaataaattatttaacacagtccaggaaaaaattagttaatacctggttctgtcaggccacccagctactcgggaggctgaggcaggagaatcacttgagcccgggaggcagaggttgcagtgagccaagantctgccactgcactacagcctgggcgacaagagcaagacttcatctcaaaaaa

SEQ ID NO: 253260 - DNA, 476 bp, Homo sapiens
tatttcattcaagtctaatattttttcttattttggtaaatattaaggattaattgattgattttgccagtgaattttagaccttcattctaatagataaaaattgtatttagttaattacaggcacagtgtcttgctctgtcacccaggctggagtgcagtggtcatagctcactgcagcctcaaactcttgggcacaaccagtcctcctgtctcagcctcccaagtagctaggaccacaggtacacaccatcaagccctggctaatttttttttttttttttaatagagatggggtcttactatgtttcccaggctggtctcgaactcctgagctcaagtgatcctcccagctactctggagactgaggcaggagaatagcttgaacccaagaggcggaggttgcagtgagccaggattgcgccgctgcattccagcctggcgacagagcgagatccgtctcaaaaaaaaaaaa

SEQ ID NO: 253261 - DNA, 905 bp, Homo sapiens
gctatacggcccaggctggtcttgcagtcttggcatcaagtcatcctcccaaaccattggaattacagggttaagccatcacacccagctaaaggtggctcaacagcaaagaatttctttgcctgtctcatttctgggaccacatttgttctacctttcagagagtgaaggccagagctgttatttaccacattgacagaacaaatcaaaataaatggatcatatgaataaacaaatgaactaatgacaagcaaagagacgagccacacagagaaatggaccagaacattaaaaagtcctgtctctacccttggagaataccaacacctaacttatccctcagatgagtccccgaatccggcttgcctctggctcagagcagagcaggctgtgtgctgatgacacaccatgccatcagtcaagttacttgcaacagagccaagctgtcagcccagggtccccagcacattcttagaaaaagttaaatatgtgagctctccataggctgtcttgaggaactggtgtttgtgagctccagaaagccccacatactgcaaggtagataaggaacagtccgtttgagcctatcggcaggaacgctgcctgcagtggagaatgaattctgacgtcagagccctgtctgaattctggggtttgccactgggctccaggaatcagctgcagggaatccccacaaatatccactgtgtaggaggaaacttgctgtctggtttatgggacagaattctaactacatttaaaaaactaacccagttttgcaaagctggtcctctgggcagtatataacaatgacagcattaatagccaatagaacagtggctcccaagggaaggaaaaaagaaagaaaagagacggagacagagattaatggccaaattccacct

SEQ ID NO: 253262 - DNA, 500 bp, Homo sapiens
ggaaggtgcacattgatgccactttgagaagaagtggactgtggtggatttgtaatgtatcagttttgccaagctgaatgcacatttcccagatttgccatctttagatagctctaggttagcctgggcaacaggagacacttggaagatagaattcgagtggctgttacacgcttttgtatactgggaagggcgttgttacagctcaggcatgatcttcatcttccctgacccttggactggtgggtgttttgcttcttgatctaacattaaggttagaagttgcaggattccagcagggttttgtcacatccaatctggtttaagttcccatattattaggaaagctttagggtgcttcaggaaaacgctttttaaaaaatcaaatttggaaaatatcaaatggaattacaggcaataagcataacccagtggaaacatgaatcaaaccctctagagcagggttgtctaaattttggcttccttgggccacactggga

SEQ ID NO: 253263 - DNA, 456 bp, Homo sapiens
aagaaaaccctaaaattcagtacaaatataaaaagaaacataaatatatctcaaattgataacataaaaacagattaagaccaaggacagtggctcacgcctgtaatcccagtgctttgggaggccgaggcaggtggatcacttgagcccaggctggtctcaaactcctgggccgaagtgatccacccacctcagcctccaaagcagctgggattgcaggtgcacaccatggtgtcggcctaagactcgtgctgattaaatgattcagaaccacactgggtgggccagggacacagctatgtcataactcaggaagacaaggcacatacctacctgacctaagggctttaggcgctgatgaaagtggagttcagtagacagcccttttcaagccctacgagaaactggggtttctggaggagaaggaaggtgatgaaggatctgttctcgtgagcc

SEQ ID NO: 253264 - DNA, 440 bp, Homo sapiens
aatacagaagaggtatgctgtggaatccgggagacttcagtttcaaacaaaccaactataaaatggcattttttgacaaaaggggaaatgataagggactagatagtaggtattataactattattttattggatatgataatgatatctgttaaagacacacactgagatatgtgtcagttaaatgataagatgtctagaacttgttttcaaatactccagaaaaaaaatcaaacaaacacaaatcaacaaaaagtaggagaaaagaagagacgagccaagatagccaaaatcttgctaagtgatgaggctggtcccagctgtaccagaagtgcaccatcagagagctgcccgcccagcccctgcacaggctgcacagccccacatgcgacaggctggagcatctcagctcagtgtgtgccgcgctggccgatgtgcag

SEQ ID NO: 253265 - DNA, 687 bp, Homo sapiens
tcttgctatgttgcccagggtggagtgcagtggctattcacaggaatgatcttagtgtactacagtctcaaataccaggcctcaagcgatcttcctgcctaagcctcccaagtggctgggaccacaggtgcatgccaccacacccagctatttaatttttaatgtagtttttccttctgtctctgggaagtacatttccaccttttaaggcatatctttctttctgtgcttgtgttttgagtccaatttttcagcctcttttgagattttgtttactcatgcagtggtagcctctttcctacaaccctgcctttccctcttcactgccttcatttgtaagctacagtgcatgggcattagagtctggacctcagctgaacccaggctttcccacttacaagatttttggcagcggacaggttactttattcttctgaaccttgatttccttgcacataaaatggggataagggagggcaattgtgtcaattaagtaaaaaacatgttaacttcctgacatataatatgcacctaatgatagctataaacattataaaaacaatcagatttcgcttatctgaaaaaagcattaacagaaatgaagacaacgccaacattctcttagctctgttctccctgattattaatgctttgctgcctatcaattatgttcatgggcaaaattct

SEQ ID NO: 253266 - DNA, 401 bp, Homo sapiens
caacccacagaggtcattgcaacatatctctgagcccctaatttacgtagtttgactcctgcctgggccctcccttcagtgatttttgtgacatattttttgactcagcacctaggtaatgtgactcttctccactgcttggactctgtcacagaaggtattgtgatgtatcactgggcctgacacctaggtgaaggtactgtcttctcctgcctgggccctgcataaattgtatattttgacatgtcactgggttcaacacatgggtgattcaactctctcacatggaccttgagcatggggttattaggacatttatttttgttcatctcagtgatatgactcctttcctccctgaaccctgtcaaaaagaaagattgtgacatatcacttaaaccaaa

SEQ ID NO: 253267 - DNA, 431 bp, Homo sapiens
cgtgtaaaatgtgcttctttattaccaactttgctacttattagcaagatagcctttgacaagttttttttttttaaacttttcaaaatcctggctgcctcttctgtagtatgatacgtaagtcctcactgtgtctaaatgcccccaactcttgcggtcttcccagctctaagatctgtaattcttgggttcaagttgtaaattgcaataattggaaatgttgtaaatatgtggccaatgattcagttggcacttaggtgaatcagaaggagatgcaagataaggtgtgtgtcctatagctgtaatgtgaatggaggaatcctacatattttccctcaaaaatactggtagtatcatactgacactaatagtagatggaaggatgagactgaaaataatacaggaaagacagtgtccagggaattaaaaac

SEQ ID NO: 253268 - DNA, 338 bp, Homo sapiens
atctcaaccagaagtctaccatcatattccaccaactaagagcctttcagacccagctctggcatatatggccctttctgcagatggatgtgctggttttatttagcttttccctattgatgtttcatttgttcttcagggatggaggtgaaggagatatggaagcagaaaaaaagaatcaagataatctggccatatgcaagttgggagggggtggggaatggtcttcctactgaaaaatggaataagtatacagcagatatttaaactgattataatatttaaaacatgttgtagtttactgtactctgtgaggctcgtatctcacattttataag

SEQ ID NO: 253269 - DNA, 1332 bp, Homo sapiens
cacccccgattgcaatagcacagggcatttggactgggggaatgatctgggccccgtgagattcctgcagctgggtggtggtgggttcccagccagctccggcatcactagccagctgttacagcactcttgccctgagtaggaagtcgaatgaaagttattacaaagacaactgccaatcactgggcctgcagacccaggcccccacaggaaagtgggtggtccacacccaagtggggcacacagagagggagaggggcagaaagtgtccacaggcttccaacaagatagttgaagacaaccccacacagccacgtggatgggggagaggccactggccagagttctcaaggcgttccaatagcctccttccagactcccaaaacagtcagaggctctctgggtcaccaggcaagtacctacctcttttttgcagacttctgtctttcactgagcacttgcaggaaccagagagcccgtggagggtgcggaacaaaaatgaggactgggtaccagaaggcgctccgtgatcctaagcaagcccgctccctccttggtcctcaccacatcagtaaaatgaggggatggggtatccgatgctttgagctcttgctcagatgcacaggatgacatatttattttccatcataggctggccctggaccccagtccaaggttaaagagaattcacaggaaactcccttcccctagggaagagcagtggtggtggtcccactaataggatgaggcagggagaggggatgcatgggtcacccagaggtggccctccaatgtgtgtgtgtgtgtgtgtgtgtgtgtgcgcgcatgcacgtgtgtgttgtgtgtgtcatgtgcgggaagggaaaggaaggatagaagatcatggtggccatggaggaagtaagctcactcttctgcttttgacagaaagcagatatagctattgggatttatggggcaaacagaccattcctggggttccctaaccccacaagtgtctttattcctaattccttgcccctgctttccactgcattcttccatttagaaacaggccatgcaaggtttaaggcagggaagggtggccctagtgacctagtgcctggccttctggcatgtgggataaatcaccacgattcttcaaaggagagagaaaggagcagggagggtcttcaggcctctgatgctctcttccccaaccccccttttaaaaagaggagggggccgagtgtggtggctcacacctgtaatcccagctgagtcagaggatcatttgagaccagaagtttgacaccagcctgagtaacacagcaagacccgaccactacaata

SEQ ID NO: 253270 - DNA, 921 bp, Homo sapiens
gtgtcaagtcagggtggtcggtagccttgcgcccgcaggagagatatggcctgaagcctgctgcacgtgcgtgccacacgcgtgtggggccacctctgcacatcctgaggtgacccttttgggggggtcgtgatggtcagtgcacgtgtgccggcagggctggtcagggttcatcgcctgcccaggagcctgagcctgaggcagggaggtgctggtgaccgttcccccaaggtggctcacccacagcaccgggaatggaccaggtcgtccctgcccctcagtaagcctggggactggcagaccgtctcttttctggggacacgtatccagccacacatgggctgaccccctcccagtctctgcacccgacacagtttgatcccttctcaggccaatcctgaggctcagggctggcacactgtctctatcccaaggcaagcacaggtgggcacactgcccttgtccttggtccactgtgggactggtcctgtctgtctccagcgcccagcatggcctccacacacctctgcctccagggctggctgggcctgccctcagagtccctgccacgccagccgttggctgcaggcatatcacagataggggatgctgcccagggctccgagtagaccaaaagattcctgcccacagcccaggaagagcaggcaggcaacggcgattccccgggaagggaagggccccggagtggggtgctcagaaccctgggccactgtgctgttaaccaccacctcccggcaatggctggcctcagcgaggccccagggcctccccgcagcctcgcagtgtgcatgtccctggccctctcccatcaccaggctgtggtgggtgtgtggggaggctgtggtacacaacgcaggtaaaataatatgagaacatgcacccagcaccaggggactcaga

SEQ ID NO: 253271 - DNA, 370 bp, Homo sapiens
ttctagggcctttcaggaactccagacagaaaaagggccagttttcaaaagtgaaagactgtcccaaacccactttcaactttccacattccagaaacatttgaagtcaagcagacctacgtttgaagctgcacttgagccatttattaccttgctaccttagtgacactgctcaacttccacaccgatccattctcatctgaaatatgacactaccacttaacctgtggagctactgctgggatctgaaagtgtacctggtatacagcaaatgtgcagtacaattaactatcatgcatgagatttccctaaacttccctccaccactgctaccaataaaattacttctccagaaagcttccctttaatt

SEQ ID NO: 253272 - DNA, 512 bp, Homo sapiens
aatagtccagtcagtcagagctggtgaagtagacttgctgtagaaggtgtgaaggcccagtcctccctccacgtttctccacccttgaaaggtcgtgtgcatgtctgttcacccatgaaagaagaggaagacaccaaatggatggcattgatttcattttaagggctggagatcaagacctacccattgtgatgaataaatccaggctctcagcaatgcagggagaaaaagttttgtctatcaacactgcagcaaccaggtaattctgtgcacagaccaagcacaggcaccagccctggagttcatgtcctcatcaaaggatggaaagaagcaaagctcaaatcagcttgggaaggaccttacctagtgctcctgaccactgtaaccatcatccagacagcagagaaaggatggactcattatacccgagtcaaagtgttgccacctccacagtcatgggccattgttccaggggaaagccctaccaaattaaagctaagaaaaacttatca

SEQ ID NO: 253273 - DNA, 326 bp, Homo sapiens
tgatgggcggatgtcgagggcttggactcaacagtgcctcatcctcgacttcatgccctggatccagctctgcttcattaatctttcccttctagaaatgcttcctcatgcactacttttccaacctcactgcagcaacatgacctctccacttgatgcgcttgttaaaacatacacagaaatagaaaaaagaacccaatgaacttctatcacctaaagtcaacaattttcaacacatggccacccttgtttcatccatatctccctttcatttccccaaccccagacaccatatcgtttcatccataaatatttataaatgcatc

SEQ ID NO: 253274 - DNA, 444 bp, Homo sapiens
gtttttcatggcagcatgtgacaagatgatgctgaaaaatttatatggaaattcaaaggatcaagaatagctgaaacatcactgaagaagaacaaagtgggctgaactcgctctactagatatcaagatttataagcaactacagtatttaggacagtgtagtatcggcactgggagagaaaaaaaaaaaaaaaaactaaaaggaaaaagagcccagagactgacttttgtgtatgtggacagtttgtttatgatgaaagtaccactgctatgcactgtgggaaaatgtcctcaaagaatgacactagggcaactgggtatccccatgtaaaaacaattaaccctaatctcacatcacacacaaaaatcaactccatttggggtatatacttaaatggaaggtaaaactattaatataaagtttatagagaatattgtttattg

SEQ ID NO: 253275 - DNA, 362 bp, Homo sapiens
actgcttggtgtctctgggattgccagccatgggaggaaggagaggcagcaggcagcagggtgcagttggtgcatcatccaggccatcagagagactggtcctgttgctaatgacagtcacagcagctggcgtttactgagccctggctgtgtgctgccactatgctgatataattcttattgcaacactgttgggggtgttttattatgcctactctccagatgataaaactgaagcccagaggttgtgtgtcttatccaaggtcacctgtttagtaagaggctcagccagcatgctaacccaggagggtaacccactgtgcttttcagttcccattaaatctaacactagacaaccactt

SEQ ID NO: 253276 - DNA, 367 bp, Homo sapiens
aattattacatagtaaatcaatattttaaaatattaatccacttgtgtttcacgcagttatacttcccaactgtaggcacaatcttctctgtaaggctacaagcaatgttaatgatcatcttcatctaatcctagctcactatccacacaaaataagacttatgaacactggaataattattccatttaacagttctctgatttaaaaaaaggctttctaattacaagttactgaagaataaaagttacatttttattgatgttagatattaacaatagagattttgaattgtaaatggtgtccatatatttcagtttgtaaaaggcctcaggagcactgaatgccaataaatatcttactgattgt

SEQ ID NO: 253277 - DNA, 429 bp, Homo sapiens
tctcaaaaaatatatatatataaatattatatttggctggagaggtagtttaagagtgccaagtttgtggggaatttggtgctctgattttaaatagggttatcaagaatattcactaaaagttgacacttcaacaaagttctgaaggaagagagggaagaagccatggaaatatctagggtgaaaagcattccaggaagaaggaaaaggcaagtgcaaaaaacctgaggcaggaacaacaaggaagccagtgtggcaagagtggagtgaaagtgaaggagagaagtaagagaaggtatcagagaggaaatggggggccagattgtctatggacttgtaggtcatggtaagcaaggacttagacttttattctgattgagatgaaaacccgttggagagttttaagcagaagaatggcgtgatctgata

SEQ ID NO: 253278 - DNA, 480 bp, Homo sapiens
ccatacactaaaattataagatcataagaatattaattatattctaccaatgcaatacaagcattgaaatggatggcatctgatcctgcttcatgtgattcttcatttagctctggactctttacatcattaaggctttttctttgcaggaatttaaaagcaaccctatgaatataacatttgtcaaaaagagcaagtgccaagccagttgagaataaccttacaatgtgtacaaggattccagttctgctgctatataaaccagcctcaaatagtctgagtctgtgatatcactgggtcacccccatcacttcagtagaaggcctgccactgcctgacatgtgaaagagagcatccaggataagccacctgtcaaactgtcaactttatgcagatatacaagtgacaggtttgagatcagcccagcccagtcaacagagaaatatcccagtagaatcattatataattaaataacatta

SEQ ID NO: 253279 - DNA, 655 bp, Homo sapiens
taaaggcagtaagataaatggtgaactgcttgctgttactttttctgcttatatttaccccagggaaaacctgttttaaaagaaggaaccaagctgctgcttctacatgttgctgagaaatctgctgggttaaatatccaatttcactgcaccattgaaatggatggcatctgatcctgcttcatgtgattcttcatttagctctggactctttacatcattaaggctttttctttgcaggaatttaaaagcaaccctatgaatataacatttgtcaaaaagagcaagtgccaagccagttgagaataaccttacaatgtgtacaaggattccagacggagtctcgctctgtcacccaagctggagtgcagtggcacgatctcggctcactgcaacctccgcatcccgggttcacaccattctcctgcctcatccttctgagtagctgggactacaggcgcccgccaccacgaccggctaattttttgtatttttagtagaaacggagtttcaccgtgttagccaggatggtctcgatcgcctgacctcgtgatccacccgtctcggcctcccaaagtggtgggattacaagcgtgagccacttcgcccggccatagtgtgatcatatgattttttttaataaaatatttttcat

SEQ ID NO: 253280 - DNA, 661 bp, Homo sapiens
  misc_feature (619)..(619): n is a, c, g, or t
  misc_feature (622)..(623): n is a, c, g, or t
  misc_feature (651)..(651): n is a, c, g, or t
  misc_feature (654)..(655): n is a, c, g, or t
taaaggcagtaagataaatggtgaactgcttgctgttactttttctgcttatatttaccccagggaaaacctgttttaaaagaaggaaccaagctgctgcttctacatgttgctgagaaatctgctgggttaaatatccaatttcactgcaccattgaaatggatggcatctgatcctgcttcatgtgattcttcatttagctctggactctttacatcattaaggtaccctgaatatattcagtatggctttttctttgcaggaatttaaaagcaaccctatgaatataacatttgtcaaaaagagcaagtgccaagccagttgagaataaccttacaatgtgtacaaggattccagcttatgcaacatgaaaatggcaaggatgaagacctttatgatgatccatttccatttaatgaatagaagaagtgttatcaattctgttgatggaccccttaatctcttctactgattatcttctacttgaaccagtgccaaattaatgttgcaagctttgtcttgaaatataaacatgcactaaccagtggaaaagcttgcctaagtgattgttgtcataatgacacggattcaatgaataattctattcatggaatttcntcnncttaataaggaaagagtaaacaaaacancannataaaa

SEQ ID NO: 253281 - DNA, 783 bp, Homo sapiens
  misc_feature (741)..(741): n is a, c, g, or t
  misc_feature (744)..(745): n is a, c, g, or t
  misc_feature (773)..(773): n is a, c, g, or t
  misc_feature (776)..(777): n is a, c, g, or t
taaaggcagtaagataaatggtgaactgcttgctgttactttttctgcttatatttaccccagggaaaacctgttttaaaagaaggaaccaagctgctgcttctacatgttgctgagaaatctgctgggttaaatatccaatttcactgcaccattgaaatggatggcatctgatcctgcttcatgtgattcttcatttagctctggactctttacatcattaaggtaccctgaatatattcagtatggctttttctttgcaggaatttaaaagcaaccctatgaatataacatttgtcaaaaagagcaagtgccaagccagttgagaataaccttacaatgtgtacaaggattccaggaagaagtgttatcaattctgttgatggaccccttaatctcttctactgattatcttctacttgaaccagtgccaaattaatgttgcaagctttgtcttgaaatattttcttctgagcatcagccagagatcactgattggttcacaggaataagcagggttactctaaactgcttgaaaaggaaacctcaaaaacaactgatgaaactagaatttaataacaagtgtaccataattcttgaaacataatttttctctctctagtctttcatttttaccaaagacaaatcatgaaacatgcactaaccagtggaaaagcttgcctaagtgattgttgtcataatgacacggattcaatgaataattctattcatggaatttcntcnncttaataaggaaagagtaaacaaaacancannataaaa

SEQ ID NO: 253282 - DNA, 848 bp, Homo sapiens
ggcaccaccttggcttcctgggctgggggaatcttccctcacatccccttcagcatgaacggcctcggctttcccggtgggtaaaacagtttaatcactgaagccgaagcacagggttgattgtacacgctccccgccagccacaggggctgacaactgcctgccccgtgaaactccagtggagacgtttcagctccacaccattcagtatgggagacgccagccccacggggctacggtgcaagcagataactgaatttcgaagtgtaggttgtgtttaatttgaatctgtttatatttcggtagccccatggggcgggtggccacagtttcagtgcagatgtaaatccggaagcctccagcacctgcagctcatagacagctctcgcccaccttctcccaggaccaagccagtcccgtccagtccagtgtctgagcagagtcagaatccacaccacccgccgcctgggctcagaaagttctgctttaagtcattatttctccactgtacgatggggaatgcggtgtgtgggggccatttacccaccaacacagcagctgtgaggcacacacggctattgaaaattcatggaaattgctgggtgtggtggctcatgcctgtaatcccagcactttgggaggccgaggcaggaggattgcttgagtgcaggagttccagaccagcctgggcaacatagcgaaaccacatctctacaaaaaaatcctccaaaattaaaaaaattagcccgagcatgttgttgcatgcctgtggttccagctatcaagtgatccttctgccttgggtttccgagtagctgcaattacaggtgcacaccaccacacctggc

SEQ ID NO: 253283 - DNA, 395 bp, Homo sapiens
accttgggtggtggcactggagatgtttgcagcagcagtttttgaccccattttctgggtcaaacatcccaaggaaggagaggccttaaagtcaaaggagcatctcaggattgagagtcaaggaaaatttgatctttgttatgataatgttccctccaatctacagttctcaaactttctggtctcaaaccttcttaatgttgaaaattgtcttcatgggtatttccatcagtatttgttatattttaaaactgagaaaaatttaggccagggatggtggctcgcacctataatcccagcactttgggaggctgaggctggaggattgctgtagctcaggatcacagaggaggtgtgatggcacctctgcgcaagagaatgtggtcctgtctcca

SEQ ID NO: 253284 - DNA, 630 bp, Homo sapiens
aagccctgacaattttgtgagccgatttcttaaaatctctctctccctgtctctttttcatatatgtgtgtttgttataataaagaataatctggttttgtcccaggtgcctagcataaaacatcagaagcctttagaattttgtgttaggggtgtctctcatataacgaggtgaaaaagagaaattacttctcctatgttaggaggcagggataaccttgattctaaaatctaataaggacaatattagaaagaaaaatcataagccaatctctttcatgaacacagatgcaaaagtcctaaacaaaatatcagcaaagttaatccaataatatatgaaaagcatccgccaggcacagtggctcacacctgtaatcccagcactttgggaggccaaggcaggtggatcacttgaggtcaggagttcgagaccagcctgtccaacttgatgaaaccctgtctctactaaaaatacaaaaacttagccgagtatggtggcaggtgccttagtcccagctagtagaaaggctgaggcaggacaatcacttgaatccagcaggcagaggttgcagtgagctgagatcataccactgcactccaacctgggtgacagagtgagactccatctca

SEQ ID NO: 253285 - DNA, 355 bp, Homo sapiens
tatagtgcagaatagtatcgtatagttgtataggacagtacagtgtagtcacagagctgtatagtgcaaaatagtactcatatagttgtatagttgcataatgccgtatactatacagttgtacagtatacttctatcgtgcagaagattttaatatagttgtatagttgtacaatatagttgcatagtacagtatggtatgtagttgtatagtgcagaatagtatagttgtatagtgagctgtgggaaatcactgtgggaaactgcatggaggggacttaggatctctgtgtactatttttgcaacgtcctgtgaatctataatcatttcaaaattaaaagttttaaaaaaatt

SEQ ID NO: 253286 - DNA, 473 bp, Homo sapiens
caaaccacacacaccccaatgcatcaactacatttcttagtcaggtttattgaggcataaatttacccttattaggtgtacagttgtgcaaattcatacagttgtatgaatgttgaaaaacttgtatgctgtggtggtaagaaaccaccagaacacattgacactatccaaaaaatcttttattttgcccctttttagtaaatgctctacctccatccgtagcatctggtaacccctgatctgatttctgtctctatatttgtgcctttttcttgagtggcatagaaatggaatcatataatctgtagccttcccagttttctgccattgtcatgttcttatctaacgtaccaggttttttggctcatctttagaaatttgcctttctaaaagcgaagtctttctaaagcattcactaatttttgtttgtttttgtttttggtttttgagactcttgtctcaaaaagaaaaag

SEQ ID NO: 253287 - DNA, 365 bp, Homo sapiens
gtcccaacagagacagacaaatcagagatcagcagcccttgaaaagtgtccggtgcaacaatgagcaatggggcctgcgacatccccaactcttgctccccaagaaagctgtatccccagtcagtccccctcagcaccggccgaagacacccagtgcctccagccaccatcaccactgaccaaggcactgtctttttcagggaggtatctaatttggtcagtcacaaattcctttttagccttccctagagaaaaacaagtcaccaagaaaaaattcactctatgtagaggaaaagtattttctctcatgttagtacacgcagaacatttaatattccacaatatatacggttttttattcataa

SEQ ID NO: 253288 - DNA, 298 bp, Homo sapiens
gcagcttcagacactgaagacaagtgacaagacgcctgctgacgacccaaaggcatgcatgggttggtttctggtcaggggagccttcagcaggagcacatgttcctgttattccttccatacagaggcatgtgctgctttggtaaatgacacctagtgagtctgtggttggctgtgttggtggctctgcatctggggagcacctgaattaataaagggcctgtgaagctttgtggcacatgctctgtgatgacccagggatgtcagaaactgctcccagcagcaggaggagagttat

SEQ ID NO: 253289 - DNA, 348 bp, Homo sapiens
catatgtatatacctaggaaaccatcactacaatcaaaataatgaagattcatcatccaaaagtttcctcaggtccctgtgatccttccctcctgcccctgtctgccccacctcctacaggcaaccagtgatctgctttttgtcactatagattagtttgcattttctaaaattttatataaatgactgactggcatctttctcagcataattatttttcaaaaagaacatttaaacaaaatagaccatattctgggccattaaacaaggcccaataaatttaaaaggatttaaatcatgcaaagtatgttctctgaccacaatggaattaaatattagaaatcaata

SEQ ID NO: 253290 - DNA, 414 bp, Homo sapiens
cagcttgccatgcactgaggagcgactccacaggaactgctgtgctcacaggtttctgagagaacaaaaagcagagtcctcaggtgaaaagtatatagtttgatatgctcaggacaaagactggcagcctttttctatcctgacaagagcttctggtccagagggaataaagcaatcaggcatctttagaaagtcagtggtaactaaattacactttttgaaacagaaaataaaatacatctcacacaatttttagaagaattaggaacctgagatactaaaacatgcaattaatagaatatattcattagctcagtactcatgctaattcagttgcaaggatcaaggtaggggtgaggaaatgatagaggaagaaatctgaaggggagagaatgggagctcaggcagaagtaa

SEQ ID NO: 253291 - DNA, 418 bp, Homo sapiens
ctttggtgtggggaactcttgatacctgccaacaagaagaaagtctttggtccccacttaactttctcagaaaccacctggcagaggtttaaggataccttattgcaacttcaggaaggtggaagtctaagctctccactcagcctttgcttgtgttcgggtggggtggggactaggtttctgtggttttttgactagagtagaatagcaattgtcaaaaagtcttcttcctaagctacccctttcttggtcttttggctacaaagaacaagcttttttttcttggagtttttcttggggagttgggtggtggggaggtctgagtgatttggtgtttctgcgttgctgagttatttggctccaagtctgagatatatgaaataaaaagaaaatccagagaactcatcatcacattatt

SEQ ID NO: 253292 - DNA, 783 bp, Homo sapiens
ttgaaggtaacctaaagaagaggaagagctgcagctgtgcctctgggccccaaaggctttgatgatgcatagatcttagaggttgtcagaatgctcagccaagcaggtgatcacagccaaggtcacgatgcagtcagcctctcctccactgctcctcctgatgaaacttcatgggaaagctcacggggggagatatttttggatggtgttttccaaacatttttacatactgtaactgatactactttataaagggctttcacattcaaccatgtaggtagttgactatgcctcaaattcagaaaaatgtacagaatgatacttatacattaatgtagatgcaggactgcagagagattctaagcctttgtgctataagagagagaagtcctgttatttaactatatcgttggagtcaaggtggtagatttgctgacctcctgcatcagggttgtcctgtccttggctattcattctgtattcatatcttcatcaaatattttttgaaaacccatttactgtgtgccagatgttgtgtcatagactggaaatacataccacgatgaacaagatcaatatggtccccagctttgtgaagctcacattctagtgtagaatatagacaagtgagcaaacaattgcaatatactgtaaattggagaaattcagaatatagtaaaatactgatattgcctaacccatacctgaaaaaaatgatttgtaaaatttccatacacttgtaccttgatttcctggggataacacttacgtgttcttcattac

SEQ ID NO: 253293 - DNA, 474 bp, Homo sapiens
agccttggaggtcctagaatacaacttctgctccatcctgttggtaaagcaagtcattgtgatcagcacagattcaagaaatgggagattcgactctaactctccatgtaaagagcagcatgttcatgcagggaggaaagaaattgagggcataatcttgaagactatcatattacaccattattccaactaatgaacattatgttttagatgggtagtactagctactcatctctcccccagaaacccaagctaagcatggacatattgaagagaatgtcaacaccattaaaaaaactctagaaaaatcacatgtgatgactgaggttaattcagtctgtcaattacatcaatataattccctcttgtaaccctaaatatggtgaagcagaattgaattctacaaaagtctttcatctgttttcctatggaataattaacaaacccaataaatgtataaatagtatgaagtcc

SEQ ID NO: 253294 - DNA, 570 bp, Homo sapiens
attgaaacggtgtccacactcccatatttaacgcaaccccatttactatagctaaggcttgtgtccatcaacagatgaatggataaagaatatgtgctacatacacaacggagtactattcagccacaaaaaagaatgagatcctgtcatttgcaaacacgtggatggaactggggtcatgatgttaagtgaaataagcatacaaagacaaacatcacatgttctctctcacttgtgggatctaaaaatcagaacaattgagctcatggacacagagtagaacgacggttaccagaggctgggaagggttgtggggggctggcagggaggtagaagtggttaatgggtaccaaaaaaaaaaaaaaaaaaaagaatggataagacctactatctatctgacagcacaatagggtaactgtagtcaatagtaactgcattgtgtattttaaaataacatataagagcgttaactggattgtttgtaactcaagggctaaatgcttgaggggatggacacccattggagaaataaagagggaagtaatgcttccttggaaggtgttagaggca

SEQ ID NO: 253295 - DNA, 424 bp, Homo sapiens
tactggggatgcctatggactcgagctgcttgttaaagaggaactccccactgtgttcagaaatccttcctcatgtcctctctccccaagcttcccatcctctactggctcagtttctagcatttcagtatcttctttcctgctaaagaacttgtccaagtaactagtgtaagtgttttccttctcaacttgttcatccttccttacctcacaaaactgatttatgaaaaaacagtcctccccaccactcacaaactggctgtcccaagaagactggtacaaggcttctaattgagccagatttgccattcctttttcctgtttttcttgggtactacgctttggcatgccaaagcgtagtccccaaagtaatgagcaaaaaagtttcagagtcaagtgtaatgtttacttcctaaacaaagca

SEQ ID NO: 253296 - DNA, 429 bp, Homo sapiens
cggggcctgctcgagtgaggccgggagcggaccgcagcccgctggaggtgccgggggcgaaatgctggcgtctcctcctccgtctcccagaatccttccctggaaaaaaacagcatccaccgtcagtttaactgaggaccgaattaaggcattaggaaagacagtggaagttatttcatttgtttaacttaagggggtaggatcccgggagccagggggattcaggtcattgtcatgttttccactgttaagcgaatagcattatacacagctgcggactgtggcaaaagacattttaaaaactattgaagtctactacacatacagaaaattgtacctattagaaatataaagcttaataagttttcatcaactgtacacctcacataaccagcacccagataaggaaataaccagataacttcttca

SEQ ID NO: 253297 - DNA, 428 bp, Homo sapiens
cgggaggctgagagcattcatgtcctcaattttttacccttccctgtctgcaagccgtttgccatgtaactttggagttcttcccataaaagcacagtatttatttccctactctgcagggcttgctttggcatgcagaatgaagcaaagggtcagtgtgccagttctgagcctaggcctcaaggggcattgagcgtttccagggctctctcttgagcctctgtcatagatatgaaaatgcacccgagccagcctgttggaggtgagagaccagggagcagtgcgcgatctccccagctgcctctgccaagggtggcctagatcagccaacagcccgcagcccctcacacgtgatgtgtccagcccaaatcagcaaagctgcctgactgacccgaagcacagaagtggtaaagtttattattgtatgt

SEQ ID NO: 253298 - DNA, 534 bp, Homo sapiens
agagtgaattctggcaacacactgagtgatgcttgtcaatggccactatcaggaatttaaaacaagatttggaattatgacatctggacaaacacatatgcaaaacctaccttttggtccattctccagggcttcttctgcagcttctggttccagttctttttcggagctgtcagtgtgtgttttggcctgtccattaactgacatcatattacttggtacagttgcattcacttttgatgatgtaggcaaggaagacccagccactactacttcctgttgtttctgtaatgctgcctacaaaccaagagaaagtgaagacacactgaccaggaaggctagcaaataagacatctgccctggagtacatctgataccatgcttttgccctaccaaagtgctatgctcaagaaattactaataaatttttatcagtttttatcctgtctataatgaatattattagtacaatatcaaactgacagctaaaaataataaaaaatcaataaaaattaatgtggacaaaaacctgca

SEQ ID NO: 253299 - DNA, 654 bp, Homo sapiens
attatgttgaaattctaatatctctctcagctcaactaagtaactttgatcataggtgtcatagaaataattagttggataggtggaaagatagattaagagcccaccaagttttatgtctgttattattgaggatccattaaccaccagttttccacgtgaagtgttttcattgtgataaaagcctccatattttttagtgaatgcctgatcattttccaggcacaagacatcactatttccactagaagacagtaaaatatttctgaacaaaagaaagagtggagactcccatgtaatgggttcctatttatttttaaagtaatcgatagttgtttgcaagtaattgcaccgtgtaatctgtaagtaaggtaagactgaaaacacacatctgagtaatcacatggtctaatctgttcaaatggacagattatagatgatcctgagacctctaattttggtaaattgtcattgtgacccttacatggctggctttgtactgtatgttccttgtgaatttcaaaggaagtgtaaacttccttgaactactcaactactataatgattgaagttaagtactgcattttctatagaaatcaatgaagctaatcacacaagcacagctcaacatatcccattcagcagtcttgaaaa

SEQ ID NO: 253300 - DNA, 535 bp, Homo sapiens
atttccctaaaatgtgtaacagattacccagttggcaaatgatgatatatattttttaaacatgaatatttctgttaggccagatggtgatttaacatgaattgtccaacatttgtgtttcttatcaaattgtcttcttttgtctaagccaagctagcaacataatttggaacacactcaggaatcactaaaggacaagagcaaaaaaaattcagacaccaagtggcagacggcatttgctccatatgccatgcaaaggctcctggccagtgctcgcatggcccttgggaagctttctcacccgttgtaagaaagtatctgtgcagtgctgtgcaacccatctacctgctttcctctctctactcccgaaaccctagcttatctaacactttgtactgtggccttcctccatgggggacttgcacttcctcaaagccctggatttctgtgcagaagagcagttttagttcttccttaggcacttccctttcctcctgtccagtgtcatgttcttgtttgttatgggctccaccca

SEQ ID NO: 253301 - DNA, 463 bp, Homo sapiens
aggaaatattttgcaaatcaggaaatgacaccgggcaaggcctctgctctccggggctacggcctcccacaggcacgttcctacatccctctgtgaaccgcccacaggcccccccacaggtgttcctctgtgagctggtcgggcggccggggccggggccgggcttcgctgctccgtgccttccacctccctggcggtgcggggcctcagggtgggcctgggaagctggaaacacctttggaaacagccgcctgaggcagctgtggacagaagaccctgcccagcagccaagggagctggcctctccgctcagcctccccacccccaccaggcccagctgttgttttcacggctccgggaccaggcggatcctcagccaagagcttcccaggagagccctcatcttcaacccctagtggcgaccagagccagcccgggcaggaggggaaggaaggcggccgcg

SEQ ID NO: 253302 - DNA, 460 bp, Homo sapiens
gaatcgccccttccttgcttctcttccgccggccaggcctctgctctccggggctacggcctcccacaggcacgttcctacatccctctgtgaaccgcccacaggcccccccacaggtgttcctctgtgagctggtcgggcggccggggccggggccgggcttcgctgctccgtgccttccacctccctggcggtgcggggcctcagggtgggcctgggaagctggaaacacctttggaaacagccgcctgaggcagctgtggacagaagaccctgcccagcagccaagggagctggcctctccgctcagcctccccacccccaccaggcccagctgttgttttcacggctccgggaccaggcggatcctcagccaagagcttcccaggagagccctcatcttcaacccctagtggcgaccagagccagcccgggcaggaggggaaggaaggcggccgcg

SEQ ID NO: 253303 - DNA, 699 bp, Homo sapiens
acacacactccgggctcccatttgggcaggcagggcctcagccaccgggaaagaacgccaagcagaggtccccacagccaccctgcagctcggctgcacccaaggagttcaggcccctgggccagtggagagctgtggtagagactgcaggaagagggaggctgctcctggccctcaggctgggggaaggggctctgggggaaggggtgtagaggcaccctcagggtgggggcgggcctggggacccagggtcctgaagtggaggggtttcggtcagggacaccatgctgggcaaaagttgggagagattcatggggtccaggtggggtcctgcccctgcaggggctagaagggctgggcaaaggccaactgtatacctggggccttgaggaggggaaccctggctgggggccccacctccccctcatttcatgcccccctcctggcttcccagatggtggccgataagggagctgcttaggatccatggaaggggccaggcaagaacccgggggaagaacccaggggcctcaacgcagggcccgttctgtcctagggggtggggcccctgccttccaacgtggggcctcttctgtcctgggggtggggcccctgccttccaacggagggcctcttctgtcctagggggtgagggggtgagggggtgagggggtggggcccttgccccgggactcgggc

SEQ ID NO: 253304 - DNA, 445 bp, Homo sapiens
caagggagagctgtgtccccgccggcgccccccaccccccctgccggggatcttggcagtggaggtgctggctgcgctccacagacctcagacctcggctgggaccagaaatgcctggtgcttccgcctgggcccggtggggggactttgggtccccagagtgcaagctgtaccacttcgaggggcctcgccaggccccccagcccccagtacacaggggctgccgtggagatgacgctgaaggccgcagccgctggaggacctggggtctgaccggaagctggctgcagaccctgcggaggcacgtccagaggcccagctgttgttttcacggctccgggaccaggcggatcctcagccaagagcttcccaggagagccctcatcttcaacccctagtggcgaccagagccagcccgggcaggaggggaaggaaggcggccgcg

SEQ ID NO: 253305 - DNA, 646 bp, Homo sapiens
aggaaatattttgcaaatcaggaaatgacaccgggcaaggcctctgctctccggggctacggcctcccacaggcacgttcctacatccctctgtgaaccgcccacaggcccccccacaggtgttcctctgtgagctggtcgggcggccggggccggggccgggcttcgctgctccgtgccttccacctccctggcggtgcggggcctcagggtgggcctgggaagctggaaacacctttggaaacagccgcctgaggcagctgtggacagaagaccctgcccagcagccaagggagctggcctctccgctcagcctccccacccccacctggcccggctcctgtctgaccaggaaaggcatcaaagccggactcggatggaggctggaaaaccccgagacttctgctggactcgacccagccacacaccaggctgtgctcaaggccacggaatgagccttgaccctggccccagacggagcccagaccttgctggtcacaggctgagccctgctggcaatatgatgtactagatcccttaaaaggccttccagcaacaaccaacttctggatgaattactatgagcgtacatttttaatagactgttgtgtttccaagaaagtaaatatctccgagtctcccccaa

SEQ ID NO: 253306 - DNA, 348 bp, Homo sapiens
gtatttatggagcatctgctgtatatcctgggcagtgttctgggccacgagaatgaagtcatcaacaggtcgttgtccttataagaaggacaaccctgtggggattctacaactcattcttcagacaaaccttctggaagcctacctacttttattctggtgtttgccctggtagcaatttaactgtcactttaagaagacgcgaatggggttggtgtctctggcttttgagacttcagggcacccctttcttggagagaaagatactcctttatcaggccagagagctgaagacctgttgggcttggggccactccctttaataaagaaacccacatcctatttgct

SEQ ID NO: 253307 - DNA, 346 bp, Homo sapiens
aatcatggcatgacttgcttttggagaagcctctggaaactcaaaatcatgacagaaggcaaagtgagaacaagcacatgttacaagactggagcaggaacaagatgctacacacttttaaacaaccagatctcatgagaactctatgatgagaacagcaccaaaggagcaatctgcccccatcatccaatcacctcctaccaggtcccacctcgaacattggggattacaattcaacaggagatttgagtggagacacaaatccaaaccatatcattctgttcctggttcataccaaatcttatgtccttctcacgttgcaaaatacaattataccttctcaaca

SEQ ID NO: 253308 - DNA, 443 bp, Homo sapiens
catgcatgcatacatgcacatacacgcacaggcataaacctcaacttgactgaaagacatacactcatgccttttcctgggcataaatactatttgcctcagtctctactgatacactacacataaaatttggtactggataaaagattagaacacacacacacagataaaaaaaatcagactcggagatattggaactctcagatgataattttaataattgatatgctaagggatctagtagaaaaagtagacaaaatgcacagaccctggagaatttcagcacagagataacagtcacatgaaaatgctagaaacaaaatacatgatatccaagatgaatctctttgatgggttattgcgccaattggatagcactgaggggggagtaagtaaatctgaaggtaggtcaatagaaattaaccaaactgaaacacacaata

SEQ ID NO: 253309 - DNA, 6453 bp, Homo sapiens
  misc_feature (128)..(128): n is a, c, g, or t
  misc_feature (1102)..(1102): n is a, c, g, or t
  misc_feature (3170)..(3170): n is a, c, g, or t
  misc_feature (3613)..(3613): n is a, c, g, or t
  misc_feature (4208)..(4208): n is a, c, g, or t
  misc_feature (4569)..(4569): n is a, c, g, or t
  misc_feature (5600)..(5601): n is a, c, g, or t
  misc_feature (5614)..(5614): n is a, c, g, or t
  misc_feature (6345)..(6345): n is a, c, g, or t
tgtaaatattccaaatctgattcaatacagtttccctttactgtaccctccactggttgaatttcctgcccttgcaggagaaattttgaaaaggagggaatgaagtttttaaaatcaagcagaatatnttgaattaagtagttttttatttcagagacttctagaggggattagtacagctttgagccacttttctctatctctaaatctaaagttcccaggatactatttctaagatgaggactctgagatcttataagctgcttagtcattccaaagagatgcaatttttcttattgtactagatttactaagacagaaaagtagactgattcattacacaatagaaagaggctgactgcctttggaaggagtacttttccttctaaaatgcttaatccatcctattgtcaggctaaaaattgtgggagatggcatttactgggccaccctgattcttctgtagagtagaacctggaaggttttggtggctaaatgagtacctctaaacaggtgaagatggactgtgtgggtgctaagagaaccccaactgctgaattttgaacatgatgggcatcttttatcactacaagcccttatggttagtaggaaagagataatagaggcatcaactgtcccatatcccaaaggtatcctgctaatgagccatttttaatgcacatgctaagggttgccagttcttattttggagagattttcaacaagaattgcaaccagaggttaaaattagaccttgggttactaaatatttgtacgacatccatccaacaaagcatttatcagtcttcatcaggtgctaggtacagtgccgggtgctgggatattggcaaaaatgataaatatttgtcattaccatcctattgcttgctgaataaagtgggttgcaggtaagtaaacaagataatgtaacagtgagttatgtgttatgataggagaaatacaatgaactataataatacacagaagcgagttgcttaatttttacttgagtcaggtaagaagaggcatttacatgaaagatgaataagcaatagacagaccaagaggagttggggcaggaaagagcattctgagaaaccantgtatacaaaggtccagaggaaaaccataagaacattttgtttggaacatacagcttttgggaagaaagggaagtggctagaaatgaagaaagaaaagtaaatagggtccagatagttagggttttataggcatttgggctttattctagaatggagagtcattaaaagcttttccagcagagaaatgattaaagatgcattttatggtaaggactctggctgcattctggagaaagttggagggaaataatactgggtagagtgggacaaatgaggagactgtcgcacatgttttcatagaagaagatgtttgcctgcatttgacaaatgataacattcttcacagctagtgcttttgtgtttggtgcactagacgttaaagttgtatactcttaatttcgtaaaatccatgtgtttatactgtgctttaactcaatgtttcccatattatatttctttaagaaaccatcctttttttctccttctcataattttataaaatatatattttttgcttcctgaatattctgaaatgtcttgtctgttcttgacacatgtatcttttctacattttgtcactttggtttctttttcaaatatgcctatagagagctcatgttgaaagagaagtaattatgtttctagtgaatagatcttggcatcacaacaggatagtctgagatttcctggaaagagcagtagaaagaaatttagtggttctcagaactggaaaaaaaatagcttaaagataaatagtgttcccagagggaaggaggcttgttgtatagcaatcaatatagtaggattagaaaagaccaacacagttgaaccccaaagtacaaaatgtaattaagggcacaaaagacacataatgcatgtcaagtttaaaagagaagctgagcaattacagagtgaagttcagaacttaaaagtgacagaaagagcaaagggggaaaatgacaaaaacatttcatgtaagactaaaagtgctgcaatcgtatatgtgatacaaaaggtcagtgaacagcctagaaaggtgtctaatggatagcaagggtaatccattgactggaagggtcttgtagacattgatttcaaaaagtaaaattaaatgatttttttttttgcctcagtgctctcaaaaagcaaagtcttgctaaaaagagaaatcaatttaaaatgaaataagtaaaattgttcattggaaatgttgccaatcaataggtggtaaagaaatcaagaaatctgaattctcatacagagccagccagatatgttttcttccaggattaatgctgtcattgtccaaggcaataattcatttttaggcttagaaatcctttctaagaaaatattatgtttttatgtttttgttcccaagtcaccaaattgtagcccattttaatgcttttttggctttctgtgtgtctgggtgtgacacatctgacccatacaggaggatatgtagaagtcctggcaaaagaacttcctaacctattaagcaatctctcctccctccctccctcccttcctttctgtctctctttctctctttctccctttctccctttctaactttctctctctttccttctctctcactttttctctctctctctgtcttcctccctccttcactcccttccttccttctctttttttctttccttttctttttcttttcttttcttttttttttctttttttttgcgacagtgtcttgctctgccaccgaggctggagtgcagtggtgcaatctcggctcactgcagcctctgcctcccagcttcaagcgattctcctgcctcagcttcctgagtagctgggattacaggtgcatgccaccatgcccggctagttttttgcatttttagtagaggcagagtttcaccatgttgcccaggctggtctcgaactcctgacctcaggtgatccgcccacctcagcctcccaaatgctgggattacaggtgtgagccaccgcacccagccttttttcttttctttttgaggaaatggtcaaatgtgcttgttgttatgttaagtagagatttggaagaatgcgcantgtttactctgaaaattgtgggagataaaatttcctaagggaacaccaatagttttttcttaattgcatattaaaggcaatattcaaagaaagggtaaactggatgcagtagtagaggggtttcctgttagcctctcagaaagatttagaaactaagaaattctgactagctgttgtaacagacaaaccctgaaatctcagtggctttagcacaacagacatgtatttcttgttcatatcacagtctaatatgaatgggggatcttccttcattttgcagccacactaagggcctctgcgataagggtagacaaagatggaagtggctgcatagctcatagctgtcttggcctggaaccggccttttccctctgagccagttacatgaccccaacctaactgtgaggtagcctgggaaaagtaggggagtacctgggagtaantaatttgacattaactgtttttgccactagaaggaagttagttactgattctgtgctctatttccattgttcctggggagataaggaccctcaaagatggaggaggtagaagaaggtggtactgtctgtggtggaggggacggaaactgaaatatatcacaggaagtgacgagacccatagaagtgaaactggaaaagctggcctgaagtggtgtgcagaataagggaatggctgtaggttcaccatttccatgtaacctacaaagacaaaggttaactctgggactactaattatgctgctttaaatgtaatcacactgcttcaaatatattacattaaacgtacctttttggatatttttccattaactttaaacattttctaaatatacagaaagattgaaagaatagtacaatatgaacgcttgtatactcattaccttcgttcagcggttattcatgttttgccatatttactttgtatagctatttgtaagtatgtgaacttttttccgaacaccttgaaaatatgttgcagacataatatttaccataatatttcatataactgcaatgccatcatcatatctaaganaattttatattcatattatacccacacacatgataatataaccaatttatattcaatttatattcaaatttccccaattatctaaagatgacatttatctctctcattctctctctttttttcaaacaaagttcacagattgtattcatgttacatttctctagtgtcttttaatctcaaaatccctttatttcttttttatagcatttactttttgaagacatggcaggacagttgtattgtcccacattctggatttgtctgatttcttctgcatgctgtggttctccttgttcttatactctttggatttcttataaactaaaatgggtctaatggcttaattagatttaaattaaanatttttggctaggatattccataagtgatattcttatttcatgttacatcacaacagaaggcatataatgccaggtttttcactaaaatgatgttaaatttgatcactttgttggtatggtcatcaccaaatctcttcattgtgaaggtttatttttcactttacaattagcaactaacttgttggttaataccttagcaccttgtgagtatctcaacaatctttcacctaaatattttaaaatgcattgacgatctttgcctgaaataattatttcattgggaggtataaaaagtgtgatttttctaatttatatcattttttctatatttagtagctgacattgttctgtgaagaataactttgcctcatcaactgggactgaattacatttcttcttaaagaagcaggatatatttataatttaaaaaaattataggcaattttgaatatagagaaaaaccaaaatcatcagctgtaatttcaacagccagtgaactaatgttaaaaatgctatgtactatatctttccattcttttttcaatacagataaggatatatattataaaatttgattcataaatatatctagccttataaagggctggatatataaaatacattattaacactttacaatgttgttaaatatcctttaaaatatttttgctgactacatatcattccataacaacaatgtgacatactttattttcgcattctcttataaccagggaaccatataaccttgtttgcccagagaaatcctgatatatgaccattatcctgaaaaattaataaaataccctcctttactcctcatatcatacaagtttgggaaacaaattgtatggttacctttcctgtaatcacttaatctacaattgacaagtagctgttttgaattttccaatctatttgctcttatgaaaatttttgggtgcattcatgagggtgaattcaccctcatgttgtattagttcattctcacactgctataaagaactacctgcgactgggtaatttatanngaaaagaggtttnattgtcttatagttccataggctgtacaggagacacgtctggggaggcctcagggaacttacaatcatggtgtaagggtgaaggggaagcaagcacatcttcacatggcagcagaagagagagagctaagggggaagtgccacacacttttaaacaaccagatcttgtgagaactcactcactatcatgagaacagcaaagaagagatctgttcccaggatccaatcacctcccacgtggtcctttctcaaacactgcagattataattcaacctgagatgtgggtggaaacatagagccaaaccatgtcacttgtatttctgttaaataagtagaatgtcatcaattggtcttaacagatttatctgatttcaactttgcctactttattcccttggagaagggtttctcaacattgccactattaatattttggcccagaaaattctttgtttttaagagggctgtctgcattgtagtatgatttagcagcaaccttggcctctgtttcttagatgccagtagcattgccactctccggcgtagcaatcaacaacaactccagatattgtcaaatgtcccctgtggggcaaaattgcctcaagcgtgaaccactggtttaggaaaatgtgcaggaataatagcagcaacatccttcacatctagcttatttgtcttaagttgttgtgtttttgttgtaagaattgtttaggctggggatggtggctcangcctgtaatcccaacactttgggaggccgaggcgggtggatcaactgaggtcaggagttcaagactggcctggccaacatggcaaaactccatctctattaaaaatac

SEQ ID NO: 253310 - DNA, 497 bp, Homo sapiens
agaatctctgcagaatgtatgctagctgactagattgtgttctaaaatgcttcatgtgtaagagacatagtctcctgtgaagtgagaagctgatgcagaaaagaaatgccaaggacaaacaaatgcaaatttttctgctgtttttctgatttgtaaacaatgttgtcagaagctgttccttaaatagtttctcatgacacaaaacatgctacagtgctgcttaaacatgtgcactaatttggggctatattttagttatcatggattaagacatatgatttaatggaattatgaatatttgattacagtggcatttaaaattaatctgattatattttacagaactcaatttttctatttaaaaaaggagatctaggatgggtgtggcggcttattcttgtaaccccagcactttgggaggctgaggagagaagattgcttgaggccaagagtgtgagaccagcctggaaaacatactgatatcctgtctctgttta

SEQ ID NO: 253311 - DNA, 453 bp, Homo sapiens
aggcaaagccagaaagccctggcaacccaaaactgaaggatctggggctttcttcctgcaagctctgctcagcgaggggcttgtgctcctacaagctctttgctacataagtcaagccaaacttccatttcccgacatgacatggccaaataagagaaggccaggttaccagagattaaaaataggacgttgctgcagagtcctgggaccggctggcaaatgacacaggaactttgggagcgcatggactcaggccaagcggccgtcctcaccctcggccacctcagggcagggacgaagagtaagcccagcctttgatgatggggattagtcccaaaattctggagttcaccactcctcccgctacactggctttatttcaaatctctgttggtccatgtcaacatcagcgatgggagttgaaagaagtaaaacagtgactcgtgcaaaaaa

SEQ ID NO: 253312 - DNA, 315 bp, Homo sapiens
ggaggcattggatttaatcgaattttccagattaatctcctgaattgtgctttatttataagctttccctgaaatcatgtgtatgtttttatcatattctatggctgtcaagtctgaagtcagcttgttacccctaaaagagtgaattaatccgaagtgttttcttcttggccttacaaagagcggttcacttgtcacaaggcaggacttgttaactcagccagatttgtttcttaagcatctgcagagagatgaccaagataattcattttaaatcaccaaatattaccagacaggaacagtttaaaaggcaaa

SEQ ID NO: 253313 - DNA, 231 bp, Homo sapiens
acacatttagtttttaaaaagtcagtttcacttcatgtcattgaacaagaggtgtaaattaattttatttacttcttaactgttaaattaactattttcaactttctgtatgattaactggaaattacacatacagcaactctgtcacatactaatggttatctcaagaaagagtattagtgcaattctttgaattgcaagccaaattagctgctttattaatgaaacagt

SEQ ID NO: 253314 - DNA, 483 bp, Homo sapiens
tctagttgatgcttttttctcccctgctggttggatgtcatcacctgctcagattctgtaacccacagttggaaaacacagagtagagtggggaggtatcatctgatgcccattttacagatgaggagcttgagtttcagctgggccatattctagctgggtaactggccagttacttaccctccttgtgcctcggtttcctcatctgtagaaggggagtgacaacagtggcaggagtggtgtgcttgtcgccaagcctggcacactgggagcccatggaccagtcattattcccctgatcctcagccaggtgccatcaaattcttaagtgcttattcatggccaaacaagaaagaagggggcaatcaaaaccagccacatcacaccatctccacagctgccatttttagctcggttttgcatagcttcaccaaagctcagtttatgttagggctttgttgccccaagaacattttaaaaaca

SEQ ID NO: 253315 - DNA, 438 bp, Homo sapiens
cattagctatagctggggatagcttgatttttctcctttcataatggacaaatcattatatacagaaatctaaaaaattctgcagacctctttatggcaagaatatgaaatcctgcttgttttgtcttgtcttttatgctactcttctctgacaagcccatcaccataaaaatggctactgaactgggaatattttcaaataaattaacttcagtgtattttgtttatacttatgatttattcaagatattgtactaggaagtgcaaggtgacagtgatatgacatctaaagtagcttaaaatttagcagagaaataaatgtttatacaattaaccatgtctaatgtgataacttctatagtggtgcttggaacaatgtctataataatataatgaagagggcaactgatttttcctagagaaggaatttttaagatt

SEQ ID NO: 253316 - DNA, 656 bp, Homo sapiens
cgacaaagactcctcccctccttatactgtagatatggaagccagccttgcacagtactcagcatattactaaacactgtctatggaagttcctcagagtcgagaaagtgctgtcatctgaaataaggaccagctttcaacagcagtggcaaaaccctaatgaaaatgtcagcacaattggaaatttcactaacttgaaagtaaataccaacagcaaacagccttttaacagtcccattagatcttctgtggatggtgttcagactcttgctcaaactaatggaagaggaaataaagagtgctgggacttaacagacacattctgttaacttcaagaaagtagatttggccagagcaaacatatgtaggattcataaccagagactataaatctgattgtgactttcagaatgagagacttacagagcaaacaataacatctaaaatatatttaaaccaaaagaaaacctctctaatgatctcaatgggaaggaaagagttatcttaaaaaaaaactcggttttactagttagagagctgtcttggctcagaggctaaaagggcagttagaaggaaggacatatatcaagggtaagctacatatgaagaatgatgctcttttggagcatgccaagatcaacacaaaaggattttaa

SEQ ID NO: 253317 - DNA, 388 bp, Homo sapiens
caaccttgtctgtccaaccctgcctgcagtctcagccatgtggctacaccccattcctcctaccagagctcatgtgcctctgtctacactttctggtggccctgggctcttcacagaaattgacattgcgattttcagttcttgtttgcctcttacttgattttaggcttcctgaggacaatttgtgtctaagtcacaatgacacttaacacttggaagatgaggaataaatgttggaaggacaaatgaaccaaatggtgtatgggccaagtgtggtggctcatatctgtaatctcagcactttgggaggccgaggcaggaggatcatttgagctcaggagtttgggaccagcctgggcaatatagtgagacctggtctctactttaa

SEQ ID NO: 253318 - DNA, 370 bp, Homo sapiens
ttttttttgaaagattctgaagatggggaaagatgtacctacttcttaagacataatagcaccactgaacacgtacgaggttttttctgaaaaaatttgctattgtggtaaccactctaagtattctatttcatccccaaaataaccttataaggcaaatgctctttttacctccattttacagatgagaaaactgaaagagaaagattgaacaagtagtccaaggtcacaagctttagaagcagcagaggtggtatgcggtcgtttgtccccaggccaatggttctcaaagcgtgattcccataccagcagcattggcttcacctgtggtgagctctcttgcactccaaacttacgggccgcacaccac

SEQ ID NO: 253319 - DNA, 614 bp, Homo sapiens
ttattttaaccaatggaaaaagtttcccttcataactgaattataacaaggattctactttaggaattgcaaatgatcctttgttgctgtaacttgcaatgccaatatggtagccattagccacatatggctattcaaattagttaaataaaagatttattttttcacactagccatattcaagtgctcagtagccacttgtggctagtggattattgcattggagagtgcacagaaggttctattggatggcactgctccaagaccgcattctgttgagattttaactgtaacatagactaacttcttgttgcttctcagtgacattaaggttggaatgttgccttatacatgtgctataaggcagcttatttgaaatctttatctcacagaaaaagagtttttcttatacaatttcaggtgcacattttgcagcaaaactgcattgctctacgtgattctatacagagcgctcaagaactactggcccaggaacaaatagatgctagaaatcaccctcttgttagtttttggagatttcatggaaaaactcttaagatcccaaattcttaaagtggccagtgttattggtatttcccacagtgctgtatgta

SEQ ID NO: 253320 - DNA, 446 bp, Homo sapiens
  misc_feature (236)..(236): n is a, c, g, or t
gctccagctataaatgtcaagctccttccctctcaggagcccagtgaagacacaccagtgtcatcattctccttgaaaggaaagagggaacagtgaactcctccccaggcctctgtgcctggagcaccagctcctgtggatccacaagtgggctggcagttcaggtgcatgagagatgccagggacactgtgcctctcatcactgatctgatgcagaacttagttcctaagttgcntgtacaagaggctgagcgattatgacccagactcaaggaaggagagcaacctgtaaaagatgaattgcctcatgctctgtaagccatgcactcccattctggcaccagaatcaccctgcagacagcacaggcctgcggcttcctgtgggttatcccgtgtcaccctccaaaaaggtcatccttcactgagctggagttgaaagactggtg

SEQ ID NO: 253321 - DNA, 302 bp, Homo sapiens
aagaagctactgctgctgccattctgcattgggaagctcatcaaacacatcatgggtattataggacttgctacattggtctttgctagcttcaatgcctggaatgcaaacttcgggtcccttgttagtagaaagatgcacagatgcggctctgttgactcagttgtttaaatacatattgtcaaacaaaatatttgcagcactgatgccaagttcctcctgacattcacaataatattgaatttgactcaaccaaacaagtgtgacaatatgtggaataaaatttcatctaggttttatct

SEQ ID NO: 253322 - DNA, 327 bp, Homo sapiens
tcaacttagtttcaacttatggcccaagaaaatagaagtcagaatcaaaatccagcatgcagaacttgttgtaaaacatggcagtacaggacttgctacattggtctttgctagcttcaatgcctggaatgcaaacttcgggtcccttgttagtagaaagatgcacagatgcggctctgttgactcagttgtttaaatacatattgtcaaacaaaatatttgcagcactgatgccaagttcctcctgacattcacaataatattgaatttgactcaaccaaacaagtgtgacaatatgtggaataaaatttcatctaggttttatct

SEQ ID NO: 253323 - DNA, 255 bp, Homo sapiens
tcaacttagtttcaacttatggcccaagaaaatagaagtcagaatcaaaatccagcatgcagaacttgttgtaaaacatggcagtacagacagtatatctctccacattgtgtctgaatttggaggagggaacatgagtaagacgtgcctttcaccttcttccacgattatgaggactgccagccacttggaactactctcaaaaagtaccagaagtaactcatgagtaagttactcaaccaggaaaagcacata

SEQ ID NO: 253324 - DNA, 468 bp, Homo sapiens
tgtttcttctcctctagaagcaaccaaattccaaatgggtgttataaactggatcacgcgtggacacgccctatttccaagaacccttagacagaccccaggaagagccctagctgctgttccccattcaacgtccattttcagcaggaagtagccagaaaaagtcgtcacccaataaccccctaacagcaattaggttgtctccatggggggctggggggaatgtgataggagttactaagaaattattttaggcagatagagaggaaaagcggtccttggaaagttttcatttcttttaaagcagctccagaaaagtttcttgtcaagaaggaaagcccaggcccttagagccaagcaggcaaccttaggtatgcagataccggccattagaaattgggtctacccaacatgatgattcccatggttgtcctcttgcccttgcgctgacatgtgcctggcaacatg

SEQ ID NO: 253325 - DNA, 601 bp, Homo sapiens
tctacttgggtgtcagaactggggctccagatatctagagcaatgtcgttttgttttctatctgctgtgtcagtaccctcctgttagagcatcagcccatgtctcctggtttcaagttacagaatacagattgagcgtccctaacctgaaatccacagtgttccaaaattcaaaatttgagtgctgacatgatgctcaaaggaaatgcttagtgaagcatttcagagttcagattagggatgttcaaccagtaagtatgcagatataccaaaatcggaaaaaatcctaaatccaaaacacttctggtcccaagcacttccgataagggatactcaacctgtagtgaagactgaggcatctgatattataactcacttccttcactgcttcaagtggactttgcatttgtctctcagaatattaaaatgtcatccatttgtatcctgcctgtctgttcaaggctttatcttatgatcacactactaaggttatgcttttgatactacgtatcttttgatctatcagtttcactttcagaaatcaattagacaagtgtataaaagtaagaatacaaggatgttttcagcagtgtttataaagc

SEQ ID NO: 253326 - DNA, 462 bp, Homo sapiens
aaaagtcaaactaggaagaagtgaggagacatttcaataaacgtttgtctgatgtctcggtatgaaaggactttctaaccctcagaacagtgggagaactcaacaaagaaataaccactacatgccagctgcggtagcatctgtaatgagcacacctgtaatcccagcactttgggaggccgaggcaggcagatcacctgagattgggagtttgagaccagcgtgaccaacatggagaaaccccgtctctaccaaaaatgcaaaattagccgggtatggtggcgcatgcctgtaatcccagctactcgggaggctgagtcaggagaattgcttgaatctgggaggcagagattgcagtcagctgagatcacgccattgaactccagccttggcaacaagagcaaaactctgtctcaaaaaacaaacaaacaaaaaaacatatacaaggacatgttgtgtaag

SEQ ID NO: 253327 - DNA, 340 bp, Homo sapiens
agcagaggcaggagagagataaacatagttcaagggcaaggccagacatgcaagagggaaagcttatctgtagtgggtagaggttgagtagaatggcgactgtagagaagcattggattggcgcgtcccttgagacccttgatggagatagctggtggggagggacgaggagaacagagtttataagaaattaagaagaacatcctagttggagggatattgggatttttagagaatgtgttggagcaggacagaggtgttggagccaagataaagtccctaagaaaagaagtaactactgtgcggtacagaaaagtggagacaagaggctttgcagcaa

SEQ ID NO: 253328 - DNA, 508 bp, Homo sapiens
accccataaatccataactataaatcagctgactcctttctaacctttctagccaaagaccaataattgatgtgacttcatttttaggtagccaatgatgatgcacgtactattatttctacatctgctttaaatttgaaatgtattattattttcctggataataccttgaagtatctagagtttcatagcataattatatgttatataaaaacatactgttttggtcttgtcattaggtcaactgttaggccttattacaatgaaagaaaaattgccttttatatactatgcttatccaaattaactgtacttagaatgtctcctataagaaaagctaaaatatcttggtataaatcacacagactgctagatgttagctgcaggcatacgatccttgattaaaatacattaatcctttgggaggccaaggcgggtggatcacctgcagtcaggagttcgagaccagccttgccaacatggcaaaaccccatctctgcaaataata

SEQ ID NO: 253329 - DNA, 693 bp, Homo sapiens
tacaggtgtaagccaccgtgcccggcccagttgtttattaaaatgttatgttaacatgtaattgtttattatttatttatttattttgaaacggagtctcgctctgtcaccaggctggagtacagtggcgtgatcttggctcactgcactctccgccttctgggttcaagcgattctcctgcctcagcctccccagtagctgggactacaggcacacgccaccacgcccagctaatttttgtatttttagtagagtcggggtttcaccatgttggccaggatggtctcgctctcttgacctcgtgtttgcccacctcggccttccaaagtgctgggattacaggcgtgagccactgtgcccggctgtaatcgtttattactatttttaaataagttgacaaatagttttaaattttctgttttaatttctttagagttccttttttaagaaaatctactctacttccttagctgtccatggcagagtaatcaggacttaataaattgctaattgaagatgttacagtgtaacaccaactcatctggccttctgttgtttggttctttctttcatttccaggaagatcacctcttactcagtaaaaagggatgctaggtggacatctgtcatttgcagctccccagaatcttctgagcaccccttccccccttcacatttggatagtctgcaaa

SEQ ID NO: 253330 - DNA, 824 bp, Homo sapiens
cctggctaatttttgtatttttagtagagacagggtttcaccacgttggccaggctggtcttgaactcctgacctcaggtgatacgtctgccttggcctcccaaagtgctgggattacaggcgtgagccactgtgcccggccttgggtttattctttctttatatgtttgtttgtttgtttgttttgagatggagtcttgctcttatcacccagggtggagtgcagtggcacgatctcggctcactgcaacctctgtctcccaggttcaagtgattctcctgcctcagcctcccaagtagttgggattacaggcacccgccaccatgcccggctaatttttgtatttttagtagagacagggtttcaccatgttggccaggctggtctcgaactcctgaccatccacctcagcctctcaaagtactgggattacaggcatgagccaccaagcctggcctattctttatatgtttaaccggagcttccctttccccttccaggaggtcctgctttgtcctttccccttccctgcagccttcaccagctccattactccttatttctgttccctgttcctctggtcctgtttttggaataacttgtccgagaaatttacatataattaattgaagtgggactattggattatcatgtaagatgatccagttttggtttttttttttataaggctgccctgtttctctgtaatatgtctgtctgggttttgtgttggcatcctctgggctgcatttatcttgtttattacccttcattttcaggaagcatggttttggccccgagagcagctgtttgaaggaaaaat

SEQ ID NO: 253331 - DNA, 827 bp, Homo sapiens
cctggctaatttttgtatttttagtagagacagggtttcaccacgttggccaggctggtcttgaactcctgacctcaggtgatacgtctgccttggcctcccaaagtgctgggattacaggcgtgagccactgtgcccggccttgggtttattctttctttatatgtttgtttgtttgtttgttttgagatggagtcttgctcttatcacctgggaggcagaggttgcagtgagtggagatcgcaccattgcactccagcctgggtgacagagcaaaactccgtctcagaaataaaaaagagacgtgatcctgctatgttgcccaagttagactcaagctcctgggctcaagcaatcctcctgcctcagccttctaagtagctgggactacaggagcaaaccactgtgcctggcaggaattactctttaaaaagagtttatgttgcttgtattcatttgagaaaaaatgagttgaagaaatggtaattgttggtcaaagaagccaaaagatttaaataaggtcttgtgtgtgggtatgtgtatgtgcatgtatttattgaagaaaataagtttcaatttgagaattagaaaattggatatttcattttaattatttatttaaagagtagagtgttcttccattattgaatcttcttttatcccaccaaatggcttaacctaatttgcgctgcctattttggttaagaaacagggaaacaccctaaaatctgtgataattttcaaaatacaattttaagaagctttgcgcttacataaatcacaagaaatacagctggaaatcatttcacttttcttgctgtaaattt

SEQ ID NO: 253332 - DNA, 980 bp, Homo sapiens
cttactaaagccattactggtcaatcagatacttttagactttaccacagttataaaagtcagcttgatgtagtaaaaaaacttgtctctctctgactaatatgtatgaatataggagaatcccagtctgaatttactgtttgaaacatagatgaggctcagcgtggtggctcatgcctttagtaatcccagcactttgggaagctgaggcgggcagatcaccttaggtcaagagttcaagaccagcttggccaacatggtgaaatgccgtctctactaaaaatacaaaaattagccaggcatggtggcacatgcctgtaatcccagctgctcgggaggctgaggcaggagaattgcttgaacctgggaggcagaggttgcagtgagtggagatcgcaccattgcactccagcctgggtgacagagcaaaactccgtctcagaaataaaaaagagacgtgatcctgctatgttgcccaagttagactcaagctcctgggctcaagcaatcctcctgcctcagccttctaagtagctgggactacaggagcaaaccactgtgcctggcaggaattactctttaaaaagagtttatgttgcttgtattcatttgagaaaaaatgagttgaagaaatggtaattgttggtcaaagaagccaaaagatttaaataaggtcttgtgtgtgggtatgtgtatgtgcatgtatttattgaagaaaataagtttcaatttgagaattagaaaattggatatttcattttaattatttatttaaagagtagagtgttcttccattattgaatcttcttttatcccaccaaatggcttaacctaatttgcgctgcctattttggttaagaaacagggaaacaccctaaaatctgtgataattttcaaaatacaattttaagaagctttgcgcttacataaatcacaagaaatacagctggaaatcatttcacttttcttgctgtaaattt

SEQ ID NO: 253333 - DNA, 347 bp, Homo sapiens
tgtgttttgagacagggtcttgctctgttgcccaggctggagtgcaatgccacgatcatggcttgcagcagccctgatcaccttggcaatgccccgacctcagccttccgagtagttggaaccacaagtgcatgtcaccacacccagcctgaccaaaatggtgaaaccccatctctacaaaaatgtaaaaattagccgggcatgctggcactcacctgtaatcccatctactcaggaggctgaggcaggagaatctcttgaacttaggaggtggaggttgcagtgagctgagattgcgccactgcattccagcctgggcgacagagcaaggctctgtctgacagaaa

SEQ ID NO: 253334 - DNA, 195 bp, Homo sapiens
ctcaagcaactttgttgaatcaggtgaagttttaaatgccagaaaaacattgtcttaatttttttgtgctactgaagtgtaaccgctatatacaagattatttaattcagggtagcaagattagatgatcaacaaaacctttgttcaaacgtgagctcaatttcctccgatgtgtggcccttctgtcgtcttctc

SEQ ID NO: 253335 - DNA, 635 bp, Homo sapiens
cgcggctgattcatcccaggccaggcgagtggaaaagtaccagccgcgcgcgaggggcgggggcgcgccgaggggcggaaaagtacagacggcggagccgcggggagaacaaagatgatgccaccgctgtgttgcggccgtcgaggccccctactccggcagatttcaacctgctttcactcttcaaaactagccggaggtcggcgagcagctccttttcgggatgtgctttttgtacggccatggaaactggactagcggaaaggctaccttttggccagcaagccaggccccttagaaagaggccccagtggggagcccggcgctcctaaggccgtttgggagtccccagttttccactcgctgacacgttgcttctcttatcccaccaccgccgccccgggcaaaggcactgccttgtctgaatgcgggtctgaggcgctttctgcggagcctggtcctttcccttcaatggtgatgtgtgtggtcttgctgagccaggcaactagggggacccttcgctgtggaaaaattggtgctgcgggaaaggcaagactcactcccttgcaggaaacaaagaccccttaggagagagaaatgttcatggaatgaatgaataaacaagtttgacctac

SEQ ID NO: 253336 - DNA, 313 bp, Homo sapiens
  misc_feature (163)..(163): n is a, c, g, or t
cacctccggctcagcgtgctgcactcagacatccaactggaggagtccatgagctgacctcagagatgccctccgacgctgagtttctttgtcaaaaaacaaactcttcactttcatctcttcaaaatggtattttattctgtcctctggtgtctgtcaatanatctcatctccccagacaggctgccttcagcttcccttcacagccttgccgatcttgccccttcccctgttaatccacacagccatcacttctgaacttaattcctatagcccctgacgttctctgactcatccgtcccttgtgatctac

SEQ ID NO: 253337 - DNA, 5583 bp, Homo sapiens
  misc_feature (5253)..(5253): n is a, c, g, or t
  misc_feature (5283)..(5283): n is a, c, g, or t
  misc_feature (5290)..(5290): n is a, c, g, or t
  misc_feature (5361)..(5361): n is a, c, g, or t
  misc_feature (5371)..(5371): n is a, c, g, or t
  misc_feature (5412)..(5412): n is a, c, g, or t
  misc_feature (5415)..(5415): n is a, c, g, or t
  misc_feature (5432)..(5432): n is a, c, g, or t
  misc_feature (5441)..(5441): n is a, c, g, or t
  misc_feature (5484)..(5484): n is a, c, g, or t
  misc_feature (5505)..(5505): n is a, c, g, or t
  misc_feature (5512)..(5512): n is a, c, g, or t
gttagaagctgctcctctgacctctggaggacccggcactccgaaccccgcgcacctgggaaaggcctgagattccccgctattgggattcacatcacgacgcggcggccccaactcggggaggaattagacacggcggcactgctggtccaacctggaatccctgcacagcattctgacctggggctgcacagcctcatggaaactcctccagagaccccaaaagccacctctgaaagaaggtgatccagcatccccacccctctcctctgcccacccgagccccagagcacacgcgtcccttccattgccctccatctccaaggcattagcagatggtcacccttgctttaggcaggccccagagctccctgcctcaaagtgtccctttcccttttgcctggatttccagggatctctgggctggtctgtggggccccaggcaggcaccaagtaggcccatcttggctctgaggctgagagaggaagtgggctttgttgtgcctgggcatcgtctggattttcccaccctgctcttcttggcaggagagccctcagctggagaagctgcctccgccccacaccagcgtcccctccttcccagctcagcaccatccatctccgtctccctagagcaaggaatgtgctccaggacactgtggggcttgttcccaatccccttctagctcatttcactcgggcttttatagatttgcctccatcccatgggctgctgtctgggttctggctctgaagacacagacagaggtttccccctcctccctgcaattcctcacacttcattttgtcccaacagcatctgaggaggctgcactgtggggagtcaaggcaccctggtgtgggaggcgatgggggttgggtggtggagggtgggtccccttccccatctttccagcccctggccctgctggcctcagctctggcactgcccacagcggctgcattattccccgtgctgcagccatccatcccctcacccgcccttcctgtccacgccccacaagcctcgattattggtgaaattagcaccgggcttcttgttggcggttgctaattaagaccattaataaacgtgattattaatgctgtagcaggcagcagcccaggcatctaatcaccacaccgctggcaagcgctgggctgccggcttccacccggctccatcttgggaaggacctgctccctttccccggccagctcacctcaggccctgccaggggagggtgggtggagacaaaggcaccacggggggttcactgagccttgcagagaaaaggagggacaacctgcactccagggagcccccaaactgggcaggccgaggccaggatgtgtgcctgtaagaggcctatgaacccacctgatgccggtacgcagggtggaccgggtggtgagtgcgaaggctctggagagagcgtgggtgggcgcctgcaccagcagccctgctctctggcagcccacagctcacgtgccctcctgagtccccctttgcccgccgccctgcaaaccaggctgtggagtgtggcccctcctgcgggggtttcacagtggttaggggccatctcagcgagacagtgaggtgctctctgtgagaaagtagaagacacctctgaccagaatgtttccctcagttactgggtgcccaccatgcgtcaggccagagggtactgtcataaacaaaaggcagtctcctcctgggaactgccccatcacattagactacatgaggtctgtccctgaatgtctccctcaccccttccctcacccctttacatggcgtcccacctcacactgcctgtaatgagctgtctgtttatctgttcacaccaacggggctgtgctgtgcgcgatgacaggggctgtgtgtccctgaggacagtggaagcccactctggctttggtgatgaagcctttcctgcccctgtctccaggccaccctccttccacgcccttccctgttcgctgtcccctgcctgacctccagcctcgggctaccagagcaggaggggttgcaaggagccctctggtccagtttgccccacttggaccccgtcagggcaggagagcctgcctgctctcagctgggactcgaggaggtaggatgtggcctgccaggcagggcgggccctgggggcctttccaggagctgtctgctgcccaggcttcccctctagtccagcctggcctctgcacccccttctgccatccacttacaccccaagaagtgatccacggcagctgaggagagcttgggaaggaacctcccccacacacctgcttccccccatttttctccaccccaacttcaatgtcttgactttttcctacagcttttgaaggaagaatccaccaagactttagtctctcccaacccagggaataagaagagaaaaaagtcctgaaaacaaaaacccgacaacaaccttaaagtaggagagattggttggaaggcttttaatcccttaatccctctcagatgggccttgagacgctaatgattttcctaattattccctccgattttcccatcgctctgtaaggaccttcgagaagagcgaaattccgagtgagcgggtgtgggatgaatggcaggcccacctcccccacatcggacccagagtccaggcggctggagaggtgggggaagggccaggagtgccccagctgggggcttgggcttctccgccactgacaccagtgtgcagggcgggcctgggacaatggggcggttgggggctgcctgagagggccaggtgtggggctggggtcccctcagtgtgaatggcccattatcctgccttgaggatgggagttgagggtctctttgtgtcccccaggaaaggcctctctggcgataatcaccctgagagggcggtggaggtggtgaggaggatctttaaagggggccaaacctccccagagaacagttggccattcaggcctccagcccctctcttgtctccagcagcctgggattcagtggcccatctatggggggtggggcgagggctaggccaacacacatggccaagcttgggcttaggccccctccccatcagtgtggcctgccagactgagcccaggggtggcttctccaggaaaccaccccagcctccctctcaacccccacctaatgttgggtgccctggggctttgtctcatttcccctgagacactgagtttctctgggggccagatctgcctgggagcagacattgacctttgaccctgccatgtcctcttttatgaaacatggggattctcattccactcctacaaattccctatgggatgagggcattagccccatttcacagatgacaaactgagcacttagcagacttgtctaaggttacacatcaagttaggggcaaattagattagagctggatccttctttttttgtttgtttgtttgttttttgaaagccctgatactgtaccaggtacaaggcttttgtacaggctgtccctctgaccgaaatgctcacctcccaaacaacccgagggctgattctgcgcctcccttggtctttgcttgaatcacatccttcatggaaggagatgtctgggatttgcttcaaaataacacgggaagtgggggaaaaggaggtgggagtgcagatgaaacaagattggcagatgttgaagctagacgagggataggtggggtctcattatactattctgtttattttatatctatttttaaatttccacaagaaaaagtggaacaaaacctggttttccctaagcaccttattttatttttgaggcagagtctcgctgttgcccaggctgtagtgcagtggtgcgatctcagctcactgcaacctctgcctcctgggttcaagtgactcttgtgcctcagcctcccgagtagctgggattgcaggtgcccaccaccacgcccagctaatttttgtatttttacaaaaaattttcatcgtgttttaccatgttagcgaggctggaggcaccttattttaaattgcaattcaccatccccagcccagccttgcctcgtaccctttccttgtttttctccagatcacttattatggtgtgaaactcttaagtattttacccatttgttttgattcttgccaatgggctacactaggttaaaggtcatggggtcagaggtcttggggttcatttgtgcaggccggttggccagtgccccagcaagaagagcagcgcctggcaccgggatgcctttgatcctgtgagtcaaggtctgggtgacgcggtgtccagaggctcttggcccagttgccaaggaaagggacggcctgtcagttgtgttttgggcctgtcgggtccttcagcacctggagccacagccggagggttccttcccagcactcccagcctgggataagcccctaagtgtcccattatgtaccattcactcttactttgtcggccccatccacagccgctgcgtccttttgtcagaggggcctgggagggcgaggggctattaccacaaggcctcattattcccagccagagtagtaatgaggagtcccttccccagactagtacattttgcagggcccctcccatttaataactataataaaggccaccatttatgagtcctctcctacaccaaacactttacatacattatctcatttaattcccccgacagctctgggaaatagctactatttgtatccccatttttcagatgagaaagctaagacagagactacaatttctttctcctcggctcagctgtacaggcaagggtagggcagggacacaacaatgtcccagtagggacaactgaggttcggagaggggacgtggcctggggaagagcacactgcagattaacaacagggcagcgagatccccttcactgtgtgcggggaagggcaagtggaagctctcagttctccaggtgacgtctcactcctatcccccagctgcagtaggggagtggccatcactgtctcacccctcacgggcaggtgcttcagtgacttactcatgtgtacacaactagtgagaatccaggtgctctgtccacgataccaactgggggacggcaggtgagaagggaatcatcctgagaggctcctgaaggatgaggctgagtgtgggccaccatgagtgggcccagctggcccagcaggaggcaggggtagagtgatggaaggggaaggcaaagagaagggactgaaatgccactggttcctctttttttttttttttttgngatggagttttgctcttgtcggccaggctngagtgcngtggcgctgtctcggctcactgcaacttccacctcccgggttcaagcgatcctgcctcagcctcctgagtngctgggattncaggcgcctgccaccatgcctggctaatttttgtatttttngtngagacgagggttcaccncgttggccnggctggtctcgaactcctgaacttaggtgattctcctgcctcngcctctcaaagtgttgggatnacaggcntgagccactgtgcccagccagaggttctcttatgctctggcctttggggtcaaacactgtccttccagcct

SEQ ID NO: 253338 - DNA, 583 bp, Homo sapiens
taatttttgtgagtacatagtatgtgtatatatttgtgtagtacatgagatgttttgatgcatgcatgcaatgtgtaataatcacatcatggagaatagggtatccatcctctgaagcatttatcttttgagttacaagcaatccaattatactcttttagttattttataatatacaattattattgactatagtcgcattgttgtgaaatcaaatagtgtcttattcattctttctaactatttttgtacacattaaccatccccacctcccctccagaccccagtacccttcccagactctggtaaccatccttctactctctacgtccatgaattcaattgttttgatttttggatcccacaagtaagtgagaatatgcgatgtttgtgcttctgtgcctggcttatttcacttaacataatgatcttcattgtctagggtgacacccagagttcttgatctcatggccaaggaaatcaaggacgtggacataccaaatatgaggtttagagcagaaatgtaataggagaaagagaacagttgtttggtacagagaagggtcctggaaaaagggttgcc

SEQ ID NO: 253339 - DNA, 685 bp, Homo sapiens
cagcagactggctgaaagaagcctctctcggtatttatagagcttgcatcgccatggtacccaggcgcttaaattaaactctagcccaactgcttggagatgcatggaatgaaatgcactttacctgtccactgtacatggtctcacacctcattctcagaacttcaccactgcaaagataagcaaatggagtgaattttacaaatcacctggcaagaagggtatagggttgggtttatacaacaacctgtctcaacagggtggctgggcagagtagtagaatacatgggcagaaaaagcaatccagatctgaaacttggctctgcatcttggtcagtgtgtgactgtcggcatgagactgcatctctctgagcctcagtttcctcacctgtaaaatgagatcaccaacaagaaaaatgagagcaacaatgctgcctcactattgacttgtgacaactatatgaaatgatacaagtgaagtgctttgctcagcttctgaaatgcagaagctcttttaaatataggtctccttccctgttcagctgttattcatttattccacaagaacttttttgtctgcctattgtctgccagacaagtattgagacataagggtgatttctggtcccgtggagcttacagtttagtaaagtaacatgtaataaacaagtcaacacatgaaaaa

SEQ ID NO: 253340 - DNA, 374 bp, Homo sapiens
atatgatgagctggctcaatttttctattcgtacagaaattcgtaatctatcagtttttctagctttgccttgtaaattcacaagccagtttcgctcatctttttcttaatacagcttggtagaatctctcaaacccattttccttcttaacctgtcacctttttctagtgctcagtttaattcctggtcatcacctttaaatgtaaatggctgtgtttatttgacacagaccatttgccagttaactttaaatatctctctttgataattgttttgtatatatctacttgattgcaaacaaatgtgttggtttcaaaacaggtatgggtagccccatttatatgccaaaaatgaacgtattactagaaaattg

SEQ ID NO: 253341 - DNA, 466 bp, Homo sapiens
gagacagagtctcgctgtttcatccaggctggagtgcagtggtgtgatctcggctcactgcaacctcgcctcccaggttcaagcaattctcctgcctcagcttcccaagtagctgggattacaggcgcatgccaccacacccggctaatttttgtatttttagtagagacagggtttcaccatgttggccaggctggtcttgaactcctgacctcaggtaatccgcccacctcggcctcccaaagtgctgggattacaggcaagagacaccatgcccagcctctcttttcttataatcaacttcttgtcattcatccttggctgagtgtccccttctcagagatactccccaccccccaacccttctgtccctgtctgtcactccactgtttggctgtaggcggcaggaacttaccttgagtctcaaatgagacttaggactatggagtgaggcacagattgcagt

SEQ ID NO: 253342 - DNA, 456 bp, Homo sapiens
caagaaaagatattatataatccctgccttcaaacagctgtatagtcaagtttgcaaaataagacaagagtagggacattagttctccaggcactcaaaagaaatatcatttctagcttgggttgtcaggcaaggcttcaaaagaggtcatgaactatgaattggtctagataaattattaggattggaaagaaagtaggaaaaggcatttgatatcaggaaataataaaattcttcattttaacacttacctgaatttgtgggctgaaaaatttaattttaggaaaaatgctgtatgttaactataactaagaactttattttctgaccagatagtgtgcctcacgccacatcagtacaatttgttcaccttagcccagctatctgctgaaaagatatcacacaactggaagcccctggccttccttctcagaagccaactaaaatgtgcattgc

SEQ ID NO: 253343 - DNA, 423 bp, Homo sapiens
tccttcacaagattacgtaacttacaggcgtgttgctggcttcagtagaagtttcatctccctcaatcctgtacacttttccatacattacatactcaaactggtcagccctatggagcaatactgtagaaaatctgatgaagacaggactttttctacagttttgcttcaacacagctgaacagtttataatgaaattattggcaaagagacaaaatcggccatataataccagggtattggcaaggaagtggcactctctcattacggacaatgtatatacccagttttcaagatttggtctatataagccagtgtttctcaacttgcataagaaccacttgttaacacatagtcttgggccacccaagacctactgaagtgggatatgtaacgatgggattcataaaatctatagttaca

SEQ ID NO: 253344 - DNA, 213 bp, Homo sapiens
tcttcattccttccttctttccttccttctttccttccttccctccttccttccttccctcctcccttctttctttacttccttccccttttcctcttgcctttcttttctcttttttctttctttctctctctctttcttatttcatcctttccttctttcctctgtctcatcctctttgtctcttctctctcccttccttttttcttcctt

SEQ ID NO: 253345 - DNA, 428 bp, Homo sapiens
gccttgtttcagcaggttacaacctatgtttcatttttacttgggtacaattccttttctatagaaaataggtcagatctcatatttttccttagtttctataaaactatcaatagctccaataaattgacctctctggggagaaagaaagcctggcttagggtttggaactacatcttacactggttatctgaatgtcctaatattgatttgattaactcccaaaccaatattaaagtaaaactctgtgcccgaaagatagaggaacaggggaaaaaaggagttggtgcctgggattttacggtggctgcgacagggcgtgtggagacatttgtgggaaacttttctctttttttgagcagagtggataaccctttatttcactatagacagactggatttatcctgcttttacctttagaattcaa

SEQ ID NO: 253346 - DNA, 392 bp, Homo sapiens
cggttcatcagaacatgtgtctacatagcaacatcacttggcatttaaaatataaatcatttacaaatgtcatttaatttagatagaacggtgggaatatgagttggggtaaaatgagggtggaggaaggacagagggagaaaataacagcccctttccaaaagtgtctggggttgagggtttccaaacattagatgcaaagtaatgccagaggaagcatgtgggatgataatcacagtgatctttttatttttttcccaaaaagattttttttttttttgagacggggtctcactctgtcgcccaggctggagagcagtggcacgatctccgctcactgcaagctccgcctcctgggttcacgccattctcctgcctcagcctcctgagta

SEQ ID NO: 253347 - DNA, 1831 bp, Homo sapiens
ggaaacagcatctgaaagtattcattttgattgtttttataaccagttactttttttcaggcagcgaggaaggaatacatagagggggaaaggtcagtgttgatactaatagggtgaccacaattaatcctagccacttcatgaacacacaaggcctttggccaactgcggccaagcattgctgtatgtatttggcaggttatttggcaggaaaagttactcaaaactaaaatcttttcaagtgtatttttaccatgttatttattattattatgtaaaagatcacttttagtgtatttgcactaattattgtataaaagcattaaagtagcctctgatttttttcaagtaaaaatgtaagaaaactagattttttttctcctaagtgagaaacaaaaaacatgctatgtgactccccacaaaagccctgtaggtttaatttaatttagcaattccctctctacttttctaccaggttcctgttaccaatgcaattatttcgtggccttttgcctgaattattctaagctgcttctccagaggaaatgagtcagaagaaataggcttgatgtgcatttctgcctttggagacttctcttgatatggtgtaaatccgtaaggtttcattaatgccttgtctgcatattttttcaatctgcttttgataacaaggtctgtttctagggtacttcaaatttaaaaccgtagggtatgtgtaaaatatcaccactagaaaatggagagatgcaaatgggttcccccttctgtagtccctcctaatgtcagaatctggggttagggttctaagtgatggtagcactcaggagagggtcacaagaggcaatgacatgggactgcatcctgaaagatgactgcttagacgtgcggcgagaatggccggaaaacggaggatggcgcttgacgttgatctaggaaaggaagacagtcattgggacttttgctaactttgtccctagagagtgaattctgcttttgctggtcctaaaaactgtagagtaattctacaatccagttaaatttgtaaatctaatgcctgattcagtctgagatttatgactcagccggttgatccagcttaggtctagactcatttcacttttgttatgacaagatacgacaatgtagggcacaccctttaccccccagggtcatcctgatgtcagtcatttcaggctaggccagtgtcagagcagtccctgaagcagaagtggatggaaagaggtgaatgatttctaatattcaacattcattaatttaacatcaactatgttaagggtaatgatatagcagttaaccaagaccaacatggtgtctgcttggttgatgcttgaaataaggtgacctggccccagccacccgggtggccaggagctgaaagggctgtaacaagtaggcagtgaatagtcttcaaacttgttacttgcatacctccctacaaattttggaaaaaccatgagactctgattgattttttaaaagaatatctaaaatcattatgtttaaatagcctcaaaagaagcattttattatgtattgtaaatattggcattttaaaatgttattcggtcttttaaatgtatccagtgaaatgttggtacaatagagttttgatagctaccattttccatttttaaaaatactttaacacgctttgtaacagttggaaatattgtttgattccttttgctccctgaactccattcttcttcttctgaagaattttatcctaaaatgaatttattttttgcttaacagtcttattggttaccttattaaatattactcagtatattatagatgtaagtgtttt

SEQ ID NO: 253348 - DNA, 370 bp, Homo sapiens
ctgtaagtgagcccagtgttttgtttgtctttaatggaaacaaaagtcaaacctccttcttttagtagttcccaatttaagcactagacctttttgcagcctcctatcctcaagactcaaggatcctgtctcttctcactttctcccatttcctatcttataaacttttgtcatcttggttgctctttccccaatttcttcatctactttgtagaatcaagaactccaggtaggtgatgaaaaggttctaaaattgattgtggcaatggttgtacaactctgtgaatatacttttaaaagtttgaactgtacactttaaaatgggtaaattgttatgtgaattatatctcaataaagttaccttttaaga

SEQ ID NO: 253349 - DNA, 909 bp, Homo sapiens
cctctctggagggtggggatagaccactttcctgggaagagtccactgaacattcttctcttgccttaaactctgggctgcctaatggtgaaacttctagcggaggacagcccaggttggcagagccagacatataccaagagaagctgtcccaagtgagagatgttaggtctaaggatctgggcagcagtactgacttggggacttccttgcctttggattcctgggtgaatatcacaaggttctgtgattctcagcttaagcatggggcacctaggccaggaatgaagtcctcccctcatgattcccatacgtgtgtaacctatccagagagaaatcacatccttttgcatccacattggaaccaagacacagagcaggagacctcagaattggagtctctgtatcaggccagtcttcaggcttctcaagctggctgttctggatgggggcagcaggataccgcctggcacccacttagccaaacaggctctgcagatggcatggggaggaggttgcactcagcccatgatcctggtctctcaaagacttcaacagcagaaatggagcatggtctccatgaagccagaacagtgcgtacttctcaggctacaccttgccgaggcctcagcagggagtgtggggaggatgagcagtacagtgcagagaatttacgtcgcatctcacgcagtctcagtggcaccgttgtctcagagagggaggaagctccggtttcttcccacagttttgattcatcaaacgtgaggaagcctttggaaaccgggcaccgttgttccagctcctcttccctccctgtcatccatgacccttctgtgtttctcctcggtccccaactctaccttccccaaccacagttcctgtccccagatgtcctgatgcccaccatgg

SEQ ID NO: 253350 - DNA, 529 bp, Homo sapiens
agaggcatggtgatatggggctatcagaagaaaataaggtctatgattgggcttcttttgaattagaggagattgttacatggccactatcttaccaatacatctaattcaggtgtctattactactgagtcttcccctactctttcccataccctgaggatactgtctgtgggaaaaccataagtctggtattatgtgtctgcctgtatgtgtctgtgtgtttgaaggctacaccttgccgaggcctcagcagggagtgtggggaggatgagcagtacagtgcagagaatttacgtcgcatctcacgcagtctcagtggcaccgttgtctcagagagggaggaagctccggtttcttcccacagttttgattcatcaaacgtgaggaagcctttggaaaccgggcaccgttgttccagctcctcttccctccctgtcatccatgacccttctgtgtttctcctcggtccccaactctaccttccccaaccacagttcctgtccccagatgtcctgatgcccaccatgg

SEQ ID NO: 253351 - DNA, 1004 bp, Homo sapiens
aaagccttttctttttacagttcctatctaagacatgaaagaacacatactggggagaaaccgtatgaatgtaaacagtgttctaaagcctttcctttttacagttcctatctaagacatgaaagaacacatactggggagaaaccatataaatgtaagcagtgttctaaagccttccctgattccagttcttgtctaatacatgaaagaactcacactggagagaaaccctatacatgtaaacaatgtgggaaagccttcagtgtttccggttcccttcaaagacatgaaaccactcacagtgcagagaaaccctatgcatgtcagcaatgtgggaaagcgtttcatcatctgggaagctttcaaagacacatgataaggcacactggaaatggacctcataaatgtaagatatgtgggaaaggctttgattgtcctagttcactgcaaagtcatgaaagaactcacactggagagaaaccctatgaatgcaagaatgtgggaaagcatttgcttctctcagttccttgcatagacataaaaagactcactagcattctctctaaatgtatggaatgtgggaaagcatttattaattttatttcatttcagatacttgtacgaaacacattggagatagaccctgtgaatgtaagcacttggtaaagccttaagtagtttcagtttctttccagtacagtcatcccttgatacctgctgggtattggttccagcactccgtgagccatgtccagtcccttttataaaatgacatgtttgtatgtaacttacccacatcctcttgtatagtctcaattatgtctagattacttaaaatacctcatgcattataaaagctatgcaaatagttgttctattgtattgtttagggaatcatgataaggaaaagagtctatgtattttcagtatagatgcagtaattgtgagcctatcaacatagtgtagtcagccagaacattaaagtttctttgtttcaactctca

SEQ ID NO: 253352 - DNA, 1258 bp, Homo sapiens
aaagccttttctttttacagttcctatctaagacatgaaagaacacatactggggagaaaccgtatgaatgtaaacagtgttctaaagcctttcctttttacagttcctatctaagacatgaaagaacacatactggggagaaaccatataaatgtaagcagtgttctaaagccttccctgattccagttcttgtctaatacatgaaagaactcacactggagagaaaccctatacatgtaaacaatgtgggaaagccttcagtgtttccggttcccttcaaagacatgaaaccactcacagtgcagagaaaccctatgcatgtcagcaatgtgggaaagcgtttcatcatctgggaagctttcaaagacacatgataaggcacactggaaatggacctcataaatgtaagatatgtgggaaaggctttgattgtcctagttcactgcaaagtcatgaaagaactcacactggagagaaaccctatgaatgcaagcattgtgggaaagcattatctcatcgctcaagctttcgaagtcatatgataatgcacactggagatggacctcataaatgcaaggtatgtgggaaagcctttgtttatcccagtgtatttcaaagacatgaaaggactcacactgcagagaaaccctataaatgtaaacaatgtggcaaagcctaccgtatttccagttcccttcgaaggcatgaaacaactcatactggagagaaaccctataaatgcaaacgtaggaaagcctgtattgatttctgttcctttcaaaatcacaaaacaactcacactggagagaagccatatgagtgtaaggaatgtgggaaagcattcagtcgtttcagatacctttctcgacataaaaggactcacacaggagagaaaccttatgagtgtaaaacatgtaggaaagccttcggtcattatgataacttaaaggtacatgaaagaattcactctggagagaagccgtatgaatgtaaggaatgtgggaaagcattctcttggctcacttgctttctacgacatgaaagaattcacatgagagagaaatcctatgaatgtccacaatgtggtaaagccttcactcattcccgttttcttcaaggacatgaaaaaactcatactggagagaacccgtatgaatgtaaggaatgtgggaaagcatttgcttctctcagttccttgcatagacataaaaagactcactggaaaaaaactcacactggagagaacccatatgaat

SEQ ID NO: 253353 - DNA, 383 bp, Homo sapiens
ccaggtcagacccctcctgcgaggccaggggctgtggccattgggagtttgtccccacggacccctcctcccccagagggcacgccagtcttgaagcaacatgagcagcccggagccccccacagagccccccgagcccgacaaccccacctggtcgactcagcccacgtatagcaaccttggtcagatccgtgcccacctgctgccctccaaggcctgccgcctccggacccctgggtccctctccaccaacccagagcccctgcccccacccctgcccaagaagatcctaacccggacccagtcactgcccacccgcaggaccctccatcccagctccatccaagtacagccgcctcggagaccctttctggggtcccaca

SEQ ID NO: 253354 - DNA, 449 bp, Homo sapiens
cttctataatgccatcctgtcagtacatattttagtccatgctgaatccaggaccctgagaaaccttatagcctagaatttgattctatatatagtcaagaatatacacaacatacctctgcattggatcttctggggttttcttaattttggatgaaaagctctcagcatattaattccagaatatacactgaatcacatcaagccaatccttgtatattaaggctgttgtatgtagcatggagtctaattaatttagaattgtagaatttattattttgtttcctgatggcattttggagcgattttaggctacatactgttgctcatcatttttttaaaaataagattctatcaacattagatgatgccattttagataaacagtatatactctgattactttatcttctgtcactgcatgaataactataggagcccagaagacc

SEQ ID NO: 253355 - DNA, 644 bp, Homo sapiens
gagcttcaaaataggcccttttttcttattcaaaactacatatataaaagtgtgaatacaacataagagagcatttttgcctgtggccttggcagggaagaccaagctggtagtttcccaatcagggtgcaggtggccgggtacgctgactcgaagatggctggctgggcacagtccccgtgagttgcctttctgccaccctgcacctctcctttctcctggattgtaaaaccagatgcacgagaactgcagagtgtatgaaaaatgcagcagaggatgaagagggaaaaatcccatggaatccctccttttcacttgtcataagcatttcccatatggtcaaaaatccttcctaaagatgtcttgttttttgtttttccatgttgatgaaggtcacatgggagcccgacaccatttggaggagattcagagaagtatgaacagcacaaagcacttggccgccccccatgggcgtcttcccaggactccctttctatgacactaacgcatcatcctgcatcccacgttccctgtgcctcatgtcatctgtacatcatgtgtctactccccatggtcatgtcatagtgttgtgtactgggcacggttgaatactcccatcacatgatgggggaggtagttgatcc

SEQ ID NO: 253356 - DNA, 561 bp, Homo sapiens
cagcggaccaatggcggccgcccgcggcgcgcagcgtgcggggatggggtccgcccgcggcgttgggcgcgctcgccagcccaggggtcgccatgaccgagcggcccaggcccgagcgaagcccgcgcgcggtcacatgggagcccgacaccatttggaggagattcagagaagcccctgattgctgattctgtccgcctgccacaccggctctgtccggagccactgggactcgggatccagtccacacacacccctcagaggggcactgtggccagagaaatgcttccacggcccaaagcccctgcctcccccagacgcccccagaccccaaccccgagtgagcaggacgcagaccctgggccagcaagccccagggacaccgaagcccagcgtctgcgcttccggcagttccagtaccacgtggcgagcgggccgcacctggcgctgggccagctctggacgctgtgccgccagtggctgaggcccgaggcgcgctccaaggagcagatgctggagctgctggtgctggagcagttcctgggcgcgctgcccagcaag

SEQ ID NO: 253357 - DNA, 624 bp, Homo sapiens
cagcggaccaatggcggccgcccgcggcgcgcagcgtgcggggatggggtccgcccgcggcgttgggcgcgctcgccagcccaggggtcgccatgaccgagcggcccaggcccgagcgaagcccgcgcgcgacctcagcccaggaccctggaggatgctgaggggctacagcccccctccctagagtctccagggtcacatgggagcccgacaccatttggaggagattcagagaagcccctgattgctgattctgtccgcctgccacaccggctctgtccggagccactgggactcgggatccagtccacacacacccctcagaggggcactgtggccagagaaatgcttccacggcccaaagcccctgcctcccccagacgcccccagaccccaaccccgagtgagcaggacgcagaccctgggccagcaagccccagggacaccgaagcccagcgtctgcgcttccggcagttccagtaccacgtggcgagcgggccgcacctggcgctgggccagctctggacgctgtgccgccagtggctgaggcccgaggcgcgctccaaggagcagatgctggagctgctggtgctggagcagttcctgggcgcgctgcccagcaag

SEQ ID NO: 253358 - DNA, 397 bp, Homo sapiens
tttttttgagatggagttttgctcttgttgcccaggctggagtacaatggcatgatctcggctcggcgtgatcttggctcactgctacctctgcctcctgggttcaagcgtttttcctgcttcagcctcctgagtagctgggattacaggcatgaccaccatgcccagccgtaactctttgtattttggaattgctactgtaactctttatactttgtaattccttgagcccagtgacaggcaaacagagctgactctaccgctagaaggaaagaagcagtctatttaattgccttgagctagtgtgtgctgctcagttggagagtgaattttaattttggaggcactgttcctagtgacttgaaatcaacaaaccttctgtcagataagcataaca

SEQ ID NO: 253359 - DNA, 505 bp, Homo sapiens
caagctctcatggcacgctgtactgtaagctccgggtcggtgtgcacttctgttttgttcctgcatttcaagccatgcgaattgacatgttttcttccccaaggcatttgtttgttgatggtaccagctgtcaaaaaccaagcaagtggcagtgctagaggtgccacaaaagtgcgaaggaagtgtcaggctggatgtcaaaatgaacaccttggagaactggatgatggaacagacggtaaaaatcagctaaacatcagagaaaatggaggaagaggtcaaaactgtgaacaggaactagaagaaagtgtagcagaaaaagacttgtcacaaacttcgagagatttggagaaaatgatgtcaaaacacatcttcctcaagcccatgctgagtatctctgatttggttaatttcttgattgtcccaaatttggccaatgaaaaagtccttcaaggccaggtgtggtagctcatgcctataatcccagcattttgggaggctgagg

SEQ ID NO: 253360 - DNA, 638 bp, Homo sapiens
ctctgagtcatggagacacttgcagaggcccataccggcaagaggaagaggacgtcactttatgtaaaggtttaacttcgttagcgaactgagtgtgccacccagtcacatgagtggagttgtgacattcatgtacgaggtggcaaacctctaccttgtgttgatgagagaataatcttgggcagtctgggaaaataaggaaggcatctccttcttactcatggagattcaactatagagagttgaaacctaaacccgccttccttttatagaagctggactagagacggactgaccatcagctctgaactgtggctttttttgttcacctatgatgccatgtaccaaattcagaagctatcgttaataatttgttttataattgagtagtacaagcgaggaaaaaatacggaggataaccactatttttgtgcaaatagtatgaaagtgaagtaaaagcaatagaagaaatttctataggatctgggtttagagtgtgtatcattaataaatatacctttgctcttttcagggaaaataacaaccacccttactgatctataggagtggtcaccactcctatagatcagttccatcagcacttgtatcagctctacctttgaaatatgaccagcact

SEQ ID NO: 253361 - DNA, 395 bp, Homo sapiens
gcggtgagctgagatcatgccactgcactccggcctgggtgacagagtgagagcccatttaaaaacgaaaaataaagggaaaaaaaaggacagaacaggagtcccggagacagaaccttgcataaatgagaatttgccgtatgacagagaagcatcaccaaccagtggggaaaagatagactcttttataaatggcgttgggacaagtggtgatccatatgggaaagtaaaattagatccccacctaacaccacacacacaactccaggtggattcaggacttacatgtgaataacaaaattttaacacatttagaagaaaatatagaagaatatttttatgacctcagggtaaggaacaatttcttttttaaataaactttttgtttgattaca

SEQ ID NO: 253362 - DNA, 362 bp, Homo sapiens
attgctccacagcttccttctcttttttccctgcctgtgtactctgaaggtctctctttctctctctctctctctctctgtgtgtgtgtgtgtgtgtgtgtgtgtgtgtgtatgtgtgtgtgtgtgtgtgtatgacctgacctccgggcaggcagtgtatcagtgtatcccccagggtctataagcacagaacactcttacacttccacattgtggttgtgtcactgaggccatgcctaaaaccctacccatgaaggcaaggctcccccagagagacctatgcaggtgaatcccttgctggagctcttttgttagggcctctggtggctgctgggcacagtggctaccagctaagctgataa

SEQ ID NO: 253363 - DNA, 556 bp, Homo sapiens
agagaagactcagaaatggtcaattctgactatggataaagtgaaagcatcttctcattaacacattaaaatgaattagctaaatccctggacattttagaaggcacagaactcctaaaatgagatactgagcagataagagagagaaagggaaacagaagcagacaagttaaaagtttaggtcagagaaaagaggcttttgataacatgactgtcaaaatgagagttaaaatcaaacttaactacttcaaaatattgtcaaaggctgaacctcctccttagagcttactgccaatgcagcactacaacagaaagaaaagaaggtaaggaatgcatgcaagcctttaagacaataattgcttctaaaagaatgttccaaatagtttaataatatcaacacagtattttgattaatgtttaagtattaaattagggaaaaagaaaattagttttgtaaactaaattaagtcacacgtaacagatttctgacaagggtcttgagaggtttggagaaaaaagaattattctgttacagatgaagacagaaaacaaaaaa

SEQ ID NO: 253364 - DNA, 353 bp, Homo sapiens
cagagattgccagtggggctttggaagaataagctacacaagtatgtgttacatgagggtgaggccaggctggtagatttccttcaaaatctgagcgcacaccaacgtgttgcacatttctcagcttagcaaagaagcgtgccaaagttaatagaatggaccctttgttggctctcaaaggctacaatggttggcactttaaacataccacgaagccattgcatttgagacggcacccaggagaagcagtcttcgaccgggaacatgcctcttccataattactgccctagaaattcaagtcatcccctatagagaataattttaaaattccaacattattcctgacttcaag

SEQ ID NO: 253365 - DNA, 232 bp, Homo sapiens
cacttaggagagtggggaaccagcagccatgttagagaggaccttataagccatgagcagggctatgaaatgcatgctgagcgcaaagtcatccacacagaggtgagagctgattctgaatctatactcccatattttcaggactaggttcagtgaataagcaaagcaatgggtgaggataaaactgcatttactgagggaagatccagaaattctcgagttagtagtagta

SEQ ID NO: 253366 - DNA, 531 bp, Homo sapiens
ccttatggaaccacaagagtgtaaacagacaagttcatctcagctcttaaactgcttgcctttgtactgttacctgatttattgacaaaaatagttactgcaacataggctgctctcgggtttttaaggaagagtgtagtttagacactatgaaatgtgtttagaaaaagagatgaagttttgcacttgttacccaggctggagcacaatggcacgatctcggctcactgcaacctctgcctcctggattcaagcaattctccggcctcagcctcccaagtagctgggattacaggtgcccaccaccacacccaagtcaaggaaacttttcttttgagctattgacagcttttaacaagttattgtactcctatgaacaaaatttggagcatattcatttctctctacctgatttctccagaatttggcaactgtttgaattaaacttgttttatggagccagtaaaagccacatgctctgtctacacagtcgctgaacagggttcctgccctgtggtaagtaaagaatgt

SEQ ID NO: 253367 - DNA, 491 bp, Homo sapiens
cacatattcccatgtatatgttggagctaaacattaagcacacatgaaaattaacatgggaacaatagatactgcacacaactagacagaaaagggaggaaagtggcacaggttaaaaaactacctactgagtactatgctcactacttgggaccaatatacccatgtaacaatcctacacatgtgtctcctgtatctaaaataaaagagtaatttaaaaaaataggcaaatgactgaaggaagtgagaagacatattctgaaatcctgagagtgaaagttggggaaaggggtggagagagaagcgtgattgatggtggtgatgaggagaggatgataatcaataggttaatgaagagcacacattctaaaggaaatcactcaagaaacgaaggaagatttcatacaaatactcccttatgattgaaaacgaatgatattattacaacaatttaagttggaaaaaaagatatagggtttaaaaagccatgc

SEQ ID NO: 253368 - DNA, 206 bp, Homo sapiens
  misc_feature (49)..(49): n is a, c, g, or t
  misc_feature (84)..(84): n is a, c, g, or t
  misc_feature (130)..(130): n is a, c, g, or t
tgcctgcatcacattctgtccttcccaacagggaatcccaccacatttnccaattagcgctctaatcctgtttgtgtgtctctnctgctctgtgccctggaccccattcattagaatgtcattcattagngatcagagattctgaggacacagagcccagcatcattagtactaattgaagcctggattcctaacctgctgcagaa

SEQ ID NO: 253369 - DNA, 618 bp, Homo sapiens
tcagtcaagtagaggagctcttagtctatagttgtctagaatcttgttactaaaagtatgatctgagaactggcaccagtggtgtcacggaattagaaatacacaatttgaagttccatccaagatctactgaatcagaagctgcattttaagaaagatacctcaaggtgatatatgtatacatattaaactgaactatgtgccacattagatactgagtctttttattctatcatgtttaaaaagcagtttatcttagctatttactgtaccaacttattaaatttatcttatttaacttagtaatttatcttagcttagttagaaagcaatttatcttgccatatttgtttctgcacctgttagatccactttattctgacaaaactttaatattcagctgcctctaccaaataagaggtcattgaagattttttcatgaaagcaacttatgaaaagtccctctgcatctgttgcaaaagtgaggctgaggacattgtttattttagtgattaacttttccttatgtggaggatatttctttaagtgtatcacaaaaatccccctcctaatatgtcataaaatcaacataaaagagtaaaaactagaggaaaaacc

SEQ ID NO: 253370 - DNA, 3024 bp, Homo sapiens
atggaagttttccccttgctcttggttttgtccgtctggtggtctcgaacctgggactcggcgaatgcggattcgatcattcacatcggagcaatttttgatgaatctgccaaaaaggatgatgaggtatttcgcactgcggttggtgaccttaaccagaatgaagagatcttacagactgagaaaatcacattttcagtgacgtttgttgatggcaacaaccctttccaagcagttcaagaagcctgtgaacttatgaatcaaggcatcttggccctggtcagctccattggctgcacgtcagcaggatccctccagtctttggcagacgccatgcatatcccccacctcttcattcagcgctcaacagctgggaccccaaggagtggctgtggactcacccggagcaacaggaatgatgactacactctctcagttcgcccacctgtctacttgcatgatgttatcctaagagtggtcacagagtatgcctggcagaaattcattatattctatgatagtgaatacgatatccgtggaatacaggagttcttggacaaagtctctcagcagggaatggatgttgcacttcagaaggtagaaaacaacatcaataaaatgattaccactctctttgacaccatgagaatagaagaactgaatcgctatcgagacactcttaggcgagcgatccttgttatgaatcctgctacagccaaatccttcattactgaggttgtggagactaatttggttgcttttgactgtcactggatcattataaatgaggaaataaacgatgtggacgtacaggaacttgtaagaaggtcaattggaaggttaacgattattcggcagacatttccaattccccagaacataagtcagcggtgtttccgtggcaaccatcgaatatcttcaacattgtgtgatccaaaggatccatttgctcagaatatggagatttccaacctttacatatatgacacggtgcttctgcttgctaatgcttttcataagaagctggaggaccgaaagtggcacagcatggcaagtctgtcatgtatcagaaagaactcaaagccctggcagggtgggcgctccatgttggagaccatcaagaagggtggagttagtgggttgactggagagctagaatttggagaaaatggaggcaatcccaatgtccactttgaaatccttggaaccaactatggagaagagcttggcagaggtgttcgaaaacttgggtgctggaatcctgtcacaggtctgaatgggtcactgactgacaagaaattggagaataacatgcgtggagtggttctacgtgtagtaactgttctggaagaaccttttgtgatggtctctgaaaatgtcttgggtaagccgaagaaataccagggcttctccattgatgttttggatgccttatctaactacctgggttttaactacgaaatttacgtagcaccggatcacaaatacggaagcccacaagaagatgggacatggaatggcttggtaggagaacttgtctttaagagagccgacatagggatttctgctttaaccatcactccagatcgtgaaaatgtggtggactttacgacacgttacatggactactcagtgggggtactacttcgaagggctgaaaagacagtggatatgtttgcctgtcttgcaccatttgatctctctctatgggcttgcattgctggcacagtccttctggtgggtctactggtctacctcttgaactggcttaatcccccacgattacaaatgggatcaatgacgtctactactctctacaactccatgtggtttgtgtatggatcttttgtacaacaaggcggggaagtcccgtacacgactctggctacccgaatgatgatgggggcttggtggctatttgctttgattgttatctcatcttacacggcaaacctcgctgctttcctcactattacacgcattgaaagttccatccagtctctccaggacctttccaagcaaacagaaatcccttatggcacagtcctagactctgcggtatatgagcatgtccgcatgaaaggactgaatccttttgagagggacagcatgtattcccaaatgtggcggatgatcaaccgaagcaatggatcggagaacaatgttctggagtcccaggcaggcattcaaaaggtaaaatatggaaattatgctttcgtatgggatgcagctgtattggaatatgtggctatctatgacccagattgttccttttacaccattggaaatactgttgctgatcggggatatggaattgcattacaacatggcagtccttaccgagatgttttttcacaaaggatcctggagcttcagcagaatggtgacatggacatcctgaagcacaaatggtggcctaagaatggccagtgtgacctgtactcgtcagtggacacaaagcagaaaggaggcgccctggacataaagagctttgcaggggtcttttgtatcctggctgctggaattgtcctctcctgcttcatagccatgctggagacgtggtggaacaagaggaaaggctcccgggttccatcaaaagaggatgacaaggaaattgacctggagcacctccatagacgtgtaaatagcttgtgcacagatgacgacagcccccataaacagttttccacctcgtcaattgatttgacccctctggacattgacactttgccaacacgacaagcactggagcaaatcagtgatttcaggaacactcatattaccacaacaacctttatcccagagcagatccagactcttagccgcacactgtcagctaaagctgcttctggtttcacttttggcaacgtgcctgagcaccgaactggcccttttaggcacagggcacctaatgggggctttttcaggagtcctataaaaacaatgtcatctattccttatcaaccaactcctaccctggggctcaatctgggtaatgatccagaccgaggcacctccatatga

SEQ ID NO: 253371 - DNA, 863 bp, Homo sapiens
atggaagttttccccttgctcttggttttgtccgtctggtggtctcgaacctgggactcggcgaatgcggattcgatcattcacatcggagcaatttttgatgaatctgccaaaaaggatgatgaggtatttcgcactgcggttggtgaccttaaccagaatgaagagatcttacagactgagaaaatcacattttcagtgacgtttgttgatggcaacaaccctttccaagcagttcaagaagcctgtgaacttatgaatcaaggcatcttggccctggtcagctccattggctgcacgtcagcaggatccctccagtctttggcagacgccatgcatatcccccacctcttcattcagcgctcaacagctgggaccccaaggagtggctgtggactcacccggagcaacaggaatgatgactacactctctcagttcgcccacctgtctacttgcatgatgttatcctaagagtggtcacagagtatgcctggcagaaattcattatattctatgatagtgaatacgatatccgtggaatacaggagttcttggacaaagtctctcagcagggaatggatgttgcacttcagaaggtagaaaacaacatcaataaaatgattaccactctctttgacaccatgagaatagaagaactgaatcgctatcgagacactcttaggcgagcgatccttgttatgaatcctgctacagccaaatccttcattactgagatgtcgttttagaaaaacacttagggaggaaagaatgtgagtgatttttgttttcatgccagagcacagacacttacgtgacaattggagtaaataaagtaagctttgactactgttctctaattcat

SEQ ID NO: 253372 - DNA, 240 bp, Homo sapiens
taggtggcttgcaaagagaaacaagtcagacgcatactcttgacgtggaccccagctctgaggactcccagaccagtgctcttggctcagcaactaggctccagttggttacgtcactgacggctccacagctctcccccaatatgagtgatcgtgtgcccagtatcaggagtggaacagcagctcctgatgggagcctatctgtctccatagcccttgactggtgaccctagccacact

SEQ ID NO: 253373 - DNA, 421 bp, Homo sapiens
tggatttctttttctgaaaataaattcttcacacacactgacttgtcttttgcaatccaatgtaaaagtgggacatcttcttcagaagctttgaaacatacaaattagcctcaaacttacctaccagacttccaggctagaaggctgattcatgtaagaaggactaagaagacacttcacccatatcctgggtaacaggaggggatcctttagataggtttgtacaccaggctggcaacctacactttcttctagcagtgagaggtactgagatccgtcaccccctcctgcaaggccaagacccagagagagccaaattttagcctagaattcagccagctcttcacagtctcccatgttttacattttcctccacaatcatttactttgaaagacttcaaacctatagaaaaattgaaaa

SEQ ID NO: 253374 - DNA, 415 bp, Homo sapiens
catctaggtttgtgtaagtacactttatgatgttaacacaatgatttaattatctaataatgcatttaccagaatgtagccccatcattaagtgacacatgactgtagttgatatttttattttgaaattattttctatttgttagtagaatttatgttccaaccagataacaatgtaaaatatcatgagttaattatattccttttattactaccagtgaaaagaagacacagggttaggtctttttaaaggtaaaaggcaagcctctgttctgtgggttcacagtttgaaaaaaatctatttttgctatttgagataccatgtagacagtgatgggttcaatatagtcataacagtcatgatgagttgtgttctattaatgagttttgagcttattaaatttatcttttctaa

SEQ ID NO: 253375 - DNA, 757 bp, Homo sapiens
cctggtcagtgccccagacgctatggctattatggcagccgggccccatggccttcgaccttcaggattctcctgcttcctcctcagcatcactcttccctttgccaccatcagtggtgacaccagcacagatccacacggctctgggccacctccgcctccaactgaaccaagagtgcaagttcatgatgccaaattcagggcacagataaaccaaaccaacacattcaacatgaacatgcaaacgctctgctgtgatgtcagaagaggcctaacatcctacgcttcagcatgcaacagacaagattccactgcaacaaactgcaaaggagagcctatgtttatttgcactggatttgcagggaagctgctggaagtaagacccttgacccaggcatcttctcatgaggtttttgtcattgctgcggctgttgttaagtgtgcctgtttcaggcagtaaaaaaaaaaaaaaaaaaaaaaaatcagctttattacttgagctcagcccaccaatatgcttcagtatgttccgacatcctgcccatggctagattatgtgacccaacccccatatgtcagtgctgggcagaggaaaaataaaagcaaacaagactgtccctgctgtcagtccaggtctcaccagagagtgagacacataagcagacggaaacggatagttcccaggtattagagtagaggaacacaaaacataggagagaaagggatcctttggactcccccacattcttcagcaact

SEQ ID NO: 253376 - DNA, 437 bp, Homo sapiens
tcttctttcaaagtcattaccacctacatgccagcggtaatgaatttcacaggctggcctgaaatgcttactccctcgaccttgccagccttggttaataggatgttaaactaatctgtgaaaaagcaaattagtgggctcttgcacccactacattagcttgtacttgatctttaaggaatcattgctgttgaaattattgttgctgctgctgctaatttttttctattccgtattctactacctgatggatatctatagccaggtaaatatctgtatatagagatctgtatctatctgtaagcagatacatcgaaccacacaaaattgacgttttgtaggccaaatatgcccaagtaacaaacttcagatggcatagcctaatatgataggatctggaattattttttaataaaatcttattcccaaaagagcaa

SEQ ID NO: 253377 - DNA, 394 bp, Homo sapiens
gaaagcagctgtgtagctatggccaaattgaacttcttgagtcggtgtcctcgcttgtaaaatggacaattctactgaaggaaattgaaggtcttaccgactccatccaaggaattgacaagagatccccaagaaggttgcatagagcgagttctgggggctggaaattcaacatcaaggcacaagcagatcagcagattcagtgtctgttttctcccccagaataacatcaatagaactcccagtgaaagaacgtcttcctaaggcaattctgaagacaaaaaagcaacataagaacacacttcccaataatgtgaagatctatgactgtactaaataaaaatgttcccttaatgtactgtaaaaaataaagatgtttggctagatttatcaa

SEQ ID NO: 253378 - DNA, 699 bp, Homo sapiens
gcttgagttatcacctcctccaagaggaggtgaccaccatatctaaagttgccacctctcctgccttactctccaacagaatataacagttttaaatttgttttttcacttaccaacatatcatgagcaacattccagattgatacatatgtatcttcattgtaatttttattgtccataatttcataatctccattttcaaatggacccttaaaactgcccataatccttctgtttcttcaaaatctttaggttttctgcctttggtgtccaatctctttgtaaagtggccccctctgagaagatctgtgttcccaaaatcaagctgttgtgttttcttttcccttatctggtcaaaatctttcaccattataatggaagacagatcttaagactttaatagattcaatctttttgaaatagagaataaatgacttaaatgcacaaacagattgattcagaaattagcagccagtcaggccaagatatcaacatataccacctatttgcatgttgaatgctttttgtcaatcaagaaccactgcacttcagcctgggagagacagagtgagactccatctcaaaaataaaacgcctacaaccaacaaactcgagggggggccccgtatcccaatttgccctatagcggagccgattacaaattcactggcccggcgcttaacaacgtggtgactggga

SEQ ID NO: 253379 - DNA, 728 bp, Homo sapiens
tcccccgggctgcaggaattggcacgagagagagagagagagagagagacaggaggaggtgaccaccatatctaaagttgccacctctcctgccttactctccaacagaatataacagttttaaatttgttttttcacttaccaacatatcatgagcaacattccagattgatacatatgtatcttcattgtaatttttattgtccataatttcataatctccattttcaaatggacccttaaaactgcccataatccttctgtttcttcaaaatctttaggttttctgcctttggtgtccaatctctttgtaaagtggccccctctgagaagatctgtgttcccaaaatcaagctgttgtgttttcttttcccttatctggtcaaaatctttcaccattataatggaagacagatcttaagactttaatagattcaatctttttgaaatagagaataaatgacttaaatgcacaaacagattgattcagaaattagcagccagtcaggccaagatatcaacatataccacctatttgcatgttgaatgctttttgtcaatcaagaaccactgcacttcagcctgggagagacagagtgagactccatctcaaaaataaaacgcctacaaccaacaaactcgagggggggccccgtatcccaatttgccctatagcggagccgattacaaattcactggcccggcgcttaacaacgtggtgactggga

SEQ ID NO: 253380 - DNA, 691 bp, Homo sapiens
ctattccattatcctccaaaaagagcacttagtttacagatctacagtttaagagcatgcctagtctactcactactcatgtggtcgagaggtttatattctaaaggatgaacaataataccccatttcattgatttctattagattgggcatcttaacatacctttattgatcacttattttttattatttgatttgactatccaaaacttctgaccagctgaggcaggaggattgcttagcccaggagttctctaccagcctggtcaacatagtgagaccccatctctagaaaaaaattttaaaaattagcttagcatggtggcacttgcatgtagtctcagctacttgggtggctgaggtgagagaatcgcctgagcccaggaaatggaggctgcagtgaggcatggctacaccactgcactccagcctgggtgacaaagtgagaccctgtctcaaaaaaaaaaaaaattatgtgatcaattttttgggtagttgtttgtcttttatatggattggtaacatcttcttagatatcatggatatcagccctttattgcctatgttgcaatattttttccaatttattgttaacttttaaactttttaatggtattttgtttaaatttttgtatattcaaatctatctgtattgttatgttttacttcattgttttgtgtcttatggacg

SEQ ID NO: 253381 - DNA, 315 bp, Homo sapiens
atcacacacaatgggatattcaatattcaatagcacacagtgtgccataaagtgagtgataatcaattgtttttcatctcttccatcccagacacaaggccaatccagatgaactgctgttgccacagtctctttcagtgatcttaagtctccaagcccagctcctttgaaaatacggtcttgcctttttatgggacacccactattacagacagaagacatgaaaccagtcaggctgcctggtaaaacgtcactgaagatcagtctctaggaaggaggcaaagctgaatgtgctacaaaactattatttgtcca

SEQ ID NO: 253382 - DNA, 570 bp, Homo sapiens
cctatggcagatagcaatgggcatctgtgcagtctaattgtagtaggcaaagttagccacatcagatacaattttaaattcacctttaggccaattttttccctaatgtcctaacctaatgtctctccagtcctggatctctaggcccagactactgggttaacttgccttagccagagatctttattttgtgagtgacaaaacccaaactcaaacaagcttgcataaactggagagctattggctttcacaactgggaatgacttgggaggcttggagaactgaaggaagagttcctgaccccagggacctggggatggaaatgagggaccctacctggcaggaccttctctcctctccacttgccaggttttattttgtagacaggtgaccacataaggcaggaaagatagtcatctgcaacccagaacctgcctccttgtatcttaggatcccagaggaaaggagaacaactctcctcccactttgatttgggaaatttgggggaaaggctccagttggcctgatttatgttggatgcccacctcttggaccagttcattcactgtc

SEQ ID NO: 253383 - DNA, 388 bp, Homo sapiens
acagattcattgcctttctatagactacgaacaatccaaacaaaactaagacgccattcactagcatggaaacgagaacacacacttaggagccaccttggtgaaggaaactgaagatttatacactgaaaatacgagacattgctgagagaaatggaaagacagcccacgttcattgggtaggagactcctattaagatttctgtctccccagatgggcccatagatcccatgaagtccctattaagatcccatcagcggccagacacggtggctcacacctgtaatcccagcactttgggaggcagaggagggcgaatcacaaggtcaggagatagatagagatcatcctggctaacacggtgaaaccgcagctctactaaaaatc

SEQ ID NO: 253384 - DNA, 324 bp, Homo sapiens
tcttgtagccagactgtaagggtttgaatcctgactctaccacttaatgactgtaggcaaattattttacttttctgtggctcagtttccttacctgtaaaagggggatgtaataatggtccttcttgatagaattgatgtgaagattaaatgagtttgtacctgtaagtgcttagaatgataacctggcaataataagcactcaggttgggcatggtggcccatgcttgtagtctcagctcctcaggaagctgaattaggaggagcacttgagcccaagagttgaatccagccttagcaacatggcaagacctgtctctttaa

SEQ ID NO: 253385 - DNA, 204 bp, Homo sapiens
cctgttctgttctgttctgattactggtgcatgcagcccccagtcatgtaccccctgcttgctcaatcgatgacgactctgtcacgcagaccaccttagagctgtaagcccttaaaagggacaggaattgctcacttggggagctcggcttttgagacgcaagtctgccgaagttcctggctgaataaagctccttccttcttt

SEQ ID NO: 253386 - DNA, 423 bp, Homo sapiens
tccgaactaaccctattccttgggaccagaagacccagtttctaccgcggatagatagcatccgccttatgctaaaagctcttttttctgcggtggtggggggcggcggggagtgtttggaaagaacggttgcaaaaacaaaacaaaacccccaaaaccactcacccaatctcaaccaccccaactgatgaatttcgaagaaagtgctttttaaaaaagaaaaaactagaagaccacagacctcccacagaaagctaaacccatgagagtggcattcaaaaactacccattttctggaacatcttttgtagctaaatcccagccatcctagccccggaacactcccgccctccgtccccgcacccccacccccgccgccacacgcgctcgcaggctgacggaggttggcggtggggcggccgc

SEQ ID NO: 253387 - DNA, 416 bp, Homo sapiens
ttgtagagcactttttccttgtgatcaccagatgtactaagagctgattcacgggcttcactcaggcgtttggctgctggcaggtattgtggatcgtcgttgttctccatcgagtgcctctgattttctgttgccattgtattttggcattagactggtggccagtggtgtcatttgatgtaggaattctgtcagtaagctcttctatcttctctctgaccgtagcctggttcatcagcctttcagctgtttttaggagcgtctcagagtgggatctgttttttaaaactctgaggagatttttaaacctctaaggagaacaattttgaatggtgcctgtgtaactcagggttcttctctttctttcctgacaacattcttaggtttatagaagaaattaattgtgcttgttctgg

SEQ ID NO: 253388 - DNA, 351 bp, Homo sapiens
ttgaagagaagaatgacgtcaatgcaaataaaggataataattatgatctcagggcaaagaggaggattagaaaatcaaaatttttaaaaaactgattatctagagagcaatattctgggaatgcaaatgtttctattgttgaaaaaatgtaccctataatcaagaaaagtaggtcaatagttcctatggccttaaagaattctacagtcttacgattttattctctattattccatgcttaaatagtctaatctattgatttgtctgctttttataacaggaaaagagaaaaaaaacacattcacgaatattctgcaaaataaacacaccattattcactaataaattgt

SEQ ID NO: 253389 - DNA, 1147 bp, Homo sapiens
tagctgggactacaggcgggcaccaccacacctggctaatgtttgtatttttagtggagacgggatttcaccatgttggtcaggatggtctcaaactcgtgacctagtgatctgcccgcctcggcctcccaaaagtagaatgttagctttttaaagatgttgggttagacgaatgttttacagagagagagatcatatacccctaagttactgcttttagtgccctcactcagatgggaatggaagaaaattacaatggcttccatttattgagcctttgtgtgccaagcaagataaatggggtgggacatagttaatatgaggcattacgtgaccaaaagcctccaaaaccatatggtaaacgctgaagaagttaagaggaattcctcactgtatcctcaagtattcaggaaagatttaggaaagaattggaagttgcactgaacctcagagccaaagactagttagtatcctaagcaaattaaggctggaacagaaaaccaaataccacaagttctcacttataagtgggagctacacattgagtacacatggacacaaaagaagggaacattagacatcaggtcttttttaaggatggagggtgggaggagggtgaggactaaaaagctacctatcaggtattatgctgatgacttgggtgacaaaattatctatacaccaaacccccaagactaacaatttacccacataacaaacctccacgcgtatcccttgaacctaaaataaaagttggaaaggaaaaaaaaaaagatttctgtagggagtttatttgagcaaaatccagagggaacataagcttcaagagacagggagtgggccagttagtttgagagaagcaggcagttttagatagaaaatagtgagaggtaagataggttgagggtctttggtactatgaaatgatactatggaatgtgctgaatcttaggttaagtagtttggatactgtaacaaaggtaaatagatgggctaaggtttgagggtaaactagtctgatctatcacttaccctgtaaccattcagttatgtgactttggctaagttacttaaccttttaaaaaaatgtaatcagttttattatcttaaaatgggaataataaaacatctttctgttgtagtgaaa

SEQ ID NO: 253390 - DNA, 374 bp, Homo sapiens
tcgtttgcactgtgaagtggagttaatatatggatgttactgtcagccagagttctcactgtggaagaagagaggttcaagtatggcatagggggccgggcatggtggctcacgcctgtaatcccagcactttgggaggcccagatgggaggatcatgaggttaggagatcgagaccatcctggctaacacggtgaaaccccgtctctactaaaaatacaaaaaaattagccgggcgtagtggcgggcacctgtaatcccagctacttgggaggctgaggcaggagaatggcgtgaacccaggaggcggagcttgcagtgagccgagatcatgccactgcactccagtgtgggcgactgagcaaaactctgtct

SEQ ID NO: 253391 - DNA, 278 bp, Homo sapiens
gagcagaaagcttatttcagggaatcaaaggggcagcaagaaaaaaatgcgaaagacaattaagaaagagaaatacaccctcagcttccaaacctgcctggatacctacgttgagagtgtatcacacacttcaaatgtttgacaaaggtcccagcactaagagggctacgtcagaccaccaagatcctgggcatacctggaagaaacttcaggtttttcagggtcttcagaataacgtgtttacaaagataaataaatttcccctttgctattgacta

SEQ ID NO: 253392 - DNA, 391 bp, Homo sapiens
cacaagtaagacttgtaaaattctctagcccataaagagtcttacaattttctctggaactgcaaaataaattttagacttatcattttgtcatttaaagtccccagatctagagccagaatacttagggatgctggcagagttgcaggaaaaaaaacttctctcccaaggctttgttctgttccagcgagcctgccagttctgcctgtacatccagtgaggggttgtgtaatcccaacacttctgggagcctaccaaccctagaagagcctgtctccaactttaacctggcctggcaggtcccccaaacaaagaaccacttcattgtctgtagaaccagtttggaccacattctgctggatttaaatctataatccacccacctacctgg

SEQ ID NO: 253393 - DNA, 478 bp, Homo sapiens
ctaccaataagagcagggtgctacattgggtgctcctgttctcgcagagtttacagctacaccattacatgaggactgctcccaggtttgctgtgtttaaatgattgacaaggcagaaactttgtcttttcttcaactgattggcactatctacttataacttataacttagcttatttttcactcccccccaaggagagtagagtccagaatggccggtggtagtctcagagtagaagagttgaggtgtcataagataacgacacccttgaatttatttctcctatactttgcttcataaaagtgagcacaaggacagacaggcagaaaatagtagatcactatgtgaggctagagagagtcctctttcaggttcaacaaaggaaagacagaagaaaagtgaataaggtacataaatataagaacataagtgtagacaggtagatgatgaaaaatgggagaaatggaagacgtaaca

SEQ ID NO: 253394 - DNA, 382 bp, Homo sapiens
tttttttacaaaaacaggctgcccataggccatagtttgctgacccctgagatacaaacaaaaacaacaacgggccaggcgcggtggctcacccctgtaatcccagcactttgggaggccgaggcagtggatcacttgaggtcaggagttcgagaccagcatggccaacatggtgaaacctcgtctctactaaaaatacaataattagctgggcatagtggcagctacctgtaatcccagtgactcgggaggctgaggcaggagaattgcttgaacccaggaggcggaggttgcagtgagccaagatcgcaccattgcactccagcctgggtgacagagcgagactccgtctcaaaacaaacaaacaaacaaacaaacaaac

SEQ ID NO: 253395 - DNA, 458 bp, Homo sapiens
cagtgatgggtgatggaagatggaagatggagccagaaggtaaaacccttctggaaagtaatattttaggccagaatctaaaagtgagtaaattcaggtgagtaagagaatggaaacaagtatcctaagcctagcaaatgccacctgccatggccaagagagtgctatggccagagtacagggaagacctcagaaagacaggcaaggagttgggtggagaagacaaagtgaacctaggcagtgcctacaaatttgtgaaatgttattttgaatatccccaaagatggcaaatctttgttttataaaggtgattattgaaagtagctgaatgtcatggagcccaaactgatgaaccatatgaaaaataatctgaaagagtgtcttttagcccaaaacaagatttaagttatgaaataacaacataaacattttcttataaactggctctgaagtaaccc

SEQ ID NO: 253396 - DNA, 502 bp, Homo sapiens
tgggcccacactccccaagagctacatggttgtggggccgtgtggagtgaagaggtcaggaggagaaccaagtcaaggcagaaatgggatgagttacaccatcaaacataccacatgaagcatcgtctcaaatggatttccagtgaattaagaaaaacttggatataatatttcttgtatttccactgagctcataaaagcccaggttttagtctgaaaacattgcagatagtaagacagttggaactgaactgactgcctaaggattgcaccgagctctgccagtacgggcacagggtggaaaatgcatgcacttcagaggctgctggcctagggagtcagaaacaactggactcaaatcccagctccaccttaatagctatacaactttggagaagttgttcagtctttctgaacctcagttttctcatctctaaaatggaataacaattcttcagagttgtactaaatgagtcaataaacgtaaaagaatatattaaat

SEQ ID NO: 253397 - DNA, 119 bp, Homo sapiens
aaaaaaaccccaaaaaaaaacaaccaaaaaaaaaccttatttatgtaaccaaataccacctacctgttccccaaaatcctactgaaaattaaaaaaaaataaaaactaagaacaattta

SEQ ID NO: 253398 - DNA, 397 bp, Homo sapiens
gagaaatcccctaaatagctcataacatacagtgtacttggctctgtgcatgtgagcctatataataatatatttgtagctgggcacagtggctcacgcctgtaatcccagcactttgggaggccgaggcgggcggatcacctgaggtcagcctggccaacatggtgaaacaccatctgtactgaaaatacaaaaattagccgggcgtggtggtgggcgcctgtaatctcagctactcgggagactgaggcaggagaattgcctgaatctgagaggcacaggttgcagtgagccgagatcacaccattgcattccagcctgggagacagaacgagactttgtctcaaaaaatgataattttatgtttgtaacagttacagaaatttgctgcatctaa

SEQ ID NO: 253399 - DNA, 341 bp, Homo sapiens
cccccagtaccagaggacaggttttcagcagtgcaatttcacttttcatgagcaattaatgattttctatggaacaaaactaaaaaagtaggttaaaaacaaacgagttccagattgtgggtcaagaggggtcatttccaaccctagatgtgcaactctttgtctgtgtgatgttgaggaatccatgttaatctctgggccctgcttttttcatggattgtactgaggtttcctgttttgtgtcacacagcttataagtgacagagtcgaccgactgcaagtttctcatggcatctccttgtacttacacatttcctaatccattgggagatgccagtgca

SEQ ID NO: 253400 - DNA, 426 bp, Homo sapiens
tagtagtggtgttctagcttactttctgtgtgggcaggcaggcacggtaatttatcccctgcacgactaaagatcacaagggctaatgctgtgtaaaactgtgaactcagtgaaggtttttctctgttagccccatctttctccatggtctacccactgatggtggccactccctccaattcaggtactccctccaattcaggtactccctctcaccatctgctttctaacttcctctctgatgccttgactgaggcagtgtcgtgtcacaggaagagcacaaacttggaatgatctgggcttgaattccatctctgacttttactagcctgggaaattgtgggaagttgctttctttccttgagcctgtgttcctacatatgcaaagtggggctaataaatgccagctagctgaaaaatctatga

SEQ ID NO: 253401 - DNA, 329 bp, Homo sapiens
aattcccgtgatataatttgctgatagagctgactgagtatttcacaaagtgtggtcctgtgaacactcatccagcagagggatccataaaaactaaacaagcatgggaagcccagggacttctgtccccttcttggagaattactgtgcacattaagggctctcaaaggatccgcaatctgcagtaaaagtctgtttcactttgtttgccctcgtgtttcccaaacatatttgatcacttaaccctttttctttggggaaggtaggtgcctatcaatcattaggtagaacagttagagaaacaatataaacaacacttgaaataaaaa

SEQ ID NO: 253402 - DNA, 415 bp, Homo sapiens
tcttattttgttttattttgctttctaatagaattggaggaaataggaagtatttaaaaagtgtttaaatttaccatcaattattcctgtatagttctctatttttaaaaatatgcccccaagttttgaaattctgattcaatacggactttgaaaggatgtgaaatttgggagcacgtattgctgttactaagactgggggctgtgagagggcttggtgttcccccaagcagtcaggcttgcagagagaatttgtgtcctgctacggtcttttgtaaaggaagctagccccacctgttgttcaaattcattttgcttgcgtgaaagaggaatgctgtccctggaaacctctgtccaagtgcctgttttttctgttgtgggcagcattgcaaaagtgatctgtatcctctcagaa

SEQ ID NO: 253403 - DNA, 486 bp, Homo sapiens
ccatcacccaagcagtgtacactgtacccaatgtatatttatccctcacccccctcttatcctttcccccgagtcctcaacacccattgcattattcttatgcctttgcatcctcatagcttaggtcccacttatgagtgagagcatacggtgtttggttttcgattcctgagttacttcacttagaataatggtctccaaatctatccaggttgctgtgaatgacattatttcattcctttttatggctgagtagtattccatggtattccatggtatatgtatgtgtgtgtgtgtgtgtatatatatatacacacacatatatatatgcatatatatacacacacatatatatgtatatatacatatatacgtatttacgtatatatgtatatatacatatatacgtatttacatatacacacacattattccatggaatacttttatatatatatttatattttctttatccactcatcgatt

SEQ ID NO: 253404 - DNA, 367 bp, Homo sapiens
cccaaaagttccgagacaccttgtctaagccctttactcacagtccaatgtgatttaaccattcaaattttttgtttttgagaatgggctttgctcttgttgaacctccgcctcccaggttcaagcgattctcctgcctaagcctcccgagtagctggcattacaggcacccatcaccacacctgactaatttttgtatttttagtagagacggggtttcaccgtgttgcccaagctggtctcaaactcctgacctcaggtgatccaccggcctcggcctcccaaagtgctgggattacaggcataagccaccgcgcccagcctcaagtattcttttatagcacttactttgtgtcaggtaccattc

SEQ ID NO: 253405 - DNA, 722 bp, Homo sapiens
caaagccaattccagaggacttactattaggacaaaacccctacatgtcagcaaagtatccgactgcttaagagggaggcaaagagataatttttctggccagagtgaacattcaccctctctcctggttccagaaaccacatgcatcaagttggaaacaatggaaggaaatcatttcgagcatcagtgggccagttgaggctacatttggccaattttatcagtgtgttttctggatgagtgccataggagatgggtctttgcttgggcacattcccaactatttgctcgtctttgacagggtctaaaaccatgaggctaaggatgcaccgagaagcaagcctgacttcaataactagccattcacttctgtgccaatttgtgcacggggcagtaacaaactccggaaacagatcagtccaactgagttgctatctaaacctcatcaagccggggaagggatttagtgtttaacagaagagaagtcttcaatgctttattgttaaaagaacgggccagagtaatttaatgatcatataacaaacatgccaagcaataaactgacacatatcaagaggatgcctactttagtacaggctttttattttctaaaacttcctgactagattaatatttgaagtttacgcaagtttaacacagtagtgtcatctacagcagcacatacagtatagtcctatagttctattcttggatatactgat

SEQ ID NO: 253406 - DNA, 366 bp, Homo sapiens
gctgcttcctcatccatgcctttccatttcctgaatttatgaaaaagccctgccataagatggacattgtaagtgtaaaaggctggactctggaattgaacagacctgagtttcagtctgcacctcatgggcaagttatttaacatctccaacctcagtttcccactctgtaaaatgaggataacagtagtaccacaggggtttatgaagattcagtataataacacgagaggtgttcctggtaatcatttagtaaatggtagctgttattttgattattacctgattggattatttgttgtaagaatactgctaaataatgaactctagtgttttaaaatataaatgcatgtttaaaacaattaa

SEQ ID NO: 253407 - DNA, 692 bp, Homo sapiens
gcttgttggggcagatttatctgcctcactttccataactctctgcccatcaggttgctgacattgatagctctcccagtaaggaggaggaggaagaagatgatgacaccatgcagaataccgtggttctcttctccaacacagacaaatttgtcctaatgcaggtaccatacagtgagacctggcacactgaacattgtgtatgtgtgtgtttggtgagaggatagatgggaaaactggacctacttttggggatacccagctaatgagaaaacagaccatgaattctaatcatgttattcattggtttgtccatccatcacatttctcttgagtatctcttctgagctcggcactaagctaggagctagagaaatagcagtgaaaaagtctttgccttattgaactttatagcttagggaacttacatgtgtcctcacttgaataatcttgaagctgatagaattttgtcacatatgtgattctcacctgaccagtctttactccatcttatcttcctttaatttcttcttaacttcacccatgtcaggctttataaattcaagtgacctgattaggtgagtacaggcactcctaggaaggagcagggtcccttggtaccttacagcatcctaagcgctgtgagataggggttcctgactctggtcgcaaaatcagtgcttgacagataa

SEQ ID NO: 253408 - DNA, 249 bp, Homo sapiens
tggcaaggtggaaatcaggacaataactacttattacataaaaccaaatatgatactgatgactcactattgtgcgatgctgggacagctatcagcggaggcaaagctgagggggagaaggggcggcggcgcagctccccagcccgttcccgcatcaaacaggtgaggggctatctagctgcgggatgtgattagagttagcccactgtcagaggtacagtcctgtgtcactgatactttcccaccttg

SEQ ID NO: 253409 - DNA, 593 bp, Homo sapiens
tggcaaggtggaaatcaggacaataactacttattacataaaaccaaatatgatactgatgactcactattgtgcgatgctgggacagctatcagcggaggcaaagctgagggggagaaggggcggcggcgcagctccccagcccgttcccgcatcaaacagggtcgcagcagcagtttcccaggaagacgccggcctcgtggaggagcccatggaggacgtggtagaggacgggcccggctaaagtcaactgcttcttccattgagactctggtagttgctgacattgatagctctcccagtaaggaggaggaggaagaagatgatgacaccatgcagaataccgtggttctcttctccaacacagacaaatttgtcctaatgcaggacatgtgtgtggtatgtggcagctttggccggggggcagagggccacctccttgcctgttcgcagtgctctcagtgctatcacccttactgtgtcaacagcaagatcaccaaggtgatgctgctcaagggctggcgttgtgtggagtgtattgtgtgtgaggtgtgtggccaggcctccgacccctcacgcctgctgctctgtga

SEQ ID NO: 253410 - DNA, 345 bp, Homo sapiens
cctgcattatattcttaagcaaagccttccctgacccccagtgcccatgtaagctcaccacagcacttaccacctagaatttcaatggtggttacgtctctctccactacgctgtgaacagcttgaggatagggaatttgccaactctgttatggtccttgcacccagaataggacgttcttgcccaaacccaccattcttgggatctcaagttcataagcgtcctgttgaaggccctcattcttatagttagccctggggagtccagttctgttaagatgctttcatcaaaaacttcacagttgctcttctgtgctctactctgtagttgggccacactgagca

SEQ ID NO: 253411 - DNA, 711 bp, Homo sapiens
tttggccctaaaatttatatgaaatgaaaaggaaccagaataaaaggatttcgaaacagaaaaagatggagaacttccactacctgaattcaaaacttattataaagctacagtaatgaagactgtaatactggcatagaggcagatatatcgatcaatggaatcaaatagtccacaaataaacctttacattatggtcagttgattttcaacaatggtgctaaaacaatccatggggaaagggtaatcttttcaatgaatgatgtgggagggaaaaaaaagaactttgattcttacctcacatcacacataaaaattgatttaagtggatcatagacctaaatataaaagctaaaactataaatttcagaagaaaaagaggaaaatcttttgatattaagttaagcaaagtttgcttagatatgacgctaaaatcgtgatctataaaagaaaaaattgatagttgacataataaatttagggttgatgcatcaaccctaaatttattaatgtaaactggtaattggtgttaaaaagcataactaataatttggtttctttcttcataacacggaaatttaaatatttctcctgatggtcttgaggttatcaccgttatgagtagtgcacagtgcggcacatatggttccatctggaagggtgtgtctcacaccttatacaagacgccagtaacaaatgcatcatacgtca

SEQ ID NO: 253412 - DNA, 613 bp, Homo sapiens
tttgcaaacagttaattgttcttatgtcattggatttgttgtgccaaatcaaaaggaactaacagaactaacttgaaagaaaggacttacaggaacttgagagtagctctctaacagttgtgaaacagaagatgaggtgcagtagtccccctttatgtgaggtttcgctttcttgggttatacctacagtcaaccgtggtccaaaaatgttaagatattttgagagagagagagagcacattaacataacttttattatagtatgttataattgttttattattgttgttgttaatctcttactgtgcctaatttataaactttatcataggcttgtatgtataggaaataaacattgtatagggtttcaggttccaagactgggggtcttggaacatatcccttgaggataagaggggactaccatacgtaaagtactttctgaagctgctatttgggcgtgtctgaaaaagtttgaaaatctattaaaaattggtttgagccctgacccatgaatcctgaaactggtctggtgacaggtgccttcaagctaaaaaatgatttttctcttttggcatcagtttgctacagtgagttcaaatcaaataggaaa

SEQ ID NO: 253413 - DNA, 560 bp, Homo sapiens
tttgcaaacagttaattgttcttatgtcattggatttgttgtgccaaatcaaaaggaactaacagaactaacttgaaagaaaggacttacaggaacttgagagtagctctctaacagttgtgaaacagaagatgaggtgcagtagtccccctttatgtgaggtttcgctttcttgggttatacctacagtcaaccgtggtccaaaaattatgttataattgttttattattgttgttgttaatctcttactgtgcctaatttataaactttatcataggcttgtatgtataggaaataaacattgtatagggtttcaggttccaagactgggggtcttggaacatatcccttgaggataagaggggactaccatacgtaaagtactttctgaagctgctatttgggcgtgtctgaaaaagtttgaaaatctattaaaaattggtttgagccctgacccatgaatcctgaaactggtctggtgacaggtgccttcaagctaaaaaatgatttttctcttttggcatcagtttgctacagtgagttcaaatcaaataggaaa

SEQ ID NO: 253414 - DNA, 505 bp, Homo sapiens
acataggggattatattggttgcatgtatgtagtggcagggatatcctggattttattacatttttaaatatataatcttatgttcttgtttgttgatatgaaaaattaacattcttagaatgcggggaagctttagaagacataactctttagccatgtggctaaattttgtgtagttttcatacagctttgaaaggttaaatgagaaagtctctggcagtaacagcatacttttgatgctattgttaattagttttcatcagcactaccaatgaaagctatctgaacacccaggttccatctttaaaatgaagttacaactagacctgatttttaaatttggactttccttaatttggtttaagaatggtattgaaaacgaaaggataatgcattttaactttacctttgcctgcttttaaatacaagacaaatcttgacaatgaactcttagttgatctcaagttgcatcaaactaataaatgtgagtcaatgataaaattg

SEQ ID NO: 253415 - DNA, 417 bp, Homo sapiens
ctcaaaaaaatccaaaatttaacaattagctggacgtggtggtgcatgtctgtagtcccaggtacttaggaggctgaggtgggaggattgcttcagcccaggaggttgaggctgcagtgagccatgatggtgccactgcactccagcctgggtgacacagcaagatcctgtctcaaaaaacaaaacaacacaaaacaaaaacaaaaacacccccaaaacttaaagtgatggtatgtacttcatgttgcatcccattaggaggtacattatttcagttgctcacttgtagtaaaggtgatggttaggttgatggccctcagaactctccatgtaattttcctctttgtaattaataagaaatctgtgggatgttggctgggtgcagtggctcatgcctgtaatcccagcactctggga

SEQ ID NO: 253416 - DNA, 2922 bp, Homo sapiens
  misc_feature (407)..(409): n is a, c, g, or t
  misc_feature (414)..(414): n is a, c, g, or t
  misc_feature (427)..(427): n is a, c, g, or t
  misc_feature (432)..(434): n is a, c, g, or t
tatttttattgaggctaatatattatcctttggtgccatgagtggatgaagaaactttcagaaggctaaacgagtggatacaagaaacttaggcaaattattacaccacaggggtgtgagaaataatgaatattctctactaggtttcagcaaacataatccaagctgatcaatttaggacacttccactgaagagacgtgaagtgtacgttcaactgaagtgtcattgtaattgtgtgccttctcagttattgggcaagttaaagagcatgatgaatgtttgtactataatggtgtaaatccttctgatttcttgcatggaagacatgtggcatcatgtagaacctgctttgacattgattctcaattgtatgagttgctcctctgattttagatcacatttgtcnnnatcanttggatatccaantgatnnngacacggttttattttagttttagacatatgacaaatcatgccatgtttgaaattgtaagtatattttgtgaagcctgtattcacctttttcagtgtatttctgtcatattccagtcccgagtcacaaagtagaaaacatcaaagcctatactaatacaggcaggaagatacatcttgatgccaacagtgcaggaatgtatggataactttatcatatttacatatgagtgattatgtatcccttttgcttttcagtgtcttctcagaaacaaccagccttgaaggctacaagtgacaagaaagattctgtttcgaatatacccacagaaataaaggatggacaacaatctggaacagtgtcttctcagaaacaaccggcctggaaggctacaagtgtcaagaaagattctgtttcgaatatagccacagaaataaaggatggacaaatacgtgggacagtgtctcctcagaaacaatcggcccagaaggttatatttaaaaagaaagtttctcttttgaatattgccacaagaataacaggcggttggaaatctggaacagagtatcctgagaatctgcccaccttgaaggctacaattgaaaataaaaattctgttctgaatacagccaccaaaatgaaggatgtacaaacatccacaccagaacaagacttagaaatggcatcagagggagagcaaaagaggcttgaagaatatgaaaataaccagccacaggtgaaaaaccaaatacattctagggatgaccttgatgacataattcagtcatctcaaacagtctcagaggacggtgactcgctttgctgtaattgtaagaatgtcatattactcattgatcaacatgaaatgaagtgtaaagattgtgttcacctattgaaaattaaaaatacattttgtttatggaaaagattaataaaacttaaagataaccactgtgagcaacttagagtaaaaattcgaaaactgaaaaataaggctagtgtactacaaaagagaatatctgaaaaagaagaaataaaatcgcagttaaagcatgaaatacttgaattggaaaaagaactctgtagtttgagatttgccatacagcaagaaaaaaagaaaagaagaaatgttgaagagttgcaccaaaaagttagggaaaagttaagaataacagaagagcaatataggatagaagctgatgtgacaaaaccaattaaaccggctctcaaatcagcagaggtggaattgaagacaggaggaaataattcaaatcaggtttctgaaactgatgaaaaagaagacctgctgcatgaaaaccgcttgatgcaagatgaaattgccaggctcaggctggaaaaagacacaataaaaaaccaaaacctggaaaagaaatacttaaaagactttgaaattgtgaaaagaaagcatgaagaccttcaaaaggctctaaaacggaatggggaaacattagcaaaaacgatagcctgttatagtggacagcttgctgctctgacagatgaaaacacaacgctccgttccaaactggagaagcaaagagagagcaggcaaagactggaaacagaaatgcaatcataccattgtagactgaatgctgctcgatgtgatcatgatcaaagtcactcatcaaaaagagaccaagagcttgctttccagggcacagtagataaatgtcgtcacttacaggaaaatttgaattctcatgttctgattctttctctgcaactttctaaagctgagagtaagtccagagtcctcaaaactgagctccattacacaggagaggctctgaaagaaaaggctttggtttttgaacacgtgcaaagtgagctaaagcaaaaacagagtcaaatgaaggacattgaaaaaatgtacaaaagtggatacaatacaatggaaaaatgcatagaaaaacaggaaagattttgtcaactaaaaaaacaaaatatgttgcttcaacagcaactggatgatgctcgcaacaaagctgacaatcaagaaaaagcaatacttaatattcaagccagatgtgatgctagagtacaaaaccttcaagctgagtgcagaaagcaccgtcttttactagaagaagacaataaaatgttggtcaatgaactgactcattcgaaagaaaaagaatgccaatatgaaaaagagaaagcagaaagagaagtagctgtgagacagcttcaacaaaaacgagatgatgtcttaaacaaaggatcagcaacaaaagctctgctggatgcttcatcgcgtcactgcacctatttagaaaatgggatgcaggattcaaggaagaaattagaccagatgagaagtcaagtatgtatgcaactttgcacaccaacaactgttaatctgtagctagttaactaatataaagtgttttggggtactaattttagtggatggctttcttttgtatttttatgataattaatgttattaaaattttatagtggatggc

SEQ ID NO: 253417 - DNA, 2346 bp, Homo sapiens
tccggttccgaatacggccacggaaaaaaaggatgaacattatctgggacaggtttcagcaaacataatccaagctgatcaatttaggacacttccactgaagagacgtgaagttgtcttctcagaaacaaccagccttgaaggctacaagtgacaagaaagattctgtttcgaatatacccacagaaataaaggatggacaacaatctggaacagtgtcttctcagaaacaaccggcctggaaggctacaagtgtcaagaaagattctgtttcgaatatagccacagaaataaaggatggacaaatacgtgggacagtgtctcctcagaaacaatcggcccagaaggttatatttaaaaagaaagtttctcttttgaatattgccacaagaataacaggcggttggaaatctggaacagagtatcctgagaatctgcccaccttgaaggctacaattgaaaataaaaattctgttctgaatacagccaccaaaatgaaggatgtacaaacatccacaccagaacaagacttagaaatggcatcagagggagagcaaaagaggcttgaagaatatgaaaataaccagccacaggtgaaaaaccaaatacattctagggatgaccttgatgacataattcagtcatctcaaacagtctcagaggacggtgactcgctttgctgtaattgtaagaatgtcatattactcattgatcaacatgaaatgaagtgtaaagattgtgttcacctattgaaaattaaaaatacattttgtttatggaaaagattaataaaacttaaagataaccactgtgagcaacttagagtaaaaattcgaaaactgaaaaataaggctagtgtactacaaaagagaatatctgaaaaagaagaaataaaatcgcagttaaagcatgaaatacttgaattggaaaaagaactctgtagtttgagatttgccatacagcaagaaaaaaagaaaagaagaaatgttgaagagttgcaccaaaaagttagggaaaagttaagaataacagaagagcaatataggatagaagctgatgtgacaaaaccaattaaaccggctctcaaatcagcagaggtggaattgaagacaggaggaaataattcaaatcaggtttctgaaactgatgaaaaagaagacctgctgcatgaaaaccgcttgatgcaagatgaaattgccaggctcaggctggaaaaagacacaataaaaaaccaaaacctggaaaagaaatacttaaaagactttgaaattgtgaaaagaaagcatgaagaccttcaaaaggctctaaaacggaatggggaaacattagcaaaaacgatagcctgttatagtggacagcttgctgctctgacagatgaaaacacaacgctccgttccaaactggagaagcaaagagagagcaggcaaagactggaaacagaaatgcaatcataccattgtagactgaatgctgctcgatgtgatcatgatcaaagtcactcatcaaaaagagaccaagagcttgctttccagggcacagtagataaatgtcgtcacttacaggaaaatttgaattctcatgttctgattctttctctgcaactttctaaagctgagagtaagtccagagtcctcaaaactgagctccattacacaggagaggctctgaaagaaaaggctttggtttttgaacacgtgcaaagtgagctaaagcaaaaacagagtcaaatgaaggacattgaaaaaatgtacaaaagtggatacaatacaatggaaaaatgcatagaaaaacaggaaagattttgtcaactaaaaaaacaaaatatgttgcttcaacagcaactggatgatgctcgcaacaaagctgacaatcaagaaaaagcaatacttaatattcaagccagatgtgatgctagagtacaaaaccttcaagctgagtgcagaaagcaccgtcttttactagaagaagacaataaaatgttggtcaatgaactgactcattcgaaagaaaaagaatgccaatatgaaaaagagaaagcagaaagagaagtagctgtgagacagcttcaacaaaaacgagatgatgtcttaaacaaaggatcagcaacaaaagctctgctggatgcttcatcgcgtcactgcacctatttagaaaatgggatgcaggattcaaggaagaaattagaccagatgagaagtcaagtatgtatgcaactttgcacaccaacaactgttaatctgtagctagttaactaatataaagtgttttggggtactaattttagtggatggctttcttttgtatttttatgataattaatgttattaaaattttatagtggatggc

SEQ ID NO: 253418 - DNA, 579 bp, Homo sapiens
agaagcacaatcagtatttcattatttatgaattctcaattgaattatcctatcctgtccacacacataatagcattagcatttcttcttataccatgttgaaatacttttaatacaaactctcaatagaagcttaaacataagtggttaagtcttgttgtctagtctcattcacctgcctcaacatgctttctttcattctatttgcatacaaaatgttcttatttcagttttgtagacaggatatgagttagcatactcgtgtttgttcagctgtccatcctgcatcgttactacaatgcctttttctgccatttaatggtgtttgtatcaatgttcccatatctgctgcattttaactccataaaaaggaaatgtgatttcgtattaatagttttgttgatcaactcaatatttctgcaccaatcagcatacctatatgcatgtagtagtctgtacaattgttcaacatcaaaatacttgtttactttatgtcaaaatgtctataaaattgctggcattgttctccatttcagtctggtagaataagcgagatagaaaataaatgtgtaaatgaat

SEQ ID NO: 253419 - DNA, 532 bp, Homo sapiens
cctaacgctccatctacccaaactcagatacaggcacacatctagggttggctgaactgagctctttcttcccctggtggagctgatgagtccaaagatagataaagaacttgaaattttatgtatgaatactggaagtcagatgtactcctcctagctaaatatatatgaagatagagacccggtgcttctagcaggtgttgtttccacaacatgaagaaagcctgtctgagaataaaatcaacctacaccacggggcgtagtggctcacgcctataatccaagcactttgggaggccgagtcgggtggatcacttaaggtcaggagtttgagaccagcctggccaacatggtgaaaccttatctctactaaaaatacaaaaattagctgggtgtcgtggtgcatgcctgtaatcccagctattcgggaggctgaggcaggagaactgtttgaaccagggaggcggaagttacagtgatccaagattgtgccactgcactccaacctgggcaacagagtgagactccatct

SEQ ID NO: 253420 - DNA, 293 bp, Homo sapiens
tctctctctctggatacttgtccttggaccccagccaccatcctgtgaggaagcccagagcacatgaagagaccacctgcacatgttcagatccactgccccagctaagatctccgctgacagccagaccaatcaccaatcttaggagctggcgagccttcagatggtccaacctttgaggccccccagaggagccaggtggagcatagatgagccatccatgtggatccctccaccaaatggaagatttaggagcaaaataaacaatgttgtcattgctttcacccaaaaat

SEQ ID NO: 253421 - DNA, 405 bp, Homo sapiens
cctggatgcattgtaaatggatttcctcttccacagggtctggctgttttgcccagaatggagtgcagtggcgtgatggtctcggctgacagcagcctcgacctcctgggctcaagccttggcctcccaaagtgctgggattacagccaccatcctgtgaggaagcccagagcacatgaagagaccacctgcacatgttcagatccactgccccagctaagatctccgctgacagccagaccaatcaccaatcttaggagctggcgagccttcagatggtccaacctttgaggccccccagaggagccaggtggagcatagatgagccatccatgtggatccctccaccaaatggaagatttaggagcaaaataaacaatgttgtcattgctttcacccaaaaat

SEQ ID NO: 253422 - DNA, 606 bp, Homo sapiens
cctggatgcattgtaaatggatttcctcttccacagggtctggctgttttgcccagaatggagtgcagtggcgtgatggtctcggctgacagcagcctcgacctcctgggctcaagccttggcctcccaaagtgctgggattacagccccacctgcagagtcaagtccctcctcccacctcagcactgctagaaaagagcttcaggatggagccacacatgtcactcaagcccaagggtcagtcaacagcccacagccctaaactcatcttgtccaatgccagaccctgcaactgctgatttacatgaatcaactccatcatgcaagcctcatgacatcccaatgagccaccatcctgtgaggaagcccagagcacatgaagagaccacctgcacatgttcagatccactgccccagctaagatctccgctgacagccagaccaatcaccaatcttaggagctggcgagccttcagatggtccaacctttgaggccccccagaggagccaggtggagcatagatgagccatccatgtggatccctccaccaaatggaagatttaggagcaaaataaacaatgttgtcattgctttcacccaaaaat

SEQ ID NO: 253423 - DNA, 431 bp, Homo sapiens
ggcagcattcagttccttgcaacctgctcactgaggtcaccagtttttgctggccgttagctggaggctacctgcagttccttgtcacatgagcctctcctacattgccacttatttcatcaaagctagcaagggagggcatctccctgcagggcaggcattatagacttacataacgtaattacatatatgtaatcaaaagactgccttttctctgtggtgtattctgttggttagaagcaaggcacagcttccgtccacacccaaaagaaaggggttacacaaaggcaggtgtgaacatcagcaggtgggaatcatggggccattgtagagttgtctaccatggtttgcttattggtcttttaatcatactgccacagattgggctgaaactggacactggcaatgctgccaccttcagggtctcagta

SEQ ID NO: 253424 - DNA, 250 bp, Homo sapiens
gagcctgccagcaccagtacatgccaggacctaaggccaggatcaagtccacaatgagcagggcccagtgcaaaatggaaatgcagggccccttgatcaaacccattaggtgggttcagtgtacactgctcaggggatgggcacaccaaaatctcataaatcaccactaaggaactaattaaccaaataccgcctgttccccaaaaacctatggaaattaattttttaaaaagcgtatagcaacaagaca

SEQ ID NO: 253425 - DNA, 474 bp, Homo sapiens
caaaaaacaaatttgtactgcaagtataagtaatatctctttttctctctctttccccacttccttctttccttcttttctctcctttttttcctttctccttgtctcccttttttagaaatttttctagataaacatgttactattatgctaatacaaaaataaaactactcagttggttattttataccattagtccctcataattttcctctccagattataatctcttttaaaatttttgtgtctcatttagtaagtttcttggaggaagaaccatactatatatgtttcgcagttttttgcttagcattcaagtagatcttagcaaatcctaccagtatcaaataattgcccttcttctatccccacacctttagagtttcaggtctctactatccgattccttgacttcccaacccagtcaaagatacatgatttgcttggaattgtgtgtttggggcatgtacacac

SEQ ID NO: 253426 - DNA, 382 bp, Homo sapiens
tacaggctgcttggtatgctccatgaactttataatttttaaagcaatacacatttctgaggttatgtaaatcaaatttttgacaaaaacttttctgggaaatgcttctttgattttacaattcagactcctagagtatgacagctggaaaaaaagcgataatctatcaactcatttggcaaaggtagaaaccgaggctcggagatattaagtgatttccctaggatcacatagctagtgtatcaaatccaagaatagaactcaggttacctgactatagtccggcactttttctattatctttttctttctttttttttttttttttctgagacagagtcttgctgttgttggcctgggctggagtgcaatggcagggata

SEQ ID NO: 253427 - DNA, 298 bp, Homo sapiens
tacaggctgcttggtatgctccatgaactttataatttttaaagcaatacacatttctgaggttatgtaaatcaaatttttgacaaaaacttttctgggaaatgcttctttgattttacaattcagactcctagagtatgacagctggaaaaaaagcgataatctatcaactcatttggcaaaggtagaaaccgaggcaggagaattgcttgaacctggaggtggaggttgcagtgagacgagattgcgccactccactccagcctgggtgacggagggagattctgtctttaaaact

SEQ ID NO: 253428 - DNA, 500 bp, Homo sapiens
ataaacaaaagcagaataagctaatatggagcaaattccaatatggttaagtaaaaaatagcaaagagtaagagtaactataggatgtatccttttttttataagaaaaaggaaagtatgtgtatgggggataatgaaaaaaatacatatctatgtgcattgccttgcaaaaacagtgcagagggaataaaccagagtgtgatagattatctatgagggtggtgtttgaatagggtggaaggatccatgtgtttatgtttttacatagtttggattttggaaacgttaatattttgcataccaagtatatgtttaaataaacaaggagagaaaagccaagaactgaaatacaaacggaaacaaatgaaatcaattttttccaaatgaaaatgtaactatactgtagtgaaaaaaattagcatcattaccttttaaacacagtacttttactatatactgtatacaatcaatcaaaagaaaaaaaaaagaactccaaacga

SEQ ID NO: 253429 - DNA, 715 bp, Homo sapiens
agaaacctgaaggaagtaaaggaatagtgaaagagcaatgtaggcagcagaaataagtgcagagaaaggccttgaaaagcttttaaggtcaggactcgtctagaagagaatatacaaggggaagagtcttaaatgaggaaattacagagatagttggggctatgataaagaaagaatattttcttagttgaaataagaagctagcttagtagctcagagtgaaggggataagaagataaaggaagtaagagcaaagaaaagaaggtatgaaataattgtccagtgaagtggaagagtcacttaattaaaagatgtagtaaaacgcaagacaatactgaagatccacttaatgttaatctgcttaatgtatcctactaaatgtggctggagaaagggtaatgatcttttctccagccagaatttagctgcttgggtggtattatactgtataatggatggaaaattggatataactagggttgggattttgccaggcaaatacattgaaaaaaaaaaaaaaaagcaatagggagtattggtaaagatggaacatgaaatttaggcaatgtaaataaaaaagtttgaaaacttttttttcttttttacatgttcagtatatgcctttcttgtatgttctctaaaaatcatccacaaaatttagctataccagaaaaggtggagtaatgaccacctccctgcaaaattcaagaaagaa

SEQ ID NO: 253430 - DNA, 442 bp, Homo sapiens
ccaatcacccagatcaagatttgggtcctttctaggttctggggaagtgccatatcccctcccagtcgttacccctcccctgtcccctaagggaggacccttccaacctctatcaccatccctgtccttgaacttgacgtggacggagtcacattcaatgtttctttttcattgctacacagtatttcatggcataaatttaccgcaataggggcaggcgctgtgtctcatgcctgtaatcccagcactttgggaggccaaggcaggcagattgctttgagctcaggagttcaagaccagcctgggcaacaggatgtaaccgtctctacaaaaattcaaaaattagccaagcattggtggcttgcgcctataatcccagctactcgggaggctgaggctggagaattgcttgagcccaagaaagcagaggttgcagtgagcc

SEQ ID NO: 253431 - DNA, 478 bp, Homo sapiens
acccttcatttctccaaaatatttttatattatttctttgataatttgtcttcctattattttcctttctttttggaactcctattatgtattatttctctctcgtttttcaattctttttctttcctttctatctttctgggagattgctctgactttactacaatgctttgatttgattttttaaattttggcaaacttatttttaagaattcttttttttttcttttcttactgttactgtctccctcaaataagaatgccttatcttcctttccaggaatattgaagataaataagtaactctaaggtgtaaatcaatgaacttgactagacactgtcacaaaactcataacaatagtaatcttaagcagttttggtgggagtgacagaaacccaattcatgcttattgcacttgctgctaccactagcaaggtaggagtccccatagagagagaagccctttttttaaaaaca

SEQ ID NO: 253432 - DNA, 280 bp, Homo sapiens
ccccgaggttcaggggccggtattagcaacccaattaatcaatgaagatgtgatcaaatgaaagcatttaagagcggtatggagagagaagttgacgacagacttggccttctttacaattctgccaggcctaagcctaaggagattctatcaggacgtggcattgcagttggccacattaaaggacacagacccgacctgtcacctacatgccttcaggccttgcctgggcctctgatacatgtcttcactgataattttggagctcttatcatcttcc

SEQ ID NO: 253433 - DNA, 538 bp, Homo sapiens
attccgcctccctttctgtacccattctcagcctccacctcagccttccccacattctttctgcatctcgttctgcccccttgagctcctcatctttttccaccccctgcttggccttcacagtgtcccagccctgccttctggctatgcagcaccccacacactccccaagtgcccctgcatccagtcttctccctctccagcctcccatttcatcgaaaagtctctgctagctggtgggacagagcgttgaatataatatttcatactgtgaggtgaatggctgataacccttccccactccaacactcaatgagtggctttgcaggtggtacagaaaagaaatttaggagcagggaattccgctcagaaaaagaagagtctcctttctggggagagaagagaaagagagaattctatgcccatggccctcctttacctgctcttctgaggggagctgatcggctttttgagcagagcctgaagctggccattcttgcctttgtctttccctcagtaaacatctcttgagcacctg

SEQ ID NO: 253434 - DNA, 319 bp, Homo sapiens
tatttgtttcattttaaagatgaggaatttgtgctccagaacaatccagtgatttttctcaggatctcatgggatgacagggcaggtctcacctgctaggaactgtgcgttctttgctttgcttttgtgtcttattttattctagataggaaggaattttccattcaggtttatattatttttattatggttggaattgctgtcataaaggacattccatccaggtgtcaataataattttccagtttgcaaagaagaagctcaagatttagaatctggaaaccttgattgtactctgttctgattctgctggcccgtg

SEQ ID NO: 253435 - DNA, 271 bp, Homo sapiens
ttcatctggccagaggagacacaatactttacctttactcatccttcaatttatcaaaatgttgtattttccttattatttgcactatgtaaatattgttttctcatacaccaaatagtatctgatgattacattttgtattatgtaactttttatttttcctggagttaaactgtgttacttttaaaatttgttagttttttctagccaaatcttcccatgatgtacaaaagctctgtcaaatgttcccaataaataacttatctcttat

SEQ ID NO: 253436 - DNA, 131 bp, Homo sapiens
tcatgtggtctaggggttgacaaattatagttctcaggtcaagtctagcctgccacttatttttataaataaagttttattggaacacagccatactcatttagttgtttcttccttctcctcctcctcct

SEQ ID NO: 253437 - DNA, 280 bp, Homo sapiens
ctccctggccagtacctaagcatcttgtcttagtcaccactgcagccgcacagctcagacaatgcacgtggaaaacaggtggatgtaaagatttcttgaaagcagcaatttaacaaactctgatctgatgcctcccctatgctctttcactacaccacgctgcttcccaggaaaaggataaatgtgtgtacagttcgtcattctctcctaacagattcaaaggtccatggctcatctgcttcttcttcatgtactacaaagcccagcaccttgtaaatgc

SEQ ID NO: 253438 - DNA, 312 bp, Homo sapiens
gtgaggagctcggagcctagctccctggcatgggcagttcacaataggattcatgctcgtatgagaagctaatgctgccgctgatgtgacgggaggtgatgctcaggtggtaatgctttgcctgcccacctctcacctcctgctgtgtggcctggttcctaacaggccctggactggcaccagtgccgatgcaaatgacgggcataagggcactgtgggtgggggctcagggaatgccctgtgctacctgctccctgctctgtaaaccaaaaactgctctacaaaataaagtctattcacttaaaaaaaaaa

SEQ ID NO: 253439 - DNA, 449 bp, Homo sapiens
actttgaaaggtctgtctgcatttagatggtaacgctcattataaatatttttgtatattctgacatatttatacaaaaccttctttcatttgatgctgttctagtaaatcatctggctttctacacctaatgtggtaacactcagttcttgttaagaaaaattaaccaggccgggcgcagtggctcatgcctgtaatcctagcactttgggaggccgaggcaggcggatcacgaggtcaagagattgagaccatcctggccaacatgatgaaaccccgtctctactaaaaatacaaaaattagctgggcgtggtggtgtgtggctgtagtcacagctacttaggaggctgaggcaggagaatcgcctgaatcggggaggcggaggttgtggtgagctcagatcacgccactgcactccagtcaggcgacagagtaagactctatctca

SEQ ID NO: 253440 - DNA, 419 bp, Homo sapiens
caccctagattttcctccggtttctagaaatgtcaaatagaagattcactgatttttctaactgcttataaacttttgcctaggggattattatattaaatctttgcctactcactagataaatgcctcttgcttaccttagtgtatttggtaaacatttatacaatcaagattccaaatggctccattaccattaacttatcaacataagtgaaatgttaagctttgagtttaagagagatcaaataacttatagggaatgatattttcttctttcaaaaggaaagttttcactgctgattatctatgattaagctagaataacaagttaaaatcctggtcaggcagttattctttttttctttgttacttgggataattttgaacatagaaccttatgccatgataatgctttgcag

SEQ ID NO: 253441 - DNA, 1968 bp, Homo sapiens
ttgaattcctcgacactgttggcctactggttgacatcgttcatgaagagcctctccacggctcctgcgcctgagacagctggcctgacctccaaatcatccatccacccctgctgtcatctgttttcatagtgtgagatcaacccacaggaatatccatggcttttgtgctcattttggttctcagtttctacgagctggtgtcaggacagtggcaagtcactggaccgggcaagtttgtccaggccttggtgggggaggacgccgtgttctcctgctccctctttcctgagaccagtgcagaggctatggaagtgcggttcttcaggaatcagttccatgctgtggtccacctctacagagatggggaagactgggaatctaagcagatgccacagtatcgagggagaactgagtttgtgaaggactccattgcaggggggcgtgtctctctaaggctaaaaaacatcactccctcggacatcggcctgtatgggtgctggttcagttcccagatttacgatgaggaggccacctgggagctgcgggtggcagcactgggctcacttcctctcatttccatcgtgggatatgttgacggaggtatccagttactctgcctgtcctcacgttttccagccctcaccttggcgcctggcttctattttactcgggttactctgtggtgccctgtgtggtgttgtcatggggatgataattgttttcttcaaatccaaagggaaaatccaggcggaactgggtatgtgtcatgtcctgagcctcccacacatggttctcccgggtccctccctgatccacagtttgagcctctggacgaccctggctgcaggctggacaggaagcaccgactggagaagaaagcacggacaggcagaattgagagacgcccggaaacacgcagtggaggtgactctggatccagagacggctcacccgaagctctgcgtttctgatctgaaaactgtaacccatagaaaagctccccaggaggtgcctcactctgagaagagatttacaaggaagagtgtggtggcttctcagggtttccaagcagggaaacattactgggaggtggacgtgggacaaaatgtagggtggtatgtgggagtgtgtcgggatgacgtagacagggggaagaacaatgtgactttgtctcccaacaatgggtattgggtcctcagactgacaacagaacatttgtatttcacattcaatccccattttatcagcctcccccccagcacccctcctacacgagtaggggtcttcctggactatgagggtgggaccatctccttcttcaatacaaatgaccagtcccttatttataccctgctgacatgtcagtttgaaggcttgttgagaccctatatccagcatgcgatgtatgacgaggaaaaggggactcccatattcatatgtccagtgtcctggggatgagacagagaagaccctgcttaaagggccccacaccacagacccagacacagccaagggagagtgctcccgacaggtggccccagcttcctctccggagcctgcgcacagagagtcacgccccccactctcctttagggagctgaagttcttctgcgctgaggttcttctgccctgagccctgcagcagcggcagtcacagcttccagatgaggggggattggcctgaccctgtgggagtcagaagccatggctgccctgaagtggggacggaatagactcacattaggtttagtttgtgaaaactccatccagctaagcgatcttgaacaagtcacaacctcccaggctcctcatttgctagtcacggacagtgattcctgcctcacaggtgaagattaaagagacaacgaatgtgaatcatgcttgcaggtttgagggcacagtgtttgctaatgatgtgtttttatattatacattttcccaccataaactctgtttgcttattcc

SEQ ID NO: 253442 - DNA, 2066 bp, Homo sapiens
atgtttagggaggctctagggagaaatgcacagtttgacatcgttcatgaagagcctctccacggctcctgcgcctgagacagctggcctgacctccaaatcatccatccacccctgctgtcatctgttttcatagtgtgagatcaacccacaggaatatccatggcttttgtgctcattttggttctcagtttctacgagctggtgtcaggacagtggcaagtcactggaccgggcaagtttgtccaggccttggtgggggaggacgccgtgttctcctgctccctctttcctgagaccagtgcagaggctatggaagtgcggttcttcaggaatcagttccatgctgtggtccacctctacagagatggggaagactgggaatctaagcagatgccacagtatcgagggagaactgagtttgtgaaggactccattgcaggggggcgtgtctctctaaggctaaaaaacatcactccctcggacatcggcctgtatgggtgctggttcagttcccagatttacgatgaggaggccacctgggagctgcgggtggcagcactgggctcacttcctctcatttccatcgtgggatatgttgacggaggtatccagttactctgcctgtcctcaggctggttcccccagcccacagccaagtggaaaggtccacaaggacaggatttgtcttcagactccagagcaaatgcagatgggtacagcctgtatgatgtggagatctccattatagtccaggaaaatgctgggagcatattgtgttccatccaccttgctgagcagagtcatgaggtggaatccaaggtattgataggagcgttttccagccctcaccttggcgcctggcttctattttactcgggttactctgtggtgccctgtgtggtgttgtcatggggatgataattgttttcttcaaatccaaagggaaaatccaggcggaactggactggagaagaaagcacggacaggcagaattgagagacgcccggaaacacgcagtggaggtgactctggatccagagacggctcacccgaagctctgcgtttctgatctgaaaactgtaacccatagaaaagctccccaggaggtgcctcactctgagaagagatttacaaggaagagtgtggtggcttctcagggtttccaagcagggaaacattactgggaggtggacgtgggacaaaatgtagggtggtatgtgggagtgtgtcgggatgacgtagacagggggaagaacaatgtgactttgtctcccaacaatgggtattgggtcctcagactgacaacagaacatttgtatttcacattcaatccccattttatcagcctcccccccagcacccctcctacacgagtaggggtcttcctggactatgagggtgggaccatctccttcttcaatacaaatgaccagtcccttatttataccctgctgacatgtcagtttgaaggcttgttgagaccctatatccagcatgcgatgtatgacgaggaaaaggggactcccatattcatatgtccagtgtcctggggatgagacagagaagaccctgcttaaagggccccacaccacagacccagacacagccaagggagagtgctcccgacaggtggccccagcttcctctccggagcctgcgcacagagagtcacgccccccactctcctttagggagctgaagttcttctgcgctgaggttcttctgccctgagccctgcagcagcggcagtcacagcttccagatgaggggggattggcctgaccctgtgggagtcagaagccatggctgccctgaagtggggacggaatagactcacattaggtttagtttgtgaaaactccatccagctaagcgatcttgaacaagtcacaacctcccaggctcctcatttgctagtcacggacagtgattcctgcctcacaggtgaagattaaagagacaacgaatgtgaatcatgcttgcaggtttgagggcacagtgtttgctaatgatgtgtttttatattatacattttcccaccataaactctgtttgcttattcc

SEQ ID NO: 253443 - DNA, 414 bp, Homo sapiens
cccctcttctggctcaagcatttgttggaatggctcacaaaactcaggaaggacccacgtgtgaagcctgtgagtttgattgcactgcaggaggaccccctaaagctactgctgcaaaatgctcctagagcaaaggcccttcagggtccaggtgaccatggtactgctggcttggagaccacactctgaggggccagaatagaggcaattgctcagctctccatttttgtgttaaacgcatttacaccctcactgattgtttggtgttacattatcttctttcaaggagaattcttgcatgagggctttaaatagaatcctgtgggaataactccttttaaagggaagttgaaagcacttaactcagccagaactcggtatgcatcaaaggaggaaaaaagaatataaagaaga

SEQ ID NO: 253444 - DNA, 362 bp, Homo sapiens
cacactgtatttccatcatcgcttttaatgagacttctttgcaaatatgtatggtatcttttaaaatacctgataaccagccagcaggggtggtcagctgctacactggtagccacaaacagaatccaagacacagaacttcatacggtgtcacagcttcattttccaggctacagctcccactgcccacatcagaaccatctgcaggtccataagctgtgagtttctttgggagttgggggagtgtcttttggatgtttataacttatgcatcttaatattgaatgtgcacttaatacatggaacttcatagtacttgattttttatgcaaaaatgacttaattaaaatttcttgaagaaa

SEQ ID NO: 253445 - DNA, 961 bp, Homo sapiens
tgatttctggtcttcttcactgctacactcccactagcaccaggacagtttacaaatgccatggcaatatcaggaagttaccctatatggtctaaaatgggagtcatgaataatccaccccttgtttagtatatcatccagaaataaccacaaaaatgggcaaacagcagcccttgaagctgccctgcctatgatgtagctattctctattcctttaccttcactttactgtatggactcaccctgaattctttcttgcacaagtccaagagttctcccttggggtctggatcctgacctctttccagtaacacatgtaaggtatacattggttggcccaaagttgtggaatatttcaaagtggggacttacaggtaataggtgaattcaaggattttcgtgatcagtcacttggttgaaagaatttagctttgtctaaagacagtagaaagaaatgcttgagttaagaaaaggaaggttatggaagccaaggttcttgttatgtagatgaagcctctaggtagtattcttcagagagaatagatggtcaatgtctcttttcagattttaaatagagtccaactcagttaaatctcctctagacctggcaaagacctagaaagggaaagagattctaaagatgcaaaattttaccccacaaaaggctttgcagggccatttcaacatatgtcagataaatatattttgaagtaaagtgtgttaatttctttcagggtctgctgtcatgtgatgctataccagagtcaagctggaatttggcatcttagtgccaaagggtctgtttcatccatgaagggatgtctattttaatgttaatgctgggcctagtatgaggtgagtgcctaggcattgccatgtagacgctgtctgagagatgaaggtcattctccaaggagcagagaaaatgagtatcgtcctcatcaaccaagttaccgatcaa

SEQ ID NO: 253446 - DNA, 460 bp, Homo sapiens
caattgttctccttggatactccctctggtctctatgtagacagagaacgttctcctccagcctctgttgatctctgaaggtctttaattcaaaatgcacgttacatcagggaccactattttgggggtctgctgtcatgtgatgctataccagagtcaagctggaatttggcatcttagtgccaaagggtctgtttcatccatgaagggatgtctattttaatgttaatgctgcaggtcaagcagtacctgagagcactgaggagcacctggacccagtaacttctctaaatctagtgtgggggaagatgcacccctgccacggagccatgttctatggcaggcaaccactggtcaataaaaaaaaatcagatgatgtcaagtgtatatctaattgacattaaaatacacatttgaaaatttggaaatccttttttaaataaaatttttaaatttcatt

SEQ ID NO: 253447 - DNA, 1068 bp, Homo sapiens
tgatttctggtcttcttcactgctacactcccactagcaccaggacagtttacaaatgccatggcaatatcaggaagttaccctatatggtctaaaatgggagtcatgaataatccaccccttgtttagtatatcatccagaaataaccacaaaaatgggcaaacagcagcccttgaagctgccctgcctatgatgtagctattctctattcctttaccttcactttactgtatggactcaccctgaattctttcttgcacaagtccaagagttctcccttggggtctggatcctgacctctttccagtaacacatgtaaggtatacattggttggcccaaagttgtggaatatttcaaagtggggacttacaggtaataggtgaattcaaggattttcgtgatcagtcacttggttgaaagaatttagctttgtctaaagacagtagaaagaaatgcttgagttaagaaaaggaaggttatggaagccaaggttcttgttatgtagatgaagcctctaggtagtattcttcagagagaatagatggtcaatgtctcttttcagattttaaatagagtccaactcagttaaatctcctctagacctggcaaagacctagaaagggaaagagattctaaagatgcaaaattttaccccacaaaaggctttgcagggccatttcaacatatgtcagataaatatattttgaagtaaagtgtgttaatttctttcagggtctgctgtcatgtgatgctataccagagtcaagctggaatttggcatcttagtgccaaagggtctgtttcatccatgaagggatgtctattttaatgttaatgctgcaggtcaagcagtacctgagagcactgaggagcacctggacccagtaacttctctaaatctagtgtgggggaagatgcacccctgccacggagccatgttctatggcaggcaaccactggtcaataaaaaaaaatcagatgatgtcaagtgtatatctaattgacattaaaatacacatttgaaaatttggaaatccttttttaaataaaatttttaaatttcatt

SEQ ID NO: 253448 - DNA, 461 bp, Homo sapiens
ctggtccttatgaagaattctgtgctcgcaggaaagatctgtaggaataatgaaatgctttcttcattgatgagatgaagtctctgtttttcaggcaagttgacagaacaaaacaatgagaaacgaacttctttagaaggttgaatgaaagtaagatctagatgaaaaagtcattggccaaagataatttttaaaaaaaaacattctatgttaacccttggaaaaaaaaacaaaaaacaacccagagaaatacaagaaaacaatgtacacattcatttcactgacagttacaagaaaatagccgtttatagaagttacacaatgctttcaacaaatcccaaacaaattttgggaaacagataaagccattgggtaaaaataaatatacatactagctaatataaaacaatttatggttacgaattgtcatcaattctcttaggacacaaggagaaatatgg

SEQ ID NO: 253449 - DNA, 187 bp, Homo sapiens
ggtcagagatggggaggtctcattatgttgctcgaactcctgtactcaagcaatccccttgtctcagtctcctatagtgctgggattagagacgtgagctactgcgcccagcccctctgtcttcattactgtgcttccctcgctaaatctgtacatatctctcattctccccttctctctctagctc

SEQ ID NO: 253450 - DNA, 434 bp, Homo sapiens
tctatcaatgccttgtatcagcctcaaagcagcctgttcaagttaactccctgttgaactccagggcctatacctctcttggctgaatagatataagaacatccttgcctgatgggttcatattcctcttcaattctgctgtctaaaagaagaagagatggacttctttcttccctgatccctgatacaaataatccctgggagagacagtaatttgaaaatgagtcattaatgctgtgtctacattacagagatataattcccattccaacagccaatatttattgtcggtttattttagtcatctaccttaggaattcatttttggcaatgctgggttatgctgagtttatcttactaaaatagaatctgtgtcaaaaacccccaatgactttagcaacaattaaacactgaagcacttgcaaaaatacaca

SEQ ID NO: 253451 - DNA, 5393 bp, Homo sapiens
  misc_feature (222)..(222): n is a, c, g, or t
  misc_feature (1785)..(1785): n is a, c, g, or t
  misc_feature (2174)..(2174): n is a, c, g, or t
  misc_feature (2196)..(2196): n is a, c, g, or t
  misc_feature (2934)..(2934): n is a, c, g, or t
  misc_feature (3251)..(3251): n is a, c, g, or t
  misc_feature (3495)..(3495): n is a, c, g, or t
  misc_feature (3525)..(3525): n is a, c, g, or t
  misc_feature (4082)..(4082): n is a, c, g, or t
  misc_feature (4154)..(4154): n is a, c, g, or t
  misc_feature (5344)..(5344): n is a, c, g, or t
  misc_feature (5352)..(5352): n is a, c, g, or t
tgtttttctcacaatttcatggattatgggtttgggacaggaagaccacaaagataaagggccattttcattatatcatattaaaggtacatgtgatcaacatgacatcactgtttatgttaaccttgatgatgaccttgttttcatctggtttctccactataagttactcctctcctcacttcccatttccagactctgctctctggaaggaagtcactntgtgtagcccatatttaagtgatagaaagtaatgttctacctccttgaaccaggggtattatccacataaattatttggaattcttctgcacaaaaaacttacctcttctcctctacatattaatttattcaatcacttacatatatcagtgtagactcatagatacttattttgtactttagcttataatttggcttttctttctttctttttttttttttttttgctctatttgttacaactttagctgtgggagctctttcaggtggctcttgtgtcccttttactccctcagtgtgtgtgtgtctgtgtgtgtgtgtgtgttgagcattttcttactttctggcactgaaagatatatctggtataaaagacaaacgatacacctatctacatggggcacttactgtgaatagaacttgcaggactggaagttgctttcggtgagtcattgagtgagtggtgggtgaatgtgaaggctcagttcattactgtacactactgtagactttataaatactaaggatacacacgaaatttattttaaaaaactatcttcaataattaaccttggcttattgtaacttttcattttataaactttttaattttttgaaactttttactcttttgtaatcacacttagcttaatcacaaacatgtatagctgtacaaatttttttctttttttctttttttttttttttgagacagggtcttgctctgtcatccaggctggagtacagtgacgcgatcatgggtcactgcagccttgacctctctagctccagtgatcctcccacctcagcctcttgagtagctgggaccacaggtgcacgccaccacacccagctaatttttgtattttttgtagagacaagttcttcctgcgctggccaggccagtttcacacgcctgggctcaaacagtcctcctgcctcaatctccccaagtgctaggattgcaggtgtgagctgccacatctggctttttactttgtatccttattctataagctcttttcttttcttttttcttttttttttttgagacggagtctcgctctgttgcccaggctggagtgcagtggcgcgatctcggctcactgcaagctccgccttccgggttcacgccgttctcctgcctcagcatcccgagtagctgggactacaggtgcccgtcaccgaattttttttgtatttttagtagagatggggtttcaccgtgatctcgatttcccgacttcatgatctgcccgagggattacaggcgtgagccactgcacccggcccttttctttttttttttttttttttttttgagacggagtctcactctattgcccaggctggagtgcaatggcgctatcttggctcgctgcaacctctacctcctgggttcaagcaattcgcctgcctcagcctctcgagtagctgggattgcaggcatgcaccaccacgcccggctaattttttgtattttagtggagatggggtttcaccatctctaacttgaactcctgatctcaagtgatccacccgcctcggccttcaaaagtgctnggattacaggtgtgagccaccgcgcctggcctatacgcttttttctgttaaaaaatatttttaagtttttaaacttttgttaaaaattgagacagaagcaaacacattacttactaggcctacacagagccaggattatcagtatcaatcccttccgcctccacatcatgtcccactggaaggtcttcggggcagtaacggacatggagctgttatctcctaacatgccttcttctggaatacctcctgaaagacctgcctgaggctatttaacagttaactttttttttatatgtaagtaggagtactctaaaataacaatataaaatgtagtacaataaaataataagccagtaacgtagttgtttattatcaagtatgtactgtanataattgtatatgctagacttntatacagctggcagcacagtaggtttatttataccagcacctccacaaacatgtgagtaatgctttgcacttgaccttctgtcagctatgacatccctaggttgcaggatttttcagcttcattataatcttatgggaccatcttcatatgtgagtggtctcttgacccaaacattgttatgtagcacatgactgtaaattttggaatcaccttgtcagtatttacaaaatagctttctgagatttagtggcaggatctcagctcactcctacctgcacctcccaggttcaagcgattcttatgcctcagcctcccaagtaactgggattatagacgtgcaccaccaagcatggctaatttttgtatttttagtagagacagggttttgccacattggccaggctggtctcaaactcctggcctcatgtgatctgcccgcctcagcctcccccagagtgctgggattacaggtatgagccactgcgcctggccaaaattgcctaaatttttaaaatcctaaattggtgttgaattttgtcaaatgctttcctgcattgattttgatgatcacttgatttttctccattcttttgttaatgtgctaaattatgttgcttaatttttgaatgaaaaaataatcttacattcctgaaataatttcggtttggttgtgatgttttattcattctatttcgtgctgaattcagtttgctaatattttgtttaggaattttgcntctatgttcatgagacagatcggcctgtaattttacttttttgtaatgtccttgtcaggtttaggcctcaaagttatgttgactttataaaatgaactgtgaagtatttcctcttttttatgctttagtttgagtaagattgattttttttaaaacttatgtcgtccttaaatatttattagaattcactagggaagttatcttggcctgttactttctttcttgagtaaattttgttttcattctttttttatagttaagtatattgagttagaatgcatacacaaacaaatgcacacaacttaaagtccagttcnatgaattttgactaatgtataaacctgtttaacttccactgtaagcaaaatatagtgaattttcgtcaactaaaaagtccccttgtacccatttaccttcagtacctatccctaccccagccacaggcaacaaatgattttcatgtgcttatttgccatctgtatacctctttggttagttttctgtttatatcttttgcccatttatttttttttttttttgagacagagtcttgctatgttncccaggcaggtcttgagctcctgggcttangggatcctcccgcctcagcctcccaagtagttgggactacaggcacacactactactcttggtttgcctatttttaaatcaggttgtttgttttcttattattgtgttctctacactgtaggatattctacctttcctagaatttcatgtaaatggactcagacatactgttgtgtctggcctcttttgttcagtgtaatgtttttgagcttcatccttgcatgttatgtgtatcagtgattgattcaatttttattgctgcatagtattggattgtatagctataccacaatttgtttattcattctcctgttgatggaatattggttgtttccagtatttagctattattattattatttttttttttgagacggagtcttgctctgtcaccaggctggagtgcagtggtgcaatctcggctcactgcaacctccgcttcccaggttcaaacgattctcctgcctcagcctcctgagtagctgggactacaggtttgtgccaccacgcccagctaatttttatatttttagtagagacgggatttcaccatgttngccaggatggtcttgatctcttgacctcgtgatctgcccaccttggcctcccaaagtgctgggattacaggngtgagccaccgcgcctggtcttttttgtttgttttgttctttttttagacagagtctcactctgtagcccaggctggagtgcagtggcatgatctcggctcactacaagcctgcgcccctcaggttcaagagattcttgtgccccagcctcctgagtagctggggttacaggcgtgtgccaccatgcctggctaatttttgtacttgtagtagagactgggttttgccatgttggccaggctggtcttgaactcttgacctcaagtgatcttcctgccttggcctcccaaagtgttgggattacaagcgtgagccaccacacccggccagggatgtcattttttataactagccataaactttagctttgaagtaaaactatttctagcaagtgattcttacctgatattttttgttgttcttgcccatattttaattgggttgtgttattatggttctctatgtattctagatttaagtttttgtatatggtgtgaggcaagtgtcaagtttaattttttttctacaaacatcctgttgttccagtaccttttgatgataagactgtcttttcccccattgaattatcttaacgccctcatgaaaagcaattggccatatgtatgtggatctacttttggactctcaattctgttccagtgatttatatgtccacccttatgtcaataccacattattttgattattgctgctttatagtaagtgacatcatgttgcctgaaatcacgttttccacctttattcttctgttgatggttgctttggcaattaggggtcctttgcattttcgtagacattttagaatcaacttatctattgctactaaaaatgcttgattgggattgtggtaaatctagaaactaatttaggaagaatggtcatattaacagtttcaagtttcagatccatgagcatattttcactctccattaggtcttttaaaatttatcctagcagtgttttatggtttttactgtagaggtcttacacattttgttacatttgttgctatgtgtttgaccttttttgatactagtgtaaatggaaattttttcttttatgttctagttgttcattattacactaaatcatctttgggtgactactaaacattctattgaaaatttgtgaatggcgtgaacccgggaggtggagcttgcagtgagccnagatcgcnccactgcactccagcctgggcgacagagcaagctccgtctc

SEQ ID NO: 253452 - DNA, 380 bp, Homo sapiens
agtgagcagagagggtattctttggacatagggaccttttaagtagccttaaaactatagtaatcagggtgatgcatttcctcaaaggcttgcccagtttatgtcatccaagcatgccactctctacacagcacacttaaaactttttagaacagaaattgccgatgtgttttagctcacttgccagtgcttgttgattgtcagtaattacatgaatctctcttgaaaacagttctgggagcggggagggatagcatttggagatatacctaatgttaaatgacgagttactgggtgcagcacaccaacatggcacatgtatacatatgtaactaacctgcacgttgtgcacgtgtaccctaaaacttaaagtataattt

SEQ ID NO: 253453 - DNA, 497 bp, Homo sapiens
gagggacgtcttttttgcgttctgcatccgtctgtcgtccgtcggtcttacggtggccgggcgtggggctactcgagcagcctggccgtggccaccggcggctctgggtgcttgaggcttgcgggtagcgccggcccccacgccggccggagcatgcgactaaccggcctcatccgcatgcgtcttgtcctggctgccttctggccctgacggccggagtgtcggatcctagatggggaccctaggtgggagccgcggggtcacatcggggtcaccccgggctgagctcgtctgaccggctcccgcgcccctcctcccccggccaccgctgccgggctcacctcgctcccattggttccggccaggctgttactgaggcggagacacgggtgatgattggctttctggggagagaggaagtcctgtgattggccagatctctggagcttgccgacgcggtgtgaggacgctcccacggaggccgggtaagcggccgc

SEQ ID NO: 253454 - DNA, 412 bp, Homo sapiens
ggagggaggtgcatcaccggggccttgtgctgttagctttcagagacagcctatggtaatgacaagcaggcagcccaggcgcagtggctcacacctgtaatccagcactctgggaggctgaggcgggaggaggggtctcactatgttgcccaggttggttcgagaccagcctgtgagacctccttctccacaaaaaattcagaactagccgtgcatagtgggcacagctgtagtcccagttactgggcaggctgagaatggaggatcacctgagcccagaattcaaggctgtcatgagccatggtcacgtcactgcacaccagtgtgcaatcttttaagatcctgtctcttaaaagaaaaaaaaagcaagtaataaagatcgggcaaaacaaagcgagtcgactgcctacca

SEQ ID NO: 253455 - DNA, 494 bp, Homo sapiens
gaggtttagtaacacaccaggttgcacccctcacaaaggagggcagatgcccacctctcatcacaggcccatgctggggccatgcacacagattacctggaatgactggcccacagaacccatcattggatcacaggcccatgctggggccatgcgcacagattacctggaatgactggcccacagactccatcacttgggggtgtttgatgagagagacaaagtgagaaggcgagttaaatacgttttgatgaagatagacagagcttcactcttgttgcccaggctgcagtacaatggtgcgatctcagttcaccacaacctccgcctcccgggttcaagtgattctcctgcttcagcctcctgagtagctgggattacagagcctgactttctcatcgaaaccatggctgcttggacccaggctctccccatgaggtaataaatgtgcaagcactttgcagggaaaataagtgcctgacacctgacataaa

SEQ ID NO: 253456 - DNA, 1005 bp, Homo sapiens
  misc_feature (898)..(898): n is a, c, g, or t
tcttttaaacaaccatatctcaggtgaactaactgagtgagaactcacttatcatcaagaggatgatgccaaatcattcatgagggattcatctccacgatccagtcacctcccaccagacctcacctctaacattggaaatcacatttcagcgtgagatttggagggaacaaacatccaagccatatcaggtattgttgagttaagggttttggttttttggtgtatcttattccttcaaagcaggaatgtgtcattatccagaataaccataacttgttttttaaaagtgttctctgcagagaatacctattgagtgtcttcatgtttgttagctgaggttttggtgaaaaggaaggaaaggatttatgttcttatgaactaagctctccagtggtcatggtgttcttattgttttatgcattgtaattgtttttaatagtcttttatttgaggcacctgggttcttcagttccccagaggagagataaatcattctttaattatgaaactatctgaggcatacttgttgcatcacttaaaggcaggtttttttgtttttgtttttgttttttttttaagtttaaaggaaaataaaactctattgtgatcctgaagtcagcagtagaacttagtttggtgtgtatgtcccccagagctatcaatacatttagatgttgaggatggaaacaggtcaggtaaacttgttcatggttctaaggtagaagttagaatattacaataagtctttttgcagtgatgaaaatatttcatatctgtcccagctactcaggaggctgaggcaggagaatcacttgaacccaggaggcagaggttgcagtgagccgagattgcaccactgcactccagcctgggcgacagagggagacgctgtctncttaaattaaaagcttgaacggagaccaacgtctatgtgtctgtatatatatatatatatataatatctgtggctatttcaatgtgcatgaattaaaattcaaaatt

SEQ ID NO: 253457 - DNA, 545 bp, Homo sapiens
cggcgaatctgctgctaccaatgtaaaggtcaggccgaggccggcgcggagaatctgctgtcgcctgcagctgctcgcctgtctccgtcggaagggagcccaagctttgcagagatgaagtcttgctctgtcgcccgggctggagtgcagtggtgcgatctcggttcactgcaacctccgcctcctgggttcaagcgattccactgcctcagcttcccgagcagctgggattataggcatgcaccacctcgcctggctaatttttttgtatttttgtagagatggggtttcaccgtgttggccaagctggtctcgaactccggacctcaagtgacccacctgcctcggcctcccaaagtgctgggatagcaggcgtgagccactgtgcccagcctcacctaatggtttcttagcaaacttcagtagaatgtttagaacgcggccctgataaacttgagtgctggtaggaggtgctacctcgctcaatctgtgagcaaccagccctgtgccctggatgcttggccgggtggagagaaagacagtgt

SEQ ID NO: 253458 - DNA, 441 bp, Homo sapiens
cggcgaatctgctgctaccaatgtaaaggtcaggccgaggccggcgcggagaatctgctgtcgcctgcagctgctcgcctgtctccgtcggaagggagcccaagctttgcagagatgatgaacgattggatgcccatcgccaaggagtatgatccactcaaagcgggcagcattgatggcactgatgaagacccacacgaccgcgcggtctggagggcaatgctggcacgatatgttcccaacaaaggtgtcataggagatcccctcctcaccctgtttgtggccagactaaacttgcagaccaaggaggacaaattaaaggaagtcttttcccgctatggtgacatccggcggcttcggctggtcagggacttggtcacaggtttttcaaagggctacgccttcatcgaatacaaagaggagcgtgccgtgatcaaagct

SEQ ID NO: 253459 - DNA, 370 bp, Homo sapiens
ttgtcgctgattcagcatatacacatcctccagtgtgacaggattgtgtatggaaacaggtaagactggtgaatactaggctgtgttcaagtgtagagtctcatgattatcaccaatactgtgggctctccctcttttagatgagtttttctaccatatctttggctttacaaaatatattaacacagtttcataatagatctcttggaatatggtcgtttggtgttaagcattctatctggcaaaatgaaaaataagatggtaagagttatcctacaaaaatcctaatgttctcaagctactgctgaaattctttttctagtaatttacaaaaaagtccccattttcttgtagaaataagccaattaaa

SEQ ID NO: 253460 - DNA, 488 bp, Homo sapiens
aaacagataaacatcaagttgaaacaagaccccactgacacatgggacaaatgtgtcggagctggccactctctgcagggagaaacgcagctcggtttctccccagcttccagaacacccggcagcgcctgctctgccatcttcattacctcaacctccagaaactggggtgcccagggcccaaacccaacgtgtctttcctctcattgatcgcattcagtctcatggctttaaacacaatatcacaccaaatttacctcccgcctgggcctctgccctgtccttgggcctcctgcattttactgcccacctgcacctatgtttggacataaaagaaactcccagcgccacctgtaatgcggcactccgtagatcctccaagtcggctctgtctactgcaactctgcccatctcagctgagggcagtgccactgtccagtggtcaaaagccctggagtgcccctgactcctgtctttctctcacaccc

SEQ ID NO: 253461 - DNA, 340 bp, Homo sapiens
gctggaggtcattatcccaagtgaattattgcaggaacagaaagccaaataccgcgtgttcttacttataagtgggagctaaacactgggtgcacatggacataaagatggcaacaatagacactggggactcctagagggaagagagacagagggattcaaggactgaaaacaacctgtttgctactatgctcgctacctgagtggtggggtcagttgtaccccaaacgtcagtgtcatgcagtatgcccatataacaaaccccttaatctaaaacattgagattattaaaaataagagattaaagatatttttaaaataaaaaaaggtatatgccaaa

SEQ ID NO: 253462 - DNA, 1024 bp, Homo sapiens
tcgatctaaggatccccgggtttatcgatgccacccttccattttgggaagggtgacattgatttcgtttagctgcttaagatatgtacttgctgttgtcttgtgagacatgacatctgaagctgaagaggagtccctctcattgttgtcattgtcccaccgggactgaaagtctcccagttgaggcagcattttagctttgatgtctacagggcaatcatggatcaggaaatttctgcaaattagacttggaaaacaaggtcttgatccttcttgtctttggacgaagactaatcatcacttttgactgaaggtgtagtgctggagactatgttggaggcagcacctgatgcactatccatattcttccccttgatcttgtcttaaagttttccaaatggattccgaggcttgtctttgatgaaaaggtcaaacatactggcagtcatgttgtttctcataagctggatgtcaacctcaatttctcctctttatccttctctcctggtttggatttcaaggtataccaccgcatcttcctgctcccctagtctgggtgcaggtcctgcaggtacacctcggcgaagcccaagtacagtagcagcagcacctcaaaggtggcctcctcctctgacactgaggtggcatacttctccttacccacctgaatcaccgagtacatgttgcttgtaccgtcaggctcttggttcttggcccctggccctatgcctgcaacactgtcacctgcacgtggattgggaaccacatagcccccggacctgctaaggccattaaggacaggatggtgatgcctcggctgactgacgtgagaagattgtcatgacccatggcctctactgctgtcctaccaacagaaacttcataatgttgtgcaggcgttaccactacctagttccagaacattgccatcacccccaaaataaatcttgcattcattaagcagtcacccctattttcccccatccctgtcaaccactgatttatgttctgtctctatggattc

SEQ ID NO: 253463 - DNA, 1354 bp, Homo sapiens
tcgatctaaggatccccgggtttatcgatgccacccttccattttgggaagggtgacattgatttcgtttagctgcttaagatatgtacttgctgttgtcttgtgagacatgacatctgaagctgaagaggagtccctctcattgttgtcattgtcccaccgggactgaaagtctcccagttgaggcagcattttagctttgatgtctacagggcaatcatggatcaggaaatttctgcaaattagacttggaaaacaaggtcttgatccttcttgtctttggacgaagactaatcatcacttttgactgaaggtgtagtgctggagactatgttggaggcagcacctgatgcactatccatattcttccccttgatcttgtcttaaagttttccaaatggattccgaggcttgtctttgatgaaaaggtcaaacatactggcagtcatgttgtttctcataagctggatgtcaacctcaatttctcctctttatccttctctcctggtttggatttcaaggtataccaccgcatcttcctgctcccctagtctgggtgcaggtcctgcaggtacacctcggcgaagcccaagtacagtagcagcagcacctcaaaggtggcctcctcctctgacactgaggtggcatacttctccttacccacctgaatcaccgagtacatgttgcttgtaccgtcaggctcttggttcttggcccctggccctatgcctgcaacactgtcacctgcacgtggattgggaaccacatagcccccggacctgctaaggccattaaggacaggatggtgatgcctcggctgactgacgtgagaagattgtcatgacccatggcctctactgctgtcctaccaacagaaacttcataatgttgtgcaggcgttaccactacctagttccagacacagggccctcagtgaggaacacatccagcctatactggcttatcctcatcccttaaccctatagcaactaaggggattccttggcgtaatagctttctgccgaaaatggactcccaggtatggcgaaataaccaggtcattaaatacactaattaaggaaactcagaaagccaatacccatttagtaagatggacaactgaagtagaagtggctttccaggccctaacccaagccccagtgttaagtttggcaacagggcaagacttttcttcatatgtcacagaaaaaacaggaatagctctaggagtccttacacagatccgagggatgagcttgcaacctgtggcatacactgactaaggaaattgatgtagtggcaaagggttgacctcatgtttacgggtagtggtggcatcgataacaccggtaac

SEQ ID NO: 253464 - DNA, 232 bp, Homo sapiens
actagactctgagctcatctgaagacagactatccccaagttcttacacaaattctgccacagagtagacacttgacaaatgtttgctgaatgagaaagcatagagagagggtgaggacgctaaagaccacagagatcttccagttgttgaacttccacttactatgtaagaaattagaggtacagaagatttaaatactaaagccatggttagaaaacccatttccactac

SEQ ID NO: 253465 - DNA, 383 bp, Homo sapiens
agacacataaaccagtggaacagaacagagaactcggaaataagaccatacatctacaaacgtctgatctttgacaaaccagacaaaatcaagcaatggggaaaggactccctattaagtaattgatgctgggataagaggctagccatatagaaaattgaaactgaccccttctttacatcatatacaaaaaaaagactcaggatgaattaaagacttgaatgtaaatttaactcattttgatactgtttcttgtgcataaaaaatttaatacctctttaatgtgctatatccatttgcttgtatttgcgattatacttctattgatccaatctcagaaaaattattctgtgttcaataaaggcaataagatggatggatga

SEQ ID NO: 253466 - DNA, 430 bp, Homo sapiens
atgtttttgtatatgcatactttgtagaagggctaaatcaagctatttaacatatgcattacctcatatatttatcatttttggaggtgagaacacaaaaatctactcttactctcagaaatttttacatatagaatatattgttattaactgtagtcactactgtgatgaacaacagatctctggaaattattctttctgtctcattgacattttgtgtcctttgactaacatctccacaatgtgctcaactcccagcctgtggtaattaccattttactttctgttctatgagtttgaatatttttacactccaaatataaatgatatcatgcagtatttatttgtttctgtgcctggcttgtttccctcaacataatgttctccagattcatccacagtgctgcaaatcacaggatttctttctttt

SEQ ID NO: 253467 - DNA, 369 bp, Homo sapiens
tttgtatttttaatagagacgaggtttcaccatgttggccagcctggtcacaaacacctgacctcaggtgacctcccacctcggcctcccaaagtgctggaattatagacgtgagccaccgcgtccagactacctgttttttaactttataccaaagataagacatcgttgaaaggcaaattataagctgtgaatatatgtaacaaaaatgatagaagaaacattaatgtttgtaacatctaaagaacacacatgaggacacactagaggccaggagtttgaggctgcagtgagctgtgattgcaccactacactccgctccagcctgggagacagagcaagactttctctctaaaaagtagaaaacat

SEQ ID NO: 253468 - DNA, 464 bp, Homo sapiens
caagccatcttcctctcatagcttcattttcttggtaagataaaacaattatactagccccctgaggactatgttcgagtgagttctagtatgacttcataaacttgaaaggactacacaaatgagatgttgcaagcccgtttctcttcctggctctgtgcttcctgaaccctatggctagaggggagcatggatccccttcttgacttgctctgtcataaacatgatcttaaacgtgaacatgctcactattctaccttcaaggaaaggtcagcctaatgtagggaacaagcacttctgatcctttctcacctgactgtgctgatacacaagctctttggctagtgacagtcacctggccagccttggaggatgttactgggactgctgtctcttgactttgatgaggaaaacagttctgtgctcaaaaaaggaagagtgggggtccaggcatggtgactcat

SEQ ID NO: 253469 - DNA, 166 bp, Homo sapiens
gggagaggtgaaatgggagctctttttctttctgtgtttgactctgcattccccgtcctccccatataatcagtgaatttccactttcgaagcctcaatggatgggctgaattctccataaactggcattcttctttttaggaatccctccattatgaactacact

SEQ ID NO: 253470 - DNA, 275 bp, Homo sapiens
tgcctcagcctcccaagtagctgggattataggcatgcgccaccacaaccagctgatttttgtatttttagtagaaacggggtttctgcatgttgatcagactggtctcaaaatcccaacctcaggtgatccacctacctcagcctcccaaagtgctgggattacaggcgtgagccatcatgcccggccaacttttttattattcactaattagaagtagactttctacttctaattggagaaacaggattgctgcttctcaaaaaaaaaaaaaa

SEQ ID NO: 253471 - DNA, 483 bp, Homo sapiens
taggtgtgggaggtttcatagaataagcaaaatctggggttgtgttggtaatgtacaagagttaataaagaaaaaaaatgaccagagaaaatgggatatgttatactgggaataacaagtatctttgaatgctcatggactaatctgccatcttttcagatcctggggtctctatacatacttcagttatttgtttctgaaggttttgcagcaacaaaaatttttaacacatttgtcagatttgagttgtagaggcctctattatcctgttttagaaagaataaagaaaattttaacttctagaagctttatgtataacttgaaaatctcaaatgttccacaacttgtctttgggcaactacaggtaacaggattgataggagaagagtctggtgaaactaaagttttcatttagagagcccatgaggtagtttaaaaacagcaacaaaaaagccacaacaatttttttttggtcaggccata

SEQ ID NO: 253472 - DNA, 376 bp, Homo sapiens
gctgtccttggtgctccttggcttgtagctgcatcactccaattgctgcctcactccaattgctgcctctgtcttcacattgaccaccttccccttgggtctctgtgtgttcacacaacctcctaataaggactgcagtctttggatttagactccactctaatctagaatgacttcatcacaaccaattacatctgcaaagactctatttccaaataagctcacattttgaggtttggagaggacatgaattttggagagatactattcaactcaatagaggaatcttttttaaaaaaaatcaaaatcaatgcaaaaaatccataaggaacaaaatttcaaaattctaaataaagacagaatccacccctgcaga

SEQ ID NO: 253473 - DNA, 782 bp, Homo sapiens
gtctcttttgctggcttgtccaactctaatatattcttcctttttctttattagtctacccattctccttgagtaatacaatgaatgcctcaggtttccaccaaaatccatgtttataactgctttagaatgcttcattcaaatgcttccatcttggatgattccaactatccacttttccatgtctagagccaggtggccaagagcttcaagagacaaagcacaacaggcagattgacattgctataaattaatgcttgccaatctcatttgaacctcatcttatctacaaatcctatagatattttgtctattctgatcatgttgactccttgcaattacaatttcaaaccttctccacagtcttcaaacttcctgttcgtgcgttcccctttcatgtttgacagatggccttgtctcttaatttacagattaaaaacaacagcaaacagcaatattctcaataaaatctagcacttataatatattctgcattcttccagttccaatagaggaattgttgttcctcctatccaaagcccatgtttccagcttactctggtcctgatttttggtctcaaaaatcttactttattcattatatttttatatgtcatgtgtgttttactacttaaagtggatccttctcaaaatattttaaacatgcacaagtctccctcacttaaacaaaatttcctttagatgtaagctatctcattgtctttctccttttattttatagtcaaacttcatagaagaaaagatactaccctcatttcctc

SEQ ID NO: 253474 - DNA, 463 bp, Homo sapiens
ttggggggtgatggacaagtttattatcttgattatgctgatggtttcacagatgtaaaactatgtcaacatttaccaaagtccacattttaaatatgtgcaaaatttaacaaactgtacacttaaatatatcaattatatctcagtaaagccgttttcagaagtttgtaagtgaagcataaccccaatagatatttagttatgatgaattactttcaaattattagagatattgaaagagagagagacagaaagagagagaaaattgacaaatctagcaaagcaaaggaaaagatacaaaatgggatggggagaaagcacagtaaatgagacatataaaatgttatttgtaaaatgtaatcgactatgtaagtaatcacacctaactccgtctcagcctctgcttcctggatgaccttgctgacacgccaggtctaatctctagattctctaatttgacagg

SEQ ID NO: 253475 - DNA, 385 bp, Homo sapiens
cttgttaattttatattctttactatactttgagcatcctgttttttccattaactgccagatagtatatgccttagactttgcaggccatgtaaggtctctgtctcatagtcttcccattgttacaactctttaaaaatgtaaaaaccattcttagcctgggggccttaagaaaacatgctcctggctggatgtggtccttgggccatagttttggtgacctgctttagaaactataacgtgcatcctgctaaaaactaatctaagcctggcacagtggctcatgcctgtaatcttaatgctttggaaagctgaggcaggaggatcacttgaggccaggagttcaagaccagcctgggcaacatgataagaccctatctctacc

SEQ ID NO: 253476 - DNA, 685 bp, Homo sapiens
gttggtttggttcatggtctcaataatcttgtcctttacctcagccatttacttccataccctagaacttgtttttaaaaattgataacccttccataatctcttaattccatgtgttatactttaaatatggtacaaggccaccataactagacttaggtcaacatggtgacccccaaacctttgtgaattctacatctcatttgatggaaactgcaatttctaaggcaaaatttaacattcatccttgatcaaatgcgtcaggaaaacgtactaagtaccttcattgtaaggtatggtcaggtactttatcagaaaaagtaaatataaggacagaggtcacgatcagttggcatatatgttatcttggatcttacaatgtcttactcagttgcccaggctggaatacagtgccatagtcatagctctgtaacttcaacctactggactcaagcaataatcctacctgcttcagcctccttagtagcaaggactacaggcaggcaccgtcacatctttttttttttttttttaaagtatggatggggtctcatgtttcccaggctggtcttgaactcctggccttaagtgttcctctttggcctcccagaggctggaactacaggcatgggtcaccatatcctatacgtcttagatctggattcaagtacactaattgaacata

SEQ ID NO: 253477 - DNA, 416 bp, Homo sapiens
ctaggaagcaaaatagttgctagcaccaaaactgctcatcttggactttaagcttggaggaacctgtagggctgtagcgaaaactatggtgacaatagaggctttatttggagttccagagctgcctctgagttaatgtgcaactgacctttggcaagtctgttggatcttcagttttctcctctgtaaaatggagataaatagagtttcttgcctgtcctgcagggctgtgatgagagagtgtattgcagtgagtaaagtgctatatggtgcagaggatgataaattatccaggtttgtctgaccagtccttttaactagggagatggcatcaagctagtcccaacccacaagtatcctcactagcagcagctgcagtgctcagtctagttccataggagaatcctttagagatg

SEQ ID NO: 253478 - DNA, 676 bp, Homo sapiens
tctgttttccacataggtaaattatggcagagatgatattaatgaagagaggaactctattaattacctatttctatgtcaaagccagccccaaacttactggcttaaaaaagacaaaacaaccaaatttatttttttcttatagctctgtgggttggctgggcagtttgataggtctctctgggactcaggcttactaatgcgttgaattcagatgacggctggatgtccggaatggcccagctcacatatcagactgcttatgctggctgttggctgcaattccttggttcttttccatgtgggctttcatcctctatgaggctagagttatggcatggcaatctcagggcaggactctgggataaccaagtctgctgcaaaggcactcgttaaacctctgcttgcttcacttttgtcaatgtgatgttggcccaaaacaagtcatatggccaagctgagagtcagtacgagagtgagtttaggtgccttctcttgatgggaaaaatggcaaggggtttgtggctgatttggctgtttttaatctagagtgaaagttttcccactcttctaaaaacctattctttttcttttgtaaatgaattataatcccaaattggaaaattattgcctggcccccttactctggcgtggttgacatggaagtattatatag

SEQ ID NO: 253479 - DNA, 544 bp, Homo sapiens
gattatgtatatttgaaggcttatgaaaaattgtactctaaaaatatacgtttacatcttcacttggcacagtaggcattattttcttctgtaattttgccaacttagcagtccaagaaatgatactgccatttcttttttatcatttgaacttaaactttttaaatataaatttctagttcacaatattttgcccatttttctattgtctttaccttattaaattgataagaaccttaaaaattaagattataagtaacctggccaggcacgatggctcatgcctgtaatcccagcactttgggagtctgaggcaggcggattacttgagatcaggagttcaaggccagcctggctaacacggtgaatccctgtttctactaaaaatataaaaattagccaggcatggtggtgggcgcctgtgtctcagctactccggaggctgaggcgggagaatcacttgggcccaggaggcagaggtggcagtgagctgagatcacgccactgcactccagcctaggcaacagagtgaaactctgtctca

SEQ ID NO: 253480 - DNA, 278 bp, Homo sapiens
gtgaaactctgtccccctcaaaaaaaaaaaacagtggcggcgggagcccccggttcctcaccgtcttgtcccgtacgtagcagcatgccatcctgactgcggagagtgcagacagcagcagccctgccacctaggagcttgcagtctgaggcggaggtggggagtgggcccctgcagactcctcatatggttaggaagcctgtcctctggaccagacacagtcctaggtgctgaggacgcagcagtgggcagcagagaagcaaagccctgtctggctg

SEQ ID NO: 253481 - DNA, 611 bp, Homo sapiens
aagcagttattacagactcatcatgaatagacattacctattgtcattcgttgaataaactacgacttagcagttcagagcttacataagaaaagcagaatgtgggccaggcatggtggcatgcgcctgtaatcccggctacttgggaggctgaggcaggagaatcacttgatcctgggaggcagaggttgcagtgagcggagattgcgccattgcattccagcctggcaacagagcgagactccgcctcaaaaaaaaaatctgtatatcaaagagtttgtgttatgcttattccttgacaccaataaaatgaagatctaaagtaaaatgtgcattgttttgtatcttttattgagtgtctgtgatataagaatccctgggagtacagcagtctataaaataagctaagttatatatgtattgtattgggatcatgtgaagaattttgtatatgtatagggatgatgttagccagctatagtaggcaaagtaatttggataaacattagctgggttgagagaaatgttaagtaatggacttagggtgcattttaaaatccctgaaacataatgcctgagatctgaaagacagctaagggtctgaaaatcac

SEQ ID NO: 253482 - DNA, 394 bp, Homo sapiens
tctaattgttctatgattcatgacctgtgttccaacacctagaaacccatcaggatacaaatatatcacttaaaataagacacatagggatggttagtttttctgtctcattctatattgttctgagaaattacagatattttcttctaagaaaggcatgatcaactattcaagttttgctgaatctaaggtaatgtcagaatactcttaaacaccttacggcctcagatcccagtagtttagaattctagggatgatgtaaatttataatcactgtgaaaatgttatcctatcaaaactctgtagaaacatctatgcttttgcaataacagcgtaaaagacctcttctgatgagagagacagagagagagagagagagggagagagaaagaaa

SEQ ID NO: 253483 - DNA, 394 bp, Homo sapiens
cagatgcaaagaggcaagtaaaggaaagaagttggttaaaaaataaaataaagtagagaatagtggagaagagaaactaaagtggatgaaagacaaaaatatgaaaattgcaaggatcagaaatcctttcagtagctatgtgaccaccagaaagtcaaagtcctgacttgctcctcctcctgacaaaggtggctctgaatgaagggcaacctctccatgccggcaaatccgctcaatgttcatgcattcgatgaagtatgccacacaagatagtaatcagaggaaactcccaaaaatcaaaataaaaagaattaaaacagtgaagaaagaattatggataataataaaaaagaaattagatgataatggggaaacatataacagtctcacaatg

SEQ ID NO: 253484 - DNA, 232 bp, Homo sapiens
agtagagaaggggtttcaccgtgttagccaggatggtctcaatctcctgacctcgtgatccgtccgccttggcctcccaaagtgctgggattacaggtgtgagccaccgtgcctggcctctttctctctttctttctttttctctttctttctttctttcttccttccttccttctttcccttccttccttcctctctctctttcttccctttcttcccttccttctctttc

SEQ ID NO: 253485 - DNA, 355 bp, Homo sapiens
atgagtcagccaggtggtgtgcgcccagagtctcagctacttaggaggccgaggtaggaggactgcttgagcctcagagatcaaggcagcagtgagccgtaatcgcgccacagcactccagcctgggcaacagagcgagacccagtcctaaaaaaacagaaaaaaaaacagacttttgtcaactgggttctactgtgtgatccttcatgccctcaactaaaagctaagttcctaaagggatcatgtttaaatgtctgagtcctccacgggatagagtacagttctatatacatagtgtgctccaaaaatgtttagtgcttgactgattcaagagttttttcacactaagaaacag

SEQ ID NO: 253486 - DNA, 301 bp, Homo sapiens
aagcataaaatccttgaaccatagacccaagagaagacaaaataaaatgttttgatggccataaagctgcatgagaagaggattgtgatgaaaaaacaaatgtgacagctctgtgtagaggaggcttatgctgaggaggactgtttctgaatgttgggttacatgacttggaatattgatgtttctgcctcttattttgcattccttattaattcagagcatgttaatgcacttgtactccttacatttatacagacaaaaaagaggaaaaaacaaaataaaccatatgttaaaaagtata

SEQ ID NO: 253487 - DNA, 472 bp, Homo sapiens
ctcccaatgccaaattccaactttagtctgaagaccagttaggaattgaaatctttcatttctttgactcacagaccaatccagatgctgagactctgttactagattatgtagggtgtaattatgtcttttttttttttttaagaaatctcctggggattcctgtaacccaagtgagttctgcaacttggagtaaaatgttacttctttatttttattttcccctaactgaaagttgatgtttccttccaatttgaatgcaagtaaccaacccacaccaatattagaagtatttatgactttgtcagcagtagtaattataagaatttttatattgtattgcagttgttggagagatctccaaatatttaaactcatcattattttgaaatgaagatggttattagacccaccactacatttcaaaattttagtgtattaataaagaagcacatatattgctgtttacaaa

SEQ ID NO: 253488 - DNA, 451 bp, Homo sapiens
caatacttaagaagaaacagaaaacatgagtggtgctataacaccaaaaaagattgaattagtcattttaaaacttcccacaaaaaaaaaaaaacaaaaacataaaaacttcctaagctcagatggcttcactgacaaattctaccaaacacttaaagaagaattatcacaaattcttcacaaacgttttcaaaaaatgaaagaaaacacttcccaactcattctataaggtattacccgcattactataatgccaaaaccaaagatgtcacaagaagagaaaattataaatcggtatctcttatgaatatggatgcaaaaatttcccacaaaataccagcatgccaaatccagcaatatataaaaaggattacacaccatgacaaattgggatttagcccaagaatacaaggttggtttatcatttgaaaatcaattaataaactttatt

SEQ ID NO: 253489 - DNA, 419 bp, Homo sapiens
tgtctgtgctatcctgggatggaagaggcagggcaacatgaaaggatcacagtggtgatttgtccaaggcctaaaacaatcctctgttggaattgtcacagcccatctcttattccttagaaagcagaaaacaaaatgtggcttttatgtgtctggagacattaaattttggttcttgggttgaatctcacatgacagaaatcactaggacaacactggcaaccactcctaggagaaatgtttgttcttctttcaatataaggcaatgaatttgatatctgttgttaaagtaaataattgcattacgggggacataacttcctttgtttttctttaaataatggctgaacttattatctaagatgtttatgtactacaaactgtttatgtagttgactttctattgaactgaaattcac

SEQ ID NO: 253490 - DNA, 745 bp, Homo sapiens
taataagtcatttatgcccattttaattatccaatttaacacattcaacaattaaggcattcagattttggtgctaacagtcatatcaaaacacctcagatcctgtcttccccctccaaacatctgtaaactataatttatgtgaaaatatagctatccacttattgtaactggcaagatagaatagctattctcgaagacaatggttttcaactgtgactgcacaatagaaacacctggacaaatttaaaaacatgaaccatacctgtattccattgtaagccaactaaataaagatcactggaaagagtgagtgcccaacaatttttttcttaaattctccaggcgattctactgtggccaggcctaggattcactcctctgggacatttctcaggcagtgcattctctgactcgataaatgaagttcagccaagaataatcagtggaaagattgcctgaagtcaatgtcattcattactttccaggctaccatctttaattaacccaggttggcagaataaaggtggagtgctaggacaggattgtaatgccctagcagacttaccgtttccaaatttcccttctgtactctcatgtactttatgattagtcaattatatctgtattattccaactactatgatgccggaaaaacaggttggcatttttgaaaaagagttttagattcctatcattttaaaatggaaaattatctggttcttactaacttgcattgacgaat

SEQ ID NO: 253491 - DNA, 478 bp, Homo sapiens
gcaatgacttttgcaccaacctacgctaaggcagctaaggcagcacacaggagagaggaactctgagagcatcccagggagctggatggtgaaggaggagttggagttgattaggtgaggaatgatgattggggaggtgcattctgtgtatggaatgttcataaatgcatgaaagcttaagagcttacagctgggatgtcctgtgcggctagaactaagcaggtaagatctcgaaggtaaatctgattcatatcagagaggcctatcgtgattctaatgaatttggacatcattcttaaggtctccaaacacttttgatgatgcatccttttggtgaagaaaaaaagaaaggtacccatacctttcccaatataatacatgttatatttatgaataatgtacatgtattgtgtaaataaataaagcatacaaaaaatacaagtgtttaaaggatcaaattaaaggtaaatacaaaaaa

SEQ ID NO: 253492 - DNA, 364 bp, Homo sapiens
ggggaggggggttcatagtagaagagcgacggtgagagctaaggtcggggcggtgatgtagagggtgatggtagatgtggcgaattttggaaaagttgttgagaaccattcttgcagtgaggtttctgctgcaagagtcctggtctcaaagtgaggcagcagcctggcagtggcaactgaggcagagatgccaggtgttcagggcctagataactgtcagatgtgcgggagagaaggcaaggagacagcctagcagccttttgggtttctccttcgggtggctagctaagtgacggttgtatttgtaggaatagaaaatagagatgtggaaagggtaagaaaagaaggtacctaggagatgaag

SEQ ID NO: 253493 - DNA, 339 bp, Homo sapiens
tcgacggtgacaccattggggcattccgttatgtccagggtgatggtagatgtggcgaattttggaaaagttgttgagaaccattcttgcagtgaggtttctgctgcaagagtcctggtctcaaagtgaggcagcagcctggcagtggcaactgaggcagagatgccaggtgttcagggcctagataactgtcagatgtgcgggagagaaggcaaggagacagcctagcagccttttgggtttctccttcgggtggctagctaagtgacggttgtatttgtaggaatagaaaatagagatgtggaaagggtaagaaaagaaggtacctaggagatgaag

SEQ ID NO: 253494 - DNA, 703 bp, Homo sapiens
atttttggcacataaatgtaatattaaagtcagtgatgctataacttgcaatgtttgcatcatgtccaccttttttaaggagtgaaaaagccctagtatgtttttaaagaatagccagtgcaagctcagtactagagtgactacacacactgcatgttttcatatgtggcactttgatgtaccgtgttgggttattgttctagattggactgttaaatactatgttcaaggctgggttgtcatttttataaaggtcttggtgttttatggccattatttattacttttgatatagagaatgagctacgtgcatttataaagcaataagaggatgtatttaatgtgccttgttttgaactgaataagaaccggaagcatgaatcaataaaactgattaaaatggtcaaaaaaaaaagctggtgaagtatttatgttttcctttaaaacacatgcagaacacatatacgcatgcttgcgtgcacgcacacacacaactcacacacacaactctcacacacacacacacaccagccaaacagtccacctaaatggcgctgtggtggtgagagctctgggcaatggaatcttaccaaacgtgcagtgctctgttttggagacagtgacaccctttttgtttatttcagatataaaacaatgcaggctttgtcctgaatatcattatccaaacaagaaaagggaacat

SEQ ID NO: 253495 - DNA, 480 bp, Homo sapiens
ggacttcgaacctcgccccctgcacgacccacacaaagccctgagccctggcgttcccacccgaagcccccagtccccgctgccgccgtcttcttcacctgttctcgggaagggctgcatctccgagccgaagtcaggccgtgggccggggcgaggtcccagagaggccacagcggatctgccaggctgagccggagccccagcagccgacgagagatctcagagaccaaggctcgccttggcgagctcttgccttttcctcctcccgcaagtctcaaacattcatacactgagagttcagctctataaatcctgctcctctttcccatatcataattaaaaaaaaaacagtaggggaggttttaacttttattgcgatttctggagttgggctgcggagcatatattaagtttacgcttatgcgctctcggcggggagggtcctttaagaaataaaaatccatcttaatatccacagac

SEQ ID NO: 253496 - DNA, 493 bp, Homo sapiens
tgctggtgctcttactcttcttcaagaaaccaattaagatcctctatagagaaacaacatcatacagaatcccaaaattttcatatacaatgacttacactcaatcaaaaataactaggcatacaagaacttaatgcagcaacagaaaatcaaaacaagagaagtaacagacaacagaaacaaatatacaagggtttcacacagtgaaattaacaacatgaattctaaagtaacagcatgtttagggaaatcaaagactagattgagaactgcagccaagaagaagaagaatcgaacgcaaattccagaatggaaaaatacaataactaatacaaaaactaaaaatacaataactaatgctacatatggatatatagcattttaagtaaatacagttgaagagagaaattagtgcattgaaagccaggtcagaatagccatagtaaggcatagacaaaatgcaacattagataagagaacacgtcaagaacaa

SEQ ID NO: 253497 - DNA, 401 bp, Homo sapiens
caattctcctgcttcagcctctcaaatagctggggattacaggcacctgccaccatgcccaggtaattttttatatttttagtagagacagggttttaccatgttgtccaggctggtctcaaacacctgacctcaagtgatccaaaatgccttggcttcccaaaatgctggggttataggcatgagccactgcgcctggcctgctatcagctacctctgacttcagctggagcttcatctgtaagggctcccaggcgctcctggaaagtacacatttccccagctttcattcactttattcaatgattgagaaagagaaacatgcttggccagttcacaaatctgaatttagatgtttgggagttctccaatgtttcacttctttttgctgaggtaggctt

SEQ ID NO: 253498 - DNA, 284 bp, Homo sapiens
gaccagctaagggaggcaaggagaaggcccctaatgccccccaaagaccactgcctgttctgttcaggatccccagcatcaaatccatagaccctgggattgcttttggagatgggtagacaagcttggtgagctgtggaatcagtgaccgtgagaagcagccttaggacaccaaggtggggaagctgctggagaaagacaggtggcgtcaccggctctgagtctaaagggaaaatgggtggcaagaaggtcctgccagggttgcccagagaaaggtagacaag

SEQ ID NO: 253499 - DNA, 440 bp, Homo sapiens
ttgaaaattatttagaaatggtcttccctgtgtacccctgctgtctcatgagacttcaagatgaatgaggttcctctctccctcttatgtaatagctactttccaatctcattttctaaaaccaagactccaaagaggataaaagctaaacttagtatgatctttttaaaatttttaagataatgatataatgaaaaggaaaattagtccttgagctcctccagcctgggtgacagagtgaaagcctgtctgtaaaaaataaataaacaaaacatgtaaaggtaatttctatctacttatattttattcaagacttccttgaatgattcctttaaaccatcacaatacatgtgtatttaggagggaaaggaaatgattattgtcactttttagggtttctcaaacaacaattcacccaaaaccctttattttagtttaac

SEQ ID NO: 253500 - DNA, 280 bp, Homo sapiens
gtgtagcatctcaatgagggagggggcaagggtggaggtttgactgaatggaatgatttatgttcacagaccacataagtgctctggagacccgaacttgtcatccagcaccctgtttgacatcattctccacacattcatggactgccatcacccagccatgtaatgggtaccaagaaatgaccaaagccaggtccaaatgatcaaagttgatccaccccgtccctggataacacggaaacccttttgtcctactgggagactaagatgctacacttgg

SEQ ID NO: 253501 - DNA, 478 bp, Homo sapiens
agcaggaggcctttagcctgaggcagtctccttactcccagtgtctatgtaacaaactgcaaccacatttagtaagtaaacaaaccaaaacctaccttatgagtatccttttttttgtaacaaatagccatgttgcagccaatcacaaatagctgagcttcagccaatcacaggcaaccaattgatcagaccattcccaaataaggcagacaactcatcacatcgtgaccaaataaggcaaacacctcattgtacccaatcagataagttttctactttgcttccatgtttggcctataaaatcttactgctcatgccactgggcagtgctctctgaacctctttgggttttgagtgctgcccaattcatgaactgttctttgctcacaacataaagtgtgtttaaatttgatttgtctaatttttttaacacgtcaaattggtataatataatgtaaataaaatcagccaataatgc

SEQ ID NO: 253502 - DNA, 700 bp, Homo sapiens
ctaccgttgggtgtcatctttgatgaaatcttaaaaattaagatttaattatggtaatgagttaaaccgaagtagagatgggttctgagattttggttagaactgttgtcttgctatagctttcatgtttctttctataccctctgtgtttctaaagaactatgaagtgaaggcaaagatctactcttttctatttctatgaaaactgtacttcttttgtggggttgatggtacataaccatgtctaactatgtaccactgacgtgagtttcaatatgtggttctcttcacaaacaagcttcagttttgtatggtcattctcaagactctactgacatttgctccataggaccacagacatcagagtccttacaatgttagtcaaaagtaatctctctctgtttctctctctgtgtctctgtctatctctgtctctttatttctctctctgccacacacacacacacacacacacacacacacatgcacgcctgtgctcacacaagttatataatcctgtcccaggtccaaatactatttctaactgcctcattgatttttattatttcaactaagctatttacaggtatcctaagcactttataatattaaataccacaaaatatactgatatcatataatctaattgaggagaaaaatatatatgttaagtttcaaatgcataatgaatatagcattt

SEQ ID NO: 253503 - DNA, 1069 bp, Homo sapiens
caactttttaaatgttcatccacttcaaatcccttcctcttccctgtaaggtttattacactgtactcacaattggtgtgactcaccagcagaaggaaactggatatgactgggagttgtgcttagtttcctcattcaacagagatttatggagcacttgctatatggaaagcactggccttgggtctggaaggatacaaaaaaatgaagatcagtttcctgctttacattctagttgagataagaatggaacataaataactactgtagaataaatgttgtcttattcatggtgagtgccagtaaaaccttgaacttccaagagctaggcctcctatgttccagatgctgtgtcacacagtttacaatgttcccacttaaccttcgcaacaacctctaaagaagataattgccattcccattttacagctaataaaacaggaactgagaaattacaagtggaaggaaataagatctgtatacaagtacagatgtgaagagtggcttccaggtctttgttcttctctgtcaattcattgatgttatctgtcttcaggatttcattttacgcctatatcagaaataaataaccttgaggaaaccatggatgggtttcaaaaggtctatgaaagaaactatgtgcatgcttttttcttagaggtttttttcatgatattttcaaaatgtcttctgatcttagagagttttaaaattatccacatatttggacttttctctccactctaggtccttatttccaaatgtctactggaaatctacttttatatcctacagattgctcaccttgtcaaatattgaacttttactatccttttcccaaagttgcttactgttgctgctgtattgcctttcttgatgaatggtgtgctaccaccctttgtcttgggacctcccacttctttagtgtctccccctcctcctatctagttatttgcctcattgtgttagttggatttagtacagtttaataaatatggattacatgctactgtgaggctgatactgtggttggttctaacagttcaaaaattaaaaatgaaaacacaat

SEQ ID NO: 253504 - DNA, 173 bp, Homo sapiens
tctccagccttcctaaaaattctgtgaagcaccaaatatatttaagtaaatttcctatgtgctcaaccagccagtaaacaacttctgctgactgaaaacactgaatcgtccaatcatgaagccaaaagaatgtggctgtataacaagaaaaataaatccatgtatctacagta

SEQ ID NO: 253505 - DNA, 842 bp, Homo sapiens
gcaacacagtgagattccatctaagaaaaaaaaaaaaaaaaacaccaatcctcatttcaaggttcatctcaaaaatccatgaatcaaaagaggaggcctttaaggagaggttaaggcattctattcaagcctctttttttttttcagaggttcagggtttgttgagtaggaaggtatgatgtggctcctggaatgatgctcataccaaagggtagaattttcatttttaaagaattttgtgcaaaaatgatggaaatcttttttttttttaatttctaagggtgatatgactcattaatgcatcaggctttcttttacactagacagcaatcacatactcactactaaggttacctctgttagcaagaggtatctcatctataagcagctaataatgggaaccaaatagatgaaataaatcagatgtgaaacaaatataagaccctcgaaatgtaagtgaccagcaaagagaatagtgcatcttgggacataagctatgactatattagaccttcaaagccatatttgcacagataggtaaagtgctaggaacaggtgaatgcacaaccgtacctgtgggacaaaaggcctcagatgagataaagagtgaagtcagaagaagagagattttatataagccaccagaagacacaatagcactgcactctcacacttgggtctctgtctctttggacatctgtcttgaccattccaatagaaaatttaaatcttggttcaggctgggccattgatcctggtcccagtcctctattgagtatgtgtcagagattcctgggtgaactttcctctcttttcctaagggttccatgggagacaaatat

SEQ ID NO: 253506 - DNA, 789 bp, Homo sapiens
gcaacacagtgagattccatctaagaaaaaaaaaaaaaaaaacaccaatcctcatttcaaggttcatctcaaaaatccatgaatcaaaagaggaggcctttaaggagaggttaaggcattctattcaagcctctttttttttttcagaggttcagggtttgttgagtaggaaggtatgatgtggctcctggaatgatgctcataccaaagggtagaattttcatttttaaagaatttttcattaatgcatcaggctttcttttacactagacagcaatcacatactcactactaaggttacctctgttagcaagaggtatctcatctataagcagctaataatgggaaccaaatagatgaaataaatcagatgtgaaacaaatataagaccctcgaaatgtaagtgaccagcaaagagaatagtgcatcttgggacataagctatgactatattagaccttcaaagccatatttgcacagataggtaaagtgctaggaacaggtgaatgcacaaccgtacctgtgggacaaaaggcctcagatgagataaagagtgaagtcagaagaagagagattttatataagccaccagaagacacaatagcactgcactctcacacttgggtctctgtctctttggacatctgtcttgaccattccaatagaaaatttaaatcttggttcaggctgggccattgatcctggtcccagtcctctattgagtatgtgtcagagattcctgggtgaactttcctctcttttcctaagggttccatgggagacaaatat

SEQ ID NO: 253507 - DNA, 358 bp, Homo sapiens
agatgtgaccttatttggaaattaggtctttagaaggtaattggtcaaaatgaggtcattagggtgggccttaatccagtatcactgcagtccttataaaaagatgaaattttgacacaaagatatgcacagaggaagattatatgaggaaacacgggggaatgccattggagtgatgcatctactagccaaggaatgccaaagattggcagcaacacaacagaacctggaggcatggaagaaattctatatcacagccctcagaacaaaccaatcctgccaacactcataatttggacccagcctccagaactgtgagacaataaatttcctgttatgggctggacacgatggttca

SEQ ID NO: 253508 - DNA, 471 bp, Homo sapiens
cactacacgatgactgaatggtggcaaagaagaccctcctattcaggctttcagctacttttttccttctgatccttatgtgtggttcctgtggtcttggtcagtatcagcaaacatgtttagtgacaatgtgttacctgttacttctctatgctataagaaacaaaggaccatgcttttcatgtgagtggaatttagcactcattttgatattgccactagaattttatgttagataacaaaattatgtgtgtatgtatgtgcatactatatgtgtatatgtatattcatatatatgaagccctttaaagtgttcatttgcttttctcaatctgtatctatttatctaactagtgtatgtcatatagtatatattatgcaatattataaaagaaattatgcctgtcaattataagaaattatatatttgtaagaaattttgcctgcaattaaaaatatttcttacctagt

SEQ ID NO: 253509 - DNA, 779 bp, Homo sapiens
tagttccaaaagcatttattatttgctaatttgctagcatgcaggttgatgcaggttgataccaggtgttggatatttcttgaccagtcagacttggttaaggaatggagttggggtgagagacaatgcattaagttagtaaaaggttgtaggcaaactatgctcatcacaaaatgaatcagttagtaaaagacagcatatattatgtaatacaatgtagaaatctgaaggaataaaatggaagaaggcaatgtggatagatcttaaatataaaggtggttaaacataaatgagaatcagaatggtatttaaagcacagtgcttgtattggacctaaatcttatgtacgtccccagatttcctccctgctgccctgtcctatcgccccgtcagttgccctggaaatcccagttcctctgctgccaccagacagccaggtggaccagttgtgtgtctagtttctgattcctccagcgactaacagatttgtatgaaataccctacagagaatggaatctgacatccctaccaccaaagggggcagatgatgcatatattactttaagcagctaaagtggcagctaaactgctaaaactttttcagtctctctacattatattaaaaaccagattgctatgtataatatgcagatctcaaatgtcacataaacacatagaatgcaacagagtagttttataagttttctttcctgggacatctgtcaaatttagacatttatgattaagtcatataagccagggaagtacagattttccaa

SEQ ID NO: 253510 - DNA, 805 bp, Homo sapiens
ccctgagaggccgtgctcgggctcgcctgctcagctcactccgaaagcctctgctcagacctgcacccagtcacagcagcacagatgtgcaggaggagaccatttccacggaccctccgactcctaggaggcagtcccttagggactggccctaacaacaaatgaggagaagccaagttctctgctttctgcagacagggcctcccctggatgggatcttcctctgaggcgagcttcagatctgctcaagcttcctgcagtggggccaggaggcagggcctgggcaggggagaccagaacctctcggtgatgcctccgaatggcagggctcagacacacacacctggctgggtttcagatcccttagttttgggtgcccaagttcacggagggtgccggggaatagaagctctgtcagtctcgtctggatcttggtcctcagcaactgtctggatcctgacagccttggtctaggtctctccaggcctttccttcctggagccacagtgcttagagacaggccactggggtcagcatttgagctcagctatgatcagaaaaaagcaccgttgaggttgcagtgagccgagatcacgccactgcactccagcctgggcgacagagagagactccatctcaaaacaaaaacaaacaaacaaacagaaagcaccgtcgagaaatggctccagcgctgactagcggccacctcatttccccccttgaccactgggccagttgggtggctaggttgcctcattttgcatccttctgtatccccaaatctgaaataaaagctggaaaaaaa

SEQ ID NO: 253511 - DNA, 777 bp, Homo sapiens
ccctgagaggccgtgctcgggctcgcctgctcagctcactccgaaagcctctgctcagacctgcacccagtcacagcagcacagatgtgcaggaggagaccatttccacggaccctccgactcctaggaggcagtcccttagggactggccctaacaacaaatgaggagaagccaagttctctgctttctgcagacagggcctcccctggatgggatcttcctctgaggcgagcttcagatctgctcaagcttcctgcagtggggccaggaggcagggcctgggcaggggagaccagaacctctcggtgatgcctccgaatggcagggctcagacacacacacctggctgggtttcagatcccttagttttgggtgcccaagttcacggagggtgccggggaatagaagctctgtcagtctcgtctggatcttggtcctcagcaactgtctggatcctgacagtgcagtaagagcttgcctggcctgtgtgcagagctgcctcatcctgaaattctgggagttgaaagccccagggcaacccttaaccaatgggggaaaagcattggtgtgtaaatcccccagcttccctgggtgggctgcagctgagccatattctacatgacacttccgaggatccccagtgggcatgacctcaatcgcccacattggatgccacaacctgcactggcttttctcccttccctgtgggtctctctctgcacttcctcccttgtgcattctaggttcaccttccaaataaatgatgtgcactcagg

SEQ ID NO: 253512 - DNA, 1177 bp, Homo sapiens
ggggggcccccccaaatgagggaaaagattccctttggctcccccaaaggggggcaacgggccccaggagcgcctacacctccctggaggcccacacttctctccccagaagctcacacgcagcgtctgaggtgcagggcccaggtgtgctggggtgacaaagccccgagctgtggtgatgggagggaggaagcgccggtttatgtctgttctttgggctgatttgctgtctctgtctttgtctctaatgtcctttgcaccactgaccttgaggagccttttgttcctcctgtcccagtttggtttccatgggaacctgagtggcagcgtcatcactttgctgaggtgaaatgcccctggatgccatgaatacctaggggaaaacctgccagagaagaataaaccatccaagagacggcgctgcagggcctcacagtctgcttccatttcctctcaggtttcagatcccttagttttgggtgcccaagttcacggagggtgccggggaatagaagctctgtcagtctcgtctggatcttggtcctcagcaactgtctggatcctgacaggtgtgtgataattacttagtgaattcatgggtgtgggccgtgatagaattaagtgatttgatgtcctctcgataaatccaggtaacgacatagggttttttgagtttgaccctctcctgaaatttgccatctgacaaaatgacatcatggcagagttgtaaactgctgtggatgtatttatttaatttctcaaattaaaataaaaggtaacggtacacttaagagtggtcactacagccaagctaattgacacccactgaactttctggaatgggccataggatgctggacaataggacagatttggaatgagcagtcttccattccaactttagtttctgcaaagctgttgagagcatggagccaggctgcggggtctgggttcaaatcctgactctaccacttaggagctgtgtgtacatgggcaggacaactggcctgcctgagtctcagtgtaggtgtctgtaaaatggaatgataatagcttccatctcacagattcactgtgtgggtaaaatgatagatatgaaatgctaagaacagcacctgtacgtagtatgtcctacatatcttactgttatcattagcatatttgtttattccaagat

SEQ ID NO: 253513 - DNA, 433 bp, Homo sapiens
acaacaacaacaaaaaaccccacagaattgtacaacacaaatagtggaccctaatgtaaactatggacttttgttaataaaaatttatcaatatagattcatcatttataacaaatacagcacactgatgttaataatgggaggaattgggtgcaggggaggaggggttataggaggactcagttctatctgaccagttttttctgtaaacctaaaggcatctaaaaaataaagtctattaatttttctaaaaatctttcattgttaaattcagattttaccaagtgtactcaagtatgtggaacaattatgttttctaatagaaactttttaagattatttgttttatttatgaaatctaaattgctgaagctttttcaagacgactgcttccattttttgtggatctataaagaatgcacagttcatgttg

SEQ ID NO: 253514 - DNA, 419 bp, Homo sapiens
gaagacagagtctcgctctgtcacccaggctggacggcagtgatgcaatctttgctcactgaaacttccgcctctaggttcaagtgattctcctgcctcagcttcctgagtagctgggattacaggcacccaccaccacatctggctaatttttgtatttttagtagagaagaggtttcaccatgttggccaggctggtcttgaactcctgagctcaggtgacccacctgcctcagcctcccaaagtgctgggattacaggtatgagccactgtgcctcgcacatcctgcatctctttgtttctgaccatagacatctgaatatgaagccaacattacaaaaataagttgacataaacttgacctattcatcgtcctctttcagttcaactaacactttatacattcgtcgatttttcc

SEQ ID NO: 253515 - DNA, 2372 bp, Homo sapiens
  misc_feature (1930)..(1930): n is a, c, g, or t
ctccagagaggctgctgctcattgagctgcactcacatgaggatacagactttgtgaagaaggaattggcaacactgaaacctccagaacaaaggctgtcactaaggtcccgctgccttgatggattatacacttgacctcagtgtgacaacagtgaccgactactactaccctgatatcttctcaagcccctgtgatgcggaacttattcagacaaatggcaagttgctccttgctgtcttttattgcctcctgtttgtattcagtcttctgggaaacagcctggtcatcctggtccttgtggtctgcaagaagctgaggagcatcacagatgtatacctcttgaacctggccctgtctgacctgctttttgtcttctccttcccctttcagacctactatctgctggaccagtgggtgtttgggactgtaatgtgcaaagtggtgtctggcttttattacattggcttctacagcagcatgtttttcatcaccctcatgagtgtggacaggtacctggctgttgtccatgccgtgtatgccctaaaggtgaggacgatcaggatgggcacaacgctgtgcctggcagtatggctaaccgccattatggctaccatcccattgctagtgttttaccaagtggcctctgaagatggtgttctacagtgttattcattttacaatcaacagactttgaagtggaagatcttcaccaacttcaaaatgaacattttaggcttgttgatcccattcaccatctttatgttctgctacattaaaatcctgcaccagctgaagaggtgtcaaaaccacaacaagaccaaggccatcaggttggtgctcattgtggtcattgcatctttacttttctgggtcccattcaacgtggttcttttcctcacttccttgcacagtatgcacatcttggatggatgtagcataagccaacagctgacttatgccacccatgtcacagaaatcatttcctttactcactgctgtgtgaaccctgttatctatgcttttgttggggagaagttcaagaaacacctctcagaaatatttcagaaaagttgcagccaaatcttcaactacctaggaagacaaatgcctagggagagctgtgaaaagtcatcatcctgccagcagcactcctcccgttcctccagcgtagactacattttgtgaggatcaatgaagactaaatataaaaaacattttcttgaatggcatgctagtagcagtgagcaaaggtgtgggtgtgaaaggtttccaaaaaaagttcagcatgaaggatgccatatatgttgttgccaacacttggaacacaatgactggagacatagttgtgcatgcctggcacaacatcaagcctgtgattgtgtttattgatgatgttgaacaagtggtaactttaaaggattctgtatgccaagtggaaaaaaaaagatgtctgacctccttacatatgcaaaaatataccttcagagactgtcagtaggctggaagaagtggatattgaagttttgacatcaatgatgaggctccagttgtctattcattgactgatggtgaaatggctggagtgattctgaatcaaggtgattgtgattatagtgacaatgaagatgatgctattaatactgcataaaaagtgcctgtagatgacatggtgaaaatatttgacaggcttatggaaggactacagcagcacgcattcataacagaacaagaaattatgtcagcttataaaatcaaacagagacttctagacaaaaaccattgttgatgaggcagatgcctctagaagagacgtttaaaagccatcaaacacaatgcctcatcttccctggaggacccacttcctgatccctcaactgtgtctgatgtttcttctcatgtaagaaataaaaaataaaaataaaaaaanatatattggtatgtaactacaggaaaaaaataaaaaatatatagtggacagtaacctttcaatcaaaactcagtatcataagtagagactgaaaacttgccgttattgattgttgttattaacagctgatacaggtattctgctgatgctactgctgcctagttaccatgaacacgttttttcactattaatggtgcgtcatattttttacttttaagtacttacgtgtgagtaagtgtaagaaaatgattgcttatcagtagtatcaatgatttactcaatatctgaatcaccttgattcagaaccatttcagctgtttcaccatcagtcaatgaataacagcctcattgatgtcaaaaacttcaatatccacttctttcagcctactgtagactctggaagtatactttttgcatatgtaaggaagtcagattttttttt

SEQ ID NO: 253516 - DNA, 687 bp, Homo sapiens
aagacgtaggatatcttgaaatccttgaaagttctaccagtccagtgaattacgaagggatttaaagtaaaatttataatctggggcccactcataagccaattagggagtttctctatcacctaagaaaaagtatttgtaaaatcagcttgttcattaaatgtcacttacatgtttcacattatgaatttaataaatgatttgtaattaacttgaaaaatttagaagacagaaacacatcagacatcttcctgacgtttggcctttgcatgggctcttcctatcatcttaacacacttccccagacatctaagattccctcacctccttcatatctttgctaaatgtcttcttttcattatgaacttaatgaactgttctatcctgttaaacactgaaacctgccctctctcccaacctcccgaactcccaatgctccataacttgttctatatttctttttcccattgtactagacccaacatactataaaatttatttattatatttgttgttcattgactatcctccttgttagaatgtaagctctgcaagggtagtttcttttactaataatattccaggtgcctagaatagtgccttcacaaaaaaatgcactcaaatatttgttaagaatgaataaacaaacaaattcatgtactactttctcaatttgtgtcctgtctt

SEQ ID NO: 253517 - DNA, 239 bp, Homo sapiens
ggaaaattattgctttaattaacatttgtcattatcagcccatattcccttaagaatattaagccatttgatgatggatttttttatttgtttgtttgtttgcttgtatttcctagctttacacatattacattagttttcatttgtttgtttgttttgagtcttgctccggcctgggtgacagagcgagactctgtctaaaaaagaaagggaaagaaagaaaaaaaagaaaagaaaag

SEQ ID NO: 253518 - DNA, 246 bp, Homo sapiens
ctgatctgatggaattagtgtccttattagaaaagactccagagccttctctgtctctgcctctgcctctgtctctgtctatgcctccgcctctgtctctgtctctgcctctgcctctccctgagaacatacaaggaagagcacacagtgagatgatagcagcctacaagccaagagaagagacctcagaatgaaacctactcttccagcaccttgatcttggacatctcaacctccagaactgtg

SEQ ID NO: 253519 - DNA, 311 bp, Homo sapiens
aagcatggaaatacctgttcctgtcccgtgcttgtgaagaagaagggggtggtggtggtggtggtgtgcttgagtcttctctctgctcacttagaaagtgaaagaatccattcttgaacctacagatgaaagggaggtgctgtttcatgtgcagagctcctgctgggattctcagtctctaaggttctcacctaatgtacatctgccctccctgtgttgtttttttatatttagaaccaataaagttcttgcacagctacagttgttggcctgcactgctatcaagggtctctctctttctccctctccac

SEQ ID NO: 253520 - DNA, 670 bp, Homo sapiens
ctatgtgatcctaccaaccaacctcccaatcgctgggatagagacatgagccactgtgcctgactcaaaaatcatactttatccttgagccagtggtcaggatagattcgcacactccctctgcagtgactccaggagcccctctcacagctcagagcggaagctgaggctgcagcctgccatcttctccgaataggccgcatccaaagcgctttggatgaggcctattggaaggtggaaggttggagaggggagaggatcagaaaaaataactaatgggtactaggcttaatacttggatgatgaaataacctgtacaacaaacccctgtgacacgagtttacccatataacaaacctgcacatatacccttgaacttaaaataaaagttaaaaaaaagatagtagtagttcccttttcaggaaagaaaagatgaaagagagaaggggcccagataacttggagtgaagactaagacctaagagacaaccatctggcaggaaccaggaatcagtgagctttccggctttcttactgatcagaaatatgccataatttgcctttcaaggtgacttaaaagttctgttgcctgccaggaaccaaaaagaagatgcatgtatctttccttttgtagagcaggaaactcacctatgtgtaagacaggctgcct

SEQ ID NO: 253521 - DNA, 301 bp, Homo sapiens
ggctggagcaaggaggtggtgtcaggccaaagaaacaagctcatgagcagctgggagagacagggctcctgagggctgctgtgagcttggctagcagcagagtgaaaaggtgaacccagcaccccacatggagagggaccctcgaggccagcaatgccctgtgatataggaaaggacaggagcaattctctcctcaggagctttcccagtccctagtgtgagccccaacaatcaaaatcaggcaacgagcacaacacaaagattaaataaacaagaaaacaagtcgctataattgaaagcc

SEQ ID NO: 253522 - DNA, 413 bp, Homo sapiens
tttaagaattagatgctacattagaggtgctaaccttggagcagatatagaaagagctcctaaaatggcaagatgctcataaatcaatgaggcaaactcctcaagggtgacaaactggggaaggaacagtgaaaagttactccagggctgtacgcagcagatctttggggcatggaggtgagaaagacttggggtaggagggatctgggaaaacttccagcagatgctatgcctgagttaagttttgaaggatgtgctggagttagcctcataaacagaaataaaaacacagaactctaagtggtggtggagtatgatgatggaacagacatatttgtttatggtgaaggggcaggaaaggaggctgggtgttacagattgttggtagctttgtggcttaaactggtgtttaa

SEQ ID NO: 253523 - DNA, 385 bp, Homo sapiens
gagaaaaatgctgacatgggtgaagtgtaaatattttagtaggcttaatagtagtgggattggtgaattctctcactgcttttgttatttaaaaaaatgtaacagggctggatatggttcatgcctgtaatcccagcactttgggaggccaaggcagggggatcacttgagcccaggagttcaagaccagcatgggcaaaatggggaaacccagtctctactaaaaatacaaaaattagctggacatgttagcatgttcctgtagttccagctgctcgggaggctgaagtgggaggatcacttgaacccaggaggtcgagggtgcagtaagccatgattgcaccactgcactccagcccgggggacagagtgagaccctgtctca

SEQ ID NO: 253524 - DNA, 538 bp, Homo sapiens
caaaaagctaactgagctctagaggggaattgattaatatgcagtggctcatttataatttaacactaaatgataaatagattgtgatagttataagcacatttgatttccaaaaggggtttttaatcctatacctgactttctgtggcatcaaatataaatagatgtatactatttttgtaaataaattatatactctcataatcagatggtgccatgtagcccacagagccaaattatgaaaacaagacgtattcagtgaattcatctaattactgaagcagataagggccatgcaatgttagagtggataggtttgttggaaataacccagcatgcctcctcatttgatgggtacatgaattgaggcccccagacactgccagactgacaagacaagttagtgggaaacagactaggactctcatcggtttctaacacctgttttaagctgctgtttcgcagcaaaataaagccattaaaaggtgttctttggtgctgtcctccttttcctttaagtgataaggtccagtgagaa

SEQ ID NO: 253525 - DNA, 384 bp, Homo sapiens
gcctccaaacgtgggagaaggccttagagtctccttcggtaactgagaagcagaatactcccattgtatgaggttgcttggcagttgcagctgtcactcagacttcttatccacaccaagcacttccaaatacaggaaagaaattagactttgtttctctaccctatttggataataattaaatgtttcaactagaaacctcttcactctggcatctgaagcatcatcttagtgtcaacttctcttgaaaagggcacacacacatacacatgcatgtactcatacttgctattttctttgccaaaatgtttactatgttatgggaaaaaactttttctcttttcttgaaataaaattaatttcttttgtttgtgctttccttca

SEQ ID NO: 253526 - DNA, 519 bp, Homo sapiens
tcttggaaaccatcagccgttgtgaccctggaggtttccaaaaaagaggatgacacctgaacgcccagcaggtctttggaactgtgaaatgcttcatctgtggggtcctggcaatcatggcagtaagcatgtcttctccaaaggatgtccacatcctgatctccagcacatgtgactatgttagatttcatggcacaggggaattaaggttgcagctcgaattaagatagggacattatcctggattagatagtccaggtgggcccagtgtaatcacaaaggtcctcacaagtgaaagagggaggtcagagtgatttcatgtgagaagaacctgacccgctgtggttgtctgtgaagatggaggatggggccacaagtcgaggaatgcaggcagcctctagaagctgcaataggaaagaaagcggcttctctcctattttagccccccaagactgattttggagttctgatctccagaactgtaagattataaatttgtgttgtttgaaaaaactaggt

SEQ ID NO: 253527 - DNA, 511 bp, Homo sapiens
cagcctttcattaatctaaagattgcttctggctcactgtcttcctcttctgccctaaattggcttctttctaatacctttaacatctacattggtgaaccatccagggctttagactcctacctacttctatgtctacctcatctttagtcctttacttcagctccaccatatccagattacattctggatctagtcaccagaaattctatgcactctgaactcttgatttctagcgtcccactttgtaaccactgctaccacccgctatattgtgttgtcaagtattgtgttgtcaactgctggcacagttctttgacctcatcactttattatctatagctccttctggcttcatgatcatttattcattctttcagcaggtgtttattaaagttcctgttaagtgctggcattgtgctatgtgcctgggatacactgatggctaagagacatattctctgctttcatagatcctatatcctgagaaaggagataagaccaagaatat

SEQ ID NO: 253528 - DNA, 1015 bp, Homo sapiens
aaacgctggcgtcaccactagaccaaggagccctctggtggccctgtctgggcataacagaaggctcgcactcttgtcttctggtcacacctcactatgtcccctcagctcctatctctgtatggcctggtttttcctaggctatgattatagagcaaggattattgtaatattggaataaaaagtaattgctacaaactaatgattaatgatattcatatataatcatatctaagatctatatctggtataactattcttgttttatattttattatactggaacagcccgtgtcctctgtctcttgcttcggcgcctggatggcttgccgcccacacaagagcaccttaaaaccagaactgcttaacctatttctgagactccaaaaagctgttcgctctcatgctgccccttttcatatttctcatatccgatctcacacacaacttcctggggccactatctctaggtaatgatagagcagataaattcatcagttctatatttcaacaagcccaagcttcccatgctttactgcatcagaacaacttgcccttactcgtatgtttcatctgcctcgcagccaggcttgagttattgtgcaagcctgccccacttgccagcatgtccctggtgttgcacctgtggaaggatgcaacccacgaggcttggctccaaatgaaatctggcagatggatgttacatatatatagcagcctttggctaactccgctatgttcatgtaatatagacacttactcccatatgttacatgccacatgccaaactggggaaacagctggtcatgtctgacgatactgtctgtcgtcatttgcccatatgggggtccctaaacaatttaaaactgacagtggactcgcttatgttagtcatgctttcccaattttttacaattgtgggcaatcaatcataaaacaggaattccatacaatccctgagggccaggcattattgagcgggtacatcaaacactacaacgcatgctgaaaaaac

SEQ ID NO: 253529 - DNA, 778 bp, Homo sapiens
tagagacagagtcttgctctgttgcccaggctggagtgcagtggtgtgatcatagctcactgcagcctcgaaatcctgggctcaagcaattctccctcttcagcttcctgagtaactgagatcacaggtgtgtgtcaccatgcctggctaattaaaaaatatatatatgtagagagagacaagggtctcactgtgttgcacaggctggtctcaaactcctggcctcaatggattctcctgtctcagcctcccaaagtgccggattataggcatgagccactgtgtccagttatgtttgctattattattattatccttatttagatgaaacttaagaggccttaagtattccatgctcccacatttacctgttcctgttaagtgttttaaggtttctcctagttcttaggtcattgattgatttaactgtgatttctaaaatctcattctctctctctctctcctcaaccctgagcacacacacacacacatatacactcgtcaattttcactgtgcaccataacatgtattaattgctcttacatttcacagttatgtttgttacagcggcctcacatggaggtccctactgagattgtctatgtgccaggtaccatggatggtgttagggctataaagaaaaatggcacaccctgcctttgaaaaactgatggtctaacagtaagttgatatgttgataaataattgccaaacattgtgatgagtgcttgatagagtcacaaaggtgctatggagccccagaagaaggcacgactg

SEQ ID NO: 253530 - DNA, 435 bp, Homo sapiens
ccggcctcctgtcccctcctggtagcacatctaccaccccgtttcccttccctgtaaagccacccccctttaggtaaatcccagcccctggccaagtttgaggttcttatgatgtcctggtctctctctcctactccttttccagcccccacctcccgcctccctgaacttctgacctttgtacttgaggacttggatctggctctgcctactaaacctttttcctctctgatctgcagaagctctcctggcttagctaggttatgtttgcttcctgatagcgaaaccaggctgggcttgggccagggtgggctgggtgggtgtggaccgggagcagaggggaggtaggtgaggaccacgggagccaaggccctgcagggctgccatgcttagctggaggggcacggttgccctctcctctgagtggcaggcagg

SEQ ID NO: 253531 - DNA, 458 bp, Homo sapiens
caccaggccctgtcaaactggtgggttctgcatcgacttcaccagcgagatgtcggccgggttcagggtgtccagagcagctagtgcagcctcgatgcagaacccaccaggccctgtcaaactggtcatggagagcatctgcatcatgaaagggatgaagccagagaggaagccagaccccagtggctccggtaagatgatagaagattactggggggtatccaaaaagattcttggggatctgaaattcttggagagtcttaagacatatgacaaagacaacatccccccactgaccatgaagcggatccgggaaaggtttatcaatcacccggaattccagccagctgtcattaaaaatgtatcgtcggcctgcgagggtctgtgcaagtgggtgagggccatggaggtgtacgatcgcgtggccaaggtggtggctcccaaacgggagcgactga

SEQ ID NO: 253532 - DNA, 402 bp, Homo sapiens
ttctcgttttactgaattactaagaactctagtagattactgatggttgtggtgttgggtattttcttcctgttctgagcattaatgcaaatgcagccaatgcttcaccatcaagaatgatgtttgctgtagttttgtgggaattttccttatctttctagtttgcttggaactttaggaatgagtattgaattttattaaatgctttttggtactcactgagatgatataggtcttttctcttttaaatcagttaataaattacctatcagtctatctaaaatggtgattcatcattacattcttaaggtaaagccttcttggtgatgttaaattttatgtgaatgcactacctaattcagtttactaatacgatgcagtcatatttacacaaatttaggc

SEQ ID NO: 253533 - DNA, 871 bp, Homo sapiens
gcagatcacccccacctgcccggcactcactgtccccagtggctggactctcaccgggccagtcactgagctggggccagcctggtctcaccagtgtgtgtctttaaatcatccaatttcttcagctgtaaatcgggctgggaggggccaggtgagctgcctgcctcaggggagtcggcgcccttacctgagtgatcccattcactcctcacaacaaacccatgaggcagggattgtcatcttcattgtacagagcaggaaatgggtgcacacagaggttaagagacttgcccaggtcacacagctaggaagaggctgtgatttgaactcagtcttctggctccaaagcccccacagagtcactcagggcactacaaagagttaacctgaatatgaaatgatctaagagtcgcagtgacaaaggcatgctctaagcgcttttcctgcagtaacttgcttaatccttacaacaaccctataaagtgggtactgttctcgcctcattttgcagatgaggaaactgaggcacagagcagctcggagggggcagagctgaatctgacaggctacagggcccctgcgttgctttgttataagatgacaataaggaagttcctttcctttgggattatttctgcctgaaagctcaagacttttagccacatcattgtctgggctccacgggaaggcggtgccacatgctgaggcatgctgggaaaagactttgttccatcctgtttggttgacatgctcttcatttttaagcctgaaaccgaagcttcctgctaagaattcaaaccatggagaaaaacgcagccatgataacggccactacttcctgagcctccagtgttccctgtgcttggggatc

SEQ ID NO: 253534 - DNA, 417 bp, Homo sapiens
agatgggtctgcttccacttcgcctttggccatcacctgcagaaccatgaaccaagtaaacctttcttctttatgaattacccagtctcaggtatttctttttttcttctgcacaaattaaccttagcagcttaaggtgtttatttatagcaatgtgagagcagagtaacgcactttcccaatcataagacacttagattgtttccaatcatcacgatctataatgctgtcatgagtacctttgtactaaatcttgtaagcatctctaattcttttcttatattagagttttggaagatgaactacagagtcaaagaatacaaacaattttaagacttttaatatgtattgtcgagttgatttacggttaagttttaccaacttaaacacccacaagcacttgcttcactgcacggt

SEQ ID NO: 253535 - DNA, 505 bp, Homo sapiens
taaattaaatcaacaacaggatacgtgtcattttttcacctatcagattggtaaggattttgaaattcctaatatccagtttgggcaaggctgtgtaaaatggacagtctcttgttttgctggtggaagtatacagctttcctgacaagcaaattggcagtgtgtatcaagttcctgaaaaatattcataccctttattccaataattctgcttctaggaaattttagtaaggaaataaacagagatgtgaacaagtctttatatgcaaatatgttcattacagcattatttatagtagcatcagttggaaacaatgtaaatgtccaacagtaagtagatggttacagtgttataggatcagagtcatgcagccattcataaatattgtgtttttaaagaatattgtcatgaaaaatatgcaaatacaaagtattaaaaaggaggatagcaagcaaaatataatatcctgattttattatattaaatgaatacattgcagtagag

SEQ ID NO: 253536 - DNA, 396 bp, Homo sapiens
cagatagtagcagtgaatacctcacaggactgttgagaagactaaatgagatagttcaaggaaggcacgtggattgtgcctggcccatgtaactactcagtaaatgtttgctatctttatgtatttgaacccagagctttgataatcatgattcctataatcgcttttagattaaaagatacaagttttaactttaagagacaaattttaaaacacttaagtatcattttcatttatatatggtccatctcaccattccagcaggcccatctgcagtcatgttacggagtcaatgcaaacaagtaaaataaatgacaggaaaaataatacttttgatatgcacatcagcaatgtgaatatgagctaaagcattaataaagacagtttcatattctc

SEQ ID NO: 253537 - DNA, 447 bp, Homo sapiens
gcaacccccccccccagcaatatccatccaggaaaaaggctgtaagcccacagcgaggcgcaccccaaatgtgggcttggtggtgatactgtttggacatttgtcctgccctaatctcctgttgaattgtaatccccagtgttggagttggaggtggggtctggtgggaggcaatggcagcatggcggaggatctctcctgaacggcttgagccaccccttggtgatgagtgagctccgcgactccctgttctgatcatttaaagccatgtgatacctctccctaactctctgcctctccctaactctctccctctccctaactccctcaactctctcccccacgagcgggggtgttgttattaaacgtctgtggagcttctgctgcaaggaacaaaaaagaaaaaaatcaaaaaagcgacaaaaaaacacaaacagaagaggaaaa

SEQ ID NO: 253538 - DNA, 312 bp, Homo sapiens
tgcctttgtggcttttcagggttcagcccccatgactactctcacaatttgagtgcctacagcttttccaggtataggatgcaagctaccagtggatctaccaaagtcatatatcattccagcattagctcaaaagtcccaagtctcatgtaagaaaatgaaagtcctttccattgatggagctgaaaaccaaggctcgagaactacatgaagaatgcaaaagcctcaggagccgatgcgatcaactggaagaaagggtatcagcaatggaagatgaaatgaatgaaatgaagcgagaagggaagtttagag

SEQ ID NO: 253539 - DNA, 1237 bp, Homo sapiens
actcagctgaaagggttttcttgactaccattttccactgactttaggaacattttctggtttctatataaaggactgacttatcaataagccacatttttccccttcctggaaatatccttgagtctgtaggatttctctcctccacccaccccccacaccaagtttcattaatatgaataactttccatgtttcttgtgttcacagaatggcctgggaatttttagttgagccaaaaagatgaatgagctgtgcccattacaaaccttgttggttatctgactgctccacagctctaaattcacactcatgtaggtggaagatagcggagaagtaagttattaaaggtgtggtattattaacagtttgtttaatgctcattaaacaaagttaactgcctacttagtttattcatttagtattctttaagagataaccctgaggatcatattacacttcagagttatgtctaaggtgtttcatatttcaattctcccaggttttaagaggtagggatcaaattttggagtcttgatggtgtttatgacagttcttttccattgcattcaacaatgtagagtccaagtggaatctgagttatgtgagaatcatgtatttaaacagaaaagtgaatagttggaaagctgttcgcggtaaatgaaattatccataggacagaggccttatgccaagatggtagctctattactttagttcccatctagttaggggggaatgaactgttaccagatgggggaaagattagttatcatcagtcattctagcatatgacagcaaagatattagaaactaaattttattgttgaaaggactttttctttatcgtttcaacaaagaagacacaattaaatgtgtgccattcttccttcagtgaattctcctcaccatcactacagctttttttaaaaacaattttgtcagaaatatcttgagctttcagggcttcttgtgttcacaggatggcctaggaatttttagttgagccaaaaagatgaatgagctgtgcacattacaaaccctgttggttatctgactgctccacagctcaacattagttccttgatggctgaaatcaagaactttggaagaacttgggctccagagttctctttggcatatgtaagattcagacttgtgtgagaaacttgcatatgaaatcttttgggaagtaaatgctaaagcttggccacatgttgcttttgttcatcagtgact

SEQ ID NO: 253540 - DNA, 1892 bp, Homo sapiens
tggagccatgctccctgggctcttccgcgggcgcccgcgcgctgcccttcgcttgaggcaaaaggactcttgtggaagatggaactcattgtccattttccagaatgtatttccaagcccatcaatgggacctgatactgctgttctgtgttgaaatgcttgaagaactcctgcatctctgcttgcatcttccatcctactgaaaccatggtcttctcggcagtgttgactgcgttccataccgggacatccaacacaacatttgtcgtgtatgaaaacacctacatgaatattacactccctccaccattccagcatcctgacctcagtccattgcttagatatagttttgaaaccatggctcccactggtttgagttccttgaccgtgaatagtacagctgtgcccacaacaccagcagcatttaagagcctaaacttgcctcttcagatcaccctttctgctataatgatattcattctgtttgtgtcttttcttgggaacttggttgtttgcctcatggtttaccaaaaagctgccatgaggtctgcaattaacatcctccttgccagcctagcttttgcagacatgttgcttgcagtgctgaacatgccctttgccctggtaactattcttactacccgatggatttttgggaaattcttctgtagggtatctgctatgtttttctggttatttgtgatagaaggagtagccatcctgctcatcattagcatagataggttccttattatagtccagaggcaggataagctaaacccatatagagctaaggttctgattgcagtttcttgggcaacttccttttgtgtagcttttcctttagccgtaggaaaccccgacctgcagataccttcccgagctccccagtgtgtgtttgggtacacaaccaatccaggctaccaggcttatgtgattttgatttctctcatttctttcttcatacccttcctggtaatactgtactcatttatgggcatactcaacacccttcggcacaatgccttgaggatccatagctaccctgaaggtatatgcctcagccaggccagcaaactgggtctcatgagtctgcagagacctttccagatgagcattgacatgggctttaaaacacgtgccttcaccactattttgattctctttgctgtcttcattgtctgctgggccccattcaccacttacagccttgtggcaacattcagtaagcacttttactatcagcacaacttttttgagattagcacctggctactgtggctctgctacctcaagtctgcattgaatccgctgatctactactggaggattaagaaattccatgatgcttgcctggacatgatgcctaagtccttcaagtttttgccgcagctccctggtcacacaaagcgacggatacgtcctagtgctgtctatgtgtgtggggaacatcggacggtggtgtgaatattggaactggctgacattttgggtgatgcttgttctttattgacattgaattctctttctcatagcctctccactttatttttttttatagggtttgtgtatgtatgtgtgtgagcagtgtaaagaaagaatggtaattatagttctgttaccaagaataaataataggaaagtgattacaaatattacctccagggttcaatagaaatcctcaatttagggtgaggagacttttttttggttttggggtttttccttgattgattttgttttcatagtgggaatcaggattgtgctttattgagcctgcagttacattgaattgtaggtgtttcgtgtgctgctaaggtatgcttatttgagtttatcaagacttttttttttctggaagacactgctgcttttaccatcacattggagcc

SEQ ID NO: 253541 - DNA, 431 bp, Homo sapiens
tggagccatgctccctgggctcttccgcgggcgcccgcgcgctgcccttcgcttgaggcaaaaggactcttgtggaagatggaactcattgtccattttccagaatgtatttccaagcccatcaatgggacctgatactgctgttctgtgttgaaatgcttgaagaactcctgcatctctgcttgcatcttccatcctactgaaaccctgccgcctcaggcagcacctccaccccagcctcatgccaggacctttgctatggtaagatagctgctctctacttccacactgttcgcatgcagacagtgcagactgttgcagctcgcccaatgagttgcagtctcgcacctagagttggcagatcgcccatgagttagcagctcgcgctctgagttagcagctcgccctgagttagcagctcgcacctgagc

SEQ ID NO: 253542 - DNA, 2033 bp, Homo sapiens
  misc_feature (590)..(590): n is a, c, g, or t
  misc_feature (1763)..(1763): n is a, c, g, or t
  misc_feature (1773)..(1773): n is a, c, g, or t
  misc_feature (1816)..(1816): n is a, c, g, or t
  misc_feature (1820)..(1820): n is a, c, g, or t
  misc_feature (1830)..(1831): n is a, c, g, or t
  misc_feature (1850)..(1850): n is a, c, g, or t
  misc_feature (1852)..(1852): n is a, c, g, or t
  misc_feature (1857)..(1857): n is a, c, g, or t
  misc_feature (1862)..(1862): n is a, c, g, or t
  misc_feature (1866)..(1866): n is a, c, g, or t
  misc_feature (1874)..(1874): n is a, c, g, or t
  misc_feature (1882)..(1882): n is a, c, g, or t
  misc_feature (1887)..(1887): n is a, c, g, or t
  misc_feature (1891)..(1891): n is a, c, g, or t
  misc_feature (1893)..(1894): n is a, c, g, or t
  misc_feature (1920)..(1920): n is a, c, g, or t
  misc_feature (1934)..(1934): n is a, c, g, or t
  misc_feature (1938)..(1938): n is a, c, g, or t
  misc_feature (1955)..(1955): n is a, c, g, or t
  misc_feature (1965)..(1966): n is a, c, g, or t
  misc_feature (1969)..(1969): n is a, c, g, or t
  misc_feature (1982)..(1982): n is a, c, g, or t
  misc_feature (1989)..(1991): n is a, c, g, or t
  misc_feature (2005)..(2005): n is a, c, g, or t
  misc_feature (2020)..(2020): n is a, c, g, or t
  misc_feature (2025)..(2025): n is a, c, g, or t
tctgtttatatttcggtagccccatggggcgggtggccacagtttcagtgcagatgtaaatccggaagcctccagcacctgcagctcatagacagctctcgcccaccttctcccaggaccaagccagtcctgtccagtccagtgtctgagcagagtcagaatccacaccacccgccgcctgggctcagaaagttctgctttaagtcattatttctccactgtacgatggggaatgcggtgtgtgggggccatttacccaccaacacagcagctgtgaggcacacacggctattgaaaattcatggaaattgctgggtgtggtggctcatgcctgtaatcccagcactttgggaggccgaggcaggaggattgcttgagtgcaggagttccagaccagcctgggcaacatagcgaaaccacatctctacaaaaaaatcctccaaaattaaaaaaattagcccgagcatgttgttgcatgcctgtggttccagctactcaagtgatccttctgccttgggtttccgagtagctgcaattacaggtgcacaccaccacacctggctaatttttatattttttgtagagacggngctgggattacaggcgtgagccaccgtgcccggccgatttccccatttttataaggccaccagtcacatgggattaagggcccaccctgctccagtatgacctcatcttaactaatgccatctgccacaaccattttccaaataacatcctatgctgaggtcctgggggttaggatgtgatcatgtagattttgttgggactacaggcatgagctactgtggctggccaattgcagacagatggaactgtggccagccacttcaccagtgaagtcccaaacacccctctgcaggcatgataagctagggtagttcttatcttttcctgattcctgttctctgtgtgtttagtggggaccacagcaggcagggtggggtgttggtggaatttgggataagtggagtctgggcaggcctggagctctctgtctgccttctgggcccgtgttggctgaccctgttgccccctctgccctgctttggctgagctgaattatttcttggtccttcccttctgggggcttctcgcttaacctcctttgttgtccctgataaaggggccttgttagcccgcaccttccctccttcgtcacttgacttctgcctgctcattctttgtaccttagttttagcgtcacctcctccaggaagtcttctttgatttctcctcctccctaggtctcctctaggctcccacagctgcctgtgttccctgcatgacagctctgctttatactgggattgctccactgcactccagtctgggcgatagagtgagactccgtctcaaaaaacaaaacaaaaacaacaacaaaaaagaaattaaatgaaagttaaaaatttagtctctcagtgtattgatttgctagggcagccatgacagtctcacagatggagaggcttgaaaacagacatttatgctgccataattctggaagccagaagtctgagatgaaggtgtgagtagggctgggtcctcctgaggctgacggggatctgcccaggcctctcccagttcctgctggtggccggcgtccttgatgttccttggcttggagaagcgtcagccgcatctctgcctccatctccacaaggcgccctccctgggtctgtatccaaactcccccaactccttcaaccttttttattttaagagatgaggggccgggcgcngtggctcacncctgtaatcccagcactttgggaggccgaggtgggcggatcangagntcaggagatnnagaccatcctggctaacangntgaanccccntctntactaaanatacaaanaattngccngnngtggtggcgggtgcctgtagtcccanctactctggaggcngagncaggagaatggcgtgancccgggaggnngancttgcagtgagcngagatcnnnccactgcactccancctgggcgacagagngagantccgtctc

SEQ ID NO: 253543 - DNA, 665 bp, Homo sapiens
cagctcctaacaggtctcagaatcttacttgcagtaataatctctctctctcctggtagaactaccagctgagccccagtacatgaatatactatgagtcattcctctgagacatgaacagaaaacacaggcctgtcagttcacttttctaggaaagcataaagaacatccgccaaaggtctctgagttacatgggaacagtgaatcatgtttcacttataattctggggtttcacaagggtacatgttttggttttgttcctctttcagtcagtcagctacaagcttattgtcttccagtatctttcagcatttccaagagctagacactagattcttggtaacttggtgaatctatggctaagcctaaagcctgcgggagcaaaagggaaattaatcgctgggaaacacccctttatatgttaaggcctaaggccctcgctcccagattctctgcttgctgtgcgctggtgcaaggggaggggtggaggagtgcctgagaccaatgcttgtgaacttgccctctttttccccatcacagctgaacaagagcccccagtccctccttcactgaaaggttacaattttagagacgtcttaagattaataacccacaggcctacactgagggttgcaaggaagaacttgcttttcttccaatcaga

SEQ ID NO: 253544 - DNA, 419 bp, Homo sapiens
cagccctgatgctgggctttgatggagtagggggatttccagaggaagaggaggcctggtgttttgggcagagggactgggaaattcaagggatggaggaagaggagagggcagttagcaagagggatggagaaccatgtggctgcaagggccagtgggaatgtctgaactcacccaggtcttaggaggcagggctggcaggagcctggcattctcaggctcctcttggacagaccactcaggcatagactcgggtgatagcaacccaggagtgtcatctttcatcaaaaacagggaggaggccaagcatggtaggttacgcctgtaatcccagcaatttgggaggtcaaggtgggagaattgcttgagtccagcaatgagagattagcctgagcaacatagtgagaccccgtctctac

SEQ ID NO: 253545 - DNA, 2586 bp, Homo sapiens
acagagccacagagggctgtgagcttgcccagccccaggtaacgctggcggtgggtgggcctccagcttggagcagagaccccccgaggcatctgcagacagaactggatggacccatgaatacggatttagctgctggaaagatggcttctgctgcctgctccatggaccccatcgacagctttgagctcctggatctcctgtttgaccggcaggacggcatcctgagacacgtggagctgggcgagggctggggtcacgtcaaggaccagcaggtcctgccaaaccccgactctgacgacttcctcagctccatcctgggctctggagactcactgcccagctccccactctggtcccccgaaggcagtgatagtggcatctccgaagacctcccctccgacccccaggacacccctccacgcagcggaccagccacctcccccgccggctgccatcctgcccagcctggcaaggggccctgcctctcctatcatcctggcaactcttgctccaccacaaccccagggccagtgatccaagtacctgaagcctctgtgaccatagacctggaaatgtggagcccaggaggaaggatctgtgctgagaagccggctgatccggtggacctgtccccacgatgcaatctcaccgtgaaagacctcctcctttcgggcagcagtggggacctgcaacagcatcacctgggggcctcctacctcctgcgacctggggctgggcactgtcaggagctggtgctcaccgaggatgagaagaagctgctggctaaagaaggcatcaccctgcccactcagctgcccctcactaagtacgaggagcgagtgctgaaaaaaatccgccggaaaatccggaacaagcagtcggcgcaagaaagcaggaagaagaagaaggaatatatcgatggcctggagactcggatgtcagcttgcactgctcagaatcaggagttacagaggaaagtcttgcatctcgagaagcaaaacctgtccctcttggagcaactgaagaaactccaggccattgtggtgcagtccaccagcaagtcagcccagacaggcacctgtgtcgcagtcctgttgctgtcctttgccctcatcatcctcccctccatcagcccttttggccccaacaaaaccgagagccctggggactttgcgcctgtacgagtgttctccagaactttgcacaacgatgctgcctcccgcgtggctgctgatgctgtgccaggctccgaggccccaggaccccgacccgaggctgacacaacccgagaagagtctccaggaagccccggggcagactggggcttccaggacaccgcgaacctgaccaattcgacggaggagctggacaacgccaccctggtcctgaggaatgcaacagaggggctgggccaggtcgccctgctggactgggtggcgcctgggccgagcactggctcaggacgtgcagggctggaggcggcgggagacgagctgtgagccccgccaggactatgctcccaggcccctctgcccaggggtgccttggggatgctgcactgggcagctacccacctggggatgggacgtgaggccaagaccccagcagagatgccagaatgggggaggcacagctcatagccacacacccagggcctgactgaggcccacgcaggaaccgacactcagacacaaggcaaagagggccacaggacccgggaaatacacacagagccaggagcagaagcaaagagcagacacacatacagcctgaaacagacctggacagacagacacagcctgaaacagacccggacagacagacacagcctgaaacagacccagacaaacagacagacagacacagcctgaaacagacccagacagacagacagacagcctgaaacagacccagacacagcctgaaacagatccggacagacagacagaaacagcctgaaacagacccagacagacagacagacacagcctgaaacagacccggacagacagacagacacagcctgaaacagacccggacagacagacagacacagcctgaaacagacccggacagacagacagacacagcctgaaacagacctagacagacagacacagattgaaacagacccagacaaacagacagacacagcctgaaacagacccagacacagcctgaaacagacccggacagacagacagacacagcctgaaacagacccagacagacagacagacacagcctgaaacagacccagacagacagaccgacgcagcctgaaagagacccagacagagagacaggcagacacagcctaaaacagacctggacagacaggcagacgtagtctgaaacagacctgaacagacagacagacgcacacacacaacagatgcgcagcaactccccgcccagggacccctcccggcctccctcgcacactgggaggaggaagccgccgagactgcagggagcctggccccggagccccgggtgcgccctggtctttggagcagccacggcccacaatcaccccccttttctaagactgcctgatccgaaataaagtattttgacaaa

SEQ ID NO: 253546 - DNA, 130 bp, Homo sapiens
accaatcagcactccccatgccctagccccctgttcaccaaactacctttgaacaacccctaacccatgagccttcaattgtaaccgagcagcttagcagctgtgaatccaaaatatctgagacaggact

SEQ ID NO: 253547 - DNA, 626 bp, Homo sapiens
cagaatactactgtctggtcccactgcaggaaaagaggctgatgtctttgggtcagcagctggcctgtgcatgggacttttaaaagctcctcagggctgggcacagtggctcatgccttttatctcggcactttgggaagccaaggtgggaggactgcttgaggccaggagtttgacttgagaccagcctgggcaacatagcaagaccactagctgggtgtagtggcgtgggactgtagtcctagctactcaggaggctgaggtaggaggatctcttaaacccaggagtttgaggctgaagtgaggtaggattgtgccactgcactccagcctgagtgagagtgagaccctgtctctaataaaaaagcaaacaaacaataacaacaacaaaaagaaataaaagcttctcaggaaatttactgtgtagcccaggttggaaacaactgcctagagcgctatgcaacgaacacacacctggagacaggagggcgacagcaattatgtagaaaggcttgagaaaggaaaatatatcttgggaccccaaaatcactaagccaaagggaaaagtcaagctgggaactgcttagggcaaaactgcctcccattctattcctaaaacagctact

SEQ ID NO: 253548 - DNA, 397 bp, Homo sapiens
cattctgtcatccacaggaattagtcctgtatccgaaacattctctggtagtcaaaagcttataagcacaagatgtgaaggaggccacacttaaaaaaaaacttgaaatggagtttcatttggaaggacactgactaaggaaaaacagagaaaaggatgaaacccaagccaactctgcaactctattaaaaacaccaagacttcaatataatctccttaaagggaggcagtgcattcttcatggctagagcttcagcagctatctagaaccatatggtggaagccacttactgagaactgtgaaacaagagcctcctgggtccctgacatatgaagccaccatacctaccttaaagtgtctttcacttgagggaaaaatacatctttcttaggtaag

SEQ ID NO: 253549 - DNA, 398 bp, Homo sapiens
ctttaaaaaaaccaaatgaattggttcaatagagtagatgcaattgaggagagagttagtgaaccagaagataaagcagaagaaaatatcaacaataaagcattttgaggcttttagatggaaaataaatatcagattgtgaaagacatattaaatatggtggaaaggcctaatatatgtgtaactggaggttcagcaggagaggagagagaaagtgggacataaaaaataattggaaaaaaatagctgagatagttctaaaactaacaaatcacacaaagccacagaatccagaagccctagggcaccaagcaggataagtacaaagattcaacatagtaaaatttctgataacaaagctaacgagaacaacatagggacaacatggtaacatttat

SEQ ID NO: 253550 - DNA, 360 bp, Homo sapiens
ctaaaaaagtctcctctcctctccccctaggctatcttgtgcactctcaagttttagagccattgacttaataaatatgaagttgcaaaattaacctgattgagcctagttaatttttcttaggctccatccagggaacttccaaatgaatactgcactcacacccatctcccagtgagcaggtgagaggatgagggtgacctcctgggcagggatgagggcaacttgctgaagaaaggggcagcgggagccacttgcagccaacactcagcagctttcacatgggagctcctcccacctcctggagctaatttgaaccccattttacagagccagacaaagttgttttgtgctggtgcc

SEQ ID NO: 253551 - DNA, 310 bp, Homo sapiens
gaaaagtccacttagtgaatcacagtgggatggcaaaaattttaaataatttcattagctgttattttaaaaacaatttttataataaaagagaggtttcattcaaatatgtttaaacaaaagactagtttacaacgtggtcttttagttttatatgctttaaataataaccgtatattttaaaaggtggtactttttgatagagacaagtgaagttttgaaaccaaccaaaatttttttttttttgagatggagtctcgctctgtcaccaggctggagtgcagtggtgcgatcttggctcactgcagcc

SEQ ID NO: 253552 - DNA, 396 bp, Homo sapiens
cggcaacagaagaggaaaatcccgagagagaggttagaagaagcacaggtttggaggacagactcaatctgaatctcggctctaccaccactagcagtggaatttcttggcccctcgggttctttatctgataattaaaataaaaccttccaataattaaacattgatactgtattgacatatggaaaccctcaactctttctgtcacctcccgcctctctctaagagaaacaccagtcaccttctggtccatgtctttctggatcttttcgtagatatacctacctttgcctaaaaaccaaaatagaccatactgtgcaaactgttcagcaacctatttttctccccctgtcaataatttatgacggacttattgccttggcagtacaaataaat

SEQ ID NO: 253553 - DNA, 323 bp, Homo sapiens
ctgtgctaaggccccagcctgggatctatgcttcttcccagctcctgtggtcccatgtctacttctgtccttgtgctgactacacccagctctgactgcctgggtaatatcaccatatagtaatgaaccagggaaataaattggaaaaagggaatagaaagaaatgtctcaatgggactaattatggaatataaaacacaatgactccctgtatgcactggaaaaaggcagagagaaaaagctaacaagacaggcacccctagtgaagcaaattaggttcctgattacaccgctgtggagctgaaagagaaagttctccaggg

SEQ ID NO: 253554 - DNA, 274 bp, Homo sapiens
gcaacccttcccaaggcctgtctcttcagaagcacctcgacccaccaggctccctcaccagaagccccggaccccctgcattctcttcttccctatattcctctgtctcaggtcccatcatttctttcctcaaaatgtaccttgcagcttctggagagttgggggagactgagtgagcagactggtactccccacctttcatcaaccttgaatttcctacacacatgaattactttcacaatttaaaaataaaaagtgtcacttcaacttaaaa

SEQ ID NO: 253555 - DNA, 420 bp, Homo sapiens
tacaccagttatataatttacacttattagtatacaatggggctaggataaatttcaatagaaaagctctttttttcaagatagtttattcttattttcctgtcaccttcctcacttaactgtcgggttcagcaaacaaatatatcaagataacattaaataccaataaaacaaccatagcatctgaagagaaatgttcatgttgaaatttagtttttatactaatttcatcctccactacattaaaatataatgatattaaaaatgtatttcctggggtagtggggatactctgaggggcctgctgctgtgtgggtagaggatagccatagtacagccagggaagctgcccaaggaacagaagctgaagctgtagaatgatcatgggcgagaggttttatttagaatctgctcatgttt

SEQ ID NO: 253556 - DNA, 642 bp, Homo sapiens
aaaggtttggacacctctggctccaaagtggggctggaggctagagcaggggtggtctctgtaagagtctgatctcaagggggcctcataccaacaacatcaccttctttttggagaggcagcctagtggagtggctggtagccttaggccttctggggccagggaggacagagactaaaaccaggaactggaaggagaaagatgggaagaaataggagagaagagagcctgggtttccattttgctcccgccacttggtagctctgtggctttggcaggtcacttacccttttttggttcgtaagtcacttaccctctttgtcacttaccctctttggtatcatctgtaagataggatgatgggccaggcgcggtggctcacgcctgtaatcccagcactttgtgaggctgaggcgggtggatcacgaggtcaggagttggagaccagcctggccaacatggtgaaactccatctctactaaaaatacaaaaattagctgggtgtggaggcgcgcacctgtaatcccagatactcgggaggctgaggcaggagaatcgcttgaactcaggaggcagaggttgcagtgagctgagatcatgccactacactccagcctgggtgacaggatgagactccattt

SEQ ID NO: 253557 - DNA, 439 bp, Homo sapiens
agccattggagggctttacgtagaaaaggggtttgatctgaattttaccttgagaagatcactctgagcgcatggagaatggatcgtgtggggcaagactgcagagtcattaggagactatcttagcagtctggctgatgcatggtggtaaccaggagtagggtttcagcaataaagttggtgatgagatttaggatacatttggaagtagtgccaacaggacatgtatctccagatagcacctgccatggtgcctgaagcaaatcagtgctccgtaaataagggctgaatgagggaatccagttggtttagaatgcaacagaggactgccgtgttcatgaaaggaatttgtaaaatttcctcctaatagtaattgtatttttgtcacgccctcacttaggttgaaatttctcttgaagtttatatactggtcctatag

SEQ ID NO: 253558 - DNA, 418 bp, Homo sapiens
caaattatgagcagaaagggtaagtgttgttaatattttgtttcagttatatatacatacacatctacacacacacaaatgcaggtatgtattgaaatgcaaaatatgtttactgtgtcaaaatttaagactttaggctgagcacagtggctcacacctgtaatctcagcactttgggaggccaaggttggcagatcacctgaggtcaggggttcgagaccagcctgaccaacatggtgaaacctcgtctgtattaaaaatacaaaaattagccagatgtaatggtgcacacctgtaatctcagctatttgggagcctgaggcaggagaattgcatgaacctgggagctagaggttgcagtgagccgagatcgcaccaccgccctctagactgggcgacagagcaagactctgtctta

SEQ ID NO: 253559 - DNA, 358 bp, Homo sapiens
gacgcttggaacattcacaagggctagattatatgttgggccacaaaacaagacttaacaaatttaagaagattggaatcatctccagtaccttttctgatcataataacattagaaattaataacaggaattatgaaaaatggacatatgtagacattaagcacacactcctgaacaactacttggttgaagaagaaatcaaaagagagattaggaagtatcttgaggcaaatgcaaatggatacacaacataccaaaagttacaggatgcagcaaaagcaattctaagagggaagtttagagggataaaggcctacattcggaagaaagatcttaaacaacctaatttcacacccc

SEQ ID NO: 253560 - DNA, 613 bp, Homo sapiens
  misc_feature (35)..(35): n is a, c, g, or t
  misc_feature (37)..(38): n is a, c, g, or t
  misc_feature (53)..(53): n is a, c, g, or t
ggaattcgttacgaggacagatctagtctcaacanannaaaaaaagaattaanaaactaattaggaatcaaagggattttgttattgaaattgtcaagatagaacaggaagaataaatgttattttatgccccatccctgttaacatggagtatataaacctgcaagtggccttctgtgagtgtgagtgtgagtgtgtgtctccttacctgtctcactgtcttatcatccatgtgtttactggagtagcacttctaatttctttcaagaatttttcctttgtattcaacacttagctaacgggttggcacaagcagcttagcttttggcctttacatgcctttctcactaaactcaatcatttctagcttttaatttaaagtaagaaacatgcaacttttccttttagttgaaggaaggccactgatggtttggctgtgtccccacccaaatctcatcttgaattgtagctcccataatccccacgtgtcgtgggagggacctggtgggaggtaattgaatcatgtgggcaggtctttcccgtgctgttctcttactagtgaatatgtctcatgagatctaatggttttatgaagggcagttcccctgcacac

SEQ ID NO: 253561 - DNA, 384 bp, Homo sapiens
gtagagacagggtctcactctgttgcccaggctggtctggaactgctgggctcaagcaatcctcccacctcagcttcccaaagtgcttggattacaagtgtgagccactgtgcatggccagtgttttgttttttttttttttttttttttttgagaatcttactctgtctcccaggctggatgcaaattcaggagagattgaaaataaatgtgtatgtttatttaccatgtttatctgaacctaaatatttctttcttcctctttctctctctctctcttgctttcttgagacagagtctcattcttgttgcccaggctggagtgcaatggcaggatctcaactcattgcaacctccgcctcccgggttcaagcgattctcctg

SEQ ID NO: 253562 - DNA, 419 bp, Homo sapiens
caagtaatcgggttgtgtgtcaagtgtctgtatcaacctgggatactagaaatgaaggaggggagtggtttgaaagatactgaaagcaagaatcatgggatttctgcctgtcagataggggcattttaataagtctcctaagaaaggaatgccctttgattatgatcctcaatggagaagatcagtggagagccaatccctagtttggttggttagagttttcacaagttataagtcctgagtttcagtgcacaagtcccatttcaggggttcaaattacctaatctaaataaaaagccaggcatgctcgtgcaagcctgaaggccccacctgctcatgaagctgagagaggaagattgcttgagcccaggagttggagcccaacctgggcaacaaagcgagaccccatctccaaatta

SEQ ID NO: 253563 - DNA, 443 bp, Homo sapiens
gatggcttgagcccaggagtacaagaccagcctgggtaacatagcacaaccctgtctctacaaacaatcgacaacaaaaaaattagccaggagcagtgacacgtgcctgtggtctcagctactcaggaggttgaggcaggaggatcacttgagcctggaaaatcgagggctatagtcagctatgattgtgccactccactcctgcctgagcaacagggtgagaccctgtctcaaaaaaaaaaaaaaaaaaaaaaagtgaaaaccattcttagtggcaggctgtactgggcctctgggcaatcatttgcctagttctgatttaacaaactcttgtatggagtttactatgtaataggcattgttttaagcactttacaaatattcagccatctaatcttcacaacaaccctatgaggtaggctattattctccctttatagagt

SEQ ID NO: 253564 - DNA, 386 bp, Homo sapiens
ttcttgatctgggtgctggttacctgggtagtttagtgtgtgaacagttatcaaggtgtttctcttacaacaaataactttgttctcaatgaaaagtgtgcataaggccagaaacagtggctcgcacccgtaatcccagcactttgggaggctgaggcaggaggaccacttgagcccagaaatttgagaccagcctggacaacacagagagaccctgactctacaaaaaatttaaaatttagccatgtgtggtggcacatgcctgtcgtcccagctactcgggaggctaaggcaggaggatcacttgatcccatgaggttgaggctgcagtgagccgagattgcatcactgcactccagcctgggatacagaaggaggcccgtctc

SEQ ID NO: 253565 - DNA, 673 bp, Homo sapiens
tttataagttgtgtcatgatttttagttaaaccagtattcagtatttatattattatgattttataagtattatttctagctaagctatataatatgctatgataatagttcctttgttcaatttttgttttccctggagttaataattaccttgttttcttagttttattttgtataatagacagtatttttacataccagttactgttcttttattttttttgagatggagtttcgttcgctcttgttgcccagactggagtgcaatggcgtgatctcggctcactgcaacctctgcctcccaggttcaagtgattctcctccctcagcctcctgagcataccagttactgttctaagccctttataaaatttaactcacataaaccttctaaaaactgagaggccggatgcttcattacattccagcttcactggccttctattccttccaaagtcccaccttatagcttttaaccgtgtacaaaccctgagctagacacagggtgctgattggtgtatttgcaaaccttgagttagatacagagtgccgattgttgtatttactatccctgagctagacataaaggttctccaaggccccaccagagtagctagatacagagtgtcgattggtgcattcacaaaccctgagctagacacagggtgctga

SEQ ID NO: 253566 - DNA, 289 bp, Homo sapiens
gtactcaagaccagacagacctaacagacatttaggtctgtttgcagtaagtttgcataagtttgcagtaagcatgccactgcactccaacctagtgacagggcaagactccgtccacccccccgccaaaaaaaaaggaacgtttcattcaacagccccagaatacacattcttttcaactacacatttatatagcaataaatgcctatcaaaaaggagaaaaatgtcaaataaacaattgaacatttcacctcaaagaactagaaaaacaagagcaaactaaaccaaa

SEQ ID NO: 253567 - DNA, 645 bp, Homo sapiens
caaaaataaaccctcatgtatataatcaaataattttccacacgggtaccaagaccattcaatggggaaaagatggtctcttcaaaaagtggtgttagggaaactgtatattcatatgcaaaagaatgaagttggacccttaccttatatcataggcaaaagttaactcaaaatggtccaaagacctaagtgtaagacctaaaactgtacaactcttggaagaaaacagaggaaaaaagcattaagacaatatatgtatttcttggatatgacaccaaaagcacaggcaacaaatgtaaaaatagacaaagtggactatattaaagtttaaaacttctgggcatcagaggacacaattaacagagtgaaaagacagcctacagactaggagaaaatatttgcaagtcatacatctaataaagggttaatatttccaaattatataaacaacttgtacaaattaaaaacaaaataacccaattaaaaaatatacaaaggacttgaatggtcatttctccaaagatgatatgcaaacagccaacaagcatatgcaaatatgctcaataccacaaatcatcaggaaaatgcaaatcaaaccacaacgagatatcatgtcacaccaattaggatggccactattaaaaa

SEQ ID NO: 253568 - DNA, 256 bp, Homo sapiens
caaaatctagaagtgattcacgggaaagtatttcttccaaataagagaagacagcaaagtataatggctgtactggccatatggaacctcaccaggaagctctgtgataaagttgcccttctttctaatgtgcttcagcatcattcttggaatttttatttgtttgtttgtttctgatggagattatagttttgtgacagctaggcccttgtctgttgtttcacatttttctatcttataaaatttctacacctga

SEQ ID NO: 253569 - DNA, 500 bp, Homo sapiens
gaagcacccttttggtgttgggctttgcgctaccaatagagacgatgtggaagaaaacaagctcgcttccctcatttccctcagcgtcaagtgaaacacgcaggcctgaacagaccttcggtagcagcagctgaggaagaaagcaaaggcagcatcaccactccctctctgctgctacagtcaccctgagccagggacctgcaattgttggcatctgacctccttctggccctgacggttctttgtgatttcagttctctacctcatggcccaggaaagttctgctaatcttccaggggccacctcctctgggagtctcgcctggccctcccagtatgagtgttcaaaacacacacttgggccctattataatttgtcagaggtaatgatctggccctacgcacttgggttctctaagggcagggcctggacctccttcccttcttttttggaaatctgcacaggaaatgtcagtaaaatctcacctgctattgtaaaat

SEQ ID NO: 253570 - DNA, 378 bp, Homo sapiens
gcatgagccaccttgcctggcttaattgtgtttttttattagttcaagccacaataagaagtttattcagtcagcaatctgtttttgactacttaaccacgtgccagctacaaaaaaataacatatagcttcaaaagcctcttaagcggctgggcacagtggctcacgcctgtaatgccagcactttggaaggccaagactggcagatcacttgaggttaggagtttgagaccagcctggccaacatgacaaaaccccatctctattaaaaatataaaaattagccagacttggtggcaggcacctgtaatcccagctacttgagaggctgtggcaggaggatcacttgagcccaggagccagaggttgcaatgaacc

SEQ ID NO: 253571 - DNA, 213 bp, Homo sapiens
ttagatagtaatggttaggtcatttagaatttgaataaattgctgaaatggtatgaaatcactaaaaagaaatgaagtcagaagaattactagacttcacataaaagagtactgaattaggtcacagaaaaatcagagctggtaacactggcaggaactaggatttctaggttccaggaatggcaggctgagttattcagaccaaattgccca

SEQ ID NO: 253572 - DNA, 287 bp, Homo sapiens
gagacggagccttgctctgtcgcccaggttggagtgcagtggcacgatcttggctcactgcaacctctgcctctcgggttcaagcaattctcatgcctcagcctcctgagtagctgggattacaggtgcccgccactgcatccagctaatttttgtatctttagtagagacagggttttaccatgttggccaggctgtaccagctttttatgggtggtaaaggtgggggctagaacagtcttcttttagttaaatcctaattcaccccttctttcaaagttttactt

SEQ ID NO: 253573 - DNA, 450 bp, Homo sapiens
tgttgttttcttttttccctcttttgcagctgcaaggaatttgggccaaattagagaggctttgttacccataatttggaattctcactcagatcggaccaagtcaggtagagttggtcaaatctgatgggagaaagaccggaataaacaacaataacaaaaaacccccaacatgatcaccgagcgctctaacggtaaagagaaattaagaccagctggtagttaaactttaaccaagacaaaaccccaattcagctacttacctaggaatgggtctcaggctgaagactgctttctaccatcctagaagcaggaaaaaaaccctcaaactcatcttccttgctgggagtgagctcaaactctataaggcagttacctgccttccattgtcatggaaacaggaaatcctaccttccttgttggaagcaaggaaaactccaaaaaaaaaaa

SEQ ID NO: 253574 - DNA, 391 bp, Homo sapiens
atagctaaatatcctagtgtgagttaaggttgattaagtgatcatctttaactctgcttttcccagggctctttgaactcttgttttattaggtaatatgctatgctgttattttattgctgtttaaaaaaccttctcttttgggaaagaaaacatgtgaattctttggtttctagatagaaattagcaatcttttgctcggaatgtaaaagtatgctgtattatcacaaactgaccctcctcctcccccagaattctagggagtaaaatgcgtgcacaggaaatcagaaatggatcaacagagttataggttttaaaaaaactgccttgcatttttgccctggaattaattttcagtgaaaattaaaatattttttctgttcatctggaa

SEQ ID NO: 253575 - DNA, 477 bp, Homo sapiens
cagtgggctgagattgcgccactgcactccaggctgggtgacaagagtgagactctgtctcaaaaataaaaaataaaaaataaaaaacaaacaaacaaaaaacacctcatatatgacagctactctatgctatctctgaaccacatagcaaccctgaacattctacggagggggaaactaggactcagtgattaagtaaagggcccaatatcctgggccctataagtagcagagctgggactcaaacccatgctgtcagattccagatcccatgcacctcactgctgtgccatgctgcctctcttctgtggacagagataaagtagccaggcatggtagtgcatgcctgtaatcctagctactcgggatgctgaggtgggagaatcacctgagcccaggaggtggaggttgcagagagccgagactgggccactgcactccagcctgggcaacagagtgagaccctgtcttaaaaaa

SEQ ID NO: 253576 - DNA, 342 bp, Homo sapiens
ctgtagtccagctactcgggaggctgaggcaggagagtggcatgaacccgggaggcggagcttgcagtgagctgagatcgcgccactgcactccagcctgagcgacagagtgaaactccgtctcaaaaataaataaataaataaataaataaaatatagtttataaaaaaggaactactggaaataatataaatcataagtaatctctagccacaaatagctagaaagtgtaatttttacaaaggtaccatttaccataaaaacaaaacaaacctttaaatacaaaagatttatatgtcacagaaaatataaggtacttagaaataaattgatttaaatatt

SEQ ID NO: 253577 - DNA, 311 bp, Homo sapiens
actcactgtccaggagaagaatgtcccagggtcaactgatcagttagggtagggcaggaaccagtcatagtggtggaaggtcatatggagggtcaatcggtgaaggcaggaactggggtttcacttcttctgtggtttttcggctgctccagatttcgtggctcctgcagaccatctggacatatgtgtgcaggtcacaggggttataaaaaatctgagctttggctcagaggcctgacagaactcacacacacacacacacacacacacacacaccatattcatacacatgtgggcaagtgtatgtatgc

SEQ ID NO: 253578 - DNA, 792 bp, Homo sapiens
gaagatgacttaagtaagtaaaaaattgaaggaggtaagggagttagtaatgtagatacattgggaaatggcattccaagaagcaggaaagtaaggccttgagatgggagcttgctttgcatatttcagaaatatccaggtacatgttactagagtgaacaacaggagaatatatgggagatgcctttggagagataatgggggctaaattatatgacatcttagaagcttttactcccaattagactttttactctaattctgggctagagtttttactcccagtgaaatgataagtgattagtgattttgagcaatgatttggcaaatctgacttacattttgagagacttgttctaactagaacgtggaaaacaaattgttggaacatcaagattggaagcagaccagttaggaagttatagccatgattcaggtgagaaacatggtagttgagaccaagatggtagtgctagaggtggtgagaagtggtcacattctgtatatactttaaagatagagcggacacattttcctggtgaatacgatggggtgagtgtgaaggagtagaaagaaagaaaaaaaaagagagaagaaaaacaaacaaagcagtcatgtattcctcccccaagttttgacctgagaatataatggatttgacctcacatacagtgggaacagtgaaggtggcacaggtttgcagagaattcaggagtttacttctgagcatagtcaagtttcaggtgttagctaaatctctaaattgagaaatggaataaactagctggctat

SEQ ID NO: 253579 - DNA, 243 bp, Homo sapiens
ttgtacctctgccctcagtgctcaccgtgagacctggactacgccactcttccttgttcaccaaggacatggcctctggcttatcccagcctcctctccaacccctcttccttgactctctcagtcgtctccgtgtcctcaggaagaactagaattccagtcccgcgcctcttgaactccatctcctttgctctgcccaacagctgcccccaccccacgatcacaccctgagcctttgtatca

SEQ ID NO: 253580 - DNA, 439 bp, Homo sapiens
caaatttaaaaaaaaaagaaaggccacttgacatttgattcctcttctcaaaaactgatacataggtcagtcatggtggcttacacctataatcccagcacttttggaggcagtggtggcagtatcacttgagcctaggaggttgggtctgcagtgagctgtgattgcgctactgcactccagccacagagggagactggtcgcaaaaaactgatacatgaaatgcataaaatattttcttgtttcttataatgcttttcatttggttccttttctcacatactagaaatgctgatttttatatgcatatagttagctgaggaaatgtctggttttcttggataatactatttcctattctcttgagttgttacacccacgttgtgttgactgttatctgatttaatcttatcctgcaagcattttttttcacaattgt

SEQ ID NO: 253581 - DNA, 1014 bp, Homo sapiens
gttggggagcacgagggggtggctcgaggcgggacggaggggcaggaagaaatagcaggaagacccaggggcaggaggccggtgttcaagcgtcgaggaacgtttcatcccttctgaatcccaggcctcgctggaccacggacccgccaggttctcccgcaacttgcggacgtcctggaccggcccttcccagaggcgcacggctgagtcccaggagcaggacctgaaccaggaaggggaggggcgagcacagtcctgcctcctcctccccgcacagtgctgggggaatgacccccactgccttcttctcctcccccaacactgcagggggaatgacccccactgcctcctcctcccaacacactgcagggggaatgacccccactgtcttctcctcccaacacactgcagggggaatgacccccactgtcttctcctcccaacacactgcagggggaatgacccccactgcctcctcctcccaacacactgcagggggaatgacccccactgtcttctcctccccccacactgcagggggaatgacccccactgtcttctcctccccccacactgcagggggaatgacccccactgtcttctcctccccacacactgcagggggaatgacccccactgcctcctcctcccaacacactgcaggggtaatgacccccactgcctcctcctccccacacactgcagggggaatgacccccactgccttctcctcccccaacactgcagggggaatgacccccactgcctcctgctccccacacacacactgcaggggagtgacccccatattttaatgcagtggtttctctggtcactcacggtccagcactagcacgcagcagtcggggaaatgctgtgggtatgagacggcctggattttgaaggcgctgcatgaaaaagaatgtagagaatctgaatgcattttatgtatagattgcatgttgaaatgatgctgttgggatatattaggcaaaataaaatatatcacaattt

SEQ ID NO: 253582 - DNA, 368 bp, Homo sapiens
caaaaaaaaactataggccaataaccctgatgaacacacatagatgcaaatatcctccacaaaatactagcaaactgaatctaacagcacatcaaaaagataacgcagggcaggcatggtggctcactcctctaatcccagcacttagggaggccaagacaagtggatcacttgagttcgggagttcgagatcagcctggccaacatggtgaaaccctgtctctactagaaatacaaaaattagctgggcatggtggcaggcacttgtgatcccagctactcgggtggctgaggcaggagaatggcttgaacctgggaggtggatgttgcagtgggccgagattgcaccactgcactccaccctgggc

SEQ ID NO: 253583 - DNA, 1101 bp, Homo sapiens
tcagattgattatatagaaaagctactagaactgggaaatgagtttagtaagatgcaggatactacatcaatatgcaaaatgtatttctctatatacactcagaaattgaaatatatctcttacaatatcataaaaatataaaacacttagtgataacgtgtgacaaaagttgtaaaaaacctgtgaaactggaaagctacagatcattaatgaaataaattagagaaaaataagtaaatggaaatataaaatacattcatgtgccattcatagtattgttgtcaattcttcagaaaattgatctatagttttagggcaatcccaataaaaaaccaaggaggcatatttgtagaaattgatagactaattttaaaattcacatggaaatgcaaaggacttcaaaataaccaaaaaatgtttaaaaagaagaaaaaaggtggaggactaacaccacttaaggtttattataaaccttcaagagcatagctgtgtggtgttggcataaatataggcaaatagaataatggaacaaaatagagagtccagaaaccgacaactgcccccccaacacatatatagatacatgatttttgacaaaagcgcaaaggcaattaagtgaaaaagggatattcttcaagaaacagtgagtgctggaacaattggatatccacctgcaaaaatataaaccttacctcacctaatacagaaagattcaaaatggaccatagacttgaatgtaaaacctaaaactactaataaagtagttttatatgtaaaccttccatcttttagaagaacacataagatcaaaacttagcgcacttgggtttgagcaggcaaatatttcttatgacaacaaaagcacaatccataaaagagcaaattgctaaattgaacagcatcaaattaaaaacttctgtatttaagaaagaataaaaaggaatgtaacagactgggataatgttttggaaataaagtatctgatgaaggatttatatccaaaatatgaaaagaacctcaaaattcaaaaagaacaactaaaaaaattggcaaatgtttaaacagacatttcaccaaagaggatatatgaaaagcaaata

SEQ ID NO: 253584 - DNA, 752 bp, Homo sapiens
tgggaagggagcagccaggggcagacgaaaccctcaatagagtcaacgagggaagagaaggaacggtggatccgttccaaatatgagcataagctctttctggccccactaccctgcactgagctgtccctgggccagcacctgctgcgggccaccgctgatgaggacctgcggacagccatcctgctgctggcacatggctcccgtgaggaggtgaacgagacctgtggggagggagacggctgcacggcgctccatctggcctgccgcaaggggaatgtggtcctggcgcagctcctgatctggtacggggtggacgtcatggcccgagatgcccacgggaacacagcgctgacctacgcccggcaggcctccagccaggagtgcatcaacgtgcttctgcagtacggctgccccgacgagtgcgtgtagtatctgttttatttgactgcagtctccttggtgtaaaaacaaaatgggaaaaataaggataactcagaatttcaaaaggaaatcacaaattcagctaataatagcattttcagtacttttcgtaaactaagtaaatacacaaaatgttgatttttctgaccataagacatattttatgtccttttgccgaggtgggtgtgttagtctcaggccctcctggccacattgcccaagtcacacaggcttctgtattatgtatttagataagatgtgtgaaaatatatttgaaaaaaagttcataaatatgcattgatttttgt

SEQ ID NO: 253585 - DNA, 251 bp, Homo sapiens
cactccctcgagcacaccttcatctctcttcccccatagcactctcctggtttacacgcccttctgcatgcttcactcctggacataaacagctgaatgggatttttttttaaatgcacaaccctgatgacttatccccttttaagtgtaggacccccaaatctcaggtagccaacagcaatgccaggcaattatcctacatgttcacagtccatgttgctccattatcactattgcataccttatcctgt

SEQ ID NO: 253586 - DNA, 516 bp, Homo sapiens
gaagcatttccttccacttttacaaatgtgtctgtatgtacatctaagtaaataaataatacacattttcatatttatggaaactgaaatgcatagttttatatctgcttttttccacttagcattatattgggagcaattttccagattattaaatattcctggaaaatgtcatttttacagctgcattctattatatggatgtataatagtcacttctctagagctggacacgtaggctatttctagtgtttttctggcgtaaatgttgatgtaataaacttgcttatatgtctttttgtgcatgtttaacatccttcttaggatagatgctataagtagaatcactgggtcaaaaattttaagaattttaagaatcttgatttttatggttaaattctgtaccattcctaatgagttatatgaattccaagttctttatgtataggtgcaaataacttacctgttttttttttttttttttttttgtgcctacatttaattttggtaattaaa

SEQ ID NO: 253587 - DNA, 487 bp, Homo sapiens
tcaaatgaacttttactttgggaaattttgttgaatttctatttttgaaaaaaagcagtgtaccaaggagggtaaatgtatatagcctccggagtcagactgcctgagttcaaatcccagctctccatttattaggcttgcaaccaagaacaagttacttaaactttcctgtgatccagtttcctcatctataaacggagataatacttatctaacaggattttgataagagttaaatagactaatacatgaacacggtgcttagtcaatgcttagtaaatattacctaaatatagattattttaaaatataaaattaaagcaaatacttatattaatataacctaatagtctaaaggaagtaaatctttgcctcccatctctattgataatatttctttgaggaagatctcttaatgggtatgaaagaggtgaattgtgttattttgtgctatgaaaatggataaattcttaatagaaactatatt

SEQ ID NO: 253588 - DNA, 424 bp, Homo sapiens
gaatgagaaagttctttcttgttaatttttataccaatcatatggcattcattatgcaactgatggtgtgtatgctatcgagggccagacactgttgatctatttgtgactctaaccctgaccccattgccctgggcaatgtaaggttgatgtattaaaacatgtataacagcaatatgtgaaaattttgtggttagaagattctgggaatgtagtggcagtggcagcataatttttcaaactacctagtcctcccataaaagcagaacaactaggtcacaaaaccaaaaacccacagacaacatttacaacaaaacttagtgacaaaggtagtcctgagagccccaagacacaaattaatgggaaaataaaacactgatcgctgcagggtgatatcagcatctgtgtgagagaaagcagaggg

SEQ ID NO: 253589 - DNA, 307 bp, Homo sapiens
tctctctctcagattgcctgctcctgcagagggctgctgccatgtcatgagcactctcaagcagctctagcgaggggtcatgtcatgaggaactgagaccttctgccaatagctgtgtgaatgagccatcatggaggcaggtcctccagccccagtcaagccttcagatgatggcagccccagctgatgatttgactgcaaactctcatgcaaccaggaataagaaccactcagcagaaccactcccaatttcctgacccacagaaactgtgagataaataaatattgctttaagctgctgtgctta

SEQ ID NO: 253590 - DNA, 185 bp, Homo sapiens
ctccagtgtgttttgataaatgtttatatccattcaaaatatagaaaagttccgttactacagaaatttcctttgtgtccctgtcagtcaccatgcaaaaaatcataccgctgttgcgatttctatgaccatgtatttgtttggctgttcttgaactttatatataaatgaagtcatacacagta

SEQ ID NO: 253591 - DNA, 413 bp, Homo sapiens
atttcatttggtaagagggaatacaggataatgcagaaattataggatatggcaaggatataacagcacaaaacactaagaagatgtggttgtctcataatcatgaagatcagaataacgaggctacttaacattgtttcaccaatttctagtgcagtgtacagtaaatttttacaagggggaagaatgaacagacccattttactgaaatatttcatacatatacgaaattgaaagataaatgagacacaatacagttataaggaagatgggaagatgagattgataagttcctagataaataaatattgttgactgaacctatagaattaatacaggattaattaagtattaatatctattagaaatttttgcagagataacttaagcctcaaaaaaggttggaaatatgt

SEQ ID NO: 253592 - DNA, 571 bp, Homo sapiens
tgcaagaattctgaaatttgatttggttgctagtggaatgagtctgaccattaatctctgaactatgacccttttcatacgttaggatttgacgtcaacccgaaaatgggaggattagccacatttttgaattctagaagtttggctagttcataagcgctatccaagtgcttttggtgaggactaacctctaatttttttaatcttgcccaaattcctatctaagaggtctggggagtcatgccctacaaatcataaattctcatcagatgggttttattcaaccctatatatcatgatttactttccaacctgactctggcataacattaggagacaaagaagaaaatcaaaatattttacccccaaaacatgtttcttgtcatattttgaaatggccctgcaaagctgttctttgtggggggaaatttgcatctgtaaagaatctctattaatatagctagatctttttcttccagaccctcccaatcctaaagagattaactaaaatctgaatagaaaacatttgtcacctattgtctctaaatgcagccactataagacttcaaaa

SEQ ID NO: 253593 - DNA, 392 bp, Homo sapiens
actcaaaacaaagcaaacatccaccacagttaaatcaaatccttatttctttgtgacttctccttttactatttatggtggttcacacacatggtctgggaggtgtaaacatcttaccatatctcccatcatacatagttaagctttcttggactcagtcatcatatttatccaaaaattattgactttcaccactagtattgcaagcagccctaaaattacaactacagctctgtatggtgacaaggagcatgcactttcccactgtctccacatcaacaagtgagaaacacctggatcaaaattggcataaacaatcaacatgacactgggttttggagtgtaatatggacctgatttacttccagctgggaaataaatcttttgccaaa

SEQ ID NO: 253594 - DNA, 151 bp, Homo sapiens
gttatacattttgtgataatttgttaagctgtatgtttattttctgtgtactttttagaaggtacgttatacataaataatatttcaatgattaaaacattttctctaaagcatgtgaccttttgaaaataaaaacactacaattcaaata

SEQ ID NO: 253595 - DNA, 265 bp, Homo sapiens
aagctgggaaaaatattttagtgagcacattgctgccttaacaaatttggactctctgtgaggagtaagagagaatggacactgggtaggcaaaatagcagtctctgccacaccaattaaatattaatagctatgttaagttcaaaacagactggggtgcagtagctcatgcctgtaatccctgagctttgggaggctgagacaggagaattgcttgagcccagttcaagaccagcttgggcaacctagggacacccctaggtta

SEQ ID NO: 253596 - DNA, 612 bp, Homo sapiens
agcaggactcccagcccctcagaatggtgaacgtggttctgaattgtgagcgaaaggatggctggatacttaaatttttggaatgtcatatgattagaagcagcgtttggcagattgtgtgaacttgggtgttttcattaaaggcttctgctcttggattttaacatgaagagctttagagtgaagaatggatgtgtgtgtttgtgtgtgtgtgtgtatagaaactaatctgtgaaaaccttgaacatgttcattgccatggcctcccagttaattgaactttctggctaaactatgctgaaataatacactggatggaaaacttaaacctgtctattcatctacaggcatctgagcataagcagtaaaaggatcctaaaagtgtgattgagtcagtgatgcctaattggcagtcaagaagcccaagtgcccgggtgggttgggttaaaacaaaggcaatgtttgaatgttatgaatccattgtttaaccagcctttcgactgagcttttctgtcgcagtcctgagccttgatgctttaagagccatctaccagccactgagtttgcactggtgtttctcatcactttgcatgtccacctgactattgacta

SEQ ID NO: 253597 - DNA, 503 bp, Homo sapiens
ttcatctttttactgcttggtctgctagggtttacatttcaccctctcccatcttgtaatggcttggataccgggtgaaccagcctaaaggagcacccactggtagggacacagtagctgtgcatagaattgtgaattacaagcattgcactaatagatgggagcaacttggggtatagctgaaagttcttactcccgggtattttgtacaagaccaggaaggctccatccagacacaggcactctttaaagatgtattttttgaactagtgatttgccttgaatttagcacaggtgcaggtcaagagtgagcaggatttttggtgtgtgtaaataggtcatgataattaacccaaattacatattgtgttgtaactcagacgttgttaattattagctagagattttcacatatagtaggtcagtactctgggcaggaaataaatgaggcagtagtaaacttaaaatctttatttaataaactttacattttcttaacatgg

SEQ ID NO: 253598 - DNA, 306 bp, Homo sapiens
ttcccagatttttgaagacaaaaaatgctggctagaaacaactccttagtgactgaatttattcttgctggattaacagatcgtccagagttctggcaacccttctttttcctgttcctagtgatctacattgtcaccatggtaggcaaccttggcttgatcactcttttcggtctaaattctcacctccacacaccaatgtactatttcctcttcaatctctccttcattgatctctgttactcctctgttttcactcccaaaatgctaatgaactttgtgtcaaaaaagaatattatctccaat

SEQ ID NO: 253599 - DNA, 472 bp, Homo sapiens
cttgatgattctgaagtcaacaagatagaatcagcagaattactgtcctccataatactactttaaacatttgagaaagcattattatgagataataattattatttgtaataataatacaaatattatttgtatgagttattatttataataataatattgagaaagaaaattgtatcttttaaagactatcagttaacttttgacttgtcagaataacttattgccagagttccaaattaatatggctttgtgattgaagtatactaagactcagaaaaggaatctggtttaggcactaaaaatatattagacaaaataacagtgataaattaaaagctaggcaggctgggcatggtgtctcatccctgtaatcccagcgctttgggaggccaagatgggaggattgcttgaggtcaggagttttaagaccagcccaggcaacgtagtgagagaccctgtctctacaaaa

SEQ ID NO: 253600 - DNA, 456 bp, Homo sapiens
cggggcggtggttcacgcctgtaatcccagcactttgggaggccgaggcaagtggatcacctgaggttaggagctcagcctggccaacatggtgaaaccccatctctactaaaagtacaaaaaattagccgggtgtggtggcacatgcctgtaatctcagcctccctggcccatgtttattccagtggctcttgccctctctctcccacagttgccaatcccaaatgaagatatctctcaggggcagcaagaacccccattctaagcactttaacctcttttcttaggatagccagataaaatacagtaacactcagttaccagcctggacaacacggcgaaaccccatctgtaccaaaaatttttaaaaaagcaacaagtagctgggaatggtggcttgcacctgtagtcctacctacttgggaggctgaggtgggaggatcacctgaccccagg

SEQ ID NO: 253601 - DNA, 303 bp, Homo sapiens
ggagtgcagtggtgcgatgcaccatctcggctctcggcacgctgcaaccttcgcaacctccgcctcccgggttcagtcgattctcttgactcagcctcctgcgattggactacaggcatgcaccaccatacccggctaattttagtagagacgggggtttcaccatgttgggcaggcttgtctcgaacgcctgacctcgtgactcctgacctggtgatccgcctgcctcggcctcacgaagtgttgggattacaggcgtgagccactgtgccaggccaagagtagtaatcttttaaccgctat

SEQ ID NO: 253602 - DNA, 416 bp, Homo sapiens
tgtgagtgacagaatgagactgtctccaaaaaaaaaaaaaaaagtgttttctcttctgctgtaaacttaaaactgctctaaaaaataaagtctatttttttttaaagtgttttctgccatgttaactgaaagttacctcaagggtcaaaagtaaaatctaaggtaattttaaacttcaagtaccaagttgcacttcccttttctcaatgaaaatattttttagacagaataaaaaaccttcagaatgagatgaggaaataaccttagttttaaaaagtacatttagacctggcgcagtggctcacgcctgtaatcctagcattttgggaggccgaggcaggtggatcacttgaggtcaggagtttgagaccagcctggctaacatggcaaaaccctgtctccactaaaaatacaaa

SEQ ID NO: 253603 - DNA, 360 bp, Homo sapiens
ctttatgaatctttcacatttaagtctaagcattaacagccaatttattcagatttatttgcattccaggatagtaaagagatttctccttctcccgaagagattttcaatgcagagtaattaaactattgtgtctctctggaggggaggatgagtgtgggccatcagaagcccctgtataagatcagggacttcctcatcttgggactcctggctggaaacccatctcactacctatgcaggtgacccctggctgtcctcctgtcatcctgtgggaattgaggtttgggcagcttgtgcaaacaaagatgttactctgctcctctgttgctatgagtaataaactctttgtctctgact

SEQ ID NO: 253604 - DNA, 160 bp, Homo sapiens
  misc_feature (18)..(18): n is a, c, g, or t
ggtgctgggcggcatttnaggagagggctgtagatcataagaaactgaggttttgtgtcattaatttggatttagaagtgattgggaaaacgtccttctctgttggttgtactgccttctgatgctgctaaagccaataattaataacatttttcctgag

SEQ ID NO: 253605 - DNA, 435 bp, Homo sapiens
gcgccgggcaaacgtgtgcattaaatgcttgtttatgcctttgtaaaataagagtgttggcaatataaaatgttacccatagagtaaattaatgtgtttttcaagttggaagatggctttaaaaattcatagaagtacaattagtccctttatttaggtgctgaatagtttccaaagccccgtgtctcttatttatcagagtttctattatataacattgtcacccagtgaacaggctatgctaggacattggaaaaaggtaaatattgagaaagccctaatggtcctttcttaaatggccccctctttccatatttaatttctaagtgacattcctaattaagggtaaacaaacataatgaaacaaggctaattttccaataccaaactaaaaaaataaaaaacagtggactggctattactttgttgatgagt

SEQ ID NO: 253606 - DNA, 679 bp, Homo sapiens
gcctgaagtgaatgagaagctggcagtatttagcatagatgtatttcaaagaaggaaatccataaagccataattagcccctgagctggaagccagatgaaattcctttaaaacagagataaggaactaattatcctactttcatctcaggcaaaacaccaagaaatagggtgaagagcaataagaaaaattaattagaggcaaagtaaatatggaaaagggagatcgatgcaaaaaggagggagctcttctcttgagggccaggaaaagcctgccgcccatttcccaaatttcctcctcttttacagactcaacaacatgacttagaaaggcttgtgtggtttgtgcattctagggtggtcttcacggaagtctgtaccctggctgttcaaaatgcatttagaaaaaaaccaaaaaccactaaacagagtccgggatctcacgtgtgacaacttggggagaccctgtctgcacagttttataatgcaggccttctcagagcctttattgtgagctgacaattgatgtgcaagaggagcatagggaatgcaatatttcccaagcatctgaaaatgaaacccatttttcaaagattgtgttgtaggactagagtttcaagagctctgctttgggtcatggtgttctaaagtaaaataaatgcaagggaaataaatccata

SEQ ID NO: 253607 - DNA, 542 bp, Homo sapiens
cctctgtgaccccgaaactgagcacagccaccaccgcgacctttaagatactcacgtttcccacgtggccctgtgaaagagccgagtcggccccacggggccttggggggcacagctagcctccttgccctcttcctttttgtgacattgttatgcaaaactttggccatcttacgatttcgtgaaaatattttaataacgtgcatttcacattcgaaaagcagggtgatcattattagtaggatctggggtagcccacaacagggaaagtctcgaatatcaagtgacaactgtgatcgcatcagtttgatatgacagaaaattggtttctggaaatagtgttaatggtgacgcttagtttgggtttaaggaactaagaaaacactgagaagaacaatgaacaccagtcaaaaggctggatgtgagtctttgctgtgacacccctgtatgaccttggatagtgacttattatgttgaaatagctgtttcttcatatgcaaaattaaggccatgatacctcctctcagagttattatggggat

SEQ ID NO: 253608 - DNA, 413 bp, Homo sapiens
atagatagagagacagataaaacagtgtggagagccagacataaacccaagtatgcagggaaatttagtttgtgatgaagaggacatttcaaattagtgggagaaaaggagattatttaataaatggtgttatgtttagacaaatggtagccatctaacacagagtttagatctcttcttcattccttatgccaaaataaattccagatggagccaagatttaaattttttaaaaaatccataaaagtattaaaagaaaacatgggagatcttatttaaataatatccaaatggaggaagaactttgccttcttaaacgtgatacaaactttagaatccatataagaaaagaaaattgctaacaatcaatattatgatgtcataaaattaaaattttctgcattccaaaaatt

SEQ ID NO: 253609 - DNA, 432 bp, Homo sapiens
ttttttagacagagtctcactctgttgccaggctggagtgcagtggcacaatctcggctcactgcaacctctgcctccctggttcaagtgattctcctgcctcagcctcccgagtagctgggactacaggcttgcaccaccacgcccagctaatgtttgtatttttagtagagacagggtttcaccatgttggccaggatggtcttgatctcctaacctcgtgatccgcccgcctcagcctcccaaagtgctgtgattacaggcgtaagccaccacgcccagcctatccatgacatatttttttaagtaggataaggaagtgaatatacagagcaagtgaacactctcatacatcgctagtgaaagcaatgctacagccactttggaagttacttgtaaagtaaaacatacacctaccttatgacccaattc

SEQ ID NO: 253610 - DNA, 108 bp, Homo sapiens
cttgatcgggagtttgctttcttatacacggaatcccatatttaaaaaccactgttcttaactacggttatggaatcctgaagaggggcagcggtgagaaaagaaaat

SEQ ID NO: 253611 - DNA, 317 bp, Homo sapiens
gctgatgaatggagtcaagtcaaaaatagctttagcactttaagaaaatcattgtgagtaaaccaatggtatgtgctaaaactccttattcttcactccattgtaggcaacctacatgtaagtgtgtcttttccttgtacataagctaggctgcttgaggttcaagaaactgaaatttggagagaccaaagtggaacagcatttgcccatagtgaaaaaaagaggcatttttgaagtttgtatgtatgtatgtatgtatgtacgtatgtatttagttatttatttagttatttatgagatggagtctcgctctgtgg

SEQ ID NO: 253612 - DNA, 662 bp, Homo sapiens
gtacagtaagtacttaagaaataatttattttgaaatagtttcaaacttcttgagaatttacaagtgtagtacaagtaatttccttagccatatttccaaactgttattatttactccatcaccctgtctgtatgatgtacattcattatcattggtctttttctgaaccatttgagaacaacctacagacatgatgtcccatcactcctgtgtactcagtgtgtttcccagaattaaggacactctcctatacaactattactcgatcctcttagtcagaaaatcagcattgatacactgccatccagtttgcattccctgttttagatattttgctttctgtatttcaaagtagcgtgcttttatttttaaaggtttatgtgtttatctataattaaaattactccaacagagcagcccattgctgtgttctaattcttagccctgaagtcctacaaaaataaacccaagcttttacagtaactgtcaatacagaactaaagcgttttagctattaaaaggggtttagttaccaaggtgcttattttcagcaaaacgccctgttactcagaagaacatacgcatatactaaagttctgacccatcgattcatgcaacagtttatatctctgccctccctccatctacctttaaaacaaaa

SEQ ID NO: 253613 - DNA, 2008 bp, Homo sapiens
caaagactcacccgtgagccagctctcaaagaaagcagcttgcgttgacagcctgggggcagcaaggatgcagtctcccaggagaggatgcactcggtggtgggaagccaggctggaggggcctgagtgaccctctccacaggcgggcagggcagtgggagaggtggtgtgtggatacctctgtctcacgcccagggatcagcagcatgaaccagcttggggggctctttgtgaatggccggcccctgcctctggatacccggcagcagattgtgcggctagcagtcagtggaatgcggccctgtgacatctcacggatccttaaggtatctaatggctgtgtgagcaagatcctagggcgttactaccgcacaggtgtcttggagccaaagggcattgggggaagcaagccacggctggctacaccccctgtggtggctcgaattgcccagctgaagggtgagtgtccagccctctttgcctgggaaatccaacgccagctttgtgctgaagggctttgcacccaggacaagactcccagtgtctcctccatcaaccgagtcctgcgggcattacaggaggaccagggactaccgtgcacacggctcaggtcaccagctgttttggctccagctgtcctcactccccatagtggctctgagactccccggggtacccacccagggaccggccaccggaatcggactatcttctccccaagccaagcagaggcactggagaaagagttccagcgtgggcagtatcctgattcagtggcccgtggaaagctggctactgccacctctctgcctgaggacacggtgagggtctggttttccaacagaagagccaaatggcgtcggcaagagaagctcaagtgggaaatgcagctgccaggtgcttcccaggggctgactgtaccaagggttgccccaggaatcatctctgcacagcagtcccctggcagtgtgcccacagcagccctgcctgccctggaaccactgggtccctcctgctatcagctgtgctgggcaacagcaccagaaaggtgtctgagtgacaccccacctaaagcctgtctcaagccctgctggggccacttgcccccacagccgaattccctggactcaggactgctttgccttccttgcccttcctcccactgtcccctggccagtcttagtggctctcaggccctgctctggcctggctgcccactactgtatggcttggaatgaggcaggagtgggaaggagatggcatagagaagatctaataccatcctgcccattgtccttaccgtcctgcccatacagactgtggctccttcctccttcctgtgattgctccctcctgtgtggacgttgcctggccctgcctcgatgcctctctggcgcatcacctgattggaggggctggtaaagcaacacccacccacttctcacactggccttaagaggcctccactcagcagtaataaaagctgtttttattagcagtagttctgttgtccatcatgttttccctatgagcacccctatgcccactctaatattcaacaattatagacaatttgccctatcatttatttacatctatgtatctaccatctaatctatgcatgtatgtaggcaatacatgtatctaaacaatgtatttgtcaatgcatcaatttacctactctatgtatgcatctatatgtgtattatgtatgtatgtgtgcatgcgtgcgcgcacacacacacacacacattgatattatatcatggcattttattcctaaatcttccagcatgcatccccaaaaaacaagaaacttgtcttacataatcacaataatatatccacatctaagaaaatttactgtaacttcttaatctaagaaaattatgtatttttgtcatatgtattttgtcatatgtattttgtatttgcatatgtattttgtatttgcatatgtatttttgtcatagcagcaaacagagtgaaatgccatttttcatattct

SEQ ID NO: 253614 - DNA, 1787 bp, Homo sapiens
caaagactcacccgtgagccagctctcaaagaaagcagcttgcgttgacagcctgggggcagcaaggatgcagtctcccaggagaggatgcactcggtggtgggaagccaggctggaggggcctgagtgaccctctccacaggcgggcagggcagtgggagaggtggtgtgtggatacctctgtctcacgcccagggatcagcagcatgaaccagcttggggggctctttgtgaatggccggcccctgcctctggatacccggcagcagattgtgcggctagcagtcagtggaatgcggccctgtgacatctcacggatccttaaggtatctaatggctgtgtgagcaagatcctagggcgttactaccgcacaggtgtcttggagccaaagggcattgggggaagcaagccacggctggctacaccccctgtggtggctcgaattgcccagctgaagggtgagtgtccagccctctttgcctgggaaatccaacgccagctttgtgctgaagggctttgcacccaggacaagactcccagtgtctcctccatcaaccgagtcctgcgggcattacaggaggaccagggactaccgtgcacacggctcaggtcaccagctgttttggctccagctgtcctcactccccatagtggctctgagactccccggggtacccacccagggaccggccaccggaatcggactatcttctccccaagccaagcagaggcactggagaaagagttccagcgtgggcagtatcctgattcagtggcccgtggaaagctggctactgccacctctctgcctgaggacacggtgagggtctggttttccaacagaagagccaaatggcgtcggcaagagaagctcaagtgggaaatgcagctgccaggtgcttcccaggggctgactgtaccaagggttgccccaggaatcatctctgcacagcagtcccctggcagtgtgcccacagcagccctgcctgccctggaaccactgggtccctcctgctatcagctgtgctgggcaacagcaccagaaaggtgtctgagtgacaccccacctaaagcctgtctcaagccctgctgggactgtggctccttcctccttcctgtgattgctccctcctgtgtggacgttgcctggccctgcctcgatgcctctctggcgcatcacctgattggaggggctggtaaagcaacacccacccacttctcacactggccttaagaggcctccactcagcagtaataaaagctgtttttattagcagtagttctgttgtccatcatgttttccctatgagcacccctatgcccactctaatattcaacaattatagacaatttgccctatcatttatttacatctatgtatctaccatctaatctatgcatgtatgtaggcaatacatgtatctaaacaatgtatttgtcaatgcatcaatttacctactctatgtatgcatctatatgtgtattatgtatgtatgtgtgcatgcgtgcgcgcacacacacacacacacattgatattatatcatggcattttattcctaaatcttccagcatgcatccccaaaaaacaagaaacttgtcttacataatcacaataatatatccacatctaagaaaatttactgtaacttcttaatctaagaaaattatgtatttttgtcatatgtattttgtcatatgtattttgtatttgcatatgtattttgtatttgcatatgtatttttgtcatagcagcaaacagagtgaaatgccatttttcatattct

SEQ ID NO: 253615 - DNA, 1044 bp, Homo sapiens
cgcacctgggatgctgggcgggtctagcctatgggaggtgagtgaggctgagatatttaccccccgaccttggctttcctccttccctccctggctcctctgcaagaggccccagctgttgtcctgggaccttctgctttgacacttttttttttgtttttttttgagatggagtctcgttctgtctcccaggctggagtgtagtggcatgatctcggctcactgcaacctctgccttcaggttcaagcgatcctcaacctcccgaatagctgagattacaggcatctgccaccataccaggctaattttttgtatttttagtagagacagagtttcgccatgttggctaggctggtctcaaacttctgacctcaggtgatctgcccgcctcagcctcccaaactgctgggattacaggcatgagccacctcgcctggccctgacatttcaactatttttgggctccagaaacaggccgtgcctgaggtggtcgcaactcgaggccgtcaccagctgcaggcacttcaccaccctgtctgatgttgcccaaactctgccctcatacccaaaggcagctccttcgtcaagtctccctgggtccccatggagcggaccacgcttcctggaggacggggacactggaaactgctgtcttcttccaccagctcagacttggtctctggaacctactgcgccactccctgcctcacttcccatgaaccagaaggtggctcctgcccgctggccagaaacagagacctttcacaaagaccaggctctcctcctctccacggatgaagacagctttcccagctggggtgcagccctgcactggcaaatttggcagcacagccctctcagggtcactggggaggtgagcccagtgcaatgactcacaaatgatggggtggcctctcggcctggcctgggaggtccatgagtcctgggtggacagtgatatgcccttttgctgtggttttatagatgggaaaagttctctggctgtgcctcagacctgaagccccacatggttagttatagaa

SEQ ID NO: 253616 - DNA, 877 bp, Homo sapiens
aaccaatctgcatctagcacaggagctttacaaaagaaagccagtaagatcagctcttttttaaggagcctcagggccactcctggttcaaaaacaagggtcacatcacatgacagagaggtagatatcgtggctaagatggtggagaagcaaaacatagaggccaaagtggagaaagcccagggtggccaggagctggagatgatcagtggcactatgacatccgagaagacggagatgatcgtctttgaaaccaaatccatttaaagaggagccagggctacaaccgcccagggatctggaagtatccctagaggagcccatcccagctttctttactgcagttcaaataataaaggaaatcgtacaactccaaaagaaatacaatctcctgcttgaatttttctgcccatagcctggtggtgacctcacagtggcttctgtgatggtggctatgctacagctggagaccccagcctccaggcaagtagagctccaccacccgcccacggccagcagagccaacgtgagtgttcagctttgcctcaatcccttttgcttccccgagactgtcaaagccacagactaagagctgggatgcatggccaccaccatgtcccctcgcccattctcctcttttccctgaatgcccctgaacatggacattcagtccagttcttagcctatgcagagacaggattcacatcccctcaggggatattcagggtaggaaggagcaatacagcagtatttgtaggcaattagaataggaaatctattcttctagatcaggaattggcaaatcatgttctgaggtccaaatcttaccagctgcctggatttgtaaataaagttttattggaacatagtcacagac

SEQ ID NO: 253617 - DNA, 441 bp, Homo sapiens
acatggagtctcactcactgtcacccagctggagagcagtggcgtgatcttggctcactgcaacctctgccttctggatttaagtgattctcctgcctcagcctcctgagtagggattacagcacacaccaccacacctggctagttttgtttggtatttttagagagacagggtttcatcattttggctaggctggacttgaactctttcacctcaagtgatccctctgcctcagtctcccaaagtgctgggattacaggtgtgagccattgcccccggccaggattagatacattttctcccccaactttggccctatattcattttccaaaaggtgtctacgacctgaaaatcaaggatgggaagaaccctgaactgtctgagactgtttctactacccacatggaaaagagagttgaaaagaaattaatttgtcata

SEQ ID NO: 253618 - DNA, 677 bp, Homo sapiens
gttttgtcttctgaattatggtacctacaccaaattagttttagttgaaaaacaacagcaaaacagattcattcagaaaagttacaaagaatgggtagaaaaaaaattaccaacagtccagtttagaatttgacttctctgatatatataatactgtagcatgccatgtagagttacagtaatgacttctttttatccttaacttcacgtcccagttcatatgcttcaaatttcagttttgcagagggttaggatcatgtttgacatagtattgatggtcagagtcaaagaatgtgttctgaaaggaaggctttggccatgcataggaatcaagcctttctcaggaaagagacaaggccaaaacaccaccgttagtcatcctctgtttcactatgtctttgcgtatattctccttcgcctctctgtgcttgttgccacctggtacgatggaaacaataacggtacccaccttgttgggaggagtcatgagactacatgccgagtgcccggcacacagtgagccctagagcgtgagaggccagaatgtggaggtattcattgttttatccctagtgtctaagacattacctggtgtgcagttggtgctcaataaatatttgacaaatgaataaataatgttggctagaataataattatggtattagagaaaagataa

SEQ ID NO: 253619 - DNA, 384 bp, Homo sapiens
gagacactggattataggggagaccttgtcattcaagcagaaattgcgaatggccccaacataccaagggagacttgggacaacaggtggagggagggagaggaaaaaaaaaactgaacaagtgtcgttcctgcccagagagtttgcgatgagtgatgagagtgccagagaaaccttttagaaaccctcttaaattccctctttgaaatctttttcatgtctgctctttgaggactgtgaagagaggggagggtagaggcagagttgatcccaactcttaagattctttggcctaatgtttcacttgaaggcagagactgacgaagttcttttttgaacttcttaggacagttccctgtggttacttttttagtataacaatta

SEQ ID NO: 253620 - DNA, 1216 bp, Homo sapiens
gtgtttgcttcaccttctgccaggattgtaagtttcctgaggcctccccagtcctgcggaactggctccggctggcacctgaggagcggcgtgaccccgagggcccagggagctgcccggctggcctaggcaggcagccgcaccatggccagcacggccgtgcagcttctgggcttcctgctcagcttcctgggcatggtgggcacgttgatcaccaccatcctgccgcactggcggaggacagcgcacgtgggcaccaacatcctcacggccgtgtcctacctgaaagggctctggatggagtgtgtgtggcacagcacaggcatctaccagtgccagatctaccgatccctgctggcgctgccccaagacctccaggctgcccgcgccctcatggtcatctcctgcctgctctcgggcatagcctgcgcctgcgccgtcatcgggatgaagtgcacgcgctgcgccaagggcacacccgccaagaccacctttgccatcctcggcggcaccctcttcatcctggccggcctcctgtgcatggtggccgtctcctggaccaccaacgacgtggtgcagaacttctacaacccgctgctgcccagcggcatgaagtttgagattggccaggccctgtacctgggcttcatctcctcgtccctctcgctcattggtggcaccctgctttgcctgtcctgccaggacgaggcaccctacaggccctaccaggccccgcccagggccaccacgaccactgcaaacaccgcacctgcctaccagccaccagctgcctacaaagacaatcgggccccctcagtgacctcggccacgcacagcgggtacaggctgaacgactacgtgtgagtccccacagcctgcttctcccctgggctgctgtgggctgggtccccggcgggactgtcaatggaggcaggggttccagcacaaagtttacttctgggcaatttttgtatccaaggaaataatgtgaatgcgaggaaatgtctttagagcacagggacagagggggaaataagaggaggagaaagctctctataccaaagactgaaaaaaaaaatcctgtctgtttttgtatttattatatatatttatgtgggtgatttgataacaagtttaatataaagtgacttgggagtttggtcagtggggttggtttgtgatccaggaataaaccttgcggatgtggctgtttatg

SEQ ID NO: 253621 - DNA, 1939 bp, Homo sapiens
cgccaggtggtggctcagaggaggacacagtcgctgtgggcaggtggtcagggcgcaggagggaatgagctgtggatttttagtaatctacaacaatcaggcagttccaggacacagggaagtgagtgtgaacagccaatggacccggagccgagagcctgggcaggcgtaggctggactatggacgccctgcaaccctgccaggctgggaaggggaggcttgatcctgagcgcgtgttaggaaggagatgcccaggttcaggtgtatcgtgcattttttttccacagtgcagaaatgacatttctggttggtcttgaatgtctgctctggccaagccacctcctctcatgctagctaaccaagtggcacgtgtgcccacgcaggccgttctaaggaacactgtaattgtctacacaattttctctcaaatactccgtcctggaagcgtctggttggcagaagagggaaggcaggagggtggcagcgtcccggctgagtcctcttgcacatgggagctggagtccagccaggctccagagcggctccggctggcaagggacctgaacaggaagatgagactcgaggttttctgcatgcctggaagtgcacatgctcatctacagctttcttggaagaagaaagaaacaaaaactgagatttagaacaccaggtctgtttccactggcggccactcttgggcactggagaccagcaagagctttgtttttaaaaggctcttccatggcagatattcgcagaggcatcagggctacacttaaatgaagggctccggctggcacctgaggagcggcgtgaccccgagggcccagggagctgcccggctggcctaggcaggcagccgcaccatggccagcacggccgtgcagcttctgggcttcctgctcagcttcctgggcatggtgggcacgttgatcaccaccatcctgccgcactggcggaggacagcgcacgtgggcaccaacatcctcacggccgtgtcctacctgaaagggctctggatggagtgtgtgtggcacagcacaggcatctaccagtgccagatctaccgatccctgctggcgctgccccaagacctccaggctgcccgcgccctcatggtcatctcctgcctgctctcgggcatagcctgcgcctgcgccgtcatcgggatgaagtgcacgcgctgcgccaagggcacacccgccaagaccacctttgccatcctcggcggcaccctcttcatcctggccggcctcctgtgcatggtggccgtctcctggaccaccaacgacgtggtgcagaacttctacaacccgctgctgcccagcggcatgaagtttgagattggccaggccctgtacctgggcttcatctcctcgtccctctcgctcattggtggcaccctgctttgcctgtcctgccaggacgaggcaccctacaggccctaccaggccccgcccagggccaccacgaccactgcaaacaccgcacctgcctaccagccaccagctgcctacaaagacaatcgggccccctcagtgacctcggccacgcacagcgggtacaggctgaacgactacgtgtgagtccccacagcctgcttctcccctgggctgctgtgggctgggtccccggcgggactgtcaatggaggcaggggttccagcacaaagtttacttctgggcaatttttgtatccaaggaaataatgtgaatgcgaggaaatgtctttagagcacagggacagagggggaaataagaggaggagaaagctctctataccaaagactgaaaaaaaaaatcctgtctgtttttgtatttattatatatatttatgtgggtgatttgataacaagtttaatataaagtgacttgggagtttggtcagtggggttggtttgtgatccaggaataaaccttgcggatgtggctgtttatg

SEQ ID NO: 253622 - DNA, 1561 bp, Homo sapiens
gcgaaagcctttgtccttggttcgccctccccccgtatacatcctgtccccttctgggctattatgctgataattggaaagaccatctaagggggaaagatcctccaatgacgaaggcattctttgacacagctgaggagagcccattctgcatgtatcattactttgtggatattataacatggaacaagaatgtaagaagaggggacattaccatcaaattgagagacaaagctggaaacaccacagaatccaaaatcaatcatgaacccaccacatttcagaaatatcaccaagtgagtctacttgcaagatttaatcaagatctggataaagtggctgcaatttccttgatgttctctacaggatctctaataggcccaaggtacaagctcaggattctccgaatgaagttaaggtcccttgcccatccggagaggcctcagctgtgtcggtatgatcttgtcctgatggaaaacgttgaaacagtcttccaacctattcttggcccagagttgcagttgtaactgtggccaggacacatggccataaataatagaaagaaagctacaaccacaggctgtttgaaagcttcacctcacctttctgcaaggcagaaaaagtatgaaaaaaaccaaggcttttttcagtagcgtcctatggatgtcacattgtacatcaaacaaccttgtgattataaaacgatcctgggaaggagcccctaactagggcaagtcagaaatagccaggctcgcagcagcgcagcgctgtgtctgctgtgtcctggggcctcccttgttccgacctgtcaattctgctgcctgtcacgcgggtggttctgcccatcgcggctgcgggtcaagcatcttcaagggaaggacggactggaggcctcaccgtggactcaactctgcattctccgtgccacattcctccagttcccacacgtagaagggaacgaaactgacgtctacctcatggggctgctgtgtgggtttgggaggcaaaaatctatgaagggttttttgaaatcccataggtgccacatctatgagatgtttgataaatgtgaatatgcttttacatttgggcttatctaatttgcaataagagagcctctctctatcaacaccagcttctctctcgggctgtttgctcagggaaggcaagaaagccacgtgctggccctctgccttctctaaagtgctgttggagcatggaggagctggaggagatggggatggactgacagctaagagggcggctgctgggactagatagtggatgaagaaagaaggacgaggaagccgtggggcagcctcttcacatggggacaggggatggagcatgaggcaagggaaggaaaagcagagcttatttttcacctaaggtggagaaggatcactttacaggcaacgctcattttaagcaacccttaagaaatgtttatgtttctttattaccaatgtaatctatgattattgaaggaaatttagaaaatgcgtagatacaaaattaaaaaaaaatactgtccacgatcctattagaggtaattaatgtt

SEQ ID NO: 253623 - DNA, 1452 bp, Homo sapiens
tgctctgaggatccccgctccgagagtcaatatcgctgtcatcttctgagctattatgctgataattggaaagaccatctaagggggaaagatcctccaatgacgaaggcattctttgacacagctgaggagagcccattctgcatgtatcattactttgtggatattataacatggaacaagaatgtaagaagaggggacattaccatcaaattgagagacaaagctggaaacaccacagaatccaaaatcaatcagatctctaataggcccaaggtacaagctcaggattctccgaatgaagttaaggtcccttgcccatccggagaggcctcagctgtgtcggtatgatcttgtcctgatggaaaacgttgaaacagtcttccaacctattcttggcccagagttgcagttgtaactgtggccaggacacatggccataaataatagaaagaaagctacaaccacaggctgtttgaaagcttcacctcacctttctgcaaggcagaaaaagtatgaaaaaaaccaaggcttttttcagtagcgtcctatggatgtcacattgtacatcaaacaaccttgtgattataaaacgatcctgggaaggagcccctaactagggcaagtcagaaatagccaggctcgcagcagcgcagcgctgtgtctgctgtgtcctggggcctcccttgttccgacctgtcaattctgctgcctgtcacgcgggtggttctgcccatcgcggctgcgggtcaagcatcttcaagggaaggacggactggaggcctcaccgtggactcaactctgcattctccgtgccacattcctccagttcccacacgtagaagggaacgaaactgacgtctacctcatggggctgctgtgtgggtttgggaggcaaaaatctatgaagggttttttgaaatcccataggtgccacatctatgagatgtttgataaatgtgaatatgcttttacatttgggcttatctaatttgcaataagagagcctctctctatcaacaccagcttctctctcgggctgtttgctcagggaaggcaagaaagccacgtgctggccctctgccttctctaaagtgctgttggagcatggaggagctggaggagatggggatggactgacagctaagagggcggctgctgggactagatagtggatgaagaaagaaggacgaggaagccgtggggcagcctcttcacatggggacaggggatggagcatgaggcaagggaaggaaaagcagagcttatttttcacctaaggtggagaaggatcactttacaggcaacgctcattttaagcaacccttaagaaatgtttatgtttctttattaccaatgtaatctatgattattgaaggaaatttagaaaatgcgtagatacaaaattaaaaaaaaatactgtccacgatcctattagaggtaattaatgtt

SEQ ID NO: 253624 - DNA, 1458 bp, Homo sapiens
ggaatcgagctcggtaccgaaggagaacaggtgaggagagccattctgcatgtatcattactttgtggatattataacatggaacaagaatgtaagaagaggggacattaccatcaaattgagagacaaagctggaaacaccacagaatccaaaatcaatcatgaacccaccacatttcagaaatatcaccaagtgagtctacttgcaagatttaatcaagatctggataaagtggctgcaatttccttgatgttctctacaggatctctaataggcccaaggtacaagctcaggattctccgaatgaagttaaggtcccttgcccatccggagaggcctcagctgtgtcggtatgatcttgtcctgatggaaaacgttgaaacagtcttccaacctattcttggcccagagttgcagttgtaactgtggccaggacacatggccataaataatagaaagaaagctacaaccacaggctgtttgaaagcttcacctcacctttctgcaaggcagaaaaagtatgaaaaaaaccaaggcttttttcagtagcgtcctatggatgtcacattgtacatcaaacaaccttgtgattataaaacgatcctgggaaggagcccctaactagggcaagtcagaaatagccaggctcgcagcagcgcagcgctgtgtctgctgtgtcctggggcctcccttgttccgacctgtcaattctgctgcctgtcacgcgggtggttctgcccatcgcggctgcgggtcaagcatcttcaagggaaggacggactggaggcctcaccgtggactcaactctgcattctccgtgccacattcctccagttcccacacgtagaagggaacgaaactgacgtctacctcatggggctgctgtgtgggtttgggaggcaaaaatctatgaagggttttttgaaatcccataggtgccacatctatgagatgtttgataaatgtgaatatgcttttacatttgggcttatctaatttgcaataagagagcctctctctatcaacaccagcttctctctcgggctgtttgctcagggaaggcaagaaagccacgtgctggccctctgccttctctaaagtgctgttggagcatggaggagctggaggagatggggatggactgacagctaagagggcggctgctgggactagatagtggatgaagaaagaaggacgaggaagccgtggggcagcctcttcacatggggacaggggatggagcatgaggcaagggaaggaaaagcagagcttatttttcacctaaggtggagaaggatcactttacaggcaacgctcattttaagcaacccttaagaaatgtttatgtttctttattaccaatgtaatctatgattattgaaggaaatttagaaaatgcgtagatacaaaattaaaaaaaaatactgtccacgatcctattagaggtaattaatgtt

SEQ ID NO: 253625 - DNA, 1553 bp, Homo sapiens
tgctctgaggatccccgctccgagagtcaatatcgctgtcatcttctgagctattatgctgataattggaaagaccatctaagggggaaagatcctccaatgacgaaggcattctttgacacagctgaggagagcccattctgcatgtatcattactttgtggatattataacatggaacaagaatgtaagaagaggggacattaccatcaaattgagagacaaagctggaaacaccacagaatccaaaatcaatcatgaacccaccacatttcagaaatatcaccaagtgagtctacttgcaagatttaatcaagatctggataaagtggctgcaatttccttgatgttctctacaggatctctaataggcccaaggtacaagctcaggattctccgaatgaagttaaggtcccttgcccatccggagaggcctcagctgtgtcggtatgatcttgtcctgatggaaaacgttgaaacagtcttccaacctattcttggcccagagttgcagttgtaactgtggccaggacacatggccataaataatagaaagaaagctacaaccacaggctgtttgaaagcttcacctcacctttctgcaaggcagaaaaagtatgaaaaaaaccaaggcttttttcagtagcgtcctatggatgtcacattgtacatcaaacaaccttgtgattataaaacgatcctgggaaggagcccctaactagggcaagtcagaaatagccaggctcgcagcagcgcagcgctgtgtctgctgtgtcctggggcctcccttgttccgacctgtcaattctgctgcctgtcacgcgggtggttctgcccatcgcggctgcgggtcaagcatcttcaagggaaggacggactggaggcctcaccgtggactcaactctgcattctccgtgccacattcctccagttcccacacgtagaagggaacgaaactgacgtctacctcatggggctgctgtgtgggtttgggaggcaaaaatctatgaagggttttttgaaatcccataggtgccacatctatgagatgtttgataaatgtgaatatgcttttacatttgggcttatctaatttgcaataagagagcctctctctatcaacaccagcttctctctcgggctgtttgctcagggaaggcaagaaagccacgtgctggccctctgccttctctaaagtgctgttggagcatggaggagctggaggagatggggatggactgacagctaagagggcggctgctgggactagatagtggatgaagaaagaaggacgaggaagccgtggggcagcctcttcacatggggacaggggatggagcatgaggcaagggaaggaaaagcagagcttatttttcacctaaggtggagaaggatcactttacaggcaacgctcattttaagcaacccttaagaaatgtttatgtttctttattaccaatgtaatctatgattattgaaggaaatttagaaaatgcgtagatacaaaattaaaaaaaaatactgtccacgatcctattagaggtaattaatgtt

SEQ ID NO: 253626 - DNA, 474 bp, Homo sapiens
atgtttaatctctgacatcatctagcccagtgcccaacatataaaaggaactaaatgactgttaggtaaatattgatatttgaccaaaatcaattttgcttgtttcacaaacgttatgattgaaataaacctttttttttttttccagtttatcatgatccaaatcacaaaattacccattttggacttttggtttttgtctttgactttctcacatctacttccacgagtccttttgttccaccgaaacacttgttattcatggaaaacaatgtcctacggtgactaattatgtaataaatgagaatgacccaacatggtctttttcacacgcactctagtaccaagtgttttctcttgtaatccactgcactcaaaacacaaaataattgtattaactgggggctgttgagggtatttttttttatttaaaagaaatgttaatttgttattaaatctcttgttgaaagaaaa

SEQ ID NO: 253627 - DNA, 535 bp, Homo sapiens
aagaccctgcctcaacaaactaaattaaaattttatttttgaattgacaaataataattatacgttttcatggagtacatagtaatgctttgatatgtataatgtgtagtgatcagatcagggtaattagcatatcatcatctcgaacatcatttctttgtattgggaacgtacaatattctccttctagctatttgaaactatatattattgttaactatagtcatcctacagtggtattgaacactagaacttattcctcttatctagttgtaattttgtatcctttaacaaatctctccctctccttcccttcccccactcattgtggttttaatttacatttctcaagtgactaatgatgttgagcatcttttcaagtgattatttgccatgtatatatctttgattaagatcttttgctcatctttttactgggttgtttgttttctcaatgttgagttttaagaattctccatattttctggatacatgtccattatcaaatatatgatttgcaaatattttctctcaa

SEQ ID NO: 253628 - DNA, 429 bp, Homo sapiens
ttcacctagcccatggccaagtcagggtctctgaagaacccccacgaaaagtgccaactggaagagccaacatttggatcttaccatttggaaggctttcaacagtcaagagagcatcacagccagcatctgcctccatctctcatccctccacagctattatattggaaaatccatcagcagttaggtcacataggagagtgatcagcatatcttgggagcacagtagacacaggttaaggagatcccctgcctgcagtgtcccaatcaaatcataggaacactgtgagactctggggtgagcttgcatttgcagacaggaactgaagggctggagaggttacactcacccaggtgcagttgcccagcatgtgaaagaggagacattctaaaccctgcacttaaaaaataaataaataaataaagtta

SEQ ID NO: 253629 - DNA, 340 bp, Homo sapiens
gagattgggggtcaggctcaggtcagaccaggagtctgtgcctgagccctctccatctcagcatgacccctctgagaccctccctccctgcctcgcttgaatgttcaagccaacagcgagcttgagtcctaccggctgcgtcttggtaggtgtcagatactgaattttaaagaagcaatgacaccccctacccaagacacccgtgcctatgaatatgggaatgtgacccgcgaatattgttgccttggaatactcatgggattaggtgcaatatgccaccaggacaagaaagacatgctgcagcctaggaaagagagaaaagagggtttgggttcacacg

SEQ ID NO: 253630 - DNA, 381 bp, Homo sapiens
acggtattctgtcaaaatacctctccaccctgagcccttgatataggaggaaccctcaaataagggtgacattctagagaagatcacaaaaaagatgagagtcacattgatttcctgacaaaggggtagtagtgaggaaggggccagtgtaagcaccatccataggcaccttggatttgtgctcttgtctcctggtggcagaggccatctcaggtttttgaaggccttgcaggacaggtgtcacaattagtcacaataataataatgattcagccgggcacggtggcacacacctgtaatcccagcactttgggaggccaaggtgggtggatcacttgaggtcaggagtttgagaccagcctggccaacatgacgaaatcc

SEQ ID NO: 253631 - DNA, 150 bp, Homo sapiens
gcagaagaaacagatggggaattgaaaagaacaatcctttttcctttctctcattctgatttgtcaatcaaaattttggagaaaattatcaaagaaaaaaatttttaaggtcaatatgttagaaaagcaaaaaggaaagaaaaacagtga

SEQ ID NO: 253632 - DNA, 705 bp, Homo sapiens
ttttatagcgaaggactctcgccatgttgcccagactcatctcaaactactggacccagacaatcctcacactttggcctcccaaaatgctgagattacagcttacctaaagttaacatctgatgacatgatcgcaactccatatcctgagttgatttcaacctatgatgttggaattttccacatggagataaacactgggaagcagctaatcattctctctggatttataaggaacaaatggataagtgaaacttgaaaacaatggccagagtactaagaactaatgtttcttcaacaaaacaaatacttttactttaagaacagaagataaaaggccaaagttgtaatataagacaaattacggaaatatacacttatacatataaaaccactcctctttttaaaaaatcatgctttttaagaagaatcttctcatatcagtgagaaagaaagttatcttaacaaacaaaaagtatcttgaaaaaaagcgttcacatgtataagaaagaaaatgaacaaataaataggaaaaaagatctctggttcaaccatatcgaagcttcttcatgtttgttattttactgtaaaggacacctccctgatcttgaactgataatacagttaaaagaattaacagaaagagagagggatagaaatggtcacgtacagaatgaaaaataaaggaaatttttttcttaaaat

SEQ ID NO: 253633 - DNA, 2507 bp, Homo sapiens
  misc_feature (1358)..(1358): n is a, c, g, or t
atcaaatggtacctgacatggggcaggcattcagataatgtgtgttgaatgagtaggtgaatgaacatgaaacatcagtaaaactgtcctgtaagtcccatgatagaaataatcagcattactaccacatcagcttcttgtttctcaggtcactggactgaggggagggaaatccaaataatttgtctgcaattaaaaggcagaaggtcaggtgcagtggctcatgcctgtaatcccagcactttgggaggtggaggcaggctgaccacttgagcccaagagttcaggcccagcctgagcaacatagtgagaccccatctcaaaagaaaagttaaaaaacaaaaaacaaaaaaaaacctccaccaacaaaaaaccagccaactgaaattccaaaggtctctagtccacaggtggcactaggggtcactcagaaaataaaaattaaaaagaaaattacttaggaaagtctaaagcactatattgggtacttcattatatctgaagcaagttgatgatggtgcccagaaaaacaaggtagggaagctgcacatttataaagcgtattagaatattctttgatttatgcactattcgaagcttgagcctgggaactaaggccatacaacaaagcaaggattaaactatcaacatgtgggacccagtcagctttcccagcaatcattgaggccactgtgactttccttattgttataaaatgtagatatttagccctacctcttaagacaagatagaactcaccacaaccagttttcactactgtagtatctagtggctttcaaatcaggtaaactaggtgttttatcccagtctggcctcatgctaacttcaggcaaattacacaacttttctcagtttttaacttgttaagtggaaataatagtcattgtcccagaggttattgagtagataagataacatggaggagtgtttaataagtgttccctccctccttcccctgccttttagacaaagcaatcattggagtaaaaactggctttggcatgatgtgggaagagcagagaaggcgtgggatgttttaaattatatgtaaaatacatttttttatttttttgagacggagtctccctctgtcacccaggctggagtgcagtggcgtgatctcggctcactgcagcctctgcctccaggttccagcgattctcctgcctcagactcccgggtagctgggattacaggcacgtgccaccacacccagctaatttttgtatttttagtagagatggggtttcctcatgttggccaggctggtctcaaactcctgacctcaggtgatctgcccacctcagcctcccaaagtgctgggtttacaggtgtgngccactgcaccaggcctaagatacatgttttttaattacttgtggattgaaaggattattattgccctcaacagtgctgtgaataactggccaaaatatggacaaaagaccgtccgtaagttactagctgggtgctaggctggaatcgattcttatttaagatggcctagtaggcaggcctccaaatttgttttcattcctttaccttctacatcttgcctttgaatacacgtttaaaatgttatttctcccaactcaaaccccgtcactgcaataaaacttcctttacttttagaaggatctaagttccaagaaaaaaagaaggaaaaaaagagagttactctcattttcctatttcatagacagttttgaaagcctttagtgtttgggtggggcccagtcacaccctttgcaatctgcagaccagtggtttaaatttgtcatccttgtgggctgtaaaatgaaaccatgtaccaaagaaaaatagtgaatgactcactcacatgtgatcttccagcgaagggaaggattcagtaggaatgtgccacaaggctggcaggtcccttcataataggctcaggtggcctgttctgggatgtgggtcaatgttaggaacctgaatggaggccgccaagttgtggtggggtctgaaggagagcttcagttaccggggtgaattcaccacaatgcaacatccagcagacccagagaaactctctctcagcacgacaagaaagggaggattcctattcaccaggctcattaaacctgtacgcacacacacatgcaaacacacacgtgcagacacacacacgtgcagacacacacatattgctaatttatttatattaagaaatacagtgccaggcatggtggttcacacctgtaatcccagcacgttgggagggtgaggcagacgatcgcttgagcctaggcattcaaggccagcctaggcaatgcagcgaggccttgtctagaaaatttaaaaaaaaaaaaaattagctgggcgtggtggcacgtacctgtagttccagctactcgggaggctgaggcggcaggatctcttgagctaagtagttcgaggctgaagtgagctatgactgtaccactgcactccagcctgggcaacagggcaagaccctgtctcca

SEQ ID NO: 253634 - DNA, 659 bp, Homo sapiens
  misc_feature (612)..(612): n is a, c, g, or t
  misc_feature (652)..(652): n is a, c, g, or t
gtgatactctatacttcttgttgctttacatccggaggctgataatgtctgcttttctctcttttctaattatttgtgaaaggaaaaatgtggggggttgggagaaaaaaacccttaagtacatactcgctaaatcacattgctacaggtaacttccattaagaacttgaaagcaaaggtagctgcattttcccctagggaacacaatgatagccaggagccttagtctacagcttgaaggattgtaattatacctaagcaaccctcctggaccaatttaatgttattagctgtgatgtatccctacctttgatgtcattatccttacttagctcccttaaagcagagatcaagatgaaaagggcttcagctgcagcatggcacatggagattagagtggggcttttggatgctgaggagcagacctagaatgggaaatagatgggagccacagaagtgaaggtccccctccctcattgctcaacctactccacatctccaggtctgcacatctgttcagttactgaatcctgtgtaagctaccttctttttcttttttcttttatttatttatttttttttttttgagatggagttttgctccaaccctgngtgacagagtaaaaaccctgactcttaaagaaaaacaganaagaaaa

SEQ ID NO: 253635 - DNA, 516 bp, Homo sapiens
gagatgaaagagaagagctttgtaggaagagggaagaaaggaagccatgtccagcaggcggttgttcctctggcctagagaacaggagtgagggctgggctagggaggcagggagagctgaagaggatggtcacaaatggtatttacagctgggactgaatgagataaaatattcataagtggatggcagcaacttcttattctaatcctcacacagcctgaggaggtgggcaaaatctccattttgcacaagaggaaattaaagtgctgggattacaggtgtgagccaccacacctggcctggttttattttttgaggaactgccagactttttcaaaatggctgcaccattttgcattcctgtcagcagtgtatgagggttttgacacttccacatcctgtctaacatttcttttttattgtagccatatagaaggtgtacagtggtatctcattgtggctttgatttgcacttccctggtggccaataatgttggacacttttttgtttttgg

SEQ ID NO: 253636 - DNA, 391 bp, Homo sapiens
gagatgaaagagaagagctttgtaggaagagggaagaaaggaagccatgtccagcaggcggttgttcctctggcctagagaacaggagtgagggctgggctagggaggcagggagagctgaagaggatggtcacaaatggtatttacagctgggactgaatgagataaaatattcataagtggatggcagcaacttcttattctaatcctcacacagcctgaggaggtgggcaaaatctccattttgcacaagaggaaattaaaggccgggcatagtggctcatgcctgtaatcccagcactttgggaggctgaggcgggaggatggcttgaggccaggagtttgagatcagcctgggcaatacagggagaccccatctttacaaaaagtg

SEQ ID NO: 253637 - DNA, 486 bp, Homo sapiens
tggagccggtctttcatcggtgatgctcatgtacacccaggccatgcgttgtctaagtctgcccctttaggaaaatgctccagctgcattttcaagggctgctttttctctgcaccaagcaccttgcccactggagagccatcttcaggcagggctcacgagccccatgccctgtaccctgagctgctctgcccggggtgtggcaggtcatgatagagttaagagtcactttgccactggacaatagttcatgacacgtggctcctacctccctgatccctaaatccttcttgcctcctccctaaaggagagctcctgagtgaatttgttggaagcaacactagaaaactgcaagtctcaatcttcaactcacagaatcaaatgttcctgtgaggtcctaaaaccaggtctgtcccagcaggtgaactaaacagggcacagcaggatgagtttgcaggaattttatatatagcaccgattaaggca

SEQ ID NO: 253638 - DNA, 738 bp, Homo sapiens
tgctgggattacaggcgtgagccaccgagtccggcctgattgcttctctaatgctcagccacccaccctgtcttgccaagtctgcccctttaggaaaatgctccagctgcattttcaagggctgctttttctctgcaccaagcaccttgcccactggagagccatcttcaggcagggctcacgagccccatgccctgtaccctgagctgctctgcccggggtgtggcaggtcatgatagagttaagagtcactttgccactggacaatagttcatgacacgtggctcctacctccctgatccctaaatccttcttgcctcctccctaaaggagagctcctgagtgaatttgttggaagcaacactagaaaactgcaagtctcaatcttcaactcacagaatcaaatgttcctgtgaggtcctaaaaccaggtctgtcccagcaggtgaactaaacagggcacagcaggatgagtttgcaggaattaggaatcgacttctatacctcgattacccgtgccctatttgaaaaactgaatgccgatctgttccgtggcaccctgaacccaatatagaacacccttcgagatgccgaactacactagtcacagatccatgatattgtcctggatagtggttctactcatatccccaagattcagaagcttctccaagacttcttcaatggaaaagaactgaataatagcatcaaccctgatgaagctgttgcttatggtgca

SEQ ID NO: 253639 - DNA, 730 bp, Homo sapiens
gatctgagttcaagtaattctcctgcctcagcctcctgaggagctgggattacaggcatgcgccaccacacctggctcacagggtgagaccctgtctctaaaaacaacaacgacaaaaatgacacaatagtgagggcacaggccccaggtcactgacttagattctaatcccagctcttccaactgctgtttcttcacctgctgagcctcagtttccccatctgtcattggggataccagcccctgcttcacgggtgcctaggggattcccaggagattatggaggtgcctcaaggtgcctggtagggctgagggtggagggtatgggggttcagggccgtgtccctggctgagctgaccccacaggtttcagcgggtgggcccacctgacggaggttgaccctgatgaggaggtgcagggcgagatccacctgcggctggaagtgcgcccaggggcccgggcctgccagctacgctgctctgtgctggaggccagatcatgaagaagtcatgctacccacgctggaatgagacgtttgaatttgagctgcaggagggggccgtggaggcgctgtgcgtggaggcctgggactgggaccttgtcagccgaaacgacttcctgggcaaagtggtgatcgatgtccagagactgcgggtggcgcagcaggaggagggctggttccggctgcagcccgaccagtccaagagccggcagcatgacgagtaagtg

SEQ ID NO: 253640 - DNA, 367 bp, Homo sapiens
gggtgttctgatccagactccaagagagggttctcggatctcatgtgagaaagaattcagggcgggtccacagagtaaagtgcaagcaagtttatgagagaagtaaagaaacaaaagaatggctattccacagacagagcagcactgagtgctgctgcttggctatttttagggttatttcttgattaaatgctaaatatggggtggattattcatgagttttccaggaaaggggtggggatttcccttcttttctatcatgtaaggtcacttctggacatttttatggcccttgtaagctgtcacatgctggtagaagtgtcttttagtatgcgaatgtaatacaattggcgtttaacgagcagtg

SEQ ID NO: 253641 - DNA, 387 bp, Homo sapiens
tattttcagcagctgacagtcattacggcttatctccaaagacaccctttccttggagattcacctttttagagtgaattttataacacggtatttggatgagaatatattccacatatgctggatgaacaaatatatgtacactaatatcaatcacttgccccaatttgttcaattcctatattttccgtagagtcctctttctcattcatcctcccaaatagtcagtcaacctcccatcgattctaactcttaaaattggtctcaaatactctcaaatacttagttctctctgctatcatatcgtaattcacttcccacttaagcatggattggaggtcaaagataaacaaaataccaaaatacagctataaagatcacactatc

SEQ ID NO: 253642 - DNA, 942 bp, Homo sapiens
ttccctcttagggggctttcctctgcctcacggtggccccagttcctcgttcctcgactctccttttctctcaggcctgaggcacagcccaggggcctccctgcaagggaacagacgtttcctttattggatcgtgactgtggacttttttctgtaattttgcgagagggtggtggttatgttgcgacatatcaaaaagcagttattttaccgcctttagcagttggggctcaccccatccccccatttgtagatataattggggttagtttagggcgagtcacttcctggtcaggatggcctcttaacttcccttttgctcctccttcctcaggaagtgattttgctgtcacgactcttcgacaaggagaggtcccaaatgttgtccatctcactacacatgcactacttttctcctgtactgtcgcctgtctgattcgctataataaatctgtgagcctcagggcatttgcttcagaatttgaacaccagtctttccctatagacacatcccttttaacgataatttttgaaaattttgtttcttgttaacaaatctagaatagctgatggattttcttaacctccagaaaggttttctgtaacacataataaaccttatgttaacacgttcaagactgaacaaagcatcctgccttctttgatgctccactgtggagtctttgatcagttgaatttgtcagtgtgcattttgtatgctcatttcttgaaaagggtcttaaatacaagagcacattctaaggtggaataacttttcttctgacagttgcacagtttcataacagtttgtcaggcttttcagtaagtacatggttttagggcacgtagaacttagaatgacctcacaaggcaacttattagacaagaattatgacatttgtctcccactgtggctattagaaaatgtgtccccttgagtgc

SEQ ID NO: 253643 - DNA, 400 bp, Homo sapiens
tcctgctcaagaaaaaaaaatttttttgaaagaacaaataacatcaacactcaatactcatttattcacatatttaagacatttttcctgggtatcccattttaattcatccttaaaatggaactgatcttgcctccttagcctaagttcaggggaaatggatgcaaagctctgaaagtcactgatctgggtgctgtgaggtgacatcatcacaggtgacatcaccagccagccatggagaggtttgaacgaaccttccccctttctcccagacagatgtgaccaggctttatgaaaatttgtctgtaaagaggcacttttcaccacattattttaatacacttgtgttattaccagaaaaatgggaaagaaggaaataaaatttgcatcgactttccgc

SEQ ID NO: 253644 - DNA, 363 bp, Homo sapiens
gtaaatcctctgcactgcacgaaagccctgctacacagtagataattcccagtatttgctgaatgacaaaaattgatttatgactaaagatgcatgctcacttggaaaggaaatagggagaaaagcaagaaaaaaattaagaaaatttacatttatcaagcggccataatgtgtcagaaggagagtcagaaagtgatgttacaaaacagttgtcaaagaaagagttgatcaacgagtatggaatcaactaaggtagaaaagaaggtgtattgggcattttataaataacaaattgttatatttctggatctttttgatgtttgtatttgccagctttcataaattattaatttgttgtgaaat

SEQ ID NO: 253645 - DNA, 522 bp, Homo sapiens
ccatttgtatcacaattccagctgcctcttttgcaaaaatgtttaagctgatcctaagatgtgtatggaaatgcaagggacccagaatagccaaaacaatcttgaaaaaaatgatcaaagttggagggctcacatttccccatttcagtacttactacagagctacaataatcaagacagtgcatattggtatgaggataggcatgtaaaacagtaaaataggatcgagagtctagaaatagaccctaaatttacggtcaaatgtttttcaacaaaagtgccaagataattcaatggggaaaaaaagccttttaacaagtggtacagggtcaaatggatagacacatgcaaaaaaaggagttggatcccttctttaagcattcaaaactcaaaagggggtgtagaactaaatatatgagctaaaactataaaatttttagaagaaaaaaatagaagtaaaccttcatgactttagcttagccaaagccttctcatatatcgcaccaaaagcacaagattaaa

SEQ ID NO: 253646 - DNA, 370 bp, Homo sapiens
aaaacaaacaagcaaacaaataagggtcttaggacgagctgcctaatatttcatctttgtcagcaagaaaagaaagtagaatagaatatctttgggtatgggccctgtttttgaatttggtgtagggtgttttgagagaagatacagctaagatcaccagtccttgataagacagggtttcttttctcatatgtgcttcaaaagtcacaaataatcatcctgactctccttggcccacctcaaaccactctatccccattggtttggatatggtcaagtccagacatgtccctctaagcagccagggcagcagaatctctacttaactaacattagttcttaatagactatgggatattgaacataaaat

SEQ ID NO: 253647 - DNA, 336 bp, Homo sapiens
acccatcctcctcatattcttcgaaaaaattgaaagggaggtaacacttccacacttactctgtggggcctacattaccctgataccaaagctagacaaagacgcaataaaaaactattgactaataccttgataaatattgatgcaaaaatcctcaacaaaatagtaccaaactgaattcaacagtacagtcatgtgttgcttaacaataggaccacattctgagaaatgtattgttaggtgactttttgtgcaaacattgtagagtgtatttacataaccctaggtgatatagcctactaccagcctaggctatattaggtagcctgttgttcc

SEQ ID NO: 253648 - DNA, 192 bp, Homo sapiens
agcaggggaatggtatcgtgcaggatgaggtgtttttgtttttgagatgattctagaacagaatttctcaactgtggcattaatggtatttggactagataattttttgttgtcaagggctatcctgcgtgttgtggtatgttgttatagcggcatccctgagctctacctactagatgccagtaggaccct

SEQ ID NO: 253649 - DNA, 441 bp, Homo sapiens
taggtcctgattttcccctctcttccattctgggggaactgcatttataaaaagtttaacattagtagtgataagaacaacaaaatcaatatgactggcagctaacttgttttgagcatcggttctggtctggcacagtgctcaccattttacatagcatggagtcggtatgggtcagtttcccaaatgtgcttttttaaagaactggaaacccagaggcatttgaaatatgtgtcttttgaatcaaagaaacatagaggatttgaagatggaggagaccgcattttattttatggccctggataaagtcactacgcctatccctctgagactcagttatccccatctgtaaaatgggtggttggatgaaatgaacactcgaggtcttctcagagctgacattctacagattcatcagtgagtttcctctgactctccttg

SEQ ID NO: 253650 - DNA, 378 bp, Homo sapiens
ttctactaataataccaaaaattagccgggtgtggtgacacatgcctgtaatcccaactactcgggaggctgaggcacgagaatcattagaacccaggtggtggaggctgcagtgagccgagattgcgtcagtgcactctggcctcggcaacagagcgagactctgtctcaaacaaacaaacaaacaaacaaacaaaaggactctatattcaagttaaaataagaagtgtaacagaatcatggggtcttttttgctttttaaattttgatgtggctcacacctgtaaatcccagaactttgggaggccaggggaggaggattgctagagcctgggggttcaagaccagcctgggcaaagtggttaggacccattctca

SEQ ID NO: 253651 - DNA, 650 bp, Homo sapiens
tttaaattgggcagccattaggctgagacagctggctccagtgcctagtaagcaaactgaagcccaatgtaaacataaaatgaaacttaagcttaaccaatcaaaaacaaacctctaactagggactttccactggatcatatccaaataaggcaagtgcctagctacagccaatcaagtaattcctttactttgctacagcgttcagcctataaaagcctgcttctaaagcagagctctctgaacttcttccagttttgaatgctgcctgaatcctttaatgctcacctaaattctgctaaatgtctgtctaaagtttttatttaaacaattctgaacatttttaagttgttattttttcttatgtaatattcattttaatacctataatgggtactctgacattcaatctaaattaatagaaaacagaaaaataattctacaaatacacttgagatgcagacatctgagtttgatttatcagatcaaatctctcatctagcacataaaaatgattctagactttcaaacaacgttaaaaaagaaaaacagccaggcgcagtggctcacacctgtaaccccagcaatttgggaggctgagatcactccactgcactccaacctggacaacaaaagcgaaactccatctc

SEQ ID NO: 253652 - DNA, 1033 bp, Homo sapiens
  misc_feature (1003)..(1003): n is a, c, g, or t
  misc_feature (1032)..(1032): n is a, c, g, or t
cagcagagcccctggaggggcacaggggcccccagagccctgcccacagaaaagggaggcttgagctcaaggggctccacccaccagggcccccaggtgaggctgagggcccagccccagagattccaggtgagcagcaaggggcggtggaggacagagccccccgagccagccctcccactgcctgcccatcccaccgaacccctaggactaagcggcccggaacctgtggcccctcccctgagcccccggcagcagacggcagggccggcgaccgcgggatgagcgagggctttcttggagaggcaggaagaggggcccactgcccgaccgagagagcaaacaagggccgtctcctccccagatgccggaaggctcttccactgcagggctgctgggctggaggggctctgaggcagagccagggagcccgagtccagggggcttccccgggtcctcctcacaacccgggcaggggcagctcacagcgggtcctggcgggggcaggcctaggtgcttctgcgcaggccctagccaagccccttccaccccggggggctctggcagccctagggggcctggcagggaaggagagaggctgctaaagtgccatggaaagcaacagcctgaagccgggctgggtttgggcaggacaggaagagtcatgggggtcaagagactgggtccctccaagcttgggcacccccgctgccagggacctcgccaccccgctcagccccacaggccctgggtaggctgtctcccagcacacatcagggaacctcagctctaatgactacaaagccagcacgtttatttctggataaacagtgagggtgtgagctgctgcacctgctcctggctgtggggcttctccgggacccctcctggcctccgcagggccctgagctttatgagggacgccttccagcgcagccaccccacagcgatactttggtcatgaatgtatatagccacttctgcaggagcaccaagaaatacntgggactacattggaatcttagtacatant

SEQ ID NO: 253653 - DNA, 4473 bp, Homo sapiens
cagcagagcccctggaggggcacaggggcccccagagccctgcccacagaaaagggaggcttgagctcaaggggctccacccaccagggcccccaggtgaggctgagggcccagccccagagattccaggtgagcagcaaggggcggtggaggacagagccccccgagccagccctcccactgcctgcccatcccaccgaacccctaggactaagcggcccggaacctgtggcccctcccctgagcccccggcagcagacggcagggccggcgaccgcgggatgagcgagggctttcttggagaggcaggaagaggggcccactgcccgaccgagagagcaaacaagggccgtctcctccccagatgccggaaggctcttccactgcagggctgctgggctggaggggctctgaggcagagccagggagcccgagtccagggggcttccccgggtcctcctcacaacccgggcaggggcagctcacagcgggtcctggcgggggcaggcctaggtgcttctgcgcaggccctagccaagccccttccaccccggggggctctggcagccctagggggcctggcagggaaggagagaggctgctaaagtgccatggaaagcaacagcctgaagccgggctgggtttgggcaggacaggaagagtcatgggggtcaagagactgggtccctccaagcttgggcacccccgctgccagggacctcgccaccccgctcagccccacaggccctgggtaggctgtctcccagcacacatcagggaacctcagctctaatgactacaaagccagcacgtttatttctggataaacagtgagggtgtgagctgctgcacctgctcctggctgtggggcttctccgggacccctcctggcctccgcagggccctgagctttatgagggacgccttccagcgcagccacctcacagcctggtacacgccccagcagttcatgggcaccaccttgccaggcgccatgtccttgatgaagacccgcggcctcaccagggatgggagcgccttccagctgcccagcggcgtccgcgggccctcctcactccacagccggagcacactctcccacagggtggccatctcctgcgtgcgcagccgggcctcagtgttgaacctgaggttctggatggtcttgttggcctggacgcagttttccagcttcattatttggttctgaaactggccttgccttcggcggaaatcctgaggtctgagtcgctcttatgaagcaggcacttgtcggagacactctctatctgctgggggaggccatccaccttctcccgcacccctcgcaggtgttcggtcacctccttccgccacctggccaggtcctccagggacttcctctctgcaccttcccattcggtctttgcctggggtacagatgcccagtgagggacaaagccaagagaggggggacagacagatggaaagacggacacggggagctctggggagcaggcggcccccacccccacttccagctctgagacatttgtgcacaggcctgcaggcggctgggatggcctggccgggcacgctctggagacacacatgccaaggcagggcctgggcagccgagggcccgtgggggctgttccgaccacacaggtgcccgagggaggcagggcaggccccggtgggacccagccccgaaacgcagggtgtcgcccacgtttgcagccgcgctcgcgtgtcggtggatgagcgggaaccggggggcggcgcctacgcaatgcacgttacgccgcggtggaaggggtgaagctctgcgcacgaggccccgaggagcgggaaacgggatgcccgtgggtgtcaccgccacagcggccgcaccgtgcgtggctctgtttcctggaaacgtccagaacaggcagcccccgagacagggaggggcccagcggtcgccaggggaagtggggatgggaatgagtgcggatggggctgaggttcttcctgaaggatgaatgctctgaaactgtgaatagacacacggaactgtgcacgttcacgggtgaaccgtgtggggagtgaatccatctcaacagagctgttacacagtgaacaagagcacgaggggtggaggccgcttgtctgccccgccgtgagctgcccgcatggccgggccgtgggccgaggctccagctcgggcctcacgggctgcagatgctgggccgaggctgctcagcggctgtcctgccccacacaggagtctctggggctcggggtctcccaggccctggggacagtcgctgggtgggacgggaggcttgggaccggcctgtcaggcctctaccctgggggcagtggtgggctgagagctggaggggtggggactccccatagccccgcctgcccccgcccgctgcctggcgcacctcggacagcctgaggcccagcatctgctcctgcagatcgagccggctgctcagagccgggagatggccactcagctcctttaactgcccggccagctgcgccacggatgcctccagagcccggctcttctctcggagctgcaggggacaggtgggcacggggaggcctggctgagcgcccatcccgtgtgcgtgggagaccccgttggggacatgttgcgctaccccctcaccagcaccagctctccatgcatctcctgccgggccagctcgccagccagctgtgcggcctccaggttctcctgcacataggcggccagctccccagcccggctttcctccaagcgccccttggcgtccctaggggttggggacacatagacaccctcagtggagcctgcccacctctcagccctgggccagggaggggagcttggctgctggctccagaacctcccaggagaccctgggatcggaagatggggtgcggtcacagtgccaccaacacgggttcactccccatggccaccaagatgggcgttcactccccacggccaccaagacaggggttccctccccatggccacagctgagtgccccagggagggcaggctgggtgagggacaggaggccccacaggagggaggagggttcgcaccatccagctgcagccctcggggtcgagcactctgctcgggggaggcaaggtcattccctgctgagtcggccactgcggccccctcctgagtgggacatcaggggtccccccgcctgacagcacctgaggccccaggacacccaccaggctttctcctcggccagtaggacacggttcagcgacgcctggttctgctgcacaaacttggtcagctgggccacggcagcatccaggccctggcactgctccaggaggtggctctcctgccagggggtggaggccgccctgagacctgcaccccggccccggccccacctgcccgccgcccgcccggccccacctcatgctgcccctgcagggcccgcaggcgctcctccatcagcccccgaagcttctcccaccggctctccagctcgccccgcaggctgccctccagcttcagccgtgagctctccgaggccttcattctctgtggggagaccccactgtcagctgcaggtctgcgtctgggaaggggggcagggcaggccagccgcgggcaggctcccaccttctccagggccaggaagctcttctgcaggaagccgtcacagcttggcctccctcttcaggaagcgcaggctcacctcttcgccgagcttggtcacctgggcctggggcggaggcacattgtcccgtgtgcagcctctgctggacacgcagccggtccccctcctgcccatggtctccatcagagttggagtcccctgctgtccccaagccctgagcccggctgagctgggcctgtcacaccctcagccggaagaaagccacggcgggcaggaccactctgtacccagacgaccaaccaggcatgggtttgtgaagcatgagaaggccacactcaggtggggtccagacacacttggcacccaccaccgaggctgcccagggaaggccccccagccgccaccaggcccggcagggaagcaggagtgtcgtgcaggtgtccccatgcacggggagccaggtgggctgggcagagccttggggccttgtctccacaccaacagctgctttcctgccgccctgaaggggaggggaggggggaggcgcagccggccccatccctgcatctcatacacgcaaagggtaggcaggcggcacaggcccttcatcagccacggagaggcgcctcccgggaaacttcccctccacccaagcccctgctggcctcctgccccccaggaggtcaccttagagtagatatttttctgtaaaaagccagatggtacatgttcccacctcatgggatctctgttgtaaccctctcagcatggcggttacagcccccacagtagacattgacaacatgtaaaaaatgttcctgtgtgccaataaaactttatttacaaaaacaaa

SEQ ID NO: 253654 - DNA, 3468 bp, Homo sapiens
cagcagagcccctggaggggcacaggggcccccagagccctgcccacagaaaagggaggcttgagctcaaggggctccacccaccagggcccccaggtgaggctgagggcccagccccagagattccaggtgagcagcaaggggcggtggaggacagagccccccgagccagccctcccactgcctgcccatcccaccgaacccctaggactaagcggcccggaacctgtggcccctcccctgagcccccggcagcagacggcagggccggcgaccgcgggatgagcgagggctttcttggagaggcaggaagaggggcccactgcccgaccgagagagcaaacaagggccgtctcctccccagatgccggaaggctcttccactgcagggctgctgggctggaggggctctgaggcagagccagggagcccgagtccagggggcttccccgggtcctcctcacaacccgggcaggggcagctcacagcgggtcctggcgggggcaggcctaggtgcttctgcgcaggccctagccaagccccttccaccccggggggctctggcagccctagggggcctggcagggaaggagagaggctgctaaagtgccatggaaagcaacagcctgaagccgggctgggtttgggcaggacaggaagagtcatgggggtcaagagactgggtccctccaagcttgggcacccccgctgccagggacctcgccaccccgctcagccccacaggccctgggtaggctgtctcccagcacacatcagggaacctcagctctaatgactacaaagccagcacgtttatttctggataaacagtgagggtgtgagctgctgcacctgctcctggctgtggggcttctccgggacccctcctggcctccgcagggccctgagctttatgagggacgccttccagcgcagccacctcacagcctggtacacgccccagcagttcatgggcaccaccttgccaggcgccatgtccttgatgaagacccgcggcctcaccagggatgggagcgccttccagctgcccagcggcgtccgcgggccctcctcactccacagccggagcacactctcccacagggtggccatctcctgcgtgcgcagccgggcctcagtgttgaacctgaggttctggatggtcttgttggcctggacgcagttttccagcttcattatttggttctgaaactggccttgccttcggcggaaatcctgaggtctgagtcgctcttatgaagcaggcacttgtcggagacactctctatctgctgggggaggccatccaccttctcccgcacccctcgcaggtgttcggtcacctccttccgccacctggccaggtcctccagggacttcctctctgcaccttcccattcggtctttgcctcggacagcctgaggcccagcatctgctcctgcagatcgagccggctgctcagagccgggagatggccactcagctcctttaactgcccggccagctgcgccacggatgcctccagagcccggctcttctctcggagctgcaggggacaggtgggcacggggaggcctggctgagcgcccatcccgtgtgcgtgggagaccccgttggggacatgttgcgctaccccctcaccagcaccagctctccatgcatctcctgccgggccagctcgccagccagctgtgcggcctccaggttctcctgcacataggcggccagctccccagcccggctttcctccaagcgccccttggcgtccctaggggttggggacacatagacaccctcagtggagcctgcccacctctcagccctgggccagggaggggagcttggctgctggctccagaacctcccaggagaccctgggatcggaagatggggtgcggtcacagtgccaccaacacgggttcactccccatggccaccaagatgggcgttcactccccacggccaccaagacaggggttccctccccatggccacagctgagtgccccagggagggcaggctgggtgagggacaggaggccccacaggagggaggagggttcgcaccatccagctgcagccctcggggtcgagcactctgctcgggggaggcaaggtcattccctgctgagtcggccactgcggccccctcctgagtgggacatcaggggtccccccgcctgacagcacctgaggccccaggacacccaccaggctttctcctcggccagtaggacacggttcagcgacgcctggttctgctgcacaaacttggtcagctgggccacggcagcatccaggccctggcactgctccaggaggtggctctcctgccagggggtggaggccgccctgagacctgcaccccggccccggccccacctgcccgccgcccgcccggccccacctcatgctgcccctgcagggcccgcaggcgctcctccatcagcccccgaagcttctcccaccggctctccagctcgccccgcaggctgccctccagcttcagccgtgagctctccgaggccttcattctctgtggggagaccccactgtcagctgcaggtctgcgtctgggaaggggggcagggcaggccagccgcgggcaggctcccaccttctccagggccaggaagctcttctgcaggaagccgtcacagcttggcctccctcttcaggaagcgcaggctcacctcttcgccgagcttggtcacctgggcctggggcggaggcacattgtcccgtgtgcagcctctgctggacacgcagccggtccccctcctgcccatggtctccatcagagttggagtcccctgctgtccccaagccctgagcccggctgagctgggcctgtcacaccctcagccggaagaaagccacggcgggcaggaccactctgtacccagacgaccaaccaggcatgggtttgtgaagcatgagaaggccacactcaggtggggtccagacacacttggcacccaccaccgaggctgcccagggaaggccccccagccgccaccaggcccggcagggaagcaggagtgtcgtgcaggtgtccccatgcacggggagccaggtgggctgggcagagccttggggccttgtctccacaccaacagctgctttcctgccgccctgaaggggaggggaggggggaggcgcagccggccccatccctgcatctcatacacgcaaagggtaggcaggcggcacaggcccttcatcagccacggagaggcgcctcccgggaaacttcccctccacccaagcccctgctggcctcctgccccccaggaggtcaccttagagtagatatttttctgtaaaaagccagatggtacatgttcccacctcatgggatctctgttgtaaccctctcagcatggcggttacagcccccacagtagacattgacaacatgtaaaaaatgttcctgtgtgccaataaaactttatttacaaaaacaaa

SEQ ID NO: 253655 - DNA, 4114 bp, Homo sapiens
cagcagagcccctggaggggcacaggggcccccagagccctgcccacagaaaagggaggcttgagctcaaggggctccacccaccagggcccccaggtgaggctgagggcccagccccagagattccaggtgagcagcaaggggcggtggaggacagagccccccgagccagccctcccactgcctgcccatcccaccgaacccctaggactaagcggcccggaacctgtggcccctcccctgagcccccggcagcagacggcagggccggcgaccgcgggatgagcgagggctttcttggagaggcaggaagaggggcccactgcccgaccgagagagcaaacaagggccgtctcctccccagatgccggaaggctcttccactgcagggctgctgggctggaggggctctgaggcagagccagggagcccgagtccagggggcttccccgggtcctcctcacaacccgggcaggggcagctcacagcgggtcctggcgggggcaggcctaggtgcttctgcgcaggccctagccaagccccttccaccccggggggctctggcagccctagggggcctggcagggaaggagagaggctgctaaagtgccatggaaagcaacagcctgaagccgggctgggtttgggcaggacaggaagagtcatgggggtcaagagactgggtccctccaagcttgggcacccccgctgccagggacctcgccaccccgctcagccccacaggccctgggtaggctgtctcccagcacacatcagggaacctcagctctaatgactacaaagccagcacgtttatttctggataaacagtgagggtgtgagctgctgcacctgctcctggctgtggggcttctccgggacccctcctggcctccgcagggccctgagctttatgagggacgccttccagcgcagccacctcacagcctggtacacgccccagcagttcatgggcaccaccttgccaggcgccatgtccttgatgaagacccgcggcctcaccagggatgggagcgccttccagctgcccagcggcgtccgcgggccctcctcactccacagccggagcacactctcccacagggtggccatctcctgcgtgcgcagccgggcctcagtgttgaacctgaggttctggatggtcttgttggcctggacgcagttttccagcttcattatttggttctgaaactggccttgccttcggcggaaatcctgaggtctgagtcgctcttatgaagcaggcacttgtcggagacactctctatctgctgggggaggccatccaccttctcccgcacccctcgcaggtgttcggtcacctccttccgccacctggccaggtcctccagggacttcctctctgcaccttcccattcggtctttgcctggggtacagatgcccagtgagggacaaagccaagagaggggggacagacagatggaaagacggacacggggagctctggggagcaggcggcccccacccccacttccagctctgagacatttgtgcacaggcctgcaggcggctgggatggcctggccgggcacgctctggagacacacatgccaaggcagggcctgggcagccgagggcccgtgggggctgttccgaccacacaggtgcccgagggaggcagggcaggccccggtgggacccagccccgaaacgcagggtgtcgcccacgtttgcagccgcgctcgcgtgtcggtggatgagcgggaaccggggggcggcgcctacgcaatgcacgttacgccgcggtggaaggggtgtcaccgccacagcggccgcaccgtgcgtggctctgtttcctggaaacgtccagaacaggcagcccccgagacagggaggggcccagcggtcgccaggggaagtggggatgggaatgagtgcggatggggctgaggttcttcctgaaggatgaatgctctgaaactgtgaatagacacacggaactgtgcacgttcacgggtgaaccgtgtggggagtgaatccatctcaacagagctgttacacagtgaacaagagcacgaggggtggaggccgcttgtctgctcctgcagatcgagccggctgctcagagccgggagatggccactcagctcctttaactgcccggccagctgcgccacggatgcctccagagcccggctcttctctcggagctgcaggggacaggtgggcacggggaggcctggctgagcgcccatcccgtgtgcgtgggagaccccgttggggacatgttgcgctaccccctcaccagcaccagctctccatgcatctcctgccgggccagctcgccagccagctgtgcggcctccaggttctcctgcacataggcggccagctccccagcccggctttcctccaagcgccccttggcgtccctaggggttggggacacatagacaccctcagtggagcctgcccacctctcagccctgggccagggaggggagcttggctgctggctccagaacctcccaggagaccctgggatcggaagatggggtgcggtcacagtgccaccaacacgggttcactccccatggccaccaagatgggcgttcactccccacggccaccaagacaggggttccctccccatggccacagctgagtgccccagggagggcaggctgggtgagggacaggaggccccacaggagggaggagggttcgcaccatccagctgcagccctcggggtcgagcactctgctcgggggaggcaaggtcattccctgctgagtcggccactgcggccccctcctgagtgggacatcaggggtccccccgcctgacagcacctgaggccccaggacacccaccaggctttctcctcggccagtaggacacggttcagcgacgcctggttctgctgcacaaacttggtcagctgggccacggcagcatccaggccctggcactgctccaggaggtggctctcctgccagggggtggaggccgccctgagacctgcaccccggccccggccccacctgcccgccgcccgcccggccccacctcatgctgcccctgcagggcccgcaggcgctcctccatcagcccccgaagcttctcccaccggctctccagctcgccccgcaggctgccctccagcttcagccgtgagctctccgaggccttcattctctgtggggagaccccactgtcagctgcaggtctgcgtctgggaaggggggcagggcaggccagccgcgggcaggctcccaccttctccagggccaggaagctcttctgcaggaagccgtcacagcttggcctccctcttcaggaagcgcaggctcacctcttcgccgagcttggtcacctgggcctggggcggaggcacattgtcccgtgtgcagcctctgctggacacgcagccggtccccctcctgcccatggtctccatcagagttggagtcccctgctgtccccaagccctgagcccggctgagctgggcctgtcacaccctcagccggaagaaagccacggcgggcaggaccactctgtacccagacgaccaaccaggcatgggtttgtgaagcatgagaaggccacactcaggtggggtccagacacacttggcacccaccaccgaggctgcccagggaaggccccccagccgccaccaggcccggcagggaagcaggagtgtcgtgcaggtgtccccatgcacggggagccaggtgggctgggcagagccttggggccttgtctccacaccaacagctgctttcctgccgccctgaaggggaggggaggggggaggcgcagccggccccatccctgcatctcatacacgcaaagggtaggcaggcggcacaggcccttcatcagccacggagaggcgcctcccgggaaacttcccctccacccaagcccctgctggcctcctgccccccaggaggtcaccttagagtagatatttttctgtaaaaagccagatggtacatgttcccacctcatgggatctctgttgtaaccctctcagcatggcggttacagcccccacagtagacattgacaacatgtaaaaaatgttcctgtgtgccaataaaactttatttacaaaaacaaa

SEQ ID NO: 253656 - DNA, 3500 bp, Homo sapiens
cagcagagcccctggaggggcacaggggcccccagagccctgcccacagaaaagggaggcttgagctcaaggggctccacccaccagggcccccaggtgaggctgagggcccagccccagagattccaggtgagcagcaaggggcggtggaggacagagccccccgagccagccctcccactgcctgcccatcccaccgaacccctaggactaagcggcccggaacctgtggcccctcccctgagcccccggcagcagacggcagggccggcgaccgcgggatgagcgagggctttcttggagaggcaggaagaggggcccactgcccgaccgagagagcaaacaagggccgtctcctccccagatgccggaaggctcttccactgcagggctgctgggctggaggggctctgaggcagagccagggagcccgagtccagggggcttccccgggtcctcctcacaacccgggcaggggcagctcacagcgggtcctggcgggggcaggcctaggtgcttctgcgcaggccctagccaagccccttccaccccggggggctctggcagccctagggggcctggcagggaaggagagaggctgctaaagtgccatggaaagcaacagcctgaagccgggctgggtttgggcaggacaggaagagtcatgggggtcaagagactgggtccctccaagcttgggcacccccgctgccagggacctcgccaccccgctcagccccacaggccctgggtaggctgtctcccagcacacatcagggaacctcagctctaatgactacaaagccagcacgtttatttctggataaacagtgagggtgtgagctgctgcacctgctcctggctgtggggcttctccgggacccctcctggcctccgcagggccctgagctttatgagggacgccttccagcgcagccacctcacagcctggtacacgccccagcagttcatgggcaccaccttgccaggcgccatgtccttgatgaagacccgcggcctcaccagggatgggagcgccttccagctgcccagcggcgtccgcgggccctcctcactccacagccggagcacactctcccacagggtggccatctcctgcgtgcgcagccgggcctcagtgttgaacctgaggttctggatggtcttgttggcctggacgcagttttccagcttcattatttggttctgaaactggccttgccttcggcggaaatcctgaggtctgagtcgctcttatgaagcaggcacttgtcggagacactctctatctgctgggggaggccatccaccttctcccgcacccctcgcaggtgttcggtcacctccttccgccacctggccaggtcctccagggacttcctctctgcaccttcccattcggtctttgcctggggtacagatgcccagtgagggacaaagccaagagaggggggacagacagatggaaagacggacacggggagctctggggagcaggcggcccccacccccacttccagctctgagacatttgtgcacaggcctgcaggcggctgggatggcctggccgggcacgctctggagacacacatgccaaggcagggcctgggcagccgagggcccgtgggggctgttccgaccacacaggtgcccgagggaggcagggcaggccccggtgggacccagccccgaaacgcagggtgtcgcccacgtttgcagccgcgctcgcgtgtcggtggatgagcgggaaccggggggcggcgcctacgcaatgcacgttacgccgcggtggaaggggtgtcaccgccacagcggccgcaccgtgcgtggctctgtttcctggaaacgtccagaacaggcagcccccgagacagggaggggcccagcggtcgccaggggaagtggggatgggaatgagtgcggatggggctgaggttcttcctgaaggatgaatgctctgaaactgtgaatagacacacggaactgtgcacgttcacgggtgaaccgtgtggggagtgaatccatctcaacagagctgttacacagtgaacaagagcacgaggggtggaggccgcttgtctgctcctgcagatcgagccggctgctcagagccgggagatggccactcagctcctttaactgcccggccagctgcgccacggatgcctccagagcccggctcttctctcggagcagcaccagctctccatgcatctcctgccgggccagctcgccagccagctgtgcggcctccaggttctcctgcacataggcggccagctccccagcccggctttcctccaagcgccccttggcgtcccaggctttctcctcggccagtaggacacggttcagcgacgcctggttctgctgcacaaacttggtcagctgggccacggcagcatccaggccctggcactgctccaggaggtggctctcctcatgctgcccctgcagggcccgcaggcgctcctccatcagcccccgaagcttctcccaccggctctccagctcgccccgcaggctgccctccagcttcagccgtgagctctccgaggccttcattctctgtggggagaccccactgtcagctgcaggtctgcgtctgggaaggggggcagggcaggccagccgcgggcaggctcccaccttctccagggccaggaagctcttctgcaggaagccgtcacagcttggcctccctcttcaggaagcgcaggctcacctcttcgccgagcttggtcacctgggcctggggcggaggcacattgtcccgtgtgcagcctctgctggacacgcagccggtccccctcctgcccatggtctccatcagagttggagtcccctgctgtccccaagccctgagcccggctgagctgggcctgtcacaccctcagccggaagaaagccacggcgggcaggaccactctgtacccagacgaccaaccaggcatgggtttgtgaagcatgagaaggccacactcaggtggggtccagacacacttggcacccaccaccgaggctgcccagggaaggccccccagccgccaccaggcccggcagggaagcaggagtgtcgtgcaggtgtccccatgcacggggagccaggtgggctgggcagagccttggggccttgtctccacaccaacagctgctttcctgccgccctgaaggggaggggaggggggaggcgcagccggccccatccctgcatctcatacacgcaaagggtaggcaggcggcacaggcccttcatcagccacggagaggcgcctcccgggaaacttcccctccacccaagcccctgctggcctcctgccccccaggaggtcaccttagagtagatatttttctgtaaaaagccagatggtacatgttcccacctcatgggatctctgttgtaaccctctcagcatggcggttacagcccccacagtagacattgacaacatgtaaaaaatgttcctgtgtgccaataaaactttatttacaaaaacaaa

SEQ ID NO: 253657 - DNA, 2220 bp, Homo sapiens
cagcagagcccctggaggggcacaggggcccccagagccctgcccacagaaaagggaggcttgagctcaaggggctccacccaccagggcccccaggtgaggctgagggcccagccccagagattccaggtgagcagcaaggggcggtggaggacagagccccccgagccagccctcccactgcctgcccatcccaccgaacccctaggactaagcggcccggaacctgtggcccctcccctgagcccccggcagcagacggcagggccggcgaccgcgggatgagcgagggctttcttggagaggcaggaagaggggcccactgcccgaccgagagagcaaacaagggccgtctcctccccagatgccggaaggctcttccactgcagggctgctgggctggaggggctctgaggcagagccagggagcccgagtccagggggcttccccgggtcctcctcacaacccgggcaggggcagctcacagcgggtcctggcgggggcaggcctaggtgcttctgcgcaggccctagccaagccccttccaccccggggggctctggcagccctagggggcctggcagggaaggagagaggctgctaaagtgccatggaaagcaacagcctgaagccgggctgggtttgggcaggacaggaagagtcatgggggtcaagagactgggtccctccaagcttgggcacccccgctgccagggacctcgccaccccgctcagccccacaggccctgggtaggctgtctcccagcacacatcagggaacctcagctctaatgactacaaagccagcacgtttatttctggataaacagtgagggtgtgagctgctgcacctgctcctggctgtggggcttctccgggacccctcctggcctccgcagggccctgagctttatgagggacgccttccagcgcagccacctcacagcctggtacacgccccagcagttcatgggcaccaccttgccaggcgccatgtccttgatgaagacccgcggcctcaccagggatgggagcgccttccagctgcccagcggcgtccgcgggccctcctcactccacagccggagcacactctcccacagggtggccatctcctgcgtgcgcagccgggcctcagtgttgaacctgaggttctggatggtcttgttggcctggacgcagttttccagcttcattatttggttctgaaactggccttgccttcggcggaaatcctgaggtctgagtcgctcttatgaagcaggcacttgtcggagacactctctatctgctgggggaggccatccaccttctcccgcacccctcgcaggtgttcggtcacctccttccgccacctggccaggtcctccagggacttcctctctgcaccttcccattcggtctttgcctggggtacagatgcccagtgagggacaaagccaagagaggggggacagacagatggaaagacggacacggggagctctggggagcaggcggcccccacccccacttccagctctgagacatttgtgcacaggcctgcaggcggctgggatggcctggccgggcacgctctggagacacacatgccaaggcagggcctgggcagccgagggcccgtgggggctgttccgaccacacaggtgcccgagggaggcagggcaggccccggtgggacccagccccgaaacgcagggtgtcgcccacgtttgcagccgcgctcgcgtgtcggtggatgagcgggaaccggggggcggcgcctacgcaatgcacgttacgccgcggtggaaggggtgtcaccgccacagcggccgcaccgtgcgtggctctgtttcctggaaacgtccagaacaggcagcccccgagacagggaggggcccagcggtcgccaggggaagtggggatgggaatgagtgcggatggggctgaggttcttcctgaaggatgaatgctctgaaactgtgaatagacacacggaactgtgcacgttcacgggtgaaccgtgtggggagtgaatccatctcaacagagctgttacacagtgaacaagagcacgaggggtggaggccgcttgtctggtcctgcggattgagccgggtgtcagagccggagatggcactcagttcctttatgccggccagtggcacggtggcccagagccggctcttccgggcgggggacggggcccgggccggcaccccccccgggtggggacg

SEQ ID NO: 253658 - DNA, 3863 bp, Homo sapiens
  misc_feature (2019)..(2019): n is a, c, g, or t
  misc_feature (2621)..(2621): n is a, c, g, or t
  misc_feature (2790)..(2790): n is a, c, g, or t
  misc_feature (3023)..(3023): n is a, c, g, or t
aaggtggactagacaaagttgtatctagacccttatcatatatgtgatttgcaaatattttgattgtgtgggttgtctttttacttttttaatagcgacctttgcagcacaaattctcattttgatgaagtcaaatgtatctaactttcatttggctgcttatgctttcagtgtcatctaggaaccatagcctaatcgaaggtcattaggatttgcacctttgttttcttctaatgattttataacattggctcttatttaggtctctgatacatctgctgtgaatttttatgtatggtacgaagtgggacgggggaggggtgtcccactttaatcttttgcacatggatgtccagttgttccagcaccatttgttgaaaaaactattctttcctcatgaactgtcgtcttgcctctgttgttgaaaatcagttgactgtaaatgtatggatttacttcagaactgttaattttattccattgagctatatctattatgctagtaccatacagtcttgatgactgcatctttgtaatatgttttgagattggaaagtgttcttgggctgagaaatgtaagaattttccatggtgtttgaccttgagattagatcattccagttcataagtatttgtatatgtcttagtcagttttgtattgcaataaaggaatacctgaggctgggtagtttatttaaaaaaaaaaaaataaagccaggccgcggtggctgatgcctgtaatcccagcactttgggaggccgagatgggcggatcacgaggtcaggagatcgagaccatcctggctaacacggtgaaaccctgtctctactaaaaatacataaacttagccgggtgtgctggcacgtgcctgtagttccagctacttgggaggcagaggcaggagaatcgcttgaacccaggaggtggaggttgcagtgagccgagatcgcgccactgcactccagcctgggcgacagagcaagactccatctcaaaaaaaaaaaaaaaagaagggggagaaagagagcaaggttaatttggctcatgtttctacaggctgtacaagaagcatggcgcaccagcctctgcaactagtgaggtctcaagcggcttccgctcgtggtggaaggtgaagggtagcctatgtgtgcaggtatcacagggtgagagaggaagcaaggagagggtgtgtgtcaggctcttttaaacagccagctcttacagcacctaataatacaggaagaactcacccctgaaggaaggtattgatctatttatgagggatccaccttcatgacccaaacccacctcccattaggcccccacctacaacattgggggatcatattttaatatcaggtttggggagacaaaccaaaccgtagcaatgcagctttatatttttacatatagtaaatgatggtgataatatcaatgacaggaaagacctcagttgggcattctttaataggagttgatcaccatcttggctttaaagaattttcattaactatactgtgctttcccttgactgaccaactgagaactcaaaccgtgttgatttttgctggtaagtatttgaattgttagttgacagtcaagccagtagctgtttgaaaaacctttctttgggacaactacaaaagcaaaaatataagtacctacaaatgcaaagaaaaatactactacctgaaatcctactgtatatggataaccactgttaatatttgatgaatgtgctttcacttagtggtctatgcaaatgcaattttacgtaaatgctgtcataccatacgtgctgtctttcaacctgcgccctcaagagaacatcattaatatatttgtcattaaatgtgggtctacttcattattttgatgacagcattaaaccactattgaactatactatttcatataatttcattaatagttttttactattgaaattttaagttgtttctagtttatactctcaccaacagaacgtgaattaaagtttcctcatacttgaggcaaancagagttttgtcacccttttaccatctttgctatactataagcaaaaaataagtttctgttgcatttcttttatgatgactgtagttgaatgtctttcattagtgtcctggccatgtgtatttcctagtgaattacttgcttatgactattgcctgttctttttttccttagtgatttatttttatatatttttagtgttagactgttaatatatgttgcaaatgtgtttctcagtttgccatttatcttggaatcttcatggcagtgtattttcttgtggtgtttttgggtattttgttgctgtccaatatttttgccttcttataaaagtaatcacacttttcaatctttgctgtatgtttttgaactttgtggtcatgcttagaaggattttacccatctcaagtttacataaactttcacttgtattttctcctggtacttttatatgtggttcatatttaaaaacatttaatccatccattataacagcagctttttaaaactgcagaactttttattctgcccaatatgtttgagagatttgtgtcttagcaagtggatttttgctttaaagtcccattgaactagtgctggaatnagaactaatagtgagatacagttttttgtattataatatttatgctcttcctccacatcttcatttggctggctctttctttgttcagacctctgcataaatctcacacctcagaaaggccgcctgtggccaccccatctttataaaatagcctctctctgatcattcngtctaaagaagaagaccacccccattgttctgcatcctgttccctgttaaacttcttagcacttagcactgcctacctcatcatgtttgtttccttgtttatcttatctcccttctcccactagaatgaggactcgatgaaagcgagatttttttctgtcttgttcattgcagtatcccagaacccagaaaagattctgacacaaaatagtcatctataaatatttaagtcantgactgaatatttagaaaattattgtggtattttttcagagtgttaacttcttttgaagtgttgtgtgaaagacatccattagtatctctgaaattatgaattaaaaagaaggcaataggctgggcgcagtggctcatgcctgtaatctcagtactttgggaggtaggaggatcacttgagcccaggagtgcaaaagcagcctgagcaacatagtgagaccccatccctataaaaaatttaaaaattagccaggcattggtggggcatgcctgtagtcccagctattctggaggctgagatgggaggatcacttgaacccaggaggttgaggctgcagtgagtcatgattgcgccactgcactccagcctgggcagcagaggaagatcttgtctcgaaaaaaaggcagtaggcgaatataattcaatataaaataaaactttgtggagtcatctaatgccagggacataggtggaccgcacctaatgatgatgaaaataagactattaatgaagcagttcacatcagccttttgatactatgcttttatcaagtttgtgtaaatgagattatgcaaataatagtgatggctctcactttgggaggccgagatgggcggatcacgaggtcaggagatcgagaccatcctggctaacacggtgaaaccctgtctctactaaaaatacataaacttagccgggtgtgctggcacgtgcctgtagttccagctacttgggaggcagaggcaggagaatcgcttgaacccaggaggtggaggttgcagtgagccgagatcgcgccactgcactccagcctgggcgacagagcaagactccatctc

SEQ ID NO: 253659 - DNA, 1361 bp, Homo sapiens
atggcagtacctcttcagtaacactgatactttgtggaggggttatgagagaattgcaggcagggccccagcacctagagcccatgggccagctgacccacaggaacaaacagagaatggcgttgagtggcagatgctgaggcacttggttcctggtgtggtctgcttcctcccgtgcatggagcagtgtgtgcattcacatggtgtgatccatatggccctcttcacacctaaatggtgggcaaatccgtcttcagtttctgacagtcactttggatttgcacagcaccagctcatagcagacagacaccttcaccatctatgccattgacctgggggccctgaccaagattcggattcgccacgacaacacaggcaacagagcaggctggttcctggacagaatagacattactgacatgaacaacgagatcacgtactactttccatgccaacgttggctggcagtggaggaagatgatggccagctgtccagggagctgttgccagtggatgagtcctatgtgctgccacagagcgaggagggtgggggaggcggtgacaacaaccccctcgacaacctggccctggagcagaaagataaatctaccacattctcagtgaccataaagactggggttaagaagaatgcgggcacagatgctaatgtcttcatcacactctttggcacacaggatgacactggaatgaccctcctgaagtcctccaagacaaacagcgataagtttgagagggacagcattgaaatcttcacggtggagacgctggatctgggagacctgtggaaagtccggcttggccatgacaacacaggcaaggccccaggctggtttgtagactgggtagaggtggatgccccatctcttgggaagtgcatgacgtttccctgtggccgctggctggccaaaaacgaagacgacgggtccatcatcagagacctcttccatgcagagcttcagacgaggctgtacacaccatgtaggaaccacacacggcaaggccagcccttctctggggccccatcaccagctaccccaactcagccccagttcttccttcaggattgactgtgggccaggcccaccttgaagattttggtctttcatccctgtcctgaattttctgactctgtgggggctgtgggcagagttctggacccaggaaatgaaaatatgaaatttattctaaactctactccaagctagctggtgacaacatgtagagaacctaacctctcgagggttcagattcctcatctgcagcatagagataataatgcaggatgatagcaatatccaaaaggaagaaagataaaggtctaactgaggaatcattatcaa

SEQ ID NO: 253660 - DNA, 1394 bp, Homo sapiens
aggagtcctcgtcagaggaggaggagatggaagaagaggaggaagaggaggagtttgggccggggatgcaggaggtgattgagcagcacaagttcgaagcccaccgctggctggcccggggcaaggaggacaacgaacttgtcgtggagttggtgccagctggcaagccgggtcctgagcgaaacacctatgaggttcaggtggtcacggggaatgtgcccaaggccggcactgatgctaacgtctacctaaccatctacggcgaggagtatggagacacgggcgaacgacccctgaagaagtcagacaagtccaacaaatttgagcaggggcagacagacaccttcaccatctatgccattgacctgggggccctgaccaagattcggattcgccacgacaacacaggcaacagagcaggctggttcctggacagaatagacattactgacatgaacaacgagatcacgtactactttccatgccaacgttggctggcagtggaggaagatgatggccagctgtccagggagctgttgccagtggatgagtcctatgtgctgccacagagcgaggagggtgggggaggcggtgacaacaaccccctcgacaacctggccctggagcagaaagataaatctaccacattctcagtgaccataaagactggggttaagaagaatgcgggcacagatgctaatgtcttcatcacactctttggcacacaggatgacactggaatgaccctcctgaagtcctccaagacaaacagcgataagtttgagagggacagcattgaaatcttcacggtggagacgctggatctgggagacctgtggaaagtccggcttggccatgacaacacaggcaaggccccaggctggtttgtagactgggtagaggtggatgccccatctcttgggaagtgcatgacgtttccctgtggccgctggctggccaaaaacgaagacgacgggtccatcatcagagacctcttccatgcagagcttcagacgaggctgtacacaccatgtaggaaccacacacggcaaggccagcccttctctggggccccatcaccagctaccccaactcagccccagttcttccttcaggattgactgtgggccaggcccaccttgaagattttggtctttcatccctgtcctgaattttctgactctgtgggggctgtgggcagagttctggacccaggaaatgaaaatatgaaatttattctaaactctactccaagctagctggtgacaacatgtagagaacctaacctctcgagggttcagattcctcatctgcagcatagagataataatgcaggatgatagcaatatccaaaaggaagaaagataaaggtctaactgaggaatcattatcaa

SEQ ID NO: 253661 - DNA, 575 bp, Homo sapiens
gaaatagattaagctctttcccactacacccagccgagatgcaaaaatcaatgcatgcaaactgcataagtcccataaaccattcccagttccatggatgctggccagaatgccccagaaaaagcagtgagcaacgctacagtaaaggagagtaagagatacttctgactctagggagaatccatgaaaaacacattttgagacagtcttcttccttttcctaccaagtgttaccatcaatgtcagtggcaacactgaagtgttaatgaaatttatgtttccttaatacaaaccccatcaaccactgcacgcctagctgctgccttttccctagcgtgagtattcctgccagtctcttcacacaggctgaggccaaaagtctccacccctgtaaagtgacagatgggacatcacattcctcagagaatgtgggtgaaaaagaacattaaaaaaaaaaaatctcttctccttaccccatgcacacctccctctgctgcctctaaaagtctagttactttttttttttccttgagacagagtctcactctgttgcccaggctggagtgcagtggtgc

SEQ ID NO: 253662 - DNA, 456 bp, Homo sapiens
aagaattgacataggggtggggccaccacaaaaagcctccactaaggctgtgcttggcagagtcataggagcaggcctaccctctgaccatagaccagtagagccactagagggcatttccagcctggcatgtggctctaatatgtaagtgctgtcatgtgggctgggactgggacacccagagccttgggggcccaacgcctgcccaagtgtgcctggaagattggaagatggggcatcaaaaggagattattctggagccttaagatttatcgtttactttgttgttgttgttgtagtattccttcctacttctcccttttggaatgggaatgtcgattctatgtctgtcccaccattgcattttggaagctctttacctatttgattcacagaatcacagatggagagcaatttctctcagaataaacataccttgagtctcacctaaaaaaa

SEQ ID NO: 253663 - DNA, 497 bp, Homo sapiens
accttcttcactcgatgtcattgctgtagagtgtacccaggatgggtatttcatattttgtttttagtttattaaattgatgagcaatgttttgtttttattttttccattacagacatgtggcaatgattggggaaggggctaaagtgatacacactgattgatagtatttgttacatctcatgggtacgggatgagtccttcagaataatttcctggccgggcgcggtggctcacgcctgtaatcccagcactttgggaggctgaggcaggtggatcacctgaggtcaggagtttgagaccagtctggccaacatggcaaaaccccatctctactgaaaatacaaaaattagccaggcgaggtggcagatgcctgtaatcccagcctcaggcggctgaggcatgagaatcgcttgaacccgggaggcggagtttgcagtgagccgagattgcgccattgcactccagcctggtgacagagtgagactccatctca

SEQ ID NO: 253664 - DNA, 633 bp, Homo sapiens
  misc_feature (573)..(573): n is a, c, g, or t
  misc_feature (614)..(614): n is a, c, g, or t
aagagtcagttttttttctcctgtaaagtaagtccagtctcaacaatttaggtgccatagaattacaagattctcatttattgaggcttctgttttggtacaaactagaacaaattgtagaatttataaacaatttgtttttacatctttttgtcttttttttttttttcattttgattgttaaactatcagtctttcaagggccagaatgtaatttaaaaacagctgtatttgaagccaggtgcagtggctcacacctgtaatcctgatgctttgggaggctgaggtggagaaatcacttgaggctagcagtttgagactagcctggggaacatagtgagaccctgcctctacaaaaaaattttaaaaattagctaggcatggtggtgcatgcctgtagtcccagccactcaggaggctgatgcgggaggatcgcttgagcccaggaggttgaggctgtagtgagctatgatggcaccattgcactccagcctgggtgacagagcaagaccctgtctcttaaaaaaaaagatagatggatggatagatagatagataatgttatttgaattntttttttttttctttttttttttttttttttggtttttttnttttttttttttttttttc

SEQ ID NO: 253665 - DNA, 337 bp, Homo sapiens
  misc_feature (182)..(182): n is a, c, g, or t
  misc_feature (249)..(249): n is a, c, g, or t
  misc_feature (304)..(304): n is a, c, g, or t
tgggattatggtgctgctgtcccttagacaaggtcacaggaggtgggacatgctggtaggccacatggagagtcagggaggcctgtcaagtttctggtgtctccagtccctaacggttgagttgcagatacagagccaacattcagctttgaagacagatcccggctttgaagacagacccnagggtaatcatgaggacaggggatgagaaggctgtgaccaaacatgtgagcatgcaggagttcagancaagggcagggcacaggcaggggaaggaagagcttcaaggagacaggaagggtcnttgtgtgctaaacctgatgcagagggaaggggg

SEQ ID NO: 253666 - DNA, 466 bp, Homo sapiens
aacacgctctcaaaattcactccaggcatttgcgttttgactccatgcatccccatcaaacagttcttagcctacagtcctgacggaggcccatctgagcagccatcttattctcaatgtctagctaacccctcctttcttctcactcagttattgccaaaatagaaaaatcgccatgtgcacgtactgtacgtggctgtggatacacaggcttcaaatgaatacattgaagttaacacattctttaatgtgggatgtcccaaatatttctttttaaatttgtacatattttgttttactaatagtttatttgatttattaagatgctatttactgagaacagcaatttctaggacatattgggaacgaagagtatagccatcttgttttatctgagctgtgggtccctgctcttgcagagagatgtggaactgggtcttgctgtgagatcttgtgaagtcaccgc

SEQ ID NO: 253667 - DNA, 459 bp, Homo sapiens
gcccatcgggatcactggtatgttctggaagctctgccgggaaagctcataagggctcaggtgctcttttctggggcccctttttatctagaaagtggcttctcttaaaggccagttatcaacttgctttcattgttggcacaaaagaattacagtgaggaacctcaagcccttgatctaaatgacaatttcttctctatttaaaatgtgtgtggttgatatcaactgacaccaacccaccgtctctttctccctgggttcacttcttcatgctgtttgtaggggtgactccacaccccgcacagaaggagcagagcctcacatctgctttgaacactctgtggacctggtggcactgattctgtcttaccagcccactgaacacaaaggaagagggttgcagcactccataggttaatttggaatccttttttgttaacaacaaatcttgtaaaagta

SEQ ID NO: 253668 - DNA, 683 bp, Homo sapiens
tactattatcccatattgttgaatagaaaattgaggcatagagtggttgaataacttgtcttggatcacagagctaacaagtgttaaagccacatcttgaaggtcagagcaagtactcttactcatcacaccctactcccctgcttccattccctatctcccttactgatgtttgagaaaattattagcctttctggttacacaatgcctcttgagcagaggatctcaaggtatcaggttgtgtcttgaaggctagagttgtactgtaattccaacccagaaaagccttcccagatcttatttagtcaacaaaattatactacctctacagatgaggcctatcattatatgagggtattatattatcatattaatagttgcttccaaatttatcaacccaatttttaatataaaaaagccaatagtgtctggcattaaaaccaatggagaaaccatactccaaggtcttcaccaagtgacttaatctattgataatcagcatgggagtaatccatggtgcaacatatctgcttgctcatcaagtgttttaagataaaagatttggctgggcgcagtggttcatgcctataatcccagcactttgggaggccaaggtgggtggatcatgaggtcaggagatcaagaccatcgtggccaacatggcgaaatcccttgtctattaa

SEQ ID NO: 253669 - DNA, 625 bp, Homo sapiens
agtgactcagagagatgggggcagacgctgagatgagggttggccaggcaggaaggaaggtgagaaggtctcatggcctcacgtgccagtagggctgggccaccacgtgtgggagggaggacacccaggcaccaggccatggtcatgacacgggtctctttgtccctcccggtctgccaacctcctgagtcactcctgacggagatgactgatccatccctggcccgcctcccaccctgtccctgggacagtgcctggggcaggcagctccattatcctccttgatgaaagagctcccagccagcactggccactccagagcctcctccccaggtgggtgatcatgcagggctgggctcttgcgactggccgggggtagagatgcaccgcactgctgagaagtgctttctaggagttcaagaccagcctgggcaacacagcagacattgtatgtagaaaaaaaaatgtttaaaaataagctgggcacagtagtgcatgcctgtcatcccagctactcaagaggctgaagcaggaggaccacttgagcccaggagtttgaatctgcagtgagctatgagtgcaccactgcatgccagcctgggcaacagagtaagactcagtcact

SEQ ID NO: 253670 - DNA, 472 bp, Homo sapiens
agaccggagatctttaacctaacctaacattccttaaggcatcggtgccctcccactcaaagtcagcctgggttttgtttctaagggtcgccaataaataggtttcacgggcatttaaggctctgggagtctttttctgtctgttacaggtagcccggctcttaaaaacgatcacacacaacgttcacaagcatgtgcacattcatacacacgtgtgcacatatacatgcccacatgcgacacacgcgtacatcatacagcatgcacgtgtccataaatgagctcacacggacagccatgtcccgcgcccaggcccccagcgacacaggccccaagcagggcctccacctgtgtggagggagcggctcagacggggaagccccagcgccttgcaatgttcacctcaccggcggcttctggcgtggccacggctccttccttttctggtaataaataccagatttggggaaac

SEQ ID NO: 253671 - DNA, 210 bp, Homo sapiens
tgtgctgtcggcttcggagaagatgaggcacctgcgggtttgagccatatctctggggtgctctatcacccctggtgctcttggtggggggtataagaggtgaggggagatgcacagtgccccaggacagaccgcgcacagcccccagctgctctttgaatggctgaggctaaactgctttgatttgctttcttaggaaggaacaaaaaa

SEQ ID NO: 253672 - DNA, 695 bp, Homo sapiens
tctccccagggccctattcttcccccaacccaagtggactttggggcacccagttaaaagtggccctcctaaggggaacctttccaaattgccccgagaagaaaaaactatttccaggttttttcttataggggaattgagtttttaatttctttttcttttcttttttttttttttcaggcttaattcactttatttttcttgtataaaaaccctatgttgtagccacagctggagcctggatcctctgcgcggagactctggtgtgggtcttgacgaggtggtcagtgaattcctgatagggagacttggtgaatacagtctccttccagaggtcgggggtcaggtagcagtaggtcttagagatggcatcaaagtgggtagggccacactttctttccgacccaatcaaagcccaagatttcttctgttcactcttcccggcttccattcttgccctcttcagtccactctctccactgagaccagagtcatttctctaacatgcaaatctgatagctccaaagcacaaggcccacttggagcacagggccctgtgtgatctagctaaagccttctctcccatagttccctcacatcagtgttccctcgttcctgcctttgtacatgttttggtccttttgtcttggcagataatcttcaaaaactgaacttgaatcacccccaaaacccac

SEQ ID NO: 253673 - DNA, 268 bp, Homo sapiens
gccaatatgcatggaaaataacaaacaaatgaaccaacccaaagaaagcacacaaaaagaataagcatttgtctgtaactcttactgtaagttcgtaatataccatagttgtacattttattcttatcctcttgctctaaggttataatgtcttttcagagtactaaagattcctgaaataaaattcacttgtaatgaagtgcaataaaaactgactacacatttacttttgtaaacattctaaaatttaaattactacgtatggcca

SEQ ID NO: 253674 - DNA, 1314 bp, Homo sapiens
ggatctgaggcctgcggtgggccttggtcccttctctccccgccccgaagccgcctgctcaacctgagggccaccggcctctatccgtcggtgccgatgctccttgcttcccagccagagcgtctcatctctgggcccggagccccaggctcgttctcctcagcccctgccggcggcggcgctcttgcagccattcctgtgaggtcgtttttcggagcagccgggccggccgaggagtaagtaggcgccagagttctagctcgggcatctgcctcggggccctgtcgccgccgcgccccggatcctgcgttggtcctgtccgataaagcggaggtcggccctgcttgctgacgagaccgtaaaaaccacggcgcttggcgccctgccgccgccacaccacaccaaagtgtacctgcccgaggctggcttcgggcgcgagcttgcatttgtgactttctcttaccgtctttgtttgcttcgttttaagtattacttccagataagggacacattctcgaaatactttgaaaacagttttgaattttgttcctcccgttgaaacggattaaatttggacctttcaagctacactgtgcaatcatcaatctcaataagctcttaataggctcattcttccgtaggctacaaacaaaataaagatcataacatcctgcggaggaagccattggtccatgtagagtcgccagatgtcaattaagagtagatcgcttttcagagaatacttaacgactctggtttagacctagacttggaactttgaggtgtttggaacactgggcagaattttcctttgttacaaaacaaagtttatgagaacgtaatttgtttttgttgtttttgttgttagtattgaagcaattttggtgcaaaccaaaggataacaaagcaaaacaatgaaaatcacccagagttccattacccacactgaaccaacttgaatatattggtttattttggcttttttccatatgaaatgttaaattttcttgtactcacgtgtagaatatgatagtttgctctttcatgtaacatgtctcccaatttttacatacataattctagtttcagtaagcatttttataactacactctttttcctttgttattgtatgtctaggttatttcaactttgcactgttgcttgtaactactatgtgatgaggcagtagctagattagtatttagaacgtgagcattcaagtcaggcagacctgggcttcacaacttactgtgcaatttcaaagagtttaacttttttgagcctcattttacacagtaacatggggataatgg

SEQ ID NO: 253675 - DNA, 652 bp, Homo sapiens
attttccaccttcctgtacaaaaccagaatcctctcacctggcagaaatctttctctccagatgctgcaaagccagcacagatcatcttctctgtgatccctcctggatgggcagaataaaagaagaggggctgaagcggatgctgcttgatatcatttacatgacctattttcaaaaataacaactggcattaatgtttatgcaacaaaaatatgcttacctgcactgatgcttccccatccggtcacagcacagatctccgaggaaaatagaggctctgcgctgtgtgggagacatactggcctcaccaccgagttgtactccagaggaaagcttagttgtattagggcaatgtcagagtcataacttagtgtgttaaagtcttcatgcactattatgtgtttggcccttctcacctgtatcggtggcaagtaagcaaattacaacgtaagaaagtcaaagaatccagcaacttccttgttgatggtccaaaataatcctaaatttctgcacttacatacataaacaatgcagaagactttctattaaatttaaaagagcaatattggtttacaatttgcagggggctatgaaccaccttctggataaaggtggtgctggagaaataaagctttgaaaacctgaaaacat

SEQ ID NO: 253676 - DNA, 2781 bp, Homo sapiens
tgagtgcaatggtgcgatcttggctcactgcaacctgcacctcccaggtgcaagcgattctcctgcctcagcctccggagtagctgggattacaggcgcccgccaccacgcccagttaatttttgtatttttagtagagatgggggttttgccatgttggtcaggctgatctcgaactcctgacctcaggtgatctgcccgccttggcctcccaaagtgctgggattacaggcatgagccgccacgctggcccggtctggaaatcttatctaaaaagtagcaagtgctggaaaaagggcctggggggcgggggtggttcttgtcgaagcccccaggctcctgtctcagggatgaatgtggcgtctcattgggattcttctcttgcccgaaagggctgcttttgaggactatcaatactggggagtgggggtgaagccggacctcactcagggtgaggatttcagggccccggcatcctgaacaccccccacaccccaacattctcctcgctctgtcccttcctcttctcccaaccccttttgtgctggggctgcgagctccccgagttctgcggtgactaaatcgaggccgagaagggaggctgccccccaccaccctgtgggtcagtacccctccccctggcttggagaaagtggggtcaccgcagctgagctggggggttattttggctggagctgctggagcagaaaggctgggtctgaaatgcccagcagggtctggggacttcgttggacccgcgtggtgttgggcggggctgtcgtgtcctacacgggagctctgggctttcatttctcttggggtgcagtggggattaactcagctattcccagggtaagcctgggtctctaattgggccctgggagccctgttaggccaccggcatgggggcttggtgaggaaggggactccccagctccccccactcccaaccacctccccattgccttggagacccctggggagggggctggggggcttctgagcccctgagtctaggttcactttcccgtcgggctgtgggaggggactgtcactttcctgtgtctttggggaggggacccccacttccttctcggatctcagggccgtggacacacaccccctttccaggagggggtggtgggcgtctaggttttccttgtcccttcctggggccagcaccgtagcagcacaatcaccccgggaagggggtgtctgtttgcctccagacacaatcgggccccactcgcagaaccacctggactctgtccgtgtctgtcccccggcctccagggctcctctcccgggacccccgtcccacgcctgggccccgcgccgggggaagcgcctgctgcctatctctgtctacctcaggtctgacttttgatgccaaaatctgagcccctggggtgcctctcccccgcctcccgtgcaccagggtctgcagcagccactggggcctggctgcctgctgcatctggcggccctggacccctggggcccccgtgcacctgcccacctcggagcctggggaggggctgtgcagggtcgagggctgggtcgtctccctcgggctgcgtgtgcgtgtcgggaatcctgcgtgtcgtgtctgtgggcgatccggcctcccggcggtgggtggacctggattctaactcagaggacttgagcctgctgttaactccgatgattgtagggacaggcggggtgggtggggggtgggcgcgaggctgggtcccggcccaggagaaggaagtcgctgaaggcagtggccatgctggccgtggaaatgggaggcggttgcagagggtctatggggcccggtcctggatactcggcaggaagccgtgtctgcagaggctcctccctgcctcaggtggccccgttcaaccccagccgtgcccatctcctgccaccgcctgtcggtgggggtttaaattcggtgtggctttctggggtgcagctcagcacccccccttatgcagactgggagggggtcgggcagtcccctcagccacgaggaccctggatgggttctagttcacttgggaccgtggggcctggctgcgtactgagtgggtgccccacagtcaaggccaacgggggctccccctgctctgagatgttgggagaaaggcggcttctggaaccttccgtgggacccgtaagtggctgtccagaaaggcgggagggtgggcacggggcacggggggcagctggggtcgttgttaagggtcacgcatctgtacagttgaatttcctttctcttatcatgttttacccaccttgtcccttttttccccaattgtgcttttgcatttttttccttggcaaatgtaaactcagcctttcattcatgacgtgtgaaatttcagtttctctggagtttgtcagacggcgtgggaaccacgcctgaaactcaggtaataggaggaaaaaaaaaaaaacttaaaaaaatttttaaaaaacataaaactactctctacctctggctgggcccagcctgtctcgccctggccgcggcagggtggcctgtaacaatttcagttttcgcagaacattcaggtattaaaaggaaaaaaaaaaaaaaagacaaaaagaccaaaaaaaaaaaaagtgtgattttgaaatttaaaagaacactgaaagtttacattttatagtaacattattatgcagattgtatttaaacttcagaaatatttaagacgattgtaaccctgtaaagctgatgagatattaaaacgagacaaaacacttctgacttttaacaaaaaaaag

SEQ ID NO: 253677 - DNA, 2498 bp, Homo sapiens
cagcctgcagtgaggtgtagaccaccttaccatcaggctgcggagaacagaggctcctgtctcagggatgaatgtggcgtctcattgggattcttctcttgcccgaaagggctgcttttgaggactatcaatactggggagtgggggtgaagccggacctcactcagggtgaggatttcagggccccggcatcctgaacaccccccacaccccaacattctcctcgctctgtcccttcctcttctcccaaccccttttgtgctggggctgcgagctccccgagttctgcggtgactaaatcgaggccgagaagggaggctgccccccaccaccctgtgggtcagtacccctccccctggcttggagaaagtggggtcaccgcagctgagctggggggttattttggctggagctgctggagcagaaaggctgggtctgaaatgcccagcagggtctggggacttcgttggacccgcgtggtgttgggcggggctgtcgtgtcctacacgggagctctgggctttcatttctcttggggtgcagtggggattaactcagctattcccagggtaagcctgggtctctaattgggccctgggagccctgttaggccaccggcatgggggcttggtgaggaaggggactccccagctccccccactcccaaccacctccccattgccttggagacccctggggagggggctggggggcttctgagcccctgagtctaggttcactttcccgtcgggctgtgggaggggactgtcactttcctgtgtctttggggaggggacccccacttccttctcggatctcagggccgtggacacacaccccctttccaggagggggtggtgggcgtctaggttttccttgtcccttcctggggccagcaccgtagcagcacaatcaccccgggaagggggtgtctgtttgcctccagacacaatcgggccccactcgcagaaccacctggactctgtccgtgtctgtcccccggcctccagggctcctctcccgggacccccgtcccacgcctgggccccgcgccgggggaagcgcctgctgcctatctctgtctacctcaggtctgacttttgatgccaaaatctgagcccctggggtgcctctcccccgcctcccgtgcaccagggtctgcagcagccactggggcctggctgcctgctgcatctggcggccctggacccctggggcccccgtgcacctgcccacctcggagcctggggaggggctgtgcagggtcgagggctgggtcgtctccctcgggctgcgtgtgcgtgtcgggaatcctgcgtgtcgtgtctgtgggcgatccggcctcccggcggtgggtggacctggattctaactcagaggacttgagcctgctgttaactccgatgattgtagggacaggcggggtgggtggggggtgggcgcgaggctgggtcccggcccaggagaaggaagtcgctgaaggcagtggccatgctggccgtggaaatgggaggcggttgcagagggtctatggggcccggtcctggatactcggcaggaagccgtgtctgcagaggctcctccctgcctcaggtggccccgttcaaccccagccgtgcccatctcctgccaccgcctgtcggtgggggtttaaattcggtgtggctttctggggtgcagctcagcacccccccttatgcagactgggagggggtcgggcagtcccctcagccacgaggaccctggatgggttctagttcacttgggaccgtggggcctggctgcgtactgagtgggtgccccacagtcaaggccaacgggggctccccctgctctgagatgttgggagaaaggcggcttctggaaccttccgtgggacccgtaagtggctgtccagaaaggcgggagggtgggcacggggcacggggggcagctggggtcgttgttaagggtcacgcatctgtacagttgaatttcctttctcttatcatgttttacccaccttgtcccttttttccccaattgtgcttttgcatttttttccttggcaaatgtaaactcagcctttcattcatgacgtgtgaaatttcagtttctctggagtttgtcagacggcgtgggaaccacgcctgaaactcaggtaataggaggaaaaaaaaaaaaacttaaaaaaatttttaaaaaacataaaactactctctacctctggctgggcccagcctgtctcgccctggccgcggcagggtggcctgtaacaatttcagttttcgcagaacattcaggtattaaaaggaaaaaaaaaaaaaaagacaaaaagaccaaaaaaaaaaaaagtgtgattttgaaatttaaaagaacactgaaagtttacattttatagtaacattattatgcagattgtatttaaacttcagaaatatttaagacgattgtaaccctgtaaagctgatgagatattaaaacgagacaaaacacttctgacttttaacaaaaaaaag

SEQ ID NO: 253678 - DNA, 2624 bp, Homo sapiens
tgagtgcaatggtgcgatcttggctcactgcaacctgcacctcccaggtgcaagcgattctcctgcctcagcctccggagtagctgggattacaggcgcccgccaccacgcccagttaatttttgtatttttagtagagatgggggttttgccatgttggtcaggctgatctcgaactcctgacctcaggtgatctgcccgccttggcctcccaaagtgctgggattacaggcatgagccgccacgctggcccggtctggaaatcttatctaaaaagtagcaagtgctggaaaaagggcctggggggcgggggtggttcttgtcgaagcccccaggctcctgtctcagggatgaatgtggcgtctcattgggattcttctcttgcccgaaagggctgcttttgaggactatcaatactggggagtgggggtgaagccggacctcactcagggtgaggatttcagggccccggcatcctgaacaccccccacaccccaacattctcctcgctctgtcccttcctcttctcccaaccccttttgtgctggggctgcgagctccccgagttctgcggtgactaaatcgaggccgagaagggaggctgccccccaccaccctgtgggtcagtacccctccccctggcttggagaaagtggggtcaccgcagctgagctggggggttattttggctggagctgctggagcagaaaggctgggtctgaaatgcccagcagggtctggggacttcgttggacccgcgtggtgttgggcggggctgtcgtgtcctacacgggagctctgggctttcatttctcttggggtgcagtggggattaactcagctattcccagggtaagcctgggtctctaattgggccctgggagccctgttaggccaccggcatgggggcttggtgaggaaggggactccccagctccccccactcccaaccacctccccattgccttggagacccctggggagggggctggggggcttctgagcccctgagtctaggttcactttcccgtcgggctgtgggaggggactgtcactttcctgtgtctttggggaggggacccccacttccttctcggatctcagggccgtggacacacaccccctttccaggagggggtggtgggcgtctaggttttccttgtcccttcctggggccagcaccgtagcagcacaatcaccccgggaagggggtgtctgtttgcctccagacacaatcgggccccactcgcagaaccacctggactctgtccgtgtctgtcccccggcctccagggctcctctcccgggacccccgtcccacgcctgggccccgcgccgggggaagcgcctgctgcctatctctgtctacctcaggtctgacttttgatgccaaaatctgagcccctggggtgcctctcccccgcctcccgtgcaccagggtctgcagcagccactggggcctggctgcctgctgcatctggcggccctggacccctggggcccccgtgcacctgcccacctcggagcctggggaggggctgtgcagggtcgagggctgggtcgtctccctcgggctgcgtgtgcgtgtcgggaatcctgcgtgtcgtgtctgtgggcgatccggcctcccggcggtgggtggacctggattctaactcagaggacttgagcctgctgttaactccgatgattgtagggacaggcggggtgggtggggggtgggcgcgaggctgggtcccggcccaggagaaggaagtcgctgaaggcagtggccatgctggccgtggaaatgggaggcggttgcagagggtctatggggcccggtcctggatactcggcaggaagccgtgtctgcagaggctcctccctgcctcaggtggccccgttcaaccccagccgtgcccatctcctgccaccgcctgtcggtgggggtttaaattcggtgtggctttctggggtgcagctcagcacccccccttatgcagactgggagggggtcgggcagtcccctcagccacgaggaccctggatgggttctagttcacttgggaccgtggggcctggctgcgtactgagtgggtgccccacagtcaaggccaacgggggctccccctgctctgagatgttgggagaaaggcggcttctggaaccttccgtgggacccgtaagtggctgtccagaaaggcgggagggtgggcacggggcacggggggcagctggggtcgttgttaagggtcacgcatctgtacagttgaatttcctttctcttatcatgttttacccaccttgtcccttttttccccaattgtgcttttgcatttttttccttggcaaatgtaaactcagcctttcattcatgacgtgtgaaatttcagtttctctggagtttgtcagacggcgtgggaaccacgcctgaaactcaggtaataggaggaaaaaaaaaaaaacttgccctttaaaaaagaaaactctagggggggcccgtgtcccaaggagtcctatggggagtaagataacgcgcgcttactgaccgtcaatttacagcgattagaactgtaacaccctggcgttacccaacataattgccttgcattgcattcaacttgcgtctggtggagaaagac

SEQ ID NO: 253679 - DNA, 1485 bp, Homo sapiens
tgagtgcaatggtgcgatcttggctcactgcaacctgcacctcccaggtgcaagcgattctcctgcctcagcctccggagtagctgggattacaggcgcccgccaccacgcccagttaatttttgtatttttagtagagatgggggttttgccatgttggtcaggctgatctcgaactcctgacctcaggtgatctgcccgccttggcctcccaaagtgctgggattacaggcatgagccgccacgctggcccggtctggaaatcttatctaaaaagtagcaagtgctggaaaaagggcctggggggcgggggtggttcttgtcgaagcccccaggctcctgtctcagggatgaatgtggcgtctcattgggattcttctcttgcccgaaagggctgcttttgaggactatcaatactggggagtgggggtgaagccggacctcactcagggtgaggatttcagggccccggcatcctgaacaccccccacaccccaacattctcctcgctctgtcccttcctcttctcccaaccccttttgtgctggggctgcgagctccccgagttctgcggtgactaaatcgaggccgagaagggaggctgccccccaccaccctgtgggtcagtacccctccccctggcttggagaaagtggggtcaccgcagctgagctggggggttattttggctggagctgctggagcagaaaggctgggtctgaaatgcccagcagggtctggggacttcgttggacccgcgtggtgttgggcggggctgtcgtgtcctacacgggagctctgggctttcatttctcttggggtgcagtggggattaactcagctattcccagggtaagcctgggtctctaattgggccctgggagccctgttaggccaccggcatgggggcttggtgaggaaggggatcgttgttaagggtcacgcatctgtacagttgaatttcctttctcttatcatgttttacccaccttgtcccttttttccccaattgtgcttttgcatttttttccttggcaaatgtaaactcagcctttcattcatgacgtgtgaaatttcagtttctctggagtttgtcagacggcgtgggaaccacgcctgaaactcaggtaataggaggaaaaaaaaaaaaacttaaaaaaatttttaaaaaacataaaactactctctacctctggctgggcccagcctgtctcgccctggccgcggcagggtggcctgtaacaatttcagttttcgcagaacattcaggtattaaaaggaaaaaaaaaaaaaaagacaaaaagaccaaaaaaaaaaaaagtgtgattttgaaatttaaaagaacactgaaagtttacattttatagtaacattattatgcagattgtatttaaacttcagaaatatttaagacgattgtaaccctgtaaagctgatgagatattaaaacgagacaaaacacttctgacttttaacaaaaaaaag

SEQ ID NO: 253680 - DNA, 435 bp, Homo sapiens
ttctccccaaattgacgtttagatacaattcaattccaatcaatagctcaacaagattttttaaaaagagtttgacaagctgaggctaaaatttacatgggtgagcaaaggggtaaagaaagccaagacactcttgtagaaattaataagaaggatggacttgtcctgtcaagtatcaaatcttattataaagatatgaaactaaaatgcgtggtgttggcacaagaataaacaaaacgaccaaaggaacagactagagagtccactggggaaactattcaataaatggtgcagggaccacatggaataaagatgaaattagtttcctgcctcctatgcatacaaatgtatacatcaatttccgatggataaaagccaaatgtaaaaagctttgtggagaaaatatagactatccttatgacttcaggatagaga

SEQ ID NO: 253681 - DNA, 259 bp, Homo sapiens
aaaccattattttccaaatgacccaatgcataatgttacacagtcttgcatgggtaaaagatccatttacagtataaaacagaccattggatcttactgtaacagtacaaaaaattcatcgatgcagattgagtcaacagtggaacttacctttaagaaattgctgtttccagcacttggggaggctgaggcaggaggactgcttgagccccaggagttcataaccagcctgagtaacatagcaagaccccatctcaaa

SEQ ID NO: 253682 - DNA, 469 bp, Homo sapiens
tccagatttccctcttcttatacggataccaggaatactggagttaggccccacccccatgcagtgtgacctcatcacaacctgatacatctgaaatgacccaaataagctcacactcacaagtaccagggatgaggacgcgaacgtatctttctctttttttttttaagggacaccggaaatagggccttattcccggtgtcctaaggctgggctcgactgctgcaggagtctcaggcagccttctacaattgctagagtgactcatttaccacctttaaaccctaggatacttgcaacaaagcaggactctttcctccagggaatgtgccgatttcagatgacacagcacccatggcagaaaacgctggaatttctcctgggaactcgacggtgatgagaggtgcttgacttgaccatttgctatatgtctctcttttttttttaagggacccgggaattagggggg

SEQ ID NO: 253683 - DNA, 4756 bp, Homo sapiens
  misc_feature (781)..(781): n is a, c, g, or t
  misc_feature (817)..(817): n is a, c, g, or t
  misc_feature (1092)..(1092): n is a, c, g, or t
  misc_feature (1965)..(1965): n is a, c, g, or t
  misc_feature (2446)..(2446): n is a, c, g, or t
  misc_feature (2793)..(2793): n is a, c, g, or t
  misc_feature (3006)..(3006): n is a, c, g, or t
  misc_feature (4037)..(4037): n is a, c, g, or t
tgaagcttttaattttttattgttcaatctgtctctcttttccattgtaatttctcgcttttgtgtcatgcttagaaagcctttttcaacttcagtttatgtctttatccggaatttatttttggttatgtgaaatgagattttttttcagccatatagctagttgtttcagtgcttttttttttttcgaatggtcagttctttgcacagtgatgtaaaagctaccctttatcatcagctaaatgtctatatgtctttttctactctactgatctatttctatatcaatgtcacagtattttaatgattatagattttaatgtttttctcttactgatatagggaattctaattagtttttcctttcaaaaggtatttggccttttattcatttggaaaagtaaatacattaataaaaggccaaatacaggattttgtcagttgccttttcagcatgtactgatataatcattttgtttttaccttttaatctcttaatacagtgtcataatgatgttgtattaaaatatttattcatttctcccaagtcacaaaagtaaagccaggaaacttaaatatagcaggtcattgaaaatacaaatttgttctttgcagtattcttaaagccttagaattttttgtgttttgtcatccagcataccgaccttgtgctcatctttttactctgcttatctactttcattttacaaaacatcattttggaatttcccaagatacttaaatttttattatttattaactatgtgcagaaaaacttggngtctctcttcatgccagctaattacactactgctgnaaaatgaagatgcaattagggaaagcaaggcagcaacttactaccatttattctatgctgtagtcagatgatgatggtgaactctgattttgttataaatgactgtagatctttgataaacctttgatgttactgttgttgaattaatttctcctgtcttacagcggcctctgttgaccccaaaccttaagatctttttagcgtatgagaccttaataaatgatagaagaagaaaaaaaattgtgtttgcaattttgtgatttttttaacatatngactcacagattatataagcttcaggtcccacaacacatgagtctgcctctgggtgtaaggggtgaagagtgggggttttatttaccccagttcttgcccacaattgtgctatcactgctagaaagctgatctctatgatggggagccaatcgttgtttactttactttcagtaattaaagttaatttaatctacttgattaaaattttatctcatatcctatttaactccacccccaaccccaccatggagtaggagatagccagccagttctttcactcctccacccctgctctaccctcttcaacttctaacccttctggcattggagtagggagacaggattggagaaaaggtgttctggtctgatgccacagtttttacttagccagacatgaaattacaagcccctgttggttattgttgcttctctagctaacattggccgtgaatttgaatgccttctgcgtgtgttccagtgctggttctgttacaggtagaagggtgcaaactcttcagaggggcccataggaagcttccctactgaatagttctttggtgttggagatccagcatccacgatatagacctggttctcttttttggtgtctacttagctcatagtaatcaactatatctttcctttgcattcttgttcttccagtcagcaaggttacaggctgctccactgcagcaccttgttcagggttttattttaccagggctgctataacaaagaaccactgactgggtggcttagacaacagaaatgtattgtttcacagttctggaagttagaaggtgtcaacggggttgtttccttctgagggctgtgagaacgaatctgttgcatgccttttcacctcgcttccngtgggttgctggcaatgtttggtgttccttggtttgtaggtatgggtgggaagaaaataatagagttttatccctttggtttttatctgaaataaggaaaagtgtacttcactaatatttgctttatagatttggagcccatgtatgtcatttatgaataaatatactagagatatgaagttaaattttctattgatataatatttaagaagtatagaccatgagcttcttgagaacaaatctttttctaatttgtctctatattccacaaatgtgatgtattttattgtaatgttaatgaatttctgaggtagataataatgtagttctgtaaaatagttctgccatttaaactcatttaagatcaaatagggcatgctttacatatctgttgatgcaactgttttgtccaactacagccgaatttacaacagattcaaatactaaccagaaggaaattaatgagttgattgtggtattnttttttcaatcagaagtgttttctggatacatctagatacagtgttgtaacaatccaggtgataaatgtattgaacattttttataattgtggtttttaatgtaaaaaaagaaaggtatgaaaacccttgacttttttttgagttgccaaaacatttctgtaataatgtatacattctccatagctattagtacccgttagctttttttaattgaacagttggcccttcatatctctgggttctgcatatgtgtggattcaaccaaccatggatcaaaaatattcttaaaaaaattgcatctgtactgaacatgtacagacttttgttctcatcactattccctaantaatatagtgtaataactatttacataggatttacattgtattaggtattacaagtaatctagagatgatttaaagtacatggaaggttatgcataggttatatacaaatactgtgccctcttttatcagggatttaagcatccatggattttgatgtctgtaggaggtcctggaaccaatcccccatggataccgagagattactgtgtatnacttaaggtctataacatgatgttttgatatacatagtgaaatgattactacagtccagcaaattaacatatctgttatctcatatacttctctccctccctccttccttctctccctccctccctccctctcttcccttctcttttccttcatagtaagagtatctaaaatctactcccttggaaatttccagtataaaatattattaaccatagtcctcatgttgtacactagatctctagatttagcctacatagctgcaaactttataccctttgacctaattcttcccattttctctgccccaggtaaccagtattctgctctttgttgctatctgtgtatttgttgttgcattttttggtttttcattatgttttttttttaattccacatataagtgagatcatgcagtgtttttctctgtgtgtctggcgtatttcacttagcataatgtcctctaagttcattaatgttttgcaaatggcaggatctctctctttttcaaggatgaatatttcattacatacacacacacccacatcatagtttctttattcgtcaacaggcacttcagttgcttccataacttgtattgtgaataatgttgcaatgaatatgggaatgcagatttttttaataagattgtgatttcatttcctttgagtagatactcagaagaggcgggattgcagggtcatattactagttctatttttaattccttaagaaacctccatactgttttccacacgggctgcacaaatctgcatttccaccaacagtgtacaagggttcccttttcctcccactcttactaacacttgttatctcttgtttttttgataatagccatcctaaaaggggtgaggtgatatcttattgtggttttgattttcattttcctgatgattagtgatgttgagcatcttttcatatacctgttggccatttttatgtcttttgagaaatgtttattcaggttctttgcccattttttaattaggttattcaattttttggcattgcntcgttatatatttttgatattaaccccttatcagatacatggtttgcagatattttctcctaatgcgtaggcctccttttcattttgttgattgtttcctttgctgtgcaaaaaaaggctattaacttttatccggtaccacacgtccaaagttagatttaaattaacatagttttcattgtaaaattagcaatggtaaatttgtcgaagcattaaacagcctcattaaatgttcataggagcaaataaccatgtcaaataccctgttcagatatggaaaaattttgctcatttaacaaatattaagcacttactatgtgcccagcattgactaatgttcagtgaaatccttttgttaagagattcttttgaaaaacaatcagactataaatattatttattggtggaaaagagtaaaacatctatatgctataaaaaggccgggtgcggtggctcacgcctgtaatcccagcactttgggaggctgaggcgggcggatcacgaggtcaggagattgagaccatcctggctaacacggtgaaaccccatctctactaaaaatacaaaaaattagcggggccaggtggcaggcacctgtagtcccagctactcgggaggctgaggcaggagaatggtgtgaacctgggaggtggagcttgcagtgagccgagatcgcgccactgcactccagcctgggtgacagagcgagactccatctc

SEQ ID NO: 253684 - DNA, 388 bp, Homo sapiens
cagagataaccaaataagcaaagagaaaagaatgaactagatgaaagtatggaactgtgtactgcattaactctcttaaagtaatattatttttagtctcctacccatcttttactggcaggttagggcagtatcatatatcaggttgataaagccaaataagaatataaatggaaaccatttttttctgttaaaaagaaaaaagaaaaaaggaaaaagtccagccctatgctttatatgaactctgtatattttataaaaataattatttcatattactaattatatcactgtttaaggtattctttttaaaaaaattagttatgctacatgtattaaatttttatatgcatagatgtcttacattctagaatgttttaaaggattg

SEQ ID NO: 253685 - DNA, 404 bp, Homo sapiens
ctgcctctccctgggcaaaatctgaaccactgacttggatctgggatggggtgaagacaagggggactgtctctcaggggtgccctgcctcaaaagctgggtgcctggtgtcaaagccatctctggtcttctgggtttgctgctatcagtgtgaaacccaccagcaagctgggtcagggccacctgcctaggaagctcagccctcagcctgggaggagcttctgccctacaaagcggggctggctgagggaaagagctgcatcctgcgatggaagtcgcctgggacttagctcagggacatccagccagggggagtaaggaagctggtgccctgctcctcccagaaaatcaccaggacccgaaagaccatgaggagagggagcctcctcctgaccctgcggccg

SEQ ID NO: 253686 - DNA, 547 bp, Homo sapiens
cgtggtatccgggagagtggagaagaggctggagaggaaggtggggacagacggcattaagcttccttttataccatgttaatggagtgggtcagagcatgacatatgcagaaaattatctgagagagaagattctaagacatttttttaaaacagccaaaaaagtccccctcaaacaaaactaattttatttcccactattttatgtgggacttttagaagggggatatctcactgatgttgtacactgttttacttaatattttgggaagtaactgcctctgacttcaactgaagaaaacacttttttgttgcaaatgtaatgtttttgtaatggtgtcagcaaataaaaggatgcttagtatttaaaaaaaaaaaaagaagggggatgtctcaaaataaaacaacttcaataatttactctaaggtgtcacaactccaaaaaagtaaaccattccttccgaattttaatagcgctttgtatctcccttttagcacttgtcactttctgcctggaagtatattgtctgtgtcttatctctgttgg

SEQ ID NO: 253687 - DNA, 299 bp, Homo sapiens
ggcaggtcgcgtcctcccgaagcctgcacttcagccccagggttttccgaccgcctctgctcccagaggggaccctcaggggcgaagaggccgaagacagcaccgagacctcagtgtcgggcgcgggtgctcccaaagcgcagcgggcccacctcccccggcagaggatcgtgcggcagtcaaagtcgcacacggggcttctgagatgtgcggcccgggcctaagagctgcatgtgttgaagccgctccgggttggaaaatgtatgtaaagtaaaataaacacggctctcgctgggagg

SEQ ID NO: 253688 - DNA, 535 bp, Homo sapiens
ctggtctcgaagtcctggactcaagtgatcctccctgcctcagcactcccagagtgctgggattgcaggcatgagcaaccatgcctggtgttttatcttttgcagaaatccaatttagtaaagtcatgttgtagcaagcatcactttaatataaaaagtgtacagcttatattattagcaattgtactgtttaattttatattagttatggtcttgaaggacattgaaaatctgttcagaaagactatgtttttcaaccagagatgacatcactctaactttcctttggtttaaatgcttgattcttcgcttacaaaacttctgttttgaacaactatggtgagaaagtatatttgtgatactgttttcttagaacactgttgtcagatagatcagccataatgttaacacatttctgatctctattataaggctgtaattttccaaaataatacagaaaaggagaaaagggtagtacatttcataattagagataaccctgtactagtgagaaaataaaaatgtcaagtttatt

SEQ ID NO: 253689 - DNA, 491 bp, Homo sapiens
ggtcaggaggtggcagttagggtagaattagatagtggagaggaagtggaggatcagagagagggaaagggacaaggggatgggggaagggtaggtaagtcagagtcacagataattcatggggggagactcagagagaatagaatcacagccctccctgagttggaagatgatgatagaaatgcaagggagatgacgggcgcagtggctcatacctgtaatctcagcacctcgggagggcgaagccagtggatcactcgagttcagttcgagaccagcctgggcagcatggtgaaaccccgtctgtacaaaaaatgcaaaaaaattagctgggtgccctggcatgcccctgtagtcccagctacttgggaggctaaggcaggagaattgcttgaggctgggaggtggacatttcagtgagctgagttcacaccattatactccagcctgggtgacaggagtaaaaccctgtctcaaaaacaaaacaaaat

SEQ ID NO: 253690 - DNA, 545 bp, Homo sapiens
  misc_feature (178)..(180): n is a, c, g, or t
  misc_feature (183)..(183): n is a, c, g, or t
  misc_feature (199)..(199): n is a, c, g, or t
  misc_feature (217)..(217): n is a, c, g, or t
tttctggttactatgggcaacggccgtgttttctttttgatgtcctttgcagtggatcacagctacctgctgaggtgaggattcaggagataattctgcgaacagaaattcctgagaactgagatgggggaaatcgctggtattagaagagtgaaaagaaactcctggagggcagagnnntgnctgccatcttcatcantgcattaccaccacccancactatcgggggacctgccctgataatcagttcctcccactgaagaatcggagtatatttctccagtccctaatgttgggttttgaattgtgtctagctctggccactggaatattaatctgtatgaccaaaaacttggaaagtgtgcattcatttgtgctcgctcactcctgctatcaccatgagaacaaacccagtccagactgctgcttccagcagaagataagagacaccaagagcaaagtcgagcttcccagacatgctcatgctagattgactaatcctcagttgacccatagatccatgaaaataaacgattgttgtatta

SEQ ID NO: 253691 - DNA, 356 bp, Homo sapiens
  misc_feature (149)..(151): n is a, c, g, or t
  misc_feature (154)..(154): n is a, c, g, or t
  misc_feature (170)..(170): n is a, c, g, or t
  misc_feature (188)..(188): n is a, c, g, or t
ctcagcagatgtcagtgtcatgctccctgtacagcctacaaaactgtgaggattcaggagataattctgcgaacagaaattcctgagaactgagatgggggaaatcgctggtattagaagagtgaaaagaaactcctggagggcagagnnntgnctgccatcttcatcantgcattaccaccacccancacagtgcctggcacaaaagagttgctcaataaatagatcaggatgaatggataaatacatggataggcactttgaactacagaagagtttaaatactttgtgtttttcttagtcaaacatgtgcaattaagcatgtgataaattatatgatgaccacaaaaaaaaaa

SEQ ID NO: 253692 - DNA, 368 bp, Homo sapiens
cgaccatcccatcccctggaaacctactgctttacttcctgtctccacagattattttgcattctttataattttacagagatgggaatcatacagaatgtactctttttataaggattcttccaggataattattttgaaatttattcattttgttgtgtgtacaattttgatctacattttcccagtgactaacaatgttgaacatcttttcatgtgcttattttccaactatatatctgtacaaatcttttgcctgttttttattgagttgtttgctctcttaatactgaggtttaatttctattttaagtgtattctattttaaaagattaacatccaataaaattaactttttggtgtacagt

SEQ ID NO: 253693 - DNA, 314 bp, Homo sapiens
gcattaggaaaaatacctaatgtagatgatgggttgatgggtgcagcaaaccaccatggtacgtgtaaactatgtaacaaacctgcacgttctgcccatgtatccccgaacataaaaaaaaaaaggtggggttcctgccgcaggtggttgctgatggagacgattgtctatctgtcttcttctgcagttggttcagaaccaagatcacctctgtaatttcctgcttatgaagattattgtcttcaaccactgggtgttggggctggcccatctacatgtgtagatgatggctgaaaaataaaataagtaaaaaa

SEQ ID NO: 253694 - DNA, 432 bp, Homo sapiens
cccagagtcctgacacagaagctctttcctgttttcttatcccagtgcttcgttccctggcccggctgaagcccactatgaccctggaggagggactgccattggctgtgcaggagtgggagcacaccagcaactttgaccggatgatcttttatgagatggcagaaaggttcatggagtttgaggctgaggagatgcagattcagaacacacagctgatgaatgggtctcagggcctgtctcctgcaacccctttgaaacttgatcctctagggcccctggcctctgaggtttgccagcagccagtgtacattccgaagaaggcagcctccaagacacgggccccccgccggcgtcagcgtaaagcccagagacctcctgctcctgaggcacccaaggagatcccaccagaagctgtgaaggagtatgttg

SEQ ID NO: 253695 - DNA, 667 bp, Homo sapiens
gttgctgggaatcaggcctgagttcagaatcacagctctagtgatggtggccttgggcaagttactgcacctctgtaaagctcagatttttaatctgtgaaatggtgataataattattttcagttatgaaaaagagctattgtaggtcatggctctactgctacacctacaaagtgcagagagcttattaattgacttgtctggggttcaacaacctgacactgacaaacataaatatttgttttacaagttgactggacttcagatattagcctgagaggtcggcaaagcttggacttcagatattaccctgagaggttggcaaagctactgccacaatcatgccattcttgtgggtacaagaaacatcaccaaacccaggtagtgggagagtgccctttccaatatatcctgccacctctctggaaaaatatgtataaccggaagtttagcaaaccacgttgcatttttctattcccatattaccatttaagaggtgtttaatctattgcattattgatttttaatcaattctaatatggtagaattgctttattattgctccctccatttttgctcctcttcagtgtaattaacacttcatgaaaaaacatgttaatgaaatattggaagaatttttatgagatatatttaatatattatgtt

SEQ ID NO: 253696 - DNA, 327 bp, Homo sapiens
tagaactgggctagatgtgtgtattttgatgtcatcagctgatagatagtttttaagctgcaggagggaatgggataatcaaaagagtgaataagacaaagaaaagaagaaatcaaaagctttgcgggaaatctagcattattcagaggtcagggaggtagagaacaaagcagcaaaggagactgacaaggagcaaagccaagggatatggtaccaatgctgccaagagagaggttcagtaagatgaggacttagagttgaccgttggatttagtggtgcatgggtcactggtgaccttaacaagagcagttttgttttttttttct

SEQ ID NO: 253697 - DNA, 292 bp, Homo sapiens
agcgtataaagcatattatgcccacaaatttgataatctacatgaaacagactaattccttgaaagacacaatctgtcaaaactcaccaagaataaacagacaatccaaacaggcctgtatctattaaataaatggaatcaataactattaaccttccaaaatagaaagcatcaggcccagatgggtttactgattaatgctcccaaacatataagaaagtttatcaattctctaccctctcttctagaaaaaggaaatattccctaactcagtctatgaggccagcattat

SEQ ID NO: 253698 - DNA, 375 bp, Homo sapiens
tagagtttaaaattgcagtaatttttatgtaatttttaactaagttgtgtatacaatattcatcgataagccacgaagttgaatttataatgaaaatcttctactcttaaaatcacaactctcctgatttgccctcaacccatatacacttccagaagaatacatataaaacatgtatgtttatgttgtagcatttaatgtggttgtaattttacatttatgtttctttgattaatatatgctccccttaagtacatgataaactccccaaagcaagaagtctgtctttgcttactatttttttaatcattgtattcacagtgcacagttgtctggcatatagcaggtactcaataaaaattcattgaaagaatc

SEQ ID NO: 253699 - DNA, 1074 bp, Homo sapiens
gtgggccatttcattctcttccactctcctctcattctccgaagatgcccaaatctctaatattattttgaaaaatattgaggctaaccaggatgaatgcatttaaatcctatcaccaccactgccccctcctatctctaaatctctccatctttagcctcccatttattcactgactacatcattcattgtcttatttgattcttcagtcactactttcatccttttatctcaggctttcaatagcatctcaacgtttatctccgggaacttccaccctccagtaccctctcagtcacaacgtcaatctctccagttcaaaggctccttttccctctaatctcttcttccccccaccccatccatcaatttgccccatttctctcgaaccatgtcaactcccttctcctttcccctggctaaaccctttcactcttcctttacctagtctatcacaaaatctaaactcctcagcctggaattcaaggtttcccacccatcacagacatatcccatcatattgccacagcctacgtattcagctatatgttctactaacttcttcggttgcctcatgtacccattaaactgagctatggtcattttatcttaacccatttccccctcctctatacacttacctataacaccctatccacctggaatgttaattctcctaaccacaagacttgtatattctatctacttattaagagacaggtcaaattccaccccctctaggacagccttctctcatttcccctgctggaaactctttcttctctgaatttccgtaacccttgattcacttactggtttctaccccataataggaatgaacatgtttgacacccctaccaatctggaagcattttgagaaaagaaccatgttttacacaactttataagacccaaagaatttaacagcatctaacgtggttggtatttaatgtgataaatgaatttttaaaaatcaaaggaacacttgtcaaagagcaaatttagtatttaactataaaatttccccataaatttagttcaaatattaataaatgattgtattctgaaatatgt

SEQ ID NO: 253700 - DNA, 549 bp, Homo sapiens
aaaggtgttagaagttgttcaaagtgctgttgcattcttttaagcgccggagtatcattttctatttgcttttaactttttcattgtgaaacatgacaaacatacagaaaagtgaagcccactgagttaccgcaaaatgaacccccatgtaaccaccaaccaggtcaaatttggaatgttgccagcacccagaagccctctcatgtttcttctcaataccagtctcctcactctccacacaaaggtaaccactgcccagaattttatggcattcacttccatacttctcctatggttttgccgtggaagcatacatccaaataccataggctagttttgcatggtttttttgaattttatagacctaaacaatttatcttctttgtgcctggcttctttcacttaacattataattatgatatttgtccagactattgaatgtagctgtagtttattcatttttattgttttattgtattctgttgattgacttataccataatgtatttatccacatttgagcactaataaaacttggattgattcca

SEQ ID NO: 253701 - DNA, 670 bp, Homo sapiens
ggccgggagtgaggaggatatgggagcatcctccagaaaagcagaagaaagggctccagcaaccatggataatgagattaccaagctcttctgggaagacaatgtgttccaacaatggcccgttccacatgctttctttatatgagtgacactcctctttacccacaagatgtgtgccctgagcaacagcaaccatgctgtgaagaagcacgaaccagcctagactgatagatggcatacaaaggctcacatggagtggaactgaggtccccagccagcagccagcagccagcagccagcctcaactaccagcccagtgagtgaatgaagcttcaaatgattctaccactcagcttttgatccacttcagctgttgcaatgtagcgctaagacaagttatccccactaaatcctgcccaaattacagattaatgagcaaaacaaatttgtcttgtttgaagttactaagcatcagaacaattcttttttatactaaaggtaactgttactgagaaacaggtctcaggtgcctgacattactcacacaaaatgatataaatctattttgagatcatcaaaaatgactctaattttgcttcgttgttaacttggaattatctatgacctctttaactccatgccttctgccccagtaaattgcaaataaatg

SEQ ID NO: 253702 - DNA, 369 bp, Homo sapiens
atggcaccactgtactccagcctgggtgatggagcgagactctgtctggctcacccctgtaatcccagcagaggtgggagcatcacttgagcccatgaggcggaggttgtagtgagccaagattatgccactgcattccagcctgggcgacagagtaagaccctctctcagaaacaaacaaaaacaccaaaaccctcagaatacatttaacaaggtaaaaagcctatatgaagaaaaaactcaaatatattaaaggaaaaaatgcaaaaacataccacgatcttggattggaagattgagtgattctaaaggctatgggaaaatataaattgccaagaataccagatattacaatttaaattggatata

SEQ ID NO: 253703 - DNA, 528 bp, Homo sapiens
ctaatgacctagttgtattttctcatcttttattgaagttatctattcataaataatttagtatttcatttttcagcatttaaaaatattttttatttttttatagagatgggggtcttgctgtgtagaccaggctggttacgaactcctggcctcaagcgatccttccatctcgggtctcccagagtgctgggattacaggtgtgagccccacagcgcctggcccatttttcagcatttttataggtgtatgtactttgcgacctgggtttaagaaagtgattattgacactgccacatattgtaatcaactcggtagattttagaacatcaagctaatggccctaccctagaccaattaaaatgcacttctaggatcatctttaactgtaaccctgaaagcggagttctgaactagagaaatgtgctacttgtcttactgatttttaaaaatgcattaaactgaatactgtaaggaatgctctttaaaaatggtggaaaataaagtggaaattttaaatttgtcat

SEQ ID NO: 253704 - DNA, 270 bp, Homo sapiens
tgcaggacgagatcagatgcccagaagaggatgaggcaggtggccacagaggcatagacttgagtgatgcaaccacaggccatgcatggtggcacccaccaaacgctggaagatccggggagggattcttccctggagcccctgggggagcagagcccacctagtaccctgatttgggtccagggaaattgactttgggcttctgccctctggaaccatgagagaataaatccctgttgcttttaagccatccagtttgtggtaatttgt

SEQ ID NO: 253705 - DNA, 83 bp, Homo sapiens
tgccaccctatgggtccaatacctaaatccctaggaaacacacttcgcactagagggtcaaattctaagtattgctcattgct

SEQ ID NO: 253706 - DNA, 451 bp, Homo sapiens
agtcgtctccttttgtgctggactgggttgagagaagtgtatacctaggacagcttcggatccccagggacttcaaaccctaagaaagatcatctgaattaggcaggtataagaattgcttgtattcatgtgggagctaatagctcagcacaagtcatgcatggagtagctgaaagatgactaggttggtgagcaagggaatagtgatcaaacaggttggagttcctggtagctttatgtctgaatatttttgcttctttgggaaagcttcaggaaggactaggagaattacactactttgcaaacattttcagacaggagctaatctcttttatctgtcatggacaggtagacagaccttcaatgccttttgtaatgacttaaaccaaatgatgaaaaataaaatgctcaaatagacaaaaagtagtagtataaaataaaggtaataaaa

SEQ ID NO: 253707 - DNA, 7958 bp, Homo sapiens
gcaggagagacactgcatattgtaacataaaatattacaaatatcatttttagagcaaaggtagaagcacattttatataaatctagaagtatcctttgatacaaattaaggcataatgtaaaaatcggattcttggaggaactaggtgatatgatacaagtatactccagtgaagtaataataataacatcaactaaatttactgagctcttactctgtgccagctactctgtctccaggctacctatgtgcaaattccaactcagtcacttattaactgtgtaaccttgggcaattctgtagctctctttgtaaaatgaggaaggtattaattgcattagtacccacttcctagagttactgtgagcttttaaagtatgggtctggtgtgcatgagtgtgcacgtgtgtgggcatgagagagagagagagagagagagaagattatattcttatataaatgaatcttgcctcttcctgttttctattccattcatttatctaccataagggattccactgtgatgaaaaaaaaagtatcttgtttcctcagaaagacatttagaaatatgtaaacattttgctttcatctttatatttatggtaattctaaggatattataaacttgcagtggtaattctgaagtataatatatattcagggtcacaaaacagggcggcaaggatgataactctattagcatttaaaaagcataaaaatactaataagcacaaattttcctactatagtaactgtagcctgaagttaagaataatagcatagtgattgtaattaataataatatatatttgaaaattgatgagagattaaaactcaaatgttcttatcaaaaaatgataagtatgtaacgtattggatgtgttaattagctttaattatttcacaatgtatacacatatcaaaatgtcacattgcacaccataaatatatacactttttatttgtcaattataccctaataaagcttgaggaccaggagaggaaaaataagaatatacaaaaatggaaccagcatgatagttcacgtctgtaatcccagcgctctgtgagaccgaggcagaagaatcatttagcccaggagttccagaccagcccgggcgacacagcaagatcccatacctactacacgttaaaaagttagccaggcatggcattaaaaaattagccaggcatggtggcacacttcctcctgtagtcccagcctgtcgggaggctgaagcaggaggaccactcgagcccaagagtccaaggctgcagtgaaccataactgtgccgctgcactccagcctaagcaacagagcaagatcctgtctcaaaaaaaaaaaaaggaagaatattattgaaaaatgaggtctgcaagaaatggcatatcacagtggctagaagacacagtgatacgccctcaggacgttccctctagctggagttctggacttcaacagaaccccatccagtcattttgattttgctgtttatttttttttttctttttctttttcccaccacattgtattttatttccgtacttcagaaatgggcctacagaccacaaagtggcccagccatggggcttttttcctgaagtcttggcttatcatttccctggggctctactcacaggtgtccaaactcctggcctgccctagtgtgtgccgctgcgacaggaactttgtctactgtaatgagcgaagcttgacctcagtgcctcttgggatcccggagggcgtaaccgtactctacctccacaacaaccaaattaataatgctggatttcctgcagaactgcacaatgtacagtcggtgcacacggtctacctgtatggcaaccaactggacgaattccccatgaaccttcccaagaatgtcagagttctccatttgcaggaaaacaatattcagaccatttcacgggctgctcttgcccagctcttgaagcttgaagagctgcacctggatgacaactccatatccacagtgggggtggaagacggggccttccgggaggctattagcctcaaattgttgtttttgtctaagaatcacctgagcagtgtgcctgttgggcttcctgtggacttgcaagagctgagagtggatgaaaatcgaattgctgtcatatccgacatggccttccagaatctcacgagcttggagcgtcttattgtggacgggaacctcctgaccaacaagggtatcgccgagggcaccttcagccatctcaccaagctcaaggaattttcaattgtacgtaattcgctgtcccaccctcctcccgatctcccaggtacgcatctgatcaggctctatttgcaggacaaccagataaaccacattcctttgacagccttctcaaatctgcgtaagctggaacggctggatatatccaacaaccaactgcggatgctgactcaaggggtttttgataatctctccaacctgaagcagctcactgctcggaataacccttggttttgtgactgcagtattaaatgggtcacagaatggctcaaatatatcccttcatctctcaacgtgcggggtttcatgtgccaaggtcctgaacaagtccgggggatggccgtcagggaattaaatatgaatcttttgtcctgtcccaccacgacccccggcctgcctctcttcaccccagccccaagtacagcttctccgaccactcagcctcccaccctctctattccaaaccctagcagaagctacacgcctccaactcctaccacatcgaaacttcccacgattcctgactgggatggcagagaaagagtgaccccacctatttctgaacggatccagctctctatccattttgtgaatgatacttccattcaagtcagctggctctctctcttcaccgtgatggcatacaaactcacatgggtgaaaatgggccacagtttagtagggggcatcgttcaggagcgcatagtcagcggtgagaagcaacacctgagcctggttaacttagagccccgatccacctatcggatttgtttagtgccactggatgcttttaactaccgcgcggtagaagacaccatttgttcagaggccaccacccatgcctcctatctgaacaacggcagcaacacagcgtccagccatgagcagacgacgtcccacagcatgggctccccctttctgctggcgggcttgatcgggggcgcggtgatatttgtgctggtggtcttgctcagcgtcttttgctggcatatgcacaaaaaggggcgctacacctcccagaagtggaaatacaaccggggccggcggaaagatgattattgcgaggcaggcaccaagaaggacaactccatcctggagatgacagaaaccagttttcagatcgtctccttaaataacgatcaactccttaaaggagatttcagactgcagcccatttacaccccaaatgggggcattaattacacagactgccatatccccaacaacatgcgatactgcaacagcagcgtgccagacctggagcactgccatacgtgacagccagaggcccagcgttatcaaggcggacaattagactcttgagaacacactcgtgtgtgcacataaagacacgcagattacatttgataaatgttacacagatgcatttgtgcatttgaatactctgtaatttatacggtgtactatataatgggatttaaaaaaagtgctatcttttctatttcaagttaattacaaacagttttgtaactctttgctttttaaatcttaaaaaaaaaaaagttgctgaagtactgtacagggttgtacaatgagaacccaatgccaaggcaaaaagaacgagtgatttttccttaggatacacatcaaccactttgctgttgaagctgtcagaataaattcctggtggtcagatgaaagggcagattaaatggactcatcagggtaagaggaataatatgggtaaaacaagaaatggcccgatagtttcacactattcctatacctccaggtccggaagacaggtaaaaaaattctataatgtaagaatggaggtagttaccctgatttgaccctgtgtgggaaatgctgaaagcaccaggaggaagccggttcccgtgagataagttaacccggcctgacagaatcaagaaaattgagatgagatttgaaaggacccgaaaatgcaggggttggctttctgactgggaacttaaaaatcactcttcatgcttccctggtcctatgtgataacagagttagagacttgagtctgatttcagtcatcttcagggaccagtctgatgttgtagcaagaagactccctttaaaagtgttactgttcaaatcatatatcaggttgaatcacattcaacagagatatattctagaatacttttttagaagaggctaataaagggaagaattatattgaatggaattatttttgataatgagaattatttgggtagattcactgaggctatgtcaacatgatatttagaccaacaggtgatcaatgtttggaaaatacaacaatgacttatttaaaaattacccttcctgctatttagacaaaaacaactgatcagtggttctgttatgtcagctgactttgttagtatcatgttgaaatagcttgaagtaatatcttttatccccttgcaaattcttgtcttccaatcatctcccatatattttcataattagttgtttatgacacctttgtttttctccctctgttcagtatttcaaggaaaattatggatgccagtcttggctgcacaagatatccattacgtacttatacattttaaaatgagtactaattttcactgctaataattctgtaaggacacatcaaagctggccaaaataatgaattttttttaaaaagcaatacctggtttccaccttggactgactttgatcctgttccacttttgaaattttatttgttccttttccatcgtggatgttcctctactttggcaattgtggagggctaatcaatcttatgttagcaggacaacccatgaaaaacaagtcagagagtgaaggctttttcccctaatcctggcagagcagggcgtagaaaagagaggatgtccatgcttaattctagatacttttgagacaacaccttcagaaaacacataatttaatctttgccatccttagatagagaagggctatagatcacatacgttatcaaaaactactcccttggaaaaaatatctttcgaaaatcaaatttaaacatttcactctgtgctgcatatttcttttaccattgaccattattatagggacccatgaagtaaatgtcacaatcatcttactagctctctctctctcagcaaaataaaactgtgatgtgtcttctttgtaaaagtttaggtataaaatgctatgcaactttttctttatagtaagagctttattttctttaataatatagcccaacttatatgttttaatctcccttgtccctcagaataagcagaaaatataactgcagctgtatgtcgtagacacaagaattgaaactgtgcagtcagtagagctgaacttagctatgaattaatttaaattaattctaaagtgactctggtttccattagtctattagctagagggttttggctgttgctttttttaaagttaggtccacacagtgaagggaaaagagtctgtgaaggtgatcagtgtagcagtaagacatctaaaatcaagacaatgacatgggggctttgtgtacttagctggataattcccttctactgtcctcttccccttggctgtgtagataaaattgtgcattcaaatgatggtactttgacttttgagggtttttatttctgttattcacaaaatactcattctcatttatgtatattgtatgtttaacccccagtgggatttctggctgctgaaaccactttgggccaggaagaacaaggatgaagaggttcctgtcatttcttatggggttcacagaattatttggggcttaaatggtacaatggagacagtcatgtgcaatgcttaagatggtctgacagggtcccttttgctggaggtgttcctgaagagattgaacctagtaacaggctttattttcaccttgtgtacaacatggcaaagactgctaagattaaaatccgtctcccatttgttacagcctcacctgcaccaggatagaaagcacgtgatggaatctgtgatgtctaatgtgtcttatgaaaattgccaaacaactgtccctggggattctgctttgattggcatttttagtcatgggaatgtatatttgctgatatatctgctctgtgtttgggcctctcttgctgtcattatgatgtattttgagatgattagtcaagagtcaaggttgcgagtacaggccaagaccatgggaaaaaagccatgctcactggccaataaagagcttgatgctgcctggccaaatgaggtgactcagatagaatctgatcccattcagagcttggtaaatgtcactgtacagaagacattgaaaaggaagaggcatagtcatgatcaaaaggatatattgacagttatctatagccagggtagttgttaatacctgcttgtttggggagatatgtttgattatagagagactctgggccaccctcaaacaccgtcagatgcattagcagcccactgcatgggacaatcgcaggcagatacgaggaatgtatcccctgcctattttccttgtgtaacaaatggaaaacattctcccctgtgagaaataatgcaatttctaattatctggatgttcgttgaaaatatattagacattctccctgaggttaaaaacaaaaagtacgtgaccagtctggtaagaagtattaatgaagtagctaatattacagcttcattttctactagcacctatcataatggtcttagtcatttcacacaaatcagaacttccttccccaccagggaggacaacatcttcatgctgtgattgaagcatccattcagaacacgaggcaatattgcagtccacagggaatggatgcttcacttgatctccggaccttggctgcagaggccatcgcagcttttgaaaagtgaaggggttaattcccattggtgtctttgcttatagcatttttctctaacctataacaaggagacattacattttactttagaacatgagaatagcagttttgctcatgacttaccattccagctgcatgggaaagcaaagcagaaaacagtgccccaaatggaaaaaagatactcacacagaacaaaacagttcttggtcttgttcttggtcttgtcaaaccttgcctgatgctctttctaaagtcaaaatatgaatgctaagaaggcataacctacatccttctctgatttcttcagcagggtcaaaagacagttactagcaatggggaatgcttgtcactgtggagaaagagttttgtatatgtctgataccgttgttataacaaaacaaatttttttactatagttttttgttttctacctgcacacccaccagaagagcacaaagcaaggccattgcaacaggcatttaaaaattattatcaaacatgcacatgcttgtacacacacacacacacacacacaaacaggggcatttgtaaaggtgtccctggaatgtaagatttataatgtttaaggcaaggtgaaggcattgccaagtgtgtgtcgctcataggactagtgtatattcactgaaagttaacctgatgatttgttattgtttgaaccatatgctgatttgcttctggtttctgtttagtgtgttctctctgataaggggctgaaagattctgcatcacacatcctctgagacctaccatgtcgcacactttgttaatgacaaacttcactctacactatacagtaccttgttgatatattcagtaaagtcttattttaaaag

SEQ ID NO: 253708 - DNA, 375 bp, Homo sapiens
cacattggaggtaacagaggagctggttttgagggacgtgtagaagtccaccagctgttgaagatgaggccaggcgtcctcagaggagagaacagaaagtgccaaggccaggggcagcggtaaggagcacacggcacactggggaagagtcaaatgctggagcccagggtgtgggcggagcggtgggagatgaggacacccagatggcttggggtcaggttctgaagaatgttgggtactaggctcgagtttggactctatggtgggggaaatagagagcccctgacagtctttaaagaggggagagatggatcaggcctgtagcatttcctcagggaggttataaagcagatacagaggtacagacacatcttc

SEQ ID NO: 253709 - DNA, 106 bp, Homo sapiens
gcctttttcagcttccgagagctattagtattacttaacttgtggaggcaaaattccagtttctgcatccatctgcacagtgtctcctcctcttctgtgttttctc

SEQ ID NO: 253710 - DNA, 138 bp, Homo sapiens
gctttctaacactaattgcaggctcaaaaggagcggaatttattgcgaaggccaaggcggcttgtttataatttatgaagttttaaatggctgtgccgcgggccccaactttctcctgggctggcagccgcgcggaaa

SEQ ID NO: 253711 - DNA, 376 bp, Homo sapiens
tgcttaagtctctcggtctgtggtactttgttatggcagccctaggagacttatattacatccagttgttctagtctaaagaatcacaggtggccaagcacagtggctcacgcctgtaatcccagcactttgggaggctgaggcaggcagatcatttgaggtcgggagttcgagaccagcctgagcaacatggagaaaccccatctccactaaaaatacaaaattatccaggtgtggtgacacatgcctgcaatcccagctactcgggagtctgaggcaggagaatcgcttgaacctgggaggcggaggttgtgatgagccaagatcactatcattgcactccagcctgggcaacaagagcaaaactctatctcaa

SEQ ID NO: 253712 - DNA, 361 bp, Homo sapiens
ctgaaaggggtctggcagtcacatcatgagagaccttatgaatggtgtaaagatccctaatataatttaaatgtgtgtcctcacccaaatctcagattgaaatgtgatccccaatgtcggagttggggcctggtgggaggtgactgaatcatggggccagttactcccatgctgagattctcacgatagtgagtgagttctcacgagatctgatggttttatgaggggctttccccctgctgctcagcacttctcgttgctgccaccatgcgaggacggatgtgtttgctttcctttctaccatgattgtaagttttctgaggtcttccccagccctgcagaactgtaagtcaattaaatc

SEQ ID NO: 253713 - DNA, 407 bp, Homo sapiens
aattaaaagatctgaggtcagcttgctcctttctgcccgtggatgccgccgaagaagcattgttaaagtctctcttctccctgctgtcatgtctaagtcagagtctcctaaagagcccaaacagctgaggaagcttttcactggaaggttgagttttgaaacaattgatgagagcctgaggagccattttgagcaatggggaaccctcacgaactgtgcggtaatgagaaatccaaacaccaggtgctccaggggctttgggtttgtcacatatgccactgtgggggaggtggatgcagccgtgaatgcaaggccacagaaggtggatggaagagttgtggaaccaaagagagctgtctcaagggaagattctcaaagaccagttgcctacttaactgtgaaaaaga

SEQ ID NO: 253714 - DNA, 334 bp, Homo sapiens
aattttgggatggtatatccttcagtcccttagctactttgaagtatttggtggtgatattgaattattgtggtttatgtgttttaattatcttgtataattatctcatataatttctcatatgaattattacttgcctgacagatgcatgtggtcttttagcattttgttagcatttgcaagttggcaactgttctcttatatacatcattctctccattaaatatcagtgcaagtgattaaagctggtaaagaataaaacaggtgtcagtataattaaagtgggactttaaaaaccaaaccaaataaagaagaatgtaacaaaaatcatttt

SEQ ID NO: 253715 - DNA, 434 bp, Homo sapiens
gaaaatgctcttgttcttagaagatacaggctgaagaattaataggtaaaatatcgtgacgtcctacctgcgccgactttaacacagttcaacatttttgggaggtacctctgagcattgtgccccttgcagcacagtgggtatgctgagggctccctccctgggtttcccagacctcatgtccccgtcttgtctgctcatcatactggaggtactacagtgcgtggacagatggagagagagaccgacaaaatgtgaggatggacaaatatcagcattgatatatttaattgaaatatattggccagggtggggagactcacgcctgtaatcccagcactttgggaggccgaggcgggtggatcacctgaggccaagagtttgagaccagcctggccagcatagagaaaccccatctctactaaaaatacaaa

SEQ ID NO: 253716 - DNA, 568 bp, Homo sapiens
aaacaaaaaaccccagaaaacagaacacaacaatttggatgaatattacaataaattaaaagtttccagatatgagaaaatacatatcatgtatactcatatatatttacataaaatttttaaataggcagaattaatctatggtattagaagtctgcaaggggtaggggggcagtgactaccggaagcaggtactgttggggcttccggggccctggtgtgttctagttctggatctggatgtgtgtgttcaccttgtgaaaattcactgaaatttatgctcaagatttgggcacttttccttgcatgttaaaataaagatcaagaatgaaaaagaggctgggtacagtagctcatgcctgtaatcccagcactttgggaggccaatgcagcagatcacttgaggtcaggagttgaaaaccagcctggccaacatggtgaaaccccatctctactaaaaatacagaggcacaagaatctcttgaaccccggaggcagaggttgcagtgagccaagatggctctattgcgctccagcctgggtaacagagcaagactctgtctccaaa

SEQ ID NO: 253717 - DNA, 622 bp, Homo sapiens
aaacaaaaaaccccagaaaacagaacacaacaatttggatgaatattacaataaattaaaagtttccagatatgagaaaatacatatcatgtatactcatatatatttacataaaatttttaaataggcagaattaatctatggtattagaagtctgcaaggggtaggggggcagtgactaccggaagcaggtactgttggggcttccggggccctggtgtgttctagttctggatctggatgtgtgtgttcaccttgtgaaaattcactgaaatttatgctcaagatttgggcacttttccttgcatgttaaaataaagatcaagaatgaaaaagaggctgggtacagtagctcatgcctgtaatcccagcactttgggaggccaatgcagcagatcacttgaggtcaggagttgaaaaccagcctggccaacatggtgaaaccccatctctactaaaaatacaaaaattagccaagcatgatggtgcatgcctataatcccagttacttgggaggctgaggcacaagaatctcttgaaccccggaggcagaggttgcagtgagccaagatggctctattgcgctccagcctgggtaacagagcaagactctgtctccaaa

SEQ ID NO: 253718 - DNA, 383 bp, Homo sapiens
atagaaactgtaatttaaaattttttcacaaatctctaatcttggcttcactagtgaagtgttaaacatttaagggagaagaaataataccactattacattaactcctaggaaatagaatagaaagaaacacactttatggggccagtatcatcttgatactaaagccagatatagacaatataatatatgaaaattacagttcaatgtccttcatgaatataggtgcaaaagtccttaacagaatgctagcaaattgatcccagtaatacataaaaaggataatatgtcatgttgagttgttttttttttttttttgatacagagccttgctctgttgaccaggctggtgtgcagtggcgtgatctcggctcactgcaccc

SEQ ID NO: 253719 - DNA, 577 bp, Homo sapiens
cagcaaccacaagagacctgctgggagccctcaccacatcctccctccacccaccctgagtctgcactctgccccctccactgccacgaggaaaggactgctcccacctgccacagacccccattgtgcacatgtcacatgagcctgtggacaagccctgccacgcaggccccttcctgttgtgtttgtattgctgacagcacaccattcctgactggttcctgtatgtacccattttacagataagaaaaccgaggctcagtttaaggcacagattaagattatacaatcagccgggcatggtggctcatgcctgtaatctcggcactttgggaggccaaggtgggcggatcacttgagctcagaaattcaagaccagcctgcccaacatggtgaaaccccatctctactaaaaatgcaaaaattaaccgggcgtcgtggtgggcacctgtggtttcagctgctctggaggctgaggcaggagaatgacttgaacctgggaagtggaggttggagtgagccaggattgtgccactgcactccagcctggacgacagagcgagaatccatctcaaaa

SEQ ID NO: 253720 - DNA, 347 bp, Homo sapiens
tgctcctacgctgtttatacatcattgtattcaatttctgtcccagttcctagtgtgggccttgtctcaagactctgctgcaaggtttctgtcctagttcttagtgtgggtcttgcgtcattactctgctgtaaggttctttggcttggggagggggtatggagccgggtaggcagggaagtggagggaggtgctcactctcagctttatttggattcctggaggaaggagagttgctgttaccaggaaaagtcagtgttgatcagacaagaagaggatctgctgccttcctttggtgggtgggtactgttaggttgagggagaatttgcctggaggaggctctgtg

SEQ ID NO: 253721 - DNA, 661 bp, Homo sapiens
gtataggagaaaaataataaagaggatatttttaaaaagtagctgagaactccctagatgacaaggtaattaaacaagaagaaatcatgctaaacaaaaaccttcaactggaataatttcacttcagaaaaaaaagttaagcatttccaaaacaaataaaagttgagtgtgttactgaccactggaacactgctaaaggaaatgtaaaagaaagtctatcacgtccaaaaatgacaatatatgctgcacagcgtcataaaagcatatgaaaatagaaagctctctattaaaggtaaatacataaacagctatagaaacctctactgtcataatgatggtgcacaaaactttcacgttattgctatggaatttaaaaaatgaagcagaaagctgcataaatatgggttcatagatactcaataagaaaagataacaagtgatattaataacaaagtgggggtataaagaggtaaagctttgcattccattgaaatatagtcattatatattgtcataactttaagatgttttatgaagtctttatttctcaagatgattacaaaaaaacctgtagatggtatgcagaagcaaatgagaaagaaattgaatcatgtcactacaaaatcaatgaagaaaaataaagcagtaagagaaaaaaaaa

SEQ ID NO: 253722 - DNA, 326 bp, Homo sapiens
ttgttggcaagctagagccttgctaggctctgcagtttacagaccagcagcactggcttcgacttccggcttgttaggaaggcagaatcccacgacccactccagaaataccgaattggaatctgcaattgaactagatccccaggtgactctctcacacacacacacgcactcacacacgcacaacacacacacacgcatgcacacacacatgcacgacacacaggcgcgcgcgcacacacacacaaagtttgaggactgagctggaggcctgtcaatcctggtagcattatttctaagagctggtacgtgagcaagaggaccca

SEQ ID NO: 253723 - DNA, 376 bp, Homo sapiens
tgtgcttctagctctcaacctcacaggtcagacggatcccccagagtcaccaatcatctcacccgcaaattaaactgttcctaaggtacttacttggatttattgagcacctactgtgtagcaggtactgggctaagcatagatcatgcattacattatttaaccctcacagcacccttgtggaacatctatcatgtttatggccactttataagaaactgaggctctggagtgacttgctcaaggcctacagcttggaagagagaagcaggatgcactccgaggccctccgaccccagtgaatgggctcataagcaccacgcagctgaccctgctgtgcaacttcttcctatgtgcttggttcgctcactgggca

SEQ ID NO: 253724 - DNA, 521 bp, Homo sapiens
aacccagagttgatctctacaccacgccatcactgccaggggtgaggaaattctggcaccagtgattcagcactgtttttttctctctcttcagtgcctctttcagtgatatgaagttaaaaccagatacccagccgtgggattgctagatcagacagagccaattgatgatcagcagggcctgaaaatgccaaaaccctgaaacaactgaccttcgaaaacttcaacatccctgaacgaaacgtccaaacacatttatccaccaatcaaagaccctttatagtctgtgctctgtgcatctcagaagtctctctttaccacactgtctatatactgcatgagccattatatgaaactccaaggcatcttatactatatattcaaccatgtatccctagtacctagtacagtcctgccatatagtttgctactaaacatttgcagaatgaagtaattatcttgtatccaggttccaagttttaaggtgatttctcactaaaaataaagcattacagttcgca

SEQ ID NO: 253725 - DNA, 576 bp, Homo sapiens
ggagacacatcgcctctgcctcccactgtcccagactgtctgcgggctgatgtcagggttcctccttctgagagccaaaaatgttccttctatttagcagacaagaatatcacccacggcttcctctatcctcctggttagtagaactcttttttagagcagtagcttagaaagctctcatcagctggatgtgggcatgtgccttaaacatatactccccaccaaaactacctgcttgggtaagctagctgcctgagaggcttccagtggttgtggctggccagagcagcacagcggctgtaataaagactaagacattttgcagtgggacccacacagcagctctcatctggcccagatgtttagagagttcggcaggtttaagtttaattttaaaactggagattctttgcagaaggacacaaacatctaaaaacccatttcttctgactcctgcccaagctaaggtccacctggagaatacagctgtgcccgtgaaaagaaatcaggctgggtgctcgctttggcagaacatgtactaaaataggaatgatacagagaaggtcacctagtaaa

SEQ ID NO: 253726 - DNA, 552 bp, Homo sapiens
gtgattgcgctcttaaaaaaaaagaaaaaaagagagaatacaaccaatatgctaatataatatcacttgagcctaggagtttgacgctgcagtgaaccacaatcaccccactgcaccccagcctgtgtaacagagcaagacctggtctcgaaaaataaataataaagtatgtgctaatattatgtaataattacatataacattagcaaaatttgttgagtatctctgtgacaggcctataaagctaggactacagtgccagttagagtttaggccaggctcactgatgtatgcctgtaatcccaacactttggtagtttgaggcaggaggatggcttgagcccaggagttcaagaccagcctgggcaaaatagcaagaccccatctctataaaaattttaaaaaattagctgagcatggtgatgtgcacctgtggtcccagctactcaggaggctgaggtgggaagattgagcctgggtgatcaaggctacagtgagccataatcatgccactgcattccagcctggacagtagagctagaccctgactca

SEQ ID NO: 253727 - DNA, 680 bp, Homo sapiens
aagtactagagaagttaaggcaggaaaaatcacttgaacccaggagttcgaggctgcagtgagccatgatcacaccactgcactccaggctggtcaacacagtaagacaaggctctctaaaaagaaacataaaaataaaataaaataaataaaaaataatttataacactgtaaaaccatggaggcatattgcccccatttgcccatgtggagcatggaagcagccagccacagaaaagggtcccagcatgagccgagagcaactctcagggcacaagaggagccacatctcttctgtctttttctacccaaagctctgatggagaactatctcagagcaggccccaaggcagtgggctggcacctggaagttatttggaggcggggagccaggcaagatagcaagacagcagcagtcccattccatttgagaatttaatactcaaggttccaacaactcaggagcatgctgaaggatgtttgagcaagcgtggggtgggaagatgcagagtgcaggtagccgtatttgcaaagccacatattagactcactttctcttgaagacaggactatctcagcatgaatgaggtcttctcagctcctggttgcctatgaagaggagccctgtagagatgtcaagccaaacttagcttctttacggggaaaaagccattgacggt

SEQ ID NO: 253728 - DNA, 1358 bp, Homo sapiens
  misc_feature (4)..(4): n is a, c, g, or t
  misc_feature (6)..(8): n is a, c, g, or t
accntnnngggaaagcccacccaagaatgacaccaacacagagggaagtaaacatagccaagaggtcagcagaggtggttcctggtgccattatccagcacccagctacagaccaggtgaagttggccgggcacatagtcacaggcactggagtgatccataggtcacacacgaaagtgtgcagagcaactccagctgtgctctttcgttttcacagttagcaacgtttttataggtagcattcttggttagcattcctagttaggatttgtagctagaaggttaccatgtggcagggccttacgaccatctctgctgatgaggagacccttactgatcattataggctcctcgagatcatcagccaggacagcttcaccagggtgaatgaagttcaccaagtaccttctcactgggcagcagtgagactctagactccctctagagtctattccatggggtcaccccaaggtcatcaaactctttcaacaccacagacactttgttcttagccatggagtacggccagcagagcagagctggtcgactacatcctagagttgggctacatgaaggcggaagaggcctgaagcaaattccagcagatagtatcagccctctagtaccaccaacagaagggggatatccatagggacctgaagcccaagaatttccttgtggtccatcacaacataaaaataacagactttggatttgataccaggttcactgtaggccagaagctgggcaccttcggtgggagtccctcttatgcggtcctgaactcttccatggccaaacatatgatgggccccagtggacatgtggagctggaaagtcattctttacaccacagtaaccaggtcctgccatttattgggcagattttgtggcgctgaggaagctgatactgtgtgaacaattgtacaagatcccactctttgcttttcatttccagagagcttcataaacctatttctgactgcagggagaggcctatactagtccacgtcatggaacacctatggatcaacactggtcaggaggagacacgaaggccataccgggagctgctctctgattaccaggactcctgaaacacagagctcatggtgtccgtgggatatgaggcagaccacatccagtccttgttagaacaaaaatttgatgataccatggcctggtactgaatcctgggctacaggaaacctgatgcagggctccatcatcacagcaaagtctttgccttcagtggatcccacccaacagctactagccttccccatcacctgaaagaaactcttatgctttaacatacaaaacttgttaaaaacattgggaaaaggtgaaaattcgta

SEQ ID NO: 253729 - DNA, 516 bp, Homo sapiens
  misc_feature (4)..(4): n is a, c, g, or t
  misc_feature (6)..(8): n is a, c, g, or t
accntnnngggaaagcccacccaagaatgacaccaacacagagggaagtaaacatagccaagaggtcagcagaggtggttcctggtgccattatccagcacccagctacagaccagagagcttcataaacctatttctgactgcagggagaggcctatactagtccacgtcatggaacacctatggatcaacactggtcaggaggagacacgaaggccataccgggagctgctctctgattaccaggactcctgaaacacagagctcatggtgtccgtgggatatgaggcagaccacatccagtccttgttagaacaaaaatttgatgataccatggcctggtactgaatcctgggctacaggaaacctgatgcagggctccatcatcacagcaaagtctttgccttcagtggatcccacccaacagctactagccttccccatcacctgaaagaaactcttatgctttaacatacaaaacttgttaaaaacattgggaaaaggtgaaaattcgta

SEQ ID NO: 253730 - DNA, 265 bp, Homo sapiens
gaactcctgggctcaagcaatcatcttacctcagcttccaaagatctttttattattagaaaagcaacatagccttttataagagccacacataaaacaaactgacatagaaatattgagcaataaaggaatatatacaatatactaggcaaatactgagcaaaagagagcacaggcagctctctttgagtaattgacctattaaactaaagcaaaagcatccaaagaggcaagcacatgtaacagtaaacaaacagatagaaca

SEQ ID NO: 253731 - DNA, 1008 bp, Homo sapiens
tgaataaaaatgtagatctaaaggttaaatagctatttgacctattggtatcagggtaccaagggtctagactcaagcacatcacctttggagctacttaataaatattaatgacattaaataaatcctttagtttatccattcattcaacaaacatatagtacaagtattttgtgctaagtattctgttagccacagaggacttaaagatgaacacagcgccttcatccttagcaacagtgggattgtgtggcagaaaaggggggagcgccaggagggcaagtacatcagcttgacagcagtagcagacaaagcttcctggagaaggaattacagtgtctttgaaaacttacttcattatttctaattataaaagtaacacaggctcattgtggtacataaaagaaaaacaaatttataattaagtaaacgcgctctcttcagtgttcaccatccccaaccttactacacagagcttgctgtgttcagtgtggaaactttcagtcttttttgtatgtatgtttatacacacgcaaactcctcctttaaaaaaataacaaaactaggatatcatatatatttgtctataatttcctactttaaaaagcgtattatggtaattagccttctagatagtctccagtgatacccgcttcctggtattcacacccttatgttaactcctcccacgctgtaccagggttggtctgtgtagctaacagaacctggcagaagtgatgacggtcactcctgactttaggttatactgagacttccatcttgtatgtccttttttctcttgtatcattgagtctggggaagccgaatgccacattgtagggacattctgcctatggagaatcccatgtggttgagtaattgaggcctgataaccatgtgaatagctgtgatgtcatgagaaaacctgagctcaaacaactcagttgtttctggattcctgaccatagaaactgtgagatgataaatgtgtgttgtttaaaactaaaa

SEQ ID NO: 253732 - DNA, 494 bp, Homo sapiens
tgtactaaatctggaatgcttataaatggttgcaagggcagatcatttcagagtaagagatatttaaaaacaaagggctaagggaaacctcaattgaaactagagcaatacaaaataaaatctcctactgaaccctaaaagactcctactgactgacccctcaaaagcaccccatatgtctttctcttctcctctgaaaaggtaactcagggcccggcgcggtggctcacacctgtaatcccagcactttgggaggccaaggcgggcggatcacgaggtcaggagatcaagaccttcctggctaacacggtgaaaccccgtctctactaaaaatacaaaaaattagccgggtgtggtatcaggcgcctgtagtcccagctactcgggaggctgaggcaggggaatggcgtgaacccgggaggcggagcttgcaatgagccgagatcgcaccactgcactccagactgggcaaaggagcgaaactcagtctcaac

SEQ ID NO: 253733 - DNA, 590 bp, Homo sapiens
aacagtctgagacatgcaaatgtgtttaaatacacaagttcataataacactaaaaatttttttaaacttaattggtcgccattgggggacactaatagactacttcatcatttttaaaactattaaacaaaagcaaagaatcaaactattattttataaattgcatcacaggtagccagtgaatgagagaaagcctctttgatagaatttttcacaaataaatgagttggaaaggatagaattagaatactgccccttagttccatatgaattattaaatataggcaataatcactcgttactactatcatctctcaaagaaagacatcctgatgatatgtcccttctgatggaaatgtgtaatatcatctagaaaatattttttgtcccaaaattgaatctgagtctgatgaagcttctacatctaaataccaagttacagggaatacaggggcagagaaatacatgaaataacaccaaaaaacttaataagcaagatctagactgtaaaaaactttataggatagacaaacaggttttacttatttgaattctcattcaaagtataaagatattatgacacaattgc

SEQ ID NO: 253734 - DNA, 1114 bp, Homo sapiens
ctcactctgagcagtgcagagtcaaacccccggcccattgtgaaaatcacagagcggttcttccgcaacccagcgaagcccgcggaggaggacgtggcagagcgcgtgtttctggtcgcggaggagcgcatccagctgcgctaccactgccgtgaggaccacatcacggcctccaagcgcgagttcctgcggcgcaccgaggtggacagcaaaggcaacaagatcatcatgacgcccgacatgtgcatcagcttcgaggtggagcccatggagcacaccaagaagctgctctaccagtacgaggccatgatgcacctgaagagggaggagaagctgtccagacatcaggtctgggagtcagagctggaggtgctggagattctgaagcttcgagaggaagaggaggcggcgcacacactgaccatctccatctatgacaccaagcggaatgagaagagcaaggaatatcgggaggccatggagcgcatgatgcacgaagagcacctgcggcaggtggagacccagctggactacctggccccattcctggcccagctcccgccaggagagaaactaacacgctggcaggcggtgcgcctcaaggatgagtgcctcagcgacttcaagcagcggctcatcaacaaggccaacctcatccaggcccgctttgagaaggagacccaggagctgcaaaagaagcagcagtggtaccaggagaaccaggtgacgctgacacccgaggatgaagacctgtacctgagttactgctctcaggccatgttccgcatccgcatcctggagcagcgcctcaatcgacacaaggaactggccccactgaagtacctggctctggaggaaaagctctacaaggacccacgcctgggggagctccagaaaatattcgcttgatgtccctcctggggcctcagccagagctgccagagaaaggaaacctcttcccgcagcctggctcctgtgttccctctatccagccaatgcctgtttacacagacacctggcctcactgccagcccacctcccctacagccctgtttgttcctgcttctcatgattttcctgtaaataaacacactcttaatttgcaaaaaaaaaa

SEQ ID NO: 253735 - DNA, 1111 bp, Homo sapiens
ctcactctgagcagtgcagagtcaaacccccggcccattgtgaaaatcacagagcggttcttccgcaacccagcgaagcccgcggaggaggacgtggcagagcgcgtgtttctggtcgcggaggagcgcatccagctgcgctaccactgccgtgaggaccacatcacggcctccaagcgcgagttcctgcggcgcaccgaggtggacagcaaaggcaacaagatcatcatgacgcccgacatgtgcatcagcttcgaggtggagcccatggagcacaccaagaagctgctctaccagtacgaggccatgatgcacctgaagagggaggagaagctgtccagacatcaggtctgggagtcagagctggaggtgctggagattctgaagcttcgagaggaagaggaggcggcgcacacactgaccatctccatctatgacaccaagcggaatgagaagagcaaggaatatcgggaggccatggagcgcatgatgcacgaagagcacctgcggcaggtggagacccagctggactacctggccccattcctggcccagctcccgccaggagagaaactaacacgctggcaggcggtgcgcctcaaggatgagtgcctcagcgacttcaagcagcggctcatcaacaaggccaacctcatccaggcccgctttgagaaggagacccaggagctgcaaaagaagcagcagtggtaccaggagaaccaggtgacgctgacacccgaggatgaagacctgtacctgagttactgctctcaggccatgttccgcatccgcatcctggagcagcgcctcaatcgacacaaggaactggccccactgaagtacctggctctggaggaaaagctctacaaggacccacgcctgggggagctccagaaaatattcgcttgatgtccctcctggggcctcagccagagctgccagaggcggccgagtgggctgaatgggcgaggatggagaaaatgatgaggccaatgcctgtttacacagacacctggcctcactgccagcccacctcccctacagccctgtttgttcctgcttctcatgattttcctgtaaataaacacactcttaatttgcaaaaaaaaaa

SEQ ID NO: 253736 - DNA, 480 bp, Homo sapiens
agcccaggagtttgaggctgcagcaagctaggatcacgccactgcactccagcctgggtgacagagagagactctgtttcttaaaaacaataacaacaaaacacacttatggccaggcacggtggctcttgcctgtaattccaggatttgggaggccaaggtgggcagatctcgcttgaacccaggagttccagactaacccgaacaacacagtgaaaccctatctctgcaaaaaatacaaaaattagctgggcgtggtggcgcatgcctgtaatcccagcaaggttgggggctgaggtgggaggattgcttgagcccaggaggtcgaggctgatgtgtcaccacagccagctagttttttgtgggtgtgtatgtaaatgaggtctcactatgttgctcactgtgttgctcagtgagccacgattgcgccactgcactccagcctgggtgacaaaagaaaaggaccctatctcaaaaaga

SEQ ID NO: 253737 - DNA, 590 bp, Homo sapiens
agaaaagccatacctcctccactgactgctctgttcagctgctgcacttcaccctcacctgcagtgtgtagaggacgttatggtacaatgctattttctactggctctgctactggagattacagcatgcgactgtgacaatactggctctgctactggagatcacagcatgcgactgtgacaaatggatattcccattaaattctttagtagactggggcattccattaaccattggcactatcccaacccaagtgaaacactgggtcatttttttcttgtgagcaagaagtgaagggagaaaacaaaggatatactctaattacctttcctatttcttttttgttgcatgcattatgataactgtatattacacttatttataattaatatatgacaagctgtcagctaaaatttaacaggtgatttgtcaagaaggcccattaatgcatacattaagcagtggatttcagtgtttcctaacaaaattgtgtattggttttgttttttcattctatttagtataaacatttagaggccacctatctttacattttgcagcatttttaaaaaataaaactattgctaac

SEQ ID NO: 253738 - DNA, 282 bp, Homo sapiens
caatataatttattaaaagtaccatgttgactccactttgaacagtggcctcatttctcatgttctgtttcaaaggagccctctgctggacagctctgtgtgatatcacatgcacgcatatatttatatatgatttataggctatagttaatataacccaaaagccatttatgattgaaactctatcgttgcaaattgaatgcatcactgaaacctgttttgtcatcactttttcatatttaatgaacaagcagttgtctaaaaataaaatgttcatcctta

SEQ ID NO: 253739 - DNA, 248 bp, Homo sapiens
agcagaattgccctgctttgcaccaatggtacagcagtctgacctctatcattagagccgcatttttaaaaccacagttcaaaaagtcacgtcttcttgcttggtgctatgtcagtagactaagctctcaccacgtggtggtactgatgggcatcctatacttcagtaacagctcatcaatcccatcaataattgcaacctgatttccaccgaaggcagccaagaccaaggaggcaatgatgagaaaa

SEQ ID NO: 253740 - DNA, 144 bp, Homo sapiens
aatcaaagtgatagatactcaataatgggattcgttccctgaacaggaatctaactcaggctgtagccataaaagcacagaagcttagttactagaccacaggctggagtgttgttttgtctcttttcccttctgtctcttctt

SEQ ID NO: 253741 - DNA, 1159 bp, Homo sapiens
aggtatgccggcatacctggaccttctctccacctccactgttcctattctagtgtccaagcctccgcatctatcaccctggctacctggcagacttcttcgtttttttgttttgtttcattttgtttgagacacgatctcaatctgtcacccaggctggagaacagtggtgtgatctcagcctcctaagtagttaggatcacaggtacatgccaccacacctgactaattttttgtagaaacggggtctcactttgttgtccaggctggtctcaaactcctgggctcaggcaatcctcccgtcttggcctcccaaagtgctggatttacaggtgtgagccatggcgcctcacctggggatccttttagtactgagggaaggaaacctttcccagaagcttcccagtcaccttccctttcttcccattggccacgactagggtgcaggcaccttgggaagggtggaccactgtgactaacccaatgcaggacatggctggccaaggggaggaaggtacatgagccaggacaattcaagctccatcagaaaacggggtcaatagtatcccctgggagaagccgtgcaatgcctgccacaaccctgcagagtcccagcagctgagggggtctattccaggggcgagatcacggcctgcaatgtgtgagctgggtctcaagagggagagagggaacaggctggagagatggaagtctgggagagcagctcctcgggagagcaccatgcatgaggagtgaggcttggggcagctgggagaggacctagagatggggagagagagaaggagtgtggccaggagcacagggggccactcaggccagagaagtgggaactgaaaatgctctggtgaaggggagagcagcagctgggcctgagaccagaaaagcccccatgggctgctggaggctcggggaggtggcagtgagctctgggctcagggcacaagaggcttttggaggctgggtgctggctggactctgtttgccagccttctctgtaagtcccaggcattagagcacagcaagcaggaataacaggagccctgggcccttagaaggaaactgaggagaagcctggatgtccatgctgtgttcctgagttttaaggtgacattttcttggccactttttatctgcatgg

SEQ ID NO: 253742 - DNA, 1831 bp, Homo sapiens
ggccagaatcgaaactgagagctcctgggcaggctcggcagggcaggcagctccaggagggcttcgaaccgtggccaacagttccagtggactgcgtggacccgtgagctcaggagcctcagacgcctccctggagagccaagctggtgttcgaggtggcgcctccagggtccaccctgctgcccaacagccccgcggccaccagagggccgtccctggcccggctgtgtgccctggtggacctgtgtctgggctgctcccgctgcacccagcggctcaatgaaagcacctacgtcctccgtagggtggagcatgactgctcccgcgagatcctgctggcccgctttaagcaggccaccaagagcaaggtctggcgcgtggtgggctgccggcccaccttcccaaggcccctgtgctaccaagtctgccactactacagccctgggctcggctgccggcgccaccgaaaccggtgcacctttgcccgcagtcgcgaggaggccctggtctggaccttcgagcgtcagcacaacctccagcgcctatggctgaaggcggaggtgcagggcagcggggcccagggaggggcaggccgggcggccgacgccatccttacggagtttggcggccgcttcgagctgctttgctccctctgcttcaggcgctgtcccccatgcatctgtcgcgtggacccccaggggcagtgccctgagcacggagcctgcccctccctcctggcccacgtgagcgccgagggccgccgcaagcaacagtttgtggtggtgaggccgcggccccgggccggccagcctcctgcctactgcaggtttgtggggcgtgggcagccgtgctggcgtggggagtcccgctgccagtttgcacacagcgccgtggagatggctgtgtgggaggccgagcagctgggtggcctccagcggggggacctgctcacaccccctgcccctgatggcgacgggcgcacggccccccttggccagccccctggggcccagctgtactgcccggcctgcttggtcacctgccactctcaggaggccttcgagaaccactgcgcatcctcggagcacgcacagatggtggccttcgaccaggccctgccctgggagcaccgttccccacccccgggactctccaagttcgagctctgcccaaagcctgacctctgtgagtatggggacgcctgcaccaaggcacactcagcacaggagctgcaggagtgggtccggcgcacgcaggctgtggagctgcgggggcaggcggcctggcaggacgggctggtgccctaccaggagcggctgctggccgagtaccagcgcagcagcagtgaggtccttgtgctggcagagacccttgatggagtgcgtgtcacctgcaaccagcccctgatgtaccaggcccaggagaggaagacccagtacagctggacgtttgccgtccactctgaggtgagcggagaacagctccgactgggcggagggagccctggggaagtggtgacttcagcccgggcagacgtcaacagcctgggtcatggagctaataccgaggcactgccgctcagcacctgcgtgacctgcagcaggtcccttagcctctctgcctcagtctcctcacctagagacagggggccaggacagtcccaccttggcagggttattctatggagtatatgggttaaaacaaggatttggccaggtgcggtggttcacgcctgtaatcccagcactttgggagaccgaggcaggtggatcacctgaggtcgggagttcgagatcagcctggccaatagggtgaaactccgtctctactg

SEQ ID NO: 253743 - DNA, 173 bp, Homo sapiens
ctcgagctcccgacctcaagtgatccgcccaccttggcctcccaaagtgctaggattacaggcatgagccactgcgcccggcccactttgtggtgtactttggtgaaacagaattcttcatttagccaagttagtccacctgaccctttttttaatgggtcatgcttttgggg

SEQ ID NO: 253744 - DNA, 428 bp, Homo sapiens
ttgtatacatatgtcatttagcacatatattaatatatctgtagtatatatttctatccatttaactggaattctgggtcaaagggcatgtgcatttttaattttggtaggtattactacattgaccttcattaaagattttattggctgggcacagtggctcatgcctgtaatcacagtactttgggaggctgaggtgagtggatcactcgagcccagaaattcaagaccagcctgggcaacatggcaaatccctctctctacaaaaaatacaaaaattagccaggtgtggtggcgtgtggccatagtccgagctacttgcgaggctgaggtgggaggattacatgatcccagggaggttgaggctgcagtgagttgtgattgctctactgcactgtagcctgggtgacagagtaaaatcctgtctc

SEQ ID NO: 253745 - DNA, 350 bp, Homo sapiens
ggagagacaaggtcttgaaatgttgcccaggctggtttcaaactcctggccttaagcaatcctcttaccttggccttgagccatgccacccagccagggaactttgaagtaattttttattatccattccttcatctttcacaggcaatcaatcaccattttctgtccatttttctctgaaatgcatctccctgtttctttttctgttccctctgccaccccaggtatttgtcacctcatactaaattatttaaaattcctcctaacagagctttcctgattccttgttctcttaaaaaaaaaaattatttcttttttcagagacaaggtctcactatgttgctcaggct

SEQ ID NO: 253746 - DNA, 743 bp, Homo sapiens
ctttacatgcattatttcatttggtcctgacacaaatccaactcagtagggacttttatgatcatttccattttccagatgcagaaactgagtgtcagagaggaaattacttgctaaaggttacagagctagccagtggcaggctgcatgcttgaacccagccctgcctgaccacacagcctctgccctcgtgtatttactatgctgcctccctgatttctgaccggttcctggagcacttaaagtggagcaactacttcacactcagcatgtgctgttttattgctacgaacacatctttttaggttcaggccctgtttattcaaataaattatcagggccttgagggcaagaaatgattttatatcagcttgcctcactaggacttagcacaatgctctcaaataataggagcctagttaactgctcctttatttcaacagttctttaatcaaacttcaaaggcagcatttattacatttacaagtcttattgtttgcatctgtccccacttccagcctggaaacatcacatatccctcatccgtgactcagcactgagcacctgggagctgctcagtaaatattgctgaggaattgagttgatggttctcgtcaatactgatgattaaccaggattaacgttttctcttttaaatttcattttccatctctgcgtgccgtctttttattgttctgcatttactcaaattattagacagtgaacttaaaacattcaacttg

SEQ ID NO: 253747 - DNA, 282 bp, Homo sapiens
gaagtctagcttgcaaaactggttgaattttgtagtaaacattttcctcatgtatctaactgggcagctgtgagttgtaagaagtatctgtttattatttatgtgctggttttattctaggactttggctgttagtcctcccttttttttttttttttttttttttttttttgaaaccgagtctcactctgtcactcaggctggagtgctgtggcacgatctcgcctcattgcaatctccacctcctgggttcaagtgattctcctgcctcagcttcctaag

SEQ ID NO: 253748 - DNA, 426 bp, Homo sapiens
agtttggatgctgggtcctgacccagaaacaacacggagtagatctcggatttgctttttcttaggtccaatgctaggacgattactttatctgtggtgaggaatgttataaaaaaccattgttggaatgccaccaaaatacttctttcccttttagcatcatcaccaagattctagaacgaagtaataacagttgccaaccttgagccattctccagctgttgtcatgtttcagtcagacaggaagtgttggcgagtaatatgggatttattgggagtgttcctttacgtgagtccaggaaataagaactagagatgagcttgggtgcctctgcttcttttatttctatggaacattctttggggtcagttttgaataatcactgggcattatcggatttctatcactattttttgcatgttctt

SEQ ID NO: 253749 - DNA, 429 bp, Homo sapiens
  misc_feature (206)..(206): n is a, c, g, or t
aagtgcttcttatggaagatcaaagaatgtggtttgttgagatggaatctactcctggttaacatgctgtgaacattgttgaaatggcaacaaaggatttagaatattacataaccttagttgatagcagcgtcagggtttgagaggattgactcaattttgaaagaagttctgtggataaaatgctgtcaaacagcatcacatgntacagagaaatctgtgaaaggatgcctactttgacccctcctattcagcatagcagtgaagacctaaccctgagcaatgaggcaagagaaagaaataaacggaccaggtgtggtggctcacacctgtaatcccagcacttcggaaggtcaaggcgggcagatcgcctgaggtcaggagttcacaacagcctgggcaacatggcgacaccccatctctacaaaa

SEQ ID NO: 253750 - DNA, 358 bp, Homo sapiens
ttcatgatttaaaaaaaaaaaaaaacctgtccacaggaactacgcatgaaggggacataactcaacatgataaatgttgcatgaacacacaactaacgccatcctaaacagggaaaagctgaaagcctttcctctaagaactggaataagacaaggatgcctactttgacccctcctattcagcatagcagtgaagacctaaccctgagcaatgaggcaagagaaagaaataaacggaccaggtgtggtggctcacacctgtaatcccagcacttcggaaggtcaaggcgggcagatcgcctgaggtcaggagttcacaacagcctgggcaacatggcgacaccccatctctacaaaa

SEQ ID NO: 253751 - DNA, 255 bp, Homo sapiens
tgagatggggtctcaccatgttgcccgggctggcttcgaatgcctaggctcaagcaatcctcccttctcagcctcccaaatagctgggattacaggtgtgagccaccgcgcccggccgaccatgcaagcttttctgacggttcctgaaaccaccgagttggttctaccccaggaccgacgcacactctgtccctgctgcatggaattcttccctctggtcttgacatgactgggaaggcttgcgtgcgcatgtcg

SEQ ID NO: 253752 - DNA, 801 bp, Homo sapiens
tccaaacctaaaaacaaagcttctgagccaactgctccttgcacaattctggcaaatgtctagctgtccacagcgttagacatggaatatttctactttgaccacagaagtactaacaatagtcaagttatatagagcagagtttctcagacgtggcatgtagggctggttcttttctttgtcatgagagtgctaggtatgtgcgttgtaggctgtttagcagcatccctggcctctactcactagaagccagcagtacccccgtctccattgcagcaaccataaatgtgtctaggcaacgcttgatcctcccttccccttcccagcagaggggcaaaaatggccctcatcgaggagcactgttgagcctctggggttctccaaaatagtgttttttctgtttttttgagatggagtcttattctgttgcccagggtggagtgcagtggcgtgatttcagctcacggcagtctctgtctcccgggttcgggcgattctcctgcctcagcctccctagtcgctggggttataggcacataccaccacacccggctaatttttatatttttggtggagacaggtttttgccgtgttggccaggctggtctcagactcctgacctcaggtgatccgcccaccttggtctctcaaagtgctgggattacaggcatgagcccaccacacccggccaagtgttttatgtgtggattagagcctggatgtgtgtttataccctggagtactggtacccatgcttcagaggaactgaacataattacaggggtgtaggaagtaaaagaa

SEQ ID NO: 253753 - DNA, 283 bp, Homo sapiens
ggtgattcgcctgcctcggcctcccaaagggctgagatcatacgcgtgagccgctgctcccggccatggcagatccttcttgaacacccactatgcatgaggcctccgctgggagttcccatcattcaccctcatagcagctctacaggaaggagctgtctgcccccaagtcacacagtggacaacagcagtttgggggtcagccttggcccccccactccgaactcctcgccgcctatgccctccactcctttccactgttaacccaagatggaaaagctta

SEQ ID NO: 253754 - DNA, 188 bp, Homo sapiens
agggggaagcggaagttatagcccagctcccccagcaggaggcctgagcggtgggtctctgtgactacctccttcataaagtcccacttgcccaagaacttgtatgataagttggaccagggctgagcgtgccggggccgggaagcatgttgcagagaccgggagtggggcaggacctctctcccttc

SEQ ID NO: 253755 - DNA, 307 bp, Homo sapiens
ttctttttttttggaaccatttctctgttccaggaagttgtcaaaacatgtgatttttaactttaaagaaaaacaggactgaaatgtgtcaagtccctggaaatagcctgaaactcaattgagtttatgcagaaaaacacacactaaaaaatcacaagaccatctggccacagagatctcagtttctctgacaacaccactggaactgtgggagggtaagtcttgtaatcaccaaattgaaaatcagtcaggagaacaaacaagaacagacaggtttcaaaacaatgtatcctacttcctgttctac

SEQ ID NO: 253756 - DNA, 690 bp, Homo sapiens
cccaggctggtcttacatactcccaggctcaagtgatcctcctgcctcagcctccgaagtgctgagattacaggtgtgagccactgcactcggcctcttttccctttttaaagtggttgttttccatctttctcctatttcccttgctcttgaaatacagctaaaaaaccccaaaaaaacaaaactgaaaaagaattctgggctttgtaatgttagtatgaattcctaatattgtgctgtggtgaagagattgaggggtaggtgcctggaaaataaagggaatcaccaccactgatggggaagacttctatatatgttctcagaggtttgtcaattggtgttgtcttattcagaatttgattactttgtttgtaaagtgaataactttgctaaatttgtttgttttatgccgtagagataaagggccagaagtttcattttcatagcttgttagtttactttgatatttgacagtgtaagtggtataataaatcactgatgcaagaaatacatctaaatagaccatatgctaggaggtatgttgtttttagtcttcattactggatttaaaatacttagaattctacaattctaatacttgctgatagttattaattggtacaagaataatagtttggcaaatagtaacttgtttaaacttaagaaaacctatattttctttctttcttt

SEQ ID NO: 253757 - DNA, 240 bp, Homo sapiens
actcaggttctgttgtgttttgttttgctttcctaacataaaggccactagcttcaggttatgctattcattcagcctgaaaatagaatacatactttcagaagatcctgttctctgcattcacagctgttggagagtctttgaaaatacccttgccagtatacagagatgtcagcctaaagaacagaaagagaagatgggggaggaaaaaaaggcaggggtaaaaaataaaaagttgcc

SEQ ID NO: 253758 - DNA, 188 bp, Homo sapiens
gacataagcctagcccacacaggagaactgagttgtcactgaaattagtctccccaaaggtgtgaaggtcaggacttttatggacaatttggtgggcagggtaatagataatgggtgttgctgattgcttgtaaaagaaatcgtaggggtgtggaaaattgcccttgtgagtgagtactcctttgggt

SEQ ID NO: 253759 - DNA, 411 bp, Homo sapiens
acagagtcttgtatattcatgtagctcatgatgatggaatcaagtttgaaggcttaacctgtgcttaacctatattgggcattgtcaagacttaaatttagaacactggaaagcaagtataattaattttacaaatagggcatcaaattttacaaagactcctaaggctatatggtattccttttataagacatggaaaaggcaaagataagggaaacgaacaaatcgctggttagaagtaggggatttgagtacatatgggcttaagagtgttctgtcatgattgtagtggtgaaaacaagcatttgcaaaaactcataaggctactcttaaaatagcaaattttgttgtatgtatattttaaagttaaacaataaaaatgctttcagtttattaaagaactcaaaaaaa

SEQ ID NO: 253760 - DNA, 409 bp, Homo sapiens
tacctagtaaaagggactctgcagatgtaattaaagtcagtaatcagttgaatgtatcttcccagttataataagtggaataacttcagctaaatgagttgaacttatcttctcactgaataagattattcaagctcacttaagaagattcctactcaattggagattatcctgaattacctgatggattcagtgtaataacatgagctcttagaagtaaaaaaagaaagaggataacatcagagagatttgaagtgtgggaagtatttgacctgccattgctgttttagagatcgaagaccctggtctgttgtggtggctactttgaggggctgaggattttttgatcccaggagtctaagatcagcctgggcaagatggaaaaaaaaaacatttctacaaaaaatgc

SEQ ID NO: 253761 - DNA, 527 bp, Homo sapiens
tttcagggagaaacaattaacaattcaaaacattatataattgggcgtcttttattacaattctttatctactaagaaacctgcttggagttaggaacggaatctctcttgcttgtttatttatctagagcccttgatgttgtgttttagaggtttcgcaaatatttgctgagtttgatggtgagagaaagtctgaatgcagagatctggatgagcatctaatgaatgtgaagaattagggttgagataaccaagaatgttccttgggttagaccaatggttttcaaccaggtacgattttgtatccccagggcatggcaatgtttggaaacatttttgctcgtcacaactggtggcagctattgctgacatctagtgaggataggctagggatgtttgctaaacatcctgcaaggcacagggcaatccccataacaaggaggtatctggctccagatgtcagtggtgctgcttttgggaacgctgtgttagagttaagctgggcttccaaagccctgtggaaatac

SEQ ID NO: 253762 - DNA, 423 bp, Homo sapiens
tttcagggagaaacaattaacaattcaaaacattatataattgggcgtcttttattacaattctttatctactaagaaacctgcttggagttaggaacggaatctctcttgcttgtttatttatctagagcccttgatgttgtgttttagaggtttcgcaaatatttgctgagtttgatggtgagagaaagtctgaatgcagagatctggatgagcatctaatgaatgtgaagaattagggttgagataaccaagaatgttccttggctcacagctattgtccctctcccagctacgatatacgacgccccagggccataggctagtcatgcgcggcacgttcgagtttagagcatctcgctggcagactactcggattacattctgactgaagtatagcctagggatgctctaggacacatg

SEQ ID NO: 253763 - DNA, 489 bp, Homo sapiens
ggccctacctgaggtgatggagtctggcctttcaatcccaacactcagcacactgggtgtggcctcacaggagccaagcaagcttctgctctgcacactgctttggctgggcattgttagggattgacttgtgtccccccaaaagacacgctgaaacctaacccccaacacctgtgaatgtggccttatttggaaataaagtttttgcaaatgtaatcaagttaacatgaggtcatatttgattagggtcggccctgatccactatgactggtgtccttttaggaagagaagaagccaggcgcagtggctcatgcctgtaatcccagcaacctggccaatttctctttcgtttttttgtgggtttgtttttaataacagtatgagaattaggatacttgagaagcaatatgagccagaatccttgcagatgtttacaaattcccgatctcttaactttttactgttataattcccacacctcgtttgag

SEQ ID NO: 253764 - DNA, 452 bp, Homo sapiens
atattgttgagattttattgattaagaagaattagtccccacaatttggtatgatttttaaagattttatattatttttaaagatttaaattatatgaaaatgttttttcaaaggtctattaatgtgatttttttaatctttaaaattactttgtgaaaatgataggttttctagtatggaattatccttttattattgcaataaactccactttaccatgctctgtcattatttaaccataccagtgatggccaggtggccaaaataaatagccaaatggctaaaattgtattgatgatttttgcaaatgtaagtaaggaaaattgttggttaaatttgtagttattgttacattcatgttcattttgattagcataataaactaatgaggacaggcttatttttctctctcacaaatcacttttacagttaaactctgatatataactta

SEQ ID NO: 253765 - DNA, 772 bp, Homo sapiens
caattactccctttggcaataaattcaggtatgatgcaaagaagacacctgagagggaggcctggagagaacactaaatgaatccagcctggaggctgcagtgggcctggaatcgccacctccatctctatgttgaaaagacgaggacaccattgtttcctgatcaacttcccatttcatcccagcagagggcaccagtgtaattctgttcccagctgtggaggctgagtggaaggcaggcgtgtcaggcgtcactctccaggaagaaatgaccccaggcaaactgcatagcagtgcaataggaacaactattgtgattgggtcctattttgaagttaatcctaaatcaattttgattttttggtccttcgaatatgaccaaaaactcagtctacaagtagattgttaagtcactttaacaggtatgctgaaataatattaatatctttgaactgaaacaaaaacaacccaaaacaaaaaaaacaccccacaccccaaaaccaaacatcgccaaattatacccccttacccagtcacccccaaaaaaacaaaacgccccttttggcccccagggggggacctttgcgcccttttctttttggggggggaaataaattaccccgcccaaatgccttcctcggtttgggtttttgggcgtgccgacgggtcccccctctttcaaaggggggtttccggttttcccccaaaccgggcggatacctggaaaaaaaacttggaagcaaagcgcttcaaagggcggaaacctataagg

SEQ ID NO: 253766 - DNA, 420 bp, Homo sapiens
gaaataaatcagttattaaaaacaaactcatagataatccagatattggagttaacagatagggcatcataacatctatgatgaatataaaggaaagaaagaaaaaatgaaagacaaaacaggttgtgtcagatttctttctggaagctttaaaatgctcactttattttcatagattctaatttcctaaattatgtttgatgtttcaagcaaaaatcatagcattgtctagtgttattctaaatggatgtaagacaattatactacaaatttgatagagtaaagagacataatatgacagaaggttgctatacttcactcagactggaataaagatgataccaattgactgtgataatgtttatataaatgaatatacactaagctgtaaaatgcaaccactaagctataaaatgcaac

SEQ ID NO: 253767 - DNA, 531 bp, Homo sapiens
  misc_feature (34)..(34): n is a, c, g, or t
  misc_feature (37)..(37): n is a, c, g, or t
  misc_feature (474)..(474): n is a, c, g, or t
  misc_feature (480)..(481): n is a, c, g, or t
  misc_feature (486)..(487): n is a, c, g, or t
  misc_feature (493)..(493): n is a, c, g, or t
  misc_feature (496)..(497): n is a, c, g, or t
  misc_feature (500)..(500): n is a, c, g, or t
  misc_feature (509)..(509): n is a, c, g, or t
  misc_feature (514)..(514): n is a, c, g, or t
  misc_feature (519)..(519): n is a, c, g, or t
  misc_feature (523)..(523): n is a, c, g, or t
  misc_feature (531)..(531): n is a, c, g, or t
cgggtccctgcttgatgaggtcagtaccgtacgnatnattgactcagtgcagccaaaacgccgtgccgctcccccatttgtgtcggtgagagttaggggagaggtgccttgagacagagcaggagtctggctgggctagcttttatcttgtgctccctggaaccctgactggatgatttctgaagtcgagctggagcccatctagagggaaggtgaaacttctcctcagcatgcagggcctcctgcacccacactgccacagccaccgcattaccagctcctgccagtctgaggagcaagaggctggcatgaagaatcagttccattctttcctccctaaatttagaaaaagcctgttttgcaaagctttcttcagtgtttcaagacaaaaaaaaaaaaattaagcagttgcacaacatgcatatcttctcctggcctgcagctccaggatatgcagctgggagcggcacatgngttggnngatcnnaagagncgnngtntaacggaantaaantcatnaaancagaaccn

SEQ ID NO: 253768 - DNA, 537 bp, Homo sapiens
  misc_feature (4)..(4): n is a, c, g, or t
  misc_feature (6)..(6): n is a, c, g, or t
  misc_feature (12)..(12): n is a, c, g, or t
  misc_feature (20)..(20): n is a, c, g, or t
  misc_feature (480)..(480): n is a, c, g, or t
  misc_feature (486)..(487): n is a, c, g, or t
  misc_feature (492)..(493): n is a, c, g, or t
  misc_feature (499)..(499): n is a, c, g, or t
  misc_feature (502)..(503): n is a, c, g, or t
  misc_feature (506)..(506): n is a, c, g, or t
  misc_feature (515)..(515): n is a, c, g, or t
  misc_feature (520)..(520): n is a, c, g, or t
  misc_feature (525)..(525): n is a, c, g, or t
  misc_feature (529)..(529): n is a, c, g, or t
  misc_feature (537)..(537): n is a, c, g, or t
aggntntcctgntttcatgngatgaggggctaaaagagagaaacttcactctgttgagccacacgcacgtgccgctcccccatttgtgtcggtgagagttaggggagaggtgccttgagacagagcaggagtctggctgggctagcttttatcttgtgctccctggaaccctgactggatgatttctgaagtcgagctggagcccatctagagggaaggtgaaacttctcctcagcatgcagggcctcctgcacccacactgccacagccaccgcattaccagctcctgccagtctgaggagcaagaggctggcatgaagaatcagttccattctttcctccctaaatttagaaaaagcctgttttgcaaagctttcttcagtgtttcaagacaaaaaaaaaaaaattaagcagttgcacaacatgcatatcttctcctggcctgcagctccaggatatgcagctgggagcggcacatgngttggnngatcnnaagagncgnngtntaacggaantaaantcatnaaancagaaccn

SEQ ID NO: 253769 - DNA, 535 bp, Homo sapiens
  misc_feature (20)..(20): n is a, c, g, or t
  misc_feature (25)..(25): n is a, c, g, or t
  misc_feature (478)..(478): n is a, c, g, or t
  misc_feature (484)..(485): n is a, c, g, or t
  misc_feature (490)..(491): n is a, c, g, or t
  misc_feature (497)..(497): n is a, c, g, or t
  misc_feature (500)..(501): n is a, c, g, or t
  misc_feature (504)..(504): n is a, c, g, or t
  misc_feature (513)..(513): n is a, c, g, or t
  misc_feature (518)..(518): n is a, c, g, or t
  misc_feature (523)..(523): n is a, c, g, or t
  misc_feature (527)..(527): n is a, c, g, or t
  misc_feature (535)..(535): n is a, c, g, or t
agggatcagctctcttgacngctcngaccctacgtatgagccgactcatagggtcacccaatccatgtgccgctcccccatttgtgtcggtgagagttaggggagaggtgccttgagacagagcaggagtctggctgggctagcttttatcttgtgctccctggaaccctgactggatgatttctgaagtcgagctggagcccatctagagggaaggtgaaacttctcctcagcatgcagggcctcctgcacccacactgccacagccaccgcattaccagctcctgccagtctgaggagcaagaggctggcatgaagaatcagttccattctttcctccctaaatttagaaaaagcctgttttgcaaagctttcttcagtgtttcaagacaaaaaaaaaaaaattaagcagttgcacaacatgcatatcttctcctggcctgcagctccaggatatgcagctgggagcggcacatgngttggnngatcnnaagagncgnngtntaacggaantaaantcatnaaancagaaccn

SEQ ID NO: 253770 - DNA, 361 bp, Homo sapiens
cttgcttctcttagtcattttcacagcacgacttcattgggatatatggaagattagcatgcccgggtctcacctctccctttaattctgcaggagtctggctgggctagcttttatcttgtgctccctggaaccctgactggatgatttctgaagtcgagctggagcccatctagagggaaggtgaaacttctcctcagcatgcagggcctcctgcacccacactgccacagccaccgcattaccagctcctgccagtctgaggagcaagaggctggcatgaagaatcagttccattctttcctccctaaatttagaaaaagcctgttttgcaaagctttcttcagtgtttcaagacaaa

SEQ ID NO: 253771 - DNA, 300 bp, Homo sapiens
agctcgggctgccataacaaagtaacagactacgtggcttcaataacaggcttctatttcttacagttctgggggctgaaaattccaagatcaaggttctggcaaggtaggtttattccaagtcctcttctcagggcttgcaggcagttctatttgtgttcacatgacttctgtgtgcagcaagaaacacagcaatagagtgctcaagagcctgctccctggtgtctcttcgtataaggacagcagtcccatcacgggagctccagctcaggacctcatctaaccctgatcacctcccaa

SEQ ID NO: 253772 - DNA, 483 bp, Homo sapiens
tctatcctggagcagaaaaatcctgtcttcattgctatagctacagattcagaaatgagcatgtaacaaattcaggccaaagagaggcaatggaaatcagagaaacactgttcctgaaagcttctgtcactcaagaatccatgaaacattcatgaacttcacatcagaagccaagcccagaaaatatgggtttaaggtttgcctatatgtccaatacaagagaaaaaagaacattccacttctttagaaggttctactttgatctcctggaagatttctgtatttgtcttcttaactcttgagttttgttgttgctaatattggatgaagaggagacaaaatgattggatctagaggagcaccgacaagcaaatggcagattcctaggccctcaccagaggctgagcagatgttggtgccatgcttgtacaagtctacggaaccatgagctaaaataaaccttttttctttagaaattaatca

SEQ ID NO: 253773 - DNA, 570 bp, Homo sapiens
tctatcctggagcagaaaaatcctgtcttcattgctatagctacagattcagaaatgagcatgtaacaaattcaggccaaagagaggcaatggaaatcagagaaacactgttcctgaaagcttctgtcactcaagaatccatgaaacattcatgaacttcacatcagaagccaagcccagaaaatatgggtttaaggtttgcctatatgtccaatacaagagaaaaaagaacattccacttctttagaaggttctactttgatctcctgattccagttgtgaaaaaaaattgtgcctaaagaatatagtccctttatagaattgttttgaaacctaccacaggtatttctacacaggaagatttctgtatttgtcttcttaactcttgagttttgttgttgctaatattggatgaagaggagacaaaatgattggatctagaggagcaccgacaagcaaatggcagattcctaggccctcaccagaggctgagcagatgttggtgccatgcttgtacaagtctacggaaccatgagctaaaataaaccttttttctttagaaattaatca

SEQ ID NO: 253774 - DNA, 347 bp, Homo sapiens
ttttttttgcacaacatggagtgaggacaaagggaagaaactcaaagtccccactcccatgaagccttgagtctagtaaagtatacaaaaaggtgaacatatggtgaaagttcatgtgttcaggattaatgtgcagacaagaataggagcattgggtgggtggggacgagctccccagagactcatctgaataacatgtgtcctgtgctttccaaaagtagccctgacccacagcttcaggtatattgactcattcagcctgcaaagcgccctgtattagacagagttctccagagagacagaaccgatagaatgaatggatgattagatagatgatagatagacag

SEQ ID NO: 253775 - DNA, 518 bp, Homo sapiens
tgtttgccaccatccatcctggcttctatgggttccatcgggacacctttgcctatgaatgccagcctcagtcccaagcccattttcctgagggtgaaggggacttttattatataggggccttatttggtgggtcagtgctggaggtttacaggctgatcatggcctgtcaccaggtgatgatgattgaccaagccaaccacatcgaggccctgtggcatgacgaaagcctcttaaacaagtacctgcttaaccacaaacccactctcccttgagtacatgtgggattaaaaagtcgatggagtatacgttggatgaatacctggtgggtttgtgcaccatgataaactgcaagagatctgtggtcttggtaaataacaatgaggaaatgtgaactgatgagggaagcttccagaaagagaccagagagggggtgattgccagtcagcccgtatcttcctcctgaaatgctaccctgatttaaaatcagctttacaataaagagtatgactccaaaa

SEQ ID NO: 253776 - DNA, 191 bp, Homo sapiens
tcaaggccagactatagcaagttatgtccatggtaatagttgctaacttggctcattctgctacctgaggatatttttctatctaacctctttaaggaaggagaatatactaacttaaatggattaaaatgtagcatatacttggtttgtatgcttgattgtaaattaacttaccagtcaaagctgctgct

SEQ ID NO: 253777 - DNA, 466 bp, Homo sapiens
tgccatttgggaatatttctatttcatcttatcattttattgtaaatgaatagtagttaccttttaataaatttacatgtcacattacttgtgagataataataatcactaattaattaatccttgtgttttttggggcatgaaaaattttgcagaacattttgaaaatataggaaaatgtaagagaaaattaaaatcatgtgtattcccattattctaagaactgatgttaacattttgatctatctcttcaatatttttccaatgaatactttaacgtaaatgacaccagactgtatattttgttttgctatctattctttgaaaagcggtaatatattatgaacatttttcaatgttaaaaagtttctacaatgatttttgcatggcttcatatagtactgtcctgttgtaattcacttatttaactctgtgctgttaatgattatattatttccaactttat

SEQ ID NO: 253778 - DNA, 349 bp, Homo sapiens
gaattgtaagggacctgaaaggtcatttagccaaatggcatactatatagtttagcccactccaacctccagatgaccatttcaagacagggcactctctaattctcaaagtagttcatgccactattgggatgtcctaattgctagaaatccatgcctttattaagtcaaattttgcctcctcctactcacagtccaggcagtgcttcttgggacctgctcactcctccacgatggcttttaagaaggctgaaggcatttactacgggcaagtaaatggcactgactttggagtctgaagaaccacattgagtttttctacatttgagggcataatttgctagagagg

SEQ ID NO: 253779 - DNA, 459 bp, Homo sapiens
ggagaaggctttgccttggcccccagaagagcagatgctccagtcaattctggagtaggaagaaaagatttggaatactttttgactccctgtgatatggtttagatgttttgtctcctccaaatctcatgttgaaatgtgacctccagtgctggaagtgggcctagagggagttgtttgggtcatgggggcagattccttatgaatatcttggtgctgtcctagtggtaatgattgagttctcattctacgagttcacataagatcttgttgtttaaaagagcctggcacctcctttctttctctcttgctcactctcacaatgtgacacactggatccccttgactttccaccatcattgtaaggcttctgaggccctcctagaagcagatacctgcaccatgcttcatgtacagcctgcagaactgtgagacaaataaacttgttttcttctaaaa

SEQ ID NO: 253780 - DNA, 514 bp, Homo sapiens
actctaaatggatccgccgttttgagctgtcgtgactgtcataaccttgggcttgggaaagtgaattggcctgaatagcaaggaggagaacttgggtgtggaaataccggaatctcactctattgctcaggctggagtgcagtggccacaaagcgggagattggcacgagggataccaacaccggaatatgtgatgagatgtgtgaagagcatggcaatggatgcaaactccctttgtgtttctggctttaagcagctctatactctcatgctgtcctacactcagcagcaatttgtcacaagtttgggaaattcttcctactcttttgaactccagcccaatttcctttctatcactgccctaggtcttactcttccagaagaaaaagggaaaacccaacctgaatgtcccctaaaagtgaagaaatgtccacacttctatgtgcagattggtatctacatacagacctcttggaggagtcagacaaacaagatcttgaatctttactgatct

SEQ ID NO: 253781 - DNA, 598 bp, Homo sapiens
actctaaatggatccgccgttttgagctgtcgtgactgtcataaccttgggcttgggaaagtgaattggcctgaatagcaaggaggagaacttgggtgtggaaataccggaatctcactctattgctcaggctggagtgcagtggccacaaagcgggagattggcacgagggataccaacaccggaatatgtgatgagatgtgtgaagagcatggcaatggatgcaaactccctttgtgtttctggctttaagcagctctatactctcatgctgtcctacactcagcagcaatttgtcacaagtttgggaaattcttcctactcttttgaactccagcccaatttcctttctatcactgccctaggtcttactcttccagaagaaaaagggaaaacccaacctgaatgtcccctaaaagtgaagaaatgtccacacttctatgtgcagattgtagacctttggaatctacattcaacatttgatactgcgtgtgactcctgatgaacacgctgaagatacatgatgtccagtaatttttactggggataatacctgcaatatacataagatggtgtcattaaagtacatttaaaatta

SEQ ID NO: 253782 - DNA, 431 bp, Homo sapiens
gctgttgctgtcacacaggcccaaggctgtggaggctcacaccagggtggtagaggaggatggtgaggagtggtcggaatctggttgtgtgttaaagatggggccagcaggactcaccagcagcctggatgaggggagcgatagggacagaagagttaaggctggtttcgagactttgggctcaagcacctcaaaggatagcattgccaccaactctaatgtatggagaaggcttgggaggagggtccagaattcagacatctcagtagaggtgtctagtaagtaggcagctgagtatctgagtgtgacatttagcctggaagtgatatatttgggcattgtcagtgtttacaatcaggagactggccaggatcactgatttagtttttgctgctgctgtaacaaagtaccataaactttgtaacttaaaa

SEQ ID NO: 253783 - DNA, 495 bp, Homo sapiens
aactcctcgaggctgacaaggaaaatcctaacttaaactttcaatgatatttccccatcttattcaagaagtgtgtcaatttcattcaacctgaacacatctggtgaagacagatagctatgagcaattcaacagctaaaatgaaagtgacgctctttggaatggtatatttaaggatattgggagggttgtggtggtgaagaagtaaagttcttgaggtcaagttcctttcctaggtaagagcctgcagagtgcacagacatgcctggagctggggcagcacctgggcatgtgagggggattgtggccagggagactcccgtgggagcttggtgggaggggcaatggagtcccagctgtcttcatttctgttgcaactaccttggacactgtagtactagagtaggggttcttctagagtcttctgagtctcagggacatatgtatggagtggagctcacacagctccactcaaagaatctaagagcatgagaa

SEQ ID NO: 253784 - DNA, 735 bp, Homo sapiens
cagcatcacttctgtgaaatccctgcccaaggtatgtaatcagaatcccatcatgaggcacacccaaatgagggacattctacaaaataactaccttgcaatcttcatagagtgaagattatgaaagtcaaggaataatgaggaactgttccagactgagggaaagaaaatatttgacaagcagatggtattcgtgcttctgaactgaattcttttgctctaataaaagacattttgggcacagttttctgattctgatgattgtattgtgattatgtaagagaatgtaggaaaagtattcaggggtagtgtgggacaggtcagcaactcactctgaaatggttcaggaaaatcagttctttatgctgtattttcaatccttgtataaattcgtgtttgtttcaaagattaaaaaagagagaaaatggaggggaaaatacctggtaggcaaatgaacaaaagacatgaataggcaattcatttaaaaattaaaataggtcttaaaatatttaaaaaaattcagcatcactgataattagagaaatgcaaattaaaactgcaatgaaatattctcatctgtcatgagaaggttgtggctgagttaagagattggcaaatccccacccaccctgcccaaaagcaactgtaaatgccattctgtaaacaaaaggaatcaggaacccttggtgatgtgactgatttcagagctggggcagataaagtacaagctgagct

SEQ ID NO: 253785 - DNA, 235 bp, Homo sapiens
  misc_feature (141)..(141): n is a, c, g, or t
tgccaaactttccgtgattggtaatgcacctttattgtaagctcagcaaagcagtccctcatctacgggatctggcaacacagagcattcctgcagcttccaaaaacagatctccatccagcacagacagacccagttagnttggtgatcgataatcaattgagggcatacctgctgtgtaggaataagggctaacctgtgtagtctgtcattcttcttttcctctttcagtttt

SEQ ID NO: 253786 - DNA, 259 bp, Homo sapiens
tgccaaactttccgtgattggtaatgcacctttattgtaagctcagcaaagcagtccctcatctacgggatctggcaacacagagcattcctgcagcttccaaaaacagatctccatccagcacagacagacccagtccgacctcacaatagaaaaaatatctgcactagaaaacagtaagaattctgacttagagaagaaggagggaagaatagatgatttattaagagccatctgtgatttgagacggcagattgat

SEQ ID NO: 253787 - DNA, 405 bp, Homo sapiens
tcttctttttctttttttagagacggggtcacccaggctggagtacagtggcataatcatagctcactgcagcctcgctcatgaactcaagtgatcctcccacctcagctgaccaaatagctgggactagaggcatgcccaccacacccggctaagcacctttgattctaatattgaaaatatcattataaaatatctagtaggtatggattaatgaatgagttaaatggcagatgtttgaccctaataagtaaaggtttcgggacgccagggagatggtaatatctgggatcttcttaggcctcattaccaggacataaagaaacaaaatgaagtttctcaaaatgcccatttaatacattattttttatcgtaataaacatacggccttttcagatcttattt

SEQ ID NO: 253788 - DNA, 484 bp, Homo sapiens
gcagagaggggtgacttggactaggatacgtaaagtgaatccggaaaagagacaacctggatgatcaagcaggaactgatttaaaggaattgatgtctgctgctaagagtatgaagccctgagggctgagaccacatctgcctggttttctgtggcagctgcagcatcaacactggctcttcgaagagtagcagctgatgaacattactccggcaaacaattttctctgctaggaactggataaatgcaaaggaaggaggggagagtgtgtcagacggggaccctgccctactggagcacacgcatcaccacctgggttaggacggcctcacccgtcccctggaccttcaccttatgtcccagagaggagacatctgctagagcaaagaaaattcattgtcatataaaacaaacaagaaaacacacacacacatgtgcacacacacatacagaaagcaaataaaacattgttagatgatgtaaa

SEQ ID NO: 253789 - DNA, 491 bp, Homo sapiens
ttcccaactttaaaaaaaaatccactttctgctccaaaggtgaagtgtcacattagaaggcaggatgctttgtgctccttcccgcaagctaacttccaaatacattctctatttttatatcagactcttttattactttttattattttttatattagactttacatgaagtgagccgttaaccttttttgttacaagacttcatgcccacaggtatattcaagtcccagatggaaagatgatctggatcaggcaagatgctgaccaggggaacaggagacacagtcaagggaatctgaggaagtacatgtttttgcccaatacagtccccaccttgtgccactcagatgtcctcatgccctccaactgtggctggttttataagcacatgactagtgtagttgcacgcggtcttgtgcttgtggggctttttgcttggattaatgttctgcacttgcatttttatttttcagacagcggaggagtatccg

SEQ ID NO: 253790 - DNA, 726 bp, Homo sapiens
cgtacacacacacacacacacacacacatacacacacacacacacacggggagagaagccaaaacttggtgagttttgaaagatgtagaattactgacttttaggtgcactgggacatgtatttctttagctatatatatgtgaatattttttcaaaatttgtttctgattttatatgtagtctaaattcattttaaaaacatggtatattgttaatattcctagattaaaagttatttgttgatcatttttctgcctcatacaggtattccagatatacaaaaattattaagatagagagttgaacttatggcaagtagtatctcaaatccaataccatataattttcatattgattatggaatttaaagaatgagaaactgacttcttattaagtctttggaaaaggtagcatttgatgcctcaaaggtgaaatgtgactttcttaattcttttaaatataaagtagatgatattgattctgtttcattggattcatctaaagggaaaaggatataaacctctaaagttcagtggatttaatcactgcagtgttagatgttaaaatacctaaaatgatgttttaaaagttcatatatacttttacatttgttccagctataaaataaaattaaattaggtataatgtatgtgaaaagatgtttactattatagtctcatgtaatttatcaaaattgttaaaaatagttgttagcttagtttttc

SEQ ID NO: 253791 - DNA, 229 bp, Homo sapiens
tgacttctaaagaatcttggtacgtgaggaagaaacccagaagaggaagaggaaagcaaaggagtcagggatggctcttcctcaggagagacggtgtttcaccattttggccatgctggtcttgaactcctgacctcaggtgatccgcctgcttcagcctcacagaatgctgggattacagacacgagccatcatgcccagccccaccaattgttattaaatatatatg

SEQ ID NO: 253792 - DNA, 293 bp, Homo sapiens
aatgttgagtaagtccttcttgaaaatgttttcaagtgggagaatattagtggtaaatttctaactgtcttttaacattttaattgggcttggatcattcacattttccccaaatcctttctaaattaaaaaaaaggtaaaggccaggtgcagtggttcatgcctgtaacgggtgcagtggttcatgcagtggttcatgcagtcccagtacattggaaggccgaggcaggaggatcgcttaagaccaggagttcaagaccagcctgggcaacagaacaagacccccatctctt

SEQ ID NO: 253793 - DNA, 316 bp, Homo sapiens
gaagaagatgttaatatcgactttacagcagagaaaactcagattctagcaggtgagtcctcaggtcacaggcgtaaagtcacagcatggaagacccatattcagtgggcgtcgtcttgccacatgctttgacctgtagctgtggtccctaatcccagccaaaggcttcactgttgagcctcaggaaaccagtgaacgctccaggattccctgcaaaatgtgccaaagcgtgcatacatttgcagaagcaaaatcacagctttcatccgattttcaaagctatctggaaccaaaaaacattaaggataactggcct

SEQ ID NO: 253794 - DNA, 372 bp, Homo sapiens
agtaggcagggacataagttgtttgtgaatataatattacagacattgtagagaagtcagaaaatcacccagaatatttcccatcataaaatcattgattttttttctgtttattttcatccatcatttttcctttgatctttttaaagatgtatgtataattttatatccttagtttttcactttacaattgtaagtagcttccttgtggcataacctttgcacaattactttattttttgaaatgattttctcccccagaattaaagcagtataaccaaactgcagaattaggaaagtggagaaaaagccactcacttctgccactcttgtacaatgactcttttgttgtgacattgtccctgtattcgc

SEQ ID NO: 253795 - DNA, 210 bp, Homo sapiens
gacacagcacttttagctgccaatgcttaatagctagaagagttcacgtaaaaatttcatttcctacttatctttaaaaactggaaacactagccacactggcgcatatttccacttggcaacaatggactgcagcaagcagggacggccccttcaggcatgggctcacgttcccagctgccacaacacctcctgtcccacctccagttc

SEQ ID NO: 253796 - DNA, 418 bp, Homo sapiens
aagaggaaatgaaaaaaaaggaaggaaggtaggcaatgagggcagtgttaccttcttgaaaagcccagatctgtgctcagtgaacattcatttcacatgcgaaaaggaaggcaaagggtagggggtgggcagttaatgatgcttttgtctgatgcccggtaaatctacattttacataagcaagcatgtgaaatgacagctatctgggaacaaaaggatggcagtttttgcatgactgggttctcaagctttaccttccctttggcatggtggcacgcgcctgtaatcccggctactcaggagcctgaggcagagaaccacttgaacttgggaagtggaggttgcagtgaactgagatcatgccgttgcacttcagcctgggcgacagggcaagactctgtctcaaaaaaaaaaccca

SEQ ID NO: 253797 - DNA, 371 bp, Homo sapiens
gattactttagtttagtttagttttagagatgtgggggtcttgctttgttgcttgggctagtctcaaactcctggcctcaagcagtcctcccacctcagtctgctgagtagctgggattacaggtgtgggcaacatgcccagtgcaaactggattatgttttgttttttttgtttttgagacggagtctcactctgtcacccaggctggagtgcagtggcacgatcttggctcactgcaagctccgcctcccgggttcacgccattctcctgcctcagctacattggaggctgaacccgggaggcggggagcagagttcctgacactgcactctggcctggacgacagagctagagtccatattatgaaaa

SEQ ID NO: 253798 - DNA, 661 bp, Homo sapiens
ggcttcactggctcctgaagtcaaaacaaagcaagatgtccacccaggcaagagtggacaccccactcacccattcccagaggccacctggacactctccaaagaagcagaaacagtcaggctttgtttttagctctccttgtgggcccctgaggcctgccccactttctagaaacagggagcttggggcccatgccatctggagggactgggcagcctttgccttctcttgccactcatggggaaaagccaagggaatgcagccctctccatgtgcacagcttccaggaaatccacgtggtagggcctctggtgggactggagtctatcagaaccacagtggtcagtctgtgcacagggctgtgtcccttgcaggagctccaagagccttgctatggaaaccccaaactccggagactgttctgattctctcatccactccacagaacccagctagcatttttctgagctcaacttgagctcaggtctaggaaaaaatctataactcagagggagaaagacaatgaaagcaatgcagaagctcccagttgagctcaatccagacaatgtaataacaagcatcatttattcattcattcagcaaagggtggaactcatgcctgtaaagatgctaaccatgccaaaaataaacatagcataa

SEQ ID NO: 253799 - DNA, 384 bp, Homo sapiens
  misc_feature (320)..(320): n is a, c, g, or t
caccttcctctaggcagatatccccaaggtcacccactgcacttggacttgcaaaccctggccactgtgcctcctgccccacgcagctgtgagggagcccaggggaatggagccttagacccgggcagctgtgttggaatgaggttattctgttccgaaggaagagagggcgaatgaatgtcatgggaaacacacagagttagcaagagttccattgaacccggcaggcaagtgtgttctgttgtgacctcatctcttccttagatggtgcccacaaacatctgtgtgtactcaggcctgcccatcagcctggggtcacnccagggctgtgcaaaggctgagggcccctgggctcactgagaattcagtggactagtagtagta

SEQ ID NO: 253800 - DNA, 365 bp, Homo sapiens
caccttcctctaggcagatatccccaaggtcacccactgcacttggacttgcaaaccctggccactgtgcctcctgccccacgcagctgtgagggagcccaggggaatggagccttagacccgggcagctgtgttggaatgaggttattctgttccgaaggaagagagggcgaatgaatgtcatgggaaacacacagagttagcaagagttccattgaacccggcaggcaagtgtgttctgttgtgacctcatctcttccttagatggtgcccacaaacatctcctgtaggacttcccatcccagggctgtgcaaaggctgagggcccctgggctcactgagaattcagtggactagtagtagta

SEQ ID NO: 253801 - DNA, 446 bp, Homo sapiens
gaatgtgatgtcctcctggggaatgttgggaaggcacttgcaaagctattttaagaggcgtttggaactgtgagaggacagggaagtataggagaacatgccagaagccttgtttgtaaatactgtattctctttaggggctactcagtggcaaaatcaaacagatattttgccagacaataaagcagctcatctttacttcctaagagaattccacactcagtgaagatcaaaacttacaatgaaaacattttaatgaatcacagaaaatcagtttttctgtttgtttggttgttggttttgtgtctttcctggtgtgagctccccaagcttacagatgagctgatgctactagttggtaccagtaatccatcagaagacagatgaaactttgtaagagaaactgtatttgataaagctgaaagctaacttgcttcaatcttttt

SEQ ID NO: 253802 - DNA, 258 bp, Homo sapiens
gattttctccctctctgtgggttgtctgttaacttacagacattctttcttttgctgtgcagaagctttttagtttaattaagtcccatctatttatctttgtttttgttgcatttgcttttgggttattggtcatgaagtctttgcctaagccaatgtctagaaggctttttccgatgttatctctctttggaaggtttttaaaaaaaacctttgggacacagtgtcaattagttttgatgggcatccaaaaaaaaa

SEQ ID NO: 253803 - DNA, 448 bp, Homo sapiens
aaggtagcaaaattttttaaaaaatggaaaagagaaagattattgatgccttgtgaatacaggtgtccccaaaaggcctgagaccaaccttaattatcaagaatatggttgcagtggaaattggtaaacagctgaaattgattcattgattattcaacacttattgagcacatactactattattaatagctgtactgcgagcgctaatacttaaaagaggaagtcaggtgaaggcgcaacagctttatgctctttttcactataatctgtgaaatagtgtatattaaacaataatagtatatggaaaagcacatctacatgtgtcatcagttataatactgtggggctgtttggcagacaatagagtagataaatttattgaacattgggcctttgaaaggtatgtggaaattgtaaataaaaatggattccatgaaaaaaaaaaaa

SEQ ID NO: 253804 - DNA, 7233 bp, Homo sapiens
gcgggtagatcttgggccgggcagcagcagtcgcagagcggcgcggcggcggtggcggcagcaggcagcaggcatgaccatggcagcggcggcggtggtggcacgcggggccggggcgagggcagcgacagcggcggctttgcggggtggctgcgggaccgcggctcgggggcggccgtgtgcgggccccgcccggcccttgtgcactgcacccgggaccgccccggacatgaagcgctacctgtgggagcgctacccgggaggcgaagagaagcacagaagaattggttccttccattatgagcaacttgttgaatccagatgccattttctcaaacaatgaaatgagcctgtcagacattgaaatctatggcttcgattatgattacaccttggtgttttattcaaagcacctccacacgctgatatttaatgctgcacgggaccttctcatcaatgaacaccggtatccagcagaaatcaggaagtatgagtatgacccaaattttgcaattcgtggacttcattatgatgtacagcgggcagtattaatgaagatcgatgcttttcattatatccagctgggaactgtctacagaggcctcagtgttgtccctgatgaagaagtcattgaaatgtacgaggggtcccacgtgcccttggagcagatgagtgacttttacggaaagagctctcatggaaacacgatgaagcagttcatggacatcttctccctgcccgagatgaccctcctgtcctgcgtgaatgaatacttcctcaagaacaacatcgactatgagcctgtgcatctgtacaaagatgtcaaggattcaattcgagacgtccacatcaaaggaataatgtacagagcaattgaagcagacattgaaaagtacatctgctatgctgagcagacccgcgcagtgttggccaaactggctgatcatggcaagaagatgtttctcatcaccaatagccccagtagctttgtggacaaagggatgagttatatcgttgggaaagactggagggacctgttcgatgtggtcattgttcaggctgagaagccaaacttctttaatgataagcggaggcctttccgaaagatgaatgagaaaggtgtcttactctgggataaaatccataagttgcagaaaggccagatatacaagcagggtaatttatatgaatttttgaagcttactggatggagaggatccagagtgttgtattttggtgaccatatatacagtgacctggcggatttgaccctaaagcatggctggaggactggtgcaatcatcccagagttgagatctgagctcaaaatcatgaacacggagcaatacattcaaaccatgacctggctgcagaccttgactggcttattggaacagatgcaggttcacagagatgctgagtcacagctggttttgcaggagtggaaaaaggaaaggaaggagatgcgagaaatgaccaagagtttcttcaatgcccagtttggaagcctgttccgcacagaccagaacccaacctacttcctaaggcgcctgtcgcgcttcgctgacatctacatggcgtctctgagctgcctcctgaactatgacgtcagccacactttctacccccggaggactccactgcagcacgaactgcccgcctggtcagaaaggccccccaccttcggaacccctctcctgcaggaggcccaggccaagtagccaagggcaaaaactagaaactgtaactgcccctgattgggcaggcatgatggggttgacttcatgtgggtctgagtgttgcttttggaaaagatacagataagccttttgatatttattttgtaccttacggagaataattctcccaatgattaagacaggagctagcagcccacccctccagcctttccccccatgcagggctgaaaggcaagcttcacattggaactctgattttgcctttttgtttactgaggtcctggaacatcaggtttcctgggataggtagaccacttgatgccatgtctgtattctagcaggtcaagcttgaaaccgttcttgactcctccatggaacatttcctgaacatttacgggctatgcattgggaactgcaggggcacagtgatgggcaaagattagctgcttccagaaggctgatttcgtgggctccacaatggtaaaacgctgctgtgagtggcagagaggttccccaggtgatggccagttcccaaatcatttggtactaaggctttgacattctggcacatcacatcaaatagaacacagcctccctggaaggacttaagtgagaaagaacaagagaagctgcaactcctggacccttttgtcctcagtgtgtggttcctgcgtccttccccagggcaggagagaggagatgagagctctggtcaaaacctgccagctagtggaacagccttctatagagccttctgcaagaaacgagtgggtttgaagaaccaaaacatttgtggtaggtctcccaggagcttgttaaacctggaaacaccacctgagttggtttcatctgctcattggaagaaagaaaatgaaccaggaaaaagcatctttgtcatgaaatgctatgccatgccacccacccagttgaattggaatcctgttaaaacatgagatttaccagaaacagtcctttgtctagatggaaacaaacaagatcctggcttctctctaatgagttaccaactgagaggtgcttggattggccaggggaggaggaagatggccaccacaacttagccatgtccagccttctcttagatttcactcctgtgatgtttgtgcgactatttgggagtttgtatagtttgtttttttttttttgttttgttttgtttttttttagatgtctaagatgggaaagggcgaaggacattgaagctaaggaatagatatgacctagctaaccaagcttttctcatttctttctgttttgttttgttgagatggagttttgctcttattgcccaggctggagtgcagtggcacaatctcagctcactgcaacctctgcctcccgggttcaagcgattctcctgcctcagcctcccaagtagctgggattacaggcatgcactaccacacccagctaattttgtatttctagtagagatggggtttctccatggtggtcaggctggtctcgaactcctgacctcagataatctgcccgccttggcctcccaaattgctgggattacaggtgtgagccaccgcacctggcctgcttttttcatttctttctaggggcaatgcaagtggcatgtattccttttgttggagggaagaatccttaattgcacctggatttgtagtatccttcaatgtaaagtgcatatttactgcactctctgagtgctatgggaatgtctgctgttattagttatggggctgctaatactgttttaattgcatatgctatatcaatacttctgttcagattagcctgatctagtattgctaaaactcattttaagcttttgcggtaacttgtatatattcttaaatctaaaggatggcaggaacatgaggggagcttgtggagagtgcttgcttattcaacatttttattgtgataaatgtatgtaaccatctattgatgaaatccaagtctggcattccatgggctccttgccagatggcagaaacttaatgagttatatagcatcctttgtaatgctgcttgttatagttggaatgtacttgtgatatttggctgtatttaactataatggtgaaggtgaccctttagatccaataaggcttctccccatcttttcttctacattttgttatgaacacagtaaggcacagtagtatgttctttttttggaacagggtaggcattttgtttattgtttgcttgcttctaggtgttttcgccatcagggtgtattggaggctgacacttaatgggtgtgtgttacgcccagaactgctcggtgtcggggttctaaaagaatgcgctggtgttcttggcttcaagtttctgctttggagaagcagattcaggaagtaggtgttgcttaaaaataattcttggtttttatctaatcagatattcattgattacctaccaggtgccagttatagggtgttttgtttactcaagaatgaagtagaactatttttaaaacctgtttccatgagtgttcacgttaggtgacctaagctttgaaggagaaaaacattttctgggtatgaataatgagttttgtaatcaattcccagttagaagaatttcagtctctgggccattgagcttggcagtgttgagatctcccatgtgacagaagcctggcatctgggccaccaaggctcactgactgtgtaccttgcagactgtagacccatgtcgtggcggtaacggggccaaacacagtcattcccatgtgaacgatggaggcacatcccactttattattaatccttgtatatactcagtcaggacagattttaacttgtcgctgtcatgactttttttttttttttttgaggcaaggtctcgctctgttgcccattctggagtgcagtggtgtgatctcggctcactgcaacctcttgcctcccaggttcaagcaattttcgtgcctcagcctcccgagtagctgggactactggtacatgccaccaggcctggccaagttttgtagttttaatagagatggggtttcaccatgttggccaggctggtctcaaactcctagcctcaagtgttctgcccacctcagccttccaaagtgctgggattctgggtgtgagccactgtcatgcctggcctcgtcatgactcttttctctttttttttttttttttttttgagatttagttttgctctttttgcccaggccggagtgcaatggcacgatcttggctcactccaacctccgcctcctgggttcaagtgattctcctgcctcagcctcccgagtagctgggattacaggtgcccaccaccacatccagctaatttttttgtatttttagtagagacggggtttcaccatgttggccaggctggtctcgaactcctgaccttgggtaatccacctgccttggcctcccaaggtgctgggattacaggcatgagccaccgtgcccagcctatcatgactcaactgggatctggcacactgcactgggtgttttgttctctgatgtgcacattgatgaatgcatattggtacaagggaaacgaatctgttttcagccatttaaaaaattgtgttgtaaagcaaacaaaaatagcttgaacatttaaaaattactgtttaatattgtttgactgattttctaagaattatgtgaacaatgatgagtccagggcagcagccatcacaaatatgacagtccagcaaggcccatggaggtccctttggaagggacttgcacagctgattttctttttccagtgttgtttttacgggtgaaacgtggcttttgaaatactttagttgtttggcttagagctcccactttccccctaacatagtgcctgtctgttttttaaaacattttacccttcggcactattttctgctattcccattaatattatgtaacataaaccacttgctactgatttgggcatattacagactacaattactagttgctttgaatgcattggcactcttaattattgcaaaggagaattgaaaagtagtcttgtggtcctagttaatttagctttgggcaaactaagtggcttttcttctgtcctcttctcaaaaggccttttaagcagcagagactgggctaaatactggaactgaattccacttttctgcctgctcatttgctgccaaagaccacttggggctccttgtctagaatgctctaagacgaaatttggccagacacagggttccttgattgttctgttcaactaatagagaacctacattttgccttcttaatatcgactttcttttgtaccaggtttttctttctttcttttttgccttaggagcttagctcaaagttcagctaacctttgacactactagtgtcatttagtaacagtaatctttgacactactagtgtcatttaggagcttagctcaaagttcagctaacctttgacactgctagtgcgttcaagaaagggtagggaatgaagtacccttaatgcagggtcagcaaacttttcctgtaaaaggccagataggaagtatttttggctttttgggctgtttgcttttgctactactactgtgggaatgaccatggtcatggctgtgttccagcacaacttgatttaccaagacaagctgtgggctgtatttggtcctcaggctgtggcttgctagcccctgctctaatggattgtgttggcggcaatggcaagattcccttgctgagaacatgcagatgaataaccttatagctgggatgcagagaggagaaagttctgtaggtaataagtgcactgtattccctctgagctacttcctgggcatagttacatgtatggccagtgtgtgtacttgagccatcaggctcagacacttgttgaatatacctctcattgcattagtttgtaattgtgctagtgctgggtgctgagctcagctgcccggatgacctttccagactgaaggacatactcccctaacagctgggagtgctgctggctggccatttacttccagcccttatgaggagtttcccctgctgaagagccctgcctgccccagatcatacccccttcctgcctgtaacccttaccggctccatatggggtacaaaggtctggcctcctcaccccaacttgggaaaccctctggggccatcccagctccagagccccttgtggggtcagtgagacctcattgtggccacattacagcccagtgcctctccctgacaagcctgtacccagccggctcagcccacagcactgtcctatgaaccttcctgcacgccattctccacctcagtatctgctttcggggaacccaacctgcgacagtgcttctgtgtgttttcagtcctgcaggtttgaactctgactttggagacttttccagttatctcgtggaatgacagattgtgcctgtatgatatcaggcacaattaatgcaaattaggcagacctatttattctagatgtgaatttgctatttattttaaatgttgattttatgtgttatgtgactctgaacttattgccaaataaaagtttgaattgt

SEQ ID NO: 253805 - DNA, 381 bp, Homo sapiens
ctgcaattctgtccctccactaacgccctttatccaagcgttcatctaatggagcatcccttcatgagttcactcacccatccatttacccagaaaatatttgtgaaacatcagcttccatttgaggacacagtgagaagacagccatcagtctataaaccaggaagtgggccctcaccgcttcctagtttaccaaatctactggtgcctttgatcttggacttttagcctccagaactgtgagaaataaatttctgttgtttataagccacccagttcatgatggcactttgttatggcagcccagacaggggtcggctggcaaataggtcagcttggaccatggccagcttggtgtccacacaccctcctctccaagca

SEQ ID NO: 253806 - DNA, 239 bp, Homo sapiens
agttcctaggtttaagattttgcacatgtttgttctttactttcttgcaaagagattacttatttatatttcatcggaaaagttgtcctggaggcatttggaggtttatgcagttattctgtattaccaactaattgtttagaccagtactgtccaatagaaatataatgcaaactattaaatatgtaatttaaaattctctagttgccacattaataaaaatcaaacagatgaaactc

SEQ ID NO: 253807 - DNA, 586 bp, Homo sapiens
ttctcaaaaacaaaacaaaacaatttattttctatattcaaataggtagaagagcagattttgaatgttcccaacacaaagaaatgataactgaggaaatgaatccgctaatcaccctgatgtgatcattacacattgtatacatatattgaaatatcacctgtatcccgtaaattattacaattattatataaacatacaattattatacataaattaaaaataataaaagcaagaaagagttctttttggcattttaaacagaattccccctcttttgctcgtgaatttgagaggcagtgttcgaatcacagcttggttagcgtgtgacctcaaggaatgtttgttatctggggctgctcaaacaaaccatcccacaacttagtagcattaaatggattgccccaaacttagcgcctgtcgtgatttctttggaccagcgattctggaagtagttggctgtgcaattctggctggaggcaggtggagggatgctcctacagttttttttgtttttgtttttgtttttttttgtgagacacagtcttgctctgttgcccaggctggagggcagtgtctcgatctt

SEQ ID NO: 253808 - DNA, 588 bp, Homo sapiens
ttcccattcaaattcaagagtcagttatattactggtgagtatgggaccaatattccgcttctgctgccctcaccttcctttttcatttctcatgaataaagtaccatatcaccctataaaaggtatctggtttagtcaaggaaaaggaggtgaatcgttcattatttgccattttgagtagttcaaattctctaagagaagttaagtttcagaagacaacttactttggaagctgagtgaaagccaggaaaccagctttggatgccacaagcctcctcacagcctggaactgactctcaagttccgcatttgaagcaacgacatccccttcttgggacagtaatgctgttatggcattattgatcagtttttctttgttttctgagaagagaccctagattgtttttggtattacatctgggaaatcttttcttaaccccaagtcacaaagaagttgctttactttctgcattaggcttctttgcaagatgatgctgaagaatgtttaaatgtttacaagtcattggcctaccgatgttacaaaccaactttctgggctctatttacaaaggtaagggaacaggcta

SEQ ID NO: 253809 - DNA, 311 bp, Homo sapiens
ttttttgagatggagtctcgctctgttgcccaggctggagtgcagtgggtgatctcagctcactgcaacctccacctcctgggttcaagcgattctcctgcctcagcctcccgggtagctgggattacaagcacacgccaccacacccggctaatttttgtatttttagtagagatggggtttcaccatgttgccaggctggtctcgaactcctgacctcaagtgatccgcccgcctcagcctcccaaagtggtgtgagccaccgcacccagcctcctgactttattttctatcccttctgtcgtcttctc

SEQ ID NO: 253810 - DNA, 540 bp, Homo sapiens
ggacagtgtaacgtcttgaattgtatagattagagttctgttaagatgactaatgttaaaagagtgcaagcagaggaggaatcgaagtcaggagggctcacagagctgaggggcctggggtgtgatgtagacatgcatgcagggtttgggagtcaggctgcctgggtttggatccagcctagataaagtactcagctttattgagctacagattcctcttctgtaaaagaacgtccacctcataggtagcttaaaattaaatgtgataatgagtgccaagtgctctgcactgtgcttgatacgttttatgaagtcagtaaagattaaccactaattaattctgaactttgcttgagattgtaggctcctgtgggaaggactccatcgcattgatcactgggttttcccgtgccatccatagaactttgtgcttaataatgactcaataaatatgattagatggatggatgtaaaatatggacttgggagaaagaaaaattagaagaataaaaaataaatggaatgaataatgaaataata

SEQ ID NO: 253811 - DNA, 692 bp, Homo sapiens
ttttgaggcatacaaaattctgttttagaaaaccaggtttgcagaaactcaatcctttctctattgtcattcctgttcttcctgttaaccttttattttaatgaactggaaagagttagacttaggggatctggacttgggcttggctttatctctaataaatagatgaacttgtttttacctctattttacctctattgacctgagttttttttttttttaaatttcacaaaataaggctatgagaccagattcctttaaaatctgttccttgacctgtcttgatcattttatatttttctcttttcttttttttttttgagacggattctcacttactctgtcgcccaggctggagtgcagtggtgctgtcttggctcactgcaaccttcacctcctgggttcaagcagttctcctgcctctgcctcttgagtagctgggattacaggctgcaccaccatgttgggctaatttttctatttttagcagagaccaggtttcaccatgttggccaggctggtctgaaactcctgacctcaagctattggcctccctaagtcctgggattacaggcgtgttactgtgcctggcctcattttatatttttcatctgtggttgtcttgcctttcttccttaaactgcttctctttctccatggcaagtagggaatctctttaaaaactttggtac

SEQ ID NO: 253812 - DNA, 301 bp, Homo sapiens
taggtggtaatatggaaaccaaaacaaggcaagggcatggctaaggttgtaccgtgatccagtctccccagctgaattcagagaaccactcatcaacaccagggcaaccctgactgccccaggacccctccaatctgtggtccccacccttctgcctctcttatggaccatctctttccataggtcagtggcctccccacaggtgaggaagaggtaaggaagggcaggggatgatggttagttaagggtagggcgagagatcctccgtcaggaacctctactcagctggctttgtttttct

SEQ ID NO: 253813 - DNA, 699 bp, Homo sapiens
gtttcagagaggatattttttcttctcatatttttgaattttcaaattttctataatcgagcatgcattacttttgtactagaaacattgtataaaaattaaaaataagaaaatagtatcaccaatgacttatatttgggcacatatgtgtgcacaatgagatgaggtaccactcattaaaaatagtgaggggggtactttgtagattgaaggtagatgaactttggtgccaatgtcagcagtttttttacagacttctcacaaatctatgaggcatgcagtgataattcttagtacaagcaattaaggttatttcagcaaacagctgtctcacaaacacttccaagattcctttgaaggttgaggaatgttgatcaaagcaaactctcttgtgaagcttcagagacatttcagcaggacgttaaaacaaaatgtggaaaccgatatcaacttagctctccatcctgatgtggtttatcctattggcacaaagcttctgatattatctgtgcacaagggtctagatgtaatacattgctattgtcatagcaaattcagcaaaatacctatcagtgtatggtccacaaatgcttagaaaggaaagcatcgcatttactatgattaacttctctttgctggggaaaaatagaactcacaatcttcaagatggctgcatttgaaatagcctttcctcaggag

SEQ ID NO: 253814 - DNA, 478 bp, Homo sapiens
cgggctcccctctaatcgtccaggacaaactccatgtagttccactggtcaacggccagctggcctgccggtgcctgtcggtgtgctcttggcgtcctctcgacgtccagccgcttgtgtgttcttttgccagtgtgttcgtctcaacgtccagatcttccaaaataactgaagaatgtgctggaatgcaacatcctgagatatggaggaactcactggagcagcctcattctgttcctttccttcctagaaacagaatgttcttcttcatggcctactatgccatgagatccccaaggtataaaacccaattctgtccgctttctggggtccctcaggtgtgctgcaagtggggcacagcagtaagactctatctgcctttagcagatggagtggtggggaaccagctcatcatgaatcctaggcttctgttgtcccttgcttcctatctggaagtaataaaccaacttcatgtaac

SEQ ID NO: 253815 - DNA, 756 bp, Homo sapiens
agaagaaagaaagaaagaaaagaaaagaaggaaagaaaaaagaaaggatgaaaatacataactcagactagagtcagacagaagggagttccattcccagcccaccacctgtcagatttggggcaagttatttaaccttttttgctcctcagttttttttaatccctgaaatggggattggaattggaacattataggattgtcatggaaattcaaagaaagaatgagtggagaatgtttgaaagagtacctaccatatgatgagtgcccaatcaattgtagctattgcaattatgtaaaagagaaatgtgtaatagctttttgtttggtgtattcaatatggttttcaaaataaagaccaatatcataaagttttgttgctgtttctcataactacatttaaattcccggttactttaagccccctttttttttgtcttctgcatacctgcaagtacctcatccattcttccgtaatgtttttctcccttagccaataccattccaatgaataaatgctcaagaccaaatgtgaacagaggtttaggctgactttaggactgagtcactgtgatctgtttcagcctcctggagctcttttttcctccatgctcatttaccgaggagtataatgtttgcatcatacctgctgttgaattaccatgtaacgattaatgagatatgtttattaacaagatatgtttatgaaatgccttatgtttgtgatcacttgtaataaaacattaataaagaata

SEQ ID NO: 253816 - DNA, 490 bp, Homo sapiens
cactgaagcaaaattaggtgtgattaaacagaaacaacagatggtatctttctattgggaaactaatcgtttgtgtaactggcaggatgaaacatcagaaaatacttgacacattttgctagagtcctaaagggcacctaggaagactgactccaaaatgtcaaaataaggaaaatacataactcagactagagtcagacagaagggagttccattcccagcccaccacctgtcagatttggggcaagttatttaaccttttttgctcctcagttttttttaatccctgaaatggggattggaattggaacattataggattgtcatggaaattcaaagaaagaatgagtggagaatgtttgaaagagtacctaccatatgatgagtgcccaatcaattgtagctattgcaattatgtaaaagagaaatgtgtaatagctttttgtttggtgtattcaatatggttttcaaaataaagaccaatatcata

SEQ ID NO: 253817 - DNA, 365 bp, Homo sapiens
aatccactgaggattatatgtgtgcttttgttttttcctattttaattaacaaacaaaccaaataaagtatggttctaggcccagtgtaggtagaaaatagaacagtcaaggaggggactaatatagatagttatgtctttgattgatggcagaaatgactggataaaaagttaactccatagcacaatcttacttttaattggcgccaacacatatttagaatgtgtctggaaggaccatctgctttggataggtcttgtgtaatcttgtaatggtaaaatattcataacttttttgatgacatactgtaatataaagcacaactagaccaaatataattttaggaggttgtagtaaaaaagaa

SEQ ID NO: 253818 - DNA, 458 bp, Homo sapiens
cccaccgtgggtagagtatatttccccaccacactgatactggggttggtcatgtgacttcctctggcatatgggatgtcagcagatgtgaacaacagatgtaaatgtgcccgcagggcttagctgagctctttcactcaagtattctgccaggagaagagcatgccccagggaattgcttacccttatcctgagaattatcaaatgtggagcagagtaaacccaaccttggatttggcaccgacagaacccaaccaatccaacagcctgaagcagagtcatttatccaagtcttgaatggaggatcagctaagccaaactggacctttagaaccctgagcataagaataaaggcttattgtgaggaagcaagtctgagttttgggtggtttgttacatggcattattatagtaacagctgtaatcccagcattttgggaggccaaggcaggaagatt

SEQ ID NO: 253819 - DNA, 312 bp, Homo sapiens
  misc_feature (31)..(31): n is a, c, g, or t
  misc_feature (62)..(62): n is a, c, g, or t
  misc_feature (66)..(66): n is a, c, g, or t
cacaggcatgaatgcaggagacttaaagccntaaatgatcatggagaacagtcagtaaagtnatcngtgcgtgggctggtgtaggcataaaggaatggtgggaaatacggccagctgcagagtgaatgtccactaagggggaaggctgtttttccaccagcgtgaaagaatgttgtccctttgcatttcatttcaagaaaagctggaagtgtgaattttaaaaatgtaaaatctatttgttttaaatattggtcactagctcaaaagtttttaaaacactattcaatacccaaatgcaatagcaaaaaaaaa

SEQ ID NO: 253820 - DNA, 474 bp, Homo sapiens
aagcaagttcagagatatttttactttcagttcctaggcaagaaggacatgagttgggagggtagtcctctgtccctgtgtcatgtgaagcaggaatgaagagttgggcagagagagagtgaaaagcgtgtagcaactagcaatatatataagggaagttcaagagcaaatacctgaatggtcctgataaaggaagctgcaagaaaatgtggagcctagtctgttaggcaggagggatgcctctaagttcttatttctgaccactggcctgagccatttgggtatagtatagaactggaaactctgtcaagagtagcggagccctgcttctggcatgagaaaattaaatgttcaaaatgaatgtggaagcaacataaaattaaagaattcactacaataagaaagatagaaaataattgaattgtgtgtttaacttaagaaaatagaataataaccgcagagtaagtgcactga

SEQ ID NO: 253821 - DNA, 414 bp, Homo sapiens
tacctcaagtaatgagaagttgattgtaaagatgcttcatcaccaatgatttgattgattgcaagttacaaaaatcagactcacctgctttctttatttatatataatcaaaactttatgctgtaatcccagcagtttgggaggtctaggctggtctcgaactcctgtcctcaggtgatccacccaccctggtctcccaaagtggtaggattacagacatgagccaccacacacggcccagtttaaatgaattttaaaggtggtctagatcaattttattattttgcatgttaagatgcaaggactgttcaacacacaaatcaataaatgtgctacctcacatcaatagaatcaaggtcaaaaactatatgatcttttcaatagatgctaaaaagcatttaataaattcagcat

SEQ ID NO: 253822 - DNA, 4852 bp, Homo sapiens
  misc_feature (165)..(165): n is a, c, g, or t
  misc_feature (1005)..(1005): n is a, c, g, or t
  misc_feature (1053)..(1053): n is a, c, g, or t
  misc_feature (1142)..(1142): n is a, c, g, or t
  misc_feature (1234)..(1234): n is a, c, g, or t
  misc_feature (1584)..(1584): n is a, c, g, or t
  misc_feature (1731)..(1731): n is a, c, g, or t
  misc_feature (1907)..(1907): n is a, c, g, or t
  misc_feature (2144)..(2144): n is a, c, g, or t
  misc_feature (2334)..(2334): n is a, c, g, or t
  misc_feature (2544)..(2544): n is a, c, g, or t
  misc_feature (2682)..(2682): n is a, c, g, or t
  misc_feature (2957)..(2957): n is a, c, g, or t
  misc_feature (3238)..(3238): n is a, c, g, or t
  misc_feature (3423)..(3423): n is a, c, g, or t
  misc_feature (3430)..(3430): n is a, c, g, or t
  misc_feature (3460)..(3460): n is a, c, g, or t
  misc_feature (3472)..(3472): n is a, c, g, or t
  misc_feature (3495)..(3495): n is a, c, g, or t
  misc_feature (3516)..(3516): n is a, c, g, or t
  misc_feature (3531)..(3531): n is a, c, g, or t
  misc_feature (4119)..(4119): n is a, c, g, or t
  misc_feature (4293)..(4293): n is a, c, g, or t
  misc_feature (4357)..(4357): n is a, c, g, or t
aaaagaaatgatgaaatgatattgaaatgaaattgaaagatgagatgatgagatgaaatggtgaaatgttgaaatgaaatgatgaaatgaatagatgtgacatgaaatgagctgaaatgatgagatcaaatgaaatgaaatgagattaaatgatgagatgaaaantgatgagatgaaatgctgagatgaaatgagatcagatgaactgagatgagatgagatgaaataatgaaattaggtgaaataatgaaatgagatgaaataatgaaattgaaatgagatgagaagaaatgagatgaaatgttgtaatgaaaggaggaaatgatgagatgaggagatgaaatgatgagatgaattgagatgaaatgagatgaaaaatgatatgaaaaatgatatcaaaaatatgagatgagatgaaatgagattatatgaaatgacataatgaaataaatgaaattagatgaaatgaaatgaaatagtgaaatgaaatgatgaaatgaaataatgaaaatgaaatggaaatgagatgagatgagatttggtgaaatgatgagatgaaatgatgagatgatatgaaatgatgagatgagatgggatgagatgaaatgagataaaatgatgagatgaaatgatgagatgaaatgatggggtgaagtgatgcactgtcacgtgtgtgtctattctttttcccaagcaacaaaaattataattcattaattttaattttattatttaagaatattcttaagagttgaaggaaaaataatatctgtacattatgggttacaatctaagtataaataatacataaatatattaaaacttacaaagaatatgttttggaatcgaatataccatgcttctgtgatgacagttatttcatgctggttgtcacaattttacatgaaaaactaatgaaaaaatgtttttaactgtttctaaaaataacagtttccaaaacagttttacattcgaaatatgaaaaagatgtctttgtgttccttnatctgatgagattttcacactctgcacatgataattgttagatttttnttgtgttgataaattgtatatcaaataaaaaatgttattacctcttaaattaggatttttaggtgatataggcagaaaggacggcaagnttttataactttgtctaaatgaactttctaaatgcctgagtattaaaagatagcatgtctataaatcacaatgtatatattactgtatgacntaggaccaatcaaaaccgttacctctgataacattatattgtgcccagtataaaatagatataataatacctcaaacttaaatccgggcattgtcattgaatatcttaagaatatgcaacaaaggtgcttttaaaaatacaagctagtgattgtaccaaatttgtaaatcacataggatagtgggtcattttaagaatattagttatttcaatctataaacgtggatgtctttccttttttgtgttttctttaatttctttcattaatatttgtcatttttgttgtcgaaatcttttacttccttggttaaatttatttctaagtacatttttgtagctattgtaaaagnaattgctttcttaatttcttgtttcagctagtttactatcaatatatagaaatgctactgatttttgtatgttgatttatatcctgcaactttattaatttcatgtatcaccctaagaagcttttggtagagtcttatttttttccntgtataagatcacattgtctttaaacagggacaatttgactgtctcctttccaattcagatgtcctttatttctttctctcacctaattgtcctggctaagactttcactatgtgaaatatgattggtgagaataggcatccttttcttgttccagtaaaatctttttcttgttcncagtaaaatctttcaccttttccacactcagtatgatcttagttgtagatttgtcctttatgtccttctgttttaaggcatatattttctatactaaattgttgagaggttttttgtcatgtaagaatatttaattttgccaaacgcttttattgtgtttattaatttaatcatatggttttcagtatatatccaaaggaaagaaaaccagtatatcaaagacttacctgcaccccnatgtttattacagcactattcacaatagccaagatatggaatcaacaaaagtgtccatcaacagatgaatggataaagaaatgtgacatacatatataatggaatactatttagtcataataaagaacaaaatcctgttatttgtggcaacaagaatgcaagtggagggcattatgttaggtgaaataancctggcatagaaacataaacaccacataactacgtgttctcacttatgtatggaagctaaaatttttaatctcgtagaagtagatagtagagttttggttaccatatcctggaaagagtaggagaaagaagagtataagaaaaatgtggttaatacatacaaaattacagctggagagaaggaagaagttctagttctctacagcactgntgggtgactgtagttaacgggaatttattgtgtgttttcaaataactaaaataaaagattttgaatattctcactgcaaagaaataatacatgatttaggtaatggatatgataatgactctgacttgatctttacgnattgcataaatatatcaaaatatcactctgtaccccataacatgtacatttattatatgtcaattaaagtaaatttaaaagagaaaaaatgaggtaaaggtaaatatacataatttaattactttttcttctataaaacccgagtcagtaccaagaagagtcaatttattagttttctaaaataaaaaaaatcaaaatcaccaaaaaagagcaatatccaagaaaacattgaaaatgaaacacaacatttagtaagaatagaaaacttgggcacngtatcaccctgttcctagataccgatttactgatggccatttaaatagaattttattctatctaattcatttatactcccagagttcgaaattacattttacctacaataaatgagataacacttgtaaattatatggtactctgcctaacacacgttaataactcaatacatgttagcaataaacttttagtatagtagtcaaagtattaatttctcacattgcaatttccttcaaagacatgaatacaacctttctaatgactccttgttcatcaaganacctcttcaaattattctatttgtttcattcagtatattatctgtgtataccgatattacactcttttctttttttgagatggaatctcattctgttactgatgctggagtgaggtggcatgatctcggttcactgcaacctccacctcccaggttcaagcgattctcctgtctcagcctcccangtagctnggactacaggtgcataccacgatgcctggntaatttttgtanttttagtacagtcagagtttcancttgttgtccaggctggtctngaactcctgacctcnggtgatccacccaccatggcctcccaaagtgctgggattacaggcataagccaccgcacccagcctgatattgcactcttggattttgaacactgaatatctttttgaaagattacacctctttacttctttgtgcttcagaaattattttccttcaagtgttctaagagtctaatgaagaatgaagtcatgttttatcacttttgtccttaaagatttcagacatgctgaaactgattgaagtatcatttgctactagatagattaattatctccagttgtaggagtggatacatctttaatggtatattttgggttattgtcttatttttgatgcagtattctataaataatttattaaacctggcatccttgggtgagcatagatttttcaactttggtgttatattgtgtttgcttttaaaaactgcttctgaggccaggtatggtggctcttgcccatacccagcactttgggaggccaagatgggtggattacctcaggtcaggagttcaagaccagcctggtcaacatggcaaaaccatgtctctactaaaaacacaaaattagccaggcatggtggtgcntgcttgtagtcctaaccactcgagaggctgaggcaagagaatcacctgaacctgggaggcaaaagttgctaggttgctgtgagccaaattcgcaccattgccctccagcctgggtgaaaagagcaaaactctgtctcaaaaaaaaaaaaaaacccaccaaaaactgcttttgantggagttgtacatataatttttatgaaaaaaattaacaagtgcataagttcataatagaaaaancaataatactccaggcacaagttagtactaaaaaaattatgttgaatattctctaatacaacatgctttttcccttcatgaacaatttgtgttttactgagaagagtcattgtttatggtagacattagactacagatgaatatgtactttaaacactcttagttgctttcttaattttatatctgctgctttatgcttctgtttattttcattctttccaatgtccacattctagtaaatttgaatattttaatccaagtttatatactatttaatattgcttgtatagtttagtatttttaagactcaaaaaggtttacagaaagaagaaaaagatcaacatgttattaatcatttaaagatcattttgaaatctttgacctttatattttaatgaataaaatattagtagttattagtataaaataatttatgtcttttggacttagcatccagtatttcttttttaataaagaaaataattattctcttgc

SEQ ID NO: 253823 - DNA, 460 bp, Homo sapiens
gtgacagttgatgacttagatgatggagcgaatggagagatcgaatctgtttccattgtggctggggatcctttagatcagttcttcctggctaaggaaggaaagtggttgaatgagtacaagattaaggagaggaagcagattgactgggagagctttccctatggctacaatctcactcttcaagcaaaagacaagggatctcctcaaaaatgttcagcattaaaggcagtctacattggcaaccccacaagagacactgtccccattagatttgaaaaagaagtgtacgatgtgagcataagtgaattttcccctcctggtgtcgtggttgctatagtaaaattaagtcctgaaccgatagatgtggaatacaaattatctcctggtgaggatgcagtgtactttaaaattaatcctcggtcgggtctgattgttacagcacggccactgaatactg

SEQ ID NO: 253824 - DNA, 456 bp, Homo sapiens
gtgacagttgatgacttagatgatggagcgaatggagagatcgaatctgtttccattgtggctggggatcctttagatcagttcttcctggctaaggaaggaaagtggttgaatgagtacaagattaaggagaggaagcagattgactgggagagctttccctatggctacaatctcactcttcaagcaaaagacaagggatctcctcaaaaatgttcagcattaaaggcagtctacattggcaaccccacaagagacactgtccccattagatttgaaaaagaagtgtacgatgtgagcataagtgaattttcccctcctggtgtcgtggttgctatagtaaaattaagtcctgaaccgatagatgtggaatacaaattatctcctggtgaggatgcagtgtagagtgctgtagctgtgtgttccaataaattattttgtagggaaaaaaaaaaa

SEQ ID NO: 253825 - DNA, 319 bp, Homo sapiens
caaggagccagattctctcactttaaacaagaaattgagaaatgaagctggtgattgagggactccaaaatctggccaagtagtataatgaaagtgagatattgttctggtttcaccactattgatattttctaattgtggtagatgtactgtataatacgacttcacatcttctgacaagagcttcacactgaatcctgtttctttaaacagcatctcttggtcatctgttggccagtactgtgcacatttaaccaattctttctccataatgcggttcagcatgacaactgctttggtcttctgctgccaaaccata

SEQ ID NO: 253826 - DNA, 635 bp, Homo sapiens
attgcctaatggtataaattatcttgttttgtcagcacaataaagtttattttattggcattttaaggcaccatctttatgttggatatttgtatcaactaaatagtggtaggtaggtcggtcgatcgatcaatcggtaggtaggtaggtagatagatagatagatagatagatagatagatccagcattttggtgtgtagaatcttatacttcatagctactgctacttgatggaaatttatttagcacatatacgtattagaagattgtttaccaaatacactactatgggagattttgagcaggtaatattttgtaaatgccagttagcagataaacaatagtatgtgtatatatctatatgaaaatacctttggccaggtgcggtggctcacacctgtaatcccagcactttgggaggccgaggtgggcggatcacctgaggtcaggaggtcaagaccagcctggccagcatgatgaaaccccgtctctactaaaaattcaaaaattagctggccatgctggcaggcgcctgtaatcctagctactcgggaggctgaggcaggcgaattgtttgaacctgggaggcggaagttgcagtgagccgatcacaccattgcactccagcctaggc

SEQ ID NO: 253827 - DNA, 722 bp, Homo sapiens
ctagaatctagatataaaaaatttatatttgtctctatattctagaatctagatattaaaaaaaggtagaagtttattataatgaacagtcattccctcatttattaattcaaattaactagttatacctattatgtactaggtatgcctttagatgctacagattaagcagtgaaaatgacaggtatatttttggtatttgttcttcaaatatgtatctgacttgctcttctctacatagctatttattttagattaactcatttgtctcaatggcacaatcgtaagtctacttgaaaagactgaacaaatgtgtgcatttttggtaagaagccaaaggtacctcggacagttctttgttcctctgatgacaggaagtcctccagagatgtaactactcttaaaactgacaaatctgaagttgcaaaccatagatattatatatgcatgcagagtcaacacattttctaggcgactgctttatgtcacaatactaggtgctaggaatacaaagaagatccagacatctcacagccaacgctccaataaagttcagtgggaagacaataatgtaaacccaaagggtaatagatattgtgagagaagtatgttgggtagcaggagtaccaaaggggaaccatgtttttatttgatggagaaataggtacggggacaagaaatttccacagagaaagccctttagttgagccctgaagtatgaa

SEQ ID NO: 253828 - DNA, 554 bp, Homo sapiens
ccatattaaattgtagccttttgcatgcgggtattatataataatgaatgggtggctcctagtagcatgcaacccatgactgtttacttccctaaaagggttaggtctgtgtcctgcacagtgttcaaaaccattaaatgtgttctttgtagcaggatggtacacagccatcagcagaatgagttaaaaccaacaatgaattcaatataccaggaaatagattgttagtagggaatggcattaaaggaaaaaaaaattagataagatgcattcaaggaataattactttcactctgctggcttaatcagtgaaggaacataaaaggaaagctggcagtgggtcttggtaatatatgaactatattagagtgccagaaaaggagacctcagaagttaagcataggttgccaatctgctacaattatttttcccaccaatctgctcaaaatgattgtatatagtattcttaaaaccatgtgtcttggtgcagaaatattgacaaatgctggccagctttatcttcctatatccttcattaaaagtatatgcatata

SEQ ID NO: 253829 - DNA, 2555 bp, Homo sapiens
acagagctaccctagtgtccccaggctgaggaggtagtgactggcatacatggctcagtttgtccaggtcctggctgaaataggtgactttggtcgcttccagatacagctattgatcctgctgtgtgttctcaacttcctgtctcccttctacttttttgcccatgtcttcatggtcctagatgagccccaccactgtgcagtggcttgggtgaagaaccacactttcaacctgagtgctgctgaacagctggtactgagcgtgcccctggacactgcaggtcacccagagccctgcctcatgttccggccaccccccgccaatgccagcctgcaggacatcctcagccaccgcttcaatgagacgcagccttgtgatatgggctgggaatatcctgagaacaggctcccatccctgaagaatgagttcaacctggtttgtgatcggaagcacctgaaggacaccacacagtcagtgttcatgggtgggctccttgttggcaccctcatgtttgggcccctctgcgaccggattggccgcaaggccacaatcctggcgcagctgctcctcttcaccctcatcggcctggccacagcttttgtgcccagctttgagctctacatggccctgcgctttgctgtggctactgccgtcgctggacttagcttcagcaatgtcaccctactgacagaatgggtggggccctcatggaggacgcaggccgtggtcctggcccagtgcaacttctccctcgggcagatggtgcttgcgggactcgcctacggtttccgcaactggaggctccttcagatcaccggcactgcgcctggcttactgctcttcttctacttctgggctctgccagaatctgcacgttggctcctgacccgtgggaggatggacgaggcgatacaactgatccagaaggcggcctcggtcaataggcggaaactctccccggagctcatgaaccagctggtcccagagaagacaggcccctcagggaatgccctggatctgttcagacacccccagctccggaaggtgaccctgattatcttctgtgtctggtttgtggacagtctggggtactacggcctgagcctccaagtgggggacttcggcctggacgtctatctgacgcagctcatctttggagctgttgaggtgcctgcccgctgttccagcatcttcatgatgcagaggtttggccgcaagtggagccagttggggaccttggtcttgggtggcctgatgtgtatcatcatcatcttcatcccagcagatctgcccgtggtggtcaccatgctggctgtggtggggaagatggccacagctgctgcctttaccatctcctatgtgtactctgccgagcttttccccaccatcctccggcagacaggcatggggctggtgggcatcttctcacggatcgggggcatcctcacaccacttgtgatcctgctgggagagtaccacgctgccctccccatgctcatctacggcagcctccccatcgtggccggcctgctgtgcaccctgctgccagagacgcatggccagggcctgaaagacaccctccaggacctggagctggggcctcacccacggtcccccaaatcagtgccctcagagaaggaaacagaggccaagggaagaacttccagcccgggagtggcctttgtgagcagcacatacttctgattgaggtctctaagagctggaccatcagcagcagggagctgcctaaacacctccttggatatggccaggacccacagggacacagggcaagaccagccttgcttatggaggcaggacaccacaatctggcccatggctgtcacctcctgccgagtccaatcccagactgggaaccaccatctgagacaggacctcccggcctccttcacctttctcatctccagagccctgcccccaatactctgtctgggttaggatcttgggtatgtcttggaattaacttgtcctctaacaatcttcatggggtatggctctcttgatctcctcaatctggagtcccctgccctcaaaacacagtgatgttcagaacagaacacaaggtaagccctttccaatttgtgggaacaggaggggagaggaaacaaatgtgaagttgtggactctacccaggcaggtggatgaaaatgctgtggataaaaggaaggttatgattccttctagcggatggaccagattcctctggctaacgtatggccccataggtcactgggtcatacagagagaagattcagttcagcctaaatcaaaacttccaccttgtgttcacttcaaagatggcccaacccccgccctacactcagctcatgcctaacctatgtgtggctcagggaccagcttggggaaggaaaggaggtttgttctgctccccgcctcaccccgcctcctcctgctcatgctcagctgcttctggaccttccagggcccatgcagggtgagggaaagggtagaggtcttttcaccgagctgctgctggttgcagttctttctggtgcacattggctaatgccag

SEQ ID NO: 253830 - DNA, 281 bp, Homo sapiens
aatcaggtaaaaatcataaaattaaatcaaagctatatgttttcattcagtttttaatgcaaatagcttatagatgcttacactgaaacatctcaagcactttaacaggtctgcctaaaattaggatgatttcagttgtaagaaacaaaaatatttgttttggcttaaaccaatggtgtctaatcttttggcttccctgggccacagtggaagaattgtcttgtgccacatataaaatacactaatgctaaagaaagctgataagttaaaaaaaaaaaaaa

SEQ ID NO: 253831 - DNA, 190 bp, Homo sapiens
aacagacaccagggcctggttgagggtggagggcgaggattgaaaaaaatacctataagccaggcgtggtggctcgctcccgtaatcccagcactttgggaggttgaggccagaggatcgcttgagcccaggagtttgggaccagcctgggcaacatagcaagactccatctctattttaaaaaaaaaaa

SEQ ID NO: 253832 - DNA, 120 bp, Homo sapiens
aaagaggtggggtctcactatattgcccatgctggccttggtctcctgggttcaagtgatccttttgcctcagctgcctaaccacaattttaaagtgcacatttccttctaattcaagat

SEQ ID NO: 253833 - DNA, 349 bp, Homo sapiens
gggtgtatttttctgtcattgtgccaatgtcacacgtcttgatttctctaactttagagtaggtcttgatatctgctagccttttggctttaagaggggcatggctattctatcaccaatagatgacaattgttaactttgttttatgcttctaaaagtataattttactgaatcttaaatatgtatattcaacaaaatttagattacactgtacatttgtttagtaatctacatattttacctagcttgaatatttcccctgtgctcaaatattcttgagactttttactttgaaataatttcaagtttacagtacagttgcaaaaatattacaaaataatgccctca

SEQ ID NO: 253834 - DNA, 702 bp, Homo sapiens
aatatatccctccagcattaacatcaacacagactttaagtgtgataagaaacatttacagtctattctctctaaagcctgctactgggaggcattctgcatgataaaacctaggtctccacaatccccgtcttaatccagacactcttttctattgatagtagctttttcaactaattgcccatcacaacagaatatatttatttatttatttttattatacttaaagttctagggcacatgtgcacaacgtgcaggtttgttacataggtatacatgtgccatgttggtgtgctgcacccattaactcatcatttacattaggtatttctcctaatgctatccctctcccagccccccacaccacaacaggccccagtgtgtgatgttcccctccctgtgtccaagtgttctcattgttcaattcccacctatgagtgagaacatggggtgtttggttttctgtccttgtgatagtttgctgagaatgatggtttccagcttcatccatgtccctccaaaggacatgaactcatccttgtttatggctgcacagtattccatggtgtatatgtgccacatttccttaatccagtctatcattgatggacatttgggttggttccaagtctttgctatcgtgaatagtgccgcaataaacatgtgcgtgcatgtgtctttatagtagcatgatttataatc

SEQ ID NO: 253835 - DNA, 372 bp, Homo sapiens
  misc_feature (2)..(2): n is a, c, g, or t
  misc_feature (11)..(12): n is a, c, g, or t
  misc_feature (88)..(88): n is a, c, g, or t
cnggggcatgnnagtctccttgaggaataaccccctttttttccttagtaggggggcattcaactaactacactgttctgaagtctgnaagaggagcaggctaggacatctcactgttcaggatacagactcttcctcaacctcctggtggttggtatggtgcacccatgctctcacctctgcctggcttgtggactctgtccttatattccatttagggtccctctattctctccttcagttgactcacctctgccctccagcccttactttggccccccatggcctgctttcctccctggctagccctcagctcagatatgataaccctaatatcttttcatgaactcatgatttttatctttcacataa

SEQ ID NO: 253836 - DNA, 446 bp, Homo sapiens
ggcatagttggagaggccaagatccaggaacttgccctcctggtgcagctggtggcaggcactcagtgtctcttccaccggggtgctgtggtctggcctgagcaggtagaagaggtccactcggggacactgcagccacttcagtgacgtctccagctggaaccggagactgtcaggtttcagggagttcccaaacaatggattggccttggtatcaattttcaggccacccaggatggtcttggactggctgtcgctgtacacgaaggccgtgtctatcttggtgtggccgtgctccaggaaggcgcgggtgactacggcgccccatctccatggcacccaacaccgtggagggccgggacatgatggcggcaacaggagactgcgacagcccgggagcaacgtgcagtggttggaagcatcagctccctggagttggcggccgc

SEQ ID NO: 253837 - DNA, 346 bp, Homo sapiens
ttttaaaacaataaataaattagaaaaaaaacagtattctcagtactataggacctgattaagtttgtgggactgaaaatgatttatgcttttcaaatatggaatctagctgtaaatgttgctgttatcttttggttggggtaggggaggcagctgcagttactatggtggtagtggaatgagtttggagtccaacatgtctaactggtatgtttggatagaaatttccgaaagacattgagaaatacagttaaagctgtatttctagcattacctataataatttttaatttacttttgatgtgatgtttttggatttgccgtattcttaagtgatttttacaca

SEQ ID NO: 253838 - DNA, 431 bp, Homo sapiens
caacttgagaagtactggagcagaatgtgtggctgcctgcagaatcttgtgctgggtgttggagtcccagggagctagaggtagcagggactcagggctctgagactggcaacagtgtgcctgaggcattgtctacgctctgcagaagaaaggtgggaataattctaggagcaaagcaaggaaagtgggtgcagagagaaccgatggaatttctttaggcttgaaaacttgagggggttgtgaagagaaaataagttgttggagaaaaaaatccagagtagaggttgtctaacatgtatgaaacatgctgtttttgttagatcatcaaagtgactttagagaccgacagtggcagtacatgccctgttacacaaagaggtgtttccttccataaccactgcttggtttaaaaaaatttaaaaagaagcaaa

SEQ ID NO: 253839 - DNA, 269 bp, Homo sapiens
ttttttttggatttaaaaattatttcctattttcaaatgatttaaaccttttaagaaaataaaagttgggcaaatttgcctccaccaattatcacaaaaattaactttgtagtttatataatccataactattacctataaaaatctataaatgtactggataaataatagagaaatcaaaaatatcactttaggtaatacacccatttaaaattgaatccatttccatggagaaaggaaaaaatacactgtagcatttggtataaaag

SEQ ID NO: 253840 - DNA, 673 bp, Homo sapiens
agcaatgattccaaagtatgtgaagctagcctcacagattgaagtccttgaaatcacactttccaaacagcttcaaatgaagaacaagctcatacaaactcaagagtgcttgatcgatgagcaactccagcaagtgaagacatcacagtctggggcagtgcatggctgacccctttacctgttgaactagctgctttggcccttgtttcaagggaaaagggctctagaggaattgggggtttggtcctcttaaggtctgaggtctttgggtctctgggtttggtcaggcccttagggactgtgggcttaggctgagcaagggtagccttgggacatgtctcaaactctggtgaagtcaagaaaggccacagagtggaaaatccagaatctacatcccattcgtgccagagccctgttccatccactctctgagcagatgtctccctacgaaggcccaagggactcctgaaaagcaggcacgaatagaccgcagagttaaacagtgcaagggcatgctgtggacccacccactttgggtaaatcttttgacttctctgtgaatcagaaaatcaatgggatagactatgcctcacagggccaccctagggatcgaataagatgatggataccaaagtgcttcattaacaataaagtgccaaaaagagttactact

SEQ ID NO: 253841 - DNA, 460 bp, Homo sapiens
ttcaacacccagctcaaatcccacttctgtaaacactttattctccactctagtctaccccttattatctgtatgattattttggtataccattagtaccttgtaagatttttcgtatttttttcataaactacttttgtaattttgtattcagtttttgagtgggtaatgtgcacatggtacagattttaaatttacaaaaataccctcccatccaattctatccccagcatccagttttcctccttggaagcaaccacttttacaactttctgtgttcttcccagtatattctatgcctctcttagagagagagagagagaatacacaaacacaaggagaatacacggatatacacccgcaaatgttggcatacaacatggaaatcctttggcccctttggacttctctttacttaacattatggacttttttttagttgtggctaaaacaaaaaata

SEQ ID NO: 253842 - DNA, 474 bp, Homo sapiens
atgaaatgactgttttcacatatgtggcaccaggcagcccagggatgccggtgaaatctctgggagaacggcatgttccagagagccacagcttgctcagcctggaccccagaacgaaggaggcatcagaagctgagccacccgtggccgacaagaaacctgagtgggaggggaaacttggttgctgtgatcgacccaggcttgcgagttgttttggcaacacagcctagcaagagccgaccaatatgtcattgatgaaagaaagtcaacaggcgtgtagaaggagctgtctactgagcatgtctgcacttttctgaattatgttgcacttgagtaaaaagtaagcaagcctgtctatttactttaaatgatgtgtgccagatatgtacagtatgcagagttaagaaggtgccaccccaaaataggctgctctggcatagtcactattaggaattaaaggcagttaaaacaata

SEQ ID NO: 253843 - DNA, 304 bp, Homo sapiens
ctcttgatttattaacatctacaggtcagaataagttgattccaacactttttttccagttttctcattgcatttgtggaggagagagaatttttggagatccttagtctgctattcttactgacattagccttatgttgttgatagtagtatagaatagtattcgaaatgatgtggacaattttgtcaaatgcttttaagatattgtacatctgggccgggcgcggtggctcacacctgtaatccagcactttgggaggccgaagcaggtggatcatgaggtcaggagatcaagaccatcctg

SEQ ID NO: 253844 - DNA, 885 bp, Homo sapiens
gattcggaacgaggagagagactcatatattatgtaaataatggaacaaacaaacagattttttaaaaatcataattaagatgttgaaatgtagaaaagatgaacaaagtgtaagaaaaaatagtacccacagaaatatctatataaaaaattaaatggacatcttatacctaaagaatacagtattgggaataactcattgcatgggtttgagggcagacaagagccaacagaaaggagtaataaacttgatgaaaaaatggaaaatatccagaataaagtacagtgagaaaatacaaaaaaaatttagagcattagagataagagatagagcctgtaatccaggctgaagtgcagtggtgtgatatagctcactgcaacctcgacctgggctcaagcgatcctcttgagtagctagggctacaggcacacaccatgctcaactaatttgtttttgtagagatggggtctcacagtgttgcccaggctggtcttgagtgacattttatctcaattttcatatttaattggcataaagttattcatactgtcctgttctctacccaatgtctgatggatctatgatgaaattgtctctgcgtattctatatttattaggtatatgtatcagttaggttggttggttaattggttattcatgttattagttttctttcggttagtgtttatagagtacattattttcatctgtttgcttttctcttcctgtgtttttatattttgagtgtctttgtatctcagggccctcttataaacaaatataattgagttctgggggtttttttggtctggtttgttcatttattcctactgactgttttacttaatccacccttctttaataaaattatttatttgggttta

SEQ ID NO: 253845 - DNA, 372 bp, Homo sapiens
ggcaagggcagaggccttcagagcgttttctttttccctttcctcccttcctgcaaacaatgtggctacagtttaactggaagtgacaaactgaggaaactgaggcactggaagatgaaggctacagaggtagaaagtgatggaggagatacatccagaagactgcattacaatttcaaatcaaagctggacaagtttttttttttttttacacagatatcaccatgttagaaaagttggacaagttttgaaaccattctgaacctatcattcctgtctttcaaatccttccaaggcatcttattattgatttgtttctatattttcctcattattaaagaggttgagtatcttttctctagagctagtttg

SEQ ID NO: 253846 - DNA, 320 bp, Homo sapiens
atgcctggagacgggaatgtctggaatcttagaggaaggaatcacacaccgacaagcatggcaggcttagtctttgaaacttaatcagagcctgagatacatccagaagactgcattacaatttcaaatcaaagctggacaagtttttttttttttttacacagatatcaccatgttagaaaagttggacaagttttgaaaccattctgaacctatcattcctgtctttcaaatccttccaaggcatcttattattgatttgtttctatattttcctcattattaaagaggttgagtatcttttctctagagctagtttg

SEQ ID NO: 253847 - DNA, 757 bp, Homo sapiens
catttccctagctccctcctgccaagccactgtgtctggagctgatccaccttcctattgatattctttgtgatcattgtgtttttttgctacagcgataataacaatagttaacatatgtcgagttttccatgtgctaccacccttctccctaatggtttatcctcaccccattttaccctcacagcaactccaggaagtcaataacgtttctcattccccctgcctcatagggctgctataaggatgaggtaagagaatgctcataaagcactcaggctagtgtctggaacataaacttaatgtatgttagctgttactattgtttttaaaatggttgcctggatactaaacctctctctgtgaccattatacacgctttatctggcccctggcctctgagggctttgggcaccagttcgtgttttccaaaaaatcttttccagaattgcaaagggctgggagaggccaggagtgaaatagagaatcccatacagtcaggcttccaactttgcattaaagaaagcgtattgaataaatttttctcttctccctccgaagatctcactaaaatgataatagaagaattataaaaaggtataaacttgagacattttcagataaatgaaagctgagagaatttatcacccatacaccagcactataagaaacgctaaacgcagttccctgtagctggaggtaaaggtaatgacaccagatgaaaacttgaatgcacaggaagaaatgaagagttcca

SEQ ID NO: 253848 - DNA, 322 bp, Homo sapiens
  misc_feature (249)..(249): n is a, c, g, or t
attccctcatcactcatgaggtccctggcggctttgtcttgtctttaattccagagcctgaagcccaaagataacaggttcttaaaacgtgattttgcaccttctactgaaatacagctgagtcttacatcagtcctgtggaccgcaggcacaacactcacaagcaggagacaggacagaactggtggctaagaacaggcgatccaggacaagacggcctgactgtgactctcagctctcccacttccntacccatatgatcttggcttagtcactcaacctcttcatgcctctgtgtcctcatctgtaagaatttcttcat

SEQ ID NO: 253849 - DNA, 616 bp, Homo sapiens
agaactcctcctggcactccttacactctgatccaccattttgtgaaacatcaactatacccttatacaattataatgggaaggcccatgtgtcaggaacccaaataaccgacccaacttttctccagggagatatattgcaatatattgtaagggactaattcatcaccttatgaaaagccaagttttggtaaaggattctttttacagtgccctccctgaagatgaggtttctggtcataatctgtagcctagagactttgtctcttacaaaagagaaagtctttggtaaaggactcccttaatccccaatggaagggtccataccaggtagtattgactaattcatgtgctgcacaattagggggtatagacttatgtatttacatgtctcatcttaaaaaggcacatcctcctgagtgaacagtgattccagccaaggatcttagcctccagttcactaaacaatatcaacctttgacttgggactagaagcagataacagctgttgttgacagctttaacccaagacactggcccacccatgcctatggatactggcaattgctatcttatggagaacccagcacctggtttatctgatttagtgtctttg

SEQ ID NO: 253850 - DNA, 730 bp, Homo sapiens
ctccctgctcattgcctgtcactttcctgagtctgagaccctctcctcatgtaatctttgccacacaggcatgcttcagaaggctgactttacctgtctgtcgagctgatctgaatcaactccatggcattcagattcagcactgatagacttaacatgcggtagagccaacatccttgctgaagtccaagcagattccatctgtaatcatagttcttcaaaccccacaagtttgtggattcatgtggggtttcattaatagtaatgatcccagttttactaggcaaaatctgagttcctcttatgatctgcccccaccaacctcatctcatacaggtctctccctttctcactcttctgcatccgtatcagcctctctccttgtttcacatcgattgctagaaccacatcttagagcttagcaatgccaaaggtataaatatcaaacatcctacatttgagaatatttctcatgttgtagcttcttgatagaaattgaatgtagtcaatcagtaaaataaataagcactaggtttaaagtaaaccattaataaaaatgaatacctgtaagtcactccaaaataatgtggatagaagttagactttaaaaaatagaccctgctttgttgatttgatttttggactatgtaaatattttaggtaattacaaaacaaattttaaaaacccaattcccataaataaaagtaaaccacacagagaggaaatttt

SEQ ID NO: 253851 - DNA, 577 bp, Homo sapiens
agcaagaatcatcaatggaagtcagtggatgaaagttttgaagaaaaacagaacattggcgtagcctctaaatatctccccaaagatatttcttaattacaaagggaaaacttgtaactttacagtggagaaacttggcagtcaccacctttgccaggtaatcatagttaacatcaccaggcaggggattaaagaacagcacgtacctcctgacatggtgcactgggaaggtcacatcactacagtgcctataacccaagtccaatcatgaagaaatgccagagaaaccgacgctgagggaccttctacaaaaataactggtcactctttaaaaaaaggccaatgtcatgaaatacagagacttaagaactgccccctgaccaaagcttcagcttgggtcagcaagatactcatcagtcaaggttctacttgagcaagaaaaagtgggtaatggtgcccatgatgagtaagcatcacctgactataacttacttccgggaagaggagctgtcctgcaccgtggtgaagctgaaagtacacaggcaatgcagcgcaaacttcatccctccctggatca

SEQ ID NO: 253852 - DNA, 425 bp, Homo sapiens
tcttgagagaagaaaccatatacagagtcatatctcagttgatcctccaagcaaaaggctttatatccagaacctggcttagatctgtggctgaaaagctaaaggctctaatttgcagactcctttacagccaggattccagaagactcaggtctgatgaatgagatgcacgctcctgggtggcagagcagataggagagcagaagagtcagagtaaggggaaggtgatgtgaatgaagatggagcagaaaaatgtgagcacacaccttgcagggaagccagcaaccgccagaagcagaagcagcaaaggcagaatcttccagttgaacctccagagaaagtatggccctgacgacaaactaattttggacttctggcttcctgatacgtgagagaataaatttgtattgttttgagccaccaaa

SEQ ID NO: 253853 - DNA, 453 bp, Homo sapiens
ctgtgttggccaggctagagtgcagtgactatttacaggcatgatcatagcttactgtggccttgaactcctgggctcaagcagtcctactgcctcagccttccaagtagccgggactacaggtccatgttactgtgcccagcttgtttttgttaaggaatctgttaagaaattcttttaggtcgtgtgcggtggctcacgcctgtagtcccagcactttgggatgccgaggtgggcggatcaccaggtcaggagatcgagaccacggtgaaaccctgtctctactaaaaaatacaaaaaattagccgggcctggtggtgggcgcctgtagtcccagctactcaggaggctgaggcaggagaatggtgtgaacccaggaggcggaacttgcagtgagccaagatcgcgcctctatgctccagcctgggtgacagagcgagactccgtcttaaa

SEQ ID NO: 253854 - DNA, 559 bp, Homo sapiens
agaccgagtagtgccgagttccttgaagaaaattattttatggacaatgtatgagtctgttttcgtgctgctgataaagacatacccagactcacagttctacgtggctggggaggcctcacaatcgtgatggaaggtgaaagacacgtcttacatggccacagggagaatgagagtccctgtacagaaccatcagatcacatgagacttactcactgccatgagaacagcatgggggaaaccgcccccatgattcagttatctcccaccgggtccctcccacaacacgtggaaattatgggagctataattcaagatgagatttgagtggggacacagccagaccatatcagacaagaatcatcttctcaaatttggggtgcgtggctgagtgcacacacctgtgaaaactgcgggatgaatgcattacaacttcctggaacaagtcattttacctaagtaattggaaggggaaagccaactgatctgcttatctggtaaatcatttaaaacatgatttttacattaacacaaacccagatttattatgaagtaatat

SEQ ID NO: 253855 - DNA, 512 bp, Homo sapiens
agcgtctctgggaggtagcacaagactccacaaggatagcacagtgactgattcccaggcatgagccaccgggcctggccccaaatatataggtcttattatgtcacagtgcttttatttgttgagttatttttttctgttttccccatgaaaatgtaagctccaccttggcttacactgtgccaggctactatttgtaggcaactaattgagcacctactacacagcaggagctcaattagtatttcttgaatgaattaaatcatgagggaatgaatgagccaaataagcaatggaggaggagacagatgttccaaacagagaggactgcctgtgtagcggagctgtggccaccaggggtttgagagctgaaggaaggcctatagggccagtgtacatagtacataccaggagaggtagtgatagatgaggaagagaattaagcatggctagatcctaacggaccttgaaggctgtgtttgttttaagggcaatgagaaggcatgaaaggg

SEQ ID NO: 253856 - DNA, 147 bp, Homo sapiens
gtaaatatatgtattacatccctagaaaaagaatcccaggattttccctcctgtgtgttttcatcttgcttcttcatggtccatgatgccagctgaggttgtcagtacaatgaaaccaaactggcgggatggaagcagattattttg

SEQ ID NO: 253857 - DNA, 447 bp, Homo sapiens
gtagagacaagtgttttctagtatactaaacctatagtggtaaaagtgaaaaagataaatgtttttgttgtttgagcagagaaatgttttggacttaagatgttaaacacacagaaaatctttcaaaccattcttcttcaaagctttctctgtggctgggggcgagaggaattctggaaagaatagtcgtacccattttggtggaacttcctgaacgtttacacgaggcatgatttttgagagatttattggcttgccagctttgagtgtagttgctagttccttgagcaaatgtatatcctgtgtcatagcataaaatattaattggaattccagcaaatatccagatagttgggaggggaatagacatggcagccttttttgcttaaggatggtgacaattctgtcaacaaaaagctagcctctagcatcctgcaagttggagtt

SEQ ID NO: 253858 - DNA, 384 bp, Homo sapiens
gagcataaggcattcattctgttgtaaattgtgagaaacagtgcaaactggttagtgatttcctaatgtgatggcttgctgaaagctcaggtggaagcttccctaccactggtagaaattcctggactctcagggtagagctttcttccacaacctttccagtgattttgtaagtcactcaacacatgataatatctctatttggaaataaactgttgtcttcagcctaactctgctctagcagacacatcaaagtttatgacctctttgatctccttttattatttaatcccaatttaaaatttttcttgtgtaatattatctggaacttttttattgtattggacttagaaaaataaacacttggatatttccattcactca

SEQ ID NO: 253859 - DNA, 954 bp, Homo sapiens
tttttcaaaaatgtctagggtcttaggagagttggacacattcaaaacacaatatgtgattaagaagattaaagattaatacttattgatggattactatgtgccaaacttccaaccgaatcctgacaacaattccttaagatgtggaaactgcagttcactgaggttgacatttccgggttcatacaacaaggatggggatgaatgactgtaactgcagacctttacaaggacaatgagagctcctaatggaggcgctaaggcagctggcccagaggcagtaaagttggcaacctcattggctccccttgagagtccggcccaccacaaccattcttttagatatgcatggtcacttagatctgctttcatggttcctatcctgtttggcaccatgacaagaaaacaaacaagttatggacttagaagatatagacttatggtggagacagagacatggaataataacccaaagtagctcatcttcctagaggcctattcttcctcttcctccagccattgcctgtttgacatgagatgtgtccttcgataagtcagtagtggattacctcaaggcaggggacaactaaggctccaatagaaaggatgaattgcaagaatgggacagagatcatattctcaaaaggactttttaataaaaactcactgaaagcaattaatttttcttgatgatttaattttctgcctggacaaagctgctgttttaactgtgtttacaaagcttctactgctggccatggcttctggaattggtctctgatggctggatctttcacactggagccctggttttgattatccaagagatgaaagaatcactccctaaaccttccgttgtccactacagagcttctcttccaccccaccatgctgcctttcctgtcaggatgacaacagcaaagacagcaataataaaagctaatgcttacatta

SEQ ID NO: 253860 - DNA, 1127 bp, Homo sapiens
tttttcaaaaatgtctagggtcttaggagagttggacacattcaaaacacaatatgtgattaagaagattaaagattaatacttattgatggattactatgtgccaaacttccaaccgaatcctgacaacaattccttaagatgtggaaactgcagttcactgaggttgacatttccgggttcatacaacaaggatggggatgaatgactgtaactgcagacctttacaaggacaatgagagctcctaatggaggcgctaaggcagctggcccagaggcagtaaagttggcaacctcattggctccccttgagagtccggcccaccacaaccattcttttagatatgcatggtcacttagatctgctttcatggttcctatcctgtttggcaccatgacaagaaaacaaacaagttatggacttagaagatatagacttatggtggagacagagacatggaataataacccaaagtagctcatcttcctagagctgatgccatcgaaacctgatcatctatcaatcttagttttagtggtgaagactcatggtggattttgcctagcagttcataatttgtctcaagggtgcctgagtgtctcagcgtctccagaaagcccttcgtggttgtttctggaatgagtcccagtgctcacctcacacaggcctattcttcctcttcctccagccattgcctgtttgacatgagatgtgtccttcgataagtcagtagtggattacctcaaggcaggggacaactaaggctccaatagaaaggatgaattgcaagaatgggacagagatcatattctcaaaaggactttttaataaaaactcactgaaagcaattaatttttcttgatgatttaattttctgcctggacaaagctgctgttttaactgtgtttacaaagcttctactgctggccatggcttctggaattggtctctgatggctggatctttcacactggagccctggttttgattatccaagagatgaaagaatcactccctaaaccttccgttgtccactacagagcttctcttccaccccaccatgctgcctttcctgtcaggatgacaacagcaaagacagcaataataaaagctaatgcttacatta

SEQ ID NO: 253861 - DNA, 926 bp, Homo sapiens
cttggaatgttttccctacaatcctcatgagaacacggtgagcccaggagggaagttcctattcacagctggggaaactgagacccagggaaggaagatgacttggctcaagtccttcagctcccctgatgcctgcagcagggctctcgcatcatgcctggccccgtgtggctcattgctggtgtgatctaaattctacacagggagtagcagtgggagggtctctgaagggatgttggaggacgctgcctcctgccttcccctgtttgcacaaggactccaatgtggaggtgagtgccccatctgggctctgtctcaggtgtgcttcctcaaaaagaaagcgcagagcccaggcccggaggcccggaggcccggagctcccctcgacaggctgagccctgccttgggctcccagatgaggtggtccaggaccgggaacgatttagttctgctgaggtttcagttacaaactctgccatcacgctggagcctagtgaggttcccagttggaaaaagaaaaacaattctttctggctggctgaagaaacggctccagcaaggagctggcaagtgtgtaagtaaacacagctccagccggcacagtcgggctctgtcaagaccggccctgaggctgcagaggcaccagagggtctaggagaaggcccaactgtggggagagaagtggggagacaggcctgccagccttgttcaggcatcaggagatgttggccaaggcccaccctggagatgtcagcctcttcccacctctagaggtctgggaagctcccacggccttctgcagcccctgctggagcctgggtggtgagctcatgattgcacagtaagtgtccgtctgctccctccagatagtgtgtgccttgggcaggccatgcccaggtccctctgccctccccatgcagggcact

SEQ ID NO: 253862 - DNA, 729 bp, Homo sapiens
tctcagggcagccggtggccaccgtgctggccattccacagggccagcagcagagttatgtgtctttgaggccagacttactgacagtagacagtgcccacctgtacagtgccactgggaccattactagccctacaggagaaacctggaccatccctgtttattctgcccagccccggggggaccctcagcagctgagccctgccttgggctcccagatgaggtggtccaggaccgggaacgatttagttctgctgaggtttcagttacaaactctgccatcacgctggagcctagtgaggttcccagttggaaaaagaaaaacaattctttctggctggctgaagaaacggctccagcaaggagctggcaagtgtgtaagtaaacacagctccagccggcacagtcgggctctgtcaagaccggccctgaggctgcagaggcaccagagggtctaggagaaggcccaactgtggggagagaagtggggagacaggcctgccagccttgttcaggcatcaggagatgttggccaaggcccaccctggagatgtcagcctcttcccacctctagaggtctgggaagctcccacggccttctgcagcccctgctggagcctgggtggtgagctcatgattgcacagtaagtgtccgtctgctccctccagatagtgtgtgccttgggcaggccatgcccaggtccctctgccctccccatgcagggcact

SEQ ID NO: 253863 - DNA, 388 bp, Homo sapiens
tttatgaacataacatttccacttacaggatttatgattgtactcactgattttgctcagctgtgtgataaaccctaggacatttcagaagctaggctgtaagaataagccttttagctgtatattggtagttcaataaagaaaacagcttgtgttatagcacagttcttttaaagtagtttcttaagaattctaaagaatgttggaaaggatttcatgatgtatctctctcaaatatccaggccaactgtgttatattgaggtgaaaagatttgttttttggatagatactttattgattgaatgaataactaaaagtagaaatggtgacattgccaggagtgtcaataattgatagatattggccataatatttccactttctatc

SEQ ID NO: 253864 - DNA, 678 bp, Homo sapiens
ccgggcgtggtggcaggtgcctgtagtcccagctacttgggaggctggggcaggagaatggcatgaacccgggaggcagagcttgcagtgagccgagatcatgccattgcactccagcctgggggacagagcgagactctgtctcaaaagaaaaaaaaaaaaagatgaccagaggacagagactgcagggagcagtacagggtagtgcaagaagctctggccctggggccagttttgtgtggggagggggcatttgaatctcacctctggcacctgtttttggagcaacctcagataagtcacttaacatttctgaaccaacttttctcatttgtaaaaatagaatctaccaggataaattggttttaggacttaagactataatcaatccatgtatatataagtacaaatttccccaaggagcaatggttcagcgtttgccaattcattgtttgtggagattttatagaacataatatcactaataacaagaatcaactggctgggcgtggtggctcatgcctgtaatcccagcacttcggaagggcgaggagggtgaatcatttgaggtcaggagttcaagaccagcctagccaacatggtgaaaccccatctctactaaaaatacaaaattggccggatgcggtggcatgtgcctggtcgacgcccagctactca

SEQ ID NO: 253865 - DNA, 1178 bp, Homo sapiens
acttctcatcctggccaaatagctattgcaaatgctatttttgactctattgatatattgaaatgtgacgtttccatctacaggtaaagaatttgtaggaaaaaagaagaaaaagtgatgtaattttgaagtattcttttagtgaggtattctctcatctctgtaacaaacagaattgctgttctttgctgtaggggctgtcctgtgccgtaaaggatgtttaccagcatccttgaccttctcccaccagccaatagcacctctccagtggtgacaatcaaaaatgtctgtattcagcagatcctgaattcagaaggaaaaaaaaagtttaaaaaaaaaccaaaaatgtctgcacacatggtcccccaaaattgtcgcagttgagaaccactgttttaactgaagcaacaagattattataaaagaaaccatcttcttccctccatccaccaaaaaactaaagtaatttctgagatagaccccctctagaaatttcagaggatttagacaaagcaggtagattaaatactcagttatttagttataaaaggccaaaccagaattattgaggacaatgtctttggagactgttgctggtgagctgtgattcttaccacaggtgcctgcctgccttttacttcaagtcgagggagtgggccttcaatggatctgctcagagcacttgacttgtacctcctgcagtctgaggggcaccgtgggcctgtgtctgactcccacaggctggcggctgttttggcagcagagtagaggaatgttgaatctgcactgggattagcctgtactcccaagtttgttcgggcaagaggtgcctgagagcttcctgtggaccaggtgtgggccatacagagctgtcactaggctaacacagcagcaccatgagaaaaaagctctccttcgtccagacgctttgcttccatctattgggaagcagtcgttgtaatttagtttggacaaaacactttactgccacctgcgggctggccccgcgccacagccgtagctttaacctcccgtcagcgccgccccaggaagaggcttctcggccgcggagccacttggggcctcagttctcgccctcttgccgtcgccgcgggtcctggagaagcggccgcggccagggaacggggcatcgcggttccacggtaggtaaccccgct

SEQ ID NO: 253866 - DNA, 426 bp, Homo sapiens
ctaacgggaggtgttttgtccatggaggcaaattcctcatgaacgtcttggtacactccttgctgtagtgagtgggtcgttactctgtcagtaccctggagagctggttgtttaaaaaagcatggaatctcctgcctctctctcttgctagctctcttgcccataaggtttctgcatatgctggctcccttatgccttctgccatgagtggaagcagtgtgagaccctcatcaaaaccatatgtggacagcatgcatcttgtacagcctgcaaaaacatgagacactttttcctataaattacccagactcaggcattcctttatggcaacacaaattgtctaagacaggaattgtagaagagaaagtatggtggaaaaactagatactgagaatctttcctgtaggaaagcagctaacaaaatta

SEQ ID NO: 253867 - DNA, 654 bp, Homo sapiens
aaggacaaatacctattgcatgtgggcttaaaacctagatgacaggttgatgggtgcagcgaaacaccatggcccatgtatacctatgtaacaaacctgcacgttctgcacatgtatccgagaacttaaagtttaattaaaatgccatgatgcggcatggttgggtgagcaggtgatggggtcggtgcgtatgtaactccaccagcaggtctcctctttaggctccatctacctaattgggcatcaactcaccatctctccatgagtccaacacacataggttcctcttggaccagattgttgcttcatagggaagacaccaaaggcggtaattgtgcttgtgtgtagtgaaaatggggtataaagatacaaacatttagcttttagcttcatgtacaagtgaggggagctgcttatttcttattccccagagagatgggggcctgagacagtgagggcagattgagggactccatttcctgttcatgctggtgcacatgctcactgagtgtattggcaagctagcagcccatactatttcagaagattcttctctttctcatttggctaaattttacctgttgaactttagtatattaaatatgtctaagctgtaatttcaccatactcaatttatctgagttccattttctt

SEQ ID NO: 253868 - DNA, 396 bp, Homo sapiens
atagcatatgcctatatgcccactatctagattctaccattaacatttgactcttcttgttttgtcatatatctatctattctatgtagccatccttttttttcttccgccttttttacgtaagtattgtcttttctcttttcttctttgctccccagttgattaaaccagtgtttctctggggctgattgggactcaagtgtcttccagctttgtgtgagctctgggaattgtttagcttatagttccgagggtcattctctgcccagacttactgggtttcatcctacacaagtatatcttagtattcaaccacagactcaaggggacatcctcccttgcagatttctggaactctttcttgatttaccttcttcctttctggtactctgccct

SEQ ID NO: 253869 - DNA, 440 bp, Homo sapiens
agactatcagattctaataaattgtgctttttagctcaaggtttaaaagaagcttgtggttccaggcaatggtcaaatgtggtcagttgttagggctaaaattacattaatgacgttatataattttatataatgaggaaaacagagcaagaaacatgtaccttttattatctgcataagcaaagcaaacatataaaataatggcacaaattttacggggtgagagggagttgggaattgggaaggagacaagttctctttattctcacacatggacaataaatgaaattacaattttcccttgatttcttctctacatgaaagctgaaatcctggatatacctgtcacaaatgatccttgttctcagcttagtcttttattttctatttgactctgtggtgacattgatgagctacttcatcacttctctattgttacc

SEQ ID NO: 253870 - DNA, 422 bp, Homo sapiens
catgtgtgtgcccactcaggggtgtatataagtattttatctgtattgcatacctatgctttctgtatacaatatttggaaatacacactgaaagccttagaaatatgtgtactcttaattttttaaaaaaaagattgtactcctcaaacgatttcagttcttaaaatccattcaaagaaaactaaaagtctgaattgaagtgttttttgatcatagtgaaaaatttgaaataatctacctgtccaacagtgggcctttgtttaaaaaatcatggtgtatccctatgatggtatatatgtaatcaaaaacatttaagttttcaaagaaaattgtggaagcataattctaagtatgaagcatacttagaataaacgtgcataatgtgaagtatgggagagggatacaaaacttgtttgatatg

SEQ ID NO: 253871 - DNA, 435 bp, Homo sapiens
gcatgtgggctaaggacggtcaatgcgaccttttcccaaactcacatcccacagaactggccccacctggcacttgtaacctcaacagcagtgagggtaaatagagtttaccttaacggagcactgactgatatgatctcatctcatcctccagcagccctttgtcctccctttgcagatgtaaaggagggaggtaaagacccagcaaggttcagtaacttgcccaaggtcacacagctgcacacatgagaacattggtcaatgcattgtccggtggaggacaagagataaagccagaaggcaaatgtgctcacaatggaatgtgtttccgctgtgaagaagtggcacctgatacatgtgaagcatacccctaccccggtttagtgggtgagggaaggctccttgaaaaagtgttggtaaagaaagttaatattt

SEQ ID NO: 253872 - DNA, 287 bp, Homo sapiens
gccgggccgggcggagaagcttgcgggctccgcgcacctcacctccgccaatcagcaccgcgaatcgacggtgacgtcgctctccccgccccctggggggccgcctttctccaggaagccacgcccaactgctggccggccgcctccctctcggcggcttccgtgcggtcctaaaggctggtgctcggcaggaggaggacgcgggctggggccgtggggcggcgtgagggtagcccgggagcggtgaggagcgtgcgaggcccacgtgagcggagggacgcggccgc

SEQ ID NO: 253873 - DNA, 359 bp, Homo sapiens
ctaatttttgtatttttcatagagacagggtttcaccatgttgcccaggctggtctggaactcctgatctgaggtgatctacccaccttggccccccaaagtgctgagactataggcatgagccaccgcgtccagccaggattcttgaaagggaacatttatagacgcaaaggatggaatagtggttgccagggaggagggaggtgggtgtggctttaaaagggcagcaggagggatgatcctgcagtgatggaatgttctgtcttgattgtagcaacaccaatatgctgattgtgatattatactatagttttgcataacagttaccattaaaggaaattgggtaaaaggctacacaa

SEQ ID NO: 253874 - DNA, 394 bp, Homo sapiens
aaataaaattactgaaaaggcgaagtatactttccaaaaattagactctaatcaatgtagtccgtgcaacaattttctttaataccgaattgcattttatatagctatttgcacagatcttcacaataaaaccataagaaaaggagaataggatattatcttcacagttctacagaggagtaaaaaaactgaccttgatctaaataagtttagaggtggattttaatcctttaataagcaaaagacatataataaaattgataaatgacaatatcaatactttatctaaaagtaatttcataaagaaacaaagccaaaattgattcagttaacataaaaaagagttaacccagaagaaaacaatgaatattgatctcgatttcagcaagcagaa

SEQ ID NO: 253875 - DNA, 110 bp, Homo sapiens
ttatgtcccaagactaattttgcctctgaggatccacagtggctgtcactgtagttattatgtgttttagcattttgcacttgaataaaagcaaagtttaatagacagat

SEQ ID NO: 253876 - DNA, 423 bp, Homo sapiens
atatgttgggaatttgatttaattatgtgaggggagttcagaattggatacatggatctggagtgaaggtaaaaggtctgggatggatatagagacctgtagacacttttaggtggctttttttaaaccacaggattaagagagagtatctcttgagatagtgtgtataaataacagttggctagctatgtagccctggagtatagcaatatttaaatatcgggtaggaccataccttgtagatttactatgctgattaagttaatgtacgtaaaacactttaaaagctgaatctagcaaatacacaatacaggttgctagtgttattactggaggccacatctctgggagaaaaaaaagcatacaaatgataatctataggacctagatctctatgtcttcttaccttggcatggattaacc

SEQ ID NO: 253877 - DNA, 925 bp, Homo sapiens
ggtcgacagctcctgacttgtgatccacccgcctcggcctcccaaagtgctaggattacaggcgtaagccactgcgcccggccacgtcttccttttcttagctttgctttgagaaatcgtttcttatcttggattccattacaatggtcctcctgccatctggcttctccagttggttcgcttatttttccttctcctatcctcattcataagtatacctcaggactagttgtggactttttctctggtattttcttaggtaacttactctctgttgccttgtgtatccagttacctaaaggctctggaggtcccacttttatctcaaatccagcatgtctaaaactgaacatactgtatttccccctgccctcagatggctcatttcaaggtccccagttgggttaatggtctagttagttctttccctagttttcaaaccttggtgtcttcttgagcactctcctggtgtttagtgttcccaagtctgttaactcttctttctcagggtctgttgagactttccgttcctacccgctaaccattcccctcgtttagcttttagtatttcaggcctagacgctcctgtccccagagcttagatcatcttgagccctgaaattcagcagatcttgctcagtgtgcaaggttcaagtcagttcaccaacttccaatcttggctcctacccagaggaatttttgtcctctgagtgaatatctggtaatcttttaattcatgctgctgtgtattatatataatttaactttaatgtctgtatgtcttggcttctcagttacattgtaaatatgttgttaggaaaaaaattctttcttgatacatgggtcttttatatttcagcttcctgtgtgttgagaatatcacagtctgtatcatgtgagaataatttaagaagtagtataacta

SEQ ID NO: 253878 - DNA, 909 bp, Homo sapiens
gaaacagaagctatatagcagtgaaaaatgggttccccccatccttctaggttctttgcgcccggccacgtcttccttttcttagctttgctttgagaaatcgtttcttatcttggattccattacaatggtcctcctgccatctggcttctccagttggttcgcttatttttccttctcctatcctcattcataagtatacctcaggactagttgtggactttttctctggtattttcttaggtaacttactctctgttgccttgtgtatccagttacctaaaggctctggaggtcccacttttatctcaaatccagcatgtctaaaactgaacatactgtatttccccctgccctcagatggctcatttcaaggtccccagttgggttaatggtctagttagttctttccctagttttcaaaccttggtgtcttcttgagcactctcctggtgtttagtgttcccaagtctgttaactcttctttctcagggtctgttgagactttccgttcctacccgctaaccattcccctcgtttagcttttagtatttcaggcctagacgctcctgtccccagagcttagatcatcttgagccctgaaattcagcagatcttgctcagtgtgcaaggttcaagtcagttcaccaacttccaatcttggctcctacccagaggaatttttgtcctctgagtgaatatctggtaatcttttaattcatgctgctgtgtattatatataatttaactttaatgtctgtatgtcttggcttctcagttacattgtaaatatgttgttaggaaaaaaattctttcttgatacatgggtcttttatatttcagcttcctgtgtgttgagaatatcacagtctgtatcatgtgagaataatttaagaagtagtataacta

SEQ ID NO: 253879 - DNA, 120 bp, Homo sapiens
ttggaggggtctagggaaggatgacacagttcctgccctcgaggagagtacagttatcttcaagaaataacaactgcaaaaacaaacattaaagaaggcatataattatgtgctaagtcc

SEQ ID NO: 253880 - DNA, 478 bp, Homo sapiens
cagttctgtgctagatcaaaaatttttaaaggggcttcttaatctctttaaaatcataaaaggaacagatttctaaaggcaagttttctgcatgacctacttcaacccctgtcctttgtggctcttcattgcaccacaggaaacaattagggctctatacatatctataacctctgtatatgtgaaatactgatttctgaataaaccgagttacttccataagaaacaatccatggtttttataaattgttggctttaggctttaaaacttcgtcatttcgtgagattaatctgaacaaactgagtctatacctcaattaaaccctcaggtgtattggaaattatgtttccattattttactatgaatgctgaggttaagaatccctttaacaatgtaaaaccttactgttttgccaaatttttacagaaaaatagctctgtgtgttctaccagtgtcaaaataaaacacttgaaggt

SEQ ID NO: 253881 - DNA, 338 bp, Homo sapiens
agtccactggctgtttcccctgcctcctgctctcccagtgccctctccacaccagtgccagagctgcttctaagagatgcctcaaagcccgcttccagcttaggaaccccagggaacatggatggtttctccattgccacttcctagccttcctggcataggaaggtctggtttgcctgcaggtccctctctgggggggtccctgctccatagatgctgaggctccagaagtctgttcttttatatcacatttgaaaacctttgaaatgcattatagttgagtcatatgaattatgtaagtatatcctactcattgtataaaacaacacagaattgtc

SEQ ID NO: 253882 - DNA, 418 bp, Homo sapiens
gaaccttgattttagactttcagtctccagaaccatgagaaaacaaatcacacttgttgaagcaacccagtctgtggtattttgttatggcagcctgagttgctaagacacttggcaattgtcatgaggtttaaatatgattccataagctgtactctgtgggatgaccctggcaatccataacccacacaccaatggaactggcacatactgggggtctcaaattattactgctgttattctcattattattttaggcaattgcatgaatctattttctctcctatcttgctagctctttgaagataggacctagtcttatccatttttctataacccagaactagtctagagtttggcacataatagttgcctaatgaatatctgctacatgaataaataagcttatattttaata

SEQ ID NO: 253883 - DNA, 2386 bp, Homo sapiens
gaggcgggacagtggaagactggctgaggctggagtttggagtttgacccgcttggaggctctctcagcagcgggcatataggaggaagggtcactgctgtctccggaagctcttggctgcaaagagagaggatcccgggtatctccctccttacaaccaccgccacctcctagtgccttagaagccactgacagcccccagggcaggtgagccctgcatctggaataaggatccagaggtctcgttcaggaccatggagagcggcaccagcagccctcagcctccacagttagatcccctggatgcgtttccccagaagggcttggagcctggggacatcgcggtgctagttctgtacttcctctttgtcctggctgttggactatggtccacagtgaagaccaaaagagacacagtgaaaggctacttcctggctggaggggacatggtgtggtggccagtgggtgcatccttgtttgccagcaatgttggaagtggacatttcattggcctggcagggtcaggtgctgctacgggcatttctgtatcagcttatgaacttaatggcttgttttctgtgctgatgttggcctggatcttcctacccatctacattgctggtcaggtcaccacgatgccagaatacctacggaagcgcttcggtggcatcagaatccccatcatcctggctgtactctacctatttatctacatcttcaccaagatctcggtagacatgtatgcaggtgccatcttcatccagcagtctttgcacctggatctgtacctggccatagttgggctactggccatcactgctgtatacacggttgctggtggcctggctgctgtgatctacacggatgccctgcagacgctgatcatgcttataggagcgctcaccttgatgggctacagtttcgccgcggttggtgggatggaaggactgaaggagaagtacttcttggccctggctagcaaccggagtgagaacagcagctgcgggctgccccgggaagatgccttccatattttccgagatccgctgacatctgatctcccgtggccgggggtcctatttggaatgtccatcccatccctctggtactggtgcacggatcaggtgattgtccagcggactctggctgccaagaacctgtcccatgccaaaggaggtgctctgatggctgcatacctgaaggtgctgcccctcttcataatggtgttccctgggatggtcagccgcatcctcttcccagatcaagtggcctgtgcagatccagagatctgccagaagatctgcagcaacccctcaggctgttcggacatcgcgtatcccaaactcgtgctggaactcctgcccacagggctccgtgggctgatgatggctgtgatggtggcggctctcatgtcctccctcacctccatctttaacagtgccagcaccatcttcaccatggacctctggaatcacctccggcctcgggcatctgagaaggagctcatgattgtgggcagggtgtttgtgctgctgctggtcctggtctccatcctctggatccctgtggtccaggccagccagggcggccagctcttcatctatatccagtccatcagctcctacctgcagccgcctgtggcggtggtcttcatcatgggatgtttctggaagaggaccaatgaaaagggtgccttctggggcctgatctcgggcctgctcctgggcttggttaggctggtcctggactttatttacgtgcagcctcgatgcgaccagccagatgagcgcccggtcctggtgaagagcattcactacctctacttctccatgatcctgtccacggtcaccctcatcactgtctccaccgtgagctggttcacagagccaccctccaaggagatggtcagccacctgacctggtttactcgtcacgaccccgtggtccagaaggaacaagcaccaccagcagctcccttgtctcttaccctctctcagaacgggatgccagaggccagcagcagcagcagcgtccagttcgagatggttcaagaaaacacgtctaaaacccacagctgtgacatgaccccaaagcagtccaaagtggtgaaggccatcctgtggctctgtggaatacaggagaagggcaaggaagagctcccggccagagcagaagccatcatagtttccctggaagaaaaccccttggtgaagaccctcctggacgtcaacctcattttctgcgtgagctgcgccatctttatctggggctattttgcttagtgtggggtgaacccaggggtccaaactctgtttctcttcagtgctccatttttttaatgaaagaaaaaataataaagcttttgtttaccacaaggaaaaaaaat

SEQ ID NO: 253884 - DNA, 2228 bp, Homo sapiens
agcgggggcacagtggaagactggctgaggctggagtttggagtttgacccgcttggaggctctctcagcagcgggcatataggaggaagggtcactgctgtctccggaagctcttggctgcaaagagagaggatcccgggtatctccctccttacaaccaccgccacctcctagtgccttagaagccactgacagcccccagggcaggtgagccctgcatctggaataagtccacagtgaagaccaaaagagacacagtgaaaggctacttcctggctggaggggacatggtgtggtggccagtgggtgcatccttgtttgccagcaatgttggaagtggacatttcattggcctggcagggtcaggtgctgctacgggcatttctgtatcagcttatgaacttaatggcttgttttctgtgctgatgttggcctggatcttcctacccatctacattgctggtcaggtcaccacgatgccagaatacctacggaagcgcttcggtggcatcagaatccccatcatcctggctgtactctacctatttatctacatcttcaccaagatctcggtagacatgtatgcaggtgccatcttcatccagcagtctttgcacctggatctgtacctggccatagttgggctactggccatcactgctgtatacacggttgctggtggcctggctgctgtgatctacacggatgccctgcagacgctgatcatgcttataggagcgctcaccttgatgggctacagtttcgccgcggttggtgggatggaaggactgaaggagaagtacttcttggccctggctagcaaccggagtgagaacagcagctgcgggctgccccgggaagatgccttccatattttccgagatccgctgacatctgatctcccgtggccgggggtcctatttggaatgtccatcccatccctctggtactggtgcacggatcaggtgattgtccagcggactctggctgccaagaacctgtcccatgccaaaggaggtgctctgatggctgcatacctgaaggtgctgcccctcttcataatggtgttccctgggatggtcagccgcatcctcttcccagatcaagtggcctgtgcagatccagagatctgccagaagatctgcagcaacccctcaggctgttcggacatcgcgtatcccaaactcgtgctggaactcctgcccacagggctccgtgggctgatgatggctgtgatggtggcggctctcatgtcctccctcacctccatctttaacagtgccagcaccatcttcaccatggacctctggaatcacctccggcctcgggcatctgagaaggagctcatgattgtgggcagggtgtttgtgctgctgctggtcctggtctccatcctctggatccctgtggtccaggccagccagggcggccagctcttcatctatatccagtccatcagctcctacctgcagccgcctgtggcggtggtcttcatcatgggatgtttctggaagaggaccaatgaaaagggtgccttctggggcctgatctcgggcctgctcctgggcttggttaggctggtcctggactttatttacgtgcagcctcgatgcgaccagccagatgagcgcccggtcctggtgaagagcattcactacctctacttctccatgatcctgtccacggtcaccctcatcactgtctccaccgtgagctggttcacagagccaccctccaaggagatggtcagccacctgacctggtttactcgtcacgaccccgtggtccagaaggaacaagcaccaccagcagctcccttgtctcttaccctctctcagaacgggatgccagaggccagcagcagcagcagcgtccagttcgagatggttcaagaaaacacgtctaaaacccacagctgtgacatgaccccaaagcagtccaaagtggtgaaggccatcctgtggctctgtggaatacaggagaagggcaaggaagagctcccggccagagcagaagccatcatagtttccctggaagaaaaccccttggtgaagaccctcctggacgtcaacctcattttctgcgtgagctgcgccatctttatctggggctattttgcttagtgtggggtgaacccaggggtccaaactctgtttctcttcagtgctccatttttttaatgaaagaaaaaataataaagcttttgtttaccacaaggaaaaaaaat

SEQ ID NO: 253885 - DNA, 1812 bp, Homo sapiens
gatctgggatgcagtggattaacaagggatgacgtatgactcttctgtgtttgtcagcatctaggctaggccctgatcccagggaacctgtgctgcaaatgtccactcattcattcattcgttcatttgttcatccatcaacctcctttcttcacaggtagacatgtatgcaggtgccatcttcatccagcagtctttgcacctggatctgtacctggccatagttgggctactggccatcactgctgtatacacggttgctggtggcctggctgctgtgatctacacggatgccctgcagacgctgatcatgcttataggagcgctcaccttgatgggctacagtttcgccgcggttggtgggatggaaggactgaaggagaagtacttcttggccctggctagcaaccggagtgagaacagcagctgcgggctgccccgggaagatgccttccatattttccgagatccgctgacatctgatctcccgtggccgggggtcctatttggaatgtccatcccatccctctggtactggtgcacggatcaggtgattgtccagcggactctggctgccaagaacctgtcccatgccaaaggaggtgctctgatggctgcatacctgaaggtgctgcccctcttcataatggtgttccctgggatggtcagccgcatcctcttcccagatcaagtggcctgtgcagatccagagatctgccagaagatctgcagcaacccctcaggctgttcggacatcgcgtatcccaaactcgtgctggaactcctgcccacagggctccgtgggctgatgatggctgtgatggtggcggctctcatgtcctccctcacctccatctttaacagtgccagcaccatcttcaccatggacctctggaatcacctccggcctcgggcatctgagaaggagctcatgattgtgggcagggtgtttgtgctgctgctggtcctggtctccatcctctggatccctgtggtccaggccagccagggcggccagctcttcatctatatccagtccatcagctcctacctgcagccgcctgtggcggtggtcttcatcatgggatgtttctggaagaggaccaatgaaaagggtgccttctggggcctgatctcgggcctgctcctgggcttggttaggctggtcctggactttatttacgtgcagcctcgatgcgaccagccagatgagcgcccggtcctggtgaagagcattcactacctctacttctccatgatcctgtccacggtcaccctcatcactgtctccaccgtgagctggttcacagagccaccctccaaggagatggtcagccacctgacctggtttactcgtcacgaccccgtggtccagaaggaacaagcaccaccagcagctcccttgtctcttaccctctctcagaacgggatgccagaggccagcagcagcagcagcgtccagttcgagatggttcaagaaaacacgtctaaaacccacagctgtgacatgaccccaaagcagtccaaagtggtgaaggccatcctgtggctctgtggaatacaggagaagggcaaggaagagctcccggccagagcagaagccatcatagtttccctggaagaaaaccccttggtgaagaccctcctggacgtcaacctcattttctgcgtgagctgcgccatctttatctggggctattttgcttagtgtggggtgaacccaggggtccaaactctgtttctcttcagtgctccatttttttaatgaaagaaaaaataataaagcttttgtttaccacaaggaaaaaaaat

SEQ ID NO: 253886 - DNA, 2316 bp, Homo sapiens
gaggcgggacagtggaagactggctgaggctggagtttggagtttgacccgcttggaggctctctcagcagcgggcatataggaggaagggtcactgctgtctccggaagctcttggctgcaaagagagaggatcccgggtatctccctccttacaaccaccgccacctcctagtgccttagaagccactgacagcccccagggcaggtgagccctgcatctggaataaggatccagaggtctcgttcaggaccatggagagcggcaccagcagccctcagcctccacagttagatcccctggatgcgtttccccagaagggcttggagcctggggacatcgcggtgctagttctgtacttcctctttgtcctggctgttggactatggtccacagtgaagaccaaaagagacacagtgaaaggctacttcctggctggaggggacatggtgtggtggccagtgggtgcatccttgtttgccagcaatgttggaagtggacatttcattggcctggcagggtcaggtgctgctacgggcatttctgtatcagcttatgaacttaatggcttgttttctgtgctgatgttggcctggatcttcctacccatctacattgctggtcaggtcaccacgatgccagaatacctacggaagcgcttcggtggcatcagaatccccatcatcctggctgtactctacctatttatctacatcttcaccaagatctcggtagacatgtatgcaggtgccatcttcatccagcagtctttgcacctggatctgtacctggccatagttgggctactggccatcactgctgtatacacggttgctggtggcctggctgctgtgatctacacggatgccctgcagacgctgatcatgcttataggagcgctcaccttgatgggctacagtttcgccgcggttggtgggatggaaggactgaaggagaagtacttcttggccctggctagcaaccggagtgagaacagcagctgcgggctgccccgggaagatgccttccatattttccgagatccgctgacatctgatctcccgtggccgggggtcctatttggaatgtccatcccatccctctggtactggtgcacggatcaggtgattgtccagcggactctggctgccaagaacctgtcccatgccaaaggaggtgctctgatggctgcatacctgaaggtgctgcccctcttcataatggtgttccctgggatggtcagccgcatcctcttcccagatcaagtggcctgtgcagatccagagatctgccagaagatctgcagcaacccctcaggctgttcggacatcgcgtatcccaaactcgtgctggaactcctgcccacagtgccagcaccatcttcaccatggacctctggaatcacctccggcctcgggcatctgagaaggagctcatgattgtgggcagggtgtttgtgctgctgctggtcctggtctccatcctctggatccctgtggtccaggccagccagggcggccagctcttcatctatatccagtccatcagctcctacctgcagccgcctgtggcggtggtcttcatcatgggatgtttctggaagaggaccaatgaaaagggtgccttctggggcctgatctcgggcctgctcctgggcttggttaggctggtcctggactttatttacgtgcagcctcgatgcgaccagccagatgagcgcccggtcctggtgaagagcattcactacctctacttctccatgatcctgtccacggtcaccctcatcactgtctccaccgtgagctggttcacagagccaccctccaaggagatggtcagccacctgacctggtttactcgtcacgaccccgtggtccagaaggaacaagcaccaccagcagctcccttgtctcttaccctctctcagaacgggatgccagaggccagcagcagcagcagcgtccagttcgagatggttcaagaaaacacgtctaaaacccacagctgtgacatgaccccaaagcagtccaaagtggtgaaggccatcctgtggctctgtggaatacaggagaagggcaaggaagagctcccggccagagcagaagccatcatagtttccctggaagaaaaccccttggtgaagaccctcctggacgtcaacctcattttctgcgtgagctgcgccatctttatctggggctattttgcttagtgtggggtgaacccaggggtccaaactctgtttctcttcagtgctccatttttttaatgaaagaaaaaataataaagcttttgtttaccacaaggaaaaaaaat

SEQ ID NO: 253887 - DNA, 1102 bp, Homo sapiens
atatattaatttacagattatgttatactaaaataaataatattctatcaagtggcctgtgcagatccagagatctgccagaagatctgcagcaacccctcaggctgttcggacatcgcgtatcccaaactcgtgctggaactcctgcccacagtgccagcaccatcttcaccatggacctctggaatcacctccggcctcgggcatctgagaaggagctcatgattgtgggcagggtgtttgtgctgctgctggtcctggtctccatcctctggatccctgtggtccaggccagccagggcggccagctcttcatctatatccagtccatcagctcctacctgcagccgcctgtggcggtggtcttcatcatgggatgtttctggaagaggaccaatgaaaagggtgccttctggggcctgatctcgggcctgctcctgggcttggttaggctggtcctggactttatttacgtgcagcctcgatgcgaccagccagatgagcgcccggtcctggtgaagagcattcactacctctacttctccatgatcctgtccacggtcaccctcatcactgtctccaccgtgagctggttcacagagccaccctccaaggagatggtcagccacctgacctggtttactcgtcacgaccccgtggtccagaaggaacaagcaccaccagcagctcccttgtctcttaccctctctcagaacgggatgccagaggccagcagcagcagcagcgtccagttcgagatggttcaagaaaacacgtctaaaacccacagctgtgacatgaccccaaagcagtccaaagtggtgaaggccatcctgtggctctgtggaatacaggagaagggcaaggaagagctcccggccagagcagaagccatcatagtttccctggaagaaaaccccttggtgaagaccctcctggacgtcaacctcattttctgcgtgagctgcgccatctttatctggggctattttgcttagtgtggggtgaacccaggggtccaaactctgtttctcttcagtgctccatttttttaatgaaagaaaaaataataaagcttttgtttaccacaaggaaaaaaaat

SEQ ID NO: 253888 - DNA, 1112 bp, Homo sapiens
tgattcacaccctcactcccacgccacatctcgagccaccatctactcaattatcgatcaagtggcctgtgcagatccagagatctgccagaagatctgcagcaacccctcaggctgttcggacatcgcgtatcccaaactcgtgctggaactcctgcccacagtgccagcaccatcttcaccatggacctctggaatcacctccggcctcgggcatctgagaaggagctcatgattgtgggcagggtgtttgtgctgctgctggtcctggtctccatcctctggatccctgtggtccaggccagccagggcggccagctcttcatctatatccagtccatcagctcctacctgcagccgcctgtggcggtggtcttcatcatgggatgtttctggaagaggaccaatgaaaagggtgccttctggggcctgatctcgggcctgctcctgggcttggttaggctggtcctggactttatttacgtgcagcctcgatgcgaccagccagatgagcgcccggtcctggtgaagagcattcactacctctacttctccatgatcctgtccacggtcaccctcatcactgtctccaccgtgagctggttcacagagccaccctccaaggagatggtcagccacctgacctggtttactcgtcacgaccccgtggtccagaaggaacaagcaccaccagcagctcccttgtctcttaccctctctcagaacgggatgccagaggccagcagcagcagcagcgtccagttcgagatggttcaagaaaacacgtctaaaacccacagctgtgacatgaccccaaagcagtccaaagtggtgaaggccatcctgtggctctgtggaatacaggagaagggcaaggaagagctcccggccagagcagaagccatcatagtttccctggaagaaaaccccttggtgaagaccctcctggacgtcaacctcattttctgcgtgagctgcgccatctttatctggggctattttgcttagtgtggggtgaacccaggggtccaaactctgtttctcttcagtgctccatttttttaatgaaagaaaaaataataaagcttttgtttaccacaaggaaaaaaaat

SEQ ID NO: 253889 - DNA, 2046 bp, Homo sapiens
gaggcgggacagtggaagactggctgaggctggagtttggagtttgacccgcttggaggctctctcagcagcgggcatataggaggaagggtcactgctgtctccggaagctcttggctgcaaagagagaggatcccgggtatctccctccttacaaccaccgccacctcctagtgccttagaagccactgacagcccccagggcaggtgagccctgcatctggaataaggatccagaggtctcgttcaggaccatggagagcggcaccagcagccctcagcctccacagttagatcccctggatgcgtttccccagaagggcttggagcctggggacatcgcggtgctagttctgtacttcctctttgtcctggctgttggactatggtccacagtgaagaccaaaagagacacagtgaaaggctacttcctggctggaggggacatggtgtggtggccagtgggtgcatccttgtttgccagcaatgttggaagtggacatttcattggcctggcagggtcaggtgctgctacgggcatttctgtatcagcttatgaacttaatggcttgttttctgtgctgatgttggcctggatcttcctacccatctacattgctggtcaggtcaccacgatgccagaatacctacggaagcgcttcggtggcatcagaatccccatcatcctggctgtactctacctatttatctacatcttcaccaagatctcggtagacatgtatgcaggtgccatcttcatccagcagtctttgcacctggatctgtacctggccatagttgggctactggccatcactgctgtatacacggttgctggtggcctggctgctgtgatctacacggatgccctgcagacgctgatcatgcttataggagcgctcaccttgatgggctacagtttcgccgcggttggtgggatggaaggactgaaggagaagtacttcttggccctggctagcaaccggagtgagaacagcagctgcgggctgccccgggaagatgccttccatattttccgagatccgctgacatctgatctcccgtggccgggggtcctatttggaatgtccatcccatccctctggtactggtgcacggatcaggtgattgtccagcggactctggctgccaagaacctgtcccatgccaaaggaggtgctctgatggctgcatacctgaaggtgctgcccctcttcataatggtgttccctgggatggtcagccgcatcctcttcccagatcaagtggcctgtgcagatccagagatctgccagaagatctgcagcaacccctcaggctgttcggacatcgcgtatcccaaactcgtgctggaactcctgcccacagtgccagcaccatcttcaccatggacctctggaatcacctccggcctcgggcatctgagaaggagctcatgattgtgggcagggtgtttgtgctgctgctggtcctggtctccatcctctggatccctgtggtccaggccagccagggcggccagctcttcatctatatccagtccatcagctcctacctgcagccgcctgtggcggtggtcttcatcatgggatgtttctggaagaggaccaatgaaaagggtgccttctggggcctgatctcgggcctgctcctgggcttggttaggctggtcctggactttatttacgtgcagcctcgatgcgaccagccagatgagcgcccggtcctggtgaagagcattcactacctctacttctccatgatcctgtccacggtcaccctcatcactgtctccaccgtgagctggttcacagagccaccctccaaggagatggtcagccacctgacctggtttactcgtcacgaccccgtggtccagaaggaacaagcaccaccagcagctcccttgtctcttaccctctctcagaacgggatgccagaggccagcagcagcagcagcgtccagttcgagatggttcaagaaaacacgtctaaaacccacagctgtgacatgacccccagtctttcccaaggggcgaaggcctt

SEQ ID NO: 253890 - DNA, 869 bp, Homo sapiens
  misc_feature (22)..(22): n is a, c, g, or t
  misc_feature (67)..(67): n is a, c, g, or t
agataagtggcctgtgcagatncagagatctgccagaaggaacaagcaccaccagcagctcccttgnctcttaccctctctccatcctctggatccctgtggtccaggccagccagggcggccagctcttcatctatatccagtccatcagctcctacctgcagccgcctgtggcggtggtcttcatcatgggatgtttctggaagaggaccaatgaaaagggtgccttctggggcctgatctcgggcctgctcctgggcttggttaggctggtcctggactttatttacgtgcagcctcgatgcgaccagccagatgagcgcccggtcctggtgaagagcattcactacctctacttctccatgatcctgtccacggtcaccctcatcactgtctccaccgtgagctggttcacagagccaccctccaaggagatggtcagccacctgacctggtttactcgtcacgaccccgtggtccagaaggaacaagcaccaccacagcagcagcagcgtccagttcgagatggttcaagaaaacacgtctaaaacccacagctgtgacatgaccccaaagcagtccaaagtggtgaaggccatcctgtggctctgtggaatacaggagaagggcaaggaagagctcccggccagagcagaagccatcatagtttccctggaagaaaaccccttggtgaagaccctcctggacgtcaacctcattttctgcgtgagctgcgccatctttatctggggctattttgcttagtgtggggtgaacccaggggtccaaactctgtttctcttcagtgctccatttttttaatgaaagaaaaaataataaagcttttgtttaccacaaggaaaaaaaat

SEQ ID NO: 253891 - DNA, 1632 bp, Homo sapiens
gaggcgggacagtggaagactggctgaggctggagtttggagtttgacccgcttggaggctctctcagcagcgggcatataggaggaagggtcactgctgtctccggaagctcttggctgcaaagagagaggatcccgggtatctccctccttacaaccaccgccacctcctagtgccttagaagccactgacagcccccagggcaggtgagccctgcatctggaataaggatccagaggtctcgttcaggaccatggagagcggcaccagcagccctcagcctccacagttagatcccctggatgcgtttccccagaagggcttggagcctggggacatcgcggtgctagttctgtacttcctctttgtcctggctgttggactatggtccacagtgaagaccaaaagagacacagtgaaaggctacttcctggctggaggggacatggtgtggtggccagtgggtgcatccttgtttgccagcaatgttggaagtggacatttcattggcctggcagggtcaggtgctgctacgggcatttctgtatcagcttatgaacttaatggcttgttttctgtgctgatgttggcctggatcttcctacccatctacattgctggtcaggtcaccacgatgccagaatacctacggaagcgcttcggtggcatcagaatccccatcatcctggctgtactctacctatttatctacatcttcaccaagatctcggtagacatgtatgcaggtgccatcttcatccagcagtctttgcacctggatctgtacctggccatagttgggctactggccatcactgctgtatacacggttgctggtggcctggctgctgtgatctacacggatgccctgcagacgctgatcatgcttataggagcgctcaccttgatgggctacagtttcgccgcggttggtgggatggaaggactgaaggagaagtacttcttggccctggctagcaaccggagtgagaacagcagctgcgggctgccccgggaagatgccttccatattttccgagatccgctgacatctgatctcccgtggccgggggtcctatttggaatgtccatcccatccctctggtactggtgcacggatcaggtgattgtccagcggactctggctgccaagaacctgtcccatgccaaaggaggtgctctgatggctgcatacctgaaggtgctgcccctcttcataatggtgttccctgggatggtcagccgcatcctcttcccagatcaagtggcctgtgcagatccagagatctgccagaagatctgcagcaacccctcaggctgttcggacatcgcgtatcccaaactcgtgctggaactcctgcccacagtgccagcaccatcttcaccatggacctctggaatcacccggccagagcagaagccatcatagtttccctggaagaaaaccccttggtgaagaccctcctggacgtcaacctcattttctgcgtgagctgcgccatctttatctggggctattttgcttagtgtggggtgaacccaggggtccaaactctgtttctcttcagtgctccatttttttaatgaaagaaaaaataataaagcttttgtttaccacaaggaaaaaaaat

SEQ ID NO: 253892 - DNA, 1601 bp, Homo sapiens
gaggcgggacagtggaagactggctgaggctggagtttggagtttgacccgcttggaggctctctcagcagcgggcatataggaggaagggtcactgctgtctccggaagctcttggctgcaaagagagaggatcccgggtatctccctccttacaaccaccgccacctcctagtgccttagaagccactgacagcccccagggcaggtgagccctgcatctggaataaggatccagaggtctcgttcaggaccatggagagcggcaccagcagccctcagcctccacagttagatcccctggatgcgtttccccagaagggcttggagcctggggacatcgcggtgctagttctgtacttcctctttgtcctggctgttggactatggtccacagtgaagaccaaaagagacacagtgaaaggctacttcctggctggaggggacatggtgtggtggccagtgggtgcatccttgtttgccagcaatgttggaagtggacatttcattggcctggcagggtcaggtgctgctacgggcatttctgtatcagcttatgaacttaatggcttgttttctgtgctgatgttggcctggatcttcctacccatctacattgctggtcaggtcaccacgatgccagaatacctacggaagcgcttcggtggcatcagaatccccatcatcctggctgtactctacctatttatctacatcttcaccaagatctcggtagacatgtatgcaggtgccatcttcatccagcagtctttgcacctggatctgtacctggccatagttgggctactggccatcactgctgtatacacggttgctggtggcctggctgctgtgatctacacggatgccctgcagacgctgatcatgcttataggagcgctcaccttgatgggctacagtttcgccgcggttggtgggatggaaggactgaaggagaagtacttcttggccctggctagcaaccggagtgagaacagcagctgcgggctgccccgggaagatgccttccatattttccgagatccgctgacatctgatctcccgtggccgggggtcctatttggaatgtccatcccatccctctggtactggtgcacggatcaggtgattgtccagcggactctggctgccaagaacctgtcccatgccaaaggaggtgctctgatggctgcatacctgaaggtgctgcccctcttcataatggtgttccctgggatggtcagccgcatcctcttcccagatcaagtggcctgtgcagatccagagatctgccagaagatctgcagcaacccctcaggctgttcggacatcgcgtatcccaaactcgtgctggaactcctgcccacagtgccagcaccatcttcaccatggacctctggaatcactggaagaaaaccccttggtgaagaccctcctggacgtcaacctcattttctgcgtgagctgcgccatctttatctggggctattttgcttagtgtggggtgaacccaggggtccaaactctgtttctcttcagtgctccatttttttaatgaaagaaaaaataataaagcttttgtttaccacaaggaaaaaaaat

SEQ ID NO: 253893 - DNA, 1559 bp, Homo sapiens
gaggcgggacagtggaagactggctgaggctggagtttggagtttgacccgcttggaggctctctcagcagcgggcatataggaggaagggtcactgctgtctccggaagctcttggctgcaaagagagaggatcccgggtatctccctccttacaaccaccgccacctcctagtgccttagaagccactgacagcccccagggcaggtgagccctgcatctggaataaggatccagaggtctcgttcaggaccatggagagcggcaccagcagccctcagcctccacagttagatcccctggatgcgtttccccagaagggcttggagcctggggacatcgcggtgctagttctgtacttcctctttgtcctggctgttggactatggtccacagtgaagaccaaaagagacacagtgaaaggctacttcctggctggaggggacatggtgtggtggccagtgggtgcatccttgtttgccagcaatgttggaagtggacatttcattggcctggcagggtcaggtgctgctacgggcatttctgtatcagcttatgaacttaatggcttgttttctgtgctgatgttggcctggatcttcctacccatctacattgctggtcaggtcaccacgatgccagaatacctacggaagcgcttcggtggcatcagaatccccatcatcctggctgtactctacctatttatctacatcttcaccaagatctcggtagacatgtatgcaggtgccatcttcatccagcagtctttgcacctggatctgtacctggccatagttgggctactggccatcactgctgtatacacggttgctggtggcctggctgctgtgatctacacggatgccctgcagacgctgatcatgcttataggagcgctcaccttgatgggctacagtttcgccgcggttggtgggatggaaggactgaaggagaagtacttcttggccctggctagcaaccggagtgagaacagcagctgcgggctgccccgggaagatgccttccatattttccgagatccgctgacatctgatctcccgtggccgggggtcctatttggaatgtccatcccatccctctggtactggtgcacggatcaggtgattgtccagcggactctggctgccaagaacctgtcccatgccaaaggaggtgctctgatggctgcatacctgaaggtgctgcccctcttcataatggtgttccctgggatggtcagccgcatcctcttcccagatcaagtggcctgtgcagatccagagatctgccagaagatctgcagcaacccctcaggctgttcggacatcgcgtatcccaaactcgtgctggaactcctgcccacagtgccagcaccatcttcaccatggacctctggaatcactcattttctgcgtgagctgcgccatctttatctggggctattttgcttagtgtggggtgaacccaggggtccaaactctgtttctcttcagtgctccatttttttaatgaaagaaaaaataataaagcttttgtttaccacaaggaaaaaaaat

SEQ ID NO: 253894 - DNA, 502 bp, Homo sapiens
gctcccaaactgatgggggagagagacatcatcccccagctctgggagtttccagtctgatggaggagacagagcctgcttcggtaactctcactctgcgggggaagactcagccctatccagggagctcccacactttcaatggggaggcccacccagatctgaaaatgtctaatttcaggctgggcacagtggctcacacctgtaatcccagcattttgggaggctgagacaggaagatggcttgagaagaatttgaccagcctcggcaactgttaagacctcgtctctacaatgaaaaaacatttttttttcattagtctggtgtgtggtagcacgtctgtagtcctatgtacgtgggaggctgagtcgggaggatcccttgtgcccaggagtttgaaattacagtgagctgtgatggcgtcactacattccagcctgggtgacagagcaagaccctgtctttaataataataataataaaattacaaataacaaaaat

SEQ ID NO: 253895 - DNA, 323 bp, Homo sapiens
tgggtgtgtgtgggtgagtgcaggtgtatctgggtgtaggtgggtgagtatgggtgtgtgtctgcgtgtaggtgggtgagtatgggtgtgcaggtgcgtgtgagtatgtgtttacattgtggtatgtgtctgttgggtgccgccattagggatttggaagagtgaggaccataaacttgtaaacatttctacatgcctggtccataagaagtgtaccaagcatgatcaaaagtaactaaaccaagtaaacaaattagacattaattaaacttaatgctgggcaggaaagaagtattcaaggccaggtaaaatgaagaaatata

SEQ ID NO: 253896 - DNA, 212 bp, Homo sapiens
acagagagaagtggggagagacagagagagaaatgggggagagacagagatagaagtgggggagaaacagagacagagagaagtgggggagagagagacagagaagtgggggagagtcagagatagaagtgggggagagacagagaagtgggggagaggcagagaaagaagtggaggagaggcagagacagaagatggggagagacagagat

SEQ ID NO: 253897 - DNA, 351 bp, Homo sapiens
ggtgggtggcagtggcctcagcagctttccccagcagctccaccagctggaaaatgttaagacaacaactccatccttgcccctagggagaacctgtttgtttagattccacagcctcctgttaagaggcaagtgtccgtgcaggggttggttgaatcgggtaaaaattgacctgtgggtaaactcttcattgtcctccactaggcgggtgctagaatctgtggacaccgacaaaggacattagctcatttgttcatcctttcaaaggatactttgcatacctactgtgtgccaggctccgctgggtcctgagaatacagagaaaacaaaaaacaaaggtccctgctttcc

SEQ ID NO: 253898 - DNA, 293 bp, Homo sapiens
ccggggacgcctcacaatcatggcagaagatgaaggaagagcaaagggacatcttacatggtggcaggcaagagagcttgtgcaggggaaatcccattgataaaaacatcagatctcgtgagacttactaccatgagaaccatgtaagaaaaactgcccttatgatacagttatctccacctggtcccacccttgacacatggggattattacaattcaagatgggatgtgggtggggacagggccaaaccatatcagtctgtaactaatctataaaagactcccttggctgg

SEQ ID NO: 253899 - DNA, 290 bp, Homo sapiens
gaagcaccatgaaatcaggtgggtgatggtttcctttcctggtgcttttaaccagttctcccagagtggagataaacatgaagttaatatggggaatgttgatcttcctaaatgcagctccaaatgatagacccaggacaggtttccaaacagctgttattcagattagaggcaaggacttgatgtattgctcccattagaaagtgtcctaatggaaagggcctgcactttctcctggccccatctgaattaaacaattggagtattttaaatcaagggtcataagtgtc

SEQ ID NO: 253900 - DNA, 415 bp, Homo sapiens
caggggaggggcacagccagctccagatgtagaaagaccctttggggtcatggctggagggcaagctggtggaggggactggactggagggggacccaaaaggccagataagaggttgagatagaccaggcgcggtggctcatgcctgtaatcccagcactttgggaggccgaggtgggtggatcatgaagtcaagagattgaggccatcctggctaacacggtgaaaccctgtctctacttaaaaaaaaaaaatttccaaaaaattagccgggcacggtggtgggcgcctgtagtcccagctactcgggaggctgaggcgggagaatggtgtgaacctgggaggtggagcttgcagtgagccgacatcgtgccactgcactccagcctgggtgacagagtgagactccgtctca

SEQ ID NO: 253901 - DNA, 867 bp, Homo sapiens
gaacaaataagctcaaaggtctggaggagccaacagacctgtgcaaacctcagctttccccagttcagctccttttccatcttcttgatttctgtatttttaaaaaaacaaggctgcattatattgtaggagaacaataacccactggaccacatcctggtaaggaagagctgcaaagccatggcctcatcactgtagacataagcttccaacagtgccccattgtggcatttgatttaactcagcccttcaaaaacatgcatttctgacttaaattctgcacaccatcaccatatccccagcagatgtcgctaacgtctcacattttggtcatgccagcagcacgcatctcaggcaacaaatatttattaagcagcgaatgtgcattgtgcaccaggctgagcactttgtagataaaaattcctggggcatgacccaggacatgaagaaaagttacttaagtgaggaggagagaagagatccagatcattttttgatgacaaaagaaggtaacataaaaaaataatggactgtctgaaaagttctttcccattgaggtacaagtttgtttctggctatgcaatgtgaaattggaactgaatgtctgggaccacctcgaagcttgtttcaaaggcctattactacgtgtcttttagacagattttatttcagcttgcctaattgaagcctctggaatctctaatgacagaagtggtaattcatatttctacatttcttctggaaaggaaggcccgaatgagaaggcagcactaaacaaaccgtgaagtcaaagttgaagtatggttgctaggggaagagtgtcgagagccccatgaggtggttgccctctgagatggcttgttgccc

SEQ ID NO: 253902 - DNA, 427 bp, Homo sapiens
tctagatttattgttggagtaaaattagttcctagacatactatcttccatgtttgggtattaaataaacactgaatgaatgactcataggatttttgacatagctgagagatactctcacatatttgaaaacctagttttggggccatttgttgtggtgcacacctgtaattccagcactttgggaggccaaggcatgtggattgcttgagctcaggagtttgagaccaccctggccaacatggcaaaaccccatctctacaaaaaaatacaaaaattaggcaggagtgatggcatgtgcctgtagttccagctactcgacaggctgatgtggaaggatcacttgggcccaggaggcagaggctgcagtgacccaagatgatgccactgcactccagcctgggcaacagagtgagaccctgtcaaa

SEQ ID NO: 253903 - DNA, 298 bp, Homo sapiens
tgagattaacatttaaatctctagactttgagtaaagcacatcaggtaaaagcttgcatagaacgaaaagattaacccaatccaagcaagagggaattatcagcagatggccttcagacttgaactgcagtcttggttctttctggggtctccggcctgcctgtgcacacacacacacatgcagacacacacaccaggaatggtgactggtgaagacacacacacacacacacacacacacacccacctctttggtccacttctctagagaaccctgactaatacaactaggatggtg

SEQ ID NO: 253904 - DNA, 695 bp, Homo sapiens
ggcgcccagcctccctacagttttcaaacattcagagaggtgattatggtgtatcttttattctgttttgctttggatcttggcgttcttctagagaactcatctgctcaggagcttctcagtgcatcttccctcccaaacttgtcttacccagcagagaatgaatgtactcaagattaccagttttgcagatgaataaaccaatgattccagaggttatggtgcatatctagagtcacatgactaagaaatgataaaaccaggatttcagccaggttatctgtttcaagacattttcagacaaaaaaatctggagtttgccaccaacaagaaatgatcctagcctcagcatctcagcccacactgggagtgtcaggtcacagtgagccgagatcatgccactccactccagcctgggtgacagagcaagactccatttcaaaaaaaaaaaaaactgaaaataccaaatattgacaaggatttggagcaagtggaaccctcatacattgctgatggaaatgcaaaattatacagccaatttggaaaaataactgggtgtggtggtgtgcacctatttttccaacaacttgggagactaaggtaggaagatcccttgagcccaggagtttgaggttacagtgagctgatggcgccacggctctccagcctgggtgacaaaataaaactgtttcaaa

SEQ ID NO: 253905 - DNA, 432 bp, Homo sapiens
ggcgcccagcctccctacagttttcaaacattcagagaggtgattatggtgtatcttttattctgttttgctttggatcttggcgttcttctagagaactcatctgctcaggagcttctcagtgcatcttccctcccaaacttgtcttacccagcagagaatgaatgtactcaagattaccagttttgcagatgaataaaccaatgattccagaggttatggtgcatatctagagtcacatgactaagaaatgataaaaccaggatttcagccaggttatctgtttcaagacattttcagacaaaaaaatctggagtttgccaccaacaagaaatgatcctagcctcagcatctcagcccacactgggagtgtcaggtgctgaaaaaaaatttttttaattttacatagtaaataattttataaaaaagaaa

SEQ ID NO: 253906 - DNA, 327 bp, Homo sapiens
acatgacaaaaccccatctctacaaaaaaaaaaaaaaaaaaagtcataaataaatgctcagaattgtcacattgaaattggatcattctcatttataagcaatatcataaatgacaactaggggaggtcaaaggggttctactctagtcttaaagccacagcatggttgtaagtgaaatatctaaactgtgttcagggttttagttacttgcctcacattgtcgaagttcaggattcagtaccatttaaaccttctcaaacaaacaaataaaaaagttatctccgttgcattccagcctgggcaacatagtgagattgaatctcaaa

SEQ ID NO: 253907 - DNA, 1308 bp, Homo sapiens
tgtcatttccagtagtgaaccctcagctgtctctttgtgcctccgagatactgtcaagcgttgtagcctgagaaattgacccactgagcctgcttaattgtgtgcaaacccgtgttgaggcgttcttcctaggccctaatttacgtaggaataggttttcccttccggtctgtgtataatgagaggggagaacgttagtgctaaggcgctaagttctggataaatacttgatttgatgtgatagtgtgtattactctatcagaaatgcagagcgttgtatgatttttctgtgtacacgcgataagagcaatattagttgcaaaaggaagttttcatctttgaacattaaaggtatcctttattcttgatcactatagcatgcaaaaaagaaactatattttctgtcctgttctttgtattactgttaaagagttggtaaactgccgtcttgctgtgagactgggaagtcggcaatgaagttagatttgtattcatgaacatgatctgcctgtcatataggcttgctttgacttgttttttttttcagtagtggcaaagggttttctgccactcaatccacactttcctccgcattggtatctccgttgaccattttgcaaaatagtttattgagattaggggtctgatcttttgtataacctgttgtagtgaactgatcatatgcgacttgactttggccaatagtacctcgtgcagtgtacagtactactatttagacttactgatttgggtaatagaaaagctatgatgttagaaatgttgtcgttgtatattggagaaattttgaagttgcatattggagtaatttagtcctgtatgctttgtaaatgagtgcattctattgtcgagagtaaatacagtattttgtagtataaacttaagcttttagctgaagaaattggcagcatagttggagtgtggagactattcttaaaacgcaaatgttttaaattacaaggaactgtagtggtgtgtaggctgtaacaattcctggtgccaaatttgggagattatttggttgagctactttctataaagaaacatattaagtatctgcaataaaagtggatttgtagctatacacaagggattttacattataaataataactcaataaggcacctttctttgctctttgtgtatctgccagttaagaccaaaacatctcatattttcactggagcttcctgccaaaacaaatactggttttgcattggctttgctgctcagtttgaaagctaggggaatctcttagagcctactctggttctggaggctgcctgatt

SEQ ID NO: 253908 - DNA, 623 bp, Homo sapiens
cacttcctggtgttcctttaacacagctgactggctcctgctgggaaagaagatgggcaacctcagccagctatcctctggagaagacaagtgactgcttcgaaagaagacctagaagtattacttaattcacctctacaggaggaatataacttccccccagaccattatggcctccctgcagtttgtgatctctttgcctgtatgcagcttaaagttgataaaaagaagtggttatatcaaactcctctacagatgtgaaggagtggacaagagttgagcagcctttctgctgattatcacacatcatgagctgagtgactgtggcttgccaaatcattgtgtttctgggtctgaccagttagcttagttcttctcctgcctaattttgaactagtaaagtgaagtgagtcatcagattataagttactgtttaaaagaaaaatgttgtgtattgatgctgagctgattcagttccttccttcttacagaagtgttaattcacccccacaccagaaatgcagcatctttgtgggtatgtctttttcacaagcctccaaggctccttagatcaggtcgttactaaaagtacattaaaacactcaagttttaaaaatgaaaaa

SEQ ID NO: 253909 - DNA, 486 bp, Homo sapiens
agaaaaattgtctgcatgagaagcctagacatttctaagtttcaagcataattataaggagtagtgtgatgtacttgcctatgctttgttcttggcttgctggcaccagttttttttcttgaatctctaaatctactttatatttttgaaagtgttttaaaactatttttaaattaagatccttacacttttatttgtactctttgaaaataagaccataattatacaacaagtaagttttgatttttttctgtgtgaaatctgcatatatatatagtgtcttgctatgttgcccaggtcttgaactcctgggctcaagcagtgctcctgcctcagcctcccaaagtattgggattacaggtgtgagctgccatgcccagcctgattgtttcgtttcttatgatcaaaagagaaatgcaatcagaagacttgttaactgttttctagtatcaaatttgtaaaaataaagcagaaaacatcatccca

SEQ ID NO: 253910 - DNA, 373 bp, Homo sapiens
ttctctcccttcccgtatttaacagcttgcacctcagtttctttatgtaacagcttgcacctcatgggacaacacaacccgtgtggcagaatttttgtgaagagtcaatgaaatagtgtatgtgatcgctcgagcagtgaccggtacggaggtgctgaagagatgctgcttgttactttctttctaggtaccacagagtccgtgttcacacagtgtaaatgccatctgtgggaatttaggacactgtcactagagacacagtagtttaaatcacagacgtaattaagaaaacccaatatactataattcagaaaatccaaatctgcaaaccaaatgcaaattattctctttgcagaaggattcttctattaaa

SEQ ID NO: 253911 - DNA, 396 bp, Homo sapiens
atctttattgaatagatgggttgtggaaactgacagccacagattaaacgcagaagaaggcactagtgcacatgatcgggactgctcactttatttaacaagaatcaccatagtgatgagagatgtgtgagggaaacggcactgcggttgccaacagcagcaggctggggccaacgggctcccggaggcaaagcctggaccatttctgaatgaggggctcatcatcgcctagaactttatgctttgtgtgtgtgtgggggggttctttttgtaaaattgtattcattttaacagcaaatgttgaaaatgtttcaatatgcattctcccctaaaatgtgtagttataagataagagacttggttttcttgccatttttcctttgctgattaaaaaga

SEQ ID NO: 253912 - DNA, 419 bp, Homo sapiens
aaaacttgagatattcaaaaattgtgattccccaacacccacttacttacatatttttggtcaagtatttattccctgctttggttcacatttgtaatttcagatttattagaaagctaatttatatatttttcttccccttcatttacaaactgtctgttaacagattggcaaccaagactaagttttaaatccagaagagagaaatgtttcacgcaagcagtcccccaactcccaacacacactccctttcattccgagcactaaataggtagcttacttgacaagcttcctttaattacacacagacatgggggttggggtaagaagatggtggtaaatatgaaaagtaatctttaataacttctgcttttgtataaaattgtaagtgaagtcaaaagaaatattcttagagtaat

SEQ ID NO: 253913 - DNA, 242 bp, Homo sapiens
tctgcaccagcgagaaccccctcggcctacacggaagcccctcaccaggcaagccgggagccccagaccccgtggcccggagtgggtcgctctgtgacaccctggacaggtcactcaaccacttggcgcctcctcggccactcagaaaacacctgccctcccggagaccccggtgaaagccgagcactcctgcaccctccttccgagcccacgcacaccaggacaccttcagccgcgtctcc

SEQ ID NO: 253914 - DNA, 246 bp, Homo sapiens
cagggtcgatgagagggtatcctgtgtgcctgtgtgtggaaagcggggagtggtagtcatggaaaagaaggttaggaacaaaaccatgctcacttattttttcaacaaataattattgaggcccctgccaggtgctaattcctactccagaggaagggatgtgatagtgaacaaaatagatctctccctctcctgccaagaaaaactttcatgaaccttacattctggtggaggaaaggtttgaca

SEQ ID NO: 253915 - DNA, 621 bp, Homo sapiens
tatttttcctaaagagaaatggttataaactaaatcacttggcctgagagccagtaagtaggcatgaaccaaaaggtactcaggagagaagagaaagaaaagcgatgagtagcagtagaaaacacctacagcagatgcagcagatattctgtaagcaaagagaaccagtaatgaagaagacagaaacaactgtgaagtagaagaggactgagataaaaataattcagatctcaataacctttaaataaaacagcaggggctttttaacatactgcaagcagggcaaatgcagccaccctaaaacttttagcaaccaaaaccaggggaattgcatgtaataggtaacccttagggcctaacctgccagatacagaattttagaagtttgtctaaacatataaagggtgaatttacatgccagaggtgaatttacatgccagaggtgaatttctgaaataaaaggaaatttttttcaatagttcattcacataaggggcaaataagcatagtttccacagatggtttttttttgtctttccccagatagagctttgctcttgttgcccaggctagttttgaattcctgccctcaagcagtcatttcacctcgaccttccaagt

SEQ ID NO: 253916 - DNA, 602 bp, Homo sapiens
tatttttcctaaagagaaatggttataaactaaatcacttggcctgagagccagtaagtaggcatgaaccaaaaggtactcaggagagaagagaaagaaaagcgatgagtagcagtagaaaacacctacagcagatgcagcagatattctgtaagcaaagagaaccagtaatgaagaagacagaaacaactgtgaagtagaagaggactgagataaaaataattcagatctcaataacctttaaataaaacagcaggggctttttaacatactgcaagcagggcaaatgcagccaccctaaaacttttagcaaccaaaaccaggggaattgcatgtaataggtaacccttagggcctaacctgccagatacagaattttagaagtttgtctaaacatataaagggtgaatttacatgccagaggtgaatttctgaaataaaaggaaatttttttcaatagttcattcacataaggggcaaataagcatagtttccacagatggtttttttttgtctttccccagatagagctttgctcttgttgcccaggctagttttgaattcctgccctcaagcagtcatttcacctcgaccttccaagt

SEQ ID NO: 253917 - DNA, 355 bp, Homo sapiens
agacctggggctctgagaagccgatggcttgcctgagaccacccagctgagaggcagagctgggatccgagtctaggtctctgtgactccattctctgtgcttttcccaattccgctcagaagtgtcccaggtagtgccagggaagagagatgggggagggggagctcaggcagctgtggtgacattttcagagggaaatggtctgccctagaggggcccagagggccttttgtgctttctttatacttcctggatctgaactggaaaaaaacatgcaagggctgcttcacacatgattcctgattcacgcagacacaaaagaacgaacccagccaaacaaatcgcacagcccaa

SEQ ID NO: 253918 - DNA, 303 bp, Homo sapiens
tgagaaaccaaggcccagagactgtggatgacttccgtaaggtcacacagcaagccagccgcagaatcaaaagtcaacttctgactcctaaaggagaactgtttccattccacagtgctcaatgcagcttccccctgacctgcagcctgctgggcagaattgctgatatggcaaatcatttctatgtctgcagtcaggaaaccagagctgttggaaattatctacacacacacatacacacacacacacacacacatacacacacacacacacattatccttttccttcttctaagtaaaaaa

SEQ ID NO: 253919 - DNA, 6799 bp, Homo sapiens
  misc_feature (805)..(805): n is a, c, g, or t
  misc_feature (2200)..(2200): n is a, c, g, or t
  misc_feature (3643)..(3643): n is a, c, g, or t
  misc_feature (6522)..(6522): n is a, c, g, or t
ataagaataaaaattaccccaaatttccaaatcaagaagtaatcatggttcaggtttgggcagatgttctttctaggcatgaacacacgttatctcattgtttacttaacaccgggttataaacatttacccatagcatttgaaaggtagctatagatagaaaagaatcagagaagttctaaaacagctcttgcgctttgtttcaaattctctgcaggaaagatgaggtcttcagccttttttttagctggacggcaccgttgcagcagtggtgaacagggcactggattgagtcaggaaacccagctgtgaccttgggcaagccacttgccctctttgagcttcactcctgctaaggcaaggggcgctattcgtaccctgtctgcccacctcacaggctctggtgaagtccttgatttgaacgcctttagctcccaaggttgtggtttggagatagggcaggtcacatgaccatgaagactgaaggagaaacgtggaagcacgtgtgcctgttgcttcttttccaacttaaaatgcttggtgatctcctgaagactccagcctcctctctgggaagccaggatccacagaccctttacctgcgggtcatgggcagtcccagatggtccccctccccaacagagggggtgcagtgagacctccggaagttactgcctctgttaccctcaaagggattttcagatcagacagcccccctactccaagggacgtgtgtggagcttggtacctttatttatctcctgctccaacccctgtggactgcctgcacccagaatggggcctntcctgctggcaagtggctgagaacctccactccactcagcagggctgttccccatttaccgaaaagctccgagagaaaataactaaccccatggcgccgctgtagctactggcagagcctcctggtccccacctctagcgcctgtggtttttgtttcatgcagagtgagcagtgaatctgggatcccatcagcagtcagtttgggtgcctgcgaggcacaatgatagatgttggtgaagggtatgtgtgaggatattaattaatattaacatgctagttatattaatattctcattggaatttgtggggctttgcaagttatatttcaaatatatggttttatgtaatccttttaactgccctgaaaccttgaaattattgcacctattttatagatggagagactgaggctcagaggggtgaattgcctaagatcctgggggaggaagcacccaggttttctggttttgagtcctgggcccttcctgctgagtagctacccccaacacagacctgcccttggagagcttgcagccacactgggaaggccagtgtattggattgctgcttagacctggaaagcacgtgaataaagcttcaggttaaaaccatgggggttccaggaggcagcagtcggctctgcctgggggtgagctgaggagccggtgctctctggaacaagggtagttgggctgaggctcagtggacagtggaggttggcaggtgaagtgcaggaggtctttgcagggagtgggaccaccttgagcacacacagaggaatgagacaggcaggttactcaaggagcagaggtctcgtgaccacttcccagagcatgtggggtcctagcctcatctccaggaggagaaagtgcatctatacacagatttgtcaatggagtttaaataggatgtgggaaaatctagattttccaaaacagtacatatttgctttgagaagaaaggtagatgcaggatgcataggttagataattttaatagcagtaacctcagagcatgtaagtatgatttgatttactggagtgcctggccgtctcagtcagtgggagcacggcttgggctgggagatgaggttgacaagggttctttctctcaaatgcttcctttggtttgctaagaggtatctcctactcggccgggggcagaagacttttccttcttttcccagtttgcagtagttgggccagatttgtggaagtgggagaaaggcctgccctgcttctacatagagttggctgtcctgacttgatactcggtgtgccttccagagacccgcctccatctcctcaactccctggcttgatgcttaggtggtgatggctgttgggcacaggagttacataacagatctgtgatggacccaggagcagagccagntgagtgaatgtcatggagtgggagtggtcttgcatggctgtggtgtcccctgcagcttgtgcagggtatgtggcaagaggtgctcaccactcatctggaatggctagactggaagcacttggccctcttgggctctgcacccccaccccctcccacctggcctgcctgctcatcttcatgggcgcctggggagaccaattatggctgcttgtcatagtggctcaggtcaccgttcacacttcctgggaccaggacatcagagccctgagaagggtcaaggggccaagtgggcctagccttttactgacagctgggaaatgcaagcgtgtggaccagagcaccaagtgagttggggccggtgtgggttcagcaccgtgtccctacccagagctccatttgttgaaaacagcctttctctaccgtttcttcacttggacaactttaaactatgtattggctggtcgcggtggctcacgcctgtaatcccagcactttgggaggccgaggtgggcaggtaacttgaggtcaggaggtcgagaccagcctggccaacatggtgaaacctcatctctactaaaaatacaaaaattagcccagcgtggtgacacgcacctgtaatcccagctactcgggaggctgaggcagaagaatcgcttgaacttgggaggcaaagattgcagtgagctgagattgcatcaccgcacttcagcctgggagacagagcgagactgcatctcaaaaaacaaacagaaacctacatattttctatatttcccccaacattgaggctcatttcttggatgaacaatttaaatgtactgtgcctctctggcaatattttccaaaattacagatgtttctatactttcaccggcagctctgcctcccagaatttattctacggatgggttaacacgtgtgcaaaatgatttatttgcaaggttcgtcattgttgccttatttttaatagcaaaagattggaggcagcttaaatgttcattcgcaggggccaatgaacaaaccatggcccgtctaaacatgggataccgcgtggccataatacataagatggacgctcaacgcactgtgccggattgagcagcaaggtggattgccgagggaagaagcaggtctgggcggtgtgtctcggagctgccatcagtgtaaaagggaagagaatcaaaagtgtcttgcttgtctatgcccagggggtctctgggcagacaccgcaagtcggtgattgtgatgcctctggagggggtgctggtcatgggagattgcttgtttgctggagatcccatgtaccttttgattgctgaagcaggtgaatgtacgcctttccaagaaattaaaatgggccaggtgcggtggctcacgcctgtaatcccagcagtttgggaggctgatgttggaggatcacttgaggtgaggggttcgagaccngcctggccaacatgatgaaaccccatctccactaaaaatacacaaattagccagacatggtggtacatgcctgtaatcccagctgctctagaggctgaggcaggagaatcatgtgaaccctagaggctgagtttacagtgagccaagatcatgccattgtactccagcctgagctacagagcgagactctgtctcaaataataaaataaaataaattaaaaacataaggactgtaaccttgcctcctgcccagtgtaggaaggtcaaggttctggctacttctcaagtacaggagcctcactcaggccccagaccactaatcaaaaaatatgtgcttggttctcacaaaggggccgagtgtgagggcttgggtgttgcttggtaaatacgacccccggtcccggccttggagagatggagccctctctgggccccttggacacactgctgttggctgactttgtcattttcaacccttgctccgattggctcacgtcatgatttctgaaacctttgggggcttccccactgacagaaagatacactttaactcagcactgggcatcccaggccctctttactgggcctcttcttgagccgcacttggcctgtcaccccttcctctgtctgccctcttaactccccacctccgtgcctttgctcatatagttccctttgcctgcctttccgtccagagcagtctccacgtgcccaggtcctgtctgactttcaagggccagcttagtttccacttctgcactgccttctgacctccctggcttctgtgtaaactgcccagatcaagccacacaatggttcctgcacccaaggaagctccctggggccccctcctggccactcgctcttcgccggtagtcaccactcacaccttggcactttcgcgtggtgcctgccgctgcctgtttgggcctcccacacacagagtgtacagaacggactcctcggtgtctggctgccttcccgcagcactgtcagatcatccaggttgcctgtagtggccctttggtttttttctctgctgcgtaggagttcaccaaatataccactatttattcattctcctgtggacaggcattgggttatgtccagcctcttcggtgaattcattcttgtctttgggggcgcgtgtgcgctctttgctgggtatacacccagggtgggttgatggcttacctgactcagaatgtgtttgcatgaatgaaattcaggttggtatgagaaatctagggtgtcctggctggagccaggcttcttgattacagggacagagcaggtacagggatcctggtttagacagcctgctcccatggggtggtagcattgttggggtgcaggatgctgaatctgcaggggacctatccgctcagtgcccagtgggattttagctggctggaaaggtggtcacatgtagaggggctcaacaatccagctaaagaggctgagcgttggtccattgttctcaatttgagagaaaactgagatcatcaaaattaggactggtatgtactaaaggaaagaacctaattacaaggctgaattgagtaagccctcgctgagggactttggatttctttgttgttcccctttatttctgcacccccacccaagtgacagatatgtacatgattggatgattttgctttcctggttgagagattcctgggaacttggcccaggagaagggggagaaatgtggagccgctagagtggcctccgcttgtttgtgttgattgaaggggagacggaaggagagctgtggacccctgaccccttgtgagggcatgtgatccttttcaaaaggctcaccaggcagaagtgcctggccaggggccgctctttccctctaatcccctctggagaagggccaggctgtgggttgctgacctgctctgatgtggatcagcctcccccaataatgcagctgcccagaagctcagagagcccaggcaacccccaaaggcaggagggccggctgtcattcccgttgtcattcccaggcggctggagtgggagcagagcggtcagttcagatgaacagtgctcgagtctgaccccaaccagcgagttatggtaagatggaaggttctccatctatattaaataagagaacaaaagccctcccaggctgcatgaatattccagggatatatatgtgaacgggttgccagtttagcttggcctgtgggtggcagccgcctgagtgagcacttcgtggctgcagctctaaagggtttggatctgaaactaatgaatgaaaatatgacctcagaagatttaaagagagcaaatacccagcaacagaacctgggtcccagagactgttgggagcatgaaatcccaggctggccgaaggaggaagtgggagagcaatggcagctgacatcacatggtgccagaccttctcagtgctttctgtgttcactcattattccgtccctctctctcagaggcaggtatggctgcttccccattttatagatgaggaagctaaggcaaggagaggttgtgtaacttgctcacagacacaaagctagccagtggcaaagctggaggtcaggtctaggtggtcaggctccagagttctgcggatttcacagcacggcagtggcagtcggaagaaccatttgtcaggtgattgtgggcaaatgacgtcagcccttcaaacctctgttttgcatctgcaagctgcttgctgctgcaacaaattaccagaaacttagtgacttaaaacacaaattaggtcgggtgcggtggctcacatctgtaatcccagcactttgggaggctgaggtgagtggatcacttgaggtcaggagttcgagaccagcctggccaacatgatgaaaccctgtctctancaaaaatataaaaaattagccaggcatttggccgggtgtggtggatcacgcctgtaatcccagaactttgggaggacaaggtgggcggaacacaaggtcaggagttcaagaccagcctgaccaatatggtgaaagcctgtctctactaagaatacaaaattagcaggacgtggtggcacgcgcctgtagtcccagttactgggaggcggaggttgcagtgagccaagatcacgccactgcactccagcctgggtgacagagtgagactccgtctcac

SEQ ID NO: 253920 - DNA, 424 bp, Homo sapiens
ctcactctttaattggcactggcccctaagtttgccaggagctcgctgcccgctcggagcagggtcccggccgggagccgctggtgggggcggggagtccgggagccgcaatccagaagcgtcgtgggccatgtatatttcatcaaacggactttgggtgcgtcgcgtctcactgccatcagtgctatgtgcagtgacatttctgacttgagtggaggaatgcgcgaaggaaacccgggcgaaattggtattagaggatcttcttggcgccaatgctaattgtcctgatttatgccccttctgactaagctcaacgtcttcatctgaaataaaatgaaagcggtgccaagcggcatagaaccgcctggccgctggttctgatccccgggaaccagaaaatcgtcctgcggcttgaaaaaaaaaa

SEQ ID NO: 253921 - DNA, 6900 bp, Homo sapiens
  misc_feature (30)..(30): n is a, c, g, or t
ggggttcggagcgcgaagccgccgctgggncctcggcgcgccccgcgtctgcgcttgctgccgcgccccggtcggcgcgctgggagttccagccatgctcttctggcacacgcagcccgagcactacaaccagcacaactccggcagctacctgcgtgatgtgctcgctctgcccatcttcaagcaggaggaaccccagctgtcccccgagaacgaggcccgcctgccacccctgcaatatgtgttgtgtgctgccacgtccccagccgtgaagctgcatgaagagacgctgacctacctcaaccaaggtcagtcttatgaaatccgactactggagaatcggaagctgggagactttcaagatctgaacacaaaatatgtcaagagcatcatccgtgtggtcttccatgaccgccggctgcagtatacggagcaccagcagctggagggctggcggtggagtcggccaggggaccggatcctggacatcgatattccactgtctgttggtatcttggaccccagggccagcccgacccagctgaatgcagtcgagtttttgtgggaccctgcgaagagagcttctgcattcattcaggtacactgcatcagcacagaattcacccccaggaagcacgggggcgagaagggagtgccctttcgagtccagattgacacgtttaagcagaacgagaatggggagtacacggagcacctgcactcagccagctgccagatcaaggtgttcaagccgaagggagccgatcggaaacagaagactgaccgggagaagatggagaaaagaactgcccaagagaaggagaaataccagccgtcctatgaaaccaccatcctcacagagtgctctccatggcccgacgtggcctaccaggtgaacagcgccccgtccccaagctacaatggttctccaaacagctttggcctcggcgaaggcaacgcctctccgacccacccggtggaggccctgcccgtgggcagtgaccacctgctcccatcagcttcgatccaggatgcccagcagtggcttcaccgcaacaggttctcgcagttctgccggctctttgccagcttctcaggtgctgacttgctgaagatgtcccgagatgatttggtccagatctgtggtcccgcagatgggatccggctcttcaacgccatcaaaggccggaatgtgaggccaaagatgaccatttatgtctgtcaggagctggagcagaatcgagtgcccctgcagcagaagcgggacggcagtggagacagcaacctgtctgtgtaccacgccatcttcctggaagagctgaccaccttggagctgattgagaagattgccaacctgtacagcatctccccccagcacatccaccgagtctaccggcagggccccacgggcatccatgtggtggtgagcaacgagatggtgcagaacttccaagatgaatcctgttttgtcctcagcacaattaaagctgagagcaatgatggctaccacatcatcctgaaatgtggactctgagcagcagtggacctcatacctgtctccagctcccagccctgtggatccccgtggatgtagacattgccccactgtaagctgtggcctcaccaggcaagctgaggccaggagggaccctgcccagtctgtgaaagctacagagcaccaaccagcagaagcctgtggacaccaagtacggtgtacagaaagccagtggctcctttctcccttcctcttggcctccagattttgaatggttccttgttcttttctattggtccaaccctgacgttctaaaagggcaaacagtggagacgtctgctctgaaatccctcatcccttagttggaagctgattgggtatcttggtgctgcctgtattggtcccttctgaccactctcctgcctccagagaaagctctgcttcaccctggaagctggtacctttacctcctcctctgggagttggctgcatggccagcactgccgacttgatgggagcagtttgccctcattctcctgtttcaggtttgcttcccttctcagtgaccctggtgagcatccgcctttcctgttcttggatgaattgatgggagtggggctattctgtgccttctacctctttcttctctacgttgtttctaaggatctgctgctgcggaacccaaagatgtgctcctgtctctgcactggcgcattggcatggtagatgccacaatgtatgtgcacggcctttctcagagacattagttctgaggccctttgtggggaggttagggggatggtaatagaaaaagactattttatttcctggcaatcacgggtaaggaggattaggaatgagtattccattcctaggtgtcatcagatgaccttgaccaccacaataccaggccctcttggatggacttatagaaagttagagaagaccttgttgaaccgctgctaaacttgccacaggagcgatgtgttttctctgagtgcccctcacttacatgtttatctttgtttgtagaggctatgtttaggatattttgcctgcatcagaatgggtgcatcatctttcttaatggcctatcgggaaatttgagtgtcagtaactgtggtagactcagaaattcgtctttgtcttgcctctggttcctgggatccagtgatctctactggcccagggcttcagctcttggttaatttaggttcatggggaaccctctgaccacctgaatgggatgtcatagcttctaaatggagcttctgtggaatgaagtgctagactgaaggactaccagaataaaacagggtctacaatggggagaacttgttttatagatgaggaaaccaaggctcagaggggcaaagtcacctgcatggtagcacatagtgatagggtagcgatataaatttatcatataaaccaggacatctcggaataaaaggggctctgttagtcattatgttgggtaatagccatggcattcctacagaacagagtgaggacaggctcctgattcctcttccttctttagagagaagcggggagtgggttaactaacagctttattgagatgtcattcacatgccattcagtttacccattgctagtgtccaattgtattcacagaaccaccatcaattcacagaattacagtcaacgttggtacattttcatcacccccagtaaaaccccgtacccttggtctgtcactcctgctttcctaactcctgcagtccaaggcagccatgaatctactttctatgtaagattaacctactctggacatttcatatatctggaatcatgtgatatctcttttgtgactggcttcttccactgaatgttttctagggccgtccaagttgaggatgtatcagtacttcattcttttgtattgctgaataatacttcattgtatagatagaccacatttgtttattgattcatcagttgatggacatttgtgtgtttttactttttggctactctgaatgatgctgctatgaacatatttctacaagattttgtgtggacatatgttttcatttcttttagcaatatacataggagtggaattgctaggtcttacagtaactccgtgttttaactttttgagaaactgccagactgttttctatagcagctgtaccattttacattcccaccagcaatgtatccaggtttcaatttgtctacatcctcatcaacacttgctattatctgtctttttgcttttagcatcctaatgagtatgaaatgctatcttgtggttttgatttgcattcccctgatggcaactgatgctgagtgtcttttcctgtgcttacgggccatgcgtatttctttggagaaaggtctatccaggtcctttgcctatttttaattgagttgtcttttttttttaagttttctgttttcctaaccactagactaccagggatgagccttctttttattattgagttgggtgagctatttgtatattctagacgccagtcttttatcaggtatatgactggtaaaaatgttctccccttctgtggattgttttcagtttcttgttggtgtcctttgagacacaaaactttttaactttgatgatttccaagatacgtattttttttctattgtcacttgtgcttttggtgccatatctagaaaaccattgcctaatccaaggtcaagaagattaatgcctgtgttttcttctaagaacttgtatagttttagttctcacaatggtctttgatccatttcgagtatatttttatatatgatgtgatgtaggggtccagcttcattcttttgcttgtggatctccacttgtcccactgctgattattgagaaaaatatcctttctccacggaattgtcttggcatccttgctaaaggcctctgcttcttactggatcttctttcctgggacatggtgtcgttgggaagcttacctttttttttttttacttagtctgtgtttggttccaccagttttatgctgcctttctactctgttcttgctgtctccctctttacctgagtcaacggtactgagtcctatctctctctgatgttccccagtcttccttggtgcatgttctagctccacacactagtccttggaggaaggttgagaccaatgatttcctgttatgagtcatgaggaaactgaatcacctagaagtggaataatgtgctcagggtcaccatagcccattagtggaaggaccaggactagacctttagtcttctgaggtccagccccttaggctgtctgtcatcactgtacccaagtgatgtcactaccaaggccaaatgatggtgggctaaattttaattctcaaaagtgtaggaggctaatattgtcttctaagttccaaaagaagatgtaataaaagtctgttaccttaagtgtgctattagtagagtcttccatttttctggcatgcccctggcatctgctcttcttaccttctcgtggttgtagttaaagcttatagcttatgaaagaatagaaaataataaataccaaaaaaaagtacacatggtaatttggtaccaaaatatctcagctgcctaatttagcagctcatcccttccacaggggtcagatgagctaaagctccaggttttatttttcatttgattgacatacagaaaagccatagcccttcccacagctgtccagggtctttcctgtgagtccggaggtgctggcctattgagcaggacagctcttcccagggcattcccaccaacctgtggcttctgaactgtagcttctttttacagtgaaccccagagggaaataagacagacacatgtgctcaggccaccatcttgaactggaagcccaaagctgagttccttactcttaggtcgtcacggtttttgcggggtatctgcaaggttgagataaaccctttcctgtttaccaggttgtcctttctggatgaagggacagaggctgttgaatggaggaataataggtttgctggaggaggggcatggtatgcctgtggaaaggacaggatggggtggggaggtcgaggctttgacttggggtcctaaacaaaggtcaggtgttgccctagtgacctcttgcccagacagcccagagccccttacacagagctattaacctagggaaggctttaccagcagtggactggagccagccagggtcacaagtttccaagtccagcattgcttcaggggctggcctgagtaactgaagatctgaaaatcattaacaagtcgatgaaataaacggaaaagcctcttaggctgttgtcagtggagcagagggagaaagtccctaggcgctcagagggggtgagaaagcagtggatgattgggcgggggtgggggattagatgttgacactgcctggggtgtaggaagaggaacagagaacccagagtcagggtcctagatcccagaccctcgctcagtatgagtctctttgcctctctgggtctctatctcctcctcttacaaatataggcttggtgatctctgaagatggcaccaacctgccatgaaatgaatctgaggggttttcccatttttccctccatcaaaatcgtacaaaaagctggacgtggtggcccatgcctctaatcctagcattttgggaggccgaggtgggagaatcacttgacgccaagagttcgagaccagcctgggcatcgtagtgagactccatctctgtctttttgaaaataaaaaatctttgaaaattgcacaacaggcaggagacctttacgtgtgcccatcctggttgtacacagtgccaccagtgctcctgcagtgcaaggcggcatgcttcttgacatgggtcagattgtgtccatcgtgtctttgggaatcagccctagctcctaactgggctgactacttcctccgcaaacttatgggggctcccagatattccttgccagccaggggccagacacagtgcaggcacagtctgtgtcattggtgcacatgtgcgtgtttacatgtgtacctgggttccttcccttgcccatgaatttgccatgagcacagccagaagcagcctcagcttggcaaggtgtggagatgactgctgttcccttcgcatttggggaaaacaggctccctcggtagctcgatgatcctcttttgatcttgtgtgacctcctggagagtggatgaagctggtggccttagcttttctagacagtgtaagtggcactgggcaaggcccccagagcagggcaaggtctctagagcgggtctcccacatgactggcttcacacaggcacttccgctcgggttgcatgctctgtgtcatcttaccggtccagggttgcaggtaggaaatgtttgtaccctcttctgattgccacctccttcccatcgcccctt

SEQ ID NO: 253922 - DNA, 6705 bp, Homo sapiens
  misc_feature (30)..(30): n is a, c, g, or t
ggggttcggagcgcgaagccgccgctgggncctcggcgcgccccgcgtctgcgcttgctgccgcgccccggtcggcgcgctgggagttccagccatgctcttctggcacacgcagcccgagcactacaaccagcacaactccggcagctacctgcgtgatgtgctcgctctgcccatcttcaagcaggaggaaccccagctgtcccccgagaacgaggcccgcctgccacccctgcaatatgtgttgtgtgctgccacgtccccagccgtgaagctgcatgaagagacgctgacctacctcaaccaaggtcagtcttatgaaatccgactactggagaatcggaagctgggagactttcaagatctgaacacaaaatatgtcaagagcatcatccgtgtggtcttccatgaccgccggctgcagtatacggagcaccagcagctggagggctggcggtggagtcggccaggggaccggatcctggacatcgatattccactgtctgttggtatcttggaccccagggccagcccgacccagctgaatgcagtcgagtttttgtgggaccctgcgaagagagcttctgcattcattcaggtacactgcatcagcacagaattcacccccaggaagcacgggggcgagaagggagtgccctttcgagtccagattgacacgtttaagcagaacgagaatggggagtacacggagcacctgcactcagccagctgccagatcaaggtgttcaagccgaagggagccgatcggaaacagaagactgaccgggagaagatggagaaaagaactgcccaagagaaggagaaataccagccgtcctatgaaaccaccatcctcacagagtgctctccatggcccgacgtggcctaccaggtgaacagcgccccgtccccaagctacaatggttctccaaacagctttggcctcggcgaaggcaacgcctctccgacccacccggtggaggccctgcccgtgggcagtgaccacctgctcccatcagcttcgatccaggatgcccagcagtggcttcaccgcaacaggttctcgcagttctgccggctctttgccagcttctcaggtgctgacttgctgaagatgtcccgagatgatttggtccagatctgtggtcccgcagatgggatccggctcttcaacgccatcaaaggccggaatgtgaggccaaagatgaccatttatgtctgtcaggagctggagcagaatcgagtgcccctgcagcagaagcgggacggcagtggagacagcaacctgtctgctgagagcaatgatggctaccacatcatcctgaaatgtggactctgagcagcagtggacctcatacctgtctccagctcccagccctgtggatccccgtggatgtagacattgccccactgtaagctgtggcctcaccaggcaagctgaggccaggagggaccctgcccagtctgtgaaagctacagagcaccaaccagcagaagcctgtggacaccaagtacggtgtacagaaagccagtggctcctttctcccttcctcttggcctccagattttgaatggttccttgttcttttctattggtccaaccctgacgttctaaaagggcaaacagtggagacgtctgctctgaaatccctcatcccttagttggaagctgattgggtatcttggtgctgcctgtattggtcccttctgaccactctcctgcctccagagaaagctctgcttcaccctggaagctggtacctttacctcctcctctgggagttggctgcatggccagcactgccgacttgatgggagcagtttgccctcattctcctgtttcaggtttgcttcccttctcagtgaccctggtgagcatccgcctttcctgttcttggatgaattgatgggagtggggctattctgtgccttctacctctttcttctctacgttgtttctaaggatctgctgctgcggaacccaaagatgtgctcctgtctctgcactggcgcattggcatggtagatgccacaatgtatgtgcacggcctttctcagagacattagttctgaggccctttgtggggaggttagggggatggtaatagaaaaagactattttatttcctggcaatcacgggtaaggaggattaggaatgagtattccattcctaggtgtcatcagatgaccttgaccaccacaataccaggccctcttggatggacttatagaaagttagagaagaccttgttgaaccgctgctaaacttgccacaggagcgatgtgttttctctgagtgcccctcacttacatgtttatctttgtttgtagaggctatgtttaggatattttgcctgcatcagaatgggtgcatcatctttcttaatggcctatcgggaaatttgagtgtcagtaactgtggtagactcagaaattcgtctttgtcttgcctctggttcctgggatccagtgatctctactggcccagggcttcagctcttggttaatttaggttcatggggaaccctctgaccacctgaatgggatgtcatagcttctaaatggagcttctgtggaatgaagtgctagactgaaggactaccagaataaaacagggtctacaatggggagaacttgttttatagatgaggaaaccaaggctcagaggggcaaagtcacctgcatggtagcacatagtgatagggtagcgatataaatttatcatataaaccaggacatctcggaataaaaggggctctgttagtcattatgttgggtaatagccatggcattcctacagaacagagtgaggacaggctcctgattcctcttccttctttagagagaagcggggagtgggttaactaacagctttattgagatgtcattcacatgccattcagtttacccattgctagtgtccaattgtattcacagaaccaccatcaattcacagaattacagtcaacgttggtacattttcatcacccccagtaaaaccccgtacccttggtctgtcactcctgctttcctaactcctgcagtccaaggcagccatgaatctactttctatgtaagattaacctactctggacatttcatatatctggaatcatgtgatatctcttttgtgactggcttcttccactgaatgttttctagggccgtccaagttgaggatgtatcagtacttcattcttttgtattgctgaataatacttcattgtatagatagaccacatttgtttattgattcatcagttgatggacatttgtgtgtttttactttttggctactctgaatgatgctgctatgaacatatttctacaagattttgtgtggacatatgttttcatttcttttagcaatatacataggagtggaattgctaggtcttacagtaactccgtgttttaactttttgagaaactgccagactgttttctatagcagctgtaccattttacattcccaccagcaatgtatccaggtttcaatttgtctacatcctcatcaacacttgctattatctgtctttttgcttttagcatcctaatgagtatgaaatgctatcttgtggttttgatttgcattcccctgatggcaactgatgctgagtgtcttttcctgtgcttacgggccatgcgtatttctttggagaaaggtctatccaggtcctttgcctatttttaattgagttgtcttttttttttaagttttctgttttcctaaccactagactaccagggatgagccttctttttattattgagttgggtgagctatttgtatattctagacgccagtcttttatcaggtatatgactggtaaaaatgttctccccttctgtggattgttttcagtttcttgttggtgtcctttgagacacaaaactttttaactttgatgatttccaagatacgtattttttttctattgtcacttgtgcttttggtgccatatctagaaaaccattgcctaatccaaggtcaagaagattaatgcctgtgttttcttctaagaacttgtatagttttagttctcacaatggtctttgatccatttcgagtatatttttatatatgatgtgatgtaggggtccagcttcattcttttgcttgtggatctccacttgtcccactgctgattattgagaaaaatatcctttctccacggaattgtcttggcatccttgctaaaggcctctgcttcttactggatcttctttcctgggacatggtgtcgttgggaagcttacctttttttttttttacttagtctgtgtttggttccaccagttttatgctgcctttctactctgttcttgctgtctccctctttacctgagtcaacggtactgagtcctatctctctctgatgttccccagtcttccttggtgcatgttctagctccacacactagtccttggaggaaggttgagaccaatgatttcctgttatgagtcatgaggaaactgaatcacctagaagtggaataatgtgctcagggtcaccatagcccattagtggaaggaccaggactagacctttagtcttctgaggtccagccccttaggctgtctgtcatcactgtacccaagtgatgtcactaccaaggccaaatgatggtgggctaaattttaattctcaaaagtgtaggaggctaatattgtcttctaagttccaaaagaagatgtaataaaagtctgttaccttaagtgtgctattagtagagtcttccatttttctggcatgcccctggcatctgctcttcttaccttctcgtggttgtagttaaagcttatagcttatgaaagaatagaaaataataaataccaaaaaaaagtacacatggtaatttggtaccaaaatatctcagctgcctaatttagcagctcatcccttccacaggggtcagatgagctaaagctccaggttttatttttcatttgattgacatacagaaaagccatagcccttcccacagctgtccagggtctttcctgtgagtccggaggtgctggcctattgagcaggacagctcttcccagggcattcccaccaacctgtggcttctgaactgtagcttctttttacagtgaaccccagagggaaataagacagacacatgtgctcaggccaccatcttgaactggaagcccaaagctgagttccttactcttaggtcgtcacggtttttgcggggtatctgcaaggttgagataaaccctttcctgtttaccaggttgtcctttctggatgaagggacagaggctgttgaatggaggaataataggtttgctggaggaggggcatggtatgcctgtggaaaggacaggatggggtggggaggtcgaggctttgacttggggtcctaaacaaaggtcaggtgttgccctagtgacctcttgcccagacagcccagagccccttacacagagctattaacctagggaaggctttaccagcagtggactggagccagccagggtcacaagtttccaagtccagcattgcttcaggggctggcctgagtaactgaagatctgaaaatcattaacaagtcgatgaaataaacggaaaagcctcttaggctgttgtcagtggagcagagggagaaagtccctaggcgctcagagggggtgagaaagcagtggatgattgggcgggggtgggggattagatgttgacactgcctggggtgtaggaagaggaacagagaacccagagtcagggtcctagatcccagaccctcgctcagtatgagtctctttgcctctctgggtctctatctcctcctcttacaaatataggcttggtgatctctgaagatggcaccaacctgccatgaaatgaatctgaggggttttcccatttttccctccatcaaaatcgtacaaaaagctggacgtggtggcccatgcctctaatcctagcattttgggaggccgaggtgggagaatcacttgacgccaagagttcgagaccagcctgggcatcgtagtgagactccatctctgtctttttgaaaataaaaaatctttgaaaattgcacaacaggcaggagacctttacgtgtgcccatcctggttgtacacagtgccaccagtgctcctgcagtgcaaggcggcatgcttcttgacatgggtcagattgtgtccatcgtgtctttgggaatcagccctagctcctaactgggctgactacttcctccgcaaacttatgggggctcccagatattccttgccagccaggggccagacacagtgcaggcacagtctgtgtcattggtgcacatgtgcgtgtttacatgtgtacctgggttccttcccttgcccatgaatttgccatgagcacagccagaagcagcctcagcttggcaaggtgtggagatgactgctgttcccttcgcatttggggaaaacaggctccctcggtagctcgatgatcctcttttgatcttgtgtgacctcctggagagtggatgaagctggtggccttagcttttctagacagtgtaagtggcactgggcaaggcccccagagcagggcaaggtctctagagcgggtctcccacatgactggcttcacacaggcacttccgctcgggttgcatgctctgtgtcatcttaccggtccagggttgcaggtaggaaatgtttgtaccctcttctgattgccacctccttcccatcgcccctt

SEQ ID NO: 253923 - DNA, 1110 bp, Homo sapiens
ctcttgtcctgggaggggcagcctgatctcacctccacctagtaccttggggactgaggaccttttggcttctctggagcctgcaagcctcttcccatgtgtccagctgctcttcctgctacaaaggggactgctcacagtggcctcagcttggtggttttgaggggccgcccccggccctccataagggtatcctgggcctgagaattctgcatctgccattggaggatggacagcctcaaatggaaggagtcccacgggagatgggtccgaggtccggctgtggccatccagccccctgtggcttgtccagcctctgtgcacccctggtgtcttcactccaggggcagacagcagccactgcagttcctttcttcgtgagtaacagtagtgatagcagctggggctaacaggctaggctttgtgttctgcgcatttggtcagcttctcactcgatcctccctaaagcaatggggaggcccccactagcccagttttcaggaagtcaactgggaggttagatgggggccagggtcccacagctactgatggcccgagccaggttgagcttcctggtgtccagtccggatcccacttgcagatctcatgctctcagataggtgggacaagttcttttgtcacagtgctggctctgtcctgaggcctcattgctggctgggtgtgctctgctgggaaaagctttgcggggcttgcttggttaaccacagaagagaaggggactgtttggggtgcctctctgcagcctccccgtgctgggtggaagcacggttactgtgttctctaatgttcatgtatttaaaatgatttctttctaaagatgtaacctccacacctttctccagattgggtgactcttttctaaaggtggtgggagtatctgtcggggtggtgtggcccttggatgggtcaggtgggtgtgagaggtcctggggaggtgggcgttgagctcaaagttgtcctactgccatgtttttgtacctgaaataaagcatattttgcacttgttactgtaccatagtgcggacgagaagtctgtatgtgggatctgtgcttgggttagaatgcaaataaaactcacatttgtagaaa

SEQ ID NO: 253924 - DNA, 4226 bp, Homo sapiens
gcagtgcacgctgcatgcttttggtcgatttagaggtatccccgcaacctctgaccacctgaatgggatgtcatagcttctaaatggagcttctgtggaatgaagtgctagactgaaggactaccagaataaaacagggtctacaatggggagaacttgttttatagatgaggaaaccaaggctcagaggggcaaagtcacctgcatggtagcacatagtgatagggtagcgatataaatttatcatataaaccaggacatctcggaataaaaggggctctgttagtcattatgttgggtaatagccatggcattcctacagaacagagtgaggacaggctcctgattcctcttccttctttagagagaagcggggagtgggttaactaacagctttattgagatgtcattcacatgccattcagtttacccattgctagtgtccaattgtattcacagaaccaccatcaattcacagaattacagtcaacgttggtacattttcatcacccccagtaaaaccccgtacccttggtctgtcactcctgctttcctaactcctgcagtccaaggcagccatgaatctactttctatgtaagattaacctactctggacatttcatatatctggaatcatgtgatatctcttttgtgactggcttcttccactgaatgttttctagggccgtccaagttgaggatgtatcagtacttcattcttttgtattgctgaataatacttcattgtatagatagaccacatttgtttattgattcatcagttgatggacatttgtgtgtttttactttttggctactctgaatgatgctgctatgaacatatttctacaagattttgtgtggacatatgttttcatttcttttagcaatatacataggagtggaattgctaggtcttacagtaactccgtgttttaactttttgagaaactgccagactgttttctatagcagctgtaccattttacattcccaccagcaatgtatccaggtttcaatttgtctacatcctcatcaacacttgctattatctgtctttttgcttttagcatcctaatgagtatgaaatgctatcttgtggttttgatttgcattcccctgatggcaactgatgctgagtgtcttttcctgtgcttacgggccatgcgtatttctttggagaaaggtctatccaggtcctttgcctatttttaattgagttgtcttttttttttaagttttctgttttcctaaccactagactaccagggatgagccttctttttattattgagttgggtgagctatttgtatattctagacgccagtcttttatcaggtatatgactggtaaaaatgttctccccttctgtggattgttttcagtttcttgttggtgtcctttgagacacaaaactttttaactttgatgatttccaagatacgtattttttttctattgtcacttgtgcttttggtgccatatctagaaaaccattgcctaatccaaggtcaagaagattaatgcctgtgttttcttctaagaacttgtatagttttagttctcacaatggtctttgatccatttcgagtatatttttatatatgatgtgatgtaggggtccagcttcattcttttgcttgtggatctccacttgtcccactgctgattattgagaaaaatatcctttctccacggaattgtcttggcatccttgctaaaggcctctgcttcttactggatcttctttcctgggacatggtgtcgttgggaagcttacctttttttttttttacttagtctgtgtttggttccaccagttttatgctgcctttctactctgttcttgctgtctccctctttacctgagtcaacggtactgagtcctatctctctctgatgttccccagtcttccttggtgcatgttctagctccacacactagtccttggaggaaggttgagaccaatgatttcctgttatgagtcatgaggaaactgaatcacctagaagtggaataatgtgctcagggtcaccatagcccattagtggaaggaccaggactagacctttagtcttctgaggtccagccccttaggctgtctgtcatcactgtacccaagtgatgtcactaccaaggccaaatgatggtgggctaaattttaattctcaaaagtgtaggaggctaatattgtcttctaagttccaaaagaagatgtaataaaagtctgttaccttaagtgtgctattagtagagtcttccatttttctggcatgcccctggcatctgctcttcttaccttctcgtggttgtagttaaagcttatagcttatgaaagaatagaaaataataaataccaaaaaaaagtacacatggtaatttggtaccaaaatatctcagctgcctaatttagcagctcatcccttccacaggggtcagatgagctaaagctccaggttttatttttcatttgattgacatacagaaaagccatagcccttcccacagctgtccagggtctttcctgtgagtccggaggtgctggcctattgagcaggacagctcttcccagggcattcccaccaacctgtggcttctgaactgtagcttctttttacagtgaaccccagagggaaataagacagacacatgtgctcaggccaccatcttgaactggaagcccaaagctgagttccttactcttaggtcgtcacggtttttgcggggtatctgcaaggttgagataaaccctttcctgtttaccaggttgtcctttctggatgaagggacagaggctgttgaatggaggaataataggtttgctggaggaggggcatggtatgcctgtggaaaggacaggatggggtggggaggtcgaggctttgacttggggtcctaaacaaaggtcaggtgttgccctagtgacctcttgcccagacagcccagagccccttacacagagctattaacctagggaaggctttaccagcagtggactggagccagccagggtcacaagtttccaagtccagcattgcttcaggggctggcctgagtaactgaagatctgaaaatcattaacaagtcgatgaaataaacggaaaagcctcttaggctgttgtcagtggagcagagggagaaagtccctaggcgctcagagggggtgagaaagcagtggatgattgggcgggggtgggggattagatgttgacactgcctggggtgtaggaagaggaacagagaacccagagtcagggtcctagatcccagaccctcgctcagtatgagtctctttgcctctctgggtctctatctcctcctcttacaaatataggcttggtgatctctgaagatggcaccaacctgccatgaaatgaatctgaggggttttcccatttttccctccatcaaaatcgtacaaaaagctggacgtggtggcccatgcctctaatcctagcattttgggaggccgaggtgggagaatcacttgacgccaagagttcgagaccagcctgggcatcgtagtgagactccatctctgtctttttgaaaataaaaaatctttgaaaattgcacaacaggcaggagacctttacgtgtgcccatcctggttgtacacagtgccaccagtgctcctgcagtgcaaggcggcatgcttcttgacatgggtcagattgtgtccatcgtgtctttgggaatcagccctagctcctaactgggctgactacttcctccgcaaacttatgggggctcccagatattccttgccagccaggggccagacacagtgcaggcacagtctgtgtcattggtgcacatgtgcgtgtttacatgtgtacctgggttccttcccttgcccatgaatttgccatgagcacagccagaagcagcctcagcttggcaaggtgtggagatgactgctgttcccttcgcatttggggaaaacaggctccctcggtagctcgatgatcctcttttgatcttgtgtgacctcctggagagtggatgaagctggtggccttagcttttctagacagtgtaagtggcactgggcaaggcccccagagcagggcaaggtctctagagcgggtctcccacatgactggcttcacacaggcacttccgctcgggttgcatgctctgtgtcatcttaccggtccagggttgcaggtaggaaatgtttgtaccctcttctgattgccacctccttcccatcgcccctt

SEQ ID NO: 253925 - DNA, 456 bp, Homo sapiens
  misc_feature (37)..(37): n is a, c, g, or t
  misc_feature (122)..(122): n is a, c, g, or t
acaagattttgtgtggacatatgttttcatttctttnagcaatatacataggagtggaattgctaggtcttacagtaactccgtgttttaactttttgagaaactgccagactgttttctanagcagctgtcccccgagaacgaggcccgcctgccacccctgcaatatgtgttgtgtgctgccacgtccccagccgtgaagctgcatgaagagacgctgacctacctcaaccaaggtcagtcttatgaaatccgactactggagaatcggaagctgggagactttcaagatctgaacacaaaatatgtcaagctcaaagttgtcctactgccatgtttttgtacctgaaataaagcatattttgcacttgttactgtaccatagtgcggacgagaagtctgtatgtgggatctgtgcttgggttagaatgcaaataaaactcacatttgtagaaa

SEQ ID NO: 253926 - DNA, 336 bp, Homo sapiens
ctcagagtccacatttcaggatgatgtggtagccgtcattgctctcagctttaattgtgctgaggacaaaacaggattcatcttggaagttctgccggctctttgccagcttctcaggtgctgacttgctgaagatgtcccgagatgatttggtccagatctgtggtcccgcagatgggatccggctcttcaacgccatcaaaggccggaatgtgaggccaaagatgaccatttatgtctgtcaggagctggagcagaatcgagtgcccctgcagcagaagcgggacggcagtggagacagcaacctgtctgtgtaccacgccatcttcgtaggta

SEQ ID NO: 253927 - DNA, 543 bp, Homo sapiens
ttacaagcaagccccgcaaagcttttcccagcagatctcatgctctcagataggtgggacaagttcttttgtcacagtgctggctctgtcctgaggcctcattgctggctgggtgtgctctgctgggaaaagctttgcggggcttgcttggttaaccacagaagagaaggggactgtttggggtgcctctctgcagcctccccgtgctgggtggaagcacggttactgtgttctctaatgttcatgtatttaaaatgatttctttctaaagatgtaacctccacacctttctccagattgggtgactcttttctaaaggtggtgggagtatctgtcggggtggtgtggcccttggatgggtcaggtgggtgtgagaggtcctggggaggtgggcgttgagctcaaagttgtcctactgccatgtttttgtacctgaaataaagcatattttgcacttgttactgtaccatagtgcggacgagaagtctgtatgtgggatctgtgcttgggttagaatgcaaataaaactcacatttgtagaaa

SEQ ID NO: 253928 - DNA, 6117 bp, Homo sapiens
tttccttcatgtggccctcgtaacctgccttgccgtggctcactgtgggcactgggtaaacgcaggctgcgtttcacagtgctctccatggcccgacgtggcctaccaggtgaacagcgccccgtccccaagctacaatggttctccaaacagctttggcctcggcgaaggcaacgcctctccgacccacccggtggaggccctgcccgtgggcagtgaccacctgctcccatcagcttcgatccaggatgcccagcagtggcttcaccgcaacaggttctcgcagttctgccggctctttgccagcttctcaggtgctgacttgctgaagatgtcccgagatgatttggtccagatctgtggtcccgcagatgggatccggctcttcaacgccatcaaaggccggaatgtgaggccaaagatgaccatttatgtctgtcaggagctggagcagaatcgagtgcccctgcagcagaagcgggacggcagtggagacagcaacctgtctgtgtaccacgccatcttcctggaagagctgaccaccttggagctgattgagaagattgccaacctgtacagcatctccccccagcacatccaccgagtctaccggcagggccccacgggcatccatgtggtggtgagcaacgagatggtgcagaacttccaagatgaatcctgttttgtcctcagcacaattaaagctgagagcaatgatggctaccacatcatcctgaaatgtggactctgagcagcagtggacctcatacctgtctccagctcccagccctgtggatccccgtggatgtagacattgccccactgtaagctgtggcctcaccaggcaagctgaggccaggagggaccctgcccagtctgtgaaagctacagagcaccaaccagcagaagcctgtggacaccaagtacggtgtacagaaagccagtggctcctttctcccttcctcttggcctccagattttgaatggttccttgttcttttctattggtccaaccctgacgttctaaaagggcaaacagtggagacgtctgctctgaaatccctcatcccttagttggaagctgattgggtatcttggtgctgcctgtattggtcccttctgaccactctcctgcctccagagaaagctctgcttcaccctggaagctggtacctttacctcctcctctgggagttggctgcatggccagcactgccgacttgatgggagcagtttgccctcattctcctgtttcaggtttgcttcccttctcagtgaccctggtgagcatccgcctttcctgttcttggatgaattgatgggagtggggctattctgtgccttctacctctttcttctctacgttgtttctaaggatctgctgctgcggaacccaaagatgtgctcctgtctctgcactggcgcattggcatggtagatgccacaatgtatgtgcacggcctttctcagagacattagttctgaggccctttgtggggaggttagggggatggtaatagaaaaagactattttatttcctggcaatcacgggtaaggaggattaggaatgagtattccattcctaggtgtcatcagatgaccttgaccaccacaataccaggccctcttggatggacttatagaaagttagagaagaccttgttgaaccgctgctaaacttgccacaggagcgatgtgttttctctgagtgcccctcacttacatgtttatctttgtttgtagaggctatgtttaggatattttgcctgcatcagaatgggtgcatcatctttcttaatggcctatcgggaaatttgagtgtcagtaactgtggtagactcagaaattcgtctttgtcttgcctctggttcctgggatccagtgatctctactggcccagggcttcagctcttggttaatttaggttcatggggaaccctctgaccacctgaatgggatgtcatagcttctaaatggagcttctgtggaatgaagtgctagactgaaggactaccagaataaaacagggtctacaatggggagaacttgttttatagatgaggaaaccaaggctcagaggggcaaagtcacctgcatggtagcacatagtgatagggtagcgatataaatttatcatataaaccaggacatctcggaataaaaggggctctgttagtcattatgttgggtaatagccatggcattcctacagaacagagtgaggacaggctcctgattcctcttccttctttagagagaagcggggagtgggttaactaacagctttattgagatgtcattcacatgccattcagtttacccattgctagtgtccaattgtattcacagaaccaccatcaattcacagaattacagtcaacgttggtacattttcatcacccccagtaaaaccccgtacccttggtctgtcactcctgctttcctaactcctgcagtccaaggcagccatgaatctactttctatgtaagattaacctactctggacatttcatatatctggaatcatgtgatatctcttttgtgactggcttcttccactgaatgttttctagggccgtccaagttgaggatgtatcagtacttcattcttttgtattgctgaataatacttcattgtatagatagaccacatttgtttattgattcatcagttgatggacatttgtgtgtttttactttttggctactctgaatgatgctgctatgaacatatttctacaagattttgtgtggacatatgttttcatttcttttagcaatatacataggagtggaattgctaggtcttacagtaactccgtgttttaactttttgagaaactgccagactgttttctatagcagctgtaccattttacattcccaccagcaatgtatccaggtttcaatttgtctacatcctcatcaacacttgctattatctgtctttttgcttttagcatcctaatgagtatgaaatgctatcttgtggttttgatttgcattcccctgatggcaactgatgctgagtgtcttttcctgtgcttacgggccatgcgtatttctttggagaaaggtctatccaggtcctttgcctatttttaattgagttgtcttttttttttaagttttctgttttcctaaccactagactaccagggatgagccttctttttattattgagttgggtgagctatttgtatattctagacgccagtcttttatcaggtatatgactggtaaaaatgttctccccttctgtggattgttttcagtttcttgttggtgtcctttgagacacaaaactttttaactttgatgatttccaagatacgtattttttttctattgtcacttgtgcttttggtgccatatctagaaaaccattgcctaatccaaggtcaagaagattaatgcctgtgttttcttctaagaacttgtatagttttagttctcacaatggtctttgatccatttcgagtatatttttatatatgatgtgatgtaggggtccagcttcattcttttgcttgtggatctccacttgtcccactgctgattattgagaaaaatatcctttctccacggaattgtcttggcatccttgctaaaggcctctgcttcttactggatcttctttcctgggacatggtgtcgttgggaagcttacctttttttttttttacttagtctgtgtttggttccaccagttttatgctgcctttctactctgttcttgctgtctccctctttacctgagtcaacggtactgagtcctatctctctctgatgttccccagtcttccttggtgcatgttctagctccacacactagtccttggaggaaggttgagaccaatgatttcctgttatgagtcatgaggaaactgaatcacctagaagtggaataatgtgctcagggtcaccatagcccattagtggaaggaccaggactagacctttagtcttctgaggtccagccccttaggctgtctgtcatcactgtacccaagtgatgtcactaccaaggccaaatgatggtgggctaaattttaattctcaaaagtgtaggaggctaatattgtcttctaagttccaaaagaagatgtaataaaagtctgttaccttaagtgtgctattagtagagtcttccatttttctggcatgcccctggcatctgctcttcttaccttctcgtggttgtagttaaagcttatagcttatgaaagaatagaaaataataaataccaaaaaaaagtacacatggtaatttggtaccaaaatatctcagctgcctaatttagcagctcatcccttccacaggggtcagatgagctaaagctccaggttttatttttcatttgattgacatacagaaaagccatagcccttcccacagctgtccagggtctttcctgtgagtccggaggtgctggcctattgagcaggacagctcttcccagggcattcccaccaacctgtggcttctgaactgtagcttctttttacagtgaaccccagagggaaataagacagacacatgtgctcaggccaccatcttgaactggaagcccaaagctgagttccttactcttaggtcgtcacggtttttgcggggtatctgcaaggttgagataaaccctttcctgtttaccaggttgtcctttctggatgaagggacagaggctgttgaatggaggaataataggtttgctggaggaggggcatggtatgcctgtggaaaggacaggatggggtggggaggtcgaggctttgacttggggtcctaaacaaaggtcaggtgttgccctagtgacctcttgcccagacagcccagagccccttacacagagctattaacctagggaaggctttaccagcagtggactggagccagccagggtcacaagtttccaagtccagcattgcttcaggggctggcctgagtaactgaagatctgaaaatcattaacaagtcgatgaaataaacggaaaagcctcttaggctgttgtcagtggagcagagggagaaagtccctaggcgctcagagggggtgagaaagcagtggatgattgggcgggggtgggggattagatgttgacactgcctggggtgtaggaagaggaacagagaacccagagtcagggtcctagatcccagaccctcgctcagtatgagtctctttgcctctctgggtctctatctcctcctcttacaaatataggcttggtgatctctgaagatggcaccaacctgccatgaaatgaatctgaggggttttcccatttttccctccatcaaaatcgtacaaaaagctggacgtggtggcccatgcctctaatcctagcattttgggaggccgaggtgggagaatcacttgacgccaagagttcgagaccagcctgggcatcgtagtgagactccatctctgtctttttgaaaataaaaaatctttgaaaattgcacaacaggcaggagacctttacgtgtgcccatcctggttgtacacagtgccaccagtgctcctgcagtgcaaggcggcatgcttcttgacatgggtcagattgtgtccatcgtgtctttgggaatcagccctagctcctaactgggctgactacttcctccgcaaacttatgggggctcccagatattccttgccagccaggggccagacacagtgcaggcacagtctgtgtcattggtgcacatgtgcgtgtttacatgtgtacctgggttccttcccttgcccatgaatttgccatgagcacagccagaagcagcctcagcttggcaaggtgtggagatgactgctgttcccttcgcatttggggaaaacaggctccctcggtagctcgatgatcctcttttgatcttgtgtgacctcctggagagtggatgaagctggtggccttagcttttctagacagtgtaagtggcactgggcaaggcccccagagcagggcaaggtctctagagcgggtctcccacatgactggcttcacacaggcacttccgctcgggttgcatgctctgtgtcatcttaccggtccagggttgcaggtaggaaatgtttgtaccctcttctgattgccacctccttcccatcgcccctt

SEQ ID NO: 253929 - DNA, 336 bp, Homo sapiens
catccttgggcctggggctatggtagaaagacctattgttaaaaagacactaaacgaggcagatgtcagggcatgtgagatccctgcttctgccagcacgctttgctgtatgcagccctattttggtggtctttgctgataccctaacagcgtgccttttgggactccccaatactgtggcactgcaccttttttcctgtgaaatacacccagtgtttctctcttgcagctgagagcaatgatggctaccacatcatcctgaaatgtggactctgagcagcagtggacctcatacctgtctccagctcccagccctgtggatccccgtggatgtag

SEQ ID NO: 253930 - DNA, 458 bp, Homo sapiens
gacccgtggcaggttccgagttcctcaggtggggaagcattcaggcagaatgggaggggagataggtgctgtcctgcccctgagttcctccctgcgccctggggccctgggtgaggtgggaagcaggagagggcttgggggctgctgcctgtgttggttttgggctgattggactctgtactctgctcgcagccgaagggagccgatcggaaacagaagactgaccgggagaagatggagaaaagaactgcccaagagaaggagaaataccagccgtcctatgaaaccaccatcctcacagaggtgagccggctgggtgcggggacagagcctccaagggtcttccaccaggagcagggctgctggtttagattcttggaaaatcgcccatctcgggtgactacttctgagagtgcttattctgttgtggtgggttccagtgtctggagctcgtgttc

SEQ ID NO: 253931 - DNA, 358 bp, Homo sapiens
ctgggacgttctgtctccccagggccctgaaatcctccaaacctgaccagtgcccgtttcccaagtatcatgggcagcccccaaccctgccatggcccattaccacaacaggccactgtctggtccctgacagaccagatgggggcagaaagaagaaactcagaggttgaactggacatctaatgagctgctttaggaagcaggggttaggatcactaatgaggaaagaattacaccgtcctgcagcattttcttcctgcccaggatggactgacctccctgtacccaacagaagcagcccagagttgctttacgcagtcactgggatggccctgccctcagctcccatctcctgaaa

SEQ ID NO: 253932 - DNA, 1079 bp, Homo sapiens
taccaaatgcctatacccctgttgtatcttggaagtaactaacttggttttgattttatgggcttataggcagaagagatttgccttgtcttagatgagactgaactgcggactttctgagttaatggtgaaatgagttaagactctgggggactattgagatggatgattgtattttgcagtgtcagaaggacatgacatttgggaggggtcaggggcagaatgatatagtttgaatttgtgccactgcccaaatctcaggttgaattgtaatccccaggaggagtgggctttgctggatccgtcccagaagaaactctacagagatgtgatgtgggaaatcatcaggaacctgatgtctgtagaaatcatatggcagagagactctgtgaatgtaaagatggtcaatgtggagaaactttcagcctgattccagatggtataatgaacaagaacactcttcctggggtaaaaccatgtgaaagcagtgtgtgtggagaaggcaacgtggatcattcatctctgaattgctacatcagagctgacactggacacaaaccgtatgagtgtcaggaacatggagagaagccacataaatgtaagcagtgtgtaaaaaccttcagctgcctccactccttccaaacacatgaaaagcctcacacaggagagaaaccctatgattgtaaggaatgggaaaaaaccttcgattctccccaaaccgttcgaagatacagggtagtgcacagtggagatggaccttataaatgtaagttttgtgggaaagcctttgataatctcagtttatatctcacacatgaaagatctcatactggacagaagccatatgaatgtaatgaatgtgggaaagcctttggttttcccagctcctttcatagacatgaaagaatgcacaccggggagaaaccatatgaatgtaagcaatgtgggaaaacctttagttgttccagttccattaaaaaacatgaaagaatccacactggagagaagccctatgaatgcaagcaatgtgggaaagccttcgcttcttccaattcctttcagtatcatgaaaggactca

SEQ ID NO: 253933 - DNA, 605 bp, Homo sapiens
gtggtgtgttgaatattatagtttcaaaatccttcatgtgtgttaggactcaatgatctttgaggatgtggctgtgaactttacccaggaggagtgggctttgctggatccgtcccagaagaaactctacagagatgtgatgtgggaaatcatcaggaacctgatgtctgtaggaataaaatgggaagaccggaacattgaagatcagtacaaaaattccaggagaaatccaagaaatcatatggcagagagactctgtgaatgtaaagatggtcaatgtggagaaactttcagcctgattccagatggtataatgaacaagaacactcttcctggggtaaaaccatgtgaaagcagtgtgtgtggagaaggcaacgtggatcattcatctctgaattgctacatcagagctgacactggacacaaaccgtatgagtgtcaggaacatggagagaagccacataaatgtaagcagtgtgtaaaaaccttcagctgcctccactccttccaaacacatgaaaagcctcacacaggagagaaaccctatgattgtaaggaatgtgggaaagcctttaattgttccagttcccttagaaaacatgcaa

SEQ ID NO: 253934 - DNA, 809 bp, Homo sapiens
  misc_feature (7)..(7): n is a, c, g, or t
ttttggnggtacccgtcaattcggccattatggccgtgcctagaacagtgcctcacacacagtatgctgcaagaaacacttgctaggacttctaacgccagccaagatggagtaataggaacccagtttaccccactcccaagaacaacagtgatttccatgacactggacatcaggccacaaaggacagtgatccccaagagacaggaaacaaacaaggtgagccccatgactaccccagctcactgccttgaggaaagtttcaagtcatggaacaggagagggaactcggatggaaccaaggcagttaggattcagagagcaggaggcagagaagagagagctggacagagagaactctggagatctggggaaggtttcaagggttcagccgagaactgatcaacacatgcctgtggggagatgacctaagttcaggaaagacgcacctgaatgatttgagggagcagtgacaggagctctccaggaggctagagtagcaggagcactcacaattcacaaagtattgagtagagtacccaaaagtgttctgcctccatgtgaacagcagttaactctagactaaacacagctctggtcctgcctaacaccttaaaaataagacccaaaggaataaactgtttctaagtaactaaactacatcacggaacaaccaaaaatatttacagtaatacaaaaatagcccccagcagggtgaaattcactatgtcaggtacccaattaaaaaattaccaagtttggctgggtgcagtggctcacgcctgtaatcccagcactttgtgaggcca

SEQ ID NO: 253935 - DNA, 396 bp, Homo sapiens
acgtgagactccatctcaaaaaaagaaaaaagaaaaaaaaaacactattgagaaagacagtgtaagcttgtggtacgtaaatactctgtcttttttaaaagttgtgtgtagccgagtgtggtggtgcatgtctgtagtcccagttagtcgggaggccgtggtgggaggattgcttgagcccaggagtttaagaccagcctgggcaacatagtgagacactgtatctacaaaaaatacaaataattatctgggtatggtggtgcatgcctgtagtcacagctactcaggaggccaaggcgagcggattgctggggcctaggagttcgaggcagcagtgagccatgatcctgccactgcactccagcctggctgacacagcaagaccctgtctcttaa

SEQ ID NO: 253936 - DNA, 585 bp, Homo sapiens
ggttataagggttcctgctttcacagaattattccagggtttatgtgtcagggtggtgacttcacacgccataatggcactggtggcaagtccatctatggggagaaatttgaagatgagaacttcatcctaaagcatacgggtcctggcatcttgtccatggcaaatgctggacccaacacaaatggttcccagtttttcatctgcactgccaagactgagtggttggatggcaagcatgtggtgtttggcaaagtgaaagaaggcatgaatattgtggaggccatggagcgctttgggtccaggaatggcaagaccagcaagaagatcaccattgctgactgtggacaactcgaataagtttgacttgtgttttatcttaaccaccagatcattccttctgtagctcaggagagcacccctccaccccatttgctcgcagtatcctagaatctttgtgctctcgctgcagttccctttgggttccatgttttccttgttccctcccatgcctagctggattgcagagttaagtttatgattatgaaataaaaactaaataacaattgtcaaaaaaaaaaaaaa

SEQ ID NO: 253937 - DNA, 935 bp, Homo sapiens
ggttataagggttcctgctttcacagaattattccagggtttatgtgtcagggtggtgacttcacacgccataatggcactggtggcaagtccatctatggggagaaatttgaagatgagaacttcatcctaaagcatacgggtcctggcatcttgtccatggcaaatgctggacccaacacaaatggttcccagtttttcatctgcactgccaagactgagtggttggatggcaagcatgtggtgtttggcaaagtgaaagaaggcatgaatattgtggaggccatggagcgctttgggtccaggaatggcaagaccagcaagaagatcaccattgctgactgtggacaactcgaataagtttgacttgtgttttatcttaaccaccagatcattccttctgtagctcaggagagcacccctccaccccatttgctcgcagtatcctagaatctttgtgctctcgctgcagttccctttgggttccatgttttccttgttccctcccatgcctagctggattgcagagttaagtttatgattatgaaataaaaactaaataacaattgtcaaaaaaaaaaaaaaaaaaaaaaaaaaaaaaaaaaaaaaaaaaaaaaaaaaaaaaaaggaaaagaacgcacagcaatcgaagagagaaacaagaaagcaagacagatagacggagaccaaaaggaagcaggcaccgcagagcacctaccgagcatcaaacaggcggacgagctgagaccgacaggaacgaagcagcgctgcgtggacgacgagatttagatagcaggaccagcaatgaggataccaggtacaaaagcggatgtaaccgcgaaaatggacaatagaactagtgggggagacaaactacaacaacaggaagtacacgtatagtgtcatggaacaagccctgctgagagaagacaaac

SEQ ID NO: 253938 - DNA, 303 bp, Homo sapiens
gagacactctctctctctctaaaatttaatgaatgaggaaaccgcgaacatatgtccaataaggtgggacttcaccagctgaggtggaggaggtgccttaaccttccggagcctctgtgtaaaatggggataatatacattgtaatggctacttctcaagatggttgtaggattacgtaaggttagaaatatgaaaagagcttataaattgcaaaacattttaccgatgctaatttaatcgctaacactccagagcattttgaaatttctttatagatttggcacagcagcgggtcataggac

SEQ ID NO: 253939 - DNA, 541 bp, Homo sapiens
cgtaaataactcttttaatctactgggagatggtctatgtaagttcacaaagagcacccaacatctagtatagcatctggcatgttaagtattcaaaactggcagtcatttttattttaacagttacactgtcattacttccttggcttctgagatagctctgccatattcatggtgttggagagaaccactagctacctctcccactgcccctcccacatgacagatctcttgatggagagtacaaaggaagaagaactgaggggacaatcagaactcgggacaggacaaggagtagtgacaacaccgaagtaaataataataaagtaaatgtaccatatttggaataatgtcacttcttgacaatgtgtggtttctctgagactgattaaagcctgacttttgggtggctcacatctgtaatcctagcaactcagaaggctgaggcagcaggatcatgaaggccaggagtttgagagcagcctaagcaatacagtgtgacctgctccctaaaaataataataaaaaaaatttaaatctg

SEQ ID NO: 253940 - DNA, 388 bp, Homo sapiens
aggcacccagggctgcatctccaggttttcccaccacttgctgttgttgaaagtatgaaatacataaactgaagaatggtgttcatggatcttataagattaaccaagacattacagacataagagacaacagtgatattctgaaactctaaagccactgatggattcaaagtccagctgagagtattggtgtaggtgaaaggcatggagatttttaatctttcacttcattatggaaaagcacactcaataagagaatggtcacaaaattattgtattaaatgaagtctgttagcaactaagaaactgttgcatttgcacagagacaggggaataaaccaatgaagaaagaaaacagcataaatacagacgtgtatatatgaacaaa

SEQ ID NO: 253941 - DNA, 578 bp, Homo sapiens
gaatgtgaccccatacaccatactggaacttggagtggactgaaatcccattaggattgtggaaaagcttacattaatgttttctaccttctagaaggtgtaagaagtcgaactggagagaagccttttacctgtaatgcatgtaggaagccttacattaattccacagaattttttttacacatgtaaaattacctcagaaccctgggaaggtaaggaatatggtataacctttaaatatttcacatgccataataagtacatgaattctgataatactgtaccgtttcttgagtagtgttagtaccttatactatcaaaataatcctaaatcctccctctcagaccttccatcattactatatttcacttttatgcctataagcacacacaaattagcatatgtaatctaatacattgtagctatttttcagaagttatcagatcaattaagtattagaaaaataaacatttttattttaccttcacttcttccttctatgctcaaagttggatgtaattcttatacttgatcctcaatacttaaagcatttccccccctctggcttctatgaaaa

SEQ ID NO: 253942 - DNA, 464 bp, Homo sapiens
aattacaacagaacccaaagtgtgagataacactgaatcattaaatgggatttaattattctcccaactctcaggaattaagggacttcggaggaaatgcatgttttcacataacaaagcacgtgttcccctcctaattcctccaatctctcaaggcagaaggcaaagggccaagatggcagcacatgtagcacagtggctacaggtatcctatctgtgcaaagggtctaggtgttccactgggtttggagtattcccagcagtcagggtggtagatgtgttcattcagccattcattcactcaacagaaattcatggagtgcctactgctatgtgccaggcattgctcgttctaggccttagggagacaaggtgggcaaggcagacaaaatcccccctcaaatgctgattacactctagtcgtggagactagactaataaacaagtggaatattggacaatga

SEQ ID NO: 253943 - DNA, 472 bp, Homo sapiens
aaaattaaaatcataccaactacattcttggatcacagtgcaataaaaatagaaattgatagcaaaaaaaatctatagtatacaaatacatgaaaattaaacaatttactcctgaataatccctgggtgaacattaaaataaaaaaaattctttgaaattaatgaaaataggtataaaacttatccaaatctctaggatacaactgaagcaatgttaagagggaagtctatagccctaaataccttcattaaaaagttagaaagagttcaaattagcactctaactttgcactgaaaggacctaggaaaaataaaaagaagaaaccaaccccaaaactagcagacataaagaaataactaaaattagagaacaataaaattgacatgcaaaaatatattttaaaaattgatgaaaccaagacttgttttttgaaaaaataagcaaggttgacatactactagctatattagc

SEQ ID NO: 253944 - DNA, 325 bp, Homo sapiens
gagacacagagtctcactctgtcaccaggctggggtgcagtggcgcgatctcagctcattgcaacctctacctcccgggttcaagcaattctcccacctcagcctcccaaagtgctgggattataggcatgaaccactgcatccagccagttcatttattatatatggaacttatatatttggttgggtttatttctggattagagtgttatacaactgtctcatgctttgctgtttttaccagttgtaaatagtagtttattaagtattttagtgcctacttggtgctactgttttaggcagtggaaatacaataaaacataat

SEQ ID NO: 253945 - DNA, 432 bp, Homo sapiens
gagacggggtttcgccgtgttggccaggctggtctcgaactcctgatctcaggtgatccgtccgcctcggcctcccaaagtgctgagattacaggcctgagccaccacgcccggccgagtcttagtttctttatccggaaaggccacttcctcatattcaaggcctctgccaacccagtttttgttttcttctcacagcatgtgagagtctttgtttcacccatacatgttagaattccgtagacaatgtaatcattcaaaaactatttattgaatgcctactgtgtgcctggtactggggatactccaacaatatccctcactcagctcattttccaggggatggaggcatgtaaaaatattatttcaaataatataagtactctaataaaaattagctggcgggggcatgtagaaaagctgttttacaca

SEQ ID NO: 253946 - DNA, 397 bp, Homo sapiens
acagttaataaatgttaaggaacatttgttgtggtctcatccattcagcataggtgtcgaggctgcaacttggcaaccagttgcaaatcttaccttgattgcggtgatgaggtaggtcttggcgtatttattaataggtatctacaggaaacttctctagaattttcaataagaatattcctgtgtgaggagtttgagaccagcctggccaacatggtgaaaccctatgtctactaaaaatacaaaaattagctgggcatggtggtgcgtgcctgtaatcccagctactggggaggctgaggcaggagaatggcttgaacccaggaggcgggggttgcagtgagccgagatcatgccactacactgcagcctgggtgacagatcaagactctgtctc

SEQ ID NO: 253947 - DNA, 414 bp, Homo sapiens
ctggtttgttacagaggtaaacttgtgtcttgggagtttgatgtgcagattatttcatcacccaggtattaagcctagtacccatcaggtatttttcctgatcttctcccttctcctactccctcctcctactccctcccctctgatggacccgtgtctattgttcccctctatgtatccatgtgttcgcatcatttagcttccacttttaagtgagaacatgtggtattttgttttctgttcctgtgtcagtttgctaaggaaatggcctccacctccattcacgtccctataaatcattctattttttatttttttaaaacacataaatttcttacagatacagctctaccttcagatataaaattcaaaaaactttaagccacaagcttataatttcagcatcttctctcc

SEQ ID NO: 253948 - DNA, 610 bp, Homo sapiens
cagtggtcaccaggaatagggattcagaaaggcaaaacataaaaggatggggaaaatcttagtgtgctctattaatatcacacaaagtagacattaaagttgagaaagagtaaagtttaaataataatatggactcacactgctgcctgattccatttctataaagtgctaaatcatattatttagaaattcttacagaagtgacaaaattgtggaaggacaagagggagaaaaggaagtgaggcagttttctaaggtccgaataatgattgtgtttcaggtagaggaagtgggttgtgaacaggcagaggcactcagcaagcttcaggcaatgttctgtttcttaacctgagcagtgattatatgcgtgtttataataattcattaagccatgcaatttttatgtatgtcttttataagaacaaggtttagaaattgacacttgtaacagctacaaaaataaagcttttgcagaaaattataactctatggaaaggtattaaaaagacctaagtggaaaaacatggatagaaagattcaattctgtgaagatatcaattccatccaaattatcatatagatttaatgtaatatacattgaaacccaaac

SEQ ID NO: 253949 - DNA, 603 bp, Homo sapiens
agccgcctgggactgctgccgtccagtacttctcccaggggagccagggaagcatcacagtttatgttgcagaatcctcaaaaatgaagggtgtaacagcaccaaatcgctctggagctggtgaggagtggaagccatcatatggagattggtggcagtggcttgagctttgagcaagaccctgatccactgccctccccttcccaaaatgcagctggtttttaaagtgaagagaggatcttggaaccagggaatgagaagcaaattggacagttctggcgaatactgaagaagagaactgatggtcactgacatatggacccctcactccacccctctttgctcgtcatagcagctgtttggaatgttcctctctcagaatctaatcagctcaagaggagagacccaaagacgctgatattgcagttctcccagtgaggtggcctggcacgttgacttttagcaaatacttatactttgttttatttttctttcttctgtgctggccagaacctctatctactatattgaaaagaagaggtgctatcaaatgccattttcattttgctgattaaaaaaaattcttctaatgtttcataatta

SEQ ID NO: 253950 - DNA, 387 bp, Homo sapiens
actaaaaaagaggtaccagatttaagtgagctcgtttatgtgaaaagggaagaactgaggagaaaggaattcatctcaaattttccctctagacagtttcataatccagattgtagaagtcattacagttcaattaccaaaaaaaaaaaattattcctagcctgctgtatgccaggccccttgccagatgctaaagataaaaaatgagcaagactggctgctcctgggcagcttggacaaatagatgatacagatgaggaaataatgtagtaagtgctacgatgagctatctgtactgagctgagaacacaggtatgggctcaataaaggttgctcccttagctgggtggaggaagcagagagaaccataaagtgtaaaaaagaaaa

SEQ ID NO: 253951 - DNA, 623 bp, Homo sapiens
attctgtgtgttctgccttctagtactagttatctgtgtaacccaacttctctagaactcaattgtctcagttgtttttttctagttccaaaattctacagattttcaaagcataaggatgataatggcacattacttccttcactggaccatttatttcttgagtggaaaggttccaaccaagatattaactccacagagaatagagtacaagttaattttaaatcttttaaaataaatacactctcaagaacataacttgattttagaaaagataacagagtgttttcaattaacaggaatgaccaaggcaaaacgtccatctacttgcatcagaatggagatgcagatgcagataatgaattaaagggactcaaagaaggtcactattctgccttgaatttgttttcatggttctctgagaagtgtctagaggtgagaaagtcaatttaactgattattttctaaaaatagaataaacagaaaattttgtttaaaaaatattttcttagcatagttaagtacaacattttctatagctatccacagtactttaagaaatttacaatgtactgctagaaatttgagtgaaacttaggaattttatgtgctttggatgaaag

SEQ ID NO: 253952 - DNA, 405 bp, Homo sapiens
attttttttttttttttggtttgtgtctttcttatggtttagtcattgtttattcctttatttttccttggttctctaatgaaaaataaaattcaaacttaccttttccactaattcacaacaaattaaatccctaaaacaggataaatagacatgataaaaatattttgtagcatacattttgtacatatagtcttattttctcctcttaattaattgcattaggcaggattatattcagtttatgtgcctatgtactgaggctcagtgaaatacaaaatcttttccaaggttatcaagcaaattagtggtaacaacttcagtgggttgtttcctaactttctcgtaagatttaacagtaaagcacactcagaaattcagagagagccgaggactcacagagaa

SEQ ID NO: 253953 - DNA, 499 bp, Homo sapiens
gcacatccatgtaatagtaccgcggtgaggagcattcaggagtgattctgccgtaatgcttaggtgtgtatctgatttatggaagataggctgtaggctgtataacccgtgtacatatatgttaggggccgaattatgtctccccccaaaaagatagttggaagtcctaacgctgagtaccacagactgtgaccttatttagaaacaaggtcattgcagatgaaattagttaaaatgagatcctgctaaagtagcatgggccccttatccaatactactggtgtccttatgtgaagacagacacacagaaagccatgtgatgatgaaggcagagattggagggatgcagcaaaaattgccaaagattttcagcaaactagcagaagctaagaagagacttcttccccttcagaaggaaggagcatggccttagtaacaccgcgattttggacttctatccccagaatcgtgagaaataaattcgtgttgttttaagcca

SEQ ID NO: 253954 - DNA, 371 bp, Homo sapiens
tcccctgaaaccagaacgcagggcctctttgcgctcggaaacgacgtacaacccagacttccagccttgtctttcagcatcagcactagccgggccgtgctgggggatcacccgatgatcaaccatgtcctctccacagagcacttcagtctggaggcctgagtggctacagatggcacatattaaatacagaaggtttccccttgctccctccacctcccacattcgcaatgtgcagcatgtcccatttccttttgaaacatactaagtaacaacacagcttttattttattttgtttttatttttttcccctgaggtcctggatggactttaacaaagggattttatggtcaaaacctccctttcccca

SEQ ID NO: 253955 - DNA, 434 bp, Homo sapiens
cattctaaagggtcagaaggctcattgtgaaactgaatacaggaggtattttagtgttcttcagtgttcaatactgctttctgtattttaattgccagttagctatcaaatggtcccatctccacatttttcaagatcaagctttcttatttctagctgtcttggtactgtgttctaacctatattcagtttcatacagttgtccttacatagatagtaaagcccctggatttaaagaaaaaaactacattgattctcatatgattctcatctctcaaatgattctgttagtgttcatgtccctcagtattgaacaacagtattgaatactgtagggttttctgtcactaattagaaaacaataggaagagtggctcacgcctgtaatcccagcactttgggaggctgaggcagtcttactgcctgagctcagg

SEQ ID NO: 253956 - DNA, 175 bp, Homo sapiens
gagacggggtttcaccatcttggccaggctggtcttcaactcctgaccttgtgatccacctgcctcggtggaaatggctggctttgattgcctgatggtggagggattcagccaccactctatagtccaccattagaggtgaacagctgctgagagatcaccgtacagatggggt

SEQ ID NO: 253957 - DNA, 434 bp, Homo sapiens
cacattaaattgtggctagcctgtgtgactaaaagaatactgagaaagcgacagtgtttgccttctgaggctgggttatgaaagatattgcagctttctccttgttctctcttggattgcctgttctggagaggaagtcagccaccatgttgtgaggacagccaagcagccctctggagccctataaaaaggtccacatggggaagaactgaggtctcctaccaacagactgcaccagcttaccagatatatgagtgagccatcttggaaggggatccttcatacccatttgagccatcagatggctgcagccctggccaacatcttactgcaaccttgtgagagacttttagccagaccacctaggtaaactactcccaaatttctgacccacagaaactgtaaggtaataaatgttcgttattttttaaacc

SEQ ID NO: 253958 - DNA, 262 bp, Homo sapiens
taatggaaaataaaaagaagatcccaaatgcaagcattccatctgtccctgatacgctgggatttcctgcagtcgtgtttgcttttcaccgtccactgaaagatgtgcataatctgacagccttgtgaaacacaaaggctgcgcgagtgagttttcctcatttacttcaaccaaaacagcatatcacaaaagagagaatgaagaagtaaatacaagaatccagctgtctttattaagccagacattaaagagctttatttgc

SEQ ID NO: 253959 - DNA, 716 bp, Homo sapiens
ggagaattggctgaacctgggaggcggaggttgcagtgagccgagattgcgccactgcactccagcctgggagatggagcgagactccatctcaaaaagaaaggaaaggaaggaaggaaggaaggaaggaaggaaggaaggaaggaaggaaggaaggaaggaaggaaggaaggaaggaaggaaggaaggaagggaaataaacttgcatgcggttaaggcactggattgtgagggctatttgttactgcaaagtaatacaacctatcctgattcaagaatgcagcagaatggagtggagtggattagaaagcattcatcacacatagtgaggctcagcccagggcagcgcacagtgcatcgaccaccctttcctggttccacagacgctgggcatagagccagtcctctaagctttggcctccaccaagagttcaggcttttccagcacaaaagccagagactagcaggttagttttggttgccaccctgcagaattaagcacagtactaaagtgggagttcgcttgctttctctctctctctctctcctcccctccttaattttgagaagtaaggtggaggagggaagagaaataaagagagaaccaatggctaatagcttataaatattatcctgccacatgtgcagaatgctatggaaaggttcagaaggaatgagcacatcccatagaaaaatcaataaaattgttcatgcag

SEQ ID NO: 253960 - DNA, 376 bp, Homo sapiens
ctcagggctgctctgattatggagtagccattcttttatcctttactttcctaattaacttgctttcactttatcctttggactcatcctgaattctttcctgtgtgtgatccaagaaccctctctttcggtctggatcaggaaccctttcctataagaatttgctaaagtgcctactttggtttgtgcagctcacatggaatcaaggtttaaagctgctgccggggctacttgcactcttcttcctgatagggaatgtggactgaacaagctatcactggtggttgcaacagatactattctcagttcctcccagaaattgcaagcctgctgtggtcactttcctgtgtcccctttctaaacatagctcccctta

SEQ ID NO: 253961 - DNA, 442 bp, Homo sapiens
cagaataggagaaaatatttgcaaatcatattgtctgataagggtctaggatccagaatatataaagaactcttacaactcaacagcaaaaggacaaacaacccaagagaaaataggcaaaatacttgaatagacatttctccaaagaagataaagaaatggccagccaggtgcggtggctcacacttgtaatcttagtactttgggaggctgaggtgggcagatcatgaggtcaggagatcgagaccaccctggccaatgtggtgaaaccccgtctctactagaaatacaaaaattagctgggcgtggtggtacgcacctgtagtcccagctactcggggggctgaggcagaagaatcacttgaatctgggaggcggaggttgcagtgagctgagattgtgccattgcactccagcctggcaccagggcaagattctgtct

SEQ ID NO: 253962 - DNA, 684 bp, Homo sapiens
gcggctgcgctgctgggcgggggcgggagctggagccggagctggagccggggccggggcccgggtcagcgcttgagccgggagaagagtttgagatcgtggaccgaagccagctgcccggcccaggcgacctgcggagcgcaacgaggccgcgggcggccgagggctggtcggcgcccatcctgaccctggcacgcagggccaccgggaacctgtcggcgagctgcgggagcgcgctgcgcgcggcgcggggctgggcggcggggacagcggggacggcacggcgcgcgcagttctaagtgccagatgatggaggagcgtgccaacctgatgcacatgatgaaactcagcatcaaggtgttgctccagtcggctctgagcctgggccgcagcctggatgcggaccatgcccccttgcagcagttctttgtagtgatggagcactgcctcaaacatgggctgaaagttaagaagagttttattggccaaaataaatcattctttggtcctttggagctggtggagaaactttgtccagaagcatcagatatagcgacctagcttgtcagaaatcttccagaattaaagacagtgtgggaagaggccgaagcgtggtttatcttgcactcatgcaaaaggaaactggcagattatctgaaagtgcttatagacataaacatctct

SEQ ID NO: 253963 - DNA, 453 bp, Homo sapiens
aacagttcttaaccttcttatttaatcacaagcccctttatgaatcacatgaaaattttgcacctctcctccagaaaaatgttcacacatataaacacacacatggaattttgcatataatcccaaatggttcacaaagaccatttattacaggtttcataaatcagcatctctgaatacctgatttaacctagtcctcttactttacagcttaggaaacaaacctaaagagaggaagtgacttgcccaaattcacagtttgggcatgggcacagtttgagaatggattaaaagtcaagttttgccaccacacccagtcttatacctgtattcaaatttgatatttgccccttgctagtaactatctcctagagtttactgtgagaataaatgaaataatgcatgtaaagataaatgtatgtagtagggatgaaataaatgtcacatctttcc

SEQ ID NO: 253964 - DNA, 357 bp, Homo sapiens
ctgcagtgtaccatgaagatgactggagttctatggcaacaacattgcaagcactgctaaacccactgtggtttcttgcctacattcctagccaaagtcaacactaaatttctgttagaggtgatgaaaataaaagtttatttttccccatctatgctcatatagtcctcccccaaattccatctatggacttttgggagatccatggaccccaggttaggaatgttagaattagatgcattatttctttataggtatagataaggaaaagattagaaggatcaactgatctggccattaactagttcaaatactaaggagtaaaatgaaataaaagttttatgtttttaccagaga

SEQ ID NO: 253965 - DNA, 356 bp, Homo sapiens
cgggaatattgtaaactaaccaagaaccaagagatttgcttggttggggattggcagaagaaccggggtgctcccagcactgctggagtgccgtcagcctggggctggggggatgtggggccacctgagtgcctcctagagaagggcacgggagccttggccgggggtgctgtggctattttttttttttttcctggagatggagtcttgctgttcccaggtggagtgtggtggcacaatctcggctcactgcaacttccgcctcccgggttcaagcgattcttctgcctcagcctcctgagtagctgggattacaggcatgagccaacatgcccagctaattttttgtattttta

SEQ ID NO: 253966 - DNA, 719 bp, Homo sapiens
agcgggcgctggccctctctcctgggacacgcaccgcctccaatcctggtttatgctgggatgtagtcaggcagccctgtgagcaatttttcagattaactcttaagtactccacggctacatgctcctgaagctgtcataggcccagcctcagatctgtgcagggcggatgcacaagagcagaatctccgtggacatctttctggagcatcaattttactgcaagattttgaagaaacacatttaattgattttcaaggtgagaaattaaacctcgaaaactagactggaaagtcatctacgcctgaactatcagactttcttcagaagaaaactctaaggagaacatattttccattattataaatattacaaatgagaaatcatagcaagttacctgaaaatgctgccctggcagtttcctaaatcacaacatgtcctgggtatggttttaggtgtattttctttttggggtgtgttcaccttttggatataaaaattggggtttttgacacatcgttgtaagttttgctgctattattagtttctttacttttgtaccatatttaatttttctgtgtcttcctcttcttctcagactcagtcactccacaagtctctaaaggctctgttcattttcttcaaacatgtttcatgttggatgatttctattgctgtcttctgtttctactctgtggataagctcaagggtgtgtgtg

SEQ ID NO: 253967 - DNA, 599 bp, Homo sapiens
taacatggatggatctcgaagatgttatgttaagtaaattaagtcagtcataaaaggacaaattgtatatggttccacttatatgagaatcatcaaatttgacagaaagtaagatggtggttgccagggtctgggagtagggagggaggaatgatgacttactgttggatacatgattttacttagggagatgaaaaaagttctggagatggatttttgtgatggttgcacaatgatgtcaatgtacttaatgccagcaaactgtacacttaaaaatggttaaaatggaaaacattacattatacacacacagatacacacacacacacacacaacaccacacatgtataatcacaactttttaaaggatttcaatgagatctgtagtacattcacatttggtaatatcttcagaatttttttttttttttttgagagggagtctcctctcctgggttcaagagattctcctgcctcagcctcacaagtagctgggactacaggcacgcaccaccacacccagctaatttttgtatttttagtagagatggggtttcaccatgttgaacaggatggcctcaatctcttgacctcgtgat

SEQ ID NO: 253968 - DNA, 673 bp, Homo sapiens
tcgtctcctaatataatattggcttgctggactttggaacattggctcagtggacacagttttatttttgagcaaccaaatggtaattaacactgacaaaaagcaatgctctgaacttggagctgtgggtgtccaaagaagagggccatggtctggcttttgggaaattataatcaaatggaaattggatttttatttttgttttttaatatttgcttttaaagaattatctgaaacatatttcattgacttatcttttctgaatatgaattttagaacattgatttgtactttttttgctacttacctttttcactaacttcatattgtatttaaaaagaaatattatactgtccaataagtacaaaaatgagtgacactgttcttgctctcgcctagtttgtaatctacagaatttaaaactagctcactcacaattgtaccaaagagtgaaacataacaaccacattaggaaggtggaaagaaagtgacaaaggagcccacaggaaggagttactttttgctgctatggagagaagggtttcatggagaaggcagcattgtaattgggacttgaaggctcacaggttttagataggcagatgctaaagtgtagaacattctagctaaaatccttcagaaaaacaacagcaaaagctaaaagaaatttgtg

SEQ ID NO: 253969 - DNA, 523 bp, Homo sapiens
cagtttaagagcgcaggcattcagctcttacaggattggcttgagaagctaatattatgttgggaaaattatataactagacatcaggacatatggattatagttccagctctgatattcattactaactatgtgaatattgtcatgtcttctgatgcctaatttttctcataggcaaaatgaggaggttagactaagtgatgattaagatcacttataaaatcctagagttcatggaaaacacataccatgactagtcctttcggtcaatttacgagattggttgttgactgtagataaatcccttaattttgttgtctttgtttttcttgcctttcaaatggctttgataattcctggtgcacctaatttatagaaattccgtgaggatttagtgagatattgggaatataagtgctctgaataattaacgcattacatgaacacaagatgatattatttgtactgaaagttaacagaaagatgtcgagtttctcgttacctccttccttccccctcaaaa

SEQ ID NO: 253970 - DNA, 690 bp, Homo sapiens
ttaaaattaacttttgattattatcgaataacttcatccttggtatacaaaaattcaggtttatgtgatttagactaactgtagatttaatttaaattctggggttgctgtgtgtaaatattctctaaccttctcctgtatctgccaatgctttgcatttccaaaagcacttgtgttagcaacttcttcaagttttctattaaagactaataaaattgtgacctatgatttcatttacagttttaaccgaagctaatttttcatctctacactttaagtaatttcacagatgaatttctcttagttttgtttttgaattcttttatgttaacctaagttttttttttcaaagctggagcatatttttattcatcaatttgcagagatataatcttactgtgagaaacttaagttgttttgtgtgttttcaaaaatgttttcccactaaattttcttttgctatattctccctggtatgttattcattgtcagtaattaaaatgctattttgtcctcatcttttctaattatgtgtaaattacagttttcttatattgtcattttaattctatcatctcaaatccaaaatgtcataatgtctagctactttgcaagtatgatattattgaatctcctatgtaaatgtgtaacagcctgaaaaatgtccttcagaatatctttggtaaatag

SEQ ID NO: 253971 - DNA, 294 bp, Homo sapiens
ttcatttatatcctagagaaacattaacacagttggacaatgatgcatatgtaagaatgcttcagtaagcatttaaatttagatttctaatttaaaaaattagaaacgaatatcctcagcacagaaataagtaaaatccccattgtcaagaatatacttttggtgatcatttcttttttaaaaactggcctgtcgagtcaaagggatcatttctataggtcattactagagaagtttctctgaatgtgtaaagaactaaaaaataagaatcaacttaaaaaatgtaaaaaccca

SEQ ID NO: 253972 - DNA, 445 bp, Homo sapiens
gcaaacatgtctgtcctagaacagtgtgcctctgacatcattcaggaaaatggtatgtctttgcagcattgtacatgttatgtggattatctggatgtaggggactgtgtctttgtgcttgtgtgaatgcctgtgcaggtatgtaaataggtacatgtggccgggcgcaggaatcatgcctgtaatcccagcactttgggaagcagaggtgggcggatcaactgaggtaaggagttcgagaccagcctgagcaacatggtgaaaccctgtctccactaaaaatacagaaattagctgggtgtggtggtgggcgcctgtaatctcagctactcaggaggctgaggcaggagaatcacttgaacctgggaggcggaggttgcagtgagctgagatcacgccattgcactccatcctgggcaacagagcgagactctgtctcaaaaaa

SEQ ID NO: 253973 - DNA, 566 bp, Homo sapiens
  misc_feature (493)..(493): n is a, c, g, or t
  misc_feature (522)..(522): n is a, c, g, or t
  misc_feature (553)..(554): n is a, c, g, or t
tagatataatctgcattacttatcactgttgatgttgatcttgatcacctggctgaggtgatgtttgctagatttttttattgcaaaattaattttcgtttccgatctttcatactaccttctttgtaaagaggtcagtttgcagaggacacacttaaggagtgggcaattatgctccttttccatgaggtatcatatctacaataaattatttggaatttttccatagaggggaaatgaaacttgtctcatctctctcatttgtttacttattcaatcatttacttatttcagaatagactcacaggtatatattttatactttgggtaataactctgtactgccttatttattttattgtgaaaattattttatctttggccattgggagctttttcacttggctcttgtgtccctttgacacattcctatcagggtagggttttttttgttgttgttattgttgttttttgtgggttttttttttttttnttttttttttttttttttttttttttttnttttttttttttttttttttttttttttttnntttttttttttt

SEQ ID NO: 253974 - DNA, 305 bp, Homo sapiens
agggtccattctgatctgtatatatgtataatatatattatatatggtcctcagggtccattctgatctgtatatatgtatcatgtaaacatgagttcctgctggcatatctgtctataactgaccaccttagggtccattctgatctgtatacatgtataatatatattatatatggacctcagggtccccgctggcttttccatgacttccttatccagctgtgagaaccctgactcttactactgtattgacttatttgtgaaaccttagtatatataaaagtagtttcaaagttgctaaca

SEQ ID NO: 253975 - DNA, 399 bp, Homo sapiens
tatatacccaattaaaactatagatatatgcagaaaagagaaacaagcacaaaaatctaggcacaagtagacatgagtctatcacggtagctgagattaagaagtcagagagaggggtggaggatctagaaaagcaaaagcaaaaagagacaagaatttcaaacaggaggacacaactagtttcaagtatatcagaggtcaaactagataaggagcagaagcgtccccgagatttggcaattaggtcaccactttgaggtggagtcagagaagagaatggaactaaagattaaagaaataaaaactggcaagtagagtctacttgtcagaaaaacttaagaaatggattcagggtggtagatgttagagagcattttgtatgtttttataatagaatgt

SEQ ID NO: 253976 - DNA, 573 bp, Homo sapiens
gctttgggggatccctggcttctttttatttcttttcattaggaggagctgggggagaacccagtcagccccttttccccaccttctctttcactagaatcacgtcggtatgtccacaagtacccagtgtttagcttccatttataagtgagaacttgcagtatttggttttctgttcctgcattaattcacttaggataatggcctccagctgcatccgtgttgctgcaaaagacatgattttgttcttttttgtgctgcgcagtactccttggtgtatatgtactgcattttctttatccagaccaccattgatgggcaccttagctagattccatgtctttactactgtgaatattgcaatcacatgtgtccttttggtagaaagatttgttttattttggatatatacccagtaatgggattgaaactctatattcaatgacataacatcggtagtttgaaattggccatggtaggagaatttacgtcatggaaatcagcaaaccaggctccacccacacccctgacacctgcacaaaatggcaaaactctatctctacaaaaattaaa

SEQ ID NO: 253977 - DNA, 707 bp, Homo sapiens
gctttgggggatccctggcttctttttatttcttttcattaggaggagctgggggagaacccagtcagccccttttccccaccttctctttcactagaatcacgtcggtatgtccacaagtacccagtgtttagcttccatttataagtgagaacttgcagtatttggttttctgttcctgcattaattcacttaggataatggcctccagctgcatccgtgttgctgcaaaagacatgattttgttcttttttgtgctgcgcagtactccttggtgtatatgtactgcattttctttatccagaccaccattgatgggcaccttagctagattccatgtctttactactgtgaatattgcaatcacatgtgtccttttggtagaaagatttgttttattttggatatatacccagtaatgggattgaaactctatattcaatgacataacatcggtagtttgaaattggccatggtaggagaatttacgtcatggaaatcagcaaaccaggctccacccacacccctgacagccagcagttaaacatttaccatctcatcactagatatataggaaaacttcaagtatttggaaatatacacttctaaataactcacaggtctccaaggcaggcagatcacttgaggccaggagtttgagaccagcctgcacaaaatggcaaaactctatctctacaaaaattaaa

SEQ ID NO: 253978 - DNA, 465 bp, Homo sapiens
tgtgtgtgtgtgtgtgtgtatctaaagtaggcttcacaggtcttctcggctccctcctgaaactctcatgaaataaaggaagaagcgggtataaccccagaaggaaagacagaagtgagaagtgatgatactagatgagagatggtcacatttgagaaagtggaaaggagacagaggggtctgctggagcaaagtcgagaagcaggaagtagactcaaaactcagaaccctaggaagttcaggaaatgaaaggaccacgtaatctggagaccagggcgcaggcacaggatggcgctaagagctcggctggtaatgattttgactaacgagcagtttgagtcccagacgctttcctgcagcagttacctgtgggtaactgtcctccctcactcaggcagatacctcgatatctgctttccaggtatagacccaagtatagggtgagggcaaagtagcaagccgcca

SEQ ID NO: 253979 - DNA, 341 bp, Homo sapiens
aaatctagagtaggtcaattgagcctaggatgtcatccagcaacagaaagcttgtcaaaataggaaccatttccatccctaccactgggcctctatgatggtgccctttgggctgagtcagggtctggaagtacactctgctccttgtctcccttggacactcttgcctgggtagatgtgaatgcaggtcatccatgctggggacacagtgcctggaaattgaattcacacagaaatcatatatcgctccagggtacctggaagttttttcctcaaaaatgtacagaactggtatgacaggataacattcttaattaaacatttttaatgaaactataatt

SEQ ID NO: 253980 - DNA, 431 bp, Homo sapiens
aatgggggactatgtgagctgccacagattttaaagatcagatgagggagttttgacatcagcataaaaggaagtgtgtcctcttatattcctaacgaccaaacaagattagagaaaaaatcttctgtcatagctaagaagaagaagcgcctaggtagatatgatcagaaggataagtggaggaggcagaacttaagctggccttgaaggatagaagttactgaagcagagaggagtggtgaagccaccctaggcagggagaacagtatgtggacaagaaatgtgtgtgttataaaccaggtagttgcaatgggtgtcataatttggtacactgggcatctgcacagaatgctctcttcctggtgggatctccctagagagtcaactcgtttatcatatagctatttggcaagcaaagaaacagaaccaaa

SEQ ID NO: 253981 - DNA, 404 bp, Homo sapiens
  misc_feature (294)..(294): n is a, c, g, or t
  misc_feature (308)..(308): n is a, c, g, or t
ggcagcaggcaagagagcttgtgcaggggaactcccctttaaaaaccatcaggtcttgtgagacttattcagtatcatgagaatagcacagggaagccccaccccacaattcaattaccttcccccaggtctcttctagcacacatgggaattatggaagctataattcaagatggagtttggtggggacacagccaaaccatatcaggcatcacacagagcaacccctgggaggcattgatatccccaggcaaggcccacggcaggccttgagagcatggaacagtggtgctngcatcagtgaatcntactagttgaaataaagaaagccatctttccacccctcacttcatgtaagtctgactccaggtcccatctcattccttggcacaggtggtcttatt

SEQ ID NO: 253982 - DNA, 712 bp, Homo sapiens
cttcaatctcaatagatatttatttattgtcataaatatatgctgttatccagagacaaataataaaggctttttaaagtcaaagatggtcaaaagtcagaatttgaaacacaggtattcctcaaagatattgggagttcagttccagactactgcaataaagcaaattctgaaatgaggcaagtcacacaattttttggtttcctagtgaatattaaatttatagttacattatattgttgtctattaagtgtgcaatagcattatgtctaaaaagtgtacatagctgaactaaaaatactttattgttaaaaaatgtttgcaatcatctgaacctttagtgagtcatagtatttttgctggtggagggtcttgccttgatgtttatggctgctgactcaatgcggtggtggttactgaaggctgtggcaatttcttaagataaaacaacagtgaagtttgccacattgattaactcatcatttcatttcatgaaagatttatctgtagcatgtcatgatgtttgatagcattttgcccacagtaaaacttctttcaaaattggagtcaatcctctcaaaccctgccactgctttatcaatgaacattatgtaatgttctaaatccttcgtggtaatttcaacaatgttcacggcatcttcactagaagtagattctatctcaagaaaccactatctttgcttctccataa

SEQ ID NO: 253983 - DNA, 205 bp, Homo sapiens
cccatgcagacaccaggacctccactggttaggtttaaactcaggacatgttatttagcctctttaattctttgtttcctcatatgtaaaaggaaaatcaaaatagctctccctcaccaggttgttgtgaagattacctgagtggtgatgtctgcctgtgaagttctcagaaccatttctaatgcaccctaaatcctcaaaaaaa

SEQ ID NO: 253984 - DNA, 668 bp, Homo sapiens
gctcactgcaacctttacctcccgtgatcaagcaattctcctgtctcagcctcccaagtagctgggactataggcgcctgccatcacacccagctaattttaatttttgtatttttagtagagacggggtttcaccatattggtcaggctggtctcgaactcttggccttaggtgatccacccactttggccttccaaagtcctgggattacaggcatgagccactgcacccagccatttgctttgttttttaaaatttttatttattttaatatttttagtagagatggggtttcaccatgttggccaggctggtctcgaactcccggtctcaagtgatctgcctgcctctgcctcccaaggtgccaggattacaggagtgagccactgtgcctggccactattttcattattgttcattatacaggcatcttttaacattaggtatctgacttgtctgcatcttttgttctaatattgagctttgctgggggaaaaaaagtttatcagttgcataatttggggaaactttctaaagatacttattaagagagaatttctcttagatattctcactctctctgaagcatctttcttttaattaattaattaattaattaatttttttttttttttttttttttttgagacggagtctcgctctgtcg

SEQ ID NO: 253985 - DNA, 346 bp, Homo sapiens
  misc_feature (338)..(338): n is a, c, g, or t
caggagggccttgatattgacccaaggattagtcaatagaggccaggctgcctcatgacttccgcccttctgcaggcatttcccaagcagtgtttcctaaagggatcttctgaagttgagccatgaattaagcagaactcttccttcccctggccccacagttttggcttctgggttctggacatgggagtcctgacaacacagatgtgtgagaaatacaaagaagaccctcagggcagtgctggaggacaagagtctttcatctagggtccccgtagtctccaggactgtcactactcatgtattgaggatcccagaaattcccgagttagtagtantaatccaa

SEQ ID NO: 253986 - DNA, 455 bp, Homo sapiens
aaaaagatgaagcacagataatggttttattttgtctgaaccaaataggaaatcacgtgctaaaccctttcaatcactttgcaatgtcattaccccactccatcaacactgctcataacctctgacagctacaagaagacctccatgatggcatttatttcagggaaatggatgtatcagctatttgtgtgacctcggagaggaaacatttgcaagctgggaagtgtccacagaagccgttcttcttggtggctgtggaggagtgaagtcgacactttgttgctggaatcggatcctttttgaaaatagatgtatggaagaaaatgccaccccactctctccttaccacctcttctctattcaagttttccctagcatcatgataaacatccctctcgaaaataagcaaacaaagaaatggggctgcgtactccattctggaactttcaaaagcc

SEQ ID NO: 253987 - DNA, 274 bp, Homo sapiens
tcccagctactagggaggctgaggtgggagaatcacctgagcccaaggactcaaggttgaagtaagcaaagatcacaccactacactccagcctatgtgacagagagagaccatgtctcaaaaaaagattcagaaatggccagtaagcacatgaaaagatgctcaacattagttattaaggcacatctcaaaaccacagacagttggtgcgagggttgtgcgttattgttatgctgattaacattgtctcctccacaaccatgcttgataaggg

SEQ ID NO: 253988 - DNA, 645 bp, Homo sapiens
attgtgaggcctcccctgctgtgtggaacagtgagtccattaaacctctttcctttataaatcacccagtctcaagtatgtctttattagcagagtgagagcagactaatacacattctcaacctagggggattttgcccccacacaattggcaatgtctggaaacttttctggttgtgaaactaaggagtggagagggggtgatattggcatcaagtacatagagatcagagatgctgctacacaccctacaatgaacaaaacagcccccacaacagagaaagatccagccctcagatgttacttgtactgatattaagaaatcttgctataaggtctttggagcccatattcagtgacagaggcagccatacagagttcaaaatggaagtgttttcagaaagacacagtcacagttggtctccttacccttccatgaactcaccacatctgctttgttctggttctttcctagctttctttggtccacctcgaaggcccatcccaatgtcatggtcaattgtctttcaaggcccagctcaaatgccccctctctccatttttccccagcaaagtcagggagggcagacctttctggtcctcccattgcaatctctattttgacttggcctgattacttctgcc

SEQ ID NO: 253989 - DNA, 238 bp, Homo sapiens
tccagtccccgcttctccgcagctgggttttttttttctttgcgccaggtgcctcaccttcctctcttgtgccttctgcacggtttggggtacccctagcggcccgaggcacaccctgggctcgaaccatggaatccaggttccaaagggccaagcgcagtggctgatgggaagatactgtcttccttggggacccaggctctgcttctctgtggcgtttttttttttttcttttccc

SEQ ID NO: 253990 - DNA, 462 bp, Homo sapiens
ctatctaaatggatggatctggattcctgtagaaaagatttagaaacataggccaggtcattgtatagggagtaagatgaaggtgaatttgcagctagttgaataattagcaaatgtccaagtgaaagggatacccagagggcattatcctttacccatccttctcaacgtctttatccgtgatgtagatggagatacagaaggcatcctcatcaaattaatggagtcatcaagcaagaaggaatggtcaaactgtgggaagtcagagttaggttgcgaactatctacgcaggtttaataatggtccgaaaacaaaaggggaaattttacaaggatctgatgcatttggagtctacatctaagtaaaacaaaaagaataaagaaaaagaaaagaaaatcaacagcatggttacagagtaaagaagacaggaatttttagccattcatgtgaaaaaaaaaaaa

SEQ ID NO: 253991 - DNA, 499 bp, Homo sapiens
ctatctaaatggatggatctggattcctgtagaaaagatttagaaacataggccaggtcattgtatagggagtaagatgaaggtgaatttgcagctagttgaataattagcaaatgtccaagtgaaagggatacccagagggcattatcctttacccatccttctcaacgtctttatccgtgatgtagatggagatacagaaggcatcctcatcaaattaatggagtcatcaagcaagaaggaatggtcaaactgtgggaagtcagagttaggttgcgaactatctacgcaggtttaataatggtccgaaaacaaaaggggaaattttacaaggatctgatgcatttggagtctacatctaagtaaaacaaaaagaataaagaaaaagaaaagaaaatcaacagcatggttacagagtgctgggattattggtgtgagctaccgtgcttggccagaatgtattctttatccctgatctaggcaataggtgtttaaaaaa

SEQ ID NO: 253992 - DNA, 430 bp, Homo sapiens
aaggtttatgtttatcatttacatgagcacaatctttttaaaatgtatatgcacccaatctcactaataccttctactcttcatttatattgaaagccctcctaaagtaaggcttactgattcacaaattagagtttaaacacttctggctgggaacagtggctcacacctgtaatcctagtactttgggaggtcaaggcaggcagattacttgaggtcaggggtccgagaccagcctggccaatatggcggaaccctgtctctactaaaactacaaaaactggccagggatggtggcgcacacctgtcatcccggcttctcaggaggctgaggcaggagaatcgcttgaaccggggacgcaaatgttgcagtgagccaagattgtaccactgcgctccagcctggacaacagagcgagactccatctca

SEQ ID NO: 253993 - DNA, 565 bp, Homo sapiens
agttctttattgcaaacttcttgtttgtatgtgaaatcttatgccatccttatatttagtgctctgtatgtaacatgttctttccctttttattccttttaggatttcctttttatcactggttttgatggatttgattaaggcgttccttggtgaagttttcttcatgtttcttgttcttagaataatcatatttctgtaatatttgaagtttatggtttccatggagcttctaaatctttcatccagtatgttttaaatatctttgtctctcttctccactacacgcccttcagggattccatttagccctatactggggcgtttaaagttttgatgccgatggtgtttttatgttttcaagtcatttgttactgtgtgtttcatttatgttagtttcaacttctattccttctagttcaataatcttctcttctgcaatgtttaatccactgccttcttccatttcagactgtaaatcatactttttatctacagaatttgatatttaaaaaatcttcaacctccccatttaattaaaatacaattatactaactgctctaa

SEQ ID NO: 253994 - DNA, 687 bp, Homo sapiens
gttttcttactagagtgctacaggagaaactgtgtaccaatgctaattcatccttgtaaaaaggaaccaaagatgtcagtcttaatcctttgtttacaaatagtcattaattactgctctatgtaagggaatgattttcttttatccatcaggaaacagaaaggaaacgatggctcagtctttgttccttatgaattaattacaacattgcatcaatgagcaaaagagaaaacactattgttataaattgtcctcgtctctccagtctcttgaatatacatattttttgcatttcctttctctgccatcaagttttccctttgtgaaaaaatttcctctagatacaaatttccttctaggtatcttcatatttttctcctttcattcacaaatgaatgtcctatatctattccctctaattccttaccatactatatatttataacaagcatcctcccaagacacacacaaatgaagaattaatcaaactctataatctaactttgggtctttacctagaacttgggaaatacattttctctcaacattgttcttgcgagtgttgtcttggaatgccaatttcctcttgtttgctacttctgcgaacccaatcaaaacttgtctgtgggtggggagattcggcccatgggtaccatgttgctgtcttgttctaaactggtagctttt

SEQ ID NO: 253995 - DNA, 523 bp, Homo sapiens
ttttacgtaagagcagaggaaaaactgtgtgagtttaagtagttgactcacaaaccctaatcttaatttaggttccagaatggcccaaggcaaaggttttaaatagtccttctccatctgccctagagggtttatttgttatcacaggggttgttagaaggaaattttctttgaagaaatgagtgatgctaaggcatgtagttggctgaagagacttccactggcacctcctcccttgatctggcaaacccagcagctgaccacctttggagtgacagaatctctctctctttatggatagaattctgtcctatggtccccacctaatggagagccacctatgtcatctctgtcacctactctgatgttaaaattttgttgtgaccacaacaaagtaaatatttcctgcaagatgctttccaaagtacctaaaaagacaagagaatgagaggaggaggttgcatggctatttttgtacttacctcccaataaatgttcgtgtgtatgaggcagaatttggtct

SEQ ID NO: 253996 - DNA, 903 bp, Homo sapiens
tagtagagatggggtttcaccacgttggccaggctggtctcgaactcctgacctcaggtgatccgcccgcctcggcctcccaaagtgctgggattacaggcatgagccaccgtgcccggccttttacagataattttaagtcaaactttgcatagttttccaagttgagttaaaattctctatgaaaataatttatctatcatttaccaaatgtaatactgaaaatatgtgaaagatactgattcacagattcaacaaacccaaagaatcccaagcatcataaatacgaagaaatactcaactagattcatctcagtgaagttgtcaaaaatagagatcataaaattagcatagaaagcagcaaaaattagatactttctcgtccatgtggtaatgtattagaacttaattcctttttatggctgaataatactccattgtatgtatatactacattttgtttatccattcatctgttttttggacacttggattgtttccatttttggctatgtgaataatgccactctgaaaattcatatacaagtatctgctttcagtttcttttgaaaacctgcttatttttgacatatcttttgtttataagcacaaatctatttagaataaagccagtggatattttatttccacaatcctttcataaatactgtaagctcttactctgagccatcaatagttaccaagagcactatataataatcagaagcagcagccagcagttatctactgacaaactcgttttttattttattttattttttgagacggaatcttgccctgtcttccaggctggagtgcaatggcatgatcttggctcaccgcaacctctgcctcccgggctcaaattattctcctgcctcagccttccgagtggctgggatt

SEQ ID NO: 253997 - DNA, 684 bp, Homo sapiens
atactttttctggttgagtcagattcaagaaaagaaacaatttaagcagtaagggattcagtactgactctaccaacatttatttttgcttattcaatgcacaaaaagaatgatgagaaatcatttctctctagtttaatgttatttcccattttttatttcgatatatattccaacctgttaactttatttcttctttcctgtgatgatctcccccattccctcttctgcagcattttctcttcttgttattcaattaacaagagaccctaggataacaacctttcttctttacagactaattgttcttttttcttagacataaaaaactagatgggcatacaaatatacatcaattgagttgtgaaggttaaaaacgattcacttttcttttcatcttttcttcattttcctcatgctttttttctattcatgttttcaatgcccatcttcaattttacttatctttctgttctttagagataattagcagtgtgtcactttttacactcaatctccaaggcagaatctacttcataattagtttgaatagttatgccaacctgagcagtccttggcagcagtttagttaggtactagaagcatatggtaaggattttgttcagtatatagcagaatcaatatgaagttgagttaaatttatttattgtaacaacacctgaa

SEQ ID NO: 253998 - DNA, 765 bp, Homo sapiens
attctactcttcaggctcctgattaagcatccttccacagtaacttcatctgacatccccctgcatagtaaaactttgccctttggctatatttaacacattacttaatgttttatattgctttcccagacttaagaattaacaaaagtatattaccaaaaagcactatatatagtactatatagagagtaatacaaagtactgtatgtaatctactagatatatgaaatcttttcatatagctacatatattaataatcacgatgatatacatcaaaacatcaatagtgttcacatctgaattgtgtggttcaaggtatgtgtgtgtcttctaatgccttataaaatgaatatatttctccttttgaaagtagtatgaagtatttttattgatgactgactaatataacattatatcccacttgtggacaggatgcataatatatgcatttatacctttgcaacattttgcaatgatagaaacatagaggacatagatgctctcagtaagaagtctgagttgtctagaatggaatggagcagaaacaaatcattttatcattatctatgtccaaactggccaaacagtatcctcatcagcacctcactatgaaatctgccattttaagacattaaactggtggttttcgcctgggagaagcactgcccgctcctgcaggggtagttttgaaatgttttagatcatgtttttgtatcgtctaataacaaggtaaggcaaaatggtatttagtgagtgctggccag

SEQ ID NO: 253999 - DNA, 439 bp, Homo sapiens
agtggtgagagtgggcatccttatcgtgttccagttctcaaggagaacagttccagcttttgtttcttcaggatgatgttgtctctgtgtttgtcatagatggctcttattattttgaggtgctggtattcctttgactgtggtataagttctgtgtagtcagttgggttcatttccagatactttaagatggccaaagccctgtagaagatctttatttcccggtcaatccttgctcctggtttcccaggcattgtggagacaaagttgaataaacatggaaattttacaatacgtttaaaattcagtagatcaaaaataagatttaaacatctgttggagatgattattcaacaaacttcaaggtagatttcatcaaaattacgtaaatacaacaaaagaaagtgacatatataaatgatattaacacatcatgctt

SEQ ID NO: 254000 - DNA, 493 bp, Homo sapiens
ttttttttgagacagagtctcgctcttgtcacccaggctggagtgcagtggcacgatctgggctcactgcaacctctgcctcctgggttcaaaccattctcctgcctcagcctcccgagtagctaggattacaggcaaccgacaccacgcccggctaaattttgtatttttagtagagacggggttttgccatgttggccaggctggtctccatctgttgacctcgtgatggtctgtatacataggcagtgctatgtatgcagactactgtatatgactgctaactaggtctagacgaaaatatgagtctataaattctttgttaattggacattttaaattatttttccaattacagtggtggatttgcacagattattttattctctttttaggccccattttgctcaagaaaagacccttgtcaagcagttggctggggtcaggggtgcatgttatgattaaggaaactagtagagataaatgagccaca

SEQ ID NO: 254001 - DNA, 460 bp, Homo sapiens
gtaaagcataaataaaaagggcaagtatttagtcattataacttgacctcttgtccaaggcaattcttggcttcagagagaactagttcccctgaacttttaaggaaaaacagtatctttgcatagcctcaaaacattatttactgtcattgtttttaacacatgcccagaaattcctccttccatggatgaagcttactcgcatcgtcttgagtgtgagcaggacttagtgactcgctgctagtgaacaataaatggaaagggaaaaacagggagtttacagggagaaacctgacggaggtttctaagtggtaactaagagtaactaagtgatcagagttaacatcatcagcagtaagtcctataaatattttgtgtccactgacatgatccaacaagaaaggtacatcatcttagggtattctcccccagaatccataatctcagcctcatcatgaaa

SEQ ID NO: 254002 - DNA, 174 bp, Homo sapiens
agccggtaccatcctccatgctccctccatatgcatgaaagacaacagactatttcctgtactaatacagccagtgattgtctccaacattccagagttgaccattttatacataagtaaacgtgtcttaggatcaactgctttttctgctgtagaatgctcctttttctcatg

SEQ ID NO: 254003 - DNA, 493 bp, Homo sapiens
cctagttctgtgataaacctatatttgtgttcccttaaccttctaactcacaggttggcaaacattagcctgagtgccttttctgtaaataaagttttattggaacacagccacacctattcaccagcagaattgagtagttgctacaaagagtatatggcccacaaaactgaaaatatttattatctggccctttatagaaaaagttggctgtttttcacaaataccacagacacacgattctgtctagcaaactcctaggcagctacaaggcctaactagagtattctttctcccttccaagtattaatcaggcccagccctgcttagcttccaaaatcagacaatattgggcatgttcagggtggtatggctgtacactagagtattctttctcctgagagaccttctagtagctacccaagcccaaggcaaagctaaccacatcctcctcgggacctccaaggggctcttaatagccaaaaaaaaaaaa

SEQ ID NO: 254004 - DNA, 505 bp, Homo sapiens
cattataaaaatttatttactatgtagctttatttgacaaaagcatctttcacattatcaatcatgaattataaatttgattcttcatgcttacgagcagatatagtactactgtaaaatctagtaggaacaatatagtaaccatggagtgaaagactcaatttttaggtcctttaggtagctctttaagtacttaggtttttaagtgcaaaatcatttttattaactatgttactgtattagaatgatatatagtgagataaagacaaatttgaagattgagggatgtcagtacgctttgacgtataagttgactcctatgaaagtgattagtttggctttccctctgtagctttctcacctccacatctcaaggataaataaagtacaaccaggcgttttccattttttcccccagttctcagtggagtatatagcacacagttggtgtttagcaagtgtggaaaaaaggattacttaataactttataatgagtgttatatt

SEQ ID NO: 254005 - DNA, 533 bp, Homo sapiens
gtcccttcccccgctggggcgacgggctccggtccagccggctcctctcggattgaaattctccggacttcaaaagctcccagcttggcttccgccggggctgggctggcctggcccgggccggaggggggtgggtgggaaccccggggaggcgacggagataagatgcgcgggtcgttttaaatggaatcggaagccgggcctaggcccccagacgcgcgggtcagctggaacagcttcgctcctgaagaaaaccgggctcggaaaagcggcgcgtgtggggcctgcctccgcagtctgcccgcccggctcgggggagatggcccgcggccccgatcaccctccccagcctgcagcgggcctttcaacggcgacagggccccgagaagggagagagcgaggagtcctgagccgggggccaggagctggcttgtcggctcaggtgtcggtgaaaatgtgatcaggaaaaaaatgttttcgcttctctttggttaaaaagtaagaacaaagggagcttccttctaaacaataaa

SEQ ID NO: 254006 - DNA, 431 bp, Homo sapiens
agtggggaaaagatgagggaagattgattctctctggctgcctgtgtcaccctcagtgacatgcaatccagccacttacagttgactttttcagctgaatgttttcgtttcatgaaagtcttttaaaaattccccctaagttatgcagcacatatagtgacttgaagaggggaaaaatacacccaacagtttaaacaaccctgaatgctggctggaaaagtagcaccagaaagatggcaatgcaaactagactaagcgacctcatggcactgctttgttcctggatgattaagatgcccaggaagaggggggagaaagcccactgcatcgagtgactttgggtctattatgccttctgcgccatgtttatcttttgatcttaaagatactgaaactgacaggtaattaaagagctgttactgttatgccct

SEQ ID NO: 254007 - DNA, 565 bp, Homo sapiens
tattataaattatgagttactgtcaaaataactcaaagcattgttttaatatagtttatcctaagaccattagaacaattctgaaaattaatggagtttattttggtatgattaccctacaacagtaattcttaactggagtgattttgcctcccaggagacatttggtaacatggagacaatttttggctgtcactatttggaaggggtactataggtatcttgcaggtagaagtcagggatgcggccgggcgcggtggctcacgcctgtaatccagcactttgggaggccgaggtgggcggatcacgaggccaggagatcaagaccgtcctggctaacacggtgaaaaacccatctctactaaaaatacaaaaaataaaataaaataaaataaaataaaataaaataaaataattagccgggcgtggtggcaggcacctgtagctccagctactcaggaggctgaggcaggagaatggcgtgaacccaggaggcggagcttgcagtgagccgagacagcgccactgcactccagcctgggcgacagagcgagactccgtctca

SEQ ID NO: 254008 - DNA, 294 bp, Homo sapiens
cagaagcaccagagcacgtgatttatttctggtcataaaggaatcaattactgtaccaggataaagcagcgattttttttttctactctgcttttgcaatcttctttcttctccgtttctatttcactctcatttagctataactgaggagtactcagtccactcttccccattcattttccatcatgtcattttattttgcattgagaactcaaatccttgtttacatgtaaataactcactgttcttcatgcttatttaaaaacaaataaaaagagaccactaattatcaaa

SEQ ID NO: 254009 - DNA, 434 bp, Homo sapiens
aggaaggcagggttactattccacacattatctaggtcatcaaaagcccctggcccaagagtattttatttccttgggaaataaaacagtcatttattaaaggaatatgttgagaactagataaatgattaaaaccaattataaggctgggcgtggtggctcacgcctgtaatcttaacagttttgggaggccgaggtgggcagatctcttgaggccaggagttcaagaccagtttggcctacatagtgaaaccccgtctgtactaaaaatataaaaattagccaggcatggtggcacacacctgtaatcccagccacttgggaggctgaggcaggaaaatcccttgaacctgggaggtagaggttgcagtgagctgagattgcactactgtactcaagcctgggcgacacagcaagaccctgtctcaaaaaaa

SEQ ID NO: 254010 - DNA, 464 bp, Homo sapiens
ttgggtttatctattgggacttcagaaagtaagcatgttgggagttgctaatgtcaattagccaaatctgaaggattgatgattatctattctaacaaagaatctccccaagaccttaattaacagcacagaaagtatgggaatttttaccacccccgaaacgtgctacaacagttttacaatcttacctttgttttgacagtgagattatttaagagttggcagaaatgttcgacttctggcaaatgcatagtgtcttctttgaatacagttaattcctcctcagctaagatgctttctgaaataatcatgcagacctaaagaccaggtttccttaacttttatcaaccccaagcacaaagcaggtaacatgtagatatagaacagaagatgttgatgaagccgaatgtttttataaaatcccagcattcacacacaaaaattattttcatgattttaatata

SEQ ID NO: 254011 - DNA, 116 bp, Homo sapiens
ccatcctggctaacatggtgaaacctcgtctctactaaaaatacaaaaaattagactccaccgccccccgcaaaaaaaaaaagattctgctgttttttggtcaccattactatttc

SEQ ID NO: 254012 - DNA, 507 bp, Homo sapiens
ggaccaggtgaagggcaggagctggcccaggggacagtgtcctaagtggagggatttgccactgcgtgaagagcttgatgggcctgcggagtgtcatctagctaggcacctttttccctgttaatgctggctttagttatagtcatttgtaatgtgtagattttcagtgtcttaacttttcaacagggtaaataggaccatccggagtacaccaatattgagctttgtgataccttttggtcgatttgttgatcagttatgcttcattgtccatgaacatttcagaaaaaaaagaaaaaaggaaaaaaagaaatggaaaattcaggctacttaaatcacgcctttgaaacctagaaacccttaggggcacagacccttcttgtgtaataacagagctctattttctgctgggaagttccctattgagatttgggacacttcctaattttttctgggtaaaataaaagtgacaacttttttttctaatgacttggtaccgagctcgat

SEQ ID NO: 254013 - DNA, 354 bp, Homo sapiens
gggccagcatctcaccctgtcactcaggctagagtgcagtggtgggatcatgattcattgcagcctcaccctcctgagtagctgggaccacagctgtgcactatcaagcccagcttaaaaatttttcgtagagatgggttctttccatgttgcccaggcttcagtgcctgaccaggcttcagtgcctgaccaggcttcagtgcctgaccaggcttcagtgcctgaccaggcttcagtgcctgaccaggcttcagtgcctgaccaggcttcagtgcctgaccaggcttcagtgcctgaccaggcttcagtgcctgaccaggcttcagttgcctgaccaggcttcagtgcctgacc

SEQ ID NO: 254014 - DNA, 216 bp, Homo sapiens
gggccagcatctcaccctgtcactcaggctagagtgcagtggtgggatcatgattcattgcagcctcaccctcctgagtagctgggaccacagctgtgcactatcaagcccagcttaaaaatttttcgtagagatgggttctttccatgttgcccaggctggtctcgaacacgtggactcgagcgatcatcatgcctcggcctctcagagtgctgg

SEQ ID NO: 254015 - DNA, 468 bp, Homo sapiens
caaacttgaagacaaagacatataatctatccaaattgaatgatacaaaaataaaagcaaaaacagcaccagtaacttcagttttttaaaaatttgaatatttttcttgtgtgggtcagattttcctgcttctttgcatgcctaataatttttcattatataactgaatttcagaattttatgttgttggttgctgaatgctgttgcaatatcaagtttcagcaaatgtgtaattagagcctcagaggagaggatattgtggtgaagtcagaaaaatatttgaaaaaaagtggctgaagattttacaaattttatggaagccataatttatggatccaagagtcttaaggacccctaagcaaaataaaactaaataaaattataagacacatcatagtcaaattgctaaaaaccagatataaagaaaaaatcttaaaagcatccaggaaaaagagacaaatgacatac

SEQ ID NO: 254016 - DNA, 328 bp, Homo sapiens
ggaaatctctgcctgtccatctgggatcatttcctttttgtctgaagtttatcctttagcacaggagtcagcaagctacggtccacaggccaaatgcacccacggcctatttttgtgaataaagtttcacaaaaattcgaatactgccaggctcgttcatttacatattgttgtggttgcttttgccccacaatagagttgggtggtttgtgagggatcccatactgtgtggcctacaacactcaaatatttactatctgactttttttttttttttttaacgcaggttttcaccatgttggccaggctggtctcaaacctgcgttaa

SEQ ID NO: 254017 - DNA, 406 bp, Homo sapiens
cagtagaaacttaagttcctgttttcttttattttatttggagttttattgttttgttttattttcttgtttgcagtctctcttaaaataagagagagctgaacaaacatctaaaggtttttttctgtaaacttttcatgaacaaccgtcgtgaatcatctactctgcaaaacttttgggcctttcaagtttcatcttattcaagtataaaaattaattccattgaaggtggcttcagaagagcaattttattcactgaagttgaaaaagggatattttgccaggtctagtggctcacacctgttatccaagcactttgggagactgaggagggaggatcacctgaggtcaggagtttgagaccagcctggctaacgtggcgaaaccctgtctctactaaaaatac

SEQ ID NO: 254018 - DNA, 503 bp, Homo sapiens
  misc_feature (484)..(487): n is a, c, g, or t
  misc_feature (489)..(489): n is a, c, g, or t
caagaaaggacagagtgatccagtaggggtctttaggtataaagttctaaaacttatcttctgcatccactggtgaaaagagacaataagtataaattatagcaagaataatttcctgacatcttcaaggccctggtaagggttagccagtgagaatgtgaaatagtctcttcttgagatctttcaaagcaagtcatggttatccacttgtagagatgatcctcatgtagtactatccagagcccaagctatagagtaaactgggactcctttccaacagcattgttctttgtgatatatcttcttgtgatatatgaaagaataaatgtatatctatacaaatatgacattgagttggaaaaaagacacgtgactgagctaaagtgttggcttcattggctgccaagattttttttttcaaactagttagtatctgtccacaaagtgctgggattacagatgtgagccactgcactccgcctcnnnnangcattaaaaaaaaa

SEQ ID NO: 254019 - DNA, 1002 bp, Homo sapiens
tggtgcaatgttataaactttatttgtggaatgtgctagacaggaactcagattttctgacacctactctgatggtgtctctaaaataatctttctaactttatagtttatcaagggtaaccccattctatcacatgccttttgagaatttgggttcaatatttggagtactctggactcatcagacatctttaataaattgtaatacattgccactgtcattcaaggtcctatgtgtgtctttttgcctattcataccaaaaatatcttttgatccctgactctgggtcgggcatagtattaagggcaggggacacaaagatgtatgagagcacattttctgtgaataaaaagctcagagtttggagttctgtatgtagcatattcaaatggaaggccttctatgcaataaaggctaaataatacatcaacttggtggcattttatttagataaggtgcaaacattattgtacatatgccccccgcccccaccaccccattgtatcctatagcacagttgaactggtttaaaagccatgcatggggaggtatgatttcactagtttttgtgtctctttcttttcctctgtacaattgagtgcataaatattatgaattgtatcctctgaacacagtattaatgctttaactgtagatgattggctggggtatcacctctggttctttccatctgtgattagaaatggagaggacatttttatttctatgtaaaagtagaagctttaagaatcagcttctgatatttatatcagaagaggtaagcacccagattcttgttgaattctgaggtcttctcatctttgcttgattatagggtataaagtattagaacaattgaatcttaaaaattgtgcttaaggaaggtactaagacaaaaatgtttgcttaaggtaatcttcatatgtatacaataactgagacatggatagtgcctacgtctttggttaaagtgcaataaacaaagaactatataaattata

SEQ ID NO: 254020 - DNA, 434 bp, Homo sapiens
atggcatttgcagcaacctggatggaattgtagactattattctaagtgaagtaactcaggaatggaaacccaaacatcacatgttctcactcataagtgggagctaagctatgaggatgaaaaggcataagaatgaaactttggggacttgggggaaagggtcaggggaggtaagcaataaaagactacacattgggtacaatgtacactgctcaggtgatgggtgcaccaaaatctcagaaatcaccactaaagaacttattcatgtaaccaaacaccacgagttccccccaaacctactgaaatttaaaaaaaataaaataaaatgttaatttcacaataaaatgtgaaaaaatatgcagaaattttttaaaaatgtgcacaaagatttatgtacatagatacaaatgagaaaactggtcatgaaagcaaa

SEQ ID NO: 254021 - DNA, 736 bp, Homo sapiens
cattctacgaggagtggtggttcctcctggtgatggctctgtccagcctgatcgtcatcctgctggtggtgttcgccctcgtcctgcacgggcagaataagaagtataagaactgcagcacaggaaaggggatctccaccatggaggagtctgtgaccctggacaacggaggatttgctgccctggagctcagcagccgccacctcaatgtcaagagcaccttctccaagaagaacgggaccaggtccccaccccggcctagccccggcggcctgcactactcagacgaggacatctgcaacaagtacaacggcgccgtgctgaccgagagcgtgagcctcaaggagaagtcggcagatgcatcagaatctgaggccacggactctgactacgaggacgcgctgcccaagcactccttcgtgaaccactacatgagcgaccccacctactacaactcatggaagcgcagggcccagggccgcgcacctgcgccgcacaggtacgaggcggtggcgggctccgaggcgggcgcgcagctgcacccggtcatcaccacgcagagcgcgggcggcgtctacacccccgctggccccggcgcgcgaactccgctcaccggcttctcctccttcgtgtgagcaaagcgccgcgcctccctcagggcggaacggaggcaactttccggagtctatttttgttaagacaatcaactccaataactgagctgaagtttttgttt

SEQ ID NO: 254022 - DNA, 449 bp, Homo sapiens
gcaatttataaaagttgaataagattgattacttcgagaaaagttggagtgtctttttctgtctctaccagatacccccagaaaatgaggactatatttaactatacttaatatgtagcagtgtaattatttgcatacattccattagacttataaaatgccgttataagcagttgttatcttaccaaagtttttttctgcaatggcatactttcagatataaagagactgctttaaaaatcaaagttgacttatacagctttttaaaagaccattggaaaatctatctctattttttgtttatgggattcctctacaggctccctgaactctgatgattaaatcatgtacttttctgacaggcccaggatctccaaattatcctgggaccctcagtagagaagtttatccaattaacacaaatatatgcaggcacacacaaaacattg

SEQ ID NO: 254023 - DNA, 468 bp, Homo sapiens
taaacaagactgagagaccactagctagattaacaaagaaaaaagaatttccaaataagtactgtgagaaatgacaaagatattacaattcatcttcatttgcagatgaagatactgcagcttagtcagcagactaagtcacctaaatgctctgccagaagcagaatttgtactcaggaatgtccaactgcaaagtccatgtgcttgaacagtatggcatactgatacatgcagaaatacaaaagatcctcagaaaatactgtgagtaattctatgcacacaaattagaaaatctagaggaaatggataaattcctgggaacatacaatctcccaagattgaatcaggaagagactgataccctgactagaccaatatcaagctctgaaattaaaccaataataaaaaacctaccaacgacaacaacaaaaagccctggactagatggattcacagctaaattctatc

SEQ ID NO: 254024 - DNA, 576 bp, Homo sapiens
tgccaaataaagtaacatgcacaggttccatggataaggatgtggacattttggggaggccattattctgcctaacactggtaacttccataaacatcacccacaacaaaaatttcatttgccttctttctatatctcattgttttgtgtgaatcacaggcaagagcacaaactttgaggtgaaacacaccagctctgctatgaactggctggatgatcctggaccactcacttcacctcctacagcgttttctcatctgcagcacaaagatgactcttactgttatcagaaaatgacagtcaaagagtaaattaagatgtgtaaggtattagacacagaggctggtacctgatgagcacttggtaaacattcctttcagtctgttcttttctctatcccatttctctcatcctcacccatcttctccttcatctcctctctcttcatcgacttacatactcttaacttgccatttagaaagaagtcatgctccccattctctcgtgactctgctagaatgttcttgtgatagagtctgccatccactcaagacagcccacattttttatacaaag

SEQ ID NO: 254025 - DNA, 456 bp, Homo sapiens
cttaaagaccacttagtcccactccctctttttacagaagaaactcaggcccaagaaggacagtgaccagtctgaggtcacaacccaaagctggcagggctggggtgaaaagctaggctcctgtgacctccttctgtggccatcccacctgcctcattccatttctggggatagagatgtctgtggggttttttcctccccattttttctccccctagttccagcctggctgacagagcgagtctgtctcaaacgtctcaaaaacaaacaaacaaacaaaaaacctctttgaaggggattaaggggatgtgtcccaattaactagcaaacacctgtgaatgccagctttgtgtcaaggggagagggatttgtatagctaaaagatatttattgcttaggaaaaacatgactgaataaatgcatcctcattaaataaaaaatgctccagttaaaaaa

SEQ ID NO: 254026 - DNA, 364 bp, Homo sapiens
cttaaagaccacttagtcccactccctctttttacagaagaaactcaggcccaagaaggacagtgaccagtctgaggtcacaacccaaagctggcagggctggggtgaaaagctaggctcctgtgactccagcctggctgacagagcgagtctgtctcaaacgtctcaaaaacaaacaaacaaacaaaaaacctctttgaaggggattaaggggatgtgtcccaattaactagcaaacacctgtgaatgccagctttgtgtcaaggggagagggatttgtatagctaaaagatatttattgcttaggaaaaacatgactgaataaatgcatcctcattaaataaaaaatgctccagttaaaaaa

SEQ ID NO: 254027 - DNA, 1090 bp, Homo sapiens
cttaaagaccacttagtcccactccctctttttacagaagaaactcaggcccaagaaggacagtgaccagtctgaggtcacaacccaaagctggcagggctggggtgaaaagctaggctcctgtgacctccttctgtggccatcccacctgcctcattccatttctggggatagagatgtctgtggggttttttcctccccattttttctccccctagtgtccagcattcgttaaatacctaagaactacttagtgacctccctccctcgagacctgggaggaggctgggatctctcctaggatgggggctagaagtgggagctgttagttcaggtataagactgatacatagactgttttcctggcccaggcccatctgtcaccaactgactttgtatgtggctcaggagacctctaggcaagggaacgaggttcctaagaaccctgactcaggtgaggttctggcctctctctccagaacataggaaattcaggtgtagctgcatgaaacctctccctagaagaggaatggtgataccccaccattcctgggacccaggatgcccttcttggcatttccctaccttccatgaccagattagtccctctccttccagaatgtctccttgggtttattcaccatgttctactcctccaccccacctgatcgtcactgcattagcatatgggattagaacatcatcttgttatgtacttgggtcccagtcactaatatgtgggtgtcctatgtctttaaactgggggttcccctcagacacctcccaaaagatgagggatgagaggtgaagtagacttttttcttttttttttttttttgagacggagtctcactccagcctggctgacagagcgagtctgtctcaaacgtctcaaaaacaaacaaacaaacaaaaaacctctttgaaggggattaaggggatgtgtcccaattaactagcaaacacctgtgaatgccagctttgtgtcaaggggagagggatttgtatagctaaaagatatttattgcttaggaaaaacatgactgaataaatgcatcctcattaaataaaaaatgctccagttaaaaaa

SEQ ID NO: 254028 - DNA, 716 bp, Homo sapiens
cttaaagaccacttagtcccactccctctttttacagaagaaactcaggcccaagaaggacagtgaccagtctgaggtcacaacccaaagctggcagggctggggtgaaaagctaggctcctgtgacctccttctgtggccatcccacctgcctcattccatttctggggatagagatgtctgtggggttttttcctccccattttttctccccctagtgtccagcattcgttaaatacctaagaactacttagtgacctccctccctcgagacctgggaggaggctgggatctctcctaggatgggggctagaagtgggagctgttagttcaggtataagactgatacatagactgttttcctggcccaggcccatctgtcaccaactgactttgtatgtggctcaggagacctctaggcaagggaacgaggttcctaagaaccctgactcaggtgaggttctggcctctctctccagtccagcctggctgacagagcgagtctgtctcaaacgtctcaaaaacaaacaaacaaacaaaaaacctctttgaaggggattaaggggatgtgtcccaattaactagcaaacacctgtgaatgccagctttgtgtcaaggggagagggatttgtatagctaaaagatatttattgcttaggaaaaacatgactgaataaatgcatcctcattaaataaaaaatgctccagttaaaaaa

SEQ ID NO: 254029 - DNA, 860 bp, Homo sapiens
cttaaagaccacttagtcccactccctctttttacagaagaaactcaggcccaagaaggacagtgaccagtctgaggtcacaacccaaagctggcagggctggggtgaaaagctaggctcctgtgacctccttctgtggccatcccacctgcctcattccatttctggggatagagatgtctgtggggttttttcctccccattttttctccccctagtgtccagcattcgttaaatacctaagaactacttagtgacctccctccctcgagacctgggaggaggctgggatctctcctaggatgggggctagaagtgggagctgttagttcaggtataagactgatacatagactgttttcctggcccaggcccatctgtcaccaactgactttgtatgtggctcaggagacctctaggcaagggaacgaggttcctaagaaccctgactcaggtgaggttctggcctctctctccagaacataggaaattcaggtgtagctgcatgaaacctctccctagaagaggaatggtgataccccaccattcctgggacccaggatgcccttcttggcatttccctaccttccatgaccagattagtccctctccttccagaatgttccagcctggctgacagagcgagtctgtctcaaacgtctcaaaaacaaacaaacaaacaaaaaacctctttgaaggggattaaggggatgtgtcccaattaactagcaaacacctgtgaatgccagctttgtgtcaaggggagagggatttgtatagctaaaagatatttattgcttaggaaaaacatgactgaataaatgcatcctcattaaataaaaaatgctccagttaaaaaa

SEQ ID NO: 254030 - DNA, 738 bp, Homo sapiens
cttaaagaccacttagtcccactccctctttttacagaagaaactcaggcccaagaaggacagtgaccagtctgaggtcacaacccaaagctggcagggctggggtgaaaagctaggctcctgtgacctccttctgtggccatcccacctgcctcattccatttctggggatagagatgtctgtggggttttttcctccccattttttctccccctagtgtccagcattcgttaaatacctaagaactacttagtgacctccctccctcgagacctgggaggaggctgggatctctcctaggatgggggctagaagtgggagctgttagttcaggtataagactgatacatagactgttttcctggcccaggcccatctgtcaccaactgactttgtatgtggctcaggagacctctaggcaagggaacgaggttcctaagaaccctgactcaggtgaggttctggcctctctctccagaacataggaaattcaggtgtagtccagcctggctgacagagcgagtctgtctcaaacgtctcaaaaacaaacaaacaaacaaaaaacctctttgaaggggattaaggggatgtgtcccaattaactagcaaacacctgtgaatgccagctttgtgtcaaggggagagggatttgtatagctaaaagatatttattgcttaggaaaaacatgactgaataaatgcatcctcattaaataaaaaatgctccagttaaaaaa

SEQ ID NO: 254031 - DNA, 1963 bp, Homo sapiens
cacattccagaaaaaaataccgctttcacaaaactcgctccgcatgacccacagaacacccaaggtcaaaaagagtccaaagttcagaaagaaaagttatctgagtagactgatgctcgcaaacaggcctccgttctctgcagcgaagagcctcataaattccccttcacaaggggctttttcatccttaggagacctgagtcctcaagaaaacccttttctggaagtatctgctccttcagaacattttatagaaaccactaatataaaagacacaactgcaagaaatgccttggaagaaaatgtttttatggaaaacactaacatgccagaagtcaccatctctgaaaacacaaactacaatcatcctcctgaggcagattccgctgggactgcattcaacttagggccaactgttaaacaaactgagacaaaatgggaatacaacaacgtgggcactgacctgtcccccgagcccaaaagcttcaattacccattgctcagtttgaaattcagctaacccagcagctacagtcccttatccccaacaacaatgtgagaaggctcatttctcatgttatccggaccttgaagatggactgctctggggcccatgtgcaagtgacctgtgccaagctcatctccaggacaggccacctgatgaagcttctcagtgggcagcaggaagtaaaggcatctgagatagaatgggatacggaccaatggaagactgagaactacattaatgagagcacggaagcccagagtgaacagaaagagaagtcgcttgagctcacaaaagaagttccaggatacggctatactgacaaactcatcttggcattaattgtgactgaaatactaatgattttgattatacttttctgcctcattgtggtttaggattgggtgtgtgtgtctcctctctgaatggcactcaaatgtttgctgactcctactctgcgtgactggggtgtacagctatggactgatgcatcccatcccatcatctttcacgagcaaagcagtctcttttttgacagctgaagaagaacctgtagggaatccagaaggagcattcatgaaggtgttacaagcccggaagaattacacaagcactgagctgactgttgagccggaggagccctcagacagcagtggcatcaacttgtcaggctttgggagtgagcagctagacaccaatgacgagagtgatgttatcagtgcactaagttacatttgccatatttctcagcagtaaacctagatgtggaatcaatgttactaccgttcattaaactgccaaccacaggaaacagcctggcaaagattcaaactgtaggccaaaaccggcaaaaagtgaatagagtcctcatgggcccaatgagcatccagaaaaggcacttcaaagaggtgggaaggcagagcatcaggagggaacagggtgcccaggcatctgtggagaacgctgccgaagaaaaaaggctcgggagtccagccccaagggagctggaacagcctcacacacagcaggggcctgagaagttagcgggaaacgccatctacaccaagccttcgttcagccaagagcataaggcagcagtctctgtgctgacacccttctccaagggcgcgccttctacctccagccctgcaaaagccctaccacaggtgagagacagattgaaagacaacacacactatttccattttagaaagtgcaaaggctagagttacaaatatgaaggcttctaaaccaatttcacattccagaaaaaaataccgctttcacaaaactcgctccgcatgacccacagaacacccaaggtcaaaaagagtccaaagttcagaaagaaaagttatctgagtagactgatgctcgcaaacaggcctcacgttctctgcagcgaagagcctcataaattccccttcacaaggggctttttcatccttagggacctga

SEQ ID NO: 254032 - DNA, 1230 bp, Homo sapiens
cacattccagaaaaaaataccgctttcacaaaactcgctccgcatgacccacagaacacccaaggtcaaaaagagtccaaagttcagaaagaaaagttatctgagtagactgatgctcgcaaacaggcctccgttctctgcagcgaagagcctcataaattccccttcacaaggggctttttcatccttaggagacctgagtcctcaagaaaacccttttctggaagtatctgctccttcagaacattttatagaaaccactaatataaaagacacaactgcaagaaatgccttggaagaaaatgtttttatggaaaacactaacatgccagaagtcaccatctctgaaaacacaaactacaatcatcctcctgaggcagattccgctgggactgcattcaacttagggccaactgttaaacaaactgagacaaaatgggaatacaacaacgtgggcactgacctgtcccccgagcccaaaagcttcaattacccattgctcagtttgaaattcagctaacccagcagctacagtcccttatccccaacaacaatgtgagaaggctcatttctcatgttatccggaccttgaagatggactgctctggggcccatgtgcaagtgacctgtgccaagctcatctccaggacaggccacctgatgaagcttctcagtgggcagcaggaagtaaaggcatctgagatagaatgggatacggaccaatggaagactgagaactacattaatgagagcacggaagcccagagtgaacagaaagagaagtcgcttgagctcacaaaagaagttccaggatacggctatactgacaaactcatcttggcattaattgtgactgaaatactaatgattttgattatacttttctgcctcattgtggtaaggacaataattaattcaggttttcagaatgcagtcctgtttttgtgtggattcagagctcacaaactgaaaaccaaagccactttcccacctgctgctacttgacatacttcttcagtcatttaaggctgaggtgtatgctttgttcttttattgcagtgtatatttcaggatttttaaaagatcctcgcttccagatctctgtgaattgaaaccaagttaatcccactagactattttaagaagtcgatataatagcaaaatttctccacccaaaactatgtcaacaattggatgtactcatcaagtcacccttactctgccactaat

SEQ ID NO: 254033 - DNA, 561 bp, Homo sapiens
  misc_feature (42)..(42): n is a, c, g, or t
tattagggataatattcatttagccttctgagctttctggcnagacttggtgaccttgccagctccagcagccttcttgtccactgctttgggagtgagcagctagacaccaatgacgagagtgatgttatcagtgcactaagttacatttgccatatttctcagcagtaaacctagatgtggaatcaatgttactaccgttcattaaactgccaaccacaggaaacagcctggcaaagattcaaactgtaggccaaaaccggcaaaaagtgaatagagtcctcatgggcccaatgagcatccagaaaaggcacttcaaagaggtgggaaggcagagcatcaggagggaacagggtgcccaggcatctgtggagaacgctgccgaagaaaaaaggctcgggagtccagccccaagggagctggaacagcctcacacacagcaggggcctgagaagttagcgggaaacgccatctacaccaagccttcgttcagccaagagcataaggcagcagtctctgtgctgacacccttctccaagggcgcgccttctacctccagcc

SEQ ID NO: 254034 - DNA, 404 bp, Homo sapiens
  misc_feature (42)..(42): n is a, c, g, or t
tattagggataatattcatttagccttctgagctttctggcnagacttggtgaccttgccagctccagcagccttcttgtccactgctttgggagtgagcagctagacaccaatgacgagagtgatgttatcagtgcactaagttacatttgccatatttctcagcagtaaacctagatgtggaatcaatgttactaccgttcattaaactgccaaccacaggaaacagcctggcaaagattcaaactgtaggccaaaaccggcaaaaagtgaatagagtcctcatgggcccaatgagcatccagaaaaggcacttcaaagaggtgggaaggcagagcatcaggaggggcagctccctgcggggaggtagtgacgaaaaataacacgatcttcgagcctgtaat

SEQ ID NO: 254035 - DNA, 1919 bp, Homo sapiens
cacattccagaaaaaaataccgctttcacaaaactcgctccgcatgacccacagaacacccaaggtcaaaaagagtccaaagttcagaaagaaaagttatctgagtagactgatgctcgcaaacaggcctccgttctctgcagcgaagagcctcataaattccccttcacaaggggctttttcatccttaggagacctgagtcctcaagaaaacccttttctggaagtatctgctccttcagaacattttatagaaaccactaatataaaagacacaactgcaagaaatgccttggaagaaaatgtttttatggaaaacactaacatgccagaagtcaccatctctgaaaacacaaactacaatcatcctcctgaggcagattccgctgggactgcattcaacttagggccaactgttaaacaaactgagacaaaatgggaatacaacaacgtgggcactgacctgtcccccgagcccaaaagcttcaattacccattgctcagtttgaaattcagctaacccagcagctacagtcccttatccccaacaacaatgtgagaaggctcatttctcatgttatccggaccttgaagatggactgctctggggcccatgtgcaagtgacctgtgccaagctcatctccaggacaggccacctgatgaagcttctcagtgggcagcaggaagtaaaggcatctgagatagaatgggatacggaccaatggaagactgagaactacattaatgagagcacggaagcccagagtgaacagaaagagaagtcgcttgagctcacaaaagaagttccaggatacggctatactgacaaactcatcttggcattaattgtgactgaaatactaatgattttgattatacttttctgcctcattgtgatgtgttgtcaccgaaggtcattacaagaagatgaagaaggattctcaaggggcattttcaggtttctgccacggaggagatgctcttcacgaagggagagtcaggtacattggaggattcattgctgtggccagggaaggcagaggacatgcaaaattagtatttccctttctatcttctaggatggacttttttcattcagacggccgctctggcttaaagatatgtacaaacctctcagtgccacaagagtaaataatcacgcatggaagctgcacaagaagtcatctaatgaggacgagatcctcaacagggaccctgggtaaatgacggagccctcacaggtcccatctaaaatgaggagggggtgagaagcttaattgctcctttcaagaatcaaaaccttggcattgttattcttatcccagggacagcgaagccccaacagagaagggggaggagagtgaagccctgccataggaggagaacccagcccacctcaggcctcctgcaaaaacacatagcataaacaataccatcagaaagaaaagcaggactgaagccagcggcccacacatccacagaggcagcgggcagagcaagcacagggccatcgttcctgcccttgtttcccagtctaattagtcacccagacctgaaaacatatcctcagggggtggagattttacaattaccattgtttttggtgccctctcccttgcttcatcaagcatcagtcatataataccacagatttgaactcctgcccacaggggacctcccatctcctggcccctatcataggatcactgggcctacctgcactgtggggccaagccctgtctttttcccaagccctcaagcacacgcatgagtgttcatcccgacttggtagggggcttttcacccttacaagatggcaaaagattcacattgcttttttaaaaatttgtttttctttttaaaaatcccaacccttggatagcagggaggtgctggaggggtagagtcaagaagagtg

SEQ ID NO: 254036 - DNA, 1841 bp, Homo sapiens
cacattccagaaaaaaataccgctttcacaaaactcgctccgcatgacccacagaacacccaaggtcaaaaagagtccaaagttcagaaagaaaagttatctgagtagactgatgctcgcaaacaggcctccgttctctgcagcgaagagcctcataaattccccttcacaaggggctttttcatccttaggagacctgagtcctcaagaaaacccttttctggaagtatctgctccttcagaacattttatagaaaccactaatataaaagacacaactgcaagaaatgccttggaagaaaatgtttttatggaaaacactaacatgccagaagtcaccatctctgaaaacacaaactacaatcatcctcctgaggcagattccgctgggactgcattcaacttagggccaactgttaaacaaactgagacaaaatgggaatacaacaacgtgggcactgacctgtcccccgagcccaaaagcttcaattacccattgctcagtttgaaattcagctaacccagcagctacagtcccttatccccaacaacaatgtgagaaggctcatttctcatgttatccggaccttgaagatggactgctctggggcccatgtgcaagtgacctgtgccaagctcatctccaggacaggccacctgatgaagcttctcagtgggcagcaggaagtaaaggcatctgagatagaatgggatacggaccaatggaagactgagaactacattaatgagagcacggaagcccagagtgaacagaaagagaagtcgcttgagctcacaaaagaagttccaggatacggctatactgacaaactcatcttggcattaattgtgactgaaatactaatgattttgattatacttttctgcctcattgtgatgtgttgtcaccgaaggtcattacaagaagatgaagaaggattctcaaggggcattttcaggtttctgccacggaggagatgctcttcacgaagggagagtcaggatggacttttttcattcagacggccgctctggcttaaagatatgtacaaacctctcagtgccacaagagtaaataatcacgcatggaagctgcacaagaagtcatctaatgaggacgagatcctcaacagggaccctgggtaaatgacggagccctcacaggtcccatctaaaatgaggagggggtgagaagcttaattgctcctttcaagaatcaaaaccttggcattgttattcttatcccagggacagcgaagccccaacagagaagggggaggagagtgaagccctgccataggaggagaacccagcccacctcaggcctcctgcaaaaacacatagcataaacaataccatcagaaagaaaagcaggactgaagccagcggcccacacatccacagaggcagcgggcagagcaagcacagggccatcgttcctgcccttgtttcccagtctaattagtcacccagacctgaaaacatatcctcagggggtggagattttacaattaccattgtttttggtgccctctcccttgcttcatcaagcatcagtcatataataccacagatttgaactcctgcccacaggggacctcccatctcctggcccctatcataggatcactgggcctacctgcactgtggggccaagccctgtctttttcccaagccctcaagcacacgcatgagtgttcatcccgacttggtagggggcttttcacccttacaagatggcaaaagattcacattgcttttttaaaaatttgtttttctttttaaaaatcccaacccttggatagcagggaggtgctggaggggtagagtcaagaagagtg

SEQ ID NO: 254037 - DNA, 1077 bp, Homo sapiens
tcttcatgatatttctggcaagctcatagtctcccagagaagtacattgtgagatacgtgggaaatggctgcatcactcactgtcttgtgcatgtgtctccccaggggcattttcaggtttctgccacggaggagatgctcttcacgaagggagagtcaggtacattggaggattcattgctgtggccagggaaggcagaggacatgcaaaattagtatttccctttctatcttctaggatggacttttttcattcagacggccgctctggcttaaagatatgtacaaacctctcagtgccacaagagtaaataatcacgcatggaagctgcacaagaagtcatctaatgaggacgagatcctcaacagggaccctgggtaaatgacggagccctcacaggtcccatctaaaatgaggagggggtgagaagcttaattgctcctttcaagaatcaaaaccttggcattgttattcttatcccagggacagcgaagccccaacagagaagggggaggagagtgaagccctgccataggaggagaacccagcccacctcaggcctcctgcaaaaacacatagcataaacaataccatcagaaagaaaagcaggactgaagccagcggcccacacatccacagaggcagcgggcagagcaagcacagggccatcgttcctgcccttgtttcccagtctaattagtcacccagacctgaaaacatatcctcagggggtggagattttacaattaccattgtttttggtgccctctcccttgcttcatcaagcatcagtcatataataccacagatttgaactcctgcccacaggggacctcccatctcctggcccctatcataggatcactgggcctacctgcactgtggggccaagccctgtctttttcccaagccctcaagcacacgcatgagtgttcatcccgacttggtagggggcttttcacccttacaagatggcaaaagattcacattgcttttttaaaaatttgtttttctttttaaaaatcccaacccttggatagcagggaggtgctggaggggtagagtcaagaagagtg

SEQ ID NO: 254038 - DNA, 1814 bp, Homo sapiens
cacattccagaaaaaaataccgctttcacaaaactcgctccgcatgacccacagaacacccaaggtcaaaaagagtccaaagttcagaaagaaaagttatctgagtagactgatgctcgcaaacaggcctccgttctctgcagcgaagagcctcataaattccccttcacaaggggctttttcatccttaggagacctgagtcctcaagaaaacccttttctggaagtatctgctccttcagaacattttatagaaaccactaatataaaagacacaactgcaagaaatgccttggaagaaaatgtttttatggaaaacactaacatgccagaagtcaccatctctgaaaacacaaactacaatcatcctcctgaggcagattccgctgggactgcattcaacttagggccaactgttaaacaaactgagacaaaatgggaatacaacaacgtgggcactgacctgtcccccgagcccaaaagcttcaattacccattgctcagtttgaaattcagctaacccagcagctacagtcccttatccccaacaacaatgtgagaaggctcatttctcatgttatccggaccttgaagatggactgctctggggcccatgtgcaagtgacctgtgccaagctcatctccaggacaggccacctgatgaagcttctcagtgggcagcaggaagtaaaggcatctgagatagaatgggatacggaccaatggaagactgagaactacattaatgagagcacggaagcccagagtgaacagaaagagaagtcgcttgagatgtgttgtcaccgaaggtcattacaagaagatgaagaaggattctcaaggggcattttcaggtttctgccacggaggagatgctcttcacgaagggagagtcaggtacattggaggattcattgctgtggccagggaaggcagaggacatgcaaaattagtatttccctttctatcttctaggatggacttttttcattcagacggccgctctggcttaaagatatgtacaaacctctcagtgccacaagagtaaataatcacgcatggaagctgcacaagaagtcatctaatgaggacgagatcctcaacagggaccctgggtaaatgacggagccctcacaggtcccatctaaaatgaggagggggtgagaagcttaattgctcctttcaagaatcaaaaccttggcattgttattcttatcccagggacagcgaagccccaacagagaagggggaggagagtgaagccctgccataggaggagaacccagcccacctcaggcctcctgcaaaaacacatagcataaacaataccatcagaaagaaaagcaggactgaagccagcggcccacacatccacagaggcagcgggcagagcaagcacagggccatcgttcctgcccttgtttcccagtctaattagtcacccagacctgaaaacatatcctcagggggtggagattttacaattaccattgtttttggtgccctctcccttgcttcatcaagcatcagtcatataataccacagatttgaactcctgcccacaggggacctcccatctcctggcccctatcataggatcactgggcctacctgcactgtggggccaagccctgtctttttcccaagccctcaagcacacgcatgagtgttcatcccgacttggtagggggcttttcacccttacaagatggcaaaagattcacattgcttttttaaaaatttgtttttctttttaaaaatcccaacccttggatagcagggaggtgctggaggggtagagtcaagaagagtg

SEQ ID NO: 254039 - DNA, 1735 bp, Homo sapiens
cacattccagaaaaaaataccgctttcacaaaactcgctccgcatgacccacagaacacccaaggtcaaaaagagtccaaagttcagaaagaaaagttatctgagtagactgatgctcgcaaacaggcctccgttctctgcagcgaagagcctcataaattccccttcacaaggggctttttcatccttaggagacctgagtcctcaagaaaacccttttctggaagtatctgctccttcagaacattttatagaaaccactaatataaaagacacaactgcaagaaatgccttggaagaaaatgtttttatggaaaacactaacatgccagaagtcaccatctctgaaaacacaaactacaatcatcctcctgaggcagattccgctgggactgcattcaacttagggccaactgttaaacaaactgagacaaaatgggaatacaacaacgtgggcactgacctgtcccccgagcccaaaagcttcaattacccattgctcagtttgaaattcagctaacccagcagctacagtcccttatccccaacaacaatgtgagaaggctcatttctcatgttatccggaccttgaagatggactgctctggggcccatgtgcaagtgacctgtgccaagctcatctccaggacaggccacctgatgaagcttctcagtgggcagcaggaagtaaaggcatctgagatagaatgggatacggaccaatggaagactgagaactacattaatgagagcacggaagcccagagtgaacagaaagagaagtcgcttgagctcacaaaagaagttccaggatacggctatactgacaaactcatcttggcattaattgtgactgaaatactaatgattttgattatacttttctgcctcattgtgatgtgttgtcaccgaaggtcattacaagaagatgaagaaggattctcaaggggcattttcaggtttctgccacggaggagatgctcttcacgaagggagagtcaggatggacttttttcattcagacggccgctctggcttaaagatatgtacaaacctctcagtgccacaagagtaaataatcacgcatggaagctgcacaagaagtcatctaatgaggacgagatcctcaacagggaccctggggacagcgaagccccaacagagaagggggaggagagtgaagccctgccataggaggagaacccagcccacctcaggcctcctgcaaaaacacatagcataaacaataccatcagaaagaaaagcaggactgaagccagcggcccacacatccacagaggcagcgggcagagcaagcacagggccatcgttcctgcccttgtttcccagtctaattagtcacccagacctgaaaacatatcctcagggggtggagattttacaattaccattgtttttggtgccctctcccttgcttcatcaagcatcagtcatataataccacagatttgaactcctgcccacaggggacctcccatctcctggcccctatcataggatcactgggcctacctgcactgtggggccaagccctgtctttttcccaagccctcaagcacacgcatgagtgttcatcccgacttggtagggggcttttcacccttacaagatggcaaaagattcacattgcttttttaaaaatttgtttttctttttaaaaatcccaacccttggatagcagggaggtgctggaggggtagagtcaagaagagtg

SEQ ID NO: 254040 - DNA, 191 bp, Homo sapiens
ccttctggtggatcaaacttagttacctagcacaccagcctgctgaaatgtgggagaataaaccacacacagtcatttagggattgtgtcacatgtagaagcccattttgccccagtgtgggtctaggggagagagactgagtgatatgggaaggagccaggctaggcacaggtttttcaggccttgcctg

SEQ ID NO: 254041 - DNA, 361 bp, Homo sapiens
ctgcagtgagccataatcacactgtactccagcctgggcgacagagggagaccctggctcaatcaataaacaaataaaatgttgtccttccagtctaattgcattgaaaaatatagctattacccaggcatatcacccatagttcagagtttgatattctaccattagattaattttttttctttttggttcatcagtgcctctctcaatcttgtaggtacctgattcactctaaagtaccaaggacgttcatctctattagcactagcctcctggggtgtaacgtgactcttcacaaaaactgcactactcttgaagaaagcaattgtgttcatttcagcaacatggaaagtccaggaaa

SEQ ID NO: 254042 - DNA, 96 bp, Homo sapiens
gtcttggagttctcataattcttctttccaccatggtaacttctattactgggttgtcaacttctgcgatagcaactaacgggtttgttcgtggag

SEQ ID NO: 254043 - DNA, 532 bp, Homo sapiens
aataataataataataataattacaacttttatttcagattcagggggtacatatgcaggcttgttacatgagtaaattgtgtgacactgaggtttgcagtatgaatgatcccatcacccaggtagtgagcatagtacccaataggtagtttttcagcacttgccccctccctcccccatctagtagttttcagtgtctatcgttcccatctttatgtccatgtgtacccaatgattacattgtttttcaccctgtgatgaaattcgtaaatgccaggtgctaatgataaatgattaagatgaaaggaaacttttgcttaataaagttactatgcattttttaacaatgaagctttaggtcatttttttaaggtttgttagctaattgtttaatatttttgtctggtttttaaaaccattggagttagagaaagacacaagaaatgaaaaaaaaagcaagttttaaaacggaatgtataggattccattttgaacgaaattatatatgatattggattaaaacgatatacaa

SEQ ID NO: 254044 - DNA, 440 bp, Homo sapiens
gcaaccaaaatgatcttttgaaaataagtcactaaatgtaatgtgatatcctggattatattctggaagataaaaagctcattagtggaaaagttggtgaaatctgaataaagtttgaaatttacttaatagcaatataccagtgttaatgtctagcttagacaaatgtaacgtggtttatgtaagatttacttagtctagttttccaacattatatgggaactttgtatttttttataactgtctataaatttaaaattattaaaaggtaaagattttaaaaatgaaaataggaaaattagccgggtatggtggcgtgtacctgtaatctcagctactcggggctgaggtaggagaattggttgaaaccgggaggcagaggttgcagtgagctgagatcacactgctgcagtccagtctgggtgaatgagacctgtctt

SEQ ID NO: 254045 - DNA, 406 bp, Homo sapiens
acggataacaaacaagcacgtgaaaaggtactcagcatccttagtcatgaaaccatcagaaggctccatgacacacctctcacgatggctgaaatgaaaaaagattgaccttaccagctgatgacaaggatgcagagcaaatagaactctcatgcactgctgatgagaatgtaaaagggtacaaccactttggaaaataattcagcactttgttgaaaagttaaacagtactaccctatgatcaagccattgcattcctagatatttacccaggagaaatggaagttcctcttggtaggaacacgatgtccatcaacaggtaactgaaaaaaacaaactgtggtatatgcatacagcactatgtcactcaacaatcaaaaaataaaaataaaaataaagaactggc

SEQ ID NO: 254046 - DNA, 385 bp, Homo sapiens
cttccaaacatacctatgccttccggtcaccctactaagccttattcatccagcataaggggagatggtactaggtttcctttgacagtctgccccaaactcattgaactaggaaagatcaggttgtgtagacggagtagttcccaaggaggaagttttagcaacagcacgctttgatccccagaaggaagcaactattagcctaatcctaatcttaatttctgcaacttctatagccccaaactgctataagactcaaaatatcgccgggcgcggtggctcatgcctgtaatcccagcacattgggaggccgaggcgggtggatcacctgaggtcaggagtttgagaccagcctgaccaacatggagaaactccatctctacta

SEQ ID NO: 254047 - DNA, 457 bp, Homo sapiens
tgtgtctcctatgcatcaatccaagtgattccacatggggtacagtggtatatgtgggtggacatggaaggtgggagaaatggaggcaagatccatccctatcacagtgccaaagagtaattggattatggcggcattgattgtaatggagagaagcacaaggcatgggaaaggattgagctaggtttgctgaaatcttagaccagtccaatttacacctaggtcttcttacttccacatttgtgctttttttttttttcttatattagtttgaagacttctagccagaaggtgaataatgtagaaattccttctgaagatcatctatgtgacactgggttttgttatttttggcatcactacttagaaacagaaatattcagctgtgtttcttgaaatgattggactttagggtttggtaagcatttcctgagatggcatgtgtcagtggccagaa

SEQ ID NO: 254048 - DNA, 270 bp, Homo sapiens
atttattatactttaagttctagggtacatgtgcacgtatacaccctgaatagagtttttaaaacaaatatagtagccatctctacatagcattctgcaattgatgaactactttgcataatctgtataacataaaatatggtaggaaaattggatgtttaaaatataggaatgagttgaacgtttagttagtggaaaaagctagaatgatgaatagtttcaaaggttgttaagaaaaattccaagatttacatattcaaatatttttgt

SEQ ID NO: 254049 - DNA, 306 bp, Homo sapiens
tgtcagatgatcctatttgcttataggttactcacccccaacttctcacttcctcactatccccacccaaccaaccctggccaagtgaggtttttctggtatttcataaaggtgaatttagtatgaatcttttgtttatggtgttggatcctgagcgaaactctcatcctaaagatctgcatctcttagctctaaacatttttcttctattactttttagaaaatttcttctgcctcttactagtctgattttgcacttaatggtttgattcttaatatatagtctttctgtcctgttctagattt

SEQ ID NO: 254050 - DNA, 534 bp, Homo sapiens
cagctcccagcccctcctcgccagcttcccaccagatgctccctcctttcctgtcctcagaagcctggttgctgcttgccctgtgtggactcccctgccttctgctctcccggcactctgggtctccgcgagggtctctctttgaccccacacgtgcagactttgtctgtggatggcagtgcactccacgaaggggtggagaggtgccggggcctcggtgcgggcgagagggcgcagtgcagtccaagcggctgcagagggctctagcgcagcaaagctggttggacccaagctctgacccctctgccctcaaagcccgggttaccgagccctcatgagcaccaagaacgaagagaagtaaaaagggacacttgtgacctgctgggggctgagccaccgctaaccccaagaaaagtctagagaacaagaaaagaaccacagcaaacctgggaccctgcaggacgaatcggggagggattcgtgctttttacttgcaataaaatctgtaaagttcttgaataggaaacaccaaca

SEQ ID NO: 254051 - DNA, 358 bp, Homo sapiens
gggagaggaagcatacacacttatgtgcacttgtgtgtgtgtgagagcgagagcatgcgtgtgaatacacatgtgtgtatgtgcttgaatatgtgtgtgtatatatgtgtgtgtgtgtctatgtgtgcacgtgtatatgcatgtgtgagagagcatgcatgtgcaccgtgtgcatgtgtgtctagtcgggggagccagcaagaggaggggaagtgggaaaggggagttgtttgtttatttgaaaccagctaggccctctaatgcagactttcaccagagcagggcagtcaatgtttgctttgggagatgctcaaagcctgaaacacagcttcagtcaaacaaggggtgtggtggaggc

SEQ ID NO: 254052 - DNA, 303 bp, Homo sapiens
atgagccaccatacctaattattttaaactttttgtagagatagagcctcgccatgttgcacaggctggtctcaaactcctgaactcgaacaatactccctcctcagcctcccaaagagctgtgattacaggcatgagccaccctgcccggctagcaagatcattttataaagtagcaatattgcagtaaaataatggatattaaaatgactaaaatgcttcaacagatagcaaacacaataaattcaaccctttttattgggaggcaggcccctgaaaaaatcgtggttttaaaaatcagcc

SEQ ID NO: 254053 - DNA, 197 bp, Homo sapiens
ctagaattggtagggcttagcagttggttggctgagggagttgacggggagagtcctgagaagccctcttagtttttcagctcttccattactaagtggtatccttttcagcaaaagggacataaggagagaattcaggcaaacgtccacaaaggtcacaggcagcggacatacgggtctgttataccccatatata

SEQ ID NO: 254054 - DNA, 649 bp, Homo sapiens
gtttaagaaacctgttttacaggatactggatctagtctttaaaattttgcctttttttttttaagtccgattcattaaaagtttaagctggtaggatttatccttgttatacctaagacagactaataatctgtattatttaccttaattatatgctttcccccgaggaggcattctggtgtgaaatggttaagatggcagactttaaagaagccagcttacctggatttgcgtcccagctctgccatttgccggctgtgtgccttggtttccttatctgtaaactagggatcatagggtttttgtgagggttaatgaataatcattcaatataggttagctgttgtagttgtgggctgtgctgttgctcactttaagagagtggagtttgctgtactgtattagataggcagtctaaagaccagtcttggctaattctgatacttgacagaacgctagcctatttgccacttctgattatactcttagtttaattcatactataacatataacccaaacgtaattatgttagattttataaagttatgttcctccaactttgctccatggtatttgttcactttgtgaaagttcattacgctgcatgtcagattcgtatacttttctgaataatgttatacttcaat

SEQ ID NO: 254055 - DNA, 494 bp, Homo sapiens
atgagctactacggcagctactatggaggcctgggctatggctgtggaggctttggtggcctgggctatggctatggctgtggatgtggcagcttccgcagactgggttctggctgtggctatggaggctacggatatggctctggctttggaggctatggatatggctctggcttcggaggctacggatatggctgctaccgcccatcatactatggaggatatggattctctggattctattaaactactgccccagcaacacaatgtgtgaaattataagaggactttcccagagctgacttcaatcattggacaacaaagatcatgctggagctatttgcacaaaagaatttaacatctcagaatttcaggcaattttttttctctgtatacccacatctctataataatcctagtattctctagttttgcttttaaagctgattgaattatctgtttatcttccaataaaacattctattttcaaacac

SEQ ID NO: 254056 - DNA, 106 bp, Homo sapiens
tgctcaacactcaacttattctcatgtttatatttaaccaatgtaatcctcatgaaagacttttatagttgaagtcacagtgaaaactagagaataaaattttaat

SEQ ID NO: 254057 - DNA, 381 bp, Homo sapiens
tatggctgtatgggttaaaaaaaaattacaatgtggatttatatcacataacaaaaattaatctagttttcaaatgtaaaaatatttagaaatgttctatgtactatagtaaacataaaagcatacccatttgaaggaattcattcaggcccagttgacagctgtcatgctgtagagatgagcaacaacagtagagagccattgtgtatcttatgtgtttctcagcctgatttgtgttccatgatgctatcatttttttagtgtcatattcctccaggtcacattagacgtattctgctgttgggtgtccttggagtcacagagtaacagctgatctagactaaatcctatgttaaccagaaataaactccagagaaagga

SEQ ID NO: 254058 - DNA, 924 bp, Homo sapiens
ccagtgactgagagcagcagggagacaaaggcaggtccattctagggatacacaggactcctctaatggctgacttggatcaaggactccctgacagcctggcccagctttccttagatggcatggcagcctgggatacttctccaacttctcttccttctctactaaactcagacttcagattgtatcatagtctgatgattctctgaggctttccaggttccctccccattttctgtcacaggcatttctcctaaaatatttgatcccatgttgtggcatctgcttctcagaagacccagacgaacacagtagaaattaaagtgcattagaatagcacaaaagataggcagtaattggagctaagttctgtatgggtcctgcttgcgttaattggtaagtggtaaagagttaatttaaggcccactgtagtaaatcaagagaaagtaataagatttttttaagtgtataaataataagctgatgggagaactggagtaataaataattgataaaaagaagacaagaatggagaaaaagagacaaagaatagatggaatatatagaaaactaataataaaatggtctacttaaatccaaatcatcagtaactatattatatttacttaattttttcaattaaagacaaaagcctaggcacagtggctcatttctgtaatcctggcactttgggaggctgatgggggaggattgcttaaggccaggcattggagaccagcctgggcaacatagcaagacccccatctctacagaaaaattttaaattagcaggcataggctggttgcagtggctcacacctgtaatcccagcacttcgggaggccgagctggggaggatcacctgaggtcaggagttcaagaccagcctggccaacatggtgaaaccctgtctctaccaaaaat

SEQ ID NO: 254059 - DNA, 460 bp, Homo sapiens
tagtatccggttctcagttccccaccccctgctaggtacaattttcagattattctagagctccctgagctcctttctcagctgtggagaaagctgataggaggggaaaatggagcaaagcagagaataaaagtagaaggcaggtgctgtctccattaggttatctcatcattagcctctccctccttgaccagtcagtgcccaaatgggagactgattatggtctctggcttcatctctggctacctaactgcagcaaaacagaatagctggagagcgcccatcaaaccaatgacaacaactgtatgtttcattgtcatataagaatcagtggagcttactacactggaagttaaaacagttttactgaagtctaatttctctgataaagcattcaattttctgtgaaatttgaaaggtgaaattggggcacacattctgtagttaccgatcaaaaatg

SEQ ID NO: 254060 - DNA, 575 bp, Homo sapiens
ggggggcaactccaatataaagaatggatgatgttattttaactatctcgattaattttgtaagtttacatttcaaagatttattgtagatagactatctactgtgccatccaggatggcagccacttaactacatgttgttacttaaatttaaatgaaaagtaaaggcagacatggcggctcatgcctataatcgtagcgctttgggaggctgaagtgagaggatccattgagcttgggagtttaagaccagcctgggcaacatagtgagaccccatctgtattttaaatataaaaagtttttggctgggtgcaatggcttatgactgtaatcccagcactttgggaggctgaggtgggtggatcacttgaggtcaggagttcgagaccagcctggccaacatggtgaaaccctgtctctactgaaaatacaaaaattaggcaggtatggtggtgcttgcctgtaaacccagctattcaggaggctgaggcaggagaattgttggaaaccaggaggtggaggttgtagtgaactgagattgcaccactgcactccagcctgggtgacagagcaa

SEQ ID NO: 254061 - DNA, 418 bp, Homo sapiens
gaccttctttcttcagtttgctgtgatccacattaattgagtagaacttgaattgatcatcgggacccagtttgttccagggatctgggtgattctttcagtcccaactaacatctggattgaaaaatgccagacgcaagagatacagtcctgctccagtacctctagctccaataaatactaagagggagatcaagtttggatgcttcttggcctgaccgatgatctggtggagcgtgtctgcggcagaggcctccaattggaaaggagagaaccagcctagccaccaggccctgggctaagtagtatcttgccagtgtattttaaaaggcctttgggaattttctattctgcctggcccactcctactacagatgtaagattatagttgtacaattggtcttgtttcatttaaatt

SEQ ID NO: 254062 - DNA, 187 bp, Homo sapiens
agtgttcacaagataaaacagcaaactccacaaactcaaagacatcacaatggagaggggcaggatacgggaggtgatcgctcatgtctgtgtgcggtgtgctgcgtaatctgctccttaaacaaaccagcaagaaaggctcaaatcagtcccagcctgacatttgagaggcccaaagtgaatgcac

SEQ ID NO: 254063 - DNA, 691 bp, Homo sapiens
atagactcataagaaatggtgattaagcgggtattaaatgaattatataagcaacaagtatcaacatattttaaaatacaaacagaacacttcttgtagggttggtcagaaagtgtttcaagaagaaaaataggaggaaactggactttgaaggatttttttgtttcttgtagtccaagtagaattgctaggagatatagaacaggcattgcaagggtaatgatcttgagctaattccacctaataaaatggacttgggccaggtgcggtggctcacgcctgtaatcccagcactttgggagggtggggccaacggatcaggaggtcaggagttcgagacaagcctgaccaacatggtgaagccccatctctactaaaaaatacaaaaaatacaaaaattagctgggcgtggtggtgcgtgcctgtaatcccagctactcaggaggctgaggcagaagaatcacttgaatccaggaggtggaggttgcattgagctgagatcatgccactgcactctagcctgggcaacagagtgagactctgtctcaaaaataaatagatagatagatagatagatagatagatagatagacagacagataaaatagacttggactccactggatcttacttcacaaatgtttgatgagtatcactatgagccagctaacatgtaaaattttggggatag

SEQ ID NO: 254064 - DNA, 694 bp, Homo sapiens
gccagtacagttggaagcctccaggacccaaggccagccctttggccagcttccgtcctgattagttggtgttcttgctgactgtaaaaataatttaaaactcctagaattatgtgtctattactgtatggatcacaatggattgtacttattggtttgtctgttttctgattgtcactagtctaaggacaagaactatatttgtcattttctccagtgtctaatatgagtagtgttttgcagttgaaaagatgatagaagatagccagaatggaggacctacatttcctgttgtttgaccacctgtttcctgtgctataggaagccattcataactaggaaggaggcagtttatggttttgttttaaatctgtaaaattttttttatactcttggctatctgtcctaatatgtttgtcttatattttccttcagaaatggatattaatttctagtttatgttctactttcaacatttgtcatcttctcttacattaatgtctcttatcatgcctcctccattatgttcctggaatctacctgtggtttcactaatatgattcctcacaggacttcctaggctttttagtgccactactttcaacctgtgtagtcctaaattcaacctggtctatacttgccgtttcttttctttttttcccatcttgtaaggatagttaatagttcttacttg

SEQ ID NO: 254065 - DNA, 570 bp, Homo sapiens
gagaaggtgcctgagaatatttcctaatcgttttgagaagtgccttcctgtgacatcttatgtatttcctaattgatcaaaagtagtgctgcttctctaagccctgagatttaatgagccccattcaaactgttattaatgtaaccttctttcccagtgcaggatgacttgtaatcaccttgaaagagaaggagggttcttcgtattcaggtagggtatggtagggatgtggagtgccaagcaggaaatctgacaagtgacccccggaactttggattacctagcaactagccaggtaactggctaatctgattgagggttgccctctttgctgggcagatcatggctaatctcagcttcacatgagtcttgtgaaccatctagttgttttgtaactgctaagagctgcaagtgctgagcagctggtttatacagcattccctgaaacagcctagtatgtgtccatttatgtgcccggcttattatgtgtccacttatgtgtccaattagtaatcactttttctttcggtcaaggtatgtgtattaatcaatattttttgaacccgtcct

SEQ ID NO: 254066 - DNA, 367 bp, Homo sapiens
tctttattgaatattactgaaatcgccttaagcattataagtatgttttcatttctcacagtgctcttttcactaattaatggttgacaatattcaaatattggatattttttggaaaagaaaccactaattaaacatcgtgggccaaattggaagtattggtacatactggaagtgtatttagtctgagtaaaagtgatgctactgcttttctcaattcattgagaggaacaaattatttacatagaaaaggagatatactttagcaaatgttttagaagcttgtcttttgaaaaaagttatagtgatacatgcacataattaaaaaaaaaataagttagttctgaagagcttataatggaaatca

SEQ ID NO: 254067 - DNA, 1082 bp, Homo sapiens
ccgcctctccccgctgcgctccctcgctccttccctgagctcccgggctccggcagcgcgctggcggggcgccgcattgcacactctgggggcgccgcagtgttcgtgggatggggcagcgggctgcagctggcggccggaatccgcgcgcagcccgggtgcaagttctctcctgttgccctgagtgcccactcccaggccctctgtatgagtgacacttcagtctgccatggaacctggccctgctctggcctggctcctgctcctgagcctgctggcggattgtctgaaagctgctcagtcccgagacttcacagtgaaagacattatctacctccatccttcaaccacaccatatcctggtggatttaaatgtttcacctgtgaaaaggcagcagacaattatgagtgcaaccgatgggctccagacatctactgccctcgagagaccagatactgctacactcagcacacaatggaagtcacaggaaacagtatctcagtcaccaaacgctgtgtcccactggaagagtgcttatccactggctgcagagactccgagcatgaaggccacaaggtctgcacttcttgttgtgaaggaaatatctgtaacttgccactgccccgaaatgaaactgatgccacatttgccacgacgtcacctataaatcagacaaatgggcacccacgctgtatgtcagtgatagtgtcctgcttgtggttgtggttagggctcatgttatagtggctcagtggctccatgtgttaatagcgatccatggggatctcgatggtccacagacctgcatgagtcattggcctgacagtaattacacatgtgagacacaacactcttggaggtcatcacagccaagcattgccacttaccatgaggaataaatgttgcttcattgtagccattttgagtctaaccgagactcatcaaagccttctgtcagtacagcccaagttccataccataaacgtttgttttcattccaagaagtagttctgcatttatcgagatctggggttcttaatttggaagaatacatgcatgagatgcagtaggtcctgagact

SEQ ID NO: 254068 - DNA, 878 bp, Homo sapiens
actgtgcagggcatgaaagaccaaccactctgtaaatgcacataaagaacaacctccttgagcaatctcaagcaagagaaagaagaggcttccgagctccagcaaaacaatgggaaaaaacatacccttatcttttccttctcattttcaaaggtaccgtgaatataagtagaagaaagacaccgtctcttcctttaaggaacttacagtcttatggaagagacacagatggaagtgcacaattaccgaatatcatcaaaaagcctgagaaaaagttatgcaaaagctactgtgtgagcacagaggctgtaaacctaatcctaagttgcagggtgagcaacaaggcactattttggaagcagagaacagccctcaccagacacggaatctgctggtgccctgatcttggaattcccaccgtctagaactgtgcaagttctctcctgttgccctgagtgcccactcccaggccctctgtatgagtgacacttcagtctgccatggaacctggccctgctctggcctggctcctgctcctgagcctgctggcggattgtctgaaagctgctcagtcccgagacttcacagtgaaagacattatctacctccatccttcaaccacaccatatcctggtggatttaaatgtttcacctgtgaaaaggcagcagacaattatgagtgcaaccgatgggctccagacatctactgccctcgaggaaccatgatctagaagaaaagccagatatcccaaatgagaaagttaagaaggactaagacaacatggagaagagagaagattagcattgacctggttgggaggaagatcaggaagatttcacagaatttatcacatttggattgagccttgaagaatatc

SEQ ID NO: 254069 - DNA, 1353 bp, Homo sapiens
actgtgcagggcatgaaagaccaaccactctgtaaatgcacataaagaacaacctccttgagcaatctcaagcaagagaaagaagaggcttccgagctccagcaaaacaatgggaaaaaacatacccttatcttttccttctcattttcaaaggtaccgtgaatataagtagaagaaagacaccgtctcttcctttaaggaacttacagtcttatggaagagacacagatggaagtgcacaattaccgaatatcatcaaaaagcctgagaaaaagttatgcaaaagctactgtgtgagcacagaggctgtaaacctaatcctaagttgcagggtgagcaacaaggcactattttggaagcagagaacagccctcaccagacacggaatctgctggtgccctgatcttggaattcccaccgtctagaactgtgcaagttctctcctgttgccctgagtgcccactcccaggccctctgtatgagtgacacttcagtctgccatggaacctggccctgctctggcctggctcctgctcctgagcctgctggcggattgtctgaaagctgctcagtcccgagacttcacagtgaaagacattatctacctccatccttcaaccacaccatatcctggtggatttaaatgtttcacctgtgaaaaggcagcagacaattatgagtgcaaccgatgggctccagacatctactgccctcgagagaccagatactgctacactcagcacacaatggaagtcacaggaaacagtatctcagtcaccaaacgctgtgtcccactggaagagtgcttatccactggctgcagagactccgagcatgaaggccacaaggtctgcacttcttgttgtgaaggaaatatctgtaacttgccactgccccgaaatgaaactgatgccacatttgccacgacgtcacctataaatcagacaaatgggcacccacgctgtatgtcagtgatagtgtcctgcttgtggttgtggttagggctcatgttatagtggctcagtggctccatgtgttaatagcgatccatggggatctcgatggtccacagacctgcatgagtcattggcctgacagtaattacacatgtgagacacaacactcttggaggtcatcacagccaagcattgccacttaccatgaggaataaatgttgcttcattgtagccattttgagtctaaccgagactcatcaaagccttctgtcagtacagcccaagttccataccataaacgtttgttttcattccaagaagtagttctgcatttatcgagatctggggttcttaatttggaagaatacatgcatgagatgcagtaggtcctgagact

SEQ ID NO: 254070 - DNA, 800 bp, Homo sapiens
ccgcctctccccgctgcgctccctcgctccttccctgagctcccgggctccggcagcgcgctggcggggcgccgcattgcacactctgggggcgccgcagtgttcgtgggatggggcagcgggctgcagctggcggccggaatccgcgcgcagcccgggtgcaagttctctcctgttgccctgagtgcccactcccaggccctctgtatgagtgacacttcagtctgccatggaacctggccctgctctggcctggctcctgctcctgagcctgctggcggattgtctgaaagctgctcagtcccgagacttcacagtgaaagacattatctacctccatccttcaaccacaccatatcctggtggatttaaatgtttcacctgtgaaaaggcagcagacaattatgagtgcaaccgatgggctccagacatctactgccctcgagagaccagatactgctacactcagcacacaatggaagtcacaggaaacagtatctcagtcaccaaacgctgtgtcccactggaagagtgcttatccactggctgcagagactccgagcatgaaggccacaaggtctgggcaacagagcaagtgaccagtactacatagccagctgccttctcttcagacatctgccagtactcatgagcagattcttactcccccgtgaaggctgtcttttgattgtctttatgctctatgaaaagacgcttcctttcctgtttactctaaaagaatacacatttataccagagcataggacaactgatataaattgtgtaaacacacatgaaga

SEQ ID NO: 254071 - DNA, 561 bp, Homo sapiens
atgtagctggagttaaattagtggctgaagtcaagagactggctttggagcctgtgttctgcctcttctgagagagcacagtgagcttgagaaagatagtctaccttcagcatctctgcttcctcttctgtaatgtggggataacaaaaatcacatgtggattttgtgatgaatgaatgacagcagctctacatagcgcattacacaatgtagggcctattagaggtggggatgaggtttcaattatgggctaatggtgcaaagcttgagatcacagtgctttgccattcacctcttctccctaaaagggtcctaacagagggagattttcacataaggaatacccgccaagcaggaagcaggccactgctttattaataacggatatgaatgaataacctagccaacattcaatggcaccaaatgctgagctttctagcagggctaggtttgggatataaatgagggcttggtttgggatataaatgagggttcctgctgctataccctcatggcaagttcctagccagactagcttcctcatttcggagaaggaagaat

SEQ ID NO: 254072 - DNA, 434 bp, Homo sapiens
ctgaaatggaggttggttatgaggtgttaacaggacctctgggccaccaaggagaaagggctggggaagccaagagaaacacccagctcccaattttaaaatgaaattagtaaaataaagaaataaaataaaatagtaaaataaaggaagaaatttgaaactgtaaaaaatttaaagcttttagtgaaaaaaaaaaggaggggataatgattaacagagcaggctttggaattaaacaaactagtttaaaattctgattcctcagactgcctttgcgacacagggcaagttcttgatggtgagcctcggctgtcttgtctgtcttgtctggtactggggtctgtctctcaggtaagcattagctaatgcatgtgaagtatctaaaaccactccaactatatagcaaaggctcaataaaaggtcgttgttattca

SEQ ID NO: 254073 - DNA, 639 bp, Homo sapiens
agaaagaatagggcactgcaaaaaaacaaaacaaaacaaaaacaaaaacatgcaatataattccttgtatatcaaattcaaaacctttaaatactgagcaatatattgtttaaggatacaaataaatgtggtaatggaaatcaggggaatgataacacaagattgaagacagttgttgcctctgtgaaaggagagaatagaatgagactgagaggtactccactcagaggacttcaaaggtaatggtaatatactttttcttaaacttgatattgagtatatgagtatttgttgtttcattattatttatactttacatgtattttactgatacttatatctattcactgtttaataaaaacaagtatgaaacaaagtaaggaaataaatataaattcaggattcagggaagtagttgctggggtacaggaatgagcacggcgtagggggaatgaatgcgtttaaaaactgggacataggaaacctctatgtggtcttaaatagtggtactgaaatgttctacttcttgggggatgagtccatatgtctgttgtattcttttgcttaataatttgcttgtacgtcaaatatacacttttgtatatattaaataattcataataaaaaaatttcaaggcc

SEQ ID NO: 254074 - DNA, 691 bp, Homo sapiens
attcagccatgaaaagaaggaaattctgtcatttatgacaacctgggtgaacttggaggacatggagtagaataagccaggtacagaagaaggacaattctgcatattctcacttagatgcggaatctaaaaaagttgaactcatagaagcagaagaatggtggttaccaagacaaaatcttgatattatcttggttcttagaaatgcaggatattcacctagactgtcatgatgtggttaaaatgggtgaagatgctgcgtgacacagggagaggcagcaggacttagaaatgtgtaggctttataagtttgtaaaagattaaaatattatcattatttatagagcattacttagtgaaataccagtgagctctctctctctctctctctctctctctctctctctctctctccccctctctctctctctctctctctctccgtctctctctctctctctctcctcgtgccgaattcggcacgagccagtatttgaagtgatgtttaaatatcctatggctgaaaataattccttctaattgtgtggcaatttgcttttactgttttcacagtatttcaggtctttggtcatttactcagtgatactgagcacttaccatgaccacgattttactaggcacaaccatgaattaaaatacaattttcttgcaccattaaaaaaagaaaaaa

SEQ ID NO: 254075 - DNA, 288 bp, Homo sapiens
agacaactcaagttgccccaagtcctggtggtaggccaacaccctcacaattccagaaatgcctccttatcagctgaaagctccagcccattgacaactgctttctgaattctgaggacgctccctatcctgtagcgctgtggatggctcctgtggactccagtttatctcagcctcaaagctaatagagttaaaccagctgctcaatttaaagaggaactgaagcagtgagatgttactgtattctgagatggggctaataaactttaatagatttcagctaacaat

SEQ ID NO: 254076 - DNA, 689 bp, Homo sapiens
ttctctcccttaataaatatattgagcattccaaacatattttaaaagactgagattgttgaattgttttatagtcttgtccttaaaatataaattagtgagtttattatttattctctctatttctcccaagcaaaagaaaatctcccacaatggcaaataaattaatataaggtattttaaaaatattttgtgtggttacataaatcattaacattgataaaagttatataaatcagggccgggtgcagtggctcacgcctgtaatcccagcactttgggaggctgaggcaggtggatcacctgaggtcaggagtttgagaccagcctggccagcatggtgaaaccctgtctctactaaaaatataaaagttagtcgggtgtggcggcatgcacctgtaatcccagctactcaggaggctgaggcaggagaatcgcctgtacccaggaggtggaggttgaagtgagctgagattgtgccactgcactccagccagggtgacaagagcgagactccatctcaaaaaacaaaacaaaaaagttatataaatcaattaacattaatttcatttgtttttgttaggggaagagagattgtttaattggctttaggaaaaaagtcttctttctttgctgtaacagaaaggaacagtgtaaatgtataaattatagttagacaagattatttt

SEQ ID NO: 254077 - DNA, 461 bp, Homo sapiens
tttgagtggcagcctataatgtatatggaacacattttgggaacttttttcccctagaatcatacattttaagaactgaaggatctttgggaatctaatccacctgcctcatttttacagatgagcaaactgatgcccagagaagttaagtgacttgttcaaattcacacagctaggaaagggcaaaatcaagactaaattgtacttctgactcccagttctgcgctcttctcgccataatgaactatttctactttctagttaaaactgtcctcccaattgtttgtgtttctctaaatatgtctctcaattccatgaaacatttatttaaatccaactttactagcagagcacagtggctcccgcctgtaattccagctactcaggaggctgaggcaggaggatgacttaaggccaggagttcaagactggcctaggcaacatagtctctaaaaaaataa

SEQ ID NO: 254078 - DNA, 406 bp, Homo sapiens
tgcatgcttctataatttatttctactaactagacatggacagtatttgcatctgttgaaaataggtaaattatttgttttcttaaattataggtggcatatttatgacaagcacatataaattgtgagtgcacattataaatatataatcctgtttgcagacatttatgggctgtatgctgtgtgccaagctttgtgctgagcactttacagtcattatttcattttatcttcattgctgtcccgtggagaagataaaatgcactggctttcaactttctctttgtaaaatagaacctattttaaaaataaaatatagcacagaaacttcaacatacagaagagacagaagctttgcagcatcctggagatgctcttagcattcctgcctccatctctaccctac

SEQ ID NO: 254079 - DNA, 964 bp, Homo sapiens
atcaaacacttatcctgcactgggcgctgcaccaggccccggagttcaaaggtggccaagatgccacttttgaaaaaaatgttttttgaatgtgttttttggttttgttttgtttttgtggtcattttcttaaaaaacctgggtgtggtcaagagcacagccccctgttttgacgctgcattagtggagggaatgagtttaacgaagcgggtgacttcacctgggtcacctgccaggattctatctggggtcacagttacttcaataaagtgaagcaggaacgaggcagaggggacatgggcctttgtgagaatgaacgatggaaactctttgaactcctgggatagaaaggccaagctgtcactagagctgttcgtgatgggagagtgattaaagctcgttggagtttcctgccttcttctggcatcagaactttatgcctgctctgtgttcggaaccagtgcagctccgagtcctgagctttgacgtgggaatcagatttccctgggcctgagtcagattctgggccccacagaagtcagtggctcccatttggctgagggggttcccaccggaccctttgctgggtagaaaacacagcagccaagaaagatctgttggtccttgagtcagctgttgagaaatggagccacaggggatgctggggggttctccgaagcttgacaccctgccttcagatcctggcatcatcatttggcaggaacacgtgtggcctttcacaagcaacaggatttctttgagcctcagctgtcccatctgtaagatggacatggtgttgccttcccaactggcttgccctgagactaaatttggaaattgccaacattcctcgaatgctccttatgtgccagctattgtggggagggcctcagctcagcccctccaaggcctgatagtttgaaggcactgaggtagaggttttgtgtctgttcctagaattagg

SEQ ID NO: 254080 - DNA, 443 bp, Homo sapiens
gtctcagaggtttagtgcaataaatgtttgtcattttctcacatgacagtgagtaggtgaaggagctctgatccacatggccattcagggtcccagaattcttccgtgtagtggatctacctttctttacaacatggaattaattacatattggattatctgcatctggcagagagtgtgtatgtgttttctcataggccgggactggaagtagagtagcatcatttctgactacttctttttggccagaagtcagttgcatagtcctgtctagcaagggaaactgggaaatagcatgtagctatgtattaagggaagcaataaaattatttgatgaacacatggcagtcatgtgatcctgttaaaacgtaagaatcaaattggtttattgtttaatactttccaatgttttccttctctctctctgtaaaaaacaaaacaaa

SEQ ID NO: 254081 - DNA, 410 bp, Homo sapiens
gccaacatggtgaaaccccatctctactaaaaatacaaaaaattagcaggcatgatggtgggaacctgtattctcagctactcgggagcctgaggcaggagaatagcttgaacctgggaggcggaggctgcagtgagccaagatgatggcactgcactccagcttgggcaacagagtgagactctgtctcaaaaaaagaaaagaaaagacaacttgttaatcctcatcagttttttatattcttctgtgaatgtgtcagattattttgtaggagcaggttttgcttagagcgggagggtagcggcagaaggtacaactgaggtcgggggaaggattccaaaagaagacactaggaaggccaaagatcaaattcagaactaaattttgcctagctttttgagtcaaaaaat

SEQ ID NO: 254082 - DNA, 326 bp, Homo sapiens
ctgggggaaagtttagaaatttctgagaaaaacccataaattgaagttgtaagctgtgaggtggaagccttgcaaatgatttgcagtttacagcagttactcaaagcagtcagattctaactgggggtcaagagagcgtccatgttttacagatggataaactgaggcatagagcttaaagaccggctctttagagtttaaagccatgccatgtcactgatagagactccttcctgggaggaaaaagacaaaagacctctctccagcagaggctagtataacctcagagaaatctatctgaagatatgaaagcatcactaacaacc

SEQ ID NO: 254083 - DNA, 642 bp, Homo sapiens
acctgatccatttaagacggacgtggtgacacatgcctgtaaccccagctatttgggaggctgaggtgggaggatcgcttgagcccaggagtttgaggctgcggtgagctataattatgccactgcactccagcctgggtgacacagtaagaccccatctcttaaaaaagttaaaaataaataaatgaataatccactcaagcttaaatgaaaatgtgtatattaaaatcatatgctattttaggttattttttcataatctttattaacatgtaacttcagttgatagattgatctgtatatataatctataaaaccaatatatgtagtatacacgtttgcacttgaaaactatttactaggctgggcgcgctggctcacgcctgtaatcccagcactttgggaggccgaggtgggcggatcacgaggtcaggagatcgagatcatcctggctaacacagtgaaactgcatctctactaaaaatacaaaaaattggccaggcgtggtggtgggtgcctgtagtcccagctacttgggaggctgtggcaggagaatggcgtgaacccgggaggcggagcttgcagtgagctgagatcgctccactgcactccagcctgggcgacagagtgagattctgtcta

SEQ ID NO: 254084 - DNA, 327 bp, Homo sapiens
atttatttttgacttacctaatttctcagtgatacaggtgttagtatatcgataaactaggagggagaagttttatgatagtctctggggaatagggaaagaaagatgtcttggccgagtaaaagtttactgggattgatggtgtttaggaaatcaaaatagctattaagtgtgtggggttcacaacttttgcaccacacaaaagtgaattgtatggtgaaatttttgtcacttagagtaacttgcttgattattcttttttgcgaatgtctcccttgttggcttttgtggtggtggtctatctttatttcctgttcttctctgacc

SEQ ID NO: 254085 - DNA, 319 bp, Homo sapiens
acagagtccccaggtattgtggatgtaattaaggcatgaggcccaccgaggaacttgctcatcctatcacccaagtcatactgtcactctggagcccaacgtgtgcctccaaaacatcattaaatgtttctacaagcagttctacaccacagcacgaagagaaggtggcacacgtctctagagaagctccacagtatacagcacatctctcttccttgtgaacatgtcagcggccttaagcatgtaccacactgtcccttgaaggcacatcgtatgcctggaggttgcaaggggcactgtcagctgtcagagagcagct

SEQ ID NO: 254086 - DNA, 161 bp, Homo sapiens
taaagctgggggtagcaagctcgatgatttatttggataacctagcagctgccatacctcttctcctggcacccaggtagaatggaaggtaagtcatgttctcatctatgacccatccctctttttgtacttttgaaataaacaggaagggtttttgttca

SEQ ID NO: 254087 - DNA, 494 bp, Homo sapiens
ccactgcactctagcctgggtaacaaaacgagaccctctctctcaaaaaaaaaaaaaggaacagaaaggagaggagaggaaggggtgaaggaaggagggagggcaggaggagagggaaagaaagaaaggacgaaaaagagaaaaacaggaaggaagcagggaggggagaaaaggaaggaaagaaaggagggaagggaagaaagagggcaggcatcatagactattgaagaatttggggtcttggcttctgactgagtttgaatctatgcttactgtgtgccattaggcaagttaaccctgctgtgccccagatccctcacctggaaattagggataattgtacctatcttatatatgttatgtgcttaacacataatctagcatgtagttactggtattatttgagcctaaaccgtgacttagttaatgaatgtcaccctttccttgattcttttgggaaatatttaaaattagtactttgatgtaaaaaaaaa

SEQ ID NO: 254088 - DNA, 448 bp, Homo sapiens
cagaaggtttcaagtcaaaatcctaaccaatctgctttgatctcattgaacaagactcgcttgcaatgaatgactgaagtggatataaaacatgagttcacttatatgtgtcccatgaaacttttattactcatttatccttcttacctagaacaatgaacatcatcgcagtgacaaccatgcagaattagcagaacctgaattactccagatattctcattcttaagttctgctcaggaagtgtatattcatgccaaggccatggcactcagggacttttaaataattctcaggaagaaagaaactgcagagcccaagtggaattctggatataatgaaatgctgccccagcctggtggcttctctcagatctttcctcccggcttgccgcttcatcgtctctgaacctcctgtgtctccttcgtgataaacttgcatttttagaaa

SEQ ID NO: 254089 - DNA, 679 bp, Homo sapiens
tggtgctccccaaacctcgacagtcatcagaaactcccctcttcataaacacatcactgggccccacatcagaactaaccagaatccctaggggtgatccctgcacccctgagtttgtgtagagcatccccagatccctcagatcatcatccagttttagaactccccatctctattagctggttctggtggcaggtgccataaaggtgcccaaccaggtctgggcttacctgacatcttgcagccaggattctgtgtgaagtcagccaaccagagctatcccactgcactgtgagagcacagaggaaagaggctgattctgcttgggaagcagggaaggcttcctggaggaaggggggtcttgaaagatggaagatgggaatatcaggagatggtgccgtaggggctgtgtaggggagtgctgtgcagcagaagagccaagggtttgttcagggggcagcaaagcagctctgggtgggctggagagatcccatatgcaaaggcagagcagagacatggccacagaggcagagagaggacttgaggctctacctcagggcgctggggagctggagatgctgttagacagaggagtgctggggttagatttgcgatgtacaggaatcaccatggaaacactgcggaggataataataaagccagccacaccaagcatacc

SEQ ID NO: 254090 - DNA, 450 bp, Homo sapiens
ccagttctctgatgtatgttcttccctttcctctgctgtttccttcttgttttgttctgttgcccacaacctgttttcacccgtttctctttttccactctctcttttgtttctttcctctcaattcttttctaggtttcctgttggttttcttatctgcctatttcccgaccatcttctcctatttcctggggagccctgaggcttttcttctcctgcccccaagcacctccagcggtgatgagctccacacccccacacccattgcagctgtggcgccacgtcctcccaaggggccttctgcccgcccccgccctagccctagctgtgccttagtcagtgtgtacttgtgtgtgtttgggggagtgggaattgggccccctttctcccagtggaggaaggtgtgctgtgcacctcccctttaaattaaaaaaaatgtatgtaaaaatg

SEQ ID NO: 254091 - DNA, 518 bp, Homo sapiens
tcctgatacctgtattttttaccagaaaaaaattctaacagcagaaaagtcaatgtgatgggttacgcctccttaacgtgccccatttgaccttgtaagcttccttccacaggctgaccttgttttgtgcaatcagtgtgatcttttgtcagctatgcaaaacagtttttgtttactgaatctggtttaaaaggcaagaagttgcttcccatagggcactttgatccttggtgtagggcactttgatcctcggtggaaagggatgtgtatgccttgaaacatggagagtcacatgcgatgcttggttttgtgtagaactaacatgagataatcttttcactggttttcagaattgtggagaattcacttaggaaaataagcatgtgtatcaatggatgactaatatggacatgtactttaactgatttcacagaagcagtgctcctgatattttgagacactaattttatttggttcttctttaccatatgatcaattagctgcttacctcataaggt

SEQ ID NO: 254092 - DNA, 517 bp, Homo sapiens
tcttcttttaatgttaatacttagttatatcccactgaactagcattctaaagaacacactttgggaaatgctgatctcaaatggcatttattcaaccaggactgataatcaacgtgtacaccaattcaattgtatcagctgtttgcaaatggtgattattctgattgatcaatttatatatcccaatgggttgattcctttgctgtattggttgttaatgttttgaatattacccggtattcaagtaatgctcattgaatttcaagtaattgtgattaaacgttgattaaaatccagtcatacttgccagaagcccctgcctttaaacattcttatcctacttcccatttcccactcttctcatttcattgaacgcatagtaaccttccttccccacttcaaagcctatctggaatgcttatttctcttatttctatgggtgactccatatcccgtcagttcacagcttaaatgtcacctcatcggaaagacacccagatcataaagtttcacatg

SEQ ID NO: 254093 - DNA, 3923 bp, Homo sapiens
gtgggccgctcccctctgggaggagggctgcccagaggggtgcgggtgtcgctagcggcccctccccgtgtggggccacgtggcgggtgcgggccgagcccgaggggaagaacctggcccgtggggaggtgggggggaccgaaacggcgctgagccgagccgagagctacggggttcggagcagaggcagcggcagcggcagcggcagtaagagggaggggaggaggcaggagggcgcatggggcgccccggcccctccgacagcgcgccccctccggcccggccgcgctgaaagctccccagcgccgcgccttgaacccacgccccggggccatgccggtcatgaaggggttgctggccccgcaaaacaccttcctggacaccatcgccacccgttttgacggaacgcacagcaacttcctgctggccaacgcacagggcacacggggctttcccatcgtctactgctccgacggcttctgcgagctcacaggctacggtcgcaccgaggtcatgcagaagacctgcagctgccgtttcctctacggcccagagaccagtgagccagccctgcagcgtctgcacaaagccctggagggccaccaggagcaccgggctgaaatctgcttctaccgcaaggatggctcagccttttggtgcctcctggacatgatgcccatcaagaatgagatgggggaggtcgtgctgttcctcttttccttcaaggatatcactcagagtggaagcccaggacttggcccccaaggaggccgcggggacagtaatcacgaaaactcccttggtagaaggggagccacctggaaatttcggtctgccagaagacggagccgtactgtcctacaccgactgaccggccactttggccgccggggccagggaggcatgaaggccaataataacgtgtttgagccaaagccatcagtgcccgagtacaaggtggcctccgtgggggggtctcgctgcctcctcctccactacagcgtctccaaggccatctgggacggccttatcctccttgccaccttctacgttgcggtcaccgtcccctacaatgtctgtttctcgggtgacgatgacacccccatcacttcgcgacacacccttgtcagcgacatcgccgtggaaatgctcttcatcctagatatcatcctgaacttccgcaccacctatgtgtcccagtccggccaggtaatctctgctcctcgttccattggcctccactacctggccacctggttcttcatcgaccttattgctgctctgccctttgacctgctttacatcttcaacatcaccgtgacctcgctggtgcacctactgaagacagtgcggctgttgcggctgctgcggctgctgcagaagctggagcggtactctcagtgcagtgctgtggtgctcacgctgctcatgtcggtctttgcgctccttgcccactggatggcctgcatctggtatgtcatcgggcgccgggagatggaggccaatgacccgctgctctgggacattggctggttgcatgagttgggcaagcgtctggaggtgccctatgtcaatggctcggtgggcggcccatcacggcgcagcgcctacatcgcggcactgtacttcactctaagcagcctcaccagtgtgggctttggcaacgtgtgtgccaacaccgacgcggagaagatcttctccatctgcacgatgctcataggcgccctgatgcacgctgtggtgttcgggaacgtgacagccatcatccagcgcatgtactcgcgccgctcgctctaccacagccgcatgaaggacctcaaggacttcatccgtgtgcaccgcctgccgcggccgctcaagcagcgcatgctcgaatacttccagaccacgtgggccgtcaacagcggcatcgacgccaacgagttactgcgtgacttcccagacgagctgagagctgacattgctatgcacctgaatcgggagatcctgcagctgccgttgttcggggcagcgagcaggggctgcctgcgggccctatcgctgcacatcaagacctcgttctgcgctccgggcgagtacctgttgcgccgtggggatgccctgcaggcacattactatgtctgctccggctcgcttgaggtgctccgagacaacatggtgctggccatcctggggaagggggacctgattggagcagatatccctgagccggggcaggagcctgggttgggagcagacccaaacttcgtgctaaagaccagtgctgatgtgaaagctctgacctactgtggcctgcagcagctgagcagccgagggctggctgaggtcctgaggctctatcctgagtatggggctgccttccgggctggcctgccccgggacctcaccttcaacctgcgccagggctctgacaccagtggcctcagccgcttttcccgatcccctcgcctctcccagccccgctcagaaagcctcggctcctcctcagacaagacgctgccatccatcacagaggccgagagtggcgcggagcctgggggtggtcccaggccccgacggcccctcctgctgcccaacctcagcccagcacggcctcggggctccctggtcagccttttgggcgaggagctgcccccattctcagcccttgtctcctctccttccttatccccatccctgtcccctgccctggctggccagggccacagtgcctcccctcacggcccccccaggtgctctgctgcctggaagccccctcagcttctcattcccccactgggaacctttggacctccggacctcagtccccggatagtggatggcattgaggactctggcagcacagctgaggccccttcattccgattcagcaggaggcctgaactgccaaggccccgctcccaggcgccccctacagggaccaggcccagcccagaattggccagtgaggctgaggaggtgaaggaaaaggtttgccggctgaaccaggagatctctcgtctcaatcaggaggtgtctcagcttagccgggagctgcggcacatcatgggcctgctgcaggccaggctgggtcccccaggccacccagcaggctccgcttggaccccagaccctccttgtccacagctgaggccaccatgcctctctccttgtgcgtccagaccaccacccagcctccaggatactacgcttgctgaagttcactgcccagccagtgtggggaccatggagacagggactgcgctcctggacttgagaccttccatattgcccccctacccctcagagcctgaccctctgggaccctctccagtgccagaggcctcacccccaaccccaagcctcttgaggcacagtttccagtccaggtcagacacgttccactgaccctggcccagggcccaggcctgtctggggtgggcgctgccgctcaccactcagggaggacctgggccccttggcttcctgccttggggtcagcagccaccagctggcctggttggctctggatttctggactttttaatgaagcgtggttacctctgacgctattcccttttccaagccttccccaacctccccctctgtgaggggagccacctgagggctgtggaacccagcaggcatgagatgaaccgcagtgcccattgggctgggcagatgagatcctactttctccccaggacctggaggcaggctgtctctcaaggtggtcttttctgctgctagcaactcaaaaatcccaacagcactccctatcctttccctgaccccagaccgctgccaagcctgttctcccccattacaacatggtctcactcagggcctggactgctccaaaactcgcccaggtctccagctctcctctaccccccaacaccctgggctcacttttggataggaaataaactctttatttttgt

SEQ ID NO: 254094 - DNA, 769 bp, Homo sapiens
gaaaaaaggatagcaggaccctggaaacctttacaactgaggacactaacagcccttactgctgttgcttgctgcaacaggcacctgcagcctttgccactgaataccacagagtcttcgccaatgctcatcctagctgacagagctgcccaaagtccatagcactgtgccctccagagccagagccatcactgctcctttcctgggacctgagtcaccactatgcctcccccagggctggagtcaccaccatgtgcattcttgcaccccatcgcattgtatatgtacccaccaatcagacccatcactaatggtggccatgtgcccactggccagacctagcatcaccatgtgcacccagaaatggcacctctgcatgccttagaatcagcatccctggaccttgtgccaaacccagcactgctcacgccctttccagccagtgcccttgtgcccacccataggtaaaggccttttcctaccaaagctggtttgtaaagtctggaagaggtggctactcctttatgtgaaggcacaaggcaagggtaaaaggtgcaccaaaaaatcaaggaaacatgacagcaacaaattaacacaataaatatctagtgaataaccccctcaaaattgagatctatgaatttcctgacaaagaattcaaaatatcattttaaagaagctcagtgagttacaagaaaacagagttcctgaactcaggaaaagagtacatgaacaaaaggagatgttcaggagatagaaataattaaaa

SEQ ID NO: 254095 - DNA, 466 bp, Homo sapiens
gtcggtacccgattgagataagcacaaagtacatttctcacaagatttgcttttttattcaagtttactctctactcttgtgttgactatattttcttattttctatatttttgatgctctggcatttggggccttgatcccagagaggctgcccctcccagggctacttaattctcagagatagcagatggctccctgcgagtgtgcctctgatatatgaaccagcaaatccagagctcacaccccctcgccatctcctttatcaaactcacacaccaaaccaatatttccctggccttaatagagggccgtgcacgaggaaccaccccatagctcagagcctgctaaaatattcaaactgttcaatcctaaacttccccagtgtagctacgctgcatcacccattcttccctgcaaaaccccactaaagactctgggccatgctccccactcttcctcttctgc

SEQ ID NO: 254096 - DNA, 389 bp, Homo sapiens
agtagatgtgctgagaacagaggccttaagtgtgcttgcagggtttggcttggctcttgcactgctcctatttgccaggaataaaatgtattccacatagtctctggtccaaggaggattagaggctgctggagctgacctaaaccccatgcacagcctccgtgggagctgcccagccagtctgtagacttgtgagtgagaaactacataatcgttttgtgagccactgaacgttaaggcagttttgttatctatatttttttattttattttattttattttttttttttttgagacaggttctcattctttttcccaggctggagtgagccatgatcgtgccactgcactccagcctgggtgacagagtgactgacagcttgtcttt

SEQ ID NO: 254097 - DNA, 189 bp, Homo sapiens
tgcccaagttcttagatatagtaagtggtggagctggaattcatactcagttccattagatcacctcactgtactgttcagagacaggggcatgcattttctggtttgaatctagacggtcattttgtacatacttggtaatgtcttctagttcatttcttagttttgtagtttgcttattatcttgta

SEQ ID NO: 254098 - DNA, 308 bp, Homo sapiens
gttgacaatgcaagactccgtctcaaaaacaacaacaacaaaaaaaaaaaaaaacaaaagaaaaaaaccaacgaatacctatagtatcatgccacacacgcaatgatctaaaactctgttaggagaacataagtaggtggtaaagctataaagaacaaggaaattattatcacaaaactcaggatagcgggtacctctcaacggaagcgagaggattgcgctgggggatcacctgggggtcgggagtgttcatgttttcttgacctggggaatagtgtacatgcttacaataaatgttttacattgtg

SEQ ID NO: 254099 - DNA, 361 bp, Homo sapiens
gacgcgctcccgattcctggtttccatttgcggagaatgcagggcttcctcttggagttaaagactcattggctcctggaaagccctcgctctccgcgccccccgcggacttagctgtgactgtccttgcctgtggagcagaaggcttgccctcctcaggggccacccgagaccgccaggatggagtaggatctggaccttcagtctgttgaggagccctggcccggggtagccattttcaagggcgagggaccttggtgggagtacgatgaatccatccatacaataaacatccattaagcacctagtacatggcagcggggggcagagggctggaaatattaataatactagtaaaact

SEQ ID NO: 254100 - DNA, 494 bp, Homo sapiens
ccagaaagtatgtgggagattatagacagagaggcatttaggaagaggaccctttaaagtggcttatgaactcctgggctacacccccatgaactgtgcatgagtgaacttggctaaaatattatatatagactttgagaactgaactatgggctataccacatacctaagtactaaactggctactgggtggtatacatgtgagacaggcccaaacatcactgcagaggttttgaaaattgagctgataatagaaccacaaccctcataaagctagtttaaacatgtggactgaaaccaactgggctacttacttattaaaataaaaacatagaataagcaatgaggacttaaatacaaccagagtgttttaaaataatactgaaaatgtccagggtacagtccaaaattacatagcatacatagaatgaacaaaatctcaagccatccagaaaaagacaattaatggaattcaatatctagctaacatgaca

SEQ ID NO: 254101 - DNA, 340 bp, Homo sapiens
taaattataaatatttttaaaaattccaaattatgaagttcgaaggggatattttatatctctcagccactgtcattttcttcctcccttccttgggtgttggccatgtatctatgagtccagttggtaaaacaatcagtagcattgacaggatgatgtactctggtccgaaactacatttctcagctttttcagttctcaggagacagcggaaaatgtacttagcaaactctattataaaggtccatgttgttccaaatatttagttgtacttaaagtaaaatcatgacttcagatgccaagtgaaataaagcataattttcacactgtatgatggaaa

SEQ ID NO: 254102 - DNA, 224 bp, Homo sapiens
tccctccatcccaggaaccccaaagccagttaaacatttaccagctggagctcaagattgaaccagctcatcccatctgacctgtcccctagctgcccacccgggtttatttcagcccaaagctgaaatttccactcttcaacaaaggaactcttaggttataacttaaatagattaagccagtcaccatcaggaaaattaaattcaaaactgcttattcctca

SEQ ID NO: 254103 - DNA, 353 bp, Homo sapiens
gcacttcttcccctctcctgccgcctccttcacaggccccatttcaggcataatacaaaggaacagggcttcctgcttgaaggtgctgatccagggatcaacaggactgatgacgttgctctcctcaaggagctgacactgcagcgtgaggggacaaattcagaggacaaattccgatcagtgttccctcttccagcacacattcactgaggtcctattgcatgctccagacatggaagcacggcagggagtgaagcaggcagaggtctccattcttatgggatgatagtctagcgggggagacagagaaaacaaaagtaaaacataaacaaagctaattaacctgaacccag

SEQ ID NO: 254104 - DNA, 548 bp, Homo sapiens
accatattcagagtgttcctcagcatccactctgtgctaaacgcttttcgttcaccacctcattcgaccttcaccctctgtggctgaggctaaggtcacccacatttcacaaatgacaaaacagcctttgaggcttcccctgacttgccccaagcaggggatcctcagggacaagggggttcattcatccataggcatttggagataaacacattcaagacctcagagatgctaaatgtacagttgagatttttcttccatcagaatttctagaatgtgttctcaatcaaattcttattttctgtgagcatataagaagtcaaacctcccaaaattagagcagagacatgggctatccagtagacatgggctacaacatgtttggagtataattggtttattcatagacttaaccagagaaatatggaagtttcgcacacttctccctgttcaagccaatggtgacacatacttagaatataatttcaaatcacagttttacgtatgtgcatggttgtatttgtatttaacaaataacataataatta

SEQ ID NO: 254105 - DNA, 360 bp, Homo sapiens
aaaaaattactactttatgaagaatgccctttcagcttagcgtaaaattagtaatctcgtaatgatgctacagctgatgttttgagtgcttactgtgtgcctggcactgagctaagacctttatgtgaagaatttaacttcatagtaactcctcctagaacctatttgcagatgaggaaatttaggtgttgagggcttaagtaatttacttagatcacacagctagttgcaaggttgaggtaggatttgaatccaggtttgtcccaactatagtgcctgtgtgggatgccacagaggagtttctttaatctgtgtttctctccttaaaagcttaaattgtaaatgaccaaagaagtgtca

SEQ ID NO: 254106 - DNA, 204 bp, Homo sapiens
ggcagctgtgagcccagcacatcggatccctggggctagagccgcggagccaatgaactcaggtgctatgggccgggctggggcagagggtgcatgctggggtcccaccggccaggggcccctgacagtgaattgctgactgtgatattccacgatgcttttgcttgtgccgtgcttgtctgctgggctctcgagtcaggggcc

SEQ ID NO: 254107 - DNA, 250 bp, Homo sapiens
gggaaggagagggcaagacacacagtcacaggtgaaacccccaacagcaatgaagtgtgtcctgcaaggaggggacccgacattgaacccctgaccccgagtgggctcctgccctgcctcagggcagctgtgatgatgctactgcaaaagcttctggaaggcctgcatctaaccagtatcccttgacgtaaaggctctcgttcccactgtgtcaaaagagatatgctacaatgtacaggcccacacttgt

SEQ ID NO: 254108 - DNA, 437 bp, Homo sapiens
gccttgtctacattaaagagcaagaaggcctcttttggtaaggagctaaccatgtgataatctgaggaaagaccattccaggcagatcaatcagcaaatgcagagactctgaggtgagggagggtcagggaagagaggatagaacatgctttcaagagagaggcagggccaggtcacagacagtgataacatttatctggacttgtaaaagttacttagctgtgcagaatgtagtggcaaggcaagcataaaagcaacaagccactaaagaagctgctgtggcagcccagttgagagatgacagtggcttgggtgagccttgtgacagtggaggctgtctacagaagctgggtctgcaatatattctgcaagtagaactaatagagttgttgatggaagggacatgagaggcatgggaaacagagacttcaaagttt

SEQ ID NO: 254109 - DNA, 231 bp, Homo sapiens
agaaagtcattaagggtaactccttcagttctgcctcttactagacaagtgcctttgggcaaactacttaacctcgtagaaacttaagtttaaataatgcttcacaagtctgtggaatactttcatatatatcgcttacatcattttatttgatcctttcaacatgcaaggttgtatacaagttttacagttatacctggttttttttttaatggacctcagaaaattgag

SEQ ID NO: 254110 - DNA, 622 bp, Homo sapiens
tgctggaaatagtaatctccaaataagtgagatatctttgtgtttataaatgtgtctacaggttcatagtgccatttccatgaagactgcccaagcatgtttttgtctagaaagtggtagatagactgtaactgtgccattaattacttactgggtaatcaaatgacctgcgctcaagttttaagtttcaaatgtgcctgggattcagtctccagtccctcgccattgttgttcaatttcccctcacttctctgttctcttctatgcctcaactttactgattttttaatgctgaaaacaaaaatcatttaatttcctgactctaaccatgccctaagtgtctcatcttccaccaaaagcagctaatcaaggtactttgatagacaaaagatttcccactctgggaggaattttcatgctagctgttgggttagtctatgtatttcttccctctatgattaaaacagaaacgtgggctgtgtgtggtggcttgcacctgtaatcccagcactttgggaggccaagaggagaagaccgtttgaggccaggagtttgaggctgcagtgagatattgtcatgccactgcactcctccctgggcaacaaagcaagaccacatctct

SEQ ID NO: 254111 - DNA, 474 bp, Homo sapiens
cattttaatttttgtgttctagtgactgtggctgctgggtagaggagaatttgtatatgtggaaaatacaagcattgtgactactagttacagtcaccatcttactggtaactgtgacaaatttcaggaaagaggatcatgatagatatgggggtgatgatagtgataatcttggagatttaatagaagaaatttcaaagtttagcagtgaatgctgataactctccggtttacttttgggaggaaagacagggattagaggaagtgaggaaaaggaaaaagtaacccctgcaggaaggatcatcctggaaaaaactgtggcgtggattcagtgtgtactcattaacttcttacctttccttgtttgtattgttcttcaggttcagaaatcaacaccctatcaccactaccaaaatctttaggcactgtattagttattgattgctgcataataaattactccaaaatttcatg

SEQ ID NO: 254112 - DNA, 495 bp, Homo sapiens
acctatgactgctcacatttttcagattgaatcatttcaattgtattttaaggttcattgactcttttccacctccaagctgctcctgaacacaactgattattattttttaattttgaaaacgttctcacttctagaatttccacttgagcctttgttattattgtagtttcttcttctctgctgtgatttcctatccatttattttaagggtttttggggttttgattttagtaagaattacaataactactttaaaaatccacactaattccaacatctgggtcatctcgaggtcagtctattgattgcctttttctttgaatatgtttctttatacatttgttataatgggattgaattctgaagattgtaaaactagattttgttttgttcctctgaaaattttgataattttttgttgtatttgttgtattttgtttttttttctattgtatactttacaatatattttcctccaatggttttaacata

SEQ ID NO: 254113 - DNA, 923 bp, Homo sapiens
  misc_feature (59)..(60): n is a, c, g, or t
atacagaggatatgaagaaggaagattggctaaccgctaaaacagtgagttcgatagannacgttttcattcatgcactccagcctgggcagtgaagcgacattccgtctcaaaaagaaaaaaaagaaaaaaaatgtttcaaatctcccatatactacatcagtggtcttcaaactcttctgttcctagacccaaataattgttttttaaattatgtaactccctgcacatctttaaatagacatctataatttttcatcataaatttgttccttatttcttgttaacagcagatagaaacagtattttataagatgaaatattgtgaggattgactgcaattggagtatttcatggtatggcttgataaaataagttttaactaccttatccataatacactctgatcctcaaataagtaaaattttaatccatgtgttttgaaaacccatggattaaacacacagattaggaaggagtacctatggaatgtgaagacctggaaacggattgcctaagagttatccaagcaaaaaagaaaaaaaaaaaaaaaagaattatccaagcatatgcactccttagagattcctcgtgccccaaagtgaagacttccatactataccatgccaaagagctcctggataagttttcctgactcataacacaactgttcttcctattcttctgtttcaaagaggaaacagagcattttagtatatttgaaagaatacacatcactaacgcctggtgcttcagtgtttccaaatcaccatgctttccaacatgggctaaaatacagtagcccccattacgtgtgggggatatgttctaagacccccagaggatgcctgaaaccacagatagtatcaaaccctatacagcccatcttttcctatatgtatgtgcatagatacctatgagga

SEQ ID NO: 254114 - DNA, 1617 bp, Homo sapiens
caattcagctcctattgctaaagaagcagtgtggggtagaagagagaaagacctggatttgaattaatccttacctgatcttgggcaagaaacccagcctatccaagtctcagcatcctactctgcagatatttttactgaagtatgaaaattataaagtttaggcaggagcttaacagatggtagtatattaataataatgatgatcataataataaccatatgcctagaattgtacaagaccattgaaagataccaaaaaataaaaatgtagaagaaatggctgggcgcagtggctcacgcctgtaatctcggcctcctaaagtgctaggtttataagtataagccaccatgaacagccacaaccttgatcttaactataggttttgattcaaacctctaccatcctcaaaaatatatgactaaaatttatgaataaattatgaataattataaataattatgaataaaatttagctgaaatcagaatgacatgggttttaaaaaatgttttcaagtcgccaggtgcggtggctcatgcctgtaatcccaagcacttttggaggccgaggcaggtggatcacctgaggtcaggagttcgagactagcctggccaacatggtgaaacactgtctctattaaaaatacagggaattggccaggcgtggtgcacacgcctgtaacaatctgagctactagggagactgagacaggagaattgcttgaaccctggaggcagaggttgcagtgagccgagatcacatcactgcactccagcctgggcagtgaagcgacattccgtctcaaaaagaaaaaaaagaaaaaaaatgtttcaaatctcccatatactacatcagtggtcttcaaactcttctgttcctagacccaaataattgttttttaaattatgtaactccctgcacatctttaaatagacatctataatttttcatcataaatttgttccttatttcttgttaacagcagatagaaacagtattttataagatgaaatattgtgaggattgactgcaattggagtatttcatggtatggcttgataaaataagttttaactaccttatccataatacactctgatcctcaaataagtaaaattttaatccatgtgttttgaaaacccatggattaaacacacagattaggaaggagtacctatggaatgtgaagacctggaaacggattgcctaagagttatccaagcaaaaaagaaaaaaaaaaaaaaaagaattatccaagcatatgcactccttagagattcctcgtgccccaaagtgaagacttccatactataccatgccaaagagctcctggataagttttcctgactcataacacaactgttcttcctattcttctgtttcaaagaggaaacagagcattttagtatatttgaaagaatacacatcactaacgcctggtgcttcagtgtttccaaatcaccatgctttccaacatgggctaaaatacagtagcccccattacgtgtgggggatatgttctaagacccccagaggatgcctgaaaccacagatagtatcaaaccctatacagcccatcttttcctatatgtatgtgcatagatacctatgagga

SEQ ID NO: 254115 - DNA, 252 bp, Homo sapiens
gtcatttgtatctgaatgtagaaagtttgagtactaagaagaattattctagatgacatcataaaagtgaattatattaaaagtaaattatataagcttgctaattttatttatattatatttataaatataagtatgtttataaaatatgtattttatttatattatattaaaggtaaaggcaaattatattatgtaagcttgctaataattatgtttatatttataaatataataaatatatttataaaa

SEQ ID NO: 254116 - DNA, 481 bp, Homo sapiens
cttcttccatagattttagcctgaaggattttgaacatctacacacacttcaaggattctactgatgtcatcagtttcttgattaatattgtctcactatgtgggcttgctaggtttttctacagaggctatatttcgaaattcctttaattttggttattggtagtttcttgcttgaactgggattcatatttctccccgctgagaataaaatttgttctcagaataaagcatatttgactctttctagctgccaaaatgtgaagtcttgtggttaggtattttggaaaaccggcaggttttgtttacatactgtggtctttctccaaatttatcccacatcccacaccccacaagtctaggaccccttccagcgtaattgctgtgggacaagtgcaaggcaaaggcttccgcagtcaccaaatcctttccatctttgaatcagacacagcaagtaccagaagagcttcccctgcttaaa

SEQ ID NO: 254117 - DNA, 503 bp, Homo sapiens
gaggccacgcggagggatccatcctcagtacccctccaggtgctgtctgctctgctggaactcttactccagtcactccacgtgtacattctggctctggtccccaggggtgtaacaccctgtactggctgcaggggggtgggcagcacggtgtggaggaaggtgaggcggacctagatcactgtcctcaagaatctagcaaaaagtaaacagaccagatccccaaccttgggaactcttgctggggaagagacagaaaacataaaaaccataaataagagccaggtgcagtggctcacgcctgtaatcccagcactttgggaggctgaggcgggtggatcacctgaggtcgggagttcgataccagctgacgacatggagaaaccccatctctactaaaagtacaaaaattagccgggagtggtggcacatgcctgtaatcccggctactcaggaaggctggggcagggcattctagcctgggcaacaagagcaaatctccg

SEQ ID NO: 254118 - DNA, 650 bp, Homo sapiens
tgccctaaataagtataggctgacgatcatgagtgagctccaggtctcagggattatttaagagccatcacagaaatgatgcctgagtagagtagacggttggattaaagcgtctgtaagtttccttctattctaaaaccaactggttccatgaacctctgagttgtagcctgaaacactggccacgggaccaatatttttgacttgcattcatctcttgctcctcacccaccacattaacaacataaaaccctcattcaaaaaaaaaaaaaaaaaaaaaaaaaaaaaaaaaaaaaaaaaaaaaaaaaaaaaaaaaaaaaaaaaaaaaaaaaaaaaaaaaaaaaaaaaaaaaaaattggggccgaatttggggttaattggcccatttccccttataggggggggttaccattcaatggcccgctgtttaaaaccgtcggacctggaaaaccctgggggttccccacttaaatcgctttggaagaaaatcccctttttcccaattgggtgtattaccacaaaaggccccgcccgaatcggcctttccaaaaagtttggccacccttgaagggcaaatgggaatttggaagccggaaattttttggttaaaatctcggggaaaaattttggttatccgcctcattttttcc

SEQ ID NO: 254119 - DNA, 876 bp, Homo sapiens
tcacacaaactggcattgaatctcagctttggcactttccaattttgtaattttaggcaagttactagaactctttaaggctcaattttcttattggtaaattaaggataataactgcttcacagggttgtcatgatgattcagcaaaatcatcaataaatatcaataaacattgtcaatgttgatgttattgttatcattattttggtgttgtctaattaacatgacatatttattagagtttcctacaaccttataaagcaatttttaagaatgtcaactacttaagtaagagctgtccttttacaatataaaagattcattaaatgctgaaaaagacgcagcatacctatttagataaaatatcaaatgttacctttttgacatattaaaagtgatcataaaatcaaaaaattataaaaccgtgccttctagtaaataatcacaggtttagctgtattttcaaaagtgcgcaaatctgtactcattaggagaacatattgatttgtgtgcgtatttcaagcaaccattttacgcatgcggagcccatggccgacagcattctcccctgggaaggtggcttctctaattgcagtgaatggtgattctatttgtagacatattttcctatagcaagcattcctttctgtgattattatttaaaaatacttgtccttaaattatttagtcttcttggctataaaggagaaaaatctacagcactgcaaagacctcacagataatataagtctgagtagaaaatgcatattaagtcttaccaacaaagtaatctatgtttcctgcaatacagggaccacaagaagcattttaataataaagatcctcaaacaaccacttaggccacataagaatttg

SEQ ID NO: 254120 - DNA, 349 bp, Homo sapiens
aatttagatgtgatgtttgtttcgagctctcgccttgcgcacggttaaagtcgcggcggcagaattatcggaagattcctgcaggggaaagaagagagagacgagtcagctccggcgccggcggagccccggctctcggcacctggggaaggaaaacacgccccaacacacgcgcctctgcgggcgccaaaaataacccgcgcgggccgggcgcccaccccggggcaacccgcgcccacctcaggggccccaggcacccaccccgaggtaacggggcgcccacgtcaggggctcggggcgcgcttccccggggctcagagcaactggggtcggagcacccgccacgcag

SEQ ID NO: 254121 - DNA, 449 bp, Homo sapiens
ctctgcttgcagaggagaaacagtctgccctcctctgacctctcctagggagagagccttgccaggtgggttccagagtcaattgtgtatgattgtggctgttgaagagactcggagaagttgtgagagaccacccagttttacatggaaaatatcagagagctatggacaagagaaaagtaacagatatagacacggggaagagaggcagagaaaaaaatcttgtttgagagatctgtggagcataggagggagaggagaggctttggcggcaggtgcagtgacaattgaatgcacacacacatgcacaaataagatattaatgtagagagaaagtggcaggaggaatggtttcaataagttttgctgtgtgttatgagtgggatctctttgggtaaatttcaatagatttcaataaagatataatttgcttattggctatttttgac

SEQ ID NO: 254122 - DNA, 730 bp, Homo sapiens
cgtctttagaattatgtggcaaatcccttaatatgtgatttattccacttaaatatgtttttagagtaggaccataagagaaagtaaaaatagaagatttaaggcaaacttattaggctaggaccagaggtattgcatttaaaatttttatttaaaaaatttatggattcataatagttttacatattcgtggatattatattttatagttcaaaccaggatgtattccagattactgaactaaagaagcattgataaaaagaactattaagaggtgttgatagggttcagtaaaatatgtcttataaggtacaaatattttagtataatgatttttgaggtcttgaaggtcaccagaaaaaataaaaatataatgaaaaccttaaattttggcaaatttaaacttaatgctctaaataataaatatttaagttgttgaacaggggaatggaaggatagtctgaagaatattcatttgataccattttgtgggcagaaagagtagaaactgaaactaggtaaataaactaggaggctgctaagttggtaagacactgtgtagtgaagaggactctgaactagaagttagaaggcttttacttgtcttctcagagtttcagtttcatcaacgtttaagtgaagataggaaggtctatgtagaatgatccaaggtggttgtagccattaaatagaatgcagtgtgaaaatgttttgaacattgtaaaacact

SEQ ID NO: 254123 - DNA, 367 bp, Homo sapiens
gttctcttctttctcttcacacaccctgtcctttgcatcttcttatccctttgccaatactctaataaccatttgttattttgaagacaaagtgttccttgtttttctattcccttctgtctactattgtttcactcttttgcttatggagagatggtttgcaagttttccaaaagaaataaattattccacaacgggtggaaaacctttagtttggacataagtttctagctgaaccctaagtcattatttgcaggaggtgaaaaggtatattttggagaatttttatctccattataaagacagtctggaggctccacctcatctcatatgttcttgacataataaaaattagaactgtacttaa

SEQ ID NO: 254124 - DNA, 797 bp, Homo sapiens
gagcaagcggccccttccttcggccccgcccagccccgccggccgcccgctccctggggaaccgagggaggaatgggcggggtcctcaggtgcccggcgacgtcatccagcccccaaggctccaggacgcaaagggtcccctgatctggcagtccctggacctaccctggagagcgtggggggacaaaggccggacgcgccgcccgctgccgcctccaggaagccctcccttgccaggacagtggagttggccgggtccttccaaagtgcctacggaaagctttgtcccatccttgaaaaattgctaatgggtttggagatacgaggtggagatgactagcaatcaaactcaaaggtggaagtcacatcgaggcagatgagcagatgaggggacctagagaagaagagaggtgcaaggagagcccagccagcaggaacatctgccccagtaggcagcactgccccacatcagagtcgaggaaagcaaagctcggattggataaaagaaacttgcaaacacggtcagtgcttactgcatgtgggctcagagcacgttaccctccttccctgcatgttcctgtgaaacgggtttactgctctaactctcagggacactgtgaagaccaaacgagaaaatagaaacaaacataatttataaaccataaagtactgacaccaaaagaggggcgagcacagcattgtgaatgtgctggtactaaatggtttgttttaagatgattttatggtgtgtgaatttcacttgaataaatttttttaatggagttcatggggacgct

SEQ ID NO: 254125 - DNA, 1842 bp, Homo sapiens
gagcaagcggccccttccttcggccccgcccagccccgccggccgcccgctccctggggaaccgagggaggaatgggcggggtcctcaggtgcccggcgacgtcatccagcccccaaggctccaggacgcaaagggtcccctgatctggcagtccctggacctaccctggagagcgtggggggacaaaggccggacgcgccgcccgctgccgcctccaggaagccctcccttgccaggacagtggagttggccgggtgtggacagcaggaagggccggcgggaagggggggtggaaagagccactcctggttaataactctgcggggttaacctagggccggccatactcaagtacggacttgagtaaaattcagcaggaaaaggagcagggtgggcgccgctagagggaggcttcaggactgagggtcagaggcccaaggcctggcagggcccttccctggtcagctccaggcttggcctgatgcccggtgggccacgggcctcttccagcctcaggctgaccccagagaaagaggacagcccacaagcccgggaggccggcttgctgcctggtcattgctgcagagcctggagggggcctgcgctcagtccccgctgaccgtcccctcccttgaccctgccatagccatctgtgtaacccaggggaaattattccaaagggacttccacttctgataatctatgattctattttctaaaaaacaaaactctaaaatgcttaatgtcaaacatctgtcatcagctgaacaggaaaaggaacagtaagtacaaagcaaggcaacatcagaaaagggagccgccctgaggaactttctccctccttcctggccgggtgaggccggactgcaggcctgactcacagggtttatttcacttattaacctaaagatgggaggatctgctggttctcccccaggcctggaggctgcctaccatcggtggctctcatcggtgagctgaggccacagttgttatagtctctgacttcaaaagaaagaccgatttcatgaacaattgcctgtctctctcgacggtggcctcggttttttgttgttgtttttctgtttgtttttgagacagagttttgactccagcctgggcgacaaagtgagactccatctcaaaaaaacaaaacaaaacaaaacaaaacaaagagttactattcagaatatattaagaattcctacaactcaacaacaaaaaaaaatccaacccaattaaaaaatgggcaacagacccaaatagacatttcttagaagacacacaaatggccaataagctcatgaaaacatgtttaacatcactaatcattagggaaatgcaaatcaaagctaaaatgagataccacgtcacactcattaggtgttattttttaaaaataacacaacaacaaaaaataagaaatgtgggcgaggatgtgaagaaattgaaacccttgtggactgttgttggggatgtaaaatggcgcagctgctggggaaaacagtatgggagttcctcacaaaactaaacagaattgccaaacgacccagcgatcctgcctctgacatatactggaaagaactgaaataaggcgctggaacagacacttgtaacccatgttcacagctgagccaaaaggtgggagtaacccaaatgtccatcagtggatgaatactggcaataaaagctgtgtctggaggccactccgtttcacacagctctccacacgggtgagggcacagccttctcgtctctttcctatgctgcatcttcagagctagctatgatatgatatgatgtgatatgtacatatcgaatatacatgttttacatgcaaa

SEQ ID NO: 254126 - DNA, 780 bp, Homo sapiens
ggagcttgggagtggaagcttttctcatgcttgtgatttggtgactcttctaaatgctgattcattagggattattacagcggatgtcaactggttgtggtgatggggtgggggcagaacatgagtagcaaagaaaagggagagacgaaaagggtacaggctcacgtaaagtaatgaagcctttcccaaccaggatggttcacaaaaaagctgtgagatccacagttacaagtgacacgcatgcacacatggagttccacatggggtactgttgaatggagcacactgatgggaagcttccctctcccaggccccctcaggagaaggtggaagagaaagggtgggcgtgggtggggaaggcagagatctctgttattctggtccatctaatgatgtaacttctttcagttattattttagctttaaaaggaaataaggggttcagatttgaaagggggtggtatgggtgggggaggggaattgccaacaaaagaacactgattgtaatgtgagaaaagtgtatttttgtattttaataaatattgttgaatttttaattcaatgtccccaaagggttaaattgagtaagaccctgaacctatagattcttatgagccaatcatttctatttaataaaaaagcggggaggggagggtacaggtatgatgggggaaagacaaatgttaaattattttcaagtatgggaaaatgctaaagctgtcaacctttccttagcttaaataaaagcaccccgattctagtgcaccttctacaagctaa

SEQ ID NO: 254127 - DNA, 421 bp, Homo sapiens
cactctgtcacccaggctggagtgcagtggcacaatcttggctcattgcaacctcgcctcccgggtttagcaattctcctgtctcagcctcccaattagctgggactataggtgcatgccaccacacccagctaatttttctattattagtagaaacgaggtttcatcatattggccaggctggtctccatctcctgacctcttgatccacctgcctcagcctcccaaagtgctgggattacaggtgtgagccaccatgcccagcctaaattagctcttctaagtctgacatatttatccattcctgatgtggagcacaaagattattattatgttagtctcttcctcttccatttccaccccaactgggtgtactgcataaaattttgacactaattatctggagttagcacagaccccg

SEQ ID NO: 254128 - DNA, 544 bp, Homo sapiens
catgggcaggaccccctggacctggcctccatagccccatgccagccggggtgccaggtgcagacccctggcctggtgacagctcagacagtgccagaaagcccaggagggtcggaccctaggggacggcagggtgcatctcaggaaaggtttaaacactgtagcacacccaaagaatggtgtgagcccagaggtttcattcctgaagacatcatggccaataactgagatccctgagagctggactctgggcgccctcagtttcgatgtcttggatgcgaatcaggccacagaagtgcccttatctccaccactgtgttctccatttatccccattgaacttgccaagctcagcaacagcctgcaggacaccaacctcacgggctgggtctacgaccccgggcagcttctgtgcgggttcctggttcctccctttgtgcctctgggctgcaccagtttgaccctgatgtgaaatctgatgcctctgtcagtttgtacaatgcggtttacaataaagcatttgacagcaatgcttaatttacca

SEQ ID NO: 254129 - DNA, 528 bp, Homo sapiens
ttccacctagaactccagctcttgctctgcaggattttcaagagacaaagaatacgtctaagattttttttttctttcatgtttttatctttgtcaaataagcatttctgttggaaattatagacagggttgttaattataccatgtatggtactatacaaacaaattttccttcctactttctaagcatatggcctggaccaacttttatcttcagttaattagatttgctgaattttaaagcatagggtgcacaagctttttacttttaataattaaattttagaaatgtgaggattttgaaggaagacaggatatggcagatataatacatgtttattgggctctggtgtatgtacatataacatttcctatactctgttagtggtattagaggccaaattgttaaaattaatcatataactagaatgaaactgagaaggtttgggatacagaaaagcattccctctattttctcacctaatttttaaatttaactgttaaaataaaactgtgcttttctccatc

SEQ ID NO: 254130 - DNA, 1923 bp, Homo sapiens
agcctgccgcttccggctctggcggggggggcacgtgccccgtcccgttgccccggcgaccgcggcggttgttctcaggccccggcctttctcaccgtgcgacgccccaacccgccgctccgccgcggtggtacgctccaggccgcgaggcccaccgagcggacgccagtggatgacccgcggcgggggaggaggagataccatcagcaaaatgccagacgtcaaggagagtgtgcccccgaaatatcctggcgactcagagggcaggtcctgtaagcccgaaacctcaggacccccccaggaagacaagagcggctccgaggacccccctccctttctttctgtcacaggtctgacagaaaccgttaatgaagtttccaagctgagcaacaagattgggatgaattgtgattactacatggaagagaaggttttacctccaagcagtctggaaggcaaggtcaaggagacagtgcacaatgccttttgggaccatcttaaagagcaactatcagcaactccccctgacttcagctgtgctcttgaacttctgaaagaaattaaagagatcttgctatcactgctattaccacgccagaaccgcctgagaattgagattgaagaagctctggacatggacttgctcaagcaggaggcagaacatggggccctgaaagtcctctatctctctaagtacgttctcaacatgatggctttgctgtgtgcaccagttcgagatgaagcagtgcagaaactagaaaacattacggatcctgtttggctactgagagggatcttccaggttctgggccggatgaaaatggacatggtgaactacactatccagagccttcaaccccacctgcaggaacattccattcagtatgaacgggctaaattccaggaactcctcaataagcagcctagtctccttaatcacaccaccaaatggctgacccaagcagcaggagacctcaccatgtcacctccgacttgcccagacacttctgactcctccagtgtggctggcccctctcccaatgaggcagccaacaacccagagcccctcagccccacaatggtgctgtgtcagggcttcttgaacctccttctctgggaccttgaaaatgaagagttccctgagaccctgctgatggacagaacccggctgcaggagctgaagtcccagttgcaccagttaaccgtcatggcctcagtcttgctggtggccagtagtttctccggcagtgttttgtttggctcaccccaatttgtagataaactgaaacgcataaccaaatccttgttggaagactttcactccaggcctgaggaagctatactgactgtgagtgaacaggtatctcaggaaatccatcaaagcctcaagaatatgggccttgttgctctaagcagtgataatacagcatctctaatgggacagctccagaacattgccaagaaggagaactgtgtctgcagtgttattgatcagcggatccatttgtttctcaaatgctgtttggttcttggtgtgcagcggtctctattagaccttcctggaggccttactctcattgaagcagaactggcagaactgggccaaaagtttgtcaacttgacacatcacaatcagcaggtgtttggtccctactacactgagatcctaaaaaccctcatttccccagcccaggcactggaaacaaaagtggagtctgtttgatagcgtcggctcagagccctggtaccttggacccaagaggaggcccatcatcttcctggagtaacatcaccagtgaccagcagacagtgagcttctatcccaggccctgcagccagtacaccaaggctgtagggatcaagcatgtaaacaccaactggtccatacccattcattaataaacttcttaagtgcaagaaaac

SEQ ID NO: 254131 - DNA, 1725 bp, Homo sapiens
agcctgccgcttccggctctggcggggggggcacgtgccccgtcccgttgccccggcgaccgcggcggttgttctcaggccccggcctttctcaccgtgcgacgccccaacccgccgctccgccgcggtggtacgctccaggccgcgaggcccaccgagcggacgccagtggatgacccgcggcgggggaggaggagataccatcagcaaaatgccagacgtcaaggagagtgtgcccccgaaatatcctggcgactcagagggcaggtcctgtaagcccgaaacctcaggacccccccaggaagacaagagcggctccgaggacccccctccctttctttctgtcacaggtctgacagaaaccgttaatgaagtttccaagctgagcaacaagattgggatgaattgtgattactacatggaagagaaggttttacctccaagcagtctggaaggcaaggtcaaggagacagtgcacaatgccttttgggaccatcttaaagagcaactatcagcaactccccctgacttcagctgtgctcttgaacttctgaaagaaattaaagagatcttgctatcactgctattaccacgccagaaccgcctgagaattgagattgaagaagctctggacatggacttgctcaagcaggaggcagaacatggggccctgaaagtcctctatctctctaagtacgttctcaacatgatggctttgctgtgtgcaccagttcgagatgaagcagtgcagaaactagaaaacattacggatcctgtttggctactgagagggatcttccaggttctgggccggatgaaaatggacatggtgaactacactatccagagccttcaaccccacctgcaggaacattccattcagtatgaacgggctaaattccaggaactcctcaataagcagcctagtctccttaatcacaccaccaaatggctgacccaagcagcaggagacctcaccatgtcacctccgacttgcccagacacttctgactcctccagtgtggctggcccctctcccaatgaggcagccaacaacccagagcccctcagccccacaatggtgctgtgtcagggcttcttgaacctccttctctgggaccttgaaaatgaagagttccctgagaccctgctgatggacagaacccggctgcaggagctgaagtcccagttgcaccagttaaccgtcatggcctcagtcttgctggtggccagtagtttctccggcagtgttttgtttggctcaccccaatttgtagataaactgaaacgcataaccaaatccttgttggaagactttcactccaggcctgaggaagctatactgactgtgagtgaacaggtatctcaggaaatccatcaaagcctcaagaatatgggccttgttgctctaagcagtgataatacagcatctctaatgggacagctccagaacattgccaagaaggagaactgtgtctgcagtgttattgcccaggcactggaaacaaaagtggagtctgtttgatagcgtcggctcagagccctggtaccttggacccaagaggaggcccatcatcttcctggagtaacatcaccagtgaccagcagacagtgagcttctatcccaggccctgcagccagtacaccaaggctgtagggatcaagcatgtaaacaccaactggtccatacccattcattaataaacttcttaagtgcaagaaaac

SEQ ID NO: 254132 - DNA, 1949 bp, Homo sapiens
agcctgccgcttccggctctggcggggggggcacgtgccccgtcccgttgccccggcgaccgcggcggttgttctcaggccccggcctttctcaccgtgcgacgccccaacccgccgctccgccgcggtggtacgctccaggccgcgaggcccaccgagcggacgccagtggatgacccgcggcgggggaggaggagataccatcagcaaaatgccagacgtcaaggagagtgtgcccccgaaatatcctggcgactcagagggcagagaacgtaactagtcatcaaactgaggagctgtccgtgtgcaacaactcaagataaaattcttgactattgaaatgcgaaaaattagattgaggctttgcggctgaattagattggtttttcttgtggccacatgaggtcgctgctggttaactgaatggcaccaaaaggcatattggggtcatttccaacagctatgaacctgagtctggaaggcaaggtcaaggagacagtgcacaatgccttttgggaccatcttaaagagcaactatcagcaactccccctgacttcagctgtgctcttgaacttctgaaagaaattaaagagatcttgctatcactgctattaccacgccagaaccgcctgagaattgagattgaagaagctctggacatggacttgctcaagcaggaggcagaacatggggccctgaaagtcctctatctctctaagtacgttctcaacatgatggctttgctgtgtgcaccagttcgagatgaagcagtgcagaaactagaaaacattacggatcctgtttggctactgagagggatcttccaggttctgggccggatgaaaatggacatggtgaactacactatccagagccttcaaccccacctgcaggaacattccattcagtatgaacgggctaaattccaggaactcctcaataagcagcctagtctccttaatcacaccaccaaatggctgacccaagcagcaggagacctcaccatgtcacctccgacttgcccagacacttctgactcctccagtgtggctggcccctctcccaatgaggcagccaacaacccagagcccctcagccccacaatggtgctgtgtcagggcttcttgaacctccttctctgggaccttgaaaatgaagagttccctgagaccctgctgatggacagaacccggctgcaggagctgaagtcccagttgcaccagttaaccgtcatggcctcagtcttgctggtggccagtagtttctccggcagtgttttgtttggctcaccccaatttgtagataaactgaaacgcataaccaaatccttgttggaagactttcactccaggcctgaggaagctatactgactgtgagtgaacaggtatctcaggaaatccatcaaagcctcaagaatatgggccttgttgctctaagcagtgataatacagcatctctaatgggacagctccagaacattgccaagaaggagaactgtgtctgcagtgttattgatcagcggatccatttgtttctcaaatgctgtttggttcttggtgtgcagcggtctctattagaccttcctggaggccttactctcattgaagcagaactggcagaactgggccaaaagtttgtcaacttgacacatcacaatcagcaggtgtttggtccctactacactgagatcctaaaaaccctcatttccccagcccaggcactggaaacaaaagtggagtctgtttgatagcgtcggctcagagccctggtaccttggacccaagaggaggcccatcatcttcctggagtaacatcaccagtgaccagcagacagtgagcttctatcccaggccctgcagccagtacaccaaggctgtagggatcaagcatgtaaacaccaactggtccatacccattcattaataaacttcttaagtgcaagaaaac

SEQ ID NO: 254133 - DNA, 1673 bp, Homo sapiens
agcctgccgcttccggctctggcggggggggcacgtgccccgtcccgttgccccggcgaccgcggcggttgttctcaggccccggcctttctcaccgtgcgacgccccaacccgccgctccgccgcggtggtacgctccaggccgcgaggcccaccgagcggacgccagtggatgacccgcggcgggggaggaggagtctggaaggcaaggtcaaggagacagtgcacaatgccttttgggaccatcttaaagagcaactatcagcaactccccctgacttcagctgtgctcttgaacttctgaaagaaattaaagagatcttgctatcactgctattaccacgccagaaccgcctgagaattgagattgaagaagctctggacatggacttgctcaagcaggaggcagaacatggggccctgaaagtcctctatctctctaagtacgttctcaacatgatggctttgctgtgtgcaccagttcgagatgaagcagtgcagaaactagaaaacattacggatcctgtttggctactgagagggatcttccaggttctgggccggatgaaaatggacatggtgaactacactatccagagccttcaaccccacctgcaggaacattccattcagtatgaacgggctaaattccaggaactcctcaataagcagcctagtctccttaatcacaccaccaaatggctgacccaagcagcaggagacctcaccatgtcacctccgacttgcccagacacttctgactcctccagtgtggctggcccctctcccaatgaggcagccaacaacccagagcccctcagccccacaatggtgctgtgtcagggcttcttgaacctccttctctgggaccttgaaaatgaagagttccctgagaccctgctgatggacagaacccggctgcaggagctgaagtcccagttgcaccagttaaccgtcatggcctcagtcttgctggtggccagtagtttctccggcagtgttttgtttggctcaccccaatttgtagataaactgaaacgcataaccaaatccttgttggaagactttcactccaggcctgaggaagctatactgactgtgagtgaacaggtatctcaggaaatccatcaaagcctcaagaatatgggccttgttgctctaagcagtgataatacagcatctctaatgggacagctccagaacattgccaagaaggagaactgtgtctgcagtgttattgatcagcggatccatttgtttctcaaatgctgtttggttcttggtgtgcagcggtctctattagaccttcctggaggccttactctcattgaagcagaactggcagaactgggccaaaagtttgtcaacttgacacatcacaatcagcaggtgtttggtccctactacactgagatcctaaaaaccctcatttccccagcccaggcactggaaacaaaagtggagtctgtttgatagcgtcggctcagagccctggtaccttggacccaagaggaggcccatcatcttcctggagtaacatcaccagtgaccagcagacagtgagcttctatcccaggccctgcagccagtacaccaaggctgtagggatcaagcatgtaaacaccaactggtccatacccattcattaataaacttcttaagtgcaagaaaac

SEQ ID NO: 254134 - DNA, 1785 bp, Homo sapiens
agcctgccgcttccggctctggcggggggggcacgtgccccgtcccgttgccccggcgaccgcggcggttgttctcaggccccggcctttctcaccgtgcgacgccccaacccgccgctccgccgcggtggtacgctccaggccgcgaggcccaccgagcggacgccagtggatgacccgcggcgggggaggaggagttctttctgtcacaggtctgacagaaaccgttaatgaagtttccaagctgagcaacaagattgggatgaattgtgattactacatggaagagaaggttttacctccaagcagtctggaaggcaaggtcaaggagacagtgcacaatgccttttgggaccatcttaaagagcaactatcagcaactccccctgacttcagctgtgctcttgaacttctgaaagaaattaaagagatcttgctatcactgctattaccacgccagaaccgcctgagaattgagattgaagaagctctggacatggacttgctcaagcaggaggcagaacatggggccctgaaagtcctctatctctctaagtacgttctcaacatgatggctttgctgtgtgcaccagttcgagatgaagcagtgcagaaactagaaaacattacggatcctgtttggctactgagagggatcttccaggttctgggccggatgaaaatggacatggtgaactacactatccagagccttcaaccccacctgcaggaacattccattcagtatgaacgggctaaattccaggaactcctcaataagcagcctagtctccttaatcacaccaccaaatggctgacccaagcagcaggagacctcaccatgtcacctccgacttgcccagacacttctgactcctccagtgtggctggcccctctcccaatgaggcagccaacaacccagagcccctcagccccacaatggtgctgtgtcagggcttcttgaacctccttctctgggaccttgaaaatgaagagttccctgagaccctgctgatggacagaacccggctgcaggagctgaagtcccagttgcaccagttaaccgtcatggcctcagtcttgctggtggccagtagtttctccggcagtgttttgtttggctcaccccaatttgtagataaactgaaacgcataaccaaatccttgttggaagactttcactccaggcctgaggaagctatactgactgtgagtgaacaggtatctcaggaaatccatcaaagcctcaagaatatgggccttgttgctctaagcagtgataatacagcatctctaatgggacagctccagaacattgccaagaaggagaactgtgtctgcagtgttattgatcagcggatccatttgtttctcaaatgctgtttggttcttggtgtgcagcggtctctattagaccttcctggaggccttactctcattgaagcagaactggcagaactgggccaaaagtttgtcaacttgacacatcacaatcagcaggtgtttggtccctactacactgagatcctaaaaaccctcatttccccagcccaggcactggaaacaaaagtggagtctgtttgatagcgtcggctcagagccctggtaccttggacccaagaggaggcccatcatcttcctggagtaacatcaccagtgaccagcagacagtgagcttctatcccaggccctgcagccagtacaccaaggctgtagggatcaagcatgtaaacaccaactggtccatacccattcattaataaacttcttaagtgcaagaaaac

SEQ ID NO: 254135 - DNA, 1811 bp, Homo sapiens
agcctgccgcttccggctctggcggggggggcacgtgccccgtcccgttgccccggcgaccgcggcggttgttctcaggccccggcctttctcaccgtgcgacgccccaacccgccgctccgccgcggtggtacgctccaggccgcgaggcccaccgagcggacgccagtggatgacccgcggcgggggaggaggagataccatcagcaaaatgccagacgtcaaggagagtgtgcccccgaaatatcctggcgactcagagggcaggtcctgtaagcccgaaacctcaggacccccccaggaagacaagagcggctccgaggacccccctcccttctggaaggcaaggtcaaggagacagtgcacaatgccttttgggaccatcttaaagagcaactatcagcaactccccctgacttcagctgtgctcttgaacttctgaaagaaattaaagagatcttgctatcactgctattaccacgccagaaccgcctgagaattgagattgaagaagctctggacatggacttgctcaagcaggaggcagaacatggggccctgaaagtcctctatctctctaagtacgttctcaacatgatggctttgctgtgtgcaccagttcgagatgaagcagtgcagaaactagaaaacattacggatcctgtttggctactgagagggatcttccaggttctgggccggatgaaaatggacatggtgaactacactatccagagccttcaaccccacctgcaggaacattccattcagtatgaacgggctaaattccaggaactcctcaataagcagcctagtctccttaatcacaccaccaaatggctgacccaagcagcaggagacctcaccatgtcacctccgacttgcccagacacttctgactcctccagtgtggctggcccctctcccaatgaggcagccaacaacccagagcccctcagccccacaatggtgctgtgtcagggcttcttgaacctccttctctgggaccttgaaaatgaagagttccctgagaccctgctgatggacagaacccggctgcaggagctgaagtcccagttgcaccagttaaccgtcatggcctcagtcttgctggtggccagtagtttctccggcagtgttttgtttggctcaccccaatttgtagataaactgaaacgcataaccaaatccttgttggaagactttcactccaggcctgaggaagctatactgactgtgagtgaacaggtatctcaggaaatccatcaaagcctcaagaatatgggccttgttgctctaagcagtgataatacagcatctctaatgggacagctccagaacattgccaagaaggagaactgtgtctgcagtgttattgatcagcggatccatttgtttctcaaatgctgtttggttcttggtgtgcagcggtctctattagaccttcctggaggccttactctcattgaagcagaactggcagaactgggccaaaagtttgtcaacttgacacatcacaatcagcaggtgtttggtccctactacactgagatcctaaaaaccctcatttccccagcccaggcactggaaacaaaagtggagtctgtttgatagcgtcggctcagagccctggtaccttggacccaagaggaggcccatcatcttcctggagtaacatcaccagtgaccagcagacagtgagcttctatcccaggccctgcagccagtacaccaaggctgtagggatcaagcatgtaaacaccaactggtccatacccattcattaataaacttcttaagtgcaagaaaac

SEQ ID NO: 254136 - DNA, 1552 bp, Homo sapiens
agcctgccgcttccggctctggcggggggggcacgtgccccgtcccgttgccccggcgaccgcggcggttgttctcaggccccggcctttctcaccgtgcgacgccccaacccgccgctccgccgcggtggtacgctccaggccgcgaggcccaccgagcggacgccagtggatgacccgcggcgggggaggaggagatcttgctatcactgctattaccacgccagaaccgcctgagaattgagattgaagaagctctggacatggacttgctcaagcaggaggcagaacatggggccctgaaagtcctctatctctctaagtacgttctcaacatgatggctttgctgtgtgcaccagttcgagatgaagcagtgcagaaactagaaaacattacggatcctgtttggctactgagagggatcttccaggttctgggccggatgaaaatggacatggtgaactacactatccagagccttcaaccccacctgcaggaacattccattcagtatgaacgggctaaattccaggaactcctcaataagcagcctagtctccttaatcacaccaccaaatggctgacccaagcagcaggagacctcaccatgtcacctccgacttgcccagacacttctgactcctccagtgtggctggcccctctcccaatgaggcagccaacaacccagagcccctcagccccacaatggtgctgtgtcagggcttcttgaacctccttctctgggaccttgaaaatgaagagttccctgagaccctgctgatggacagaacccggctgcaggagctgaagtcccagttgcaccagttaaccgtcatggcctcagtcttgctggtggccagtagtttctccggcagtgttttgtttggctcaccccaatttgtagataaactgaaacgcataaccaaatccttgttggaagactttcactccaggcctgaggaagctatactgactgtgagtgaacaggtatctcaggaaatccatcaaagcctcaagaatatgggccttgttgctctaagcagtgataatacagcatctctaatgggacagctccagaacattgccaagaaggagaactgtgtctgcagtgttattgatcagcggatccatttgtttctcaaatgctgtttggttcttggtgtgcagcggtctctattagaccttcctggaggccttactctcattgaagcagaactggcagaactgggccaaaagtttgtcaacttgacacatcacaatcagcaggtgtttggtccctactacactgagatcctaaaaaccctcatttccccagcccaggcactggaaacaaaagtggagtctgtttgatagcgtcggctcagagccctggtaccttggacccaagaggaggcccatcatcttcctggagtaacatcaccagtgaccagcagacagtgagcttctatcccaggccctgcagccagtacaccaaggctgtagggatcaagcatgtaaacaccaactggtccatacccattcattaataaacttcttaagtgcaagaaaac

SEQ ID NO: 254137 - DNA, 853 bp, Homo sapiens
agcctgccgcttccggctctggcggggggggcacgtgccccgtcccgttgccccggcgaccgcggcggttgttctcaggccccggcctttctcaccgtgcgacgccccaacccgccgctccgccgcggtggtacgctccaggccgcgaggcccaccgagcggacgccagtggatgacccgcggcgggggaggaggagataccatcagcaaaatgccagacgtcaaggagagtgtgcccccgaaatatcctggcgactcagagggcaggtcctgtaagcccgaaacctcaggacccccccaggaagacaagagcggctccgaggacccccctccctttctttctgtcacaggtctgacagaaaccgttaatgaagtttccaagctgagcaacaagattgggatgaattgtgattactacatggaagagaaggttttacctccaagcagtctggaaggcaaggtcaaggagacagtgcacaatgccttttgggaccatcttaaagagcaactatcagcaactccccctgacttcagctgtgctcttgaacttctgaaagaaattaaagagatcttgctatcactgctattaccacgccagaaccgcctgagaattgagattgaagaagctctggacatggacttgctcaagcaggaggcagaacatggggcccctggtaccttggacccaagaggaggcccatcatcttcctggagtaacatcaccagtgaccagcagacagtgagcttctatcccaggccctgcagccagtacaccaaggctgtagggatcaagcatgtaaacaccaactggtccatacccattcattaataaacttcttaagtgcaagaaaac

SEQ ID NO: 254138 - DNA, 2017 bp, Homo sapiens
agcctgccgcttccggctctggcggggggggcacgtgccccgtcccgttgccccggcgaccgcggcggttgttctcaggccccggcctttctcaccgtgcgacgccccaacccgccgctccgccgcggtggtacgctccaggccgcgaggcccaccgagcggacgccagtggatgacccgcggcgggggaggaggagataccatcagcaaaatgccagacgtcaaggagagtgtgcccccgaaatatcctggcgactcagagggcaggtcctgtaagcccgaaacctcaggacccccccaggaagacaagagcggctccgaggacccccctccctagaacgtaactagtcatcaaactgaggagctgtccgtgtgcaacaactcaagataaaattcttgactattgaaatgcgaaaaattagattgaggctttgcggctgaattagattggtttttcttgtggccacatgaggtcgctgctggttaactgaatggcaccaaaaggcatattggggtcatttccaacagctatgaacctgagtctggaaggcaaggtcaaggagacagtgcacaatgccttttgggaccatcttaaagagcaactatcagcaactccccctgacttcagctgtgctcttgaacttctgaaagaaattaaagagatcttgctatcactgctattaccacgccagaaccgcctgagaattgagattgaagaagctctggacatggacttgctcaagcaggaggcagaacatggggccctgaaagtcctctatctctctaagtacgttctcaacatgatggctttgctgtgtgcaccagttcgagatgaagcagtgcagaaactagaaaacattacggatcctgtttggctactgagagggatcttccaggttctgggccggatgaaaatggacatggtgaactacactatccagagccttcaaccccacctgcaggaacattccattcagtatgaacgggctaaattccaggaactcctcaataagcagcctagtctccttaatcacaccaccaaatggctgacccaagcagcaggagacctcaccatgtcacctccgacttgcccagacacttctgactcctccagtgtggctggcccctctcccaatgaggcagccaacaacccagagcccctcagccccacaatggtgctgtgtcagggcttcttgaacctccttctctgggaccttgaaaatgaagagttccctgagaccctgctgatggacagaacccggctgcaggagctgaagtcccagttgcaccagttaaccgtcatggcctcagtcttgctggtggccagtagtttctccggcagtgttttgtttggctcaccccaatttgtagataaactgaaacgcataaccaaatccttgttggaagactttcactccaggcctgaggaagctatactgactgtgagtgaacaggtatctcaggaaatccatcaaagcctcaagaatatgggccttgttgctctaagcagtgataatacagcatctctaatgggacagctccagaacattgccaagaaggagaactgtgtctgcagtgttattgatcagcggatccatttgtttctcaaatgctgtttggttcttggtgtgcagcggtctctattagaccttcctggaggccttactctcattgaagcagaactggcagaactgggccaaaagtttgtcaacttgacacatcacaatcagcaggtgtttggtccctactacactgagatcctaaaaaccctcatttccccagcccaggcactggaaacaaaagtggagtctgtttgatagcgtcggctcagagccctggtaccttggacccaagaggaggcccatcatcttcctggagtaacatcaccagtgaccagcagacagtgagcttctatcccaggccctgcagccagtacaccaaggctgtagggatcaagcatgtaaacaccaactggtccatacccattcattaataaacttcttaagtgcaagaaaac

SEQ ID NO: 254139 - DNA, 2198 bp, Homo sapiens
agcctgccgcttccggctctggcggggggggcacgtgccccgtcccgttgccccggcgaccgcggcggttgttctcaggccccggcctttctcaccgtgcgacgccccaacccgccgctccgccgcggtggtacgctccaggccgcgaggcccaccgagcggacgccagtggatgacccgcggcgggggaggaggagataccatcagcaaaatgccagacgtcaaggagagtgtgcccccgaaatatcctggcgactcagagggcagagaacgtaactagtcatcaaactgaggagctgtccgtgtgcaacaactcaagataaaattcttgactattgaaatgcgaaaaattagattgaggctttgcggctgaattagattggtttttcttgtggccacatgaggtcgctgctggttaactgaatggcaccaaaaggcatattggggtcatttccaacagctatgaacctgagttctttctgtcacaggtctgacagaaaccgttaatgaagtttccaagctgagcaacaagattgggatgaattgtgattactacatggaagagaaggttttacctccaagcagtctggaaggcaaggtcaaggagacagtgcacaatgccttttgggaccatcttaaagagcaactatcagcaactccccctgacttcagctgtgctcttgaacttctgaaagaaattaaagaggagactggagggagagattctcctgctggccctgaagaagcaaacagctgtgttgtgaactgcctatcgagagggccacatagcaaggagctgcaggtggcttctaggacccggggttagcatccagacaatagccaatcttgctatcactgctattaccacgccagaaccgcctgagaattgagattgaagaagctctggacatggacttgctcaagcaggaggcagaacatggggccctgaaagtcctctatctctctaagtacgttctcaacatgatggctttgctgtgtgcaccagttcgagatgaagcagtgcagaaactagaaaacattacggatcctgtttggctactgagagggatcttccaggttctgggccggatgaaaatggacatggtgaactacactatccagagccttcaaccccacctgcaggaacattccattcagtatgaacgggctaaattccaggaactcctcaataagcagcctagtctccttaatcacaccaccaaatggctgacccaagcagcaggagacctcaccatgtcacctccgacttgcccagacacttctgactcctccagtgtggctggcccctctcccaatgaggcagccaacaacccagagcccctcagccccacaatggtgctgtgtcagggcttcttgaacctccttctctgggaccttgaaaatgaagagttccctgagaccctgctgatggacagaacccggctgcaggagctgaagtcccagttgcaccagttaaccgtcatggcctcagtcttgctggtggccagtagtttctccggcagtgttttgtttggctcaccccaatttgtagataaactgaaacgcataaccaaatccttgttggaagactttcactccaggcctgaggaagctatactgactgtgagtgaacaggtatctcaggaaatccatcaaagcctcaagaatatgggccttgttgctctaagcagtgataatacagcatctctaatgggacagctccagaacattgccaagaaggagaactgtgtctgcagtgttattgatcagcggatccatttgtttctcaaatgctgtttggttcttggtgtgcagcggtctctattagaccttcctggaggccttactctcattgaagcagaactggcagaactgggccaaaagtttgtcaacttgacacatcacaatcagcaggtgtttggtccctactacactgagatcctaaaaaccctcatttccccagcccaggcactggaaacaaaagtggagtctgtttgatagcgtcggctcagagccctggtaccttggacccaagaggaggcccatcatcttcctggagtaacatcaccagtgaccagcagacagtgagcttctatcccaggccctgcagccagtacaccaaggctgtagggatcaagcatgtaaacaccaactggtccatacccattcattaataaacttcttaagtgcaagaaaac

SEQ ID NO: 254140 - DNA, 348 bp, Homo sapiens
caagtttctgttagcacaggcaacctttctgtagttgtagattggttcatctttctgtcttccttcataaaaacttttaaagaaatgtcaagagaaaataatttctgatatatgactgaactttgcatttagtttcaaatttctgaaactacaaatgacacatgtgagacaaggaataaacactttttatagataaatcaaatgatggatttatggatctgggagtggaaacttaatagaataaatggggattgggagattactaatataaatgctacccatataagcaaatgcaatagtgaaatcatagagggaaatgagaaaatagaggtcagatattatgattgt

SEQ ID NO: 254141 - DNA, 414 bp, Homo sapiens
ctttacttacagtgaaactctctctttaatgctgtttggtcaaataaacatcaacaaccacgttcaagtttcttggtcactcctgaatcctttcttttaagtgggagtgggaagttatacagagacaagtgtcggccgggcacggtgactcacacctgtaatcccagcactttgggaggccaaggtgggtggattacctgaggtcaggagtttgagaccagcctggccaacatggtgtaaccctgtctactaaaaatacaataattagctgggtgtggtggcatgcgcctgtagtcccagctactcgggaggctgaggcaggagaatcacttgaacccgggaggcggaggttgcagtgagctgagatcgtgccactgcactccagcttaggcaacagagtgagacttcgtctca

SEQ ID NO: 254142 - DNA, 447 bp, Homo sapiens
gcttcacaggtgaattcttccaaacatctcaagaagaattaatgccagttcttcttaaactatttttaaaaattgaagaagagggcacacttccaaatttattttatgtggccaacattatcccgataccaaagccaaacaaagacaccacaagaaatgaaaactgcaggtcaatatctctgatgaatatacatataaaaactcataacaaaatactagcaaatcaaattcaacagtacatttaaatgatcgtacatcctgactgagtggcatttatccctaggatacaagtatggatcaacatacaaaaataaatcagtgcgaaatggcctattaacagggcaaagatataaagataacatgatcatctcaatagatgcagagaaagcatttgacaaaattcaataccctttcgtgattaaacaatttttcaacaaactggaaata

SEQ ID NO: 254143 - DNA, 195 bp, Homo sapiens
caaactaaaatgttaagaagctatcgattttaggactcatcctgatttcagaggtgttaagatgtgaacaaaatgcatttaggaatcaatgaaacagagagcgggtgtctgcacttcgcaaaggaactaatgaggctgccgcaaccattccgtgagcctgtcttcttagtaaataacagtggcttactcaatgtg

SEQ ID NO: 254144 - DNA, 476 bp, Homo sapiens
aatccatgaacatggactaggtctttatttccttaggtcttctttaatttatctcactgtttcatggttttcagcatagctattttgcacacgttttgctagctatcttggatatttgatgttttttgatgttactgtaaatgatattgttaggtacactggatatttgatatttttgctgttactataatttgcatggcttcaaattttattctcctagtctctgttgctaacatatagaaatatagtagtccctctatccctggttttgctttccacagtttcagtcacccatggtcaactgtagtctgaaaacaggtgagtataatacaataagacattttgagagaaagagaccacattcacataacttttattacagtatattgttataattgttttgtttcattattagttactattgttaatcacctactgtgcttaatttttaaattaaactttatcataagtatgta

SEQ ID NO: 254145 - DNA, 631 bp, Homo sapiens
ccctcattttttccccctctaaaatgcatggtattcaggattagaatctgaatcttttgctataaagttgacatacattggttttaatcccttgaaagttcagtaaaaacctaaaaggaaaagcatcctaccacaccacactcatgtggtatgtgcaactattatagtggcttagagacactagttcgtgttcttcgtttctatattagtaaagatgttagaggaaattaatctgtttgttgcatcagggtttaatgtgaccatgttgtataactattctgaaaggtaagaagtttttcactggagtacagtcactggctgagaacatttaagttttcttttgaagcatacacagttaacaactattgcaggaagaactctgaattaaatttcaggcccagagttttgatttaaactccaaacccttggaaaaaaagactgctggaaaatatgaaagaacccttcgtttcttaacccccacaagtccttttattgcacttactttcatgtatttgaggatgagaggagctttaaatcaacaataattcactaaggaataatgcaaggtggtctattgtaacattttatgatattattgccctggaaataaaagatactgaacaatgtataa

SEQ ID NO: 254146 - DNA, 195 bp, Homo sapiens
aacaaattttaaacttctttcatcatcgctgtaactagtaagttcatctagtccttttcaaatagaaaaacaacaaaacccatgaaatggaaaagagagttccaaaaaagaagacctgttgatactgaatatgagaacattacactgcactcagtaatttagctgtgtctagatcttggaaagaaactccttcat

SEQ ID NO: 254147 - DNA, 613 bp, Homo sapiens
tcagttggcaagtaattttatttagtactcaatatatgtaagcactagggattcaggggaaaacaagatagagaaagtctgccccgttggaacttaaatctcctgactgctggtgaattcataaataagtgaatcctgtagtataatgtatagttgagtatagtccgcttgagcactactttgtggaaaatcttctgactttaacatagtcttaaaatcctaaactgtcaggaactttccaggttccttcagctaagtaaggtgaggcacaccaggcaaaggaacagcagagctttggcaagggggagcagaaataacacagcattgagcaggcttccattataatcaataccacatatctactttagaaaatgatggtttcatccttatataagtgtacttggtaagtggatggacagtgccagatatggaccctcatcgtcaggaaaatagaagcattgacttcttataagatatagaagaacaacacctcggctgggtgcagtgggtcacgcctgtaatcctagtactttaggaggctgaggcaggaggatcacttgagtccaggagtttgagactagcttgggcaacatggtgagacctcatctctgca

SEQ ID NO: 254148 - DNA, 379 bp, Homo sapiens
ttttgtgcctcttggcgcttgtcgtgtttctttttgagtcagctccgactgtggctggcccagggggaaggcagcatccagttatgaatctgatatttatgaggccgtggctgctgcaacatcagaatccactaccgtagagcctggcaagctggatgtgggagccacggagggccaagacctgcagcacatcagcaaccaaaagatgcccacagcttctgttctggacctggaagatattgcgcttgatattgcggaggaggtgttatctgaaatggtgagatgcattccttcatctggaagagaattttttttttttctggggcttcttcccttattaatgaaatgaagacataaaagtctgaccatatacataaca

SEQ ID NO: 254149 - DNA, 368 bp, Homo sapiens
gacaagctctattctaccttccatttccatcaatttgcctaacctaggtacctcatataagtggaatcatatttgtccttttgtatctggtttatttcacatagcatgttttcaagatttctctctgttatagcatgaatcagacttttatttctttttatggctgaatatttaattgtatgtatataccacatattgtttacccatttgtctgttgatggacatttgggctgtttccaccttttgtctattgtgaataatgctgctgtgaacattggtgtaccagtatctgtttgagtccctgctttccacagaaggacactcttttgctttacaaatgtatcaacttcatccagaaataatgtcta

SEQ ID NO: 254150 - DNA, 680 bp, Homo sapiens
acattaacagatgaaagaaaaaaaacacatgatcatctcaatgcagaaaagtatttgacagaatttagcacccttttatagaaaataactagaaatagaaggaaaccactctataataaggccatatgcaaaaatctcacagctaacatactccatggtgaaagactgaaagctccaacatcagcaataaggcagcaatgcccacttttgccacttatagccaacagagtattggaagtgttagccagagaaaataagcaagaaaaagaaacaaatgccatctgaatgggaaaaagcgaagttatctgagtttgcaggtggcgtgatcttaaatgtggaagaccctaaagactaaacacacacaaacctattagaactagtatatgaagtcaacacacagaaatcagttgcatatctatacacttaacagtgaacaatcctaatagaaaatgaggaaaacaatttcatttaaaatagcatcaaaaagaaaaaaatgcttaggaattaaccaaggagatgaaagacatacactgaaaactacaaaatactgctgaaagaaagatgtaaataaatggaaagacatcacatgtttgtagactggaaaactatttttttttttttttgaaacagagttttgctcttttgcccaggctggagtgcagtggcatgatcttggctca

SEQ ID NO: 254151 - DNA, 173 bp, Homo sapiens
cagtggtgcaatctcgactcactgcagccttgaactcctgggctcaagcaatcttcccaccccagcctcccaagtagctgggaccacaggcacgcactaccatgcccagctaaagggccccctttagaaacagccatctaactgaattttctgtttttttttgttgttgttgc

SEQ ID NO: 254152 - DNA, 380 bp, Homo sapiens
ataaatatttttaaatcacctatcacaagtctagtggtagtaaatgttcatagaataagaagctgttgaagtcaaatgtattaacttatgaaagagattttgtcaagcagaagggcagcctagaaatcctaaacaggaaagagagggagagaaagacagacagaactctttaaaaagacttctgtgtgtccacaggtttgttctctggggaaaaaattattagaaatgaaatcgaaggagaaatctatcttagtaaggataaagaggagctatatatattatatacatatttataaatttttattaaaatatattttttataaatattcaaatatacttttataaatatttaatatatatatattttttaccacgaacat

SEQ ID NO: 254153 - DNA, 333 bp, Homo sapiens
gactcccccaacagttggttggagtgtttttccagattgcaccagacttcacagagtaatggagaccagctgtccaggcatctgagagggtgacatccaaggagaaaaggcaaacgtcttgattgcccatgatgtgggcaaccaatttggatagaaaagaaggtgtcagggtttaacactgaatgtagactttatttacccaaagcctttctttaattctaacactctcaaaaatggggctcagtcaccatttgggtttcccatgttaatatgcagagagctaattcattgtctttcattgctgtaatgcagcagttctcaaaatgtactcca

SEQ ID NO: 254154 - DNA, 616 bp, Homo sapiens
agttctttatatattcttatataagtccattatcagatatgtgctttgcaaagatttttctccctatctgtagtttgtctttttatgctcttaatgatttttgaagagaagaaactggcgttcagtttaccaattggttgttttatggattgtgctttttgatgttatatttaagaaattttgcctagcccttggtcacaatgattttctcctatgttttgttttagaagttttttttggttttatgcttatgtctgcaatccattttgagttaatttttttatatgatccaaggtgtatgaagtttttttttacatatggataatgaattgttctagcaccatttattgaaaagattattttttctccattgaattgtctttccacttgtatcaaaaatcagttctgtaatataaatctaatacaataaaaatggataaaatttttatttgttgaattttgtggaatcagctttgcagataaattttaaaaaggtaatgttttgaaattttcacttttttatcatagcgtttctggttaaactatcaactgtttaggaatgaataagtgacgtattctcttccgtttattttataggcttttacgttttatttta

SEQ ID NO: 254155 - DNA, 316 bp, Homo sapiens
tgatacttcgatgtggactttccagcctccagaaccatgagaaatcaatttctgttgtttataagctactcaatggaaaatgtggacacatttaggcacacagtggggaggccgtgtgcagctaacaccatgtgagatcggttgatacagcagaagccaaggaacaccaaatattgccaacaagccaccagacactaagagagtgacatggaacagatttctcatcctcaaaaggaaccaagcctgccaactccttcatatcagacttctggtctccagaattgtaagacaatacatttttattgtataagccaaa

SEQ ID NO: 254156 - DNA, 394 bp, Homo sapiens
agacactgtatttagtggtaacatcttaattttagtgttaaattgtattgccaaagtgctaggattacagatgtgagccaccgcttctggccctgcttttcctatgtacctgagaatttttaaatatttatttatttatttttgagacagggtactccagactggagtgcaatggcccaatcaaggctcactacagcctcaaactcctgggctcaaactatcctcccgagtagctgggattataggtgtgagccagtactcctggctaattttttttttttttttgagatggagtctcgctctgttgcccaggctggaatgcagtgagccgagattcgtgccactgcactccagcttgggcgacagaggaagactctgtctcaaaaataaaaat

SEQ ID NO: 254157 - DNA, 609 bp, Homo sapiens
atttggtaccttaattccatctttaaaatcctttctagcaacacctacattcatgattgatagactaactgagagaaggtatatacaccacggactgcgaattttggaggtcactttagaattctgtctaccacggatacatttgaatatatctgcacatttacatatagttgtcaccacattaaggaaaattaacatatagattaccccgaaaaatttcctcaaactattttataattccttaatcccaccccttcttgccctctttaccaccttcaattctaggaaactgcacctatgctttttgtcactatgattggtttgttgtgtctgagattttatataaatgtcaccgtacactatgcactttttgtctgacttctttcaactagcatagtttgagattcctatatgttttatctatcaatagtatatttttatggctgagtcttattttattatatgactatattcaccttcatgacaatagacattaggttgtttccagtttggggcctgagaaataaagttgttttgaacattcatgtacaagtatttgtaaggacatatgcttttatttcttttgcataaatactaaaaaaaagagtg

SEQ ID NO: 254158 - DNA, 1373 bp, Homo sapiens
gctcagatactgatactttctttccaaacagcataagaagtgattgagccacaagtatactgaaggaagggctccctcgagttgtggtgtgaagagataaatcaccagtcacagactatgcacccgactgctgctgttcagtccagggaaaatgaaagttggagtgctgtggctcatttctttcttcaccttcactgacggccacggtggcttcctggggaaaaatgatggcatcaaaacaaaaaaagaactcattgtgaataagaaaaaacatctaggcccagtcgaagaatatcagctgctgcttcaggtgacctatagagattccaaggagaaaagagatttgagaaattttctgaagctcttgaagcctccattattatggtcacatgggctaattagaattatcagagcaaaggctaccacagactgcaacagcctgaatggagtcctgcagtgtacctgtgaagacagctacacctggtttcctccctcatgccttgatccccagaactgctaccttcacacggctggagcactcccaagctgtgaatgtcatctcaacaacctcagccagagtgtcaatttctgtgagagaacaaagatttggggcactttcaaaattaatgaaaggtttacaaatgaccttttgaattcatcttctgctatatactccaaatatgcaaatggaattgaaattcaacttaaaaaagcatatgaaagaattcaaggttttgagtcggttcaggtcacccaatttcgaatgtcactcttgtcgcccaagttggagtgcaatggcacaatctaggctcactgcaaccctgcaacctctgcctaccgggttcaagagattcccctgcctcagcctcccaagtagctggaattacaggcacctgccaccacatccagctaactttttttgtatttttactagagacagggtttcaccatgttggccacactggtctcaaactcctgacctcaggtgatccgcctgcctcggcccccaaagtgctgggattacaggcatgagccaccacatctggcctaggaccttaaatattggaaagcatcctcaaaactgtgggtcagtgagtagaactacaaaacaatagcagtagggcagaaacttgaaagaaggcaggagatcatggtgacagtggatgggaaaaagtgagggttggggataagggttgcgggttgtcgaagggtggattttctccttcagcaactacaggagatatgatgcctcataattcggagccagaagtggggctttgggtgagatatctttgcacagataacatgtatacatcatagttcaaaacccagtagtcattgtttacagcaaataaagaaatatttagtaaatt

SEQ ID NO: 254159 - DNA, 1335 bp, Homo sapiens
cattagaacacaccatacaaatgttagttctatatggccaagacatctgatttaaatttgatgaaacacagcatgtcattgttttctagaacttaaccattttcgcttctagaatttcagtatgattgtaggcaatgccactgaggcagctgtgtcatccttcgtgcaaaatctttctgtcatcattcggcaaaacccatcaaccacagtggggaatctggcttcggtggtgtcgattctgagcaatatttcatctctgtcactggccagccatttcagggtgtccaattcaacaatggaggatgtcatcagtatagctgacaatatccttaattcagcctcagtaaccaactggacagtcttactgcgggaagaaaagtatgccagctcacggttactagagacattagaaaacatcagcactctggtgcctccgacagctcttcctctgaatttttctcggaaattcattgactggaaagggattccagtgaacaaaagccaactcaaaaggggttacagctatcagattaaaatgtgtccccaaaatacatctattcccatcagaggccgtgtgttaattgggtcagaccaattccagagatcccttccagaaactattatcagcatggcctcgttgactctggggaacattctacccgtttccaaaaatggaaatgctcaggtcaatggacctgtgatatccacggttattcaaaactattccataaatgaagttttcctatttttttccaagatagagtcaaacctgagccagcctcattgtgtgttttgggatttcagtcatttgcagtggaacgatgcaggctgccacctagtgaatgaaactcaagacatcgtgacgtgccaatgtactcacttgacctccttctccatattgatgtcaccttttgtcccctctacaatcttccccgttgtaaaatggatcacctatgtgggactgggtatctccattggaagtctcattttatgcctgatcatcgaggctttgttttggaagcagattaaaaaaagccaaacctctcacacacgtcgtatttgcatggtgaacatagccctgtccctcttgattgctgatgtctggtttattgttggtgccacagtggacaccacggtgaacccttctggagtctgcacagctgctgtgttctttacacacttcttctacctctctttgttcttctggatgctcatgcttggcatcctgctggcttaccggatcatcctcgtgttccatcacatggcccagcatttgatgatggctgttggattttgcctgggttatgggtgccctctcattatatctgtcattac

SEQ ID NO: 254160 - DNA, 2301 bp, Homo sapiens
gctcagatactgatactttctttccaaacagcataagaagtgattgagccacaagtatactgaaggaagggctccctcgagttgtggtgtgaagagataaatcaccagtcacagactatgcacccgactgctgctgttcagtccagggaaaatgaaagttggagtgctgtggctcatttctttcttcaccttcactgacggccacggtggcttcctggggaaaaatgatggcatcaaaacaaaaaaagaactcattgtgaataagaaaaaacatctaggcccagtcgaagaatatcagctgctgcttcaggtgacctatagagattccaaggagaaaagagatttgagaaattttctgaagctcttgaagcctccattattatggtcacatgggctaattagaattatcagagcaaaggctaccacagactgcaacagcctgaatggagtcctgcagtgtacctgtgaagacagctacacctggtttcctccctcatgccttgatccccagaactgctaccttcacacggctggagcactcccaagctgtgaatgtcatctcaacaacctcagccagagtgtcaatttctgtgagagaacaaagatttggggcactttcaaaattaatgaaaggtttacaaatgaccttttgaattcatcttctgctatatactccaaatatgcaaatggaattgaaattcaacttaaaaaagcatatgaaagaattcaaggttttgagtcggttcaggtcacccaatttcgaaatggaagcatcgttgctgggtatgaagttgttggctccagcagtgcatctgaactgctgtcagccattgaacatgttgccgagaaggctaagacagcccttcacaagctgtttccattagaagacggctctttcagagtgttcggaaaagcccagtgtaatgacattgtctttggatttgggtccaaggatgatgaatataccctgccctgcagcagtggctacaggggaaacatcacagccaagtgtgagtcctctgggtggcaggtcatcagggagacttgtgtgctctctctgcttgaagaactgaacaagaatttcagtatgattgtaggcaatgccactgaggcagctgtgtcatccttcgtgcaaaatctttctgtcatcattcggcaaaacccatcaaccacagtggggaatctggcttcggtggtgtcgattctgagcaatatttcatctctgtcactggccagccatttcagggtgtccaattcaacaatggaggatgtcatcagtatagctgacaatatccttaattcagcctcagtaaccaactggacagtcttactgcgggaagaaaagtatgccagctcacggttactagagacattagaaaacatcagcactctggtgcctccgacagctcttcctctgaatttttctcggaaattcattgactggaaagggattccagtgaacaaaagccaactcaaaaggggttacagctatcagattaaaatgtgtccccaaaatacatctattcccatcagaggccgtgtgttaattgggtcagaccaattccagagatcccttccagaaactattatcagcatggcctcgttgactctggggaacattctacccgtttccaaaaatggaaatgctcaggtcaatggacctgtgatatccacggttattcaaaactattccataaatgaagttttcctatttttttccaagatagagtcaaacctgagccagcctcattgtgtgttttgggatttcagtcatttgcagtggaacgatgcaggctgccacctagtgaatgaaactcaagacatcgtgacgtgccaatgtactcacttgacctccttctccatattgatgtcaccttttgtcccctctacaatcttccccgttgtaaaatggatcacctatgtgggactgggtatctccattggaagtctcattttatgcctgatcatcgaggctttgttttggaagcagattaaaaaaagccaaacctctcacacacgtcgtatttgcatggtgaacatagccctgtccctcttgattgctgatgtctggtttattgttggtgccacagtggacaccacggtgaacccttctggagtctgcacagctgctgtgttctttacacacttcttctacctctctttgttcttctggatgctcatgcttggcatcctgctggcttaccggatcatcctcgtgttccatcacatggcccagcatttgatgatggctgttggattttgcctgggttatgggtgccctctcattatatctgtcattac

SEQ ID NO: 254161 - DNA, 2149 bp, Homo sapiens
gctcagatactgatactttctttccaaacagcataagaagtgattgagccacaagtatactgaaggaagggctccctcgagttgtggtgtgaagagataaatcaccagtcacagactatgcacccgactgctgctgttcagtccagggaaaatgaaagttggagtgctgtggctcatttctttcttcaccttcactgacggccacggtggcttcctggggaaaaatgatggcatcaaaacaaaaaaagaactcattgtgaataagaaaaaacatctaggcccagtcgaagaatatcagctgctgcttcaggtgacctatagagattccaaggagaaaagagatttgagaaattttctgaagctcttgaagcctccattattatggtcacatgggctaattagaattatcagagcaaaggctaccacagactgcaacagcctgaatggagtcctgcagtgtacctgtgaagacagctacacctggtttcctccctcatgccttgatccccagaactgctaccttcacacggctggagcactcccaagctgtgaatgtcatctcaacaacctcagccagagtgtcaatttctgtgagagaacaaagatttggggcactttcaaaattaatgaaaggtttacaaatgaccttttgaattcatcttctgctatatactccaaatatgcaaatggaattgaaattcaacttaaaaaagcatatgaaagaattcaaggttttgagtcggttcaggtcacccaatttcgcccagtgtaatgacattgtctttggatttgggtccaaggatgatgaatataccctgccctgcagcagtggctacaggggaaacatcacagccaagtgtgagtcctctgggtggcaggtcatcagggagacttgtgtgctctctctgcttgaagaactgaacaagaatttcagtatgattgtaggcaatgccactgaggcagctgtgtcatccttcgtgcaaaatctttctgtcatcattcggcaaaacccatcaaccacagtggggaatctggcttcggtggtgtcgattctgagcaatatttcatctctgtcactggccagccatttcagggtgtccaattcaacaatggaggatgtcatcagtatagctgacaatatccttaattcagcctcagtaaccaactggacagtcttactgcgggaagaaaagtatgccagctcacggttactagagacattagaaaacatcagcactctggtgcctccgacagctcttcctctgaatttttctcggaaattcattgactggaaagggattccagtgaacaaaagccaactcaaaaggggttacagctatcagattaaaatgtgtccccaaaatacatctattcccatcagaggccgtgtgttaattgggtcagaccaattccagagatcccttccagaaactattatcagcatggcctcgttgactctggggaacattctacccgtttccaaaaatggaaatgctcaggtcaatggacctgtgatatccacggttattcaaaactattccataaatgaagttttcctatttttttccaagatagagtcaaacctgagccagcctcattgtgtgttttgggatttcagtcatttgcagtggaacgatgcaggctgccacctagtgaatgaaactcaagacatcgtgacgtgccaatgtactcacttgacctccttctccatattgatgtcaccttttgtcccctctacaatcttccccgttgtaaaatggatcacctatgtgggactgggtatctccattggaagtctcattttatgcctgatcatcgaggctttgttttggaagcagattaaaaaaagccaaacctctcacacacgtcgtatttgcatggtgaacatagccctgtccctcttgattgctgatgtctggtttattgttggtgccacagtggacaccacggtgaacccttctggagtctgcacagctgctgtgttctttacacacttcttctacctctctttgttcttctggatgctcatgcttggcatcctgctggcttaccggatcatcctcgtgttccatcacatggcccagcatttgatgatggctgttggattttgcctgggttatgggtgccctctcattatatctgtcattac

SEQ ID NO: 254162 - DNA, 954 bp, Homo sapiens
gtgttttgattggcatttcacttataccttatgatgctggcatcttttcagatacttagtggacatttgtatacatcttctttgtagatatatctgttcaggttctttgtccatttttaaattgggttatgtctttttattattgatttgtaagagttctttatatattttagatataactcccttatcagatgtattatttgcaaatattttttcccattctgtgtgttgccttttcaccttcttgatgatgtccttcaaagcatgaaggtttttaatttttattaagtccagtttagccatatttttcttgttgcatgtggttttggtggcatatctaagaagccattgctaacataaggccacaaagacttatatctgtattttcttctttcctctcataagagttttatggttttacctcttaacgtttcggctttttgtgcatttagaattcatttttgtatatggtgtgatgtaggggttcaccttccttgttttacatgatatccagttgtcccagcaccattagtgaaaagactattatttccccactaaattgtcttcacccccttgtcaaaaagcaattgactatacatgtgagggtttatttctggactctgaaattctattccattgatctgtctgtctagccctatacaagtaccacactatcttgatcactgtggttttgtattgagttttgaaattagaaagtgtgagtcctccaactttgttcttctttttcaaaattgttttgtttattctgtgtcccttgcatttctttgtgaatgcagggatcatgttgagactgtagatcatttgggggggcattgccattttaatggtattaaaaatcttctcatccatgaacctggattacctatgtcttctttaatgtctttcaacagtgttttatagttttcagagaataaatttttcactgcttttgtt

SEQ ID NO: 254163 - DNA, 479 bp, Homo sapiens
ccatgatcgtgccactgcaatccagtctgggtgacagagtgagaccctgtctcagaaaaaaggacaaacatgtttcctcttcacagtcaccatttacgtcaccacccagatacatgagtacttctcacgatggtaaggctgggcaaaggatgtgggccccacaaccagccggcttggatttgactcctcaatttgaagaactatctgatgttgggcttgttacttaacctctctgggcctccgtttccacatatgtgaaatgaggatattcatggtgactgtcttatcaggttgcaaagatttgatgagtcaatctgggcaaaacaattaggacagtgcctggcacatcatccatgatggttcttatgaaatatcactgacagaaagacctaagaatatcaatcactgcagggtaggaactgtgtcttcatgagttatgtctttattcaaggaggaaacaaaacaaggagaaaaagaaa

SEQ ID NO: 254164 - DNA, 432 bp, Homo sapiens
atttgacaacgatgttcaagatttattgtattttatctagtaaagataatcaacatatagaaatcaacctctattgcttttacaaacaagcaaaacccaccaccaagagcaatcaccagcgaatagttttgggaaaatgtggatacaataaataattcatgatgacttttcacataatctttttactttctgagtggctatgtttcttgataccaaaattctcccttatgaacacacatacttcttattgtattactttaagcctaaactgctagaatatactgtttacctacatagactgaaagagggaatctagtttggaaaattgcaaagattatcaaaaactgttaaaatcccttctcctcctcctcatcattatcatcatcaccctcatcatcctcatcatcatcactatcattgttgtgtcatttt

SEQ ID NO: 254165 - DNA, 384 bp, Homo sapiens
agcagtgtgagaacggactaatacagtaaagtggtaccagtagagtgggatgctgctgaaaagatacctgaaaatgtggtttaactgtgtccccacccaaatctcatctcgaattcacatgtgttgtgggagggacttggtgggaggtaattgaatcatgggggcgggtctttcctgtgctgttctcgtgatagtgagtctcacgacatctgatggttttatgtgtctgggatttcacctgtttgtactcactccatcctgctgccctgtgaagaaggtgcctgcttctcctttgccttctgctatgattgtaagtttcatgaggcctcctcagaaatacagaactgtgagtcaattaaatctctttcctttataaattaccaa

SEQ ID NO: 254166 - DNA, 252 bp, Homo sapiens
tgctgtaacaccagtcaaaaaaattgacaaagatgaggtattaagtattgacgttaatactctacctgaaaataaaaaccatggaacctatctataggttaaaacagcatactgataaaaaacacatatactttgatgcagagatgtacgataatcatgaattagaattagcatcctgatttagtgttctaccaaaaaccctaagtgaacacagaatctatttaaaaccaaagaaaacaaaaaaatcttgtg

SEQ ID NO: 254167 - DNA, 503 bp, Homo sapiens
tagtagagacagggtttcaccgtgttggtcagtctggtctggaactcctgacctcaggtgatccacctgccctggcctcccaaagtgctaagtgctgggattacagacccttaaacaatattaagtagtaattagtaaactatattttcttttcttttcttttcttttttttctgagatggagtcttgctctgtcgtccaggctggagtgcaatggcatgatcttggctctcactgcaacctccacctcccaggttcaagtgattctcctgcctcagtctccctagtagctgggattacaggtgttcaccaccacgccaggctaatttttgtatttttagtagagaaggggtttcaccatgttggccaacctcgaactcccaacctcaggtgatccacctgcctcagcctcccaaagtgctgggattacaggcatgagccactgtgcctggccaataaactatattttctcaagccaaagtagacaagcacagtctaaaaagg

SEQ ID NO: 254168 - DNA, 405 bp, Homo sapiens
acatgtcattgcctcattaaaagagaaggtttaatcttgcaatggactgaatatccatcttctgcagcactggaaaaaagcgcagcttatctatctgctttgaaaagtaggtttatagcaaaaggctcttcccttcctgcctggatagccaccactaaattgggcctctcagaactgagctcctgaaaattcatactacagaaatgtttcacttttaagtgggatttctgtttttaatttctggggaaaagatttagatagtatcccctatgatgagttttatttaatatctttactgcctgcaaaaagcccatgcttatgtttgtttttacagaagacccttcactaccttaatcaacagacctttgttaagcacttattctgtgccaggcagattaaataata

SEQ ID NO: 254169 - DNA, 219 bp, Homo sapiens
  misc_feature (190)..(191): n is a, c, g, or t
gtcatctgaagataatataaaagacaccaagttaaatgacttgcaaatttttttactttttaaaatttttttatttttttagacttgcaaattttaattcacattgagtaaaacaacttttgtaaaattatatactttagaaacaaatgaagattcttgtgacttgtttattctataagctgtataaccnnaaagaaaaattaaagatactttaggaat

SEQ ID NO: 254170 - DNA, 361 bp, Homo sapiens
caaatccatactgagtgcttcgtataatcagctcatttaatcctcccagcagccctgtgaggcagttgatataccatggaccaggatgctcttatctttaatgaaaatactgcagttaaatcgacagatacaaggaactactgggaggcattttaactattatgtgtatctattcttagatcacaaccataaagacacatggtcttggttgtggtgtggggtacgggagtggtaaactaagcttaactagaccttgaagaggtttttcgtttgttcttttttttcctaatttgttcttttggttgcccacagataagtcatataaacatgacagattcagaaaaattcataggactttaaa

SEQ ID NO: 254171 - DNA, 689 bp, Homo sapiens
tcctctgtggataaattgcaaggcttgacctcccacccagatctccttcatgagcttcagaccttcaagtgaaattaagtcctagacatttctaccaggagcacctcacccttgccgtgcctccaaacagactcttcatcactttacccatgcactcacctattccagacctgctcttcctcctgtgtcccctaaaatcagtagcaccaccatgcccctgtgttcaagttagaaacctgcatcatccaacattctttctcccagcccccacatctccactgctttaattcacacctgcatcatatctcacccgacctattgcaacagtctcctaggataaactctccttgtctcccattcctcactcccccaaatccagtagctttagccattcatggagctctcctgtctgcagagcaaacacttcatgtaccaagtgcatttaagacttttcttgagctggctcctgctgaagccgtaactcaggtccattcatttgttcatctctgtctccccagagtctagcgcagtgccaagcacacttactgggcttaatacataccttttaattaaagaaatgaatgaaggagtgaaatctgcgaaagtcactccctgctgtcagatgcagctttgtgagcagtggctggagtagccaggacatggaggagacccgagtgacatgtgatggc

SEQ ID NO: 254172 - DNA, 469 bp, Homo sapiens
aattgagtacttactgtgtgccagctctatctttattgctttatttgtattaacacagttaattctcacaacaaccatatgaggtagatgctattattacccctattttacacataaagaacttaagcttaaagagatttaagtaacctgtccaaggttacccaagtaacaaggttggggcagaaccacgattagaactccaacagtccagtttaaaaacccaagccctttactaggatctgctagaagtacatttgaattgtctgtagaagagggagtggtgtttaaaagatggagaggagctttccaaatagaagaaattataagctgaccagatgcatcaaaatcacttaaaaacacagattttaggcaccccaaacccttgcctcagagaagctctgttgtagaattgtggcttccaaattgggattctcagattcctagagtctaggtggaattattggggaat

SEQ ID NO: 254173 - DNA, 250 bp, Homo sapiens
aggcccaggagaagccagcagctggtgcttcctggaataggccagggctgacaaactccaagaggagcctaaagatcagcatttgttttaatgcagaggctcggcttagaaggcccagcttgtgggccaggcgcagtggctcgcacctgtaatcccaggactttgggaggccaaggcaggtgggtcacgaggtcaggagatcgagaccatcctggctaacacagtgaaaccccgtctctactaaaaatac

SEQ ID NO: 254174 - DNA, 239 bp, Homo sapiens
atgggtctgtaaaggaactgataaaagtttgggactgaaaagattttaaaaagacagagatcttggaagagctatatgttatatcaaaagctattgtgtgcctgtgcatatgcatgtgtacgtgtgtgtgcaccttgcacacataacctgctgcttactactcagcccccttgtgtcttctccccttccagagtaggccatatacctatgaacgttttaacgctcatgtataaaatcta

SEQ ID NO: 254175 - DNA, 428 bp, Homo sapiens
acagtttttaaaaatttaaagttgataaggtaaaaatgttagagcaaactaaggttaatgtattattgaagaaaatttttaaaatacatttagtgtagcctaagtatacagtattcgtaaagtctacggtggtgtacaatgatgtcctaggccttcacattcactcaccactcactcactgactcacccagagcaacttctagtcctgcaagctccactcatgatgagtgctctatacaggtgcaccgtttaaaatcctttatattaatagcatatttttaccataccttttctatgtttagatacacaaatacttaccattgtgttatagttgtctaccgtattcagtacagtaacatgatgaaatcgcctaacaacacgtttctcagaatgtatgcctgtcattaaataatatgtgactgtgtatt

SEQ ID NO: 254176 - DNA, 471 bp, Homo sapiens
tcatttgcatctcacgagtcaaatatttttattttatagatgagaaagttgaagcccacagaagttaaatgacttgcccaaggccctatagctagttaggctcagagctgaatctagcgctgtagtacacaccaagatgccacagttatctgtgtgtcatctgcctctcccatcctctttggagcagtctaggtcccaaattaacttttctgtgacttaaattgtttctgagttgagatcattttgatgtatattgaacggggaagaatttttgtttttctttttgagacagcatctcactccattaccaggctggagtgcagtggcgcgatcttagctcgctgcaacctccacctcccgggttcaagcaattctctgcctcagcttcccaagtacctgggattacaggcacccgccaccacacccagccaatttttgtatttttagtagagacggggtttcaccatcttg

SEQ ID NO: 254177 - DNA, 220 bp, Homo sapiens
cttttttacgtggatttggggaagacagactggtagattactctcagtactcctttaagttaatttaaatatgaagtagtagttgctgtctgcaagaaagccttgttggttcattttgaatttttgttttttacttttttgcaaatggagaaaggattgtggtccacggaatgctgtcatgttgccatgttgtcatgcaatacagtatttttgtcgcaga

SEQ ID NO: 254178 - DNA, 376 bp, Homo sapiens
aatgaaactatagttccatttggaagcccagacataggatgggtcagtgggcatggctctattcctattctcagagcatgccagtggcaacctgtgctcagtctgaagacaatggacccacgttaggtgtgacacgttcacataactgtgcagcacatgccgggagtgatcagccggacattttaatttgaaccatgtatctctgggtagctacaaaattcctcagggatttcattttgcaggcatgtctctgagcttctatacctactcaaggtcagtgtcatctttgtgtttagttcatccaaaggtgttaccctggtttcaatgaacctaacctcattatttgtgtcttcagtgttggcttgttttagctgat

SEQ ID NO: 254179 - DNA, 454 bp, Homo sapiens
ataggggaggatcccttgaggccaggagtttgagaccaacctgggcaacatagtgacaccccattgctacaaaaaaaaaaaatgaaaattagctgggtgtggtggcaagtatccacgggcgggggacaaggttattttggtaagcctagcaaactctggggcagagaagtggaggggtagaagcttgcctatcttgagctgaggagggaggaggaagtgagaaatggaggcagccagatgctctcctttgagaaggacctaattcctattctcattggtgtaacttaaaaacaaaacaaaagtgattaaatatttcaaacataaaagtaaaatgaagctgggcatggtgatatgtgcctgtaatccaagttacaggaagccaaggtgcaagggtcgtttgagcccaggaattcaagaccagcctgggcaacccagtgagaccctgtgtctttaa

SEQ ID NO: 254180 - DNA, 340 bp, Homo sapiens
ttacattatctgtaaaatgaggacttgaataatgttgagctctcctgtaggagaaagaggaaagaggttgccaggaaaattctgcctggagactttaggacagctgctcctgagggtcactagtgagtctaccttgatggttctgtgactgcagatattggtagggtgctgcttctgtgttaggctctatttctcgagtaatagtaagccagttggtgagaaaacaagactgaaaaaatgctcccttgacataaacctgttgtagaactctcactgcacattctttgaggaccttccactgtggaattctgtaactgaagtccaggagtaaaggaaggtc

SEQ ID NO: 254181 - DNA, 389 bp, Homo sapiens
aaaatacttttttttttctgtaaacagtaaacatttataatgtttgcatctaaatttcaagggctactggctggcattgggtcatcctatagggaaggggaccatagtatacctagatagggaagaagcccacaaggaaatacatcaaaatgttactgctaggtatctctgggtgataagattaaatataatttttatattcatctttatagttttttcccatttagaatttatagaaagaccctaaattacttaaccaccataggttaactaaaaatgagcattggaacttttaaaaatcagaaaaataatgaacattataatatgcatattatatatgaatataatactaaataatatatataactttaataatcagaaaaaaatta

SEQ ID NO: 254182 - DNA, 512 bp, Homo sapiens
attgagaatgtattgttttaacgtggccaaattagtgtactctaggatactacccatgtggcagatatttgagaatgcattttgtgtgacttacagattaagcatacaatttgccaaaattttatgtaattaatttcctagtttacatttagggctagatgaagactagtactgtttcatcttttagaaaaactaacacttttcctttagtaaaagtgttaatttttgcaatacttttgcaaaaggttaaacttatagcaattttgtcatagctataatcttacactgttataaaatttagaggatttttaatttttatttattatcattatttgagacagttttgctctcgttgcccaggctgcagtggcgcagtctcggctcactgcaagctccgcagtccggcctgggcgacagagcgagacggatgaacccaggaggtggagtttacagtgagccgagatcatgccactgcactccagcctgggcaacggggagactgtgtctcaaaa

SEQ ID NO: 254183 - DNA, 336 bp, Homo sapiens
aaaaccacaacagcaaagatgctgattattcagtctgaaaatgttaagtgggtacataacattttcagggaaaggtgacttgaaacgtagttttaaattagaacgatagaggaaatgatattagtctagttattggtacacgtttgagaccttgtctcagctctgccactaactagccgtagaatgttaagttgtaaaacctttctccatctaaagattttcatctataaatgacggacccgacctagatgattgctaaaatcctttccactactaatattccgtgatgcattttctccaagtttgggtaaaagccctccatctaaagaaggaaaa

SEQ ID NO: 254184 - DNA, 1155 bp, Homo sapiens
tcgccccagcccgggatgctgctcaggccccgcaggccgcccccgctcgcgccccccgcgccgccctcgcccgccagccccgaccccgagccgcggacacccggagacgccccggggaccccgccccggaggcccgcctcgcccagcgcgctgggggaactcgggttgccggtgtccccgggctcggcgcagcgcacgccctggagcgcccgggagacggagctgctgctggggacgctgctgcaaccggccgtgtggcgcgcgctgctcctggaccgccgccaggccctgcccacctaccgccgcgtgtcggccgcgctggcccagcagcaggtgcgccgcacccccgcgcagtgccgccgccgctacaagttccttaaagacaagtttcgcgaggcgcacggccagccgcccgggcccttcgacgagcagatccggaagctcatggggctgctgggcgacaacgggcgcaaacggcctcgccgccgctccccggggtccgggcgcccccagcgcgcccgccgcccggtccccaacgcgcacgcgccggctcccagcgaaccagacgccaccccgctgcccaccgcccgcgaccgcgacgcggaaccccacctggagctccgcttcagcccgtccccaccgaagtctgcggacgcctcccgcgcccgcggctccccgccagctcccgccccgaccgccctcgccacctgcatccccgaggaccgcgcgcccgtccgcggccccgggtccccgccgccacccccggcccgcgaagaccccgactcgccgcccggccgccccgaggactgcgcgccccctccggccgcgcccccgtcgctgaacaccgccctgctgcagaccctggggcacctgggcgacatcgcgaacatcctgggcccgctgcgcgaccagctgctgaccttgaaccagcacgtggagcagctgcgcggcgccttcgaccagacagtgtccctggccgtgggcttcattctgggcagcgcggccgccgagcgaggggtcctcagggacccgtgccagtgagtcccggcttgcgggcagtctcccctctccaggccgaggccctccgccctgaccctcctgctgccttcccaccctcgttcttgggtacgttcaataaaaggattgttttcctag

SEQ ID NO: 254185 - DNA, 201 bp, Homo sapiens
  misc_feature (91)..(91): n is a, c, g, or t
gcaggagggaaagtgcagagaacgatagaccagaagccccagggacagcgccagtcctcccacgaaagcctgcccatagcccagggcggtngtagacacccgtgatcccctcctgtagtgtccagagtccaggtcccacaatgatgattagtcctaggatgctgcccaacagtccacaccagtcgtagccactgagaccct

SEQ ID NO: 254186 - DNA, 419 bp, Homo sapiens
gtcttgctctgtcactgaggctggactgcagcggcgtgatctcagctcactgcaacctctgcctcccggattccagctattctcctgcctctgcctcccaagtagctgagattacaggcgcccaccaccacacccaactaatttttatatttttagtagagacatggtttcgccatattggccagactggtctcgaactcctgacctcaggtaatccacctgccttggcctcccaaagtgctgggattacaggcgtgagccaccatgcccagccaggttaaatattaatagtagccttttttcattttcaaaggggttctgttttagatgatatgttatgtgttcagctattatactgtacatttatgttttatgcacttttatgtatttattatatgtcaaaaatgtttttaagttaa

SEQ ID NO: 254187 - DNA, 221 bp, Homo sapiens
  misc_feature (162)..(162): n is a, c, g, or t
  misc_feature (172)..(172): n is a, c, g, or t
ggatgtggctcatcgccaataatagagccagtgtcttcatgtattctcacgtggtcttaatgatcagaacgtgctctttcattctctgccctaattgaaataattctgtccctttcctcatttactttttctctgatattcttacactaccagctgggtttncactgccccnccctggcacactgctgcaccatggttaccatggttatcacacattctga

SEQ ID NO: 254188 - DNA, 471 bp, Homo sapiens
gaccggctgctggggtttgggaggggcagagattgaggagccagttgctgtgccctgttctggcaaaagaacaagatgcgttgcaagccagaatgatgaattccacttttcacgtcgcctccgtggcattctgcctaaatgatgggcatggaaatggtgctgagggatgtgggctgaatcgagaacacagggacttttgtcttcagggtgagaaatgttccggtccttaaggaaacatcgtgcagcagttgcatgggtcttccaggcgttcctcccaaaacattattttttttctttcactattgagttttaaaacttagcgttctgtcgctagcattgcatcttagttacacatcctctcccacccataacgtcaaatttaggagacgatacatccccaagctttcctgcattattttttgcagtaactggttattcagtttactttctttaaactatgtccttctcaaa

SEQ ID NO: 254189 - DNA, 300 bp, Homo sapiens
gggctgctccttgcctgttagactcaccccttccacaggaatcagtgggggccagaatgagtcctggtgtgcagtatccctgttcagggttcccagcttcctccccttcagcccagcctctgtgccttccctctgtccactctcaatgccttccctctgaagatctgctaggagtgcaccagtcttcctgatgtcttggtccctcactgggagatgtttctactggctgcatctagtaggccatcttggagcagcaatttgcatgttaaggctcagactgtttgtttgaatgcacacaga

SEQ ID NO: 254190 - DNA, 1866 bp, Homo sapiens
  misc_feature (1)..(1): n is a, c, g, or t
  misc_feature (3)..(4): n is a, c, g, or t
  misc_feature (6)..(7): n is a, c, g, or t
  misc_feature (10)..(12): n is a, c, g, or t
  misc_feature (14)..(14): n is a, c, g, or t
  misc_feature (18)..(19): n is a, c, g, or t
ntnntnnctnnnanctcnnaggcattctgaaggcaaatcctgtttagacccaggcaaaggttcctggtgacccaggctctcatgagcagattgtcccttatcattctcctgaggatgtctggagcttcagtgctgtgtgctcttggcctccacactgggggtgccaccaactcccactgtccagggcttctggtggactctccgaggcaccgatgtagaaacttacccattcagtgcaccaagagcagcctcacatggtgtgggccgacatgaagagctgccagatccaacagttctcagaattcttcatatattttggacagcagtttttccatcagattattttgtaagtattttctcccagtctgtgacttgctttttccattctcttaacagtgtctttcacagaacagaagtttttaattttaatgaggctcaacttaattttttttcattagtagattgtgcttttggttttgtatttaagaagccatcattgaacccaggatccccgagattttctcctatgttatctcctaggattcttatggttttgcacttacatttacgtgtaagatttattttataaaggatataacatgcatacctggatttatttagttttttgcatgtggttgtccagctgttctagcaccactagttggaaaggctatctttgctgttttaaattgtctctaaagctccatggaagatcagtggactgtatgtaggcctgcttctgggctccgtattcttttccatgcatctatttgtgtgtgttttctcttttcaccaacttcacactatttgggttactgtagcttaatgtaagtcctgaagttggtagtgccaaacctcagggagtttttctgaacttcatcatgagaacctggttgagatcattgtagtaaaacttggaaatgtgtaagattcccccttagtctggtcttcaaggagtttttaatgttctagccaggctaccctcagcttctagtaatctgtcaatatcatttaagtgctcctcccacttgctgtccccagtagcttctcttccctgtgacctgtgactccttatgtgttagcctgtgtttctcatttttaaggtggcagttttccctgtgacctcaattctctgatccaccctagaagggttgactttcagtttgttcagcttttttctagctgtgaggacaagtgatgagctgcctagctctttcccatgttgataatagaaacccaaaagtttgtttaaagaattacttgttataaaagtcccccattgttaatgtacaactcaatgatgtaagttgatttatcgaattgtgcagccatcagcagagttctacttcagcatattttgtcacttcccaaattcccttgaacctgtttgtagtcatttcctaatccctggtccccatgactgggtctgaatagaataaacatttggaaagcagatttcattatatttacattttcctgtgtttgggactttatatagtggactattgtgttcgttttgtgacaagtagagaagagattgcattctagggatggtttttgggggaacataatagtagtcctgtttatggctctccttgaattggttcttctgtgctggtgactggtatttgttaccaaaccttgtctggtgagcacaagaaaaggaattttttaaaatctgctattaaaattgagatgatacattttcacataataatatttggagttaagtagtgaaccgtctttattttattttatctctttttttggagatggagttatttctcttttccttgggctcgaatgcaacggcgccatctcagctcactgcaacctccacctcctgagttcaagtgattctcctgc

SEQ ID NO: 254191 - DNA, 6896 bp, Homo sapiens
  misc_feature (1)..(1): n is a, c, g, or t
  misc_feature (3)..(4): n is a, c, g, or t
  misc_feature (6)..(7): n is a, c, g, or t
  misc_feature (10)..(12): n is a, c, g, or t
  misc_feature (14)..(14): n is a, c, g, or t
  misc_feature (18)..(19): n is a, c, g, or t
ntnntnnctnnnanctcnnaggcattctgaaggcaaatcctgtttagacccaggcaaaggttcctggtgacccaggctctcatgagcagattgtcccttatcattctcctgaggatgtctggagcttcagtgctgtgtgctcttggcctccacactgggggtgccaccaactcccactgtccagggcttctggtggactctccgaggcaccgatgtagaaacttacccattcagtgcaccaagagcagcctcacatggtgtgggccgacatgaagagctgccagatccaacagttctcagaattcttcatatattttggacagcagtttttccatcagattattttaaatgtgattgataacagtaaagccacactcctcaagtgcctgaaatacccctcattgtcttcttcaggtggcaagggctctggaacagccacataaagcccttgaagataaggatggtcaaacaaaataatatcatacctggagaaactcagatcttgctaagatttactggttgggaatccaaagttaatgccaagaagcagctgccagttgggatcaaatgtgagcctatggatcaagacggttacctggcacgctggccacaatctacctcactcttatcagagtctgagcagtgctttcagctctgagttgaggcacctcgaaccttgtttttgtggtgaaggatcctaaagtgctgtggggagtgatcacatttttcacaacatccctgactccacctcttctgccacaaacgtcagcatggtggtatcagccggcccttggtccagcgagaaggcagagatgaacattctagaaatcaacgagaaattgcgcccccagttggcagagaacaaacagcagttcagaaacctcaaagagagatgttttctaactcaactggccggcttcctggccaaccgacagaagaaatacaagtatgaagagtgtaaagacctcataaaatttatgctgaggaatgagcgacagttcaaggaggagaagcttgcagagcagctgaaacaagctgaggagctcaggcaatataaagtcctggttcactctcaggaacgagagctgacccagttaagggagaagttacgggaagggagagatgcctcccgctcattgaatgagcatctccaggccctcctcactccggatgagccggacaagtcccaggggcaggacctccaagaacagctggctgaggggtgtagactggcacagcaacttgtccaaaagctcagcccagaaaatgatgaagatgaggatgaagatgttcaagttgaggaggatgagaaagtactggaatcatctgcccccagggaggtgcagaaggctgaagagagcaaagtccctgaggactcactggaggaatgtgccatcacttgttcaaatagccacggcccttgtgactccaaccagcctcacaagaacatcaaaatcacatttgaggaagacaaagtcaactcaactgtggttgtagacagaaaatcctctcatgatgaatgtcaggatgctctaaacattctcccagtccctggccccacctcttctgccacaaacgtcagcatggtggtatcagccggccctttgtccagcgagaaggcagagatgaacattctagaaatcaatgagaagttgcgcccccagctggcagagaagaaacagcagttcagaagcctcaaagagaaatgttttgtaactcaactggccggcttcctggccaagcagcagaacaaatacaaatatgaagagtgcaaagacctcataaaatctatgctgaggaatgagctacagttcaaggaggagaagcttgcagagcagctgaagcaagctgaggagctcaggcaatataaagtcctggttcactctcaggaacgagagctgacccagttaagggagaagttacgggaagggagagatgcctcccgctcattgaatgagcatctccaggccctcctcactccggatgagccggacaagtcccaggggcaggacctccaagaacagctggctgaggggtgtagactggcacagcaccttgtccaaaagctcagcccagaaaatgatgaagatgaggatgaagatgttcaagttgaggaggatgagaaagtgctggaatcatcttcccccagggagatgcagaaggctgaagaaagcaaagtccctgaggactcactggaggaatgtgccatcacttgttcaaatagccacggcccttgtgactccaaccagcctcacaagaacatcaaaatcacatttgaggaagacaaagtcaactcatctctggttgtagacagagaatcctctcatgatgaatgtcaggatgctctaaacattctcccagtccctggccccacctcttctgccacaaacgtcagcatggtggtatcagccggccctttgtccagcgagaaggcagagatgaacattctagaaatcaatgagaagttgcgcccccagctggcagagaagaaacagcagttcagaagcctcaaagagaaatgttttgtaactcaagtggcctgcttcctggccaagcagcagaacaaatacaaatatgaagagtgcaaagacctcataaaatctatgctgaggaatgagctacagttcaaggaggagaagcttgcagagcagctgaagcaagctgaggagctcaggcaatataaagtcctggttcactctcaggaacgagagctgacccagttaagggagaagttacgggaagggagagatgcctcccgctcattgaatgagcatctccaggccctcctcactccggatgagccggacaagtcccaggggcaggacctccaagaacagctggctgaggggtgtagactggcacaacaccttgtccaaaagctcagcccagaaaatgataacgatgacgatgaagatgttcaagttgaggtggctgagaaagtgcagaaatcgtcttcccccagggagatgcagaaggctgaagaaaaggaagtccctgaggactcactggaggagtgtgccatcacttgttcaaatagccatggcccttatgactccaaccagccacataggaaaaccaaaatcacatttgaggaagacaaagtcgactcaactctcattggctcatcctctcatgttgaatgggaggatgctgtacacattatcccagaaaatgaaagtgatgatgaggaagaggaagaaaaagggccagtgtctcccaggaatctgcaggagtctgaagaggaggaagtcccccaggagtcctgggatgaaggttattcgactctctcaattcctcctgaaaggacatcggtgggatcaagtgaaaaaggaggaccaagaggcaacaggtcccaggctcagcagggagctgctggctgagaaagagcctgaagtcttgcaggactcactggatagatgttattcaactccttcagtttatcttggactgactgactcatgccagccctacagaagtgccttttacgtattggagcaacagcgtgttggcttggctgttgacatggatgaaattgaaaagtaccaagaagtggaagaagaccaagacccatcatgccccaggctcagcagggagctgctggctgagaaagagcctgaagtcttgcaggactcactggatagatgttattcgactccttcaggttatcttgaactgcctgacttaggccagccctacagaagtgctgtttactcattggaggaacagtaccttggcttggctcttgacgtggacagaattaaaaaggaccaagaagaggaagaagaccaaggcccaccatgccccaggctcagcagggagctgctggaggtagtagagcctgaagtcttgcaggactcactggatagatgttattcaactccttccagttgtcttgaacagcctgactcctgccagccctacagaagttccttttatgcattggaggaaaaacatgttggcttttctcttgacgtgggagaaattgaaaagaaggggaaggggaagaaaagaaggggaagaagatcaaagaagaaaagaagaaggggaagaaaagaaggggaagaagatcaaaacccaccatgccccaggctcagcagggagctgctggctgagaaagagcctgaagtcttgcaggactcactggatagatggtattcgactccttcagtttatcttggactgactgacccatgccagccctacagaagtgccttttacgtattggagcaacagcgtgttggcttggctgttgacatggatgaaattgaaaagtaccaagaagtggaagaagaccaagacccatcatgccccaggctcagcagggagctgctggctgagaaagagcctgaagtcttgcaggactcactggatagatggtattcgactccttcagtttatcttggactgactgacccatgccagccctacagaagtgccttttacgtattggagcaacagcgtgttggcttggctgttgacatggatgaaattgaaaagtaccaagaagtggaagaagaccaagacccatcatgccccaggctcagcagggagctgctggctgagaaagagcctgaagtcttgcaggactcactggatagatgttattcgactccttcaggttatcttgaactgcctgacttaggccagccctacagaagtgctgcttactcattggaggaacagtaccttggcttggctcttgacgtggacagaattaaaaaggaccaagaagaggaagaagaccaaggcccaccatgccccaggctcagcagggagctgctggaggtagtagagcctgaagtcttgcaggactcactggatagatgttattcaactccttccagttgtcttgaacagcctgactcctgccagccctacagaagttccttttatgcattggaggaaaaacatgttggcttttctcttgacgtgggagaaattgaaaagaaggggaaggggaagaaaagaaggggaagaagatcaaagaagaaaagaagaaggggaagaaaagaaggggaagaagatcaaaacccaccatgccccaggctcagcagggagctgctggctgagaaagagcctgaagtcttgcaggactcactggatagatggtattcgactccttcagtttatcttggactgactgacccatgccagccctacagaagtgccttttacgtattggagcaacagcgtgttggcttggctgttgacatggatgaaattgaaaagtaccaagaagtggaagaagaccaagacccatcatgccccaggctcagcagggagctgctggctgagaaagagcctgaagtcttgcaggactcactggatagatggtattcgactccttcagtttatcttggactgactgacccatgccagccctacagaagtgccttttacgtattggagcaacagcgtgttggcttggctgttgacatggatgaaattgaaaagtaccaagaagtggaagaagaccaagacccatcatgccccaggctcagcagggagctgctggctgagaaagagcctgaagtcttgcaggactcactggatagatgttattcgactccttcaggttatcttgaactgcctgacttaggccagccctacagaagtgctgtttactcattggaggaacagtaccttggcttggctcttgacgtggacagaattaaaaaggaccaagaagaggaagaagaccaaggcccaccatgccccaggctcagcagggagctgctggaggtagtagagcctgaagtcttgcaggactcactggatagatgttattcaactccttccagttgtcttgaacagcctgactcctgccagccctacagaagttccttttatgcattggaggaaaaacatgttggcttttctcttgacgtgggagaaattgaaaagaaggggaaggggaagaaaagaaggggaagaagatcaaagaagaaaagaagaaggggaagaaaagaaggggaagaagatcaaaacccaccatgccccaggctcagcagggagctgctggctgagaaagagcctgaagtcttgcaggactcactggatagatggtattcgactccttcagtttatcttggactgactgacccatgccagccctacagaagtgccttttacgtattggagcaacagcgtgttggcttggctgttgacatggatgaaattgaaaagtaccaagaagtggaagaagaccaagacccatcatgccccaggctcagcagggagctgctggctgagaaagagcctgaagtcttgcaggactcactggatagatggtattcgactccttcagtttatcttggactgactgacccatgccagccctacagaagtgccttttacgtattggagcaacagcgtgttggcttggctgttgacatggatgaaattgaaaagtaccaagaagtggaagaagaccaagacccatcatgccccaggctcagcagggagctgctggctgagaaagagcctgaagtcttgcaggactcactggatagatgttattcgactccttcaggttatcttgaactgcctgacttaggccagccctacagaagtgctgtttactcattggaggaacagtaccttggcttggctcttgacgtggacagaattaaaaaggaccaagaagaggaagaagaccaaggcccaccatgccccaggctcagcagggagctgctggaggtagtagagcctgaagtcttgcaggactcactggatagatgttattcaactccttccagttgtcttgaacagcctgactcctgccagccctacagaagttccttttatgcattggaggaaaaacatgttggcttttctcttgacgtgggagaaattgaaaagaaggggaaggggaagaaaagaaggggaagaagatc

SEQ ID NO: 254192 - DNA, 429 bp, Homo sapiens
ttaccccacctgccacgaaggctcagtcctccccagtgcaatgacccagccctgctggcttccctgtgtgcccttggagtgccctgtctcccagggttcatgctcagggtttgtttcagactcctgggtccagtcagcagcctctgcctgctaatggaacaagcacactgctctcctacctgtgaggtacttggggtgagaagtctcgtcacctcttttaagttagcagacgtgctggctttcccgggctcagacagcagagagacgtgcattgtgttttgttgtaatgcactgtgaacacctgggtgtgagggtgcacacccacagtcccactgactctggaagccgaggctggtggatcacctggtcctgggagtttgagtccagccttggtaacacagcaagaccgttgtctcttaaaaaaaaaaa

SEQ ID NO: 254193 - DNA, 534 bp, Homo sapiens
cttacctgttaaatggggaacacgatagcatatcacttacaatattcagttaacatctataaaccgcttaaaataactgtcatgtattaatgacgagaattcgttctaaaagaaaaaagccatacatttctgaaatttaaggtgcccccagtattcagtacagtatgatgctgtacaggtgtgtaacccagaagcaacgggctgtaccatagagtccagatgtgtagtgggctgttctgtccagtctactctctgaaggttgttctaagggtctgtgaaagcaacaagaggaagttcttgtaggccgaaaaaggaaaaaaagaaaaagaaacagaggatgagaggagtcctcttctccttaaaacttcctcaaacctgaccatcataatgacctcctgtatatacaaatattcatattgcacatcatatttccaaagaggctaattttcaggtctgctattgtggttcaaatttaatcattccaaatatgatttgatagctgttaataaaggtgtgataccacctagaaaaaaa

SEQ ID NO: 254194 - DNA, 228 bp, Homo sapiens
ccattccttccttggcccctcccacctccctcccagggtgatgtctgcttggctggtcatggtaggcagcctgtgggatggcccccagtgctctctgcccatatgtaattcatctccttgaatatgggctgcatttagcaactcacttctaatgaatgacagcagtgatgggagcactctgagactaggtcattaaaagattgtggctcgtattgtgaaaactctctg

SEQ ID NO: 254195 - DNA, 275 bp, Homo sapiens
cctcagactctgccttcagacagtgtcctgtgccctgcaaagcctctagatccatagactcatgttagcattgcagccacccttggccattggggtaaatgctcctatgtccattttactgagaggaaagccaaggctcagagctcacgagggacggagacaaccccaagcctagccagaggccaacaagccttcctccttggtggttttccacacctgtcatttctgtccccttccctggggcctacaggagcccttgggtggccactagggcc

SEQ ID NO: 254196 - DNA, 470 bp, Homo sapiens
aaggatggctagtcaggttcttctcatgggactgagcaaacaaaatgctgataatgtggcaggtggtgtagtagttgaagataataggatgtaaatagataccatgaggtagtgttcaagtaacagagtgccctgtgtaagaggaagttatgagtttgcagaaagtgtgagaaaggtagcatatatgggtaacagtggtgggaagagaagaaggaagacacagaaacagataggaagagaaactgagtagcattgatgttggagcacacctgtggccaaggtggcacattttccttggatacacactaaccctggtgtttctgtccttataaggctgactgcaccctagatgacgggttgatgggtgcagcaaaccaccatggcacatgtatacctatgtaacaaacctgcatgctgcactttctttcatgtatcccagaacttaaagtaaaataaaaaaataaataaat

SEQ ID NO: 254197 - DNA, 473 bp, Homo sapiens
cagatttgtctggctttatctctaaccactttgtgactctttttgtaacttgcatttttctaaaaatgtgaccttgtttggtcttcctactgttggccatgctgtttttccttctctccacatctttttatcaatggtgcaaattataaattgtattcaaatttactgtaaagatcatgtcctctagacagcccctatcccacttgtataacccttgctcttcagcccctttcacacctgcataggtattcttctgctgtgatgatcctttgaataattctcttggagttctctttaccaggctctcttgcagcaactggtgagctcatgtaggctatcactgggtctctgcttatttgccagtgcctgcaggtcctcagtacctgtttgctgaacaaacgaatggtctgtcagcttaacccaactctgtatgtagaaggcacttaataattcttaaaaacaattttgattct

SEQ ID NO: 254198 - DNA, 691 bp, Homo sapiens
tcggcttcccaaagtgctgagattacaggcatgagccaccatgcctgacctgaggacttaattttggaagtgaggatgtacatgcgcgtgggctgattcaatcctcatcaccgctctatgacatagggataaactatggttcccactctgcagatgaggaaccccaggctccaggaggggatgcattgtgtgctgtgttacagcggcagggcaggactgagagctacttggggttggaggggtgggcaggagagctgctgcccaactcattcaggcacccccctccctacttcactccccagtcttcctttggttcctggtctctccctacccctccagaggactagcactttccccagcagtgtttggggtagatccaaggtcccgaagttcctgccacaggcactgtctgcgtgataggaaaggaaatctctgtccttcccctcggtgcccaacctcccgttggctaagccggcacctgggcgggcaagagggtagaatgaggctattcagagagttttcctgatgcaataactgattgcaaaacccttgcatccctgagcgttttatggaggttggtaattctaagtggcaccaggaaatcccaaacttacccagctgccagaacacagcccttcaggtcaaaccacagggaagaacagttaccccaaggctaggcgtcagagaaaca

SEQ ID NO: 254199 - DNA, 658 bp, Homo sapiens
tcatcaaaaacttcatactggagagaaactttacgaatgtgaagaatgtgacaaagtttacattcgcaaatcacaccttgaaagacataggaggattcatacaggagagaaacctcacaagtgtggtgattgtggtaaagcctttaattcaccttcacaccttattaggcatcagagaatccatactggacagaaatcttacaaatgtcatcagtgtggcaaggtctttagtctgaggtcactccttgcagaacatcagaaaattccttttggagacaattgtttcaagtgcaatgagtatagcaaaccatcaagcattaattgacatcagagtcaaatcagcattgacctgagtttgagttgacttaacattgatttcaagcattaatcgacattaaactgtttatgttaagaggattgggccaggcgtggtgtctcacacctgtaatcccagcactttgagaggccaagacaggtaggtcacttgaggtcatgaatttgagaccagcctggccaacagacgggagccacttttcccagcctgtatgttcttttatttatttatttatttttaagatggaatcttgctctgtcgcccacgttggagtgcagtgatgtgatctcggttcactgcaacattcacctcccaggttcatgc

SEQ ID NO: 254200 - DNA, 484 bp, Homo sapiens
tttttgtagtaaacgtccttgtgtaaataggctggcctgtttctgttagtatatccacaggttaaattcccaggattgaaaccattgagtatgggtatgtacagtttttattttgagagatgctatgaaattgttcccaaggaaggctacatcaaattatgccaacataagaaatgtttaagaggaactttctttcccctctgccctttgccatcactgggttttaccaaaacttcaccaaaatgtttccagtctcgttgaaaaaaatacttatcttattgttttcacttgctttagaaaattcagtaggtctacgcattctgttacatgtttattgttcattaaaaatctaaacatcctattcatcgtattcagccatttttttctgttgtttcttttattaatttatacgagctctttgtaaattaagaaaaccttttgtctgtttatgtattataaatatttttcctatttgaaaccaaaa

SEQ ID NO: 254201 - DNA, 569 bp, Homo sapiens
aatcctgctgggtaaggacagaagtgcaaagtcctattgccttaaggacatgccccacggcacccagtgctgggaaaactgtgagccatggaaggaaaacaaggtttgaaatgcgtggagccagaacctcgtctgtggaaaattcttccaaatttcatagttcctatatgaaagaaggctgatgacagtttctcaaattttacaacaatccagaacatttgtatggcaccgtcaacaacagattaggaagtttaactttcctaaactaccaataattaaaacacaaatttcaaccatgttaggaggaagactgaagtatcttttctctgtatggaaaatatctcccccaaaaatcacaaaatccttgtcctctgtagaggccttcagagtaagaagccagaccatgtaggggaccaaggtattagaaatatgtcaggaagttgccacaagttatgttatttttctggatttagtattgtagtatttgtcaatttaaaaaaaaagttttcaaaaaaaagtatcatcatttcttttctcattattttaattcacttccatttttgaattca

SEQ ID NO: 254202 - DNA, 331 bp, Homo sapiens
ggattacaggtgtgatacactgcacctggccaactcagaacttttaatttcctacctcagtactttgatggccatgaaagaaatggtcagttttcttcatcattctagatactttcattcagaaaaccaagaagctctacattgacagttgtgcttgaagaaacctaggctccatcaacactgaattgcaagatgtgcagaggctcatggtggccaatatcgaagaagtgttacaacgaggagaagcactctcaggtatctaaaagcaatgagtcttatgaagaaatggttctcattccattgaaccggatagcttattttgcagtgcctt

SEQ ID NO: 254203 - DNA, 543 bp, Homo sapiens
ttttccaataaggaaaaataggtataatttagtactatccaaagacatgggacacaaagttttatgtatatttatgataattctgaaaagcatagaaatgaaaaaggaccaaagaaatgcagcagagccttgatccctgcacttcacagagacgttctgcctgtctgtgagcagggacagtgatacatgattacaactgcctgagtcacttggcctaggtgtgctccccagccaggggaccagcccctcacacagctctgctgtgcagtcacttccaggaatgaagcaacagatcatatttcttcttggaaaatggccaaaagtgagagggaacctctgctgaaatctgaaaagccatgctgtggttttcatgtgcacatcgaatgtcattctactctcaacaggatccatgtaagaagggcaatcccaaatacaaacatttctaaattcttaaatataggcctggggaaggtctctagacatattcctccacgaacatcacaggtctacaataatacttaaataaaaataacaatggcgata

SEQ ID NO: 254204 - DNA, 642 bp, Homo sapiens
agctctggtacccaagccggagatgagtcagcttctctcgttagtgagcagtggatagtggagctcagactgagggactgggggcaaggagcaggggtggttgtccaagccacggagggaggagaagtgtcaccactggggacagcacagacaaatgaatgatcttgattggggttggtgaaaccccgttaacagttaatccaacgaggtggcacttgagctggggcttgaagaagtgaatatgatttcctccagcagaagggtaagtccaagggaagcatcgagggacacaagaataatgaagagtcagcaccataaggcagggcgagagcaaaataaataaataaaaaagaataatgaaaaatagttaagaatggtgcatgcagaacactgtcagcagtagtctggtgtccttcttttgtgggtaactgtctaaaaagaaaatcttttattttgttacataaagccaattcttctattttttaaatcgtttgttactattaaaatagagacaggtcttgctgtgttgcccaggctggtctcaaactcctgggctcaagcaatcctcccgcttcggcctcttaaagtgctgggattacaggcatgagccactgcccagccccttcttactctttaaattgt

SEQ ID NO: 254205 - DNA, 554 bp, Homo sapiens
ggtttcgctcttagttgcccaggctggagtgcaatggcgtgatctcggctcactgcaactcctgcttcctgggtttaagtgattctactgcctcagcctcccaagtagttgggattacaggcatgcaccaccacacccagctaattttgtgtttttaatagagacagggtttctccatgttggtcaggctagtcgtgaactcccgacctcaggtgatctgcccgccttggcctcccaaagtgctgggattataggcgtgagccaccgcgccctgccagttttcagtttccagtgtagagaccttgtataccttttgtcagatttattcctattattttatatttaggggtgttactgtaaatgctaattttaaaatttcaatttctcattgttgctggtatgtagaaatgcagttgacttttgtatattgacctgtattttgaaatagtactaaactcactaattagttctagtagctctttaaagtgactccctcagattttttacatagacagtattgctgtctctaaataaagagaattttactttttact

SEQ ID NO: 254206 - DNA, 440 bp, Homo sapiens
aactcctgattataggatgcaaaaatttcacttttgaggattaactatggtggatttttttcaacccaaatgggtgtacccttctctccagcatgttatggggctactttctaccactgccaaaatagaatgtagtagaagaattagaagaattccaagtagttttaataataactcctgggttattaaaaattaaatatctggggtaaaaaaaatcccattaaatatacatgtttgtgaagtacctcaaacatatatgtgttttacaaaattttacgtgtcattatttgctcctattagaacaagaaattgagaatgggtttcacagtgttctgttaatttgattactgtgtcctaagtggtaagtataaacctccttatgtattttgtgaagctcacttaatcaagcaaatattataaaacacactatcatatcacta

SEQ ID NO: 254207 - DNA, 949 bp, Homo sapiens
aatctactactttaaaaaattagtaatattgataaacctatatagcaagactgacaaaaaaacagccacaatcacaatatcagaaatgaaatagaggctatccatgctgatattaaaaggtaatggagaactattaggaacaagtttacctcataaattcaacaacttaaacttgaaaaccacaagctactaaacctcaaccaagatgaaacaatctgaatagccttacacacaataaataaattgaattcattattaaaaagctccaacaagctaaagaaaaatatatgatcatatcaatctatggagaaaaagcacttgaaaagatccaatactaaggtatttttttttcgttttttaaagaaagaaaaaaaaaacctcttagcaagttaggaaaggaaactatctcaacttgataaataacatcttttttaaaaaactgcaactaacatcttagttaatggtgaaagactgaatgctttctctttaagattgggaatgggtgaaggatgtctgctatcatcactcgtatttaacatagtaccggaagttctagctactgaagttctttctagcaggaaaaaaaaacgcatacatcgtgataaaaagaaataaaacaatccctatttccaggtgacatgcctttgcagaaaatcccaaagaatctaaaaaacaaaacagaaactcttagaactaacagcaaggtctgaagacacaagataaacacataaagatcagtcaatttttatatatgaacaatgaatatatggaaactgaaattagaaatgtaataccattacattcactccaaaaaaaataaaatacttagttataaacttaacaaaatgggtacagaatcctgaaaattaccaaatactgacaaaataaatcaaaaagccttcaaatcgaagaagttttcaataaataatgagacataccatgtgcaaaa

SEQ ID NO: 254208 - DNA, 301 bp, Homo sapiens
ccaagatcatgccattgcactgcagcttggacgacagagggagactctgtctcaaaaacaaaacaaacaaacaaaaaagaaacgaacaagctcagagtctccttgtccactaagggagatggagggcagtgtatgtggcttgccccacaccgacagcagcataaaaacgatgatgagcaaggcataggtatacctttttttttttttttttttttttttgagacagagtcttgctctgtcgcccaggctgaagtgcagtggtacgatctcggctcactgcaagctccgcctcccgggttca

SEQ ID NO: 254209 - DNA, 479 bp, Homo sapiens
gaacgatggtcctcagcttttgaaacatttgtgcctctattactatgtatcaggcactgaactgaatgcctagggatagaaagatgagactgtagaccctgccctcatgagctcatggtctagtatggaaaacagccatatgaacaaataaccacactataggtcttcagagctcaaatcctatcctaaatactgctaaattaatgttctgtggggttttgaaagtactagggccagagacaatatggctgcttggatgactttccatcaaagttaacattcagccttcaccaccaaaggtggtgtgtgtatgcctcttccttgcaacccaccagggcctaacacatcatatcaccacttctgaaattaggaaacaggctcagaagtccaagagcttgaccaaagtaactcagctggtatgtagcagaaccaggtcagtatgattcttcttcagtatcttgccagtaaatgggcaagtg

SEQ ID NO: 254210 - DNA, 370 bp, Homo sapiens
ttgaggcttcaggaggggagggtagagtctgcagcagggagccccaggagtcaccagcccaaagtcacccagggacaactggtgaaggaaacaggctcagaagtccaagagcttgaccaaagtaactcagctggtatgtagcagaaccagctctcatacaaagatgacctgaggacagagacagtagaggacagtgcagggtagtgcaagaagctgtggctctggggtctggtcaagatgcccctttcttctgttaggaagctttcccactcctctgcctgctttcgcatctcttccaaaatacaagtgattgcatgtgactcccttgttagagcaggctctcaataaataggctttgcttgatttcaat

SEQ ID NO: 254211 - DNA, 932 bp, Homo sapiens
attttgttaaataatgtagagctgattttttgtttagtttctcctactaattcagacagatgtgcttgcctgctgtttatttaaagcctagtaagaattgaacagggcactgtcagaaactcacgtatggcactcctcctcccttaacacacacagccttcacagaacgaccccaccccctatacattaaatttttgaccatcagatggcagctgacagcctcatctttgctgctgtggagttcccaactccaatccacaaagaaagccctgccccaagactgtctgctccatctttgggggaggcagtccaagttagaagcaggcagcagcacctctatccactgctggaaggatgccaatattgccagtatccatgggtaagaaggcattcttctgccctgtgtctctgaggtaagcacatcattgacctctaggagtcaagagggtgttagttgcctcaggaagggcactgttgattgtttttttctatttagatccattggcattataataaactgaaattactcctggttttgttattatgttcattatctgctgctaaatatatttacccatttaaatgttagggttgttattttaattaaaaattgggaatgtgagtcctggttccctaggcttatattacaatcttccttgggaatcacctacattttttttaataccgttctttaggcattcacaatgttttattcacagatggaaaagaaactggtgaaacattcacatttaaaaggcattctcaagatgctagtcaagatgtaaagttgtattcagatacaggtaaattaatatttgtataatttgattcttttagattgtggttctaaaaaacacaagtagttccctcagaatttagaagaagaaatgtgtgatttttcaaaaaaaataaaagcatgattaatacccaag

SEQ ID NO: 254212 - DNA, 1507 bp, Homo sapiens
attttgttaaataatgtagagctgattttttgtttagtttctcctactaattcagacagatgtgcttgcctgctgtttatttaaagcctagtaagaattgaacagggcactgtcagaaactcacgtatggcactcctcctcccttaacacacacagccttcacagaacgaccccaccccctatacattaaatttttgaccatcagatggcagctgacagcctcatctttgctgctgtggagttcccaactccaatccacaaagaaagccctgccccaagactgtctgctccatctttgggggaggcagtccaagttagaagcaggcagcagcacctctatccactgctggaaggatgccaatattgccagtatccatgggtaagaaggcattcttctgccctgtgtctctgaggtaagcacatcattgacctctaggagtcaagagggtgttagttgcctcaggaagggcactgttgattgtttttttctatttagatccattggcattataataaactgaaattactcctggttttgttattatgttcattatctgctgctaaatatatttacccatttaaatgttagggttgttattttaattaaaaattgggaatgtgagtcctggttccctaggcttatattacaatcttccttgggaatcacctacattttttttaataccgttctttaggcattcacaatgttttattcacagatggaaaagaaactggtgaaacattcacatttaaaaggcattctcaagatgctagtcaagatgtaaagttgtattcagatacagccccaacagaagacttgatagaagaggtaactgcagatcatccagaggttgtgaccatgattgaagagactataaaaatgtcacaggatataaactttgaacagccatatgaaaaacatgctgaaatcttacaggaagtccttggagaggtaatggaagaaaacaaggataggtttcctggtgccccaaaatatggaggctggattgtggacaactgccctattgtaaaagaattgtggatggccttaatcaagaaaggaattatacctgatttggtcatctatttatcagatacagaaaacaatggaaaatgtttatttaatagaatatatttacagaagaaatctgaaattgactctaagattttagaaagattattagaagaactacaaaagaaaaaaaaagaagaagaagaagcaagaaaagccacagaagaggaattgagactcgaagaagaaaatcgaaggctactggaacttatgaaagtgaaggcaaaaggcaagcacagattgctatgactgatgatgtgtcatggtattgttactgcaagcaattgcagtatttcaagtgaattatagactgggtgatcacatttcccaatttgtccatgagagcccaggtttatgcctatattcttgaagtctttatagtaccttttattcttaaagtgttccagtttgtatactaaataatattgttactga

SEQ ID NO: 254213 - DNA, 516 bp, Homo sapiens
actttcttgggtcagatattatcaatcatgttttattgcaagtagtattgtccactaaaattattaatggcattaatttatcagcttattttactttagccccaacagaagacttgatagaagaggtaactgcagatcatccagaggttgtgaccatgattgaagagactataaaaatgtcacaggatataaactttgaacagccatatgaaaaacatgctgaaatcttacaggaagtccttggagaggtaaaaaatctagctgggcaattcttatcagtgacttaactattactgagaaaatgttaatctaatatgtgtgtaattattttagagtcttatgatgttgaaatttgtagccttcaaattcatgtacattttgtagtcagcattgttaagtgcgaagtaccccagtgaacaactactgatgctctttggtaaattttcaattacaaacaaaattatgtaatataactttatgctttgaaattaattcttcattaaattttattgtctt

SEQ ID NO: 254214 - DNA, 525 bp, Homo sapiens
gccagggttattttctctgtctttttccacagccttgtgtggcttctactgcttgtgattctgaatatcttctatctcttattctcataaaaaggaaagcagtgtttctgtttttcacctttattgtgttttttgaaatgatttccaagtagacgagagttcaagatggactttattacaccatttctaaccagaaatatttctcttaaataagcattttagtaacaaggtcttgagtcagctaggaatagtgggtgaagatgtaaaaatacttacactgtttccatttagcaatggggctgacttggtgacataagaggatttcttgataaagaaggagaaaatcagaaaggttatatttgtgaatttcatatgttaaccagctctttgtaacttttagtaatgtatgttaacgtttaagcataaaatgtagctattttaagtatcaggaattttagaactagctttcttcctgaattgtagtaaaaatcaactatttatggaatgggaacctttgtctaaatc

SEQ ID NO: 254215 - DNA, 421 bp, Homo sapiens
aatcacagaattaacattacgttaattaattcatttgtatttttccatgaaaatgttaaaaacataagtgcaatctttgtagttgtgtattctgctgtgtcattaaatggtttttagaaagctcaaaagctgccaggcacagtggctcatgcctgtaatcccagcactttgagaggctgaggcgggaggatcacctgaggtcgggaatttgagaccagcctgaccaacatggagaaatcccgtctctactaaaaatacaaaattaaccaggcatggtggtgcatgcctgtaatctcagctactcgggaggctgaggcaggagaatcacttgaaccctggaggcagaggttgtagtgagttgatcgtgccattgcactccagcctgggcaacaagagcaaatctccatctcactaaaaaaaa

SEQ ID NO: 254216 - DNA, 418 bp, Homo sapiens
tgtgcatggaagggcactgccaatcttccacctctatttcttgccattcttccccttgcctaccacattctagcaacatcaacttgtttcccatgtatagaatatccctagaactttcctgtctctggcctttgcattttatattgtctggaacttgctttaaccagctcttgccacagttgacttctcagtttcctccttctcagaggccttctctgaccttcctaagtgccacccaccaccaggtagtctcttacacatcactctgttgattttcttcttaatgtctactccctcttccaccagaatgtaagccccatgaggggtggattcaagtctgctttggtaaccactacattgctagtgtcaggcacatcctatgccatattggttgaatcaaaggaaagatggatgtatg

SEQ ID NO: 254217 - DNA, 501 bp, Homo sapiens
tgaatacttgataataactaactgtcttactggcttttgtatttactatcagagcatatcctgtcattaagtgatgcatgactgtattttcgcagaattctgtgaatcctaaacccggcaggcatggtcacgtgggaagagaaaaatgtcatggaaacaaatttgcctttggaactaagtcacctttctgtttcctcgttcccaaattttattccaggaggcatttttccctaaggcagcccagctgccccggactgctttagattggccttgttattcccatctgtgctctacacgccacattcctgagtgtagtttattattgctttgtttcccatgtctgcctcttcatccattgaagtttatttcttctacatcttgtacactcaagatcaggcattttgccttccagaataataatcatagaaaatatcaattcgtgctagaaacaatatttttatttttataatataaccaaaataaagtgttttaagttccaaa

SEQ ID NO: 254218 - DNA, 471 bp, Homo sapiens
tctcggctcgctacaacctccacctcccagccgcctgccttggcctcccaaagtgccgagattgcagcctctgcccggccgccaccccgtctgggaagtgaggagcgtctctgcccggccgcgaccccgtctgggatctgaggagtgtctctgcccaactgccaccccgtctgggagctcttcaaggggagcatctgctgaacaggacgggtgaagtgatgggaagcaggagcaggcctgcggtcgcagtgagtacatcacattgcgtgatagggaatggggagtgtctgtgggagactggccagaggtcgtgtctttcacagatataagtgcgagagggattctggatgtgctctcagtttcgcaaggctcttaatgaacttctttgtcacctgtttgggctctgattttccattgttcagaattccatataaattacaatggaaaaataaaaaaaattaactcttgttg

SEQ ID NO: 254219 - DNA, 1862 bp, Homo sapiens
aaaagctaccagcctcacggagaaggcgcagtccctgtccacagagacacagccttgccccagttactgcccacctgcaagagatccacatttctgccctccagagctcccaaactgatgggggagagagacatcatcccccagctctgggagtttccagtctgatggaggagacagagcctgcttcggtaactctcactctgcgggggaagactcagccctatccagggagctcccacactttcaatggggaggcccacccagtggccgagcctgctgctgctcctgctgttgccggggcccccgcccgtcgccggcttggaagacgctgccttcccccacctgggggagagcttgcagcccctgccccgggcctgtcccctgcgctgctcctgcccccgagtcgacactgtggactgtgatggcttggaccttcgagtgttcccggacaacatcaccagagccgctcagcacctctccctgcagaacaaccagctccaggaactcccctacaatgagctgtcccgcctcagtggcctgcgaaccctcaacctccacaacaacctcatctcctccgaaggcctgcctgacgaggccttcgagtccctcacccagctgcagcacctctgcgtggctcacaacaagaacaatctcatctccaaggtgccccgaggagccctgagccgccagactcaactccgtgagctctacctccagcacaaccagctgacagacagtggcctggatgccaccaccttcagcaagctgcatagccttgaatacctggatctctcccacaaccagctgaccacagtgcccgccggcctgccccggaccctggctatcctgcacctgggccgcaaccgcatccggcaggtggaggcggctcggctgcacggggcgcgtggtctgcgctatttgttgctgcagcacaaccagctggggagctcagggctgcccgccggggctctgcggccgctgcggggcctgcacacgctgcacctctatggcaatgggctggaccgcgtgcctccagccctgccccgccgcctgcgtgccctggtgctgccccacaaccacgtggccgcgctgggtgcccgtgacctggtcgccacaccgggcctgacggagcttaacctggcctataaccgcctggccagcgcccgtgtgcaccaccgggccttccgccggttgcgtgccctgcgcagcctcgacctggcagggaatcagctaacccggctgcccatgggcctgcccactggcctgcgcaccctgcagctgcaacgcaaccagctgcggatgctcgagcccgagcctctggccggcctggaccaactgcgggagctcagcctggcgcacaaccggctccgggtcggcgacatcgggccaggcacctggcatgagctccaagccctccaggtcaggcacaggctggttagccacactgtccccagggcccctccatccccctgcctgccctgccacgtcccaaacattctagttagctggtaaagcaatcagaacaagaaaatgataagagtgggttagaaggtgatgaggaggctgggtgaggtggctcatgcctgtaatcccagcactttggggagccaaggcaggagaatcgctttaggctatgggtttgagaccagcctggcaacacagcaagaccctatctctaccaaaaaaacatagccaagcgtggtggcacatgcctgtagtcccagctattcaggaggctgaggcaggaggatcgcttgagcccagaagtttgaggctgcaatgagccgtgatcgggccactgccctttagactgggcaacagagcaagaccctgtctcttgaaaaaaaaagtgatgaaagagg

SEQ ID NO: 254220 - DNA, 448 bp, Homo sapiens
cgagacacagaggcacacagctggcatactccaggctcacagaccacgccggcctggcgggacacaccctaccccaaactcccaacacagatggaggcagcaacaataaagccaaacccttccagcactcagcacggaccaggcaccctttgggggctctgtccacggactcctccccacaaccagtccagctggggaaactgaggctctgggatgctaagtgggtcaggactgaattttgaggtcttgaggcacacactggggtcaccaaacagcaccctgtgcgacctagccacgtgtgattgcagggacgcccaaggccacccactgaaaaaacactgggtgacagatatagggaccctcacatgtatccccccccacagcaagcatgggaatgaaatgcatccttcaagctgggtgtgtggtggtgcccttctgtaatccgtta

SEQ ID NO: 254221 - DNA, 1239 bp, Homo sapiens
caagtgatggagatcttccccctcacctttggggagaagccggcactcaggtccgtgtacctccacaacaaccagctgagcaacgctggcctgccccccgacgccttccgcggctccgaggccatcgccaccctcagcctctccaacaaccagctcagctacctgccgcccagcctgccgccctcactcgagcggctccacctgcagaacaatctcatctccaaggtgccccgaggagccctgagccgccagactcaactccgtgagctctacctccagcacaaccagctgacagacagtggcctggatgccaccaccttcagcaagctgcatagccttgaatacctggatctctcccacaaccagctgaccacagtgcccgccggcctgccccggaccctggctatcctgcacctgggccgcaaccgcatccggcaggtggaggcggctcggctgcacggggcgcgtggtctgcgctatttgttgctgcagcacaaccagctggggagctcagggctgcccgccggggctctgcggccgctgcggggcctgcacacgctgcacctctatggcaatgggctggaccgcgtgcctccagccctgccccgccgcctgcgtgccctggtgctgccccacaaccacgtggccgcgctgggtgcccgtgacctggtcgccacaccgggcctgacggagcttaacctggcctataaccgcctggccagcgcccgtgtgcaccaccgggccttccgccggttgcgtgccctgcgcagcctcgacctggcagggaatcagctaacccggctgcccatgggcctgcccactggcctgcgcaccctgcagctgcaacgcaaccagctgcggatgctcgagcccgagcctctggccggcctggaccaactgcgggagctcagcctggcgcacaaccggctccgggtcggcgacatcgggccaggcacctggcatgagctccaagccctccagatgctggacctcagccacaatgagctgtcctttgtgcccccggacctgcctgaggccctagaggagctgcacctcgagggcaaccgcatcggccacgtgggccccgaggccttcctcagcacaccccgcctgcgtgccctcttcctcagggccaacaggcttcacatgacgagcatcgcggctgaggcttcctggggctcccaaacctgcgtgtggtggacacggcagggaatccggagcaggtcctgatccggctgc

SEQ ID NO: 254222 - DNA, 1612 bp, Homo sapiens
aaaagctaccagcctcacggagaaggcgcagtccctgtccacagagacacagccttgccccagttactgcccacctgcaagagatccacatttctgccctccagagctcccaaactgatgggggagagagacatcatcccccagctctgggagtttccagtctgatggaggagacagagcctgcttcggtaactctcactctgcgggggaagactcagccctatccagggagctcccacactttcaatggggaggcccacccagtggccgagcctgctgctgctcctgctgttgccggggcccccgcccgtcgccggcttggaagacgctgccttcccccacctgggggagagcttgcagcccctgccccgggcctgtcccctgcgctgctcctgcccccgagtcgacactgtggactgtgatggcttggaccttcgagtgttcccggacaacatcaccagagccgctcagcacctctccctgcagaacaaccagctccaggaactcccctacaatgagctgtcccgcctcagtggcctgcgaaccctcaacctccacaacaacctcatctcctccgaagaacaatctcatctccaaggtgccccgaggagccctgagccgccagactcaactccgtgagctctacctccagcacaaccagctgacagacagtggcctggatgccaccaccttcagcaagctgcatagccttgaatacctggatctctcccacaaccagctgaccacagtgcccgccggcctgccccggaccctggctatcctgcacctgggccgcaaccgcatccggcaggtggaggcggctcggctgcacggggcgcgtggtctgcgctatttgttgctgcagcacaaccagctggggagctcagggctgcccgccggggctctgcggccgctgcggggcctgcacacgctgcacctctatggcaatgggctggaccgcgtgcctccagccctgccccgccgcctgcgtgccctggtgctgccccacaaccacgtggccgcgctgggtgcccgtgacctggtcgccacaccgggcctgacggagcttaacctggcctataaccgcctggccagcgcccgtgtgcaccaccgggccttccgccggttgcgtgccctgcgcagcctcgacctggcagggaatcagctaacccggctgcccatgggcctgcccactggcctgcgcaccctgcagctgcaacgcaaccagctgcggatgctcgagcccgagcctctggccggcctggaccaactgcgggagctcagcctggcgcacaaccggctccgggtcggcgacatcgggccaggcacctggcatgagctccaagccctccagatgctggacctcagccacaatgagctgtcctttgtgcccccggacctgcctgaggccctagaggagctgcacctcgagggcaaccgcatcggccacgtgggccccgaggccttcctcagcacaccccgcctgcgtgccctcttcctcagggccaacaggcttcacatgacgagcatcgcggctgaggcttcctggggctcccaaacctgcgtgtggtggacacggcagggaatccggagcaggtcctgatccggctgc

SEQ ID NO: 254223 - DNA, 892 bp, Homo sapiens
aaaagctaccagcctcacggagaaggcgcagtccctgtccacagagacacagccttgccccagttactgcccacctgcaagagatccacatttctgccctccagagctcccaaactgatgggggagagagacatcatcccccagctctgggagtttccagtctgatggaggagacagagcctgcttcggtaactctcactctgcgggggaagactcagccctatccagggagctcccacactttcaatggggaggcccacccagtggccgagcctgctgctgctcctgctgttgccggggcccccgcccgtcgccggcttggaagacgctgccttcccccacctgggggagagcttgcagcccctgccccgggcctgtcccctgcgctgctcctgcccccgagtcgacactgtggactgtgatggcttggaccttcgagtgttcccggacaacatcaccagagccgctcagcacctctccctgcagaccacgccggcctggcgggacacaccctaccccaaactcccaacacagatggaggcagcaacaataaagccaaacccttccagcactcagcacggaccaggcaccctttgggggctctgtccacggactcctccccacaaccagtccagctggggaaactgaggctctgggatgctaagtgggtcaggactgaattttgaggtcttgaggcacacactggggtcaccaaacagcaccctgtgcgacctagccacgtgtgattgcagggacgcccaaggccacccactgaaaaaacactgggtgacagatatagggaccctcacatgtatccccccccacagcaagcatgggaatgaaatgcatccttcaagctgggtgtgtggtggtgcccttctgtaatccgtta

SEQ ID NO: 254224 - DNA, 228 bp, Homo sapiens
gggccccgaggccttcctcagcacaccccgcctgcgtgccctcttcctcaggtgccccgagggtgaccggaggggtggaggtgggcaggggagggcctgggagggtcatgaccgcctctctgtgcagggccaacaggcttcacatgacgagcatcgcggctgaggcttcctggggctcccaaacctgcgtgtggtggacacggcagggaatccggagcaggtcctgat

SEQ ID NO: 254225 - DNA, 487 bp, Homo sapiens
acaagccagtgattctccaaagtctcccattgtgatccatacagcagttggtggcttcagatgggcctctgttagaacagttaaatgcctagggctggggaccattggtgggtttaggatgaagattattcacaggaggatgacagcaagccagagcgacgctcagcctttcaccatcctctgagtagctgagtcatagctaacaaggtgtactcatgaatcctgccaaagctgctataatctcatcatggctttcaatatcccagaatattcactaggaaggccaaatgattgattaagctttatggtaaattaccaagctgaaattcttctccacataatgtccttaatggaagcccacatgccccacccacccatcttaaaggtgaaacgatcaaagctcatttcagacacccatgcagtttcaagacatgctgtttttatgcctctgctggccatctggctcaatttgccctgcctcatagga

SEQ ID NO: 254226 - DNA, 369 bp, Homo sapiens
tggctcgaactcggctcactgcaagctctgcctcctgggttcatgccattctcctgcctcagcctccggagtagctgagactacaggtgcctgccaccacgcccggctaatattttgtatttttagtagagacggggtttcgtcattttagccaggatggtctcgatctcctgacctcgtgatccacccgcctcggcctcccaaagtgctgggattacaggcatgagcaaccgcacgcgcccggccatgctttattatcttagccaaagacgtttccacctgaatgtatggattatacttaccttcctggtttgaaagacttacataattcaaaaacattattaatgatttaatagcctctagttaaag

SEQ ID NO: 254227 - DNA, 304 bp, Homo sapiens
tcctggtacgtcatctgactgaaaagtgctgtgaacctagtgtcaaggatctagaagagcgccctaggcatcctctcaagacaagtaccttccttttcacagggtcgtgctacccggaagcattccagaggctgacagagaaaggagactcaacacttcccttcgaaaagtgaaaactcagaaaaatctttatatccacccttcatccttactactgcactttaagatcttatgagttaggattttgttttgttttattaaagtttatacttattaaagtttaggccaggcacagtggctcaca

SEQ ID NO: 254228 - DNA, 318 bp, Homo sapiens
tgccaccctatccattgttcgattgtaaaatgatgcagccactttggaaaacaatttatcagttgcttaaaatgtaaaaaatagaatcgccatgtaacctagcaattctactcctagtgtctacccaagagagttgaaaacatgtccatacagaaacttgtacactcaagtttgtagcagcatggtttaatagctaaatagccaaaaagtggagataacccacacatctatgatctaatggatggctaagtagaatctggtctattcatacaatggaatattattcagcaacaaaaaggaatgaagtcctggtacatg

SEQ ID NO: 254229 - DNA, 379 bp, Homo sapiens
gtctcttatttcttcctactgtcctgcctctatataatgtcacttaattgtatatttttaaaactgttggatttgtgttataacctttgtggcttctaggcttgctgtctctgagctaggtaatttaaaagaaacagctatttacatagtgtttatttcatccttagtaaaacaaaacctgtaactgaggacattctcatggctccttccattagagttgtgctcccatcactttctctttgcccaaaaggaaatctctggctcatatttcagtctctacagtacctcttctcaccttgattttactctttcaactattgtttttattatgcactttctactccatgtcctataaaaactatggtttaaatcatttttg

SEQ ID NO: 254230 - DNA, 448 bp, Homo sapiens
gcatggctcctgaccatatgccccgctgtgtctgcagggccacacgcatgctgcgtatggtcagtcctgttccacaccttttgcagcatggctccgtagccactgtcgcagttttcagactctttttctcctacctgccagtaacgagcacagccctggacccagctctaatcaggtgaaatcacaagggacacatcttcataaagcagacctgctagagacctgagacgtgtttgtgccccttttcccctgattcgaggagtgcaggggaccgctcgggagctcctctgagactgcctctttcccttgttcctttgggtgtttgaagcctgttgcctcctgctttcccttttcttttcccttttaaaaaattctccattttttgacttagaaaaaaattatttatacgattgagatccactaattaaagccattttctggtatttgg

SEQ ID NO: 254231 - DNA, 350 bp, Homo sapiens
aacaataaaaaaaagttttatgaatggactaccagtttttgcttttttgaaaagaaatattacaataaggttatttgctcaaataaaacctacctgacactcttgcaaatgtttagggagggaaagtgtgtctccctttatatttactgtttctctctgaagccaatttcatttttttcaacatcctggccatctgcattcatataaagtggttattttcatggataattcaccttatatatgaaatataaaaggtatctggaataaattcattgcaaaattgatgttacctgttaaatcttcctagtagtttgttttcaccaaaataaaatgagtgagatttactgctt

SEQ ID NO: 254232 - DNA, 448 bp, Homo sapiens
ggattgtgattaggatgggacacatacgggagtttctaatttcctgctgtggtcctggatggtggctaaaggggattcactttacaataatccgctaagctacttcattcgactctgagggctaccataacaaaataccgcagactgggtgacttcaacaacagaaattgattttcccacagttctggaggctggaagtgcaagatctaggtctcaaatgggttgttttctcctgaagtctctttccttggctcacaaacagccaccttctccctttgtcctcacagggcctttcctctgtgcatgtgtgtccctggggtctctccctcttcttttaagaagttgccagccagactggattaagaccccccgtcaatgacctcgtttaaccctagttacctctttcaaggtccaaacatagtcatactgggggtcagggcttcacata

SEQ ID NO: 254233 - DNA, 484 bp, Homo sapiens
agcctgggcaacacagaaagaccctcatctcaccaaaaaaaaaaaaaaaagtaaaaagatacatactaaaagataatctgtaacctacgtataatcaacaagattagtatgtagatgatgcaaagaactcttataaataaaaaatactagcagacttatttttttctttattttttgagagagtcacgctctgtaactgaggctggagtgcagtggcataatcttggctcactgcaacctccgcctcccaggttcagcgcccctgaggagctgggactacaggcatgcgccactatgcctggttaatttttgtacttctagtagagacagggttctgccatgctggccaggctggtcttgaattactggcctcaactgatccatccgcctcagcctcccaaagtgctgggattacaggtgtacaccctgcccagccacaagccgatttttaaaaggtcaaatgctatgacagccattttacagg

SEQ ID NO: 254234 - DNA, 383 bp, Homo sapiens
ccaggaagctctgaaaactcaggcttggtagacagttccttttgcaatgcatgtaaaatgcttaacatgtgtagcccatccttcataaaggttagccatcaagagaagaatatcttttattcttataattacagatgacaaatgctctcttaatgctgtggggatagtggtggttatcattattggtatgtggttttattttaaaggtctatgaatcacaggtacctgaccattggttaaatgagctgtaactggatggtcattatgacccaagtgtgagggactagggctagtagatacttactatgaatgacagggaatcctcactgtgggtaactactcagagtttgtgagtgaagtgactatagtaacctgaaaagaag

SEQ ID NO: 254235 - DNA, 460 bp, Homo sapiens
gtatatacccaaaggattataaaacatgctgctataaagacacatgcacaggtatgtttattgtggcactattcacaatagcaaagacttggaaccaacccaaatgtccaccaatgatagactggattaagaaaatgtggcacatatacaccatggaatactatgcagccataaaaaatgatgagttcatgtcctttgtagggacatggatgaagtgctgcatttctaacaagctcctaaacgatgctaaatctgctggtcctcagactactctttaagtaacaaggatatagttggttttagcaatagtgacttaaagattttttgctatttttgtttttatctacccatttttgtattcactaaaatgtgttctggatgcaaacttctttaatacaaagggaaaataaattaaaagccaactttgcaagaattgaattacacacattttaaacttaaa

SEQ ID NO: 254236 - DNA, 372 bp, Homo sapiens
ccccttcaatacgaaaaaaatctacatgggcctggactttttttctttaggaaaaaaaatcaccattatctggccaggcgcgatggctagtgcctgcagtcccaacactttgggaggccgaagcgggcagatcgcttgagctcagaagttcaagaccagtctggacaatatggcaaaacccggtatctacaaaaataaaaataaataaaaataaaaattagccaagcatagtggcactgtgcctgtagttccaactacttggggggctgaggtgggaggatcacctgagcttgggaggttgaggtggtggtgaacagtgattgtgccactgtactccatccaggcgacagagtaagaccctgtctgaaatta

SEQ ID NO: 254237 - DNA, 461 bp, Homo sapiens
aagtcttttcctgattaaggaattgtcagctgaaatcatcagggatttccccttaactattttggaagaaatctgaagaatgtaatgtgttgcttggaaattaagaaatttggaataattcatgtgaacctaaatggtgaaatagaatcaagaaatgatagttttcttaaaaataagatggccaggcacggtggctcacgcctgtaatcccagcactttgggaggccaaggcgggtagattacctgaggttgagagttcgagaccagcctgaccaacatggtctctactaaaaatacaaaattagccaggcatggtggcgcatgcctgtaatcccagctactcaggaggctgaggcaggagaatcacttgaacctgggaggtggtggttgcagtgagcagagatcaggtcattattgcactccagcctgggcaacaagagcaaaactccatctcaattaaa

SEQ ID NO: 254238 - DNA, 6199 bp, Homo sapiens
  misc_feature (1106)..(1106): n is a, c, g, or t
  misc_feature (1601)..(1601): n is a, c, g, or t
  misc_feature (2918)..(2918): n is a, c, g, or t
  misc_feature (3896)..(3896): n is a, c, g, or t
  misc_feature (4695)..(4695): n is a, c, g, or t
  misc_feature (4925)..(4925): n is a, c, g, or t
  misc_feature (5392)..(5392): n is a, c, g, or t
  misc_feature (6175)..(6176): n is a, c, g, or t
  misc_feature (6178)..(6178): n is a, c, g, or t
  misc_feature (6182)..(6182): n is a, c, g, or t
  misc_feature (6184)..(6184): n is a, c, g, or t
  misc_feature (6186)..(6186): n is a, c, g, or t
  misc_feature (6188)..(6188): n is a, c, g, or t
  misc_feature (6191)..(6191): n is a, c, g, or t
  misc_feature (6193)..(6195): n is a, c, g, or t
gagggacttctgtaaggcggcacgaccacaccaaataacagcagcagagggaggtgggggagagggaaataaaggggagtcatgcttaaaatgctacagcggtgtgaaacagcagagcaaagaagcgcccccagcttctgagagccctggcccgagtcccctcccccgttagaaacagggctttgggatggtcatggagcactgccagtaactccaaccgcagcacgccggcctgctcgcccatcctccggaagcggtctcgctcgccaaccccgcagaaccaggacggagacaccatggtggagaagggctcagatcactcctcggacaagtccccgtccacaccggagcagggcgtgcagcgcagctgctcctcccagtccggccggagcggcggcaagaattccaagaaaagccagagttggtataatgtgttaagccccacctacaagcagagaaatgaagacttcagaaagctctttaagcagcttccagacacggagcgcctcattgttgattactcatgtgcactccaaagagacattctccttcagggccgactctacctctctgaaaattggatctgcttctacagcaacatcttccgctgggaaactctgctgacagtccgtttgaaagacatctgttccatgactaaagaaaaaacagctcgcctcattcccaatgccatccaagtttgcactgattcagaaaagcacttcttcacttcgtttggggcccgggataggacatatatgatgatgttccggctctggcagaatgctctccttgaaaagcctctgtgtcccaaggagctctggcactttgttcaccagtgctatgggaacgaattgggcctgaccagtgatgacgaggactacgtgccccctgacgacgacttcaacacaatgggatactgtgaagagatccctgtggaagagaatgaagtgaatgacagctcatccaagagcagcatagagaccaagccagatgccagtccacagctgcccaagaaatccatcaccaacagcacactaacatccacagggagcagtgaggcccccgtctcgtttgatgggctgcccctggaggaagaggcgctgganggagacgggtccctggaaaaggagctcgccattgacaacatcatgggggagaagattgagatgatcgctcctgtgaactccccttcactggacttcaatgacaatgaggacatccccactgagctcagtgactcttccgacacacacgatgaaggagaggtccaggccttctatgaggacctgagtggccggcagtacgtgaatgaagtcttcaacttcagcgtggacaagctctatgacctcctcttcaccaactcgcccttccagcgggatttcatggagcagcggcgcttctctgatatcatcttccatccatggaaaaaggaggagaatggaaaccagagccgagtgattctttacaccatcacccttaccaaccctctggctcccaaaactgccactgtcagggagacacagaccatgtacaaggcgagccaggagagtgaatgttacgtgatagatgccgaagtcctcacccacgacgtgccctaccangactacttctacacaatcaatcgctacacgctcacccgtgtggctcggaacaagagccgactcagggtctccacagagctgcgctatcgaaaacagccctgggggttagtgaaaacgttcatcgagaagaacttctggagtgggctggaggactacttccgccatttagagagcgagctggccaaaacggagagcacttatttggctgagatgcacagacaatctcccaaagagaaggccagcaagactacaacggtgcggaggaggaagcgtccccatgcccacctgcgagtccctcacctggaagaggtgatgagcccggtcaccacgcccacagatgaggatgtgggccacaggatcaaacatgtggcaggttccacacagacgcggcatatcccggaggacacccccaacggtttccacctgcagagcgtgtccaagctgctgctggttatcagctgtgttctggtgctgctggtcatccttaacatgatgctcttctacaaactctggatgttggaatacaccacgcagaccctcactgcctggcagggtctaaggctccaagaaaggttaccccagtctcagacagaatgggcccagctcttagagtcccaacaaaagtaccacgatactgagctccaaaaatggagggaaatcatcaaatcctcagtgatgctccttgaccagatgaaggactcgctcatcaaccttcagaacggcatcaggtcccgcgactacacgtcggaaagtgaagaaaagaggaatcgctatcattgacaaggcaggaacagggtggctgcaagaggcctgtgcaatacatgtacatagaccatataaatatatatatataaatatatatatatacagaatataaatatatatattatatacagattttaaaaaagagataatgcctatgtaccagggagaaggagcgggccctcccgcgccctgtgctggccggagcagcgttttcttatggtggagcagctgaggagggcaggaaccgcctctcagcaccgacctcccctgatctccctcctcccaccctctgttccccaccccttcccttgctggccattcttggcttttagaagggaaatgttgagccaaagttatgcctgcgaagaccctaaggtctcaaaaagaagtcttaagacggcattgcttaaggtgcttcattccctaatccccttttgatttgtttccaaaataaaagagaatcttttcttccctaccccaggcttccccaggcattctcttgggaacacagaagcatcaagggagcccagtctaaactcctagggttggccncccacttgatccggaccgtactgagtgtcagatggagaggatgcttggaaagctaggaaggctgcattgtgtggtggcaggctcccgagactcgtgttctgaaggatactctcctccatcacccctgcaccttcctccgacctgtgtagggtgtggacccagtaagggctgggaatttcttactttcccacccgctttctctctggtcttctcccaggctggatctgggcgaagtgtcactttttagtgcctaaagtcctattgtttctctgtgccctaagagcacattgtttattagccagggtggagcgttttcgaccttattaaacctcttttagtgcttctaagcaagtcaggtctgtggctctgaggccttcacttagagctgtcagtgtgatttccaggatgagtcagggtgtgctgggccctccaggatttgagagagggagagaaggcccttgccacgtccggggtgcagggtctacccacagaacactgtgagtggtgagcaccaagatgggttgccagcctcatttgctctttgaacgaaccaacattagccagtggagacgactgtctgagacagtttgcacatagaaaaagcatctgagccactggagggaaggatttggcaaaggtgcatgtgtttgggcaggaaaaggccaagtgaaatctatgccctacgggagccattcccaatcctgagtttctcagacttggcaatgggggttctggcgggggttggagtacaaatcctgctctggtctctggccccacagaggtgtaagatcattaagaagtagaaggcactagcttcaaagagtgagacattcagggccttttcagcattggcccactagcaccatgcatttatctgaattcacggggccctctgggcacattcatcatccctcatacactaactactgtttcttcatgtaatgaccaaaagagtcccaccagctccaggcagagctngtggagattcatgaaagagtcacagccagtttggcatgcagaggtcttcagtcttgcttattcttctcctgggcttcttgacacaggggcagaagaaaccccagatgtcccagatgtcccagaacatcagcccaaaagacagaagattttatcactcatctaccccaaagataaagttgtatttttttcttagaatggcctttaattccctgtggcaattacagtttttgacttttccatgtgagaataaggccttggtatttccctaagggcaggatcagaaaacaggaaggtccatgcccaggtgatcctccaagggaggagggtgaggaggctccagggcatgagctagagtggatattcctcccctagaagaggagatgggaggaaatgcagtttcatgtaatccctgtgaagagtgcctatgcccacagcccagtgggtccttgttcagttcttgtccaggcctttgggtgagggacactggtagggatcaaggctcatgggctctgagccaaagaaggaggcatggtgcagactgctggaaatctcccccttggcacagccagaagccaaaactattcccagaaagttttgaatgcaaaacttgtagattcctgaatttattccatacataattatttccttaagttatttaattattaaaggtgccacggtgggacctttgggatgacttaaaaagggttctttgttgggagtcaagtgacagagcagacctggccgcagggagttgttctgcttctgctttacctctcaggaccattcccaggaggaaaangtggcagagagggcagtactgagtatgtcagaagagccctcctggttttttagcgatttgaacccactagacaatgtgtgcacatagggaatgtcctttaagaatcatggatctcttgtaggctctctgtgttccaataattttttgactatcataccaggaaaaaaccaacaactctattcattcccaaacaaaatctcttcccccttagtcaatagcttgcgaaaganatcttaactcacccttgcagataagtcttggagtgaaacaaataaatagcattgtattcctggccatttgcctggctagttgctgtctacaagggagcatcaaaacatcactacttcttatgtaacttcttccagccagtgcttttattgttcgttttagtttactggggacacacaggagtctttctgtaatgacttatgtggtaaaatgtttgagagtttgcactcaattttaaagaatttgcagtttctaacaaggtgaagaacagctataggatctaaagttccattacagcttactgtgaaagaattgacaagactggcctcagacaagctaatcatggtgcgactctctcccttcctcatccacctctttggggacaagaggattacatctcaggccagcaagatcagctgcttgaagctctgtgtaagagcactgcactgacggtttggagacctgagcntgggtcctgacttttccattgactaagctctgtggccttgggcaagtcactccccctctctgagcttcagtatcctcctgtcacaggagggagttgggctagatcatctttaaggtaggttctagctttgacatcatcttgggggttaggccagaggctgggaagactgggtggactttctcaattgctctgccaggagggaacaagcccagaggctgaagcttcccagtatttagaggtgtggtagggcagtgtctgcattcccaggagacccagggtgattaaaatttattctttaggtggctaggagggctggggaggcccagtggaagagagagagagagagagagagagagagagagagagagatcgagcttgatgtattgctcagtattcacttagaagggtttctttctctttggcctagtttgtgaagggatcttcctttggactttctctaagttgggagaagaacattcttttcaatggagctcatcttctatctctagggtctgttcagcctttcatctatccatccttcctctttattggtagaagaaacagtggagagtagccacttctggttctagcacttctcttttgttaagatagggtttggatttagtatgaagctttggctaaaacccttgggtttgccttagaacactgacactaagaacctggaatgacatggggaggacaaagagagctcaagaggaatgctttgtgagaagtggattctctccgtgtccctgccccccacccaaacttgaactatacctnntncatnangnantancnnnaaat

SEQ ID NO: 254239 - DNA, 3051 bp, Homo sapiens
  misc_feature (668)..(668): n is a, c, g, or t
  misc_feature (680)..(680): n is a, c, g, or t
  misc_feature (683)..(683): n is a, c, g, or t
  misc_feature (2064)..(2064): n is a, c, g, or t
  misc_feature (2773)..(2773): n is a, c, g, or t
  misc_feature (2784)..(2784): n is a, c, g, or t
gcagcttcagcgaagccggagatgggcagagagcgcgcgcggcgcagcagctccagattcactgctctcccctgcagctccccgcgcccccgccgctgtcgctgcctcggtgtcccccagccccagtcgcgctcttaggacagcgccgccaccgccgcctggccctgcctgcctcctgcgccgcgcagccctcgcgagcgccccggatggcgctttacccctaggaccgatttagaatgtaataactcaaggatttgataatacagtgaagtagtataacaactgtctacgtgcttcccatgatatgttctctatattgaaaaattatgacatcaacatccaaaggaattcttcgcccatttttaattgtctgcattatcctgggctgtttcatggcatgtcttctcatttacatcaaacctaccaacagctggatcttcagtccaatggaatcagccagctctgtgctgaaaatgaaaaacttcttttccaccaaaactgattattttaatgaaactactattctggtgtgggtgtggccatttgggcagacctttgaccttacatcctgccaagcaatgttcaacatccaaggatgccatctcacaacggaccgttcactgtacaacaaatcccatgcagttctgatccatcaccgagacatcagntgggatctgacnaanttacctcagcaagctaggccacccttccagaaatggatttggatgaatttggaatcaccaactcacactccccaaaagagtggcattgagcacttgtttaacctgactctgacttaccgccgtgattcagatatccaagtgccttatggcttcttgacggtaagcacaaatcccttcgtgtttgaagtgccaagcaaagagaaattggtgtgctgggttgtgagtaactggaaccctgagcatgccagagtcaagtattacaatgagctaagcaaaagcattgaaatccatacctacgggcaagcatttggagaatatgtcaatgataaaaatttgattcctaccatatctgcttgtaaattttatctttcctttgaaaattcaatccacaaggattacatcacggaaaagctatacaatgcttttctggctggctctgtacctgttgttctgggaccatctagggaaaactatgagaattatattccagcagattcattcattcatgtggaagattataactctcccagtgagctagcaaagtatctgaaggaagtcgacaaaaacaataagttataccttagttactttaactggaggaaggatttcactgtaaatcttccacgattttgggaatcacatgcatgtttggcttgcgatcatgtgaaaaggcatcaagaatataagtctgttggtaatttagagaaatggttttggaattaaaatttttcatcacttgcacacttgataaatattttgatgagatatcatccaagtattgaggataagaagagatgcaacatactacttttgtgtcacaatttatttttatcaccctctctagggtaacgtgtatattttggtggagatttttaaaagctcagcatgagcaatcattccattcggttttaaattatcctgtatatacctaattatgtgcactggagagtaatttattcttcattatcatttgtaaacattgctttttcacatttttgtagttgtccataatgtaagcttgtggtttgattattgtttccacactgatcagctgtttaatctatttgggaaatgaagatgcacatcttaaagtatgaaaaattttcactaagtattacaatgtctagttccaactttgcatactataacagaggaagaacatgttgcgattgaattctaacctctttgactcctaagatgaatgaagtgtataactgtctctatttgatctattttttttacctgtttatcacatttgtgaaggtgaaattattcatggagtgaataagaaagatatgaagcagaactgttctattcaggaagctattagacttctcatttattttcattaagctgatttgcagctacttattctcatggncttaaattaaattattcaagtatttttaaatatccaatttgttgtgattttcagcacctgggaagtaatcccaataatactttagaaaatctaagacagttctttctgctactgatgacactcattgtcataataaaacaaataatttcctcaaataacaaagaaaaatgatacctataaatatatttataaatggtgtcatttatgaacaatgtttaattatgtatcaatttaagatttttttctgaagccctaatatttaaaatggccttattttaccatatggatataagatttggctcataatgatgagccctatcatttgatttgagttctatcatttaagagagcctaaataaaattatcatcaaggtattaaatataagacgttaaatataataaagtggggatatatagaaaacacacagtgttagcacagagtaagatctcaatgcacatttgttggatgaataaataaatgcaattgaattcccagaaaaatgattgtttcaaggaagtgacagttctactttagaagtactaattggagatgacttttatatcccattttggtaattattcatacatagcacatatgaccatgatgttcagggctttatagaaccaaataaacctaccattacatgaaaattttgaagagtatattcctgaacttgcagctgcctatagcattctcctccataaggcnagaggagagcnggatataagcagagatcgtaggtgaaaaaagatgggccattaaggattcttcaaggaaaacattcctcaaaatgatctttagtgcctttattcctttcaggccaataatccacccaaaaattagaatgttctgagacatccatttgggtctatttgtgacttattcgtattacaaattgacatcagcaaaattcaaaaagaattcagtaaaaagggcatagatccagctatccagactatcttgtgagagaataagctcaccccagc

SEQ ID NO: 254240 - DNA, 1162 bp, Homo sapiens
  misc_feature (740)..(740): n is a, c, g, or t
  misc_feature (1069)..(1069): n is a, c, g, or t
gcagcttcagcgaagccggagatgggcagagagcgcgcgcggcgcagcagctccagattcactgctctcccctgcagctccccgcgcccccgccgctgtcgctgcctcggtgtcccccagccccagtcgcgctcttaggacagcgccgccaccgccgcctggccctgcctgcctcctgcgccgcgcagccctcgcgagcgccccggatggcgctttacccctaggaccgcacatcaagatgcaaatttggatgagaggaaaactacacttctaaggctcccctgacatagtttctttggagtgcaattcagcctctctttattgagggcctatggggcaagaactgaagtgatgatggcaggcacaagaaaccttaagtttctttcactggagagctcttcagttcatccatgaagctgagtcccagattaaaaaccattgctgtggtttgtctgtattttggtgtatcaaagcagacaaaagaaaaggaaagcacctccaatccatcctaataatcatcccaccttcctttctgctttcatatgacatttatttaaaccaagctatagctgtgcttctcaaaccttacagtccatgtgaatcacctgaagatattattaaaatgcagattcttattcaatagatctgggttgggatgggagatttctaacaaactcttaagtaaactcctactctggaaaccacactttgacaagcaagggtctgtaaaactagaaagntagaggccttttagttcatggctcttaaccaagagcctgcgaatctctgggacatttatccacaggttttaggattctatgagtcccaagaaataaatgcaaaattttatatgtatgtgggtatgggcatttttttattttctggagagttaacagttattagcctttgtaagaggcttatgaagacctaattaaaataagtgggtagtgattgaatcagtcccatttttagatgagtaaactaaggtctaaggaagctaaattatctgcgaggttcacagagtttgttacaaacctaggaattgcatccaggtttctggtgcctaatncaggggctttgattgtactagactgtctttcaaactttgatttgagagaaataagtgtaataattcagtaaataaatttaataatgaaagaac

SEQ ID NO: 254241 - DNA, 2711 bp, Homo sapiens
  misc_feature (668)..(668): n is a, c, g, or t
  misc_feature (680)..(680): n is a, c, g, or t
  misc_feature (683)..(683): n is a, c, g, or t
  misc_feature (2064)..(2064): n is a, c, g, or t
gcagcttcagcgaagccggagatgggcagagagcgcgcgcggcgcagcagctccagattcactgctctcccctgcagctccccgcgcccccgccgctgtcgctgcctcggtgtcccccagccccagtcgcgctcttaggacagcgccgccaccgccgcctggccctgcctgcctcctgcgccgcgcagccctcgcgagcgccccggatggcgctttacccctaggaccgatttagaatgtaataactcaaggatttgataatacagtgaagtagtataacaactgtctacgtgcttcccatgatatgttctctatattgaaaaattatgacatcaacatccaaaggaattcttcgcccatttttaattgtctgcattatcctgggctgtttcatggcatgtcttctcatttacatcaaacctaccaacagctggatcttcagtccaatggaatcagccagctctgtgctgaaaatgaaaaacttcttttccaccaaaactgattattttaatgaaactactattctggtgtgggtgtggccatttgggcagacctttgaccttacatcctgccaagcaatgttcaacatccaaggatgccatctcacaacggaccgttcactgtacaacaaatcccatgcagttctgatccatcaccgagacatcagntgggatctgacnaanttacctcagcaagctaggccacccttccagaaatggatttggatgaatttggaatcaccaactcacactccccaaaagagtggcattgagcacttgtttaacctgactctgacttaccgccgtgattcagatatccaagtgccttatggcttcttgacggtaagcacaaatcccttcgtgtttgaagtgccaagcaaagagaaattggtgtgctgggttgtgagtaactggaaccctgagcatgccagagtcaagtattacaatgagctaagcaaaagcattgaaatccatacctacgggcaagcatttggagaatatgtcaatgataaaaatttgattcctaccatatctgcttgtaaattttatctttcctttgaaaattcaatccacaaggattacatcacggaaaagctatacaatgcttttctggctggctctgtacctgttgttctgggaccatctagggaaaactatgagaattatattccagcagattcattcattcatgtggaagattataactctcccagtgagctagcaaagtatctgaaggaagtcgacaaaaacaataagttataccttagttactttaactggaggaaggatttcactgtaaatcttccacgattttgggaatcacatgcatgtttggcttgcgatcatgtgaaaaggcatcaagaatataagtctgttggtaatttagagaaatggttttggaattaaaatttttcatcacttgcacacttgataaatattttgatgagatatcatccaagtattgaggataagaagagatgcaacatactacttttgtgtcacaatttatttttatcaccctctctagggtaacgtgtatattttggtggagatttttaaaagctcagcatgagcaatcattccattcggttttaaattatcctgtatatacctaattatgtgcactggagagtaatttattcttcattatcatttgtaaacattgctttttcacatttttgtagttgtccataatgtaagcttgtggtttgattattgtttccacactgatcagctgtttaatctatttgggaaatgaagatgcacatcttaaagtatgaaaaattttcactaagtattacaatgtctagttccaactttgcatactataacagaggaagaacatgttgcgattgaattctaacctctttgactcctaagatgaatgaagtgtataactgtctctatttgatctattttttttacctgtttatcacatttgtgaaggtgaaattattcatggagtgaataagaaagatatgaagcagaactgttctattcaggaagctattagacttctcatttattttcattaagctgatttgcagctacttattctcatggncttaaattaaattattcaagtatttttaaatatccaatttgttgtgattttcagcacctgggaagtaatcccaataatactttagaaaatctaagacagttctttctgctactgatgacactcattgtcataataaaacaaataatttcctcaaataacaaagaaaaatgatacctataaatatatttataaatggtgtcatttatgaacaatgtttaattatgtatcaatttaagatttttttctgaagccctaatatttaaaatggccttattttaccatatggatataagatttggctcataatgatgagccctatcatttgatttgagttctatcatttaagagagcctaaataaaattatcatcaaggtattaaatataagacgttaaatataataaagtggggatatatagaaaacacacagtgttagcacagagtaagatctcaatgcacatttgttggatgaataaataaatgcaattgaattcccagaaaaatgattgtttcaaggaagtgacagttctactttagaagtactaattggagatgacttttatatcccattttggtaattattcatacatagcacatatgaccatgatgttcagggctttatagaaccaaataaacctaccattacatg

SEQ ID NO: 254242 - DNA, 2995 bp, Homo sapiens
  misc_feature (668)..(668): n is a, c, g, or t
  misc_feature (680)..(680): n is a, c, g, or t
  misc_feature (683)..(683): n is a, c, g, or t
  misc_feature (2008)..(2008): n is a, c, g, or t
  misc_feature (2717)..(2717): n is a, c, g, or t
  misc_feature (2728)..(2728): n is a, c, g, or t
gcagcttcagcgaagccggagatgggcagagagcgcgcgcggcgcagcagctccagattcactgctctcccctgcagctccccgcgcccccgccgctgtcgctgcctcggtgtcccccagccccagtcgcgctcttaggacagcgccgccaccgccgcctggccctgcctgcctcctgcgccgcgcagccctcgcgagcgccccggatggcgctttacccctaggaccgatttagaatgtaataactcaaggatttgataatacagtgaagtagtataacaactgtctacgtgcttcccatgatatgttctctatattgaaaaattatgacatcaacatccaaaggaattcttcgcccatttttaattgtctgcattatcctgggctgtttcatggcatgtcttctcatttacatcaaacctaccaacagctggatcttcagtccaatggaatcagccagctctgtgctgaaaatgaaaaacttcttttccaccaaaactgattattttaatgaaactactattctggtgtgggtgtggccatttgggcagacctttgaccttacatcctgccaagcaatgttcaacatccaaggatgccatctcacaacggaccgttcactgtacaacaaatcccatgcagttctgatccatcaccgagacatcagntgggatctgacnaanttacctcagcaagctaggccacccttccagaaatggatttggatgaatttggaatcaccaactcacactccccaaaagagtggcattgagcacttgtttaacctgactctgacttaccgccgtgattcagatatccaagtgccttatggcttcttgacggtaagcacaaatcccttcgtgtttgaagtgccaagcaaagagaaattggtgtgctgggttgtgagtaactggaaccctgagcatgccagagtcaagtattacaatgagctaagcaaaagcattgaaatccatacctacgggcaagcatttggagaatatgtcaatgataaaaatttgattcctaccatatctgcttgtaaattttatctttcctttgaaaattcaatccacaaggattacatcacggaaaagctatacaatgcttttctggctggctctgtacctgttgttctgggaccatctagggaaaactatgagaattatattccagcagattcattcattcatgtggaagattataactctcccagtgagctagcaaagtatctgaaggaagtcgacaaaaacaataagttataccttagttactttaactggaggaaggatttcactgtaaatcttccacgattttgggaatcacatgcatgtttggcttgcgatcatgtgaaaaggcatcaagaatataagtctgttggtaatttagagaaatggttttggaattaaaatttttcatcacttgcacacttgataaatattttgatgagatatcatccaagtattgaggataagaagagatgcaacatactacttttgtgtcacaatttatttttatcaccctctctagggtaacgtgtatattttggtggagatttttaaaagctcagcatgagcaatcattccattcgcattatcatttgtaaacattgctttttcacatttttgtagttgtccataatgtaagcttgtggtttgattattgtttccacactgatcagctgtttaatctatttgggaaatgaagatgcacatcttaaagtatgaaaaattttcactaagtattacaatgtctagttccaactttgcatactataacagaggaagaacatgttgcgattgaattctaacctctttgactcctaagatgaatgaagtgtataactgtctctatttgatctattttttttacctgtttatcacatttgtgaaggtgaaattattcatggagtgaataagaaagatatgaagcagaactgttctattcaggaagctattagacttctcatttattttcattaagctgatttgcagctacttattctcatggncttaaattaaattattcaagtatttttaaatatccaatttgttgtgattttcagcacctgggaagtaatcccaataatactttagaaaatctaagacagttctttctgctactgatgacactcattgtcataataaaacaaataatttcctcaaataacaaagaaaaatgatacctataaatatatttataaatggtgtcatttatgaacaatgtttaattatgtatcaatttaagatttttttctgaagccctaatatttaaaatggccttattttaccatatggatataagatttggctcataatgatgagccctatcatttgatttgagttctatcatttaagagagcctaaataaaattatcatcaaggtattaaatataagacgttaaatataataaagtggggatatatagaaaacacacagtgttagcacagagtaagatctcaatgcacatttgttggatgaataaataaatgcaattgaattcccagaaaaatgattgtttcaaggaagtgacagttctactttagaagtactaattggagatgacttttatatcccattttggtaattattcatacatagcacatatgaccatgatgttcagggctttatagaaccaaataaacctaccattacatgaaaattttgaagagtatattcctgaacttgcagctgcctatagcattctcctccataaggcnagaggagagcnggatataagcagagatcgtaggtgaaaaaagatgggccattaaggattcttcaaggaaaacattcctcaaaatgatctttagtgcctttattcctttcaggccaataatccacccaaaaattagaatgttctgagacatccatttgggtctatttgtgacttattcgtattacaaattgacatcagcaaaattcaaaaagaattcagtaaaaagggcatagatccagctatccagactatcttgtgagagaataagctcaccccagc

SEQ ID NO: 254243 - DNA, 433 bp, Homo sapiens
cagaagtgaaggttgttccctctgttttaattcactggggtattacatatattaaaaaatcatagaatattagaccttcatatgaactacaagatacaagtccagttccctctatttacagaaaaatctgtaacttgcctaagatcacaaaacagattagagaagaaagagggccaagaagccaggattcagctctactgttgttttgtctctctacattgcatgctgcttgtccaaaacaagcaccccaggatttatgagaatcacccttgtgtatactttggagtactattcaagttttccattctttttggatatttgtttttaagcagagtttgcaaatactactagtataaatataggtatgcttcactttatgtaatttattttcctaatgacaggatctaaatcttttcctcaaataattatcatc

SEQ ID NO: 254244 - DNA, 429 bp, Homo sapiens
actcttgatgcttgctgtctacttaccttgggcaaactgcttcatctgtataagcctcctctgtgtcctcatctgcaaaatgggtttgagagttccaacctccccaagttgctgtgatgaccgatagacataatgcatgttaaggatcatacatagagcatagcatgatgtggtgaatagtcaccaaattgtacttacttgtttttaaataaggaaactcacattcatatggtttaaaaaaaagatcaagagttcagtgatagggccacgatgagtggattataaaaatgggctttcataccccagtagatttgaatcttgccagactgttctaccaacctaacttaaacacatacacacacacacacacacccctacatcaaggaggaaaggaggcattttcaaatccacgactctccccacttgcca

SEQ ID NO: 254245 - DNA, 370 bp, Homo sapiens
gccaagaaagtgttttctaatgctaactctggagatttgctcaaatcaaggtgacttccctatctgtcagaattttaagattcatttaatgactgtgttactttctccagagagggataaggaattgggccatgtggtcatgaagtttgagaagtctcaagatttacaagttggagaccgtggagagctgatgatgtgttgcggcatgagtccgaaggaccgagcattaggagagccgatggtctaatttccagtttgagtccaagtctaaaggcaggaaaagaccaacgtcccaatgaccatcaggcagagccagtgaattctctcttaccctgtcttttgttctagtcaggccttcaatggcttggat

SEQ ID NO: 254246 - DNA, 261 bp, Homo sapiens
aggttgcagggcctggttctctgcgtcttcctcagttctctgcctcatctgacccactgaatagctctcatgtttacatagtgtactatgtgccatttcattcctaacttctcccctctcgaatcagtgataatccattgtttttatcatcactatatctatgggttttgttgacgagacctgattaaccctaaaaagtcattacactgcacaagtaaagcagtgttggggtggactgttatctagatgtgtattttcctt

SEQ ID NO: 254247 - DNA, 10141 bp, Homo sapiens
  misc_feature (2130)..(2130): n is a, c, g, or t
  misc_feature (3450)..(3450): n is a, c, g, or t
  misc_feature (4715)..(4715): n is a, c, g, or t
  misc_feature (10133)..(10133): n is a, c, g, or t
aggaagaagctggagacttggtccagccgggcatcagctttccggggccggcagaggaggatctagacccgcagtactcatggtcgcccacgcagcacttcaatgaggagcgctactcgcccgcgcccaggagcatgaagggcctttccggaagtcggacccagccgccgctgtgttccgggcacacgtgtggtctggcgcccccggaggactgcgagcacctgcaccacgggcccgacgcgcggccgccctacctgctgagccccgccgacagctgccccggggggcgccaccgctgctcgccgcgcagctcggtgcactcggagtgcgtgatgatgccggtggtgctgggcgaccacgtgtccagcagcaccttcccgcggatgcactacagctcgcactacgacacgcgcgacgactgcgctgtggcccacgcgggcgccaagatcaaccgcatcccggccaacctgctggaccagttcgagaagcagctgccgctgcaccgggacggcttccacacgctgcagtaccagaggacgtccgcggccgccgagcagcgcagcgagagccccgggcggatccgccacctggtacactccgtgcagaagctcttcaccaagtcgcactcgctggagggctcctccaaaagcaacgccaacggcaccaaggcggacggccgggcggacgaccaccaccacgcccaccacgccaagcacagcaagaggagcaagagcaaggagcgcaagccggagggcaagccccggcccggcatgagcagctggtggagctcggacgacaacctggacagcgacagcacctatcggacgcccagcgtgctcaaccggcaccacctgggccccgtggcccactgctaccccgacgcgctgcagagccccttcggggacctgtccctcaagacctccaagagcaacaacgacgtcaagtgctcggcctgtgaggggttggcgctgacgcccgacgccaagtacctgaagcgcagctcctggtctacgctgacggtcagccaggccaaggaggcctaccgcaagagctcgctgaacctggacaagccgctgctgcaccaggacgccaagcccgccctgaggccgtgccactacctccaggtacctcaggatgagtggggagggtaccccaccggtggcaaagatgaggagattccctgcaggagaatgagaagtgggagttacattaaagccatgggggacgaggagagcggagagtcagactccagccccaagacatcaccaaagtcggcaatcctaccagagccgctgctgaagtccatcggacagagaccgcttggagagcaccagacccagacctacctgcaagctgcaagcgatgtgcctgtgggacacagcctggaccccgctgcgaactacaactccccgaaattccgctcccggaaccagagctacatgagggccgtcagcaccctgagccaggccagctgcgtgagccaggtgagcgaggcggagatcaatgggcaattcgagtccgtgtgcgagtccgtcttcagtgaagttgaatctcaggccatggatgccctcgacctcccgggatgtttccgaacaaggagtcacagctaccttcgagccattcaagccggctactcccaagatgacgaatgtattcccatgatgacaccctctgacatcacctccaccatcaggtcaacagcagctgtctcatatacaaattacaagaaaacgcccccaccggtgccccctcggaccacctccaagcctctgatctcggtgacggcgcagagcagcaccgaatccacccaggacgcctaccaggacagccgcgcacagaggatgtccccgtggccccaggacagccgcggcctctacaactccacggacagcctggacagcaacaaggccatgaacctcgcgctggagacggccgctgcccagcgccacctgccagagagccagagcagctctgtgcggaccagcgacaaggccatcctggtgtccaaggcggaggagctcctcaagagccgctgctcctccatcgggattcaggattctgaattcccagagcatcagccatacccaaggtcagatgtggaaacggccacagattctgacacggagagcngcggtctgcgggaataccactctgtcggggtgcaagtggaagatgagaagcgacacggacgttttaaacgttctaacagcgtcacggccgccgtccaagctgacctggagctggaggggttcccaggccacatcaccacggaggacaaaggccttcagttcggctcatccttccagcggcactccgagcccagcacccccacccagtacagcgcggtgagaactgtacggacccaggggctcttcagctatagagaagactatcggacccaagtggacacctccaccctgccccctccagacccctggctggagcccgccatcgacacggtagagactgggaggatgtctccgtgccgcagggatggctcgtggtttttgaagctgctgcacgcagagacaaagaggatggaaggctggtgcaaagagatggagagagaggcggaggagaacgacctctcggaggaaattctcggtaaaatcaggagtgctgttgggagtgcccagcttctcatgtcccagaaattccagcagttttattggctttgccaacagaatatggaccccagcgccatgccgaggccgacgtcgcaggacctggccggctactgggacatgctgcagctctccattgaggacgtcagcatgaagttcgacgagctgcagcggctgcggctcaacgactggaagatgatggagtccccggaaagaaaggaagaaagaaaggtcccgcctccaataccaaagaagcctcccaaggggaagtttcccatcacaagagaaaaatccctggacctgcccgacagacaacgccaggaagcccggaggcgcctcatggccgccaagcgagcggcgtccttccggcagaattccgcctccgagcgcgcggacagcatcgagatctacatccccgaggcccagacccggctctgagggcggaggccggcgccttcccctcgtcgcttccgctttcccggacgcttgtgcagcgcggcgccgccctggtggtttctgtctcctcctcccgctgaacacgtcctcgctcccgcgctccccgcgccccggacacagcgggacgcggccggcggcctcagagtccacggagctcgcggcgaggacgacttctgcttttgttgttgttgttgttgttcacgggtggcctggctcacacttggctctgagggacaggtgtggcgagacctgatttctcctgcgtgttctcagaggacggcgagaaatgcctctggagctggaacccagcttacattttgttatttctatttttataaattgtgtgataattagaggtaagaataacaantaactataaacgggtgcatcccaccactccctggaggcattagacacccaagtggaaggtgctacaacctgaagcgcaggaaagaaaggcccattcccctcgcacagccgagcttttactccctgagcacgggccgctccgctcccctgctcctgtctgtctcggacagaaaacacgaggctccttgtgtcaagcttcctgtgatggaaagcgacctctccaaccaccacactccccgccgtacagttctccagaatcccaggcgatgacaagtctgaacccacgaaaatacccagcgcagcatctacacattcaaaagataagctgagtgttcccaccaggaagtcacgcgcagagaggagagtcttacggagggctgggagcttaaaaggaaaacaatgtccttacttgtaaacagttattgtattttttatttctttctaacttaaaatacgacacccagtattttctttaagtttcaccatttacgctacatgtgatttttttaatgtatgtatatatatatattctcaaattgctctatcagctgacttttcagggtatccttaaaaaaaaacacacacgaaaaacaaaagtttgcttgtttaaaatgacagttgtgatgtaaaaagtttaagaaatatgaatgtgagtggtaagtatatctcagtttaaatggtaaagaagaaatgtagtttacatttgtatttttccagaattcttttgtcctatgcagtattgctaaagtcgagaatatattccttgcctgtgttagacatgaagggaaaaagaggtcacatattgtgatttccagctgtagcattcaaaaaaaaaattggtgttcatgactctgtggtcggtgccagaggaaaataggaacgactctaattaataggctttctgtgtatataattaaatttagctgctgcaaccattgttctgacacgacttctgtttcacagttcagaccggtcttcaaaggaaaagcctgtccgatttttccatgggttccagtttcagagttctcattattactcaaagtaaaagcggactgcgatttaagatgtttccaccccaatacctggtcttccttcccggcttaaggagtaccatgtacttagccacaggcagaatagctttcgatgaccccatagcactttgtttcttcaccttgatttgcactttacaatgtccccagcccctctgcagcccgtggctggcagggcgttcgatgtgcggttggcccccagcgcgccctccagagntgcggtgtctccctgcctcattccccacatcccactgagcatgggaccattgggagcagagctgatattaaagcatgtttagcttcgaagttttacttttttaaagctgagtagttaagaattccctgtaaaaacaaaaccctgtaaattgagcctcatgtctggtatatattttaccaaacagccttaaaatatatttggaagcaaaaatcagtacgaatgtatctccttgaaaaatgcaaaaaaaaaaaaaatcctggaatatcttctataatgaatcctaattccccccagagtgttcaaggcattttttttaactaatgaatacctaaatcttgagtagtgtacggtaatgacgcttcttccctatatccactcttattatgttaaaacaaatgtatttgcgagtattggcattttaggactttaaaaatgctgtatgatttccaggtgaactctgctgtttagaagtaaccacagaaaagcaaagtcagtgtacactctgagtgaaaggaaatgtaatgtggataaaggcccgccacctcctcacattggtctatctactggcagctgatacgtttaactcatttccttgagcttatacaaaacatagaaaagcaaactgttaaagtagtcaataattatttgtctcagatcccagattctatgatccctgcttaaaagaaaatgttcactgcatgtaggttgatttcttatgttttgtagactcattgttatttttcaatccccaaaagtcttggcctaaaccatccctaggggagcagattaacctaccaatacattgcacagggttggtgactcgacgtggtgaatgtgcacacgccctgcctggtccgccatgttccaaagaagatgatttaatggtagaacggatacctgctgctagacctgatggaatgttacctgtccgtgttacataatcaagtgcaatatactcagttctcatgcaggtgacattctaccatgaaacgcagaagataagccatgtttctgtattgtacatgtaaagaaaaataaaactgtttatgatacttgtgttagtcactcgagctagcttatttcagccacttctagcagatcatgccatggagctcacgacgtgtgaccatttcgtcatatttaaaatataacttcaagaaaagagtaaacatccattggagaacacggctgaaaattattgtgctgttctaggaacatcatcctagagagtgtgatgttcactataaccccatacctacattccctaatgatacagccaatgacaggtgaaacccagacactctccttagagccgacaggttgatcctgctgtgttgaaggctgtggttaataaaacacaagtatgataaacaggacctagcgtttagcccgggaaaggagaatgctgcttgtcacctagagtgctttccttgtgatgcgtctctcgcatcttcacgtgttgttgtgtttgaagtaaaactagttgttatcgatgacaatttttaccatagttttctcagcaaatttatatcaccatcttagaatggtatataaaaaaattgaactgtttatgataccaaaaaaattacagttttgtttaaaaggaaatgttgatgttttcaactccaaatcaattctaaaaacttcaagcacttaatggaaaggtaaatggtcagataaaaatataattacctgtaaggttatctggttttaaaagaaaaaaaaaaagcctacaaactcagtgacctactacgcagagggaatttttccctgctgcttcttatgaaagtggccaggtttattattagaagacacagtggcagagcacacatgtgcacaggttctgattatttctcttggagcatatgtccttgtcttgatttttgccttttcgatgccatattaagcagccaccgtttccacccctttcattagaaggccctgcatccgtaaattcgcgcatctctgtttttgttagatccttgtaagcatcgctacccgagtccaggatggaatttcacaggaaagtgaagggatactgcaggcctgtgtttgcagcgcctgtggtaactgtggaatgagctctgttagggacagttgtctggtttgtgccaaaccttcgaggggcgagtagggagtgggggaggtgggtccaagtctcccctcaggaaggccttttctatcggcagcaattccatcaagccaagcctcctgtggtcctgagcatgaaggggccaggggacctcctgggagatgcagcttttgtttccgctgcgtttcatcagtcagccttgcttggaattctggcaggttccccggggtgtttcagtggacaggaggcccccgtgccgtggctgagtcagcctgggtaccccagtcaccagcagggccacccttgatgacagggccccccacgaacctgggaaaggcagcgggaaatgtgtgagagggtgtgcgctggtacggacataaaagcattgtccaaaacagcgctggttcggggagggcccctggatactgcctttggcccacactgaaaactgaaattgccccacctgtgagcacagaaacacgcttctccaacacgggccgaaataactaaactccacatggttcctgcctgctcatttcccagccctcttcttctcaagcctgaacttcatttttttttttagctgcaaatttaacaggctaatttaaaactgcagttttcagacgacagcccctgggaatgttccagggttctcttgttttgatctgcatgtctgtttacacttctctgtaggcgtgggttgaatacaagtttccaaaactttaaaatagaaaaccacgagcttaagaggtgaaaaagatgacccctttctgattaggatctgtaactctgtgggctgggtcaatgcagtgtgcttcattcagggccatgtggcagccatgacacacaccacataaggtcagctcagagcccatggcttccctgcaggagccccatcttgtcgctattagttgggagttgcaatacattgttggccataaacaaagtgctaaaggaaagggtttgcttctacacattcggctgaatgtcccccagtgcagggtggcagcagaatgttctggaaatgaaggagatattgctaggaatctctaggctgttaggcaacctggcttttattcatcctcagccggcaactcatctcaagtttatgtctcagtttttttcctctagaaaggggattacagttcctgtccctgtcttcctccaggacacactgtgaggattaatgacatattggctctaaagtcctttgagctcctgggaacaggtggtgaaagtgtgcgttactgctaaggattagtcctggctcttctagaatgccgccctcccagctctgcagggcacgctgccagaatccaggctggtcgtaaacatctcagagataatcagggaccaccagaggcagaggccatgagactgtctttggaaaggtttggaaatgcagaaataactacaagggccattctccttagcttctggctttcaactgtttctagatgcttccaagaacaagaacccagcaccaaccagaattaggccacattttcaccattacttaagctcaatcgcctcttagatgaaatgaggagataaactaaacattaaaatgatgaaggaaaaaaaattatttggaagcagaaaaccacatgggtggggaaacatcaggaacgaaatcagacacactgactcaaaccacgcaagggtttgagaagcccacccctctaattccaggtgtttgtaatttctgcacttcgcacttgagagaaggcagaggtggtccgtgggaaagctccgggaaacagccgtctttcatccttgccacattgaaaaatgtccacaattttatgaattgctgtcctaaccctggcgtttttatccagtgttaaaataaattatttcaagtttcaatgtaaacacttaacagatgacttctttgcagaagaaatgttcgttacctactatcaaactactttttaacagattttgtatatacacacacaagttgacagaggtttacctccctactttcttagattttatgtaactcttttcattggtgcttattcagaacctgaaagccttgggcatccaagctttcacctactcaatggaggagaggtgataatgaatgaaaagattgacaccaggtttcttggacaaatttaagttcaaatttatctctttcaagtagaccatggtctccctagagagtgtgttggcttgtgtctgccagtacgacaaaggacgctcccagcttgatcgtggtaccttatggaagccactcacgcattctctgatttacccccaaaacactaccatgccccagccccactcatttaaataatacaatcatatcactttcaaagggctcagcacgaatgttcccctcactccactttttaactcgtttgctgaactcgacaaggcttccccttacgagcagtgagacctaggctactttcgaacgcttccttccgaacggtaagccacttcgctctcgggcaggacaggtcctccctgcagagagagacaactcatcccccgaccttccatactacagaccaaaatacccaggtgtggcctaaggactatattaaatgcctcctatagaaattcaaggaatgttagaaccaggaaactagctgtttaaagttttaaagaagtatataaatatatatataaatataaatatgaaatcatatcgagtgtgaggatgagcagagtgccaaatattcagcatctgtacaaagtcattcactggaattcaactattttatgtcattctctttctcacgcttttatggttcttttgataaattctatttagtagcatgcaggatacctaatctgaatgtgcaatatgctattcatcaccacgacaatttcttacttcctcttaataacttaccagaatgttggtcattcctttaaggcagttaaggattgctttatttgtgttcttttttcccatgactttttttcactctcagctgactgtaagaaactgtgcaccgtttccgccataaccgtcctgtgacgatgcctccatttgacttctgtatcgctgatgttcacctcctgtaaatagtttggcaattaaattttttgagaaaagtaatgtttacttttttattggagtgaattctcgtgttattttaatctcagaaaaattatatagaccaaagagttttatccgaaaaaaaattacactcttcctccattatatatttcattgttgaaatatcctcaatttctctatattttaagaagtaatggacatttattaaggttacagatttaatatgtatgcaaaatggtatagattaaatgagtttttaattaataaatcctacagtatttagttnaaaaaaaa

SEQ ID NO: 254248 - DNA, 10126 bp, Homo sapiens
  misc_feature (2115)..(2115): n is a, c, g, or t
  misc_feature (3435)..(3435): n is a, c, g, or t
  misc_feature (4700)..(4700): n is a, c, g, or t
  misc_feature (10118)..(10118): n is a, c, g, or t
ttcagcggcctgaattctagaactttccggggccggcagaggaggatctagacccgcagtactcatggtcgcccacgcagcacttcaatgaggagcgctactcgcccgcgcccaggagcatgaagggcctttccggaagtcggacccagccgccgctgtgttccgggcacacgtgtggtctggcgcccccggaggactgcgagcacctgcaccacgggcccgacgcgcggccgccctacctgctgagccccgccgacagctgccccggggggcgccaccgctgctcgccgcgcagctcggtgcactcggagtgcgtgatgatgccggtggtgctgggcgaccacgtgtccagcagcaccttcccgcggatgcactacagctcgcactacgacacgcgcgacgactgcgctgtggcccacgcgggcgccaagatcaaccgcatcccggccaacctgctggaccagttcgagaagcagctgccgctgcaccgggacggcttccacacgctgcagtaccagaggacgtccgcggccgccgagcagcgcagcgagagccccgggcggatccgccacctggtacactccgtgcagaagctcttcaccaagtcgcactcgctggagggctcctccaaaagcaacgccaacggcaccaaggcggacggccgggcggacgaccaccaccacgcccaccacgccaagcacagcaagaggagcaagagcaaggagcgcaagccggagggcaagccccggcccggcatgagcagctggtggagctcggacgacaacctggacagcgacagcacctatcggacgcccagcgtgctcaaccggcaccacctgggccccgtggcccactgctaccccgacgcgctgcagagccccttcggggacctgtccctcaagacctccaagagcaacaacgacgtcaagtgctcggcctgtgaggggttggcgctgacgcccgacgccaagtacctgaagcgcagctcctggtctacgctgacggtcagccaggccaaggaggcctaccgcaagagctcgctgaacctggacaagccgctgctgcaccaggacgccaagcccgccctgaggccgtgccactacctccaggtacctcaggatgagtggggagggtaccccaccggtggcaaagatgaggagattccctgcaggagaatgagaagtgggagttacattaaagccatgggggacgaggagagcggagagtcagactccagccccaagacatcaccaaagtcggcaatcctaccagagccgctgctgaagtccatcggacagagaccgcttggagagcaccagacccagacctacctgcaagctgcaagcgatgtgcctgtgggacacagcctggaccccgctgcgaactacaactccccgaaattccgctcccggaaccagagctacatgagggccgtcagcaccctgagccaggccagctgcgtgagccaggtgagcgaggcggagatcaatgggcaattcgagtccgtgtgcgagtccgtcttcagtgaagttgaatctcaggccatggatgccctcgacctcccgggatgtttccgaacaaggagtcacagctaccttcgagccattcaagccggctactcccaagatgacgaatgtattcccatgatgacaccctctgacatcacctccaccatcaggtcaacagcagctgtctcatatacaaattacaagaaaacgcccccaccggtgccccctcggaccacctccaagcctctgatctcggtgacggcgcagagcagcaccgaatccacccaggacgcctaccaggacagccgcgcacagaggatgtccccgtggccccaggacagccgcggcctctacaactccacggacagcctggacagcaacaaggccatgaacctcgcgctggagacggccgctgcccagcgccacctgccagagagccagagcagctctgtgcggaccagcgacaaggccatcctggtgtccaaggcggaggagctcctcaagagccgctgctcctccatcgggattcaggattctgaattcccagagcatcagccatacccaaggtcagatgtggaaacggccacagattctgacacggagagcngcggtctgcgggaataccactctgtcggggtgcaagtggaagatgagaagcgacacggacgttttaaacgttctaacagcgtcacggccgccgtccaagctgacctggagctggaggggttcccaggccacatcaccacggaggacaaaggccttcagttcggctcatccttccagcggcactccgagcccagcacccccacccagtacagcgcggtgagaactgtacggacccaggggctcttcagctatagagaagactatcggacccaagtggacacctccaccctgccccctccagacccctggctggagcccgccatcgacacggtagagactgggaggatgtctccgtgccgcagggatggctcgtggtttttgaagctgctgcacgcagagacaaagaggatggaaggctggtgcaaagagatggagagagaggcggaggagaacgacctctcggaggaaattctcggtaaaatcaggagtgctgttgggagtgcccagcttctcatgtcccagaaattccagcagttttattggctttgccaacagaatatggaccccagcgccatgccgaggccgacgtcgcaggacctggccggctactgggacatgctgcagctctccattgaggacgtcagcatgaagttcgacgagctgcagcggctgcggctcaacgactggaagatgatggagtccccggaaagaaaggaagaaagaaaggtcccgcctccaataccaaagaagcctcccaaggggaagtttcccatcacaagagaaaaatccctggacctgcccgacagacaacgccaggaagcccggaggcgcctcatggccgccaagcgagcggcgtccttccggcagaattccgcctccgagcgcgcggacagcatcgagatctacatccccgaggcccagacccggctctgagggcggaggccggcgccttcccctcgtcgcttccgctttcccggacgcttgtgcagcgcggcgccgccctggtggtttctgtctcctcctcccgctgaacacgtcctcgctcccgcgctccccgcgccccggacacagcgggacgcggccggcggcctcagagtccacggagctcgcggcgaggacgacttctgcttttgttgttgttgttgttgttcacgggtggcctggctcacacttggctctgagggacaggtgtggcgagacctgatttctcctgcgtgttctcagaggacggcgagaaatgcctctggagctggaacccagcttacattttgttatttctatttttataaattgtgtgataattagaggtaagaataacaantaactataaacgggtgcatcccaccactccctggaggcattagacacccaagtggaaggtgctacaacctgaagcgcaggaaagaaaggcccattcccctcgcacagccgagcttttactccctgagcacgggccgctccgctcccctgctcctgtctgtctcggacagaaaacacgaggctccttgtgtcaagcttcctgtgatggaaagcgacctctccaaccaccacactccccgccgtacagttctccagaatcccaggcgatgacaagtctgaacccacgaaaatacccagcgcagcatctacacattcaaaagataagctgagtgttcccaccaggaagtcacgcgcagagaggagagtcttacggagggctgggagcttaaaaggaaaacaatgtccttacttgtaaacagttattgtattttttatttctttctaacttaaaatacgacacccagtattttctttaagtttcaccatttacgctacatgtgatttttttaatgtatgtatatatatatattctcaaattgctctatcagctgacttttcagggtatccttaaaaaaaaacacacacgaaaaacaaaagtttgcttgtttaaaatgacagttgtgatgtaaaaagtttaagaaatatgaatgtgagtggtaagtatatctcagtttaaatggtaaagaagaaatgtagtttacatttgtatttttccagaattcttttgtcctatgcagtattgctaaagtcgagaatatattccttgcctgtgttagacatgaagggaaaaagaggtcacatattgtgatttccagctgtagcattcaaaaaaaaaattggtgttcatgactctgtggtcggtgccagaggaaaataggaacgactctaattaataggctttctgtgtatataattaaatttagctgctgcaaccattgttctgacacgacttctgtttcacagttcagaccggtcttcaaaggaaaagcctgtccgatttttccatgggttccagtttcagagttctcattattactcaaagtaaaagcggactgcgatttaagatgtttccaccccaatacctggtcttccttcccggcttaaggagtaccatgtacttagccacaggcagaatagctttcgatgaccccatagcactttgtttcttcaccttgatttgcactttacaatgtccccagcccctctgcagcccgtggctggcagggcgttcgatgtgcggttggcccccagcgcgccctccagagntgcggtgtctccctgcctcattccccacatcccactgagcatgggaccattgggagcagagctgatattaaagcatgtttagcttcgaagttttacttttttaaagctgagtagttaagaattccctgtaaaaacaaaaccctgtaaattgagcctcatgtctggtatatattttaccaaacagccttaaaatatatttggaagcaaaaatcagtacgaatgtatctccttgaaaaatgcaaaaaaaaaaaaaatcctggaatatcttctataatgaatcctaattccccccagagtgttcaaggcattttttttaactaatgaatacctaaatcttgagtagtgtacggtaatgacgcttcttccctatatccactcttattatgttaaaacaaatgtatttgcgagtattggcattttaggactttaaaaatgctgtatgatttccaggtgaactctgctgtttagaagtaaccacagaaaagcaaagtcagtgtacactctgagtgaaaggaaatgtaatgtggataaaggcccgccacctcctcacattggtctatctactggcagctgatacgtttaactcatttccttgagcttatacaaaacatagaaaagcaaactgttaaagtagtcaataattatttgtctcagatcccagattctatgatccctgcttaaaagaaaatgttcactgcatgtaggttgatttcttatgttttgtagactcattgttatttttcaatccccaaaagtcttggcctaaaccatccctaggggagcagattaacctaccaatacattgcacagggttggtgactcgacgtggtgaatgtgcacacgccctgcctggtccgccatgttccaaagaagatgatttaatggtagaacggatacctgctgctagacctgatggaatgttacctgtccgtgttacataatcaagtgcaatatactcagttctcatgcaggtgacattctaccatgaaacgcagaagataagccatgtttctgtattgtacatgtaaagaaaaataaaactgtttatgatacttgtgttagtcactcgagctagcttatttcagccacttctagcagatcatgccatggagctcacgacgtgtgaccatttcgtcatatttaaaatataacttcaagaaaagagtaaacatccattggagaacacggctgaaaattattgtgctgttctaggaacatcatcctagagagtgtgatgttcactataaccccatacctacattccctaatgatacagccaatgacaggtgaaacccagacactctccttagagccgacaggttgatcctgctgtgttgaaggctgtggttaataaaacacaagtatgataaacaggacctagcgtttagcccgggaaaggagaatgctgcttgtcacctagagtgctttccttgtgatgcgtctctcgcatcttcacgtgttgttgtgtttgaagtaaaactagttgttatcgatgacaatttttaccatagttttctcagcaaatttatatcaccatcttagaatggtatataaaaaaattgaactgtttatgataccaaaaaaattacagttttgtttaaaaggaaatgttgatgttttcaactccaaatcaattctaaaaacttcaagcacttaatggaaaggtaaatggtcagataaaaatataattacctgtaaggttatctggttttaaaagaaaaaaaaaaagcctacaaactcagtgacctactacgcagagggaatttttccctgctgcttcttatgaaagtggccaggtttattattagaagacacagtggcagagcacacatgtgcacaggttctgattatttctcttggagcatatgtccttgtcttgatttttgccttttcgatgccatattaagcagccaccgtttccacccctttcattagaaggccctgcatccgtaaattcgcgcatctctgtttttgttagatccttgtaagcatcgctacccgagtccaggatggaatttcacaggaaagtgaagggatactgcaggcctgtgtttgcagcgcctgtggtaactgtggaatgagctctgttagggacagttgtctggtttgtgccaaaccttcgaggggcgagtagggagtgggggaggtgggtccaagtctcccctcaggaaggccttttctatcggcagcaattccatcaagccaagcctcctgtggtcctgagcatgaaggggccaggggacctcctgggagatgcagcttttgtttccgctgcgtttcatcagtcagccttgcttggaattctggcaggttccccggggtgtttcagtggacaggaggcccccgtgccgtggctgagtcagcctgggtaccccagtcaccagcagggccacccttgatgacagggccccccacgaacctgggaaaggcagcgggaaatgtgtgagagggtgtgcgctggtacggacataaaagcattgtccaaaacagcgctggttcggggagggcccctggatactgcctttggcccacactgaaaactgaaattgccccacctgtgagcacagaaacacgcttctccaacacgggccgaaataactaaactccacatggttcctgcctgctcatttcccagccctcttcttctcaagcctgaacttcatttttttttttagctgcaaatttaacaggctaatttaaaactgcagttttcagacgacagcccctgggaatgttccagggttctcttgttttgatctgcatgtctgtttacacttctctgtaggcgtgggttgaatacaagtttccaaaactttaaaatagaaaaccacgagcttaagaggtgaaaaagatgacccctttctgattaggatctgtaactctgtgggctgggtcaatgcagtgtgcttcattcagggccatgtggcagccatgacacacaccacataaggtcagctcagagcccatggcttccctgcaggagccccatcttgtcgctattagttgggagttgcaatacattgttggccataaacaaagtgctaaaggaaagggtttgcttctacacattcggctgaatgtcccccagtgcagggtggcagcagaatgttctggaaatgaaggagatattgctaggaatctctaggctgttaggcaacctggcttttattcatcctcagccggcaactcatctcaagtttatgtctcagtttttttcctctagaaaggggattacagttcctgtccctgtcttcctccaggacacactgtgaggattaatgacatattggctctaaagtcctttgagctcctgggaacaggtggtgaaagtgtgcgttactgctaaggattagtcctggctcttctagaatgccgccctcccagctctgcagggcacgctgccagaatccaggctggtcgtaaacatctcagagataatcagggaccaccagaggcagaggccatgagactgtctttggaaaggtttggaaatgcagaaataactacaagggccattctccttagcttctggctttcaactgtttctagatgcttccaagaacaagaacccagcaccaaccagaattaggccacattttcaccattacttaagctcaatcgcctcttagatgaaatgaggagataaactaaacattaaaatgatgaaggaaaaaaaattatttggaagcagaaaaccacatgggtggggaaacatcaggaacgaaatcagacacactgactcaaaccacgcaagggtttgagaagcccacccctctaattccaggtgtttgtaatttctgcacttcgcacttgagagaaggcagaggtggtccgtgggaaagctccgggaaacagccgtctttcatccttgccacattgaaaaatgtccacaattttatgaattgctgtcctaaccctggcgtttttatccagtgttaaaataaattatttcaagtttcaatgtaaacacttaacagatgacttctttgcagaagaaatgttcgttacctactatcaaactactttttaacagattttgtatatacacacacaagttgacagaggtttacctccctactttcttagattttatgtaactcttttcattggtgcttattcagaacctgaaagccttgggcatccaagctttcacctactcaatggaggagaggtgataatgaatgaaaagattgacaccaggtttcttggacaaatttaagttcaaatttatctctttcaagtagaccatggtctccctagagagtgtgttggcttgtgtctgccagtacgacaaaggacgctcccagcttgatcgtggtaccttatggaagccactcacgcattctctgatttacccccaaaacactaccatgccccagccccactcatttaaataatacaatcatatcactttcaaagggctcagcacgaatgttcccctcactccactttttaactcgtttgctgaactcgacaaggcttccccttacgagcagtgagacctaggctactttcgaacgcttccttccgaacggtaagccacttcgctctcgggcaggacaggtcctccctgcagagagagacaactcatcccccgaccttccatactacagaccaaaatacccaggtgtggcctaaggactatattaaatgcctcctatagaaattcaaggaatgttagaaccaggaaactagctgtttaaagttttaaagaagtatataaatatatatataaatataaatatgaaatcatatcgagtgtgaggatgagcagagtgccaaatattcagcatctgtacaaagtcattcactggaattcaactattttatgtcattctctttctcacgcttttatggttcttttgataaattctatttagtagcatgcaggatacctaatctgaatgtgcaatatgctattcatcaccacgacaatttcttacttcctcttaataacttaccagaatgttggtcattcctttaaggcagttaaggattgctttatttgtgttcttttttcccatgactttttttcactctcagctgactgtaagaaactgtgcaccgtttccgccataaccgtcctgtgacgatgcctccatttgacttctgtatcgctgatgttcacctcctgtaaatagtttggcaattaaattttttgagaaaagtaatgtttacttttttattggagtgaattctcgtgttattttaatctcagaaaaattatatagaccaaagagttttatccgaaaaaaaattacactcttcctccattatatatttcattgttgaaatatcctcaatttctctatattttaagaagtaatggacatttattaaggttacagatttaatatgtatgcaaaatggtatagattaaatgagtttttaattaataaatcctacagtatttagttnaaaaaaaa

SEQ ID NO: 254249 - DNA, 10084 bp, Homo sapiens
  misc_feature (2073)..(2073): n is a, c, g, or t
  misc_feature (3393)..(3393): n is a, c, g, or t
  misc_feature (4658)..(4658): n is a, c, g, or t
  misc_feature (10076)..(10076): n is a, c, g, or t
ttcagcggcctgaattctagaactttccggggccggcagaggaggatctagacccgcagtactcatggtcgcccacgcagcacttcaatgaggagcgctactcgcccgcgcccaggagcatgaagggcctttccggaagtcggacccagccgccgctgtgttccgggcacacgtgtggtctggcgcccccggaggactgcgagcacctgcaccacgggcccgacgcgcggccgccctacctgctgagccccgccgacagctgccccggggggcgccaccgctgctcgccgcgcagctcggtgcactcggagtgcgtgatgatgccggtggtgctgggcgaccacgtgtccagcagcaccttcccgcggatgcactacagctcgcactacgacacgcgcgacgactgcgctgtggcccacgcgggcgccaagatcaaccgcatcccggccaacctgctggaccagttcgagaagcagctgccgctgcaccgggacggcttccacacgctgcagtaccagaggacgtccgcggccgccgagcagcgcagcgagagccccgggcggatccgccacctggtacactccgtgcagaagctcttcaccaagtcgcactcgctggagggctcctccaaaagcaacgccaacggcaccaaggcggacggccgggcggacgaccaccaccacgcccaccacgccaagcacagcaagaggagcaagagcaaggagcgcaagccggagggcaagccccggcccggcatgagcagctggtggagctcggacgacaacctggacagcgacagcacctatcggacgcccagcgtgctcaaccggcaccacctgggccccgtggcccactgctaccccgacgcgctgcagagccccttcggggacctgtccctcaagacctccaagagcaacaacgacgtcaagtgctcggcctgtgaggggttggcgctgacgcccgacgccaagtacctgaagcgcagctcctggtctacgctgacggtcagccaggccaaggaggcctaccgcaagagctcgctgaacctggacaagccgctgctgcaccaggacgccaagcccgccctgaggccgtgccactacctccaggtacctcaggatgagtggggagggtaccccaccggtggcaaagatgaggagattccctgcaggagaatgagaagtgggagttacattaaagccatgggggacgaggagagcggagagtcagactccagccccaagacatcaccaaagtcggcaatcctaccagagccgctgctgaagtccatcggacagagaccgcttggagagcaccagacccagacctacctgcaagctgcaagcgatgtgcctgtgggacacagcctggaccccgctgcgaactacaactccccgaaattccgctcccggaaccagagctacatgagggccgtcagcaccctgagccaggccagctgcgtgagccaggtgagcgaggcggagatcaatgggcaattcgagtccgtgtgcgagtccgtcttcagtgaagttgaatctcaggccatggatgccctcgacctcccgggatgtttccgaacaaggagtcacagctaccttcgagccattcaagccggctactcccaagatgacgaatgtattcccatgatgacaccctctgacatcacctccaccatcaggtcaacagcagctgtctcatatacaaattacaagaaaacgcccccaccggtgccccctcggaccacctccaagcctctgatctcggtgacggcgcagagcagcaccgaatccacccaggacgcctaccaggacagccgcgcacagaggatgtccccgtggccccaggacagccgcggcctctacaactccacggacagcctggacagcaacaaggccatgaacctcgcgctggagacggccgctgcccagcgccacctgccagagagccagagcagctctgtgcggaccagcgacaaggccatcctggtgtccaaggcggaggagctcctcaagagccgctgctcctccatcgggattcaggtggaaacggccacagattctgacacggagagcngcggtctgcgggaataccactctgtcggggtgcaagtggaagatgagaagcgacacggacgttttaaacgttctaacagcgtcacggccgccgtccaagctgacctggagctggaggggttcccaggccacatcaccacggaggacaaaggccttcagttcggctcatccttccagcggcactccgagcccagcacccccacccagtacagcgcggtgagaactgtacggacccaggggctcttcagctatagagaagactatcggacccaagtggacacctccaccctgccccctccagacccctggctggagcccgccatcgacacggtagagactgggaggatgtctccgtgccgcagggatggctcgtggtttttgaagctgctgcacgcagagacaaagaggatggaaggctggtgcaaagagatggagagagaggcggaggagaacgacctctcggaggaaattctcggtaaaatcaggagtgctgttgggagtgcccagcttctcatgtcccagaaattccagcagttttattggctttgccaacagaatatggaccccagcgccatgccgaggccgacgtcgcaggacctggccggctactgggacatgctgcagctctccattgaggacgtcagcatgaagttcgacgagctgcagcggctgcggctcaacgactggaagatgatggagtccccggaaagaaaggaagaaagaaaggtcccgcctccaataccaaagaagcctcccaaggggaagtttcccatcacaagagaaaaatccctggacctgcccgacagacaacgccaggaagcccggaggcgcctcatggccgccaagcgagcggcgtccttccggcagaattccgcctccgagcgcgcggacagcatcgagatctacatccccgaggcccagacccggctctgagggcggaggccggcgccttcccctcgtcgcttccgctttcccggacgcttgtgcagcgcggcgccgccctggtggtttctgtctcctcctcccgctgaacacgtcctcgctcccgcgctccccgcgccccggacacagcgggacgcggccggcggcctcagagtccacggagctcgcggcgaggacgacttctgcttttgttgttgttgttgttgttcacgggtggcctggctcacacttggctctgagggacaggtgtggcgagacctgatttctcctgcgtgttctcagaggacggcgagaaatgcctctggagctggaacccagcttacattttgttatttctatttttataaattgtgtgataattagaggtaagaataacaantaactataaacgggtgcatcccaccactccctggaggcattagacacccaagtggaaggtgctacaacctgaagcgcaggaaagaaaggcccattcccctcgcacagccgagcttttactccctgagcacgggccgctccgctcccctgctcctgtctgtctcggacagaaaacacgaggctccttgtgtcaagcttcctgtgatggaaagcgacctctccaaccaccacactccccgccgtacagttctccagaatcccaggcgatgacaagtctgaacccacgaaaatacccagcgcagcatctacacattcaaaagataagctgagtgttcccaccaggaagtcacgcgcagagaggagagtcttacggagggctgggagcttaaaaggaaaacaatgtccttacttgtaaacagttattgtattttttatttctttctaacttaaaatacgacacccagtattttctttaagtttcaccatttacgctacatgtgatttttttaatgtatgtatatatatatattctcaaattgctctatcagctgacttttcagggtatccttaaaaaaaaacacacacgaaaaacaaaagtttgcttgtttaaaatgacagttgtgatgtaaaaagtttaagaaatatgaatgtgagtggtaagtatatctcagtttaaatggtaaagaagaaatgtagtttacatttgtatttttccagaattcttttgtcctatgcagtattgctaaagtcgagaatatattccttgcctgtgttagacatgaagggaaaaagaggtcacatattgtgatttccagctgtagcattcaaaaaaaaaattggtgttcatgactctgtggtcggtgccagaggaaaataggaacgactctaattaataggctttctgtgtatataattaaatttagctgctgcaaccattgttctgacacgacttctgtttcacagttcagaccggtcttcaaaggaaaagcctgtccgatttttccatgggttccagtttcagagttctcattattactcaaagtaaaagcggactgcgatttaagatgtttccaccccaatacctggtcttccttcccggcttaaggagtaccatgtacttagccacaggcagaatagctttcgatgaccccatagcactttgtttcttcaccttgatttgcactttacaatgtccccagcccctctgcagcccgtggctggcagggcgttcgatgtgcggttggcccccagcgcgccctccagagntgcggtgtctccctgcctcattccccacatcccactgagcatgggaccattgggagcagagctgatattaaagcatgtttagcttcgaagttttacttttttaaagctgagtagttaagaattccctgtaaaaacaaaaccctgtaaattgagcctcatgtctggtatatattttaccaaacagccttaaaatatatttggaagcaaaaatcagtacgaatgtatctccttgaaaaatgcaaaaaaaaaaaaaatcctggaatatcttctataatgaatcctaattccccccagagtgttcaaggcattttttttaactaatgaatacctaaatcttgagtagtgtacggtaatgacgcttcttccctatatccactcttattatgttaaaacaaatgtatttgcgagtattggcattttaggactttaaaaatgctgtatgatttccaggtgaactctgctgtttagaagtaaccacagaaaagcaaagtcagtgtacactctgagtgaaaggaaatgtaatgtggataaaggcccgccacctcctcacattggtctatctactggcagctgatacgtttaactcatttccttgagcttatacaaaacatagaaaagcaaactgttaaagtagtcaataattatttgtctcagatcccagattctatgatccctgcttaaaagaaaatgttcactgcatgtaggttgatttcttatgttttgtagactcattgttatttttcaatccccaaaagtcttggcctaaaccatccctaggggagcagattaacctaccaatacattgcacagggttggtgactcgacgtggtgaatgtgcacacgccctgcctggtccgccatgttccaaagaagatgatttaatggtagaacggatacctgctgctagacctgatggaatgttacctgtccgtgttacataatcaagtgcaatatactcagttctcatgcaggtgacattctaccatgaaacgcagaagataagccatgtttctgtattgtacatgtaaagaaaaataaaactgtttatgatacttgtgttagtcactcgagctagcttatttcagccacttctagcagatcatgccatggagctcacgacgtgtgaccatttcgtcatatttaaaatataacttcaagaaaagagtaaacatccattggagaacacggctgaaaattattgtgctgttctaggaacatcatcctagagagtgtgatgttcactataaccccatacctacattccctaatgatacagccaatgacaggtgaaacccagacactctccttagagccgacaggttgatcctgctgtgttgaaggctgtggttaataaaacacaagtatgataaacaggacctagcgtttagcccgggaaaggagaatgctgcttgtcacctagagtgctttccttgtgatgcgtctctcgcatcttcacgtgttgttgtgtttgaagtaaaactagttgttatcgatgacaatttttaccatagttttctcagcaaatttatatcaccatcttagaatggtatataaaaaaattgaactgtttatgataccaaaaaaattacagttttgtttaaaaggaaatgttgatgttttcaactccaaatcaattctaaaaacttcaagcacttaatggaaaggtaaatggtcagataaaaatataattacctgtaaggttatctggttttaaaagaaaaaaaaaaagcctacaaactcagtgacctactacgcagagggaatttttccctgctgcttcttatgaaagtggccaggtttattattagaagacacagtggcagagcacacatgtgcacaggttctgattatttctcttggagcatatgtccttgtcttgatttttgccttttcgatgccatattaagcagccaccgtttccacccctttcattagaaggccctgcatccgtaaattcgcgcatctctgtttttgttagatccttgtaagcatcgctacccgagtccaggatggaatttcacaggaaagtgaagggatactgcaggcctgtgtttgcagcgcctgtggtaactgtggaatgagctctgttagggacagttgtctggtttgtgccaaaccttcgaggggcgagtagggagtgggggaggtgggtccaagtctcccctcaggaaggccttttctatcggcagcaattccatcaagccaagcctcctgtggtcctgagcatgaaggggccaggggacctcctgggagatgcagcttttgtttccgctgcgtttcatcagtcagccttgcttggaattctggcaggttccccggggtgtttcagtggacaggaggcccccgtgccgtggctgagtcagcctgggtaccccagtcaccagcagggccacccttgatgacagggccccccacgaacctgggaaaggcagcgggaaatgtgtgagagggtgtgcgctggtacggacataaaagcattgtccaaaacagcgctggttcggggagggcccctggatactgcctttggcccacactgaaaactgaaattgccccacctgtgagcacagaaacacgcttctccaacacgggccgaaataactaaactccacatggttcctgcctgctcatttcccagccctcttcttctcaagcctgaacttcatttttttttttagctgcaaatttaacaggctaatttaaaactgcagttttcagacgacagcccctgggaatgttccagggttctcttgttttgatctgcatgtctgtttacacttctctgtaggcgtgggttgaatacaagtttccaaaactttaaaatagaaaaccacgagcttaagaggtgaaaaagatgacccctttctgattaggatctgtaactctgtgggctgggtcaatgcagtgtgcttcattcagggccatgtggcagccatgacacacaccacataaggtcagctcagagcccatggcttccctgcaggagccccatcttgtcgctattagttgggagttgcaatacattgttggccataaacaaagtgctaaaggaaagggtttgcttctacacattcggctgaatgtcccccagtgcagggtggcagcagaatgttctggaaatgaaggagatattgctaggaatctctaggctgttaggcaacctggcttttattcatcctcagccggcaactcatctcaagtttatgtctcagtttttttcctctagaaaggggattacagttcctgtccctgtcttcctccaggacacactgtgaggattaatgacatattggctctaaagtcctttgagctcctgggaacaggtggtgaaagtgtgcgttactgctaaggattagtcctggctcttctagaatgccgccctcccagctctgcagggcacgctgccagaatccaggctggtcgtaaacatctcagagataatcagggaccaccagaggcagaggccatgagactgtctttggaaaggtttggaaatgcagaaataactacaagggccattctccttagcttctggctttcaactgtttctagatgcttccaagaacaagaacccagcaccaaccagaattaggccacattttcaccattacttaagctcaatcgcctcttagatgaaatgaggagataaactaaacattaaaatgatgaaggaaaaaaaattatttggaagcagaaaaccacatgggtggggaaacatcaggaacgaaatcagacacactgactcaaaccacgcaagggtttgagaagcccacccctctaattccaggtgtttgtaatttctgcacttcgcacttgagagaaggcagaggtggtccgtgggaaagctccgggaaacagccgtctttcatccttgccacattgaaaaatgtccacaattttatgaattgctgtcctaaccctggcgtttttatccagtgttaaaataaattatttcaagtttcaatgtaaacacttaacagatgacttctttgcagaagaaatgttcgttacctactatcaaactactttttaacagattttgtatatacacacacaagttgacagaggtttacctccctactttcttagattttatgtaactcttttcattggtgcttattcagaacctgaaagccttgggcatccaagctttcacctactcaatggaggagaggtgataatgaatgaaaagattgacaccaggtttcttggacaaatttaagttcaaatttatctctttcaagtagaccatggtctccctagagagtgtgttggcttgtgtctgccagtacgacaaaggacgctcccagcttgatcgtggtaccttatggaagccactcacgcattctctgatttacccccaaaacactaccatgccccagccccactcatttaaataatacaatcatatcactttcaaagggctcagcacgaatgttcccctcactccactttttaactcgtttgctgaactcgacaaggcttccccttacgagcagtgagacctaggctactttcgaacgcttccttccgaacggtaagccacttcgctctcgggcaggacaggtcctccctgcagagagagacaactcatcccccgaccttccatactacagaccaaaatacccaggtgtggcctaaggactatattaaatgcctcctatagaaattcaaggaatgttagaaccaggaaactagctgtttaaagttttaaagaagtatataaatatatatataaatataaatatgaaatcatatcgagtgtgaggatgagcagagtgccaaatattcagcatctgtacaaagtcattcactggaattcaactattttatgtcattctctttctcacgcttttatggttcttttgataaattctatttagtagcatgcaggatacctaatctgaatgtgcaatatgctattcatcaccacgacaatttcttacttcctcttaataacttaccagaatgttggtcattcctttaaggcagttaaggattgctttatttgtgttcttttttcccatgactttttttcactctcagctgactgtaagaaactgtgcaccgtttccgccataaccgtcctgtgacgatgcctccatttgacttctgtatcgctgatgttcacctcctgtaaatagtttggcaattaaattttttgagaaaagtaatgtttacttttttattggagtgaattctcgtgttattttaatctcagaaaaattatatagaccaaagagttttatccgaaaaaaaattacactcttcctccattatatatttcattgttgaaatatcctcaatttctctatattttaagaagtaatggacatttattaaggttacagatttaatatgtatgcaaaatggtatagattaaatgagtttttaattaataaatcctacagtatttagttnaaaaaaaa

SEQ ID NO: 254250 - DNA, 9476 bp, Homo sapiens
  misc_feature (1465)..(1465): n is a, c, g, or t
  misc_feature (2785)..(2785): n is a, c, g, or t
  misc_feature (4050)..(4050): n is a, c, g, or t
  misc_feature (9468)..(9468): n is a, c, g, or t
tagatttaaaaccgtcctcttttatttgcttgcaattaagatataagtatacaataagataggcattttctcccttgttttctttttttttttccttttcttctctgttcagtttctcaactttcaatttcctcttataccagagggaaataaaactaaattttagccagtgctttgtcccagctgctgagattgcaagtgtcccttcttctcttacttttctcacatgttctcactttatccatagtgtttacctatcacttataatgaagaaaaaccaacatttttatattcatttccttttagggtatgcatttttatacatctgactttaactgataaatgactgtaaagaggtgtatctttatggaattgtagaggatttgtttccaaaaaggagctgatgctgccgttctcagtgacaaagttgatgcgtgtttcatgtctgtctgctcccaggtacctcaggatgagtggggagggtaccccaccggtggcaaagatgaggagattccctgcaggagaatgagaagtgggagttacattaaagccatgggggacgaggagagcggagagtcagactccagccccaagacatcaccaaagtcggcaatcctaccagagccgctgctgaagtccatcggacagagaccgcttggagagcaccagacccagacctacctgcaagctgcaagcgatgtgcctgtgggacacagcctggaccccgctgcgaactacaactccccgaaattccgctcccggaaccagagctacatgagggccgtcagcaccctgagccaggccagctgcgtgagccaggtgagcgaggcggagatcaatgggcaattcgagtccgtgtgcgagtccgtcttcagtgaagttgaatctcaggccatggatgccctcgacctcccgggatgtttccgaacaaggagtcacagctaccttcgagccattcaagccggctactcccaagatgacgaatgtattcccatgatgacaccctctgacatcacctccaccatcaggtcaacagcagctgtctcatatacaaattacaagaaaacgcccccaccggtgccccctcggaccacctccaagcctctgatctcggtgacggcgcagagcagcaccgaatccacccaggacgcctaccaggacagccgcgcacagaggatgtccccgtggccccaggacagccgcggcctctacaactccacggacagcctggacagcaacaaggccatgaacctcgcgctggagacggccgctgcccagcgccacctgccagagagccagagcagctctgtgcggaccagcgacaaggccatcctggtgtccaaggcggaggagctcctcaagagccgctgctcctccatcgggattcaggattctgaattcccagagcatcagccatacccaaggtcagatgtggaaacggccacagattctgacacggagagcngcggtctgcgggaataccactctgtcggggtgcaagtggaagatgagaagcgacacggacgttttaaacgttctaacagcgtcacggccgccgtccaagctgacctggagctggaggggttcccaggccacatcaccacggaggacaaaggccttcagttcggctcatccttccagcggcactccgagcccagcacccccacccagtacagcgcggtgagaactgtacggacccaggggctcttcagctatagagaagactatcggacccaagtggacacctccaccctgccccctccagacccctggctggagcccgccatcgacacggtagagactgggaggatgtctccgtgccgcagggatggctcgtggtttttgaagctgctgcacgcagagacaaagaggatggaaggctggtgcaaagagatggagagagaggcggaggagaacgacctctcggaggaaattctcggtaaaatcaggagtgctgttgggagtgcccagcttctcatgtcccagaaattccagcagttttattggctttgccaacagaatatggaccccagcgccatgccgaggccgacgtcgcaggacctggccggctactgggacatgctgcagctctccattgaggacgtcagcatgaagttcgacgagctgcagcggctgcggctcaacgactggaagatgatggagtccccggaaagaaaggaagaaagaaaggtcccgcctccaataccaaagaagcctcccaaggggaagtttcccatcacaagagaaaaatccctggacctgcccgacagacaacgccaggaagcccggaggcgcctcatggccgccaagcgagcggcgtccttccggcagaattccgcctccgagcgcgcggacagcatcgagatctacatccccgaggcccagacccggctctgagggcggaggccggcgccttcccctcgtcgcttccgctttcccggacgcttgtgcagcgcggcgccgccctggtggtttctgtctcctcctcccgctgaacacgtcctcgctcccgcgctccccgcgccccggacacagcgggacgcggccggcggcctcagagtccacggagctcgcggcgaggacgacttctgcttttgttgttgttgttgttgttcacgggtggcctggctcacacttggctctgagggacaggtgtggcgagacctgatttctcctgcgtgttctcagaggacggcgagaaatgcctctggagctggaacccagcttacattttgttatttctatttttataaattgtgtgataattagaggtaagaataacaantaactataaacgggtgcatcccaccactccctggaggcattagacacccaagtggaaggtgctacaacctgaagcgcaggaaagaaaggcccattcccctcgcacagccgagcttttactccctgagcacgggccgctccgctcccctgctcctgtctgtctcggacagaaaacacgaggctccttgtgtcaagcttcctgtgatggaaagcgacctctccaaccaccacactccccgccgtacagttctccagaatcccaggcgatgacaagtctgaacccacgaaaatacccagcgcagcatctacacattcaaaagataagctgagtgttcccaccaggaagtcacgcgcagagaggagagtcttacggagggctgggagcttaaaaggaaaacaatgtccttacttgtaaacagttattgtattttttatttctttctaacttaaaatacgacacccagtattttctttaagtttcaccatttacgctacatgtgatttttttaatgtatgtatatatatatattctcaaattgctctatcagctgacttttcagggtatccttaaaaaaaaacacacacgaaaaacaaaagtttgcttgtttaaaatgacagttgtgatgtaaaaagtttaagaaatatgaatgtgagtggtaagtatatctcagtttaaatggtaaagaagaaatgtagtttacatttgtatttttccagaattcttttgtcctatgcagtattgctaaagtcgagaatatattccttgcctgtgttagacatgaagggaaaaagaggtcacatattgtgatttccagctgtagcattcaaaaaaaaaattggtgttcatgactctgtggtcggtgccagaggaaaataggaacgactctaattaataggctttctgtgtatataattaaatttagctgctgcaaccattgttctgacacgacttctgtttcacagttcagaccggtcttcaaaggaaaagcctgtccgatttttccatgggttccagtttcagagttctcattattactcaaagtaaaagcggactgcgatttaagatgtttccaccccaatacctggtcttccttcccggcttaaggagtaccatgtacttagccacaggcagaatagctttcgatgaccccatagcactttgtttcttcaccttgatttgcactttacaatgtccccagcccctctgcagcccgtggctggcagggcgttcgatgtgcggttggcccccagcgcgccctccagagntgcggtgtctccctgcctcattccccacatcccactgagcatgggaccattgggagcagagctgatattaaagcatgtttagcttcgaagttttacttttttaaagctgagtagttaagaattccctgtaaaaacaaaaccctgtaaattgagcctcatgtctggtatatattttaccaaacagccttaaaatatatttggaagcaaaaatcagtacgaatgtatctccttgaaaaatgcaaaaaaaaaaaaaatcctggaatatcttctataatgaatcctaattccccccagagtgttcaaggcattttttttaactaatgaatacctaaatcttgagtagtgtacggtaatgacgcttcttccctatatccactcttattatgttaaaacaaatgtatttgcgagtattggcattttaggactttaaaaatgctgtatgatttccaggtgaactctgctgtttagaagtaaccacagaaaagcaaagtcagtgtacactctgagtgaaaggaaatgtaatgtggataaaggcccgccacctcctcacattggtctatctactggcagctgatacgtttaactcatttccttgagcttatacaaaacatagaaaagcaaactgttaaagtagtcaataattatttgtctcagatcccagattctatgatccctgcttaaaagaaaatgttcactgcatgtaggttgatttcttatgttttgtagactcattgttatttttcaatccccaaaagtcttggcctaaaccatccctaggggagcagattaacctaccaatacattgcacagggttggtgactcgacgtggtgaatgtgcacacgccctgcctggtccgccatgttccaaagaagatgatttaatggtagaacggatacctgctgctagacctgatggaatgttacctgtccgtgttacataatcaagtgcaatatactcagttctcatgcaggtgacattctaccatgaaacgcagaagataagccatgtttctgtattgtacatgtaaagaaaaataaaactgtttatgatacttgtgttagtcactcgagctagcttatttcagccacttctagcagatcatgccatggagctcacgacgtgtgaccatttcgtcatatttaaaatataacttcaagaaaagagtaaacatccattggagaacacggctgaaaattattgtgctgttctaggaacatcatcctagagagtgtgatgttcactataaccccatacctacattccctaatgatacagccaatgacaggtgaaacccagacactctccttagagccgacaggttgatcctgctgtgttgaaggctgtggttaataaaacacaagtatgataaacaggacctagcgtttagcccgggaaaggagaatgctgcttgtcacctagagtgctttccttgtgatgcgtctctcgcatcttcacgtgttgttgtgtttgaagtaaaactagttgttatcgatgacaatttttaccatagttttctcagcaaatttatatcaccatcttagaatggtatataaaaaaattgaactgtttatgataccaaaaaaattacagttttgtttaaaaggaaatgttgatgttttcaactccaaatcaattctaaaaacttcaagcacttaatggaaaggtaaatggtcagataaaaatataattacctgtaaggttatctggttttaaaagaaaaaaaaaaagcctacaaactcagtgacctactacgcagagggaatttttccctgctgcttcttatgaaagtggccaggtttattattagaagacacagtggcagagcacacatgtgcacaggttctgattatttctcttggagcatatgtccttgtcttgatttttgccttttcgatgccatattaagcagccaccgtttccacccctttcattagaaggccctgcatccgtaaattcgcgcatctctgtttttgttagatccttgtaagcatcgctacccgagtccaggatggaatttcacaggaaagtgaagggatactgcaggcctgtgtttgcagcgcctgtggtaactgtggaatgagctctgttagggacagttgtctggtttgtgccaaaccttcgaggggcgagtagggagtgggggaggtgggtccaagtctcccctcaggaaggccttttctatcggcagcaattccatcaagccaagcctcctgtggtcctgagcatgaaggggccaggggacctcctgggagatgcagcttttgtttccgctgcgtttcatcagtcagccttgcttggaattctggcaggttccccggggtgtttcagtggacaggaggcccccgtgccgtggctgagtcagcctgggtaccccagtcaccagcagggccacccttgatgacagggccccccacgaacctgggaaaggcagcgggaaatgtgtgagagggtgtgcgctggtacggacataaaagcattgtccaaaacagcgctggttcggggagggcccctggatactgcctttggcccacactgaaaactgaaattgccccacctgtgagcacagaaacacgcttctccaacacgggccgaaataactaaactccacatggttcctgcctgctcatttcccagccctcttcttctcaagcctgaacttcatttttttttttagctgcaaatttaacaggctaatttaaaactgcagttttcagacgacagcccctgggaatgttccagggttctcttgttttgatctgcatgtctgtttacacttctctgtaggcgtgggttgaatacaagtttccaaaactttaaaatagaaaaccacgagcttaagaggtgaaaaagatgacccctttctgattaggatctgtaactctgtgggctgggtcaatgcagtgtgcttcattcagggccatgtggcagccatgacacacaccacataaggtcagctcagagcccatggcttccctgcaggagccccatcttgtcgctattagttgggagttgcaatacattgttggccataaacaaagtgctaaaggaaagggtttgcttctacacattcggctgaatgtcccccagtgcagggtggcagcagaatgttctggaaatgaaggagatattgctaggaatctctaggctgttaggcaacctggcttttattcatcctcagccggcaactcatctcaagtttatgtctcagtttttttcctctagaaaggggattacagttcctgtccctgtcttcctccaggacacactgtgaggattaatgacatattggctctaaagtcctttgagctcctgggaacaggtggtgaaagtgtgcgttactgctaaggattagtcctggctcttctagaatgccgccctcccagctctgcagggcacgctgccagaatccaggctggtcgtaaacatctcagagataatcagggaccaccagaggcagaggccatgagactgtctttggaaaggtttggaaatgcagaaataactacaagggccattctccttagcttctggctttcaactgtttctagatgcttccaagaacaagaacccagcaccaaccagaattaggccacattttcaccattacttaagctcaatcgcctcttagatgaaatgaggagataaactaaacattaaaatgatgaaggaaaaaaaattatttggaagcagaaaaccacatgggtggggaaacatcaggaacgaaatcagacacactgactcaaaccacgcaagggtttgagaagcccacccctctaattccaggtgtttgtaatttctgcacttcgcacttgagagaaggcagaggtggtccgtgggaaagctccgggaaacagccgtctttcatccttgccacattgaaaaatgtccacaattttatgaattgctgtcctaaccctggcgtttttatccagtgttaaaataaattatttcaagtttcaatgtaaacacttaacagatgacttctttgcagaagaaatgttcgttacctactatcaaactactttttaacagattttgtatatacacacacaagttgacagaggtttacctccctactttcttagattttatgtaactcttttcattggtgcttattcagaacctgaaagccttgggcatccaagctttcacctactcaatggaggagaggtgataatgaatgaaaagattgacaccaggtttcttggacaaatttaagttcaaatttatctctttcaagtagaccatggtctccctagagagtgtgttggcttgtgtctgccagtacgacaaaggacgctcccagcttgatcgtggtaccttatggaagccactcacgcattctctgatttacccccaaaacactaccatgccccagccccactcatttaaataatacaatcatatcactttcaaagggctcagcacgaatgttcccctcactccactttttaactcgtttgctgaactcgacaaggcttccccttacgagcagtgagacctaggctactttcgaacgcttccttccgaacggtaagccacttcgctctcgggcaggacaggtcctccctgcagagagagacaactcatcccccgaccttccatactacagaccaaaatacccaggtgtggcctaaggactatattaaatgcctcctatagaaattcaaggaatgttagaaccaggaaactagctgtttaaagttttaaagaagtatataaatatatatataaatataaatatgaaatcatatcgagtgtgaggatgagcagagtgccaaatattcagcatctgtacaaagtcattcactggaattcaactattttatgtcattctctttctcacgcttttatggttcttttgataaattctatttagtagcatgcaggatacctaatctgaatgtgcaatatgctattcatcaccacgacaatttcttacttcctcttaataacttaccagaatgttggtcattcctttaaggcagttaaggattgctttatttgtgttcttttttcccatgactttttttcactctcagctgactgtaagaaactgtgcaccgtttccgccataaccgtcctgtgacgatgcctccatttgacttctgtatcgctgatgttcacctcctgtaaatagtttggcaattaaattttttgagaaaagtaatgtttacttttttattggagtgaattctcgtgttattttaatctcagaaaaattatatagaccaaagagttttatccgaaaaaaaattacactcttcctccattatatatttcattgttgaaatatcctcaatttctctatattttaagaagtaatggacatttattaaggttacagatttaatatgtatgcaaaatggtatagattaaatgagtttttaattaataaatcctacagtatttagttnaaaaaaaa

SEQ ID NO: 254251 - DNA, 404 bp, Homo sapiens
tgggggcacactcttggagactccagttgctcaccagcttggacaaaccactggactcaaatgatcaggtagaaattcatcactggagagaacacagtggaatggcttcagcgaaaactcactctgaaggtcttcagggcaactttaagacttgcccctggccgggcacagtggcttatgcctataatcccagcactttgggaggccgaggcgggtggatcacctgaggtcaggagttcaagaccagcctggccaatatggcgaaaccctgtctctactaaaaatccaaaaaattagccgggcgtggtcgtgggcgcctgtaatcccagcaactcgagaggctgaggcaggagaattgcctgaacccgggaggcagagtttgaagacagccgagattgcaccac

SEQ ID NO: 254252 - DNA, 296 bp, Homo sapiens
agtgttgattctttattttatagatgaacaacaatagcaacaaaacatttgaaagctttcaatttgatgactttctctaaagaaaaaaataaactcaatatacacaaaataaactcaatatacacacttctcatctcttcaaactatacagagtaagaatttcacagatgaatgtttttctctatcaatcattaacatgtttatttcatgctgtaatgtgggacctagctattttttatatttctgataattattaacatttatcatgggaatattcacttaactgcaatgtaaca

SEQ ID NO: 254253 - DNA, 296 bp, Homo sapiens
  misc_feature (59)..(59): n is a, c, g, or t
cctcatcctcagaagaatggaacagtttggggtggagaacgttatcagtaagtttctgngttaaaagatgtggagggaccgcagggaaatcaggtctgagaaaaatgcagtcactgactaggcagataggtttcatattcctgatgaatctacctaggatgaagggcatctgtgggtctgactgggatgaagcagcagcccttctggtattggcagaagactgtgttattagtgatgttgctgtggacacacacgtaccttctatttgctattcctgaactgggaaaagcagcatc

SEQ ID NO: 254254 - DNA, 307 bp, Homo sapiens
attcagcagggccctgggtcatcacatttttcataaacatttggagatctagggccacccctctcaccatgggaaagtctttattttctgtgagtccttgtatgctaagggctcagtcctgtttgtgttatagagctttggggttgaagggtctgcttcccaaatactcatctgccctatgtgtaaagtagatactggttttacttttagcttagaatgagaaacaccagcccctttggaaaacccatcccagcctaaattctaaatatagccaattttgacggagacagacatccagtcatgaacc

SEQ ID NO: 254255 - DNA, 497 bp, Homo sapiens
accagatctcacgtgaactgagtgagaactcacttgtcaccagggggatagtgctaaagcattcatgaggcatccacccccatgatctattcacctcctaccaggccccatgtccaacattgggaaccacatttcaacatgagatttggaggggacagatgtccaaaccatgtaaaaggtggagccctcatgaatggtatttgtgtccttataaaagagacctcagagaactagctcactctttccaccagtgagacagcaataaaaaatcagcagtccgcagccaagaagagagctcttatcagaatttaaccctgctggcatgcttatcttgggcttccagcctccagaattgtgagaaataaatttctgttgtttataagccacacagtcttgggtactttgtgatacagcatgaactgactaagatgcaagtcgagcaggaatttgatgactgagtggattttattttattttttaagaattagaaggagaaa

SEQ ID NO: 254256 - DNA, 404 bp, Homo sapiens
atttcaaagcaaagaatattaccaaggaataaggaggttatttcacaattatacagggatcaattcatcctaagtgtttcttcatacaataatgggagcttgaaaataacgtgaagcgagagttgacagaactgaaaggagaaacagaaaatcctcataatggttggagatttcaataaccttctctccgtattaataaaacaagttggtagaaattcagaaaggataatgaccattagccaacttgtgctaattgatgtttttacaattcttggcacaacagcagagtatacgttctttacaagcacacatggaccacttaccaagatggaccagtatctactttataaatctcaataaacttaaaaggattcaaatcatacaaagtatattttctgaccaga

SEQ ID NO: 254257 - DNA, 629 bp, Homo sapiens
ctgaaagaggaagggatttggtttacggatttgactggatgatgatggagctagctaatattttaaccctgaaagttaagcagagaaatcatagccatggaataacatacatttttctttcattttctgcctcccatttagagcctctttcatagagttattccatttctttttcagaaaagaaactatttatcaggtcctcatggtctggaagaaacctcagatttgctagttttgggcaaaataacttaaaggtatatctttctgtgataatctacatcttttcataattacatccttatccatgccatatgggacacctaaaatttctgaaacagcaacttctccagagaatagcctaaggatttctcataatgaaatgcacgtgttaatagtacatggcttgataaaccctattgtgcaaggtaaacctcatgctctctagtaaggaacatgcccagtgtctataatttaagattcatatgctaggaaccctgccctggtttatgatgactttgaatgacctacctacagacacctgctcatatcagtacaaactgggttagctcactaatgccatatgtgtgtgtatgtgaagcccagattcactgaatttaatgaattaacgc

SEQ ID NO: 254258 - DNA, 552 bp, Homo sapiens
gctaaatccaactcaaggctcacattgagcaattagtttaaactccatctcaatttactaaagatgagtcaaatgtgctctctctcctgcagagttggaaggccaaatcaaggagtgtgtagataaaatgtttaaaccacttaaatgtcctacagatgcaaattgctattgttgtagagcatagctgacatcaatataattctgggatgatatattgtaattatctatgtctgtataataaatgttttgttttggccaaccgacttttgttgctttcttagaacagcgtgactcaagaagaataaaacatttttaacatatactatccaaaaactagtatacatacaaacatgttgttaaacacaatagtaaaagaactatcacagttatttatataattttataaatgttgattctgtgccttttatgtcatattgcatacatcaaccttgaacttcatcccagatggacagaaaaatatcgcttttagtgggtgaaatgatatactgcataattaatcacccaaaacagagtaggtttgatagcaaaagg

SEQ ID NO: 254259 - DNA, 408 bp, Homo sapiens
cagcttggtttttcatttttaaatatgaggggtgggtttattttgcccgaaatgaagaatactggcttatatttgaaatacttgaatcatccaacagccttttattttatgttctccattcatttctagttctgcagaggtagactacagaaggggtggtggattcatttactaattaacctatggcagaagctgaaagctggcagaccgtgggctggatccagcctctaaatgtgtttggcccacacaataccttaaaaatcaggaaattgcaaataaaactctagatttctggcttttcttgaaaaatgagatgctttcagcattgtgcctgcatccctgtgtgacagcagtctggttgtgagcaccaactgtagtgggctctccaattagccacagtccccactg

SEQ ID NO: 254260 - DNA, 680 bp, Homo sapiens
agcttcttaaatataaacttaatttttaatcttagttacaatattttagagtacatttaaaaattgtattgactaggattatctttatttttgcttccattatgctaattgtatttgattaaatttagagagatttaaatattaatgtgtttttttcatattataaatatgaatgtttggcctctatttcaaaatacacatgaataaaacattaggtttcctctgaatggcaatgttaaactgctctaccgaatggaattatgatctgtgaatatagagattatatattgatttaatttatttctggtgaaatcttcatactaacatcaataaatatttcctggcaatattctcatccttggcattttattgttctcagttcaaatcctcaagaagattttaaatgccttgtacctatgtgcactgaggggatagggaagacagtttggagatgtgaagaagttagaaaaatgtaaacaggttagggctggagaaagtggggaagctgcacctttaactgatgtcctcctaagactgtaacaattgctcctttgcagtcactgaaggctacaaggtacaatatgtagtgaggctcagcaatcagtatttagtaaaagaaaacagaaaaagaacaatatccctctttagtaccatcatttgctgagtggctattacacgcc

SEQ ID NO: 254261 - DNA, 7046 bp, Homo sapiens
acagaatctttgaaattgcctggggtctatgaagtcttattttataatgaaactgaagattgcccagggatgatgttatggagatatccagaacctagagtactcacccttgtacgaataactcctgtaccttttaacaccacagaggatccagatattagcacagcagaccttggtgatgtgctacaggttccttgtagcttggaatactgggatgaactccagaaggtttttgttgcatttagagaatttaatctgtctgaaagcaaagtttgtgaactgcagttgccggatatcaatctcgtgaatgaccagaagaaattagtatcttcagatctttggagaattgtcttgaacagcagtcaaaatggagctgatgaccaaagctctgcaagtgagtctggttctcaaagcacttgtgatccacttgtgactccaacagccctggctgcctgtaccagagttgactcctgctttaccccatggtttgtcccatccctttgcgtttctttccagtttgctcacctggaattccatctttgtcatcaccttgaccaactaggcacagctgcaccacagtacctacagccatttgtttccgacagaaatatgccatctgaactagaatacatgattgtttccttcagagaaccacacatgtatcttcgacagtggaataatggttctgtctgtcaggagatccagttcttagctcaagcagactgtaaacttctagagtgcagaaatgtcactatgcaaagtgtggtgaaacccttcagcatcttcgggcagatggcagtttccagcgatgtagtggaaaagctgcttgactgcaccgtgatagttgattctgtatttgtaaaccttggacagcatgtagtccattcactaaacactgcaatacaagcttggcaacagaacaaatgccctgaggtagaggagttggtcttcagccattttgtgatctgtaatgacacacaggagacactgcggtttggccaggtggatactgatgaaaatattctgctggcgagtctccacagtcaccagtacagctggcgctctcacaaatccccacagctgttacacatctgtattgaaggttggggcaactggcgttggtcagagcctttcagtgtggaccatgccgggacttttattagaacaattcagtacaggggtcgaactgcttctctcatcatcaaggttcagcaactcaatggagtacaaaaacagattatcatctgtggaagacagatcatctgtagttacttgtctcaaagcatagaactaaaagtcgttcagcattacattggtcaagatggacaagctgtagttcgggaacattttgactgcctcacagccaaacagaaattgccttcgtacatactagaaaacaatgaactgacggagctgtgtgtgaaggccaaaggagatgaagactggtcaagagatgtgtgcctggaatccaaagcccctgagtacagcattgtcattcaggtgccatcttcaaacagttccattatttatgtctggtgcacagttttgactttagaacccaactctcaagtgcaacaacgaatgattgtgttcagccctctttttatcatgaggagtcatcttccagaccccattatcatacatttggagaaaaggagtctgggattgagtgaaacacaaattattccaggaaaagggcaggaaaaaccactgcaaaacatagaacctgaccttgtacatcacctgacattccaagcaagagaagaatatgatccttcagattgtgcagttcccatctcaacatccctcattaagcaaatagccactaaggtacaccctggaggcacagttaatcagatccttgacgaattctatgggccagaaaagtcgcttcaacccatatggccctataataagaaggattctgacaggaatgaacagctaagtcagtgggatagcccaatgcgagtgaagctgtcaatctggaagccatatgttagaactttgttgatagaacttctgccctgggccctgcttatcaatgaatccaaatgggacctctggctatttgaaggagagaaaattgttctacaggttcctgctggcaaaattattattcctcctaattttcaggaagcttttcaaattggaatatactgggcaaatacaaacactgtgcacaagtcagtagcaattaaactggtccataacctgacatctccaaagtggaaagatggaggtaatggtgaagttgtgacactggatgaagaagcgtttgttgatactgaaataagacttggtgcttttccaggacatcagaagttatgtcagttctgcatttcctccatggtacagcaaggtatacaaattattcagattgaagacaagactacaataatcaataatacaccatatcaaatattttataaaccacagctatctgtctgcaatccccattctggaaaggagtattttcgtgttccagacagtgctacttttagcatttgcccaggtggagagcagcctgctatgaaatccagctcccttccttgctgggacttgatgcctgacatcagtcagtcagtactggatgcatccctgcttcagaaacagatcatgctgggcttttctcctgccccaggtgctgacagctcacagtgctggagcctgccagctatagttagaccagagtttcccagacagagtgtggcagtacccctcgggaatttccgggaaaatggattctgtaccagggctatagtgctgacatatcaagaacacctcggagtgacttatttaaccctctcagaagaccctagtcctcgagtaattatccacaatagatgtccagtaaaaatgcttataaaggaaaacattaaagatattccaaagtttgaggtttattgcaaaaaaattccctccgagtgctcaattcatcatgagctgtatcatcagatttccagttatccggactgcaagaccaaagacttacttccaagcctacttttgagagttgaacctctagatgaagtaacaactgagtggagtgatgccattgacatcaacagtcagggaacacaggttgtgttcctgactggctttggctatgtgtatgtggatgttgtacatcagtgtggcacagtcttcatcactgtggccccagaaggaaaagcaggacctattttaaccaataccaacagagcgccagagaagattgttacatttaaaatgttcatcactcagttaagcctggcagtgtttgatgacctcacccaccacaaagcatcagctgagcttctgagactcacactggacaacatttttctctgtgtggccccgggagctggtcccctccctggggaagagcctgtggctgcgttgtttgaactttactgtgtggagatctgctgtggggacctgcagctagacaaccagctttataacaagtccaatttccactttgctgtcttagtctgccagggagaaaaagcagaacccattcagtgttccaaaatgcagagtctcctcatatccaacaaagagttggaagaatacaaggaaaaatgttttatcaaactttgcatcaccttaaatgaaggcaagagcatcctctgtgatattaatgagttcagctttgaattaaaacctgctcggttatacgtggaagacacatttgtatactacatcaagactttgtttgacacctaccttcctaacagcaggttggctggtcactccacacacctctccgggggtaaacaggtgttgcccatgcaggtcacacagcacgccagggccttggtgaatcctgtgaagttacggaaactggtgatccagccagtaaatttgctcgtcagcatccacgcttccctcaagctgtacatagcctcagaccacactcctctctccttctcggtgtttgaaagaggacccatcttcaccactgcgaggcagcttgtgcacgccctggcaatgcactatgccgctggggccctttttagagcaggctgggtagttgggtctctggatattcttggcagccctgcaagcctggtgagaagcatcgggaacggggtcgccgacttcttcaggcttccgtatgaggggctgacccggggccctggagccttcgtgagtggcgtctccagagggaccacatcgtttgtaaagcacatctccaaaggtaccctcacatccatcaccaacctcgccacaagcctggcccggaacatggaccggctctcactggatgaggagcactacaaccggcaggaggagtggcggcggcagctccccgagagcctgggcgaggggcttcgacagggcctgtcccggctgggcatcagcctgcttggtgcaattgctggtatagttgatcagccgatgcagaacttccagaaaacatctgaggcacaggcttcagcaggacacaaggccaagggtgtcatctcgggtgtggggaaaggaatcatgggggtgttcacaaagcccatcggaggagctgctgagctggtgtcacagactggctatggtattttacatggagctggactttctcagcttcccaaacagcgccatcagccaagtgatctacatgctgaccaggctccaaacagccatgtcaaatatgtctggaaaatgcttcagtctctgggcagaccagaagtccacatggccctggacgtggttctggtgaggggctcaggccaggagcatgaagggtgcttgctgctgacatcagaagtgctcttcgtggtgagtgtcagtgaggacacacagcagcaggccttccccgtcacagaaatcgactgtgcacaggacagcaagcagaacaacttactcacagtgcagctcaagcagccaagagtggcctgtgatgtggaggtagatggagtccgagagagactgtcagagcaacagtacaacagactggtggactacatcacaaagacatcttgtcacctggcccccagctgttcttccatgcaaataccatgccctgtggtggctgcagaacctcccccctccactgttaaaacataccattacctggttgatccacattttgctcaggtcttccttagtaaatttaccatggtgaaaaataaagccctgaggaaagggtttccttgagtcccctctgaggtgtttattcctgcttgtgtgatttagtttttgggtttctttgagacagggtctcactgcattgcccttgctgacctcaaattctggggttcaagcaatcctcccacctcaacccacaagtagctacgactgcaagcacctgccaccataaagggctgcattttgccaccataaagggctgcatttttttaaaaagcctaggcagctctaacatcatctgatatggacacaaggccaacagtttccttatttacatccttacctctaaaagatacttcaaagtgacaaaaacgtgttccttccccacttagagacaatgattaacagggccctatatgttcttaccacatacagaggatgcatttatttttgctctatgacacttgcaaaaatctctactgtaattaatttgggtctattattaactctctgttccatcatagaatgtggccaggccttacaatggagagccagagttaaaacttcaagttgcatctgtttttgggctgagtcaccacctttgcctcatgctcctttgtctgcaaaggcctaggattctttctttaaatgaaatgcttaggactttgtggcttgttacatttgtcatttaactgcagtgctattctttgaaagctgctatgtgtattttctctgaagtctgcattttactaaaatttacaacagtctgatgattgattgattactgtccaggtacattttagaaaaagtgttcttcttccagtttgttttactaagcaaactttgagtaaatcctttgtcctatattgaatccagtcccaaagtgttcaggtgagtttctctagttccataaacaaaacatacatagtgggaactccctggtatgccatagagcacacaagaaccccaatattaatgctaacaattataccagtccattttgtttattctgtggaattgacttgacaaagcatgaagatattcccagtgtctgtctgataatattttgcatctaagaatgggtttgactcaagatcttgggttaccaagatgtcttaaatgttcagtaaatatctttcttacagtccagtagcttagagcatgtttgctgattgatattacatttaaacttggggctacagcttgttacctagaattttgagatactaagagaatgcaattttaaatgcccactggttttatttgttttggagagagggtctcattctgtcacccaggctagagtacagtgggaacagtcatggctcactgcagcttaagctcactgcctgggctcaagtgatcttactccagcctcccaagcagctgggactacaccaccacaggtatgcaccaccatacctggctgatttttaaaattttttctagagatgaggtctcactatgttgcccagctggtctcatactcctcagttcacgcattcctcccacctccacctcccaaactgctgggattacaggtgtgagccaccatgcccaacacccactgatctttaactctcacatgttgggcataagaagtcactatataattgttactggaaagcaagacttaacgaacaattctgactatgaaaaatgtctctttcagtttgttctgtaaatatttagaaaagtgacagctgtcaacctcagagtaactatttctaaaaatgtaaatatgtattaatccttgtatcttttatggtaattttgcatattgatatgaattatataaaattgtttaaaataaaaggtgtccttgaattactgaccacccatagatgtctactgttaccaggttttacaatgcaaattttcactaatacctgggtttaatacagctcacatcactgaatgttacacatgagtttaaatgggtaatatacaggttttgttataataaagttactgattaaatt

SEQ ID NO: 254262 - DNA, 6864 bp, Homo sapiens
acagaatctttgaaattgcctggggtctatgaagtcttattttataatgaaactgaagattgcccagggatgatgttatggagatatccagaacctagagtactcacccttgtacgaataactcctgtaccttttaacaccacagaggatccagatattagcacagcagaccttggtgatgtgctacaggttccttgtagcttggaatactgggatgaactccagaaggtttttgttgcatttagagaatttaatctgtctgaaagcaaagtttgtgaactgcagttgccggatatcaatctcgtgaatgaccagaagaaattagtatcttcagatctttggagaattgtcttgaacagcagtcaaaatggagctgatgaccaaagctgcaccacagtacctacagccatttgtttccgacagaaatatgccatctgaactagaatacatgattgtttccttcagagaaccacacatgtatcttcgacagtggaataatggttctgtctgtcaggagatccagttcttagctcaagcagactgtaaacttctagagtgcagaaatgtcactatgcaaagtgtggtgaaacccttcagcatcttcgggcagatggcagtttccagcgatgtagtggaaaagctgcttgactgcaccgtgatagttgattctgtatttgtaaaccttggacagcatgtagtccattcactaaacactgcaatacaagcttggcaacagaacaaatgccctgaggtagaggagttggtcttcagccattttgtgatctgtaatgacacacaggagacactgcggtttggccaggtggatactgatgaaaatattctgctggcgagtctccacagtcaccagtacagctggcgctctcacaaatccccacagctgttacacatctgtattgaaggttggggcaactggcgttggtcagagcctttcagtgtggaccatgccgggacttttattagaacaattcagtacaggggtcgaactgcttctctcatcatcaaggttcagcaactcaatggagtacaaaaacagattatcatctgtggaagacagatcatctgtagttacttgtctcaaagcatagaactaaaagtcgttcagcattacattggtcaagatggacaagctgtagttcgggaacattttgactgcctcacagccaaacagaaattgccttcgtacatactagaaaacaatgaactgacggagctgtgtgtgaaggccaaaggagatgaagactggtcaagagatgtgtgcctggaatccaaagcccctgagtacagcattgtcattcaggtgccatcttcaaacagttccattatttatgtctggtgcacagttttgactttagaacccaactctcaagtgcaacaacgaatgattgtgttcagccctctttttatcatgaggagtcatcttccagaccccattatcatacatttggagaaaaggagtctgggattgagtgaaacacaaattattccaggaaaagggcaggaaaaaccactgcaaaacatagaacctgaccttgtacatcacctgacattccaagcaagagaagaatatgatccttcagattgtgcagttcccatctcaacatccctcattaagcaaatagccactaaggtacaccctggaggcacagttaatcagatccttgacgaattctatgggccagaaaagtcgcttcaacccatatggccctataataagaaggattctgacaggaatgaacagctaagtcagtgggatagcccaatgcgagtgaagctgtcaatctggaagccatatgttagaactttgttgatagaacttctgccctgggccctgcttatcaatgaatccaaatgggacctctggctatttgaaggagagaaaattgttctacaggttcctgctggcaaaattattattcctcctaattttcaggaagcttttcaaattggaatatactgggcaaatacaaacactgtgcacaagtcagtagcaattaaactggtccataacctgacatctccaaagtggaaagatggaggtaatggtgaagttgtgacactggatgaagaagcgtttgttgatactgaaataagacttggtgcttttccaggacatcagaagttatgtcagttctgcatttcctccatggtacagcaaggtatacaaattattcagattgaagacaagactacaataatcaataatacaccatatcaaatattttataaaccacagctatctgtctgcaatccccattctggaaaggagtattttcgtgttccagacagtgctacttttagcatttgcccaggtggagagcagcctgctatgaaatccagctcccttccttgctgggacttgatgcctgacatcagtcagtcagtactggatgcatccctgcttcagaaacagatcatgctgggcttttctcctgccccaggtgctgacagctcacagtgctggagcctgccagctatagttagaccagagtttcccagacagagtgtggcagtacccctcgggaatttccgggaaaatggattctgtaccagggctatagtgctgacatatcaagaacacctcggagtgacttatttaaccctctcagaagaccctagtcctcgagtaattatccacaatagatgtccagtaaaaatgcttataaaggaaaacattaaagatattccaaagtttgaggtttattgcaaaaaaattccctccgagtgctcaattcatcatgagctgtatcatcagatttccagttatccggactgcaagaccaaagacttacttccaagcctacttttgagagttgaacctctagatgaagtaacaactgagtggagtgatgccattgacatcaacagtcagggaacacaggttgtgttcctgactggctttggctatgtgtatgtggatgttgtacatcagtgtggcacagtcttcatcactgtggccccagaaggaaaagcaggacctattttaaccaataccaacagagcgccagagaagattgttacatttaaaatgttcatcactcagttaagcctggcagtgtttgatgacctcacccaccacaaagcatcagctgagcttctgagactcacactggacaacatttttctctgtgtggccccgggagctggtcccctccctggggaagagcctgtggctgcgttgtttgaactttactgtgtggagatctgctgtggggacctgcagctagacaaccagctttataacaagtccaatttccactttgctgtcttagtctgccagggagaaaaagcagaacccattcagtgttccaaaatgcagagtctcctcatatccaacaaagagttggaagaatacaaggaaaaatgttttatcaaactttgcatcaccttaaatgaaggcaagagcatcctctgtgatattaatgagttcagctttgaattaaaacctgctcggttatacgtggaagacacatttgtatactacatcaagactttgtttgacacctaccttcctaacagcaggttggctggtcactccacacacctctccgggggtaaacaggtgttgcccatgcaggtcacacagcacgccagggccttggtgaatcctgtgaagttacggaaactggtgatccagccagtaaatttgctcgtcagcatccacgcttccctcaagctgtacatagcctcagaccacactcctctctccttctcggtgtttgaaagaggacccatcttcaccactgcgaggcagcttgtgcacgccctggcaatgcactatgccgctggggccctttttagagcaggctgggtagttgggtctctggatattcttggcagccctgcaagcctggtgagaagcatcgggaacggggtcgccgacttcttcaggcttccgtatgaggggctgacccggggccctggagccttcgtgagtggcgtctccagagggaccacatcgtttgtaaagcacatctccaaaggtaccctcacatccatcaccaacctcgccacaagcctggcccggaacatggaccggctctcactggatgaggagcactacaaccggcaggaggagtggcggcggcagctccccgagagcctgggcgaggggcttcgacagggcctgtcccggctgggcatcagcctgcttggtgcaattgctggtatagttgatcagccgatgcagaacttccagaaaacatctgaggcacaggcttcagcaggacacaaggccaagggtgtcatctcgggtgtggggaaaggaatcatgggggtgttcacaaagcccatcggaggagctgctgagctggtgtcacagactggctatggtattttacatggagctggactttctcagcttcccaaacagcgccatcagccaagtgatctacatgctgaccaggctccaaacagccatgtcaaatatgtctggaaaatgcttcagtctctgggcagaccagaagtccacatggccctggacgtggttctggtgaggggctcaggccaggagcatgaagggtgcttgctgctgacatcagaagtgctcttcgtggtgagtgtcagtgaggacacacagcagcaggccttccccgtcacagaaatcgactgtgcacaggacagcaagcagaacaacttactcacagtgcagctcaagcagccaagagtggcctgtgatgtggaggtagatggagtccgagagagactgtcagagcaacagtacaacagactggtggactacatcacaaagacatcttgtcacctggcccccagctgttcttccatgcaaataccatgccctgtggtggctgcagaacctcccccctccactgttaaaacataccattacctggttgatccacattttgctcaggtcttccttagtaaatttaccatggtgaaaaataaagccctgaggaaagggtttccttgagtcccctctgaggtgtttattcctgcttgtgtgatttagtttttgggtttctttgagacagggtctcactgcattgcccttgctgacctcaaattctggggttcaagcaatcctcccacctcaacccacaagtagctacgactgcaagcacctgccaccataaagggctgcattttgccaccataaagggctgcatttttttaaaaagcctaggcagctctaacatcatctgatatggacacaaggccaacagtttccttatttacatccttacctctaaaagatacttcaaagtgacaaaaacgtgttccttccccacttagagacaatgattaacagggccctatatgttcttaccacatacagaggatgcatttatttttgctctatgacacttgcaaaaatctctactgtaattaatttgggtctattattaactctctgttccatcatagaatgtggccaggccttacaatggagagccagagttaaaacttcaagttgcatctgtttttgggctgagtcaccacctttgcctcatgctcctttgtctgcaaaggcctaggattctttctttaaatgaaatgcttaggactttgtggcttgttacatttgtcatttaactgcagtgctattctttgaaagctgctatgtgtattttctctgaagtctgcattttactaaaatttacaacagtctgatgattgattgattactgtccaggtacattttagaaaaagtgttcttcttccagtttgttttactaagcaaactttgagtaaatcctttgtcctatattgaatccagtcccaaagtgttcaggtgagtttctctagttccataaacaaaacatacatagtgggaactccctggtatgccatagagcacacaagaaccccaatattaatgctaacaattataccagtccattttgtttattctgtggaattgacttgacaaagcatgaagatattcccagtgtctgtctgataatattttgcatctaagaatgggtttgactcaagatcttgggttaccaagatgtcttaaatgttcagtaaatatctttcttacagtccagtagcttagagcatgtttgctgattgatattacatttaaacttggggctacagcttgttacctagaattttgagatactaagagaatgcaattttaaatgcccactggttttatttgttttggagagagggtctcattctgtcacccaggctagagtacagtgggaacagtcatggctcactgcagcttaagctcactgcctgggctcaagtgatcttactccagcctcccaagcagctgggactacaccaccacaggtatgcaccaccatacctggctgatttttaaaattttttctagagatgaggtctcactatgttgcccagctggtctcatactcctcagttcacgcattcctcccacctccacctcccaaactgctgggattacaggtgtgagccaccatgcccaacacccactgatctttaactctcacatgttgggcataagaagtcactatataattgttactggaaagcaagacttaacgaacaattctgactatgaaaaatgtctctttcagtttgttctgtaaatatttagaaaagtgacagctgtcaacctcagagtaactatttctaaaaatgtaaatatgtattaatccttgtatcttttatggtaattttgcatattgatatgaattatataaaattgtttaaaataaaaggtgtccttgaattactgaccacccatagatgtctactgttaccaggttttacaatgcaaattttcactaatacctgggtttaatacagctcacatcactgaatgttacacatgagtttaaatgggtaatatacaggttttgttataataaagttactgattaaatt

SEQ ID NO: 254263 - DNA, 262 bp, Homo sapiens
aaagtttgtgaactgcagttgccggatatcaatctcgtgaatgaccagaagaaattagtatcttcagatctttggagaattgtcttgaacagcagtcaaaatggagctgatgaccaaaggtaattcattgaaagatgatatggtagcattacactgggaaacaatgataagtcatcttttcctatctagtgacccctcacttaactgtatctcagctgtctagcagctgcatctctctgaacaacagatgagaaccacaaag

SEQ ID NO: 254264 - DNA, 175 bp, Homo sapiens
catccatgccattgcatgcgtcagtgcttccttcctttgtattgctgagtaatattccaatgtgtagcccaacaacattgtatccgttcatcagctgctgaacatggggattgtttgcattttggattattatgaacaatgattctgtgggcatttatgtgtgcatttttgtcaa

SEQ ID NO: 254265 - DNA, 511 bp, Homo sapiens
aaagagactaaaatatgcatttgtgcttttaactctgaaaacctgaatacctattcaactgttgattctgagtatttacagaactttatttcttctttggacatgctttcgcagtttttacctaatgtatacacatttttgccttgttcttaataattaaatatctgagaaaaagatattcaaaaagtggttttttgtgcgtactcatgataaacagtaacataaaaagttacagaggtcgggcccagtggctcacgcctgtaatcccagcactttgggaggccaaggtgggtggatcacttgaagtcaggagttttagaccagcctggccaacatggtgaaactccatctctacttaaaaaataaataaataaataaacaggcatagtggctcacgtctgtaatcccagctactggggaggctgaggtgggaaaatcacttgagcccaggaggcggaagctgcactgagccaagatcacgccattgccctccagcctgggtgacaaagcg

SEQ ID NO: 254266 - DNA, 182 bp, Homo sapiens
ttagatcaccatattcatttttaggacatggaattatttccgattttttttttcaaacgcagaaattgttttcatagaaaaaatagatcctacttgtttcttatagtattgtgatattgcaaataaaactgaggagatttagatatttctgatgaatttttgaggcattcatctgatagtac

SEQ ID NO: 254267 - DNA, 270 bp, Homo sapiens
aaccatttttcctatgtgactgtgcagtgggataaaagctctcatactgctggtagaagtgtaagttgattaaactggaaaaaatagtttgacaacttatatagaaatttaagattttttttttttttgagatggagtctcgctctgtcgcccaggctggagtgcatgaaatattttgcagacattgaaaataatgtcatctttcctttaatacagaatcaaggaaaaatgttttatgtaaatcttttattttattatactttaagtttt

SEQ ID NO: 254268 - DNA, 284 bp, Homo sapiens
tgctgacctcatttcaaggtgtaatattttaaatttatgccgaagtttaataatatattgtttaggcttaagtttggctgaaaatatcagactactctaaataacagtgctttaaacaagatccaattttgtctctcattagaaagtttaagcacgcaccctaaagctattatgatctttcaagatcaggaagctttttattctactttgagtggccttcattgccaggctttcctcatggttcatgatggtggcttcagcagttaatcaagtctgcatttcag

SEQ ID NO: 254269 - DNA, 380 bp, Homo sapiens
gtgtcagcaactgaagtctatacaggaaaaggcagagctgattcacagggagaaactaagtcctgatgacatcacctgacccctgaatccagctctggctagctgtgcctggacttcgaagttagatgaggaaactgaagcacagagttaacttatccagttacactgtaaacgacagaggcaggattcaaatccaggcagcccgacaactcctacttttaccacgacactgattctgagcccacaagcaactaaggttctaatgctattccaacagagtaaaaactcaaagtccagcactcccaaaagcaccaaatgtgacagtgaaatatcaccttttaattctgaaacagggttaacatagttctgcattataaaaa

SEQ ID NO: 254270 - DNA, 582 bp, Homo sapiens
cttcacccaaaggcaatgctcttggctatgaccacctcatgttttcaaggtggcttgagatgagttatctttcacttttgagtccatgagcactcaggaatccttgttgtgttaaagaggaaacagtagattgtttctgctcatactgctctttctgtttttttttttggggggggggtaggtttttttaagcctgacacccttattatctcccgactgtgactttcacagagaatgcagattccctgggactcacctgaccaggattctatcttagagaggttctcttgagactccttctcttggaaaaaaaggtagatttgaggacagcatgtctttaattctataaaatccttatgaatctctagcactacttttatccttcagtctccagatatttattcatgtttaaattgtgtttgtgggtatatgcatgtcaatggcctgatatttttgcactgagtcctgccaaaagctatttcttacctctgattttaaagagggccttctcacccatctccctcagcttttgcatctcatctaaattgcacgccacagcaaagcactatttcaccttcgtgt

SEQ ID NO: 254271 - DNA, 438 bp, Homo sapiens
gctgggcaatcatatttctagcaaaactcttgactttcttcctgttctcaacctctgccattaaaataaggaaatagtgctatcaaagtaaaagagaagcatctgttggaggggttcaagggggttgagtctttaggcatcaaagctaggagttggctgggcgtggttgttcatgcctgtaatcccagcactttggaaggccaagtcaggcagatcacctgaggtcaggagttcaagaccagcctggccaaaatggtgaaaccctgtctctactaaaaatacaaaaattagtcaggcatggtggtacatgcctgtagtcccagctactcggtacactgaggcaggagaatcacttgaacctgggaagtggagttgcagtgagccaagattgtgccactgcactccagcctgggctactgagtgagactccatctcaaa

SEQ ID NO: 254272 - DNA, 399 bp, Homo sapiens
gggtccttctgagggagccagacctctggcccagaaagccagacattgtgtggaaggagcgttcctggcccagggtcttcctgtgtatccttgccccatcgatcaagtgctgtgggagctgttttaaggtgaaaacctagatgcacagcacttccttgtcctcatgaaaggagcagaggtcttcacaggcctctgggctgccccgagaacctctctattccaggcccctctgcagacccctccagacgccagaactccaggcagtggcctgagctgtcactccttgctctgagacccctacctctgccatgagacctcttcatattcccccagatgccccgatccctctggattccccacctcccctggaacctcccagaacatgaaatgtttctcaaa

SEQ ID NO: 254273 - DNA, 460 bp, Homo sapiens
ggagttcgagaccagcctggccaatatggtgaaaccctgtctctactaaaaatacaaaaattagccaggcgtggtggcgcatgcctgtagtcccagctactcgggaggctgaggcaggagaatcacgtgaacccaggaggtggaggttgcagtgagccgagatcacacctctgcactccagcctgggtgacagagcgagactctgtctcaaaaccaccaccaccaccaccaccaccaccaacagcaacaacaaaggtaatagagatgtttgtttattaagctatacttttaaatgtttcctaattattatagaacacagagacacaaaacttctgtgattgaaacagaaccagaggcaggatcagaagctctgtctatatcccatcaccctatcttacccccatacgacccatcagcctcatataaccaaaccctattactcctaatatgaccaaacccc

SEQ ID NO: 254274 - DNA, 497 bp, Homo sapiens
gcagatgtgcccagccctgctatatagtctctagtgggcaatgggcccaggagcactgcatacctttgtcctgataacaggacccttcgaatctgtccacctccctattcagcacttctgtggccactagtgcttggctgctttcccttacctgcccatgggtgcatgtgagcaaatgaggcttccatccacccaggtggtccactcaagtattttgcttttaccactcttgttctttgtcctccgaggcttgctgggctacagaaaccagcctatggctctgctctgggatgcactaaatgatctgggtttctctcatcctgctcttcagtgtccagcaggagacagtcagggtgctgagcactctcagagactctctgtctgatgtctctctacgtcaccaaaactatccttttattatatgatcatacactctatgttgttctcagtggcttcatctatagcctttaattgtaaagtcaagttttttagaatac

SEQ ID NO: 254275 - DNA, 442 bp, Homo sapiens
gcccccaccccacccccaggtccccacctttacttgacttttcttcttttgacaatctggtagtctcaagatggcatggctcacgctcggcatctaggaatttctgaagacctccaggcaggggccatgaggatgtgtcctcaaagaaatgcctgatccttgtggctggatgctgcctgccccctcccttcccagtttagataattaacagacctgggcggaatgctgagagttccaggggcaggaaaggagccattctcagctccccagtgccaggccccctgttgacaccaaacagcctcagagcaacatctgaaggccccaaaggagagaccagccaggaagatcccagggagggatccagccccatccaacccagccacccagagcctgaaggcagagcagaggcatcccagcactggggacacccactatatatttt

SEQ ID NO: 254276 - DNA, 566 bp, Homo sapiens
ttgtttgaatgcttcatgtatcctctcaaccacaacttgtttgcagagttttaatctgaagggcttaggtctcttgttcaatgaatgagtttgatctgatgggtgagaggaaggtgaaatggaaagcgaacgagaagccatacagattaggcgagtgagcctaatctctccctaaccataagattgagtatgcctgaattcttcgcagagtggaagaatccattttaaatatatatatctacatgtacagatcctttaaatatttgttctgacattcattgtttttgagtcactgtcattgagaaaagtttagaaaggagatattaggagcaggaaatagaaggtaaataaaatatcaaaataaaaatggggttttataaatgatataataggcaaaataaaggaaaggcatcctagacctctggttaaaatgaagatggcacttggcgagatgtgttccagggtagttcacatgatgtatgttttcagagaattgtcatattgcatatgctgctatattttttattttcatgaattaaaaggcatgttgagatttcagagtttta

SEQ ID NO: 254277 - DNA, 376 bp, Homo sapiens
ctgcctgtaaaggggaggaagactagaaaatatttgtcaacaccagagactcctaggctgggtgggggatatggacactgttttgatgtaaataaaaaatttggcacccaaatgaggtgaatggtgactggcaactgcacctagttggatgtcagtgctgagttgcatttacctaaaagagcagttagcaagttcttgatgtgtcctgctgaatgttttatcttgtgaagggaagaagaagaacctatagagggctgggcgaggtggctcacgcctgtaatcccaacactttgggagtctgaggcaggagattgcttgagcctaggagttcaagatgagccaaggcaacatagtgagaccccatctttattacatt

SEQ ID NO: 254278 - DNA, 151 bp, Homo sapiens
ttggttcttgttgagagaatagctttgacggatttctaggctgcagatgtcaagttcaaagtcttcatcatatgggtgatatttaaagtggtgagactctgagaaagtgtgcagatgagggagggaggccctgggaccctccaacatgtag

SEQ ID NO: 254279 - DNA, 706 bp, Homo sapiens
actcacagtccagtgttaacaggcaataatggtgtgattccagaggagagtactaggtggcaggaaaataaatgagattagcagtatttgacttggagccataggcatcaattctgctccagctgtcgaccaggttctaaaaacaagactcggagcagcttttgctcttgctagtgatgcagggccaggagagcccccacactctgcatttgcaggtgtccatgaggggaagccactcctgcatttatcctgtgagtggagaagctcagaggaatgaggacattccaacagggtatcagaattctcttttgtttatgctaattgacagcaggaacatcaccatcttggacaaacaccaccattttaagttctcttttatttaaaaactgcctaaatccagccccaaaacatcagcctaatggctattgtcagcataatcagaaacattccaaccctaagataaacacccctctggccagaaatatgccgaccccgagacagcctcccctccgaccagagacattccaaacccgcagtaaactttccttcgcatggaaacattccaaacctacaaaaagcttccctcttcctaaacccttaaatatccttagtctgcaagagagaatgctcctgactgaaatcagccagaagcccctctcaggtttattctccaaaataaacctgtctttgactgttgagccacttt

SEQ ID NO: 254280 - DNA, 481 bp, Homo sapiens
actcgatccgctgatccagcacacttcctaatagccctatcggtgacaatctactgcattgtcttatgaaaacctgctgcctgttcctaggcaacccgatcaacggaaatctcaggtttatacaattttcatttagggaacataaaggttaactgactgtaatgggagtgttttaaacaaacccacctactcttcctctcactgaacagggctgacagctctgtttaattctgctctgtctttgctgctggtggtttgggcagcaatgactgtctgagtgccaaccacctgctgggtcaacggtgagtgttccccaagacggagtcttgctgtgtcgctcaggctggagtgcagtggcgtgacctcagctcactgcaacctccgcctcccgggttcaagtgattctcctgcctcagtctcccgagtactgaagcaggagaatcgcctgaacctgggaggcggcctattgcactgagcccag

SEQ ID NO: 254281 - DNA, 548 bp, Homo sapiens
agcaaatgtcactgactttttgaaaaataaacaagtgcatatatcatatagggaaaaatactgaaaagacatactaaagttgtcttagaatcactctgtttttaaattttaattgggcattttgctagttattttctaagctttctgctaagcaacagggagcaggtttttgtaagataatgcaatagactgtcactgataggggaacataaaggttaactgactgtaatgggagtgttttaaacaaacccacctactcttcctctcactgaacagggctgacagctctgtttaattctgctctgtctttgctgctggtggtttgggcagcaatgactgtctgagtgccaaccacctgctgggtcaacggtgagtgttccccaagacggagtcttgctgtgtcgctcaggctggagtgcagtggcgtgacctcagctcactgcaacctccgcctcccgggttcaagtgattctcctgcctcagtctcccgagtactgaagcaggagaatcgcctgaacctgggaggcggcctattgcactgagcccag

SEQ ID NO: 254282 - DNA, 454 bp, Homo sapiens
tactcttcctctcactgaacagggctgacagctctgtttaattctgctctgtctttgctgctggtggtttgggcagcaatgactgtctgagtgccaaccacctgctgggtcaacggtgagtgttccccaaggccaggggccatggcgcatacactctccaggggaccctggcctgtcctgggcatctgaatgacaggggaaggcagcaggtaacagttaacagcagggaacctggcctgcctgccctgaaggcctcttgaaagacttctcaggaccaggaagcctgtccagtcccctccacccccgagactcagccacttaattcaatgacgcagatgcggaggaactcaacacgccaggcaagtgctaggctttggggacccaaagataaataaggaaagcctccacctctctgagagctctcattgtattgaaaaagaagaggctctgactg

SEQ ID NO: 254283 - DNA, 496 bp, Homo sapiens
caacattggtttttaaaataatatgaatcccacctcagcctcccaagtagtggggactacagcaacactacaccgagccacagttccctttcttgaatttggaattattttcccccagtttgagtcagagaacatttgaatggaatcatctaatgtcctatccaaaaggactatttttctttaaaatgcatcagtgtcttaggctgaagttcaagagcctccatttccaactcttgggactactattcctcatgatcaccatttagaagcctcttttactcacctgtctattcttgagtaaagtacacaaggttgaagaaagtcttccattgaagacatcaagacaaactgctcagcatttagaaatgctaccatttgccctccccagcctgagccccagttgagtctcatcttacaatccggcctaagctcgccattcttgcaaagtaagccttcacaaagcttgcttgctctcattttcaaacacaaactcggg

SEQ ID NO: 254284 - DNA, 484 bp, Homo sapiens
tgaatatttgtgagagggagttaagtaatataaataatataactgaaaacatttttgaataaaaacaaactctgatgcattatgtagtcaaaacaagcttctcttgaatttttatatgaaatatgagactgcaaagaaactcagctttgctacaggttacttgcagctaaatgtctatctttcctcttcccatgaaccaaccctcttctgccattgaaacatttccattgagacattggaaatgcctgagaatgagcaacattttaaaacagtttagcacttcctagatgattacataatttcagcagttatttctgatttccttactgatcttattttcttattgatcttattttctttcctttgatttcttgctctgagcccctatgctaatatgtttttccttctgaactcagagacacccatttatcagtaatatgcatacattttctttagtgttagtaatagaaattgcttccccaaa

SEQ ID NO: 254285 - DNA, 706 bp, Homo sapiens
tgcctggggttatttcgtcacgaggcaggtatgaaactaagagacatagagaacttaagagacttgtccaaggttacccagcaggtaaggggatgtctggattagaacctgggcagcctggctttagaattcgaattgtcagctgctattactgcccatcagtggcggaaggacccagaggtgaagacttggcaacagaggcagggtggcgtggacgggggacagataggcctggccggtggtcatacagccaggatcaggccttctgtgggctccacagggtgtgctcccagggccgccccgctggcctctgggctgagtttccttgaggttgtctggatcccagaccctctggccttcccagctcagcagcttcagcctgggagagcccacttttcctcagcagacagctgatgatcgttgactgggcttggtgggaggtaaggaggtaaccagcaggttttctttctgtgatggtaagaggccgccttggaagcagacagctgagaaaacacaaagacctgggctggccggccccacccttggtcgagccgcttctgcctgtgaagtgtaaatgcaggtggtgtcaagccggcagacaggcccagctccctcttccccttgagcaggcagggtgacgccccctgcagcaggcccgtgattcagttgctctggctgatgaggagcctgggcccgggaggagtgt

SEQ ID NO: 254286 - DNA, 745 bp, Homo sapiens
tgccttcgcatatatcatctcgtttaatcctcgagacagcttccatgaggtagcctcattatacaaataaggaaactaagagacatagagaacttaagagacttgtccaaggttacccagcaggtaaggggatgtctggattagaacctgggcagcctggctttagaattcgaattgtcagctgctattactgcccatcagtggcggaaggacccagaggtgaagacttggcaacagaggcagggtggcgtggacgggggacagataggcctggccggtggtcatacagccaggatcaggccttctgtgggctccacagggtgtgctcccagggccgccccgctggcctctgggctgagtttccttgaggttgtctggatcccagaccctctggccttcccagctcagcagcttcagcctgggagagcccacttttcctcagcagacagctgatgatcgttgactgggcttggtgggaggtaaggaggtaaccagcaggttttctttctgtgatggtaagaggccgccttggaagcagacagctgagaaaacacaaagacctgggctggccggccccacccttggtcgagccgcttctgcctgtgaagtgtaaatgcaggtggtgtcaagccggcagacaggcccagctccctcttccccttgagcaggcagggtgacgccccctgcagcaggcccgtgattcagttgctctggctgatgaggagcctgggcccgggaggagtgt

SEQ ID NO: 254287 - DNA, 468 bp, Homo sapiens
acattaggaaaatacagctgttagaaagaggaggggagagtacacaatgtatttatagcaagtgtatatattatatcaagtagaacagacacccagccttttatgagcagttttaactctgacatgcatgagttttaaataagaaataactatagaaatctccaaagaattttaaaaatcccaggccgagcatggtagctcacgcctgtaatcccagcactttgggaggccgaggcgggtggatcatgaggtcaggagttcgagaccagcctggccaatatggtgaaatcccgtctgtactaaaaatataaaaattagctgggcgtggtggcatgagcctgtagttccagctgctcggtaggctgaggcaggagaatcgcttgaacccgggaggtggaggtggcagagagccaagatcacaccattgcactccaagctgggcgacagagtgagactctgtctcaaaaa

SEQ ID NO: 254288 - DNA, 1215 bp, Homo sapiens
tcgcgacggggtagcggttccggaatcccccagaaccgtgagtcctcctgaggaagccgtcgggggcctggccctgttaggcactgtctcccagagtccccctttcccactagccgcctccgcgtagcccgagaccgcgtcaggagttgcgtcttcctggctgcgcctttttcgggacgtccccgcgccgtccgccgcctctcactgtccccggagcgcgcgccacccgcccgcttcccacaggcggtttcacgcgggtccccggcgccgcgcgcggctccggccctggcgactcttgggacacccgagtagttgcgtgatagcggggctgtcctgaggattcggcgtgccaggttgagagcccgtcgcgtgccggggactcgcggccactgtcgcttcccgtccgcccctcttctcctgggatttggggaggtgggcgggaaagagaagtggtcggcggccacccttgccgactcctcctcagcaggtcgcagttgaaaggtcatccttctggagcccactcccctggcccggcgggcaaggataggtctccaagtcccaccctctcacagcgctcggttctgttccactttagaacaggtcgcagttgccactacgtaaacagctccccatagagagagtattttattcattccgattgctccgtcttttatctagaacagagtctggtacaatgactctcgaaatgtggtctggtgacctcagggtcgctgagacccttctagggaattcacaaagtcaaaacaacattgataacgtttcttacgtgttatttgccgtttttaccctcattctgttggaaatgtacagagttttcaagcggctagatgacgattgactagctggtaaaatgtatcctggagtatccttgtgttttctagaattttctaaggtagtaggtttagggcataaatacgtgcgttttcagagattaatgcaatttgccctcagtactcctagtgtgtttctaggaggtaggttaggtaggtggtgatagcctcccttcaaggggaacaaacttgctaaataaatagaacaaaccagcccatagtgtacaaaccacatccgaggctcctggttagaaaattttgcagcaaagaggtacgagagcagaagggaaaatccccaaactctcacaagcgcagaaacccatgatcagtgtcgttgggctgaattatactcattataatagta

SEQ ID NO: 254289 - DNA, 410 bp, Homo sapiens
aagctataactagtaaggagattgaatcaggaatcaaaaaccttccaacaacgataagcccaagaccagatggcttcactagtgaattatactaaacatttaaagaagaattaaaaccaacccttttcaaactctcccccaaaaagaagagaagagaatacttcttaactcattttataaagccagcattaccatgataaaaaaccagaaaaagtcactacaggaaaaaaaaactacaagtcaatatccctaatgcatatcaatataaaaattctcaggaaaaaaaaaaacctagcaattcaatttcaatggcacattagaaggatcacgtaccacgcccaagaggcaattatccctaggatacgaggatggcacaacatacaaaaatcaatgtgatatataccacattc

SEQ ID NO: 254290 - DNA, 694 bp, Homo sapiens
caaagagctatttttgaggaaaggattcctcacatttttgcaggtgtaagtcattcctgcctcagtggagtacaaagagtgatgtgagggaagcagagctgctggcaggaattttaaaagtatactatatttgtcccacattaactgtgcttctggggtataaaggtcagggatagaactggtcctgtgggatgtttctcatcgaaaccacctctattccaaagccttggtgtcactagccaagatgtatctattctaataaaatataggtctcatatgacaccacattacaaaatacaaattttcatttgtttttgtttatctagtctattggaaatgtgtggttcttttgtagtttcagttaagagtctaatttggtcatttgcctcttaaaatactcttcaagtcctgtgagtactcaacaaacactcactgttgaccaatttctatttccagccacatactgttcataatgaaacctacttagaggatttgaatgaaataatttaattattttcaatgtacaagaggctaaatgtttccatttttgatgttcaatcaagaaacattcaaattcaactgtattttttgttaagaagaatatttcctttggcattcaaaatgatcccaaacattgcttggaagagagaagtggggagagagaccacatgtattaaagcacatttaaccaatt

SEQ ID NO: 254291 - DNA, 694 bp, Homo sapiens
acaacactttcatctttgttttgttgtctgttgattgtatttcctcattcaagttgagatgttcttggctttggtatgagaagtgactttccattgaaacctagatattttgggtattatgttgtgagactgtggattttacttaaacctcttgttttagtggtgccttctgagactgctttagcagcatgaagaggatggcgctgtcttattattgcaagatgagaagtctaggttctcacctgtcctccattgacacctgagtggaaaaaggagtttttcattcctgctgggcaggggcacagtctacctttcaccagtaggcttctgctgatatcactctaactggaagggataggaatgactcattactgttttatacatggcctttactgatactatggatgtagagggtggttcgcttctctcctgtccctctccctttcttctctctcttttccttctcttctcttttttttctgctatttcacttcccctcttcctctttctttatgctttctttcttcttcttatctatctttttttctcctttctcttccttccatccctcttctttcttatcttccttcgcatttttcttctctctcttcttactctctctttctttcttattacttttctttctttcttctcttcttttcttcccaccatcctctctctttctcttttttcc

SEQ ID NO: 254292 - DNA, 1148 bp, Homo sapiens
tgtcccactgtctagacttttagccccttgaaaacagaggtcatggtttaagtgcttttgtgtttcatgtacactgtaggcattcagtaaagagttgctttgatttttagcttggtggtcttaatatatgcattttatactgattttttaaactgttgttgttgctgaaaactagatttgtcagcttgtttagtgcatcatgatccgcttactatggattctgctaccttgaccagcaaggtagcagaattttaactataatttcttctttaataagagattttctgaggcaggtaaatgaagtatactgatacttcttacacggtggaatatgaaagtgtgacacgtcgcatcttgaaagtactttaaattgtgtgcctttgagttctacactgaaaaataaaactactaccaacaacttgaccccctttcctgccctcaaattgtttagaactgaagatagtgttttgttgtacatatttatattccataaagtaaaattttttaacatcagaaaacatctaaatatattatcgattccttaagaataaacactcattccctgatgtattatactattactaattactttaaaaataaaattagtattgtttttaatataaaatgtttggtaacttgatttttattatactttgcttgctcttttcacatcttatggtaagtttaaagtactttctgatgtcttgtctttgtaatgttttagtgataagaagactcattattagattgactacacagtacctctgagaatgatgagtgttattcctaagttcctaaaaggagactagtacacagggctagttcctggcagtaagaaataccctgccttagctttttggaaaatttactatccgttcggtattgaccaccagtggagcatttgttattaggcatttagcaagtaatgtgctccaaattgcatttccttctcttatttttatccttatgagagagtaaggcaggtgttatttttagttatgaattaggtgtcctgggatgtacatgcctaaattatattgacagccagttgtggagatgccttatacaacctatctacaatgttttctctatgagacctgctgacttatacacgttgaattgtactccagtgtgaagtcctgtataaa

SEQ ID NO: 254293 - DNA, 377 bp, Homo sapiens
ggaaatcacaagcagctttgttgaagaagtggtatctgaactagatttgaaagggtgagtctgagttgaaaatgcagaagaggagaggcaggttctggagcaggtggcggggtgcatttcaacaaccacagcagactgcccagtggttcgctgtgggggatggtgtggatcagaagcacagaccagcccgggcaacatggtgagatcctctctctattaaaaaaaaaaaaaaaaaaagaaacgaaaattagctgggcatggtagcgcatgcctgtaattccagcactttgggaggcctaggcaagtggatcatctgagcccaggagttggagaccagcccgggcaacatggtgagatcctctctctattaaaaaaaa

SEQ ID NO: 254294 - DNA, 516 bp, Homo sapiens
tgatttcattggaaattcagctggaggagtatatttgggttcacctctttgttttcaaaatatatactaggagtgatattttatcagaaaaaaatgtatctttaatcactttatgttactagagaaaatgtaagtcatttaaacatcttgagttcctagaatttttagttgctgggataatttggttctcctttttgcctcacatggtcatattgcctctgaaggtgactggcagtgcaatcaaaaccttcaagaacaggccaagtttaactgaatcccttgtggctgtcactgtgatgagctttggagagtaagtaggaagctgtgttggagacatctgttgtcatgtgtaatgtatatcaggctttggcagtaactgaaaccaagcaggcccatcagtctatagtttatatgcagtaatcttagagctcaaaaattacttctgtgaatggcaaatcgttggacagaaccagcattttttatacttgagagggaaaggagtttgaaagactcacc

SEQ ID NO: 254295 - DNA, 359 bp, Homo sapiens
atgcattggtaatgttgccatgtatttcaaattaccctccatgtatgtttcttaatccttaatctctctttaaaatgctaacaagagttgttttaactaatgcggaagttggtttatctcacatccttctcagccacctgatcaagcctacgtaatcaagtcattcatatgctcactctcctcgtcatcacccccgtttgtgggtccgcaactcttcaggcagggtgcacccctcctacatcggcaagccctctgcagcaaagccgagcagtatccaacagtctctagggatttccctgacattccactttccccttccctctgagctgctttttacattttattttattcaccttcta

SEQ ID NO: 254296 - DNA, 465 bp, Homo sapiens
agatgggaggaagattggaaaggaaaaatgaaaactgtctacgcagaagaccataaaagattgagacaatttttaaaagaaataggtagaagaatgtaccaggctcaatccttagaagattcactataataaagatgttaatattcatcaagttgttcttcagattccatataattccagtatagatttcagcagtgtgtgtaggaagagggaggtgaggtatgagaaaatggacaagctgtttctaaaatgtgtataggaacagaaaacgtaaagaactaaaacaatcttgaagaacaaagtgaagactttctctaccagacagcaagacgtttaggccagatgcagtggctcatacctgtaatgcctgcgctttgggaagctgaggctggaggatcacttgagaccaggagctcaggactagcctgggcaacatagcgagacaacttctctacaaaaattaaa

SEQ ID NO: 254297 - DNA, 663 bp, Homo sapiens
acctctccagcgatgggagccgcccgcctgctgcccaacctcactctgtgcttacagctgctgattctctgctgtcaaactcagggggagaatcacccgtctcctaattttaaccagtacgtgagggaccagggcgccatgaccgaccagctgagcaggcggcagatccgcgagtaccaactctacagcaggaccagtggcaagcacgtgcaggtcaccgggcgtcgcatctccgccaccgccgaggacggcaacaagtttgccaagctcatagtggagacggacacgtttggcagccgggttcgcatcaaaggggctgagagtgagaagtacatctgtatgaacaagaggggcaagctcatcgggaagcccagcgggaagagcaaagactgcgtgttcacggagatcgtgctggagaacaactatacggccttccagaacgcccggcacgagggctggttcatggccttcacgcggcaggggcggccccgccaggcttcccgcagccgccagaaccagcgcgaggcccacttcatcaagcgcctctaccaaggccagctgcccttccccaaccacgccgagaagcagaagcagttcgagtttgtgggctccgcccccacccgccggaccaagcgcacacggcggccccagcccctcacgtag

SEQ ID NO: 254298 - DNA, 450 bp, Homo sapiens
ccatgccaggctgaagtttttttttagtagagacagggtctccctctgttgcccaggcttcagtaaatttaaagagatagaaataatacaaagtattttcttcaaacacaatgaaatgaaattagaaatcaataacagagaaatttgggaaaataacaaatatgtataaattaaagagtatatttctacaaagccagtaggccaaagaataaatcacaaaggaaattagaaaatactttggtatgaacgaaaaccatgatacaacatactaaaatttatgaaatactgctgaagtaatggttaaaggaatacgtatacccttaaaagcctgtgtttaaaaagaaagctctcaaatcaattatctaaccttttactttaaaaagctataaaaagaagataaaactaaacccagagctggcagaagaaaacagtaaagcttagagtagaaat

SEQ ID NO: 254299 - DNA, 696 bp, Homo sapiens
taccatgccagaagtgttcttggcatgtcatgaggactgttgccgttattagcgatgacaatgcagtcattatttttacactggcttaattgttcagcagacaccaaggaccgtgtcaacacagttctgcaaatggaaacaaacacgccatcattcagggtcccactttgatattctgcctttgcacttgtttcattttttctttgaagaacattctatagatcgaaggaattattccagacctctgattcatgctaggcttattctcttcctcattcagtctctcaatcaatcaatacttactgagtacttgtcattgcaagacctgaggaatagaggggctagcagaccagcctgggttctgcccttattggaatctttcaccttctactgcagaaggtcccacctttaggtagaatgatcagagatctctctgaggatgtcacatttaaactgtgactctaaggatgaaaagaagccagatttgtaactaatgaaaggatgttccagccggatgctggaactttgggaggccgaggcgggtggattacctgaggtcgggagttcgggaccaacctggccaacttggtgaaaccccatctctgctaaaaacacaaaaaattagccagacatggtggcagcacctgtaattccagctactcagaaggctggggcaggagaatcgcttgaacctgg

SEQ ID NO: 254300 - DNA, 207 bp, Homo sapiens
cctcctccactctccttggatttttgtcatacattctaacacactagcagggctcacctcaagtttactgcaagtatcacacacatgtcctctccaacaactaaactaggacatagggggccttaggaggcactttattgatcttagtttctctaaaatgaacacgaagcttaaactcattaactgtttactggcaacccattcaac

SEQ ID NO: 254301 - DNA, 257 bp, Homo sapiens
aacatgggaagtttatcttactaacctgtttacttatatgggcttaagactaacctttgtcctactagggatactttactgcctcctactcaggggtcagcagaagtttattacccacaaactgtgtttgctttaggcctgagaacctggcctttaatctttaccctctagtggtgtttactcataacttttgttaattagtcttactgaataaatatgagcctcactaactgaccagggctgagtcgcaactgttt

SEQ ID NO: 254302 - DNA, 1068 bp, Homo sapiens
ttaataatgttgaagtagtaatagtttgtcaatatttcaagaaggtaggaatggccattaaaaaaataaagtttgaattgattgagttgtaatttataactaagtgaattaaatgctttctaaatttgagcagactgttaatttgtagcctaagctctgtaaagcaattgtggagaacatctaaaggcattctcctagaagaggactttatatgtacatttgaggagacagatttttcgttttatattaacatctgagaagtagtcctttctcaaaagtgctgtggatgctgtagcacttgctctagtattcaggacttttccagtcagtttattgttagcttttggtttccttgagaaagggtttgactacaattcttccttttcatttcagttattagttttatgtagatgtaagtgctgttatcttgatggaaaaggagcttgaagtcccctccccctgggaaaaaaaaaaaaagcccttcccaaataatacaattttgatcagagtacctggagtgttattgtgtctggagttcaaaacatttgcttaaattttgaactagagatgttctcaaacctaagtttaaagttacttctagtcagggccattatgtttgcatcaaaaaaataactgaaaaaaactgaattgaaagacaatattatagtgaagcagatctttattctgtaatccagaaaacaaaatcgttttctgtttttgtgaatactttgtgtagaaatgtcttgacagccacgtttctgaggtaaaacggtttgctcagatacaaagctgaacggtgtattccaattagctgttctaacaatttaccactggaacctgtgaccctgcgaaaaggttgcagatcttttctgttgtcttaattgtgatttctagccactgaagattgggtaaacatagtaaaaaatgcattaagtattatttatatgtattttaagggtttaaatttaatatctccatttgaatattttatttttatggaaaggaagttacttcattgctagtatcagggatgtgtatgacgaatataatgtaggttttgctgtaaaa

SEQ ID NO: 254303 - DNA, 369 bp, Homo sapiens
cagtagcacagagtatatttgaaattccaataaaatcaatgttgacttgattgggaaattctgaaaattagaattaaagtctaaggagagacagattaagttattaattagctagggttgccagaaaacagcaatatataaaaagagaatataaggaagacgacttcctgtaaagctgtcatcatgcattcaactagaaatggatcctgcagtcccacatgtagaaatgagatgaaagtttggagtagctgcctcctttcaagagattcacaattttgaagtgttacagcatattcccagagggctgggtgagattgtgtgtgtggtggggtaaagtagagaaaaaagtgtcacagaaaattagtagtt

SEQ ID NO: 254304 - DNA, 342 bp, Homo sapiens
gtgagcgagctatagaacttccggacatttcaactttattatttcaagtgtaacaccaattgttgaggagaaaattagcatgcagtggcttggggtcaatcaggcctatcttgaattatctgtttctgtaaaaatgaggggaaaatgagatgtaggtctctgtgaggattaggagtggaaattacgtaagataacataaacattgtatgtgaaacttcttaatagcagagtacattgtagggggatcaataggcattgatttgtagatattaatagatactttttcataattttaaactctgtttttctaagtccatgattaaaaatattttccagcatatt

SEQ ID NO: 254305 - DNA, 360 bp, Homo sapiens
cgcgtttatgacgtacgagtgtgttttgtggaaaccactgagtagtgctccgcgtgtcaaagaaaaatattcccctaatgagaaaactgagaaacgagtgcagagaattaattccaaagttttaaattttcccattcgtgtcatagtttgggtaccctactcctcagacccggggcgagccttcggctgtgactcagcacataaaaaaccagaacgccggaagtattttcctacacccgccggatggacgctgctcccgagcgccgcaaatactaattggctcttctctaccctacagtcggcccgacagtggtggggtttcatcctcaagccctaagaaagtgctaaaaagaccagtct

SEQ ID NO: 254306 - DNA, 271 bp, Homo sapiens
gggacggaagggggagataaaaagcctaattaaattctcacagagcgtttatcctaatattaactagttaatgacctcaagatatgtattgagcttttactatgcacgcatggcaggaggggcgtgccccttccttgccttaacctggtgtggttctttgactttttactcctgtatactcgaagaaaacaatacaaaaatcaaagctgggaaaaaagttcctgtatggggtatttcaccgttttaatgcattaaacatgatgtgctcaaa

SEQ ID NO: 254307 - DNA, 474 bp, Homo sapiens
aaaaaaaaaaaaaagcatgaagctgcatggaggaagaatagattcctgaacaaaactagagctctgttaggaaggcaaagagaatgggtaagcagccagcattgttcactgtaactgtagacacctttttacacctaacaccctgtggtggttaattttatgtgccaacctgactgggccacagggtgcccagacatttggtcaaatgttattctgggtatgtctgtgagagtatttcaggatgaggttgatatttgaagtggtaatgtttgaagtggtgggctgagtgaagcagactgccctccctaatgtgggtgggcctcatccaatcaattgaaggcctggatagaacaaaaagattgagtaaaaggaattcctcccacttgactgctggagctgagatattagtcttttctaaccttcagtcttataccaaccatcagctctcatggttctcagccctttggactcaga

SEQ ID NO: 254308 - DNA, 211 bp, Homo sapiens
tggtcaggtctaggcagcaaacagcacatcgcctgccatgggttcacagactccagaggccctcacttcagatgacaaaggtgcccttcctgccaatgatcagagaggtctggatctgaagcacatttccagacaagtttttttttttttttttgagacagggtcttgttctgtcacccaagctggagagcagtggcgcaatctcagctca

SEQ ID NO: 254309 - DNA, 324 bp, Homo sapiens
tccattagaaaatatattcttcctgttttatagacataggaacagaattaacttcatattttgacagatttttttagagatctaagatacaattttgtgtaactaagaacataagatgggggctgtgtgtatgtgagtggaagtggttgtcggtgtaggggaggaggatgggaatacagggacgtgcaaagccctgaagccgtgctagcgatctcagtcctcccttcccacagattaacaagcccgtggaggaacactggaacacactggggaattctttcttagtagtgatttttttttgctccactttgtttcatattagtc

SEQ ID NO: 254310 - DNA, 298 bp, Homo sapiens
catcatctaaatctggtaaataagcccaaataaagtatggcttttttttgtctgggactacaagattagaacaggaaacccatatcacaactcctgacaccagagaaaaacaggctcctttgggtaaagatgtaaagaggaacttggctcatgaaaagattcaggaagccaggcgcagtggctcactgtaatctcagcactttgggaggccgaggcgagcaggtcacttgaggtgagaagtttgagaccagcctggccaccatggtgaaaccctgtctctactaaacatacaaaaatt

SEQ ID NO: 254311 - DNA, 396 bp, Homo sapiens
aaattcaacatacacaattccatatctctgtccagtttggtaaagataacttctttagttaattaaatcagatctggcctctggcctcctcttattcccctgcctcaactctccaacttttcccatgcatctctctttcccctgctctattcatagaaccataaaacctcaattcagaaggacaataaaggtcatctagtgtggcttcccacttaaaacctaaataccctatagttaacatggggttgagctataagtttttctcagaaccaactcaacttggccaggtgcagtaggttcatgcctgtaatcccagcactttgggaggctgaggtgggcctggaggagtacgagaccagtgtgggcaacatagtgagaccctctctctacaaaaaa

SEQ ID NO: 254312 - DNA, 531 bp, Homo sapiens
tatacagaatcgccctgaaatctggctatggaaaatatcttggtataaattcagatgaacttgttgttgggtgttcagatgcaattggaccaaaagaacaatgggaacaagtctttcaaaatattagatcctgtgctgaaagagaaaccacgaaaaaagatgacattcaagaagaagacaaaggaaatgtaaaacaatgtgaaatcaattatgtaaagaaatttcagagcttccaagaccacaaacttaaaataagtaaagaagacagtaaaattcttaaaaaggctcagaaagatggatttttgcatgagacgcttctggacaggcacggcagtgatccagatatagagccgttgctcttgcttctataagtgtaatattttgattcaaaaaaggaagtaaaaggaagagagttgattacatttggctactgacattaataataataaataataattgtacttgtaatataaacatccgaaagttttagttataagaatggctgtccacataataaaattatgtaaaaat

SEQ ID NO: 254313 - DNA, 397 bp, Homo sapiens
caaaagggcccattgaaaacccagacaggcttgaactgtaagtcacaccggagagagggttgctgaggggaccctagagggaggcagtcccggagcacagctttgcttctttggctacttcctcgctttggaggttgctttcttctcaaggtggaccacctgctagaacagggcagcactgctgttcactggccagcttggagagaagactgcccatgtgattctaagtcaggcccttgtgactgaaccaccatgaggctggactgtggggactcgggtatcccagaggcagagcacaccaggtctgggaggggggccactcagacggcaacattgtcattcaatatctattgaacacctactgtcttaatccatgtttgttgctaccacaaaaaaa

SEQ ID NO: 254314 - DNA, 1027 bp, Homo sapiens
gtgagatgatggtaacattaacagaagtagagaaaccaggaataggatcaaaattggaggggaaggggaaaagggccttttgttttgagacatcaacttagaattgttgatgggctatccaggtgggtagataataaaagtttttgtgggggaggactaaaactaaagagttagacttaagagagaaatacttgagaatcacttacatggagatagatgatagttgaagttaaagaagagaacgagatttctaacggagggaatacactatcaaggaaaggattagagaaccctgggggagtgtgaatatttgtgcctcatttaattttcagaaccagatcatgaggaaagaatacttcccattttagagattaaaaaacaaaaccgaagcacagtgcttaagtaactttctcaaggccatataactaataagtggcagatatgagattttgagccctactctaaaacttgctcctcaatttgaatgtttacatatttatgtaaataatatattttacaatattaaaaacgtttttgtagagatacaataaccatataattttacaggattgtcttttttatttacgtttttctttggagtataatacatttttaattattggcctgagaagaagatacaatagattatttttggcaaatggtgcactcattcatgagagacactgtattttctaaagcaggctgatctctgcataatactggctccctgaaaataaatccttgctgggccgggcgcggtggctcacatctgtaatcccagcactttgggaggccgaggtgggagcatcacgaggtcaggagttcgagaccagcctgaccaacatggtgaaaccccatctctagtaaaaatacaaaaattagccgggcgtggtggtgcatgcctgtaatcccagctactcaggaggctgaggcaggagaatcgcttgaacccaggaggtggaggttgcggtgagccaagatcgtgccatggcactccagcctgggcgacagagcgagactctgtctc

SEQ ID NO: 254315 - DNA, 624 bp, Homo sapiens
ttcattgtgcaagtctttcacctccttggctaagttaattcctaagtattttattcttttcaatggtactatacatggaattgtttttgtcttttttggacaaattggataatccttttcaggttatccattggtagtttatacgaaatgcaactgatacttgggtgttgactttgtatcttgctactttgctgatatcattaattagctctagcagtttttttgtggcatatttaagattctttacatataacatcatatcatttgtgaacagaggtaatttttttttttttttttttgagacggagtctcactctgtcacccaggctggagtgcagtggcgtgatctctgctcactgcaacctccgcctaccaggttcacaccattctcctgcctcagcctcctgagtagctgggactacaggtgcctgccaccatgctcggctaattttttgtatttttagtagagacagggtttcactgtgttagccaggatggtctcaatctcctgaccttgtgatccacccgccttggcctcccaaagtgctgggattacaggcgtgagccaccgcgcctggcaaacagaggtaattagacatttttctttcttttttttttgaggtg

SEQ ID NO: 254316 - DNA, 518 bp, Homo sapiens
ttcattgtgcaagtctttcacctccttggctaagttaattcctaagtattttattcttttcaatggtactatacatggaattgtttttgtcttttttggacaaattggataatccttttcaggttatccattggtagtttatacgaaatgcaactgatacttgggtgttgactttgtatcttgctactttgctgatatcattaattagctctagcagtttttttgtggcatatttaagattctttacatataacatcatatcatttgtgaacagaggtaatttttttttttttttttttgagacggagtctcactctgtcacccaggctggatgatactgtcattctgatttaagtgtttgaggagctgccgtagagtttccacggcagctgcactgttttccattcccaccaacagcgcacaggggccgatagccccacgtcctcaccaacacttgtgattctctggaggtttttttttttttttaatagcagccatcctcaggggtgtgaggtggc

SEQ ID NO: 254317 - DNA, 463 bp, Homo sapiens
aggagaaatgatcagacacatgtgattttatactgatttatggactgtagctaatgctttagctggatggtcagggacttagaaggagcatgatgggcaaattggtgacaaggaaattgggagaagtatatgaatagacttctctgagtgggcaaaagatgtgaaggtatttgcgtccacatgaatgttcatcaaaaggtgacatcagcagaggaggatttttttttttttattttttttgagacagagtctcactctgtcgcccaggctggtgtatagtggtgtgatctcggctcgctgcagcctctacctcccaaattcaagcgattctcctgcctcagcctcccaactatctgggattacaggcatgtgccaccacgcctggttaatttttgcatttttagtacagatgaggtttcactatgttgcctagcctggtctcaaactcctgagctcaaaacca

SEQ ID NO: 254318 - DNA, 275 bp, Homo sapiens
taactagcacctataatccctgctgccctgccctggaatgctgaggcagaaggatggctagaggccaggagttcagccttagcaatatgagcctgtatcaaaaaaaaaaaactttattaggttagctgcatagtcgtggtacacgcttctgtgcctgtagtcccagctgctcactactcggggacgaggcaggaggatcacttgaggagtttgaggctgcaggtgagctatgatcacatccctgcactccgccatgggcaacagagttagactct

SEQ ID NO: 254319 - DNA, 418 bp, Homo sapiens
tgtttaggtactaataagttgttaatttttattctaccatgaaaggatactaacacacacacacacacacacacacacacacataccacttgactatcgtctacatttcaattttaaaaaatttaagcctaaaaagtaggatggacataatttcacaatgagggatcatccttcccaagaaagagaaattgataacactacattgaaaacacaacctacttacacatgtcatcctttctttctcactttgccatggtaatgtcaaaaagtttacctttagtttcttgttgtacttgattttaataagccactttgaaactcaggcttttcacttcttcaaactggctgttttctaatcatctggataaacagttggcatttcatgtgtctgttttgtgccattgggcagaaacctgct

SEQ ID NO: 254320 - DNA, 434 bp, Homo sapiens
aattattataacaatagatagcaagaaacttggctttcatttgattcctctgcccagcttcttataaagtgacatccatcttatttctgtattacaccaaagtaaaaacaatatttatatacattaagattatgtaaagactaggatgctgtaatggtgtctggtatatatatccacgatacaatcatatagtacctccactctgaagacacagaatatgaattcgctttagtacctagcaaggagccaaagagtaccttacttcctatgtctgagcatttgaccgaacttaagaaacaacaccccagcaaccttgtcatttcaatttttcacacttttgtctgtatgtgttttatgtctcaacaaagacttatctccccaacccactgccacaggataattctctgtaacaaagctcagtctcaatctccacc

SEQ ID NO: 254321 - DNA, 5219 bp, Homo sapiens
gtctcctggaccccctttcgtgacccctctcaacacctctactggggagacgaggaccccgaggttctggggggcgacgcgacctgcccgaagtgacaagggtcctgggccgcactgctccgccggggtctgcgctcctcggcggagcgggtgggaaggatgagtcctcggggtggagaaggaggagcgggtccccgggtaccgctcacccggccttaggagcccgggagcgcgcgtagggacgcggagttgaggctctccatctgcggccagggaaagggatacagtcccccgggcccctcccggccgctcggaacccaccccaggcgcgtccccgcgggcgcgcgctccaggcggggccgacgggctcggaggcgcgcgcccgctgccgggtccgccgcgcgcgctccctccgctcctctcccccgcccctcccgggcccgcgcgctcccagggtccgccgcgcgcgcgcctcgcgtcgctccccatccccgcccctcccgccgccaccccgcccccggccgggtaccctcgccggacccgagagagagcgccgccgccatcttagttgctgccgctgccttcagcaagacgctgctctgaggcggggagggcgccgcgtcctgagcgcgcggcccagcgtcacggcggcggcggcggcggctcctccttggacccccggagctccccgcgccgcggagcagctggccccaggcccctagagccccgagagctccgagagctccgctcggcgtcccgcgcgcctccctgccgctcccgccccgggctggcgatgctgcgccgccccgctcccgcgctggccccggccgcccggctgctgctggccgggctgctgtgcggcggcggggtctgggccgcgcgagttaacaagcacaagccctggctggagcccacctaccacggcatagtcacagagaacgacaacaccgtgctcctcgaccccccactgatcgcgctggataaagatgcgcctctgcgatttgcagagagttttgaggtgacagtcaccaaagaaggtgagatttgtggatttaaaattcacgggcagaatgtcccctttgatgcagtggtagtggataaatccactggtgagggagtcattcgctccaaagagaaactggactgtgagctgcagaaagactattcattcaccatccaggcctatgattgtgggaagggacctgatggcaccaacgtgaaaaagtctcataaagcaactgttcatattcaggtgaacgacgtgaatgagtacgcgcccgtgttcaaggagaagtcctacaaagccacggtcatcgaggggaagcagtacgacagcattttgagggtggaggccgtggatgccgactgctcccctcagttcagccagatttgcagctacgaaatcatcactccagacgtgccctttactgttgacaaagatggttatataaaaaacacagagaaattaaactacgggaaagaacatcaatataagctgaccgtcactgcctatgactgtgggaagaaaagagccacagaagatgttttggtgaagatcagcattaagcccacctgcacccctgggtggcaaggatggaacaacaggattgagtatgagccgggcaccggcgcgttggccgtctttccaaatatccacctggagacatgtgacgagccagtcgcctcagtacaggccacagtggagctagaaaccagccacatagggaaaggctgcgaccgagacacctactcagagaagtccctccaccggctctgtggtgcggccgcgggcactgccgagctgctgccatccccgagtggatccctcaactggaccatgggcctgcccaccgacaatggccacgacagcgaccaggtgtttgagttcaacggcacccaggcagtgaggatcccggatggcgtcgtgtcggtcagccccaaagagccgttcaccatctcggtgtggatgagacatgggccattcggcaggaagaaggagacaattctttgcagttctgataaaacagatatgaatcggcaccactactccctctatgtccacgggtgccggctgatcttcctcttccgtcaggatccttctgaggagaagaaatacagacctgcagagttccactggaagttgaatcaggtctgtgatgaggaatggcaccactacgtcctcaatgtagaattcccgagtgtgactctctatgtggatggcacgtcccacgagcccttctctgtgactgaggattacccgctccatccatccaagatagaaactcagctcgtggtgggggcttgctggcaagagttttcaggagttgaaaatgacaatgaaactgagcctgtgactgtggcctctgcaggtggcgacctgcacatgacccagtttttccgaggcaatctggctggcttaactctccgttccgggaaactcgcggataagaaggtgatcgactgtctgtatacctgcaaggaggggctggacctgcaggtcctcgaagacagtggcagaggcgtgcagatccaagcacaccccagccagttggtattgaccttggagggagaagacctcggggaattggataaggccatgcagcacatctcgtacctgaactcccggcagttccccacgcccggaattcgcagactcaaaatcaccagcacaatcaagtgttttaacgaggccacctgcatttcggtccccccggtagatggctacgtgatggttttacagcccgaggagcccaagatcagcctgagtggcgtccaccattttgcccgagcagcttctgaatttgaaagctcagaaggggtgttccttttccctgagcttcgcatcatcagcaccatcacgagagaagtggagcctgaaggggacggggctgaggaccccacagttcaagaatcactggtgtccgaggagatcgtgcacgacctggatacctgtgaggtcacggtggagggagaggagctgaaccacgagcaggagagcctggaggtggacatggcccgcctgcagcagaagggcattgaagtgagcagctctgaactgggcatgaccttcacaggcgtggacaccatggccagctacgaggaggttttgcacctgctgcgctatcggaactggcatgccaggtccttgcttgaccggaagtttaagctcatctgctcagagctgaatggccgctacatcagcaacgaatttaaggtggaggtgaatgtaatccacacggccaaccccatggaacacgccaaccacatggctgcccagccacagttcgtgcacccggaacaccgctcctttgttgacctgtcaggccacaacctggccaacccccacccgttcgcagtcgtccccagcactgcgacagttgtgatcgtggtgtgcgtcagcttcctggtgttcatgattatcctgggggtatttcggatccgggccgcacatcggcggaccatgcgggatcaggacaccgggaaggagaacgagatggactgggacgactctgccctgaccatcaccgtcaaccccatggagacctatgaggaccagcacagcagtgaggaggaggaggaagaggaagaggaagaggaaagcgaggacggcgaagaagaggatgacatcaccagcgccgagtcggagagcagcgaggaggaggagggggagcagggcgacccccagaacgcaacccggcagcagcagctggagtgggatgactccaccctcagctactgacccgtgcccccggccacctcggtttctgctttcgaagactctgctgccatccgttctcccagtcccaagggtccacgatgtacaaagtcatttcggccagtaggtgtgcagacccctccccgccacgatcgtcgctgtgcttggtgtgtaggaccctaggctccccgcccaccctctgcctggtcgcgctcttcagtcccacgaggagctgacacgtcctctctggccgccatccggctcgcacaggggcctcccagcgcctcaggccccgcgtttgtgtctggagtctccccccggggagaggacactggcccctcgcactccagaaaagccatgccagctgggctcgttgacaaagggtaaaacatgctcactcccacccggtaatcatttttttctttttttaaaaaaagtttttattttttccaaactagtgcatgtataaataatggcaggatggggggtactgtgtagatgattaactgactttttaatattttgtaaataaatcggattccttgtgtcctttgtgctagtgtaacccgggactggaatgtaaagtgaagttcggagctctgagcacgggctcttcccgccgggtcctccctccccagaccccagagggagaggcccaccccgcccagccccgccccagcccctgctcaggtctgagtatggctgggagtcgggggccacaggcctctagctgtgctgctcaagagactggatcagggtagctacaagtggccgggccttgcctttgggattctacctgttcctaatttggtgtggggtgcggggtccctggccccttttccacactcctcctccgacagcagctccctgggcagtggcctggtctcaccgtgtgcagccttgtggtttatgcttaaatgtacattttcctgctggtaaaaggagaaactgagaggtgtcctgcagaccggctgaccactccttttggagacggcaggaggcctgagcgatccgtactcagaacgtccaggagagacgcatggcccgaagtcaaagtgctggaattttccaaaacagcctgttctctcctctctcctccccagagcaccccctgccatcaggggggttgaaatccctctcccccaggagccctgctgctttgcttggtggtagggcaggagagcaaacaaacagtcatggtctaaaacccacatagcactttgctcttagttacatgtaaaattttagatttctaaaacaggtgggcaatcattttgaatactgttctgtgaccctgactgctagttctgaggacactggtggctgtgctatgtgtggccatcctccatgtcccgtccctgtagctgctctgtttagacagcggacagacgctcacgcccaggggatgtcctcacgctgtcgccgcgcggtttcccttcgcagatgtgtatactcatgataggtcagaaagtgtatccgctacaataaagttctggttctaact

SEQ ID NO: 254322 - DNA, 5097 bp, Homo sapiens
gtctcctggaccccctttcgtgacccctctcaacacctctactggggagacgaggaccccgaggttctggggggcgacgcgacctgcccgaagtgacaagggtcctgggccgcactgctccgccggggtctgcgctcctcggcggagcgggtgggaaggatgagtcctcggggtggagaaggaggagcgggtccccgggtaccgctcacccggccttaggagcccgggagcgcgcgtagggacgcggagttgaggctctccatctgcggccagggaaagggatacagtcccccgggcccctcccggccgctcggaacccaccccaggcgcgtccccgcgggcgcgcgctccaggcggggccgacgggctcgcgcgcgcgcctcgcgtcgctccccatccccgcccctcccgccgccaccccgcccccggccgggtaccctcgccggacccgagagagagcgccgccgccatcttagttgctgccgctgccttcagcaagacgctgctctgaggcggggagggcgccgcgtcctgagcgcgcggcccagcgtcacggcggcggcggcggcggctcctccttggacccccggagctccccgcgccgcggagcagctggccccaggcccctagagccccgagagctccgagagctccgctcggcgtcccgcgcgcctccctgccgctcccgccccgggctggcgatgctgcgccgccccgctcccgcgctggccccggccgcccggctgctgctggccgggctgctgtgcggcggcggggtctgggccgcgcgagttaacaagcacaagccctggctggagcccacctaccacggcatagtcacagagaacgacaacaccgtgctcctcgaccccccactgatcgcgctggataaagatgcgcctctgcgatttgcaggtgagatttgtggatttaaaattcacgggcagaatgtcccctttgatgcagtggtagtggataaatccactggtgagggagtcattcgctccaaagagaaactggactgtgagctgcagaaagactattcattcaccatccaggcctatgattgtgggaagggacctgatggcaccaacgtgaaaaagtctcataaagcaactgttcatattcaggtgaacgacgtgaatgagtacgcgcccgtgttcaaggagaagtcctacaaagccacggtcatcgaggggaagcagtacgacagcattttgagggtggaggccgtggatgccgactgctcccctcagttcagccagatttgcagctacgaaatcatcactccagacgtgccctttactgttgacaaagatggttatataaaaaacacagagaaattaaactacgggaaagaacatcaatataagctgaccgtcactgcctatgactgtgggaagaaaagagccacagaagatgttttggtgaagatcagcattaagcccacctgcacccctgggtggcaaggatggaacaacaggattgagtatgagccgggcaccggcgcgttggccgtctttccaaatatccacctggagacatgtgacgagccagtcgcctcagtacaggccacagtggagctagaaaccagccacatagggaaaggctgcgaccgagacacctactcagagaagtccctccaccggctctgtggtgcggccgcgggcactgccgagctgctgccatccccgagtggatccctcaactggaccatgggcctgcccaccgacaatggccacgacagcgaccaggtgtttgagttcaacggcacccaggcagtgaggatcccggatggcgtcgtgtcggtcagccccaaagagccgttcaccatctcggtgtggatgagacatgggccattcggcaggaagaaggagacaattctttgcagttctgataaaacagatatgaatcggcaccactactccctctatgtccacgggtgccggctgatcttcctcttccgtcaggatccttctgaggagaagaaatacagacctgcagagttccactggaagttgaatcaggtctgtgatgaggaatggcaccactacgtcctcaatgtagaattcccgagtgtgactctctatgtggatggcacgtcccacgagcccttctctgtgactgaggattacccgctccatccatccaagatagaaactcagctcgtggtgggggcttgctggcaagagttttcaggagttgaaaatgacaatgaaactgagcctgtgactgtggcctctgcaggtggcgacctgcacatgacccagtttttccgaggcaatctggctggcttaactctccgttccgggaaactcgcggataagaaggtgatcgactgtctgtatacctgcaaggaggggctggacctgcaggtcctcgaagacagtggcagaggcgtgcagatccaagcacaccccagccagttggtattgaccttggagggagaagacctcggggaattggataaggccatgcagcacatctcgtacctgaactcccggcagttccccacgcccggaattcgcagactcaaaatcaccagcacaatcaagtgttttaacgaggccacctgcatttcggtccccccggtagatggctacgtgatggttttacagcccgaggagcccaagatcagcctgagtggcgtccaccattttgcccgagcagcttctgaatttgaaagctcagaaggggtgttccttttccctgagcttcgcatcatcagcaccatcacgagagaagtggagcctgaaggggacggggctgaggaccccacagttcaagaatcactggtgtccgaggagatcgtgcacgacctggatacctgtgaggtcacggtggagggagaggagctgaaccacgagcaggagagcctggaggtggacatggcccgcctgcagcagaagggcattgaagtgagcagctctgaactgggcatgaccttcacaggcgtggacaccatggccagctacgaggaggttttgcacctgctgcgctatcggaactggcatgccaggtccttgcttgaccggaagtttaagctcatctgctcagagctgaatggccgctacatcagcaacgaatttaaggtggaggtgaatgtaatccacacggccaaccccatggaacacgccaaccacatggctgcccagccacagttcgtgcacccggaacaccgctcctttgttgacctgtcaggccacaacctggccaacccccacccgttcgcagtcgtccccagcactgcgacagttgtgatcgtggtgtgcgtcagcttcctggtgttcatgattatcctgggggtatttcggatccgggccgcacatcggcggaccatgcgggatcaggacaccgggaaggagaacgagatggactgggacgactctgccctgaccatcaccgtcaaccccatggagacctatgaggaccagcacagcagtgaggaggaggaggaagaggaagaggaagaggaaagcgaggacggcgaagaagaggatgacatcaccagcgccgagtcggagagcagcgaggaggaggagggggagcagggcgacccccagaacgcaacccggcagcagcagctggagtgggatgactccaccctcagctactgacccgtgcccccggccacctcggtttctgctttcgaagactctgctgccatccgttctcccagtcccaagggtccacgatgtacaaagtcatttcggccagtaggtgtgcagacccctccccgccacgatcgtcgctgtgcttggtgtgtaggaccctaggctccccgcccaccctctgcctggtcgcgctcttcagtcccacgaggagctgacacgtcctctctggccgccatccggctcgcacaggggcctcccagcgcctcaggccccgcgtttgtgtctggagtctccccccggggagaggacactggcccctcgcactccagaaaagccatgccagctgggctcgttgacaaagggtaaaacatgctcactcccacccggtaatcatttttttctttttttaaaaaaagtttttattttttccaaactagtgcatgtataaataatggcaggatggggggtactgtgtagatgattaactgactttttaatattttgtaaataaatcggattccttgtgtcctttgtgctagtgtaacccgggactggaatgtaaagtgaagttcggagctctgagcacgggctcttcccgccgggtcctccctccccagaccccagagggagaggcccaccccgcccagccccgccccagcccctgctcaggtctgagtatggctgggagtcgggggccacaggcctctagctgtgctgctcaagagactggatcagggtagctacaagtggccgggccttgcctttgggattctacctgttcctaatttggtgtggggtgcggggtccctggccccttttccacactcctcctccgacagcagctccctgggcagtggcctggtctcaccgtgtgcagccttgtggtttatgcttaaatgtacattttcctgctggtaaaaggagaaactgagaggtgtcctgcagaccggctgaccactccttttggagacggcaggaggcctgagcgatccgtactcagaacgtccaggagagacgcatggcccgaagtcaaagtgctggaattttccaaaacagcctgttctctcctctctcctccccagagcaccccctgccatcaggggggttgaaatccctctcccccaggagccctgctgctttgcttggtggtagggcaggagagcaaacaaacagtcatggtctaaaacccacatagcactttgctcttagttacatgtaaaattttagatttctaaaacaggtgggcaatcattttgaatactgttctgtgaccctgactgctagttctgaggacactggtggctgtgctatgtgtggccatcctccatgtcccgtccctgtagctgctctgtttagacagcggacagacgctcacgcccaggggatgtcctcacgctgtcgccgcgcggtttcccttcgcagatgtgtatactcatgataggtcagaaagtgtatccgctacaataaagttctggttctaact

SEQ ID NO: 254323 - DNA, 528 bp, Homo sapiens
cagctctgccgtggcatcgcctgcccggtgccctcctctttcttaatggaggacattgttagtggggcgccaacctgcagatctggatattgacttttttgttttttgacggtgaacagctgagacgtttacaaggttttttgttttttgttttcttccctttctccttgaaactaagtggcttgacacagacaagtatcagacatgtgaggatgaatggatctggccattttttcgttatgaattattatactctatccctctctcgactttgggaggcatgtgtttcatcttataaatagaaagtagcatatttttgggcaggatctcctttatactgtgcagtctaggagaggtcagtttaaaaataaatatgcacttgaatgttacattactgagagccaggctgtggctgggacaagctgcgtggacagcagcatcaaagccgggagcgcagctgtgttgaaaggagtaaaagccccagagtgcagcccaggctgacagtcaagtaattacattttgtttaaa

SEQ ID NO: 254324 - DNA, 429 bp, Homo sapiens
accactgttttcaagaatttaatattcagtagcataaaatttgctttaaggcatacctaggattgcagttcagctctaaaagcttttgctgtactgtgttccagaaactttgttttgagaaagacgattggacatctgacagcttcattgatagctgacacaaattgctttctcattgccttgttatcatattcctggaagtgacttgtgtatgacatgagatcgaaaatagaaaataaaaaagattaaaccactttttaggtacaaaacaaatttttacaagcctttaagccgtcaaatcagaaaatgtttctttcaaaacgtgatgattctctcttactgtttatgaaatgttggaatatcatagtttacagatttttgtggaatgtatgatttgcttaaataaaaataatagctacaagagtaaaa

SEQ ID NO: 254325 - DNA, 524 bp, Homo sapiens
ggagttcaacaggaagctcagtggaggatgggggccacccatctgtcctttcaagacaggaaagacttatacaggttcatctgctgaaaagagtccactgagattcacaggttcaagatatgggagagatgaggtgagcgcacctacattatgcctgggacacaaaaatgaaatgaacatggctcctgcccacagggagtgtgcagtctatcatggcggtcgatacgcatccacataaaaaacagggacaaacagaagagcacaaatagagcactgtgagcattcagatgcatctgtgaaatgcgtggatgatggcaggtggaaattcgggagcagcaaaaacagagcccctatactctaaagctgtaaaggaccctggaaatcacgcagtcagtgctctcggctgacaggtatgaagggaataagtgactgcatagacacaggtgattaacgacagagctgggatcacacaactctaatatctccactcttaatctggtgatgcctcccctaaaccacactgc

SEQ ID NO: 254326 - DNA, 1340 bp, Homo sapiens
gattactcactatagggctcgagcggccgccggacaggtgccccgggagcttcccgctcgcgaagacccagacggctgcaggagcccgggcagcctcggggtcagcggcaccatgaacgtctcgggctgcccaggggccgggaacgcgagccaggcgggcggcgggggaggctggcaccccgaggcggtcatcgtgcccctgctcttcgcgctcatcttcctcgtgggcaccgtgggcaacacgctggtgctggcggtgctgctgcgcggcggccaggcggtcagcactaccaacctgttcatccttaacctgggcgtggccgacctgtgtttcatcctgtgctgcgtgcccttccaggccaccatctacaccctggacggctgggtgttcggctcgctgctgtgcaaggcggtgcacttcctcatcttcctcaccatgcacgccagcagcttcacgctggccgccgtctccctggacaggtatctggccatccgctacccgctgcactcccgcgagctgcgcacgcctcgaaacgcgctggcagccatcgggctcatctgggggctgtcgctgctcttctccgggccctacctgagctactaccgccagtcgcagctggccaacctgaccgtgtgccatcccgcgtggagcgcccctcgccgccgcgccatggacatctgcaccttcgtcttcagctacctgcttcctgtgctggttctcggcctgacctacgcgcgcaccttgcgctacctctggcgcgccgtcgacccggtggccgcgggctcgggtgcccggcgcgccaagcgcaaggtgacacgcatgatcctcatcgtggccgcgctcttctgcctctgctggatgccccaccacgcgctcatcctctgcgtgtggttcggccagttcccgctcacgcgcgccacttatgcgcttcgcatcctctcgcacctggtctcctacgccaactcctgcgtcaaccccatcgtttacgcgctggtctccaagcacttccgcaaaggcttccgcacgatctgcgcgggcctgctgggccgtgccccaggccgagcctcgggccgtgtgtgcgctgccgcgcggggcacccacagtggcagcgtgttggagcgcgagtccagcgacctgttgcacatgagcgaggcggcgggggcccttcgtccctgccccggcgcttcccagccatgcatcctcgagccctgtcctggcccgtcctggcagggcccaaaggcaggcgacagcatcctgacggttgatgtggcctgaaagcacttagcgggcgcgctgggatgtcacagagttggagtcattgttgggggaccgtgggccg

SEQ ID NO: 254327 - DNA, 258 bp, Homo sapiens
tttaattctcaaaggatgaaatgacttgatatacgtaaaagcatttagaactgtgcctaacacatgataggcattactgggtttagtgatgatgctggtgctgatgatgccaatgatgcagatgatgcagcaaattacaaattaaataacaacatattaagccattatgtattcagtttttcttattcttaaatcttaaggcaaagctttgatcagaagaataattgaataattactgtattagatctacttttagaa

SEQ ID NO: 254328 - DNA, 464 bp, Homo sapiens
aaacatatcacctgatgatcgccattttcatttcaacgtcatccttcattaagttgtctacacaagttttattccgttctcttaacctgaagcttgcttttaaaaacaaaatccacgaacccatcgcacatgctaagcagttacactcctggatggccaggagcttgttcaggtgtttattcactcattcatggtttttggagcaattactgtgcccagtgctggggcaacaaaggcaagagacagttctcaccttcaagttgctcccaggctggctctgctacccaagagctacaaacagagatcttcctgaactcgccttttggcctcaggatgatgtggtatagaaaaaattcattagcaaacagtcacctagaaatttagagctgtaacatttgttaaggaacacacagaaaaagagcacacattgatgctttgaaacaaaataaaaactcattgcatta

SEQ ID NO: 254329 - DNA, 483 bp, Homo sapiens
tatgcagtgtttgtccatgagcatggaatgactcatactggcctcagagttagggactcactttaaaggaaaggggatgcagtagtgggcacatgactaagaaatccaccgatcctctcatatactgcaccaccagaagctgctggattagcagagcaaaggtcacagaacgttttcctgaatcggattctgggttaaagctgccagtaggaagaattcacatgagatttcaaaggtggaagagaaggagaaggtgtttttttcttgcaacagtttggctggggagctgagatcttcactgagggcttcctttggctccgggttcccgtggacaggcagccgatgtcatcagtggtggcttctctgtgatcactataccaccaggtctcctaaagtggccttcttgacctttgcctccccagctctttcaatggttatgtgaaactctaattatgtacattaaatatctttcagctcataaaa

SEQ ID NO: 254330 - DNA, 557 bp, Homo sapiens
ctaacctgaatattttcttttccctttttcccctatgtgactgagaagtattttgaggcaggttctgtgttggcaaatgcatatttgagagcttctatttaaaggcaatatgttttccttctacatggaaatgtaggagaaaggctataaattttatattacattgctcatagaactatataaagttttatataaagttatagttgtatgttattgaactggaggtctgttgcttcagagtgaaggggcttttatttttaaatgtttctgtatgtaaatacagtatttagtaaatagaattctaaaagggtgatctgcagtggtaactctagatatgtgctgttttatagagtagccactggccccgtattagctatttgagcacttgaaatgtggctggtccaaattgagatatgctgtaaaatacacactgaatttctaagacttagtataaaaaataatgaaaaatatttcataaataattttatttcatattgattacttgttgaaatactattttatatatgttgagtcaaataaagtatattattaaaatt

SEQ ID NO: 254331 - DNA, 378 bp, Homo sapiens
tgtgatgtatgtggaaatttagtccatgttcctatcccaattgaacctgtgggatagttcctatcccactagcctttcatttgtttacattaagcactagtaatattttgagaatgcactaagatgaaaattataagtgagaactgtcttgggactgactgattctaaggtcgggaaataaaattgaatcatcatttcattatgcattgattatgaatgtgtccttggtaaagtgtgtttgtgatgtctgtctacaattttacatatagaatcgtttaacttaagaaggaaattatgagctacttattcttgagacccagtgctttttttgcctcaatttatttcctaggcagataccaaagtcatcatgcttcattt

SEQ ID NO: 254332 - DNA, 555 bp, Homo sapiens
gggactgaagttgcgcagcagcacaactggctacttgttttttttgtttttttttttggtagagatgagggtctcactttgttgcccagtcttttaaaacttgttttaaatacactgttttaaaagttgtttaaaatcttttttcctgtgacatgttggaattttatgtatttttggagtgtggtaactgtaaagcgtttctactttggtttagtttttcataatctctgttatgtggtcactgtaacaaattccataaacttagcggcttaaaacaacagaaatgggctgggcacggtggctcacacctgtaatcccagcactttgggaggccaaggtgggcggatcacttgaggtcaagagttcgagaccatcctggccaacatggcgaaaccccatctctactaaaaatacaaaaattagcctgagtagcagggactgaagttgcgcagcagcacaactggctacttgttttgttggtttttttttgggtagagatgagggtctcactttgttgcccagtcttttaaaacttgttttaaatacactgtttta

SEQ ID NO: 254333 - DNA, 571 bp, Homo sapiens
gggactgaagttgcgcagcagcacaactggctacttgttttttttgtttttttttttggtagagatgagggtctcactttgttgcccagtcttttaaaacttgttttaaatacactgttttaaaagttgtttaaaatcttttttcctgtgacatgttggaattttatgtatttttggagtgtggtaactgtaaagcgtttctactttggtttagtttttcataatctctgttatgtggtcactgtaacaaattccataaacttagcggcttaaaacaacagaaatgggctgggcacggtggctcacacctgtaatcccagcactttgggaggccaaggtgggcggatcacttgaggtcaagagttcgagaccatcctggccaacatggcgaaaccccatctctactaaaaatacaaaaattagcctggcgtggcagcaggtgcctataatcccagctactcaggaggctgaggcaggagaaattgctggaatctgggaggtggaggttacagtgagctgagatcgcaccactgcctccagcctaggcaacatgtgagactctgtgtcaaaa

SEQ ID NO: 254334 - DNA, 248 bp, Homo sapiens
cttttgtctagaagttttacattttcaggtagtaactataatagttaaactgatagaagaagagaatacaatagtggttgctagggcctggagagtggggaaaatagagtgcttgttgttcaatgggtacaaagttttagttatgctagaatagtaaattctagagatctgctgtacaacatattgtttattgttaacaacatggtattttgtgtttcaaaatttcttaagagggcagatctattttg

SEQ ID NO: 254335 - DNA, 179 bp, Homo sapiens
accgggtcccggggcggtgggagccccggccgggcagaagggcttggcgggccgttagaggaccgccacggctgtcgagtcccctcccttgttggacttgcgcgccctggcgctcggaacctccggcgctgtgcccaccccgctctagctcgcgtctcccgactccaattaggtcaggc

SEQ ID NO: 254336 - DNA, 549 bp, Homo sapiens
catcattttatcaattctggtagtgtttgcatttgttcttggaaatgttgccaatggcttcatagctctaattaatgtcaatgactgggttaagacacaaaagatctcctcaactgaccaaattgtcactgctctggcattctccagaattggtttactttgatcatattattacattggtatgcaactgtgtttaattcagctttatatagtttagaagtaagaattgttccttctaatgtctcggcaataatcaatcatttcagcatttggcttgctacgagcctcagcatattttatttgttcaagattgccaatttctccaattttatttttctccacctaaagaagagaattaagagtgttcttcttgtgatactgttggggtccttggtatttttgatttgtaatcttgctgtggtaaccatggatgacagtgtgtggacaaaagaatttgaaggaaatgtgacttggaagatcgaattgaggaatgcaatacacctttcaaacatgactataaccaaccatgctagcaaacttcacactgtt

SEQ ID NO: 254337 - DNA, 335 bp, Homo sapiens
tctgtctcaaaaaggaaaaataaagggcaaaaaataatatgtataaacataaaaataatgaaataaagctttgccatgtcaagcgtcatcagagcagaagttttcagactaagacaaccagcagggattttcatgggcttctctgtcaagacccgccttggccagcccatgctgtcatccccgattgggtttgcagaagcaggcgtcctgggcgaccaggcctcctgggcaacatgtacatggcctcctatggcacctcttgcctcccatcttagacaattcgctgcctgatttctcactcccaggagattagatagctaggcttcagggaaagt

SEQ ID NO: 254338 - DNA, 488 bp, Homo sapiens
tcaaatgcaaatattgtgcatagaattgttttttaaatcgggagattttttaatgttttattctttctgttttgttaggatacttatagtcagaagagtagttagcataatgttctgctaaaggaacttcttgatctagatgtttaaaaattattgaacaaaaaagtgattttgaatatgcttggaatatttatactgaagtttgcacattttcattctaaacaaagtgttttgctattctcaaaacaaataattactctggttaactctatagtgtgataaaaagagaactctcctcgtgtacagtggtattgcatgttataatctgctgctcaggatgttaaaatattcaatatgatatttccatacagatattattcaccttaaaaaagaaagggaaggaagtttgagtaaattattttggttgttctttccactagaaaacctttttatttctaacaaacttctctccatcccttttcctgtca

SEQ ID NO: 254339 - DNA, 477 bp, Homo sapiens
gcgtgtatgatctctgagtggaaaacttctctgaaaataaatggattaccctttttactacactgtctgatgtctcttcagcagatagcattgcttccctgtgatctctaacccaccacaattgaaatgacaagcgttgaaatgggggcctcacggtggcgccctctgcctttgccggccctttctgcagcacggaacggttcacgccgcagagcaccggttctcaaacttgaataatgcctggacacccttgggaaggatagaatcatcttcagaaaccccacaacacgtcagtggagtccactttgagaaatgctgacctaaaaattagaatcttattctattaaaatggcttacatttgagaattatcactgcaaagaaaagttccgtctttagaactgctaaaaggttgagtttttacatctttactctgctattgaaacaaaactattaaaattatcttaaatatcctgaaa

SEQ ID NO: 254340 - DNA, 346 bp, Homo sapiens
  misc_feature (29)..(29): n is a, c, g, or t
  misc_feature (235)..(236): n is a, c, g, or t
  misc_feature (244)..(244): n is a, c, g, or t
  misc_feature (250)..(250): n is a, c, g, or t
  misc_feature (334)..(335): n is a, c, g, or t
agaagacgtgacacataacaactgaaggnaactcatggtccaagattttctttgcctataatgaatgttattaggacaattggaaaaatttgaataagaccatttagtataaatatcagcattagtttcctgattatgaggtttatattgtggttctgtaacagaatggccttgtttttaggaaatctacactgtattttgagataaagatataggtaggtaggtagatagagcnnatgtggtnaaaggntaacatctgaggaatctgagtgagggtacatgggaattctttgtagtattcttggaaactttctgtaaatctgaaattatttcnnaataaaaagtt

SEQ ID NO: 254341 - DNA, 468 bp, Homo sapiens
cgtggtgcctagtaggtgcacaagtgacccgtgccaaatgcacaaatgcttgtctgcctcctgttgatggacatctctgctttcttggctgcccctttgtcaagcactgacttttgattcgtctctgtgatgccttaacccccaccccagggtcgggcacgcagccaggccctcagtcactacctctagagtgacatgagtggggccaggtgcagtggttcatgcctgtaaacccagcactgtgggaggctgaggtcaggagtttgagaccagcctggccagcatggtgaaacctcgtctctgcgaaaaatacaaaaattagccgggcgtggtggtgggtgtgtgtagtcccatctactcaaggggctgaggcaggagagttgcttgagctggggaggcggaggctgcagtgagccaagattgcaccactgcactccagcctgggcaacagagcaagacactgcctca

SEQ ID NO: 254342 - DNA, 642 bp, Homo sapiens
  misc_feature (67)..(67): n is a, c, g, or t
  misc_feature (259)..(259): n is a, c, g, or t
aagaatgtcggggcagcgaaaattatggggggtggtatggagaggtaatgggcgatgtttctcaggnctgcttcaagcgggattaggggcggcgtgggagcctagagtgggagagattaagctgaagggaggtcttgtggtaaggggtgatatcatggggatgttagaagaaacatttgtcgtatagaatgattggtgatggcctggatacggttttggatgatttgagaagctaaatggaagatacaaggtccgaatnaaaggaggagaaaaatgggtattaaatgtctaagaattgggaggacctaggacatctgattagagagtgcctaaggagattcagcatagtcctgccagcaaagattatttacttcaagagttaagagtggcagtttggggatagcaccaggagatatcagctgtgatggcttggagaaacagtgtaaaccggcagtgtaaacaagagcagggcatgtatgagtagttgagaacggtgaataggagtatgactagacagaagatagtagggatgacaagtttttttggggcacagtctaagttggtctggtgtctggaatgagactggggcctaataaaaaggagcgtctatacaggagcttaaatgggatgtactttgtagca

SEQ ID NO: 254343 - DNA, 236 bp, Homo sapiens
tgtgtgtgtggtcaggcgggcaaattgaggccagagagcacgttaatgtgcattctggccagaatcaattcctggggaaagttggaaaaatctcctttcctttctaaattagtgtctaccaggaaaaaaagttgtatatcttaagatcatacttgtctcacagcaaactgatcctggtgttgagtcaaattgagcctgttgatcaggtgtgcatagtgctccagaggctgtcattt

SEQ ID NO: 254344 - DNA, 637 bp, Homo sapiens
ctaatgtcctagaggagatacctgcacatggagagaggatgggtacaatccttctgcaagggatcagacagtaaatattttaggctttctgggacatacagtctctgtggcaaccactcagttctgctgatgtagtgtgaaagccaccacagaccattcccatggttggattccaaaaaatgttatttacaaaagcagtagcaggctggatttgacccatggccttagtttgtctacccctgagctagaggaatgctagaggtcttttccaactccaaaatgctgttattctctgaatttaaaaaatcatctctttcaaatatatctaagttgaacatcccaagtccatgtgcagaaatagtacatttcactttgagtttattaacaaactctgttgaccaagtgagttctttgtttcatcttgactgtgcagtatttttaaaataatagcttctcagaaaacctatgcttatgccatgaaaatctttaaagacacctcagaggccctcttccctctaaagaaaagaaaagaaaagaaatgaaatgaaaagacaaatcacctgttattctaccaagcagagagagcagccatggtgaagactttgttgaatagtgagaatcaaaatctctgctgcgt

SEQ ID NO: 254345 - DNA, 379 bp, Homo sapiens
tgattttttaaattcagagaataacagcattttggagttggaaaagacctctagcattcctctagctcaggggtagacaaactaagtccatgtgcagaaatagtacatttcactttgagtttattaacaaactctgttgaccaagtgagttctttgtttcatcttgactgtgcagtatttttaaaataatagcttctcagaaaacctatgcttatgccatgaaaatctttaaagacacctcagaggccctcttccctctaaagaaaagaaaagaaaagaaatgaaatgaaaagacaaatcacctgttattctaccaagcagagagagcagccatggtgaagactttgttgaatagtgagaatcaaaatctctgctgcgt

SEQ ID NO: 254346 - DNA, 272 bp, Homo sapiens
ccattcattctaatagtgatttgtatttcctgtgtgttctcatgtttccaagcaggaaattcagtctgacaaaatatttgcaatatggtaagagagatatagcctatttttaaaggagataaaggtatcttcagaactcagtaatttattatgtactatttgttttcattattttcagttattttggtcaatcttatttctaatataaatgaaaataacccttaatttaggttttttatgttctgcattttaccctatatttaaaaattggt

SEQ ID NO: 254347 - DNA, 286 bp, Homo sapiens
agggtccgcctcaagtcttcagcagagtcaggtgtgatgagcacgtgcatgtgggcagggaaggaaccacccaggaggagcagagggaaccatctcgaagcccacgtaggcctgagagtagctcactttcccaccatccagagagagcagtctgtttctaaggaacttaactgtgtccccggacgaagctcatttttacaatgaaattctgaatcatgttgttctttattacacatccttgattgtgcaataaagattgattcttgattgatacccaccaataaaa

SEQ ID NO: 254348 - DNA, 509 bp, Homo sapiens
gccaggcggcgagaacgcgctgggggaacccttggtccgctctgcgcgtcgctctaggatccccgaaaaggagcacgggcgcgaaagcggccaggctgggccaggatctagaaagactgcctggcgcaggctccctgcccccgcgggcctgctgtcatggactcgtggagagctcgcttcccgcgcggacccttcctgcaggggtccacgtccaggcaccggcggctcggacaccccacccccggccgggcacctgccctgggtgccccttaacccgggcggtagctcgttaagatggcgaagtgtccggtccggaacacgcgaaaccccaaatcccgcctgcccgacctcctgacccccggccccacgggacgacagactgggcctcccgacgcgcagcgcgctgccgggacaccggtgcgtgcgaaacggaggacctttgtaacgccacgtgtttgctctttttgaaaaaacaagaataaatgtgttaaactgtctgaaaagcttgc

SEQ ID NO: 254349 - DNA, 432 bp, Homo sapiens
cagatattcttaaagcatatgaagatgacgtcctcttaattgatgtaattcaagatgacccagacctctttggagtctccaatgaaggggagctctcatttacttctgaggtcccaaagataagccaggagcccaatgttgctggagagcaccaatcaacagactccaagtacatggaaactccagtaaaaaaagaaccaagtgatgacttaagagaacttcctgtactggactgtggatggataaagccagacatctgtgcttccaactcagcagaaagtgaaataaaacgtgatcccaaagatgtaaacacttccttaggagaagttgctaatgagacctctgaaaatgaaacactgggagacttcagtgaacaaataaaaggttcagacttggatgaaaagcatagatttacagacaaagtgattacca

SEQ ID NO: 254350 - DNA, 343 bp, Homo sapiens
cacacacagaatagaaaaatgaatttatttaccttggattagtaagaccattttgttggaaacccatagtgcaaaattggctttcctttgcctcagttgtactgttgccatatttgacctggcccaggtgaaagtacctactttcatttacccttctatgtcagtgattctccaatgagcaattcatggccaatcttgtttcatctatacccgtgccctcttccccactccatatttgtgtatatttctgacatatcatttcatcctgtaaatgtttcagtacgttatctctaaatgataaggattcttctttaaaaccaaatcacagtattgtcacaccaaa

SEQ ID NO: 254351 - DNA, 308 bp, Homo sapiens
tcctttacgctacacatttatgtcatatcttaggaacaaagaatggaatatgaggtttcaggagcctggattccagggtgatgactgatcaagggccctcccattgggaagagattagcaggtcagggcaatatggcacctaagaagagtcttcatgtaaagtgtggtggaatggcagggagaatctgtgctcacgtttggtatgaacaagtatacgaaagtagcagcatctgaaaggaaaggggttgaatggatttatatgaacattacctggaaattgccagagattcttaaaggtaatctagtaa

SEQ ID NO: 254352 - DNA, 455 bp, Homo sapiens
gaaacaaactgctgtctggaaagctttttggacgcataaacaaactgagatggttgtgctctgaggaacataaagcagtctgaagtaaacagtcgcacacagacgcaacaactacagtatcttcaggatgcaaagccatacaggcgctgtcagttcccttctactggggggcaagaaaacctccctttgagctgtggtgacagggttacatgggagggtttggttgctcttcagttcagaagccatcactgccagcacctgcaacttgctgctctgcaccttctgctctgaccactggtgagagaagtcactccttccttctcttgctcttaagatccctcttaagtcctgcagggtaacacctgcttggctgccacagaggtgtctgggtctcctggtgcctttatggatactcaccactcatgcagggtcttcagggagaagatgaagaaatc

SEQ ID NO: 254353 - DNA, 1455 bp, Homo sapiens
ttgaactatggcacaaggataaaatgagtaaagatttacttctgggaattgcgagaatccagctttctaacatcttgtcttcagaaaaaactcgttttttaggttctaatggtgaacagtgttggcgtcaaacttacagtgaaagtgtgcctgttatagcagcacaaggatcaaataacaggatagcagatctttcttacacagtgactctagaagattatggactagtaaaaatgcgtgagatttttatctctgattcatctcagggtgtatctgccgtacagcaaaagccgtcttctcttcctccagcaccttgtccttcagagatccagacagagcctcgtgaaacgttagaatacaaagcagcacttgagctagaaatgtggaaggagatgcaagaagatatatttgaaaatcagctgaagcagaaagaactggctcatatgcaggctcttgcagaggaatggaagaaaagggaccgagaaagagaatcactagtaaagaaaaaggtggctgaatatactattctagaaggaaaacttcaaaaaactctaattgacttggagaagcgagagcagcagcttgctagtgtggaatcagagcttcaaagagaaaaaaaggaactgcaatcagaacgtcagcggaacctgcaagaactgcaggactctatccgtagggccaaagaggactgtattcaccaagtagaactagaaaggttaaaaatcaaacagctcgaagaggataaacaccgccttcagcaacagcttaatgatgctgaaaataagtataagattttggaaaaagagttccaacagttcaaggaccagcaaaacaacaaaccagaaatccgtctacagtctgaaataaatcttctcaccttggaaaaggttgaacttgaaagaaagttggaatctgcaactaagtctaaactgcattacaagcagcagtggggacgagctttgaaagaacttgccagacttaaacagagggagcaagaaagtcaaatggctcgtcttaaaaaacagcaggaagaattggaacagatgagactacgttaccttgccgctgaggaaaaagatacagtaaaaaccgagcgacaagaattgttggatataagaaatgaattgaacaggttaaggcaacaagagcaaaaacaataccaggattccacagagattgcaagtggaaaaaaggatggcccccatggcagtgtattggaagaaggtttggatgattatttgactcgcctgatagaagaaagggatactttgatgagaacgggtgtgtataatcacgaggatcgaataataagtgaactcgaccgacagatcagagagattttggcaaaaagcaatgccagtaattaataacatttggaaaagctttatagagactctaagtctaaattttaatttctttgtaaaaccctcaaaagtgaggaaaatggatgtttta

SEQ ID NO: 254354 - DNA, 724 bp, Homo sapiens
catacattatccccatccacatcatagccttaacttcacgacgctagaaatatttataagattttggaaaaagagttccaacagttcaaggaccagcaaaacaacaaaccagaaatccgtctacagtctgaaataaatcttctcaccttggaaaaggttgaacttgaaagaaagttggaatctgcaactaagtctaaactgcattacaagcagcagtggggacgagctttgaaagaacttgccagacttaaacagagggagcaagaaagtcaaatggctcgtcttaaaaaacagcaggaagaattggaacagatgagactacgttaccttgccgctgaggaaaaagatacagtaaaaaccgagcgacaagaattgttggatataagaaatgaattgaacaggttaaggcaacaagagcaaaaacaataccaggattccacagagattgcaagtggaaaaaaggatggcccccatggcagtgtattggaagaaggtttggatgattatttgactcgcctgatagaagaaagggatactttgatgagaacgggtgtgtataatcacgaggatcgaataataagtgaactcgaccgacagatcagagagattttggcaaaaagcaatgccagtaattaataacatttggaaaagctttatagagactctaagtctaaattttaatttctttgtaaaaccctcaaaagtgaggaaaatggatgtttta

SEQ ID NO: 254355 - DNA, 555 bp, Homo sapiens
gaataaaaaagaatgcctgaaaaaatcatattagtgatcagcatcggttatttaactgacaactgattcatttatttgacatatttggggttttttggcgactttatttttcttccttttgtagctgaagcagaaagaactggctcatatgcaggctcttgcagaggaatggaagaaaagggaccgagaaagagaatcactagtaaagaaaaaggtaataacttgtgtaaaagtgaggaagagaaggaagaatattaatgataatatcttgtatttgcgttaaagacagtctctggaaggaataactaattttagtggtgatatgttggcatggaagaagtgagtggtggctctggatagagaagggaggcgtttcactgtaaagtattttgtgcttttggaatatgcaaatgtattacctattcaaaaaatatataatataggccaggtatggttgctcacacctgtaatcccagcactgagggaggattgcttgaggccaggaggttgagaccagcctggacaacatagtgagacccccatctcttaaaaaaa

SEQ ID NO: 254356 - DNA, 415 bp, Homo sapiens
aaaattgaaaacacaaagtaattttgagattcatgacagccttagggttcatattacttgactgtgataaatttagaagattatacatagtttggctggttgttcctgcatgctgacggtatttcttccgtctttaacccttgcaaagaagatttaaattttgctatttttgaacttgtttaccaacttggtcattcttgatacttgttattgcccaaattttacttgtaattccttttagaagcataaatagtggatttcaatcatgtcaatatttctgcagtatttagaatggcatgaattagaaaacatgaatttttcaaagaaatcataactttttcttgagtccagccatttgctatcatcaataagattagttaggatactggatttcatcagtgattccattatctga

SEQ ID NO: 254357 - DNA, 365 bp, Homo sapiens
cccttctgtcccatctttaaatgttgaagtgtcccagggctcagtcctagagccccctttcttatttatttattttaatttttttgagatggagtctggctctgtcacccaggctggagtgcaatggtgcgatctcagccactgcactctggcctggtgacacagcgagactccatctcaaaaaaaaaaaaaaaaaaaaaaagattaccagaggataagttagatagctggtagagagatcacgaaagctatgtttgatctctggagcaaaaactgtgttgaagttctcccatggaatggttcccatacaagattcaccatattaatgccttttctaagaaaaggggacatggagaattattgga

SEQ ID NO: 254358 - DNA, 479 bp, Homo sapiens
gtaaacagccctgggacaaagaacagactacgggtattgccttcttaatcaacaataaagtattagttggcttccaggcagacaccactgactttcaagagaaaggcacgggagtaaggaagtaaagaattcagggcaaacgtcgagctttcctctgggctccaatgtaaaagaagtggatagcggctgactagtgtacatattatgtatgcagactttgaaggaatcccccttgtttttagctgttcttccattgctcctggagactctgagctcagagattttctaggctctgatgggcagagtggctcgtttcctccctgaagtttccttcatgccacattctggattacaacctcctccaaagagtgtcatctgtcaatataatgtcatctcttgatttctctgttttcttttcttcactataataggtaattctatgttttagcagagctaaatacatcgccttcatcttcaat

SEQ ID NO: 254359 - DNA, 386 bp, Homo sapiens
  misc_feature (6)..(6): n is a, c, g, or t
  misc_feature (49)..(49): n is a, c, g, or t
gaccanccaccaattaccattacccttccaccaaggacctgggatttangataaaccttccctaaccttccacttaaccaggtttgaaaaaatgacctgcattatatagcaaacctaatttttttgcccttgtcattctgaggtcatgaaataacttggaatcgtaagtaggattctatgtacaaatagcagaagaaaggttcaattgttttcctgtagttttctttcattagtatattgaatgggctgtgaaatctggaatatttcacaaatagaaggtgatatagatacagagagataccttcctgggcatttgtaataacatgtagaatcgaaaatgtgaaactactaatctaagttattaaaacttatctttttcactaaaa

SEQ ID NO: 254360 - DNA, 476 bp, Homo sapiens
atatgctggattacatttattgatttgcgtatattgaaccagccttgcatcccagggatgaagcccacttgatcatggtggataagctttttgatgtgctgctggattcggtttgccagtattttattgaggatctttgcatcaatgttcatcaaggatattggtctaaaatgctctgttttggttgtgtctctgcctggctttggtatcaggatgatgctggcctcataaaatgagttagggaggattccctctttttctattgattggaatcatttcagaaggaatggtaccagttcctccttgtacctctggtagaattcggctgtgaatccatctggtcctggactctttttggcaacctaccttttaaaatattcctcatagtcagtggttaaactctgtatgctttgttgagggaggcattacattgttcttttttttttttttgaatgagtacacagtatatgcaggaa

SEQ ID NO: 254361 - DNA, 413 bp, Homo sapiens
caagaccattaaccttctctttaaaataattaacagctatgttcaagtatcttcttcacactagaagctatactaagtgcttggcatactttacttagcaccaccctatgagggagacactcttatccccacttcacaggtacagaaactaaagtatagagatcaccactacttaaaatcaaacccaaagcacccacgttcagagttagtgctcttctatactatggatacatcatctcatttttaatttccgtgtttttatgatatggtttctacttctgccactcatttcccatttatgacattttagtttggggtgcctgctgtgccatctaagaaagtatcttaaaggtctttttttatgacatcctggaagaatttcctaagtcaggacatttaatatttaactaagt

SEQ ID NO: 254362 - DNA, 727 bp, Homo sapiens
aaattagtatccactaattagaagagttgtatctattaatataaaattgaaatgggccaggtgcagtcccagcactttgggaggccaaggtgggaggatcacttgaggccaggagttggaggccagcctgggcaacatagtaagaccctgtgtcgacaggaaaatgtttaaaaattagccaggcatggcagtgctcatgtgtagtcccagctactcaggaggctgaggcaggagaaccgcttgagcccaagagttggaggctgcaatgagctatgatcacaccactgcattctagcctgggtgacagagtgaaaccctctcaaaaataatgaaactggtatcaacagtttcatatccagcaccagacattatgtgacagtggaagagagactttcaaagttctgagagaaaatgaatttgagcgtagagttctttgccatgccaagctgtcaaccacagataagacaaaagaaagacattagccagggcatggtggctcatgcctatatcccaacactttgggaggccaaggtgggcggatcacctgaggtctggagttcgagaccagcctggccaacatggggaaaccctgtctctactaaaaatacaaaaaatcagccaggcgaggtggcacacgcctctaatcccagctactccggaggctgaggcaggagaatcacttgtacccgcgaggcggaggttgcagtgagctgagcttacgccactg

SEQ ID NO: 254363 - DNA, 230 bp, Homo sapiens
tagattttcatagaagcccaaatcctattgtgaactgtgtatgcaaggtatctaggttgcacactccttaagagaatctaactcatgcttaatgatctgaggtgggaccatttcattctgaaaccatgccccctccccacccttggtccatgaaaaaattgccttccacagaattggtccctgatgccataaaggttggggactgctgatctaaagggagaggtagactc

SEQ ID NO: 254364 - DNA, 430 bp, Homo sapiens
tcttctgtggttatcgcgctttgcctgccgctgagtctctctgaggtgatgctcctcctgtcgttggcttggccctccaacccagactgcatactgtggcctctcaaagcaatgtcgcctgatactcaggccagaaagagaagggaggagagtggggaggagaggggtggaggcgatagcagaacttccttccagagtctctatattcttctgtgttgtttgaacacaacaaccatatactatctctgtgatttaaattcaaatttcaatgagaattaaaagttgaagctcaggccacactgctgtgcgttttttagagagatatgtttgactgaaagcatatcaaggggcaggaagaattttttgctgggcagtataaccagggcagagaaaggtttttatttcttaaaaatattttctatatcataaa

SEQ ID NO: 254365 - DNA, 230 bp, Homo sapiens
ttttaattttttcttaaatatgtcatttcaagctgcattggaaatgtatatttacagacatttactgaataattggtttattaatatgacctatatggtcattagtttaggagagaaaaataatgaatcagtcatgttcaaaacagtaatatagacttcaatggcataaaacattcaagataagcacactgttttctttgttcttactaaaccaattgatgattttaaag

SEQ ID NO: 254366 - DNA, 156 bp, Homo sapiens
caagtctttatttacatagggtgtaactctgtatacccaatgggaaacctctagagggtacataaaccctagaagatttgcaaccagtgctcttgagccacttgctcaagtatgctcccactatgtactttgatttcagtaaatcattgcttcatt

SEQ ID NO: 254367 - DNA, 358 bp, Homo sapiens
gctatcaaagtttgtttttaagatttgttaggtcaggtccagagttgtctgtagtcttgggctaattgatttccactatgaatgagatattattttgagaagtttatctaatactccatattttcctatttctttccaatcaggccagtgagaatatgaactattcccatcatgatatcagcctctggaattgttctgcaagctcttttccattggttctttgcccagcctaaggtagtttctctcacatatttgcatctcagcataaagccaaaaactagaaagtgtccctgtgtagaatttagagctgtctttctgtgtatcttcctcctctccagtagtctctcctgaaaagcta

SEQ ID NO: 254368 - DNA, 1192 bp, Homo sapiens
aggcaggatacttgtgtctcagatgcggtcgcttctttcatacagcaattgccgccttgctgaggatcaaggaacctcagtgtcagatcacgccctccccccaaacttagaaattcagatggggcgcagaaatttctcttgttctgcgtgatctgcatagatggtccaagaggtggtttttccaggagcccagcacccctcctccctccgactcagacccaggagtctggccctccattgaaaggaccccaggttacatcatccattcaggctgcccttgccacgatggaattctgtagctcctgccaaatgggtcaaatatcatggttcaggcgcagggagggtgattgggcgggcctgtctgggtataaattctggagcttctgcatctatcccaaaaaacaagggtgttctgtcagctgaggatccagccgaaagaggagccaggcactcaggccacctgagtctactcacctggacaactggaatctggcaccaattctaaaccactcagcttctccgagctcacaccccggagatcacctgaggacccgagccattgatggactcggacgagaccgggttcgagcactcaggactgtgggtttctgtgctggctggtcttctgctgggagcctgccaggcacaccccatccctgactccagtcctctcctgcaattcgggggccaagtccggcagcggtacctctacacagatgatgcccagcagacagaagcccacctggagatcagggaggatgggacggtggggggcgctgctgaccagagccccgaaagtctcctgcagctgaaagccttgaagccgggagttattcaaatcttgggagtcaagacatccaggttcctgtgccagcggccagatggggccctgtatggatcgctccactttgaccctgaggcctgcagcttccgggagctgcttcttgaggacggatacaatgtttaccagtccgaagcccacggcctcccgctgcacctgccagggaacaagtccccacaccgggaccctgcaccccgaggaccagctcgcttcctgccactaccaggcctgccccccgcactcccggagccacccggaatcctggccccccagccccccgatgtgggctcctcggaccctctgagcatggtgggaccttcccagggccgaagccccagctacgcttcctga

SEQ ID NO: 254369 - DNA, 863 bp, Homo sapiens
catagatcctgaaagcatcttcatttgcttcagtggacccaaaattctctagtctacgcttctcttcagttgtccctttcttttttagaagggatttcttatggtttaggcaaattgatagcagtgttgcttgaattctccttggtattcttacttaataaaggtaacattgctttgaccttgatttaagtgttacttcatagattattttcacctattttctgttcccttgattttacactcccctagtaatagtttataattaaatagtactgaaccttaaaacaggcatagtcccgaaatgcttcacatatattaactcatttaatcctcacaaacagtttatgctagtattgtagtagtattcccagcatagagttaaggaaactaatgcccagagaggttaaatgatttacccaaggtcacacagctaataagaggtggagtcaaggtccaaacccaggcagtctggcttcagaagacttattcttaactgctgcattatacagcctggttagaggcagcacttcttattgacagtttgctttctgcttggcagtggatgtaaagaaagttttggagaaagcctgactgggtagtgaggacattattaatatgttctttgaactagccacatgtcatctgagcctcagtatcagcacatgtgatttgggatgttaaccactttttacggttgttagaattaaaaggtacaccaggcaagacacaggtggtttacccctgtaatcccaatgcatttggaggctaaggtggaaggatttcttgaggccaagagtttgagaccagccaggtcaacatagcaagaccctatctctgccaaaaaaaaaaacaaaacaaattca

SEQ ID NO: 254370 - DNA, 1917 bp, Homo sapiens
ttccagtggtacaagatgtggaggtggaagacagtgatattgtgtccggaatttattccttcttgtgggttctcggtctcactaacttcaagaatgaagccgcagaccgtcgcggtgtgttacagttcttaaagatggtgtgtccagagtttgttccttcagatgttcagatgtgtcgagtttcttccttccggtgggttcgtggtctccctgacttcagaagtgaagccacataccttcgcaatgctggccaagaagagctgaaatagaaaacagcctagaacctaacactatttactgtaaaatttttgcaccaggatggaaggggattcttaccacaatgcaaccaccgtcaatggcaccccagtaaatcaccagcctttggaacgccacaggttgtgggaagtcatcaccattgcagctgtgactgctgtggtaagcctgatcaccattgtgggcaatgtcttggtcatgatctccttcaaagtcaacagccagctcaagacagttaacaactattacctgctcagcttagcctgtgcagatctcatcattggaatcttctccatgaacctctacaccacctacatcctcatgggacgctgggctctcgggagtctggcttgtgacctttggcttgcactggactacgtggccagcaacgcttctgtcatgaaccttctggtgatcagttttgaccgttacttttccatcacaagacccttgacatatcgggccaagcgtactccgaaaagggctggcatcatgattggcttggcctggctgatctccttcatcctctgggccccagcaatcctctgctggcagtacttggttgggaagcggacagttccactggatgagtgccagatccagtttctctctgagcccaccatcacttttggcactgccattgctgccttctacatccctgtttctgtcatgaccatcctctactgtcgaatctaccgggaaacagagaagcgaaccaaggacctggctgacctccagggttctgactctgtgaccaaagctgagaagagaaagccagctcatagggctctgttcagatcctgcttgcgctgtcctcgacccaccctggcccagcgggaaaggaaccaggcctcctggtcatcctcccgcaggagcacctccaccactgggaagccatcccaagccactggcccaagcgccaattgggccaaagctgagcagctcaccacctgtagcagctacccttcctcagaggatgaggacaagcccgccactgaccctgtcctccaagtggtctacaagagtcagggtaaggaaagcccaggggaagaattcagtgctgaagagactgaggaaacttttgtgaaagctgaaactgaaaaaagtgactatgacaccccaaactaccttctgtctccagcagctgctcatagacccaagagtcagaaatgtgtggcctataagttccgattggtggtaaaagctgacgggaaccaggagaccaacaatggctgtcacaaggtgaaaatcatgccctgccccttcccagtggccaaggaaccttcaacgaaaggcctcaatcccaaccccagccatcaaatgaccaaacgaaagagagtggtcctagtcaaagagaggaaagcagcccagacactgagtgccattctcctggccttcatcatcacatggaccccgtataacatcatggtcctggtttctaccttctgtgacaagtgtgtcccagtcaccctgtggcacttgggctattggttgtgctatgtcaatagcactgtcaaccccatctgctatgccctctgcaacagaaccttcaggaagacctttaagatgctgcttctctgccgatggaaaaagaaaaaagtggaagagaagttgtactggcaggggaacagcaagctaccctga

SEQ ID NO: 254371 - DNA, 564 bp, Homo sapiens
aggtacatcttccctttccttcaacagtccaaaccctccagaactctctcgaggcagtgattaatactaaacaaaggacttgaaggataggagggattctgaacagggtagaaataaatagtagtgtgggatattcgtatagttttcttggaagaggtaatatttgagtaggatcttgaaaaatgagtagacgtgtaaatgccgcaagtaaaggcaaagatatatacatcattgtcggaataggaaagagtgtggcacatctgggaatgatgaggggccttatgcagctgggggagtctattggtcagacatgaggctggaaatggtgcaagggctagatagggaagggcttcatatgcgatgccaagaggcacagactatgctgtgattccctggcagtatagctggtgggacaaagagaaatcaaactcaaaaagttcccctcttgtctaccatgtgtatactcaagtaggtgatgagattgtaggaagaaggtaggatataatagcagataattgggtagccatatagaaaaatcaaataaaatttgacctttaccttata

SEQ ID NO: 254372 - DNA, 185 bp, Homo sapiens
ccatctgtgtatcttctttgatgagatgtctgtccagatcttttgcctttttaatttttttgagacagtctctgtcacccaggctgaagtgcagtgcccacagagagaactgccacaggggcagagtcacacagagagggtaatgcatagtggagccacctcacagttccacttgggtcatgccc

SEQ ID NO: 254373 - DNA, 816 bp, Homo sapiens
tacaacagctttatgtggggtgaatcagatgcctgtattacagaagcatctaatgcaaagcaaaataaaaacacttgcatgagcgcacagaggtaggtgtggaagaaagtgaaacactattttaggttttagttacactctgctgtggtgtgctgcctagtatttgcaggttaatgcaaatactaggggttatgaattgtttctaagtctattattaaaaatagccttgcttcatttcttcctaaaatggagacaaatatgtatagtgtctgtgttaccagtatgtgtaagagtaatatcttaatgcgtgtaaaatgttcataggaacctgtatttcaaagagctatttttgcaagtgacactatccttttaagaaacttttttattcaaacttttttctccatttataactattctattatttcttaatgttcagaacccttttcattatctacaaggttaaattttaggtaagtaatgagaaaataataatatgtggagaagaaatgagtgaggagtcgagatgtgtgtcaatcaagaatgagtttgtcagcccttgtattatgattttactcgggaggggataattattgaaggatgtaatgtaagggcagtgatactatatggtatgtaagactgttaaaatcactgaggtaagctattacttgaactaagcatagaaatagagacagatttttaatgcatttaattatcaaaatatctaaattaaagatttgatgtggctgttcactggaaacaaatggcagacaaacagaatatttcttggaatcataaatgacatcatcctgtctccaa

SEQ ID NO: 254374 - DNA, 426 bp, Homo sapiens
cagcactgatacctaagcttttccaggggtttaatctgagtgggagtatggagagtggcttcactgtggagcaaaatgaggtagccgtcaggagagggaagcgagggcacacaacctttgtgctgtcattgttaggtttactgaggtgtaatttacagactgtaaaatccacccttattagtatattttctaagttttggcagaagagtacagtcatacagctaccaccacaatccccctataagtgtccccatgccaccctttgtagtcaacccacacccctactccttgcctctggtaaccattgatctgtttctgactgataattttgccttttccagatgtcatttaaatggaaccatagctttttaagcctggcttcctttactcagcattatatatttgagattcatccattttgttctc

SEQ ID NO: 254375 - DNA, 662 bp, Homo sapiens
catattgctcagaaaaatagattcctttcaaaacattactgctcaccgataatgcacctagtcacccaagaactctgatggaaatgtacaaggagatgaaggttgttttcatgctggctaacaaaatatccactctggcagtgcatggatcaagaaataattttgactttcaagtcttatagctgccatagacagtgattcctctgatggatctgggcaaagtaaactgaaagctttctgaaaaggattcaccattctagatagcattaagaacatttgtgattcatttgaggaggtcaaaatatcaatattaataggagtttggaagaagttgattccaaccctcatggatgactttgaggagttcaagactccagtgggggaagtcactgcaaatgtggtagaaacagcaagataattagaagtggagccagaagatgtgactgaattgctacaatctcacaataaagttgcttcttaaggatgggtagagaaagtggtttcttgacgtggaatctactccttgtaaagatgctgaaatgacaacaaaggacttagacttaattgataaagcagtagcagaattccataaacttaactgataaatcagtagcagaatttgagaggactgacttcaattttgaaagaagttctgtgggaaa

SEQ ID NO: 254376 - DNA, 375 bp, Homo sapiens
tgcatctaggagacccgcagaactctggttgggtcctgtccccctagccagtttggtctgatatgctctgaaccctcttcttgtcctgctggatcagcactgacaacaagtcttcttctgcagctcctgccactgttaatttggacccgtcacttccttgcagtagagctgataggccaactgcagaaccgtagtctgcctccaactgttcactctagagtatacagatgtctccctgtgtttcttctactttagatatttcggccatttgctatcacacatattcatgcgaatgcaggaatttcacgaggtacaattctcttccaatgtaaacctgttctgtgaatgccttctgcaataaaatccctctacaaa

SEQ ID NO: 254377 - DNA, 543 bp, Homo sapiens
aaatgccaggttgagctatctcctctcctctatcaccctagccccaggtgggaacaggaggcgagactccctggggacagaggcaggcggggagaggacgtccctgccttttcccccgagccactgtggctttccctcagtgcccaagcaggggataccactgggaggtccccatccccttcccttccctccccaagacgcctttacggaaaccagtggaagtttcatctcagaatgaatgggctgcactatcaccacctctgcccgagcctcctctgttccacaaaaggccaagttcacactctctccctctatgccaatgaagtgtccccctcctcagtacgtgtatccctttcctaggcctgccagaacaaagtgtcatagaccagatggcttaaaacacataagttgacttttgttatatatttttatatagagatgaggtctcactattttgcccaggctagtctcaaactcctgggttcatgtgatcctcctgcctgggcctcccaaagtgctgggattacaggcatgagccaccat

SEQ ID NO: 254378 - DNA, 228 bp, Homo sapiens
ttagagagaagggtactgtgcttttacaacaggtaaatgattgccacacaaagggtgcacttttgttgtgaggctgctgcccttggttgcagcctacagacagtgaagtttctcttcgatgcctgattagaatggagagcgcactgcctttttaggtccttctgcctttccatccaaactatccatcgttaacaaggccctatggcagtgcagcagcgctcgtcgacg

SEQ ID NO: 254379 - DNA, 690 bp, Homo sapiens
tctgtttataagcctgattttaggagagatgaataatacttgtctttcactcacagaaacagattttcagcatatataatattttaagggttagaatttggcctatgatgtgtctgcatgaaacaaatcattgtaagagaatttgattgtaccatataatgtaaaattagaacaaaggagtcacattgtccatgtatacattatgtgcagagcattcaagtgcatttatctataattcaacaagcccaaaatcatgaaaatattacacttgatattcgcaacattgattataaaatctgaacaagcagcaaagggcacttcaaagtcttgaaatgtcaatatttgtaggccatgcaaatatgtttaaaatatattctgtttggggagctacccagaagccaaacaaaagtacaccagaatcctattatagtacagtactaacacacaagagaagcaagcatcaatctatcttataaaaatgttattccagtcactacataccctacattgcgcatgatgaatttctattatagtaatgttattactagatattataactatatattattctgcatattttaatattaattgttatgatttgaattttaggatgggcataaatatcccattgtctcagcttccctttctaggcactgcaggttaaagagtaaatccatgtcttggcctcct

SEQ ID NO: 254380 - DNA, 316 bp, Homo sapiens
acttctcccaacgtttgcttccacttgaattgttcaaccctcctgctagttctcactcagtagaattcagaaggtttctgtgattgttacctctaatccttggagttcttaaatttttcaacagccttcacctgtactcttcacactggtaacctcagggcagagcccccggtcgaacctgccttaaaggaggttctcagcatatgtgtccaccttgaaggaacctaggaacatccctgtaccaaggagttcatgagttacttttagggtagatgatgggggtctctttcacacccctaccatgaaggataggcca

SEQ ID NO: 254381 - DNA, 912 bp, Homo sapiens
tagtatacaaaaagtagcatgtattgtgtccagttaaggatatttattgaaacttttaagttcattgtatttatagatactgtgctacaatttaaaagacatttcttactgaatttttgtcaaaatccattgacctagataggaatctgtattggagtaaagatggttctaaggggaaggagtgtagagaagcaatgtgggagccacatgcggtggttcatgcctatattctcagtactttgggaggcggaggtgggaggatagcttgaggccaggaattccagaagcaatgtggaaaggacactagggaatgtaggttctagtctttatccaagctctttgacttcaagcaaatcacatttttctcctggaccttacattcttttttctcattgcccttagtaccttctgtctgacttcaaccccacatctgcttgacaagaattaactcaaatatctcttcttaacacctacctgattctggcatacagtaagtgcttataaatatatgttaaatgggtgagaacctttcccttaggtctgtgggtactttcactgggcttgtatatctaccactccatttaaaactctacttacagctttttaagaaaatgtatttctaagccaggcacagtggctcatgcctacatttccagcagtttgggaggctgaggtgggtggattttgtgcttggaaattcgagaccagtctaggcaacgtggcaaaaccccatctctacaaaaaatacaaaaattagcagggtcatagtagtgcgtgcctatagtcccaactacttgggaggctgaagtgagaggattgcctaagcctgggaggtgaagactgcagtgagctgtgggtgtcccactgcacttcagccttggcaacaaagtgagaccctgtctcaaaaaaaaa

SEQ ID NO: 254382 - DNA, 419 bp, Homo sapiens
catgcccgactaattatttttatttgttgtttgaaacggagtctcgctatgttgcctaggctggtctcgaactcctgggttcaagtgatcctcctgccttggcctctcaaagtgcagggattacaggccttagccactgtgcctggtggactaactgaattttttttttcttcatgtcagacgcgcaatgtgccgacgtcgtaacaaggttcgagggtggcgcatctcacacgggaacacccaatcatcacgcttataaagtacaaaaagtcaactaactgaattcttacaaggcatgggtgattagtaaagagggaaaaataattagacctactatgtgcagagcactctggtggaaattggaaaatcagatatttacttcagagcaattaaaactacaaacataaacactcattaac

SEQ ID NO: 254383 - DNA, 4945 bp, Homo sapiens
  misc_feature (90)..(90): n is a, c, g, or t
  misc_feature (94)..(94): n is a, c, g, or t
tcactgttctggagagaaacaaatgcatactcacagcataaggcagtcctcgacacccatgcctctgagtggtcccataattatgagtgnaatncattcttatacattgtgactttcttgaaatgtttatatgcagcatgacgaagttgccccttttgcacttccctgactccagcggacgtctagccctgcatcattgttcttgtttttatgtcccagttgaccttggcattttgttttatcactttcctggttgaagccaaaaaacaaagggtactactttcttctttctttccatatgtaccatactttaggggagagaggggccagtgtttggacactgttgatttaaaaaatcttattttcaggatcataattacggagcccctcctcctccgacacctcctgcttctccccctgtccagacgatcatccctcgttctgacctgaatggcctgccgtcgcctgtagaggaacgctgtggagacagcccgaactctgaaggagaaactgtacctacctggtgtccttgtggtctttctcaggatggcttccttctcaactgtgacaagtgcaggggaatgagcagggggaaggttattagacttcatcggcggaagcaggacaacatatcaggtggggatagcagtgcaacagaaagctgggatgaggagctttctccttccactgtgttgtatacagcaacacagcacacacctacaagcatcaccttaactgttagaagaaccaaacccaagaagcggaaaaagagtccagaaaagggtcgtgcagcaccaaagacgaagaaaatcaagaattctccctctgaagcacagaatttagatgagaatacaactgagggctgggaaaatcggataagactatggactgaccagtatgaagaagctttcactaatcagtacagtgcagatgtacagaacgcgcttgaacaacacctacattctagcaaggaatttgtgggcaaacctactattttagacactattaataagactgaattggcctgtaataacacagttattggttcccaaatgcagttacagctgggaagagtcactcgtgttcaaaagcaccggaagatcctgagggctgcaagagatttggctttggacactcttataatagagtatcgtgggaaagtcatgttacgacagcaatttgaggtcaatgggcatttcttcaaaaaaccatacccctttgtgctcttctactcaaaattcaatggtgtagagatgtgtgtggatgcccgtactttcggtaatgatgctcggttcatcagaagatcatgtacaccaaatgcagaggtgcgacacatgattgcagatgggatgattcacctgtgcatctatgctgtgtctgccatcaccaaggatgctgaggtcaccatagcatttgattatgagtatagtaactgtaattataaagtggactgtgcctgtcacaagggaaaccggaattgtcctatacaaaaaaggaatcctaatgctacagaactgccactcctaccacctcctccaagcctacccaccattggagcagagactagacgtagaaaagcacgacggaaagagctagagatggagcagcagaatgaggcttcagaggagaataatgaccagcaatcacaagaagttccagaaaaagtaactgtatccagtgatcatgaggaagtagacaatccagaagaaaaaccagaagaagagaaagaagaggttatagatgaccaggagaacctagctcatagcaggaggaccagggaagatagaaaggtagaagccatcatgcatgcttttgaaaacttagagaaaagaaagaagcggcgggatcagcccttggaacagagcaactctgatgtagagattactacaaccacctcagagactcctgttggtgaagagacaaaaactgaagcccctgaatctgaagttagcaactctgtttcaaatgttaccatcccaagcaccccacagagtgttggtgtgaatacccggaggtcttcccaagcaggggatattgctgcagaaaaactagtccccaagccacctccagcaaagccttctaggccccggccgaagagtcgaatttctcggtacaggaccagttcagcccaaagactaaagcgtcagaagcaggccaatgcacagcaggcagaattgtcacaagctgccttggaagagggaggaagtaacagtttagtaactcctactgaagctggaagtctagacagttcaggagaaaacaggccattaacagggtctgacccaactgtggtgtcaattactggatcccatgtcaaccgtgctgcatctaaataccccaaaaccaaaaagtatctagttacagaatggttgaatgacaaagcagagaagcaagagtgccctgttgagtgccctttacgtatcacaacggatccaactgtactggcaacgaccctaaacatgttaccaggtcttatccattccccgttaatttgcaccacccccaaacactacattcgctttggctcaccctttatccctgagagacgtcgaaggccccttctgcctgatggcacattcagctcctgtaagaagcgctggataaaacaagccttagaagaagggatgactcaaacatcatctgtaccccaagagactagaactcagcacctataccaaagcaatgagaatagtagctcttctagtatctgcaaagacaatgcagacttgttgagcccattaaagaaatggaagtctcgctatctgatggagcagaatgtcaccaagttacttcggcctctgtctccagtcacaccaccccctcccaattcaggctcaaagagtccccagctggccacacctggctcatctcacccaggagaagaggagtgtcgaaatggatacagcctcatgttttcaccagtcacatctcttactactgctagtcgctgcaacactcctctacagtttgagctttgtcaccgaaaagacctggatttggcaaaagtaggataccttgactccaacactaacagctgtgctgatagaccttccctactcaactcaggtcattctgacctggctcctcatccctccctcggacccacttctgagactggtttcccaagcagaagtggagatggacatcagaccctcgtgagaaactcagaccaggcatttcggacagagttcaacttgatgtatgcctactcccctttgaatgctatgcctcgagcagatggactgtatcgaggatctcctctagtgggggataggaagcctttacatttggatgggggatattgttcccctgcagaaggattttccagcagatatgaacatggcttaatgaaagacctctctcgtggatccttgtcacctggtggtgaaagggcctgtgaaggagtcccatctgccccccagaacccaccacagaggaaaaaagtatccctgctggagtaccgaaaacggaaacaagaagctaaggaaaattctgctggtgggggaggtgactctgcacagagcaaaagcaagtctgcaggagctgggcaaggcagcagtaactccgtttccgacactggtgcccatggtgtgcagggatcctcagcccgaactccatcttcccctcacaaaaaattctccccatctcattcctctatgtcccatttggaggcggtaagcccatcagattccagaggcacttcttcatctcactgcagacctcaagagaatatcagcagtaggtggatggttcccacatcagtagaacgactccgagaaggagggagcatccccaaggtcctccgaagcagcgtgagggtggcccaaaagggagagccctctcccacatgggagagtaacatcacagagaaagactcagaccctgcagatggagaaggcccagagacattaagctcagcactctctaaaggagcaacagtttacagcccttccagatacagctaccagctcctgcagtgtgatagtcctcggacagaatcacaaagcctccttcagcagagttcctcccccttcagaggacatcctacacagtctccaggatacagttatcgaactactgcactgagacctggaaaccccccctctcacggttcttcagaatcatccctctcttccacgtcctattccagccccgcccaccctgtgtccacagactcgttggccccatttacggggacaccagggtattttagcagccagccacattctggaaacagcactggcagcaatcttccaaggaggagctgcccttctagtgctgctagccctaccctgcagggaccctcagactcgccaacctcagattcagtttctcagtccagcacaggaactctgagttccacctcctttcctcagaactctaggtcgtcattgccatcagacttacggactatcagtctgcccagtgctgggcagtcagctgtctaccaggcctccagggtatctgcggtttccaattcacagcactacccacaccgtgggagtgggggtgtgcaccagtaccgactccagccactgcaagggtcaggagtcaagactcagacgggactttcctagggcttctggatttgggcaaacagaactgaatgagcccatagctgcttccttccagctgcctctggaacctaggccgagcatattgctgaggaacggggggtacaaggtgccagaggattgggtctggtggacaagaaacaagacttgtggtcacaattggcctctggccttggagaaagctgtaaatcttgtctgaagcagagactataaagaagtttctccctgctgtcaagggtacattgttgacaagcaaatggtgtttcggttagtaacggttctaagtgcaatgagttgtgttgaagcctccgtctcccatccttgcctgtagcccgtagtcacttgtgcagtgaggacatctttttaaattt

SEQ ID NO: 254384 - DNA, 2860 bp, Homo sapiens
  misc_feature (1)..(3): n is a, c, g, or t
nnntaacagattaccataactccttaaataaataatagattaccataactccaaatggagagaaagtatggtttttttctctcttacggaaagttcatggtctttatgaaaaatccaaccagaagccttttcacacaggtgcgacacatgattgcagatgggatgattcacctgtgcatctatgctgtgtctgccatcaccaaggatgctgaggtcaccatagcatttgattatgagtatagtaactgtaattataaagtggactgtgcctgtcacaagggaaaccggaattgtcctatacaaaaaaggaatcctaatgctacagaactgccactcctaccacctcctccaagcctacccaccattggagcagagactagacgtagaaaagcacgacggaaagagctagagatggagcagcagaatgaggcttcagaggagaataatgaccagcaatcacaagaagttccagaaaaagtaactgtatccagtgatcatgaggtaatcgcccctggtcaaatgatgatgctatggcatcaatcctccaaaggaagaggaacccgggttgccgcatggtttaagtaggggagctatagtaacacttagtgccctttatatcaatgtgggtttattgtgttcatacatttctttctgttttacaaagtcaaaaacatcctttgctggttttgcaccagagaataggggttagttatcatctgtgtttaccatgtggcctcacatgagttaacagtttaaagcactagagattgttatagagagttttaagctaccagaataaaacagattgattttttctcagagcttgagtacagctgaatattgcctctatcttaaaggaagtagacaatccagaagaaaaaccagaagaagagaaagaagaggttatagatgaccaggagaacctagctcatagcaggagggtgagtactgtctgacattactttgctccttctcattcctgctacctccatcatgtgaacctcttctgttctcttgactttgtatcatctcattgatttgacctgaaggttataatttgggctttttccgtaataaagattttattataatttttttatttatttttctctatacacacagtagttttgtagtgattattatctagtgatggtttgaagaggttgttttttttttttttttttactaacaatctggtttccactgcacccatcctgtttttctttcatattaaagtttcaaaataactgaccctttttgaaaagtttatgtttgaccttgcctttatttacaactattccccacatttaaaatgaaatattttatttttaatcttctgttttccaagttatatgtgtcatcttactggtagttaaatgaatttctgtaaatttccattaaaaatacttttataaaagctatccactcgtcctcatttgaagcttccttctacaccagtactatctctttctagaccagggaagatagaaaggtagaagccatcatgcatgcttttgaaaacttagagaaaagaaagaagcggcgggatcagcccttggaacagagcaactctgatgtagagattactacaaccacctcagagactcctgttggtgaagagacaaaaactgaagcccctgaatctgaagttagcaactctgtttcaaatgttaccatcccaagcaccccacagagtgttggtgtgaatacccggaggtcttcccaagcaggggatattgctgcagaaaaactagtccccaagccacctccagcaaagccttctaggccccggccgaagagtcgaatttctcggtacaggaccagttcagcccaaagactaaagcgtcagaagcaggccaatgcacagcaggcagaattgtcacaagctgccttggaagagggaggaagtaacagtttagtaactcctactgaagctggaagtctagacagttcaggagaaaacaggccattaacagggtctgacccaactgtggtgtcaattactggatcccatgtcaaccgtgctgcatctaaataccccaaaaccaaaaaggtaagtcacaaatgcatcctttataagtccagtctggcaagggctgtcttagtgaaatgagaggacctataatccccagaagaaactaatctcaatattactagattgaaagttctaaaatgctttgacacaaaaggctggagtcatcctgctacctgtttccttatttttagtcagcttaaatcactgatagctgaaattattcctctcttagtgggcgtggagagggtgaaggaagatatccttgtgttctagttgctcaattcattcttactgcagctgctgcatctcctcctgtcctagtttctagatgacgtttgtctttatgaactacactgctacctcttgatttataaactaatgatctcttttttaccttagtatctagttacagaatggttgaatgacaaagcagagaagcaagagtgccctgttgagtgccctttacgtatcacaacggatccaactgtactggcaacgaccctaaacatgttaccaggtcttatccattccccgttaatttgcaccacccccaaacactacattcgctttggctcaccctttatccctgagagacgtcgaaggccccttctgcctgatggcacattcagctcctgtaagaagcgctggataaaacaagccttagaagaagggatgactcaaacatcatctgtaccccaagagactagaactcagcacctataccaaagcaatgagaatagtagctcttctagtatctgcaaagacaatgcaggtacgtatctaaaacctttctgattatatgaccaatgattgtttcaggtctgc

SEQ ID NO: 254385 - DNA, 858 bp, Homo sapiens
  misc_feature (11)..(11): n is a, c, g, or t
gtgtcactctnaggatccccacactgggtcgagtcccccaaaaccaaaaaggtaagtcacaaatgcatcctttataagtccagtctggcaagggctgtcttagtgaaatgagaggacctataatccccagaagaaactaatctcaatattactagattgaaagttctaaaatgctttgacacaaaaggctggagtcatcctgctacctgtttccttatttttagtcagcttaaatcactgatagctgaaattattcctctcttagtgggcgtggagagggtgaaggaagatatccttgtgttctagttgctcaattcattcttactgcagctgctgcatctcctcctgtcctagtttctagatgacgtttgtctttatgaactacactgctacctcttgatttataaactaatgatctcttttttaccttagtatctagttacagaatggttgaatgacaaagcagagaagcaagagtgccctgttgagtgccctttacgtatcacaacggatccaactgtactggcaacgaccctaaacatgttaccaggtcttatccattccccgttaatttgcaccacccccaaacactacattcgctttggctcaccctttatccctgagagacgtcgaaggccccttctgcctgatggcacattcagctcctgtaagaagcgctggataaaacaagccttagaagaagggatgactcaaacatcatctgtaccccaagagactagaactcagcacctataccaaagcaatgagaatagtagctcttctagtatctgcaaagacaatgcaggtacgtatctaaaacctttctgattatatgaccaatgattgtttcaggtctgc

SEQ ID NO: 254386 - DNA, 309 bp, Homo sapiens
gcagtgagccaagtttgcaccacagcactccagcctgggcaacagagtaagactcagtttcaaaaaacaaaagaacaaacaaacaaaaactagagggtctcctcttagttcttaaaccctcttagtcaacatttgtgagcctcttttctgtatgttttggcatctttattcctttccttcgtgtcttgaccaaattcaccagatcatgactcagaacaaaatcctgaggttgaatatagaggtctagaacatcttcaaattaactgtttctcctcatagagaattaaagaaattgagaaagcaaaaaaa

SEQ ID NO: 254387 - DNA, 757 bp, Homo sapiens
tctaagaaaaatcacagagtttattggctttgtaaaacctgccacttcatcctgacaacattttggatctaagaagttataagttgaacaactcagcatcagttgtttttacactgaagtgttatttaaaagaagcagatacagtcaacttcacaattttatgaacacttaaaaaaaatgaattgacaagaagagacagagtctcactctctcccaggctggaatgcaagtggtgccatcatagctcactgcagcctcgaactcctgggctcaagggatcctcctgcctcagccttctgggtgactaggagtacagagctccagagcaccaccccactgtgcctcattcaggaagtgctgtgatcaagaaaccactactgctgctggtgccaggactgtgattcccatcaacagcactgatggcctgcacctcacctctgacacccatgggactcttgtatgtggacaccagaaagtctgctaattctggaacaaaaacctgaaatgtctccatgagatggactgctgaaagaaatagaaaaccacagaggtgaggcctccaccgtacttccaaatgctgtattgcacatggaatgcatttgatttgtcagatcaatcactttcagaatccaagctgcaaaggagttttggaaacacagaccagagttttccagcctctgtcagacgagaaggctaaaaaagattggaatggatgatgggcattcatattcacataaattcgacttctatatatgtg

SEQ ID NO: 254388 - DNA, 380 bp, Homo sapiens
ctgctaacctttgaatttctcttttatgactattatactacataattgaggttagattctatataattttgtagcctatatttttccattggtattaatgaaagactttaataacaccttcctgtgttattcaaaagttttcagaaacataatcttaatggcttcatactattctattatgtgaatatgctattattatttacgtagtcatttctctactgttgtgtatttaggtgatttctagatttttgctattataattaataatctaaggaatatttatatatgataattttgttttgccttcttgattattttcttaagatagatcccaataagtagaattactacatcaaataaaatgaatttttaaaaagcta

SEQ ID NO: 254389 - DNA, 370 bp, Homo sapiens
agtcctgtcatttctagctctggaattctctgtggcatccccacagctcttaccctagtcaggtccccagtcttccctcctggacaccacaacagcttccctaactgtctcctgactgccagtgcagcctgatattctagcatacaagtctgatctccttgcaaaaccctccctggatccctctggcccttaaccaggctgtgcagcctggccgtggctcacggcctcagcctcagcccattgggaacctccccacgtcccaccctaagctccagttgcagagaacatgattacagtaagcagctcctggaactccctatgctctctctggctttctcgactttccacatactgctcccatgcggaactc

SEQ ID NO: 254390 - DNA, 506 bp, Homo sapiens
gcagaggggaaaaaaaaaaagaattgaaaaaaaaaaacagcatccagcacaatgcctggcacatagtaagtactcaaatgttcctcaggccagtcatggtggctcaaacctataatccgagcacttttggaggtgagtatggaggatagcttggggccaggaattcaagcctatggtaactactcaaatgttgcttaaatttcaacccagaagccaggcgtggtggctcacacctgtaatcccagtactttgggaggctgaggtgagtggatcacctgaggtcaggagttcaagaccagcctggccaacatgatgaaaccctgtctctactaaaaatacaaaaattagctgggcatggtggcgggtgcctgtaatgccagctacaggggaggctgaggcaggagaatcgcttgaacccaggaggctgaggttacagtgagctgagatcgtgccactgcactccagcctgggtgacagagcaagactccatctcaatttaaaaaaga

SEQ ID NO: 254391 - DNA, 449 bp, Homo sapiens
gcagaggggaaaaaaaaaaagaattgaaaaagccagtcatggtggctcaaacctataatccgagcacttttggaggtgagtatggaggatagcttggggccaggaattcaagcctatggtaactactcaaatgttgcttaaatttcaacccagaagccaggcgtggtggctcacacctgtaatcccagtactttgggaggctgaggtgagtggatcacctgaggtcaggagttcaagaccagcctggccaacatgatgaaaccctgtctctactaaaaatacaaaaattagctgggcatggtggcgggtgcctgtaatgccagctacaggggaggctgaggcaggagaatcgcttgaacccaggaggctgaggttacagtgagctgagatcgtgccactgcactccagcctgggtgacagagcaagactccatctcaatttaaaaaaga

SEQ ID NO: 254392 - DNA, 421 bp, Homo sapiens
tctattcttctcccaggtgcatttttaactcttttctatccaacagtgtctggaaaattctatctccaaaagacatgatcagcagaatgcagatgaatgatgtctcctctcagtaacaatcaccttcctattgtctcctagctggatttggctttccctagaggttgcagtgatgtcatgttggaggggactacagcacttaggccaccctagagtgggctgtaaggcccctacggctctggatgccttgacttgttctctgctaagaccgtgttctcatgggcagcaagcgggattgcaggtgagggaaatagtcaggagcctgaaaaccttcctttctccctcccaagacccttcctttaactgctttgtggctgctgctgtgatttgagttgatagattaaagaatttctatattaaa

SEQ ID NO: 254393 - DNA, 451 bp, Homo sapiens
atacttgtagtggcaggtaaaataaatgtagtccttgccctcaagacagttacaaattaggcagaagtgaagcagtaatagaatagaaactactcagccaatgtttgattacccatatgaaagcgctgttctgtgaaccatatgaagcaccagatataatccttgcattccttgggggtgtgagataggctaagacaggtctgagattgagatgctcttaaggaggaataaagggtaaatttctggggatatgcaagacacaggttggggatgggagaaggttgaatatactgacagtacgggtcttaaacaaaggaggggagtgaatgatattgctgtcatttctcagcaaatcatagtgataaaaaatgtggcagttacaactatacctgtttgaaattcctattatataccatggcaaaaaaataaattatttgcaaggacttaattg

SEQ ID NO: 254394 - DNA, 333 bp, Homo sapiens
ccccatcaaaatccctcccactcccaaggtactaaggaagtcctcaactgcctcctagaattggaagaagatggccctattctccgtgtcatcagcctggacatttatggtgaaaaactaggaactcttatggaagggtccagttcattcatcccacaaacctattccgtgccgggtaccctggggaaaattaaggaaatacatgacagaataaagagaaacaatccttcctttctcttaacacaaacaaaaatcaacaaaatcctttccttgacctcccatcccctccagataactcatcaatcctccatttcccttccctgaaaagcttct

SEQ ID NO: 254395 - DNA, 171 bp, Homo sapiens
ctgaaacctggaaagttgtgtttctaaaaaaattaagagttaaaacaaatgtagcaataccttaagatttggcactgcttagcggtgggtacacatgtctttattctatcctctacatttctgtatgctccatatatttcataataaaaatataaggtgtgttgctcctga

SEQ ID NO: 254396 - DNA, 483 bp, Homo sapiens
catcacttcgtagctcttaacaagtctgtaaatttaataaggtgattttcctaaaccaatgagtctcctaaaaacggttacagattcctcatttcacattgagaagaaagatcacagacctagaatgttaaaactgtccaggaaaaaaaacagttgtaaagctttggaacacactagtagatcttaatctattcacaaggaaatatcagacaagcccaaagtgagagatattctacaagataaattgcttgtactcttgacagctccaaggccatgaaagacaaagaatgagaaactgttctccattaaaggagcctaggcatgacagctaaatgctgtttgattctggattggattctggacccaaaactttttgtctttctttttttctctttcttgcttctttttttctctcttttgctatagatgacattataggacaattggcaaaatatgaataaagtctgcaactagctaatagca

SEQ ID NO: 254397 - DNA, 435 bp, Homo sapiens
aaagtttcttttgctaatgaacatttccagacctgttcctcattctagtttccttttctttctgtccttttttcttgtcaatattctgatccattaattattcattgttattcatctaatttccactgggttatctattaattactcatcaaacacaaatctttttgttttcttccagactgtttcgtaacctatttatcttatgctaaagagacaaagtctctgacttttaaacttacttcttatggccacatttctatcatctgtcacctgggcagagctttgtgaaggaccaggtaccactcatgtaaaaccgctctgggcttccttctatagggaggcaggggaaaactagcagagccgcagggtctagaaggttggttcccaagctggatgcattttggaatcatcaggggagcgtgaaaaaaaaaaaac

SEQ ID NO: 254398 - DNA, 217 bp, Homo sapiens
caaagatttttttaaccttttatcatttctaactaattaagagaaaatttgcttcatataccactatggctctttgtaaatggccttaaatgaaaatttacacttttcttttatcaaaacagttgtgagctgccatttccttgggtatgaaactgattataagcaaagagaccattaaaaaatgttaggtagctttgctgaagttttcttctctaaa

SEQ ID NO: 254399 - DNA, 423 bp, Homo sapiens
ctcccttgatgtatatttaaccacatttcattggctctttcctttttgttttggttgggggttggagaggagttccataaggaattgatgtgatttttctcctggccatttctctaagaataaccctttctgaatgaggtatgttaatcaattcagagttggtcatcttattcctttgtatgatagaagagtagattttaaaatataagcaatgagtatgccttgctttggggtatctggcactgattaccttcttacagcatcacagttactctctttggaaaccctttcttcaatctcaatccatgtcatggaacttatcctactcttaactctaggaattattcgtgaaatctgacaaattagagtgtcacatcccccggtcacagttattgataattggctcaaggagagtcacaggat

SEQ ID NO: 254400 - DNA, 298 bp, Homo sapiens
gtgcagccaggcaggcatagactgaagtaaacatcttgcatgactcagcaggattggagcgcaggtgcacaattccatgcattatataatcaacagctatgtagccataacatgggaggctcatcatctggctctaagccactattgtttgtgaggcgtataaatgcaatactgacactgaaagagctgctgaataaagccatgtctcatctacctgctgtctctcaagtgttcttccagctagctgccccccaccacccactcccctcagacctcagctggggactgaccctgacat

SEQ ID NO: 254401 - DNA, 489 bp, Homo sapiens
aatgagtttgagatgaagtttgagatgtgcttttttatatacaaaaagcacatcttccaccttaaacagttgtatgagacctaaatgaaatacagtgtgcaaagtaccttacaatgcatggaacaaagtaggccttcaacgaggattattcccctttactttaacaatatgatagcataattgcagagagagaaaattggggtaatgagctttgaatagctaacggttttatcagttgtaaatgtgaatcatttggaagcaggagtgttgtcttattaatgacaggtcttattttatagcttagatttaaattaagtcactggtgcaaggcacttcatcagattattttcccaaagtgcaaaagtgcatgtgatccaagaaagagagctgtatttgggtatgaactgcaatgatacatatttatgtcatatctaataacataattgtatgttggattttttcagttagtttataaatattcagaagtaa

SEQ ID NO: 254402 - DNA, 273 bp, Homo sapiens
  misc_feature (50)..(50): n is a, c, g, or t
gaatgattgaataaaaacatatgaataaggaacatattatttggactggnggagtgagttaactgtccagccctggtcagtcagctcttgaaggggtagtttcctggcagtgaggtggtgagccaaggagaggaccacatttctctgcatgcaaatatccgttgcccaaagcattacatgggaagtcaaactcaatcagcaaacaatgattgctgaaccttattaatatggtccgggagatagaaaaaagagtacggaggggtgtcagagtct

SEQ ID NO: 254403 - DNA, 415 bp, Homo sapiens
ggcgcaagaaaatttgcatataagtggacctgcacagttcaaacctgtcttgttcaagggcaaactattcttcctcacttcagtcaggtctgtactcagatgtctttttcaaagagggctcctctgacctccctatccaaaatagcatccttaccccactttatttttcttgatagtacttattacctcttgatgttgtttgttctactagagtaagggaaggagtaagctttgttttgcttactgctgtattttatctcctctgtgtagcaaaaccttaaccctgagggaatttagggttttctctaatttgttgagtgatagtaacagaaattgcacacttctgtggataggacccattgtcacttgttgtttttaacctcaactaggccctcagcattgctcagtgattcta

SEQ ID NO: 254404 - DNA, 340 bp, Homo sapiens
tgtaatgcagtacatgtttttgtccccccagattcatcatattgaaaccctaatccccagtgggatgatatttcgagatgaggcctttaggaggtgatttggtcatgagggtagagcccacaggatgggattagttccgttgtaagtagagacatgagaaagctggcttcctgtctctatgtttccatgctcctccaccatatgaggatacaagaagaggacagcagtctgcaaatcaggaagggagccttcaaccagacactgaatctgccagcaccttgaccttagacttcccagccttcaaaactgtgagaaataaatttctgttgtttaagccacc

SEQ ID NO: 254405 - DNA, 326 bp, Homo sapiens
ccaggagataaaaataaaaaatttgtttatagtcatccaaagttaaagaaattagaagaagttgtaattgaacacttcaagtcatggaatgctgaaaacactactgaaaagaaacgtgatgagacccgagttatgatcttctcttcatttcgagatagtgttcaagaaattgcagaaatgctttcacagcatcagccaattattagagtaatgacttttgtcggccatgcctcagggaaaagcacgaagggttttacccagaaggagcaactggaggtaattatttttggaattgataaaaataaaaataagattgattagctttg

SEQ ID NO: 254406 - DNA, 500 bp, Homo sapiens
cttccatttccaagtgtgtcgatttctccccatcaaggaaaacagctaaggcaatgtgttgatattttctttgaccaagtcatcaggagtcacatagacatacagcactcaagaagtgcctgtaactaaaggcacatctcgttcatctacaacccttgtaatcccaacctttgtctgatgcacaaacccttccctagttctccccaccaccaccactgcacctccaagtggggacaacgaattgtttcatttgcatgtggtttttctcatgaaaaatatcattaacatgagacagccccaaaccaaggaaaccagaagtggggtttgtgcttggtcttactgagagctttccctacttgaccagaccccagcattgttctagatttgtctcttgtgggctacaggaatgcaaacattttgtagtttcctcttttttgttttcttaatggcttgatgagccacacatgtttctctaaatgcatgattttaaattcacacaa

SEQ ID NO: 254407 - DNA, 490 bp, Homo sapiens
gctgcctgcccttcacccctgctccatgaggtaattctgctcccctctgattttttgtatcagaattaactggcttgatgaaggtaccatgcgaaatgagctgctcttaactgggcagaggttttgcatcaggccacctcacaggccagcctatggaaagcttctggagggtcggtacccatgtctggtcagttgggaacagagtgacagtgctgcaactatgcataaaaagctgcctttgaaacctgggggcatgaaggagactcagtgccacagactctttcagaaacaatgtattcatttacctgcaagaagaggagaattgccttcgaaattcttagcatttggattgcagccattgagaagaagaaaagtggcattttctaagaggcaactgctgacagccaaaaaaagtggcgtttcaccattgtgagtggtttgctcccacagactggggtctgaagctgaaataaattcatcataccacaca

SEQ ID NO: 254408 - DNA, 453 bp, Homo sapiens
ccatcccctggcggaaccgcccccagaattaactggcttgatgaaggtaccatgcgaaatgagctgctcttaactgggcagaggttttgcatcaggccacctcacaggccagcctatggaaagcttctggagggtcggtacccatgtctggtcagttgggaacagagtgacagtgctgcaactatgcataaaaagctgcctttgaaacctgggggcatgaaggagactcagtgccacagactctttcagaaacaatgtattcatttacctgcaagaagaggagaattgccttcgaaattcttagcatttggattgcagccattgagaagaagaaaagtggcattttctaagaggcaactgctgacagccaaaaaaagtggcgtttcaccattgtgagtggtttgctcccacagactggggtctgaagctgaaataaattcatcataccacaca

SEQ ID NO: 254409 - DNA, 475 bp, Homo sapiens
cctcacctcatcccctgcatgccattctggcaagtccgaaagcccagctttctgcccagaaagtggaagcgcttcccttaaggcaagagcctgtatgttcccttcagctaagctctggcataaagtcactttctttttaccatccttgtgtttgtcatttaaatttgcaagcaacaaggggcatgacgtgtattcctaggactgagccattagcctgtggggtctgatgctttctccatttactgtcacaattggattgcactgtaggacacgcagctggtacccaagatttggtctgtgtggggaaaaaacccatgtatctggtaacagaagtgttctgtgttgagtgttgagagtatactataagacagttgtttttcctattataacattttgtctttcaacttttttcttcatgtcttctgagacgtaaaagttgtaaattttgaggaaataaattgatttatttttcctt

SEQ ID NO: 254410 - DNA, 373 bp, Homo sapiens
ttgtttgtttgttttgtttttgtgatagctttggtcccaatatttgggggaattttattttgaacatccagaggggagataagataatctactctgcaacaaagtctaaactcagatatctctatttctgatttcctgaaaacgaaacaaaggctgaagtaagaaagacattaccatggctaatacaaactgctgtcttcagcgtttgtctcaagttctttcataaactggactctcaaggtcagttggcacgcttcttccccattggatttgcttgttgggtggataataatgcttttacatgagaggttttgaaggctggagcttataaacaaaaacgcttgataaataaaaatgtgagctgcaggagaaa

SEQ ID NO: 254411 - DNA, 428 bp, Homo sapiens
ctctgaatatatctgctcttagctggaaggaaatacagaacatcacctcttctttggatggtttcagtgggtgtcttggtcatttttttacaaggtgtaaaacatctgccttttccttcactgacagcctaacttatttatttaatggactgtgattgattcaaaacatagttgctgccaattattcagaatttataccactggacgaaaagcttgttccagtggcacttgttgaaggccatgttataccactaagctaactccggttcacaatgcttgtcaaaaataaaaacttaccttcttggactagatttcttttcaccactcataatttgaagtcaactaaaacagggctcttaacatcttccttgctgaaatatgtctctgcatgtggtctccctttgagctacaatacacctgcttcaagg

SEQ ID NO: 254412 - DNA, 383 bp, Homo sapiens
ctgtgcctggacttgtgggggaggtaagcaggttctatgtgagaagacaacttgagaacatcagccctgagagccgcggtaccacatttcatcagagcacacaggactcgccactcactcccctcccttagtgctgaccaagtagccctcccagccacttctgcctgtcacaaaggcagatgcagagatcgtcattcctttcctcacacgtcttctgaggcctcgtcccagcaggatctcagttgtgtaaacttcaggcaaaggccaactttgtatagagctgtgggtagcacgtcacaaacagtagggaccctatttcgctgagtctgtgagacacagcccattgtcaggtgcttcctgatttcagggagattaaaatgtga

SEQ ID NO: 254413 - DNA, 441 bp, Homo sapiens
ttttgttgtgggagaggcctttctaagtaccacatcaaaggcagaaatcataaactaaaacactgatagatgtgaatgcataaaaattaaaatctttatatgggcaaaaaaccttttcaaaaggtttgacacatcaataaactataaaaatacttgcaacagactgggcgcagtggctcacgcctgtaatccctgcactttgggaggctgaggcaggtggatcacctgaagtcaggagattgagaccagcctggccaacatgatgaaaccccgtctctactaaaaatacaaaaattagccaggcgtggtggcacgcctgtaatcccagctacttgggaggctgaagcaggagaatcacttgaacctgggaggtggaggttgcagtgagctgagattgcaccactgcactccagcctgggtgacaagagcaaaactgtctca

SEQ ID NO: 254414 - DNA, 453 bp, Homo sapiens
cttgccactgaaatggatcaatatgctttctaattctggttattttttaatggctttaatttcttcaaacattgtcttcttatgtagtgtttttaatttcttaagcaaaaacaaggcaaaaacttttagtgactctccatcacctgaggataatcctgcttgactggttggatcttaggactggctttatgggcattcaaccagtgcaatcacacagaaccctgtgcttgtaagagcctcctactcctaatatgctatagtgctgtgctatcaccaacttgaagttcttagtaagtttttaacaagagataccttatttgcatgtgactcttggcactacaaattaggtagttcgtcctagatcaaggagatgtctcctctactctcaagttactggatctggattccttgagcactaggattgtaaaataaccttcaaaggggctgaccacg

SEQ ID NO: 254415 - DNA, 266 bp, Homo sapiens
ctttagagagaaaatggtgggacagttaggaaggggtctcactatgttgtctaggctggtctccaactcctgagctcaagtaatcctcccacctcagcctcccaaagcactgggattataggcacgagtcactgtgcctggcctggcattagggtcttaagctcatttcgttctgttccttgaggattaatttggccagaacagttagtattcacaagtggcaacctaaaattaagtatgtgattcatatccaggatgaggcaagt

SEQ ID NO: 254416 - DNA, 336 bp, Homo sapiens
cacacccacggcagacacgcacgcacccgggcgccgaagggaaagccgcgtctcgccctcccgccccgccgtcggtcctgtctcagtccctcagcagagcgggaaagcggaggccggagccgtgacctctgaccccgtggttatgcggagccgccgcattccttagcgatcgcggggcagccgccgctgccgccgtgggcgactgacgcagcgcgggcgcgtggagccgccgccgcccctcccccaccgccgctctcgcgccagccggtccccgcgtgcccgccccttctccccggccgcacccgagacctcgcgcgccgccgctgccacgcgccc

SEQ ID NO: 254417 - DNA, 414 bp, Homo sapiens
ggaccctgacaggggctatgaaaatagtgtatccgatcccagaagcactggagagtagcagggagagtgggttttgagggtctggatgtgtaggccagttatagggatggaagacaggaagttgtgctttggcgctagtgaccttgagtgatggtgaggattacagtgggactttcttgtgggtatttgaaaggctaattgagaattctggtggtggaagagaaggaggggagggatgaaggaggaaaacagaccaagtgaaagtgaatgagtgagagacataatgaatgaatgaatgaattgttgaatcaggtagatgtgaaaatggggctggattattggctggtttggaagccatttcttcattgagacctctcagtgtaaaggaagagtggattatcttctccatggggg

SEQ ID NO: 254418 - DNA, 388 bp, Homo sapiens
gacctcaggtgattcatccgcctcagcctcccaaagtgtgggattacaggtgtgagccactgggcccagctacaatagaatactttaagctatataccttgctttttagacataatagcttctgtgtaattaattgacaacagtatagtacaaacataacttttttttttttaagttccagggtacatgtgcaggatgtgtaggttggttacataggtaaatgtgtgccacggtggtttgctgcacctgtcaacccatcacctacatattaagcccagcatgcattagctatttttcctgatgctctcccttcaccccctaccccataggccccagtgtgttcccctctccatgtctgttaaatgtaacttttatacgtacttggaaa

SEQ ID NO: 254419 - DNA, 250 bp, Homo sapiens
aaaagtgtatgtaacttttaagtaacctataatcttcccttcctcaggttcattaagcactgaaccaatagcgcacaggctgagaaacttacctcacccagatgttttgggcctgaattctaacccctctgaaagccacccaccaccagcttctgcaccaggcacccagtcttggctgggacacagggtagcatctctcatggccagcagacctctgttgggccatgttctgatgcatttctgatctgtc

SEQ ID NO: 254420 - DNA, 278 bp, Homo sapiens
ggcattttttgcaaacccttagccaaagcattgatccggcaacagttcaccaggatagtcgtgatgccaaagggtcaggaaagtgtgttttctttcatctgtcgctgggcaactgtcgagggccataactctgagctgaggagacggacacctgtggcctcaaaagaaatatccatgttatgtgtcttgtctcatgggatcctatttgagtgttagaaacaggaaagttcttcttgttcatgttagcagttgtttgttgagccctccctccagccttc

SEQ ID NO: 254421 - DNA, 371 bp, Homo sapiens
gccaccattcccaacctaaactttttgcaattagaaagaattaatgatactttaaaaatatcctatgccccctaacagagtctcttgaatgtaatgtactcaatgaaaattttcagtaaaattgttagtgcatttttttctgtttcttatattacatgtctatgcatacagagtttgtaatattgtaatacttttcttttaaaaacagttgtagtaatcaatggtatgccattcactcagtgcttttttagtactaagtaagtttgatattctttttttttttttttcactgttgcccaggctagagtgcagtgagccgagattgcaccattgtactccagcctgggtgacaagagcgagactttgtctca

SEQ ID NO: 254422 - DNA, 713 bp, Homo sapiens
agcaaatagaacaaaacagagtatgatacaacaatgtagatgaattccagaaacatggtatgcagaagagccaggacacaagagtatacataagttatgtgaaggcgaaactattctatcgtgataaaaatcagaatgctggttgtttatgggagatagaaattaactggaagggggcacaaaggaactttctatgtctctgttatggtggtaaatatatacatttttatatatacatatttatacataggtgtataaatttatcaaaatcaaaactcattctgtgtacattttgaagtccatgaattttgctgaatataaattatacctcaactctaaaaaatttcatgttgaccctaatcaactctcacctgaagtgcttcatctattttcctaatggctaccctggtccctgtcctaattaaccttcaaagctgttttaaaacttttctcttctgcctattgctctgattccaagagatgtggtagaatgtaaattgtcaagatttggaaatctggagaatgttcaaggttaaagacagaaatatctaattaacaagcccagatacagccttggacagtcgaacgcttgggcaagtgttcactgctcgtgttcacttttctcttttgtgaatgatactgctttctaaatatattttatttcttgagcaagagggagaaaagaggagtccttcaaatttactttttgtttt

SEQ ID NO: 254423 - DNA, 741 bp, Homo sapiens
caagcttgagagtgaaaaactttaggggtgacgagtcatgagacctaatcataggactatagaatgctctaccctcccccgctttcttacccccactttcttagccctattttctgcagttccttttacccaattcaccatgtccagctctcaagaaaaaaattacaagtgtactagaaggcaaataatacacttcgaagagacagaacaagcaacagaaccagattcagatatggcagggctcttgaaattatcatatcaggaatttaaaacaactatcattaaaatactaagggctctagggataaagtagatgccatggaagagcagatgggcaatgtaagcagagaggtggaattctaagaaagaatcaaaaagaaatgccaaaggtgaaaaacagtgaaataaaaatgaagaatgttttaaatgagttcattggtagacttgacacagctgaggaaagaatctaaaaccttgagtatatgtcagtagaaacttccaagatagaaaagtaaagggaaaaaagactgaaataaactgaacagaatatccaagaactgtggaacaacaataggtgtatcatatgcatgatgagaataccaaacgaagtaaaaaaggaaaggaacagattaaatatttgaagcaggaacaacagaaattttcctgcaaattaatgtcccacactaaaccacagattcaggaagctcagaaagcattaggataaatgcaaaaaaaaaaaaa

SEQ ID NO: 254424 - DNA, 405 bp, Homo sapiens
agcttggttcacagttacatattagtgtggttagtgtaatatttctcagtttctctagattgttaagtgccatgtgagcaggaccttgggtatgcttactattgcatccgtagagcctagcaccacatctggtttatacaaccataggcactgaagcacacaatgggtaactgcaagtggcttgatggagtcttatcaagctgtgactgaagaaacatgggaactgaggctacatagaggatctacaacaatggctttcaaactattttgatgatgatctacaatgtgaatacaatttgtattacagttcagtacacgagcatgttcatagcatatgtaacatagattttgtataccagtactttgccataagctcatgtaatacactcgttttccacatcaaaa

SEQ ID NO: 254425 - DNA, 487 bp, Homo sapiens
acttgatcctacattttatgctgacaccttaactctttgtcaaaggctattccaatctgtaatggaaggaattcagggatgccttccctttctgtgtgcattgtataaagatagaattggagattcgctggcagaaataccctcagctgcctctctggtcttttccagcaactcccagaagagccctgatctcagggctcttgtctgccccaagcctgggaagctttgctcagggaaagaagaacagagggaactgggctgcaacggagatggtgttaattggagcaaaagattttgcctactggaaatagtagctgtaagcgagatgagatccaaagaacccagtgaaactcttcgggcctgcctgcagcctggctcctccagggaagacaagactgaaccccccattgaggcaaggcaaaaaaggctcaaaatgaatcaattaacagcacatataagataataaatgcctgtatttttttttctt

SEQ ID NO: 254426 - DNA, 310 bp, Homo sapiens
agagagaatccagaagggtgatgccagcatcagccagatgccggggtgtggactagtgacagccattggcttctgctccatgagggcctcttgctgacagtggtggggtttctgtaaccccacctgactgggcccatggatgccgtctccaaaggtggaagcagcttggtgaagtgggcagagtggtgttcctgaggccagaaatgatggaatccctaactcaactcttaactgctgtgtgacttctggcaagtcattttgcctctccgagcctcagttgtctcatctgcaaaatggggatgacaatgcc

SEQ ID NO: 254427 - DNA, 429 bp, Homo sapiens
tgcactgagtttctacttttatctctccttcataaaacactccaattataatacagtacaatattttaaattaagttaaaacccacctcaattttgacagtgagcaaagaagaaaaaaaaagccatagcatagcagttatcctgtggtctcactttctcttccttgtttagacttggagttagtttgggtgtatttgaaacctttctgcagtgatgcactttctgaaacatatggcctagggtctgccagtggtgtatttattggtctttttcaccttttggtatagacctgagatattctagtgggaaaagaaaggagtctgctcttcttaaaactctgctgcctcaagggtggagcctattaaccactgccaaaagtttagatgaatttaaagtttaatataagatgactcctgattgttaaaaaaa

SEQ ID NO: 254428 - DNA, 506 bp, Homo sapiens
gtctctaaacattttggggaagattctggaatgtcttaagtgtttacagagtggctttttagctgtcctggggcatccagatttcttctttggggtgatgtttgtgccaagatccctcatgccttgatgctgctgactctgttaaagaggaataaagctgccgtgttgaagccatcctcaccaatcatgcagaatctgtttgtgccacccaatactctaaatgctcctcagggatttttaatgatgttcttttttttttctttttctttctttcttttcttttttgaggcagagtctcttgatatggcccaggctggagtgcagtggcacgatctccactcagcgcagtctccacctccctggttcaagtgattctcccacctcagccacttgggaggctgaggcatgagaatcgcttgagcctgggaggcagaggttgcagtgagctgagatcgtgtcatcgcactccagcctgggtgatagagtgagacaccctgtctcaaaag

SEQ ID NO: 254429 - DNA, 218 bp, Homo sapiens
ttttctttttgatgtcttttatttccttcttttacctgattgctctggctagcacttcaagtactgtcatgaatacaacaggtgagaaaaggcatccttttcttgtcttcaaggggaacgcttccagtttttgcccatttattattatgttgttgtgggtttgtcacagatggctcttactattttgagaaatattccttcaatgcctagtgtctttt

SEQ ID NO: 254430 - DNA, 323 bp, Homo sapiens
actccagcctgggcgacagtgagactctgtctcaaacaaacaaacgaaaacaatgataaaagagatttaacatcactgaaagttgtaaggaagtaaaccctaaacctccacccctccattaaagcaatgattataagactatactttgaacaattatatgacaacagattagctaacctagatgaaatggacatatttctagcaacacagaaattgccaaaactggctcaagaagaagtaaaaaactttagtagatgtgtaacaatggattatgtcaataatcaaaacctctgaacaaataaaggcccagaaccagatgactt

SEQ ID NO: 254431 - DNA, 318 bp, Homo sapiens
cacgaggcctgccgcggggcctccctggagagggactagccctggggatctgtggccacagcaagcctgggagggtgtttcctaacagcaaagctgggggcaggcgtttcctgaagccctggaggctgcgccatgtggggaggtagagaacctggcctgagagccccgagggccacatcgggactgtggagtccccacagcagctggctggatgagatggttcagaagccctctgaaaagtcactcccttgcccagagcctccagggacttgccatggctctggggatgaggcccatgctccctggcagctcctgtac

SEQ ID NO: 254432 - DNA, 302 bp, Homo sapiens
tgcccctgccaaagctaccaccagttgtgtcaatgctatccacaccagcaatgtacccccgaaccctcgtaccaagaaatagctgatttgcacagagatagatgacatgggatgcctgtctcaatgacaaggggatacactgtagctgtatcttttcttctccctgaaacttccatgaccatgaccctagccttgttgccagactgaaatgaacaagcatttcctctcctcttcactcctaagcttcatttttgtttgttattgatgtcttttttttcattcataaataattttcctttggc

SEQ ID NO: 254433 - DNA, 644 bp, Homo sapiens
gctcgctgacataaaacaaaaacaaggtgacaggagagggagatgagaggctagatggttaatttagatggtcaggaagatctctaggggggcattcaagctgaatggtactttgaatgtttttcgtaagaatgggaggaaataggccgggcacggtggctcatgcctgtaatcccagcactttgggaggccgaggtgggtggatccacctgaggtcaggagatcgagaccagcctgatcaacatggtgaagccctctctctactaaaaacacaaaaaattagccgggcatggtggcgggcacctgtagtcccagctactcaggaggctgaggcagaagaatggcgtgaacccgggaggcggagcttgcagtgagccgagattgcgtcactgcactccagcctgggcgacaaagcgagactccatctcaaaaaaaaaactttgggaggccaaggcgggtggatcccctgaggtcagaaaattgagaccagcctgaccaatatggtgaagtcctatctctactaaatacataaaaattagctgggcgtggtggcacatgtctgtaatcccagctacttgggaagctgaggcaggagaatcccttgaacccaggaggcggaggttgcagtgagccgagatcgcacc

SEQ ID NO: 254434 - DNA, 499 bp, Homo sapiens
tgatgtaaaatgtggaaggaaaagacaatacaggccaagagtggaagcagtgagaccttttacaggcctccttgattattcaaatttagttaatgtctcaattatacaaaaaatacttagttgctaattacgtaaagaccatcacataattaagaggaaggagcaaataacctctggcccttggtttttttatgcaaatgggagaaattagctacattcattcatccatgaaaaacatttattgagtgaacatcatgtgtcagacactctgctatgctctgcactgagaaaaaagatgaaaaagaccctaattttaactaacactcaaggaacttaggacaagtatggtagtagaagaatgaagaacagaccaggtgtggtggcacacacctgtaatcccagcactttgggagcctgaggcaggtggaccacctaaggtcaggagttcgagactagcctgaccaacatggcgaaacctgttctctactaaaaaaaaaaa

SEQ ID NO: 254435 - DNA, 441 bp, Homo sapiens
gtccccttggcttcctcctccgcctcctccttccagggtctcctctgcagcactccctggcctcccaggcactacctccccttcttgtcacccaagagcagttggcacagatctctgtgggcatcacacagacttcctcccatcaccctctcagatcctcctctgcggcccccatgctaggtgggagcctcattgtctctctaactgtggcaacaggcgaagcacgtgctctcactcacagggtccttggagtgcctgctctggttgccacatgccatggggtgcggttgctgctctcaagaagcccacatcctcctgcaggggacctagcccacggagagtgccaagtgtatgcttgtcagaggtgaaagaggtgtgtgtgtgtgtgtgtatgtatgtgcatgtgtgtgtgtgtgcatgtctgtgcttgtgcatgcgtgg

SEQ ID NO: 254436 - DNA, 681 bp, Homo sapiens
tagattaccaccaatcagccatctgtgtcatatgccatcattcttcctgacatctctgaattacaaactcaaccaagagttccagtaatgaatctagaaggttactttttcacattttacaccctgtaaattttatagaataacccagttctcactctcattctgcttatttgatccaagtgaagaatactatccaatattcacccacagttcctctaggtagggatgggaggaagtagggagtaaatattattaccaaggagagagggaaaagaagaatatagatatatatgtatataatcgtaaatcatatttttatatataaagaatacatataattttaaatattattaaacaacacaagaaaaagtaagtatggagaaaaataatcatgcacatttcaaaagaatacagaaagtgggaggaaaattacattctctatgagaataaggcagaaatattccccaaaaggagaaaaaactaaaagggagaaattactcatatattggtcacgtttatatggtaacttttacacttttttaaaaagtcaaccccatttttgttttcactgaaaaatagtatgtgtcctgcagtatatactcaataaatgtttgtgaattgaatttaaattattttactttggcaggttatttctttttcacagtgctcacagggaaaatc

SEQ ID NO: 254437 - DNA, 488 bp, Homo sapiens
gtaagaacctagagttttatgtattattattattaagccttccgagggaccactttgcacgcgcacacaacctgcctccgggacacccgccgggggcgccagtggggtgcgcacgcccaacggggagacccgggcaggtacccgagcaggtggagcggcgaccgtggagggtgtcgggagggaaaccgtaggtggatagagtgggatccccgagagcccggacatgacacgcgggttgaccacccgctgcttaggcgatcagttcactttcccactctgcgctcttggcgcgctgccccggggctggagacccgcggtttctgagagtcgcttctcgcggcgccggctgccgcccgcgcccacgccgctcggataaccccaggttctggcaccgcgagcgcaaagccgcctcggagcagggaaatggtgcccttctgttccgctggtcacagcctcccccaaagccgagaacgaactttgcctacgac

SEQ ID NO: 254438 - DNA, 510 bp, Homo sapiens
gtttgaaggttcttatttccattcagactcaaactctccctcctcaacactttcacccatgggtcctatccttaagggccatacaaaactaatcgaatctcttagaacagctcttcacactgttgaacacagttgtcactgctccttgtctccaccctctgagtgctcctacctccagtttcttaatctaattcactctttcccagacaccattgctctgcctgcttgttttggacatgactgtcttaagtggtggctccaggcaagcctattcttcacagtctttatgaaatgcattccttcagtgcctggaacaatagcagggacttgatttttatatttgctacgtggaagagcatattctagctaaccccatagaatatgcatttagtattgtaaacctcagtttacaaaaacaatttcttcagtacctctcatgtcattttctccccaagtctcagtcctcattagatgagggaaaaacatcacttttgcttctaactccttcag

SEQ ID NO: 254439 - DNA, 576 bp, Homo sapiens
gtggctaatctaggaatgactcttgctcttctgagagtcactggtagaactgtggaaacactgtccatgtccaagccctttcttcattcgttagcaccttcattctttcaaaacacgtttatgtggagtccatctggtgtcagggagaactgtaggagccagctgacaaagatgaccaacagagttggggccctggcctcagagcctaccagagtgaagcgagagatggtcacctcatggcccacagcatgacggtgtcatcctccactgggcattgcgtgggtaggagttgggacgggattccccgaggaagttgtaaagagcctgaggccccgcatttgagtgggaggccactgggccaggcaggccaggggacaggaggacaggagcagaggcaggccagggccaggcagaagcctgtgaggcaggagtgggcgagcccagcagggcctccaaggtcatgggagtgtcttagactctcaaggatggtgggagccatagtagggtgtggagcaggaaagtagcacaatcacgtgtgcgtatctgcgtatttaaatgtatttaaatgcctcaggt

SEQ ID NO: 254440 - DNA, 720 bp, Homo sapiens
gtgcaaatcattttaaagagaaagaaataatgtcaaatttattatccttgatagtagttgaaagttcacagtaatatggaaaaggtatacatgggactatttctgccctcggaagcgtctgcgcagatagcatggttagcaagtggcaggaaccatggggatttcagtgtgtccctggctgccaaggcctgggggccgaagtttacaaatacacccttggctgaggggaaagggactggggtcctgttccctatcattacatgttccagggacacacaggcctgaagaccttcctaaacagtgacgatatcacctcaggcgggacccagcagaagcccgcgagtccccggtgccccgccgggatgggcctgtgggccggcaggactccgggcggccctacagcttggtgggctgctcggggctgagggggccaggcccgctgggcgggggcagcaccatgggcagcgagttgctgcccctctcgtgccagcaggtgtccaggatggggtagagcttgccctggaagtcggcctggaaggtgtagagcggccgcaggtcatcggggcggtcggcatcgaagaaggtgagttcgccctgctcatagtgcaggtagagcccgatgcggtgggggtggccggccacgggcaggggtacccgggggcaggcaaaggcttcgtacacccggccctccttcaggccgatcagccacacgccgtgctc

SEQ ID NO: 254441 - DNA, 587 bp, Homo sapiens
gtgcaaatcattttaaagagaaagaaataatgtcaaatttattatccttgatagtagttgaaagttcacagtaatatggaaaaggtatacatgggactatttctgccctcggaagcgtctgcgcagatagcatggttagcaagtggcaggaaccatggggatttcagttgacgatatcacctcaggcgggacccagcagaagcccgcgagtccccggtgccccgccgggatgggcctgtgggccggcaggactccgggcggccctacagcttggtgggctgctcggggctgagggggccaggcccgctgggcgggggcagcaccatgggcagcgagttgctgcccctctcgtgccagcaggtgtccaggatggggtagagcttgccctggaagtcggcctggaaggtgtagagcggccgcaggtcatcggggcggtcggcatcgaagaaggtgagttcgccctgctcatagtgcaggtagagcccgatgcggtgggggtggccggccacgggcaggggtacccgggggcaggcaaaggcttcgtacacccggccctccttcaggccgatcagccacacgccgtgctc

SEQ ID NO: 254442 - DNA, 1995 bp, Homo sapiens
agcggagtgttcggctggggcaggcacgctgtggctggctacttcccttcctcccatcccccttgggccaaacgggatcggtgcttctggtgagacgcctccccatgcacatcactcccaggtgccctagggggcacatttcccacaactcccagagggcaggtttctagaaagtgccaccagtggggaggcgccacaacttcactgccattttgtgaggtgccgccgtctctcctccagcaaggtcaggacgaaacaatgaccgataaaacagagaaggtggctgtagatcctgaaactgtgtttaaacgtcccagggaatgtgacagtccttcgtatcagaaaaggcagaggatggccctgttggcaaggaaacaaggagcaggagacagccttattgcaggctctgccatgtccaaagaaaagaagcttatgacaggacatgctattccacccagccaattggattctcagattgatgacttcactggtttcagcaaagataggatgatgcagaaacctggtagcaatgcacctgtgggaggaaacgttaccagcagtttctctggagatgacctagaatgcagagaaacagcctcctctcccaaaagccaacgagaaattaatgctgatataaaacgtaaattagtgaaggaactccgatgcgttggacaaaaatatgaaaaaatcttcgaaatgcttgaaggagtgcaaggacctactgcagtcaggaagcgattttttgaatccatcatcaaggaagcagcaagatgtatgagacgagactttgttaagcaccttaagaagaaactgaaacgtatgatttgagaatacttgtccctggaggattatcacaccccaaatgcataatctcgttaatgattgaggagagaaaaggatcagattgctgttttctacaatggagcaggatattgctgaagtctcctggcatatgttaccgaatcaactggccttccagaggctaagaaatttctgttagtaaaagatgttctttttccccaaagcgttttatttgaaaggataacttgtgttttggttatttgtgtattcccacctgtgctggtagatattattaacccattaggtaaatactattacagtcgtggtttctgcagcagctcacactgatgtagctggcgtttataactaccttctttcgctacccgtttcgcattccctttgccctgagatagcatgtcagttggtcatgatgcttggcctggcaggatgactcaaaccttcattacggaagagtctgaaccattagatatcctgcctggatggggttgctgtgattttccattaactctaatcgaaaaacacgggaggactaagaagctctctagacatatcacacatactcttccttagcccctcgtgtggtgggaacccgatctcaatgttgaaatctgtatcatcagccttcaacgaaaaggcagaactaatgggagattttaatgtgtgtgtgtgtgtgtgtgtgtgtgtgtgtgtgtgtgtgtgtgtgttggtagggggtatatatacatgcacacacacactttctaatctcccattatacatataatacacattacacatattatatatacacccccatatatatatatgtatgcgtgtgtgggggggtatatccaatatatataataaaggtagttcctagataggattggtctgatacaataatttggagctgcagtagcagtccctgtaaggctgttgtttccagatacgacttgaacgttctatgctttttattttttttaaagacagaatcttgctctgttgcccaggctagagtgcggtgacacgatcacaagtcactgccacctcgacctcaccccagttcaagcgatccttgtgcttcagccttcgaagtagctgggattacaggtgcaccacaggtgccatcacgctgcaatttttgtatttttagtggagatggggttttgccatgttgtccaggctggtctcgaa

SEQ ID NO: 254443 - DNA, 507 bp, Homo sapiens
tcctcctgtctcagcctcccaaagtgctgggatgacaagtgtgagtcatggtgcctggccacattttctattttatttcatgttttaaaagatgctggtgtgacccctaaattgatttcatgatccactagtaggtcttttttttaaaagacagagtcttgctctgtcacccaagctggagtacagtggcatgatcatagcttactgtaacctcgaactcttgtgttcaagtgatgctcctcctgtgtctgcctcctgagtagctgggactacagttgcataccaccacgcctagctaattgtagtttttgtagagacagggtcttgctgtgttgcccaggttgatctcagactcctggcctcaggtgatcctcccacctcggcctcccagagtgctgggattataggcatgaaccatcacacctggccccactagtgggtcttgacttgtgttttctaaaaatactgtttctgagataaccagctcaactagataactgtgggaga

SEQ ID NO: 254444 - DNA, 561 bp, Homo sapiens
cagctatctgaaaactcatccagatagcaaatgtatcaggaataatgagggtttacattttcattggtgtgtttgctcaaatatttctgttcattatttgtccactttcaggagagatagcatattaaggttaatcagcagcaatttattttgtgtggtacctgaaatttctactttataatcgtacatgacatgattaccacatgataaaatcgatttttatttcttgtcttacggaaagaaatcctattatcttgtcttgtcacattgagtatttttaaggcactctgtcttatatcagacattttgaattttaaaatgatcaatgtccaggttaattttatatacattttcatatctgtctaattttttttggcattttatagtgctttgaaagatacagtgtgtaaaagacaatttatgttttagagaatgatgttccttaccttgatgcatagtcttcctgtttataaagatgttacatgtttatggtggaatagtcaatcaaatactggcaaatacaaaaataaaagtgaaaattactccaaattccagagataa

SEQ ID NO: 254445 - DNA, 331 bp, Homo sapiens
caatgcacactcgcagtgacagccctgacaggaggggcatgaaagacggtggctccctctctgtccctcctgtcccttcctctctggtgtctgtccccctcactgctctggggtccgtgagctccaacgggtagccctggccacatggactgacgtcctcttgggccgggccctgtgccacctcctatccaccctgactccctctgctgcttcccccaaactccagattgggaccgagtgctgcccaggtggccccctaggacttgctgtgactgttttgcccagaggcccctcggacagtaacgccacagacctcgctggtcaccgggca

SEQ ID NO: 254446 - DNA, 312 bp, Homo sapiens
aagtggagacagggtcttgctttgtcacccaggatggagtacagtggcacaatgaaagctcactgcagccttgacctcctgggctgaagtgatcctcctgcctcagactcctgagtagctaggactgcaggtccatatcaccatgctcagctaacaggattcttaaatgaatacaaatgagcagaccacacccaggcaagaacccgtgttctgaaggcctcaggtatatcccaggacgaaggtgtctgaacagggatgctctcctgtggctataccccaccccctgcacttgtggttcccttgactccctgc

SEQ ID NO: 254447 - DNA, 234 bp, Homo sapiens
atggctgtggaatccatttcctctgggtacagtgaaactgcttcccctagcttccatttatgatgatttccattatttggaacgtttgttactctttctctctctttctgtcacacacatgggtacagtgagagctagatgcagtttagaaaccaaatctctgttgaacagactgttaatttaaatttttgaaaacaaggaaaaaggaataaaaattctagttctgtagttcag

SEQ ID NO: 254448 - DNA, 393 bp, Homo sapiens
agtgagccgagatcacgccactgtactccagcctgggcaacgagagcgaaactccacctcaaaaaaaaaaccctttttataggctaaggagttagaatgtataagcagcagaaatccatggggatccaatgctattgttccctggcaaatttatgtagcattttgatggagacatcaaactcggcacccaggcttctcccttttcgtggcaagggcaatggctacctcttcacccgacatctctggacaaggcaaaaactaagagaatatccctctacccagtatacccacacctccaatgtgatgggtgagaaattattaaagaataattcccatccctagcaccccaacccccactataactacactgcccacttggagcttctgggtgag

SEQ ID NO: 254449 - DNA, 542 bp, Homo sapiens
gtgagtttaaatatacatattcatttatgttgctatcaccacattctgggtaatgggcatatccatcacctccaaaactttctatgttttcctttgttgctgttgttgatttgttaacatttaaaatgagatccattctttctaagattttatatgtaccacatattattgttgactgtaggccctctcatggcagacctctggaacttattcatcttgtgtaactgcctccccttagatgacaactctttttctctcttttctgcattccctggtaactactattctaatttctatatctatactttttcctatttcaggtgtctcacataagaattgtgcagtgtctttctgtgcctgacttatttcacttagcataatgtctttcaggcacatccatgttgtcacaaataagaggattctcttattttttaaaaggctgaataatgttccaattatgtatgtgtgacattttctttatgaatttatctatttgtatgggttgttaaaactgtgagaaacaaaatgactttaaaaaaaaa

SEQ ID NO: 254450 - DNA, 372 bp, Homo sapiens
ttcatgccagtaatcctataatcttagcactttgggaggctgaggcgggaggatcacttgagcccagttcaagaacagcttgggcaacacagcgagtccctgtgtctagcaaaaaaaaccatgtgtatatatatatatatgtgtgtgtgtgtatatatatatatatatatatacatacatatatatacatatataatttgatgggttgtgagaagccaaccccccccaaaaaaaggggggtgtagagcagcttcccctgacaggtgccgtggctgcccccgtagtgggctatgtctgtgcacaggcgacagggaggagggctccggagcttcccttgtggtgggggtgccttctccctgtgaggatgctgag

SEQ ID NO: 254451 - DNA, 327 bp, Homo sapiens
agaagacattccaggctgaggtaacagtagaagtggagaaaagaaagtatttgccatggtttgggaaaggctaagtgttgtatgtgttcatcgcatagggttttgcaagatgtcctgggagacgagcctgaatatagatggggccgtgctcagtaggaaaagggaggagaatttatacttactgaacaccttttatataccaggttctgaggttgggcgcagtggctcactcctgtaatcccagctacttgggaggctgaggcacaagaatcgcttgatcctgggaggcagagaagtgagccgagatcgtgccactgcactccaacc

SEQ ID NO: 254452 - DNA, 298 bp, Homo sapiens
  misc_feature (16)..(16): n is a, c, g, or t
ccagcttaaggaatgngtgggaattagtttcatactgtagattaggcagacttgtgctactgctgtccacccacacatctacatgatcaaaagacagtgcccttcccactactaaattgctggttacccatcccttcttctatccctattgtccctgctaatttcaggttcccaatgcctacctgctggttgcctgcaatgacctctacatcactctccttgtattcaccactacagccacactgctttccaggtcttatacccacagagaagtctttctcaactacttgtctctcac

SEQ ID NO: 254453 - DNA, 699 bp, Homo sapiens
ggacagatggagagacacagaaaatatttttcagtataacacagataacttctaaagcaggtgttttgtttaccaactgtctcttggaaactcttcagttcaaaatggtgaggttattttttgtatacgaaatccagtctacttcctaaaattcaacccggcatgcagtttcttgggatatactatctgactccacagagacaaacaactattcagactgcactgcgtactgagtttcattattgaaatccttacactggattttaatgattttttcttcctatttgtcatcccatcctgttacataatgtcagagctgtatctttcatttcttggaatccccagagcttctcaatgagcttgacacacagcagacatttaataaaattatataaagttaaattatgaccatctcttgagtatgtgacttatacataataggaagtaataattaaaatgcatatttgcccattttaaataaagaaagatgcaaagtatcaggaagatggcagaataggaaataccagaacttcttctaccacagagacactagcgtaacaatatatggtatgtacatggggacaagaaacaggaagagatgtaaaggagtaggttttgtaagtaattgaagttaagttgttatcaatttaaaatatattatataagatattttatgttagatccatggtaacccgaaaa

SEQ ID NO: 254454 - DNA, 394 bp, Homo sapiens
acctaggataaatgtctctatgtgatattaggataaaaaatgattaaaaaattagaaagtttgtaccaattttaactaatgaaaatgtttgcattggctgggcacagtggctcatacctataaatcccagcattttgggaggctgaggtgggaggattgcttgagtccaggaattcaagactggtctgagcaacatagtgagacctcgtctctacaaaaaaatattttttaaaaattagccggacatggtggctcatgcctgtggtcctagctactcgggaggctgaggtgggaggaccgcttgagcccaggaggtggaggctgccataagccatgttcataccacttcactccagcctaggtgacagagtaagacccagtctcaaacaaaaaa

SEQ ID NO: 254455 - DNA, 155 bp, Homo sapiens
agaggctgtgaagaagaagagacttgtctctcctcccctgatcaccagcctgggccagggatagcagctggtgctacttggcaccttttagctgaggaaactaaggctttattcacccaatcaatggacgaagaaactgaggcagaaagcagaga

SEQ ID NO: 254456 - DNA, 195 bp, Homo sapiens
agtgctctcatagtctagcctaagaggagcacagaggcacaaagcatgcatcatcagaatgtgtgggcagagcatgacatgctgtggccttttgcaaccccaggacccagagtttcagaactaatcttcaggcaaatgatgatactggcttttccatggtgacatctggccgggatacagagatccctgagtaag

SEQ ID NO: 254457 - DNA, 227 bp, Homo sapiens
ttttgatttttatttcaatagcttttggagtacaagtggttgtgattacataaataaattatttagtgatgaattctgagattttagtacacctatcacacaagtagtgtactttgtacctaatatgcagttttttatcccacattctcaatacccttcctcttctgaatctccaaagtccattttatcactctaagtctttgcgtattcttagattagctcccact

SEQ ID NO: 254458 - DNA, 438 bp, Homo sapiens
caccagtgcacttcagcctgggtgtcagagctaggccctgtctcaaaaaaaaaaaaggaaaaattaattacacctgagggaaattcccatgcaacatttaatgaatgccttcagtgctgttataatgcattaatttctatgagaaatgttctctcttttttgtgccttttaggaaaattgcattttggtgatagaagataaaaacttggctaattaggccaggcatggtgggtcatgcatgtaatgatatgggaggctggcatatcacttgaggccaggagttcgagactagcctgtccaacacagtgaaaccccgtctctactaaaaatacaaaaattagctggatgtggtggtggatgcctgtaatcccagctacctgggaggctgaggcagaagaatcgcttgaatccaggaggtggaggttgaagtgagccgag

SEQ ID NO: 254459 - DNA, 397 bp, Homo sapiens
gagagaaagaagaagaggaggaggaagaaagggaggaaggaaagaaaccatcatattcttttttttttaaaccattatattctaaatgaagtaactcaggaatggaaaagcaaacatcgtatgttctcacttttttgttctgttttgttttttaagatggagtttcgctctgtcgtccagtctggagtgcagtggcgtgatctcggttcacctggtgccgaattcggcacgaggaaatatactgtatatttcaaaagaagaaaagttaaaagatatttgaagattgcaggggcaaaacaagcagtaactacatggacttttaagtgcggtatgaaatgcaacattacgcttacaaacagtactgtcaaacctcaaatgctttctttcttcagatgcc

SEQ ID NO: 254460 - DNA, 648 bp, Homo sapiens
atggtgaaaccctgtctactaaaaatacacaaattagccgggcatggtggtccgcaccggtagtcccagctactcgggaggctgaggcagaagaatcgcttctggcggagtttgcagtgagccaagattttgccactgcagtcagcgttctgttaggaatctaattgcacagcagtaggtgagcagccactgagcgagctttaccgcctcaactccacctcctgtcagatcagcgcacattaggttctcataggagcatggacagcacatatgagggatatctaggttgtggctgcttatgagaatctaatgcctgatgatctgaggtggaacagttacatccccaaaccatcccatccccgaccagtcccccaccagccccccacccagacctgtgggaaaattgtcttccattaaaccgctccctggtgccaaaaaggttggggactgctgcgtagaatactagagcttctcaaaacagtttatatatttttattttttgagatagggtcttgctgtgttgctgaggctgtagtgcagcggcacagtcatggatcacttgagcctaggaattgagggttgtatcgacctaggattgcaccactgcactccggcctgggacacagagtgagaccctgtctccaaaag

SEQ ID NO: 254461 - DNA, 360 bp, Homo sapiens
aagaaaacaacagctcaccaatgaatgacattattatttctatttccccattttttgttttgcaactagaaattcaggaattaatttatgtcaccaattcaaaatttcatctccagtagaaatgatttaaggggaaacaaagaatccatttgaagtagcctcatcatttgtgttcactttttgaattagcctttgtatgtttacagtctctttggatgattggtgactaatacgtaaaaaatggctaaacaatgatgtttcttcagaaaaggacattaaggagttttgtgagacaaaaagacacaaatattggccgggcgcagtggctccagcctgggcgacagactgggactccgtttc

SEQ ID NO: 254462 - DNA, 251 bp, Homo sapiens
ggggtccagtgagagtctggggtcaccgtcagcctgtggtgcatggtggtcaggcttggtagagccccagatcgtgggtggtaaagggaatgattaaaatttaatatcttgaagctgggagttaaaaatgatttgtgtaaaatagaagtccaacttttctgaatgtatgcttggctgacatggtttgtctatcagctccagggatgcaggtggtcaccatcccacccattatgaaaagattccaggccatg

SEQ ID NO: 254463 - DNA, 318 bp, Homo sapiens
tccttctggcctccagctgagtctcacctgcctggagcaggtagaaatgttggggaaagtgtggctgcctgggagtcaaggtcgctttgaaggatccactgagtcagtgtacagatgaggaaactgagctcaagagcaggaagggaaatgcccagaagccagtgaggaaaacaggcagagtgcgatctggattcagcaacaggaaatgtgatttccccacctatttgggaggctgaggcaggaggactgcttgagcccaggagtttgaggccagcctgggcaacgtagaaagaccttccccactccctcgcaaaaaac

SEQ ID NO: 254464 - DNA, 658 bp, Homo sapiens
tcaccatgaccaagcaggctttattcctaggatgcatgattttttcaatattcacaaatcaaaatgcaatttaccacataaagacaaaagcataaaacatatggccatctcaatagatgcaaaaaagctttatataaaatccaaaaacttttcatgataaaaaccctcaacagactaggcattgcaagaacatatctgacaataatgaaccatttatgtcaaacttacagtcaacattatactgaatagataatagctggaatcattcctcttgggaactgaaataaggtgaggatgcccactctcaccactcctattcaaaatagtactggaagtcttagccagggcaatcagaaaagaaaaaaatattctatacttggaaaaccctaaagactccaccaaaaggcaactagaactgataaatgacttcagcaatgtttcaggatataaaatcaatatacaaaaaattagcagcatttccacacaccaacaacatccaggtcaagagtcaggtcaagaacataatatcatttacaatagtcacaaataaaatgaaatacttagaaatagaatacagctcactaaagaggtgaaagatctttacaaaaagaactacaacacaccgctgaaagaaattagaggcaacacaaataaatgg

SEQ ID NO: 254465 - DNA, 422 bp, Homo sapiens
ttaccttttctaactgaatatttctgaaaaattctcagtgtactggggttgaatttcttcatcccctaccaaagggaaacctggatttcgaagcatgttaccttttctgtctgaatatttctgaagaattctcaatgtactggggttgaatttcttcaccccccaccaaagggaaacatggatttcaaagcatgttcccatgaagggaaaaattccacatccacgacattcatagaattatcaggtataaaagagactttgtctaaaatttgatctataattttctcttaaaaactaaatgatatagccacatgctgtgtatgtaatagatgtatgtgaatgtgcgtgtgttcttcagcaaaactgttgtactttatgcaggtataaaatgttgccatattcgttaattttgtcataacaaa

SEQ ID NO: 254466 - DNA, 470 bp, Homo sapiens
ctacatagttttgcaagcatttgcaagcataaacactcaggcatattatatgacagaaagatataacataggactgttatgagcatatgaactgtatttataaagaaataggtcataagggaaatgcataaacacctatcactgtggttgctaattgtgtgcaccccactttataactgtgggtcatttttatctttcacaaatgcagatgtatgaaaaggacatctgttcatttattgaggaagtttcaacatttttacatacatgtacagtgcttacatacaaagtcaacattgtgatcatgcactttcgtgaagtcagatttgcaaaacatgcataaaacaaattagaatcctttaagtctctataacttacgcttccagtgttggaaatgatgcaaaggtgaaatacatagcatagcaaattgtaaaaaataatactcacaatttaaaatagcggaaaaggaaact

SEQ ID NO: 254467 - DNA, 630 bp, Homo sapiens
atcactataaggcacaaatggtaacaatgcttatatgatagaatggaatcattaaaatgccaaatttaatcaaaggcaataagaaaaaagggaactaagatcacatgggacaatttaaaaaaataagatggtagatttaaacccaggcatagtgacaattacgataaatataagtggtctactcgtggataagttcaaactaaatggatgggaaaaaatataacatcctaacattcataaaggaaagctgaagtggttacattagaacaagcaatgttgctaaggataagatgagacatttcataatgataaatgggtgaattcatcaagaaaacagttctaaacaggtgtgtacctaattacagtttcaaaatacatgaagtaaaatctgctctcattgaaaggaaaaatatataaaatcaaaactacattttgaggccaggcacaatggttcacacctgtaatcccagcactttgggaggccaaggctgatggattgcttaagttcaagaccagcctgggaaatgtggggaaaacccatatctacaaaaaaatacaaaaattagccaagcgtggtggcttgtgcctgtagtcccagtttactcacacagagcaagcaagactctgtct

SEQ ID NO: 254468 - DNA, 343 bp, Homo sapiens
ttattggattcattctgataagggagaaagacctaagcatggagatacagagtagaatattacagtgtgggagagtcacacagacaggttgggagaactctcaggactcagatctcctggtgcagggtaggagttgcagtgacaggttgatttctcccatctcttccgacatgggtttccccatgtgccactccctgtagattagtagtggggtcacgaatatactcaaaccacactagcatgctgggacaatgtgtgtctttgtgttctgtaattgatctgagtctcctttatgagccccctctctcctgaatacttcaagttgccagttagcaagatatca

SEQ ID NO: 254469 - DNA, 1405 bp, Homo sapiens
agacaaggttacaccatgtttgtcaggctggtatccaacccctgacctcacatgatccacccacctcagcctcctaaagtgttgcaattacaggcatgagccaccatgcctggccacaagttcttactattaagagacatggtgataattcattctgaagaggaactctacaaacctgaaagatgtgacagtgcttttttcaacacttccatcctttctatacataaaaaatttatactagtgtgaaaccctagaaatatataaaatgtgaaacagcctttatatggttgccacatttgatagtaagataattcatactggcaaaattcctacaagcatgaagaatgtggcaaaacctttaatcaatgtgtacatcttattttgcaggaaagctattatccctgagaaaaattgtacaaatataaagaatatggaaaacccattaatgcctactcacatcttactcaacataagaaggttcatagttaatgaaagcattaaaagtgcaattactgtcaaaaaatctttcagaaaatataagcctttaaagtgaagaagagtatttattctgaagacaaccattacaaatatacaggaggtttattacacacattttgtactagaggaaaatcctgaagcagttgctcaagctttgctcaacatcagagaacttatattggagaagagtcctgcaaatgtaatgaatttggaaacactttaaaaaaaaaaaactacagcttagaaaacagcagagtttatactaaaatatatttttgcagatgcagtaaacatgaaaaaatatttaattcaaaattaattgtatgtaaatatcagaatttacagaataactaaggcactgacacttcagacattacattaaataagagtgttgagtatataaatgaattcacaactaaagttgttaaatttgtatataagtttgtgtaaattagtatataactttaaaaggagattttttgaagctttgtaattacattgaaagtatatttgtttccttgaaaacaatttttttgaaaagtgaataatgatgtaatacagctttcaaattatgctgttactttattatattcacgtgaaagtatgtgatcaattgttgctgcatcagagatattagagattctttattagttgggcattctttatgaccttttctataaaacagtaaggacattaaaatgtaagatgcatgacaaaaatataagtggagaggctcattgtaattaacctatattaagtaatgtttaaggtaggtgttcagagtaatacttttctacattatactgagagaaagaaattataaattaaagtatatcaattattttactaattttactgttacgtaataaaatgcaatatatttaaaaattgttagatgatgtgtgaa

SEQ ID NO: 254470 - DNA, 287 bp, Homo sapiens
cacagggtttaggagaggatcaaatgataaactgctcctgaaagtgtttcataaaatgtaagaatgtagtttaacaaaagactgtattggtttaagtgctactgagaaaaatgctgtatggtctggagggtatttttggaggaagtgaaagtctttggagccaaaataaaaacagtgagggaaggtcatgaatgattaagggaggtgattgtctgttactgtctatggaaaacagaaatcaaaacataattccccaaaaacagagaaatgaagctttcaagtattga

SEQ ID NO: 254471 - DNA, 122 bp, Homo sapiens
tttttgtgtcttttttgaccatctttgtctgcttttgataatactagccttattaaatgaagtgagaagtattcctacagttgatgatttgttgatttgtattccccttctgtcgtcttctc

SEQ ID NO: 254472 - DNA, 215 bp, Homo sapiens
acccagatacacatctggtcacgacttgaacctctcttaaaaggccctggacatcattcaatcctttggagctgtttctccaatgtttccttggcagaacccagaggtggaatgtgtaagaagggagcgtgcagtgagaagcacctccatcgggtttgagggtgcaggagaacatttagactgaaaggttctcttttatgctttcaaacatgaga

SEQ ID NO: 254473 - DNA, 442 bp, Homo sapiens
cattcattcagtagacatttattgcacatccattatgtgttagatttagaggagaaattgtgacataagggtaataatattctaatttgctggtgccagagagactgtagcagcaatgtatgtattcagttatatacctgtaaaagaagtttcttatcacctgaaataatccttcgtttgataatgaatcttttgtaactatgattttaattcacccaattcttaatattgttatcaggcacttaattatttattcctctttgaaaatttgactactgatttccacttgatagtctcattgcttggcaatggctaagttaaaaagtgatttacaatttttgttctttcagactatgttataggtgacattttgttcttttaatattaattcacaccaattaaattatatttaataaaggagttttgatctcaggactttaat

SEQ ID NO: 254474 - DNA, 378 bp, Homo sapiens
agtcctggtgacaatgcccatatccatggcaagggagcaacctgcctctgatcttccaaaggtctccatgagattcctgaaaaaagtggggaggtattcccttcttcagcatgaggcagctcactctcacttaggcctctgctctctcagggttttggaagggctaccatgaagataatgttgtcacaatataacacctctctcccctcttataattagtccaaagggccaattcctaccccttctccctttctcttttgtttcttactggatgaaggattgccatgggtgactacaacacaaccaaccaacaattaagagctcccctacccccagattccattctctcttcaacaataaaaaaaaaatacccccatc

SEQ ID NO: 254475 - DNA, 1144 bp, Homo sapiens
ccagaagcctattcagaaaatgaacaattaaaaaaatatagtaatgagccaccaacctgggaaataaattattcttttaaaataatttcaaatgttcaactggtctcactgtaaaaaaaaccttcctttatccctgtcttatatttttgatcccctccaaaacaagaaatagagcagtagcacacaaagtacttagtaactatgtcctcattttgatgtagggccaatgggaaagactggagacaaacgcatgctttcctgatccctccattttaaagctgtagctctggcacagaacctttaaaaagatagtggttctaactgttcaagtatgtgatgcctcatctacccctcactgtcaagaaaatcatgtattccactaagagtctcctaaataactaaagtttacgtcacacttttagtataacaatagacatctttataaaacctattattctagtctagtgctggccaaagacagatgatgccagtcatacatgtaatttaaaattttccagaagccacttttaaaaacataaaaaggcaaaaataattttattttctttaaccgagtataaccaaaatattgagatgtattttacatttttttggcttagtctttgaaatccagtgtgtgtttgacacttgcagcatacctgacattggactagccactttggaagtccttagcagtcacgcatggctattgaactggacagcacagctctgggccctccctgccttagtaaattgactttaatagacaaacgaaaaccaaattcggaccagtcattatttactagtatgtgtgccacagcaaacacattgcctttccaatgtcacagctaagcatgttaattctggatactttaataacccatttatgcctagtgttccattactggaacgctaagcatgtggaatttatctcctactgctcaaggtcatcgccagggtctgactgcaaaaattcaaaaaattgcaacctcaggcgtaaacgggttggttcttctttgccggggaggccatcattatggttctctactgcgtcattactatacttataatattgcagttccctaaggactgttgtgatgacagacttaatggtttggcctgtcactgaattctccaagaccactat

SEQ ID NO: 254476 - DNA, 1088 bp, Homo sapiens
ccagaagcctattcagaaaatgaacaattaaaaaaatatagtaatgagccaccaacctgggaaataaattattcttttaaaataatttcaaatgttcaactggtctcactgtaaaaaaaaccttcctttatccctgtcttatatttttgatcccctccaaaacaagaaatagagcagtagcacacaaagtacttagtaactatgtcctcattttgatgtagggccaatgggaaagactggagacaaacgcatgctttcctgatccctccattttaaagctgtagctctggcacagaacctttaaaaagatagtggttctaactgttcaagtatgtgatgcctcatctacccctcactgtcaagaaaatcatgtattccactaagagtctcctaaataactaaagtttacgtcacacttttagtataacaatagacatctttataaaacctattattttccagaagccacttttaaaaacataaaaaggcaaaaataattttattttctttaaccgagtataaccaaaatattgagatgtattttacatttttttggcttagtctttgaaatccagtgtgtgtttgacacttgcagcatacctgacattggactagccactttggaagtccttagcagtcacgcatggctattgaactggacagcacagctctgggccctccctgccttagtaaattgactttaatagacaaacgaaaaccaaattcggaccagtcattatttactagtatgtgtgccacagcaaacacattgcctttccaatgtcacagctaagcatgttaattctggatactttaataacccatttatgcctagtgttccattactggaacgctaagcatgtggaatttatctcctactgctcaaggtcatcgccagggtctgactgcaaaaattcaaaaaattgcaacctcaggcgtaaacgggttggttcttctttgccggggaggccatcattatggttctctactgcgtcattactatacttataatattgcagttccctaaggactgttgtgatgacagacttaatggtttggcctgtcactgaattctccaagaccactat

SEQ ID NO: 254477 - DNA, 401 bp, Homo sapiens
atattcccagaaatcagaattctgttcatcttatacatacatttttaaatgcctgtctctaaatgattattgttcactaggagcaaagaattgcagcctccactatcaagagagagattttcagagtttggaagtggctcctaccctctctttgttaccttgatgaaatataaacatgattataagaagatttcacattgaatcagaaacttccaacctcttgtctgtatgttccattcttcctttaactccattaagtgcatattgtaattagtatacattttaaataggttttaaatgggtgcatcatatgaaatattttcctattttgaagtaatttaaagccgaataaatttacagttttgaaatataaaataagctctttcagatttaaaaaaaaa

SEQ ID NO: 254478 - DNA, 497 bp, Homo sapiens
ccagtgcctcgaggagtgcttagtatagagacattcagtattgtttgttgattgaataaattatttccattatgccatctctcaccccacagtctctcttctgtttcctatcatcttgggcacagttgtgtgttctggacgttggacattttctgtcttctttcaaaaatcgtcttgcccaatcactacagcaacttactttctgcttaggaactgacatcttgctccagaaacaatttagtgtttctactcttgggaatttgcaaagcaacagatgttttctgcatactgtatctaaacccacagcaatttgaatagtgagacttcctgatactgtgccaggctctgaggaatagattttggagacagatatttggcacccctaaaattttagtaggcctaggtccagcctcgtccatgtcagtggcagttgggccaaattcaccgagtcagacattcctgccctcaggagaccccaccaccccacaagctgtggt

SEQ ID NO: 254479 - DNA, 844 bp, Homo sapiens
gccaccacgcccagctaatttttgtatatttagtagagacagggtttcaccatgttggccaggatggtctcaatctcttgacctcatgatctgcccacctcggcctcccaaagtgctgggattaagggcgtgagccatcgtgctcggccttggtctcccttctataggtaaaattggttttctcctttaaaatatagttcccatttcctctgcaaaccttatttaatggtaaccagttagtcctaattgataagggaatatactgttttacagaagtttagataaaaggtgtgaaaaaaagtgacaatttaaaaatcattttgcagtcctgaggaactaatcagtcttatcactaaaaatgggaaaaccagatatggtatgcttcttgaggtgatataacatgaagttcacaagaattattgccaaaaatcttgaacccaaatcaaatcaagtatagagagtcatcttccctaccacaagggagcagaatacaagacattctgttggacactacttgggaggctgaggtggggaagatagcttgagcccaggagtttgaggttgcagtgagctatgatcacaccactgcactccagactgggtgacattgtgaaaccttgtcatttaagaaaaaaaaagttggtattcttttcatatgtctgcatgactcacactgagaaatttaatttcactttgcctctctatccttagtttctttgatgtgctctccttccctcttttcattgggcttttcaaatatagcatagaggtttgctgcctttctttctgtcagccacccatcacctgcttcctggtctgacttcttctgtcccccttttcctgt

SEQ ID NO: 254480 - DNA, 724 bp, Homo sapiens
aaacttagttatgttcacacaacaaatgagtggcagagccaagatccgaatccaggcagtactgcaccagagactaggctctttaccccaccactaaactgcctctcacttaaagcaccacattatccagttaccaaaccagttcccccacattagctcatgtaagtcaggaatgagagactatacttaggcaagttgtaatttttaaaaattggtttcaggactggcaaggtggctaacacctgtaattccagcactttgggaggccaaggtgggaggattgcttgaggccaggagttcaagatgagtctgggcaacacagcaagatcccatccttgcaaaaataaaaatacattggctaggcatggtggcaagtacctgtagtcccagctacttgggaggctgaggtggggaagatagcttgagcccaggagtttgaggttgcagtgagctatgatcacaccactgcactccagactgggtgacattgtgaaaccttgtcatttaagaaaaaaaaagttggtattcttttcatatgtctgcatgactcacactgagaaatttaatttcactttgcctctctatccttagtttctttgatgtgctctccttccctcttttcattgggcttttcaaatatagcatagaggtttgctgcctttctttctgtcagccacccatcacctgcttcctggtctgacttcttctgtcccccttttcctgt

SEQ ID NO: 254481 - DNA, 397 bp, Homo sapiens
atgaagctagttatctgcttctttcttacaacattgccctgaaacttagcacctttcaacaacaaatactatctcacaatttgtggggaccagaaactggacacagtttagtggggtgcctcttcctcaaggtctttaggaggcttaggcctcataagaagctggacttctcaacagaagctggactggggaaggatcagctttaaactcactcatgtggaaattggcaagactttgtgtggcctgagagcccacgtttcttccatctattggcctgagcactccctcagttctttttatgtgggtctgtacatagagcatctcgtagcattggaatttgccttttcagtttgaggaatacagtacagaaatagataattaaacagaaaaacacaaa

SEQ ID NO: 254482 - DNA, 1161 bp, Homo sapiens
caaaatgtgaatatttttgtgtagttgagtgtcaccagagaccaggatgaagatgataaggctccagagccaacgtgggctgatgatctgcctgccactacctcatctgaggccaccaccacccccaggccactgctcagcacccctgtggatggggcagaggatcctagatgtttggaagccttgaagcctggaaactgtggtgaatatgtggttcgatggtattatgacaaacaggtcaactcttgtgcccgattttggttcagtggctgtaatggctcaggaaatagattcaacagtgaaaaggaatgtcaagaaacctgcattcaaggatgagcaagtctaccctcattcaattcaacagtgcaaaaaagagcactcacggaagaaggagatggaagaatagccatcttggcagaaataatgatatgtataatttttttatttaattaaaattgtattatgtaatatttgatactacaaaagataatgcaacatgtttgtcaattttttttattatactttaagttttagggtacatgtgcacaaagtacaggtttgttacatatgtattcatgtgccatgttggtgtgctgcacccattaactcgtcatttaacattaggtatatttcctaatgctatccctccccactcccccgccaccccacaacaggccctggtgtgtgatgttccccttcctgtgtccatgtgttctcattgttcaactcccacctatgagtgagaacatgcggtgtttggttttttgtccttgtgacagtttgctgagaatgatggtttccagcttcatccatgtccctacaaaggacatgaactcatcattttttatggctgcatagtattctgtggtgtatatgtaacatgcttgtcaatttaaaaacatgataagatgaacaccagtgaacacatcacctagagaatgaagcaaacatcaaaaattctattgcagcttcccgtgtggccctccgccatcccagctctctattccatgccagggatatcccattttgaacttcgtatttaccatgtcaatgtgctgttgacatttataggtaattttacatgtaaaactctatatatctctatgtgttgccaaacaataaatatttagccttgcttattttacagttttacaaaaaagg

SEQ ID NO: 254483 - DNA, 421 bp, Homo sapiens
caaaatgtgaatatttttgtgtagttgagtgtcaccagagaccaggatgaagatgataaggctccagagccaacgtgggctgatgatctgcctgccactacctcatctgaggccaccaccacccccaggccactgctcagcacccctgtggatggggcagaggatcctagatgtttggaagccttgaagcctggaaactgtggtgaatatgtggttcgatggtattatgacaaacaggtcaactcttgtgcccgattttggttcagtggctgtaatggctcaggaaatagattcaacagtgaaaaggaatgtcaagaaacctgcattcaaggatgagcaagtaaattggcctgtctctatcaaaagcatagaactccctaatttccacatattcacccaatacaaatacagcactatattt

SEQ ID NO: 254484 - DNA, 585 bp, Homo sapiens
ggcagctctgagcagagcaaaggcaaatggaataaaattgaggaccaagtttctcttaccatatattgacacttggctctcaaggaaccatttttctgaaaattcggtcttcttttttcctcagtgtgaaactccaacctcaggccacccaagctgtgtgtttctttctctttagtgaaaaagttcctttgggctattgctttgtctgtacctttatgagttttgtgtgccttcttccacacagcttttttggcttcctgttttttcaactgcaaagtgggattgtgggaatggtttaacttccccattctaagggctcttcagaactatcacaaacaatatatttgttttcttgaaaacagctttaattgtaaacagtttactaatggtagaatagagatttggagaaccaaaacatcattgtgattggaaaatgttgaaagtacacagcaagcattcatgatctgactgcttacttctcctgccttgcctttctttgatttgccacatactttgatgtaaccatgagacactacatagagttaattgaatgtgccgtgcccctgtgtctttatttgtactact

SEQ ID NO: 254485 - DNA, 635 bp, Homo sapiens
catgactttgggctcagccatgtgacttctgctggccagtgatatacataagctaaaataacagcatgtgagttctgagcctggactttctaaagcctctaaggcatttttctgtttgtcctcttgcacctctgccatcacctaagaaaagcattccctgagagctacatgagatagagtcatccccactggtccacagaccttcaggggaaagtatatattttcatctagctgcagcagcctgaaacagaactgcctattcaaatccactctgatgagccaagccccaactgaaccacagacacaagagcaatactaaatgactgttgttttcagccacagactgatgggttatacagcaatggcaaaccaatgcagcattcttcacttcaaccccaccaatagcccccaaccctcagccctagttttgctccatggcaggatggaacaaatgcagcaccaatatggctcacaccatttcccaataagatgagtaagtcctttgagacttgacaaaaaataataattttcaatctatcttaaagttcttggcacagtggctcacacccgtaatcccaccactttgggaatccgaggcgggtggatcacttgaggccaggagttcgagactagcc

SEQ ID NO: 254486 - DNA, 485 bp, Homo sapiens
aaatttccgatgagatgcatttcttcctgcctgaatgtcttgaatgcctgctggatttgtctccctgctaagacactcacacttgcaaatctgtgcttttcaaggtggggagatgaaaataaaaagtctgtgagatgtatttctgggaggcctgaaaacaggaagcaaattggaaccacagcatgtggggcacggatgctggattctgggggatatttgcttatttggaaaggctgcaaacattccatcctacccactgctaggagctctgcactttgctaacgtcccatggaaaccaaggttctctttaggactcgacaggactgggttatttttctcagcttaaattgtttttatatggttatcctcagtactcttttctgttttgggatattttcatactttttattttttaaaaaccccagaatatcttgattttgaaaaggtacattcacccaaataaagtgcccagcgcatagaaaagg

SEQ ID NO: 254487 - DNA, 370 bp, Homo sapiens
gcgatggacaattatgttatgatagcttatgtagccgaatgtgatacatgccaaatgccatacgtaaatacttgactataaaaactgcccccctccgttccaaataagtgcatttattgcctctatgtgcaactgacagatgaccacaagcagttagaaacacattatgcttgagatgtcttaacctgttcccaaatgccttctgttttccaaaggagtggtcaagcccttgcccagagacctctattctggaagagtggtccaggtggggccgggcactgggcactgaattatgccagggcgcactttccacctgtgtccagtttcaattgcttctgtgcaataaaacaaagtgcttataaaacgaaaa

SEQ ID NO: 254488 - DNA, 700 bp, Homo sapiens
aacagaggcccaaaagtccctggtatcaactccagaaggggcgagacccgaacaagttccaaaccaggcccaaatagtatcccaaactcagtcccaaacacattctcacccccggcagcaggctgcaggcctccagctacacacacggccctgggcaactctcagtctggccacccattcgatgctgccagccccaagggtgtgggaggggggtctcagagtgtcccagggtactggccacacatgcccgacaccagggtcataaggtcctctcagcagagccactgcagcaccaaaggcatttctggaaggaggcaaggacgcgtcatctagatgtcaagccccagcgtgcgattctgtcacagttcaccccaccttcaccccgagacggaagacggaagagcttcgcacacaggcgggaagaggtcaggaccagtccagcctcactggcttcagaactggcctgggggctaccttgacccacaggaagggaagaggaacgtgctctgggcagggcaaggcaggacctgcagcacccacagaccagcagtaaaggacccccggaactttccaagtctagcacaaaacccagaagccacaaaggaaaatactggcagatttaaatgcatgaagtcaacattctttttgtagagctaaagaaaccataagcaaaattaaaagccaaatgcattctgggagg

SEQ ID NO: 254489 - DNA, 434 bp, Homo sapiens
ctgctgaattactttattattactttttctgacctgtggtacctaatatcatttaatgttaactcagtcgttaaggaaatgttgatataaaaatgttgttattacaataatagctaatgtttttattgaatgttttcgttcattttcattagctattgaataatagctaatgtttttattgaatacttatgcaaatattctggtatatattttctatatcttagctcatttaacttgcgtagcagctgtataaagaataatactgttatttatctttatttatgagtaaatgactgaattcctcagtttcctatctaagatattatttggtagagtccatatttgaactttgctctatttgactttaaacaaattataatctgtgtaagctctatgttttttttttgagtcttcagaataaaatttatttaatg

SEQ ID NO: 254490 - DNA, 401 bp, Homo sapiens
tgtattaaatgggttcttatataagggagtgaactattatttaatgattaaaatgataaatgtaaaatctatcaagcaacatggggaatgtattatactgagtaataataataataaaataataagtgaaggtgggtgcagtggctcacgcctctattcccagccctttgggaggccgaggcaggtggatcacttgaggttgggagttcgagaccagcctggccaacagggcaaaaccccatctctacaaaaaatagctgctgtggtggcactcatctgtaatcccagctacttgggaggctgaggcaggagaatcacttgaacccaggaggtggaggctgcagtgagccaagattgtgccactgcactccagcctgggtgacagagcgagactctgtctc

SEQ ID NO: 254491 - DNA, 430 bp, Homo sapiens
gtattagggcaagtttcagctgtctgtaacacaaaactccccacatctaacacacaaagtgtagctttctctcatgcagaattccagaggcaggcagtccaaagctagtaaaagtgactttactgttagggactcattctcccttatactaaaggagaagagaataaacgctggagaagaaaccaaaactcgaacacactgaatagtgctatttttctgctctcagatccttagaagccccctttaaaatgtctttaggacattttaggaaatcttgcattaaaccaatttaaacactctttctttctttatttcttcttctcttccccttctctctcccttccttccttccttcctttcttccttcttttctattagagacaaggtcttgccatgttgcctaggctggtctcaaactcctggactcaag

SEQ ID NO: 254492 - DNA, 425 bp, Homo sapiens
atgttccctggtttgcttatttcatgggatgctctcacgctctctgctccagccacgctgacctcaaacacccggggcatgctccttcaggctttgcactggctgttccctctggctgggccactctttccacggatgtctgcttgacccactgggctggctctctccttctccctgtggcctgacctccctgctttgattctgggacatggctgctccatccccagtgaacaggacaagcacacgcccgcgtgtgcgtgcgcacacacacacacacacatgaccctgccctgcctccagcattcggaatcctagttctgccctcttctgctctcccttttaacccatctcatcgtccacttacttaatatgcatgttgttcacctcccaccaccaggccaaggcagggatccttctagaacata

SEQ ID NO: 254493 - DNA, 397 bp, Homo sapiens
ataaaacccatgcacagatgtgagacttaacgatcaggaaaaatcatttcttctttaagacagaggtaagaagataagactatgtatcattatatattcatttagttatttttctttccacaaacaagtatttaggtgggacaagtattttttttttttttgcactgttttagagaatctaagagatcaaaaaatgtataattttctcatgacaagcctcctatttttctcatacagggaaccagtttttcaggttaactttggaatgccctggctgagaagaggggttcattcagatggttagcgggccctaaaattttattttttctttacaaatgtcatttgaaaatattaaagcatgaaggtagacactattatataatatgcaatttatttt

SEQ ID NO: 254494 - DNA, 585 bp, Homo sapiens
tggtttctttcaggtcattgggcccagaagctaatagaagatatggttcttgcccttggaaagaagctgactggtttggggaagaagatttgcatgtgtgaaaccacaacaaagtgtctaggaatgaagacaaatttgtgctaagtggtgtggagttgaccacaagccacaagggggtctatgtaggagggtacaggagagggacaggcccaccagggagtatcccagaggaagtgggaatagagctggattctgaaggatttggaaggagaagaaagaagcaaagtcttttaagggtaaagaaggacatgaacaaagtgggtggtggtgacaatatctctgcagagactgagggatggaaaacagaccggttcttcttcagacaatggaaaaactctctgctgagaaatacttgttggcaaaaacctttcaaagtccccattcttggatctgactcggcttcaccatttctctaaccaccagccaaatctaggcgctcttttcctcgtttccggattcttttttaaaattaaaaatttaaatttattaatttaaaacaaataataattgtgtttatttaagaga

SEQ ID NO: 254495 - DNA, 476 bp, Homo sapiens
caatcattccagccaagaagataatactttttaaactcttgtacgtactttgattaatacagattcaaaagaaacctgcagactgaattcatctgacaattcagaagaaattctcatccaaaactgtgtatgtgttagaatatatatgtgtgtatatatgtatatatataacattcacacacacattttcactttttctaatttcttcccatcaattaatatttataagcatattaatttgaaagtcaatctgagacagggatacaatttctagataagacaacacagatggtggcatgcattcttgcagactatttttatattgactctcttacagacaatctgttttatcagctttccaatgggtccacagtatgaagaactccaaaaaagaaacttccaagattctaaaaacacttggctgtaaacagacttagtgggcatagcttctccctttgccaagtctttaggatgca

SEQ ID NO: 254496 - DNA, 638 bp, Homo sapiens
tcctggacttttacccctgtttcctattctctagtccccctcctgaaattagtgctgatcagaacagaagtttgaagaaactacctgaggctggagaaagtagcaccagaaaagagcagaaggaacaatcctcagagtaccagccccaacaagataaaattcactatgtctgacattcaaaaaaagttatcaggcctgcaaagaaacaggaaaatgtgatccataatgaggagaaaaatcaaatcaataaaacagatcaagaattatacagaagatagaattggtagacagagacattaaaacagttcttataactgtattccacatgttcaagaagctagaggaaagattgaaaatgataagtagagtcatggaagttattttaaaagatctaagtctaacttctagagatgaaaaatatggtatttgatatgaaaaatacaatggataagattaacagcaaattaaacattgccaaaggaaagactaaataacttgaagacatagctataaaaacaataagaaatgaaacacatagagaaaaaagactttaaaaagagcacatcagcgagccttgagacaacatcaggtggcctaatatatgtgtaattagagaccccaaaggagaagggagggta

SEQ ID NO: 254497 - DNA, 659 bp, Homo sapiens
attcaatgattttttggggtgaatatttgggataatgacatttgtttgtcagctattccctttgattgatttaggtttgttaattctggtcttagcttaatgcttattttattaacacttctgtgtgtcagaagactgcttgtttcaaaacacattgaatagtttgctttgcaaataaaactatagtcctggaacggttttatgattttgatatcctaaaagtttctaatgagtgcagtagtagtttttgaccaggtaagcgaatatttggtggtatgttcatttgctggttcataagcttaggcacgtaggataagtttgtgaccataattatgccagtttcctagtttgagcggttaaaatgactttgcatttcaaacacagtatttgaatcattatacatgtgattcattagagagataatagtactgaggtagcatatgctggaacactttaaaaataagctttcagatatgtcccagtatcttttttgtcctggcaaatagaaattgttataataatactctttcaggatcctcttattaagtgccacctaataagtttaaaatgatctccaaaatgtcactaacacaaatagggaatataacagaactatacaagcctttgcctgtcctggaaaagtcactagagcaaatatt

SEQ ID NO: 254498 - DNA, 391 bp, Homo sapiens
gtggtggtttctgtgagtcaaaataaaagagctcattctcatcgcataagtggttttctgctactggtttttgcttgagaggcctggttcatctgctttctccagaactgtcctgtgccaggaaataacttaagccaaggcaagcatagagcctgttatcagacaagagagttaaaccaaagggatgtatacatggattattacatggagaaaccataatcagaatagtggtttaaagcatgaagtctgatgaaatgattgattgtctctgcagcagcttcttagcctcatgactcttagaaagttatttaacttctgtaagcttccgttttcccatatttaaaaagcatactctattgtgagactttaccattgtatatttgacccagca

SEQ ID NO: 254499 - DNA, 475 bp, Homo sapiens
ggatttactttttgataacagtcaaatcctatgactattgtgtaaaggtgagggacccagctaggcaattctgcttggggttaaaataataataaatgtacctgaaaataaggaggttgacttcttatacagcagctacacaccagctcctcaaacacacctacctcaggacctttgagcttaatgctctcactttgtggaatctttttatagcatgttctttttcactgatatgagttacaggtcacttaaaaaaggcctttcctgaacaccctaatggagagtggtccacaatcactctcaacaaccacatttgtctaaatcaatgtcatgcttgcttttttatcaactgttatcaccatttattaattttttgttatttttcatctcttcttctgacccatgctgtccaacacagtaaccagtagattaaaattccaattaattgtaattcagaaacttaaagaaaaaaatg

SEQ ID NO: 254500 - DNA, 163 bp, Homo sapiens
gtgtacaaaacaaatctttgagagtcaggggaattgaaataatttttggacagagacgagacaggcttagagatattgactgaggactaaagagtccctggctttgatttctggttgctgaattgtgctctagaaagcactactgcttaccctaagtccaact

SEQ ID NO: 254501 - DNA, 715 bp, Homo sapiens
ctacttgttataaaccacataatagtcatttgtcttcgaaagaatttttaaaaataaggacatttatatttacccacagatttgccatttctagtgttcctcatttttctagatttccatctgatatcattttccttctatttgaagtacttcttcctttaagatttcttagaatgcaagccttctggtgattaattatttcacattgtgtaaatctaaaacagtatttggttgcaggattttgttgttgttgttgtagtaaaagcacataacattacatttaccatcttaaccatttttaactgtgtagttcagtagtgttaagtgtattcacattgttatgcaacagatctctagaacttgcaacactgaaactctatacaatactaattcctcctccccatttcccccagcctttggtaaccatctttctactttatttctctaactttgactactttagatacctcgtatgagtggcattacacagtatttgtccttttgtgactgcttattttgcttatttcattttgtgtaatgtcctcaagtttcacttatgttgtagcatgtggaaagatttccttaatgctgcatagtatttcgttgtgggtattataccacattttctttattaatctgtcgagcggcattgcacccgcttccacctagtgggcctcttctgggcgcccactctcgatcactcggccgccctcct

SEQ ID NO: 254502 - DNA, 439 bp, Homo sapiens
cctcctgcaaattattaaaccactgtggtgattttctcatctaagaaaacaggttgttgctctggacattctcaaatatacttttccaggcttttatccacctggaataaccccatccacaccccatcaccaccatcacctttttatattctcattttcccaacatcatgctagagtcttgtattctccatgaggtcttactgtaacaacttaatcttttcttgtatccaaaaatctcatggaattctctgagttcttcattctggcagtgattagatattgcctcatgtaatataactaattcatgtgtgcctgccctatttctctaatatcagacagtttgtcttaatctttgtgtttatctgtcatcatcatcatacactctatatagcacttattgaatgaatgaatgaatttgtgcagagggaaatgactaagt

SEQ ID NO: 254503 - DNA, 307 bp, Homo sapiens
ccccaaccacatggaactctaagtccaattaaatttctctagtaaatttcccagtctcggatatgtgttcatcagcagcatgaaaatgaatacagctgggattacagatatgagccaacgtgtccagcattgactttattttcttagaaccactttaggttcacagcaaaattaaaaggtacagagaatgcccatgtaccacctctcctacactcaggcacagcctcctccactaccaacaccccccaccagagtggtacatttgtgacaatggatcaagctacatcgccacattatcatccccaca

SEQ ID NO: 254504 - DNA, 444 bp, Homo sapiens
ttttcctagttcttctgcaaagaattgaactgttacccctccctgcattctgttatccttttcagtgaggattccggaagagtctgagagaaggctggaagaaggctggagggtggtgtcatgggatgcatgtgcagattcagaagtggcaggtgcagaagaagagcatccaggacaagcagctgtctctatgccacatcatttggcaccctgcgatgtcaccttgcttttcaggagtgcagccggttgtggacattttggaattgttttgcttttggaatgggtgttggggtgaagcattcttctgctgggttttcagatgtagctctaactagccacatcacttcagccaagtcatttctctctgggacccgtcatcatcactcataataataccatatgtgtggaggttgagggcaaggaagtaaaacagatgtgtctgta

SEQ ID NO: 254505 - DNA, 515 bp, Homo sapiens
cctattctaggcacttaaggaaacttcagagaacaaaatagatgcccctgtggtgcttatgttccagcaagaagggtcagacacatggaaccaacccaaatgcccatcaatgatagactggataaagaaaatgtggcacatacacaccatggaatactatgcagccataaaaaggaatgagatcatgtcctttgcagggacatggatgaagccaggaaccatcatcctcagcaaactaacacaggaacagaaaaccaaacactgcatggtctccctcataagtgggagctgaacaatgagaaccacatggacacagggagggggacaacacacaccagggcctgttgaaggggggcaaagttagggagagcatcagggcaaatagctaatgcatgcagtgcttaatacctaggtgacgggttgatgggtgcagcaaaccaccaatgcacacgtttaccgatgtaacaaacctgcacattctgcacacgtatcccagaacttaaagtaaaattaaa

SEQ ID NO: 254506 - DNA, 338 bp, Homo sapiens
attatgtttgttttgcatccacagagttctgctctctgaggatctaacatgtacacccagctctcttccacagggtggaaatagagaacacagaagggggaagacccacataatcactgtgtttaagtgtaatgtgctttgaaggaatgtgttactccaaaggagaggtacaagctattttgtcagtcagtagagactgaaccaaataaagtaacttggccaggccatgaattatagctgggatgggggatattattttcacacactgtgatttgtatgtatgcatataaacacatccacaggtatatatacacacacgaagcatgaacgtagtgtaa

SEQ ID NO: 254507 - DNA, 484 bp, Homo sapiens
attagataaactctaaaatctcactaagttcactatcactaacactgatgcaggatttttcttcttggtcattttgcaagacggggacccccggccagtgacactccacccgggcctcgctcggccacgctggcatgccccagctcacctatgttatagcttgtacctgcattcggtggttcccgagctctggtactgcacccaagaagaataaggatacgctgggcattgaagtggtaaggagggcgaagaagagttttattgagcaatgaaaacggctttcagcggagaagggatgcatggttggtccccctacgcaaaggcagtgcaggaaccaagggcgggtaatatcagaagaaaatcgtgcgatgaaaatgaagatcagaagcgcatactgaacaagcaactgactttgttaatctcttgaaaaatagcatcaagggggatgtttttaaattaaagaagaatgattttgcttttcaaa

SEQ ID NO: 254508 - DNA, 339 bp, Homo sapiens
aataattgatgctaccttattacataaaatagagcatttataggacggtgataaaattaaagcaagcatttcttagtgaaacaaaccattgttcctgattgttcatcaggtaatttatcataaaattatttttcctttatacacatgtggagttatagacatttatgttgaatgctttaaaattgtctttagttttctctcatattgccttagtttgtagtaatttagagtaattagagtaatatgagtaattagagtaatttctcatgttgtcttagtttgattacttataaattattcagtactttctttcattaaaacattattaataatatgata

SEQ ID NO: 254509 - DNA, 867 bp, Homo sapiens
aagttttccatatcatacacactcttcttttaaatcatcagtgttaacaggtacacttgctagcagatagataaaactatggtttaaatagcctcctaatgtgcagttttaaacattaagtctgtaatagctaaacctagttttgccattgcttcaggaagtgacagctaaaactaagacagagatgtatcaaaacatggatgacgaaatgaagagagagcacttggctgcagaacagcgcatggtccacagaatccaaaggattatgatggaatgccacagagagaaggtcgaagctgtggagaaagccagggctgaagaaagacacatcgcccaggaagcaatccaggcccagaaaagcaaagccgtggaggaaattgtgaatactggtgtcacagttattaaggatgagaagaccagtgtggcccgactgatgagggaaaaagaacatgaaatgagcatcctctatggcatagctcagaggcagaggcaagaagaggtacaggaagtgcttcaagaagcagagaaaacacatcaggccactcttggcaatatgatggataaactggctaacacccagggggagctgctgtctatagcaaaacaactgggaatcatgacaaattggaaagatttcctagaggaggaattacaggaaaccaggatggcatttcaaaaatacatcaattatacctttcctaagctttcaccaggacatgcagattttattctgccagaaagaaagaaaacaccttctaatcttgttattaaggagaacaaaacaactcttgattagaagtcttcagttgaaattccactacaaaagacatcattccagactaaataaatttactcaaaaaccaaaaa

SEQ ID NO: 254510 - DNA, 444 bp, Homo sapiens
cctccattggccaacagatcaagtctgcacaccgcagcctggctgcgagggtccttttcatccagcctcattcatcagtgttcttgtgagcatctactctgggttaggcccagacctcctgggttaatcagattgaacaaaggggtgtaatagagaaccaaagggccaggtgcggtggctcacgcctgtaatcccaccactttgggaggccaaggcaggcagatcacgaggtcaggagattgagaccatcctggctagcacagtgaaaccctgtctctactaaaaatacaaaaaattagccacgcatgttggcgggcgcctgtagtcccagctgctcggtaggctgaggcaggagaatggcgtgaaccagggaggcggagcttgcagtgagacgagatcacaccactgcagtccagcctgggcgacagagcgagattccgtctc

SEQ ID NO: 254511 - DNA, 629 bp, Homo sapiens
tactataaatatttaggacgggaaggcatatggtttaagccaactccctgccacactcaatgtgtagttttcatgttttaaactatcaatgctcaatcattactgttgtgctggcagtcctttcttttgtgtatgtgagtttctccctattaaataaaccctctcttttggaagaattctcatggcaatgactataattacaacccaaagctgagctgtaaaatgcagtgatatgacagcttttgtgatagaaagggtggagaaacaatgaaagcttataattttctttgagatgtctcaaagtctgacagcagccccacccttatgatgtaaatctgcagtgacctaaagtttcaggaaagatgaagctagagagacatgccaagtcaccgccacattgaccaccagcaaacaagcaagaaaagattcagcataatgctgaattctctatgacttcttcaaatagtctggaatggtatttcctgacatttccgaatatgagggttctttttaatgtcaaaactttttgttccttacttgagatgagctgttctttttatatccatcatttgaggaaatatatggtgataatatgcaattaatttattactttgaaataagctatttac

SEQ ID NO: 254512 - DNA, 422 bp, Homo sapiens
gattgatggctgggactgggtggggctgagacagcggtcagagatgagagaggagaaggaacgagactccctccgcagtgctcctcaaccatgtcctggagctgagcttgttgttttgtctcacacctcttaaaaaaaaaaccagaggacaggagtgtggattcccgttgaccaaggctgtcaggtagaggagtgtttctcaggggttgagccttcccccagccagactggacctagctgctccctcctctctgctccatagaacactggacatcgattgtagcacctgtcatgtcacatttttctctggcgtactgttcgtttttcttgtaaatacaaaggtgatacatgcttattgtagaaaatttggaaaatatagacatgtatgaatgataaaataaaggtctcctgtaattgcccac

SEQ ID NO: 254513 - DNA, 396 bp, Homo sapiens
gcattctattatgttatgcaaattcaaataatgggcttttttatgtgaactacatccgtttacatcctcattatcccaaggtttcggtattcggccaggtaatgacagctgtgaaaacagacttggaaacttactgctatcttcattaatttactgtaggtaactgacctagtcaaacatccctgaatatgatataaaattcacagactgtgtttacccgtgaatccggctgaattccagctctgcgtttctcatcccatattaaacatgacgacagatgcaccaacagaggttactggggaacctctcccaggcattgtcttgcagagataaagttctgtaattaagctgctgttcaccaatgtggaaataatacagtgtattggaaaacggtaa

SEQ ID NO: 254514 - DNA, 671 bp, Homo sapiens
agagctttttatttttaattaaagtcttcagaggatcactttatattatgggattcaaattctgatttttatgaaaatgtcgtaggtcagttgattagttgatacgtatttttgcactgattttttttttaactatgtcttctttcagtgataactggctttatttaagttggtaacctatactgagtatatgtttacaaagtggatatggaaacttgatgttgtgaaatcagacctcatatatttttgtttgaagcattcaactttctatgttttttataatgaaatatttttttctatgaaatatttttgtgctttgttcttaaacgaaaatgccagcacttgggattattatagtttagtgtgaagattattcttatgtggcacagcataactgagatgttatattttaaaatatgatataattcctagtttcattatttttctgtaaatactaaaatttttctattagaaaatcttaaaattcctgacttttgagagtactgtggagattgttgaaatacatttttgataataataaaatgaaaatcttttaagggaccatgtaaatatagaagttggattaatatgtgaattatttttatacatttttaaaaaccatttgtcctaagtatacactttaaaataaatatataaaaagtgttttcaag

SEQ ID NO: 254515 - DNA, 434 bp, Homo sapiens
agctttgttatctgtggagtaaatgacagagaagctgccttacagggctgaaaaagaactatatgacataatggctgtaaagtgtttaacaaagtgcttggttccaagtctgcataactacttgccattattatgaccatcactgatatgagatgcaggaatcattcatgagttcagggcctaatgtcccctccataccttgaacctatttctatggcagcccctgtaaccctgtattgaggcattcatttagccagcacccatcagacagtggtcttctaccaggaatgggctatgaactcaagctcaatgtaggaattaaagacaccaagagaagtgtattaaggattacagtcagccagaaagagaaacacagaaagagggagtgtgggagagagaaagaaaatgctaattagaatacctgaattcatttg

SEQ ID NO: 254516 - DNA, 1472 bp, Homo sapiens
ctctcccacactggttttatttgtaatttgcatttatatactcattttaaatgacttttcagtgtttttcatagtttataatctgatggctaactaactttcaaaacagcttttaactaagtttgttgtaggagaaatgactgcggtaatttccagttctataatgtttcatgttgagccaaaagagtatatcttgcactttaaaaacgctgcgtcctattccatttgaatgtaaattcttaaaagttgagaccaattgtaaccagtttaactcattttagatgacctttttttcttataatatttgcaagtgacaagtttgaaaacaaagcaagatcagtgcagagaagccacatgacatgttgggtgacagattggtcatttatttaaataaagttaatacagattaaatttgtttcaagagctattgaattttcaaattttcagtgtatttataacttttaagaacatgaagtattagcttaatatagttttctctgttggtttcttcctcaagtttgcattgttttcttttgttaaaattagagatttctttttattttccagttatagtaatactagctgtcagcttaaaccctctgtaatagaacatggaaacagacacataaagacattagctgaaaaaatagagtgaaaatcaactattttttactcccgctaatttcaatcaatcgttttcaaaagcgcacgagattcactcattggatttatgcagtgccctgtctgtataaaaactcttaagagttcctttatatcatattcttcagagccaacatttgtcctcaaagcaacgtttcccacctccttttactgagtactgaaaaagttttagcaaagtcacagattaggttgaatttcaaaatatatgtactttaaaaagttctgatttccaaatataataaagttaaaattaagtatatactttaggaagttaccaataacttccatcaaagcagagtaggatatatggtaacattaattttcggtcatttcaaatgaggtatatttcttattagggaaattaaagtccctatatttattatatattttttccttattaacagagtattaatctagtaaaaaataacccagcagtaaataataaagaaattactgaatgagaggataatgaatctgaatcatagcaggaatttgcaatattaattatggttagctatttttctctcattgatttttgtgccacttgaatggaacagaagcaagccttatgttttggaaggtctgcggtaaaatgctgtgactgtttactttcaattgcattgtgtgttgcctgtgactgctttcaaacgctagagggggcctctgatttaaagaaataaaaaggacttttctaaaatggatgtgtagtttattttgccttttgtaaagctcttttggctattgtaacttaacaaataaaatcataattgtgtgcatctctgagttcttga

SEQ ID NO: 254517 - DNA, 1375 bp, Homo sapiens
ctctcccacactggttttatttgtaatttgcatttatatactcattttaaatgacttttcagtgtttttcatagtttataatctgatggctaactaactttcaaaacagcttttaactaagtttgttgtaggagaaatgactgcggtaatttccagttctataatgtttcatgttgagccaaaagagtatatcttgcactttaaaaacgctgcgtcctattccatttgaatgtaaattcttaaaagttgagaccaattgtaaccagtttaactcattttagatgacctttttttcttataatatttgcaagtgacaagtttgaaaacaaagcaagatcagtgcagagaagccacatgacatgttgggtgacagattggtcatttatttaaataaagttaatacagattaaatttgtttcaagagctattgaattttcaaattttcagtgtatttataacttttaagaacatgaagtattagcttaatatagttttctctgttggtttcttcctcaagtttgcattgttttcttttgttaaaattagagatttctttttattttccagttatagtaatactagctgtcagcttaaaccctctgtaatagaacatggaaacagacacataaagacattagctgaaaaaatagagtgaaaatcaactattttttactcccgctaatttcaatcaatcgttttcaaaagcgcacgagattcactcattggatttatgcagtgccctgtctgtataaaaactcttaagagttcctttatatcatattcttcagagccaacatttgtcctcaaagcaacgtttcccacctccttttactgagtactgaaaaagttttagcaaagtcacagattaggttgaatttcaaaatatatgtactttaaaaagttctgatttccaaatataataaagttaaaattaagtatatactttaggaagttaccaataacttccatcaaagcagagtaggatatatggtaacattaattttcggtcatttcaaatgaggtatatttcttattagggaaattaaagtccctatatttattatatattttttccttattaacagagtattaatctagtaaaaaataacccagcagtaaataataaagaaattactgaatgagaggataatgaatctgaatcatagcaggaatttgcaatattaattatggttagctatttttctctcattgatttttgtgccacttgaatggaacagaagcaagccttatgttttggaaggtctgcggtaaaatgctgtgactgtttactttcaattgcattgtgtgttgcctgtgactgctttcaaacgctagagggggcctctgatttaaagaaataaaaaggacttttcta

SEQ ID NO: 254518 - DNA, 424 bp, Homo sapiens
ggaaattgtccattttctctaggttttctagtttctgtacatagaggtattcatagcagactctgatgatcttttttgttctgtagtatcagttttaatgtcacttttatcatttctgattgtatttatttgaatcttctttcttttgtttcttagttaatctacctactgtctctgaattttgtttagtctttcaaagaaccaatgttttctttcattgattctttgtattattctttatctcaatctcatttttgtcttctctgattgttatttcttttcttctgatagcttagggtctagtttgttcttgtttcatttttctagtcattgagttgtaatgttagattgttaattcgagatctttctatctttttgatataggcatttaatgctataaactttattcttagcacagctttag

SEQ ID NO: 254519 - DNA, 336 bp, Homo sapiens
tgcttctccccctcccttatttttcctttatctgcctggaagatccttctcaacttccaagtgtcaacccaaatactgacttcctataaaatcatccccaatcccaaattcctgtcccccaaactaaaataagcactatgtttttaatagcaccttagacatgcttctcttctagaacccattaccttgtgttgtaatatttctgtgtttatctccccactagactgtgagctccttgagggcaagtcttaacttttattcatctctggatctctagaacttggaacagtgcccagacacaggaggtgctcaataaatgttggttgaatgtatgaa

SEQ ID NO: 254520 - DNA, 496 bp, Homo sapiens
cagtccctctgtgttccgtgtgctggaggcctggctctgcccaccaccctcaggtcttcttgcctcttcccttgtgctgctgtgaggggttgggcttgtgggaaagtgtccctgcagcacagtgccctgggtattgtggaggtcgggaatcaacctgatttgtgcaggccgaggcccgggggcagggcctgaggggtgggatcactgggcctggcccaggcctcctgcgcccctttgctgcccccatcacctacgttgcttgccccttgggcagggcgtcctcactgcctctggaggctgcgatgggcagatctctcccccagggctgcacctgcgggggctacgaaggtccccaaaagcggtgaccctcctgcccccaaatttagtccctttttctgcctggggctcccttccgaaatctcacctctgtgaagctgtggcagggttgtctgtttaggggaaggacgtctcccaccctacaggcatctcagaagac

SEQ ID NO: 254521 - DNA, 797 bp, Homo sapiens
tgccctcacactgctcttgatttctacccttacctgggaagtctctacttgatgtctgtcttaggctaagaaaaagagaagagaaagggaatgagtattagcatctggattctggggctgcttcttggcctctgtgagaatccactgtttcacagcaatcacagcctagaaaactagactttatggagtaaacaataggtatcattctgacctgggcttcaccacaatcacccactgaacactcccaagagaaggttgttaccatttatttatgaaaataccaaactatgtgatacatactctattagaagtattatggaaaaatagagaatatgtctacctggccagagaatagaggatctggatcacaaaaaaagtacaaatatttaagcagagacttaggacaaatgggcattcaacaatttaggacacatgggcattctacaatttccagagtgaagtaaacattctaggcagataaatcacacatgtgctgtcttaggaatgtgagcttattttgaaagcatccctatcaaatacgtgctaaaacttgtgacaagttcccattcctagagtacttacaggatacacttaagtgactgaagatgcaagagaaatatatatttgtgtatggatatagcattttatcattaattgagagattataaagctaatgagcttttctttgcagagggagtatttgttaggatgaaatggggagagatgtttcaaacaccaagtttatcttataggttaagttcttacaatgaatccatgcacttaagtatttttcctct

SEQ ID NO: 254522 - DNA, 451 bp, Homo sapiens
atctcttttattctccattaaaagatattatttcctttataattcatttttattccttatttgtttagtgccttaagtctgtttctgtacagcttggagactgtaacttggaaaaatgtagatatattcattatatactatctcacttaaatgtgaattctgaagaagtttttctgagaaaataaattcgtcttgtttgagtgttccttctctgtctgctgtattctaccagggggacagaggaaagaagggcagagaaattctttcctggatttcatgaaatcactgaggccagagcaacagatcatttaacttttctttatcccgtgtatgtattactgaaaaaaatggtacataatagaatttgagtttatttttatctgacttcaggtacatagggacacttcctgtttaaaagaactctgcattgaattgtgcctttcataaagca

SEQ ID NO: 254523 - DNA, 414 bp, Homo sapiens
tctcatacttaaatgttttcagaatcacggaatacatctaatacaatctactcttaatgtctgtgttacgacttagatttcttaggagtatctattatactttgccttttgtcttctagatactattggatcaccttattctgatatttggcacttcgttgattggtagaaaaatcgttttggccaggcgcggtcgtcacgcctgtaatcccagcactttgggaggctgaggagggcggatcattaggtcaggagatcaagaccatcctggctaacacggtgaaaccccatctctactaaaaatacaaaaaattagccgagagtggtggtgggtgcctgtagtctcagctactcgggaggctgaggcaggagaatggcgtgaacctgggaggtggagcttgcagtgagctgaga

SEQ ID NO: 254524 - DNA, 308 bp, Homo sapiens
aataaattcccctttgaggctttgtggttaacgtaagttgggtttctgtcacttactgcccaaacgatcctggctgacacagacctgcttagcatcctatctacacagacctccaacacaaactcctcttgtagctgcatccctgcctttgaatccagatctgaattggttgtgagaatagaagaagctgaacagcctcttggttaatttccgccataaccagtccctgctttgtatcccattttcaataaccgaggccctgtctccttatcctggctcttagtccttgcagccccagtagggacagc

SEQ ID NO: 254525 - DNA, 423 bp, Homo sapiens
accttcccctgggtccctcctataacacgtgggaattctgggagacacaattcaagttgagacttggtggggacacagccaaaccatatcaaccctaaagacaaagtctgactatcaacaatccccggttcaaaagccttcagtagttttttaattaatttccaaaatctgaccatcagcaatccctggttcaaaagccttcagtggttttttaataaatttccttctccctaatcatcacctgtaagatcaagccccaactccttggaaagcatgttccaactgtgaggatctccttgacctaacttgaggaccctgtctcagccacttgccttagatgaggccaactgagtgaggctctgtatcctctgagactccatagtagctttaccccttatcaaaacaggctaggattctttgttt

SEQ ID NO: 254526 - DNA, 637 bp, Homo sapiens
aaccctatcttgaaaagattttcatattgctgttcttctctaaaattacctctttatttacttttctctgactttttactctttggcgcctcccattttcttcttattccgaattcatttgggatttggaatttaaatacatttcttgaggtgtgcactggaacaaacccattgtttgtattaggcagcatggttgccaccatactccctggctggaaactgcgatttagttgctggcagctcccaccccttttattgctggggaagaaggtgaatcctggctcctggtccatgggtccctggattccctttggtgtcagttccccagaatgatacaaaatcacatcttcattgggacatctgcttttcactccctttctcttcatacacaaagaggagaaaaaaggctgactttaggaggcaaaggtattcttgaggaaatcattttattctgacttctgtccttattgtcaagactatctgaaggttccttcagttttaacttcacagatctatcccaactagtccccattttaaagtcctgaagtataatggaatcatggtagaaaggaacttcaaaatccatgtttacttcaattctctcatctgtatgtgaaagctctgtgtaacctcccta

SEQ ID NO: 254527 - DNA, 409 bp, Homo sapiens
cagccttgtttaaactcgggttttcagtgcaggaggcaagtaggaaggaacagagttgagaaaaggtaaaaaatatacatatgccatacaacttgagattaaggaaagagaaaacatataaaagggaaggtaattttctgagatggaataaactgagttagatttattttaatttatttaattagacagcaagcatcctgcctcgccaacagagggcgcctacggcccagtacagctactgccctgataatcacagtttaggggcctcattcaatatgaaggggcctcattcaatatgaaacctaactgtgttcgatgtataacttggaagggctctgtgtttagtaaaactaagtagtcaataacatttcaaagcagtgcgttaccaaaggcgaagggatagattaaa

SEQ ID NO: 254528 - DNA, 297 bp, Homo sapiens
aatgctaaaatctataactgagctctaggtttaatatataaatcagagtgggaaaactaatggtgttaagaaacctggatttaattcacagatcagaagaggcattgatggaggaaaaataaaaagaagtcaggtttggttttcatgctagaaatgagttgatgatgaaatagttaacagagatgccccaacaagtggggcattaggggtggaagcattaacagaagtaggcataaagagaaaactgaacagtccaggcacagtggctcacgcctgtaatcccaacactttgggagg

SEQ ID NO: 254529 - DNA, 317 bp, Homo sapiens
ccagaattggtacctttgattgcagtctctgaccagcgccaggcaaggacattgaagttacaagagagcttgagggatgaatactggtaatgggagagacactggcctagggatcagaggtcccagctccatccctgcattgcctggtaactgctgcaatgcaagtggtttctgggcaacaaggcatccagcaagctggacaaagcccttagtcagatgtcaatcccagaagggtccatgaagaccattacttaagttttgtcatttaactgcgtttttgggatgaaaataaagtcacagtggtatctatcatctga

SEQ ID NO: 254530 - DNA, 982 bp, Homo sapiens
caggaaactaagagttaaaggtctgccctctggacactcagacttgcctgccccatacgacttaacaggcaaatcaggccaacgtaacttgcctaaagagagcttagcattgaaatcaggacaactcccttgcatagggagagttttgcattgaaatcagtcttcccataaagccagtaattaccccatactttgtatgtcttacaggattttcttactatggtctgactaaactcatttagggcatgaaaatggctttttaaaaatagataccaggtgtacatggtataagatttaaaagttgcaaaagtaatttcccagttaccctcctccaaggcaatcactagtatcaggtttttttttgttttcttaggaagccattaaatacacacaatcgcatataagcatagtatcccacactcatttaatatattttggagatggttctacatcagggcacagagttgtaagttgtccctttttctttttttttttttttctaagatagggtcttgttctgttgcccaggaacactcaaacgtgacaggcaaaatcagtaagctcagcctttctaatagacaaggcagacttgaaaaagcaagtccagccaggttgacccatctaccggctccttaaagatgtatcactcagggaacaggtgtttactggcccactaaactacatttagaacaacccaactgactaaggagagctgacagtgatcgtggagaccgcagttcaaaccccaggtttataaatgaggatcctgaggcctgagatgcctaaatgggcaactggcccccaggtctgacctaactgagcagaatcccaggggtgggtggttgtcacctggtcaacctaacacaaattagatttcaagctagactttcctactgcaatttctatcacttaaaaattcattaaatattaggaattactttggaaactgacccttagagaactgttgtgtgctattcaagtc

SEQ ID NO: 254531 - DNA, 932 bp, Homo sapiens
caggaaactaagagttaaaggtctgccctctggacactcagacttgcctgccccatacgacttaacaggcaaatcaggccaacgtaacttgcctaaagagagcttagcattgaaatcaggacaactcccttgcatagggagagttttgcattgaaatcagtcttcccataaagccagtaattaccccatactttgtatgtcttacaggattttcttactatggtctgactaaactcatttagggcatgaaaatggctttttaaaaatagataccaggtgtacatggtataagatttaaaagttgcaaaagtaatttcccagttaccctcctccaaggcaatcactagtatcaggtttttttttgttttcttaggaagccattaaatacacacaatcgcatataagcatagtatcccacactcatttaatatattttggagatggttctacatcagggcacagagttgtaagttgtccctttttctttttttttttttttctaagatagggtcttgttctgttgcccaggctggagtgcagtggcagaatcacagctcactgcagcctcaacctcctgggctcaagcaatcttcccacctcagcctcctgaatagctgagattacaggcatgtgccactatgcctggctaatattttacttttttttttttttttttgtacagacagggtctcactatgttgcccaggctggtctcaagcaatcctccggcttcagcctcccaaggtggatcgtaaggtcaggagttcaagaccagcctggccaacatggtgaaaccctgtctctactaaaaatacaaaaaattagccgggcgtggtagcgggagcctataatctcagctactccagaggctgaggcaagagaatcgcttgaacccaggaggcggaggttatggtgacccaagatcgctccaa

SEQ ID NO: 254532 - DNA, 1394 bp, Homo sapiens
tcccccccgccatgttcgcctaaccaaccaacctgttccaccccccccggttttggaccccccctctcccgttcttgcaccttacccattctcataactggtccgccccaacaagtttaacttttcgccccccccccacatttttttttttttttttttggaaaggtttccacccaggcccacgaggttaaagtgccccttcctgttttttttttcaaaaaagttcctttcctttgcgccaagcttgatccattgccaaaatcacacgtccctgcaacctcaaaccccctggggcaaaccaattttcccccccccgcctccctgatactggatttcacgcaatgcccccaacccggccaaaaatttaaccttttttttttttttttttgtacagacagggtctcactatgttgcccaggctggtctcaagcaatcctccggcttcagcctcccaaggtgctgggattacaggcgtgagccactgcacccagactttgcctcactatttttaatgactggacattatttcattacacagatgtactgaaacagtattacttaataacataattatttaatcagtcccccatctgacttttgtttctttttgccattacaaatattgctataatgaatatccttgtatataaatcatttcataaatgtgtgagggtatccctaagataaatacttaaaagtggagttgctgggtcaaagagtatatactgccaaatagccctacatagagactgtaccttttacactcgcaccagcagtgtgagcgtgcatttccccatgcctttcccaactcatgtgtccttcacaccttgtatcatattggcacagggtacccactcaataaatacacattaactgcttatacaaggcctcctacattaattccaggatcctcatgcctcaaccttctgagcagccggggccacaggtacgcccggtctccaaaaaaaaaaaaaaaacaaaaaaacaaaaacaactttcgtcgcgcgccggctcctcggcgcccctgagaaagacttttcttataaaccccttccggttggggccgcgcggggcccccagttaggcgacaggtcaaccacttttgcgcaatgagcggtgtctcccataaggggagaactccggggccagtagaaaatagggcgccagtggaagtttcctctctcacaccccaatattaaaaagacgcggccccgggggggggcaaactcgcgagcagcccgtttttctagagacacaaactctccaaagtagcgagagtgtctaagagagggacccatataacggggggcctcttacttccacaccgaggggagtgccccaaaggagaggaggccccgaatatttctaaatatttacccccccgcccgcgttgg

SEQ ID NO: 254533 - DNA, 381 bp, Homo sapiens
tggagttgctgggtcaaagagtatatactgccaaatagccctacatagagactgtaccttttacactcgcaccagcagtgtgagcgtgcatttccccatgcctttcccaactcatgtgtccttcacaccttgtatcatattggcacagggtacccactcaataaatacacattaactgcttatacaaggcctcctacattaattccaggatcatttcaaaattgggcccttcccactatctcttaacaataaaattgaggccaaagaaaggaataaaggccgggcgccgtggctcaagcctgtaatcccagcactttgggaggccgaggcaggtggatcgtaaggtcaggagttcaagaccagcctggccaacatggtgaa

SEQ ID NO: 254534 - DNA, 459 bp, Homo sapiens
taaaagttgaaataaaatgtttttagaatatgtattccacagggaacttagtagaggagggagctgtggttgcagagaagtagctgtggggaagaatgagtaagaaacacaccaagagcaagtaatttccctctggggatgcctaaattctgaaaagttatcagctaatactgacaaagtaaagcctgcatcacgaagaagaggatgaacaactgtatcaaggactttctaagagatgtacatctccacattcaaaatgtcctgtgcatgaagtgagcactcagccttggtgagtcacccacaaggaaggctaagaggaggtggtaggaggataaagcccaaattcctgggagcacccgggactgttttgtgatcctccactgtttttctcactggttgtagttggaggctctttgaattcctcccgtgacctagatgatataaatcagtgttttcaag

SEQ ID NO: 254535 - DNA, 299 bp, Homo sapiens
gatgatcagagttaaatattgaaccaaccaagagaataaggaggaaaaaaactgttttctcagcagagaaagacagtatcttcaatcaaatgatcaatccatggatcttgatgtatttatgctcatgtttatgtttatacaacactaaattgatctttttagtgtaaaattctggctttaaaaatgttttcatttggtattcacttgctattatgtatttaagtataatcttagttgcttccatggaatttcaattaaacaatataatcaccagacattaaaaaatcaaaataacctat

SEQ ID NO: 254536 - DNA, 395 bp, Homo sapiens
gtctcagctacttaggaggctgaggtgggagaattgcttgaacccgggaggcggaggttgcagtgagccgagattacgccactgcactccagcttggggcacagagcaagactgtctcaaaaaacaacaaaaagaacaacaacaacaaaaccttttattttgaagggaagaaaacgtgttcagtttgatagcacatttatgagtagagtgtagactgtcaggaatatttagctttttaaaaaagattattcctacagctgaggaaaaaaaaactttctcccactcttgatgtgaaaattactaggtgatttgcatgtgagaataattttactgtagcatctgagaagtggtctgaatgaagaggtgagcccagttagttaccaggcaacaggtgg

SEQ ID NO: 254537 - DNA, 211 bp, Homo sapiens
acccggccctcattttagcttaattacctctttaaagacctcctctccaaatacagccacattctgagatactgggaattaggccttcctatgaattttaggaggggtcagttcagcctgtaatacttgccagcacttggtaagatcaactgttgtgattccagcctttctattaggtgtgtaatggcatctccttaatttgcttctccct

SEQ ID NO: 254538 - DNA, 170 bp, Homo sapiens
ctggcaccctggcacgtgtcgcatcctctatgctggcaccctggcacgtgtcacaacctctgtttagtctagtcacaacctaggactgtaagccagtgttggcttcttttgatcacactttctgggagtgtgtgatgaacgaaaataaagaatttatcatagtgtctggt

SEQ ID NO: 254539 - DNA, 329 bp, Homo sapiens
tagacagagtcttgctctgtcgcccaggctgaagtgcagtggtgcgatcttggctcactgcaacctccgcctcctgggttcaagcaattctcctgcttcaaccttccgagtagctgggattacagggacacgccaccatacctggctactttttctatttttagtagagacagctgattcacctgcctcggcctcccaaagtgctggaattacaggcatcagccactgtgcccggcccacagttcttttctcagcccttcctggagaagcaaagagcctctcattttagttctagagtcatttaccagatgatcctcaaattctctttt

SEQ ID NO: 254540 - DNA, 214 bp, Homo sapiens
ctagacatacagtaagtacttaatggatatttgaatgattgaatatcttgaaatgttgaaatgtaaggtgtgcacagtgatcttcaacttaacaaacacttacgttctcctttataaaatgcatagtaaaccactaacgttagctgttttaataaaagttttcagttataagtttagtaaatattaataaatggatacacattcaaaatacttt

SEQ ID NO: 254541 - DNA, 345 bp, Homo sapiens
gttacatggcaaaagattttgtgtttttggcatagtgccctgtcatagactttttggaaaattaagcaaatcacatttaatagattcaaagttgttaactttggaatctgttcagtaggctgatatacaatcaacccttgaacaaaacagggtttaggggcaccaaccccctgtgcagtcaaaaatccatgtgtaacttttgactcccccaaaacttagctactgatagcctactgttgatcagaagccttacccataatataaacaattgattaatgcatattttgtatgttataatattaaatactgtattcttagaataaaataagctagagaaaacattta

SEQ ID NO: 254542 - DNA, 159 bp, Homo sapiens
cctttcttccccatcaactggctacattttcttttctgcctatcttggacgctttgtcccataactcctttgtgccgacttctctcatggttcttatccccccaccatcccaccctgaggccctttcagtgactcttgatggcaagtggctgttctcat

SEQ ID NO: 254543 - DNA, 403 bp, Homo sapiens
caattcacttaatctctttgatcttttccatcttattaaaaataatgatactaacaagaatcccatgctattgtgagactcaaaaacaaaatacgcatcatgaaagctgggtgaagcataattttaataatttatttgaatatgcatacatgatttcatcaaggtatttgcaaaaaaaaaaaaaaaagctacatgcactgacctcatgtttctaattttaaaagtttcttatgggtttaaatgcatcttccaaaattcctatgttaagtcccaattcccagtacctcaaatacctaagtatatttggagatagggtctttaaaaaaggttactgagttaaaatgaaacattgaaagtggggccctaatccaatatgattgatacccttataagaagagagaga

SEQ ID NO: 254544 - DNA, 521 bp, Homo sapiens
tgactgaagaactaaaaatacataaatgaattaagtaattataaacataaatttcctgtagctccaacatgactttgatctgagtaatagtgttgtgaaatagattactacatgattttcattgcttttatattatatatagtaattaatattcagaatagttgattaactttcttaagtgtcacataatttaaaaatgaaattgctgtttgccccagatatgtttttctgtgttctttttaaatttcagtgaaattttcttatactcccttcattaaatctattatctggtttctaaacctttacctatttaatgtctcttttcctttctttctaaaaagtaactggttaaactacagttttgtcatttatgaaattttttctgttattattgtagggatagtcaatattatcattttaaggatagttaaaacttattttgcaattaatacgtattttacagtacactaatatgcatatatgttgtattttattaaaatattaaaatgttttttaaacaa

SEQ ID NO: 254545 - DNA, 514 bp, Homo sapiens
tcaaagaaccagcacagaatttcctataaggctgttgcaatttttcccactctatgtctctaccatgtggggtggaggtggtattggaggactactaatttgtgcttttcatgcgaatacctaaaagatagcagtggattaggaggaagcagggcctagtaactgaagagtacagaaatataaaaatgactaacaggcaatactgaactgacacaaaatgcctaagaacaccataattactgcagcaataaagaaacaggaatggagcaattttcttaagaagagatggacatctctttttttgttttatgctggttctttaacactctaagattgaggaccatgaatatttccaggaattgattatacaagaagtaattagaacttagcacagatattttcttcaactgctgatagtcattagggtggaatattcactaattgaaaactatttttaaaagtgagtagaaaataaaatttcagaagaggagaaaaatggcataattttttaact

SEQ ID NO: 254546 - DNA, 276 bp, Homo sapiens
gatggggtggtttgggatgctggtctcaactttatgtctcatccttccgcgatagccttatgtttgaatttgactcagtcttcaagcctggatcaaacagcacctcactcgacagtcttttgtgctcttccgaatggagctgatggcttcctcccttcacacttggatctgagcactttcctgcccactctcagtgcagcagtgcacctgctggatggttttactgagtcacatttctgatgtgcctctcgggtgaacagatctatctttttccag

SEQ ID NO: 254547 - DNA, 442 bp, Homo sapiens
aaaaattcacccctgcttccaccagtagtagaatttgtagctagtgtgtctggaccagggtgatacaagcatcacaggagagtggagagctagtgttaaagacaagtccctaaaatgggcagaagcagtggcagatcttggcagttaagagcacgggttcccatgagttctggatttgaatcctggctgaccacttgtgagctctacaatctcaggcaaagccctcctgttcccagccccaagtcggttaaacccatgttaaatctataggttgaagacctggatcattcgaagcccagagccttgcacagcagcgatctgctccaacagagggtgatgtcatcatccgaggccacacaaataatgcatttctcaccatcaaaaagcttctgaagccatgttctcaaaggcaaaaaataaataaataaattaccaattaact

SEQ ID NO: 254548 - DNA, 414 bp, Homo sapiens
attttatgtcttaataaattcagggcttactttctttatttttttgatattgtttttctattctcaggtacactttgattcactttctggctggcaatatacagccagtagttttaaaaacaaatcgttgttgtttcatttcttgaatttttccatacatgaggtggtctacctattgtcattatacttacaggacaagtgggctgggtataatatcttgtgccacaatatctttttcttaaaactttaacgtgatttcccattgtcttctatcattgatttctgttataggagtttgggaaaagtatgatttttaacctgttttattccagtttgtttaaatgattttttcattgacattgaaattccatagttttaccaagtttggcattgatatttctgcatctttttttt

SEQ ID NO: 254549 - DNA, 389 bp, Homo sapiens
attcaccaagtccattaaagtaggctgagtatctagagtgcaaaataaagtcacaatttgtaagatattcagcttattgaaataatatgtacattccacatggatagttcaatcacttaaaagaagacatctaggccaggagtggtggctcacgcctgtaatcccagcactttgggaggccaaggtgggtggatcacctgaggttaggagtttgagaccagcccgaccaatatggtgaaaccccgtctctactaaaaatacaaaaattagccacgcgagttggtgcactcctgtagtcccagctactggggagagtgatacaggagaattgcttcaacctgggaggcagaggttgcggtgagccgagaacataccactgcactccagcc

SEQ ID NO: 254550 - DNA, 3421 bp, Homo sapiens
gcgatctgggctcactgcaagctctgcctcctgggttcacgccattctcccgcctcagcctcctgagtagctgggactagaggcacccgccaccatgcccagctaattttttgtatttttagtagagacagggtttcactctgttagccaggatggtctcgatctcctgacctcgtgatccacccgccttggcctcccaaagtgctgggattacaggcatgagccagcatgcctggcctacagctattcattttctaaggagagtccattgcagattctgcattgcatttggttatctctctttagtgtattgtagcatggaaaccccatgaaagtatgctctcaaattatggtgggtatcagaatcccctgtggaacttagtaaacctacagaagtgtagccctagtttataagcctgggcctctgttttttattatttctccaggttttgtgtctgtgataccaaccagagttagagagccactggtctagaacatttctcattttaaaaaaatgacattgaattttgagtagcccagaaatgttgttggctatgtgtttagatttctttctttatagtgtcatttagccttgttcttggttgtattttctttacaagggaaagtaagtccagaggctttcttaggtctagattaaacgttttggggaagaatactttgtaggttatttctatgtcatattgtactgtcagaaaacatttaagtacaggtccttgcattagtgaaactaaggatgatcatttgggtaagctggtaaccgccgtaagtccattgtaaagatttagtttgtagtgggtaagtaatctatggagagacgttgtcatctctgaaaagttatagtcacgtgtacttaagccctggattgaatacaaaatgaaaattgaaatagactattgagaaatgaatgccattaaagcgtcaacataattcaacttgtgtgatatggctgacactgtactcagtacaaaactggcaccctttggattgtatagggagccaagattgtccggaacctcttttttgttcagcatttatcaccagcacctataccatggctggtacatgagctgttgataaaaatttgaaaaaatattaaccctttaaatcaagctgtaaaacatgataccattaagccgggagcagtggcctcatgcctgtaatcccagcactttgggaggccaaggtgggcagatcacctgaggtcaggagtttgagaccaacttggccaacatggcaaaactccatctctcctaaaaataaaaaaattagctggacatggtggtgcattcctgtaatcccagctacttgggaggctgaggcaggagaatcactcgaaattggaaggtggaggtggcagtgagccaagatcgtgccactgcactccagcctgggcgacaaagtgagacttcatctcaaaaaaaccccaaaacaaaacatgataccgatgtggcatcatgaattagattaaattttttttaagattaagaataatcctttgtgattttattccattgtgttgaaaaatctataaagtgataatttatattgatagctttcttctttttatgaatataccctggtcagatgattattctttcaatagactacttaattctatcttttaccatttaattgcatctataatcataagtaaagttataattttccaagtatttttcaggtattgatattgcaatgatgttatacaacttataaaacaagattatataaaacttggctttcaaatcttatgttcctattttttatttccagtttcatcttttttctatccattctcttgaactttcttctttgaaatcagcagagtccctgggtattaacctagcacaactcctttctgggtcattgcacatcccggtagtatcattaagagttgtcagaaagatccctggcagcctttcggtgaaactctatcatcatgcaatcatggcagtactatgttggaagtcagagtccctttgcaaacataataaaacactttaatatatttgttaaagttacaaaccaagtatgtacaaatttaaaaatcacggccaggcacggtggctcacgcctgtaatccccaacttaaaatggtttgacttataattttcagctttataatagtacaaaagtgatatgctgctatagtttggatatttatcccctccaaatctcatattgaagtttgatcccaatgttggaggtggggcctaatgggaggtgtgtgggtcatgggagaagatccctcatgaataaattaatgtcctctctggattggggggtgaattatcactctgttagttcctatgagagctggttgtacaaaagagcctggcacctccttcctcaccctcttgcttcctctcttgccatgtgatgtctgcatacactgccccctttcatctgccatgagtggaagcagcctgaggcccttaccagaagcagatgttgcaccatgattcttgtaaatcctacagaacactgagccaaataaacctctttctttattaataacccaacctcagacattcctttatagcaacacaaaactaagacatactcagtcagagtatgctccttgacttaaaatggggctatatctagataaacccattgttaaattgaaaatattgtagaccataaatgcacatatggtgtatgatgttttcaatttatgatgggtttatttggacataactccccgtaagttgagaagcacctgtagtaattattattatttatgctcaaattgacataatgtggccagtaggaatccatttacattttttttttactacttatttttttcttttgatgttttaaaggaatattgttttcaggccgtaagaggatgtttaagactgaccctgtttgttggttcatgtcccccatgcctcttgtcctgagtcatggaatcaactcatgatttaataccctcttatcttagggagtcctggttccttttagaggaaaaaagaattagagaccaaaaaatctggctgctgtgagtgcacatggcagttacaggtatggaaaaaaagatgctgcttttgttagaattcttttaatagtttcagagttgaaaatgtcatcctaaggtcagaagttccctctgaattttctcaacttacatttctatgatctgctcttgtttgcatttggtattttattgaattatgttttatgtatggtgatagctgagaagtttatctccttttaaggcctggctgaaatgatacattaatctgcctcccatttttggagatattgctctgatttaaatttgtcatggtgtttctgagcagcgttgtaaagaaacttgttttagaatattcagtcatggatgttatcttgaatgttcatagactccccagaaaagaagaaaaagtagacacaa

SEQ ID NO: 254551 - DNA, 2073 bp, Homo sapiens
cagcctctggtttctatcattctattctttacctctgtgagatctttttttagctccagcctgggcgacaaagtgagacttcatctcaaaaaaaccccaaaacaaaacatgataccgatgtggcatcatgaattagattaaattttttttaagattaagaataatcctttgtgattttattccattgtgttgaaaaatctataaagtgataatttatattgatagctttcttctttttatgaatataccctggtcagatgattattctttcaatagactacttaattctatcttttaccatttaattgcatctataatcataagtaaagttataattttccaagtatttttcaggtattgatattgcaatgatgttatacaacttataaaacaagattatataaaacttggctttcaaatcttatgttcctattttttatttccagtttcatcttttttctatccattctcttgaactttcttctttgaaatcagcagagtccctgggtattaacctagcacaactcctttctgggtcattgcacatcccggtagtatcattaagagttgtcagaaagatccctggcagcctttcggtgaaactctatcatcatgcaatcatggcagtactatgttggaagtcagagtccctttgcaaacataataaaacactttaatatatttgttaaagttacaaaccaagtatgtacaaatttaaaaatcacggccaggcacggtggctcacgcctgtaatccccaacttaaaatggtttgacttataattttcagctttataatagtacaaaagtgatatgctgctatagtttggatatttatcccctccaaatctcatattgaagtttgatcccaatgttggaggtggggcctaatgggaggtgtgtgggtcatgggagaagatccctcatgaataaattaatgtcctctctggattggggggtgaattatcactctgttagttcctatgagagctggttgtacaaaagagcctggcacctccttcctcaccctcttgcttcctctcttgccatgtgatgtctgcatacactgccccctttcatctgccatgagtggaagcagcctgaggcccttaccagaagcagatgttgcaccatgattcttgtaaatcctacagaacactgagccaaataaacctctttctttattaataacccaacctcagacattcctttatagcaacacaaaactaagacatactcagtcagagtatgctccttgacttaaaatggggctatatctagataaacccattgttaaattgaaaatattgtagaccataaatgcacatatggtgtatgatgttttcaatttatgatgggtttatttggacataactccccgtaagttgagaagcacctgtagtaattattattatttatgctcaaattgacataatgtggccagtaggaatccatttacattttttttttactacttatttttttcttttgatgttttaaaggaatattgttttcaggccgtaagaggatgtttaagactgaccctgtttgttggttcatgtcccccatgcctcttgtcctgagtcatggaatcaactcatgatttaataccctcttatcttagggagtcctggttccttttagaggaaaaaagaattagagaccaaaaaatctggctgctgtgagtgcacatggcagttacaggtatggaaaaaaagatgctgcttttgttagaattcttttaatagtttcagagttgaaaatgtcatcctaaggtcagaagttccctctgaattttctcaacttacatttctatgatctgctcttgtttgcatttggtattttattgaattatgttttatgtatggtgatagctgagaagtttatctccttttaaggcctggctgaaatgatacattaatctgcctcccatttttggagatattgctctgatttaaatttgtcatggtgtttctgagcagcgttgtaaagaaacttgttttagaatattcagtcatggatgttatcttgaatgttcatagactccccagaaaagaagaaaaagtagacacaa

SEQ ID NO: 254552 - DNA, 438 bp, Homo sapiens
acaaagaatgagggacactccccaccgtttccccaccgtgaacatccccagcacctcagggcctgggctccatgtgtcagtgacctgcatgtggttgcattggcctgagcggagctggctgcatgcaaaccactggccaggaagaatcccactcctgctgctgctcctgcagctgcgccgggtcccgcgagcccccgcgtgcgcggcctgtgtaaacagtgcgtcatctcctgttgcacactttgggcctgcgggtcacgaccagggattatcaaattgacagagctcagctggcctctcactccacgtccgggcacattgcattttgttaattatcgtcttttgcttttgacgtaaagggtcggggtctgggtcagggtcactgtgtattttcctttccttctcattaaagttgcccagctctcagggcccccagtt

SEQ ID NO: 254553 - DNA, 611 bp, Homo sapiens
agaatctttcactttctaaaggttgagaagtgaaaaaaatgaatttcttaatattttaaacaatattctagaaaaaaagtttttcagttagcatgtgcattattcagagtttaaatgttggtatgtaaaaaccctagtctatcagatagattcttttgaataattatatcatcctatcacttaaaaaggatccctcttgggttctacattagccaatctagcaattgaggaaaaaatcaaagtgtgtagactctgtacctcaggaatttacaaccgggggcaaaaggctaagatttgtaaaacaggaagtaaaaacgcccatgcctggcatggtggctcacgcatgtaattccagcactttggggggcgctgaggtgggtggatcatttgagcccaggagttcaagaccagcctgagcaacatggtgaaactctgtctctacaaaacatataaaaattagccaggcatggtggcacacgcctgtagtcccagctacttgggtggctgaagtgagaggatcacttgaagcctgggaggcagaggttgcagtgagccaagatcacaccactggcactccagccagtgcgacagagcgagaccccatctcttta

SEQ ID NO: 254554 - DNA, 263 bp, Homo sapiens
atctactctttatctggaaggatgaaggaaggttcagaggctacccagatacatgtgttttgtatgtttacataaagagattcttaaataaaacaagcaaataaaaagactacctattaatactctttaagtgtgggggcaaattttcattattaggacactttaggaataatgataaacaaagggctgagttgtaatctatatacagtgatattctgagctttctaactgacaagtaaaaaatatatagacacatctatata

SEQ ID NO: 254555 - DNA, 387 bp, Homo sapiens
tttgctaaagttattaatacttgtggttaattcttccagagttcagagcatagaacagacatgccatttcaagaaggctgtagtcatgggataggttttgagaactgactgtgctaagctctcatttattttctgtgttttatactatcttgtcaactttgagctatccaagcattgattatcgattcagacttggagagttctttcaggagtcatgggaaaagcatcccatgtggacccgcccaaagccaacgtcaaactcttgccctagctgaggcttgtactccttttggtttctgctatggctctttctaggaagtcccaagccccatgcagtgcatttgacagggagaggctcaggagagaccaatagccccatccacactg

SEQ ID NO: 254556 - DNA, 393 bp, Homo sapiens
gaaaaggactgtgttatgtgggtaagatgtaaaagacaccagccttgccctctattgaagctccaaagccccctgtgaaactccagtggcattttcacagtgatatttgtaaaaagacaaaaacaggccgggtgcggtggttcatgcctgtaatcccagcactttgggaggccgaggtgggtggatcacctgacatcaggagttcaagaccagcctgaccaacatggaaaatccccgtctgtactaaaaatacagaattagccgggtgtagtggcacatgcctataatcccagctacttgggaggctgaggcaggagaatcacttgaacctgggaggtggaggttgtagtgagccaagattgtgccactgcccaagagcaaaactccatctca

SEQ ID NO: 254557 - DNA, 366 bp, Homo sapiens
ttaaagaaattccatatagcacttacgagacactcaattttgcgggagccatacaagtgttaattcatgtaatattcacagtcatcttaacggggtcagtcaccatcacgatccccgttttccagatgagaaaacaccaagcaacatcttacccgaagttgcacagaggctggggatgggatttgaactgggtggtgggctcccctcttctctgctgttaaccactgggctgtgctctgggccagccagctctgagcgcaagtgttagggacagggctggcggaggttaatgagggaaaatggccaggagttggcttcaggaagggaggcagtgggtgagggtggagccacagcaggctcccagag

SEQ ID NO: 254558 - DNA, 419 bp, Homo sapiens
attttcacaataaacacacactcacatacatgcacacacattcacatacccatgtgaggacacacgtgccctcacacactctcacaccttcacacgcttgcacaaacttacttgcaagctctcacaaactaacacatacgcacaccctcacacagtcacacactcatttgctctctcacactcgtgtgcacactcgtgcttgcacactcgcacaaacacactcgtgcacacttccacacacgcactcacacaaacacgtgctcagcaccctcagactcactcatgcacactcacagtcacacacttgtacgcaattatgtacacacacatgcacctattcacacgcttggataaacacacactcagcctcacactaacacactaaacacgctcacatacctgaggactaacctctgacc

SEQ ID NO: 254559 - DNA, 337 bp, Homo sapiens
gaaattgccttatgttctttcatgtatcttcatttccctccctccctattggtgttctgttgttacccatggaaggtctcaaaccatcccctacctggtttaaacatcttcaggtcaacaatacattataaagtgtattcaaataggaagagaggaagtcaagttgctgtttgcagacgacatgattttatatttacaaaaccccatcatctcagcccaaaaacttgtcgaattgataagcaacttcagcaaaatctcaggatacaaaatcaatgtgcaaaaacacaagtattcctttacactaacaataggcaagcagagagccaaatcatgaatg

SEQ ID NO: 254560 - DNA, 303 bp, Homo sapiens
caaacattcaatcaattgcaaagacatactagcaatttgatatgatctctttcaaaaaaaaatagaatagagagtgattctcaacgtattttctgatgtcagcattaccctgatgctaaaatcacacaaagacatataagaaagagatcttcagaccaatattcttcatgaacatagttacaaaaatcctcaacatagtattagcaaattgaatccagtaacaagtaaaaagaatataaatgacagcccaaacttactcaatacttgggaatcagttaatgtaacataccatattaacagact

SEQ ID NO: 254561 - DNA, 118 bp, Homo sapiens
ccagactcctcccagaacctgagatgtgagcacttggccctgagcctgttccagagaacttcaggactaggggcttcaaggttaaaggggctggggttctattgctgaggagctgttg

SEQ ID NO: 254562 - DNA, 241 bp, Homo sapiens
  misc_feature (66)..(66): n is a, c, g, or t
gtcttgaaatgggtcatgatgagcaaactattactcttgataagccagctctctagttcacagccnaaacattcacaggcgagtgtttcctagagcaagcacttaaattatttttgatcagtctcagcatggtctaacacagggataggaaaatgtatctgtcccagtatcgtttaacccagggccaaaaattatggtgattcacctcctgcatttacttttttttaatcagatagtgggg

SEQ ID NO: 254563 - DNA, 371 bp, Homo sapiens
gtgttagtcaggatcattgtgagtacagaacacaaaattcaacccaaagccataaacagaattgaaagacctctgtccatggaaagcctatgaacacattgaacacagagggacttcaggcatggttagatccagctgttcaagggactctcacttctgctttcctctttttttttttttttaatggagtttcactcttgttgcccaggctggagtgcagtggtgtgatctcagctcactgcaacctcccggtttcaagcgattctcctgcctcagcctcctgagtagctgggattacagccgctcgccaccacacctggctaactttttgtattagtagagacggggtttcaccatgttggcaggctggt

SEQ ID NO: 254564 - DNA, 419 bp, Homo sapiens
agcccggggctgacgtagccttttgttatacctcactggctctctatccttgctccacttagatggccaagattcttggtcttcccctgctgttgagacctagggcagtgtttcttaaccttaaaaggtggttgtgcaagctggagacccagggaaaaagcacctgtgattttgcgttctctttgaagcggttcaaggtttcttggaagcccatccacacacacaaggttaagaacctctggacttagtgcatttcatccccagaactcactgctcagatcagccccactagagccattttataatttgttgatttgtttatttctatccctttttgttatgaagaacatctggagaggcttacaagaagcatgcctgttgtaaaataattatgagtagcaaaatcagcaacaagggaa

SEQ ID NO: 254565 - DNA, 270 bp, Homo sapiens
aataagcattaaaaggcaaagaaaggacaggatgttaattgaaatttagaagcatctgagggttcctccaatgaaaaattgcaaactgtgggtcatcatttggattctacagtgtgattttaaaatactgtgtgttctaaaaggtattatatagcatatatttcctaattttggtgttttactgagtatttgataatggctattgagataatagtttataaaatagaaaagattgtggttttataagactttcataacattttatgaagc

SEQ ID NO: 254566 - DNA, 356 bp, Homo sapiens
caggaagcaaatggctggagcgtgcatctgctctgatgcctgtcgctgcgacctccagcaggcccctcatcccctctgagctggatcctgaatctgtgaaatgacactaggcacaccttctaccagagctgtgctgagaggacacgagccattcccatcacagtgccaggaagcctcggtgccagccaggatgctgatggaaaggattccgtctcttagaaatctcagtcctttaggccacgtgtgctgccttgtgcctgcaatcccagcactttgggaggccgaggtgggaggattgcttgaggccaggagtttgagaccagcctgggcaacatagtgagaccctgtctctacaa

SEQ ID NO: 254567 - DNA, 518 bp, Homo sapiens
aattaaatgggagacttacttccaatgatacctagaaatttctaaaagaactactgagaaaattgcctccattgaggatttaaactggggatatctgatgctttttctgaattgagaaatattgaggaggctttgtctctttcgcctccaactgctccttttcctcctgcccctgcacctgcatagtctcccttacctgagccctcctgtcctgccttgcctcttcttccatcaccatcacctgaggaaagtccccagggctctggccccttccctgaaacttctgttctggcagcccctttcaaggtaaaacccacaggaagaggggagcctactattgtgtatactgcttcaccataatgtgaattaagaatattgtaaaagacttcccttttctaaattgaaatacattttcctcttctctttctaaagcaggctctgctttagatttagaagtagattggaggagaatttagcaatgcacttaaaaggccaaataaatctgtcattgatatttt

SEQ ID NO: 254568 - DNA, 543 bp, Homo sapiens
aacatgcatatttaaattatgcatgcattgtagctgtatactgtgtgaccacatttacttaaaaaagaggaaaaaaggttacttgcttgagacaggaaactatcacctttgaaagcatattaagtagttggcttactttggaacacacagtagactgaaaatgtgaactaatactttaaaattgccgtataatgatgtcattgcaagccattcatctatccaatgggggaaaatgtggaggtctaggcttgtgttgtcacaaaatacaccttttagataatccttacctgtacagatttttataactgttgttatcataagagaatggctacatcattatcctgccttttctgggtgtttattttgttgtttttgaaagtggacaaaacctcaaagcacaattttgttctgatatatccagtttagtagtttatgctggttaaatgatcaaagtaattgcttaaatgtcttgtggaattagctgtcactttatagtttatgtattgtggtgggtaccttaataataaaaagatttttaatgta

SEQ ID NO: 254569 - DNA, 431 bp, Homo sapiens
cagtcatagtcatagcacactgctgcagccttgaattcctgggctcgagatgatgctgcctctgcttccccagtaatggatactacaggcatgtgccactgtatctggcctgggtttcctttctaggagtattttcataggttgattccttagttaagagttatttaatcagaagcctgccatcagctgtatcttgtgagataagaaaattgaatggtgtcttccaggttcatcttagtatgttctttctgcttggacagatagcaaggtattgattttcatatgagactgattttattactagcttgttttctctctcttaccttttcttctcctttactcatttcattttaaatttgtttaaagacacgggttaatatttgtcataaaatttcaggcattgcagcagtatatcagaagtggtagttccc

SEQ ID NO: 254570 - DNA, 533 bp, Homo sapiens
cagcctgggtgagagagtgaggccctgtcgcaaaaaaaaaaaaaaaaaaaaaaattatatatatatatatgcgccatatgccaaaatatataaagaacttttataattcaacaaaaaaagacaaacctagttcaaaaatgggcaaaggatttcaacagatatttctccaaagaagatatacaaatgaagtcattagccattagggaaatgtttatcaaaatcacaatgagatgccactttatgcccactgggctggctacaataaaaagtagaaaataagtgttgatgaggatgtggagaaactgaaatctttgtacattactggtaggaatataaaatggtgcagctgctgtgaaaaaagagtctggcagttcctcaaaaagttaaacatacaccaagtgacgcagcaattccgataccaggtatagaccatgagaaatgaatcatctatccacacagaaaactcatacatgaatatacagagcagcatagccaaaagtggaaacaacccaaattcctttcaaatgctgaca

SEQ ID NO: 254571 - DNA, 192 bp, Homo sapiens
  misc_feature (182)..(182): n is a, c, g, or t
  misc_feature (184)..(184): n is a, c, g, or t
  misc_feature (186)..(186): n is a, c, g, or t
  misc_feature (188)..(189): n is a, c, g, or t
  misc_feature (191)..(192): n is a, c, g, or t
caggcttaggaatttttaacagatatttatcctggaaaattcagttatgagaagacccacttgactgctaatttgatgacgaatctgcaagtgtttttacaaaggacttttctagttgatgataagaacataggtctttataggtactaagggctttcaattaaatggctcctccatctcancnanannann

SEQ ID NO: 254572 - DNA, 455 bp, Homo sapiens
ttttaattataaatattatctaactctctgctatggaagatgaggattttgcttttcatacttctccccctattctccttccccaacctgatcttacactgggacttctactcctatcatcacttaattgtataatttttttaaattcatatcgaatatataaatgtacatagataatattgtcttctatagcataccatgattacattttctttcttttataatatttttgtatctctggaagtagtaattgccttggttgtaatttgttcaacttcatttgtatcttctattaattgatcatcagaatcgtttgtcattttttattctccaaatcacagggagacttcttcgagttctacggccctcagtcaggactgactactgtccaaataacacagttgtcataacagaattgatcatattgggacttccctttgttttctcttgcattt

SEQ ID NO: 254573 - DNA, 337 bp, Homo sapiens
gatctaacccaggagcagacagagaagctgctgcagtttcagctatttcagatgggaaagaataaggacataggttttaaggagagctaatgcaggttgctgtttgaacaactggagaaggatgacatggacagagagaagggggaattaaaggagttatgcaggccagcagaggaagaaatgatcccttttctgcttgcacaggaggaagaaatttatgaccctcatccttttaaatgatagcctgaacgctgggctgtagaatcaaatttataagtcattttgaaaatctttcttttggcttcacctgactatattacctaaaggaaaaaaaaac

SEQ ID NO: 254574 - DNA, 409 bp, Homo sapiens
tggagtctcgctccgtcgcccaggctagagggcagtggtgcgatctcggctcactacaagctctgcctcccgggttcacgccattcttctgcctcagcctcccgagtagctgggactacaggcgcctgccaccacgcccggctaattttttgtattgttagtagagacagggtttcaccatgttagccaggatggtctcgatctcctgaccttgtgatccgcctgcctcagcctcccaaagtgctgagattacaggcgtgagccaccgcgcctggccaaatgttccctttttataaggacaatatgttatatggaggaacctgccccaacaccacccacattaactaattacatctgcaatgacatcatctccaactgaggtcccattctgcggcgctagggggtagga

SEQ ID NO: 254575 - DNA, 399 bp, Homo sapiens
acttatcggcacaagctcctctctgtcttctaaactcgaagctgaaaatgatgtggacccagtgttgctgcggtcaccacacacagagaggctgcctgagaacgaggctgagatgagagagaagagtaccaaatactgacggcacactgggatagcgccagggactggtccatgatagaagggagtaagttccactttttatgtaagccaatttgaggtgggttttttatcatctgaaaacctttcattatgatttcagtggactctgaaatcatgacgcctgagtttaaattgtggccccatgcttattaacagtggcactttgagtagattacttaatatctcaatgactcagcttcctcatctaataaatggataataatagtgccaacttcataa

SEQ ID NO: 254576 - DNA, 407 bp, Homo sapiens
caaatggaaaaaaatattatagcttaacatctgctttccctaggtaatgtgttaattaaagattgttttaatatggaatgatgtctagcctttgaaaaactttatcttacggtttatggtattgataaccttcagaaaaggaagactggttcaaattatgtcaattaatatgaaaaaagcccactcaatatgaagccccttgacttctaaaaacttgctttttagaaaatgttaaaaaaaattccaggttttgcaggataaatcctcgggggaatattgtgaggtgaggaatagtcgtggtcttgatgcaatgtaacttataattagaaagatgctgattttgctgtggagtcattgaatatcattatttcaaaataattttgaataaaatgagatttctaataacc

SEQ ID NO: 254577 - DNA, 614 bp, Homo sapiens
gatgattcaatgttttaccacaatgctttctaaaacagaagagtgtaaaaggatattcaaagtcaatttcctcagcgaggctttgcagaaaatgaggaaactagagaaacaaaaatggcaggacattctacgggtgattttaaatgttgctatgttttatgggaaaaaatactttaccttttaaagaatcacaaagaattgttggaaacccaaactctggaatgtttgcaaatttagttgagcttctatgtaattatgtctatataggtagccacgatgttgatgatttcttaaaaatctgtgccttatttgtgtgataaaatacacaatgaataattaatgctcataggaaaaccttataaagggaaaataaatcttggggacccaaaatcactaagctaaagggaaaagtcaagctgggaactgcttagggcaaacccgcctcccattgtatccaaagtcacccatctgctcacctagataaatgcatacctgattgcctcatttggagagggtaatcagcaatgcaaaagaatgaaatcatttgtctcttacctacctatgacctggaagccccctgtctggccttgtcacctttctggactgaaccaatg

SEQ ID NO: 254578 - DNA, 332 bp, Homo sapiens
ttgtcttggtatattattgtatgttgataaaattaatgcttaaatatacttaatattttatttcataaagtagacttttttaggagaccagggtgggtggatcacttgagatcaggagttcaagacaagcctggccgacatggcaaaacctggtctgtactaaaaaattcaaaaattagctgggtgtcgtggtgcacgcctgtaatgccagcaacttgggaggctgaggcatgagaattgtttgaacccgggaggcagaggttgcagtgaacagaaatcgtgccaccgcactccagcctgggcgacagagttagactcctcaaaaaaaaaaa

SEQ ID NO: 254579 - DNA, 512 bp, Homo sapiens
ttgctaaggtcatcccatgtcaaagtcttttccaccacacttgctcgcttcatgcagctgaacttatgacaccttcagctctgggtgcctgttacccacctagtttgtgaatactccctctctgtaccttcttactattgtatcttttagtaatttactgcctttttcttttcttattgaggttaggcaaggaaaaggagatgatcattagtcccctttcctacttgttagtatctctcatagaacacatattacatttgaagtcagttaacccatattgcattgctggattttcataataacccctctatcactgaacccctgctagcacatgggtgtgttatctcttcaggggctccgaggtcttgggcccataacattaacctctctgaacctttgttttctcatatacaaattgaggggtttgttttctgaggtcatttcctgaatctaggaatctatctaatgatttaatgggaaaagaatgctagaataaatggttgaacattatt

SEQ ID NO: 254580 - DNA, 379 bp, Homo sapiens
tcattctttctgtggcctcagaatccttcttacattgtaattattaccaatttattatgagtttcatgaagatgcaactgagaataatacctattccaacacaactataagtttattgagacaggtgtttacaaatctatcatgtagcacatcatgaaaacagggcagcagctcaaaaatgttgctgaatgagtgaattaattaattaattaataggtgttctgcaaagatctttttttttttttaaaaaaaaagacatttatccagcgtcacgatcagactattacatttagcaatcaacagcatggggtgcaaaaaaaaaaaatctacattaaaaccctttgttggaatgctttacactttccacagaacagaaact

SEQ ID NO: 254581 - DNA, 419 bp, Homo sapiens
cctaaaccccatctgtatgtagttgactgatgtgctggtaagcctttggtaactttgatgtttggttaaataactgtgtagtattgctttaagtctctcttttaatcattcaaaagctaaataattacatcagttctcttaagattttccaaagatgaattctatattagttgcatgagtggctcattttcttggaattttttgggggttaccaaatcttaataagtaataactggggaagctttaaaactgccttagttttctaactttttgtgtttgtgttcaaaaataattaagttgatggtaatacgttggaaagtgattaaaattttgtggaaaggtgatagcatttgatgtagtgagaaaacagttattaattatgcacagatgaggttgtcttttgtttgattaatggatgt

SEQ ID NO: 254582 - DNA, 298 bp, Homo sapiens
gcagtccatattcatccaattatgaatgggagtggctatcattttaaagaataacttaccaagcactctaagttgcttttaatgtaaattgagatggaggctgaaaagagaagtagtagaaattgtttcaaagttgaattattaacatctaaagacagttgtcacttaaaatatgggagtcaggcaagcagccttggaacttcaagatatgtgaccaactctcatctggcatttaattagggtagtgcttttttgtcatacaatttcatgtgaatagatacctgggcctgaattaaaa

SEQ ID NO: 254583 - DNA, 493 bp, Homo sapiens
agtatcccactctctaacaacacctctactttcttttcagttttttttttttcctagcataccaactatgaaactcctttacactgtgaaggttctcgaatccagtaatatcaaaactttttcttgttcatcatttatttcctaatcttctattcatgcaagttagaatgcttgaaggaaattatagtcactctcctgcatataatctcaaatttttccacctgcagtcttacttacttgggaaaatttcactatttgtaataaaactcataactttcacccctgcctaccaacccctaaagcagctaaacaggaatgcagaaaacaaatatcttataatggtactatgcctgtgcattgttctaattattttatatatgtgaattcatttagtcctatcaactaacctataaaatatttataattattatccagatccatctcaattaagaatgtaaatgcaaatgtacaaaataaaatacttgcactaaca

SEQ ID NO: 254584 - DNA, 1093 bp, Homo sapiens
gagatacttctttactgaagacatttgttcattgagaattggtaagtggattaagaaagaagacacttttagtcacttagcatattcatctaagaaacatctttcaaatactgaatatatttaatattctttatgaataagctttaacttctttgatgaatttaaattggagtttatccaagtaagtttttttaaaagcacctgcgaaattctgtttccaaaggaataagtcatacattaaatatgtgaaatatatttatgttggtaatcattttatatcagccaacaatgtagtactaccagatgcagtggtgacatcacactcaagggttttcaaccagagagaaacatgattcatatatttaagagattactgtagtgactaggggtagggtaatgggatcaaggcagagaggctgagagatcagctatagatgtatcagaggtggtcagcaagacagtagttgggtttgggcagaggtaaacagatttgaggtatgttttggaagtaaaaaaaatattggggttacttgctgctgggtatcatgtagaaggagagggagttaggatggtgattccactgactaaaatggagaaagctgagaagttcagagagcagaacaggtttgttgactgttgattggtagccatatgatagacacacagtgccaagtgctctgagtatatcttctcatttaattttcacaaaaggcttctgaggtgggtatattctcatattatagatgaggtagatgctaagccacattttctgggaagtatgcatatatcctcagtgaaattaaataacttgcccaagtaccagcttactgggaaatggcagagctgggatgaaactagccttttcaactctaaaacttcggctgttttttcaaagttcatgtatgaaaaagaaatacaagcaaattattcctgtaggagtaaggagtaatggtctaatttgttgcttatactaattagacttattctattggaacaccaacatgccagcatcagtttggctaaagtaaaaataaagctcccgtatttaaaattattctaaaaataatggaacaaaaataaaattcttttcata

SEQ ID NO: 254585 - DNA, 3883 bp, Homo sapiens
cttgagggtgcccttgagcaggagagaaaagcgagaatgaactgtgaaagggaactgcacaaactggagggcaatttaaagctgaatcgggaaagtatggagaacctggaaagcagccagcgacacctggcagaagagctgaggaaaaaagaattagaattgagtcagatgaattcaaaagtggagaatgagaaaggcctggtagctcagcttcagaagacggttaaagagcttcagactcaaataaaggatttgaaagagaaactagaagctgaaaggaccactcgagccaagatggaaagggagagagctgacctcacccaagacctggctgacttgaatgagaggctggaggaggtaggaggatccagtttggctcagctggaaataactaagaaacaggaaaccaaattccagaagctgcaccgagacatggaagaggccactctgcactttgagacaacttctgcatctttgaagaagagacatgcagacagcctggctgagctcgagggccaggtagaaaatctacagcaggtcaagcagaaactggaaaaagacaagagtgacttgcagctagaagtagatgacctcctgacccgtgttgagcagatgacaagagctaaggcaaatgctgagaaactctgtactctatatgaagagcgcttgcatgaagcaactgcaaagctagataaggtgactcagttggcaaatgacctggcagcacaaaagacaaagctgtggagtgagagtggcgagttcctacggaggcttgaagagaaggaggctctgataaaccaactttccagggaaaagagcaacttcactcggcagattgaagacctgagagggcagctggaaaaggagaccaaatcccagagtgccctggcccatgccctgcagaaggctcagcgtgactgtgaccttctacgagagcagtatgaggaagaacaagaggtcaaggctgagctgcaccggaccttatccaaagtcaatgctgaaatggtgcaatggagaatgaagtatgaaaacaatgtcatccagagaacagaagacttggaggatgccaagaaggaactggcaattagattgcaggaggcagccgaagccatgggggtggccaatgccagaaatgcctccttggagagagccaggcaccagctgcagctggagctcggggacgccctgtctgacctcgggaaggtccgctctgcagcagccaggctggaccagaagcagctgcagtctggcaaggcccttgccgactggaagcagaagcacgaggagtcccaggcgttgctggatgcctctcagaaggaagttcaggctctcagtacagagctcctcaagctcaagaacacctatgaggagagcatcgtgggccaggagacactcaggagggagaacaagaacctccaagaagagatttctaatctgacaaaccaggttagagaagggaccaagaacttaactgaaatggaaaaggtcaagaaactaattgaagaagagaagacagaagtccaggtgacactggaagaaacagagggagccctggaacgtaatgaaagcaagattcttcatttccagcttgaactcttggaagctaaagcagaacttgaaagaaagctttcagagaaagatgaagaaatagaaaattttaggaggaagcagcagtgtaccattgactccctgcagtctagtctggattctgaagctaagagcagaattgaggttacccggctgaagaagaagatggaagaggacctcaatgagatggaactccagcttagctgtgccaaccggcaggtgtcagaagcaaccaaatccctgggccagcttcagattcaaatcaaggaccttcaaatgcagctggatgacagcacacaactgaacagtgatctgaaggagcaggtggctgtggctgagcggcgcaactctcttcttcagtctgaactagaggatctaaggtccctgcaagagcagacagagcgtggccgcaggctgtcagaagaagagctcctggaagcaacagaaagaatcaatcttttctatacccagaacacaagcctcctcagccagaagaagaaactggaggctgatgttgcccggatgcagaaagaagctgaagaggtggtgcaggagtgtcaaaatgcagaagagaaggcccagaaggcagccattgaggcagcaaacttgtcagaagaactgaagaagaagcaagacaccattgcccacttggaaaggacaagagaaaatatggagcagccaattacagacttacagaaaaggctggctgaagctgaacagatggccctgatggggagtagaaagcaaatccagaaactagaatccagggttcgtgaactggaaggtgaactggagggtgaaatccgtcgcagtgcagaggcccagaggggagcccgcagacttgagcgatgcatcaaagagctgacctatcaggcagaggaagacaagaagaatctgagcaggatgcaaactcagatggataaacttcagctaaaagtgcaaaattacaagcagcaagtcgaggtggcggaaacacaagccaatcaatacctttccaagtataagaaacagcaacatgagttgaatgaagtgaaggaaagggcagaggtggcagaatctcaagtcaataaactcaaaattaaagcaagagagtttgggaaaaaggttcaagaagaatagcatcccctgctttgaaaggacaacagctggagaagtacaaggaaggtgctgtttcatggccaaaaacttaggttgcatggaaacatttttaaaaacatgtttaaattgcttttcacaccatataaacaaggcaattagaaaaataattaaagggaatatcattgcttccacagttaatggggattttttgatcctcaaatgcaagtaaactaccttctaatgcttcacatgacagattaaataaatggaagaaccttttcaattctgatgtttaaaaaatgaataaaacttgatcctttgtccatatttcctcttaatgggtaggactcatagaagatgtccttagaccagtcacgcttcatggggactagggcatgttggtgaatggtttttactaaagttaggcaactttggcttgattcacccctaaatctatgaatgtatattgtgagccagcagtggtagaatggaagtcataagatctcctcagcattgtgatataaatatagctatagttaggcaatttgaacatgtaggcaaaactctcctaatcaacacacatgtaggctatatgctggtacatgctttaaacatggaggtaaccccacacgagacattcagtgacaggtaatatgctggatttgtgcagtaccgatttggctcagctggaggaacatgtcccggaattcctctctctcatggttctggattggagtaggtcataaagaaatttgcattaatttgatcagcagctattttatactcataaggtcagtgtacagacccaagcatggtgacagcttgaaaatatgactccaggccaaaaaggggagctagaagagaccagagacagctccctggacccagagctcttccagctcctgccagcctcctccttcagctttgcaaagtactggccaggtgtgtgtgcagctccatggcaaccagcatcagcttttcctgagatcacacacagcattgcagtggaggccgtgagacagacatgggttctgtttgttcttatggacttcccttcatccttgctgcattcacagtcgacctacagtgacttcaggcccagaaccagatgcagagggaacagcctggcctagacttctccaccagcacccacaattgtgtaaggctgaagctctataataaatctttattctgtcat

SEQ ID NO: 254586 - DNA, 1785 bp, Homo sapiens
ttctactcctcgcccctagcagagagccccggttaatcggcagaggcaagaagtctcacacttgctcccctcccttcacgttgcacctctctgaggaggtacaggagggaagaatggctccagtggggagtaagaggtggggtcagatgtgctaggcacattcttgcctcagggcactggccttcccgttctcaagaaggccccttggagaaggtggcattggcgtcaaggagaaggcaggaaaagaggatatctgggttcgtgaactggaaggtgaactggagggtgaaatccgtcgcagtgcagaggcccagaggggagcccgcagacttgagcgatgcatcaaagagctgacctatcaggcagaggaagacaagaagaatctgagcaggatgcaaactcagatggataaacttcagctaaaagtgcaaaattacaagcagcaagtcgaggtggcggaaacacaagccaatcaatacctttccaagtataagaaacagcaacatgagttgaatgaagtgaaggaaagggcagaggtggcagaatctcaagtcaataaactcaaaattaaagcaagagagtttgggaaaaaggttcaagaagaatagcatcccctgctttgaaaggacaacagctggagaagtacaaggaaggtgctgtttcatggccaaaaacttaggttgcatggaaacatttttaaaaacatgtttaaattgcttttcacaccatataaacaaggcaattagaaaaataattaaagggaatatcattgcttccacagttaatggggattttttgatcctcaaatgcaagtaaactaccttctaatgcttcacatgacagattaaataaatggaagaaccttttcaattctgatgtttaaaaaatgaataaaacttgatcctttgtccatatttcctcttaatgggtaggactcatagaagatgtccttagaccagtcacgcttcatggggactagggcatgttggtgaatggtttttactaaagttaggcaactttggcttgattcacccctaaatctatgaatgtatattgtgagccagcagtggtagaatggaagtcataagatctcctcagcattgtgatataaatatagctatagttaggcaatttgaacatgtaggcaaaactctcctaatcaacacacatgtaggctatatgctggtacatgctttaaacatggaggtaaccccacacgagacattcagtgacaggtaatatgctggatttgtgcagtaccgatttggctcagctggaggaacatgtcccggaattcctctctctcatggttctggattggagtaggtcataaagaaatttgcattaatttgatcagcagctattttatactcataaggtcagtgtacagacccaagcatggtgacagcttgaaaatatgactccaggccaaaaaggggagctagaagagaccagagacagctccctggacccagagctcttccagctcctgccagcctcctccttcagctttgcaaagtactggccaggtgtgtgtgcagctccatggcaaccagcatcagcttttcctgagatcacacacagcattgcagtggaggccgtgagacagacatgggttctgtttgttcttatggacttcccttcatccttgctgcattcacagtcgacctacagtgacttcaggcccagaaccagatgcagagggaacagcctggcctagacttctccaccagcacccacaattgtgtaaggctgaagctctataataaatctttattctgtcat

SEQ ID NO: 254587 - DNA, 3533 bp, Homo sapiens
cttgagggtgcccttgagcaggagagaaaagcgagaatgaactgtgaaagggaactgcacaaactggagggcaatttaaagctgaatcgggaaagtatggagaacctggaaagcagccagcgacacctggcagaagagctgaggaaaaaagaattagaattgagtcagatgaattcaaaagtggagaatgagaaaggcctggtagctcagcttcagaagacggttaaagagcttcagactcaaataaaggatttgaaagagaaactagaagctgaaaggaccactcgagccaagatggaaagggagagagctgacctcacccaagacctggctgacttgaatgagaggctggaggaggtaggaggatccagtttggctcagctggaaataactaagaaacaggaaaccaaattccagaagctgcaccgagacatggaagaggccactctgcactttgagacaacttctgcatctttgaagaagagacatgcagacagcctggctgagctcgagggccaggtagaaaatctacagcaggtcaagcagaaactggaaaaagacaagagtgacttgcagctagaagtagatgacctcctgacccgtgttgagcagatgacaagagctaaggcaaatgctgagaaactctgtactctatatgaagagcgcttgcatgaagcaactgcaaagctagataaggtgactcagttggcaaatgacctggcagcacaaaagacaaagctgtggagtgagagtggcgagttcctacggaggcttgaagagaaggaggctctgataaaccaactttccagggaaaagagcaacttcactcggcagattgaagacctgagagggcagctggaaaaggagaccaaatcccagagtgccctggcccatgccctgcagaaggctcagcgtgactgtgaccttctacgagagcagtatgaggaagaacaagaggtcaaggctgagctgcaccggaccttatccaaagtcaatgctgaaatggtgcaatggagaatgaagtatgaaaacaatgtcatccagagaacagaagacttggaggatgccaaaagagatttctaatctgacaaaccaggttagagaagggaccaagaacttaactgaaatggaaaaggtcaagaaactaattgaagaagagaagacagaagtccaggtgacactggaagaaacagagggagccctggaacgtaatgaaagcaagattcttcatttccagcttgaactcttggaagctaaagcagaacttgaaagaaagctttcagagaaagatgaagaaatagaaaattttaggaggaagcagcagtgtaccattgactccctgcagtctagtctggattctgaagctaagagcagaattgaggttacccggctgaagaagaagatggaagaggacctcaatgagatggaactccagcttagctgtgccaaccggcaggtgtcagaagcaaccaaatccctgggccagcttcagattcaaatcaaggaccttcaaatgcagctggatgacagcacacaactgaacagtgatctgaaggagcaggtggctgtggctgagcggcgcaactctcttcttcagtctgaactagaggatctaaggtccctgcaagagcagacagagcgtggccgcaggctgtcagaagaagagctcctggaagcaacagaaagaatcaatcttttctatacccagaacacaagcctcctcagccagaagaagaaactggaggctgatgttgcccggatgcagaaagaagctgaagaggtggtgcaggagtgtcaaaatgcagaagagaaggcccagaaggcagccattgaggcagcaaacttgtcagaagaactgaagaagaagcaagacaccattgcccacttggaaaggacaagagaaaatatggagcagccaattacagacttacagaaaaggctggctgaagctgaacagatggccctgatggggagtagaaagcaaatccagaaactagaatccagggttcgtgaactggaaggtgaactggagggtgaaatccgtcgcagtgcagaggcccagaggggagcccgcagacttgagcgatgcatcaaagagctgacctatcaggcagaggaagacaagaagaatctgagcaggatgcaaactcagatggataaacttcagctaaaagtgcaaaattacaagcagcaagtcgaggtggcggaaacacaagccaatcaatacctttccaagtataagaaacagcaacatgagttgaatgaagtgaaggaaagggcagaggtggcagaatctcaagtcaataaactcaaaattaaagcaagagagtttgggaaaaaggttcaagaagaatagcatcccctgctttgaaaggacaacagctggagaagtacaaggaaggtgctgtttcatggccaaaaacttaggttgcatggaaacatttttaaaaacatgtttaaattgcttttcacaccatataaacaaggcaattagaaaaataattaaagggaatatcattgcttccacagttaatggggattttttgatcctcaaatgcaagtaaactaccttctaatgcttcacatgacagattaaataaatggaagaaccttttcaattctgatgtttaaaaaatgaataaaacttgatcctttgtccatatttcctcttaatgggtaggactcatagaagatgtccttagaccagtcacgcttcatggggactagggcatgttggtgaatggtttttactaaagttaggcaactttggcttgattcacccctaaatctatgaatgtatattgtgagccagcagtggtagaatggaagtcataagatctcctcagcattgtgatataaatatagctatagttaggcaatttgaacatgtaggcaaaactctcctaatcaacacacatgtaggctatatgctggtacatgctttaaacatggaggtaaccccacacgagacattcagtgacaggtaatatgctggatttgtgcagtaccgatttggctcagctggaggaacatgtcccggaattcctctctctcatggttctggattggagtaggtcataaagaaatttgcattaatttgatcagcagctattttatactcataaggtcagtgtacagacccaagcatggtgacagcttgaaaatatgactccaggccaaaaaggggagctagaagagaccagagacagctccctggacccagagctcttccagctcctgccagcctcctccttcagctttgcaaagtactggccaggtgtgtgtgcagctccatggcaaccagcatcagcttttcctgagatcacacacagcattgcagtggaggccgtgagacagacatgggttctgtttgttcttatggacttcccttcatccttgctgcattcacagtcgacctacagtgacttcaggcccagaaccagatgcagagggaacagcctggcctagacttctccaccagcacccacaattgtgtaaggctgaagctctataataaatctttattctgtcat

SEQ ID NO: 254588 - DNA, 606 bp, Homo sapiens
attttgtccatttttcttttcctcttgtttatgccagtctttgggaagcacaggcaagagtctggaaaggctacatgaagcagcattactaggttccagatattgtagcagtattttctaagagcttttcagattttaatttttcttattctgccattcaaaaaaaaatagtggtattcagaaggagaaatctcttttaaaaaattataaagagtggtaagtaacacatgggtgctggatttgaacagaccttgtcatcaaatgtcaattcctacacaggtttcataggttgctatgagggtaaaatatggaaaacgctaagcccagtgactagaactaatgaaaactattatcattagtagtaatgtactttggaaataaaaaatacaaacttccactcccataagctcaagggtattactaaaaatgattgcctggccagaattcctggcttaaacttgtaactttctgggggttgatacatccacccctgcattcttaagcccccaattgtgatagaaaagaggtgacacattctttccttttgctagactcatgtaaaagttgccataaaccacccatggcattttcagtggagtttcaatg

SEQ ID NO: 254589 - DNA, 4920 bp, Homo sapiens
cttaagtctttctctggggaggcagtaaggggccgtggagctggcctcggcctcggcatcgggagaggctggacttcctgtctctctgtgctgaatggctgcgatggcgcccgctctcactgacgcagcagctgaagcacaccatatccggttcaaactggctcccccatcctctaccttgtcccctggcagtgccgaaaataacggcaacgccaacatccttattgctgccaacggaaccaaaagaaaagccattgctgcagaggatcccagcctagatttccgaaataatcctaccaaggaagacttgggaaagctgcaaccactggtggcatcttatctctgctctgatgtaacatctgttccctcaaaggagtctttgaagttgcaaggggtcttcagcaagcagacagtccttaaatctcatcctctcttatctcagtcctatgaactccgagctgagctgttggggagacagccagttttggagttttccttagaaaatcttagaaccatgaatacgagtggtcagacagctctgccacaagcacctgtaaatgggttggctaagaaattgactaaaagttcaacacattctgatcatgacaattccacttccctcaatgggggaaaacgggctctcacttcatctgctcttcatgggggtgaaatgggaggatctgaatctggggacttgaaggggggtatgaccaattgcactcttccacatagaagccttgatgtagaacacacaactttgtatagcaataatagcactgcaaacaaatcctctgtcaattccatggaacagccggcacttcaaggaagcagtagattatcacctggtacagactccagctctaacttggggggtgtcaaattggagggtaaaaagtctcccctgtcttccattcttttcagtgctttagattctgacacaaggataacagctttactgcggcgacaggctgacattgagagccgtgcccgcagattacaaaagcgcttacaggttgtgcaagccaagcaggttgagaggcatatacaacatcagctgggtggatttttggagaagactttgagcaaactgccaaacttggaatccttgagaccacggagccagttgatgctgactcgaaaggctgaagctgccttgagaaaagctgccagtgagaccaccacttcagagggacttagcaactttctgaaaagcaattcaatttcagaagaattggagagatttacagctagtggcatagccaacttgaggtgcagtgaacaggcatttgattcagatgtcactgacagtagttcaggaggggagtctgatattgaagaggaagaactgaccagagctgatcccgagcagcgtcatgtacccctgagacgcaggtcagaatggaaatgggctgcagaccgggcagctattgtcagccgctggaactggcttcaggctcatgtttctgacttggaatatcgaattcgtcagcaaacagacatttacaaacagatacgtgctaataaggggttgatagttcttggggaggtacctcccccagagcatacaacagacttatttcttccacttagttctgaggtgaagacagatcatgggactgataaattgattgagtctgtttctcagccattggaaaaccatggtgcccctattattggtcatatttcagagtcactgtctaccaaatcatgtggagcactcagacctgtcaatggagttattaacactcttcagcctgtcttggcagaccacattccaggtgacagctctgatgctgaggaacaattacataagaagcaacgactgaatctcgtctcttcatcatctgatggcacctgtgtggcagcccggacacgtcctgtactgagctgtaagaagcggaggcttgttcgacccaacagcatcgttcctctttccaagaaggttcaccggaacagcacaatccgccctggctgtgatgtgaatccctcctgcgcactgtgtggttcaggcagcatcaacaccatgcctcccgaaattcactatgaagcccctctgttggaacgtctttcccagttggactcttgtgttcatcctgttctagcatttccagatgatgttcccacaagcctgcatttccagagcatgctgaaatctcagtggcagaacaagccttttgacaaaatcaaacctcccaaaaagttatcgcttaagcacagagcacccatgccgggcagtctgccagattcagctcgtaaggacaggcacaaattggtcagctccttcctaacaacagccaagctgtcccatcaccaaacccggcctgacaggacccacaggcagcacttagacgatgtgggggccgtgcccatggtggagcgagtgacagcgccaaaagcagagcgcttgctcaacccaccaccacccgtgcatgacccaaaccacagcaaaatgagattgcgagaccattcatctgagagaagtgaagtgttgaagcatcacacagacatgagcagttcgagctacttggcagccacccaccatcctccacacagtcccttggtgcgacagctctccacctcctcagattcccctgcacccgccagctctagctcacaggttacagccagcacatcgcagcagccagtaaggaggagaaggggagagagctcatttgatattaacaacattgtcatcccaatgtctgttgctgcaacaactcgcgtagagaaactgcaatacaaggaaatccttacgcccagctggcgggaggttgatcttcagtctctgaaggggagtcctgatgaggagaatgaagagattgaggacctatccgacgcagccttcgccgccctgcatgccaaatgtgaggagatggagagggcacggtggctgtggaccacgagtgtgccaccccagcggcggggcagcaggtcctacaggtcatcagacggccggacaaccccccagctgggcagtgccaacccctccaccccccagcctgcctcccctgatgtcagcagtagccactctttgtcagaatactcccatggtcagtcccctaggagccccattagcccggaactgcactcagcacccctcacccctgtggctcgggacactctgcgacacttagccagtgaggatacccgttgttccacaccagagctggggctggatgaacagtctgtccagccctgggagcggcggaccttccccctggcgcacagtccccaggcggagtgtgaggaccagctggatgcacaggagcgagcagcccgctgcactcgacgcacctcaggcagcaagactggccgggagacagaggcagcgcccacctcgcctcccattgtccccctcaagagtcggcatctggtggcagcagccacagctcagcgcccgactcacagatgagcgggagacagccatctaaacagactcactaactattggcattaaagcttcagaaatctctgcgtttgatattcaaacatcatatgccggaaattttcacagtttttagtgaacttaaggaatttagatcctactttggtatttttttttcttgttttaatttttgttttgtttttgtttccatgttttcttgtcacacacctgagcacttcctcccgttggcaaacagaagttcaggatgagaccctgctggcctggtcctggcacatcctctgcactgttgaatcactggacttactgatcttagatgaccaccccctccctcacacctgtgggcagggcagaacagcctggcgggctacagtttagcatggccttcttgagctagggtggaatggggcagggtgctctggactcttaccccctcccctcccatctgtggcttggctctgctgtggccctcctggctgggtccccttggtttttcgtgctggaacatccccaccagagcctctctgccataactgccagctgctctccccgagtgctcagctggcagaacacctttcctttctcacccagaacttaagagactgattttttgtttcatctgcatttggtcttctctgttttgactctttcactgcagtaacctggctgtggctgctcaggttcccctcctcatgccccttggtacccttccctgtctgctctcccatgccatgtacacacccacaacccgtccttccacttggaatatttttaccacctatcctgatctttgaaggtagggttaggactacttaacctctattcccactcccctgcaaactgggggttgtgggaagtgagcagccatctccctgtgtgattttttttttttttccctctgattcactttgccatgtttccttcacatccagatccctgtcggtgttagttccactcttggtctttcacgctccccttgcctgtggaacattgtctggtcctagctgtggttcccattgttcccccttcacccttctctgttaaccttgtgcctgtctcctgtatgatcacatcaccaaaaagggggaggggggagaagactctttttttttggccattttgtaatcgtataaaaatagtagacaactgcttaatggttggggttttttcacaattttcaacattagtgatttttttttctgtttgcaagttaaagggtttgtcattgtttctttaaaaaaaaatacaataatgcaccatatccctatgcataaagtgcttcttctatttataaggttgaaaattctgaataacccttttagcattgaaaaaaaaaacaaaaacaaaaaatggaaaaaaaaaaccttgtattttgtaaatattttcttttcctgctttggagctgtgtaatggcagcgaaacatgtagctgtctttgttctatagaaatgcttttcttcagagaagctgatctttgttaatgtcttgattctgttcgcaaagcacagactagtgctt

SEQ ID NO: 254590 - DNA, 582 bp, Homo sapiens
cagaaaatagtacaaacccatctggctgcaacagtccagcagcatgaagatcaaagtcacgtagtagagccagagagaaatttgccctgggcctaatattcatgaagcctttccaattcagactcggtattattgccaagtcggtgtgtttgggagaaatcagaagccaacacactagaaaagttgcaagagattcctaggggaacccacaaattcagttccttgccagaaacctgctcctccagatgaatctagtgcatcagatgggctcagaagcacaggtggcgcaggcagacctctactgagaagaacaacagtggaaggcagatgaaactcacattttggagtctgagagccatgcgggcccaccccagttacgtctacccctggtcggtgaccagagaatcctttagcagcaacagcagtgatgtttatttcactggtatgtataaagcgactgattgaaaacaagctgtatgcccaacaacttggaactggttaaatgatttttggttcagccgcacagtggaatatcatgcggccattaagaataaataaaaaatcctatactttccatattca

SEQ ID NO: 254591 - DNA, 838 bp, Homo sapiens
cagaaaatagtacaaacccatctggctgcaacagtccagcagcatgaagatcaaagtcacgtagtagagccagagagaaatttgccctgggcctaatattcatgaagcctttccaattcagactcggtattattgccaagtcggtgtgtttgggagaaatcagaagccaacacactagaaaagttgcaagagattcctaggggaacccacaaattcagttccttgccagaaacctgctcctccagatgaatctagtgcatcagatgggctcagaagcacaggtggcgcaggcagacctctactgagaagaacaacagtggaaggcagatgaaactcacattttggagtctgagagccatgcgggcccaccccagttacgtctacccctggtcggtgaccagagaatcctttagcagcaacagcagtgatgtttatttcactggtatgtataaagcgactgattgaaaacaagctgtatgcccaacaacttggaactggttaaatgatttttggttcagccgcacagtggaatatcatgcggccattaagaataaataaaaaatcctatactttccatattcaactttagactgcaaacaactgaaaaaacaccttcataattaggcttcctcagattagaacgtgaagtcaaatcaacgtgtgtcagaaagttaacaacagctaactgtttgttgtggtgttctgagtaacttgtattatttttcagtttttttcccattcctaatgtgcaaatgtactatttttattgtaaaaaaaaatacatgtttgtaaagagcaataacataaatctctgcataggcaaattgaaaggaaatca

SEQ ID NO: 254592 - DNA, 437 bp, Homo sapiens
  misc_feature (9)..(9): n is a, c, g, or t
tactaaatncgcggccgcgtcgactctgatggtctgtgagagatcaaatgaggacaggtgtaattaagctctattattaacaataatgccttgtatttgtatagtgctttataatttacagagagcgttaacatccatcaatttatttgaccctcaaaacaaccctctttgtttacttatgcatatgtataagtaaaatatgtaatattacctccagttgaggaaaccaaaacttggctgggcgcggtgggtcacgcctgtaatcccagcactttgggaagcctaggcaggtggatcctgggacctcacttagaataactaagcacggtgctcgcttcggcagcacatatactaaaattggaacgatacagagaagattagcatggcccctgcgcaaggatgacacgcaaattcgtgaagcgttccatatttaaaaa

SEQ ID NO: 254593 - DNA, 442 bp, Homo sapiens
gacacaagaagatgtcttttatcttaataatgtagtacattctaataacatgcctctgatggtctgtgagagatcaaatgaggacaggtgtaattaagctctattattaacaataatgccttgtatttgtatagtgctttataatttacagagagcgttaacatccatcaatttatttgaccctcaaaacaaccctctttgtttacttatgcatatgtataagtaaaatatgtaatattacctccagttgaggaaaccaaaacttggctgggcgcggtgggtcacgcctgtaatcccagcactttgggaagcctaggcaggtggatcctgggacctcacttagaataactaagcacggtgctcgcttcggcagcacatatactaaaattggaacgatacagagaagattagcatggcccctgcgcaaggatgacacgcaaat

SEQ ID NO: 254594 - DNA, 723 bp, Homo sapiens
cctcccaggtgatgggaaagtggaagtgctctgtagcacttctctatatgctacctgctcatgccttttgtttcaggtgctgagctgggcagatgtcagcatgaatgcaaagtgccaagttggtactggggtatgctcagatatattctcatctttgtaccatccttgtttgaacttctaagtctcatctcttcctattctatttgcagccaaagtgatagtttagcttttcacctcctagtctaaaaatgcatgccaccaaaattttcaggcagttggaagccaagcaaagaagaaagcaaggatattcagaccaaggctgggggcccttgcacctctgaattaaaatgttagttccatgtggctctgttggctaatgttgaatatgaatgtgactctagcatgacagggtgaagaggttcagtatcagaaatctgagaagttgctaaaggaggccatgagttttctggaaatgcaatatgaataatcaggaatccccagataactgtgtaccatcataggaggtggaatgtaatgtaataaataatctttcaatcagatacatttagttatatcaagtcagcagatttgaaaaaggaccctagaggccaggcacagtgataaacctgtaatcccagcactttggtaggctgaggcaggaggattgcttgaggacaggagttcgagaccagccagggcaacatagtgagactctgtctccac

SEQ ID NO: 254595 - DNA, 491 bp, Homo sapiens
gtaaaccagctaagtaacaatgcctgcttgttagaaggcatatctggctctgggagccatttcgccaggcacttataaggcccatttaacattataggacagtacaggcttcctaacagcaagggcctggcacaaggccagtgtgcctgccttaaagttagcccaactctgctgggctgggcacacttactatgaacttggcagacagaccagcaggttggtcagacagctgctggatgaggcctgggagggagggaggagcagggtttcttccagtcagggcagaagaaataccagaagcaagaactggagcttcaactccaattgaagaaaaagcagcagctagaacagaggcatgttcaggaactgaaggactcagctggggcagaagtgtcaaagatataaagcaatgttgtaaatactgactacagctggaattaaagagcaacgcttctttgtatgcagtaaaacaacaatgcactaaattcctt

SEQ ID NO: 254596 - DNA, 387 bp, Homo sapiens
gactgaagaaagatttgaatatgttgaaagcgtggtgtaccaaattctaatagataaaatgggtttttcagatgcaccaaatgctattaaaattgaatttgctcagaggataggacaccagagagactgcccaaatgcaaagcctcgacccatacttgtgtactttgaaacccctcaacaaagggattctgtcttaaaaaagtcatataaactcaaaggaacaggcattggaatctcaacagatattctaactcatgacatcagagaaagaaaagagaaagggataccatcctcccagacatatgagagcatggctataaagttgtctactccagagccatctgacctcaatagaaacagttacgctgtgctttccaagtcagagct

SEQ ID NO: 254597 - DNA, 391 bp, Homo sapiens
tcagttttactgaaaataaactcttcataggtcataaatttttagaaccggccataataaactaaatatctgtgtacaagtcccaaagcaaagatcgctgcaccggaagcctctagcagtgcttcaaacatgcttgctgctaatacttagaactgccgttatcagagacagagatgggagatgagaaagaaacagattgggagactagaaactgaagaatgccaaggagagaatccagtatgacaaaactgtcatcaatctaccatctgtgtagagtttgggggtttcagagacaacatcataggtcaacttgcttttcaaatgtctgaaattgtgcccccacatgtgtgaattgtggctagacagcatgaatcacggagtgcaatacaaa

SEQ ID NO: 254598 - DNA, 680 bp, Homo sapiens
ccgcacatagaggttaaggaaaggagctataaaaaaacatagtgttggggactgaggtgttctgaataccagagggcttggaatgctgcagctgtatcttagaaatttaaaggacagctccgaggggaaatagaacaaagctatgttcatgatgaatagcattaggaacagcagacacataacaggagagaagcaaagagaaattcaggcaggagtgtgtcatcatacctgtgaataggtcttggtttgtttcaatgctaaagtgaacaagaaatccaggagattgcactttgcagaattagaaattgcagtcggcactatcattgcactttgtgtagaaagtatttcatagtagagtctgtggatggaagggaaggaactgtgttcaaaccgtgttccatcatgtcctcgctgcaagaacttaggcttgttaacgtttctgactcttggtttctgcggtattcaagagaagctgtagccatagataatttatttgcataaatttaaagattatttttcaaagaaagctgtggatcctcggtgtgctttttatgtggtagatatttcttcaatgctggcaccactgagccgggggcttcgggagaaaggcaacagatcctggctctctggctcccagcagggctttctgtacgagggagggtggtgcccaggacccaccc

SEQ ID NO: 254599 - DNA, 375 bp, Homo sapiens
tgattttaagttgaagctagtgcacatttaccattcttaaaatcctagggcccttaagaattgtgctaaattagctgggcacagtgactcatgcctgtcatcccaatgctttaggagaccaaggcagtaggaactctcgggccaggagctcaagatgagcctggcaatgtggtgcaatcccatacaaaatttatctacaaaaaatttaaaaattagccaagcatggtggcatgtgcctgtagttctagcttctcaagaggctgagacaggaggatcacttgagctcaggggttcaaggcttcagtgagccatgattgcaccagtgcactccagcctgggcgacagagcaagactttgtctcttcaacagaaacga

SEQ ID NO: 254600 - DNA, 689 bp, Homo sapiens
ggcacagctagctaatcagagcttaacggagggactttctaatgactagagctgtcaaagctgggctgatggtcactatggacagtggtgggagcttctgtcctgggaggtgccctcagagatgggatatgctattactcaataagtctaccaacggttcctgcctcattagaactcagccagtgcaggagttagacatccatcagactcctgcatgcccagaatgtgtcaagcttgccctgctggactttttactatgggtactctgtttttcttcctagatgtcaacatttagaaatcatagtgttaccagatggtccttgctcctggagctcccaagatggtggtgggccgcttccacaatggcggtgggccgtttccaagatggtggcaagcctcctgatctctgacctggggttcttggcctcacggattccaaggaatggaatcttggtccatgcagtgagtgttatagctctattagaagctgtgggtcacagaagagaaccgtggaacccagtgactgtgttcagctcaattaggacgaacctgcgcacttagcagtgcaggaacaatgggcttttagctcaatcaggaccagcatgtgtgcctcgctggatcaggagcacagcggacaccctgctggatccagagggattgaagtcagtggcaggtctgcgatggcggca

SEQ ID NO: 254601 - DNA, 445 bp, Homo sapiens
tactcgggaggctaaggtgggaggatcgctggagcccaggaatttgaggctgcagtgagctgtgattacaccgttgcactccagcctgggtcacagatcaagaccctgtctcttaaaaataaaagttggagacaagagctggctcacctgaaaggagggattagtaggtaggagggtggatggaggatggatggatgtgtgggtggataggaagatggtattaagttggtgcaaaagtctttgatattactcttaatggctttaataaaaagcttgaaggaagaatgattggttggatagacagagataaatgcatactggaaacaaagataaagataaaacacaagttataccaggccagcaactctattttgttcactgcctttagtcccagcctggcacatagtaggcactcaataaagcctgatttgtagcaaatgcttat

SEQ ID NO: 254602 - DNA, 507 bp, Homo sapiens
aactgtagtcctcaggttgtacattagatctctgggcatatcttacatatctgcaactttataccctttgacctataatctccctattttccccccaacctgtaatcaccattttattatgtttctatgtatttggcttaaaaaaaaaaaaccccacatatgagattatgccatgtgtctttctatgtccacctaatttccttggcataatgtcttccagattcatccatgccaaaagtggtaggatctccctttttaaggcaggataacattcaattgtgtgtataaccctccatttctttatttattcatctgttgatgggacacttgggttgtcttctgtatctttgctattgtgaataaaagcagcaagagtaaaagcaacgtgccacataacaagggagtcttcattagacaatcagctttttcagcagaaagtttgcaggccaggagagatgggtggtgtatttaaagtgctgaaagaattaaaaaacaaaactgaaatta

SEQ ID NO: 254603 - DNA, 631 bp, Homo sapiens
ccactatataaatatatgactgaaaggaacatatgaaatagggataattcttagagagtgggattagaaagagaagtaacaatatggaaatttttctttcataatactttatttttttccagtgaacacatattacttttattttttttttaaacctgaaaaatatcagggcaatataagtggttgttaaaaaacatcaacttttgaagttagatttgaggtcaaaatcaagttctaccatgtactagttttataactttgggtaagtcacttaacattgctgagtctgtgttctcatatgtagaatagggaaaatgaaagtacttattttggccggtcgcggaggctcatgcctgtaatcccagcactttgggaggccaaggcgggtggatcacaaggtcaggagttcaagaccagcctgaccaacatggtgaaactccacctctactaaaaatacaaaaattagcagggtgtggtggcatgcacctgtaatcccagctactcgggaggccagggcaggagaattgcttgaatccaggaggtgaagcttgcagtgagccaagattgcaccactgcactccagcctgggcgacagagggagactccatctcaaaaaaaaaaaaaagtactt

SEQ ID NO: 254604 - DNA, 295 bp, Homo sapiens
gaaaactttaagaggtattatgagtgagctataacctcctctttaataagaagagtcagtaactgttgtctaaagtggttaagttgagaagtaaaagtataagcatataatatagtgttatggatcagaatatctaaagagaaattaaaagaaatttctctttgaagtagaggtaaagagggttggagcgggagacttgcttctcatcacaccttcttcaaaactatgaactgttatcatgtgcatgcattattaatactttagttttaaaaattaaattaattatttcaacaaa

SEQ ID NO: 254605 - DNA, 517 bp, Homo sapiens
aattcccaccactgagaccactgttagtcttcagggggctgcagccatcgcccccaactcctcggaggagcaacgcgcgacaaaatggctggcagccatcttgcggcactacaaaagatgcgcatgcgccagatccagtgagccattcactacgcagactccgacaccaaaccgtatttattgctgcccatagaagataacattcacagccgcttgaccatttaggttacaggaaaaggaaataaatgaggaagtgaaaggaaattttcctcataaaatttttcgaggcgaaaaaagaatggcaagatgtgacctcattttcgccagctatgatacaatcttaaaattgcataatacattacagttttcaagagtcttacgtaactattatatgaaccttatacgaaccattttatcgcaggtatctatgtaaatcctctgagctaatttaaaggctcctgtgttcccactaaacatatacagttttaattcttttaacgtctcctcactgcggcca

SEQ ID NO: 254606 - DNA, 250 bp, Homo sapiens
aggaacctgaagaaatttgagacgagagaacagaagggatttagctagaactggaggggcaggtagagggaacagcaaatagaacaatcctggctgctgattttataaaatgaaacattttatcacagtcctaagagaagcctacatgtctgcttctcagttttaattgtgacatgtgctttagttacctggaaaatcactgccttcttaaaattatattttaaaaagatgccaccaccatctctaccaa

SEQ ID NO: 254607 - DNA, 406 bp, Homo sapiens
cagcatcgatcctgctgcacagagaaatctgtgaacttgggagagggagagtgcagtgggtgggggactttgcattgaactcagtgctgtcctgttacagtggagacctgtcaggattcatcacctgctaactaaagactccctgggtcctgaataaccaacaatgatacccaggtaatatgccatgggctttgggctcttagatacgttggcttcaggtgtgacccagcacattcccagctgtggtggctgtggtgaaagactccttctgtttgagaaaagcagggggaaaattaagggaactcttgcatgtttgatttttcaaatggattcctgcctgtgtgtgaccactcttttctctcaaaaactcatcatgggaacactgcaataaaaccaaagaaccagg

SEQ ID NO: 254608 - DNA, 546 bp, Homo sapiens
acaaatggacttaacagatatatacagaacaactgcaaaatatacattctattcaacagtgcatggaactttctccaagatagaccatatgataggccataaaatgagccttagtgaatttaagaaaattgaattatatcaagcactctgtcagaccacagtggaataaaactggaaatcaactccaaatggaatcttcaaaaccatgcaaatacatggaaattaaataacctgctcctgaatgagcattgtgtcaaaaatgaaatcaagatggaaattatacaattatttgaactgaacaacaataatgacacaacttatcaaaacctctgggatacagcaaaggtggtgctaagaggaaagttcatagccctaaatgcctacatcaaaaagactgaaagagcaaaaaagacaatctacagtcacacctcagggatctagaaacaagaacaaaccaaacccaaacccagcagaagaaaggaaataatcaagatcagagcagaactaaatgaaattgaaacaaaaaaaaaccatacaaaaaaataa

SEQ ID NO: 254609 - DNA, 554 bp, Homo sapiens
gagataaacctggatttagttcaaaattttataaatgtcttaatcttctttgcattgccagcactgagcaaatcctgcatggtgtactagttgtcttagtccattcagactgctgcaacaaaatactatagcctgagtagtttataaacaacagaaatgtatttatcatagttctggaggctgggaagttcaagatcaatgcactggcaaagactgtgtctggtgaggccctgtttcctgcttcatggatagccatcattttgccatgtcctcacatggctgaagggaataacaagttctctagagtctcttatataaaggcactaattctattcatgaggtctctactcccatgacctaattacctcccaaaggccccacctcctaatagcatcaccttgggtgttagaattccaacatataaattttggggggacacaaactttcagactataacactagcagtattttattattgtggttgcttttaatggaaacatgacacctttgataataaaaggttcagtgtgcagttttgaaattttgtgagcaga

SEQ ID NO: 254610 - DNA, 346 bp, Homo sapiens
gacctggattatggctggcattcaataaatagtagctgttaattgatagctaagctagaactctgaagtctaccatggcaacttcttaagtggtctgagaacccagttgtgttctgtggcaaaacacagcttagggatccatacccagccctcctgtcagctgttcaccttccagttcttcagagacatgtgtggcagtgactttggccacatagctggctgtgccctttaaaggcattccttgacacagatatgtggactggtgacgttgctctccagccaggtgttcttcccagcaggctggcctggctgtctcctgcatgcctgtacttgtttgtctccctgc

SEQ ID NO: 254611 - DNA, 366 bp, Homo sapiens
caatcaagatgtagaacatttccatcacccaaaaaatgttctcttataccactttgcagtcagtcctcaccccaagtctgggccatagacaacggctgatatgattattttcactgtagagtagatctgtctttttaaaaattttatataaataaactaatgcaatatgtactcttttatgtcttctttctgagattcatatacatcatgacactccttgggtgtttactcaagagaaatgaaaatatatatccacccaaagatctgtacacagatgttcatagcggtattatttaggatgaccaaaaagtagaaacaacctaaatgtccattagcagttgaatgaataaacaaagtgtgattcat

SEQ ID NO: 254612 - DNA, 236 bp, Homo sapiens
ggagagactgaggctcagagaggtgaggtctgaacttggagctctggactccaaaacccagtttcttttcatggtaccaggctgccaggaggagaaaggatggagcttagattcaagtcttgcaacattcttcttagtccagtattggcttattttgttttatatttttttgagacggagtcttgctctgttacccaggctggagtgcagtggcgtgatttctgctcactgcaacc

SEQ ID NO: 254613 - DNA, 387 bp, Homo sapiens
aggtgtctgagtatctttttgggtttggggctcagtggattccatcaccattatccctccttttcctctttgaaacagaattttctttctgaaaaaccttccggccgggtgcggtggctcacgcctgtaatcccagcactttgggaggctgaggcgggcagcggataacctgaggtcgggagttcgagactagcctgaccaacttggagaaaccccgtctctgctaaaaatacaaaattagccgggcgtggtggcgcattcctgtaatcccagttactcgggaggctgaggcaggagaatcgcttgaacctgggaggcggaggttgcggtgagccgagatcgcgccattgcactccagcctgggcaacaaaaccgaaactccatctc

SEQ ID NO: 254614 - DNA, 395 bp, Homo sapiens
taggggtcccagcagcgctcaaagaagacaaatgtcccgaatgtagtgatggggccagaaacaccaagccttctgaagaggaaagaagtgtatgtaaaatgaacagaatgagtcatgggcagaatttccccacttttagaaatcaaactaaatgtttctgactacagtacagagttctagaccataatccaggagtgttaagaaatgaccctccctaccttaaacacctctgtggtttcaggagcttgttcaagcttaccctagatataaaacacagggaagcccagtccgggggtcacctcttcagctccctgctctccttccctcagtgaataaagcagttggttagatcggcaatctcactgagaattccagtggactagtagtagtatcca

SEQ ID NO: 254615 - DNA, 444 bp, Homo sapiens
ccaagtttccaagaagggaagatggagtggagggcgcccaccctatctccagtggacatcccctgggctactcctctcctgatgagaaaatgctcacttcagccaagtgcagaatggtcccctttgttttcgtgggtatcagtggagaatgagatccttcatatggaatctccctgtgttgctcaggctgatctcgaactcctgagcccaagcatgcatcagcctctcagtagctgtgattacaggcattgagtcaccactcctgagaaataacaggactttggtgctattctccaagctgaaagccatcctcttcggccctgaggacacagctttttctgccataactcactgtctccactggctcaattagccaattagtggcattgtagagggctgagatgttactttttagtttccaataaaattctcaagttggtttca

SEQ ID NO: 254616 - DNA, 828 bp, Homo sapiens
ccaagtttccaagaagggaagatggagtggagggcgcccaccctatctccagtggacatcccctgggctactcctctcctgatgagaaaatgctcacttcagccaagtgcagaatggtcccctttgttttcgtgggtatcagtggagaatgagatccttcatatggaatctccctgtgttgctcaggctgatctcgaactcctgagcccaagcatgcatcagcctctcagtagctgtgattacaggcattgagtcaccactcctgagaaataacaggactttggtgctattctccaagctgaaagccatcctcttcggccctgaggacacagctttttctgccataactcactgtctccactggctcaattagccaattagtggcattgtagagggctgagatgttactttttagtttccaataaaattctcaagttggtttcaattctccttataatgatgataaagtcaaagctcagaggaactgaacgatggccccttaaaatttatattttgaagccctaactcccaatgtgaatgtatttggagattggccctctttaaagaggtaattatggttaaatcaggttacaagggtggggcttaaggcaataagactggtgtgctgaaaaaacggggaagaggctggccgcagtgcctcatggctgtaatctcagcactttgggaatctaaggcaggggtttgagaccagactgggcaacatggtgaaaccctgtctctacaaaaaatttaaaaattagtgtaggggggtgccaggcgtggtggctcatgcctgtaatcccagcactttgggaatccaaggcgggt

SEQ ID NO: 254617 - DNA, 810 bp, Homo sapiens
agacatcagtactggaagttatgccttgccttcttcccagcagaaaagtagaaaagtacaaaaaatctgctcctctgggttgaaacccgggcgccaccaagatgccagcttaccactcttctctcatggatcctgacactgaactcattggaaacatggcactgttacctatcagaagtcaattcaaaggacctgcccccagagagacaaaagatacagatactgtggatgaagccatctattagttcaaggccaatgtcttcttcaaaaactatgaagttaagaatgaagctgacaggaccttgatatacgtatctctgtctacgtttctgagtgtctgaaggaactccagaagtgcaattccaaaagccaaggtgagaaagaaatgtatacactgggaatcactaactttcccattcctggagaacctggttttccacttaatgcaatgtatcccaaacctgcaaacaaacaggaagatgaagtgatgagggcctatttacaacatctaaggcaagagactgggctgagactttgtgagaaagttttcgaccctcagaatgataaacgctgcaagtggtggacttgttttgtgaagagacagttcatgctagagtctttcaagacctggacagtgaaaggagtacgggcagccaccatctccagagccctgggcagcattttccagcaagatatacgaatcttttgcctttatttcataaagttttatacagaagagagaagaccatgtctttacttgaaaaactcttgatcaagaatttgggtgggagaaaagaaagtgggttatca

SEQ ID NO: 254618 - DNA, 146 bp, Homo sapiens
tcccttccttgtacccaactactagcaaaaaggcttggagcatccgggaatggccttgatactgaagtcagcaggcaaaatctactactgcctgagcaccaggccaaggggccaaaaatggtctggagattaccctcttgttacct

SEQ ID NO: 254619 - DNA, 518 bp, Homo sapiens
aactgaacaagaaatcgtgactaagccactgttatataagggttctctgttatttgcagctggtctgaatcataacttaccccatgtttctcaaattaaacaaactgccagttaagtctccatcaagaagttgttgctggtgagcagcacctgattatgatcctctattcacttcaaggccataaaactttggttcctccaacccatctatcttaacaccatcacaggaaggtaaacgtccccaagctaagaaagctgcattctgtacctgtgttggcagcttgagaaaaatcacaggaagtggccagttaaaaatagaactcactgcttggtgctcttctaatctgtgaccctctcccacgtccatggtacttgcccttcgggttctacggctgtctgtaccagcgcttcctagatgtgcgttcttttttccctgatgacagctggctcacctggcacctcagctcatcctgtcacagacttctgttctaataatggatatggacatgtttttatga

SEQ ID NO: 254620 - DNA, 471 bp, Homo sapiens
gatgaaatttgcatatgcactagattagagcgcagcgttgcatcaatatcatgtttcctgattttgattattgcattgtgtgtatatgagagaacgtcttaggaattacacacttgagtacttaggtgtaaaggagactgatgttgaatgttgaagacaacattcattttctcagggttccaaaataaatacgcatcaagagacagaatgaagattataaaacaaacggggcaaaatgtagtcaggtgaatctggatataggataaaaaaattccttatataatttttgcaacttttcaataagctagaaatcataataaaaagttaccaaaaatcactaacaaaattaatatcataaaacatgttattagagttgtcgacgaaaaaaatctaacttttgtcagatacagtgagttctgcttcaaagctttagtttttgacctctttgttcttcattctcaagatcagctt

SEQ ID NO: 254621 - DNA, 416 bp, Homo sapiens
gcctcaacaatggtattaggtgtttgtcacgcttactcctttcttggctctctttcctctgtttggtttatgttcagtatgaacagttacagaatagatgctgagaggcccctgttgtcctcaatttttggcagagagcatgatgggaaagtaaaatacaccttttccagcaggtcaagcaaaagtccctaggagcactgtgactggtctggcttgggtcatgtgctcatccctggaccagtaaacaccccggggatgatataatctggccaggattgaggccacagtgcagatgcaggtcacacctcctgagccactgagactaacacaagttattttagagaaggggttgagtgggtctccaaagcatattggccaccatggccttcatgaccctggctgtgtccctgctccct

SEQ ID NO: 254622 - DNA, 569 bp, Homo sapiens
ttaaatacagccttttcatcttaaaaattacattaagtttctggaattctgatatacccaattccaagtaagcatgctttgagctgaattgagcctttaggagttggaatatttgggacctagtccccaaccaagtcttcaggacttctcaaataattaattcaggccatacaagagatttggtgaatgatacagagcagtagaagtcccataaatgggggaaagagaagacataggggttacaggagaggagagaagggtattgttagggaagtacatgaagtcataaagtagcacttactgaagacctgggattttctaattaagcccaagcaattctcctgaattcagttcaatttatgggttcgtatgctaaagaaaaaaaatatcaattcatcttgatactattttgatcattatttccacaggaaagatttccaacattcttattcagattgaatttcatagtaaaatacctacttcaaaattaatgcccatatgatttttgagtaatttttactacttatacttaaggaatatttttatattgttttcattgaaatggaagt

SEQ ID NO: 254623 - DNA, 659 bp, Homo sapiens
ataaacaatagaaatttatttattacagttctggaggctggcaagttcaagatcaaggtgccagaagatttggtgtttggtgagaacccactttctggttcctagaaataacaatttctccctgagtcctcacatagtagtggggatgaagaagttctttgggatctcttttataagggcactaatcccttttataagggctccaccttaatgatctagtcacttcccagacgccccacttccaaataccatcacattggggattaggtttcaacatacaaattttaggaggacacagacattcagactgtagcaatcccttgtgcccatttgtttttcctttaggatggtcattttctgctgctatggcccagtttgtgccttcaaggactgactgtgtaaaaaagagcccagaaactctttgaactgacttacagtagcttcttcagcagtcagctgtaacgatggctggagcacctggtacctgagtgagggccaagaatgggctctgcatgtgccctccctcaacaattgcccaccacccattctcacacaaatgcagtgggggatgaacctgtagggatgggtaatcagcctgaaaggaacaattttgcatatgtgtaaaatctgaaaaaataaattattattcatgggaaaca

SEQ ID NO: 254624 - DNA, 432 bp, Homo sapiens
ttaaatacagccttttcatcttaaaaattacattaagtttctggaattctgatatacccaattccaattctggaggctggcaagttcaagatcaaggtgccagaagatttggtgtttggatggtcattttctgctgctatggcccagtttgtgccttcaaggactgactgtgtaaaaaagagcccagaaactctttgaactgacttacagtagcttcttcagcagtcagctgtaacgatggctggagcacctggtacctgagtgagggccaagaatgggctctgcatgtgccctccctcaacaattgcccaccacccattctcacacaaatgcagtgggggatgaacctgtagggatgggtaatcagcctgaaaggaacaattttgcatatgtgtaaaatctgaaaaaataaattattattcatgggaaaca

SEQ ID NO: 254625 - DNA, 852 bp, Homo sapiens
gaaaattataagaaattcaagttccagtatccatcaagtgtactggaacatacccaagttcattgatttataaatatactatatatgataatgctttggctctgtgtccccacccaaatctcatcttgaattgtactcccataattctcatgtgttgtaggagtgaccccctgggagataatctgaatcatgggggcagtttcccacatgctgttcttgtggtagtaagtctcacgagatctgatggttttatcaggggtttccgcttttgcatccttctcattttctcttgtcactgccatgcaagaagtgtctttcacctttcgccatgattctgaagccttcccagccatgtggaagtgtaagtccaattaaacttcttttttttttcccagtctcaggtacgtctttatcagcagcgtgaaaaaggactaatacaatatactatatagtttatggctgtttttcatactacaatggcagagttgagtactttaggcctgcaaaacctaaaacaaataccacctgccctttacagaaaatgtttgccaacccttagtttaggatctattatttatctctgccctccagtgaccctgccatctaatcatttggcctcttaactctctctttaccctgagcaaatccgtaaaataaaaggtatacctttccccaagtactattaaagaaaagaagaggagaggggaaaagggaaaaaggggaaaagaaagtgaggaaagggagaggatgcaaaagaaaaagaaggaaagaaaggaatttccctgatgagatcccttagtaataccttatcagctgttcataatcaaaattcctagaagaggaacaacagct

SEQ ID NO: 254626 - DNA, 363 bp, Homo sapiens
taagaaaatgatccatttgtgaaaataattcccacaacactgaactctttgcctcaagtgttatataaaagtcaactcactggtcaacaagaaaaaaagtcagatacaactaccaatcagcctttctgatttgttgaaattaatttcagaattggattttctaagtggggtcgtctgccgaaaagacatgctaaaaacctaaaatctaattcgtgttaaaattagctgaaaatctgaagcattgtttataggcttgacgctctttcttctcccacccccaccccaacacatacaaacgtttcccaccaatccttgaactgcaaaaaacagcttggtaaaaatcggcatcatagcaaagatgca

SEQ ID NO: 254627 - DNA, 478 bp, Homo sapiens
agtaaggacactttgctcaggcatgtactattttgcatagaaaaatactaaccaaattcctcaagggtgaggaaggttaataatttgaaactggacctgctggggttcctgatgctgttgagttcactgcctaccagatcactaaccttgccttttcagttaagtgttgctgtacggacagaaggtggagaaaccacccctgcaggttgcctgctgcctgatggtcccagctctccatcccaggtatttgtttggtgatgaaaagctgagctcatgaagaagtggaaagtgctggaagaaagaattaacacatccttcctagggaggccaaatgttagatcaatcatgtcttccagccactacagtgattgcagggaatgagatgttaatttatgcccagtgccatcaggagcctgggaagtgagttctatgatctgtctgattcttcagccaatgtagctgcctctgctccctctga

SEQ ID NO: 254628 - DNA, 2976 bp, Homo sapiens
  misc_feature (28)..(28): n is a, c, g, or t
  misc_feature (149)..(149): n is a, c, g, or t
  misc_feature (181)..(181): n is a, c, g, or t
gcttcccagtgagtttctttcaaaaacntccacccatgtctccgctgaactaaagagaaaggaatttgtccagagcatcaggaaagcagccagaggaagtccccagggaccaggcgtggggccctaagccacactgcagctgcagggangagagtgagcccagcttgtgctgctgcggggnggggaggactcctgaggggacaagggggaatcagggagcagagagactaagggggagggggaggaggagactcagggacagagggtgaggctcagtgggagagaaaggggagacagggtatgggggtaaccaggaggcagagaaagtggagaagagcggagggagttgagggggaggcaggaaccaaggtgtagccaagggcaggtgagggaggagggactctgagcctgggccaggggagtcagaaggccggagccctgaagggccccacagccctccccggccctgctgtctccatacaattctgtggccaaggagtgaaccttgcatgatttcagccaccccacccagacaccccccaccctggaacaaaggggaagtggccccatgggcctgcctgcttccagctcagggctgggcttggtcaccaggcaggcacttgttgtagcaacagtccctggggacccatcctggggaacaggactgctagcagtaaagatgggggagccagggcccccatcccctccagcccccaaggctgccccaggcctcattgacagcttctctgagatgaacaactaccggcgggccatgcagaagatggcagaggacatcctgtctctgcggagacaggccagcatcctggaaggagagaaccgcatactgaggagccgcctggcccagcaggaggaggaagaggggcagggcaaagccaatgaggcccagaacacggtgtccatgaagcagaaactgctgctgagtgagctggatatgaagaaactgagggacagggtgcagcatttgcagaatgagctgattcgaaagaatgatcgagagaaggagctgctccttctgtatcaggcccagcagccacaggccgctctgctgaagcagtaccagggcaagctgcagaagatgaaggcgctggaggagactgtgcggcaccaagagaaggtgatcgagaagatggagcgggtgctggaggacaggctgcaggacaggagcaagccccctcctctgaacaggcagcagggaaagccctacacgggcttccctatgctctcagcctctggccttcccttgggttctatgggagagaacctgccggttgaactttactcggtgctgctggcagaaaacgcgaagctgcggacggagctggataagaaccgccaccagcaggcccccatcattctgcagcaacaggccctgccggatctcctctctggtacttcagacaagttcaacctcctggccaagctggaacacgctcagagccggatcctgtccctggaaagccagttagaggactcagctcgacgctggggacgagagaagcaggatctggccacacggctgcaggagcaagaaaaaggtttcaggcacccctcgaactccatcatcatagaacagcctgtgagtgacccccctggagtagctcccaggggttcaggtggtggagcaggaagccaccgcacccccaaagtcactgggccctgagaaaagccattgtggagccaactccagggctgggggtcaggagtcctaggctcccattcctgctccattaccaaccgaaggctcggtcttaattcccccacctgtctaaggggaacagaaaacccctgccaaaactaccctttcccccatggggtgctatgaaactcaaggagatgactgtggatgaggggtccatgcaggcatctccaggatgccctgacactgtgctttaggactggctgcgctcatgggcagagtagcttgtggccctacccccctgaatccatagagcctaagattctcaaattagcacacccttctcagatggccacgatgtaggctccactttgccaacttcccgagaacaaacaggcctgctcacaactgcccctcaagttcaaccccgggaccgcccagccccgcaaagcaaagaccctgacttctcctgctcttgagccagctgtgctttgcccgtggccagaagctcagcagcggctcctgggaaaggcctggaaaggatgagggaacaggcaaggaacaaaggcaacctttgcacactcacctgagccctggggacccttggagaaattaggtgtcacctgctgtggcaaaatgggtttagaaatctttgccaggtcatggcccactggattctggatactctgaggcctggtttgtcaggcaatatgcccttgagcaggtcaccccctgggaatggggggtactcatgcaccccgctttgcacaccacagagtgccctcacccactccatggacctcaagcagccctcagagctggagcccctgctgcccagctcagactttaagctcaacaagcccttgagcccccagaaggagaccgctaactttcagcagacctgagccccagagcaggcctccttccctgtgtgctggggagtctcatcaccgccccctaaaaatgacgttattaaatgttgtagctctgtgagcattttcctctttcctggagcagggcagcctgggggccctgcttcctcctcctagacctcactctgggcctgggcctgggtcttctgctgcagccttacagcctcccgcctgccccaggagccagcatctttggaaagccaagggccacagtggacccaggagggtggagagaagaggccttccaaagcaggggccagggagacgggccccttccagacccggagaagaagcaaggccaccagagaccagctctgttgggaaatacgagggaggcttgtccttttcatctgccccaaaacatctatcatgtctgatattccttct

SEQ ID NO: 254629 - DNA, 935 bp, Homo sapiens
  misc_feature (28)..(28): n is a, c, g, or t
  misc_feature (149)..(149): n is a, c, g, or t
  misc_feature (181)..(181): n is a, c, g, or t
  misc_feature (930)..(931): n is a, c, g, or t
gcttcccagtgagtttctttcaaaaacntccacccatgtctccgctgaactaaagagaaaggaatttgtccagagcatcaggaaagcagccagaggaagtccccagggaccaggcgtggggccctaagccacactgcagctgcagggangagagtgagcccagcttgtgctgctgcggggnggggaggactcctgaggggacaagggggaatcagggagcagagagactaagggggagggggaggaggagactcagggacagagggtgaggctcagtgggagagaaaggggagacagggtatgggggtaaccaggaggcagagaaagtggagaagagcggagggagttgagggggaggcaggaaccaaggtgtagccaagggcaggtgagggaggagggactctgagcctgggccaggggagtcagaaggccggagccctgaagggccccacagccctccccggccctgctgtctccatacaattctgtggccaaggagtgaaccttgcatgatttcagccaccccacccagacaccccccaccctggaacaaaggggaagtggccccatgggcctgcctgcttccagctcagggctgggcttggtcaccaggcaggcacttgttgtagcaacagtccctggggacccatcctggggaacaggactgctagcagtaaagatgggggagccagggcccccatcccctccagcccccaaggctgccccaggcctcattgacagcttctctgtaagtcgccccctcgcccactggttctgggaagatgggttggctcgcctagcagcaggtgtgttggggtgtgttgcccagcaaccagtagaggtgttcccagagcctcttaagtgggaggcagggtggagaggaccagggctttggcccttagatgcccgtggtcacaggaatcttttgcnnggcc

SEQ ID NO: 254630 - DNA, 879 bp, Homo sapiens
tatgttgttgaaatgtccatctgtgtcttggtcaggctgcctgactgtttggccccctcaccctcaccccgccacccctgaggtctcgggaaggtgtcaagcccacatggcccagagctttgctttcttcctggacagcaggctcaggccctggttgtcctggccatcagggattagccctgctgcccatggtcctccaattgtccctctctgtgtctgcagttagaggactcagctcgacgctggggacgagagaagcaggatctggccacacggctgcaggagcaagaaaaaggtttcaggcacccctcgaactccatcatcatagaacagcctagtgccctcacccactccatggacctcaagcagccctcagagctggagcccctgctgcccagctcagactttaagctcaacaagcccttgagcccccagaaggagaccgctaactttcagcagacctgagccccagagcaggcctccttccctgtgtgctggggagtctcatcaccgccccctaaaaatgacgttattaaatgttgtagctctgtgagcattttcctctttcctggagcagggcagcctgggggccctgcttcctcctcctagacctcactctgggcctgggcctgggtcttctgctgcagccttacagcctcccgcctgccccaggagccagcatctttggaaagccaagggccacagtggacccaggagggtggagagaagaggccttccaaagcaggggccagggagacgggccccttccagacccggagaagaagcaaggccaccagagaccagctctgttgggaaatacgagggaggcttgtccttttcatctgccccaaaacatctatcatgtctgatattccttct

SEQ ID NO: 254631 - DNA, 1635 bp, Homo sapiens
acaagagacgcatggcccaggccactcagagtgcacagagaccctgcccgcacaggatctcctctctggtacttcagacaagttcaacctcctggccaagctggaacacgctcagagccggatcctgtccctggaaagccagttagaggactcagctcgacgctggggacgagagaagcaggatctggccacacggctgcaggagcaagaaaaaggtttcaggcacccctcgaactccatcatcatagaacagcctgtgagtgacccccctggagtagctcccaggggttcaggtggtggagcaggaagccaccgcacccccaaagtcactgggccctgagaaaagccattgtggagccaactccagggctgggggtcaggagtcctaggctcccattcctgctccattaccaaccgaaggctcggtcttaattcccccacctgtctaaggggaacagaaaacccctgccaaaactaccctttcccccatggggtgctatgaaactcaaggagatgactgtggatgaggggtccatgcaggcatctccaggatgccctgacactgtgctttaggactggctgcgctcatgggcagagtagcttgtggccctacccccctgaatccatagagcctaagattctcaaattagcacacccttctcagatggccacgatgtaggctccactttgccaacttcccgagaacaaacaggcctgctcacaactgcccctcaagttcaaccccgggaccgcccagccccgcaaagcaaagaccctgacttctcctgctcttgagccagctgtgctttgcccgtggccagaagctcagcagcggctcctgggaaaggcctggaaaggatgagggaacaggcaaggaacaaaggcaacctttgcacactcacctgagccctggggacccttggagaaattaggtgtcacctgctgtggcaaaatgggtttagaaatctttgccaggtcatggcccactggattctggatactctgaggcctggtttgtcaggcaatatgcccttgagcaggtcaccccctgggaatggggggtactcatgcaccccgctttgcacaccacagagtgccctcacccactccatggacctcaagcagccctcagagctggagcccctgctgcccagctcagactttaagctcaacaagcccttgagcccccagaaggagaccgctaactttcagcagacctgagccccagagcaggcctccttccctgtgtgctggggagtctcatcaccgccccctaaaaatgacgttattaaatgttgtagctctgtgagcattttcctctttcctggagcagggcagcctgggggccctgcttcctcctcctagacctcactctgggcctgggcctgggtcttctgctgcagccttacagcctcccgcctgccccaggagccagcatctttggaaagccaagggccacagtggacccaggagggtggagagaagaggccttccaaagcaggggccagggagacgggccccttccagacccggagaagaagcaaggccaccagagaccagctctgttgggaaatacgagggaggcttgtccttttcatctgccccaaaacatctatcatgtctgatattccttct

SEQ ID NO: 254632 - DNA, 424 bp, Homo sapiens
cccaaagtactgggattacaggcatgaaccatcgagtctggcccaccctgcggtatcctcttgatgagaagaaatttctaccagacattggtgctgagctaagctctgtggcctttcctggcatgctgatattctcttatcctatgactactgtatcttttgtaactgatcatgtttcccactttgttcatgagaaagctcagaaccaaacttgttcagggactttgagcataagtttccaggtacaagaattttccctggctttatttgatttttctacccgtgttttccctccgctctatccccttactatttttatcccactatattgtgtgcattttgctaagctacctcaaatccttttttgaaacacaaaggagcataaataaatcaataaatagatcctgtgtttgtaaatatggca

SEQ ID NO: 254633 - DNA, 758 bp, Homo sapiens
gacacatacacacacacacacacacacacacacacacacacacacacacgaagagagagagagaatttagagcactgatcttttctctcttagactaattattttaacattattttcagccactttattaattgtggggttaagggtaggatagatctaatgcccatttcacatgtgttgcaacatcagagattatggttttcattaaaaacatcagagctaaattccttttcaaaaaagacattgttactgttagtaccttggggaatgttgtagtcttatgaatgctgatacgtttatttgagccaattgaatattatctctaatataaactataatttactgtgtgattcctcttcctgttttacctatatatactcaaagtgaatgattgtgtttagtgaacatttctttaggtaataaaaattaatttcatttaagaaagaagtacaaaatagttattagagcaaactttggtatttgtaattttgaagttacatacttttgaaataaacttgggctttcatgccatgttgggtttgaggaagatagcaaatgtataaattgagctctctagtcataaccttgctatatgtattcctgctcattaaaatactttgcgccagcaaaaatgatttccaacatatgtgttttggatgtaattaagtaactgtataaaactaagtatgttttttctcctttccccagtgactggaaaactttcatacttttaaggtaataataaaataataatcttt

SEQ ID NO: 254634 - DNA, 280 bp, Homo sapiens
tttaaggtgctccagctacaaatgcattttttcatcatttgtcatccacaaaacagtgaccagacagaacacatccagaagatatttgaaagacaccttcagagccctctccccagaagtagagtggtgaaaaatgacagacggtgatggagtaagaaaatctcaccctgcagcacttacattatgaccttataatattttggtttgtgtttaattatcttcttatgccaataatcttatgcatcttatgttatttcagataataaacttagacaaaaga

SEQ ID NO: 254635 - DNA, 213 bp, Homo sapiens
aattttattgataattacatattaaacattccttgtttacttcagccagatgaacaaggtcaacattaacagttacatgtggcatagtgccacggttattacttgagactgtcactatgacagttactgctgttactacttgagaccgtcattatgagactgagtgaagggggacaaatgtagaaatgaaaaattaagacaaaagaaactttt

SEQ ID NO: 254636 - DNA, 1555 bp, Homo sapiens
cggcgatggccccactcggatacttcttactcctctgcagcctgaagcaggctctgggcagctacccgatctggtggtcgctggctgttgggccacagtattcctccctgggctcgcagcccatcctgtgtgccagcatcccgggcctggtccccaagcagctccgcttctgcaggaactacgtggagatcatgcccagcgtggccgagggcatcaagattggcatccaggagtgccagcaccagttccgcggccgccggtggaactgcaccaccgtccacgacagcctggccatcttcgggcccgtgctggacaaagctaccagggagtcggcctttgtccacgccattgcctcagccggtgtggcctttgcagtgacacgctcatgtgcagaaggcacggccgccatctgtggctgcagcagccgccaccagggctcaccaggcaagggctggaagtggggtggctgtagcgaggacatcgagtttggtgggatggtgtctcgggagttcgccgacgcccgggagaaccggccagatgcccgctcagccatgaaccgccacaacaacgaggctgggcgccaggccatcgccagccacatgcacctcaagtgcaagtgccacgggctgtcgggcagctgcgaggtgaagacatgctggtggtcgcaacccgacttccgcgccatcggtgacttcctcaaggacaagtacgacagcgcctcggagatggtggtggagaagcaccgggagtcccgcggctgggtggagaccctgcggccgcgctacacctacttcaaggtgcccacggagcgcgacctggtctactacgaggcctcgcccaacttctgcgagcccaaccctgagacgggctccttcggcacgcgcgaccgcacctgcaacgtcagctcgcacggcatcgacggctgcgacctgctgtgctgcggccgcggccacaacgcgcgagcggagcggcgccgggagaagtgccgctgcgtgttccactggtgctgctacgtcagctgccaggagtgcacgcgcgtctacgacgtgcacacctgcaagtaggcaccggccgcggctccccctggacggggcgggccctgcctgagggtgggcttttccctgggtggagcaggactcccacctaaacggggcagtactcctccctgggggcgggactcctccctgggggtggggctcctacctgggggcagaactcctacctgaaggcagggctcctccctggagctagtgtctcctctctggtggctgggctgctcctgaatgaggcggagctccaggatggggaggggctctgcgttggcttctccctggggacggggctcccctggacagaggcggggctacagattgggcggggcttctcttgggtgggacagggcttctcctgcgggggcgaggcccctcccagtaagggcgtggctctgggtgggcggggcactaggtaggcttctacctgcaggcggggctcctcctgaaggaggcggggctctaggatggggcacggctctggggtaggctgctccctgagggcg

SEQ ID NO: 254637 - DNA, 350 bp, Homo sapiens
agattattgttgatatgttaagatttttctcctgatttttaaagccatattttatcatctgtctcttattaaatatccctgatgccacaaggtctgctcacctgcatacctcttttggtgtatgcccccacctctttttggtcatcttaatcttaattgttgaagtgctttcctttgtgaaatatttcatcctgaaaaatcttgtcttctttccaaagcccttaattgtgcgagtttaagtgaaggaaatagttctttttcaagaaaaaaatatttattttttaaatgaaatcccacattttagtagataatatgaatcacattattgtgaaaaatgttatgcatgaaaa

SEQ ID NO: 254638 - DNA, 439 bp, Homo sapiens
taactgaattgctgttactaaggcaggtactcatcctactctgaaaacggagacggccctgcaggagacccaggaggtggggctgtagcctcccatgcagaggtctcttgctccctcagctggtggagggtgacagccgaatgtgaagaaacccagtcaaccacttcaggagagggagaacaatttttgctgctgtaaagcaggaaacccattgtccaattttagattggcatgagagtgttatagtagaaaagaggctgcttacatcgaagtaaatgcaccttgagcataaattgtaaaaataagaaaatgtaactgctaatttctcctgagagggttccaactagtctttaacacaatacttgtaaataacagtgggatagattccagggctctaatgtgtagttggtcatgcaattaaagcactccgtttctcata

SEQ ID NO: 254639 - DNA, 311 bp, Homo sapiens
caggagtgaagcagagatacatattttttattaaaaggggccaagaaaggatccatgaaaagaatagaatgccagccgggtgcagtggctcactcctgtaatcccagcactttgggaggccgatgcaggtggatcacctgagaccagcctggccaacatggtgaaaccccatggtggcgggcgcctataataccagctactcaggaggctgaggcagaagaatcgcttcaatctgggaggcagaggttgcagtgagctgagattgtgcccctgccctccaacctgggtgacaagagtgagactccatctta

SEQ ID NO: 254640 - DNA, 600 bp, Homo sapiens
gaaatggaatccagtagaaatgatgccaaagatgatcttggtaatttaaatgtgcctgattcatctctccctgctgaaaatgaagcaactggccctggctttattcctccacctcttgctccagtcagaggaccattgtttccagtggatacaaggggcccgttcatgagaagaggacctcctttccccccacctcctccaggaaccatgtttggagcttctcgaggttattttccaccaagggatttcccaggtccaccacatgctccatttgcaatgagaaacatctatccaccgaggggtttacctccttaccttcatccgagacctggattttaccccaaccccacattctgaaggtagaagcgagttcccttcaggattgattccgccttcaaaggagcctgctactggacatccagaaccacagcaagaaacctgacaatattgttgctttcttcaaaagtaattttgactgatctcattttcagtttaagtaactgctgttacttaagtgattgcacttttctcaaattgaagtttaatggaataatagttctcaggatagtatttcgtaaataaagatggtttgaatatgaa

SEQ ID NO: 254641 - DNA, 323 bp, Homo sapiens
gcaccctggagactaattaagcattctttagaatgtttaaccattctaagttaaacaatagaagtactatagtagtcatgataaaaggaaacctaataccaataaatgccctgagtttttctaaatgcagaataacataggaccaggcatggtggctcatacctgtaatcccagcactttgggaggccaaggcaggtggcttacttgagcccaggtgtttgagaccagcctgggcaacacggcaaaacctcatctctataaaaaataaaaaatattagctgggcgtggtggtgcacacctgtagtcccagctactcaggaggc

SEQ ID NO: 254642 - DNA, 376 bp, Homo sapiens
ggagggcgggggggctgcgacagccgcgccggccccagcccggcctgaaactttggcagcggatccccgggctcggggctgccgggggccgggggcaggggaaggaagccctcgcccttgaccttgatccccggatgtgggcgagcctaagggccaaagtcggcgccccgctcacctgtgcccgccgcgcgtctgggctgggaggcgtgggggatgggctcgcgctggctgccctgccgggagctgtggaagggctggccaggagggaggaagaggtattttttcctcctttctagttaccattttgcagctcggctatggaagaaatccagggcttgaggcagcacgatttaaagctgcagtgcttacaccccat

SEQ ID NO: 254643 - DNA, 200 bp, Homo sapiens
tatttctccagctcgttcgcctgagcaaagacagtggcttctgatagcagcagcttctcctggagatcttgatagcgttgtttgcattgtgacagctgggagcgcaggtgctgggtggaccctggtgggctaaacgctgattgggcccagtgtcacaaggctgggactggttctccaactgtgaaaggggccaagacaag

SEQ ID NO: 254644 - DNA, 444 bp, Homo sapiens
ctctgaatatattggttgacctctacgcatcagtttacttcaatatagtgagacctggccaggcgtggtggctcatgcctgtaatcctagaactttgggaggtcaaggtgggtgaatcacttaaagccagaagttcgagaccaccctggccaacatggtgaaatcccatctttactaaaaatacaaaaattagctggggatggtggcacgcacctgtaatcacagctactcaggagactgaggcaggagaatcgcttgaatctaggaggtggtggttgcagtgagccgagatcacaccactgcactccagcctgggcgacacagccagactttgtctcaaaaaaaaaacaaaaacaaaaacaacaacaaaaaatgcatatatatatatatatatatataaatagatatagtgatatagtgataccccatctctgcaaaaaattt

SEQ ID NO: 254645 - DNA, 708 bp, Homo sapiens
ctcctgcttctctttcttctgtctctgtcttttctacctatctcattcaacaatatggaacaagagttaggttctgtgaatatgcaaagttgaatcagaagctgttcctccccataaagctcacagtctaatcctagaaacttagaatagaaactggccattcatgaggttaagtgctatgaggtaaggcatgtgctttgtgcatagagttggaggtgaggttagggaagtagtctagtgggatgatgcttgacttgggttttgaagaatgaataataatttcctcaacgcatgggatacggtagctgaattgtagggaatacgtactgatctattggtttttttttttttttttttttttttcttaaccccaggtaatggtctgatggtaagttctgattttctcaatagttattatttgtacaattttaactggcagctccttatatctggaaatacagaggcatgtgactatagcaagaaagcccattggcatcatattaaatgagtgcatttagacctgggcttcacatatgattatccagtgagtgaaaattttacagaaatggctttctcaacacatagcttgtcattgttttcatcattattggaaaatttgacataatttgtaatctgagaaagaaaaccaaaatttagcttgataatcagcatcaagctgcaataattgtctaaaaatccccagaattt

SEQ ID NO: 254646 - DNA, 570 bp, Homo sapiens
tcattattttgtatgtggatgtccagttgttccagtaccatttcttggaaaaaaaaaactaggctttctccagttgcctttgctcctttgtcaaaatcagttgactgtatttgtatgggtctatttctgggctctctcttccattccagtgatcttttttgtctattctttcaccaatagaatcattcctaggtatccttgggcaattggttccaggaccccgcaaggtaccaaaatccacagatgctcaagttcctgatataaaacggcagagaatttgcctataacctatgcccatcctcctatgagtttaaatcatctctagattacttataattcctagtacaatgtaaaagctatgtaacagttgctatgctgtttatttttttattgttgtattattgtttttcaaatatttttgatccatggctggttgcatccacggatgcagaagctgtgggtatggagggctggctatatacttaacactgctgacctgtacacttaaaaacatttaagacagcacattttatgtgtattttatcaaaattaaaagaattttttttaatc

SEQ ID NO: 254647 - DNA, 434 bp, Homo sapiens
ggggttatgagcaggcaacactgcctgctcagtaggagctgacaatcaactaggatagccccaatttcctgttgcaatatttaactcacttttgtgtttacatttgataaacacaagtttagagattcaagaattagaacatctcttgtctcactccagctacaaatattgattaaaatgggaaagattgtttattgtaaattgcatttatcttcatgatgtgggaacaatgtaggttttcaatgaatgcttctttgtgtgtgaaagatatgtgaataaaccaatttcaatttttttttaatttttaattattaattttaaattgacaataataattgcataatatttatgtggtacaatgatgtcttaatgtatgtgtgcattgtggaatgagcagaccaggctaattaacatattcatcacctcacaagctt

SEQ ID NO: 254648 - DNA, 480 bp, Homo sapiens
ccaagagttctgaccacagcctgaacacgtctttttcttgctcacaggctttcatcactttgaattaccttcatcatgactctttatagtggctgtacaataacctgtggaagaggtgggctgtaatgtgcttagctcagacacttcccccgctgtcagcttttcccttattgtaagtaagctgttgtgagcaccttcacatgcattgcctttccctgttttttttttctgtcttactccgtctcaaagaaaaaaaaaaaagaagaaattcaactgaaatttagtcaagaatgaggacaagagagacaagtgcaggctgacagagactaaagctgcacacccaccagaactccccctgctccccacccatggcaggacagggcacacccctgtcctgctggggacactggcagccaagaccacagaaagtgaaagccagcacctcctgctgcaggaatcctgcttggaaagaagtgagtt

SEQ ID NO: 254649 - DNA, 642 bp, Homo sapiens
attaagatccagataaatggaaagacatccatgttcatggattggaagactgaatattggtaagatggcaatgctgcccaaattagtctacatattcaacaattcctatcaaaatcctagctgtattttttgcagaaattgacaaactggtaaaattggtagggaaacgcaggggacccagaatagccaaaaaaccttggaaaagaacaaagttggaagacgtaccaatttcaaaaagtgctaccaagctacaataagacagtgtaggcatatggatagacatatcgatcagaggaatggaactgaacatccagaaataaacccatacatttctggtcaacttgttttcaacaaggatgccaataccatcaatagagaaggagtggtcttttcaacaaacggtgctgggacaactaactggtagctacgtgcacagcaaaaggatccctaccttcctaccacattacaaattctaactcaaaatggatcatagacctcaatataagagtttaaactcttagaagaaaacagaagtaaatctttgtgatgttgggcttaggaatggtttcttagacataataccaaaagcacaagcaacaaaggcaaacagtagataaatgggacttcatcaaaattaacttt

SEQ ID NO: 254650 - DNA, 432 bp, Homo sapiens
aatgcagagtgtgttttatttgaaaggttttctttccagaagaaagattctatggatgtgcagttgcttctagaaaaacagaaatggagtcccagtagaatagcagaatttctgaatgggcatccatgccagtaagcaacatgtaaaacaacatcacaggacctaatgtcataggctttatatcttcaaggatagctgccttgatgcatcaacttgattttatcaagaacatgaacaatgattattctgaaaggaaaacaccaaactcatggaaaataaaaatgcaagaatttgaacattactgccttttcttgcaagatatactttgcccaaatgattatgcagctcagtcaatatttgagaacacctggttgttctgataaggaatatattttccccatcattatgtgtcctttcacagattggggttca

SEQ ID NO: 254651 - DNA, 506 bp, Homo sapiens
atttgtagttaaaagtcttccctaatgctacataatctcttccagaaaacagaacaagaagaaatactcctctactcatgaggccacatttccttgattccaaaatgaaatactgttctaaaaaggaaaactataggccactattccttaagaatacatgtatacacaaaaatcttcaaaaaaaattaggaaatcagatgtatcagtgatatataaaaataatactatttctcagaaaattgaaactagaattactatttgagccaactctcaggaaaaaaaaaaaaaaaaaaagctagagaggcagcaatgctgttctgataatccccagatttttccaagtatatatgttcccagggatattgtccagattccatatgtaagcgtttatacacctgatttagaaagaaacataaattttccttttcattaaggaagcagatcctccacaaacagatcttgaggggagaggggaggaaaaagacctaccacctctagtttgtttg

SEQ ID NO: 254652 - DNA, 1416 bp, Homo sapiens
tgcctgtgatcccagcactttgggaggccagtgcagaaggattgcttgagcccaggagtttgaaactagcctgggcaacatagcaagagaccctgtctctatttaaaagattttatatatatatatgatcatatataatatatataagatatatatgatcatatatataatatatatatatatgatcatatatatcttatatatatatatgcagtttggaattctatttgtcttgccttatttgctttttaaaaatttctaccttagttttttcctggtttactttgagtgtttttttgtagtcggaggagattgttggtgcggctgggtgtaggtatgaggcagaggaggaagagtaatttattccatctactgagcctttcatttactttctgttttagcagtagagtgggatgtcggaagcttttgttgggtgagagtcaatctgtcagggtaaatcttaaaaagctggatttgtggtttagttactagttactgtgtctccagtggagacaaagattagtttttaagatttagccttaatggatgattcacaaattgcaatgcagagtattgaagttaagtccaaggtcaagcacacaagtgggtaaaactgaacatatgaaatgggtgtgtggctggcacccacctctgacctttactgaaataaatgaggaagacggtgctgtaagtggaatgccacggaccaggagttaagaccagagtcctctgctaggccctgcatctgaagtctgcagagcatggcttttcattggctcagtgaggagttgagtcctggttcagaaaaagttaccgaggtctgtaaaagtcagtaggataccggaacaagaaagagtgggagagtgtacagttcccagcgaacattgccagtggaggctaattttcaccagtgaagggcgattttgatagaaaagcacagtgtctcaactacttgtggtttttgattctgaaagaggaggctttggcaggagcaataatacacgtggcctaccacctgtttggctttttccccacaggttgcaagctgcagggagggccttgctaattctagtacctccatccccgaatcgtctaaatgtattttacccaggacctgtcatggtttatctgagtgaccagtttcctttcctctcttgcttatttatcatgttcatatttatatttttcataatggggcctatttatatattttgaagtagttctagtgattttaagatccagcaaaacttcaaggtcatctggattttggtgttctatttaagttttctaacttgatacagtctttttttttttttttgtattttgtatgtttttctacaaaatgtgagagagttaagcatgtataattacatatgactgctgttttcactttgaaattttaaatcctgcttggga

SEQ ID NO: 254653 - DNA, 392 bp, Homo sapiens
gattttattttatatataagaaaagtataggtaaaaagtgtttttactgtattaaaaatatatataaattgcatcagctaaaccattaacaaatattcctggcattttgtaatattcaaatgctacattaaattagtagactatttcaactttaaatgattttaaattgaatattatgaaattacatggcactatgtatcatggtaaggtaggatttcttggttttgataactttagggatcatttgcaattcagattttaacatgaaatgatgtgagaagcaaagcttccttttttaattgtcatttctcccctttctaaatgtcatatgtcatattgtaacattcattcattaccacatttttaagaatttgttttgataccattattaa

SEQ ID NO: 254654 - DNA, 713 bp, Homo sapiens
aaaaaaaaaaaaaaaaaaaaaaagagaaaaaagaaaaaaacaagaaatatcttgccttaggtaattatttgggttattcagagaaatgaatttaggaacaacattcaaataaaaagctggaccctggtttcctagacataggatatcagggaaactaccttttctctttctctgggtattttctaggatatagccctgtatttctgtgctggagggtaaaaagatgtgcaaaagagctctgtgggtggttgggccccttggggccaaatgtatttctgtgtaggagtaagactgacagaattaactgtgcaagcacttactaatttgctgtaagtgaacctgtacccatggcatcatttataatccagagctccttgaacagaagcaactcagaagaaaagttcctaaaaactaaggcaaggaatttttgtgtgcccaattactgtggcatattatgctttcttatagcagtggttgggagaagcaagaattcagctattctcaagcataggacttagcttttacttggcattattgagattggttaaaaactattttatggggaccaaatgtgaattgcatagattgggcctcaggtcacatagagacaaattcagtatattcaccagtcattctttttttttttcattcaccagtaaactaacctgtgcttcttcacatagtgtctcagggttcttttcaaagtagagagt

SEQ ID NO: 254655 - DNA, 539 bp, Homo sapiens
aagcgtttttgagagggtatatttaaaggtataggtatatattactagtgtgtaaaataaactttatgagacagtactagattattttccagtgtattgttcctatttatgttctcaccagtagtgcgtaggagttcttgctgtttcagatccccaccagcacttggctaggtatttaatttcttaatttttaacaatttggtgtgtagtatattctctggtcttcctttgtcttaccctgattattaatgaggtcttacatcttttttccccccacatttatggccatggatgtttctcttttgtgaaattctgttaaatgcctatttgtgttttttgcttgataaaatgtgagcttattatttaactgattttgtagttttaaaaaattgctgggggcggtggcttgcgtctgtaatctcagctttttgggaggctgaaggaggaggattgcttgtggggcccaggagtttgaggctgcagtgagctatgatcgttccattgcactctagcttggtgacagagcaagactttgtctg

SEQ ID NO: 254656 - DNA, 239 bp, Homo sapiens
ctgatgccagatccctgctctgggggcgctcatctgtggcctcaagagatgtatggcttctgtgcctagtgcagagttgggattgattgctcagtttaaatggaaaattgttccaaaagcagcagctgcctctccagccctgaatgagaagaatgtatctttctctgagtccaaaaatatatatatatatatattatgtagcacatactatgttcagggcatcctttgaggggaaggtt

SEQ ID NO: 254657 - DNA, 582 bp, Homo sapiens
ctcagagaagatgtcaatcctaattattttcatctctacccctgcctcaacgtgcatcccaatttcatttctatgcctagacttttttgcaagatttaataaaaatggaattttactcctttctacattattccccgcctccccacaaaaaatagctgtggccctcaactagtactaccaattgtgtccaagatgcttgttatcctagagtgacttattgattacaaagtcactttctgatgtttattattattatttataaataggagcaatatggtaatcttgagttgaagaaaattgttgctgctgtttggacgacaccagggatgaggattgacagggaagaaccacactcaccctagatgcctcagatgccagtctccatgaagccactcatgaaaactctccctcctcgacatgctcagaggggctttaggggccagtgaccagtggcttcttatccagcaggacagatgcagccacatgttcacaaacaatacagagtaggaggtagtccacgtccaagaggaaggactcacaacaaatggagaggccttacagggaaagggcacagcacatggc

SEQ ID NO: 254658 - DNA, 489 bp, Homo sapiens
agtgagttcgggaagccagtgcccgaatgctcaaccttgctgtatcagggagggccggagaggggagctcaagaagaggacgtcctatcgaggtggcagggattttctgaaggagggcgtattttgctgggtgtcatggcacgtgcgtgtggttccggctacttgggaggctgaggtgggagaatcacttgagcccaggaggagaagactgcagtaaactatgattgcattattgcattccagcctggacaacagcaagatcttgtctcaaaaaataaataaaaatttagaaataaagttttattggcacacagccatgctcattcatttgcacattgtctatggctgcttttgcacaagaatagcagtgttgaatagcaatcgaggctgtatggcctgcaaagccgaaaatattaactatctggtcctttaagaaaaagtttgcctgagcccaggactgcgagaccagcctgggcaacacagtgagac

SEQ ID NO: 254659 - DNA, 357 bp, Homo sapiens
  misc_feature (25)..(25): n is a, c, g, or t
  misc_feature (33)..(33): n is a, c, g, or t
  misc_feature (35)..(35): n is a, c, g, or t
  misc_feature (62)..(62): n is a, c, g, or t
tcaaatcccccgggaaggtgcaacnacatgtgnantaagtccatgtcttcccctccatcccncaaaaatctctgggtgcgagggaagcagggaagaaataagtggcaaatgttggcttgggaacggcctcgccctgagtaacaggaagaaaggcgttggctggcctccctggagccctcttctcagctgcactgccagtggctgagcaggctggccggaccgtgcactttactttatcagcaggtatttactaggtgccaattatgtgtcaagcttggtgctaggtgctgggtgcagggggtagagttaaaggacacaattccttctcttaggaagtttccttgaaggaagttgagt

SEQ ID NO: 254660 - DNA, 275 bp, Homo sapiens
tacaaaatgaaatagcctttttcatcctgtgtccttaagtgactatgtggaaccatgtccctgccaacctggaatgaacatgcagcagagagagaagtcaatgtttttttgtgtccactgaaatttgggggttgctttattactgcagcataccctggcctatcctgaataatatagtagtcaaagaggaacaattttttttctctttacattttgtgtccatattagagattactatttcaaaaactgaaagataaaaccttgaaaatcaactg

SEQ ID NO: 254661 - DNA, 356 bp, Homo sapiens
tactgctatgttaagcaactatgaaattttttaaactttttcatcagagtaccagtgctccaaatggtcactttgatcagcgttctttagtttaaaagagtgcagtgatcaaaattagatccccatacttgaataaacttgaccacttatttaatgagaatgtgatttataaattgttatgtgctgcataaatatggtttatgttaatgagtttatgcctgatgtccattgaggtgtataaaaacatttctttagctttctaggttatattttttgctcattccagtataaattttacttaaaaaattaaatcctgggattctagcaataaattacttacccaatagtaagggcat

SEQ ID NO: 254662 - DNA, 445 bp, Homo sapiens
ttccaaaaactgacctgactgtcccaggatgccacaacatgccagctgaggagtggcgtttgtctccaggatacccgaaggggtattgtgcactgaactggtggcctcacatccactcccctgcctctgcaggcagtgggttagtccagaacccccatgcggggtctccaagaggaacatcagcagagctgaaggcaaaaatctgaagagatgcagaggatgtgggtcctcccagagatggagggggccacagggttttatctgggagccccgggacaggagtcccaagtttcttcgtgcataacttgattcacaggccactgtctgaatttattaggactcattcagtttctacagtagaaactgatttaaagcgatttaagcagaaatgggaatttgttggctcagggtaatgctagctgctctaataaacaaatacaaacaa

SEQ ID NO: 254663 - DNA, 222 bp, Homo sapiens
aaaccatcattctcagcaaactatcgcaaggacaaaagccaaacaccgcatgttctcactcaaagaagagaaccatcttaaaaccatgaggtgacatccatgaggacaaagacttcctgcttgttcttgagccactgagggtacctctgagttgctgtaccacccagaaaatgctatccctgaacttcttgttgactgagacaaataaaccccttatttaaa

SEQ ID NO: 254664 - DNA, 111 bp, Homo sapiens
gaggcagtgtcttactttatctcccaggctggagtgctggagtgcaatcacggccccctacaaccttgaactcctgggcttgaatgatcctcccccttcagcctcttgagc

SEQ ID NO: 254665 - DNA, 393 bp, Homo sapiens
aacactcaaccctagacgctgccgtggggtcagagcccatgctcccaacgacctgcccgtctgcatgctcctcccctaggggtttgagctgctgcagcagagcgccaaagaagcaagccacacgccatcacacgccctgccagggggataagggaacttttcctgtttcaactgggacctcgcccaggatcccggaagggattccagcatttgtcccagcatgttttatgcagaaagaagtgatcaaggaaagtgtccaagacatggtaagccaaatgtagaatgaggcagtcatagtgagaggattgtccactctgttatgcatgattgagagtcatatttattcctaaactacattcttttattattactgttaacttttctctgaagtcc

SEQ ID NO: 254666 - DNA, 422 bp, Homo sapiens
caaaacttcaagaaacagataattttcatttgatatataccattccagagtacaaaattggaatgtatccaaccaattttactaggccagcataaccttcatccccaaacaggcaaggacaacaccaaaagagaaaattataagctgtcttcccataaggatacaggtgcatatttgggaggccaaggcgggtggatcagctgacgtcaggagttcaagaccagcttgacccaacgtggtgaaacctcgtctccactaaaacacaaaaatgggctggacatggtggtgggtgcctgtaatcccagctactccggaggctgaggcaggagaattccttgaatcgggaggcggaggttgcagtgagccgagattgtgccattgcactccagcctgggcaacaagagtgaaactccatcttaaaa

SEQ ID NO: 254667 - DNA, 706 bp, Homo sapiens
aagataacaacggatttcttgtccaaaacagaagacaatgaagcaacatctttaaagtaatgaaacaaatgctttaaaaatatgcttcacaaaaacaagccatgggccagatatggccttataggcagtagtttgccacctccggaatagagtgtcaatttcttcagatggctataaactattaaaatcttcaccatcctatttgttttaaataaaaacaaaagcacaatttttaaaatacattaccaagtttttgatattttagtttaagagccattatgacttcctttgagacttttatctgttaacaccaatgcaaggaactgttttgaattagtgttttcctcatcaaatgaaacggtttgcactgtcctgctttaaatttagcttgcgtctgcctaccttactccattctgttatactgggtgttgtctatgacaacaaatgtggtgtcaaagcactaagtacactacttagctatttccaattgctttgaagttgctacatgctgagatcaatcattggattttcatgacagatgaaatatttttaatgtaaataaaattcaatcttaagtgatttagtgtggcagtccccaaccttttggacaccagggacaggttctgtggaaaacaatttttccatggacccggggtggggatggttttgggatgaaactgtttcacctcaaatcatcaggcattag

SEQ ID NO: 254668 - DNA, 187 bp, Homo sapiens
tttttgccttcctttggattattttatttcatattctccttctgttatcttgttagttttacatactcttattcttttacaaaataccgtagaaactgaaacatgtacccctgatttattaatttctaatataaatcagtgcctccaccattttcactttcaagacaattcaaggacttcagaatac

SEQ ID NO: 254669 - DNA, 448 bp, Homo sapiens
aggcctggggtatatttctgttggacacatctgtccttcggatggaggagttacctccaaatggaaaggcagcaagtgcctggactcagctggagctggagtcttccctgtgttcttggattgaaatcttttgagactgattttatttaatctttgtagtagaggagactctgggccaggtgcagtggctcattcctataatcgcagcactttgggaggccaaggagggtggaccacttgagcccaggcattcaagaccagcctgggcaacatggcaaaaccccatctctacaaaaaattagctgggcgtggtggcgcacatttatagtcccagctactcaggaggcggaggtgggaggattacttgagcctaggaggtcgaggctgcagtgagccatgatcacaccactgctctccagcctggacaacagagtgagaccttgtctca

SEQ ID NO: 254670 - DNA, 5954 bp, Homo sapiens
gcggccgccctctaccctcaatccccactggagattcctcaccccgggaccgtccgcgcgggcgtggtcgggctccgcgcctcgcgcagcggggtggcacaggcggccagggagggcccacgcacccggcgcgagctagaagcctccggtcggcctgcagtgcccaagtcccatggcgagggcagcccgagtggccgtcgcggctgtaggtccgcatgccgggcaccgcaccaggcgtctagcaggtaggggcagggaaggtagggctgcgctggcggccggtgcccagttaccggcgatcggggacgctcggagacacctggtctcccggaagcgcccttcggaaatgggattcgacccggcttgcgggcggcgggtgtttagaagaagaggctgcgggcaagcagtgccccctctctggttccccggactcctcttagccccctcgtggcctgatgggcggccgggacggaggtgggctgtaagcccgccggcacccaccgtgtcctgtggaaggcttggagacctgagccaggctctactcggttagatgcgagtgagacaggcgacggagttcgtctttaagcctcccttgcctcagcaaggagagggagcgttttccttattttaatgaccgcctttccctcccttggggtcccagttcaccctgaacctttccacagccttaaaagcccgctctccctagcggagtgctgcggcagttcttcagaagacacggggccaaatgaaacttacttaaagtggttatcgcgtttcaggctgatttgttcctagtaactacgttttggaaagcagctgtggactctcaaggacaggcaggaacgaagacctccttagggtccgagtgtcgcttcccacagttagattacccatgaatttccttgattctgtaggtctcaagaatctcatgagcccccaaccacctccacctttctctctgaatctctctcctgtctctgaaattcttcgcaaaaataatctgtcctcaaggaatattgaaagcgtcatcaatgtcttgaaggaaattactgtatctgagaaccgaaactagtatttgatgtttcactttcaaatacatttttttttaataaaaaggatacctttaagtaaaacactaccactgctatttacgtttaagtagatttttaattcatattaagcagtagtgtgctttttggaaagatgatggactgggactcataatccctgggttttgtttctatttgtagtttcttgagtaagtcagcactttccctggttaagaaatgacctcatctgtaaaatgaacctgacttctaaggtcttgttcggctctcacgtctttacttcagttaaatattgacataatacatgtttgttgaatgaatgactgaatgaataaatcttattgctctaggaactatgtgcttttaacctttggaaatacatagaaacaaatgcctcctttgctaggaaagggagcttaattgtgctcccactgcatcagactgcttccatctaatgatgcaattgcaatacagggtgggaggccatccacagggctgtccctctgcctcagagctcatctcaagtttgcccttctctatggagaaggaaaatttgagtctccagaaggaaagtattttgctaaacgccaagcaagaattagagggtaagggggcttctgatgcctggtccaaggctcttagaagaagaagaaggagaaagggagaaagctcaagaaaataatgcacagatcaccagctacaggtggccctagtgcctaagtttataaactacccccgcccttcccggagagaaaggagcttgtataaagggaacaatcctagaacctaggcttaacaaggaaggagaaggggagaagcaagggtcattctgttctcaagtggtttgttgtatctgtgtgtttatctattccacatttggccaggcagtgggactccgggaaagcaagctgaagtgttttgtgggacaggcacatcatttggtcaactccttttccctggttgattccctccttttcctgacccatctcccccttcctaccagaggcaaccaaggcctttccaggcaacagcagacattatttaccccttgcgaattgattccacaatggaagactcttgggtccaaggagctgtaagataattaaggagaaaacagataatgaaggcaaaaatccaacacctggccattagcaatgctctggaaaggctatttaaacccgcattggatatcagagctgggagggcccatacagtctacctacctgccttttgcagatggacacaggaagatccagaagctagtggcacatctagcaacagagccagatcagaacccaggtaagctcggtctcaggccaggattccttttccatctcctctctttctcaggagccagtcttcctgcaccagcttcctcttttctcctagctcccctgcccctgcagcctggagggctcaaccacccttcctttggctcccactcccagctgaggctcagcctggcagtgcttttctgacacccacttcttttctccttcctccaggcaagaagtgcacgtttaaacctcattatctggctaagtataaacctcagggagaaaaggggtttgtttttgtttttctcagtctataagctaacattgagctgactttcagagtccaggcaaatatgtttggtgggtcaccacccagaaaggaattctcttagcactgaatcagggctctgtatgtaaagtataaatcccctaagagaactcctcaccctcctacacagacacattggtgcatgcacacacaccccactctctgcacagagagcatctgagctaggagctggcaagtggggcaccagtcctgtagcaaagaggcacaccacacacacacacacacacacacacacacactctctctctctctctctctcactcacacacacacacacacacacacacacacgcttctcccttgcttgggaatctgggagaagaaccccccacccccacccctgccctccataggcattgtgtaggtgagagaaagagggaggagtgagagagaacacacagaggggcccaaggaggtgccaggccattagcagggcccctccttgagaaacccctctgcaggagcttctcctgccgccagccaggttggaggtggagtagttcagaatcaactgacgcagccgggaattgagctttgcaaagccacttgcaaggaagggaagcatctgcccaaccctcccccaccgcgcgccctggatcctctgcctgccccctcccccgtgacgtcaccctagtcctgtcccggggagcctgcaaagcctctcagattcaaactgctagacgcactgctgccaccgccaccgaattggaaacgcgcgcccaggctccgtcgtcgccttcgcccgccgaccgggccagccggctctccgacctccctacagaatcgcaccccagtccctccctggcagctcggcttccctcagctccaactcttctcttccgctcctgcctcctgtcggatttttaatttctgcgcacccccagtcaaattaaatcaaccaacaaaaagcagggcatcccccctggaagcagcgtcttattttaccttgttctcccacttcctgaagatgctaaactcctggtggactgcagaggagagggattcagtcttctcctgatgtgtgagtaacccccacctcgcactgtctttcccatctctatctctcctctacacctgccgccagccccctgattcctgattttcccaccccctttttgcgctttttttttttttcctaaagcgattgcgatttctgctgggagctcaagacgggcgagctgcccgagatctcttcgagataccccaggggaggaggagatgggcaggatttagtaggacaactcggttactaatgacttggcggctggctgcgaccccccgggaaatcaggtgcaagcatgtgtgttcccggggcgcgtgtgtgggtggcctcgggatgggggaatagggagcggagaaaagaaaccgctttggaaaatgcaatgatttcattctgccgtgttgctaaccccctcattctccctcgctcccactccgcctccttgctttaccatttttaatcgggcttccttgtttctttcttccctgcacccgcttcttccccctgcccccacctaaggtttgcctgtaggtacctgagttgacaccgaaggtgcctaaagatgctgagcggcgtttggttcctcagtgtgttaaccgtggccgggatcttacagacagagagtcgcaaaactgccaaagacatttgcaagatccgctgtctgtgcgaagaaaaggaaaacgtactgaatatcaactgtgagaacaaaggatttacaacagttagcctgctccagcccccccagtatcgaatctatcagctttttctcaatggaaacctcttgacaagactgtatccaaacgaatttgtcaattactccaacgcggtgactcttcacctaggtaacaacgggttacaggagatccgaacgggggcattcagtggcctgaaaactctcaaaagactgcatctcaacaacaacaagcttgagatattgagggaggacaccttcctaggcctggagagcctggagtatctccaggccgactacaattacatcagtgccatcgaggctggggcattcagcaaacttaacaagctcaaagtgctcatcctgaatgacaaccttctgctttcactgcccagcaatgtgttccgctttgtcctgctgacccacttagacctcagggggaataggctaaaagtaatgccttttgctggcgtccttgaacatattggagggatcatggagattcagctggaggaaaatccatggaattgcacttgtgacttacttcctctcaaggcctggctagacaccataactgtttttgtgggagagattgtctgtgagactccctttaggttgcatgggaaagacgtgacccagctgaccaggcaagacctctgtcccagaaaaagtgccagtgattccagtcagaggggcagccatgctgacacccacgtccaaaggctgtcacctacaatgaatcctgctctcaacccaaccagggctccgaaagccagccggccgcccaaaatgagaaatcgtccaactcctcgagtgactgtgtcaaaggacaggcaaagttttggacccatcatggtgtaccagaccaagtctcctgtgcctctcacctgtcccagcagctgtgtctgcacctctcagagctcagacaatggtctgaatgtaaactgccaagaaaggaagttcactaatatctctgacctgcagcccaaaccgaccagtccaaagaaactctacctaacagggaactatcttcaaactgtctataagaatgacctcttagaatacagttctttggacttactgcacttaggaaacaacaggattgcagtcattcaggaaggtgcctttacaaacctgaccagtttacgcagactttatctgaatggcaattaccttgaagtgctgtacccttctatgtttgatggactgcagagcttgcaatatctctatttagagtataatgtcattaaggaaattaagcctctgacctttgatgctttgattaacctacagctactgtttctgaacaacaaccttcttcggtccttacctgataatatatttggggggacggccctaaccaggctgaatctgagaaacaaccatttttctcacctgcccgtgaaaggggttctggatcagctcccggctttcatccagatagatctgcaggagaacccctgggactgtacctgtgacatcatggggctgaaagactggacagaacatgccaattcccctgtcatcattaatgaggtgacttgcgaatctcctgctaagcatgcagggg

SEQ ID NO: 254671 - DNA, 382 bp, Homo sapiens
acctgttttgaccccttatctttggaatgctgattaacatgaagcaataattactattaatatattagtctttcaatattgctgagactattcataagactgaaaaccctttaaaaagctcccacgacggccgggcgcggtggctcacgcctgtaatcccagcactttgggaggccgaggcgggcggatcacgaggtcaggagatcgagaccacggtgaaaccccgtctctactaaaaatacaaaaaattagccgggcgcagtggcgggcgcctgtagtcccagctactcgggaggctgaggcaggagaatggcgtgaacccggaaggcggagcttgcagtgagcggagatcgcgccacagcactcccgcctgggcgacaga

SEQ ID NO: 254672 - DNA, 424 bp, Homo sapiens
taggaaaagaactgggtagtgaggtttctggttttcctccaagatggagaagagtggagggctggggagcatgagtcacaatgaagttgaactatcaacagaccacccagaaacaaaacctcccatatattaatgaaaaataaaaaaagcaaacagcaattgataaacaaatgtatttaagttataccaagggcaagattgctctgtcaaaaagcatttgataatcagttaattggtgagtgtctgctatgcagaattagaggcagttatttttttgtttgtttgtttttgttttagattatttcttgctcaaaactcactcaggttcctgggctataatacttgagccagacagagcagctttgatctcactggcagtttgtttagaagcctgagatctggagtggctttctaaaatcttcag

SEQ ID NO: 254673 - DNA, 249 bp, Homo sapiens
gcccccgaatgtgcacgctgcttgtgcctctgctgcctgcatgacagcctcgccgtcacgtagcgctggaccgcaggtgttctgcaccagaccctctttcagagaggaaatgcaattagggctgtacagttggcagacttcatctccatttcggccttgggagagggatcaaagggcagcaggcagggctgtgtgtgcatgtgcatgtacatgtgaatgactgtgtgtcttgggttaacccctgcgggc

SEQ ID NO: 254674 - DNA, 414 bp, Homo sapiens
cattttcatcagcatactcaatctcctaacttaatttttttttctactgcccccacttccaccactggctactactccatttctttactcctcaccatggccaaagtcctccagagttatccactgcctataactcacctattcctaaaatccattccaatcaggatgtctccatcccacagctgaaactttcttgtccaggtcaccaacgacctctactctgctaagtacaattgtcaattctcagaccttatgtaattttcagatccaatccattagccaattctcttggttttcagttggatttttaaaagaatcatatttttgttactattattttgggatttttaaaaatttaactctttaatccatctagaacttactttacactttgtcctaacaatatgtatttta

SEQ ID NO: 254675 - DNA, 457 bp, Homo sapiens
ctggagcgcaatggtgcagtcttggctcactgcaatctccgcctcctaggttcaagtgattctcctgcctcggcctcccgagtagctgggactacaggcatgcaccaccatgcctaatttttatatttttagtagagacggggtttcaccacgttcgccaggctagtctcgaactcctgaccccaggtgatctgcctgcctcggctgggattacaggcgtgagccactgcgcccagctgtgttttgcttttgtaaaccctgacgagcgcctccacgcagaggggccatttgttcccttccagactccctttgaggacttctaggctggccgcccaggggcagttaagcgacaccctcaggacagctgctgggctaaggcccaactcccccgaatcccgggatctgctcctcctcttcctgccttccttaccctgatacatttccccaccccgccctg

SEQ ID NO: 254676 - DNA, 384 bp, Homo sapiens
acaaacagctaacatgacgcagcataagacaaagaaagggcccttcctaggtcgaagaaacatgggcccaggctaagggaaagccagttcaaaaggcagcagacaatgccaagaaacattagcaaagtggccgggagcggtggctcaggcttgtaatcccagcactttgagaggctgaggcgggctgatcacgaggtcaagagattgagaccatcctggccaacatggtgaaaccctgtctctactaaaaatacaaaaattacctgggcgtggtggcgcccgcctatagtcccagctacttgggaggctgaggcaggagaatcacttgaacccgggaggcagaggttgcagtgagccaattgagccgagatcgcgctactgcac

SEQ ID NO: 254677 - DNA, 587 bp, Homo sapiens
  misc_feature (426)..(426): n is a, c, g, or t
aaagataaagagagagagaaagaaaaagaaagagaaagaaagaaagaaaggaaagaaagaaaggcaagcaagcaagctacataccttcctcacaatttgcccacttggaaattccttgtgggctcaagatctttaccctaaaatggttctgttgaattttatcctgacagtgtaaattgatagcttatctaaacagttgcaggacaaaggacaaaaccgaaagtcatccctctgctcacttaagacaaatgcacatctgaatgcttcacctgatgtaaaagtgtgattcactgagctacatgaaagcatgagtgactattattcctctacccaccacccccccaaccccccctccctgccaacatgtaaattgtgtattcagtgaaaggctgatcaaacacaaaaaagaatgaaacaatttgtctnttatctacccacaactttaaaagatgtattcctttttccccaatatccaccctttccctttaaatattgaagccctcaaaataatctttggagaaaggcacagacatgtttgcttggtgtacatatttaaccttggcaaaataaacattctaaattcattg

SEQ ID NO: 254678 - DNA, 455 bp, Homo sapiens
ctatatgaattcagtgctattatgtcattttatagatgaggaaatggaaacaagcttcatttgcttacctgcagagaaatgactctcagtaagtggtggaagtggactcatgtgtgtctgtctcaaaatcctactttcttgccacaccacactcctacctgaaaatttttgatgagccataaaaaaagggatgaggccgggtgcggtggctcacgcctgtaataccagcactttgggagaccgaagtgggcagatcacgaggttaggagatcgagaccatcctggctaacacggtgaaaccccgtctctactaaaaatacaaaaaattagccgggggtggtggcaggtgcctgtagtcccagctactcaggagactgaggcaggagaatggggtgaacccgagaggcggagcttgcagttagccgagatcgcgccgctgcactccaggctggatg

SEQ ID NO: 254679 - DNA, 279 bp, Homo sapiens
ctgcaacaaaccaggttgatttattacattttctagttagattttgttgactgttcagttattctagtcatgaataaatttttatcatttttccccataacatatgttgaagcagaagtctcatctgctagaagcaacatttaaagtgcttgcataacaatattgttgatacagaagattttttgtatccaaacaaagaagttaactactgtgcttcatttatcttcatctgtctgaagtaccaagaaaagagatgtggaaaaataatgataggtaagc

SEQ ID NO: 254680 - DNA, 342 bp, Homo sapiens
gtctcgaactcctgacctcgggtgatcgcccgcctaggcctcccaaagtgctgggattgcaggtgtgagccaccacactgggcatctacatcattcttaatggctgcataatgttccaccaaatggatgttttgcaattttaacccttgttggtgaacatttaggccatttgcaatttatgtgccttaggcttggtctgcattttgtattatctccttaaaactggtttctagcagaaatgccttgcttgcttctttcattttatagcaaggttaagaaaacaagtgccaaataaggagagaggaagaaagttataaaaataagtcaaatcaagaacagttg

SEQ ID NO: 254681 - DNA, 440 bp, Homo sapiens
cagagatcatgtttttcagggggcaatagcagatgaataaagaacctgtgtaatttagggaggtgtcacatatagcatgctatttcaacaatgtcctggcaactaaaaacggtgtggtggtgaaggtgtctaagaaggtatatagcagaacaaatgacacataaagctgttttgggtccccccccgttaagggaatgtaaaggatctttcttacttacactgtacaaagcagaagagactttgcaaactggacacaacgcagcaaaaattcgacagtggttattgttgggtcagagaattacaaggctgtttgttgatatacttcatgcttttttagtgttttcaagtttcttgtaactaacatgaattactattacataattattttgaagatgcttccgttttgaaatatgatatattaaattttccagtatataaaa

SEQ ID NO: 254682 - DNA, 219 bp, Homo sapiens
aaaatttccaaaataagatataagaatggagattaaacacattaaaaggttcttagtaccattattcatctgggcaatgcaaactaaaagtacaatgagataccacaaccctcacatgctagaatttcaaaagttaaaaaatgtaaacaaggcaaggatgctcactctcactacacttattcaacgtagtactgaaattccttgccatggcaataaggt

SEQ ID NO: 254683 - DNA, 454 bp, Homo sapiens
aaacaatcttcactaattgagacataaacatgtccaaagcctcatctacattttgtaactttccctgcatagctggggcactttgttggataaacatcgtattagctaactttaaattttctgaggcttctgagtcaatatccatttattgtctgaaagcttcaaagacttgttctaaaaattccaaaggcacactcattaggcttctgcttgatctcctggaccttactgaggccgctttccttgggcactcccttgcagaggctggccaaaatgcagttttgatagtgttcgaggttagatctatctccagtgtttatattccatcccaggacagaggtgggaactgcaatctgagcagctgcccttactggattactgggagagtcagtgtgaataagatcagccttttccttagctttttctaaaaccattctttgcttctctgaactca

SEQ ID NO: 254684 - DNA, 707 bp, Homo sapiens
ccaaacccttgggccctcagggctgctcatctgccgccggctgccctacggcctgggtcccgaagcctgcgccttgggcgatgccgaagctaaacatgcccatgggcgccccgcctctctacaggtcttgcactgccctgcacctgcgcccctaggccacctcagtccaggcgaagccctgagccgggaccagcctttggtcagaatgctgctcatgacgcggctcgggcccagcaggcagtccgggagcaccggggcaggtgcaaattccacgttggaaaagtttggctgcaccatgcttgcgaagctgcagctgaacgcgcccaccagggcataagcgcgaaggagggatcgtaggtgtcaacccccgcgggccgcggcggcctcggggggacacctgcacgccagccgaagagcgcaaagccagagagtgcactggtccaccacagagcgcagcaccgtgccagggcgcagagcccacgcacgcccggtcggcgtcgcagcaccaggagcacaggctacccgggccactagcctccaggaacacgcagtctcggcgcccgggacgctctggggcaaagtggggcaccgtgtggagaccactccagcgaccctggggcggcggtcgtccaaacgcgtggccacaggccttgcttctcgcttgcagacaactgaggccagccagcagcgcgacaggatgggcggcc

SEQ ID NO: 254685 - DNA, 390 bp, Homo sapiens
cagaagaggaatgctggaaaaatctggtttatgaaaacagaaatcaaaccaagttactaaccaacctccccgtcccctccaggcacacaaaaacatttgcctttgtactctgccaatgcttgatttaattataatacacactcaagtggctgtaaaaaaacccaacagaacagaaaccatttaacatctgaatagtgatttatgaacagatttcctctgacaaatggggccagctattcttaaggcttgccaaatagctgttagatgtctaaatttttgtatgtgcctgcgtttgtatgtggttacactgtaaagtaatgacagactgaggctttgatttcagaacttcagatgtatcaaaaatacagatttttaatatttgattttaaa

SEQ ID NO: 254686 - DNA, 472 bp, Homo sapiens
gcttggggcatggtgccctgaccctcggctcacgtctgcccagatccttacagctgatggaaccctttgctccaagagacgaggttggcacaccgtggtctcaataaatgtttgtcgagtaaacagatgaagatgtccttcgatcttcacaacagttttgagaagcaaaatgaaaaaggactctcccttgacccaatagaaagggaagtttggactcacctcaaggtgctgtcactagccatgtgttccagagcagcaacataacttctcaaagcctctgtcacttcatctgtaaagcaggactttgtcactattgctaggttataggactatcctgaagagctgctgagacaacatacgggggaaacatttctataaattattttttgatgagggaattgaggtttataggggttaagtgacttgcccacagtcaatcagtaaattgtgaagccaaaacttaaactcggga

SEQ ID NO: 254687 - DNA, 363 bp, Homo sapiens
  misc_feature (59)..(59): n is a, c, g, or t
  misc_feature (128)..(128): n is a, c, g, or t
  misc_feature (188)..(188): n is a, c, g, or t
aacacctcaagctttgtgaaccaggcccaagactttgaattgtgttttaggtacctaantggcaagccactcgaaggtattaaacatcatctatttttcttattaaaaagatacttttgggtgagtcntagaggaaagggttataatgggacaaagttataggaaggacatccattaggaaattgcantagaatttaggcaagagttactggtagagaaatggacgcatttggaaagttttgtttgttagttccagtcaacatgatttgttggtggattggatgttggcagtgaggaaacaagaagactcaaggatgacttgtatacctttgaccagagcaactaagtgggtagtgtatgggc

SEQ ID NO: 254688 - DNA, 358 bp, Homo sapiens
gtgttcactaccctaataagacctcagcttccctcgggaggggacataacaatataggaagagtgaaccacacacctatcaaggggcacaagaaactttaatagtggaggaaagtttggactcggaaactcaagaacaatatttggcatgtcaaggagaatatcatgtatgtccttagcataatgtgcttgattttactactctctcaccctgaagccccttcatttgtctggactgctaaaaactagagaaactggctcacgcctgtcatcccagcactttgggaggccgaggcaggcggatcacctgaggtcaggagtttgagaccagcctgaccaacatggtgaaacccctacta

SEQ ID NO: 254689 - DNA, 430 bp, Homo sapiens
tcttcacatggcggcagcaagtagaagtacagagcaacagggggaaaagccccttataaaaacatcagatctcaggagaactcactatcatgagaaccatgagaaaagcatgagggtaactgccccatgattaaattattagtacctcccaccaagtccctcccattacacatagagattatgggaattacaattcaagaccagatttgggtgggacacagccaaaccatatcactgccgttattcagagattccttggaaacgagaattcatgagtctcctatcagccagtatagacagtaaaatcatgctttcaggactttcttagactcttttttgaatcagcatttattcgaatgcacatgaatacattcctcagtaggactaactttattctctttggaggttgtttttatgccctggttaaaaa

SEQ ID NO: 254690 - DNA, 4675 bp, Homo sapiens
  misc_feature (1)..(1): n is a, c, g, or t
  misc_feature (10)..(11): n is a, c, g, or t
  misc_feature (49)..(49): n is a, c, g, or t
  misc_feature (290)..(290): n is a, c, g, or t
  misc_feature (296)..(297): n is a, c, g, or t
  misc_feature (1223)..(1223): n is a, c, g, or t
  misc_feature (3129)..(3129): n is a, c, g, or t
  misc_feature (3229)..(3230): n is a, c, g, or t
  misc_feature (3537)..(3538): n is a, c, g, or t
  misc_feature (3999)..(3999): n is a, c, g, or t
  misc_feature (4479)..(4479): n is a, c, g, or t
ncgagccctnngcagcgcggcggagagccctcaaggcgagcagcgcgcncgcggctgccgcgggactgctgcgggaggcgggcagcgggggccgcgagcgggcggactggcggcggcggcagctgcgcaaagtgcggagtgtggagctggaccagctgcctgagcagccgctcttccttgccgcctcaccgccggcctcctcgacttccccgtcgccggagcccgcggacgcagcggggagtgggaccggcttccagcctgtggcggtgccgccgccccacggagccgcnagccgnngcggcgcccaccttaccgagtcggtggcggcgccggacagcggcgcctcgagtcccgcagcggccgagcccggggagaagcgggcgcccgccgccgagccgtctcctgcagcggcccccgccggtcgtgagatggagaataaagaaactctcaaagggttgcacaagatggatgatcgtccagaggaacgaatgatcagggagaaactgaaggcaacctgtatgccagcctggaagcacgaatggttggaaaggagaaataggcgagggcctgtggtggtaaaaccaatcccagttaaaggagatggatctgaaatgaatcacttagcagctgagtctccaggagaggtccaggcaagtgcggcttcaccagcttccaaaggccgacgcagtccttctcctggcaactccccatcaggtcgcacagtgaaatcagaatctccaggagtaaggagaaaaagagtttccccagtgccttttcagagtggcagaatcacaccaccccgaagagccccttcaccagatggcttctcaccatatagccctgaggaaacaaaccgccgtgttaacaaagtgatgcgggccagactgtacttactgcagcagatagggcctaactctttcctgattggaggagacagcccagacaataaataccgggtgtttattgggcctcagaactgcagctgtgcacgtggaacattctgtattcatctgctatttgtgatgctccgggtgtttcaactagaaccttcagacccaatgttatggagaaaaactttaaagaattttgaggttgagagtttgttccagaaatatcacagtaggcgtagctcaaggatcaaagctccatctcgtaacaccatccagaagtttgtttcacgcatgtcaaattctcatacattgtcatcatctagtacttctacntctagttcagaaaacagcataaaggatgaagaggaacagatgtgtcctatttgcttgttgggcatgcttgatgaagaaagtcttacagtgtgtgaagacggctgcaggaacaagctgcaccaccactgcatgtcaatttgggcagaagagtgtagaagaaatagagaacctttaatatgtcccctttgtagatctaagtggagatctcatgatttctacagccacgagttgtcaagtcctgtggattccccttcttccctcagagctgcacagcagcaaaccgtacagcagcagcctttggctggatcacgaaggaatcaagagagcaattttaaccttactcattatggaactcagcaaatccctcctgcttacaaagatttagctgagccatggattcaggtgtttggaatggaactcgttggctgcttattttctagaaactggaatgtgagagagatggccctcaggcgtctttcccatgatgtcagtggggccctgctgttggcaaatggggagagcactggaaattctgggggcagcagtggaagcagcccgagtgggggagccaccagtgggtcttcccagaccagtatctcaggagatgtggtggaggcatgctgcagcgttctgtcaatggtctgtgctgaccctgtctacaaagtgtacgttgctgctttaaaaacattgagagccatgctggtatatactccttgccacagtttagcggaaagaatcaaacttcagagacttctccagccagttgtagacaccatcctagtcaaatgtgcagatgccaatagccgcacaagtcagctgtccatatcaacactgttggaactgtgcaaaggccaagcaggagagttggcagttggcagagaaatactaaaagctggatccattggtattggtggtgttgattatgtcttaaattgtattcttggaaaccaaactgaatcaaacaattggcaagaacttcttggccgcctttgtcttatagatagactgttgttggaatttcctgctgaattttatcctcatattgtcagtactgatgtttcacaagctgagcctgttgaaatcaggtataagaagctgctgtccctcttaacctttgctttgcagtccattgataattcccactcaatggttggcaaactttccagaaggatctacttgagttctgcaagaatggttactacagtaccccatgtgttttcaaaactgttagaaatgctgagtgtttccagttccactcacttcaccaggatgcgtcgccgtttgatggctattgcagatgaggtggaaattgccgaagccatccagttgggcgtagaagacactttggatggtcaacaggacagcttcttgcaggcatctgttcccaacaactatctggaaaccacagagaacagttcccctgagtgcacagtccatttagagaaaactggaaaaggattatgtgctacaaaattgagtgccagttcagaggacatttctgagagactggccagcatttcagtaggaccttctagttcaacaacaacaacaacaacaacaacagagcaaccaaagccaatggttcaaacaaaaggcagaccccacagtcagtgtttgaactcctctcctttatctcatcattcccaattaatgtttccagccttgtcaaccccttcttcttctaccccatctgtaccagctggcactgcaacagatgtctctaagcatagacttcagggattcattccctgcagaataccttctgcatctcctcaaacacagcgcaagttttctctacaattccacagaaactgtcctgaaaacaaagactcagataaactttccccagtctttactcagtcaagacccttgccctccagtaacatacacaggccaaagccatctngacctaccccaggtaatacaagtaaacagggagatccctcaaaaaatagcatgacacttgatctgaacagtagttccaaatgtgatgacagctttggctnnagcagcaatagtagtaatgctgttataccagtgacgagacagtgttcaccccagtagaggagaaatgcagattagatgtcaatacagagctcaactccagtattgaggaccttcttgaagcatctatgccttcaagtgatacaacagtaacttttaagtcagaagttgctgtcctgtctcctgaaaaggctgaaaatgatgatacctacaaagatgatgtgaatcataatcaaaagtgcaaagagaagatggaagctgaagaagaagaagctttagcaattgccatggcaatgtcagcgtctcaggnngccctccccatagttcctcagctgcaggttgaaaatggagaagatatcatcattattcaacaggatacaccagagactctaccaggacataccaaagcaaaacaaccgtatagagaagacactgaatggctgaaaggtcaacagataggccttggagcattttcttcttgttatcaggctcaagatgtgggaactggaactttaatggctaggtgacttatgtcagaaacacatcttctgagcaagaagaagtagtagaagcactaagagaagagataagaatgatgagccatctgaatcatccaaacatcattaggatgttgggagccacgtgtgagaagagcaattacaatctcttcattgaatggatggcagggggatcggtggctcatttgctgagtaaatatggagccttcaaagaatcagtagttattaactacactgaacagttactccgtggnctttcgtatctccatgaaaaccaaatcattcacagagatgtcaaaggtgccaatttgctaattgacagcactggtcagagactaagaattgcagattttggagctgcagccaggttggcatcaaaaggaactggtgcaggagagtttcagggacaattactggggacaattgcatttatggcacctgaggtactaagaggtcaacagtatggaaggagctgtgatgtatggagtgttggctgtgctattatagaaatggcttgtgcaaaaccaccatggaatgcagaaaaacactccaatcatcttgctttgatatttaagattgctagtgcaactactgctccatcgatcccttcacatttgtctcctggtttacgagatgtggctcttcgttgtttagaacttcaacctcaggacagacctccatcaagagagctactgaagcatccagtctttcgtactacatggtagccaattatncagatcaactacgtagaaacaggatgctcaacaagagaaaaaaaacttgtggggaaccacattgatatctacggccatgatgccactgaacagctatgaacgaggccagtggggaacccttacctaagtatgtgattgacaaatcatgatctgtacctaagctcagtatgcaaaagcccaaactagtgcagaaact

SEQ ID NO: 254691 - DNA, 539 bp, Homo sapiens
tagacttcatatattatatctatcataatatatatcacatattatataattagagtctaagtcagatttttaatcagaagatccagaattagaaaggtgagaattctgattaggattgaacagataaagaaggtgtattagtctgttttcacactgttataaagaaccacctaagactgagcaatttatgaaggaaagagatttaattgactcgtatttccgcatggtgtggaggcctcaggaaacttacaatcatggtggaaggcaaaagggaagcaggcaccttcttcacaggaatgcaggaaagacagaaagggaagggcaagtgccacactttttaaaccacagatctcatgagaactcactgactattacgagaacatcgtgggggaaaccactcccatgattcagtcacctccctcccagtccctccctcgacatgtggggattacaattcaagatgagttttgtttggggagacagagccaaaccatatcagagggggtatctgggaatcaataagagaagaaataaacagc

SEQ ID NO: 254692 - DNA, 1076 bp, Homo sapiens
ttttttcttgcagaatgcagtgggccagccggctcgcggacttgaaaccaggctgttgcgagcccagagctccggctgggcagcagcgctctgcgcagcctcgcgctcatctggctccggggtgagtgcagagcagggtgagggtagaagaagtaggatcctcaatacaagctcattaaagagagggaaggagggaggaggcaagaaccccctatactggaaaacaaacaacccaaggaaattgacgtggtccgagcccattttcaaagtaaggaagtataatggagatttcgctactcttctgtatgggaaggactgatggcagctagaactttagtttgtggtatgaagtgctttaaaagaaacacttggatgaaaaggaaattccttgaatgttaattgtgactgtaaacgtgttaaaactagccaaagaggacgcactggtgtcggtctctgcctttcttacatctttgataaaacccataggcaccaaaatcctggctgtttacatttctgcagatttgggaattacccatctgctaaatcatttgtcttttattttctttcaaaggctaaactgtatcgaagtctaaccctgtatttcctcctagtaaacacaatagatgttaaaagggaattcttttcccaaaataaccttttattattacaaaagccaaacataatcatttgagatataaaatcctggcaaacataatcgtggttaaaatttaatctgggccctttgggatctgtcccttcaaaggcaggtgagttgccctttaattcgtattgccacttcattgactcaatcactgttatttcagaaaaaaataaaaggaagtagcagaattcaagttacgcaaaacaaaacttgctgtctaacaagcactctttgaaagcaaagatgttttagtgttcagcttttaaattgagctatgtgattaaaaccaaccatgaccttaacggattttacccaaactcgtctaacttcagtatgttttgtcagagattaatcagttacttgttcaaacttaaattgagatagtgtaaatatcagggtttcctagataaggaca

SEQ ID NO: 254693 - DNA, 623 bp, Homo sapiens
agcgggagggggctccgggcgccgcgcagcagacctgctccggccgcgcgcctcgccgctgtcctccgggagcggcagcagtagcccgggcggcgagggctgggggttcctcgagactctcagaggggcgcctcccatcggcgcccaccaccccaacctgttcctcgcgcgccactgcgctgcgccccaggacccgctgcccaacatggattttctcctggcgctggtgctggtatcctcgctctacctgcaggcggccgccgagttcgacgggaggtggcccaggcaaatagtgtcatcgattggcctatgtcgttatggtgggaggattgactgctgctggggctgggctcgccagtcttggggacagtgtcagcctgtgtgccaaccacgatgcaaacatggtgaatgtatcgggccaaacaagtgcaagtgtcatcctggttatgctggaaaaacctgtaatcaagccgtaggtttgaaagatgtatggttccagccgggcgccgtggctctaccctgtaatcccagcactttggaaggccgaggcgggcggatcacgaggtcaggatatcgagaccatcctggctaacacggtgaaaccccatctctactaaaaatac

SEQ ID NO: 254694 - DNA, 690 bp, Homo sapiens
  misc_feature (587)..(587): n is a, c, g, or t
agcgggagggggctccgggcgccgcgcagcagacctgctccggccgcgcgcctcgccgctgtcctccgggagcggcagcagtagcccgggcggcgagggctgggggttcctcgagactctcagaggggcgcctcccatcggcgcccaccaccccaacctgttcctcgcgcgccactgcgctgcgccccaggacccgctgcccaacatggattttctcctggcgctggtgctggtatcctcgctctacctgcaggcggccgccgagttcgacgggaggtggcccaggcaaatagtgtcatcgattggcctatgtcgttatggtgggaggattgactgctgctggggctgggctcgccagtcttggggacagtgtcagcctgtgtgccaaccacgatgcaaacatggtgaatgtatcgggccaaacaagtgcaagtgtcatcctggttatgctggaaaaacctgtaatcaaggtaggaaaagagtctgacataaatacacaatcgaagacacctctatcactcccaaattaaaaatattcttatctcaaactactttccatggctatttttccaaaatatgtgagctgncatttggctgataaataaaaatatattaatgataaatattgtgcaatttcttttatccaaggacaatttaaccaattggattctcttattctctgatactaat

SEQ ID NO: 254695 - DNA, 892 bp, Homo sapiens
  misc_feature (753)..(753): n is a, c, g, or t
  misc_feature (756)..(756): n is a, c, g, or t
agcgggagggggctccgggcgccgcgcagcagacctgctccggccgcgcgcctcgccgctgtcctccgggagcggcagcagtagcccgggcggcgagggctgggggttcctcgagactctcagaggggcgcctcccatcggcgcccaccaccccaacctgttcctcgcgcgccactgcgctgcgccccaggacccgctgcccaacatggattttctcctggcgctggtgctggtatcctcgctctacctgcaggcggccgccgagttcgacgggaggtggcccaggcaaatagtgtcatcgattggcctatgtcgttatggtgggaggattgactgctgctggggctgggctcgccagtcttggggacagtgtcagcctgtgtgccaaccacgatgcaaacatggtgaatgtatcgggccaaacaagtgcaagtgtcatcctggttatgctggaaaaacctgtaatcaagatctaaatgagtgtggcctgaagccccggccctgtaagcacaggtgcatgaacacttacggcagctacaagtgctactgtctcaacggatatatgctcatgccggatggttcctgctcaagtgccctgacctgctccatggcaaactgtcagtatggctgtgatgttgttaaaggacaaatacggtgccagtgcccatcccctggcctgcagctggctcctgatgggaggacctgtgtagatgttgatgaatgtgctacaggaagagcctcctgccctagatntangcaatgtgtcaacacttttgggagctacatctgcaagtgtcataaatgcttcgatctcatgtatattggaggcaaatatcaatgtcatgacatagacgaatgctcactcggtcagtatcagtgcagcagctttgct

SEQ ID NO: 254696 - DNA, 454 bp, Homo sapiens
ggatgcttatcctttaagcaccccatcatactgttagtagtgacgacatcacggaacttgtcacacaggaggactgaaagacagggactctcaggggccagaaaacatgagagtgaaagagagattccgaaaaacatcgagatttgtgaaaatgctattatgtgttagatagaatgcagggtactttccataagtcaacttggttatttctcagaggaattccaggaaataggattttacacatgtgggaaacaggctgagagaggttatttaatttgccaaaggtcacacagctggtattagagaccgaatattaaagtaggcgtttcttaccccaaaatccactctctgcaccaagaggccactcagaaaatataaaaataagcaaatcaaataaattgactacgtaagtttgaaggcttcaagaaaatgtaaatacttccacccagaaaaa

SEQ ID NO: 254697 - DNA, 316 bp, Homo sapiens
tgtgctgtccatagtcactggaagcagtgaacacatcctactctgcttctgattctcaacttactgtttttgaagcacatgaacaggccaggcacggtggctcacgtctgtaatcccagcactttgggaggctgaagtgggcggatcatttgaggtcaggagtttgagatcagcctggccagcatggcgaaaccccatctctactaaaaatacaaaaattagctgggcgtggtggcacatgcctgtaatctcagctactcgggaggctgaggcaggagaattgcttgaacctgggaggcagaggttgcagtgagcc

SEQ ID NO: 254698 - DNA, 222 bp, Homo sapiens
cactattaagagaatgaaaaggtagtccacagagcaagaaaacaaaattttcaaatcacatatatgataatggcagtaagaatcttagcccatttcaggccgggcgcagtggctcacgcctataatcccagcactttgggaggccggggtgggcagatcataaggtcaggagatcgagaccatcctgactaacacggtgaaatcccgtctctactaaaaata

SEQ ID NO: 254699 - DNA, 433 bp, Homo sapiens
atgttctgatatcaatgtcactgaaaaaattttcttcagtaattaaatgattcactgtttcaactatttatttctacaaatatttattaaatagttactatctaatttttcttaccccaaaagaggaaaaagaaaaggaaggcccatttaacagaccaaaaaaattataaacaccattatttattgactacttcttctaagccaaatacctaaaaggtaggtagacttatttttactactctacagattaaaactgatgttcataactgatgttcaccaagtcacaaggctgaagtgatccgctcagagctgtccaatctcaatgtctatgttctgaacaactcctcctctcatgatgtcaatttttttttaaaaggagggccagaacataaatacacaagaaaatgaaacatggctaggactttctaagagc

SEQ ID NO: 254700 - DNA, 422 bp, Homo sapiens
aatgatgttcatcatgtaatttgagcctctagtttgtttatgctagaccaactttatccatactccaaacaaattatctcttataattaccagcccgaagataaatctctaaatgtttttctgatgatagtgctatggttggcaggtgttaaaagtgcctcccagggacaaagattgaagacgagcttgttcccacaaatcctcgaggcgaggatgttgagctttctatcctgccatgtgcaaaggagccttgtatggtgccctgctaatgaaatctaataggcaaaggtcgtacatctttacaaagaaaaatgcaaagttggttgtgtgataaatgggctccatggggctcagtggacgcgatttagtgaaaaaacccgtgtttaaacagtcagctcggttgctcgctaatgtttacgcct

SEQ ID NO: 254701 - DNA, 464 bp, Homo sapiens
ggaatctcaggccttagcccagctgtactaaattagaagctgcatttttcaggagattcccatccccaggcgccccccgtgattcctgtgcatattgaagtttgagaggcctggatttacgccactccctcccatgagcttggaacgtatgaatcagtgctcccttgagccactgataaactgagctctggacctgcaaaactggtccccatccaggtaatgctaacctgggacaccagccctcccctccaccagagcaactggctgcctccactttgacatcttttctttctgactgcaacagactctccttccagtatcaaagagtgagccaagcaacagacaggacttgtttatcgtaaggcgaaggcagccatgccttggattcatcaaaagtttgtgaaacgaggtttataaaatcatcatattatttgtgcatggaataaaatggccatgtgggtgaa

SEQ ID NO: 254702 - DNA, 513 bp, Homo sapiens
  misc_feature (503)..(504): n is a, c, g, or t
gtgagagggagtagttacttatgaatgcttgagaaaatggtgctgtccttagctgcaatacggaacccaggatgggaacaggtgaatagagttcatggagaagagctgggcaggaggcagacaattatttagaactttcagttttgtctagtaatgactggtttatcttttaccagtttatgataagctatgagcaggatctttttgtcaggcaattagaaagatgtataggttctttcttataatgcaaatactttttttctttcttttcttccttcttcttcttttttctcttcttcctcttcctctttttcttcttcctcttcttttttttttgaggcatagtctcactctgttgcccaggctagagtgcagcggtgtgatcttggctcactgcagcctctgcctcccaggagaatcacttaaactttggaggcagaggttgcagtgagctgaggtcgcacattgcattccagcctgggcaacaagagcaaaactccatnncaaaaaaat

SEQ ID NO: 254703 - DNA, 432 bp, Homo sapiens
ggctggtcgtgaacacctgggctcaagtgatctgcccgtcttggcttcccaaagcactgcgattacaggcgtgagccacttcacccagccttgttccattctttttaacaggtctacaatagtctgtgaattaggacaacgtgacttatttagctaatctgttattgatgctcatttaggctggacaaattctttcaaaggtagctcagcccaaactcattagcaattagagaaatgcaaatcaaaataacaaggaggtgtcattttacagctatcctattgactaacattagaaaggtgggtaatggccggcgcggtggctcatgcctgtaatcccagcactttgggaggctgaggcgggcagatcacgaggtccgaagatcgagaccatcctggctaacacagtgaaaccctgtctctactaaaaataca

SEQ ID NO: 254704 - DNA, 431 bp, Homo sapiens
caggactgtaggggtctcttgggacttattcagaaatgccttattttgctttcaaaattttataataataattgctaacattagttgagtgctatcagtttgccagcattttgcccattttacagtatgaggagtctaaaactcatggctaataataagtttggggtctgagatctgatcacagcagattccaggatcccctgtccactgtgaacacctgggctgaacccccatgagtacagttgctgggcatcatgattttgcacactgtactgcatgttccacatttggcagtgaaggctgattaaaaatagctgggctaatgaacggtctcagactactgcttggggcggtctgtagggctggctctcatggctgtgccccagaactctaagccaaatattaaaaataataatctcttttttggcagg

SEQ ID NO: 254705 - DNA, 249 bp, Homo sapiens
ctgttggtatgtgtacaacatgcatgtccagcactgtagcccttgctcatccacccagcctttaagttcctgttgcactgacatgcagttctgtaaaagttatttcatatgagtaaattttgtaatcccagctactcgggaggctgaggcaggagaatcctttgaacctggcagacggaggttgcggtgagccgaaatcacccattgccctccagcctgggcaacaagagcgagattctgtctcaaaaa

SEQ ID NO: 254706 - DNA, 336 bp, Homo sapiens
gatagtgtttaattctgtcacccaggctggagtgcaattgcatcatcatagctcactgcagcctcgaacccctgggctgaagggatcttcccactataggtacacgtcactatgcccagctaatttttttttttttttattgagacggagtttcttgtcacccaggctggaagtgagactccatctcaaaaaaaaaaaacaaaaaactcctacagagatccttattcagagaattgttagggatcttagtactgatctgtacaggatacactgcctgccctgacgtggagttacaactgaacctattcccctaagaatactagtgagaagaaccaa

SEQ ID NO: 254707 - DNA, 467 bp, Homo sapiens
gttgatggacacatggctgtttttaggtgtggacaattataagtaaagctgctataaacattcttgggcagatcattttgtggatatatattttcgtttctcataggtaaatgcttaggattggaataattgggtcatagagtatgtgtatgtttagttttattagatactgctagaccttttcccaaagtggttgtaccattttacacacagagcatttgatccacatccttgtcaacatttagtgtcaatttttcaaattttagtcattctggtggatgtgtggttgtatctcattgtgctatccagtttatttttaactcttgtcttctttcgtttccttgccctacttacatttcagtcttgccaaaacaagctatttacatatacattaataccctgtgcactttttattgttcatattgttcccatgagaggtaataataaatttgttttaaaatcatgaa

SEQ ID NO: 254708 - DNA, 438 bp, Homo sapiens
ctttgattttggatattactgaaaggttagcttgttttagactttattcttgaatgtatatatgtggtctaaatgtctgaattagaaggcatggaatggatggattatttaaaaaataatccttccttgctttagacggaagccttaaattctttctcttttggatcttcaatgctctttaatcacctaggtagctccaaaatctcatagtccacagttagggtagtgataggccatttgggcagctggtagttattgtaagacaatgtagaactatcagtttacactcttgacccatagaagtaattctgaggtccttgaagatccctgagactattggatgaggttcagggttcgtgcaagaggactgttagactgtgaggtcatccagattctgtctaagatcttgaaacttgaagctgaccttggccagcttgt

SEQ ID NO: 254709 - DNA, 498 bp, Homo sapiens
cattaaatatttgtagaacctactttttcctaacatcattgcttgccattttatgagttgttttctgcacatcaaagaaaggcaagatgtagtacaaatgctgatgtcaaatgtcagcattttaatccttaaagtcatctcttgattggtgtgttctttctttatttatttttaataaaaaattgtatttgcttagaagcattcagaatgtcaacaaaatggctacaactttttcttttttttttttttttttgcaattacagagtggtattcacttaacaacagtcattttatataagctgcatcagagacaactgaagatgaaaaaactaccatccccatatataactaatttgtgccatgcactaacaagaacctgcttttaatttccatgccagtttacaatccccatactgtactaggcaaggttggtggctattgaaaataccaccaggacagggatatctaaagacacatttggtagtgtgttaactatac

SEQ ID NO: 254710 - DNA, 1187 bp, Homo sapiens
attccacaaatagagaaaaagagtaagaagataaagtccattcccttctttggggaactggggaaggactgataagcaaacaaagaattaacagagtgatacagtaaaataaaatacagagattatattttcatgtttttcccatgttcactcttttcctctcagtagtttggaaactttgtgaaagtggagatgcagtgcattttacatggttcattgcatctagcattttttttttttttttttgagatagagtcccactcttgcccaggctggagcgcaagtggcgcgatctcggctcactgcaacttccgcctcccggtttcaagcagttctccagcatcagcctcccgagtagctgggactacaggcacgtgctaccacgcccggctaattttttgtatttttagtagagatggggtttcaccatgttagccaggatggtctccatctcctgacctcgtgatcagcccacctcagcctcccaaagtgctgggattacaggcgtgagccaccgcacccagcccatctagcataatgttttgcatagttgtcagcagataaatattgaatgacaaaactcagatggaggaaaaagaacaaaataacctagttctcagaaagatttaatgagcaaatgggaaaatgtcaaaaagatttgcaatgccattcctaaataactatttccccttttagtcattagaaaacgtctaaacactttcaacattaaatctttcacttgcattttaacagagcactacttaattttgggttaccttttatatactttgtacattttaaggtgattatactggagatagaagggggttagactctagatgtgtgttgtccaatacagtaacttttagccaccagtggctattgagcacttgaaatgtggctagtctgaattgagatctataaatataaaattcacactggattttgaagactcagtatggaaagaaaaatgttaaaatatctcaatttttttcatattgattgcatgttgaaatatttttgacattgtgttaaaatatattgaaaaattaattatcctcattttgccattgtttaatgtggctactagtaaatctaaaattacataggacagcatgtctcgacttcctgaggaatatctgaaagcatataaaatatctgtaaaaattaaacatgttaatactttc

SEQ ID NO: 254711 - DNA, 428 bp, Homo sapiens
aaactttaccctgaaacatttctgttgaattcatcctggcaatgtaaactgatagctgatcttaacaggtgcaggacagaaaatcattcctctgctcacctgagagaaatgcttatctgattgcttcctcagacctactgtgtatgtaaaaatgaagattcactgagccagactagattgtgaattcactgaaaggctgatcaaggactcaaaagaatgcaagcttttgtctcttatctacctatgacctggaagcccccctcttcgagttgtcctgtgttactggatggaaccaaagtatatcttacatatattaattgatgtctcaggtctccctaaaatgcacaaaagcaagctgtaccccagccaccttggggacgtgtcgtcaggacctgttggcaaaataaacttttaaattgcttgagacc

SEQ ID NO: 254712 - DNA, 318 bp, Homo sapiens
gctagaacttaaagtataattaaaaaaaaaaaagtctgttggtgaaggttgaagataacgaggcagtgggctgactggtgaaaactaaatcatcttttgtccttcaaagtcttgggccaggaacagtggctcacacctgtgcacggtggctcctagcactttgggaggccgaagtgggtggattgcttgagtctaggagtttgagaccagcctgggcaacatggcaaaacccatctctactaaaaatacaaaaaatcagccaggcttggtggcgtgtgcctgtagtcccagctactcaggaggctgaggtggaagaat

SEQ ID NO: 254713 - DNA, 5808 bp, Homo sapiens
gcgcgcgcgagggcgttgggcgccgccgcgaggcggggaagcgcggggccgcggcggtgcgggttctagggcggcggccgtcgccgtcgcagcagcgccccgagcggggagggccgaggaggcccgacgagctggggatggagagtaccgggcccctcactgcctcagagcgcgtgtgcggctctgggcgcgcacagtgacggtgacggcacccctggcccggcagcgccgaggccgcttcgccagacagccagcggccggcggcaggccgggccatgagcggcaggggccgggccgggcctcgctgaccctggctccgcgcggcagcttccccagtttccgctccggtctctcggcatgagagtccgcccgggcccggggctgcggctgccccagacccgccgcacgctggcgcgctccgggcccgcggagccgcggtgctgatacctgcgccgcactgcgccgcccgcccgtccgctgtgtgccccgggggcgcggccatggaggtggtgggtgacttcgagtacagcaagagggatctcgtgggacacggggccttcgccgtggtcttccgggggcggcaccgccagaaaactgattgggaggtagctattaaaagtattaataaaaagaacttgtcaaaatcacaaatactgcttggaaaggaaattaaaatcttaaaggaacttcagcatgaaaatattgtagcactctatgatgttcaggaattacccaactctgtctttttggtgatggagtattgcaatggtggagacctcgcagattatttgcaagcgaaagggactctcagtgaagacacgatcagagtgtttctgcatcagattgctgctgccatgcgaatcctgcacagcaaaggaatcatccacagagatctcaaaccacagaacatcttgctgtcctatgccaatcgcagaaaatcaagtgtcagtggtattcgcatcaaaatagcggattttggttttgctcgttacctacatagtaacatgatggctgcaacactgtgtggatccccgatgtacatggctcctgaggttattatgtctcaacattatgatgctaaggctgacttgtggagcataggaacagtgatataccaatgcctagttggaaaaccaccttttcaggccaatagtcctcaagacttaaggatgttttatgaaaaaaacaggagcttaatgcctagtattcccagagaaacatcaccttatttggctaatctccttttgggtttgcttcagagaaaccaaaaagatagaatggactttgaagcgttttttagccatccttttcttgagcaaggtccagtaaaaaaatcttgcccagttccagtgcccatgtattctggttctgtctctggaagctcctgtggcagctctccatcttgtcgttttgcttctccaccatcccttccagatatgcagcatattcaggaagaaaacttatcttccccaccattgggtcctcccaactatctacaagtttccaaagattctgccagtactagtagcaagaactcttcttgtgacacggatgactttgttttggtgccacacaacatctcgtcagaccactcatgtgatatgccaatggggactgctggcagacgtgcttcaaatgaattcttggtgtgtggagggcagtgtcagcctactgtgtcacctcacagcgaaacagcaccaattccagttcctactcaaataaggaattatcagcgcatagagcagaatcttacatctactgccagctcaggcacaaatgtacatggttctccaagatctgcagtggtacgaaggtccaacaccagccccatgggcttcctccggccgggatcatgctccccagtaccagcagacacagcacagacagttggacgaaggctctccactgggtcttctaggccttactcaccttcccctttggttggtaccattcctgagcaattcagtcagtgctgctgtgggcatcctcagggccatgactccaggagtagaaactcctcaggttctccagtgccacaagctcagtccccacagtctctcttatcgggtgctagactgcagagcgcccccaccctcactgacatctatcagaacaagcagaagctcagaaaacagcactctgaccccgtgtgcccatcccatactggggctgggtacagctactcgcctcagcccagtcggcctggcagccttggaacttctcccaccaagcacttggggtcctctccacggagttctgactggttctttaaaactcctttgccaacaatcattggctctcctactaagaccacagctcctttcaaaatccctaaaactcaagcatcttccaacctgttagccttggttactcgtcatgggcctgctgaagaacagtcgaaagatgggaatgagccacgggaatgtgcccattgcctcttagtgcaaggaagtgagaggcagcgggccgagcagcagagcaaggcagtgtttggcagatctgtcagtaccgggaagttatcagatcaacaaggaaagactcctatatgtcgacatcagggcagcacagacagtttaaatacagaacgaccaatggatatagctccggcaggagcctgtggtggtgttctggcacctcctgcaggtacagcagcaagttccaaggctgtcctcttcactgtagggtctcctccacacagtgcggcagcccccacttgtacccacatgttccttcgaacaagaacaacctcagtggggcccagcaactccgggggctctctttgtgccatgagtggccgcgtgtgcgtggggtccccgcctggcccaggcttcggctcttcccctccaggagcagaggcagctcccagcctgagatacgtgccttacggtgcttcaccccccagcctagaggggctcatcacctttgaagcccctgaactgccggaggagacgctgatggagcgggaacacacagacaccttacgccatctgaatgtgatgctgatgttcactgagtgtgtgctggacctgacagccatgaggggaggaaaccctgagctgtgcacatctgctgtgtccttgtaccagatccaggagagtgtggtggtggaccagatcagtcagctgagcaaagactgggggcgggtggagcagctggtgttgtacatgaaagcagcacagctgcttgcggcttctctgcatcttgccaaagcccagatcaagtccgggaaactgagcccatccacagctgtgaaacaagttgtcaagaatctgaacgaacgatataaattctgcatcaccatgcgcaagaaacttacagaaaagctgaatcgattcttctctgacaaacagaggtttattgatgaaatcaacagtgtgactgcagagaaactcatctataattgtgctgtagaaatggttcagtctgcagccctggatgagatgtttcagcagaccgaagatattgtttatcgctatcataaggcagcccttcttttggaaggcctaagtaggattctacaggaccctgcagatattgaaaatgtgcataaatataaatgtagtattgagagaagactgtcggcgctctgccatagcaccgcaaccgtgtgagcagcaggctcatcccgtggaccggtggtgggaacgtgaggtgatgcctttgggattacagcttgagttctgtcaccccatccccaggaaactgtagcttcttaactggtgactaccaaagaacaagcagtgatttgaaaaaggaaaaacaatccaaaaactacatatttgtaggaaatctgccttattggagaaaatcaccctttccctttttctttgtagaagcaggagcaagagtgtttggctcccagtttggacttggtgaataaatgtaccttagaactaggataatcggtacagttattcttaaagataattaaaaatgaaacaaagtgagtgctcgtcactgggttcatcagagcagtgtgtgaaattccatgtgtttgctgaggtgtaaaggtaaatgtattcacccctcatccaggcagtttgatatttggagtaagtttgtttaaatctgagcatgcatctttaaacagctcaggaagaaatagcttaagaagaagtgaaacatggatcttggaagaaattttgaaatcttcaatttgatcctaatatggatacatgttaatcttccaaaatctttcatattgcactaatttattaaaacaactgtgtattggattttgtaatttaactaaggcacaatggacttgtttaaaatattttacttgattgtatacatagaccctttccagaattcacatgtaatctccagtgaacttttaagtggttaaaacttgtattcatgtgaacctttgcacatttttttttttttacttctttatctacacctacagattttctcagtaatgtttttgttagcttttggttccattttttattgtgcatgcagaatgtacattgatgcctgtgaccttaggtttattaaaggctaggtttatttgggcagtattagaaacaaaatcatggatcaagagatactcttgataatttgaatagggccaaaacaaagttggtgacctaaaggcttgttagtgatgtggagttcctacatgcagtgagtggaaaatgaagttcgttttctcttaggaaaatgggcagctgtcttctgcctaatgtgtatttttcatgttaattctgacagttcaccaaatagctagtcatggagaatgcaggcagttaacttaatatccctccaggaatggttcctacgttgtgtattatttggtttcttttacttacctgcttgaatacttgaataaaccattcaccaattttaatccttttattttaatccttttacataaaataatctgaactctttgacaaattgcacagagctctttggcattaatctaattttaatgtactgataaaaacaaacatggttgtcctttactttgacaaagtaatgtaatttttaccttatttatctgtatgaaattccagtagttaatttgaacatttatttatatgacgtttgtatttttaggtctttaatacagtgtttctacctctcatttgtaactgcatgcattattcttgaaactaggtaaaactcactgaattgttgtgtaatagcctttttattattgcctgtacaaatgtatattaaggtaaaataaaactgacaaagtgtttctagggtgtagctgggtacatattaagtggcttgttgagccaggtacttccttagtgagtttagagacttggccatgaatatcctttgtcctgccccaggatttagatcttggctactgtcatgcaggcttccaggaacatagactgttttacctccacaaccctatttgttattagtgatactttattttatataatattttttattcacagtgaaatttcattcatgttctttcagttatcacctgtgttatctcagttgtaggtttattctatcctctcctcttcctctcccatttcttttttaacacaggatgaaacaggttcagagaggggaagtgattggcctaaagtcaggaactaggcaagtggtcaagccatgctttgtgactttcaagttaattcttcttgttcttgtatattaaaggtcttggggtagatggtgtgtgtgaaacagtgaagtctcaacagcagaaaagaacaaaatgtaaattcatgaataatggttctggttatacttccattatcaaggctaattaagagattttgccttgagtatagcaataataaacaaatgctttatgtttccctg

SEQ ID NO: 254714 - DNA, 1448 bp, Homo sapiens
tttgagaaatctgatatctcttcatagtcttcaattattaaagttaaaaaaataaataaatgtgaatccaaattcctcattcccttcatgctctccttcacaacccaatcctgttgatggaatatgcagatggtatttgattttgtgtgcttaaatatttacgtgactccttttgtaccagcgaaagggactctcagtgaagacacgatcagagtgtttctgcatcagattgctgctgccatgcgaatcctgcacagcaaaggaatcatccacagagtggaaaatgaagttcgttttctcttaggaaaatgggcagctgtcttctgcctaatgtgtatttttcatgttaattctgacagttcaccaaatagctagtcatggagaatgcaggcagttaacttaatatccctccaggaatggttcctacgttgtgtattatttggtttcttttacttacctgcttgaatacttgaataaaccattcaccaattttaatccttttattttaatccttttacataaaataatctgaactctttgacaaattgcacagagctctttggcattaatctaattttaatgtactgataaaaacaaacatggttgtcctttactttgacaaagtaatgtaatttttaccttatttatctgtatgaaattccagtagttaatttgaacatttatttatatgacgtttgtatttttaggtctttaatacagtgtttctacctctcatttgtaactgcatgcattattcttgaaactaggtaaaactcactgaattgttgtgtaatagcctttttattattgcctgtacaaatgtatattaaggtaaaataaaactgacaaagtgtttctagggtgtagctgggtacatattaagtggcttgttgagccaggtacttccttagtgagtttagagacttggccatgaatatcctttgtcctgccccaggatttagatcttggctactgtcatgcaggcttccaggaacatagactgttttacctccacaaccctatttgttattagtgatactttattttatataatattttttattcacagtgaaatttcattcatgttctttcagttatcacctgtgttatctcagttgtaggtttattctatcctctcctcttcctctcccatttcttttttaacacaggatgaaacaggttcagagaggggaagtgattggcctaaagtcaggaactaggcaagtggtcaagccatgctttgtgactttcaagttaattcttcttgttcttgtatattaaaggtcttggggtagatggtgtgtgtgaaacagtgaagtctcaacagcagaaaagaacaaaatgtaaattcatgaataatggttctggttatacttccattatcaaggctaattaagagattttgccttgagtatagcaataataaacaaatgctttatgtttccctg

SEQ ID NO: 254715 - DNA, 5386 bp, Homo sapiens
gcgcgcgcgagggcgttgggcgccgccgcgaggcggggaagcgcggggccgcggcggtgcgggttctagggcgcggccatggaggtggtgggtgacttcgagtacagcaagagggatctcgtgggacacggggccttcgccgtggtcttccgggggcggcaccgccagaaaactgattgggaggtagctattaaaagtattaataaaaagaacttgtcaaaatcacaaatactgcttggaaaggaaattaaaatcttaaaggaacttcagcatgaaaatattgtagcactctatgatgttcaggaattacccaactctgtctttttggtgatggagtattgcaatggtggagacctcgcagattatttgcaagcgaaagggactctcagtgaagacacgatcagagtgtttctgcatcagattgctgctgccatgcgaatcctgcacagcaaaggaatcatccacagagatctcaaaccacagaacatcttgctgtcctatgccaatcgcagaaaatcaagtgtcagtggtattcgcatcaaaatagcggattttggttttgctcgttacctacatagtaacatgatggctgcaacactgtgtggatccccgatgtacatggctcctgaggttattatgtctcaacattatgatgctaaggctgacttgtggagcataggaacagtgatataccaatgcctagttggaaaaccaccttttcaggccaatagtcctcaagacttaaggatgttttatgaaaaaaacaggagcttaatgcctagtattcccagagaaacatcaccttatttggctaatctccttttgggtttgcttcagagaaaccaaaaagatagaatggactttgaagcgttttttagccatccttttcttgagcaaggtccagtaaaaaaatcttgcccagttccagtgcccatgtattctggttctgtctctggaagctcctgtggcagctctccatcttgtcgttttgcttctccaccatcccttccagatatgcagcatattcaggaagaaaacttatcttccccaccattgggtcctcccaactatctacaagtttccaaagattctgccagtactagtagcaagaactcttcttgtgacacggatgactttgttttggtgccacacaacatctcgtcagaccactcatgtgatatgccaatggggactgctggcagacgtgcttcaaatgaattcttggtgtgtggagggcagtgtcagcctactgtgtcacctcacagcgaaacagcaccaattccagttcctactcaaataaggaattatcagcgcatagagcagaatcttacatctactgccagctcaggcacaaatgtacatggttctccaagatctgcagtggtacgaaggtccaacaccagccccatgggcttcctccggccgggatcatgctccccagtaccagcagacacagcacagacagttggacgaaggctctccactgggtcttctaggccttactcaccttcccctttggttggtaccattcctgagcaattcagtcagtgctgctgtgggcatcctcagggccatgactccaggagtagaaactcctcaggttctccagtgccacaagctcagtccccacagtctctcttatcgggtgctagactgcagagcgcccccaccctcactgacatctatcagaacaagcagaagctcagaaaacagcactctgaccccgtgtgcccatcccatactggggctgggtacagctactcgcctcagcccagtcggcctggcagccttggaacttctcccaccaagcacttggggtcctctccacggagttctgactggttctttaaaactcctttgccaacaatcattggctctcctactaagaccacagctcctttcaaaatccctaaaactcaagcatcttccaacctgttagccttggttactcgtcatgggcctgctgaagaacagtcgaaagatgggaatgagccacgggaatgtgcccattgcctcttagtgcaaggaagtgagaggcagcgggccgagcagcagagcaaggcagtgtttggcagatctgtcagtaccgggaagttatcagatcaacaaggaaagactcctatatgtcgacatcagggcagcacagacagtttaaatacagaacgaccaatggatatagctccggcaggagcctgtggtggtgttctggcacctcctgcaggtacagcagcaagttccaaggctgtcctcttcactgtagggtctcctccacacagtgcggcagcccccacttgtacccacatgttccttcgaacaagaacaacctcagtggggcccagcaactccgggggctctctttgtgccatgagtggccgcgtgtgcgtggggtccccgcctggcccaggcttcggctcttcccctccaggagcagaggcagctcccagcctgagatacgtgccttacggtgcttcaccccccagcctagaggggctcatcacctttgaagcccctgaactgccggaggagacgctgatggagcgggaacacacagacaccttacgccatctgaatgtgatgctgatgttcactgagtgtgtgctggacctgacagccatgaggggaggaaaccctgagctgtgcacatctgctgtgtccttgtaccagatccaggagagtgtggtggtggaccagatcagtcagctgagcaaagactgggggcgggtggagcagctggtgttgtacatgaaagcagcacagctgcttgcggcttctctgcatcttgccaaagcccagatcaagtccgggaaactgagcccatccacagctgtgaaacaagttgtcaagaatctgaacgaacgatataaattctgcatcaccatgcgcaagaaacttacagaaaagctgaatcgattcttctctgacaaacagaggtttattgatgaaatcaacagtgtgactgcagagaaactcatctataattgtgctgtagaaatggttcagtctgcagccctggatgagatgtttcagcagaccgaagatattgtttatcgctatcataaggcagcccttcttttggaaggcctaagtaggattctacaggaccctgcagatattgaaaatgtgcataaatataaatgtagtattgagagaagactgtcggcgctctgccatagcaccgcaaccgtgtgagcagcaggctcatcccgtggaccggtggtgggaacgtgaggtgatgcctttgggattacagcttgagttctgtcaccccatccccaggaaactgtagcttcttaactggtgactaccaaagaacaagcagtgatttgaaaaaggaaaaacaatccaaaaactacatatttgtaggaaatctgccttattggagaaaatcaccctttccctttttctttgtagaagcaggagcaagagtgtttggctcccagtttggacttggtgaataaatgtaccttagaactaggataatcggtacagttattcttaaagataattaaaaatgaaacaaagtgagtgctcgtcactgggttcatcagagcagtgtgtgaaattccatgtgtttgctgaggtgtaaaggtaaatgtattcacccctcatccaggcagtttgatatttggagtaagtttgtttaaatctgagcatgcatctttaaacagctcaggaagaaatagcttaagaagaagtgaaacatggatcttggaagaaattttgaaatcttcaatttgatcctaatatggatacatgttaatcttccaaaatctttcatattgcactaatttattaaaacaactgtgtattggattttgtaatttaactaaggcacaatggacttgtttaaaatattttacttgattgtatacatagaccctttccagaattcacatgtaatctccagtgaacttttaagtggttaaaacttgtattcatgtgaacctttgcacatttttttttttttacttctttatctacacctacagattttctcagtaatgtttttgttagcttttggttccattttttattgtgcatgcagaatgtacattgatgcctgtgaccttaggtttattaaaggctaggtttatttgggcagtattagaaacaaaatcatggatcaagagatactcttgataatttgaatagggccaaaacaaagttggtgacctaaaggcttgttagtgatgtggagttcctacatgcagtgagtggaaaatgaagttcgttttctcttaggaaaatgggcagctgtcttctgcctaatgtgtatttttcatgttaattctgacagttcaccaaatagctagtcatggagaatgcaggcagttaacttaatatccctccaggaatggttcctacgttgtgtattatttggtttcttttacttacctgcttgaatacttgaataaaccattcaccaattttaatccttttattttaatccttttacataaaataatctgaactctttgacaaattgcacagagctctttggcattaatctaattttaatgtactgataaaaacaaacatggttgtcctttactttgacaaagtaatgtaatttttaccttatttatctgtatgaaattccagtagttaatttgaacatttatttatatgacgtttgtatttttaggtctttaatacagtgtttctacctctcatttgtaactgcatgcattattcttgaaactaggtaaaactcactgaattgttgtgtaatagcctttttattattgcctgtacaaatgtatattaaggtaaaataaaactgacaaagtgtttctagggtgtagctgggtacatattaagtggcttgttgagccaggtacttccttagtgagtttagagacttggccatgaatatcctttgtcctgccccaggatttagatcttggctactgtcatgcaggcttccaggaacatagactgttttacctccacaaccctatttgttattagtgatactttattttatataatattttttattcacagtgaaatttcattcatgttctttcagttatcacctgtgttatctcagttgtaggtttattctatcctctcctcttcctctcccatttcttttttaacacaggatgaaacaggttcagagaggggaagtgattggcctaaagtcaggaactaggcaagtggtcaagccatgctttgtgactttcaagttaattcttcttgttcttgtatattaaaggtcttggggtagatggtgtgtgtgaaacagtgaagtctcaacagcagaaaagaacaaaatgtaaattcatgaataatggttctggttatacttccattatcaaggctaattaagagattttgccttgagtatagcaataataaacaaatgctttatgtttccctg

SEQ ID NO: 254716 - DNA, 450 bp, Homo sapiens
ctaggcttctttcttttctgcctagaaataggtcctatgttttataccttataaatggtcattgtagtttttgatgcctgagacagcagttttcttgttcaaactcctctacagtgacttcattaatgagcttctgaatgtttctgaacataaatacaataacaggttgtttatcatggccgggcgcggtggctcacgcctgtaatcccagcactttgggaggccgaggcaggcggatcacgaggtcagaagatcgagaccatcctggctaacacggtgaaaccttgtctctactaaaaatacaaaaaaattagccgggcatggtggcaggcacctgtagtcccagctactcgggaggctgaggcaggagaatggcgtgaacccgggaggcggagcctgcagtgagccaaggtcgcgccactgcactccagcctgggtgactccgtctca

SEQ ID NO: 254717 - DNA, 715 bp, Homo sapiens
ttttgtaattggacaacccattgaacatagtgtcatttatgtaatcatgagttttttaatcttctagtcaagaagaaatattatacaatctaccattgtaaatatacccaataataaagaatagcacattacttgcaaaaatctgagcaaagtatggctaattttactactttgctaaatttactttatactttccagcacaaagcactgtaacctgcctacacataatgacaatatttaaataaagatgaattatgtaataccatgggtaccttactaaatctatagactgctttcttgattagaaataatttttctttgtcatcaaaattgtggcaattctaattttatatagacattttatgggatgaaaagagaacatagacggacaacatgaattctttccatccacttgccctctaccaaaggcactttgatgggcagttgttaatgttaatacctattctgtttccctcagcttcttttataatgcattttttctatgttgacctttgcacaattctatctttactctttgaaactcacaaaaaccctataagataaatattttcatcacccctattttacagataaagaaacagggaagcctaaagtcaaacagatagcaaataaaagagctagaattcaaatccaggccagcctacctacaaactaggcttttaatcactatactttgactcaagcaaaggataaa

SEQ ID NO: 254718 - DNA, 464 bp, Homo sapiens
aagaaacaaaaggcatctacattggaaaagaggaagtcaaactatcttcctttgtggatgatatggttctatacctagaaatacctatagactctgacagaaggctcctggaaataataaacaattttagtaaagtttcaggatacaaaatcaatgtacaaacgtcaaataacctttatgctgagagtcaaatcaagagtgcaatcacatttacaacagccacagaaaaaataatacctaggagtacacctaaccaaggaggtgaaagatctctttaaggagaactgtaaaacactgctgaatgaagacgtaaatgacacaaacaaatggaaaaatatgtcatactcatggattggaagaatcaatatagttaaaatggccataatgagcaatgcaatgtatagattcatagattcaatgttgttcctaccaaactaccaacatcattttcacagaacttaaaa

SEQ ID NO: 254719 - DNA, 287 bp, Homo sapiens
gagagacaggtttggtactatagattgaatgtttatgtcctctgcctccctaaattcatatgttgatactgagtccctaattatgagggtattaggatgtggagcctttgtgggggcaattagtgcacttatagaagtggcttcaaaagcacatctttactccttctgccatgtgaggacacaacaaaaagccggtcctcaccagatactgaatgtgccagcaccttgattttggacttcccggcctctggaactgtgagaaataaattcctgttgtttataatcca

SEQ ID NO: 254720 - DNA, 684 bp, Homo sapiens
attttaaaattctatctttctgctgaactctaaccttctaatattgccttctaagcaaattaaaggctgccttatactgaatgaggaagagaacaaatacttggctgaatgaggtactgcaagagactgcatgcactttgaagaaagacttgagttattgtcataggatttccattctctttagctttttcttaaacatatgacaaaatacctacacagagagtggtatttgagttaatatagtacatttatttttcagactgacattcagcttaaatatgccagtatgtgatttaatccacaggtacctgatgaacacattattgtcagattggttacagttgctaaacgctatctgaaggtcattcctagtcatttatacgtgtcagggtaaaagtgaagcgatttgaactataaaaatacctttgaaataatttatcaatgtattagataagctcagtttcagaatgataaactgttagaccaaataatgtggctaattaacagtggtacgatttctagcccgagggtttaaaatggagttaaagtaagtgtctttaaactgaactcaaagaatgcaaaagcggcaagttcagaaaaggcaagaacaggacctttagtccattttaagccataaatattacacaaaatatgcctctaactgaaactgagaggtataaaaac

SEQ ID NO: 254721 - DNA, 505 bp, Homo sapiens
gatgctgactctgttttgcctgaaaccagacaagctctgcttcagggtctgtgagtggaaggggggtgggtgggaacctctcgcaacctctcctgggacagacacaatgggcaatcgtgacctcctggggtagatactgaaactgtgacaagtgataacaaaactggcagaaatcagttggacccaatatggccaactggagtttctgcagaaagagcttgctgatatcacagcctgaatttccacgcatgtttcgtattaactgccccggaatttgatttgcacacagcacccatgaggaagcatgaagagataactgcgcatgtctgaggacttgccagacctcctctttccttccaccgatctcctgctaatcccggaacccaccctctaacccttttctaataaaattatttccttaaaggcagcacagcgagacagatttgagctggactcctgtctccgtgttggtcaatttgcaatgaaaagcttttcttttctctga

SEQ ID NO: 254722 - DNA, 590 bp, Homo sapiens
catggccgagtctgtcacattcttccgatctttcctcaaatacctcccaccccacaaggtcttccctggccaccgagctagacttgcacctcctacagcactctctgttcccctgagcctggccaccaagctagacttgcacctcccacagcactctctgttcccctgagcctcttcaggtttctttttagcacactgagcacattacatatttgacttatttatcgtgtttattttctgtatcttctccctacaatgtaagctgcgtgaggacagagactctgttttattccttgtgatatacgcaggacctagaacagcaactactcagagcagacactaagtaaatattgattgatgattgattgattaaggaatctgtctacccatctaccatccagtggtctacactacaccaacaaccctccttcctttctcttatccaccaatcttagccatccaaaacacatcataaattcattgatctacctgttccacccattcagcatatggatctgtcccagccatccagcatccgttactatatccagcctgggcaacatagcgagaccccgtctcaaaaaaaaaaa

SEQ ID NO: 254723 - DNA, 422 bp, Homo sapiens
atttttactcacttaaaagtaaaggtgcaagatacaagttagaaatctaaaattcttctcatttgtcattggcttgtaattgttaatagtccagaattttctgagtgtctgaacctttatcttcccctctctcccctaggtaaagctatggtactttagaaaaagtcaactctgtgtaaaccactgtatcaggaaaatcttctggttgtgcctcaaaatctgctttatccaacttgttcctccttgcatttacacacttctctactactcagtacttataaaaactttgccttgctctgtaaattcctgaaactactttcattgcttttttaaacacttcaaaattacagcaaacattttattcttaaagattttggccatttcattactgttgagttttagagagctcacctagtttcaga

SEQ ID NO: 254724 - DNA, 341 bp, Homo sapiens
gaaaatcacctgagtctgggggtttgtggctacagtgagctttcagcctgggcaacagagtgagaacattgtctaaaaaaaaaaaaaaaaaaaaaaaagaatatgcaagaactttatggagataactggaacattttactggagagcattacacaatgttaaataaatggaaagagattttatgttcatggatgaagacccagagtagtaaaaacaggtaattctcacagaacaacctataggtttagtataatgacaattaaaatcctggattttctcttctggtggtggtaaacaagataatttgaacctgttttcccagttaacttaaaaagtaaaaa

SEQ ID NO: 254725 - DNA, 421 bp, Homo sapiens
  misc_feature (368)..(368): n is a, c, g, or t
attcgcggccgcgtcgacctcccttcccagcctggctcagtcttcccacacaggttgagagaggaggggatccaattgcctgtgaggaggacacggctcctgggtggaccctgcagattgtgaagttcaagtcacagctcctgggaaggtctctgtgtgtaaagatcatgggggtgagacagattcagggaccacactctgctctgctctgtacctctgagtgtcgatccagctgccttgtgaccaggacacttagaagaagcatggaccctgcaagaggatgggctcaaggacagcttgcctgactgcagccataagggtgaagcctcttcaggtagagaaggactccaggtggggcctgtgcaganggttcttacgggcgcagtaggattggggctataaaatcagtaaatggaaaagg

SEQ ID NO: 254726 - DNA, 473 bp, Homo sapiens
  misc_feature (450)..(453): n is a, c, g, or t
gactcagggagcagagaaaatgatgagcccgacgaacattctggagcaagtcaaaagaagcaaatccccaaggaatgggcgagagcccagaaagtgctggtgctggacacaagtgcggggttggagggacccgtggctgcagacactccctggggcgcggcaatgggcggcctagggaagagaaggtgtccttggaggggctgcggcagcgccggggagaagtgggctgctcccagaggagggccgggtggcccagagggaagaccctgcttgctggggaccctcagagacccgtggagtgggggcgctgggctgcagggggttaagggcgaagacatcttttgggtgcttgagagctgcggtagaaatggggcaggaaggggtggcgcggggctcgggggtgacgtcccagcagcctgtcccgccccggctggcagcgcgacccccgcnnnnggggaaggagcagcggtcgc

SEQ ID NO: 254727 - DNA, 289 bp, Homo sapiens
gccttataatcctcacatcaccgtcgggaggcctgtgcaactgccatttccccacttcagaggtgaggaagcagacctagaaaagtttccatgacttgtgtgatagcacacaactgatcaaggatgagttgaggtttgaacccaagaagcctggcaccagaaaggaaaacgcactccaatgcacaagacatacattgtcacccacacaggcccagccatctcccctcctgcttcatctaaccactagaagtgcggggatagttatggcagagacaaagaaacccactca

SEQ ID NO: 254728 - DNA, 1890 bp, Homo sapiens
tatgttgccaagctttatttaggctgtaatggttacagataacacacatctaaccctatattctctgcgtcccatgcagtcccctgagcaggctcagctaccctttccctccagtctcacttcttgtcttcctccttcttgtccttcttgccatccttggtggcctggcaggccagggagcccacagcgtttcaaatggcttcattgttgggatccacacctgggaggttctccaggacactctgaaggaactcaggatcctgcatcacgtcgtaatcatcctcctccttggctggctggcaagtgtccatggctgagctggcatcaatgtctactgattccgcctggccaaactctgctcctgcagggacatcttcatgacataagcaatcccctcttccttaggtcaggaagtccggtatggccaaactcttgttggctaatggtcatcttcagcaggacctcgtctgagccttcagtcccagttgtagcaatcctggcctcagcagcagaggctgcagctgctcgtctgggctcctcatcctgccgctgctgctgctcctccatagaaacccgagggccaaggccagctgaggatcagcactgggatctactccaaattcaaagtcactggcaccgagacccagcatggcacccccttccccagccaaaatcggagaactgatgagagcatcagccaagctgggcccaggaggcactgccaccagatgagaaccgcttccatctttgccattcaacgtgtttacaaaggctgtcagcttttctctgttcacctcctcttcccccaaatttatcatgtcaacatttactttctccttcttgaggaatttagccagtttcaccagatccttctcattgcctttgggcttcccacgaaggcaatgatatgcgtcttgtgattcttgccccgtcagcgcttcagagccagatgggccatgtggatgccagtgtagaaggtgatcttgcccttgggttggacggtgtgtagcttggacaggatgcggccggtgtctagagtgagtgtggtcagcacttcacagtcattagccagtgtgatgagggccatgttgttctcagggttgctgtggattttgtttaattttttttttttttttgagactgagtcttgctctgtcacctaggctggtgtgcaatggcgcaatctcagctcactgcaacctctgcctctcgggttcaagggattctcctgtctcagcctcccaagtagctggaactacaggcgcctgccaccacacccggctaatttttgtatttttagtagggacggggttttaccatgttggtcaggctggtcttgaactcctgacctcatggtctgcctgcctcggcctctcaaagtgctgggattacaggcgtgaaccactgcgcccggcctgttgtgggttttgaatgacatactatgttgacagcgtcttgctgggcctgcagctgggtggggaagaagtcctcattccgcacatactgttgtccacacacaccatagcgctttccgacaccatcctgccaccctcctccctcccatttcttgaaataatccttcatgtataacttaggttaatagtgcctcatagtctacttagaaagaatcagatagaattttctttagtaaggaaatttccaaatagagaatagaaaagttaattgatggcaatgtatttaatagcgaggatcagtgaggaaatgaattaaagaggttccttttacacttttcttctctgaagctaggtacaccttagttcatgttgcagcttctttggtgctgtcagatcatagttggtatgaaatgggaagtttctgaaagtcagatgacacatttgtgaaatgcaacctcactgttatctacccggc

SEQ ID NO: 254729 - DNA, 443 bp, Homo sapiens
agttgatgcagtttcttcatagtgtcattggtctgtgtacttcagtgtgtttttgcagtggctggtattcagcatcttttcatgtgcttattggccttttgtatatcttctttgaagagacatctgttcaagaccttttgcctgtttttaaaatttagtttttaaattggcaaatacaaattgtatatatttatcatatgcaatgtaatgttttgaaatatgtacacattgtggaatggctaaattgagctaattaacatatgcattacttcacatacttttttttgtgatgagaatacttacaatcttactctcagcaattttcaagaatacaggtgaggctgaggcaggaggattgcttgagcctagaagatcgaggctgcagtgagccatgttcacaccactgcacaccagcctgggcaactgagtgaaactttgtctca

SEQ ID NO: 254730 - DNA, 942 bp, Homo sapiens
actccacatcaaatatttgatggcactggaatagactttggcaaatgtagtccattttctaatttcttcttcatttgcatttaaaggaatttcttcttcatttgcatttaaaggaatttgagttacagaggagagatgatacttattaaagccaagacaggtttcaaacactttcttctgaaaatccacttttttcctttgcggtcagcagcatttactataggaaaatatacacttaacatttagccaaaaataaaaacttctgcaaaatgtctatattcagattgcttctatattttgaggttgcattcacattaacctcaaaagaacctagatgctggtgctcagaagaaattgagtagttgaaaaccacagtggagtcagaaatcagaagaaattaaattaccattatggcactaagccctaatcccagaaaatcaaaacacaattagtcagccactaaatccattataaaatataataaacatcattagaattttttatctcccagcaaataaagagttggagacattatcccattgcttaaccactttttatagtggggtcattattccttaaggtgttactaaacacactcatcaacctagaaatcccaagtttaccttccaaatacatgatctcatccttctgtgtaaagttaatcgaagttgtaaaagtgcttcattctctatctttatttttccccacagggacagggaaataaaaatgtgatgcattggaggagaatcacaggatgcaacaaataaaacttgagatgtctctactctatgagaaagtatgtagagattaaccctctcctggaaaatgaacatttaaatgtgttttctacggatatcatacttttagttaggaaattctttatatccagcatgactttttcatgctgtaataaccttccagttgttaaccaagaatttttct

SEQ ID NO: 254731 - DNA, 699 bp, Homo sapiens
gtgaggtctgcatttgtagactcgaatctcccatttacattcttggactaaaacctcgctcctgcttatcatgtaatcatggagctaagctaggcttggagaagagtggcaagaagttcccacgtgcatggagctgtagtttttcccacattcctcttaggagctgtgcctaagatgctgcgctagcaacctctgtattgtgaaggaactgcgtttcctggattcccacaggagttggattcctgtccttgtgaagccatctcagggaacagggtgggcggaaggggcactggaggccatcatgattgtcctaacaggcattcttctggcaggaactggcaaggatagaacacagacttggtccctgcagctgaaagggaggaggcaggatggtgatggaagaggcgaaagaaagatatttgcatgggcaagcccagtattcaataactgtggcaagacttcatccttacaaatctacttagggccgactccacacctgagccgcttcccagacctgctgttctatcccggaagcagagggcagcatggcgaagacctgcctctgtctttgacgctggcacattgatgcgattcttccaagctctttgctcctgggtgacccccattgcacgcagagcctccacaatgtttggggagggggctgagcacacctctgtgtgcttcatccagccagccagc

SEQ ID NO: 254732 - DNA, 378 bp, Homo sapiens
  misc_feature (367)..(367): n is a, c, g, or t
  misc_feature (372)..(372): n is a, c, g, or t
ttcaacatggggtttggaggggacacacgtccaaaccatatcagaagccttcagacaagacactactgtttccttccttcccaactgatttaacgatgacttccacattgctagttatattcctggaccccactggcatttgtgttggaggccgggacaagtcgtggctcatgctgcttttgccttttgatgccttgtccagccagagaactcctacccttcaggcctagctcaacttccaattcttctgtgtgtctgtgcctcctgacagactcagtgagcatgagcagctcccttcctgtgtccccagattgttcaaggcatatttcaacagatgaattcaattcactgagaatcagtggactantatantatcaa

SEQ ID NO: 254733 - DNA, 448 bp, Homo sapiens
aacagactaatacatggctttgggcagcttctcatgtctagccatggtagctattcttatgatttggatggtgcccaagcattgctctcgagctccaggcccatatatttaaccacctccagatattctatacttaaatggtttagaggcaattcaaacagctacaaaagacaaatcatgatctcagttcaccccacccacatgtgacttccagagctcccaagatcagccagtagcaccacctgccatcagttcaacttcccaagccagaaattcaaaggataccttgatgtctcccttctccttccccgttctgtccaatctcatctgttcattcagcaaacacttactgagcaccccagcactgtacaggagctagggatgaacaggtgaataagagaggctctttgggaggttaggtgcagtggggcagacaggcaatcacggt

SEQ ID NO: 254734 - DNA, 412 bp, Homo sapiens
ccatcttgggcctgtggcgtgggccacctgtgtccatctgcacccctcgtctccatcaccgttgctcagagtgacttgttctcctctccaaagggccgcatgctttataggtggtcatttgtgatatctgtggggcaccagccagcccagtgaatccctgcatgtgccacaggggcctcccgtcccagtcgcaaggactctggcctaagggtgcaaggccagaggctcccggcccccaccccatcacagttactgtgagccttggctgaatgtgcaacagtgtctatttcaagatcactctgggacttaaaatagtctgtcctggcacacctggttttctggtggatttagtaatggagttaccatatgctgtaaatcatgcaaaatcaataactcaagagaggtgggcata

SEQ ID NO: 254735 - DNA, 406 bp, Homo sapiens
gggagagagagagagagagagagagagagagagagagagagacactaacataattactgagtttcctctgtcttctccctccctccctccttccctctgtttttcagtctcttgcagtcaaaaacatacttgttcaacacatccagctagggtttaaggtgtagtgtggaataggacagcagtttttttctgggatgctacttcatgcgtggagcacaaaactgagtgtgatcacttctaataagctatttgacttagcaaaagctaataatgagagaaaaagattttgttatttttattgtggctgttattcagtcactataagctatcatattattatgtagggccttaaaatttattgagaatctacagacaatggaaaagacaccaaaaatgtaagtagtta

SEQ ID NO: 254736 - DNA, 643 bp, Homo sapiens
cctcagagcggccccggagcggccgcagcgcggtggtctcggcccggctgcgccagagtccgcgcgatggagccccggccgcggcggcggcgcaggagtcgccccctggtcgccgccttcctgcgagacccgggctcgggccgcgtgtacaggcgcgggaagctgatcggcaagggcgccttcagccgctgctacaagctgacagacatgtccaccagcgccgtgttcgccctcaaggtggtgccgtgtggcggggctggggccgggtggcttcgcccgcagggaaaggtggagcgtgagattgccctgcatagccgcctgcgaccccgcaacatcgtggctttccacggacactttgctgaccgcgaccacgtgtacatggtgctggagtactgcagccgccagtctttggcccacgtgctgagggcgcggcagatcctgacggagccagaagtgcgcgactacctgcggggcctggtcagcggcctgcgctacctgcaccagcggtgcatcctgcaccgcgacctgaagctcagtaacttcttccttaacaagaacatggaggtgaagattggagacctgggactggcggccaaggtggggccagggggccgctgccacaggtgagagccggggggagggc

SEQ ID NO: 254737 - DNA, 627 bp, Homo sapiens
gtgggcctcaggagctaggcagatgggaattttgaactctaagtgtctatttctgaagtgaaactaatcaatgtgtttctacagttaacatttattgagcaactactatgtgtcacaaagttcataaatgttatctctaagcttccaaacaaacatggaatgacagcctggttacaaatgattaaaaagggactcacagagtctattaacattcccaagagtcattagttcttactgaacattagtaagccaaaggcatatttatatcaacacaagagttaatcacacagaaaagatgacagtcttaattcgaacaatcaagggtcaaaatcattatatattttgaatacgaatatggttgaatatgacaaggatttgaatacgtcaaaacacaaatcacattccctgacatgtaactgaaatgacaagaatatcaagaacttaagtacatgtttattctaacctctaacatcagtattgtgcaatgatttcattttaaactaaatgattaaaatgtacctttgttttaaaataggtatttgagtttctacagcagtgtttctccaagtgtgagccaaggaccttttatgttaaatgaatcacaggagggtgctcgttaaaagtaca

SEQ ID NO: 254738 - DNA, 573 bp, Homo sapiens
gtgggcctcaggagctaggcagatgggaattttgaactctaagtgtctatttctgaagtgaaactaatcaatgtgtttctacagttaacatttattgagcaactactatgtgtcacaaagttcataaatgttatctctaagcttccaaacaaacatggaatgacagcctggttacaaatgattaaaaagggactcacagagtctattaacattcccaagagtcattagttcttactgaacattagtaagccaaaggcatatttatatcaacacaagagttaatcacacaggaatacgaatatggttgaatatgacaaggatttgaatacgtcaaaacacaaatcacattccctgacatgtaactgaaatgacaagaatatcaagaacttaagtacatgtttattctaacctctaacatcagtattgtgcaatgatttcattttaaactaaatgattaaaatgtacctttgttttaaaataggtatttgagtttctacagcagtgtttctccaagtgtgagccaaggaccttttatgttaaatgaatcacaggagggtgctcgttaaaagtaca

SEQ ID NO: 254739 - DNA, 488 bp, Homo sapiens
gtggtggcggacgcctgtaatcccagctactcgggaggctgaggcaggagaatcgcttgaacccaggaggcggaggttgcagtgagctgagatcgcgccactgcactccagcctgggtgacagaacgagactccatctcaaaaaaaaaagaagaaaattaaccttttatctatgaaatgagttagatatttgttttccagtttgctatttatcttttggcttttatgctggctttgttcatgtagaaatctattttttgtagctaagtgtacccaacttttcttgtagagcttctcagttatgtcaggcttaaaaagatcttgcctttccaagattgtgttttacattcttctatattttttcctgtaatttgtttccttttttatagctaaatctttaatccaactggaaattattttgctgtaaggtgtaagagtcaagatccaaccttatttttgccctggcagcaagctgtccattgaattcat

SEQ ID NO: 254740 - DNA, 410 bp, Homo sapiens
ttctcaccattaggaaaattggccttcatcggaaatgaaaatattaatatattaggccaggaagcacagagcatgtctatatttaatgagccaatacctgttttcctacagttacctccctggctcaatcatggagacattctgatcagcagttctcaaaatctgtcttgcatcagaatcatctgggggggcctgttaaaacccccagcacatcagatttggtaggtttaaggtggaacctgaaaatgtgcatttctaacaagttcccaggtgatgccaatgctgctggtctaaggaccattgctgtaatattttgaaatatcagatgtatttaagtagacatttggtgattttgtcaatgacttgccacctagcttttcatttagaacccaaatgggctggtgttaagg

SEQ ID NO: 254741 - DNA, 353 bp, Homo sapiens
gagtgggggcgcaaaaaccagtaagatgagaaaatagtgtttcctcagttctagtatccaggggaaaaaaagaaaagagaaaatactgtttcctgccacttaagaggaaggactcacatatcctaccttccatcagccttgaaggagacaagtgccctctctctcacacccggtggccttcccttcccctttcccagagcctccaagaaggcccctggctggcctgatgcccaccatcagcagcaataggcaccaaaacctttctccttcctatccctccccacctcccaaaagggctggggacagcaggtgtatccttgttagttccatcatgagacagcacattcctacaa

SEQ ID NO: 254742 - DNA, 420 bp, Homo sapiens
tcaaatattcagcctgatctagttgaatctgaagatgtggacctgctgatgaagagggctgactgtatctaacttagggtcttgcatgcagctggcacttaatacattttattgactgttttagataacattcaacagataattcctaataaaaactcttaaaagtaggagaagaaggactcacatatcctaccttccatcagccttgaaggagacaagtgccctctctctcacacccggtggccttcccttcccctttcccagagcctccaagaaggcccctggctggcctgatgcccaccatcagcagcaataggcaccaaaacctttctccttcctatccctccccacctcccaaaagggctggggacagcaggtgtatccttgttagttccatcatgagacagcacattcctacaa

SEQ ID NO: 254743 - DNA, 220 bp, Homo sapiens
cagtttttatttaaaatgacccactgcctctaaaaagagagcatcaacaccggccttcacctgaagcaatccttttctccaacagaagagcaaatcaagtctgcagggttcgggggcaaagggaaaggattaagaaatccgatcaagtgtgaaaatgcgtggtgcatcgagttttggagatcaaataccagctttgcaaacaggatacggccaggtcagc

SEQ ID NO: 254744 - DNA, 295 bp, Homo sapiens
  misc_feature (46)..(46): n is a, c, g, or t
  misc_feature (61)..(61): n is a, c, g, or t
  misc_feature (88)..(88): n is a, c, g, or t
  misc_feature (157)..(157): n is a, c, g, or t
  misc_feature (281)..(281): n is a, c, g, or t
ctgtgttcactatctgggtgacgtgatcaacagaagcctaactctnagcatcatgcaatanatgcctataataaaactgcaaacatancccctaatttattatttgggtgtgtgtccctgcccaagtcacaagtcgaattgtaatccctagtgttgnaagtggggcctggtgggaggtgattggatgatggggacagagttctcatgaatgggttagcaccatcctcccttggtgctgtttagtgagtgagttctcatgagatctggttgtttaaaagccngtgtcatgcatccc

SEQ ID NO: 254745 - DNA, 588 bp, Homo sapiens
attgatctcagctgttgcacagtgcctttgcatgtaaaggtgctcaataaatatttgaattgatgagcaaatgtttagactgtttcccaggaacttataccttatttgcatgttatgcctagggtgaattttaaaatttgatctaatgagtatagtgctaaacagacaactatataacgtctattccccagacatctagaatttcagaagctggcaaacactatgtatagatgtttaggacatataaaagtagaataaagtgttaaatagtgtatggatgatgaaatacttatgaagagttaactgcattttggaggattgggatggcaagtagagtcatgcgtcacttaatgatggggatacgttctgagaaatgcaccttgggtggttttgttctgcaaacatcatagagtgtactgtacttaaacaaacctagatggtgttgcttaaccacacacctaggctgtgttgctcctaggctacaactctgtacagcatgttaactgcactgaatatcataggcagttgtaacacgtggtgtttgtgtgtctacacataggaaaggtatggtaaaaatatgatattata

SEQ ID NO: 254746 - DNA, 717 bp, Homo sapiens
aacgcatagcttctgtcaaacttacgtatcttaagactcaatatgacacccttgttaataactgaggaatcaacaatttgattccccgaaaacatgggtggtgaatgtaatgcccaacattgtttttactaaccctgtttttagactctcccttttgctctcttaatcacctagccttgtttccacatgactaaaactctcgcttagctgagaaagccggacgaactccatctggcccccttgatttgtaagacattaaggactccttacccacccccttcttcaaggagttaacttgtgtaaacagattctcaacatatcaaaagagtccaattaactgataaggtactgaaacaaacaatgtacgaagttcccaggattttgctcaaaagataacaccacaaagccttgagtctgtgtccggcatagcacccatatctaacatcttatgaaggatttagagcccccgcacctgctaccgttgcttttctgtaaacatttgtcttttaaattgtctgtttctctgtaatcatttgtccttttaatttttgcatgtttttacttctgtagaattgttgcgtttgagctcccctccccttcctaaaccaaagtataaaagaaaatcaagccccctcctcatggccgagagaattttgagcgttagcggtctctttggccaccggctaaataaaggactcttaattcatcccaaagtgt

SEQ ID NO: 254747 - DNA, 1186 bp, Homo sapiens
aaacaatgcattttatcatagggccggacagctacatgcacaagatgctacctgcagagattggtttttgcccagatgtgcaggagagatgcacagagaggaagaaatgcatacatgtgtgcaggttttggcgtgtgcacaagaagcctggaaggattttctttggatctacagtcaaaatggatttccgagaggaagctgtctgaaaacacacctcttccctgtgctacatacggtcccatctctgccagccaggttgtcaggaaagtgatcagcactggcttcaactctggctagagctctttggccaatgtgatgggcagaaaactggaatgaggacagaaaagcacctcagaggtttgaagagtctagtctctcaccaccttgctgtaggttttctgaatacttctgagtttaggagcattttttctcaacaggcaagtcaggagctgctaagataaaccatggcagtaagctcgagccagtgttcgtatttgccattgatcggccaccaagtgcttgctatgtgccatgcattgtgctaagcactatctcatttaatatttacagcaatcttatgaggtagatgctactgttatctccattttacagatggggaaactgaggcacagagttccacagctggtaacttgaggaataggaattcaaccactggagagtctggctggagttttttgtggtaggagaaaatatgctgtctaaatttgccttgggaaaccatcatggtggtcacaaaaccacttctacggcttgccttgacctagcaggaatgaagatataaagaaagaatgagcgcgtcatggttatgatgggatgatgatgtctgttgtgttgtttggtgtcagtttctgtaacgcctttctatttcaatcaaggctattaacttttcctctgttttagtgaagtttccttgaagtagaaaatgggagtgtattgggcatctcagagttttcagctgaactgaagggtctgatggtaactttacccccaaatccctgagagaaaagcagggggtccctgcttcagctctgctcagaagagcctccctcacatggtggtttctgtgtcactagactggttaaccaaatggttcttctaaatacccaacttttaatagaaactcttgcggcttggattattaaagtcctaacatgcttatttaatc

SEQ ID NO: 254748 - DNA, 524 bp, Homo sapiens
aaacaatgcattttatcatagggccggacagctacatgcacaagatgctacctgcagagattggtttttgcccagatgtgcaggagagatgcacagagaggaagaaatgcatacatgtgtgcaggttttggcgtgtgcacaagaagcctggaaggattttctttggatctacagtcaaaatggatttccgagaggaagctgtctgaaaacacacctcttccctgtgctacatacggtcccatctctgccagccaggttgtcaggaaagtgatcagcactggcttcaactctggctagagctctttggccaatgtgatgggcagaaaactggaatgaggacagaaaagcacctcagaggtttgaagagtctagtctctcaccaccttgctgctgagacttatttgaatgcctgtttcatatggagcttttaagtgtaacagttgtgagtgaaattgccccttttcaagcgctccgagtttgcttctgcatggaaggggaagatggactagagctgatacctcctg

SEQ ID NO: 254749 - DNA, 452 bp, Homo sapiens
gctgagacttatttgaatgcctgtttcatatggagcttttaagtgtaacagttgtgagtgaaattgccccttttcaaggtaattgaattccatttttcactttccatttccctctagaaaaatcaaaacgttttcagagcttggcttcttagtgggtgattttctaaggtgggaactttagaaccataaaacattctagtgtggcaaaggcattcaggaaccggatgaccaggccccttctccgcaggtgaacagcctccaccagccggtcttggagaacatattgatttcactgtgtttttatttgaaacaccaaaggaatgcccatatcttgtccttgggccagggctgtgggttaggggagctgggtttctgtccagaatcttgtcatctgtagggcagctgaggggcattattacccagaggtccctggaaacctgtgctaaattggt

SEQ ID NO: 254750 - DNA, 460 bp, Homo sapiens
caagttctgcaaaatagccatttgtaactttgtatcactaaggttatgaatttaagttcagtccgccctccatacatgtgggttccacatccacagagtcagccaaccacaaatcaaaaatatttgaggaagaaaaaataatacaggttagtaaataatatagtataacagctatttacataacatttacattttattaggtgtcataagtaatctagaaatgatttacagtatgccagaggatgtgtgtgacttatatgcaaatactgcaccctttcctgtcagagatttgagcctcctccagttttggtattggagggtgctggcatcctggaaccaataccccttggatgcagagggacgaccatatgttcagcttcacatcagtaggaagcaagccgcagcaacgtctcgttctgagccttttctcctgttactcccactcctccccaaatctgat

SEQ ID NO: 254751 - DNA, 688 bp, Homo sapiens
ggggatgctggagtctgtcctgcagaggccgtggcgcgggcactgctgcctgatttcgaagaggctccatcaacctactctcttccaaagggctgggcagcccagccacagacaggcagcctctggatctcagaagtgagggacggagtctatcctgggtttggtccagtagaaaccccccacccccacccccagagtctgggaaccagtgctgtgcccacagatgcaaagagaaagagcatgggttaaagcgctattgggatcggttagacaccacacttttccaaggaagacattttcttcgagaggaacagcaaaaggagtcaatataatgttaaaaatattaaggcaggtgctgtgccacatgttgaagtgattccaaaagcagagaaaacatgggactcacatttaagaggattaattgtagcctttgagtttttcccagaaaaaaaaaaaaggctagcatatatattttcatatatttatatgaacaggtaattaaataaggagggattttaaaaaattgtctatttggatatcgttttcctttccatttgaggaaaagccaaatgcaaataaggagaataatatttaaagaacatgcttttaatagagcctcaattatccttctaatttaaccaagatgaaaataattgtgaaataaagcaaaataaaatcttggaagcat

SEQ ID NO: 254752 - DNA, 793 bp, Homo sapiens
tatatatatatatatatatatatatatatttataaataatatttttattttataaaatatttattataataattcctactagctgtaataggaattcccatttatgagcggttatgatcttttctagtttatctctcccctaaagatttcaacaaagagtatatttgcttgggaaattttagagttttgggttctgtataaatcacaagatttgtactgctcacaatgatggaaactaactgcattgggtcagtaatttggctcacagagttgatcatctatattctaataattaaatgtcaccaaaatatttatttaatgatttatattagaattgagaatgatacaatatcttactttagatatgaaaatttggctgggcgcagtggctcacacctgtaatcccaacactttgggaggctgagacgggaggatcccttgagcccaggagtttgtgatcagtctggacaacatagtgagaccttgtctctacaaaaaaaaaaaaaagaataaattagggaaaaaaagatgaaaattcacttttagcagtcgactgttttagaaaaggtgcctaatatatgttagagtctgtgtttaaagtgtgaaaggaaaataaaaacgtaagacccccaactcactctgccaaaagaaaaaaaattaagctgaaagctgagtcatgcagaaagctgcctttccttttgttcctaagcagatagctacagataaagggttaaatatttccacaggtagctactttatattcaccttatcttatgtaaagtgccaatttact

SEQ ID NO: 254753 - DNA, 416 bp, Homo sapiens
tgcaaaggagtttgatgcctttcttcatcctctctccgcctccccaccccgctgttgatgctaatctgaactcctgaaggagtcaccttcccccagaaaggtgtcctttgaggggaggagagaaggaaaatgtggggatggaaatgtttcttgattgcctacatctgattagtaattacacgccaagagccgctctggagagaaacactgtctccctctgatgaggaagaaatttaataaggcagttcttccaggtggaggttggggtaggaaggtgatgaggaggagaggaggtggtaacagatatacaactgggggacctgctgctagttgggctggggtacaggtaggcagattattgtatccttcaccagcattaccacttctccatttatcagcatgagtgatcttgagct

SEQ ID NO: 254754 - DNA, 410 bp, Homo sapiens
tttcccttctacctcagaggtcagcaaactgtgcccctgtggccaaatccagccagccacccgttttgtacagaaccgtgagctaagaaaggatttacatttctccatggttgaaaaaaagtcaaaacaagtataatattttgggatacgtgaaaatgatatgaaatttacatttcggtgtgcataaatgaggctctattggcacacattcggatatggatttatttattgtctatggccacagaggagtctcaactgagagagtcaagcctgaaatattcgacatctggctcattaaagaaaagatgtgctgacctccgctctaattccccccatcccttattccacaggattatttttatgttacctttatgcactttcctgtttggataatacaataatttgcccta

SEQ ID NO: 254755 - DNA, 516 bp, Homo sapiens
gaggactcgtcaagcaagtaaatgtggttagaaatcttaggactagtagtcttccttataatactaactgttttactattgttccgttgctgtgctcaatctcctcccccaggcaaggccctcttctgtccttgctggatatgaatacgctgtacattgttttgctgttatcaccccccttgaccatgttaaaataagtacccttagaaagtgtccccattgtacacacactacagggtcaggaaacagtataactaggactctattattctatacttattaggagtgtacagggactcacctaggaacttgtacttacaatcggatcacctattcaatttgtgacccaggaaatggccagccttatatatgctatgaccttctaagtctttacctaggacttggtttgaggttcatactgagtcaaagaaaggaagtcttataaatcaaagccaagcctctaccccccagggggggctatagccatatactttgatatttgtcagttaacatccg

SEQ ID NO: 254756 - DNA, 231 bp, Homo sapiens
agacctgctcgacggagaattcaatgtgtgctgctgcaactgcaggtagtgccgtggagttcggcttccagtggggtcctgtgtcaagtccatgggattttcctgccctccaggtctcccaaccccaggctggcaagtggaagcctggactgaacttggagctcctgcatcctcaaagagtgcttggccctgtagattattattcattgaataaacagatgaatttctcta

SEQ ID NO: 254757 - DNA, 477 bp, Homo sapiens
gaaagccaattttgtttgatttcatatacttttttatttttctacctttatttcgtttatttatagatcatgggtatatttttagactgggggaaaataactttctataaaaggatatgtattttcctagatacttttatcattggatataacatttaggaggagagggcaaaaaaacagaggctggaaaaaccagagagttgcaaataaacacaggaggaatgttggtgaacatactcttgcaaatgttagagccactcaaaataaaaatatccatttgaggaaaatcaaacactagtatgtattattttacacttttttaacctctttggcttatacctttatactcactcttcaagtggtaagtcatccccagactacagacactaacatctccaaataatttatcacagttcatactgtcaaaaaaataaactgcttacactgaaacaaccaccatctcaacccaaataagtg

SEQ ID NO: 254758 - DNA, 262 bp, Homo sapiens
tgtctgtgagactggaagcctgggagactctaaaatcatgctgagatcatgatgaattccccatcaatgtctgtcattcagaagtctggaaacccaaattgagaagttcccaaacaaaactgctggaccttgaagaggctacaaaagagtgagctgtggtgcctccatcactcaggaatgtgaggggctggccagctcttctggtcctagttctcctttgtgtcaccccctccttggcttataccttgccaaactaaatctt

SEQ ID NO: 254759 - DNA, 159 bp, Homo sapiens
tatatttttggtgaagtctcaacctctattcagaaacacatgaagaatatttttaaccgtggacatactaaatttgagctgtttgggagacatttgggtagtaagcgttctatagacatttgaaaatgagcctgtcttaatgtagaaagttgaatatgg

SEQ ID NO: 254760 - DNA, 439 bp, Homo sapiens
aatactctgtaccctggggctgggtatgctcagatcttgtgaggattactttataagaggaaaagaaccaggttgctgccctggtgatttggatggagctaaggatgggaagagagaggcagtattcagaccaggaattggagctggaggttgaatttcaccaccatcttcaggtgcaaaacctcaagaaatccactcagtctaaatttaaacctgcctttctagtttcagtttcctttgagtaaactaaaaggatgatgccaatcagggaggggtctggaacactgtgtggtcaaaaattacttagtctggactggatggcgtgaggggaagcctctgggcatggagtaggaggggctgtgtgctgggctggacctccatctcgatcatttcctttgtgttttctcttttcaataaaacaacatatttgatccctcta

SEQ ID NO: 254761 - DNA, 409 bp, Homo sapiens
atcttcaattataatcacattctgaggcgctggggaaaggccttcaagccatgaattttaggggtacacagctcaggccatattaccttgcatttctttttataaaataacatttatgatctcacataagaaataggtgtttcatgtagaaaactgtactatattggtaagaaaaaagtaaacaaaattactcataatcttatctaccaggaataactactattgacattttgcctactgtgtcccaaaacttcagtgcatagacatgtatagattctaaaaattgagactatacaatacgattccattttccacctttatctgccaacatttctcctgtttcattcttccttcatctgcttcctcctcatcacagatgatttattctttcctttgtcacttgtctttc

SEQ ID NO: 254762 - DNA, 233 bp, Homo sapiens
agggtctccctatgctgcccaggctagccttaaactcctggactcaaatgatcctcccatctcagcctcccaagtagtggggactacaggtatatgccactgttcccagcttgagatggtagcatttttatgtgtaaaatttaggacactaaattacaaaaagagtaacaaccatgataccagagtgataagctattctgtggcggcaggaagatctctgtagcccctgaaat

SEQ ID NO: 254763 - DNA, 485 bp, Homo sapiens
ggagttaatgaacaatcttttattctgagtattttgcactgtgcatatctggctttcaaaataggttaaatggctaaatttggcaataagatcaagtaacacaattcttcacaattatgacagtattccctaaaacataatacatattgggaatgaagcactgattttgtttttcactattccttgcatttgcataatgaaggccgggtgtggtggctcatgcctgtaatcccagcactttgggaaggccgaggtgggcggatcacctgaggtcaggagtttgagaccagcctggtcaacatggggaaaccccatctctactaaaaatacaaaaattagccgggcgtggtggcgggcgcctgtaatcccagctacttgggaggcggaggcaggagaatcacttgactgcaggctgaggttgcagtgagccaaaatagtggcattgcactccagcctgggcaacaggagcgaaactctgtctccaa

SEQ ID NO: 254764 - DNA, 479 bp, Homo sapiens
ccatgttatagtatttggtgtcattttaagtgcattttgtgcatttatttggaaattaaccactaaactgatcttactgttccctgttattaagatgtaattcaaatgccataaaaattcactcttttaaggtgtacagttcagcatttttagggcattcacagtgtttactaccatcactgctgtctagttccaaaattgttctaccctgaaggaaacttcataccgttcatatccattcttcctctgcccctaggtcccccagcaaccagtaatatgttttctgtccttatagatttgtctatgttggatatttcagataaatggaatcatatagtatatggctttcttgggtttttttgtttgtttgtttgtttttaggcagagtctcactctgttgcccaggttagtgttgcagtgagccaaaatagtggcattgcactccagcctgggcaacaggagcgaaactctgtctccaa

SEQ ID NO: 254765 - DNA, 302 bp, Homo sapiens
tcccctgtaatccactcacttctcaccattcttactgccactaccttggcctgtctgctgccatccatcatctggtatctggtaatctgcctgcacctctctcatccatcctctttgatacggtgacagtgatcttcctaaaatctaaatgagatcatgccatttcatccctaaaaccctccaatggctattggtgaaatacaaatcaaaattacaatgagataacatttcacacgcagtagagtggctataatcaaaaacacagacaacagcaagcgttggagaggatgtggataaactgg

SEQ ID NO: 254766 - DNA, 557 bp, Homo sapiens
ccactcagtaaacaggatgatcaatgcaaggattatgtttcattgatgccattgtttactcttgttaatgctatttatatgctcagcaaaaactcccacaagatcccagtgcttcacagttttttaaaatctgattgattataaatggaagaaatatggtagctcatctaccggggatggttgggacagcagaaggggagacttcccctcagtgtggaattttgaggtatgcagagattttatttcaatttcacgtccactttctgttcctctccactcctcactcccccagaattccttttacttctggtttctaggatttacatacagctttgtttttcctttctgcaaatcaaacaatctgataaatgtattaacaggaagtcttcagagaaaagagctatggacttttccaagggtatttttgttcttaaaacaacaacaaaagaaatagtaaagaagcatataaaacatacatcaagatgaaataagaattagttattgtatcatttagagaagtcaaaaattcttttaaaaattctgttttgaagaagccc

SEQ ID NO: 254767 - DNA, 298 bp, Homo sapiens
atttcagatattctcaactttaggagcatctttagtccattcagggtgctatgacaaaataccatagactgggggggttatcaacaacagagatttatatctcatagttctaaagcctgggaagtccaagatcagggtgcctgcagatttgatgtctggtcacagccacttcctcacagatgacaccttccttctgtgtctcacatagtggaagaggtgagggatctctttgggatctcttctattgggcactaatcccattcatgaggaatccatcctcatgacctaatcacctcct

SEQ ID NO: 254768 - DNA, 606 bp, Homo sapiens
cgctctcatcctaagctcccacgtctggtgtggctgggggggcgtcacaggtcccgagggagcgtcctgcctgaagtttctccctcctaacccactcgctgcactgcatatgttgccgatgttttcatttctgtggcctcgacccctaggctcccgtcccataaatctagtaccccaggtcccgggcaccggcccggctcactaactcagtggcagtatatgctttcgacatttggtcctgatgtccaggaatagcgcgaaaagtttgactttgttaggcgaagccgttttggaactgcggagggatgggaagaaatcgccgagcgtcttaagccgcaacatagtgctctgctcagccctggaaatagaggttttcagacattgaaaactttccaagtgctccgtcttggcggagaaagaactgagttggaaggctaatttagaatgaactttttgcttttgttctttgcaaaaattacataaaatgttgcaacagttcgagaccaggactataacaaaacgcatttcatggagctactttgtaccgcgcttggcgacttaccttgtcagagctgaataaaagtggttgagttcacaaaaaaaaaa

SEQ ID NO: 254769 - DNA, 293 bp, Homo sapiens
attcttacttaaaaccaggtcttgactggagcagggaagggaaggagagccccacatactctgctgcagctgaaggtctagttccttcgttcctatccacagggactgagcagggaaggaaaaagaaggtccttcctccctcccttctttctgggttctgtcttttatctgcttgaaagttgtgttctatacttttcttggagtcaggtcataatatttgcttaactaaatagcaagaacctgagatttttatgttctactcaaagagaggttattgctttcccttccctgca

SEQ ID NO: 254770 - DNA, 529 bp, Homo sapiens
tacagtacttaagataaccctgtgaaggctgagattgatatttgaaattcacaactgatcttggagcctggtacagcagtcatggatttgttcatgtgtggatgtgatggaactgaagtcgctaggttcatgctacctggaacatgagactgacaaatagaggagcactgagtcaaatgaatctcggagaaatggagctggaagaaaactggaagtttcattcttgttgcccaggctggagtgcaatggtgtgatcttggctcaccgcaaccttgacctcctaggttcaagtgattctcctgtctcagtctcctgagtagctagtattacaggcatgcaccactatgcccggctaattttgtatttttagttgagatggggtttctccatgttggtcaggctggtctcgaactcccgacctcaggtgatccacctgcttcagcctcccaaagtgctgggattacaggtgtgagcagccgtgccctgctgaaacttatttgtttgagcaataaaagccacatatttcctc

SEQ ID NO: 254771 - DNA, 526 bp, Homo sapiens
gagaatgggctgaacaaggcaaagggaacgccaagcaactagttgggaggggtactaggtggctcaggctgccaaaagaaaatagcacaggctgggtgtcttaaacaacagacatttatttctcatggttttggaggccgtgaagcataagaccaaagtaccagcaaggaatgaaagaaaagatatacgcaaagtggattctaatcatagagtttcattcttgttgcccaggctggagtgcaatggtgtgatcttggctcaccgcaaccttgacctcctaggttcaagtgattctcctgtctcagtctcctgagtagctagtattacaggcatgcaccactatgcccggctaattttgtatttttagttgagatggggtttctccatgttggtcaggctggtctcgaactcccgacctcaggtgatccacctgcttcagcctcccaaagtgctgggattacaggtgtgagcagccgtgccctgctgaaacttatttgtttgagcaataaaagccacatatttcctc

SEQ ID NO: 254772 - DNA, 488 bp, Homo sapiens
tggttcccaaaattcagggattacagatgtgagccactgtgcttggcaattttaaagtcttaaaacagtgttatattaatataaatcatggtaggatttgacatttcaaagaacttgaggataaaaacatttcttaggggaccaaaaatgatcactaatttgtaaaatgggcctagactcacccacatctcccaagtgatgtttccttcttcagagctgctctacatgtaattaagagaacagaagggccgcctgcatcaatcaaatgcacaaccttccctagcacacacagttccaatgaaaatccaaacagctattgggatgaactgaggaatgatgtttatcaggtcttcaaggtgaaaataccaccagcatttattactgagagaagaatcttttagcaaacaatagaccaataaattttacctctcaaaaaagtgtttcacttcattcttccacttttgactccaagtcataaaagacccagc

SEQ ID NO: 254773 - DNA, 296 bp, Homo sapiens
aggagtgctagccaagttcaggatgtaccatttttctatccaatgtttgacatacagagtagatgaacataaacattcacttttttcctatgaagaatctacatttaatttaacttacccatgataaactattgtattaatgattatatcttttaaggagacctcataaatttattgtatcttagaaaaatttaacatgtattaaatataatgttccagaaaaggaaaagggaaaaaaataaacacatgaatggcactgctactgctgcttagcattctaacagaccagctcactg

SEQ ID NO: 254774 - DNA, 521 bp, Homo sapiens
aactttgcatgctgaagccctcatctccagtacctcagaacatgactgtgtttggagacagagtcttaaaaatggtaattaaagttaaataaggttatataggtgggctctaatccaatctgactggtgtccttataaggagaggaaatttgaacccacaagagataccagggacatgtgcccctgagggatgaccatggggagaggcaggaagaggatggacaactgttttgctaaggaaagaggggtcaaaaggagtcaaccctattggcacctcgatcttggacttctgtcctccagaactgtgagaaaacaaacttctgttgtttaagtgacccagtctatggcattttgttacagcagccgtagcaaactaatacgtcatctgaggtgtgttttgagaccacataaatatgttaacatttcactcagtagagtctgattgctacttcaaggaaatttgtaaaaaattactaacttgaatgataaaatcttagatttggaccagccctgcgacctta

SEQ ID NO: 254775 - DNA, 440 bp, Homo sapiens
ccaaggctttgggacaaaacgccccagcccttgagcctggagggctagtccttccagaagaaagtcatgctttgtctttgctgagattcactcagggctaacaaaagcctggtttacagatgtgcagcttttctggaacaggactgcttcctagcacagtgcattcctttactgaaactgataaagcgagcctgccccattccagggctgtcaccgcccccaccccagttccagggcccttgagggatcccgggcagcgggcagcaggaccttcagaggaccagaaggctgcacttctgagcacccagcacagttgtttctactaaatgccgaaagcaagcgttaggatcaggcgctgggttctaaaatgagatttactgttgtctcttctgtggttgaagcaagcaaagagagtatttctaaacgagttcatgtcattg

SEQ ID NO: 254776 - DNA, 401 bp, Homo sapiens
cagagccctcatcaggaactgaattggccagcaccttgaccttggacttccaacctgccagaactgtgagaacataaatttctcttgtttcaactaccgagtctctggaattttgttatggcagcctgagaagacaactgagacacacaaataccaaacatggggaaatatttggaaaattaaaataatgaaaaattcaaactcttcttggcagtgaaccaaaatttagttttctggcacactttggagtcactatgtaacattggttgttataaaatagaagaaagaatcaggtaaataaagtagattgtaccttagatttgttctggaaaccaccaagcagaatacatcataacacatagtcttacattacaataaaactataatattaacaagttcta

SEQ ID NO: 254777 - DNA, 832 bp, Homo sapiens
taattctcatggcaatcctgagaggtaaatagtgtcattcccatttgagagacagacaagctgaggctccttgaagttaaaatacgtgtgcacaaaaggcagtagaacatggtggtttagagcacaggacaaagccgggcgcggtggctcatgcctgtaatcccagcactttgggaggccgaggtgggcggatcacaaggtcaggagatcgagaccatcctggctaacacggcgaaaccccgtctctactaaaaatacaaaatattagctgggcgtggtggcaggcgcctgtagtcccagctactcgggaggctgaggcaggagaatggcatgaactcaggaggcggagcttgcagtgagccgagatggagccactgcactccagcctgggcgacagagcacgacttcatctcaaaaaaaaaaaaaaaaaaagagaaaaatagagcacaggacagatcttaaccaacccgggcctgttagctccttttcactggatgatgtatgagggaattttactttgctgaggccttacttccccagtagtaaatgagagaatatcactgcttaacttcatggggctttgtgagggtttgaaaaagtgatgtatcaaaagctcctggcactgggcttggcaggtgcaaatgttgagcaatgttaactgttaacactgcccaaggccatcacaggaggaatatttgcaatctgtccgtggctctggctccaaagcctcagggacgctcactttttctgcccacaccctcactcacactcagtctcccttctccggggcctctccctgcgaaccgctacctggacccctagcctcacgggg

SEQ ID NO: 254778 - DNA, 320 bp, Homo sapiens
cactgcacagataagatcagtccacagagaccacagcgttgcagtaaagaaagagtttgatgtgaggccagccacgtgggaaaactggagttatcactcaaatcagtctccccaaaggcttggaggtcaggatttttgtggacaatttggtgggcagggagctagggaatgggtgttgctgatgggtagggggtgaaatcataggggtgtggaaaacagtcctgatgtgctgagttttcctctgggtggggccacaggaccagctgaatcatgaatccaggtggggccagtgtgaagaacgtatcaaaaaatcaatctta

SEQ ID NO: 254779 - DNA, 344 bp, Homo sapiens
tcctttgatttgcttcagctgctaataacagacatcccaggcaacaaagaccatcacagactaagccagcacatcatgaccagcagtgcctggccgaaagggtcccgaagccctaacggttttccggtctctgatgcagtgatagacatccagggcacccaccctctgcgccttggaaagcctgcagcaccgtcgctaagagcaagtggtctggcaagttgccaagcaatccgtcgtcttcctttctacttatttcctgttttggatatagttagagctcaaaatcaataaaaaagttcttgcgttccaatccccagttagacagatgggaaaacaaataaaaa

SEQ ID NO: 254780 - DNA, 4331 bp, Homo sapiens
ggcttttcttccccttctgattttcccctccccccttttctccctttccgggtttggttccccccttttcttcccctctcccccctccttcccaagcccctttcccctcccccgtcccagtcccccctgcttcccagccctcggccccggggaagccccggccgagaaaagcccgcccccagaagcgcgccgccgccggccgtcggggccgagccgcagccgagcggccgtgggcccgggcggcgggcggagacgtgggcgccctccccgccaaggcccgtgcgagaggttagacttgtttcttatatgtgatgccattccagcactggactcatggaggctgagcatttattcaggagtccatagaggccactgtattctattgaagaacatgtctaacagtaacactactcaagagaccctggaaataatgaaagaatcagaaaaaaaaactggtggaagaatctgtaaacaaaaacaagtttatatctaagactccaagtaaggaagaaattgagaaagaatgtgaagataccagtttgcgtcaggagacacagaggcggacatctaaccatggtcatgccaggaaaagagccaagtctaattccaagctaaagttggtgcgtagcctggcagtgtgtgaggagtcctccaccccatttgctgatgggccattagaaacccaggatataattcaattgcacatcagttgcccttctgacaaggaggaagaaaagtccacaaaagatgtctctgaaaaggaagacaaggacaaaaacaaagaaaagatcccaaggaagatgctgtccagagactccagccaggaatatacggactccactggaatagacctacatgaatttcttgtaaatacactgaaaaagaacccaagggacagaatgatgctgctaaaattagaacaggagattctggaatttattaatgacaacaataatcagttcaagaagttccctcagatgacctcatatcaccggatgctattacaccgggtagctgcctattttgggatggaccacaatgttgatcaaactgggaaagctgtcatcatcaacaaaactagtaacacaagaatccctgaacagaggttctcagaacatataaaggatgagaagaatacagaatttcaacagaggttcattctcaagagagatgatgccagtatggaccgagatgataaccagactggccagaacggatatctaaatgacatcagactctccaaagaagccttttcttctagctctcacaagagaaggcagatttttagggggaaccgtgaaggactgagccgcacctcaagcagccgccagagcagcacagacagcgaactcaaatccctggagccacgcccttggagcagcacagactctgatggctctgtccggagcatgcgaccccctgtcaccaaagctagcagcttcagtggaatctctatccttacccgaggtgacagcatcggcagcagtaaaggcggcagtgcgggaaggatctccaggccaggtatggcactaggtgccccagaagtgtgcaaccaggtcacctcatcccagtctgtccgggggcttctcccttgtactgcccagcagcaacagcagcagcagcagcagcaacttcctgctctcccacccacgcctcagcaacagccacccttgaataatcacatgatctcacaggcagatgacctcagcaacccctttggacaaatgagccttagtcgccaaggttctactgaagcagctgacccatctgcagctctattccagaccccacttatctcccagcaccctcagcagactagcttcatcatggcttccacgggtcagcccctccccacttccaactattccacctctagccatgcaccacctactcagcaagttctgccaccccaggggtacatgcagccccctcaacagatccaggtttcttactatccccctggacaatatcctaactccaaccagcaatatcgacctctctctcacccggtggcctatagcccccaacgtggtcagcagctgcctcagccatcccagcagcctggtttacagcccatgatgcctaaccagcagcaggcggcttaccaaggcatgattggggtccagcagccacagaaccagggcctgctcagcagccagaggagcagcatggggggccagatgcaaggcctggtggttcagtacactccactgccttcttaccaagttccagtgggtagtgactcgcaaaatgtggtccagccgcctttccagcaacccatgctggtccctgtgagccagtctgtgcaaggaggcctcccagcagcgggggtaccagtgtactatagcatgatcccacctgctcagcagaacggtacgagcccttctgtagggtttctgcaaccccctggctctgagcagtaccagatgcctcagtctccctctccctgcagtccaccacagatgccacagcagtactcaggagtgtcaccttctggaccaggtgtagtggtcatgcagctgaatgtccctaatggaccccagccccctcagaacccatccatggtccagtggagtcattgtaaatactacagcatggaccagcgggggcagaagcctggagacctgtacagtcctgacagcagcccccaggccaacacacaaatgagcagcagccctgtcacatctcctacccagtctccagcaccctctcctgtcaccagcctcagcagtgtctgcacaggactcagtcccctgcctgtcctcacacagttcccccggcctgggggtccagcacagggtgatgggcgctactcccttttgggccagccattacagtacaatctgtccatctgccctcccttgctccatggccagtcaacttacacggtgcaccagggacagagtggactgaagcatggaaaccggggcaagagacaagcactcaaatctgcctccactgacctggggacagcagatgttgtcctggggcgggtgctggaggtgacagatctccctgagggcatcacccgtactgaggcggacaaactcttcacgcagctcgccatgtctggcgccaagatccagtggctcaaggatgctcaggggctgcctggagggggtgggggggacaacagtgggactgctgagaatggccgccactcggacctcgctgccttgtacaccattgtggctgtgttccccagccccctggctgcccaaaatgcctcccttcgtctcaacaactccgtgagtcgcttcaaacttcgaatggccaaaaagaactatgacctgaggatcctggagcgagccagctcccaataaatggaggaggggaaagggactgtcacagaagaagcaagggcagggtggagggggttgaaggatcctgacagaccatggacagaggcaggaagtaaggaaactgatgttaaactggaacctaagacagtgatgaagatggaaacacagatacctacactggcattggactccttcttgctcccctgccatgggtcctctctttttccctggttgaccccccttgcatcactcttcttcccatcctcttctttttttttttttttttttttttgagacggagtttcgctcttgtcaccccagctggagtgcagtagcacgatcttggctaactgcaacctccagctcctgggttcaggtgattctcctgcctcagcctcccaagtagctggcactacagacacgcgccaccatgcccggctaatttttgtatttttagtagagacggagtttcaccatgttggccaggctggcctcaaactcctgacctcaggtgatccacctgccttggccttccagagtgctgggattacaggcgtgagccactgtgcctggcttccatcctcttctatcatttttttaaatctcttctcctatcataaaattaatttctcattttttggtcaggtagaattgggaaagtcccacactgtcctcctattaccttaacatcccaagcttcctttccttttttggtctttatgaatatatttatatggacagaattaagataaacaaaattgattgccccattctctcacttccccatcttgtcttcctagaccccacagagttaaaacttgggattcccctggcccccccagaacacttgtatattgtttgtttgaggttcgtgccgcagtaacagacacagtatttaattgcacatacagatgtttgctgggtatattcactgtaaattttatttaatctgtttttttgtttgtttgggggttatttggggggaggttggttttgtttttaaatataaaaaaaaaaatctgtcactgg

SEQ ID NO: 254781 - DNA, 480 bp, Homo sapiens
agataattacaacagccaaagagagaaggaagtgaatttcccaaccagaagcgtagggaaattcagatggctttcttttctcccagcagaggaacagaaggcggagctaagggcaggaaccaggagttggtcaaggagctataggaggtgatgagagtagaaccaggggtaggagctggtctggtacccctcaccctctaattgggagcccagggagaaggactgaaaagaagatgggagtggaaaagaataaagccagtttctgcttcccagggatgcagagattggggcatgctgtgtctgcagaagctcctagtcatttccgccataattgtgagagagaggggcagccctcccacaagatttttcccttcccatatcacttccctgaatccccttcctttccccccagtacagttaaacctctctctaatttggaatgttatatttgagaagatggccactgtgaataagtgacaa

SEQ ID NO: 254782 - DNA, 562 bp, Homo sapiens
tcctatctacctacctgcttctggggattggagaaattaatgtaagtgctttatccactgtgaaaccaatttaagtagaaggcacagatgaattaagaaacacttcctgctatgtatgatctttgtccttctcattctctgccttttctgacttgtggcctaaatcataaatgcttcctgataataataatagctgtcaattgttgaacactttctccatgccaggcattgagctaaatgcttcacaggtgttagtttattttatcttcatgataaccttgctcgctggtagtcttattgtttcagtccccacagttgaacctggactctgaatccagcatgctcttctagaaaagctcatgcacttccctttaggctgcattttaaatgaaggagctgcattcatgattttcaattttgacatttaaaaaatgatctaggtcgaacgcagtggctcacacctataatcccagtactttgggaagctgagatgggtggatcattttgaggccaggagttcaagaccagcctggcccacatggtgaaaccccatctctactaa

SEQ ID NO: 254783 - DNA, 665 bp, Homo sapiens
agccacctaaagctggggttgaagtgacacaagcatccctgtggccaccaccactgggactgtgctgggtccgacctgaagccagcacagcactgggtctcacccaagacctcttgtaaccactcactagctactgcctatgtttgcttaatgccctgggacaacaatcatcagatggaaaaactagccaggcctgtgtccttcccttcagggcagcaatgtttcccaggccccaggtgggtccagatgtgccatccaggagtcagggattacagtcaaacaaccttaggagtttatctggtgttcttttttactgttctgagctggcactcaaatgacaagacacagtcctttctactgttcccttccctttacaaaggcagaagagccttaccccatagctattgccacccctcaccatggggcgtactgccagactgctgccaatgttcccttaaatcccaaaggctcttcattcagcttttggtgaatgttgcttggtctgggactcacctttcagggtactgggttcccctctgcttcagggcaggtttcagaaatgccatccaagggtcaggtcctggaatcaggaataccatcaggctacttttgtgctctacactcctgtgaccatgctgtacctaaagccagcaagtctcagaggc

SEQ ID NO: 254784 - DNA, 909 bp, Homo sapiens
gtaattcttcccactgccctctccccaggttgtccctgatctgctttttgtccttgtagattagttgcattttctagaattttgtataagtggagtgtatctacagtatgttctcttttgtgtctgccttcttgtactcagcataattattttgagattcatccacgtctttgcatggatcagtcatctgttccattttattgctaagcagtattccactgtatagataaataacattttgtttatccgtttacttgttgatgaactttaagttgtttccagttttgagttattagagtaatgctactatgaacatttgcatatgaatccttgtatggacatgaactttcatttcttttgggagtaggatagctggatcatatggaatgtatatgtttaacttttaaataaactgccaaactgttttccaaagtggttgtaccatattacattgccaccaacaatgtatgagaattccagttgtcctatattctctccaacatttgatatcgtcggtcttttcaattttagtcatgctaacagatatatcatggtacctcattgtgttttaacttgcatttacctaatgactaatgatgctgagcatattttaatgtatttatttgccattgacatattttctttggtgaagtatcagttcaaatcttttgtccattttgagggaggttgtttgctttcttattgagtgttggacattctttatgtaatggatataagttctggacttaagttctttatcagacatatgctttggaaatgctttctccccgttcgttatttgtcatttcattctcacattagtgtcttttaaagagtggaagttttacattttgatgaaatataatttatccatttgtccttttagagattttgcttttagtatcatct

SEQ ID NO: 254785 - DNA, 501 bp, Homo sapiens
gagaaacatacagttttgattgtcacatgttaaatggaatttcactttattttagcttctagctggcagtatcttattacagaggcatgctgtaacagttagttcacaagctacttatctcaacgtgtttatttgaattctcttcaactctttcgcgatacgggtgtggggttcaggatttctaagggagtcagcgctgactatacagagaaaaatccccaagggagaaagtcaggagctgctaagaaggtcaaaaagaacacaggggaaaaaaagaaaaatgagttatgccggtgttctttaaaattgaagacagaaaaattcttggctgcactttcattctatttcaccttacaaaaacctcctgctattccactctgctcaaagtcttctttccaaagtactttgaattaaaacatgaagtaatccttactaagtgtccataggatctcttctttatccttcgctgtgtaagtggggacaaaaagagctacccagtat

SEQ ID NO: 254786 - DNA, 442 bp, Homo sapiens
gccctctccttcctgagcagcctggaaccccaggctcagggctaagccctgagcacatcggagcctcaggaagtgccactgggatgttagctgcaaaatacttctcctgtgagctgaacatctgtcttgggtggaccagagatcacgcccatttggctgtgcattcaaatgccctgctggcggcagcctccacttcctggtgatttctgctttcttttttgccaagtcacatctgtttgccatctgtaggtagctgatcacatttcaaaaagctggctggggttttatgcatatttcatccactgggagattttggagaaggaaagctctctttaagatcaaaatgagctgaagaggtgctcagctgggtcacccagacagtgaagattagaaaggccctaattccagcctgggcaacatagtgagactttgtctctactta

SEQ ID NO: 254787 - DNA, 664 bp, Homo sapiens
ttggcttgctaatatgtctttgggatgtttgcaactttgctcaaaagtgagactagtctgtcatttacttccttgcaatgcccttgtcagattttgatatcaaggttatcctagcctcttaaaataaaaatgggtaatataccctctttttctgtcttctagaagagtttgtattaagttacaatgatttcttcttaaattattgcaaaaaactcatccctaaagccttctgattttgctttcttttgggtaggttttcaatttctagttccatttctttaatagttatgagaagtcaagttcttcttttttttgcatcaactttgttatattttatttttctaaagtttccatttcatttaaattttttaaagttttacagaaatttattcatcttgtctcctttttaaaatgtatatattttaacaaaggtagcttttgaaaaaaagaagaaaagatatataatgatggtcatttcacttttataatattagttacctttgccttgttgctttttctttgatcagtctcactagaagtttattcattttattagactgtttaaagaaccaaattttagcttgttgatccactctaatgtattctttttagagaaataataaatacacatatttcacagtttagagtaaatatagtatagagt

SEQ ID NO: 254788 - DNA, 864 bp, Homo sapiens
ttctcagtccctgtggaggctaacgcaaagctctgtagaacaagccttagagtgcatgctctatggtctaatgagaaacttgtgtttgtgcttgcacacgtttcaatgttccctacaggatattttacaaaggtatgaaaataatggccaaccagaagctagtatcagtttggggcctaaatgcagcaggtgttcctgataagcagataagcagagctcttcctgcagtagcccaggtctcaccaaatgacaaatggctaatcaagacactcctgcaagcccttgatggtgagagctgcagagctgtttcttcagctgccatcaaggcaggacctcaggacctgactgtctacagtcagggaatagtgaacaatatgggatatgggtataggtaggtggtagacaaggatcgtgccccatggctgatgggccgggtgtctcaggcaggccccctgtgcacagaaagagcctaagtgcagagaagccaggcatctttcccctgtcatctgtggaaggggaatgtgatggccacagacaccctcatggcacagacatggccagcctctgacgttcctctgcatcagagtagttctgtcctcgaagccccagtcagcagagctggatgaccagatcgcaagaagcaaaccagaaagtgtgatggcagagatgtcagatcccgtttaataaacacttcagtaaaaaaataatcgatcgcaaaccaaaaagggggggcccgccaaaaaaattttcccctcgaaggggccacaaatctttaggcctttccccaagtttcgtggcacaaaggggggccctaaaggggagggcgtttaataacccaaggacacgggccgtctttttacaacc

SEQ ID NO: 254789 - DNA, 382 bp, Homo sapiens
ctttaattttttagagtaatgtttattgaagcataatttacatgtagtgaaagtaaaagtttaacaaatgtctataattggatagtctccaccacagtcaagacatagaaaaggacgtttccgttactctaaaaagttcactcatgccctgtcatgagtcagtcctctacctctacactcccagcccctgaaaaccgttaatttaattgatgctcttaaagttttatctcgtctggcatatataaatggaattatacattatgtagcctttcgtgttcccttgcacttagcgtaatgcttgatatttattaagttgttacatgtgtcagtattttgttcagtgatgtgctgggaaatgtcttaacaacatactcttcagaaa

SEQ ID NO: 254790 - DNA, 453 bp, Homo sapiens
ctccatgtctatattttataagtctaaaggaaaagaaatatatttctccctaacaatttcaacaaaaattccatagttgtgcttctctagccctgattggctgacttgggacatgtgaccatcctggctgcaactctgtgatgtatcctgtttaggcaggtccagatcacatcatcctcctccagctaggaataggtctagggtagggatattgtttcaaggaatattagagcattggtagcagatggtggagtaatgcatgctgttgaggccaaaacaaatgtgtactacattcaaaacattttaaatataatttctatactttcatacattctttaaagttttgggctcacaataatgatgtttccagtcaaagaaactaacattgttcatggctgttttgattcattatttttctttaggtggcactcttagtaaagactgtattaaaaa

SEQ ID NO: 254791 - DNA, 5169 bp, Homo sapiens
ggggctggtgcccactgatcttcaccacacccagtcagtcccagatgctgcaccagctcctgcagcagcacggagctgagctccctacacacccctccaagaagaggaagcactctgaatccccccccagcaccctcaatgcccagatgctgaatggaatgatcaaacaggagcctgggaccgtgacagccctgcctctgcaccccactcgagccccatcgccaccctggcctccccagggtccgctctccccgggccctggttccttgcctctcagcattgcccgtgtccagacaccgccttggcacccgccaggtgccccctccccaggcctcctgcaggacagtgacagcctcagtggctcctacctggaccccaactaccagtccatcaagtggcagcctcatcagcagaacaagtgggcgaccctgtacgatgctaactacaaggagctgcccatgctcacctaccgcgtggatgcggacaagggcttcaacttttcggtgggcgacgacgcctttgtgtgccagaagaagaaccacttccaggtgacagtgtacatcggcatgctgggcgagcccaagtacgtcaagacgcccgagggcctcaagcccctcgactgcttctatctgaagctgcacggagtgaagctggaggccctgaaccagtccattaacatcgagcagtcccagtcagaccggagcaagcggcccttcaacccggtcacggtcaatctgccccctgagcaggtcacgaaggtgactgtggggcggctgcacttcagcgagaccaccgctaacaacatgcgtaagaagggcaagcccaacccggaccagaggtacttcatgctggtggtggccctccaggctcatgcacagaaccagaactacacgctggccgcccagatctcagagcgcatcattgtgcgggcctccaacccaggccagttcgagagcgacagcgatgtgttgtggcagcgggcacaggtgcccgacaccgtcttccaccacggccgcgtgggcatcaacacagaccggccggatgaggcgctggttgtgcacgggaatgtcaaggtcatgggctcgcttatgcacccctccgacctgcgcgccaaggaacacgtgcaggaggtggacaccaccgagcaattgaagaggatctcgcgcatgcggctggtgcactacagatacaagcccgagttcgccgccagcgcgggcatcgaggccaccgcgccagagacaggtgtcatcgctcaggaggtgaaggagatcttgcctgaggctgtgaaagacaccggagacatggtctttgccaatgggaaaaccatagagaacttcctggtggtgaacaaggagcgcatcttcatggagaacgtaggggccgtgaaggagctgtgcaagctgacagacaacctggagacgcgcattgatgagctggagcgctggagccacaagctggccaagctgcggcggctcgacagcctcaagtccaccggcagctcgggcgccttcagccatgcagggagccagttcagtcgggcgggcagcgtcccccacaagaagaggccccccaaggtggccagcaagtcatcgtccgtggttccggaccaggcctgcatcagccagcgcttcctgcagggaaccatcattgccctggtggtggtcatggccttcagcgtggtgtccatgtccacactgtacgtgctgagcctgcgcacagaggaggacctggtagacactgatggctcttttgccgtgtccacttcctgtctcctggccctgctccggccccagccccctggggggagtgaggccttgtgcccatggtccagccagagctttgggaccacgcagctccgacagtcccccttgaccacggggctaccaggcatacagccctctttgctgctggtgaccaccagcctcaccagctcggccccaggttctgctgtccgcaccttggacatgtgttccagccacccctgccctgtcatctgctgttcctcacccactaccaaccctaccactggtcctagtcttggccccagctttaaccctggccatgttctcagcccaagtcccagccccagcaccaaccgctcaggccccagccagatggcccttctgccagtcaccaacatcagagccaagtcctggggtctttcagtcaatggcattggccactccaagcatcacaagagtctggagcctctggccagccctgcagtccccttccctggggggcagggcaaagccaagaacagtcccagccttggtttccatggccgggcccgccgaggggccctccagtccagcgtgggccctgctgagcccacctgggcccagggccagtcagcctctctccttgcagagccagtgccctccctgacctccatccaggtgctggagaattcgatgtccatcacctcccagtactgtgctccaggggatgcctgcaggcctgggaacttcacctaccacatccctgtcagtagtggcaccccactgcacctcagcctgactctgcagatgaactcctcctcccccgtgtctgtggtgctgtgcagcctgaggtcaaaggaggaaccatgtgaggaggggagccttccacagagtctccacacccaccaggacacccagggcacctctcaccggtggccaataaccatcctgtccttccgtgaattcacctaccacttccgggtggcactgctgggtcaggccaactgcagttcagaggctctcgcccagccagccacagactaccacttccacttctaccgcctgtgtgactgagctgccctcctgaggcagcaccacaccagggaccaggggtgcccaggcaccccccaacactggatgcaatggtgttacactggagcccgctgcaggccagctctgctgttcactggccctacccgagactggtgaaactggaagtcttcacactggagttgctgttccagctggtcgcccctcacggcacagagggaacctgagagccagagacttcttgggccttcctgcctgccaccccctaggggccaggacaggaccagtttacctctttccagatatggtggttggagggctggttcaggtgccctggagggaaggggaagcctgtggccctgatttgttcagagcccattctcccttgcctccccttttgagactggagccaacccttttggagagaggacctgcccacctttgagatcagcagggggctcggatccagccctaagagacttgggtggacccccatgagtcaatggagggcagacggctctcccccttaaagctgttccctgggggatggcttggtagtggactttctggggtttgcctgttacgccagactcggacttctaagctttaagtgtggcccaggaggtttcttctccctgggagggcttggctcccaagaagtcccagggcagccgaggccagccctgcctgggttggagaaactgactttgtgccttaagtctactcagtgcctggtgaagccaccctcagcccttcacaggcctgaaccagtaggggccagtgggccaggtaagccctagagccttgaaccaggaatatccaggaagaggaaattccctttgagcccccagatggtattgcagcttcactgcctgcgttcctgggagcgtctggagctcacagtgatcagtgaccacatcattctctctgagcagaggagcaggaatccctcaagcagcagcctggtcttggctggtgggcagatgcaaatagcttttgctgttattaatgaagtaattactaaatgcacttaaaccagggcaggaaggaatggaaggatggagctagaaagctcagagtgggccagagcaggggtgtgacacttgcaaagacagggctctgactctgatccctcccagggagcctccgacacccatcccactcccaaccaccaagaccctgggttagggaagaagttgtatcttaagtgccaccttcaagtttcttagtggtgcctggtgcattccgaggctacatccaggctcatggaaggagtgtagtattcatttagccatgtctgccatgggtccagaaatgggaaagggaattgctgtccttgccctgtggtatgctgccacctctttgggaagcaggccttgcccctgtcccaccactcattctcagctttgaatgggaggcctttctatagtggaggcctttccttgaagcctatgaactgcaggcccccttttgccattgatctcaaagcacttgtcctcaggatagggaagagcagggggatgcaggaatagcagggatagcttgctcccagccccctccccaatttggttccgttgacataggaattttacgattcccaaaccatgcaggggctgagccttccttatgatgactttgttctccctcccactgggggaatcctccctatgccttaaaactgccgagccccactccatgtaataggattcctgggcttcctcaatgggggttcatgttcttggactgcgggccctcagtccttaactggaaagtgaccgtccactgccccatggagcccatctggacacagcacagccccaaaaccgttagcagctggctctgtttccaagcctggggaggggttcctcagtgcaggagttggggacaggctggggatccaagctgcttgagggggtcaaccttggaccaaagttgccttaagcctgtggtaaaagggcttcagggaaggtaagtgggccacctgctggaagctgccagctgcccggctggcaatggtgtgagtgtcttggccctgtccctgccctggggtccagcaggtcatccctcccttcttctctctcctttggcgtttgttcctgtagtcactgggctaatctccccctagcttcaagctgtacatagggcctcccagtgcaaatcctcctgcccataccgtgcacccttagaagcctgcgtgtgcatagagcgccccctacttcccagttaactcccagttcttctccctgagcttggtatttgtcatgtgccaactctgactctgaggtgggcagtgagggaagcagccccgggcctgcttgcttcctgtccccgaaatgttcgtttcttctgaagtaaatatacatatataaataaatgtataaatactgctttgtatctg

SEQ ID NO: 254792 - DNA, 250 bp, Homo sapiens
ttgatttttgataagggtgcgaagaccattcagtgggacaaagaatagcctcttcaacaaatggctctggggcaacttgatatccacatgccaaaaatgaaattggacccttaccccacaccatatataaaaattaactcaaaatggatcaaagagctacactacccaactcttagaagaaaacatagggataaatctttattatcttagatttggcaataattttttatctatgacaccaaaagcacaa

SEQ ID NO: 254793 - DNA, 275 bp, Homo sapiens
ccatctggggaataaacctgtccttgtatcatgccctggctgttgttaaatccctgtctgttacctagaattcaagctctcaaccttgttttgtgaagctactactactaaggatcatttttgctcattcttgtagaatgtcctggtgtcatgttgagccatttacacccatttttatcatttactcctcccaggggctattacccccatcttaacagatgttaaatttgtggaagatcatgtaactagtaaatgtttgtgtcaggtctgattag

SEQ ID NO: 254794 - DNA, 785 bp, Homo sapiens
aattagtaggaatatccagtgaaagggaaattaatgaattttataagtatactaatcaagaagtatattcttttcctttgaggtagaatgtaatatagcacctcccctacccaaggcctgggttaagagtatattaactgcttatttctcccctatgcgtggagaggcttatctgtgttccatcgtttcacattccttgaggcacagcgagttcttgcttccctccctagcgctgctgtaaagtcacaaaactgattagcaagtgttacaaaagcatgtattcccaaggacgtaagacatatggtgtaacaaatgtaagagtaatttactgcctttgttcttgcttctgcaagtacacttcatgcaacacgtaactcccaacacaaactgcttaaaaggtgattgatccctttgttcggggctcagactttctggaccctagtccgactgagccggtgatcaccttaataataaaggctctcctgaactctgctcggtctctcccgtctatgatttgtcccgcaacaccagttgcctgcggaacacctctacctagagagctaacactcatccccggtcagtaaatccaaaactaaacccgttgcctcctcctaccaacctgtccctcctataatgcctgtgaagaaaaggcatcactgtgcacactgttgccctctccatgcttcatctaatcagtcatcagatcctataattctaccaccttaaaagtttcaccgtttcttccgtccagtcgcggtggctcacgcctgtaatccctgcacttt

SEQ ID NO: 254795 - DNA, 798 bp, Homo sapiens
agcatgaatagaccgtcagggagcaccagatgtttgaggaatggaatatttgggccattgaaggattttaagccaaatgacctgacagtccaactttaaaagaagacaactttattttttcaaagaacaattttagattgatagagaagttgtacaaagagttatcatatgccccacattcactttcacctattactaacattattatggcgtatttactattaatgagccaatattgatacgttattattaactaaagttcatacttgattcagtatttccttagtttttcccagtgtccttctctgttctacggtcccatccaggacaccacattatacctagtcatcatatctctctagactcctcttggctgtgacatttctgacttaactacatcagtgtagagtgagaaataaaaattaaaaagaaaaaccctcaaacatttctgccttacattttaatgatgctaattctggttgcaggattcagaagattctgatggtggcaaagtgaaagcagtgagacggattaggaagccactgcagtaatccaaggcagagataatgatagggctggatcagaatgatggtggtaaaagtgaaaagtgttccatttggggatgttataaaagccattagcctggatggggaaactaaaggaatgagtgtagatggagaagaaaagagttccagggatggagcccttggggcacctgaatgtttaaaagttagtgagataagaaactagcaaaggagacccaacaggaagtggccagttacgtaggaagaaaagctg

SEQ ID NO: 254796 - DNA, 344 bp, Homo sapiens
ctgaaaactttttttttttaaatgatactctgttttaaccaaagtgtgtggaatatgctacataatatactcaaggcaggaaaaaaagtcctcacaatagtagcatttgtacagaacacatgaaaggcttcagtaacattctctataggtaatgaggcatttgaagctggaaatagtgatattttcaaatatctaataatgttagtttaaatgagaggaatgcactatcaaatccatattatcagtgaatttattgtgattttacatataaatgcaatcaagttacatgaaaatgccttgctagaatttaagtttaattaacttacaatcaagatgccattcca

SEQ ID NO: 254797 - DNA, 431 bp, Homo sapiens
ggctagatgtcctaagggataaacctgcttggaataattctgttcctgtttacatgtccattgttaactaaccatttatttgcatgcccccatatcttctggaaatcatgactgtctattgggaaatgataataccagctaatttctttttcacaattaattgaaattttacactcttacatttcaatatccatcaatatttttacatactgacacttttaatcaaggattatctttcacaggggagctgtaacagggccctaattaattaaagtgataattactcctctccctcgcagtttgttagttacataacacattctccaggaaattcacatccttagaattcctctttaaatttctctcatttataaggagataccttggcttctatctctgtaagaatttactgaaaactcaaataaatttat

SEQ ID NO: 254798 - DNA, 300 bp, Homo sapiens
tcagggagtctcagccaggacctagttcccctacaatgtgctatttaagagcatgggctttgaagacacacagcactgagttccagtcctgcctcctctgcctcccaagacaaattactcagcttgtctggcagagcttgagaactgtcacagtgcctgcctcatattcctggacccagtgtctgacacatggtaggttaagtccactcagctctgtccagtgccagtgaagacaggtcagcaacaacacgtctccatccagcactggccacagactcctttacagactgatgtccaggc

SEQ ID NO: 254799 - DNA, 964 bp, Homo sapiens
ggccacatcttaagctgagccacagggaagatcaaagactgtgggagggcagatgtcacttcttaagcctatccagtgctgtaggcttcccctacaggagtccgtgtccacctacttgtgtgttatgctgggatggaagaaaagcacaccaaattcagagaacctaggtgagtttggaaggaaagatagaacccgtcacagcggtgagccagtgtcagtgagagcttggaagcaggatctcgttcaccaggttaccatcaatgaaccaggaaacctgtcctggatgtcacatctaggaggagctgagaggccaggcccacatttagaatagcagatcctagatttcaccaagaaggcactgaaatgaagccaatttatgcctcccataaaaagcctgtctctgtgctaacaacctcatctctccttgtctactcctgggcttttactctaaaatgatctcttttcttttgcattgatgatctctaactcctcgtatctcctgttctctaaccaaaattaggtcaaagattctgccctcctaattaaactctccctcagatatgtacctgcctcaagttcccttgcttttggtaccaacctctcccttttctcaagaccattcttcttgaaattcccactttggtttccttacattcctttggcttctttagtaacctcacaatttgtttttttcctcaaatctcctgaaactggtctctctagtgatcactagttaccttcttaattaataattagttatcttcctaatcaatacatcctgtggctttcaccttctctttcctcattcctccatgcctctccatttcacacctagtgagatcataagacttgcacttcttgtgcacaacagcaggaaaaggacataggaggcaggtgtgctgatcctcctgtgttaggtaggagacatagagtcttccttggcacttgagaagctccgaccaaa

SEQ ID NO: 254800 - DNA, 419 bp, Homo sapiens
ttctctcaccttgccctgacagttttcatttgctgtttagaagaaacacaaattctcccttaggaatcaggtaagtatatgaaagagatgaaggaactggttgagctcacagattctttatcttttctatttttttctcttttctgtttctgttttctataagccagggtttttcttccccctgaactcttcctttctcttcccttctttggggaataacttcaggtactctgtaagcacctcctttctttttactgttttcctgagtatattttcttgagagtgagactggatttctgcagaattttccttgagatgctcctagccccatgtcctaagatggttgatttttcttgggttaaacaccaattagggtaccaaaaactcagggcagtggggcagggggagaatttttttac

SEQ ID NO: 254801 - DNA, 479 bp, Homo sapiens
gcgaaacccatggtgggggggaggcgcccaaaccacagtgctaatgatattacaattagctctgggtcatgttcaggacatttagttgatttatggtgcctgtgcctaagttgggacagtcccttctgagcagacatcctggtatgagaggaaattcttaactacatttccatctgctagttacaccatagggagggtacaggtgcggtcccaccggcgctgtctctctcccaagaacctccttctctatctacctagccagcctctaattgcctcctctctcactgtttctttaggtaaaaacatcctaagactataaagggggtaatacatctggctatcatcagggcacttgattaactttattctaattgtgttcaatagacaatgtttgattttctcattgcctcttttcagaggcattcttccactcgcattcacgtgcataataaacttaattacggtgctgcaaaaaacaa

SEQ ID NO: 254802 - DNA, 417 bp, Homo sapiens
agttccatatctgatttgagaccccgtgttctattttgagttcttctagaagtaggatgtaaaacaatcgttcaagtatgaagagtgtaagtaataccaataggagaaagaaaaactgacacaggaatggaagggaggcaatttacgatgcattatttagccagtatttacaatggacaactggcaataaaataggtaaatagataccttagaactatcccaccgaaagtgccagatagttacaaaatgtactcatgaactccaaagagtcgctgattgagagctgctcttaggagtgctaattcttttgcactttaggcttcctagcctgtcagaatggccactctgcagactacaatgctttatgagaaaactcttttaggagaaaaaataatgcataaccacatcttgaagaac

SEQ ID NO: 254803 - DNA, 492 bp, Homo sapiens
cgtcttatttaaaacatttattctttaaccatcatgctcacaattttctgtaaatacatattacttttataaagatgagggaaaaaaataaacattttcagtgtgtcagtagtgtaagtatgtttcagttatctaagcatccaaggagagtaaaacagctaaatttagcaactcattgtacttttatgatacaatatgcagccattaaaaagtcatgttttggccaggcacggtggctcacgcctgtaatcccagcactttgggaggctgacgtgagcagatcacctgaggtcaggagtttgagatcagcctgaccaatatggtgaaacccagtctctactaaaaatacaaaaattagcctggctgtggtggtgtgtgcctgaggcaggagaatctcttgaacccaggaggcatacgttgcagtgagcagagatcacaccactgcactccatcctgggtgacagagggagactttatctcaaaaaaaaaaaa

SEQ ID NO: 254804 - DNA, 166 bp, Homo sapiens
cgtttccagaaagagaaaatagaaagaatgggagaggaggcaatatttgaatactgcctagctgagaatttttcagaactgaagaaatatcagtagggtttactctaggattataggaataatataactttataaaatttaatgtaacttaccatattgacatatt

SEQ ID NO: 254805 - DNA, 299 bp, Homo sapiens
gccaggctgacctcaaactcctgacctcaagtgatccacacaccctggcctcccaaagtgctgggattacaggcgtgagccaccgcgccaggtcagctgcttaacctattaaaaggcacaatcacatctcgttagggatgaagggaagaggggaccagtttgagatacaaaaaacagacctctcagaaatataaaaaggagcattactacagatcttatggaaaaagtataagggatatactaggaacaactatataccaacagattagcataatttagatgaaatagaccaattccta

SEQ ID NO: 254806 - DNA, 306 bp, Homo sapiens
gttaaatcttcactccactgataattagtgatgtcgagcactctttcatttgcttatttattgaccattcctgtatcttcttttgtatagtatatgttcaagtcttttgctctttttattatgcggatgggatgtctgtttttttattatggagctacaggaattctttgtatagtctggatataagccctttcagataaacatgttgcaaatattttcttttagtctgtaaattctgtatttattttagcagtgtcttttgttgaacataaatttttaattttaatgaagtccatttagtcaatt

SEQ ID NO: 254807 - DNA, 486 bp, Homo sapiens
atgaaattcacattcagacactaaggttactcagtgatggctctggctgtctgggagactcatcagtgatttttttttgatacagggtctcacactgtcacccaggctgaggtgcagtggtgcgaccacggctcattgcagcctcaacctccagggctcaagcaatccttccacctcagcctcctgagtagctgggactataggtacacgccaccacacccagctagtttttaaattttttgtagaaacaaggtcttgctatgttgccagagctggtcttgaactcctgggctcaagaagtcctcccgcctcagcctcccaaagtactgagattgcagacatgagccactgtgcctaccctccctttcagttgagtttctcagagtgtctgcagactgagcttctccctttgatacccagtgtcctgctttggacagtcaggagttggctggaaaaaaaaatctttctggttttcaaaatcctttt

SEQ ID NO: 254808 - DNA, 414 bp, Homo sapiens
gtgctccctcgggtttgaggcactgtcgtcagattcccagagagatccgtgtgatagccgtggcccaagaaaggttaacagttacagacttagaactaaaagaagtcaggtacactgaaagccttagaatgccaacgattggccaagcgtggtggctcatgcctggaatcccctgtgttttgggagaccgaggcaggcggatcacctgagtttgggagtttgagaccagcctgaccaacatggagaaaccccgtctgtataaaattagccaggcatggaggcacacgcctgtaatcccagctactcaggaggctgaggcaagagaatcgctttaacccagcgggggcggaggttgtggtgagccgagatcgtgccactggactccagcctggccgacagagcgagactgtctca

SEQ ID NO: 254809 - DNA, 405 bp, Homo sapiens
gaggtgcttttgatgactggcacagggtaaaggtgaccggcatcaggtccaggtggaggaggatctggtctattacagtctgcctctgctaaccaggagactaaccaaagaggcagcaaagaggcagacctgtgtggcattttcgtgtggccaaaagaaatatggttagttaagtacacatcaaaggcagagatcctggcttaacaatccctgctctagggtgtaaacttgaagaagaccattccaaaggtggtatacagactgtactccagaggattataaatccatggctctgatcttctggctccctgaggagtctcatgaaaggaaatgaaggaaactaacaatattctaggtctccagttatttctataagcaatttttcaaacaaaatgggcaccaaac

SEQ ID NO: 254810 - DNA, 232 bp, Homo sapiens
caaaaactggaaataaacccgagtcctgacaataagaaaatcgccaagcttattgggatctgttaacacaatgaagaattaaagaatgattttaaatggctagaatgtgaactatattgatagatatagaatccttccccgtgaaataagcagaacccaaagtagtatgggttcgctgattacaactatataagaaattcatgggtattaaataacagaagagaggtccttt

SEQ ID NO: 254811 - DNA, 3280 bp, Homo sapiens
  misc_feature (3228)..(3228): n is a, c, g, or t
  misc_feature (3263)..(3263): n is a, c, g, or t
  misc_feature (3265)..(3265): n is a, c, g, or t
  misc_feature (3271)..(3277): n is a, c, g, or t
ctgaagttctccaagggcgaccatctctacgtcttggacacatctggcggtgagtggtggtacgcacacaacaccaccgaaatgggctacatcccctcctcctatgtgcagcccttgaactaccggaactcaacactgagtgacagcggtatgattgataatcttccagacagcccagacgaggtagccaaggagctggagctgctcgggggatggacagatgacaaaaaagtaccaggcagaatgtacagtaataaccctttctggaatggggtccagaccaatccatttctgaatgggaacgtgcccgtcatgcccagcctggatgagctgaatcccaaaagtactgtggatttgctcctttttgacgcaggtacatcctccttcaccgaatccagctcagccaccacgaatagcactggcaacatcttcgatgagcttccagtcacaaacggactccacgcagagccgccggtcaggcgggacaaccccttcttcagaagcaagcgctcctacagtctctcggaactctccgtcctccaagccaagtccgatgctcccacatcgtcgagtttcttcaccggcttgaaatcacctgcccccgagcaatttcagagccgggaggattttcgaactgcctggctaaaccacaggaagctggcccggtcttgccacgacctggacttgcttggccaaagccctggttggggccagacccaagccgtggagacaaacatcgtgtgcaagctggatagctccgggggtgctgtccagcttcctgacaccagcatcagcatccacgtgcccgagggccacgtcgcccctggggagacccagcagatctccatgaaagccctgctggaccccccgctggagctcaacagtgacaggtcctgcagcatcagccctgtgctggaggtcaagctgagcaacctggaggtgaaaacctctatcatcttggagatgaaagtgtcagccgagataaaaaatgacctttttagcaaaagcacagtgggcctccagtgcctgaggagcgactcgaaggaagggccatatgtctccgtcccgctcaactgcagctgtggggacacggtccaggcacagctgcacaacctggagccctgtatgtacgtggctgtcgtggcccatggcccaagcatcctctacccttccaccgtgtgggacttcatcaataaaaaagtcacagtgggtctctacgggcctaaacacatccacccatccttcaagacggtagtgaccatttttgggcatgactgtgccccaaagacgctcctggtcagcgaggtcacacgccaggcacccaaccccatcaccaagcgctggaagcacctcactgggactctgatcttggtgaactccctggacgttctgagagcagccgccttcagccctgcggaccaggacgacttcgtgatttgaatgggtcccctcccctcctgctgctctggagtgcaagccctcttctgccctgcgtgccctgctgtcaccgcggagctgaagagggaggaaggggcggctgctcagacagatttaggcccgccagctaggctacacccatcatgcgccgccctcctccatcgagggagaggcctgaagggactgcctactgcagctcgttgccaatcacatagctttctatttgttaagtataaatttaaatttaaaatcacttttttaacgaatggggggaagggatctatgagaaaggtggtatctaatttttttatggaccataaaggtttaaaagaaaataggggcacaggctgttgaggtttttatgttgttatagacctttttaaattatgttagagatgtatataggtatttaaaggtcactgggagcgtttctgattcccggccacactttgcatttcaacactcagcccggaaagatgctcgttcggttgttggacctctttcactccctgcgtgtaagaaggtgaatcacgtgggaaaaagtggcttttcagtaaacgggtacagctcattctttctgagaaggccccaggtcctgctccctcctcggatttgattgtcttccgtgctttgcctcactcgtagtaaatgaccatccatagaatatgtgaatctttggtgagcttcagtgggcagagtgaagtcccgcattagcatttaggtgccctgagctgtttctgccaatagattagaaagcagccatgagttgacagtctttagggcccctgccagtgtgcaattagtcattgacaagaacaatgccatttgagagtgaggtggtccctgctgctacgaggccattgtactgttttttccttgaggtcaaagcagtgcttcccatagagtttgctgcctcttctgtggacaggaagaaaacttcatgaccgaatcagagccttggtggccactgactctcgtgcttattgcagatgctgtggttggcctcacaagcaacgccttatgctgatgtgcagaggtgccagctgccatttgccaaactctgcatttcatttcatctaaggcttaacccctcttccttcctggtgtacctgtgtctcctcggaaggaagtcatagtttagatgaaaccattttttgtacaatgtaaagatcatctgagcaagatgagcattttgtaaaaatgaaaatgtgactcacataaaatcaggaacttgacacagtgttgcattaataactttagggtgcagacatgctgtgtgaatctcacaatgcgtcgtagatgtcgcgtgttggaagggagcaggaggaaggactgatactggcaaatcagtagagtgaggtgatccttagcaacgtgccaggacacttcctgtgtgcctgcagttgtcagggaccatttgggatcccgaatctcattctctaaaactgctttcttgaaacatgttacttccttagtataatcaatgtatactcccttactggcctgaaacgttgtatagctacttattcagatactgaagaccaacggactgaaaaaaagaacaaacattagctattttatgctgcaagaaccaggacacacaattcgccaatcatcccaccatataaccttcgattgtgcttctcaactccaccccataatttctcccagagaccatctatcaccttttccccaaagaagaaacaaaaccagttgcaccttaaaccatggatattttttcctcaggggctttaaatagtttcctatgcaacgtgtcttgtagcacaaatnaaattctacaaaagttgcagtaaattttatttggntnttttannnnnnnaaa

SEQ ID NO: 254812 - DNA, 288 bp, Homo sapiens
ttaagtaggcaggaatttgcatttgttctatcagtcttctcaacattcattattcatctgtagttgtcagtgaaatactataggtctttttagagaagatgtaaacttccatttaaaagtatttctgagtgttttattaataatatgagttttttctttccttatttctatcattaactgattattcttgttaaatgagattattattattttatgtaaaaaattaatgtgaatatacatatgtaatatttgatcactctattaaaatcttttattagtctgagaaaa

SEQ ID NO: 254813 - DNA, 410 bp, Homo sapiens
ctgtatctttatattcctaaaaatggtacttttggcataattaagaaatttttcttcatattatcacaatcatgcccttccattgaattattaattacaattaattactaaaaagcttggtatgtaaaattattctccacaatattaccatgcaagttatctctgaaatttaaaatgttaaagaaaaacatttctatattgaaatatatataatttataatgaaaattatagtagtttgtagtatttcattgaattttagagagatatttcatatatatgtactgtattttggatgtgtaaagcttctatgtattgaaatatttttttacgttttatttattgtacaaagtgtatataattactgttttcttttttgtcagtgtaaagcagtcattagaattgattatac

SEQ ID NO: 254814 - DNA, 245 bp, Homo sapiens
actttggattgatatctaagagtggaattactgaaacaaaagttgtggatatttatgttttgccagttgttctaaagagttggttaatttgcagggctgaggattcctcatctcagatgacataaggttcttgttatactctctaagtgccctgagtttctctctcacatatggtggctgtaatcagtgggcattacaggtgcctttgagatggtgtgacccttccagggacatctgtatcccac

SEQ ID NO: 254815 - DNA, 353 bp, Homo sapiens
cacctgttctgtggtaattaatctcatactcaaccatggagttgtttctagatcttggtgtgttgtcctccctcccctttgcctaaaatcaataacctgagcacacctaaaggtgtcttcaggcctcgatgtgccctgtgaattgtgcggggttctagggtctctgtacgtaaggagatggtctgcatttgcctggcccctcttgcaggaagagcagcagcggttgcctcgcctccggtcctcagcttggtccttagcagggtgagcagggccagagtcatgggcatgtgacctgtgcactccctcatggccccacgcttgctttcacattttcctactggcatcaatacttt

SEQ ID NO: 254816 - DNA, 554 bp, Homo sapiens
  misc_feature (3)..(4): n is a, c, g, or t
  misc_feature (7)..(8): n is a, c, g, or t
  misc_feature (13)..(13): n is a, c, g, or t
  misc_feature (47)..(47): n is a, c, g, or t
  misc_feature (58)..(58): n is a, c, g, or t
  misc_feature (124)..(124): n is a, c, g, or t
tgnnccnntgcgncgtcctcaagttatattagaatcgtgtcctcccngctttggccancttactattctaggacttgattccttcattcagtcacaatttattgagcaccgactttgcatcaanctcttgctgaagataacagtgctgacaatatacagccctgccctcagagcttatatagtagaggagaaaaagtgaacccataatatacagtcagtagcgagtatttactaagtactttctatttgcgaggccctgataaaagtactgtcctggccaggcgcggtggctcacgcctgtaattccagcactttgggaggtcgaggtgggcagatcacctaaggtcaggagttcgagatcagcctggctaacatggggaaaccccgtctctactaaaaatggaaaaattagctgggcatggtggcgggcgcctgtaatcccagctactcgggaggctgagacaggagaatgacttgaacccaggagttgcagtggccaagataagatagcgccattgtactccagcctgggtaacacagcgagactgtgtctc

SEQ ID NO: 254817 - DNA, 673 bp, Homo sapiens
tatgactttagtactttactatggtggacaatgaggcaattgatatttttatgtatataacttttttctttcacatattgttggaaatttgatattattaaatttttaatacatttgttaccatctctctccttttcaactgttacttcttttcttttctttttttttttttcttatggctccagctcaaaggaccattacttttcttagagtcacttctaaatgcaagtgatttagtgtgaagctgcttcctggtgaaacaccatctcccatgatgacctgtggtgctaaatagacagatggtgcttcagcaaatttcccatgcaggctcatctgagatgtgcttttgccaggtgcaatagaatttggagtgaaggtcttctgaagtctcagttcttgcaacaacctttctctcttatatctagcttctctccttaggcagcttcatagaatgaaaatgtaaccctcccttgggagagagagaacaggaaggggcttgtccttagacaacaaccgtctgtcacctggaaaggagctctgacctagagaagcgtggtgtgacatgcaagttgaagtccctccaggaagcatgttgtggcctatggttctgcacactctggtgtgttagtctgacccacctgctatggcaagataccatagattggtggcttat

SEQ ID NO: 254818 - DNA, 6503 bp, Homo sapiens
attactgtatatgtatgtattcagccgtgattcccaaaggttcattttatgacagcatctttctgatttcctcacagtttattatcttcccattgcccaagtttagtaactttatattagttttggcttcgtacaggcaccactcattgggagcaacacagaaatctgtttcaaaacatcatttcaggaaaaagagaatattttagcgttgaggatctttaaaagtattgcagtactttatagaactaagttgtaggagctaagaggatcttttaattcatgctatgcaattatgtattttttgttgttgttgtattttattttattttgatttgtatgactttggaagagggtatgattttaccattcaagaaaatggacttcagatagatcaacctcctgaaataggaaacatctccattgttcgcatcataataatgaaaaatgataacgcagaaggcatcattgaatttgacccaaagtatactgccttcgaagtggaggaagatgttgggctgatcatgatcccagtggtgaggctacatggaacttatggctatgtgacagctgatttcatctctcagagctcctctgccagtcccggaggtgttgattacattttgcatggcagtacagtcacctttcagcatgggcaaaacttaagttttataaatatctccatcattgatgacaatgaaagtgaatttgaggagcccattgaaattctactcactggagctactggaggagcggtccttgggcgccacctagtgagcagaatcataatagctaagagtgactctccctttggagttataaggtttctcaatcaaagcaaaatttctattgctaatcccaattccacaatgattttatcactggtgctggagcggactggaggactcttgggagagattcaggtgaactgggagacagtaggacccaactctcaagaagccttactgccacagaatagagacattgcagacccagtgagcgggttgttctattttggagaaggagaaggaggagtgagaaccataattctgacaatctatcctcatgaagaaattgaagttgaagagacattcattattaaacttcatcttgtgaaaggagaagctaaattagactccagagctaaagatgttacattaaccatacaagagtttggtgacccaaatggagttgttcagtttgctcctgaaactttgtctaagaagacttattcagagcctctggctctggaagggcccctgctcattaccttctttgtcagaagagtcaagggcacctttggagagattatggtttactgggaattaagtagtgagtttgacattactgaagactttctttccaccagtggatttttcaccattgctgatggagagagtgaagctagctttgatgttcatttgctaccagatgaggtacctgagatagaggaagattatgtgatccagcttgtttctgtagagggaggagccgaactggatctggagaagagtatcacatggttctctgtttatgcaaatgatgacccacatggagtatttgccctgtattcggatcgccagtcaatacttattgggcagaaccttattagatccatccaaattaacataacccggcttgctggaacatttggagatgtggctgttgggcttcgaatatcatcggatcataaagaacagccgattgttaccgaaaatgcagagaggcagctggtggtcaaagatggtgccacatataaagtggacgtggtgccaataaagaatcaggtcttcctatcactgggctctaatttcactttgcaactggtgactgtgatgcttgtcggtggacgtttctatggaatgccaacaattcttcaggaagcaaaatctgctgtccttccagtctctgagaaagctgccaattctcaggtcggatttgaatccactgcttttcaactcatgaacatcactgctggcacaagccacgttatgatttctaggagaggcacatatggagctctctcggttgcctggaccactggatatgctcctgggttagaaattcctgaattcattgttgttggcaacatgaccccaacactggggagcctttcattttcccacggtgaacaaaggaaaggagttttcctgtggacgtttcctagccctggttggccagaggcctttgttcttcacctatcaggagtgcagagcagtgctcctggcggagctcaactccgatcaggtttcattgttgctgaaattgaaccaatgggcgtcttccaattttccactagctcaagaaatatcatagtgtcagaagatacacagatgatcagattacatgtacaaagactatttgggttccacagcgatcttattaaagtttcttatcagaccactgcaggaagcgccaagccactggaagattttgagcctgttcagaatggggaactgttttttcaaaaattccaaactgaggttgattttgaaataaccattattaatgatcagctttctgagatagaagaatttttttacattaaccttacttcagtagaaattaggggattacaaaagtttgatgttaattggagcccacgcctgaatctagatttcagtgttgcagtgattacaatattggataatgatgacctggcaggaatggatatttccttccccgagacaactgtggctgtagcagttgacacaactctcattcctgtagaaactgaatccaccacatacctcagcacaagcaagacgactaccattctgcagccaaccaacgtggttgccattgttactgaggcaactggtgtatctgccatccctgagaaacttgtcacccttcatggcacacctgctgtgtctgaaaagcctgatgtggccactgtaactgccaatgtttccattcatggaacattcagccttgggccatccattgtttatattgaagaggagatgaagaatggcacattcaacactgcagaagttcttatccgaagaactggtgggtttactggcaatgtcagcataacagttaaaactttcggtgaaagatgtgctcagatggaaccaaatgcattgccctttcgtggtatctatgggatttccaacctaacatgggcagttgaagaagaagactttgaagaacaaactcttacccttatattcctagatggagaaagagaacgtaaagtatcagttcaaattttggatgatgatgagcctgaggggcaggaattcttctacgtgtttctcacaaaccctcaagggggagcacagattgtggaggggaaggatgatactggatttgcagcttttgccatggttattattacagggagtgaccttcacaatggcatcataggattcagtgaggagtcccagagtggactagaactcagggaaggagctgttatgagaagattgcaccttattgtcacaagacagccaaacagggcctttgaagatgtcaaggtcttttggcgagtcacacttaacaaaacagtcgtcgtgctccagaaggatggggtaaacctgatggaggaacttcagtctgtgtcagggaccacaacctgtacaatgggtcaaacaaaatgctttatcagcattgaactcaaaccagaaaaggtaccacaggttgaagtgtatttttttgtggaactatatgaagctactgctggagcagcaataaacaacagtgccagattcgcacagattaaaatcttagaaagtgatgaatctcaaagccttgtgtatttttctgtgggttctcggctggcagtggctcacaagaaggccactttaatcagtctgcaggtggccagagattctgggacaggactaatgatgtctgttaactttagtacccaggagttgaggagtgctgaaacaattggtcgtaccatcatatctccagctatttctggaaaggattttgtgataactgaaggcacattggtctttgaacctggccagagaagcactgtattggatgtcatcctaacgccagagacaggatctttaaattcatttcctaaacgcttccagattgtcctttttgacccaaaaggtggtgccagaattgataaagtgtatgggactgccaacatcactcttgtctcagatgcagattcgcaggccatttgggggcttgcagatcagctacatcagcctgtgaatgatgatattctcaacagagtgctccataccatcagcatgaaagtggccacagaaaacacagatgaacaactcagtgccatgatgcatttaatagaaaagataactactgaaggaaaaattcaagctttcagtgttgccagccgaactcttttctatgagattctttgttctcttattaacccaaagcgcaaggacactaggggattcagtcactttgctgaagtgactgagaattttgccttttctctgctgactaatgttacttgcggctctcctggtgaaaaaagcaaaaccatccttgatagttgcccatatttgtcaatattggctcttcactggtatcctcagcaaatcaatggacacaagtttgaaggaaaggaaggagattacattcgaattccagagaggctactggatgtccaggatgcagaaataatggctgggaaaagtacatgtaaattagtccagtttacagagtatagcagccaacagtggtttataagtggaaacaatcttcctaccctaaaaaataaggtattatctttgagtgtgaaaggtcagagttcacaactcctgactaatgacaatgaggttctctacaggatttatgctgctgagcctagaattattcctcagacatctctgtgtctcctttggaatcaggctgctgcaagctggttgtctgacagtcagttttgcaaagtgattgaggaaactgcagactatgtggaatgtgcctgttcacacatgtctgtgtatgctgtctatgctcggactgacaacttgtcttcatacaatgaagccttcttcacttctggatttatatgtatctcaggtctttgcttggctgttctttcccatatcttctgtgccaggtactccatgtttgcagctaaacttctgactcacatgatggcagccagcttaggtacacagattctgtttctggcgtctgcatacgcaagtccccaactcgctgaggagagctgttcagctatggctgctgtcacacattacctgtatctttgccagtttagctggatgctcattcagtctgtgaatttctggtacgtgctggtgatgaatgatgagcacacagagaggcgatatctgctgtttttccttctgagttggggactaccagcttttgtggtgattctcctcatagttattttgaaaggaatctatcatcagagcatgtcacagatctatggactcattcatggtgacctgtgttttattccaaacgtctatgctgctttgttcactgcagctcttgttcctttgacgtgcctcgtggtggtgttcgtggtgttcatccatgcctaccaggtgaagccacagtggaaagcatatgatgatgtcttcagaggaaggacaaatgctgcagaaattccactgattttatatctctttgctctgatttccgtgacatggctttggggaggactacacatggcctacagacacttctggatgttggttctctttgtcattttcaacagtctgcagggactttatgttttcatggtttatttcattttacacaaccaaatgtgttgccctatgaaggccagttacactgtggaaatgaatgggcatcctggacccagcacagcctttttcacgcccgggagtggaatgcctcctgctggaggggaaatcagcaagtccacccagaatctcatcggtgctatggaggaggtgccacctgactgggagagagcatccttccaacagggcagtcaggccagccctgatttaaagccaagtccacaaaatggagccacgttcccgtcctctggaggatatggccaggggtcactgatagccgatgaggagtcccaggagtttgatgatttaatatttgcattaaaaactggtgctggtctcagtgtcagtgataatgaatctggtcaaggcagccaggaggggggcaccttgactgactcccagatcgtggagctcaggaggatacccatcgccgacactcacctgtagcacctcactaaccattcgactgagcacactttcatatttgtatcagcttttgtgctaaaactctctaagtacatccacctgtgtaataggaacctgtgaattgtactggatgattaatacaaacgtgattgttgtatttggagtataaattactgattgtatgtgacctgaaaattcactgctataagaaaggtggagtcagtttgtatcagttaataggatgttcatattccaaggatattagttgtttttttaatcatcctatatggctaacattgtttaatgaaagtaataatcaataaagcaatagaatct

SEQ ID NO: 254819 - DNA, 9203 bp, Homo sapiens
attactgtatatgtatgtattcagccgtgattcccaaaggttcattttatgacagcatctttctgatttcctcacagtttattatcttcccattgcccaagtttagtaactttatattagttttggcttcgtacaggcaccactcattgggagcaacacagaaatctgtttcaaaacatcatttcaggaaaaagagaatattttagcgttgaggatctttaaaagtattgcagtactttatagaactaagttgtaggagctaagaggatcttttaattcatgctatgcaattatgtattttttgttgttgttgtattttattttattttgatttgtatgactttggaagagggtatgattttaccattcaagaaaatggacttcagatagatcaacctcctgaaataggaaacatctccattgttcgcatcataataatgaaaaatgataacgcagaaggcatcattgaatttgacccaaagtatactgccttcgaagtggaggaagatgttgggctgatcatgatcccagtggtgaggctacatggaacttatggctatgtgacagctgatttcatctctcagagctcctctgccagtcccggaggtgttgattacattttgcatggcagtacagtcacctttcagcatgggcaaaacttaagttttataaatatctccatcattgatgacaatgaaagtgaatttgaggagcccattgaaattctactcactggagctactggaggagcggtccttgggcgccacctagtgagcagaatcataatagctaagagtgactctccctttggagttataaggtttctcaatcaaagcaaaatttctattgctaatcccaattccacaatgattttatcactggtgctggagcggactggaggactcttgggagagattcaggtgaactgggagacagtaggacccaactctcaagaagccttactgccacagaatagagacattgcagacccagtgagcgggttgttctattttggagaaggagaaggaggagtgagaaccataattctgacaatctatcctcatgaagaaattgaagttgaagagacattcattattaaacttcatcttgtgaaaggagaagctaaattagactccagagctaaagatgttacattaaccatacaagagtttggtgacccaaatggagttgttcagtttgctcctgaaactttgtctaagaagacttattcagagcctctggctctggaagggcccctgctcattaccttctttgtcagaagagtcaagggcacctttggagagattatggtttactgggaattaagtagtgagtttgacattactgaagactttctttccaccagtggatttttcaccattgctgatggagagagtgaagctagctttgatgttcatttgctaccagatgaggtacctgagatagaggaagattatgtgatccagcttgtttctgtagagggaggagccgaactggatctggagaagagtatcacatggttctctgtttatgcaaatgatgacccacatggagtatttgccctgtattcggatcgccagtcaatacttattgggcagaaccttattagatccatccaaattaacataacccggcttgctggaacatttggagatgtggctgttgggcttcgaatatcatcggatcataaagaacagccgattgttaccgaaaatgcagagaggcagctggtggtcaaagatggtgccacatataaagtggacgtggtgccaataaagaatcaggtcttcctatcactgggctctaatttcactttgcaactggtgactgtgatgcttgtcggtggacgtttctatggaatgccaacaattcttcaggaagcaaaatctgctgtccttccagtctctgagaaagctgccaattctcaggtcggatttgaatccactgcttttcaactcatgaacatcactgctggcacaagccacgttatgatttctaggagaggcacatatggagctctctcggttgcctggaccactggatatgctcctgggttagaaattcctgaattcattgttgttggcaacatgaccccaacactggggagcctttcattttcccacggtgaacaaaggaaaggagttttcctgtggacgtttcctagccctggttggccagaggcctttgttcttcacctatcaggagtgcagagcagtgctcctggcggagctcaactccgatcaggtttcattgttgctgaaattgaaccaatgggcgtcttccaattttccactagctcaagaaatatcatagtgtcagaagatacacagatgatcagattacatgtacaaagactatttgggttccacagcgatcttattaaagtttcttatcagaccactgcaggaagcgccaagccactggaagattttgagcctgttcagaatggggaactgttttttcaaaaattccaaactgaggttgattttgaaataaccattattaatgatcagctttctgagatagaagaatttttttacattaaccttacttcagtagaaattaggggattacaaaagtttgatgttaattggagcccacgcctgaatctagatttcagtgttgcagtgattacaatattggataatgatgacctggcaggaatggatatttccttccccgagacaactgtggctgtagcagttgacacaactctcattcctgtagaaactgaatccaccacatacctcagcacaagcaagacgactaccattctgcagccaaccaacgtggttgccattgttactgaggcaactggtgtatctgccatccctgagaaacttgtcacccttcatggcacacctgctgtgtctgaaaagcctgatgtggccactgtaactgccaatgtttccattcatggaacattcagccttgggccatccattgtttatattgaagaggagatgaagaatggcacattcaacactgcagaagttcttatccgaagaactggtgggtttactggcaatgtcagcataacagttaaaactttcggtgaaagatgtgctcagatggaaccaaatgcattgccctttcgtggtatctatgggatttccaacctaacatgggcagttgaagaagaagactttgaagaacaaactcttacccttatattcctagatggagaaagagaacgtaaagtatcagttcaaattttggatgatgatgagcctgaggggcaggaattcttctacgtgtttctcacaaaccctcaagggggagcacagattgtggaggggaaggatgatactggatttgcagcttttgccatggttattattacagggagtgaccttcacaatggcatcataggattcagtgaggagtcccagagtggactagaactcagggaaggagctgttatgagaagattgcaccttattgtcacaagacagccaaacagggcctttgaagatgtcaaggtcttttggcgagtcacacttaacaaaacagtcgtcgtgctccagaaggatggggtaaacctgatggaggaacttcagtctgtgtcagggaccacaacctgtacaatgggtcaaacaaaatgctttatcagcattgaactcaaaccagaaaaggtaccacaggttgaagtgtatttttttgtggaactatatgaagctactgctggagcagcaataaacaacagtgccagattcgcacagattaaaatcttagaaagtgatgaatctcaaagccttgtgtatttttctgtgggttctcggctggcagtggctcacaagaaggccactttaatcagtctgcaggtggccagagattctgggacaggactaatgatgtctgttaactttagtacccaggagttgaggagtgctgaaacaattggtcgtaccatcatatctccagctatttctggaaaggattttgtgataactgaaggcacattggtctttgaacctggccagagaagcactgtattggatgtcatcctaacgccagagacaggatctttaaattcatttcctaaacgcttccagattgtcctttttgacccaaaaggtggtgccagaattgataaagtgtatgggactgccaacatcactcttgtctcagatgcagattcgcaggccatttgggggcttgcagatcagctacatcagcctgtgaatgatgatattctcaacagagtgctccataccatcagcatgaaagtggccacagaaaacacagatgaacaactcagtgccatgatgcatttaatagaaaagataactactgaaggaaaaattcaagctttcagtgttgccagccgaactcttttctatgagattctttgttctcttattaacccaaagcgcaaggacactaggggattcagtcactttgctgaagtgactgagaattttgccttttctctgctgactaatgttacttgcggctctcctggtgaaaaaagcaaaaccatccttgatagttgcccatatttgtcaatattggctcttcactggtatcctcagcaaatcaatggacacaagtttgaaggaaaggaaggagattacattcgaattccagagaggctactggatgtccaggatgcagaaataatggctgggaaaagtacatgtaaattagtccagtttacagagtatagcagccaacagtggtttataagtggaaacaatcttcctaccctaaaaaataaggtattatctttgagtgtgaaaggtcagagttcacaactcctgactaatgacaatgaggttctctacaggatttatgctgctgagcctagaattattcctcagacatctctgtgtctcctttggaatcaggctgctgcaagctggttgtctgacagtcagttttgcaaagtgattgaggaaactgcagactatgtggaatgtgcctgttcacacatgtctgtgtatgctgtctatgctcggactgacaacttgtcttcatacaatgaagccttcttcacttctggatttatatgtatctcaggtctttgcttggctgttctttcccatatcttctgtgccaggtactccatgtttgcagctaaacttctgactcacatgatggcagccagcttaggtacacagattctgtttctggcgtctgcatacgcaagtccccaactcgctgaggagagctgttcagctatggctgctgtcacacattacctgtatctttgccagtttagctggatgctcattcagtctgtgaatttctggtacgtgctggtgatgaatgatgagcacacagagaggcgatatctgctgtttttccttctgagttggggactaccagcttttgtggtgattctcctcatagttattttgaaaggaatctatcatcagagcatgtcacagatctatggactcattcatggtgacctgtgttttattccaaacgtctatgctgctttgttcactgcagctcttgttcctttgacgtgcctcgtggtggtgttcgtggtgttcatccatgcctaccaggtgaagccacagtggaaagcatatgatgatgtcttcagaggaaggacaaatgctgcagaaattccactgattttatatctctttgctctgatttccgtgacatggctttggggaggactacacatggcctacagacacttctggatgttggttctctttgtcattttcaacagtctgcagcttctagtaccctctgttctactttttacttctatgagatcaacattttttagcttccacacagggactctgacttcaagagagaagaaaagtacttttgtacttacatgcctactgagcccagattccaaaggccttggggttctatgtttccttaacactgaatgggctttccaagtgcattgatcatggtggctgccacggtgcaagactcacctcctgccagctttccagccccagcaggaaaaagcttattcctagataacaaaatcctatggaagaccagatggtaccatcctgggtcacatcccatgcaggaacaaatcacagggtaacagatactctggccaggcctgggtcatgaacagcatccaataatggaaagagtcaagttggtttcataaaaaaccacatggagtggaattcctgccagaagaaaggattctctgaccaacagaagggggcaacagtgcttggcaggccaaagtaacagacgtccactatacttactttctaaatttgcttgttcattgatataagtttgaacaaggccaatgacagcttctgtcacaaaactaggaaactttatcagtgtgatttcagtttattagaatagtacttgtgatctatcatataaccaaatgtctctatattgtccacaagaaattcataagaaactatgtttaatattttttattttcccgttccattaatccaataacctctattttaaaaaaattgagttgagtttgtcatttctaaggggattcatgctaatacttataggtcataagtttcttaaactattcaggccaaggtatatccaaatttatatcatcatttattggtaataatcacctggggtttatactcagctggtaggccctggcagaaccctatcagttaaaatattgaaaatagctactgtccaaaccttgcaggtgttccaggcttccatccactgaggttagaagcatctctaggcttcctgacagggatcctccaggatgctagtgcagcgctagacctgcagccattctgattgggcaatgcttatgccacactcattattaaatattttgcatatcactcctagctctaattatgtgctgaaatattctttttaacctgaaccagtcagattcaggctgaaatacagcatttatttcaggttttcttctaggagttctctcacacttactgtgttagaattttactgacaattttctcacatgtagagagaatcccatgtaagataatgagagtagccagcagtaatagacatgagctgcttggagatgctagaaaatacgtttgtggagaaggttcatatgcatagaagctttccaaaatctgaaacgcattcttcttggaatgcttaacctggcaagtgagcagagctttgcacagtgttgggatatgacacttctcagtatgtcagttatgagactgcattctccagagtactgtttgactgtttctctgtgactgacttgtacatgttcgtttgtacaagcatctggtctcgagatgttccctggcacgttttgaatcattccctatttcagagaggggagttacaacatggaatttgtagctaaaaatatatagtccatcttcagacttaaagagccagttggttaaaatcattttcattcctatccccatgtcttaagctgctaaatggttgggaaataagtgattgaaagatagcaacagtttcttccacctgttttttaaaaattgtcctttggtggtcactagagtgtcttaaacacataaaacatttctcttatttaaaatagcaaacagttctctctctctcactcgctctcttactctccaccccaccctgccttttaccctttcttttcttgttttctatgtgtctctcgttgctatatgttgaatttcagttttaaaattaaagccatcttttatgaagagattttcccaaatgaaaatagtttttgaggtatcgtaagaaatggaacgtatttctttgctcatagaaaatatagattccatcccaaatggaatattggatcaaattaataatcccccttcaattcccacttagtatccagaagggttcagtgcaggtgtctgcttagatacagtacatatttagtcttggctgcttccttttgaggataaacagctcttgggaaatacacattgttaaataatcagttacagaggactaattgtttcaaggcactccctttgcagttgctttccaacagccaacagtaataagaaatgtcactttgtttccattggagactagcacatgaactattcatgaagagcggaaaagcagtcttcccagaaaaccctggaataaacatgtagaagccaagggaggctgggactctatcattgatttgtcccagagccatgtcaaattcagtgaaaaaaaaatcactacatttgttttctagagtgagaattcagagagactaatgaatgcctcatgcacctttcaaaacatccccaaaggtttctataacttcacaaataaatatatagaagctgagacaaggaggtgtacttaaattttcttaatcaggttatgcctctctgccccgtgttcagtagcatctgggctggtgaaacacctctgtgtttttgagcaacaagctaactccatttcacaatgagtgacagtgtctgacattgcctgctcattagcctgttgattgaccaggcatagttctttagatagactgcaggattttcacttttgtttcatctggattctctaaataaaagtgtcaaggtctgatctgccagtaaacatcttccacaaatatagttttagtaatgaggggcttgaacagactataccttttcatacctggctccctccttccaaacaggtgcctccatttcttctgctctaattcgtgctatcttttaatcttttaggtttttttcctgtgatttttccattttctgagcattctatgatcacatttattgcatcttaaacaatgtgttaataacatgcttttcctgggctctgtgagcctttactttgcctgcaaaaagatctagcacactccaatacttgaaagagcaaacctacaagatttaaactaaacaagatgcgtacgtcctctttaagagagtttgggagagcaaagcaaatgacatttgggactcgtttttacctggtcattcagattctttgtcttcatgttaactgataattttttccaggatctaaaactttattcttctctctcatattactcaaatgttggggtggggagaatacattttttaaaaaaaaactttatatgaatattttacaccaacattttgtaacgttcagccatcagatttagtagaaggtgcatgcagttaagtgtcaagcaacctctattttaccaagcaacgtgagttatccgcttttcagaggtgctgattttgcctctaaattttgtcctaaggattgtgtaaaaatatatgtgtataaataaaatctgtaaactatgc

SEQ ID NO: 254820 - DNA, 497 bp, Homo sapiens
ctgtgcctggccttgactagatttaatagttgttacagtctgctatatttgtgacattttttctgaagcattttaaagtaaaatacatagattatgatatttcaccccaatctacttcaatatgtatcctaaaaatatgctggggccagaatttaaaccaaagcctgacactaagtctatattaaagcttgcctaacaccagtatcttttcactactggattttgtcattgagccaggaaagaaaaagatataaaggagaaaagtaaacagggaccgaaagcaagatttgtgtggtctcctgtaagtttacctctcccccgacccctttttaaaaatgttttaccttttgtgaactataattgaattttggaaaagaaaatacactactacagttttaaaagtcaaatcccaatttaagaaaagaaataataccctactttgctttttcatgttttctttcagggagcctttcattttcccacggtgaacaaaggaa

SEQ ID NO: 254821 - DNA, 326 bp, Homo sapiens
aagagaaaaaactctgcttgtctgcaattctttagcctgcagggcactgatattttctgaccgacatggtttggtgggaactagcctcaagctctttcagggttctgcagggtggccccagctccttcttttgtgtctgtggcatttactttaggttttggggatcccttccccttccccaatttgtgctttacaacttctctaactctgctttgcagagatgtgtttaaatctcttatttgctggtggtgactacctctaatttccttcatcgttctaggtcttattcctttttaatcatcattttaatagatttgtgtaagacc

SEQ ID NO: 254822 - DNA, 611 bp, Homo sapiens
tgacaggtaccctgcaggggagagggtggggccctgagctggactccacccaacactgccacctccccagcctgtgtcctccctaccacccgaggagctgaaggacccaacagcacaccctcagtggtttctgaaaggaagcaaagttctttctaccctttttcactttgggtgaaaacatgtggctgggttgacaagtcggttttttagaaaggaagcactgactagcgaaggactcgcccagccagaagagggctctgcaaagacagccccatccccaggatgggaatgctggattcagacaccacaaaccaagagaacccagactctggacgtggagcagtaccagggtgaaagacttttcccaccgacatggtcacatagccattctccttgaagtactgggggatggtggagaagtttccagcgtgcaccctccagtaggagttgaagtcgtacaggcgggtggtgtcaggtctcctgccagtgaggaaagaaacgcggctcggggcgcacactgcttgctgttagggagcagaagcagaggggggacatctgctgcttcccaaatgccacatttcttcaaataaaaagcagaagacagcatgcag

SEQ ID NO: 254823 - DNA, 443 bp, Homo sapiens
ggcctacaacccctggatggacatcaggcaacgggaagacgtccaagccttaaacatcagtgtgccgtatggtccaattcctgtggactttcagcggaaaatccgccagagctactttgcctctgtgtcatatttggatacacaggtcggccgcctcttgagtgctttggacgatcttcagctggccaacagcaccatcattgcatttacctcggatcatggggggacatctgctgcttcccaaatgccacatttcttcaaataaaaagcagaagacagcatgcagtacataaggaactcatgtcttggtaaagacaaaattgaaattcttttaataattagtctcatgtcatagaaaagaggactgattttcctcacccacccagcaaggttgctcttcttgctatacttgtttggcataaactactgacttcttgcgagca

SEQ ID NO: 254824 - DNA, 768 bp, Homo sapiens
tgacaggtaccctgcaggggagagggtggggccctgagctggactccacccaacactgccacctccccagcctgtgtcctccctaccacccgaggagctgaaggacccaacagcacaccctcagtggtttctgaaaggaagcaaagttctttctaccctttttcactttgggtgaaaacatgtggctgggttgacaagtcggttttttagaaaggaagcactgactagcgaaggactcgcccagccagaagagggctctgcaaagacagccccatccccaggatgggaatgctggattcagacaccacaaaccaagagaacccagactctggacgtggagcagtaccagggtgaaagacttttcccaccgacatggtcacatagccattctccttgaagtactgggggatggtggagaagtttccagcgtgcaccctccagtaggagttgaagtcgtacaggcgggtggtgtcaggtctcctgccagtgaggaaagaaacgcggctcggggcgcacactgcttgctgttagggagcagaagcagaggggggacatctgctgcttcccaaatgccacatttcttcaaataaaaagcagaagacagcatgcagtacataaggaactcatgtcttggtaaagacaaaattgaaattcttttaataattagtctcatgtcatagaaaagaggactgattttcctcacccacccagcaaggttgctcttcttgctatacttgtttggcataaactactgacttcttgcgagca

SEQ ID NO: 254825 - DNA, 415 bp, Homo sapiens
tggtgggttttagccagctcctttactgcaatctgttttatcagcaaggtctttatgacctgtattttgtgccgacctcctatctcatcctgtgacgtagaagaccttaacggtctgggaatgcagcccagtagatttcagcgttgttttacccagctcctatttaagatggagttgctctggttcacacacctctggcagttttggcaattcaggtcaattaagacatcatgataaactcttacaaaaatggccatgctgttgctataaactcagcacattttttattttccagagatcattattagctgcagttcaatctgagtgtcttgtaagcagtgaggtagaacaaaatcaaggagtcttaaatcagcatttcgcatacttcaatataccaggcagataaaagtccaaa

SEQ ID NO: 254826 - DNA, 141 bp, Homo sapiens
cagagtaataaaatagaacatgatccagaaacagcctatatattatactgtcacatatacaaaattacaataccttttccaccggaatggctaaaataaaaaagagagacaatatcaagcatcattgaggatggccaaaac

SEQ ID NO: 254827 - DNA, 675 bp, Homo sapiens
caacagataactatgttttcaatagtacagggcatgctagtgcagctacaactagatagctatgacctggtatggggaagtctgaaatcagagtgacttcttccatttggcaaatatcagttaaaatatctactgtgtgcatgtacactcctgggtattagggttacaagataaatgagctggacacggtacctgaaattctattgatgagaccaaaaaaacccaagcaaagtgagtaaaaaatatttatttaaggaaaagtactatgaagaaaatagggtgattttatatagtgtaattgcactgaggggcaactttagccagtagatcggagaaagtatcctatgcagtgctgtcgaattgagatcttggtggaaagtcattggagaggtttcaataacgaagtgacttgatgttgttttcatataaaaatgtgaatcaggctactgtgtgggaaatggctagagagggaaatagtgaaagaaaggcaagctaccaggctatagcattccattcgtacaaagaaaataaatccagtgagaaggaagtcagctgttcttatgggcctaataagcaatggccagccaagtctaatacgcacaccctcgggagtggacagcgtgagcatttaggtacaaactggtgggcccattgtggctacagatgagaacatga

SEQ ID NO: 254828 - DNA, 391 bp, Homo sapiens
ccggaacctactagtaactttcaccaggataaaagtgactctgcttttctaacctacatttccgaacagtgctttataaatcacctctcggggttagtttatcaagcgcaaaaaaaagtttaccttgtctcttccggaagaaggaacctgacaaaacccctcccggtagtattgcccacaatcagagccagccagcgcaggcttgcaccgcgcagcaaagggggagcccagcatcaagtccacgcggaaagcatctgaatcccggctgctggctttactggcggagcacagaggaaaaccccaagctcctgcctacagccccggcctgtctggctccctcctccacgtccccactccacgccacgttctgtgcctggcagtccacgcgccc

SEQ ID NO: 254829 - DNA, 417 bp, Homo sapiens
ggtaggagatagatgaataaactacttctttgtttgaatttatagattccttctgaaaaaaattcctagttctaatgcattgcttatttcccattttttacatcttaatttgctgatattttattagctgatcatacagatcatcaggaatgtttcctagttcaggaaaattataatgctatctcaattatttttgccccattaaccatttgctcagttaattttacaagtatcaatagtgcatttcttgactgtgattatcactctgaccttctctttaattgaccagagggcaaaacagagtcagagagattgtgcaaacgtactttgtctttaagtgtttacagcttaattattaactttgcaacattcctaaagataaataaaaattttaaaaaatggatcacttggttgtca

SEQ ID NO: 254830 - DNA, 664 bp, Homo sapiens
gtctacactagtaggtacctgaagtttttgggtcctggggcatcactgtaaagtcttcttgtcagtcttttcctggcgtgccaccccagctggacagcttgggttagtggagtcacaagggagcccgatctgagtattattttgtacaaattggagacacctgttagatccttgatctgttttatcttttagatcaggtatctttagtaactaattgcgtaaggtttgttttgttttgttatttaccataatgtgatgatctatgaccatatttagttagagaccaccctaggtttttgggaatctaggttctttttttttttttttttttgtcattaatagttcatctttctgaatctaagtgtggaaaataccctttgcgtttggctttaactcctgaggtgaacactgaggctgggacttgtggagtaggatgtctgggatcagggtcatttgtaaagttcacatgtttgtgttgtctttttagtagctgtgtctttaggttgttattattttttaataacctcaaatttttattttttatttttttgtgaccctggcagtaggccactgctacccttttaggtagctatactgctgcctctaatagctgtaatgtttttaatattattaacctccttatagtctgcagtcaggaggcctc

SEQ ID NO: 254831 - DNA, 420 bp, Homo sapiens
gaagaatgaaagctccatgttatgtttgaagttttacgagttgactgctttgtaagaaaaaaaaaaaaatcctagatctatgagaatattcccgtgaatgccagggatttgcatataccagtttgatgatttcagaaattaaagtctactctatgaaaatgtttttcatttgaaaattttccctagaatgatttaaattaaaaataatgaggaaaaacttgtgaatctctacagatatatccacggagactagtttgaggatacactggcatagctatcagagaacctgggcttcaatattggcccttccacttactagctttttttcactaaggcaagttgcttagccattggtaaacctcaatatcctcatatgaaaaataggttaaatgagaatgaagtaatgtgtgtaaagtaaaa

SEQ ID NO: 254832 - DNA, 267 bp, Homo sapiens
tgagcacaagctgcagaccacccacacgtcagaggtgcctggggcacccaccagcatgccctgatccttggggaatttgcattctttgcacgtgctccaggtcgttctgatgcacctggagatttgtgcaaggcaggaatgtgggctgcagcccattccctagctgtaggggtgttctacattcaactcagctggcttaaactcaactcagtgaagaggactcactgtcgtataactgataagtcccaaggggagtggggttaaggg

SEQ ID NO: 254833 - DNA, 403 bp, Homo sapiens
agatactacctggttcttttgtttaattataattgaaaacaccaagttttactttattttgtgaaatcaagtaaatacatggcctttaaatataagataaaaaacaaaataaaaactcttctgaataagcatttcaggtataaaaattgtgatgaggtcacatatgtaaagaattaaacaattcctttttcactccttggcatttaggtgaattgctaacaaacacccagactcccttatttacagctgttctagaaacacttaacattttattgggccccacgctggctatttccctctcagcaaacatgcactgggtctgagaataaatcagtcgttcttaaacttccttgagtcatgaatccctacgaggctctacgataactctaggctctctctccag

SEQ ID NO: 254834 - DNA, 497 bp, Homo sapiens
aaactccactccctgttttagagttaaacaatagagggaaaaagatagagtaattactgtaaagtattgtaggtcaccatccaaggtatctcaacaaactgatcttgccacattattttccctatacacagtttatctcctaatatttatcatcattggtttgtaagtttaagagaatactattatgggcctagcccccttcaaagagataagtagatacacgtgacaatacttgaaaccctttaaaggaaatgtaataaataattttgagatgttatttttagcaggtaccctagtaacaaatattatacttaatccattttcattttgtggctgagtacatttctaaattgcttcaatatgagtcaacattataattttcagtgcagctgagaaaaaataaaacgttttggatcagacttccttcatgagcaaatgcattaattggaataacaaaggttgtttgctttgctgtataaacattatggatctgacag

SEQ ID NO: 254835 - DNA, 400 bp, Homo sapiens
gtaaatattacctgaacagaacttcttaaaataccctttacaactaaatacctagtaatcattaaacaaggcaagaaatataaggtttggggttgtcgggggaagagcaagcaaacattgttttacaacaggtttctggaaactataaactcaaatagcagattactaattattgggaaggagatgggatcttggttctaagaatctctgtaacaacttggatatagatgtaatagagcctaactaaattatttcttgcaaagacagaggtgtaatattctcaacaaagtcctgtagagtacacccagtcagctgacagtcatctgtggtaaagtcattcatgggggctttcagcagaacggagggagaaagtccaacatattcagcatgctctctaaag

SEQ ID NO: 254836 - DNA, 178 bp, Homo sapiens
tgccatggttttgccatgttgcccaggctggtctggaactcctgacctcaagtgatctacccacctcggtgtcccaaagtgccaggattacaggtgtgcaccaccacacctggcctccagtgtctattgtccccacctctgtgtccatggtacccaatgcttagttcccccttataag

SEQ ID NO: 254837 - DNA, 474 bp, Homo sapiens
ctgtctcagaggtctcatggcagaatgaaggaatttaccaaagccaagccctttgactctgggcctatctatttctttgatcagttgaaacctgaacggaaagatgggaaaagataacctgtgaagaaagttatcccacccaaaatgcacctcaagagctaagtgttggatctttcaacatccttactcaaaatgggaaattctgaagtggaagacagtccccagtatagctgtgaagagactacaagtagccataattcaaatcaaaatagaagaagcaaagcaaaaaaaagagggcgtcaacaaacaacttatccggcgccgctatgaggacctggaaggcgtggaggagagcagggatcagcagtgctcacagagtttctggctggagctgctggagaagaagcctcagatgccaattgtcaaaaaggctgaccccaacatgaaaaaattccattacgctctggtggatgg

SEQ ID NO: 254838 - DNA, 433 bp, Homo sapiens
ctgtctcagaggtctcatggcagaatgaaggaatttaccaaagccaagccctttgactctgggcctatctatttctttgatcagttgaaacctgaacggaaagatgggaaaagataacctgtgaagaaagttatcccacccaaaatgcacctcaagagctaagtgttggatctttcaacatccttactcaaaatgggaaattctgaagtggaagacagtccccagtatagctgtgaagagactacaagtagccataattcaaatgtaggaagccctccatagtctttataatcatagacttttataaagcatatggtttgatgggcaagaagaaacgcagagcatgtggccccccagacaagtcaccttatcacgatacctgcctattgtatctgtaatatgaaaacatatatacacagctgcacacacaaaa

SEQ ID NO: 254839 - DNA, 419 bp, Homo sapiens
  misc_feature (38)..(38): n is a, c, g, or t
  misc_feature (46)..(46): n is a, c, g, or t
  misc_feature (55)..(55): n is a, c, g, or t
  misc_feature (59)..(59): n is a, c, g, or t
  misc_feature (63)..(63): n is a, c, g, or t
  misc_feature (65)..(65): n is a, c, g, or t
  misc_feature (84)..(84): n is a, c, g, or t
  misc_feature (89)..(89): n is a, c, g, or t
cccaaaatgcacctcaagagctaagaaaaggggtgtgnggcccctntttttgggnggtnaagnanccttggaaaaatttggggngggcntctgggccaggatttacacagttggatctttcaacatccttactcaaaatgggaaattctgaagtggaagacagtccccagtatagctgtgaagagactacaagtagccataattcaaatcaaaatagaagaagcaaagcaaaaaaaagagggcgtcaacaaacaacttatccggcgccgctatgaggacctggaaggcgtggaggagagcagggatcagcagtgctcacagagtttctggctggagctgctggagaagaagcctcagatgccaattgtcaaaaaggctgaccccaacatgaaaaaattccattacgctctggtggatgg

SEQ ID NO: 254840 - DNA, 355 bp, Homo sapiens
acacagctgctttcacactgcaatagcagagctgaatagctgggacagagaccatgtggtctgtaaagcatgaaatatttatcatcactggtaatcaagaaaataaactacagacagagtatcctaatccaaaaatctgaactccaaattactccaaaatcctaaattttttgagcatttgcatgacactcaaggggaatgcttactgacagcatttcagattttggaattttgaatgagggatgctcaaccagtaagtataatgcaaatattccaaaattttaaaaaaagaaaaaaaccaaaaaccaaaatcctgaaatctaaaacactgtggtccccaagtatttaagataag

SEQ ID NO: 254841 - DNA, 258 bp, Homo sapiens
gaccagctgtgggccagtcggacattctgccagcagagtaagggacaggtaaaactatatgctaggcaggaaaagccaacatttaatatgctccagatgaaacttcagaagaactttttgctttggcctaaaaaacctggtcgagttacagcctaccagacatgtgccttaggagaggtgacaaggcacttgccctctttgagctatacatactttttataataagcggaaataaaaataactatttctcaccactaa

SEQ ID NO: 254842 - DNA, 410 bp, Homo sapiens
gatcttggttcactgcaacctccgcttcccgggttcaagcgattctcctgcctcagcctcccaagtagctgggattacaagtgcgcaccatcacgcctggctaatttattgtatttttagtagagatggggtctcatcatgttggccaggctggtctcggacacctgacctcaagtgatccacctgctttggcctcccagagtgttgggattacaggcgtgagccatggagcccggcccaaacttccatttttaagcagttcacgaatcccgcctacttcctgcagatcacccggtccttcgttctcataaccccaagaagcagggaggggcacatgcacctgagggccttgcttctgctggctctgggtcttacgaaggaagagtggatcttcctaagcattcaggtag

SEQ ID NO: 254843 - DNA, 274 bp, Homo sapiens
tgtgcagccgcatgtgctgcagcggtaacttgcattatcagaccttgattttgtaaggatgagttgaaaatggaaaaatgaaatgactaatggtagttgtaagggtaggtcttctaaagttgatagaattggaagatttttaaattcaatgaatgtgccagaagtaagaaatctttagtgtcagttgaatactcattgacttaagtcaacagccctgctcagttgtgaagagaaaaaaacacacatagccaaagaataatgtctaaaatgccca

SEQ ID NO: 254844 - DNA, 327 bp, Homo sapiens
gctgtgagtatatgtgactcataaactgctgctgatctcatctgtccagtgcctggcgtcccatgttcagctatccccataactctagggcaagggatccctccctcacgaataagacaaacaaaaggaaattaaaacaagcaacttctgaggtctgctaaaccaagttcaagtgagctgtccacttagcgtctgtttaggccactgcaaggctgctttctccctaccctgcaagtctgggttccagacacaggattcagcaagccctggctggctctccagcaggcgctcttgagaatgttaagggctcagcaggcacaccgtgtt

SEQ ID NO: 254845 - DNA, 432 bp, Homo sapiens
cagcttctaaggctctttacatctctaggaaatgtgaattttgtgcacactagccactgttttctgcttacttcaagaaacaagtctaaagatttaggatcttatctctgatgttcttagcaacacaaatagcaatcttaaagaaggtaaaacattatttggccatcagaaattatcatagaattaagagtggatgaggacagcaaaagaaacaaatagagtaaaaagggcaacttacagaatgggagaaaatatttgcaaactatgcatccaacaaaggtctaatatccagaatctataagggactcaaattaacaagcaaaaaacaaacagcctccattaaaaagtgggcaaaagacacaaacagttttcaaaagaaaacatacagtgaacaagcatatgaaagatgcttaaaatcactgatcattagag

SEQ ID NO: 254846 - DNA, 428 bp, Homo sapiens
taggcagattatttaaaacgtaaagaaaaccttttacaatcttttaccaagaagagatcaatactacaagaaatctttgtcattttaacagagagaagaccaatttttagttttgcattagtgtatggtattttgatgttgagtcatttcagacccttataataagttcattcaatggtagtcaacttgaccacacaagattctctcttcccaattttctatatcaattttttgtccttcattctccttttacattctgaaaaatttaaataatctccaagctagaaaaaaattcttttttcaacaaacacacattttcatactccataccttttcttaccaaaaatacaccctacttttcttatacacaaagttgttttccctattatctctagtaattttaattgcatatactaattagaattttt

SEQ ID NO: 254847 - DNA, 106 bp, Homo sapiens
agagcagagctctgtgttggaggagatttgcagggtgagaatccagccagcaaactacctcatcccagcttgtgcttactcctcaatgcatcattttccactgatg

SEQ ID NO: 254848 - DNA, 724 bp, Homo sapiens
gaagatgggaacaatagttactggggactactagagggggaaagggagagaaggactggaaagctgcctattgggtactataatcactatctgggtgttgagataattcgtactcctaaccttggcatcatcctatatacccatgtaagtaacctgcccgcctacccccgaatctaaaacaaaagttgaaattattttaaaagacttgaataaaaggatgagagagtgatatcattaattgcgtgtatagatgagataattgatactcaggataatttgcccaatatcacacagcaaaagctaaacactaagtctttctgattatattttcataatatagtacattattattattcaaataagtaatgcattgttataatttatgtagaattgtgtattggttttatgtgacaatttttttcatgaagacaacctagtaaacataaaactaaatatgatttaattgtatgtaagcattttcatgtaaaaagttctacaattcagaaaataaatctgtccaatcatgtatttttatttgatttggaaaataatatgactggggggcagggccaagatggccgactagaatcagtgtcagtcagagtcttccattgaaaagaaccaaaacagtgtgcgaatccttcactggcaacccagatatccaggttctgtcatcaggactgagtaggaggctggggtgacccacggagaggaaggaagagca

SEQ ID NO: 254849 - DNA, 466 bp, Homo sapiens
tactcaatcatacaacatgcaaataatgtcataactttccaacggtcataactttttttttcttttcctattgcactggctaaaacctttaggacaatggtagtggcatcaatggcattcttgtcttatttacaatttccaaggaaatcttacaacggtttactattaaagatggtatttgatgtagattttttggtagctctccttcatcacattgagaaaattcccttctattcattttttaaaaaatcataaataggtactgattttaacaaacgcttttctgcaattattgaggtaaagaattttcttttgtagtctgttaatgtggaaatttatattgattctaagttttatagttttccagttttatgcagaaactctcaatcttaatgtttaaaaatctatttgcacatagtaaacttcgatattttaaagtctatcttatttcagtatccaaagaccc

SEQ ID NO: 254850 - DNA, 517 bp, Homo sapiens
agtcatgtcaatagattcagaaaaatgattaatacccatttataatttaaattaaaataattcttaataaacaaatagtgcaagagaacatttttaacttcataaatggaaatttcccaatatctccacaaatataatattgatagataaaaattttaaagcattacctttagatcctggaatcagataaggatattgttatcactatctctagtcaacattgtgctaagagttctatccagggttataaacataaaagttctaagaattgaaaattgaaggaataaactgtcattccactcagacatatgataacctacttacaagaaaatattcataaatacaatcatatatgtgattaagctttgcactacaattgcttaatatgaaaacaatattcaaaaacaatgatggctaaggtgtggagatgcagttctgttacgttctgttacggcaccgtgagcccactactgcccaaccctctcactaactacagctaaaaatcatggacaaaata

SEQ ID NO: 254851 - DNA, 571 bp, Homo sapiens
aaaccagcctcctgtttgtgcaggctgggcggctgtctgtgcaaattgattgctaagtgctcattttcccactgtgggtttctgaaattgcaaatatggaggtaggatggcagtgtgtgggtgaatgaggagtgaactggtgtgtgctgcatatgacaagtgcctcccatgtgtctgcttttgaatgtgccatcctggagctaatgacacttctcaattaaattgcaattttgctctcagtagctttgccctattgtccaggccacttgacctgtcaggcaaagaggagacggtgtgtgggaaaagaaaattccctccctgctcacagagagagaagcctgttcgcattctgagggtctctcaacttctcagagctggaatggcctatctcaagacatcatcagatgcaaataaaacaaagcctctcagctctggctgcacagtattctctatctgcactgtgagtcaccgtgctcatagtaatggcttgccttgtgagccgctatcaagcgtgtgcgtgtttttctttctgagagatgacagttcccaagtgaaaggacacttcagctct

SEQ ID NO: 254852 - DNA, 1150 bp, Homo sapiens
aggaaaatacatcagggatcggacatcacatcggagcagaagcaactgctgctgtggctgctgagggagaaggagacagcagcactagcatcagagcgaaatgacagatttcccaatagccgatgttggctgcacaaatgcatatgaagggcggagatatgaaactttacctctagctccaggggctggaaacagcttgtcaggaagaatagagagggactgctcctagagctttgttcgacagtttccaggacagccaggagaggacacaggaatgaccagacccaaagggcatagcccacaggtaagtgacccccctacttgccactttacgaatgactgtgcttcttataaaaacaggcaatgaaataaggccgttacacttgatgttccttaggtgagtataccaaacaaattggggacggacttctcttggggcctgttagagcccaggggaagtgccccaccccagagcaggccactcacactctgggggaggacagcgatggccaagggcaagggggaaaccagggccaaatcccaagtacagatggagacaggccaaaaagataaaacaggtacagggacagaagtccagggcttctaaatatgccctggacacattaccctctaaatatgctgggagatactggtatcccaataggctgtagatgagccctggaaaagagagggttctcatcaggccccagaaggatcctgcttgaccagctactcaatacctaacatggctggctttatcagaagacagccaagcaagttcccttctgcttgacggagaaggcctttgttgacagagccagagtggcctgggccagtgggaaggcataccctcctggactcctgagaatgggagttggcacagggatgagttagctgtaaacgcttctgttggcgattcagctaactagctccagtggtggcagcccaggggcctgtggccctaaaaacagaactgagactccaatgctgtggtcgtgcccttcggctggggggtgcgggcgcctctgcaaaaccagtggtgctgggcaatcccacacttggtgcagggctgcctgctggagggcctgctcctcctctacccagactaaccccagagcccagatcttttctccctgatcctgacgcccaa

SEQ ID NO: 254853 - DNA, 386 bp, Homo sapiens
catggaagtgcccccgagcgcagcctctagatcacactcccggtcgggctccatgaggcccggacaaaggctgccatgctttcgtctggtcatgcctgaaagaaagaaaacacatttgacttcttgacagagaactcgcacttgagtatatgaatcaagtttaatgcagcagggctttcccatgctctggaagaatctttccgaaatactctgttctcttcagcctgttcctccgccattcctatcctttttttaaaaaacgtagctcttgtctgacttgattgattttacaacccactgataggtcttgaccacccacgctttgagaaaccccaaccttacagccgggcgcggcggctcatgcctgtattcccaccattttggga

SEQ ID NO: 254854 - DNA, 363 bp, Homo sapiens
ctgtacagcagtcatgacgctggcatctgcttggcttctggggagccctcgggaaacttacaatcatggcagaaggtgaaggagaagcagtgtccattctccagtatggttttgggggagtatggcttcctacctactgtggaccacctgtcaactctgggctgtaacatgagagaattgtgaacttctgtcttgtttgagccatggtttcattctctttttcagccatgtagcctgtgctgtaactcagtgccacattagcaactagtgaaagtcaatgtgggtaaatttgtcattcttcaggttagaacatttcttccttttattcttgtgtttttggctaaataaactgggaaattatag

SEQ ID NO: 254855 - DNA, 264 bp, Homo sapiens
aaaatagccaaagcgaaaaaagaagaaaaagaacagaggaactctggtagatatcaaccataaaagtggagtaatgggaaagcagatcatagggaaagtgggcaggacctgccctggttacaagcagagacccccaagttgatactgtttgctcttctcttgagcactgctattctcatctgctttagtggcagctactatggatggaataatggctcccagcaaaggattatgtagctgctcttgtcaagaatggcttacaaa

SEQ ID NO: 254856 - DNA, 449 bp, Homo sapiens
gattctttctgtaccattactgaatatgtgtttccaatgattgatctgaattttcaagattaatgacagcagtgcccattagctctcttccttcaatctacatcattagactggctgggtacacactagaatttatgttttgctacaaacaactgttcaaggaacaaattaatatattttcttacattagatactaggtagtagaatcactgttttctgataaaagtcaggagctgtcatcatgtaaattgttaatctaacatcccgtgatttattcctttgttcctggcttaccttactaacctctggtccttcatctacataccaaattacactttacaggaaggctactaagatttatgtacaaacaagtcttagtatctacaaacatgggcaactaaaaaaaaaatccagaaaggttaacttgttaaatgtatattaaaaaaaaa

SEQ ID NO: 254857 - DNA, 509 bp, Homo sapiens
agcccctactcccagctcagtgaaaagccctaggtctcagcttctttccagggatgaaaggatggaagagctggattatgtatccaatgtttcaatttttctggatgctgcccaaagaattggcttctgtcttacctgtctcggagtactatgagatgcatcatgctctagatgcctgggggctgctagaaacaaaaatggtggtttggattagtgtgagtgtttgagaccacccctggcctccagaatctcttcctggattgattaagggatttctccggtatgagaccagtatgtgaagactgggagagttggctattttttctaatgcatagttaaaaagagtcaaggacaataaagaagtaggaaaatatgttgcaaacaaaggaacaaaataaagctccagaaacggaccctaatgaaacaggtaaagaacttacctgacagagaatcccataaaaatgctcgtggtcagaagaaaatgcctgtgcaaagtaagaattttaaca

SEQ ID NO: 254858 - DNA, 363 bp, Homo sapiens
ttttatgaaaatatcctaaaatatcttattatcataaaattcattatttgcatgatttcaccactgccatggcccatcacactttaagatagttttagagatgtaaatagaattgggaatacttgataaatttaattacttttttttttgagacagggtctcactctgtcacccaggctggagtgcagtagtgtgatctctgctcactgcaacctccgcctcctgggttcaagcgatcctcccatttcagctactctggaggctgaggcaggaggattgctggatcccatgagttcgaggctgcagtgagccatgattgtgccactctaccctagcttgggtgacagagtgagacccagtctc

SEQ ID NO: 254859 - DNA, 607 bp, Homo sapiens
caaagatgccaaaactccagccagcctctgggtcattctggagaagaggctcttctggctagaaggtggtaggcaaatgactgcactgtcaggcctcccttgcctgtgtgcagttaggaagatgagctccatttccaagcacccttaagcccaaagactttttgaaactggcctctggctcctgctcaggtcggaagcaggaggtgtctgccatggtcacccctggacccctggtctgtctcctgtgtgtctccaggcagctgctggctctggaggcatccacccacccagtgggaatcgggatcgttcactgattcagcatatctgccctgggtgtccctgggtgtggcagtcgggaaggcaggctccggtcgggatggcagggtcggtggccctgaagaagcccccaccccagcagggaggcaggtatccagttagcaggagaaagcaaagtggatgatagatagcgaagggtgaggggatgtcaggtggagggcacagcaagtgcaaaggccctgatatgggaccaggaaaaggagctggggctgggcccaggtggaggaagaggcagctgcaagagtgcagatgggccccagtgggttgtgtg

SEQ ID NO: 254860 - DNA, 665 bp, Homo sapiens
ggcaatcatgcaatgacatataaggaacatttaactgcatggaggactctttcttatgtttgattgtaggtacatgggtagacactatcccatttttaacatgtttaacatgttttaacatgtatcccgtttttaacatgtggtttaaatattgcgtgagtaattacaaattagtcactttttttttctgaaatacctaattaccttgttggacttgggatagaggaactcaaatggtctttttatggtggatgactgttatagatagagatgtcatccattatatgcttaccctttctagattcatgtttagttttgtcttctaaattctgagtatactttgttcttatatgttgattaatctggcatttgtttaatatttcatagttacgcaaataaagttcacatatatcatgttgttttatccgactgtcccttcttaattctggcagaagatggaacacttaccctctagatatggtgatccagaaagaatttagagtaggcaaccaaagctaattgggagtaaagcttccataatgaaagctagagggttacacaaaaatctatgaatttagtattaactgccacttctcagctctctttccagatgtggttccagaacactgggatttgtgtttttactctcaggggaaagagcctct

SEQ ID NO: 254861 - DNA, 414 bp, Homo sapiens
ccatgatgggaggggctcgggcaggggctcaattctgagtgtgagaagcccggggagagggggcagagtgtgtagggaatagagcaggcctgagggcagcttcaggttgctgccgtgtggtgcacacaggggcatgtagggaggaaagaggagactgtctcgtctggagaggctttgggcaggcagtgaacacaggcccagggcgagggcacagtgatggatggaatatttggtagcatcagtaaccaccagggctgcagagttctgcacactcaggccccgaagacctgatatccttccttttagaggtggccaggcttggtagttaaggacttggggccaggcgcggtggctcatacctgtaatcgcagcactttgagaggccaaggagggtggatcacctgaggtcaggag

SEQ ID NO: 254862 - DNA, 474 bp, Homo sapiens
ggcactgagaactgaagaggaaacgtgaacagaaagaagagtgagggctgaataagaagcctcgccagtgggaaatagggcccttggtaccttttgctcctaatagtcacatctgtgtttagaagggccaggaactcccacctcctgcgtcagagcctgtcaagcatgtcaggcctagagtggctttctgatccctgttatacacctatttataagttatctaagctaattctgagctcagagtaattttcctgaaggagcttcaggtaaataaggatgacaaagaactaaaaccaaatttactgtaaatgataacttcagcttctaagaaaagaattactgactccacactgatgtcaatagctggagagcaagggctacgaggaagaaaaccagtgaaataatccatggtcatgccacttgcccaaatatctgaattgcttatcattaaaaaagagcaaatttacgtttata

SEQ ID NO: 254863 - DNA, 1108 bp, Homo sapiens
taggtaaagatcctgttacttctcaaacttccacctactggttttagtatccattactttagttatacctggcatggagcctccgcagctggtatggtcttgtggatttttatttaatagaatctaaatcattactgtcactttttattttggtgctcaaatcatcttagatttggccattaaaaattccttcattgctgggattacaggcatgagccattgcacccggcctcagctttactttcctaacagggatctgatagctaaaggaaaagcctttgccagtcacgatggctcaaacctataatcccagcactttgggaggctgaggctggaatattgcttagagcccaggaggaggctgcagtgagctgtgatcgcaccactgcactctagcgtgggcaacaaagcaagaccctgtctcaaaaaaaaaaaaaaaaaagaagaagaagaaaagcctttactccagatgtagagcagactgagctcatccatcatgatttcttcgtgatattactgccaagcagattataaggtgaagtcaatgtgacaaaaggaaattcggctaaaagcttcctgaagccttttgatgctaagcagtccttcttttgatatttaatacccatggacataaacttctgccttagaggtcgccatggagttttgttttgttttgttttgttttgtttttgccatctgttaacagtcctgagtacccatagagccttttactatttatcagcattctagagtcgtcagtatggattgtcaaaacttgcatttgtctcttttttgttcagtgttgtgtgcatccacattttctttcttttttaaacaaccctgcttatgtaacatccacattttctgacttacctttcaaacctgccagaaagcagaagtgatatttaatacacttggtatgttttatatattgattctaatgataatgtttagtctaagatggacctgacaaggccaggcatagtggttcaacagcactttgagaggctgaggcaggatgattgcctgagcctaggagttcaaggttacagtgaactgtgatcacatcctgccttctagcctgggtgacagagcaagaccctgtctc

SEQ ID NO: 254864 - DNA, 416 bp, Homo sapiens
tctacatacacactccaaggatcccacacttttaaaagggtgctaatactctcttacttaccttggccacagccctgtccctacagtcatctgccctttgttcctggcagctccaccatgcaggtgaaggggcaggagcaggaaagtgtgtgtgtgttgggagggaccctgtggatccttcacaggctgtgaagctcacttccttaaactagggagatgggcttgtgccaccccaatctgaagccctggaggtcagctgtgggacggaacagaggggcctctcttgaaagaaaactgggagttgaagaagtgttgcattctacatgcttcctcatttccttttctgtagcccttctctgtggcacctgatgctacccataactcctagcatgacaatgctcacccatggctcctcc

SEQ ID NO: 254865 - DNA, 461 bp, Homo sapiens
gactccatctcaataaataaataaatgaatgaaatgcaagtacaaatcaatttagaggtgggaggaaagaccttaaaaaatatcacagtggctggcccttggaatcccagcactttatgaggctgagaccagcctgggcaacatggggaaaccatctctacaaaattttagctgggtgtaggctgggtgcggtggctgacgcctgtaatcccagtactttgggaggccgagtcgggtggatcatgaggtcaggagattgagaccatcctggctaacacagtgaaaccccatctctactaaaaatacaaaaaattagctgggtgtggtggtgggcacctgtagtcccagctactcgggaggctgaggcaggagaatggcatgaacccgggaggcagaacttgcagtaagccgagatcgcgccactgcactccagcctgggcgacagagcgagactcggtctc

SEQ ID NO: 254866 - DNA, 1985 bp, Homo sapiens
  misc_feature (258)..(258): n is a, c, g, or t
tagcgtgccatggcctgctacatctaccagctgccctcctgggtgctggacgacctgtgccgcaacatggacgcgctcagcgagtgggactggatggagttcgcctcctacgtgatcacagacctgacccagctgcggaagatcaagtccatggagcgggtgcagggtgtgagcatcacgcgggagctgctgtggtggtggggcatgcggcaggccaccgtccagcaacttgtggacctcctgtgccgcctggagctntaccgggctgcccagatcatcctgaactggaaaccggctcctgaaatcaggtgtcccattccagccttccctgactctgtgaagccagaaaagcctttggcagcttctgtaagaaaggctgaggatgaacaggaagaggggcagcctgtgaggatggccacctttccaggcccagggtcctctccagccagagcccaccagccggcctttctccagcctcctgaagaagatgcccctcattccttgagaagcgacctccccacttcgtctgattcaaaggacttcagcacctccattcctaagcaggaaaaacttttgagcttggctggagacagccttttctggagtgaggcagacgtggtccaggcaaccgatgacttcaatcaaaaccgcaaaatcagccaggggacctttgctgacgtctacagagggcacaggcacgggaagccattcgtcttcaagaagctcagagagacagcctgttcaagtccaggatcaatcgaaagattcttccaggcagagttgcagatttgtcttagatgctgccaccccaatgtcttacctgtgctgggcttctgtgctgcaagacagtttcacagcttcatctacccctacatggcaaatggttccctacaggacagactgcagggtcagggtggctcggaccccctcccctggccccagcgtgtcagcatctgctcagggctgctctgtgccgtcgagtacctgcatggtctggagatcatccacagcaacgtcaagagctctaatgtcttgctggaccaaaatctcacccccaaacttgctcacccaatggctcatctgtgtcctgtcaacaaaaggtcaaaatacaccatgatgaagactcacctgctccggacgtcagccgcgtatctgccagaggatttcatccgggtggggcagctgacaaagcgagtggacatcttcagctgtggaatagtgttggccgaggtcctcacgggcatccctgcaatggataacaaccgaagcccggtttacctgaaggacttactcctcagtgaaattccaagcagcaccgcctcgctctgctccaggaagacgggcgtggagaacgtgatggcaaaggagatctgccagaagtacctggagaagggcgcagggaggcttccggaggactgcgccgaggccctggccacggctgcctgcctgtgcctgcggaggcgtaacaccagcctgcaggaggtgtgtggctctgtggctgctgtggaagagcggctccgaggtcgggagacgttgctcccttggagtgggctttctgagggtacaggctcttcttccaacaccccagaggaaacagacgacgttgacaattccagccttgatgcctcctcctccatgagtgtggcaccctgggcaggggctgccaccccacttctccccacagagaatggggaaggaaggctgcgggtcatcgtgggaagggaggctgactcctcctctgaggcctgtgttggcctggagcctccccaggatgttacaagaacacttcgtggcaaattgagatcaatgagcgcccaaaaaggaaactgatggagcaatatttctgctctaccaaagagggacaaactgtggacaagcattgacactcttgggcccctgattgaccgggaccacagctgaggacccgtggtctcacgtgggacagatgaccatcgcatcagaacaaggtcttgagagcagaatca

SEQ ID NO: 254867 - DNA, 1412 bp, Homo sapiens
  misc_feature (258)..(258): n is a, c, g, or t
tagcgtgccatggcctgctacatctaccagctgccctcctgggtgctggacgacctgtgccgcaacatggacgcgctcagcgagtgggactggatggagttcgcctcctacgtgatcacagacctgacccagctgcggaagatcaagtccatggagcgggtgcagggtgtgagcatcacgcgggagctgctgtggtggtggggcatgcggcaggccaccgtccagcaacttgtggacctcctgtgccgcctggagctntaccgggctgcccagatcatcctgaactggaaaccggctcctgaaatcaggtgtcccattccagccttccctgactctgtgaagccagaaaagcctttggcagcttctgtaagaaaggctgaggatgaacaggaagaggggcagcctgtgaggatggccacctttccaggcccagggtcctctccagccagagcccaccagccggcctttctccagcctcctgaagaagatgcccctcattccttgagaagcgacctccccacttcgtctgattcaaaggacttcagcacctccattcctaagcaggaaaaacttttgagcttggctggagacagccttttctggagtgaggcagacgtggtccaggcaaccgatgacttcaatcaaaaccgcaaaatcagccaggggacctttgctgacgtctacagagggcacaggcacgggaagccattcgtcttcaagaagctcagagagacagcctgttcaagtccaggatcaatcgaaagattcttccaggcagagttgcagatttgtcttagatgctgccaccccaatgtcttacctgtgctgggcttctgtgctgcaagacagtttcacagcttcatctacccctacatggcaaatggttcccaaagtgctggaattacagttgggagccactgtgcctggcctggaagactttcaacttgtgtctcagtgcagttcttgactcacctctctgggcctcaggttctacaaatgccagacacctagcgaagagctctgcaggctttccactgcctgtattggaaatcttgcaattcacataattattcagtcactgcctggtacctttatcttcccatcccactaatgttagtgtcttttaatggagcttttattctgagaatatgtgttgtctagtaggtaagatattgagacagagtctcgctctgtggcccaggctggagtgcagtggcacaatctctgttcactgcaagctccgcctcccaggttcacgccattctcctgcctcagcctccagagtagctgggactacaggcgcctgccaccatgcccggctaactttttgtatttttagtagagatagggtttcactgtgttagccatgatggtctcgatctcctgacctcgtgatccacccaccttggcct

SEQ ID NO: 254868 - DNA, 208 bp, Homo sapiens
gcttccagggatagagagaagcaaatgccagcatagtgagatcttccttgctctcgtttgtcttgccaagctccaacctacatttttattttggtcttacatcccaataatccccaacaagatgcatgtactttggccaaaatggattgttcctttaaaacttactagtttctcattttagttaacaatatagttttaaataaacaac

SEQ ID NO: 254869 - DNA, 409 bp, Homo sapiens
gcttcaacaataattgtgttaatgttttggaaaacaaacattaactaaaataaaagcaatatcctagcaactctcttgattgcctatgctttccccctaacaataccttctccgattatgaccaggtaaccaacactcaaggaaagatgaccctctccccagctcagtgtaaaatcttgaacagatagtaaattgattgaactaatctcacttatttgggagtaatcagtttaggagtgaagatgtgtttcagttccaacaaatgagacatgaggaaatcagcttctgggttggggacaggaggttcttcactcttgaaaagagacttggtggagagttcaccagcagtgaaaacaccacacaatgttgcatgtgcacgtgcccccgaaccacagcgaccatattgtgc

SEQ ID NO: 254870 - DNA, 682 bp, Homo sapiens
ttatgtccatgtgtgctcaatgtttagcttccgcttataagcggtaacacatggtatttggttttctgttcctgcatgaattcgcttaggataatgacctccagctgcatccacgttgccacaaaggacattatttcattcaattttatggctgcatagtgttccaggagcaatttaatagttaaacttgcagccatgatggagcaatagtctccgatttgccctccctcctgagacaactgaaaatggacaatcaataggaggcaatggctctcaggttatctgacaccagacaatgaagtcagtgacctctgagagacagaaaacaaatgaattaatccctaactctgccccagctgacttcatggaagtttctgggctttgacacagagaggggaaccaaagtgaaatctggagatctctctgagtggaagagatgagagatgagggataccaaccagttaagagtttcggggcagagaatcaaaaaggagacagctgcacagataggaatttctggagattttcagaggctccctctcaagtcataagcagaacacagatcagtacgtgcatatgaatagactacctaagtcccagaaaaggacgaccagagtggattagaggaaccatccccagggcagggacaaaaggaagaagggctgttcccatctgccagagt

SEQ ID NO: 254871 - DNA, 361 bp, Homo sapiens
gtctaagagaaataacctttaatgataaaaataatttgctaaaaagctgaatggaaaaatatatttagccagaggataattcccccaaaccagaaaacacacagtgttaagtaacatcattatccacccttttttggttggaaagtatggatatatggtatccacgctggcactgcttctcacagtgcctctttgtatagcagccaaataacaagttgtgttatttgctggatgagaatgttgctggctgagaatgtgtctttttactctctgaaccctcacacctttacagtcatgggtggcaggtctttatgcatgaatatcttctctggttgcagctgtagtgacttgcagatggatc

SEQ ID NO: 254872 - DNA, 681 bp, Homo sapiens
ttccaaaaacaaaatatctactggaatcatcagctttagccctaattgtaaaggatcaaggataggaaaatgttgagcttatcaaataccacttaggtgggaaaaggtaattattttgtttcccaaggcaaacacaaaaagaaatttggcattagaagatgaaagtagataatttttaagttaccaaatcaagatgctgtttgcagaaatatttggtccacagtagatgattcatttaaaaaatacactttacctgacacagtgcaaaagttaaaatgatttttattttattttgcggtttagctttaatacaacctgctaaaatggcacagaatcaatactgcaatgaaaaacctctgtttctttgttgagtctggtgtctgtcaataggtttccaggggcatctgatcattatttaagcttaaactcaattattcagaaaatgccctgtggccctagcgtcagcataaaatagcagcaagaccttactaaactgctcagaactgggtgaagagtttcatttcccaactttcagggtgaaatgttcaaggcatctgaggaaggatagtgtaccacattaaacatgcacagtgcatatgaaacctgttttgttaatgggcacaatagtattatatttaactctgggaatatttccaccaggaagcaacaggctgcatttag

SEQ ID NO: 254873 - DNA, 252 bp, Homo sapiens
tgctttccaaacacctttgcctcctgagtagttgctgaggcctgatcataccgcatctcaggggaagctacatcgttgccaggcttcccacctcctggggcaggaatgtggatttcctctcatttccagaacatcctaagtgcagggagggagagttggtgtcctgggcgccacggggacctagagcgcctacggcacattggaggctgcaggttgagcaggccactcttgtggggtaagatgagtccacca

SEQ ID NO: 254874 - DNA, 358 bp, Homo sapiens
gaagctattgcttccaataataataataataataatttgtgtcatgtcctgtttttgcttacaatgttattatggtatgtccagattagtcatcaactgaaagggctagaataatgattgcccaaagagttgctctaattgaggaggcagtagcatagcctgacccagcttccaggtttgctttcccttttgctgtatatctggtctagatccctatatttttaatttcctcttaccttctttcctccccctattttaatcttcatggggcacgacctgctaagaatgagccttcctagcaaggtgggacctgaatttctgggaataaaccatcctagcaatgaaggaccagctcaaa

SEQ ID NO: 254875 - DNA, 5302 bp, Homo sapiens
  misc_feature (292)..(292): n is a, c, g, or t
  misc_feature (300)..(302): n is a, c, g, or t
  misc_feature (305)..(305): n is a, c, g, or t
  misc_feature (309)..(309): n is a, c, g, or t
  misc_feature (311)..(314): n is a, c, g, or t
  misc_feature (679)..(679): n is a, c, g, or t
  misc_feature (734)..(734): n is a, c, g, or t
  misc_feature (740)..(740): n is a, c, g, or t
  misc_feature (1945)..(1945): n is a, c, g, or t
gcttggcacagaagacagccgggacaccctggaggccgccacaagcctgtacgaccgagtggatgaggaggtgcacaggctggtcctcacctcgaacaatcgtctccagcagctggagcacctccgggagctggcgtcactcctggaagggaatgaccagcaatcctgccagaaaggactacagctggcgaaggagaacccgcaacgtacagaggaaatggtccaggatttcagaaggggcctgagcgccgtggtcagccaggctgagtgcagggagggagagctggccagngccctccnnntcncacngnnnngcagctggatggggcccctggacccggaggcttgtccctcctcacccgtggctgagtgtttgaggagctgtcaccaggaggctacctcggtggctgcagaggccttccccggggcaggtgtggcagtgctgaagcctcatgccctggggaaaccgtgggcatcacagcaagacctgtggctgcagtacccccagacccggctccgtctggaagaggccctttctgaggctgccccagaccccagcttaccgccccttgcccagagccccccaaagcatgagcgtgcccaggaggccatgaggaggcaccagaagccaccctcattccccagcacggacagtgggggtggtgcctgggaacctgcncaaccactgtccggcctccctggacgagcgcttctgtgtggacaggacggggagnccctgngcccagggctgtgtgctctgtgggacccactgtccctcctcaggggccttccaggggcaggggccaccacggcccacctggaggacagctctgcctgttcctctgagcccacccagaccctggccagccgccccaggaaacatccccagaagaaaatgataaagaaaacgcaaagtttcgagatacctcagcccgacagtggccccagggactcctgccagccagaccatactagtgtcttcagcaagggcctggaggtaaccagcactgtagccacagagaagaagctcccgctgtggcagcatgccaggagccccccggtcactcagagccggagtctgtcctccccctcggggctccaccctgctgaggaggatgggaggcagcagccgactgaggcacatcatggccgagatgatcgccacagagagggagtacattcggtgcttaggatacgtcattgacaactattttccagaaatggaaagaatggacttgccccagggccttcgagggaagcaccacgttattttcggcaacttggagaagctccacgacttccaccagcagcacttcctccgggagctggagcgctgccagcactgccccttggccgtgggccgcagtttcctgagacacgaagagcagtttgggatgtacgtgatctacagcaaaaacaagccgcagtcggatgccctgctcagcagccatggcaacgccttcttcaaggacaagcagcgggagctaggtgacaaaatggacctggcctcctacctgctgcggcccgtgcagcgtgtggccaagtacgcgctgctactccaggacctgctcaaggaggccagctgtggcctggcccaggggcaggagctgggcgagctccgagccgccgaggtcgtggtctgcttccagctgcgtcacggcaatgacctgctggccatggacgccatccgcggctgtgacgtgaatttgaaggaacaggggcagctgagatgccgggatgagtttatcgtttgctgcgggaggaagaagtatctgaggcatgtgttcctctttgaagacctcatcctgtttagcaagacccagaaggtggagggcagccacgacgtctacctgtacaagcagtccttcaagacggccgagatcgggatgacagagaacgtcggggacagtggcttgaggtttgagatttggtttcgcaggcggcngaaatctcaggacacctacattctccaagcaagctcggcagaggtcaagagtgcatggaccgatgtcatagggaggatcctgtggcggcaggcactaaagagcagaggaaggcggggaacaccccccaggcagagagacctgggcagccaccgccatgaatgagagctctctggctgtccccaggccagctatgctctgatggccaagcgtggtggtccttgcctgtgtccgagcgtggggttagttctggaacatttgatcacttctcctgctccactctctgcactccacctggaactcccgattacacaactcagaatccaagaaatggcatccatggggataggcaaccagccattcatggatgtcaagcccagagaccggacccctgactgtgcagtgataagcgacggggctcccaaatgtgcagtgatgagcgaccgggtccccgacagcatcgtcaagggcacagagtcacaaatgagagggtccacagcggtgtcctcctctgaccacgccgcccccttcaagcgaccacactccaccatctcagacagcagcacctcctcttctagcagccagtcctcctccatcctggggtcgctgggcctgcttgtgtcctccagcccagcccacccgggcctatggagccctgcccacagcccctggtcatctgatatcagagcctgcgtcgaggaagatgagccagagccagaactagagacgggcacccaggctgcagtgtgtgagggggctcctgctgtgctgctgagccgcacacgccaggcctgatgactgtcagggtggcagtgcccatcatgtggctagaacaatacagagggagcagcacgccaggcctgatgactctgggggtggcggtgcccatcgcgtggctggaacgatccagagggaatagcacagcaggtgtccaggtatttcccaggattttagacattccctaacattttcaaacaaatttataattttgtcttatttaaaaaacaaaccttccacttccacccaagacaacagcataggaaacagacctaaaacaagacaaaaaaagactaaacatgaaacaaaagatgtcaagacacaagacatttggcaacaaaggaccgcgatccctgagagacaggaaaacgggaggtgagcccggtgatggcctcagacctccctccgccttgagagtttgcaggcctcagtgcagggaggggcccaggaagagcccagcagcctccgtgagttgaagagaccaagtcagcaggagttggcaggtcagagtgccagagagagatgcctgcatggggaaagactcaccagatcagcccctccagcacctagtgggttgctacccattcgcacactcaaacagggaggctaccaaggctgggagcaacctttgaaaagaccaaagatcaattcctggtactcatgtgggctggggacaggacccgttcccaccagccagactagggaaactctcagtagatcaattcctgatactcatgtgggctggggacaggacccactcccaccagccagactaggaaaactcccaatctgtgagcattaggtggagttctcagaaaatcttgcctcaggaatggggataattagccctagactgagccctgctcctgactcgcctacaaaatcataaaagcaagacctaaaatgatcaaaccattcccagataattcactttatcccagaacaaagctccagatgatctaggggttaccaaagtgtccgcaccctgcaaggtaaactcacagtgcctgacctcggagtgccaggcgtgcagaggagcagccaagggcaaacactccaaggagagtcgcctggcaaagccaaccacccagagccggcgtctgtgctagaatcacagaattcaaactgtggctgaaatcgcagcccaggcgtccagaaagttaaagttaagaacctataatcccagcactttgggaggccgaggcaggcggatcacgaggtcaggagatcaagaccatcctggctaacatggtgaaaccccgcctactaaaaatacaaaaaattagccgggcatggtgttggccgcctgtagtcccagctacttgggaggctgaggcaggagaatggcatgaacccgggaggcggagtttgcagtgagctgagatcacgccactgcactccagcctgggcgacagagcaagactctgtctcacaaaaaaggttaagaaatgacttaatggaagagattcagaagacccagaccgaccttacagggatgagaaactacaatattgacagtggaaactatcctggatggggtaacagattggatttcacagaagagaccatgaggcaccttgaagacacatcagtggaaactatttgcatttgttgggcctccagagagacagaaccaataggagatagctagatatatatacagacagatagatagatagatagatagatagatagatagatagatagatagactgacagacagatgagaggggccttaggggcattggctgacacaattttggcaggtcaagagccccacaataggccatccacaagctggagacccaaggaagctgctagtgtgcccagtccgagtcctaaagcctcagagccagggaagccagtggtgtaattctcagaggccaaaggcctgagaacctggaggccactggtataagtctgagtccatagacccagtgaactccaaacacaagagatatgagtgcacatcataatcaaattgcatataaccagtgataaacagaaaatcctaaaaccagtcagaggacaagggcatgttctgttgggaggcacaaagctgatgaggatggctgactcctcaggagcagcatgggtgagaggcagtggaatgtactaaggagaaaactgccaaattcacattctgtacctgacaaaatctttccgaagcgatggtgacataaagacattttcatacacacagaaactaagagtttcatccccagcagacctgcactacaagaaatgttaaatgatgtgcttcagggaagagaaaaatgaagagcatgtgcaccatccaggattttcctcgttatttgaatccctttggcccatctcccatttgccccaaggaatgagtgctggcagtgagctgcactttttttttctctaaacgggaaatgggttaaaagatgagtggcttggccgggtgcggtggctcatgtctctaatcccagcactttgggaggctgaggccagaggatcacttgagcccaggaactggggggtcatgctgggaaacatggcaagaccgcatctctattaaaaataaataaaagttaactgactgtttaaacaaaagt

SEQ ID NO: 254876 - DNA, 687 bp, Homo sapiens
tccttgacattgaacttgccaaagagcacatgtaagttaaataagagcctagaaaaatgtatactttcttacttgcagtttaaaaaataaccttaaatgaaaagagaagtgcacaaagtgatacaactttgtcttaattagctacgctgtttctctgtgctttgctgactagtattgaatcaaaatcctgattgtcactaaggctccacctaagtagaatcatacagtaagctgtcgtggataacgcagatgtcaggtgtattacagtgaataaaatgaaagaatagcctaatgtagatcgaccccaataatttgtgtgtgtgtgtgtgtaatttttaaaaaagacaaggtcttgctatgtgaccaggctggtctcaaacttctggcctcaagtgatgcgcccaccttagcttcccaaagtgctggtattacaggcgttgagccactgtacctagccaaccccaatagttcttcctcataatttatctcatccacgtaatctagtgtgatttacaaactgctctgcagctcaataactttctgtaaccttaaacacaagtaaaagtgagctgctacatccaaggaaggagatggcattggcggtgtggagagaggaggtgagaaatggtcagattctggatgaattctgaggttagagcccataggagtggtaggattctgggtttg

SEQ ID NO: 254877 - DNA, 416 bp, Homo sapiens
tttgctaaaactcatgataaagtacatacagtggtaatatacaatacaggatgaccagtgtagactggctgactggggaagggttgatgtaggctggctaactaaggagaggctcagtgtagacaggttgactctggaaatagttggtgtagaccagtcgattctgaaaaggctccatgtaggctgactgtctcataaagggctcagtgtaggctggcttcccacagagggaaatatttgagatgagtggattgggaggttatatcctgtgccctagttctgccattaacattgcatttctttgcaaataaatgtaactttgtcacttcaaatctgcaattagcattaactgtcaatgacaagactagggtgacagtgagttcgggttcacaaccacgagctaggaccaggagagc

SEQ ID NO: 254878 - DNA, 516 bp, Homo sapiens
ctctcctccctcatactttgtgccagctactcccactgcctgtaatgtccctgactccatgttcacttaacttgtccttcaggttatcacttagacatcccaccaccctctccaggaagccttaatactaggagatgtctctcctatggtgtcccaccaaatttcatgcttccatatctaaatagatcacactatattgcagttgcttcgctacttgtttttcttactgtcctataaacatcttagttatttgcctttgtaacccaatgcctaatacaggagctgaaacatagcagatgctaaaaaaaatctgctgaataaatgaatgtatgaagaaatgggtgaaggaataagagatcaaagttgatgccacagaaaggaggtaaaagaaaatcccttccaattacatgatacctttccctagccttcccaaatgggaatgagtgaaagacataatggcttatttcttcccattctttttggttgtttagtgttagagatgttatgctggatgaa

SEQ ID NO: 254879 - DNA, 375 bp, Homo sapiens
tggaggttacagtgagccgagattatgccactgctttccagactgggtgacagagtgagactctgtctcaaaataaataaataaccaaggatttaacatttatgtagatttcacaccacgtaagtacagaaccacatacattaaaaacaaagaaaagaaaatagacctcctattttagcaagccaaaatcaaggttacaaaaagatatcctgaagggcaagtactgtccgtgactgtattccataaaacaagcctgttagggggccggacgcagcagctcacgcctgtaattccagcactttgggaggctgttgggcggatcacaaggtcaggagatcgacaccatcctggccaacatggtgaaaccccgtctct

SEQ ID NO: 254880 - DNA, 224 bp, Homo sapiens
atggcaaggaatagatcagaccatttataatccggtagaactttgcttcatcctcctgctgctgctcacttaattctttcaccactcccttggaatttctgaagaaagccaagtggggcatagggaaaagagacgggaggtgaaattcaaaatatcagatgtgggtaccttttaaagttattctgttaaaagaaatctaacagaagagagtataaatattgatt

SEQ ID NO: 254881 - DNA, 444 bp, Homo sapiens
aaactgaaccctcccccttcctccataccccccccaaaaaaaaaacccagcacctaagtgtcctgatactatgaggcataacaaatatggaattggagttgcagaaggggtgagggcagaaaaaatatttgaacaaatatggccaaaattgttccacattggatgaaaaatagaaacataaaaatccaagttcatttaacttcaaatagaaaagaaaaccataccaaaacatatcatttctgaaaccagtgataaagagaaaagtcataaaagtaaatgaagaaaaaggcacatcacaaaatgcaaaacaaaaatgaactgacttcacatcagaaaaaatgcaaaccagaagataatggaatgagatcggtatcaaaagatgaagacttataaaccttaaattctataaccaggaaaaaacatctaaaatgatgacattttcag

SEQ ID NO: 254882 - DNA, 344 bp, Homo sapiens
taaagtctctttcaatgattggattcagtggagctgggtttactgtaaagggaactttaatagctatttttcaatgaacacagaccatctccttttgattaagtttaactattaatgtaatttgacaaggaggtgagaagctcatgcctcatcttcatctgctgtctaaagtaacttaagcaaaagcaaagaaaagaagcagtaaggtgttgctgctggaaaattctgtctgaaaatgctgttatttgaaattatttatagagaattcactgaagtgaactatttcaataatatttttatgttaacgaaggttatcaatgataagatgagccaattataatagt

SEQ ID NO: 254883 - DNA, 301 bp, Homo sapiens
aaaatggctacggcttctaaagggccacagtaactagtggtatatagtatatctgtggtattaaatttaatggaaggggactgggggacacaatagataaatgtctaaaaaggccgcttagggcgactataatttttttaaagcctgaaaaacagtaatctgattcaatcaaatatcagtacaatcaaaatggtgaccaaaccaactataattccaacctcattttcacttttgtatggggctcgtaatccaacatcacaaccacaggagggattcattcactaattatttactaaaccct

SEQ ID NO: 254884 - DNA, 504 bp, Homo sapiens
gaaataattggggcaaatatgcatagataatgtagaaggacttttattgcaacattgtttgaaagtgacaattataaattactcggtatttactaataggaatcctgttgaataacttagggtgtattcttacaatgtaatagaggaacttcccaataaggtcccacactgtgctgatgccctgagacactgtggcacacggtgggcacagtgaggtattttaaatttccaagagaaacacaggtacatttgtcagataccctggaactcctagttcctggtagttctgtttcaacattagatggtgccaaatccctttctataatgtcatatttttgtgaaactgggtttttagcagttgctaagtacaggcaaaaatcagtttgtagaagaaataaaggtggtgctgtttagtctgattccaaggtttgagaggtgcagtgcctaacaggcgccataagtgagtgagatggttatttggtaaagaaataaaaatgtaaaaaa

SEQ ID NO: 254885 - DNA, 351 bp, Homo sapiens
ttttttcacttaaagtcaattttgtccaatataaatatagatgtattaggccattcttgcattgctatagggttattataataaagtaccacagaatgggtgccttaaataacaaaagttcattttctcacagttctggaagttataattctaagatcaagatgtcagcacatttggtttctcctgaggcctgtcttggcttgcagctgcttgccttcttgccatgtcctcttatggcattttttctgtgcacatgcattcctggtgtctcttcctcttctaataaggacatcagccatattgcatgagggccataccctgggagtctcattttagctttatcagtcctta

SEQ ID NO: 254886 - DNA, 382 bp, Homo sapiens
cgagtcttattggaacgcgggaccctatgcaccagtcccaaggctggacacttcatttttatcactagtttcactatttgccctttctccttccccccaaatctttgcttttaagacaggaaaacctacaagataatttggttttattgtatatgtttagtctattcacagcaattaaatgagaggggttttgaaaattctccagtttatttataatccatacttgacattatgcataaaaaatgaagacagtgtcatttttcatgcttgagattttactatcaactggccttatcattgaatttactttagggttacttaaactagtctagtgcaaaactattaaactttcttccatgtgttgtagaatagtgtgatttgg

SEQ ID NO: 254887 - DNA, 435 bp, Homo sapiens
tgctatgctggatggaggtactgaaggcaggaggaagggtagatgatataggtttaatttctattctctctggcaactgggtatcattcaacagtaaacaagcaatctcagttttgctttattttaaaataagcctgactggatattttccatggctagttatatccttatcaggggaaatttcagaatttggggtgagatactcttctgtgacaataataatggcaacaaaaaccacgaaatgacagctgctgttttttgagtgtttaccaaattttagaacctatgccatttctttacatgtattgtttctatacctcatgcccacccgatgtggtaaatttattcctttttctttctaaatcttgaaaccttggcttgttgacactaaacaacttattccaggtctaagagtgagtatgtggctcagcatta

SEQ ID NO: 254888 - DNA, 290 bp, Homo sapiens
agctggtgtccgagtcctctgacgtcctgtccaagtgaacagctgtggcagcccctcccagcctgcccctcctgcggctgccccagagcccagcgggggaggctgctgtgcagggtagcacagggaacgggagacccacctgaggctcagccctagccctcaacccacctgcgggggagtttactgcctagggaccccccttgcccatgcctccagctacaaaacaattcaattgctttttttttttggtccaaaataaaacctcagctatctctgccaaaaaaaaaaaa

SEQ ID NO: 254889 - DNA, 420 bp, Homo sapiens
gaccagatctgattcgtaattcagtttaagaatgacgcaatcaaattaattttttaaaggtgattcttgctgcttggtagaaaatagatcatcagagaacaaggagatgggtgagaagaccagtgcaatagttcagataagaaatgatggtgatttgaacagggaagtaacaacagtgatggcgaggagtcagtgatttaaggatatattttggaggtaaagtaaaaaggaattcctgatagatcctggggaaagggaaagcaaagaatcaaggataactttcataacccaagttgggcagatgggaatgccatcttctaagacagaaaaaaaacttggagaagaggtgattggtgggcttttggggtaattaagagttctcttttgaacaagttgagtttaagatgtttattaagcatc

SEQ ID NO: 254890 - DNA, 188 bp, Homo sapiens
atgccacatagctaggagcagagatttcaatcaggcagtctggctctcaaagtatgatgccttccgtgtggccgggtgcagtggctcatgcctgtaatcccagcgctttgggaggtcaaggtgggcggatcacaaggtcaggagttccagactagcccggccaacatggtcaaaccccgtctctactg

SEQ ID NO: 254891 - DNA, 681 bp, Homo sapiens
ttcctcttttttggtgctcttttctctatatcctgttgtaatgctctcccttggctccagcccttgctcttggaagcaaagttcagtccttataatcggctgatgcaagtccagaaccaaatacattgtatatagaatggggtggctttccttttttctacatcagactttttcctttctgtttattataaaggttgccctgcttcgatagagtgattattctatggatgaattataaatattttgtttaagttattaattatgtattcagcatgtttcacttgtatcagtgtgcatttaaatatgtcatctcagcctgtcctcatgagacttatttcaatttcacaaatgaaaataaatctaagcctacagcctctgcacaactccctgatgtcacctagtgttctgttctttccccagcatcatcattttcaaatcagctcccaagggtcagtgaggcagactgagcatgtgaatcttgttggaataattgggtttctatgataactggagaccataataggccatgcactggttttccaataggggttttttttaacaaacagaaccataaaattctaagggaaaggtatcagtctggcattgatcatcttgcaaactattctcagtggccttgaatttaacaagaataaaagttttaccctcaaatgcaagcttttg

SEQ ID NO: 254892 - DNA, 738 bp, Homo sapiens
catcataagaaaagatgttttaaatcttatgaagaaggtttagaggccatttgtgtagtaaactaacaaaagaacaaacttctttgaagaaacattctctctcagagttgaaaataatttctgatttcctctaaaagtaccaaatgattgtgtaataaatgagggttgagaaatagaggattaccttccaagaaaacatcaaccacagcttgtgtattttttaagtgttgtgaattgtactttgtggtacaagcagtaataaaagtaagtatctacttctaatagtggtgttcaatcgtatctagtgactttttaggagagctgaatatacaaggacacctttttactgatgttcatatacatttcactggcatcgttaaaaagaatgaacattccagagttgtgataggaaatgatagataactttgtcttctatctcagacttcctatatgcccgatttgttctagcacattgcacacatttgcctgtttccttatctgtaaggtacaaccagagccaaacaagaactagagttccgtgaaaagtgaggttttgtttgcaccccacctcctaaagtgctgacaagcaggaaacagtcattcttataagtatgtgctaacttcttggggaggttttctttttcactgtgggtaaaatgagaaatgttggatgcctctagaccgacaattagctaaccaaaagtaagcatccagttttcagtagtatgaaagcatctg

SEQ ID NO: 254893 - DNA, 583 bp, Homo sapiens
ctgcattccacaagccttgatatatatgacctgtgtcattcataattctcactgtgatttttctttttaactcatatagtaggctgaataatgcttcctctacaaatatatgtatgtatgtatacacacatacatgcacacacatctctttctgtacatatcctaattcctggaatttatgacatggcaaaaaggcaaattctcccctagagcctccagagggagcgttgccctgacatcttgatttcaggctggtgatattgatttcagacttctggtctccagaactgtaagagaatatatttctgttatgttcagctaccaagtttgtggtaatttgtaatagcagcaataggaaaccaatacgcctatgaattatttgaaaacacatttctaagttgcctaatccatatttagcctattcgtattccattttttgctgatttctactttaattgcttttatttggaaaccattatttgcaatactttgattatttgaaacttgtagacaatttctctttgatctatacatagtacatttttatagtttatatgtacctgaaaataaaatatattcttca

SEQ ID NO: 254894 - DNA, 296 bp, Homo sapiens
acaaaattcccatttaattctacctcctaagatacaaccaccattaacgatttatattttttcactctttggagccagtctgctagggaccaaattctagctctgccaacagctagcaaccttggacaagaacttaacctctttgtacatgcttctttacctgtaaaatgggggtaatgatagtaccgattacatgcggctgttttgagaattaagttaatatatgttaagcacttgaaacagcacctggcaatagttaagtgttcaataaatgttggcctttttctaagtgtgaa

SEQ ID NO: 254895 - DNA, 496 bp, Homo sapiens
ctttaaggaatatcacgggaaagcatgaagctgttataaagttaatatctgctattctggactcaagaaggtcaatctgtaccctccgtacgtgcctcctttcctagccttcccaagaagtcttaagaaaaatggacatcaaccaggctgaaaccttggcatcatacctggcacctgctggatgcttaataagtacttgtggactgagtgactctcatgccttacctctgcagtgtagacaatagtacccatgcttgctacatcacggaggacttgttaagcattattcaattatgaatctttagctagtctacatgtcatagattctaatattgatgttttctaccctttaatataagtgaattttaatccattttatagtacatcttgaaattatatatataatttccttagtggtacctaatgtatcttccaatcaataattttcctgatttattgaaaaacggtattaaataaatgtaattacaaaaccaac

SEQ ID NO: 254896 - DNA, 308 bp, Homo sapiens
aaagaaacccaatggcaacaggtcaagtttactagaaagactgagacagctgaagcaaaaccaagcagctggagttgagcagagtcctttgacctcgcctcccttctcgtagctctagaaacggcagctgtgttttctcctctctgtacagagttgggctggcaccccttcccaggaagctggcagtgggcctggggcacacaccctcagagctcggctgagtcacactcccatcagataaaaccatacacctaggcaggctacagggcttgatggaaaccacatcacctcggaatcatgattcagtt

SEQ ID NO: 254897 - DNA, 554 bp, Homo sapiens
tggctcctgtgtccttttgctatgacccagtcctctttgattatttgccccctgtctgccaccacaagatgttccaagttcatcttgttcatttcctgtctctcacctttaagtcgccattttccaaggagccctcttctttcctttaggtattttggtactttcccaaatggtatttggaaaccacaatcaggttgttaggagtgcttcctgctcctggttggccatttttaagatatgtatgcattttaagccattctatagacattgctcaagtgccttcaggaagattatgcagctgtacatctacctacagtagaagagatcccaaagccacgctcatccaatcctggagaatcatttattttgaatatagaccattgaataggtgaaaaatggaaaagtcactttttgtacatttgcattccttcaataatgattaccatttgttcacatatttgttgaccattggaattgattttagcacagtgcctaaaatatagtaggtgctcaataaatatttgttaattgaataaattacttgtatgttcata

SEQ ID NO: 254898 - DNA, 691 bp, Homo sapiens
catgggagggatcacaccagtgtcacccttacaacagtggaggctgcttttgggcatgtggtgacccgtgaccctggccctgtctaggcactggccatcctgagtctagcacctcacacacacacatatatacagtgcatcccagtgctcaccgcctgcccacaccccccaacgccagcacccaccgtcatgacatgaacacagagaccagtaccctaccttgcactggtgacagcgcccctgtcacaaagccagcagcttcagacagcatccctcaacattcttcctggctactctgtccctgtccctcactccctctccagtagctcacagtccaaatcccacaacggatggggaagcttaggcccaagaggaagggatgggaggacacagtcatccctcctgagacccggggataggatcataaatgaggaaagaaaattgcctttggccagtgaatgacagacgtgggcatccaatacaaatcattcagctcctggtcggttgccccactgcagccctctgaatctgttcagctcctgccgtgcggcagctagaggggcccccaggacaggattctagaaatgggcaccaagctgggaccagagtcctaaggaccactctctgctcccaagtgtcagtcccagactatgggcccctaggtttcactaatccatcaaattctagactc

SEQ ID NO: 254899 - DNA, 200 bp, Homo sapiens
actactgctactgctacaaatactactagtgttgctgctgctgctattactattatcactgttactactatccttgccactatttctattactactactgctgttactactactattactgctactgctacacctgctactgctatccccactattcctactaccattgctcctactgccactactgtcttcgctataat

SEQ ID NO: 254900 - DNA, 424 bp, Homo sapiens
tgaagactcactctttttcatgatcttcaaagaaactcagatgcgatgtattgcacacaatttaatgaataattatggagggaagcaggttttctttctactgttataaatgctaaatgatgcacacttgaaagatactcattaaaagcttttttgcagttttgatgcattatcattcaatacgttttgaaaagaatgatactttgctacttctacttctcattatagtgatcttaatttttactttcaaggtccattttttttctctaaagttatttttttgtctttaatttgacctgaatccaatttaagatgaacaagtatgaatccaacaaagcggctttgaggtctgagaatgaaacttgtttactactgtaggactgctttcctctctgaggtggtttttactatttggggcttcaga

SEQ ID NO: 254901 - DNA, 1328 bp, Homo sapiens
cgggcagccttgcctaaatttctcccaagccaagctgtttgactgtgtgcacgtgtatgaacacaggtgtacggatgtgcatgtgtatgggtcaggtgtatgggtcacaggtgtacagatggaggcctatttgtatgtggctgtgaggtgtgtgtgaacagctccccgccgcccccactccccaaagcagcagctcttaaattttgggtcttggagcatccaatgaagatttaggatcctgcagttaagtacgaagttcgtattccatttaaaaaggctctggaatcagctatggacccgttgaacattcttctggctgtccttcccagctttggtgggagttggctctgactagatctgtcaggcctctgtgaagtcttcctgactgagtctctctctatgagcagagtggggccaagaagccaccccaactcctacccccgggcagcctggtcgccctggccctgcccacacagcctgccctgaggcatgctgagatcccagtctgcatcagggctgcccatctgccttggtgctcatcaccttgacatgaacaggcccgaagttcttttccaggatggcagagccttcagaaccatcaactcctacccctccatcgtgcagaggcccagagagggacagagacctgcccaacaccacagcaatgaagtggacaatgaagattcaaaaccacatttgcggtctcctcattccgagaggagattctagatgagccccgttacaggagtgtatttgcaccggcacacgccaagggactccatccccatgacgcagatggcccgggaccttcttcctttccaggctgtcccttcctcttgggtccctgagagggcagtcctggtgagggcaggagaggacagctaaggctaaggagcttgggaaaagatgtcctcttaagaactgctttccagcacatgttgtcccaccttctgaaattcaaggagatggttaaaagagaaaagcctttctccggacccacctgcagcattaagaaccatgggttgggctgggcacggtggctcatgcctgtaatcctagcactttgggaggccgaggtgggtggatcagttgaggtcaggagttcgagaccagcctggccaacacggcgaaaccccgtctctactaaaaatacaaaattagccgggcacgtgcctgtaatcccagctactcagcaggctgaggcaggagaattgcttgaacccgggcggcggaggttgcagtgagccgagatctcgccattgcacttcagcctgggtgacagagtgagactctgtcttaaaaaaaaaaaaagaaagaaagaaagaaaa

SEQ ID NO: 254902 - DNA, 453 bp, Homo sapiens
acaccgagaagagggctcactttattgagaaaacagaaggttgagtacttggtaccaagatggagcctggggtaggcaaaaagcctgaaaacaaagctttaagcttccttttttacatgcccgcctccctgcccctaattggggcagctcctattacagacccccaggcattcttttccctgtctctgggcaaatgcccagtagattttaccaacagatgtctgtttctgggacccaggaacatgagggaagtgtctcagttcttttccaggatggcagagccttcagaaccatcaactcctacccctccatcgtgcagaggcccagagagggacagagacctgcccaacaccacagcaatgaagtggacaatgaagattcaaaaccacatttgcggtctcctcattccgagaggagattctagatgagccccgttacaggagtgtatttgca

SEQ ID NO: 254903 - DNA, 409 bp, Homo sapiens
actgttttcatacttcaatggcagggttgagtaggaatgacataccacatgaaaaagccctgtacagaaaatgcttgccaatccctgctttataccataaccagaatgccctaatactcaaatctaatcatgtgactccccactccaatgaatccctacagtaaacattgctgtctccctacccaatagtgagtccctgctctgtcttgctggaggaacacatgtctatttggatatttgccatgccaatatccctaccaacccaaaagaagaaatgattatcctaagctcatcatagtaattacatttgcttccccagtgcctggtttaggaatgagcatgtggtaggacccagccaataaaatgttacaggaagtcaactgcacgtttccgagtcttctccctaact

SEQ ID NO: 254904 - DNA, 321 bp, Homo sapiens
ctaaatcccaaacacagtatttttccacacttctttattttctgaaatacacaaggctgttcaccctggcctggggagggttgtggagcctgtgttgttggagcaaaggttgttaactattctgagtgttatctcttttttctatctatcacatatacattgaaacgcttccatccttttcctcaagccaatgcccccactctccgaggagactctgctctgagttcggtgtgtggagttgggtgacgtttggaaagacagcatgctacacataatgtaaatgtaactacttatgtttccagaaataaacttcagtatttt

SEQ ID NO: 254905 - DNA, 288 bp, Homo sapiens
gaggcaaggaaacagagtaagacagaagataggaacagagagagagagagagagacagagagacgcagaaaaagaaagagagagacagacagacagaaaaagacagagacggacagagagagacagagaaacagagagaaagagagaaagacagagagagcgagagagggagagagagagaaacagaaaggcagggagagagacagagagagacagacagatagacaggcagagaaagagagtaagacagaagataggcacagagagagagacagagagacacagaaa

SEQ ID NO: 254906 - DNA, 233 bp, Homo sapiens
gttggagagtttggccagattctggggctaggaagaaaaactgctaagtccactgtaaggaacaaaccccttttcattctaaaggcagtgacaataacatggttagatttcccaagaatggaattcagaaaattcacaagatttagaaattggacagaaggttcatgattcaaagaactggcttgacattatacttcttttgaaaaaagtctattttattaaatatgcttatg

SEQ ID NO: 254907 - DNA, 2144 bp, Homo sapiens
  misc_feature (1114)..(1114): n is a, c, g, or t
  misc_feature (1484)..(1484): n is a, c, g, or t
cccagaagatggaagccaatgccagctcagcaaaacaacagatgagtggtccagcctgagtagaggatctcaggccaggaagacttagttttttccatcatattagtcactcatttatcatccaaattctgaaagtgctgttaataaggcagaagttggccttagattcggatttcctagcacatgctgtccccctgtactgggaggtgctggctgtgttctaggcctgcctcatgggtatcattctggattcttgggccttccctgtccctcatcctgggaaccgcttttgttgcgttgcatgtttttctcttttttggttcagttccttgttttaagcagtggatctttcagtagctttctgaggaagagtctgtgggagttaaatttctcacatccttgtatgtttgtaatcgcttcattctaccctgattttttagagatagctgagctgggtacccttattctttagagatagttgagctgggtataaattcacgactggaaatagttcccctcaccatttcaaagacatttttctatttttatcttgcttcccatgttgaagacattcaacattgtgattccaaaatcattgtaggagacctgcttttttatctctggaaacttttaggatcttctcattatccctagatctggaattccgtgtgtgtgtgtgtgtgttctcatcatgctgggtatctgcagagggaggctttgattttgaagcaaatttccttcattcttggaagctctacttgtagcacaacttggataacttctcttgtgaatttcatgttttccctggaacttgggctagttccatggcccctggtgtgtgtgtctttttttctgttaatatttgcttattttgttcaacttatggagagattttctctacttttatcttctaaccccttctgttttcttgaattttaaaattttctgctgtcatttaaaaaaattgtccaccagctgcggtggctcacgtctgtagtcccagcaatttgggagcctgatgcgggtagatcacttgaacccaggagttcaaaaccagcctgggcaacatagcaagaccctgtctctacaaaaagatacaaaaattagccaggcntgagccactgcgccaggcctcattttagctttctgcagctccctctctcttcccggtcccccctccttctgcttgctggtgctgtgcccttcctctggttagaactccttaggcgtctggggaccctgaatgaagggaaccttatcaagccgatgggagctctgtgcactcatgagtgtttgtcatagcgggtgggcaggaaggttttgttagggggctgcccagattctgcaagactcacatccttggggatatagtaccagcatctggcgtttgggaagagggctgggctatcaccctttggggggcctgtccaacctcctccctgcgctcagtgtctttcagtctggagcctctctctagggtgaanctcccagctcctgccagctgggccaccctcagcctgttcagtgttgaggtctccctcagccctgcctctggaggtgcttggggcctctccagcacgagccttggcaggattctcttaggaaaaccacctcctcctcgtgggtatcacctcctcctaggagatcaaagcccgttcctgcacgttcatcccggcatctctccggaaatgccacggtctcccactgccgccctcccctttcccattctttgtgtccttcagggttgacacctgcgtccctcctttgctgtggttgcaggagggtcttgtgcatgagcgggcgcaggtgcatgtgctcagctgtcttgtgtcacccaaagtcagctagaaatgggagacccaggccagagacagtggctcacgcctgtaatcccagcactttgggaggctgaggtgggcggatcacctgaggtcgggagttcgagaccagcctgaccaacatggagaaaccccatctctactgaaaatacagaattagccgggcatggtggcgcatgtctgtaatcccagctacttgggaggccgaggcaggagaatcacttgaacccgggaggcggaggttgcggcgagccaagatcatgccattgcactccagcctgggcatcgacagtgaaactctgtctc

SEQ ID NO: 254908 - DNA, 1349 bp, Homo sapiens
tcagacaagcttcttagtttgccatgagtgacacttttgcctgccctggtgtctctgccaaaaatatgaagggtttcagaacccccaccccggcctgcttccctcccagacttggagtgggtctggggctgacaacagtctcatgccagatagcctgagcagccaccagtgccatcaggtctgacactgcggcccctgccccggagggaaaaacaaggccctctctgggggattttctgccagcttgtgaaaacaggcctggagtcagccagcgcccccatgcttagacacttcgtgtggttttcaaagtgcttttatgttgctagctcatatgatcttccccaaaaccccataagggagggcaggaagtttgagcaacagcctgtcaagcacccatacagcaggtggtttcattgccctccatttacagacaagtaaactgagcttcagggtggctaccgcttgtctcccaagccacccagccatttagccacggaagaggtcatgactttttacaccccagtgaagctgaagatttttctttccgtttttaaaaatgtttactccccagggcagtgaacacctggtgcctctgtctagcgcaagaggtgaacgtttgccacttccgtttctttcctcctaccagacctgaccctccttttgtgacgggaacatcctgcaggcagtctgtcctgctttcatagactttgagaaacggggtccaaattgccggctgtgggtgggacaggcgacactgcagtgaagaggtggagtatttttgtagcggggaagaaatacatttcctctaccctcttaggttcagtgtttgggggtctgtgaattaaactcactcaagataaattaatgagagaaaagacagatttaatcacatacgtatgggatttcactgaaaaacgtgactcaaaagagcaggtagaaggtggggcccgtgactggtccgaaggtagtgagttatctcagttgattgttcacagtcagttacagattagactccttgttccactgtctcccctcttcccacttgttttgttttttttgagtcagagtcttgcactgttgcctgggctggagtgcaatggcacgatctcggctcactctaacctccgcctcccgggttcaagcgattcccctgcctcagcctcccgagtagctaggattacaggcacccaccaccacgcctggctaattttttgtatttttagtagagacagggtttcactatgttggccaggctggtctcaaactcctgacctcgtgatctgcctacctcggcctcccaaagtggtgggattacaggcatgagccactgcacccagccaactagtctt

SEQ ID NO: 254909 - DNA, 1164 bp, Homo sapiens
agcgtatgatgctgagaagaattgacaaaaacaagaaaaaagaaaaaagaaaaacagtaaagtttaagaaagtaaacaatcagccagcgcccccatgcttagacacttcgtgtggttttcaaagtgcttttatgttgctagctcatatgatcttccccaaaaccccataagggagggcaggaagtttgagcaacagcctgtcaagcacccatacagcaggtggtttcattgccctccatttacagacaagtaaactgagcttcagggtggctaccgcttgtctcccaagccacccagccatttagccacggaagaggtcatgactttttacaccccagtgaagctgaagatttttctttccgtttttaaaaatgtttactccccagggcagtgaacacctggtgcctctgtctagcgcaagaggtgaacgtttgccacttccgtttctttcctcctaccagacctgaccctccttttgtgacgggaacatcctgcaggcagtctgtcctgctttcatagactttgagaaacggggtccaaattgccggctgtgggtgggacaggcgacactgcagtgaagaggtggagtatttttgtagcggggaagaaatacatttcctctaccctcttaggttcagtgtttgggggtctgtgaattaaactcactcaagataaattaatgagagaaaagacagatttaatcacatacgtatgggatttcactgaaaaacgtgactcaaaagagcaggtagaaggtggggcccgtgactggtccgaaggtagtgagttatctcagttgattgttcacagtcagttacagattagactccttgttccactgtctcccctcttcccacttgttttgttttttttgagtcagagtcttgcactgttgcctgggctggagtgcaatggcacgatctcggctcactctaacctccgcctcccgggttcaagcgattcccctgcctcagcctcccgagtagctaggattacaggcacccaccaccacgcctggctaattttttgtatttttagtagagacagggtttcactatgttggccaggctggtctcaaactcctgacctcgtgatctgcctacctcggcctcccaaagtggtgggattacaggcatgagccactgcacccagccaactagtctt

SEQ ID NO: 254910 - DNA, 649 bp, Homo sapiens
aagttaaaaattcatttgattaaaaaaaacatttattatctactccatgccaggccccttgacaggttatgagatcacaaagtccagttggatcttgttgaggtacagcctgagaggagaacatgaataggctggaatttccttcattgtgttcgttctctgaggatgacttatctgtcctccaaagtgaccacctcccacggatcgagagcctgttactttctactatccctgcagctgtgctttccacaggacagttcgcctttccttcctttcctctgtggattcttccatctgattttcagccgaatgtaggtagattctgcatctaaaagaaatctttgtttttcctttttctttttttttaatacatgatttaaaaggcgaaagatttatatgatctgaagagaaaccagagtagaaagacatgatttaaaattaactttttcttaattgttgaaatagtttatgcttattggtaaatacttggaagatctataagagtataaataataaacataaaaattacctataattctacaactttgagatcacagttgttaacgtctttgcttctagtctgtttgaacttcctgtctgctttttgtctcctatcagccagtcatgcttggcagcgcttacaaaacac

SEQ ID NO: 254911 - DNA, 297 bp, Homo sapiens
gaactaaaaggaaactaaaaacccgcatgacacagttaactttggggcttaagatgagataaggagtgatggcgcttgccagtaatcccagctattccagaggtcgagctggaaggatcccttgagccgagtgcgaggctgcattgaactattaccacaccactgcactccagcctgggcaacagagtgagacctcatctctggacaagtgttatttgtgacagcacaatgtttgatacaacccaaatgttgaatgaaagtggaccagctaaataaaccatgaacatttactcaatg

SEQ ID NO: 254912 - DNA, 501 bp, Homo sapiens
aaaatagtgcttatattttctttagtggcctgtgcacattattcactgaggccatatagaagtaataccccacattcttatagtacatcctctgattgaagcttaccagcctatagagtagatgaaacacaaaatcttctaactgagaagctcactggagaccacccgggctactgtttctcaaactgggatttggagactccaaagaattgatagaccattcttggggggatctagggcttgtcctaggagactttatgttttccctttccattttgatgtctcttgatttcagggtccatgtttgcatttctgtttaaaatcacatcgaggccgaatgaactcttaaagtcacagcatttaacttttaatctagtttctgaaactgtggtgtgggaatccctgagggttattcagatcgctggggacagtaactggggacgcaacatctagcaagacactttattttctgtgctcatattttaatggggtacaggtaga

SEQ ID NO: 254913 - DNA, 337 bp, Homo sapiens
atacctgctgtaaatatctggaaaatactgtttccctgggtcagtgtacagagccctagaatcagctgttttttgtcatgcacacacatttatcagttataaatgtagatttagaagcaataattaaaactgtaaagcatccacttggaggactagatattccaaaatgttctttgctatgctttcagaaagaattttttaacaaggctataaagtgctgtgtgtgtgtgtatgtgttttatatatgtgtagtggtgaaatgaaaaatgtttcctcacttataaatgtttccacggctgttaggtgggtagaccttaataaagaagcatgaaagaga

SEQ ID NO: 254914 - DNA, 401 bp, Homo sapiens
cctgctttgaccccttattctcttttattactgctcatttctctgctacccttcatagcaaaacttctcaaaagagttgtctaaattaaatgatttcacttccctgtggcccatttcctcaacccactccaaagaagtctctgtctccacccctcctctgaaactgcagttgtccaggtcaccagtgatttcatgttgccaatacagtggtcacctctagtccttcttttcctcaacctcccaatattggacatagctgatttgtctctataccaagaaatacttggttctcttgtttctaggacagtatatgttttttttcctgccttaatgattgttgcttcttggtcctctttgttggcttccccttgtttgcatctattaagttgctttcagctgca

SEQ ID NO: 254915 - DNA, 229 bp, Homo sapiens
tttgtggtgagagcctctccttgtatcatagtaagtttagtatcacccttggcctctaccaactagatgccagtagcacccctccagctgtgacaaccagtccctagacatgccacataccctgcaagggtgggggaagcaaaatcatccctggtggagaacaagtaaaggaaacagcatgtgcaacagcatggagacaaatagtacagggcaggagaaggatttggtt

SEQ ID NO: 254916 - DNA, 484 bp, Homo sapiens
gaggggatttacattctgtagaggatccctttcccttccccggtgtttttctgatcctgaagagattagctaagagtctagtaccttttattaaaggtctgaataggaaatatttgctatctgttgcctctaagggcagccacctatgagacttcatctacataagaacctaggtctctacaaccccttatcttaacccagactctcctttcaattaatttcagccttttagataataactctttcagccaattgccgatcagaaaatctttgaatccacctgtgacctgtaagcttctgcctttccaggccaaatcaatgtatacttcacatgtgtcggttgatgtcttatgtctccctaaaacatataaaaacaagagcctttaacccaactaccttgggcttgtattctcaggacctcctgaggctgtgtcctgggtcatgatccttaaccttggaaaaataaatctctaaattgaaaaga

SEQ ID NO: 254917 - DNA, 1005 bp, Homo sapiens
actagaggatacagtcccttctctaaatccttcctttttctctttctgagacaggttttgatctgtcacacagtgctggagtgcagtggcatgatcacaactaactgcagcctcaaactcctgggctcaagtgatcctctcacctcagcctcccaagtagctgggaccacagccacaagccaccacccttggctaattgtttttattttttgtagcgatgggagtctcgatatgttgtccaggttggtcgcaaactcctgggctcaagtggtgatcctcccacttcagcctcccaaagttctgggattacaagcatgagccatcacgcctgaccaagtgatgtcttaaaaattctaaggaaaatagtttcaatctactctgctctactcagcaaaatagcaaacgtcaaggtaaagataatttcagacacacggggactcagatttacctctcacgcattagttcttagatcatttttggaatgtgatctccattttggagaaataggaagacgtggacctacctggctgacaagagcgctgccacaggccaccaggagggccatgctagggcaatcgtgacagtcaagccacactgagcaagatggtggagagtccttagaggaagtcaagggaaaaacggaacaggagattagctgagagttttgtacatttgaaaaataacactgataggcctcagccaagtctaatacagcatggggacaagtttaaggtagataaacagaaaactaagcaaaggtggcggggcggaaagaaacaattgtccatcccaggaaaaacagccaggctttactgagaaagggaaccatcagccttagtacaaagtcataatgaacactgactatagtttcatcagcaaattgccatctaattgcatagaaagtccattggaaaggaagagtgagaggtatagagacctgaggcctcatctgctgtcgtaggaagctgcagttactccccaaaatcaagaaatcaagaatattta

SEQ ID NO: 254918 - DNA, 499 bp, Homo sapiens
gcatgcacagagctgccctcccttgtgtccaagcaccaccctccccttgctgggctaactcaatggactcccataggcaggtcttgaaaggcaaatcctagggactgagggctcccaggaaaaatcacccatgtaggctttccggggatttatatacccttgtccaaaggaggcatgcccacacaggtaagaaaatttgtagtgaggatgtggcttttcctctttttatattcagagcttctactgctacagagcccaactattcattttgccttgaaaaacctccaacgtatttttcctcacaacatttcttttagcttccaagccttttcatttcccagtgggctcttcaaattccctcctgcctcagaagcatccctctgcaccaaaaagctcttgctctttcaggattgaagacaagcctttccttaagagtttgtgtgttcttccttacttggaaaaatacattatttccaaaattatctatctgttggttaaa

SEQ ID NO: 254919 - DNA, 663 bp, Homo sapiens
tggccaatgggcaccatacgttgagtagcagtagtctagatgattagcgtctccaaatctggctcctgcctttatttagtcttggttcctctcaaatccaccctccccaaacctctttgggttcacatgcaaatagaatcttaaacccaatactggcctcccattcccctcaggatagaggtcttggtgtggcttgcaaggcattgccataatcttcagctttgtcttttacactactttacgcctctgatcaatggtccatccatatcgaacctcttagctcccttaattctccaacctacttacactgttatgctaaactcttactcttcctactgtctggaaaaccctgctataatcttgtctttctgatgagcacctgctggcattttaattctgccttagagggcagaattgtatttccacaattctggttcatattataatgcccaaaacacagtatgagcttaataaatatttgtgaaattaatatggtacccaataaataattaaagcactcttctgtaaacattatagcacttaaagagcaatcatattttaaagatattttagtctgttgtcctcaagggaatgtgtccatttctacttctttggaagtggtcaattaaactacctgcttgtactgcctcgaagttgtttttt

SEQ ID NO: 254920 - DNA, 427 bp, Homo sapiens
acattggtatgatttatattcctaaactggttacttacaattgcttctctcagtaggaatactgctctgtcagattccttgcaagttttcagcatgcttgtagagtgcacaagcaaatgcctaggaagattttctaacatattttgttgatagcccattagctaacattttaaaacacaacttcaaagtgtttataatatttgaaatttagtaaaattagcatatctgttttggtttggatacattattctaattattgttggacaacctagttcatgattttatttgtccaaaaatggcttgtttggttttaaaaaaattaatgtgttatgagatcttgatgttattttttaaaaaacccaaaaaagaaattacttttcatttaaagagaatctgcttcctgcttaagtggctaatattttaatta

SEQ ID NO: 254921 - DNA, 389 bp, Homo sapiens
gctgttggctacgaccgcggtcacttcacttcagccctactcctggcctggggaaatgggcaggccccctagtagctcggggtggggagacgggtggagaggaaggaggggcgaaaagggaaggcgcgaaatctacaaatgtttaagccagctggaactccgatgcctctttgccttttagggaaattgactcgactcggaactcgaggacctttcacaagagaccactgggttagggggcagagctggtaatagaatccagcgctccgaaccctgaatcatgtcctctttttgctgctgaggctcaggccacagcaccccaaattatgactgtagaataccaaaatatgctatcccaaaatacacttgtttggcacatttcaagctgg

SEQ ID NO: 254922 - DNA, 176 bp, Homo sapiens
ccgcgctgtgaggactcaatccaagaaagagaggacaaaggaaaaaacccatcaaactagggtcagcaaagcctattacatacacaggataaaagaatacgatttgatcttcatttctcaacacaaaagttgacatatattgcatacaatacattaaaaatgttgacaattgagaa

SEQ ID NO: 254923 - DNA, 261 bp, Homo sapiens
tcatctgtctcttcttccctgtgtgcagggagctatgaaggagcccacttaggaagccaggatttaaggtgacaggagcatattgcaggtggggctccacctgccgggcagtgacggctgggggtcaccccgaaatctctgcactcagggctgtcagacggacgttacgcggtatgtgaactagagacactaagagcctattattctgttttgcattttaaaggaggtctctgaggaccagctgatgctttcaaaccactt

SEQ ID NO: 254924 - DNA, 6846 bp, Homo sapiens
  misc_feature (636)..(636): n is a, c, g, or t
  misc_feature (651)..(651): n is a, c, g, or t
ctgtgcaacggggtcaacgactgtggtgacaacagcgacgaaagcccacagcagaattgccggccccggacgggtgaggagaactgcaatgttaacaacggtggctgtgcccagaagtgccagatggtgcggggggcagtgcagtgtacctgccacacaggctaccggctcacagaggatgggcacacgtgccaagatgtgaatgaatgtgccgaggaggggtattgcagccagggctgcaccaacagcgaaggggctttccaatgctggtgtgaaacaggctatgaactacggcccgaccggcgcagctgcaaggctctggggccagagcctgtgctgctgttcgccaatcgcatcgacatccggcaggtgctgccacaccgctctgagtacacactgctgcttaacaacctggagaatgccattgcccttgatttccaccaccgccgcgagcttgtcttctggtcagatgtcaccctggaccggatcctccgtgccaacctcaacggcagcaacgtggaggaggttgtgtctactgggctggagagcccagggggcctggctgtggattgggtccatgacaaactctactggaccgactcaggcacctcgaggattgaggtggccaatctgganggggcccaccggaangtgttgctgtggcagaacctggagaagccccgggccattgccttgcatcccatggagggtaccatttactggacagactggggcaacaccccccgtattgaggcctccagcatggatggctctggacgccgcatcattgccgatacccatctcttctggcccaatggcctcaccatcgactatgccgggcgccgtatgtactgggtggatgctaagcaccatgtcatcgagagggccaatctggatgggagtcaccgtaaggctgtcattagccagggcctcccgcatcccttcgccatcacagtgtttgaagacagcctgtactggacagactggcacaccaagagcatcaatagcgctaacaaatttacggggaagaaccaggaaatcattcgcaacaaactccacttccctatggacatccacaccttgcacccccagcgccaacctgcagggaaaaaccgctgtggggacaacaacggaggctgcacgcacctgtgtctgcccagtggccagaactacacctgtgcctgccccactggcttccgcaagatcagcagccacgcctgtgcccagagtcttgacaagttcctgctttttgcccgaaggatggacatccgtcgaatcagctttgacacagaggacctgtctgatgatgtcatcccactggctgacgtgcgcagtgctgtggcccttgactgggactcccgggatgaccacgtgtactggacagatgtcagcactgataccatcagcagggccaagtgggatggaacaggacaggaggtggtagtggataccagtttggagagcccagctggcctggccattgattgggtcaccaacaaactgtactggacagatgcaggtacagaccggattgaagtagccaacacagatggcagcatgagaacagtactcatctgggagaaccttgatcgtcctcgggacatcgtggtggaacccatgggcgggtacatgtattggactgactggggtgcgagccccaagattgaacgagctggcatggatgcctcaggccgccaagtcattatctcttctaatctgacctggcctaatgggttagctattgattatgggtcccagcgtctatactgggctgacgccggcatgaagacaattgaatttgctggactggatggcagtaagaggaaggtgctgattggaagccagctcccccacccatttgggctgaccctctatggagagcgcatctattggactgactggcagaccaagagcatacagagcgctgaccggctgacagggctggaccgggagactctgcaggagaacctggaaaacctaatggacatccatgtcttccaccgccgccggcccccagtgtctacaccatgtgctatggagaatggcggctgtagccacctgtgtcttaggtccccaaatccaagcggattcagctgtacctgccccacaggcatcaacctgctgtctgatggcaagacctgctcaccaggcatgaacagtttcctcatcttcgccaggaggatagacattcgcatggtctccctggacatcccttattttgctgatgtggtggtaccaatcaacattaccatgaagaacaccattgccgttggagtagacccccaggaaggaaaggtgtactggtctgacagcacactgcacaggatcagtcgtgccaatctggatggctcacagcatgaggacatcatcaccacagggctacagaccacagatgggctcgcggttgatgccattggccggaaagtatactggacagacacgggaacaaaccggattgaagtgggcaacctggacgggtccatgcggaaagtgttggtgtggcagaaccttgacagtccccgggccatcgtactgtaccatgagatggggtttatgtactggacagactggggggagaatgccaagttagagcggtccggaatggatggctcagaccgcgcggtgctcatcaacaacaacctaggatggcccaatggactgactgtggacaaggccagctcccaactgctatgggccgatgcccacaccgagcgaattgaggctgctgacctgaatggtgccaatcggcatacattggtgtcaccggtgcagcacccatatggcctcaccctgctcgactcctatatctactggactgactggcagactcggagcatccaccgtgctgacaagggtactggcagcaatgtcatcctcgtgaggtccaacctgccaggcctcatggacatgcaggctgtggaccgggcacagccactaggttttaacaagtgcggctcgagaaatggcggctgctcccacctctgcttgcctcggccttctggcttctcctgtgcctgccccactggcatccagctgaagggagatgggaagacctgtgatccctctcctgagacctacctgctcttctccagccgtggctccatccggcgtatctcactggacaccagtgaccacaccgatgtgcatgtccctgttcctgagctcaacaatgtcatctccctggactatgacagcgtggatggaaaggtctattacacagatgtgttcctggatgttatcaggcgagcagacctgaacggcagcaacatggagacagtgatcgggcgagggctgaagaccactgacgggctggcagtggactgggtggccaggaacctgtactggacagacacaggtcgaaataccattgaggcgtccaggctggatggttcctgccgcaaagtactgatcaacaatagcctggatgagccccgggccattgctgttttccccaggaaggggtacctcttctggacagactggggccacattgccaagatcgaacgggcaaacttggatggttctgagcggaaggtcctcatcaacacagacctgggttggcccaatggccttaccctggactatgatacccgcaggatctactgggtggatgcgcatctggaccggatcgagagtgctgacctcaatgggaaactgcggcaggtcttggtcggccatgtgtcccacccctttgccctcacacagcaagacaggtggatctactggacagactggcagaccaagtcaatccagcgtgttgacaaatactcaggccggaacaaggagacagtgctggcaaatgtggaaggactcatggatatcatcgtggtttcccctcagcggcagacagggaccaatgcctgtggtgtgaacaatggtggctgcacccacctctgctttgccagagcctcggacttcgtatgtgcctgtcctgacgaacctgatagccagccctgctcccttgtgcctggcctggtaccaccagctcctagggctactggcatgagtgaaaagagcccagtgctacccaacacaccacctaccaccttgtattcttcaaccacccggacccgcacgtctctggaggaggtggaaggaagatgctctgaaagggatgccaggctgggcctctgtgcacgttccaatgacgctgttcctgctgctccaggggaaggacttcatatcagctacgccattggtggactcctcagtattctgctgattttggtggtgattgcagctttgatgctgtacagacacaaaaaatccaagttcactgatcctggaatggggaacctcacctacagcaacccctcctaccgaacatccacacaggaagtgaagattgaagcaatccccaaaccagccatgtacaaccagctgtgctataagaaagagggagggcctgaccataactacaccaaggagaagatcaagatcgtagagggaatctgcctcctgtctggggatgatgctgagtgggatgacctcaagcaactgcgaagctcacgggggggcctcctccgggatcatgtatgcatgaagacagacacggtgtccatccaggccagctctggctccctggatgacacagagatggagcagctgttacaggaagagcagtctgagtgtagcagcgtccatactgcagccactccagaaagacgaggctctctgccagacacgggctggaaacatgaacgcaagctctcctcagagagccaggtctaaatgcccacattctcttccctgcctgcctgttccttctcctttatggacgtctagtccttgtgctcgcttacaccgcaggccccgcttctgtgtgcttgtcctcctcctcctcccaccccataactgttcctaagccttcaccggagctgtttaccacgtgagtccataactacctgtgcacaagaaatgatggcacatcacgagaatttagacctggattttaccatgaacctcacatcttgtactccatcctgggccccctgaaactgcttattcgtgattcctcaccagcgtagagctccacctcccctttccccagtaccctcagtgcctgcttctcagtgctgatgcagctgatgacccaggactgcgctctgccccatcacagccagcatgactgcttctctgagagaacttgcccatcaggggctgggacatgggggtgtgggtaaagacagggatgaaggatagaggctgagagaagaaggaagaatcagcccagcaggtatgggcatctgggaaacctccagcctcaagtgtgttggtaacatgaaaaagctctggggggtagttggatctgggtgtctggtccattgctggcagtggacattattcttgccctaagagacactgccttttcagcagcagatactggtgagatgggggtggctcaggctgttcttcctcctcctagaatgtctggagctgtttctacattcagataactgggtcccctatcacaaggctactggctaataggaattccctcctggtgccaccactggccagtacctttcctaagtctttgctcaaattaaccaggttgtgagccagtggcttgagtgaatgttaggccttgggggctgagtctctgaaaagtctaagaagctctgcctagaccaaatatggtatacctcctgacccctctctccctcatgtcctgggattctggggaagagacctagaaacaagctttcaaagaaaaaccagaagttgtcataaatggtcagaaagaacgatcaggttggagacttgggaaacccagggcctaaagagaagtatccatgagggtcaaacttcctgttgaacttcctatgttctttctcaagtgctcagggatctaagttagtggacagcaagcctgtggctacggggtggtgatgttcctcttccagctgtcccctcagctaaggggcttagtttccatgtgggatgccatcacttggttcatgctcattcacacaaagggcacgtgtctcagcctggtatcagggaaattgagacttatttttgccctaaaacgtctccctagctgttcttcgtggggtttttttgtttgtttttttgcctaatttgctttttctgaccaagccttgtggcaccagcaatctccaaagtcctgtggtgggagggctgaataaataaaaatacaaagaggtgggtaaggagtaggaaggtagagagcaccactgatgaggccctcctagcccatggcagacccagacctcttctcccccaggaattagaagtggcaggagagaacaacaggggctgggaatggaggggagaatttctaggggaagtttcctgagttgaaacttctcctgtggttactggtattgagaaatcagctaccaaagtgaaaaaggacaagatcaattcttttctagtcagttctaagactgctagagagagataccaggcccttagccttgctctcagtagcgtcagccccagttctgagcctccccacattacacttaacaagcagtaaaggagtgagcactttgggtccttagactcatgtctggggaggaagagcaagtagaaaagtggcattttcttgattggaaagggggaaggatcttattgcacttgggctgttcagaatgtagaaaggacatatttgaggaagtatctatttgagcactgatttactctgtaaaaagcaaaatctctctgtcctaaactaatggaagcgattctcccatgctcatgtgtaatggttttaacgttactcactggagagattggactttctggagttatttaaccactatgttcagtattttaggactttatgataatttaatataaatttagcttttcttaatc

SEQ ID NO: 254925 - DNA, 5193 bp, Homo sapiens
  misc_feature (1)..(1): n is a, c, g, or t
  misc_feature (32)..(32): n is a, c, g, or t
ncgtctctagaggaccccttaaagctccttcnttacgtatgccaagtcattatctcttctaatctgacctggcctaatgggttagctattgattatgggtcccagcgtctatactgggctgacgccggcatgaagacaattgaatttgctggactggatggcagtaagaggaaggtgctgattggaagccagctcccccacccatttgggctgaccctctatggagagcgcatctattggactgactggcagaccaagagcatacagagcgctgaccggctgacagggctggaccgggagactctgcaggagaacctggaaaacctaatggacatccatgtcttccaccgccgccggcccccagtgtctacaccatgtgctatggagaatggcggctgtagccacctgtgtcttaggtccccaaatccaagcggattcagctgtacctgccccacaggcatcaacctgctgtctgatggcaagacctgctcaccaggcatgaacagtttcctcatcttcgccaggaggatagacattcgcatggtctccctggacatcccttattttgctgatgtggtggtaccaatcaacattaccatgaagaacaccattgccgttggagtagacccccaggaaggaaaggtgtactggtctgacagcacactgcacaggatcagtcgtgccaatctggatggctcacagcatgaggacatcatcaccacagggctacagaccacagatgggctcgcggttgatgccattggccggaaagtatactggacagacacgggaacaaaccggattgaagtgggcaacctggacgggtccatgcggaaagtgttggtgtggcagaaccttgacagtccccgggccatcgtactgtaccatgagatggggtttatgtactggacagactggggggagaatgccaagttagagcggtccggaatggatggctcagaccgcgcggtgctcatcaacaacaacctaggatggcccaatggactgactgtggacaaggccagctcccaactgctatgggccgatgcccacaccgagcgaattgaggctgctgacctgaatggtgccaatcggcatacattggtgtcaccggtgcagcacccatatggcctcaccctgctcgactcctatatctactggactgactggcagactcggagcatccaccgtgctgacaagggtactggcagcaatgtcatcctcgtgaggtccaacctgccaggcctcatggacatgcaggctgtggaccgggcacagccactaggttttaacaagtgcggctcgagaaatggcggctgctcccacctctgcttgcctcggccttctggcttctcctgtgcctgccccactggcatccagctgaagggagatgggaagacctgtgatccctctcctgagacctacctgctcttctccagccgtggctccatccggcgtatctcactggacaccagtgaccacaccgatgtgcatgtccctgttcctgagctcaacaatgtcatctccctggactatgacagcgtggatggaaaggtctattacacagatgtgttcctggatgttatcaggcgagcagacctgaacggcagcaacatggagacagtgatcgggcgagggctgaagaccactgacgggctggcagtggactgggtggccaggaacctgtactggacagacacaggtcgaaataccattgaggcgtccaggctggatggttcctgccgcaaagtactgatcaacaatagcctggatgagccccgggccattgctgttttccccaggaaggggtacctcttctggacagactggggccacattgccaagatcgaacgggcaaacttggatggttctgagcggaaggtcctcatcaacacagacctgggttggcccaatggccttaccctggactatgatacccgcaggatctactgggtggatgcgcatctggaccggatcgagagtgctgacctcaatgggaaactgcggcaggtcttggtcggccatgtgtcccacccctttgccctcacacagcaagacaggtggatctactggacagactggcagaccaagtcaatccagcgtgttgacaaatactcaggccggaacaaggagacagtgctggcaaatgtggaaggactcatggatatcatcgtggtttcccctcagcggcagacagggaccaatgcctgtggtgtgaacaatggtggctgcacccacctctgctttgccagagcctcggacttcgtatgtgcctgtcctgacgaacctgatagccagccctgctcccttgtgcctggcctggtaccaccagctcctagggctactggcatgagtgaaaagagcccagtgctacccaacacaccacctaccaccttgtattcttcaaccacccggacccgcacgtctctggaggaggtggaaggaagatgctctgaaagggatgccaggctgggcctctgtgcacgttccaatgacgctgttcctgctgctccaggggaaggacttcatatcagctacgccattggtggactcctcagtattctgctgattttggtggtgattgcagctttgatgctgtacagacacaaaaaatccaagttcactgatcctggaatggggaacctcacctacagcaacccctcctaccgaacatccacacaggaagtgaagattgaagcaatccccaaaccagccatgtacaaccagctgtgctataagaaagagggagggcctgaccataactacaccaaggagaagatcaagatcgtagagggaatctgcctcctgtctggggatgatgctgagtgggatgacctcaagcaactgcgaagctcacgggggggcctcctccgggatcatgtatgcatgaagacagacacggtgtccatccaggccagctctggctccctggatgacacagagatggagcagctgttacaggaagagcagtctgagtgtagcagcgtccatactgcagccactccagaaagacgaggctctctgccagacacgggctggaaacatgaacgcaagctctcctcagagagccaggtctaaatgcccacattctcttccctgcctgcctgttccttctcctttatggacgtctagtccttgtgctcgcttacaccgcaggccccgcttctgtgtgcttgtcctcctcctcctcccaccccataactgttcctaagccttcaccggagctgtttaccacgtgagtccataactacctgtgcacaagaaatgatggcacatcacgagaatttagacctggattttaccatgaacctcacatcttgtactccatcctgggccccctgaaactgcttattcgtgattcctcaccagcgtagagctccacctcccctttccccagtaccctcagtgcctgcttctcagtgctgatgcagctgatgacccaggactgcgctctgccccatcacagccagcatgactgcttctctgagagaacttgcccatcaggggctgggacatgggggtgtgggtaaagacagggatgaaggatagaggctgagagaagaaggaagaatcagcccagcaggtatgggcatctgggaaacctccagcctcaagtgtgttggtaacatgaaaaagctctggggggtagttggatctgggtgtctggtccattgctggcagtggacattattcttgccctaagagacactgccttttcagcagcagatactggtgagatgggggtggctcaggctgttcttcctcctcctagaatgtctggagctgtttctacattcagataactgggtcccctatcacaaggctactggctaataggaattccctcctggtgccaccactggccagtacctttcctaagtctttgctcaaattaaccaggttgtgagccagtggcttgagtgaatgttaggccttgggggctgagtctctgaaaagtctaagaagctctgcctagaccaaatatggtatacctcctgacccctctctccctcatgtcctgggattctggggaagagacctagaaacaagctttcaaagaaaaaccagaagttgtcataaatggtcagaaagaacgatcaggttggagacttgggaaacccagggcctaaagagaagtatccatgagggtcaaacttcctgttgaacttcctatgttctttctcaagtgctcagggatctaagttagtggacagcaagcctgtggctacggggtggtgatgttcctcttccagctgtcccctcagctaaggggcttagtttccatgtgggatgccatcacttggttcatgctcattcacacaaagggcacgtgtctcagcctggtatcagggaaattgagacttatttttgccctaaaacgtctccctagctgttcttcgtggggtttttttgtttgtttttttgcctaatttgctttttctgaccaagccttgtggcaccagcaatctccaaagtcctgtggtgggagggctgaataaataaaaatacaaagaggtgggtaaggagtaggaaggtagagagcaccactgatgaggccctcctagcccatggcagacccagacctcttctcccccaggaattagaagtggcaggagagaacaacaggggctgggaatggaggggagaatttctaggggaagtttcctgagttgaaacttctcctgtggttactggtattgagaaatcagctaccaaagtgaaaaaggacaagatcaattcttttctagtcagttctaagactgctagagagagataccaggcccttagccttgctctcagtagcgtcagccccagttctgagcctccccacattacacttaacaagcagtaaaggagtgagcactttgggtccttagactcatgtctggggaggaagagcaagtagaaaagtggcattttcttgattggaaagggggaaggatcttattgcacttgggctgttcagaatgtagaaaggacatatttgaggaagtatctatttgagcactgatttactctgtaaaaagcaaaatctctctgtcctaaactaatggaagcgattctcccatgctcatgtgtaatggttttaacgttactcactggagagattggactttctggagttatttaaccactatgttcagtattttaggactttatgataatttaatataaatttagcttttcttaatc

SEQ ID NO: 254926 - DNA, 650 bp, Homo sapiens
  misc_feature (1)..(1): n is a, c, g, or t
  misc_feature (32)..(32): n is a, c, g, or t
ncgtctctagaggaccccttaaagctccttcnttacgtatgccaagtcattatctcttctaatctgacctggcctaatgggttagctattgattatgggtcccagcgtctatactgggctgacgccggcatgaagacaattgaatttgctggactggatggcagtaagaggaaggtgctgattggaagccagctcccccacccatttgggctgaccctctatggagagcgcatctattggactgactggcagaccaagagcatacagagcgctgaccggctgacagggctggaccgggagactctgcaggagaacctggaaaacctaatggacatccatgtcttccaccgccgccggcccccagtgtctacaccatgtgctatggagaatggcggctgtagccacctgtgtcttaggtccccaaatccaagcggattcagctgtacctgccccacaggcatcaacctgctgtctgatggcaagacctgctcaccaggtgagtgaaagcatcacagatctagatgcagcctctctgggagggggcaatggctctcttccttccttgcagatgggctccaatgtggtctgagaaaccatgagtcctgctgcttctagaggcccaggggagagactcacggcttttagaaaag

SEQ ID NO: 254927 - DNA, 277 bp, Homo sapiens
caacggcagcaacgtggaggaggttgtgtctactgggctggagagcccaggtagggaacaaggccccatggagaggggcagagccatgccacatgcgcagcaacggtgggaggaataggccagtggtttgcaaaccttaggcagcaggacatctttttcttccagggaaatcttagttggagccctaatatagaaaacatttgttaatgtatatcaattttataggttcaaatataacatttgctcatgattgagctcaatcagtgagaataatgag

SEQ ID NO: 254928 - DNA, 506 bp, Homo sapiens
ttggtcaggctggtcttgaactcctgacctcatgatccacttgcctcggcctctcaaagtgctgggattacaggcgtgagccaccacgcccggctgaatatttttattttaaaaaaaatctttgggtgttaggttcagaaatctgtgttttaacaagctctcctgattcttacgcacactaaagtttgagaatcatcgccttaaattatggttgcctatgtttgggaagtcttgctctttcaagaaatccaactgatcacatccttgaatttcttcttgcagttcaagtcactaaatttccgttgtgcatctgtcacaaaatatcttttgagcccctactctgtgctctgctggcgcataccaggctcttgtgttggccatggaaggtaagagggtgaatgaacaagactagaattaatctctgtatcccttcttgataggtacagaccggattgaagtagccaacacagatggcagcatgagaacagtactcatctgggagaacc

SEQ ID NO: 254929 - DNA, 184 bp, Homo sapiens
ctggcatggatgcctcaggccgccaagtcattatctcttctaatctgacctggcctaatgggttagctattgattatgggtcccagcgtctatactgggctgacgccggcatgaagacaattgaatttgctggactggatggcagtaagaggaaggtaagggtggcagtaagaggaaggtaagg

SEQ ID NO: 254930 - DNA, 460 bp, Homo sapiens
ccttcatctcttgtcctcctgcccccgtccctgccccccaggagccttggtagaggttttgtgtagttgccaggcctgggcccaggggacatggcagaccacgtccagactgaggtcttcctggactttccccaggcctcccgcatcccttcgccatcacagtgtttgaagacagcctgtactggacagactggcacaccaagagcatcaatagcgctaacaaatttacggggaagaaccaggaaatcattcgcaacaaactccacttccctatggacatccacaccttgcacccccagcgccaacctgcaggtaaaaaactgcccaccgggtgagccaaagtagcctcatggttgaggtggcctctggtgcctctgagaaccttccttccccttagagttgccatttcttctgatggggaaatccagcagggcactgacatgggctaattcctccctct

SEQ ID NO: 254931 - DNA, 584 bp, Homo sapiens
acagaagggagatctcttgacctgcctggtgttcccagatgtgaatgaatgtgccgaggaggggtattgcagccagggctgcaccaacagcgaaggggctttccaatgctggtgtgaaacaggctatgaactacggcccgaccggcgcagctgcaaggctctgggtaagggctgttggcacttggctgggtgggcagagggccgagcatggaggaaggccaggtactctggtgctcagggatttgcagagaggtagagagatttctgtcacagtaaaatgcagcaacagttgcattctgagccccaagaaaaatgctgctggggtggagtggggtggggaggggtggaggaatatagtttaaaggttgccactcttctggtactgatgctgacagcttggggcatgtccttgtgagcaagtggctccatcggtcagctgaagacctgctgatgggtaccaggggcggctctgaaacccagtgggtatcccatgtttatactgtttcccagggccagagcctgtgctgctgttcgccaatcgcatcgacatccggcaggtgctgccacaccgctctgagtacaca

SEQ ID NO: 254932 - DNA, 642 bp, Homo sapiens
agagacctaaatttgaaaagcaatactttaaaatatttagaagaaatatctaaaaaaatagacttgttgatttgagaaaacaaaatatttctttaaaatgattttttatttaaaaagcaagcacaaattattaaaatattgattactttgcttataatgacataatttacatatatttgtgcttataaataaaggacaagctacagacaggaagacacatttccaaaaatcacaaaaactaggtttgcaattgagaacttgaaaaaatttctgagtcgattaagaaaaaaacaaaaggtaaatcatacattgcaaatattataattagacagttaacagtaaagaaaaacaaatagtcaataaatgtattatgctgaaatttattactaattttactaatcaggtatcatttcacacctatcagaaaaaagacctgggcatcttggccagtattatgagaaacaagagaaattcttacttccccatgagaagtttgaataatatagtatatattcaaaagcatgtgttctagaattagtccttttctgtttcaaaactgttataccccttagctttatatgctttgagcaagctacttatcttgctatgagacaatgctctatgtgtctcctgcatttctgc

SEQ ID NO: 254933 - DNA, 425 bp, Homo sapiens
gaaagatagttctccccccaccccccaacacagttttctggcttctgtggtcttccttttattttctatcagatttagaagtcccaagatccccttatgtcctactcaaattaagacttgtttctcttctcctttctgtattgtgctttcaactctgaggccctgttttagctttggtgtttattagctgaataaaaagataaagtgagagagcttagagttttaatagggaacatttcttgaattggattgatttcatcatcaattttactttcttaagtattaactaattactagctgtggattcccaggcaagtccactcactttcttcatctgtaaaatgaactacctactcagcaaggatccttctgtggtatatcagcattccttattattattatttgtttttgttagtagaaccatg

SEQ ID NO: 254934 - DNA, 326 bp, Homo sapiens
cggcacgaggaagtcccaaaggctaagccatttgaagtagaaaaggataaaacataaggcttaggatcattgggagagatatttttttctcctcctttttcccttttctctcccaggaattcttcagtagactcaattgaagccttgagtttgaggttttgtattctcagatggtaagcacacctattaaaaaagcaatgtattcatgttaactccctggcaccagcagggcctgtgtattcactgctagcagtggacaccatgccaggagaacctgactcctggtgcaaaaggattaggaaaaaaaaaaaagtcaaacaatgcca

SEQ ID NO: 254935 - DNA, 658 bp, Homo sapiens
ctgccccccagccccccagtctggccagtcgcaactatcctcaggcatattgctgaaggaatgatgcttgcttgctgcagataggtcccctttggtgaaaggggggagtagccaagtgagatagtgctacccccgtgcctgagtccagcagttctgcagagccatgctgctgccccacccaaggcctgctgggcagtgtccctgggagtggtaggcagagggacacccagtgctgagtccagggtctggtaccggatagtgggggctagggcagtacatgtggggtatggggtggtgggggttgcaaccctcccaaccaacacccactttctccagacgcatgccccatgtcccgacacaggccagcacacttagctggtttctatctccaccctctctttttcattcccttgacacgtgtgtgttgcttttggtcttactgaagagtcttcccattcatgtatcaatattttgaaactcttagtggatatcttattaaaagagagggggaaaatcacctatgaatctctggtgcaatagagtagcctcagtcttcttgatataagttatttgttaattctagaatcattattagatcatgcttatgtagttggtgttggccctcttagcccctaattgctcctgccataggcagagt

SEQ ID NO: 254936 - DNA, 508 bp, Homo sapiens
aggctgaagtggggggatcgcttgagcccaggaattcgaggctgcagtgagctatgattgtgccattgtactgcagcctgggtgacagagcaagtccctgtctctacaaaacaacaaccccgcccccaaaccatttgatacagcaggcatgtgaaacaaaagaatatctgtatgttccaaggactcatattctagatgattttaaaaaatttaaggggccgggtgcggtggttcacgcctgtaatcccagcactttgggaggacgaggcaggcagatcacgaggtcaggagatcgagaccatcctgactaacatggtgaaaccccatctctactaaaaatacaaaaaattagccaggtgtggtggtgggcgcctgtagtcccagctactcgggaggctgaggcaggagaatggcatgaaccccggaggcaaagtgtgccagtgagccaagattgcgcccctgaactccagcctgggcgacggagtgatacttgcctccaaaaaaaaaa

SEQ ID NO: 254937 - DNA, 556 bp, Homo sapiens
cttttgcttcacttcacaacccaggaattcctttccctaaaggggaaagtgtgatcatgggagacagtgtttcttggtggttcaggatgggatctctggagacaaactgtttgggttcaagtccagcacggctatttactggctatgtggcttggacgggttaacctgcactgaaaggttttcctgaggtctgtgataatttgtggaaagtgctccattctcatcattacacagcagattacttttgctgtcttctctgttctgtttcacatcccttctcctccacatgtattcctatgccccagctgtgtttaataataaggatagctaatatttactcagcccttactctaagcgcctttcatgtaattaactcatctaatcctcgcgacaaacctatgcaataggtgctgttttattcccattttcaagtgaggaagctagatgctgaatgctaagtaattttcccaacataccatggccaataaatgatgtagcagggattttaaatgaggcattctggcgccagagtctgtgctcttatatttatgcaaaa

SEQ ID NO: 254938 - DNA, 843 bp, Homo sapiens
atttgcagggaattactctttatcctccagcactaaaaactgctttcagtgctgagctctcaagtgaggaagcaggtgctcagagagagtgctatttcctgggctggggctgtgccacccagaaatcgttcttgggtgtcacagtgggtgaggcagacagcgtaggcccaatttcagcctccagctctagggaacagagaccactgccacctatacttctctactcacttgccttgttcgaattcgacggtttctctggcagatgggtgattgggtggggagaggatgatgccacttgcccgggggcttcttgccaggaactgaagaatcaccaggaggaagaacaacaatcggaggaaaaactccagccacataagaagttaaatgtgccgcaaccaccagtggcgaaattgtggacatcacaggagcaaccgtagacttcaaagggtaccgcatctcgagactggctactctctggtcatagcagatagtgtgtgaattgccacaggcacaggtgtggccagggccacagccaccacaaccacagccaccacctcagccaacacaaccaagtgctcaagcccgttgtactcagcacacctccaaatgcaatctccaggattcccaaaggccaggtcaccagcctacttcagcggggatctactaagctggagggcaatctctgtatcaacaacagattccagggtgggcagaaaatccttacagactctggactggagcctgggagtgggaggtggtaaggagaggagccctttgcttccatcccggccctgtagtgtagaatccatatctaccaccctaccctctctgactctcccaagt

SEQ ID NO: 254939 - DNA, 394 bp, Homo sapiens
gagacggagtctcactctgtcgctgaggctggaagtgaaactccatctcaaaaaataaaaaataaaatgaaaataaaattaagaggtagacgctaggcttgagtccagaattagaaatctccagagctagggtgttttctaagaagcccctttgcgttctgggggctcagacctcagtgaggcttagtaggattttgtattttctttcattctgactcagcacagacatttatgggggagatggagagaggagagattaaggagaaaaaggtaattccggagacctaagtggggagagatgagcagaggaagggtcagatgatgatgctggaaccctctatggggtttctccatgtcggtcaggctggtctcgaactcccaacctcaggtgatc

SEQ ID NO: 254940 - DNA, 251 bp, Homo sapiens
cggattcaagcgattctcccatctcagcctcccgagtagctgggattattgacgcgcagcaccacgcccggctaatttttgtggtttttgtatcttctgtcttctgctctttagtaccgcatagagccacagaagactagtgagtcgaacaaacggcccctcttgcagcagttgttgatcacagggctgcccccggtactcatcctgtgatcaacaactgctgcaagaggggccgtttgttggacatacta

SEQ ID NO: 254941 - DNA, 1681 bp, Homo sapiens
tgattaataatagtcagatataatcctatccgtttcctatctctagtaaaacttttcttattctaattattttctttgctgtactggaacagcttgtgccttcaggctcttgcctgggcacctgggtggcttgcggcccacaagataagatatattgcgttgaactataatttatgttgattgctgaatgatttagggcgggggggtgggcaccccctgaaattctgccctggaggagtggcctcaccctaaccctggccgtggctaataataaggcccacctcttagggccgtggagtgaaataagttttccaggtaatgcgcagtagagccctcagccctccgctgaagttgcgttaggaaggaggaagggagaggtaaatgctgagcccgcaggcggcagtctgtgcctcggagagaaactttatcccaaccttgctgggggccttgacgcccaccttgccccaagagcaccccggcagtcacccctgccctctggggtcctgccaccccgagcccgaccttcccccttttcccccgcgccgggccaatagcctcctaactgcgtcgtgctcatcacctttgcgtcgtttcttcgctccacaaacgtttactgagcgccttccacacgccaggcgccagactcgcgcggggaaacagggataagcactgaggaggggtcccagccctcagcgatgggatttcagagcgggagataaagggttgcccagaagggtggtgagtggaatagctgatataaacaacgggggcgcgatgaaatacacaggagggctgctagtcacatatggggcgggtgccgagggcccttgactaagggaggcttcctgcacgggtgacacccaagcggagtcctgacgacctgcgtcagaagtagccaggcgaggaggaggggaaaggaatccacgtcccgagcagagaggcagcgttccctacacagcacaggacacggtccgcgcacagaagccgcaggagacgcaggcacaggggctggggagaatccttgctgggccctcgccgcctccctctgccgggtgtctggtgccagcctcctgcctggcagaggaactccagcccctgctcccggaagcccctccaggccttcggcttccctgactgggcatgggcccctcgtcccctcgggtacggggccggtctccccgccctcgggcggcgaagtaaaggctgagcccactgctcccaccacctctgtctgtccccaccccgacctggggcctcataccatcccactatcatgggtagtgcctaccactgggaggcccggcgccggcagatggctttggaccgaaggagatggctgatggcccagcagcagcaggagctgcagcagaaagaacaggtgcatgggataggctgggttcttcagggtcctctctggagcaggaagggaatggagaatggagagagatccctaggaagctgcctactatttggtgaatgctgtttgctgggggtaggaggaaagcaaggtcatttggcgttctctcagatagactgtgtctgtgttggggggaccactatcagctgactcaatttccctcttgtaatagtctaggggaaggcaagggtactaggcctgggaggtttaaagatgttctgtccaatagggtaacccccagcctgtatgctatattgagccttg

SEQ ID NO: 254942 - DNA, 1904 bp, Homo sapiens
tgattaataatagtcagatataatcctatccgtttcctatctctagtaaaacttttcttattctaattattttctttgctgtactggaacagcttgtgccttcaggctcttgcctgggcacctgggtggcttgcggcccacaagataagatatattgcgttgaactataatttatgttgattgctgaatgatttagggcgggggggtgggcaccccctgaaattctgccctggaggagtggcctcaccctaaccctggccgtggctaataataaggcccacctcttagggccgtggagtgaaataagttttccaggtaatgcgcagtagagccctcagccctccgctgaagttgcgttaggaaggaggaagggagaggtaaatgctgagcccgcaggcggcagtctgtgcctcggagagaaactttatcccaaccttgctgggggccttgacgcccaccttgccccaagagcaccccggcagtcacccctgccctctggggtcctgccaccccgagcccgaccttcccccttttcccccgcgccgggccaatagcctcctaactgcgtcgtgctcatcacctttgcgtcgtttcttcgctccacaaacgtttactgagcgccttccacacgccaggcgccagactcgcgcggggaaacagggataagcactgaggaggggtcccagccctcagcgatgggatttcagagcgggagataaagggttgcccagaagggtggtgagtggaatagctgatataaacaacgggggcgcgatgaaatacacaggagggctgctagtcacatatggggcgggtgccgagggcccttgactaagggaggcttcctgcacgggtgacacccaagcggagtcctgacgacctgcgtcagaagtagccaggcgaggaggaggggaaaggaatccacgtcccgagcagagaggcagcgttccctacacagcacaggacacggtccgcgcacagaagccgcaggagacgcaggcacaggggctggggagaatccttgctgggccctcgccgcctccctctgccgggtgtctggtgccagcctcctgcctggcagaggaactccagcccctgctcccggaagcccctccaggccttcggcttccctgactgggcatgggcccctcgtcccctcgggtacggggccggtctccccgccctcgggcggcgaagtaaaggctgagcccactgctcccaccacctctgtctgtccccaccccgacctggggcctcataccatcccactatcatgggtagtgcctaccactgggaggcccggcgccggcagatggctttggaccgaaggagatggctgatggcccagcagcagcaggagctgcagcagaaagaacaggaactgaagaatcaccaggaggaagaacaacaatcggaggaaaaactccagccacataagaagttaaatgtgccgcaaccaccagtggcgaaattgtggacatcacaggagcaaccgtagacttcaaagggtaccgcatctcgagactggctactctctggtcatagcagatagtgtgtgaattgccacaggcacaggtgtggccagggccacagccaccacaaccacagccaccacctcagccaacacaaccaagtgctcaagcccgttgtactcagcacacctccaaatgcaatctccaggattcccaaaggccaggtcaccagcctacttcagcggggatctactaagctggagggcaatctctgtatcaacaacagattccagggtgggcagaaaatccttacagactctggactggagcctgggagtgggaggtggtaaggagaggagccctttgcttccatcccggccctgtagtgtagaatccatatctaccaccctaccctctctgactctcccaagt

SEQ ID NO: 254943 - DNA, 2318 bp, Homo sapiens
tgattaataatagtcagatataatcctatccgtttcctatctctagtaaaacttttcttattctaattattttctttgctgtactggaacagcttgtgccttcaggctcttgcctgggcacctgggtggcttgcggcccacaagataagatatattgcgttgaactataatttatgttgattgctgaatgatttagggcgggggggtgggcaccccctgaaattctgccctggaggagtggcctcaccctaaccctggccgtggctaataataaggcccacctcttagggccgtggagtgaaataagttttccaggtaatgcgcagtagagccctcagccctccgctgaagttgcgttaggaaggaggaagggagaggtaaatgctgagcccgcaggcggcagtctgtgcctcggagagaaactttatcccaaccttgctgggggccttgacgcccaccttgccccaagagcaccccggcagtcacccctgccctctggggtcctgccaccccgagcccgaccttcccccttttcccccgcgccgggccaatagcctcctaactgcgtcgtgctcatcacctttgcgtcgtttcttcgctccacaaacgtttactgagcgccttccacacgccaggcgccagactcgcgcggggaaacagggataagcactgaggaggggtcccagccctcagcgatgggatttcagagcgggagataaagggttgcccagaagggtggtgagtggaatagctgatataaacaacgggggcgcgatgaaatacacaggagggctgctagtcacatatggggcgggtgccgagggcccttgactaagggaggcttcctgcacgggtgacacccaagcggagtcctgacgacctgcgtcagaagtagccaggcgaggaggaggggaaaggaatccacgtcccgagcagagaggcagcgttccctacacagcacaggacacggtccgcgcacagaagccgcaggagacgcaggcacaggggctggggagaatccttgctgggccctcgccgcctccctctgccgggtgtctggtgccagcctcctgcctggcagaggaactccagcccctgctcccggaagcccctccaggccttcggcttccctgactgggcatgggcccctcgtcccctcgggtacggggccggtctccccgccctcgggcggcgaagtaaaggctgagcccactgctcccaccacctctgtctgtccccaccccgacctggggcctcataccatcccactatcatgggtagtgcctaccactgggaggcccggcgccggcagatggctttggaccgaaggagatggctgatggcccagcagcagcaggagctgcagcagaaagaacaggaactgaagaatcaccaggaggaagaacaacaatcggaggaaaaactccagccacataagaagttaaatgtgccgcaaccaccagtggcgaaattgtggacatcacaggagcaaccacagccatcacagcagcagccatcagtgcagccaccatcgcagccaccaccacagccatcaacattgccacaggcacaggtgtggccagggccacagccaccacaaccacagccaccacctcagccaacacaaccaagtgctcaagcccgttgtactcagcacacctccaaatgcaatctccaggattcccaaaggccaggtcaccagcctacttcagcggggatctactaagctggagggcaatctctgtatcaacaacagattccagggtctcatgaacccatgccaatctagccccatcagaaacactgggtattcacaactcaagtctaccaattacatacagcagtggtgatccagagattgaacccaggaccccatggccatccccaaaatgcagatgagcaaccacatcttctcagcatccagcaatatctccactccaaaagccacccactctagaagaggaggctgccaggaataaaatccaggtacagattttgctgagagagaagaaaagagaacgtgggaccacgtgtcacatggagcagcctgtcagctcagaagatgcctgcaggtcccagtttccttaccccacagaactctttccttccatcaggtgcccccaaaatgtcactcccaccccttcccacccttcaggtgagtgtagcagcatggctgcactatcactctgacctccactcacttggcccaggcacatgctggacccccattcaggagacagacaaaacattcttcttcctcagcaatgcaggctgaagagcccaaggtcacatattgtaaagattaaccaaattccagc

SEQ ID NO: 254944 - DNA, 2054 bp, Homo sapiens
tgattaataatagtcagatataatcctatccgtttcctatctctagtaaaacttttcttattctaattattttctttgctgtactggaacagcttgtgccttcaggctcttgcctgggcacctgggtggcttgcggcccacaagataagatatattgcgttgaactataatttatgttgattgctgaatgatttagggcgggggggtgggcaccccctgaaattctgccctggaggagtggcctcaccctaaccctggccgtggctaataataaggcccacctcttagggccgtggagtgaaataagttttccaggtaatgcgcagtagagccctcagccctccgctgaagttgcgttaggaaggaggaagggagaggtaaatgctgagcccgcaggcggcagtctgtgcctcggagagaaactttatcccaaccttgctgggggccttgacgcccaccttgccccaagagcaccccggcagtcacccctgccctctggggtcctgccaccccgagcccgaccttcccccttttcccccgcgccgggccaatagcctcctaactgcgtcgtgctcatcacctttgcgtcgtttcttcgctccacaaacgtttactgagcgccttccacacgccaggcgccagactcgcgcggggaaacagggataagcactgaggaggggtcccagccctcagcgatgggatttcagagcgggagataaagggttgcccagaagggtggtgagtggaatagctgatataaacaacgggggcgcgatgaaatacacaggagggctgctagtcacatatggggcgggtgccgagggcccttgactaagggaggcttcctgcacgggtgacacccaagcggagtcctgacgacctgcgtcagaagtagccaggcgaggaggaggggaaaggaatccacgtcccgagcagagaggcagcgttccctacacagcacaggacacggtccgcgcacagaagccgcaggagacgcaggcacaggggctggggagaatccttgctgggccctcgccgcctccctctgccgggtgtctggtgccagcctcctgcctggcagaggaactccagcccctgctcccggaagcccctccaggccttcggcttccctgactgggcatgggcccctcgtcccctcgggtacggggccggtctccccgccctcgggcggcgaagtaaaggctgagcccactgctcccaccacctctgtctgtccccaccccgacctggggcctcataccatcccactatcatgggtagtgcctaccactgggaggcccggcgccggcagatggctttggaccgaaggagatggctgatggcccagcagcagcaggagctgcagcagaaagaacaggaactgaagaatcaccaggaggaagaacaacaatcggaggaaaaactccagccacataagaagttaaatgtgccgcaaccaccagtggcgaaattgtggacatcacaggagcaaccacagccatcacagcagcagccatcagtgcagccaccatcgcagccaccaccacagccatcaacattgccacaggcacaggtgtggccagggccacagccaccacaaccacagccaccacctcagccaacacaaccaagtgctcaagcccgttgtactcagcacacctccaaatgcaatctccaggattcccaaaggccaggtcaccagcctacttcagcggggatctactaagctggagggcaatctctgtatcaacaacagattccagggtctcatgaacccatgccaatctagccccatcagaaacactgggtattcacaactcaagtctaccaattacatacagcagtggtgatccagagattgaacccaggaccccatggccatccccaaaatgcagatgagcaaccacatcttctcagcatccagcaatatctccactccaaaagccacccactctagaagaggaggctgccaggaataaaatgtaatttttttcctgggaagaaaaaaacaaaaagaaataaaaaagaaagagaaaattgaaaagaaaaaaaaa

SEQ ID NO: 254945 - DNA, 1593 bp, Homo sapiens
cggattcaagcgattctcccatctcagcctcccgagtagctgggattattgacgcgcagcaccacgcccggctaatttttgtggtttttgtatcttctgtcttctgctctttagtaccgcatagagccacagaagactagtgagtcgaacaaacggcccctcttgcagcagttgttgatcacagggctgcccccggtactcatcctgtgtctctcgtccaaatccccgctcctccccagctatcacctctgccgatgctggtggtttccctgggtaccgggaaccaaactctcattccccaggaacctaagtcagggttcctgcacattcacagttatgggtggccctgggagtaacacctggcacccaaacagatcaccagagtccacacatagtccacctgccctccctgcataagatcagctcttcttcctcccgatgatagatcagggtcaatgatccctgccaagatggcgactgctccagcctgctggtccaacctgtccagccacagctgtagcttgaaggcttgaagttcaatgggaccctctcctgctttctacaaactggttcctttatttttatttatttgggacggggtctggctctgtcacccaggctggagaggaagaatgggggaaagaagccagagagaaaagactttactgctgaattgtccatggggcccattgagactcaaagctaaggtgggaaggtcttctatctgatcaggacccaggagagaaaggtactttgcagatgttccctgggagccttgggaaaaatgcctccctctctcaacaaagcaggcggggcctgcccagttgccctggcagtaaccacattgtgaggtggttccagttataggcagaggggtctgagtgggaagagacagaggtggtgggagcagtgggctctgcctgtccccaccccgacctggggcctcataccatcccactatcatgggtagtgcctaccactgggaggcccggcgccggcagatggctttggaccgaaggagatggctgatggcccagcagcagcaggagctgcagcagaaagaacaggaactgaagaatcaccaggaggaagaacaacaatcggaggaaaaactccagccacataagaagttaaatgtgccgcaaccaccagtggcgaaattgtggacatcacaggagcaaccgtagacttcaaagggtaccgcatctcgagactggctactctctggtcatagcagatagtgtgtgaattgccacaggcacaggtgtggccagggccacagccaccacaaccacagccaccacctcagccaacacaaccaagtgctcaagcccgttgtactcagcacacctccaaatgcaatctccaggattcccaaaggccaggtcaccagcctacttcagcggggatctactaagctggagggcaatctctgtatcaacaacagattccagggtgggcagaaaatccttacagactctggactggagcctgggagtgggaggtggtaaggagaggagccctttgcttccatcccggccctgtagtgtagaatccatatctaccaccctaccctctctgactctcccaagt

SEQ ID NO: 254946 - DNA, 1085 bp, Homo sapiens
gagacggagtctcactctgtcgctgaggctggaagtgaaactccatctcaaaaaataaaaaataaaatgaaaataaaattaagaggtagacgctaggcttgagtccagaattagaaatctccagagctagggtgttttctaagaagcccctttgcgttctgggggctcagacctcagtgaggcttagtaggattttgtattttctttcattctgactcagcacagacatttatgggggagatggagagaggagagattaaggagaaaaaggtaattccggagacctaagtggggagagatgagcagaggaagggtcagatgatgatgctggaaccctctgaggaagaatgggggaaagaagccagagagaaaagactttactgctgaattgtccatggggcccattgagactcaaagctaaggtgggaaggtcttctatctgatcaggacccaggagagaaaggtactttgcagatgttccctgggagccttgggaaaaatgcctccctctctcaacaaagcaggcggggcctgcccagttgccctggcagtaaccacattgtgaggtggttccagttataggcagaggggtctgagtgggaagagacagaggtggtgggagcagtgggctctgcctgtccccaccccgacctggggcctcataccatcccactatcatgggtagtgcctaccactgggaggcccggcgccggcagatggctttggaccgaaggagatggctgatggcccagcagcagcaggagctgcagcagaaagaacaggtgcatgggataggctgggttcttcagggtcctctctggagcaggaagggaatggagaatggagagagatccctaggaagctgcctactatttggtgaatgctgtttgctgggggtaggaggaaagcaaggtcatttggcgttctctcagatagactgtgtctgtgttggggggaccactatcagctgactcaatttccctcttgtaatagtctaggggaaggcaagggtactaggcctgggaggtttaaagatgttctgtccaatagggtaacccccagcctgtatgctatattgagccttg

SEQ ID NO: 254947 - DNA, 461 bp, Homo sapiens
cacctctgccgatgctggtggtttccctgggtaccgggaaccaaactctcattccccaggaacctaagtcagggttcctgcacattcacagttatgggtggccctgggagtaacacctggcacccaaacagatcaccagagtccacacatagtccacctgccctccctgcataagatcagctcttcttcctcccgatgatagatcagggtcaatgatccctgccaagatggcgactgctccagcctgctggtccaacctgtccagccacagctgtagcttgaaggcttgaagttcaatgggaccctctcctgctttctacaaactggttcctttatttttatttatttgggacggggtctggctctgtcacccaggctggagtgcagtggtgcaatcactgctcactgcagcatccacctcccagcatccatccaccctcctgcctcagcctctggaatag

SEQ ID NO: 254948 - DNA, 1414 bp, Homo sapiens
tgattaataatagtcagatataatcctatccgtttcctatctctagtaaaacttttcttattctaattattttctttgctgtactggaacagcttgtgccttcaggctcttgcctgggcacctgggtggcttgcggcccacaagataagatatattgcgttgaactataatttatgttgattgctgaatgatttagggcgggggggtgggcaccccctgaaattctgccctggaggagtggcctcaccctaaccctggccgtggctaataataaggcccacctcttagggccgtggagtgaaataagttttccaggtaatgcgcagtagagccctcagccctccgctgaagttgcgttaggaaggaggaagggagaggtaaatgctgagcccgcaggcggcagtctgtgcctcggagagaaactttatcccaaccttgctgggggccttgacgcccaccttgccccaagagcaccccggcagtcacccctgccctctggggtcctgccaccccgagcccgaccttcccccttttcccccgcgccgggccaatagcctcctaactgcgtcgtgctcatcacctttgcgtcgtttcttcgctccacaaacgtttactgagcgccttccacacgccaggcgccagactcgcgcggggaaacagggataagcactgaggaggggtcccagccctcagcgatgggatttcagagcgggagataaagggttgcccagaagggtggaactgaagaatcaccaggaggaagaacaacaatcggaggaaaaactccagccacataagaagttaaatgtgccgcaaccaccagtggcgaaattgtggacatcacaggagcaaccacagccatcacagcagcagccatcagtgcagccaccatcgcagccaccaccacagccatcaacattgccacaggcacaggtgtggccagggccacagccaccacaaccacagccaccacctcagccaacacaaccaagtgctcaagcccgttgtactcagcacacctccaaatgcaatctccaggattcccaaaggccaggtcaccagcctacttcagcggggatctactaagctggagggcaatctctgtatcaacaacagattccagggtctcatgaacccatgccaatctagccccatcagaaacactgggtattcacaactcaagtctaccaattacatacagcagtggtgatccagagattgaacccaggaccccatggccatccccaaaatgcagatgagcaaccacatcttctcagcatccagcaatatctccactccaaaagccacccactctagaagaggaggctgccaggaataaaatgtaatttttttcctgggaagaaaaaaacaaaaagaaataaaaaagaaagagaaaattgaaaagaaaaaaaaa

SEQ ID NO: 254949 - DNA, 841 bp, Homo sapiens
atttgcagggaattactctttatcctccagcactaaaaactgctttcagtgctgagctctcaagtgaggaagcaggtgctcagagagagtgctatttcctgggctggggctgtgccacccagaaatcgttcttgggtgtcacagtgggtgaggcagacagcgtaggcccaatttcagcctccagctctagggaacagagaccactgccacctatacttctctactcacttgccttgttcgaattcgacggtttctctggcagatgggtgattgggtggggagaggatgatgccacttgcccgggggcttcttgccaggaactgaagaatcaccaggaggaagaacaacaatcggaggaaaaactccagccacataagaagttaaatgtgccgcaaccaccagtggcgaaattgtggacatcacaggagcaaccacagccatcacagcagcagccatcagtgcagccaccatcgcagccaccaccacagccatcaacattgccacaggcacaggtgtggccagggccacagccaccacaaccacagccaccacctcagccaacacaaccaagtgctcaagcccgttgtactcagcacacctccaaatgcaatctccaggattcccaaaggccaggtcaccagcctacttcagcggggatctactaagctggagggcaatctctgtatcaacaacagattccagggtgggcagaaaatccttacagactctggactggagcctgggagtgggaggtggtaaggagaggagccctttgcttccatcccggccctgtagtgtagaatccatatctaccaccctaccctctctgactctcccaagt

SEQ ID NO: 254950 - DNA, 1984 bp, Homo sapiens
tgattaataatagtcagatataatcctatccgtttcctatctctagtaaaacttttcttattctaattattttctttgctgtactggaacagcttgtgccttcaggctcttgcctgggcacctgggtggcttgcggcccacaagataagatatattgcgttgaactataatttatgttgattgctgaatgatttagggcgggggggtgggcaccccctgaaattctgccctggaggagtggcctcaccctaaccctggccgtggctaataataaggcccacctcttagggccgtggagtgaaataagttttccaggtaatgcgcagtagagccctcagccctccgctgaagttgcgttaggaaggaggaagggagaggtaaatgctgagcccgcaggcggcagtctgtgcctcggagagaaactttatcccaaccttgctgggggccttgacgcccaccttgccccaagagcaccccggcagtcacccctgccctctggggtcctgccaccccgagcccgaccttcccccttttcccccgcgccgggccaatagcctcctaactgcgtcgtgctcatcacctttgcgtcgtttcttcgctccacaaacgtttactgagcgccttccacacgccaggcgccagactcgcgcggggaaacagggataagcactgaggaggggtcccagccctcagcgatgggatttcagagcgggagataaagggttgcccagaagggtggtgagtggaatagctgatataaacaacgggggcgcgatgaaatacacaggagggctgctagtcacatatggggcgggtgccgagggcccttgactaagggaggcttcctgcacgggtgacacccaagcggagtcctgacgacctgcgtcagaagtagccaggcgaggaggaggggaaaggaatccacgtcccgagcagagaggcagcgttccctacacagcacaggacacggtccgcgcacagaagccgcaggagacgcaggcacaggggctggggagaatccttgctgggccctcgccgcctccctctgccgggtgtctggtgccagcctcctgcctggcagaggaactccagcccctgctcccggaagcccctccaggccttcggcttccctgactgggcatgggcccctcgtcccctcgggtacggggccggtctccccgccctcgggcggcgaagtaaaggctgagcccactgctcccaccacctctgtctgtccccaccccgacctggggcctcataccatcccactatcatgggtagtgcctaccactgggaggcccggcgccggcagatggctttggaccgaaggagatggctgatggcccagcagcagcaggagctgcagcagaaagaacaggaactgaagaatcaccaggaggaagaacaacaatcggaggaaaaactccagccacataagaagttaaatgtgccgcaaccaccagtggcgaaattgtggacatcacaggagcaaccacagccatcacagcagcagccatcagtgcagccaccatcgcagccaccaccacagccatcaacattgccacaggcacaggtgtggccagggccacagccaccacaaccacagccaccacctcagccaacacaaccaagtgctcaagcccgttgtactcagcacacctccaaatgcaatctccaggattcccaaaggccaggtctcatgaacccatgccaatctagccccatcagaaacactgggtattcacaactcaagtctaccaattacatacagcagtggtgatccagagattgaacccaggaccccatggccatccccaaaatgcagatgagcaaccacatcttctcagcatccagcaatatctccactccaaaagccacccactctagaagaggaggctgccaggaataaaatgtaatttttttcctgggaagaaaaaaacaaaaagaaataaaaaagaaagagaaaattgaaaagaaaaaaaaa

SEQ ID NO: 254951 - DNA, 1500 bp, Homo sapiens
gagacggagtctcactctgtcgctgaggctggaagtgaaactccatctcaaaaaataaaaaataaaatgaaaataaaattaagaggtagacgctaggcttgagtccagaattagaaatctccagagctagggtgttttctaagaagcccctttgcgttctgggggctcagacctcagtgaggcttagtaggattttgtattttctttcattctgactcagcacagacatttatgggggagatggagagaggagagattaaggagaaaaaggtaattccggagacctaagtggggagagatgagcagaggaagggtcagatgatgatgctggaaccctctgaggaagaatgggggaaagaagccagagagaaaagactttactgctgaattgtccatggggcccattgagactcaaagctaaggtgggaaggtcttctatctgatcaggacccaggagagaaagtgcctaccactgggaggcccggcgccggcagatggctttggaccgaaggagatggctgatggcccagcagcagcaggagctgcagcagaaagaacaggaactgaagaatcaccaggaggaagaacaacaatcggaggaaaaactccagccacataagaagttaaatgtgccgcaaccaccagtggcgaaattgtggacatcacaggagcaaccacagccatcacagcagcagccatcagtgcagccaccatcgcagccaccaccacagccatcaacattgccacaggcacaggtgtggccagggccacagccaccacaaccacagccaccacctcagccaacacaaccaagtgctcaagcccgttgtactcagcacacctccaaatgcaatctccaggattcccaaaggccaggtcaccagcctacttcagcggggatctactaagctggagggcaatctctgtatcaacaacagattccagggtctcatgaacccatgccaatctagccccatcagaaacactgggtattcacaactcaagtctaccaattacatacagcagtggtgatccagagattgaacccaggaccccatggccatccccaaaatgcagatgagcaaccacatcttctcagcatccagcaatatctccactccaaaagccacccactctagaagaggaggctgccaggaataaaatccaggtacagattttgctgagagagaagaaaagagaacgtgggaccacgtgtcacatggagcagcctgtcagctcagaagatgcctgcaggtcccagtttccttaccccacagaactctttccttccatcaggtgcccccaaaatgtcactcccaccccttcccacccttcaggtgagtgtagcagcatggctgcactatcactctgacctccactcacttggcccaggcacatgctggacccccattcaggagacagacaaaacattcttcttcctcagcaatgcaggctgaagagcccaaggtcacatattgtaaagattaaccaaattccagc

SEQ ID NO: 254952 - DNA, 695 bp, Homo sapiens
gttactttcacttcagagaggctcacattgattaagtgctttctgtgtgccaggaactttacctgtgctatcctaattaatcctctttagcaactctatgaatctgtcattgttgtttgactggggagaacattgtaactgcaaaaaatttaagtaacatgaccaagagcacaaaactagcatgtggcgagtcaggattgaaacttggtcttctgagtcaaaagccactggtctttgttttgtatctatggggacccaaattcactaaggttatgccacttatgatcatttgaaaggatgttggaggcaaagacatttagcaagctgggttcttgaatgtattgcttgccctgtgtatctcatactttgggaagcaggatttagaagcagaaagatcaccataagcaactggcaggtcatatggactacaatgtgaatggcacctccgggacttgcacaaggcataaggcaagggccattttctagggatctaattcccaagtgtcttctctttaactcagtgccttcccaacatctataaccatgaccatccaaaagacaaaaggcagaggggcagaagagataaaggctggaggcacttttatcatattaggagaaaatttagtgtgcagcctttacccttcttctggagaagtttaggtctggcagtcttatctcatattttcatattctaa

SEQ ID NO: 254953 - DNA, 416 bp, Homo sapiens
atgacagtgtttgaaggggccaatgaataatttcctatgttagggaaaggatacaaaaagcacgaatcataaaaaggttaatttatctatgctacaatgaagaatatctgttcattaaaatatattactaggccaggtgcagtggctcacacctgtaatcccagtgctttggaaggctgaggtgggtgaattgcttgagcccaggagtttgaaaccaggctaggcaacatggcaaaaccctctctctacaaaaaatacaaaaattagccaattgtggtggcacatgcctgtggtcccagctactcaggaggctgaggtggaaggatctcttaagcatgaagaggttgaggctgcagtgatccatgcttgtaccactctactccaaccttggcaacagagtgagaccctgccttaaa

SEQ ID NO: 254954 - DNA, 523 bp, Homo sapiens
gtagtcacatctaatcaggtttatgtgattagccctatttcttcagggcagctccatttcattagttcccaattactcgttaaacaaccttgacaatgagttacacatgcttagtcatttccatggaactctcatttatcttgcatcaatataggtaaatatctaactattcctcagttgctgctgcaaatcagaggtctagtcttcagccatttccagagaggaggccaaagaaacagctgttagtcctttttcggtatataaaatgctcaggatagtgcctgacacgtagtaagcaaacaaaaacttcacagaatcattgaatttgttttttcaaaattgacaaataaagtgcatattctgatattgtaatttaaaaaaataatagaacaaaggaatccactgcttggttgtaatatcttttcttcattgataattttcaaaatgattgttgctaaaatcatatgcctctgtcaaattcctttcacgtcaaataaaattaaatcctatgatgtccttgaaa

SEQ ID NO: 254955 - DNA, 399 bp, Homo sapiens
aattgatgatcccctcaggggatcaataatgagtagtgagattgaatcagcaataaaaaaattttcaaacaaaaaaaaaaaagctcaagaccaggtgaattcacacgtgaaatctactaaacattcaaagaagatctggtaccaatactactgaaactatcaaaagattaaggagggaatcctacctgactcatgctatgaagccagtatcactctgatatcagagccaggaaaggacacaacaaaaagaaagagatagagatcaatatctccaatgaactgagatgcaaaaatcctcaacaaatactagcaaaccaaacttaatagcatatcaagaagataactcaccacaatcaagtaggttccattccaggcatgaaaggatgattcaacatacac

SEQ ID NO: 254956 - DNA, 431 bp, Homo sapiens
cattgtttcttagacaagaacaatgaatcactgagcacaaatggcttaatctccaggcacagcctctagtgttgctccagattcaaactaacatttgatgacaatataagacattcatctcttgtgaatctattgtttagtgtgggttttaatttgttgcaatagttataagccacaacaaatgcaggttttcagagaatcagaaatggagtaagaatggaacactgtatgttctagatcacaggccatttatgtatgtatgtatccctactataatgttgatgatgcttacataatttctttatatgtagaaaagatacttcaaatttcagatagatgatcacaccaacaaatggcaaatgttgtatttctgtcaaaacattaaatttggcatgcttggtgtttcttcaacatggaatgaccatcaagtt

SEQ ID NO: 254957 - DNA, 331 bp, Homo sapiens
tgacccagagaaacattgctgggtaaactgtttcctagaaaccaagaactggctgggcacagtggctcatgcctgtaatcccagcactttgggaggccaaggtggacagatcatttgaggtcaggagttcaagaccagcctgaccaacatggtgaaaccgggcctctactaaaaatacaaaaattagctgggcgtggtggtgcatacttgaatcccagctgcttgggaggctgaggcagaagaatctgcttgaacccaggagggcggcagaggttgcggtgagccaagccactgcacaccagcctgggtgacaaagcaagactctgtctca

SEQ ID NO: 254958 - DNA, 252 bp, Homo sapiens
gaagaccagctcaggaggaggcctgattctcatgcaggcttagagcacagcatgcatgggttggactgtgcagatcagaaggggtgggaatgctgttcttacaggcttaggttttctctctttattcctccatccttgagcccctggaggttcaaaaaagcaaagataccagttattaggaaaaataaagacattctgtgtttgtaagtggctgagttgaatctgtccaaaccagcttatacttgtgcaaac

SEQ ID NO: 254959 - DNA, 275 bp, Homo sapiens
cacacaccatcacttctacattattctgttggtcacacaggccgccccgaggcagtgtgggaaggatctacacaggacgtgaataccagaagtgagaatcactggaagtcatgttggaggctggccactatccccttctcgctaaacctgacattatcactctcatatttcatgttccaccaagcaccaaaagatttcagattcccagaacctatagggctgtgtcttccatctttgtgttcctcatgcctgcaagatcttttcctctcttttgt

SEQ ID NO: 254960 - DNA, 439 bp, Homo sapiens
tgcagaagtttgtaaatttgatgaagttcagtttataaaaaaaaaaaatttttatgtattatgtttttggtgaccaatctgagaaatctgtgcataatccaaggttttcttctagaagttttatacttttaggctttacatttaggtctattatgtattttgagttcacttttacatatggtatgagatgtggatcaaagcatttttttcatgcaaatattttattgttgcagcaccatttgttgaaaagactattctttcttcactgaattgtctcatcaaaaatcagttgtccatatatgtatgaatctatttctgaacttttattctattgatttgtctattttgatgccattactataccatcttgattactgtcactttataagtcaccttaaaatcagataatgttggtcctccaactctgttctttttcaaa

SEQ ID NO: 254961 - DNA, 739 bp, Homo sapiens
ttaccgatactcttccgcggctactggcaatctagcactagtggattccccgggctgcatgaattctgcacgagcttatttacctgcttatattgttttagcacatgttttagttcacctctgctgggtttagtggtctttcagatcatattacctgatttgaataaaatgaactttgctaaatagacagatggctcacaaagattcctgcaaagaaaatgcagattgaagtttcagagtcagcagaagattgaagtaataatacaaatacacgtgaacagccagaaagaaacagagtggatacttctatttatattatgaacttgtcagtcaaatgcataatataaaaacaatggtgatctcatcagattgatgaagaagcagtaataaaaaatagcttagaattactaaaaatactatttaaaatatggacttatatacactgttgagtacattgtacctgaaggtatttactaatgatattatgggctaatcttataaattgagatatttaaaaactaaatattcagaatataaagacagacttattgatgtttttcagtgattgtcagtcataatccagtaccttaaaattttattaaggttaataatacatttttagaagttccttttgaggtttaggaataaaagacaaaaagtcataaactcttgttcttcttgtttggtaacagtggctgaaatgatatatagataaataatttgagtttggtgtaaaact

SEQ ID NO: 254962 - DNA, 759 bp, Homo sapiens
tcctatttactgcctgcctatctgaactccacccattcttctagggctacaaacccttccctgactgccctagccctcactgatttaccttgcctatgactctgaatatacttatagcctattacatggtctaggacttctttatgccattctgtgatacagatgagtactgtaccacttacagcttcacgtgtgtgccctcaaaggaaagcttcatgtttgtttcacatttaatgcttataactgtgctaagcacaaaactcatatgcaaatgaatatcaagtttttctacaaatcattattgggagagcacaaggaacacagagtacctatatgtagtatagtcggaaggcagcaggactgtgtgtcacagcgcaatgtgccactatacagccatgtgagcatgttaaatctcagccttccaatccataaaatgaagatggcatctacctcagtagagttgctgtgaagatgaggcgcagggaattaaagaatactaaatgtggaaatcttccttgaaaaatgcatagtgcaaaatcaaactgaagtactattattcttctccacgactattacactgtagcagcccataaaaccataagcttgaattttctttttaaatatacaattttgtgagaaggaaaagcaaaagtctagattaatcttgtacagatagttagtatgttatgttaaaatggacatatatgttaaatgtaactgaagtttatccattagtttctaattgaattttctagtgat

SEQ ID NO: 254963 - DNA, 652 bp, Homo sapiens
ttctaaaccttatttgtggctctattttatattttttcagccttatttatgtttttccttatgagaatttatcccttttaatattttatacatcattctaaacaagacataactcaatcatcaatcaaaaatcactgcactgtataatacccaacttccacagtgacgaccctgagtcattaataaattattacactgccgattttctgctttgatggaaaagaagtacacaagatattttaagcctatttcatcacaaatgataaggggttttttttggaggggacggggaaggaggagacagggtcttgctctgttgcccaggctggagtgcagtgtcataatcacagctcactgcagcctcaacctcctgggctcaagtaatcctcccaccttctgggattaaaggcatgccccaccacacctgactaattttttttaattttttttgtagaggtggagttttgccttgttgcccaggctggtcttgaatttttggactcaagcaaccctcccacctcagcctcccaaatatcaaggattacaggtgtccaccaccacacccagctaatttttgtattttcagtagagacagggtttcaccatgttggccaggctggtctcgaactcctgacatcaagtgatccacccg

SEQ ID NO: 254964 - DNA, 341 bp, Homo sapiens
ttagtttttttttttcttcaaaagaaatcacaacttcaaaagttaattaagagcattgatgataggcagacttcaaaatcatggaaggcttaatttctatcttttgctgctattctagtttatgtatttcagacacattgcaggtttcagaagtccaagttttcctacttttatattatgtgaaggtttgtttattagaatgatatgattttataaaagaaaattgaaccaatatattatattatatagtataaagcatatgacaggtatggatatttagacatcttcactttccttttagtcaaattaaagaactatctacaaattgcttttatctaaaa

SEQ ID NO: 254965 - DNA, 984 bp, Homo sapiens
gatgattggcttgggttgcttttaaaatatttaaaatattggcttggggatggccagtgccctctgtggaatgtttcctgagaaggggtagctaaagaggaacctctgcctatccatcatcatgtctctgggtttcattgtcaccctaaagccactctcagatgtctttgtgcaaggcaggcagggcaaggccagcctcagtcttcccagtctcctttatattttatactgcaataccaagttcagccagagttcatgtttctgaagtttcttaagcatttggaaagttacttcaaaatttggatcaattttaaagaaagtaactttgaagttgaggaatcactggggaaagtattgatggccaaggatcctgtcttaaatggccaaatatgatctaaagaacagtaacagggagcaaaatgaaaagggaagggtgagagtatggagaagtcagaaaaatgagtctgttaatgaagaaagaatgaccctattaaagccaccaaactttgatttccttgtgtgggaaatcatttttccaattttcactgtggaggtatgtgttaccagcgcctcagggctaaagacagagagtcttctgttttccctgggacgtttgaatgacctgtgtctgccatggggcccagtgctctccaccagcaattgctgctggcctcggcgctgacaggtcaacactggcgctgaaggaggcccttgttgctccaggggctgcccacgtgagcacaagagttagaggtttttgtgtttttgtctgtttgttttagttttcattagtacctcctgcagaggctctgataatcaaccgaaggagttctccataaaaaattcctacctcttactcaacacgaggctcgacattaaaggaacatcatctgaggtttagagagaaacatacattgtccatcataaaaatgaactttttgggtaaatggtgatttttctgttgctttaaaaaaatacatacaa

SEQ ID NO: 254966 - DNA, 275 bp, Homo sapiens
aggtcccctgatttcacgcctcccgtagcttctctcctgctctggtcttgatggtaatctcctttgagggtacaaaactgctttgaagacttgaattgcgtttgaactggaaattagcctcagaacaacctggtctataaatgagcacactgaagttagattgttcccttattcccagagatggaaccagaattaggcatcagtgaggattagcagctgcagagtcataaacagggacccagttccacctcagtgttggtaaatcatgctctgtg

SEQ ID NO: 254967 - DNA, 1174 bp, Homo sapiens
ccaccctcctcggcctcccaaaatgctgggattacaggcgtgagccaccgcgcctggcctctttttctttggcatgagccacggtgcccggccaattactgagaattcctgcctttttcacaggattattttaaggatcaaatgaaaagttctgtgtgaaagaagaatgaggccatgaagtgatacagaaaccaaaggtgatatatttattgcctttcccactcaatgtagttcgttttttgttttgttttgttttgtttttttgagagatggtttcactcgacttactgtgaccaggcgttgcttgggtactgctgctactatggaaataaacaaagacaaatccttaccctgagaaatgttgccagcctaatgctgaggttaaggaagggaaggggtattaagataggagagggcagaggcaaggaggagggcccaaagagatgagggcaaagaagagcaagggagccgggcactgtggttcatgcctataatcccagcactttcggaggccaaagcagacagatcatgaggtcaagagatcgagaccatcctggccaacatggtgaaaccccgtctctactaaaaatataaaacttagctgggcgtggtgacacacacctgtagtcccagctactccggaggctgaggcaggagaatcgcatgaacccgggagacggtggttggagtgagccgagatcgcgccactgcactccagcctgggtgacagagcaagactccatctcaaaaaaaaaaaaaaaaagaaaaaagaaaagaaaaaaaagaaagaaaaagaaaaaacaaaaaaccagaagagcaagggaaggctcacagggctgaatcttgaagaatgggggttctcagggttacagagaaggggaggacattctggacagaaatggaatgtgtgaagatattgtgtacttggagattgcagatgtcgtgtggggctaaacattcttgttcagctgcaagaacatctgaaacctgggaaggctgtgggaaacataaagaactagatgtataatattttcagtttttttttaaattagtaactattaatagagtagcacaaattaattgggtgcttgttctggaccagatactgtgctactactgtgctaggtcctttgtttttttagacatggggtctcactgctgttgccgaggctga

SEQ ID NO: 254968 - DNA, 1153 bp, Homo sapiens
tgcgaaagcgatacccataccaaccaccgcgcctggcctctttttctttggcatgagccacggtgcccggccaattactgagaattcctgcctttttcacaggattattttaaggatcaaatgaaaagttctgtgtgaaagaagaatgaggccatgaagtgatacagaaaccaaaggtgatatatttattgcctttcccactcaatgtagttcgttttttgttttgttttgttttgtttttttgagagatggtttcactcgacttactgtgaccaggcgttgcttgggtactgctgctactatggaaataaacaaagacaaatccttaccctgagaaatgttgccagcctaatgctgaggttaaggaagggaaggggtattaagataggagagggcagaggcaaggaggagggcccaaagagatgagggcaaagaagagcaagggagccgggcactgtggttcatgcctataatcccagcactttcggaggccaaagcagacagatcatgaggtcaagagatcgagaccatcctggccaacatggtgaaaccccgtctctactaaaaatataaaacttagctgggcgtggtgacacacacctgtagtcccagctactccggaggctgaggcaggagaatcgcatgaacccgggagacggtggttggagtgagccgagatcgcgccactgcactccagcctgggtgacagagcaagactccatctcaaaaaaaaaaaaaaaaagaaaaaagaaaagaaaaaaaagaaagaaaaagaaaaaacaaaaaaccagaagagcaagggaaggctcacagggctgaatcttgaagaatgggggttctcagggttacagagaaggggaggacattctggacagaaatggaatgtgtgaagatattgtgtacttggagattgcagatgtcgtgtggggctaaacattcttgttcagctgcaagaacatctgaaacctgggaaggctgtgggaaacataaagaactagatgtataatattttcagtttttttttaaattagtaactattaatagagtagcacaaattaattgggtgcttgttctggaccagatactgtgctactactgtgctaggtcctttgtttttttagacatggggtctcactgctgttgccgaggctga

SEQ ID NO: 254969 - DNA, 393 bp, Homo sapiens
ttctttttccaaccctttcatcatctgtgtgggcttccttcctttttatttctctgcattccctttcagatgtggagatcataactgggcatggatagccagcatgagtcaagcagtgatgagtaaaataagaaacttacctcagagtttctaaactaattttctatttatgaaccccagtaatgtgcttgcttaaaacacaacgagaatggtggctcgctatcatatttcacttgtaggtctgctatggtacaaggtgtgttttttctgctacatttcaattctcgcacgtggccagcctttaccttgtatgctgtgtcttatattccagaacatattattttgcaaaatgacaggaaagacttgcataagtatgaaggatattttgatgtg

SEQ ID NO: 254970 - DNA, 1237 bp, Homo sapiens
tgagtgttttacagccaagaaaattcttactaatctatcttagggaaaaaaaaaatgacagctcatgccactgattatcaggagccagtcagcttccctctgtgccctgtgtgccctctgtgccgggcctgccccctcccactgcctggccctcctcagaggtgggccatccttccactgccggggctgggccgggctgtgtcagctcgtgctggccactttactgctccacttgagatcccctgacgtggcaacttgggttctctgacctgcgccctggtgcttgcctggccgacagggcactgtcctggcatggggtctccttggcatttgggtctcaccaccacccacacctcaccttcctccagccctgcagttctcacaccggcaccaggagcctggtggggcggtgcagatgggaaagctcttagccccatagaacgtgctggacagtgcagacctggaggcctgctgaggcaccgggtgccagcctctccacagtgtgggcagcagggtggggtctatatgtatttacatccatctctgtccacatacaccattcctaaggaccggagggtgcgtctcctaaaatgacggccacccctcgcatgcacccaccgtcagcacgctggaaagcggctgcagggaatcccgtgtcatctgtgtccaggccgtgttcccagctccagaattgtttcacaagtgtctctcatagctggtttttttcagactggaatccaaggttcatattccatctggttattaatgtctctctagcttttcttaagatataatgggcacgtagtaaactgcaccacttgatgattctgacccatacaaacactcatgaaaccatcccgaccgtcacggcagcgagcactcaccccacgcacacactcatgaaaccatcccaaccgtcacggcagcgagcactcaccccacgcacacactcgtgaaaccatcccgaccgtcacggcagcgagcactcaccccacgcacacactcatgaaaccatcccgatcgtcaacggcagcgagcactcaccccacgcgcacactcatgaaaccatccctacagtcacggcggcgagcactcaccccacgcgcagggacttggccttggtgatgatcttcaggctctctaccactcccgccacactctcatgctccatgctgctgtactcgccctctgtgttctcccggacaatgaggatgtctatgtccttgtgccgagtcac

SEQ ID NO: 254971 - DNA, 534 bp, Homo sapiens
atgcacccaccgtcagcacgctggaaagcggctgcagggaatcccgtgtcatctgtgtccaggccgtgttcccagctccagaattgtttcacaagtgtctctcatagctggtttttttcagactggaatccaaggttcatattccatctggttattaatgtctctctagcttttcttaagatataatgggcacgtagtaaactgcaccacttgatgattctgacccatacaaacactcatgaaaccatcccgaccgtcacggcagcgagcactcaccccacgcacacactcatgaaaccatcccaaccgtcacggcagcgagcactcaccccacgcacacactcgtgaaaccatcccgaccgtcacggcagcgagcactcaccccacgcacacactcatgaaaccatcccgatcgtcaacggcagcgagcactcaccccacgcgcacactcatgaaaccatccctacagtcacggcggcgagcactcaccccacgcgcacactcatgaaaccatccctacagtcacggcggcga

SEQ ID NO: 254972 - DNA, 475 bp, Homo sapiens
caaaaaatttttgtgtttataaatttgtctataaaatgattatgaatatcatatacatgtaaatcatgccttaagtcattgtgggacaaatagtgacaaaatgaaatgaattgccaagactttgaaaatcaaacttcataaaattctaaagtaaaggaaggaaaaataaacacaaattcttggttgttacctctgggggaaaccaaaggagatgcaattaggtagtgacacagaggagccttcaaaggtataaggaatattctattttttaaactggatgataaatacacacgtatttgttttattatttttctccagaacttacacttacatatgcgttccacatattagtttatgtgtatgatatatttctgaattaaaaagcttgaaagaaagaaaatcaatcttcagttaacattctactcataaagtcaactgttccctattctccaggaacaaatgtagctaccgaata

SEQ ID NO: 254973 - DNA, 350 bp, Homo sapiens
acactttttaacttcttcataacttattttctttgtctctaaaacaggccaaattatactgtgccactttgtgttatataatgaacgtgaagtatttgatttataataactacttaagagacaacaaaccttttccctcaccgtcctgcatagccattctattcctcagaatataggccatcataagacaatggaatatgtcccaagagacagattggactgaaatatgcccctataacatatctgtcttttgatttaattctgtttaaaattaacaaaagggagtctgttataaaagcttcttttgaacaaaaaatgcaaatgttatttaatgaaagcgattatcgttt

SEQ ID NO: 254974 - DNA, 647 bp, Homo sapiens
ttcttgtatatagaaaaccctaaagactaaaaaacataaaaataaaaaacaaaaacaaaacattattaaacactgatgaaagaaattaaacacaaataaaaggaaaacatcccatgttgtttgttgggaagaattaatattattaaaatatctgtactatttaagtgatctacagatttaatataatcctatcaaatttcaatgtcatttttcacagaaataggaaaaaccaatttttaaattcatatggaaccacaaaaaactccaaataaccaaagtagtcttgggaaagaagaaaaagctggaggcattgcacttacttactttaaaatatattacaaagctacagtaatttaaatagtatgatattggtataaagacaaaaatataaaccaatgtagcaaaatagagaccctagaaataaatggatgtaaatattttcagttgatcaacaagggtgccaagaatacatgggaaaaattatagtctcttaaacaaataatgctagggaaactgaatttccatatgcaaaaggatgaaattggacccctatcttacacgatatatgaaagtcaactcaaaatgtattaaagacaaatgtaagatctgaaactgaaaaacttctcaaagaaaacacaagggaaaaa

SEQ ID NO: 254975 - DNA, 302 bp, Homo sapiens
ggccagaaacagtagacttcactggttaattctatccaacacttaataacatataccaaatttctaaaactagaagaggagggcacacttccctacacatcctgtgagtacattactatcaagataccaaaaccagacaatattacgaggaaagaaaactacatactgatattgcttatgagtatagacacaaaaatcctcagcaaagtattaacaaaccgaattcaacaacatataaaaagaattgtacggcatgacctagtaagatttatcctaggaatgcaaggttgttttacatttga

SEQ ID NO: 254976 - DNA, 446 bp, Homo sapiens
gtgtgttccagtgtggactgacgcaggacagcagagggcgtttggtacatgatgtgtttgagcaaggatgtgccagggaagatgggagttaggggctgaaacatactcagctatcctgtatctaaattgcgtgaaatcaacagggctcctccttctcattaccaatatttatcttcctgatttatctccctgtgccccaggaacacatccctccaccttttttctgcccctgctttccaagatcacatcctgggtggtttcctttattgcagtctttgagctctgtttcctattctgaaagcataatgcccaggaacacagacttcaccacttaccggagtttaaaaaccaacagcaacaacgaccttgggctggttgcttaacccctatgcctcagtttccttacatgtgagatggggataataaatgagacgttatgtgtaaag

SEQ ID NO: 254977 - DNA, 447 bp, Homo sapiens
caaaggtatgtcttttgacttgtctagatggaccccataatgcagaagaacgagtcttggccatttgcatactgacacttgggctagcaggccagaaggttctacaataggcctggcctcaaatatatttcacttgtaataagcaccatatggggtcctgccttggagctgagtcatacaagagtgcctagagtgccttttaaaggcctacagccatccaactcttagggaagggagtccgcattggacttgggtgctctgggaagtggtctggttcctggatcaattgttgatgaggtatatatttcaatcatgttttcccacggactgtggggaaggcggtgagggtggctggagacagggttggttggggagaaggggctgctgttggttgaacattagttacacagagctgcgtgctataaattctggctcactgaatcctca

SEQ ID NO: 254978 - DNA, 2163 bp, Homo sapiens
ctaatcttccagttgccccctattgactttaaaccaaagctttgattcatgaccactgggatccagccagcgggggatttcttttcctgatggactgtacccaggatctcacatttgcttaagcagctcccacaattgggttcttataaaaggacacagaagagacaagctcagttttctctgaaggagaaggactgcacttagaactgcattttggtgacctctgaaattcagtacggcagtgaatgagcttctgaccttgaggtgaacttaacaaaattatttttggaaaaatcgttgtgggaaccattaaaagaactccaggaaacatgaattctggaatcttacaggtctttcagggggaactcatctgccccctgtgcatgaactacttcatagacccggtcaccatagactgtgggcacagcttttgcaggccttgtttctacctcaactggcaagacatcccatttcttgtccagtgctctgaatgcacaaagtcaaccgagcagataaacctcaaaaccaacattcatttgaagaagatggcttctcttgccagaaaagtcagtctctggctattcctgagctctgaggagcaaatgtgtggcactcacagggagacaaagaagatattctgtgaagtggacaggagcctgctctgtttgctgtgctccagctctcaggagcaccggtatcacagacaccgtcccattgagtgggctgctgaggaacaccgggagaagcttttacagaaaatgcagtctttgtgggaaaaagcttgtgaaaatcacagaaacctgaatgtggaaaccaccagaaccagatgctggaaggattatgtgaatttaaggctagaagcaattagagctgagtatcagaagatgcctgcatttcatcatgaagaagaaaaacataatttggagatgctgaaaaagaaggggaaagaaatttttcatcgacttcatttaagtaaagccaaaatggctcataggatggagattttaagaggaatgtatgaggagctgaacgaaatgtgccataaaccagatgtggagctacttcaggcttttggagacatattacacaggagtgagtccgtgctgctgcacatgccccagcctctgaatccagagctcagtgcagggcccatcactggactgagggacaggctcaaccaattccgagtgcatattactctgcatcatgaagaagccaacaatgatatctttctgtatgaaattttgagaagcatgtgtattggatgtgaccatcaagatgtaccctatttcactgcaacacctagaagttttcttgcatggggtgttcagactttcacctcgggcaaatattactgggaggtccatgtaggggactcctggaattgggcttttggtgtctgtaatatgtatcggaaagagaagaatcagaatgagaagatagatggaaaggcgggactctttcttcttgggtgtgttaagaatgacattcaatgcagtctctttaccacctccccacttatgctgcaatatatcccaaaacctaccagccgagtaggattattcctggattgtgaggctaagactgtgagctttgttgatgttaatcaaagctccctaatatacaccatccctaattgctctttctcacctcctctcaggcctatcttttgctgtattcacttctgaccagagacaaatcagaaatgtgttcacatgctgtgggaacccctttatcccaggaagtcctcttccttgtgccttaacatacaggacaaataggctctattttatgtcttgaattgccttctaatgttatcaaaactcatttattgtgttactattaaatatgctgaaaacgctaaaagtatacgtattggttctttattaaataatttttgaaaaatcattattcatgatcatggcatacagtatattctcttttttttctttatttatgactgtcactgagtgaaataatagatgacagacatgtctgaatgaagtaaaaatcaatggaagacagtcgggatcttttgcttcatgcaaaaaacttggagtgaagtctcaatgataactgggaaatgtttttcttcctctttatctaactatattacacttatccatcaggtttcattgtattaatctatcctttgaggtaata

SEQ ID NO: 254979 - DNA, 647 bp, Homo sapiens
ggcagagacaggcctaataacttgtcctgaattatgagactagaacatgagagagccctcatttgaatagggaagtcggaactcagggactctgatctgataaccactctatattgcccctcataccagaacatgagggtcctccttccacacgcatgcacttcccactgtgtacgcctcaccatggccaaacagggggagcttgaccccatgaaatgctcaaggaatcacactccgttacagggttagagggactaaatttcgcagcatggacacagatgcatggcatgccaagaacaagacatatttttaacatatcaggttttttatgacatgaaccaataaggcctgagatatgtgaaattagctaaacagtaattgtcacaagtacaaaaagcatgcagatacttgttttggtaccactccagcaactaatttggaagaaaaagccatgaacaaccaacatacctgtattgaaatgccagagtctttcttggaatatgaaaacccagcaaatctctatggaggagacaacagttcaatcacttaatcccagaacactggtaactacttgttagtaaggatcttagttgtatttgtttgattttcagctacccaaatccctctgcagcttttgctctatctcc

SEQ ID NO: 254980 - DNA, 483 bp, Homo sapiens
atttatttgtgtgcttcctcattcttgtgaagctagggcaccaaccaggaaagaatgaatcctgtgagttggaatgtttatgtgtcagaagggttggaacccataaatagaaatgtcttttctggtcattataattggataccaatgaggaaaggaaaaggtgggaggaagggagatgaattgaaaacattaaaggaaaagacaaaaaagttgcatcctgaaacacttgcagaaactcagcaacaaatagttccagaaaccgaggttctattccttatacttttacttattcaaaatctgtacaaatcttgcttagctcccctctccttgacaataaaatatgtactgagcagctcctcaggtttcagtaacatgacacatattcaggatggaattctgagcaaaaacagatgatgtaacatgatatctggtattgtggcataaagcttcaggcaagaagagaatcactaacacataaaattg

SEQ ID NO: 254981 - DNA, 1228 bp, Homo sapiens
  misc_feature (1117)..(1117): n is a, c, g, or t
  misc_feature (1218)..(1218): n is a, c, g, or t
  misc_feature (1228)..(1228): n is a, c, g, or t
aagtgctgggattataggcatgagccaccttgcctggccttacttatatcttctttaatgtatttcagtaatgttttgtagttttcagtgttcaagttttttgccttcttagttaagtttattcctattttgttcattttgatgctattgtaaatggaattgttaattttaggttcatatatagaaacatagttgacttctgtatgttgatctggtactccacaactttgcagaacttacttattggctctagtagctttttagtaggttccttaggctttcctagataccagatcatgtcacatgcaattagaggtagttttacttcttccttttctttctgcatgcattttatctctttttcttgcctaattattcttggctatgttgaataggaatatcaggagtggccatctttgtctttttggtattgaggaggaaaatgttcagcctttcaccattgagtatattagctgtgagatttttgtaaaggcttttcatcaggttaaagaagtttccttacatgtcttgtttttcagtttttggttgttgttttttttttgcttttttgttttatcataaacagttgttagagaccttttatgtttcattcgtggtttttctttttttgataggtgagttgtggacagctgagtgctagttaaatatagtacatagaaagaatcttgaaaagaaaactagtttgaataagccaaagtagaaacttgttgactcataaaattctagaaaaaatgagtatcttaaattgcactaaagaggctgggcatggtggctcacgcctgtaatgccagcactttgggaggctgaggtgggcagatcacttgaggtcaggagttggagaccagcctggccaacatagtgaaaccccatatctactaaaaaattcaaaacaattagctggacatggtggcatatacctgtaatcccagctgcttgggaggctaaggcacgagaattgcttgaactcggttggtggaggtttgcggtgagctgagatcatgcccctgcactccagcctgggtgacagggtgagactgttacccattaaaaaaaaaaagaaaaaaaagaaagaaaaagaaaaattgccaggactctngctgttctctttgattcttctggtattactttcatactcagtgcagattaatggcgttgcaggttggtctttattacacccaaggtttatatcttgagttnctgctgtagn

SEQ ID NO: 254982 - DNA, 480 bp, Homo sapiens
cgtgtttcccattatagtgtcttacaggtttttcaaattaagttctgcacttcagaatggttgaaattataggggaagcgatattccagaaaataccctgctggttttatttctaatgcaaacataaatgaggaatgggaggaaatcttctgaggtagtgagtcttagatgtcagctcattctgtattgattgcaattaatacaaataggcaaaatgtgttctcattacagtgagaatatgattaaagtttgtataaaaggttgaaacttgagttatttgctgggaagcaaattcctccaagcaaaataataaaagctacaatattattaagtttaacatatgccaaggattgtttttatgtaaaagtcagtatactacagccctctggccaaatctggcccactgctcagcctcaatacactccagttgctctattcaatgcctgtttttgtaaataaagttttaatggaacacaacca

SEQ ID NO: 254983 - DNA, 488 bp, Homo sapiens
aacaaaacaaaataggatttaagccctggtaacctgacgccaaaggccacagttgtaaccactgtgctgtgctgccattcttagacactacatgtatgcaatagggattaacaagggtggcgagaagttaccaatttttgttatatgtaccacaggcacttaaagtaccttatctaatcttatctaataaaatccagtgaagtaagtattagctccatttcctacatgaagaaactgaggttcagagattgaaggcaattgttagttagtggcagagctgaaacccaaacacagacctgtctggctccaaagcccgaggtcttttgttatagctctttgcttcaaacaactcatttgaaacttgtttctaggccgggcacggtggctcacgcctgtaatcccagcactttgggaggccaaggtgggcagatcacgaggtcaggagatcgagaccatcctggctaacatggtgaaactacgtctctact

SEQ ID NO: 254984 - DNA, 424 bp, Homo sapiens
aggatttaagctcttaggaaccagaggttaaaaggtagtcagtatacactactatacatactagcatatatgctaatatatgctaacatttatagaatatatgtatatatactatagttgtagtcagtaaagaaattttaaaacacaacataatgaacaaaaacaattagctaatctgtatctatgtatctaaatccgtaggcatttattgttttattaagagtgaggaaaccttagatgggtgcagccagaagctaaaaacaatcttatcatagtgaaagatgcatcagaggtactgaaagcctttaacatctccactagtatttctcatcatctttgaaatcagaaaaaacaattttgcttccctttaggaacgtcagcccatacagttgtcagggtcttcacggagttgacctctgtttaa

SEQ ID NO: 254985 - DNA, 330 bp, Homo sapiens
aggactatttgccttcctagacttggtactcccttgactccctcagtcccagccaggagagtgtcattttaggccattgtcacactaggatgtaggaggtgataaagacagcttagttaggcttaggaccaaggctgtgtgagaaccaaccgaagacagacctgcaatgtgtcatctggtacttacggcctctgtttgccaggggctaagtgtgataatgggtcagaaagtataaggtttacaaagtagctgagatgccacctgggacctactattaaaagccagggcagaatcctacaactaggaggtcataacagtgcttggaaggcc

SEQ ID NO: 254986 - DNA, 389 bp, Homo sapiens
atgtttttacagaatatcacatttactaggaaaatgtaagtaacataacattaggtaatattgaatcatccagaaatatcatagaataaaggtaaagttgacataattcttagataatccattggtcttggaaggactcttatagagatctgtttcaggctttacctttaggaccttcaggaacacttgatcacttttctgtgcccttaagggtcctttgggaataatgtttgagaagcaccaaccagctgtaccctctggggagtgataacagaaggcagagtatgagcatggccttgaatagtaagcaggaattctgcaagcaacaggggtgggaatgggccatagctttctgagaacaatgtgctcagggcagcattttttgaaga

SEQ ID NO: 254987 - DNA, 598 bp, Homo sapiens
ccacattgttttgtagtttcactgtagaggctcagacatctgttttaatctgtccctaagcatttttttggtactgtaaacgatactttcagaaagttcatcttgcaatgatttattctatatgaaaatacaattacttttggtgtatagaatttggatcctgtgaacttgctaatctcacctattctggcaaaattttttttttttttggcagattccttaggattttaagtacacaatcatgtcattggtgaatacaggcagttttacttcttccttccaattgtttttgtcttttctttttcttacctattacagtggctgtcaatacaatgttaaatgtctttattttttatctcaaggaactatagattttctacctctagtagtttcagtagtttgcatcttttaaggacttcatatgttccagtaagttgtgaaatgtattggtataaaagtttatagtatttgcgttaaaatgtctgtaatatgtcatggagtctccctttcctttcttgttacctgaaccttgtgttctttggttcttctctaactagaggtttataaattaaatttgtttgaagaacatttaatttca

SEQ ID NO: 254988 - DNA, 590 bp, Homo sapiens
cggtgtgctcccttgctaagacatgaataaactccagctttgcctatctgtgagatttcgggtggtgtatttcagggcgctgacatttggcaaaagtaatagtataggttacatccgaggagggaactgagagaagaaatgtggaaggtgtctcttaggacctttgaatttttacgtgggcgtgtattgtctattcgaaaataaatgctaaaacaaaacaaaaagtttaaaagcaggacaccattgtgtaatctcctttctgaccagaaggtggcgcctccacctttcctggggctggggaaggggaaagctgtagagaggggagaaaggtcccagtgaaacaacaggggcctacattgagagtggaaattttacctcctggcaagaaaggtccagaatctctcttcacaataatagctaatatttattgaatatatattaaatgccaattaagatttttaaaacaggccgggcacagagtctcaagcctgtaatccgaggactttggaaggctgcagccagtggacagcttaagtctaggagtttgagaaaagcctgggcaacacggtgaaaccctgtccctatttttt

SEQ ID NO: 254989 - DNA, 700 bp, Homo sapiens
ggggtctcaatatattgcccaggctgaatttgatgttatttcaagttgatttttgtgtgtttggaagtttgtcttgctcctcaactactatgcaggtagacagtcatcccccagagattcactagattgccatatagaggcactttatcatttccctattgttcctaatacagaattgtagagctggaaagtaacttcagttttctaaatctattcctaaacaggatatcactaacttctttagaatcatttctcagtatacatcaacttattgagaactgtctaatactcaaagaaatgaaatcttgagttcagtaagctgtgttccaagcaggaatcattttcacttaccaaaatatctcctattacctcaagctatccttgttgaggaaagctgaaaattaaattttaagtatcaagtctagaccatagagtgctttggtgggagtattttgattatatacctcctacccatcagaagcaggcagctaatattgtgaactgagcatttttgtcaaaagtcacaggcaagagactagagaagaatgagaaaggtcaaatggaccttgtgtggctgactacatggatcttgttcttggaggtctgtcacagaagagcacatagaggtgaagaaccagacagactcagtcagcatccttacctagagatggcacatctctattaggaccaatgcaatacc

SEQ ID NO: 254990 - DNA, 90 bp, Homo sapiens
catgcgtgattctgcatctttgtttatgctgtcccctctgcctgacagcccctttcaattcactgcttggctaatttcaatcagccttta

SEQ ID NO: 254991 - DNA, 392 bp, Homo sapiens
cactgctgaattgagaggtgtgtgatattaggttgttccagtatttctgatgggaagtgtgatcacttaattaaggtggtgaccactggatctctcctttgtaaaatagggtttttcttgacacttagcaagtaatctttgggggtgacgctttggcaacttccaaatatcctgtatctcaacaacgtcttttttgttttttttttccttcactctgcagcccagcctggagtgcagtgtcaaaagcacggctcgctacagccttgacctcctgggctcaagtgatcctcctacatcagcctcccaagtagctgggatcaaggtgcactaccatgcctggctaattttttaattttttggagagacggagtttcaccatgttgcccaggctg

SEQ ID NO: 254992 - DNA, 462 bp, Homo sapiens
ccaatagaataaggcaaaagttacacttctagtttcctggttccaagccttaggagactcttcacttactcttcctgtgtcatggaatgcctgctcttggagccctggaccaccatgtaaaaagtccaactaccctgctggagatgcaatgtgaagcagtgatgagattacatggagagagtgaaaggcccaactgagcccagccttccactttgccctgctgagatgctgggcatgtgagtacaactcacttggacactccagaccagaccagccaccagctgaaggtcactaagtgactccagtcagtgccatgtgaaatgaaagaattgcctagccaagacctgccagaattcttattcatcagctataatatggttgttgagtaagccactaagttttgttacagtgcttgttaacgtgttacaatgatgtaataaaagtttctgaactgatttacta

SEQ ID NO: 254993 - DNA, 442 bp, Homo sapiens
ggagaagctgaaaattggttggtataaagagaagtgatttgtagaaacaaagtgggaagaatgttcatagacatcaaactcttcaacaatgtgaaagaaactttagtttctaaaggtcagtaggatagaccattttttgttttatatattactttttggcccaacatttattcaaccagtttttaatggaaaattccccattgtcaagcactgtgtcatgtattcgagctataaaagtcagtgtatttgggccgcagaagtcatcatgacagacgtagttcctactctgtggatgtacaattcatagattttgaggcatatctttgcccagacatgagaagactatcattttgtaaccgaacaatcagcttgaagccaaaacatacattttatcttatatttgcttctttgttttagcacccagccattataaattccacac

SEQ ID NO: 254994 - DNA, 225 bp, Homo sapiens
aacaaacaaagccttcatgtcagtaattttgtagacacgctcggggctaggtttgtggtaaaaccctgagaagctcccagtttagttcaattaaacgctttctccttgagaagatgacccttttctgttgaaagctgcactgagtcagcttgtgggtctttgagaccccaaaattcatagcttctctaggccctgggggctgcaccaggtggctttggggttgtt

SEQ ID NO: 254995 - DNA, 301 bp, Homo sapiens
aaagtgttgaaaaatcaatagatttgtcaaaaagctcaatcggcattagaactctcaacaacaacaaaacaaagagtattttacaggcttccaagaagctggcaggaggataaaaacagaatctggtcacatcaggtttggtgttaaaccttaacccagagaacattactgtacacaaaagtcctttgttatatttgggattctattttaattaaaaatagctaagcataaaaaaactttctaacctttttgtttctgagaagcctataatataaacataaaaattatacactttttgaca

SEQ ID NO: 254996 - DNA, 542 bp, Homo sapiens
agggcctttgaggataatttggtcatgagggcaaacccttcatgattggattagtgcccttataaaagaggcctggggaagcctgtcggttcctctttgctcttccaccatgtgaggacacagcaagaaggtgccatctgtgaagaagagagccctcaccaagaaacaaatctgctggcaccttgatcttggacttcccaacctccagaactctgagcaataaatttctgtttataataatttataaattgcccagtccaaggtattttgttataccagcccaaacagaccaagtcaggaggccagggaaatgtctgtgcctggatattcaagggagaccagctacggtgctttcaggggactcctccaaagccatgactggctgtctccagttttcctaattgggaaatgagccgcccaaggtcagacactgacacagcgttatcttagctcacattttaaaataaagatttcctctgttctaggtacaagagaataactgttccacgtgaagtatacttagaatagtaattaacttgatg

SEQ ID NO: 254997 - DNA, 209 bp, Homo sapiens
  misc_feature (122)..(122): n is a, c, g, or t
ggattgtctacaggaagtacatattcactcgcttcttcagggtctccagacctgtgggcaggcgagggcagcccaggtctagaacatgaccttgagaatgagaaggcttaaagctggaatcngtatgaacaagctcacttggacaacagacctgcagccacctgttccaatctggcttctatcagcaatcaaggtaataacttacaaga

SEQ ID NO: 254998 - DNA, 391 bp, Homo sapiens
gagtctgctaaaagttaaaaacattacatgagaactccttaaccattatgaaggattctttctactcttgagattcataattctgtgggttgctatagtcagtatttaccagcatgtctcccatctcacaatttggtactcttaggattctttggttcagagaatgggttcagattcccattctgtcaccagctgtgcaggccttggtcaagttacttggtcaagtctcagtttactcatttataaaatagggaaaataatacccacctcataaagattttagtattaaatgagataatatacgtaaaatgtttagtatggtaccatgagtagtgtattagtattatagtctttttgaaagtttgcttgctttaagggcgtgatgttttca

SEQ ID NO: 254999 - DNA, 118 bp, Homo sapiens
gaatgtgaacacagacacagattgtgcaaattggggtgcggctgttgagatgacaactattgtttctttagggagaagttctccaaaaaattcctccctgacctgtttgaggggatag

SEQ ID NO: 255000 - DNA, 416 bp, Homo sapiens
gctcatttcttgtcaactcttcttgctcctgaggtcaaggcaggtactgatggcaaatactgaggacagagggaggatcaagaagagaacactgaatggcctacagcaacctacagaaagactgccttgggatggaacgaacacaaactttttattcagaaggcaagacagtgcctccgatcaacagcttaacatctctaaggagactacctgctggcctgagccctgccctcgaatctgccacataacatggcctcctactgctgacacagtaaaatggaatgatccatctgtaaaaggtccataaggaaaaaagggaaggataaatttcaagttttaatttttatctaataatcttggcttggcaaaataaattcatagtcaggcttgatcaaccagcctgaaatttgaatatc

SEQ ID NO: 255001 - DNA, 419 bp, Homo sapiens
aacgttcagacgttgttagacatctaaatattcaacgttctacctgtataatgttacttaatatttttctttaagccaagtttaagttctttaaacttaaattcatctcaaggaaatctgtcattaccttaaattaaaaccagcatcatgatacactgtaaatgtagagtaaatgtaacactaaatataagtttagaaccaagtttgttaaattctacctagaaagatataagacagtgtagaagaaagctgccatttatattaaaaagaggaaaaggagcctctttcttaagacatctctggatgaatgtttaagaaactgatggttattgcctctgatgaggggaattagttggcttgaggacgaagtggatggaagactttttattatctttacccctttgtgtccttttaatttt

SEQ ID NO: 255002 - DNA, 426 bp, Homo sapiens
gggggtggttcctcgagggtgtgggcataggtaggaaaagggtggatgatgggaatgacacagaagaattagagggagtgacactgtgtataccttttgaatcgttctgacttttagaatcatgtgcatatttcatgtactagattaaaaattttttttaatgagaggaaacccaaaatagaatacaaacagaaataagtggcactaatagttttacaaatgatttatatacttccactgaaaagatgggggaactaacctaagaaactttggaaaacagtgtttttattgcatcctcaaaggctaaaaatgaaaagacgtatatacacatatcataccatgactagttggtcaatttttcacaagggtatgggtcactgattctgaaactattttacatgccttctggaactgagcaaatcagtc

SEQ ID NO: 255003 - DNA, 657 bp, Homo sapiens
  misc_feature (455)..(455): n is a, c, g, or t
gagatattagacaggaaatagaaaaactaactgctaattctcaagtgaaaaaactaagatggttctcagaatgtttatctcctccaggtggcagtgacaatttatggaacttggttgctgtgataaaaggacaggatgatagcttacttcctcagaactactgcaaaggaataatgcacttgaaacatctgattaaatttagaacatctgaagctcaagaactaacaacagtcaagatgtctaaatttggtggtggtattggtgtacctactaaagaggaaagactgaaggaagctgctgaaatccacttgagattaggacaaattcagagatactgtgaacttatggttgaacttggagagtgggacaaagccctgtcaattgcaccaggagtctctgtgaaatactggaagaagttaatgcagaggagagctgaccatttatccaggaagatnaggatgatgtcttccatacttgatatccattggggatgtgaaaaagcttattcatttttcatgtgaagaggcaacttaaaaaactctgttgttcacaagctgttgtgaaggaatattgaggccttacatggtccggcgctaaagagcttctattttgatgatatctccaaggaaactttattgtactcctgccaaatcatta

SEQ ID NO: 255004 - DNA, 402 bp, Homo sapiens
gcgcaaaacagaagagaggacgtacgcctctaagagcagaaagtcatgtgtacgtccatacataggatatacggaatatgaaatgttttggagggcccagtattcatgttttcgtacaataatctatatgtgataagcctgtatgaatttctttgatttcaataggatttttataagtcaaactctgaatgctccttaaaatgcacatatttcaacacactgcctttaaaagtttatgacagttaatatgtgggctatttactgcttatttaaatgttgaccaaattgtctactgtatctgactaatcatcatctcttttcattttggaagaaaaattattcaaataatttttaagacccaaatgactttggatttttgcaaagaggatgacagacagttta

SEQ ID NO: 255005 - DNA, 3018 bp, Homo sapiens
cggcaaaaaggagggaatccagtctaggatcctcacaccagctacttgcaagggagaaggaaaaggccagtaaggcctgggccaggagagtcccgacaggagtgtcaggtttcaatctcagcaccagccactcagagcagggcacgatgttgggggcccgcctcaggctctgggtctgtgccttgtgcagcgtctgcagcatgagcgtcctcagagcctatcccaatgcctccccactgctcggctccagctggggtggcctgatccacctgtacacagccacagccaggaacagctaccacctgcagatccacaagaatggccatgtggatggcgcaccccatcagaccatctacagtgccctgatgatcagatcagaggatgctggctttgtggtgattacaggtgtgatgagcagaagatacctctgcatggatttcagaggcaacatttttggatcacactatttcgacccggagaactgcaggttccaacaccagacgctggaaaacgggtacgacgtctaccactctcctcagtatcacttcctggtcagtctgggccgggcgaagagagccttcctgccaggcatgaacccacccccgtactcccagttcctgtcccggaggaacgagatccccctaattcacttcaacacccccataccacggcggcacacccggagcgccgaggacgactcggagcgggaccccctgaacgtgctgaagccccgggcccggatgaccccggccccggcctcctgttcacaggagctcccgagcgccgaggacaacagcccgatggccagtgacccattaggggtggtcaggggcggtcgagtgaacacgcacgctgggggaacgggcccggaaggctgccgccccttcgccaagttcatctagggtcgctggaagggcaccctctttaacccatccctcagcaaacgcagctcttcccaaggaccaggtcccttgacgttccgaggatgggaaaggtgacaggggcatgtatggaatttgctgcttctctggggtcccttccacaggaggtcctgtgagaaccaacctttgaggcccaagtcatggggtttcaccgccttcctcactccatatagaacacctttcccaataggaaaccccaacaggtaaactagaaatttccccttcatgaaggtagagagaaggggtctctcccaacatatttctcttccttgtgcctctcctctttatcacttttaagcataaaaaaaaaaaaaaaaaaaaaaaaaaaaaaaagcagtgggttcctgagctcaagactttgaaggtgtagggaagaggaaatcggagatcccagaagcttctccactgccctatgcatttatgttagatgccccgatcccactggcatttgagtgtgcaaaccttgacattaacagctgaatggggcaagttgatgaaaacactactttcaagccttcgttcttccttgagcatctctggggaagagctgtcaaaagactggtggtaggctggtgaaaacttgacagctagacttgatgcttgctgaaatgaggcaggaatcataatagaaaactcagcctccctacagggtgagcaccttctgtctcgctgtctccctctgtgcagccacagccagagggcccagaatggccccactctgttcccaagcagttcatgatacagcctcaccttttggccccatctctggtttttgaaaatttggtctaaggaataaatagcttttacactggctcacgaaaatctgccctgctagaatttgcttttcaaaatggaaataaattccaactctcctaagaggcatttaattaaggctctacttccaggttgagtaggaatccattctgaacaaactacaaaaatgtgactgggaagggggctttgagagactgggactgctctgggttaggttttctgtggactgaaaaatcgtgtccttttctctaaatgaagtggcatcaaggactcagggggaaagaaatcaggggacatgttatagaagttatgaaaagacaaccacatggtcaggctcttgtctgtggtctctagggctctgcagcagcagtggctcttcgattagttaaaactctcctaggctgacacatctgggtctcaatccccttggaaattcttggtgcattaaatgaagccttaccccattactgcggttcttcctgtaagggggctccattttcctccctctctttaaatgaccacctaaaggacagtatattaacaagcaaagtcgattcaacaacagcttcttcccagtcacttttttttttctcactgccatcacatactaaccttatactttgatctattctttttggttatgagagaaatgttgggcaactgtttttacctgatggttttaagctgaacttgaaggactggttcctattctgaaacagtaaaactatgtataatagtatatagccatgcatggcaaatattttaatatttctgttttcatttcctgttggaaatattatcctgcataatagctattggaggctcctcagtgaaagatcccaaaaggattttggtggaaaactagttgtaatctcacaaactcaacactaccatcaggggttttctttatggcaaagccaaaatagctcctacaatttcttatatccctcgtcatgtggcagtatttatttatttatttggaagtttgcctatccttctatatttatagatatttataaaaatgtaacccctttttcctttcttctgtttaaaataaaaataaaatttatctcagcttctgttagcttatcctctttgtagtactacttaaaagcatgtcggaatataagaataaaaaggattatgggaggggaacattagggaaatccagagaaggcaaaattgaaaaaaagattttagaattttaaaattttcaaagatttcttccattcataaggagactcaatgattttaattgatctagacagaattatttaagttttatcaatattggatttctggt

SEQ ID NO: 255006 - DNA, 272 bp, Homo sapiens
ctactgcctaaattggcaaagcactccatcgatcagtgataaatgtggtccttgggagactgcttttatgtttgtttcactcatgggaaaatggccacaacccttttgtaagattcctcggctgctgctctccccaggttacaatcatagtaactgctgcttctgggatgcctcgctgtaatcctcatgttcaatgatggctcaatggatatgtgcttgaaggagagtgagtgatggggagtctacagttatgaataaaatatattcaagtc

SEQ ID NO: 255007 - DNA, 694 bp, Homo sapiens
tagagctagtaaaggtacctaagcttctgggcaggacaccaacagcaaccactccaggaggcgacatttaagcagagattggaatgacaagaaaaagctggtcacaccaaatacagaggaagagtgagcttggcaagtctagggcctagaagaaggtcaataggcctgcactgtagggggtgaagctctagagagagtggtatcagagaccaatcacacagaactttgtcagcccagaaaggctttcaaaagacattggtggttttaaatcggggcacatgattgaattctggatttttctgatgtgagcccatctctggcctgaagttgccttccatttatagtgtgatactagtgtaaacaaaaattatgggaggccattttttaggctgagctctagcactaggccgcaacagaccagtccaaaccaaaatgaagtcactcatgctaaatgccacgtaatcaaactgaaactttaaggaaacagatacgtccccacagccctatatttgctgaaaacaggagagattccagtctacctgagttggcataataatgaagtcccctctgtttaacccttatcaaaaaagtaacctgaaattgaccaatcacctttttttcttgttctgttttcttgtccccaccttgcaaaacccaccattctgccattgcccagagtgggggtggcggtggg

SEQ ID NO: 255008 - DNA, 794 bp, Homo sapiens
tcaggtcaggatgggcaccgtgcgcccacctcgcccctcgctcctgctggtctccacccgggagtcttgtctcttcctcctcttctgcctgcacctgggcgccgcctgcccacagccctgccggtgccctgaccacgcaggggctgtggctgtcttctgcagcttgcggggccttcaggaggtccccgaggacatcccggccaacaccgtgctcctgaagctcgatgccaacaagatctcccacctcccggacggggccttccagcacctgcaccggctcagggagctggatctgtctcacaacgccatcgaggccatcggctccgccaccttcgcgggcctggccgggggcctgcggctgctggacctgtcttacaaccgcatccagaggatccccaaggacgccctgggcaaactcagcgccaagatacgcctgtcccacaaccccctgcactgcgagtgcgccctgcaggaggccctgtgggagctgaagctggaccccgactctgtggacgagatcgcctgccacacctcagtgcaggaggagtttgtggggaagcctctggttcaggctctggatgcgggtgccagcctctgcagcgtcccccacaggaccacagacgtggccatgctggtcaccatgttcggctggttcgccatggtgatcgcctacgtcgtgtactatgtgcgccacaaccaggaggatgcccggaggcacctggagtacctgaagtctctgcccagcgcccccgcctccaaggaccccatcggcccggggccctagcgcctgttcc

SEQ ID NO: 255009 - DNA, 146 bp, Homo sapiens
gaaaaagaaaaacctcacatgggtaaaactgttaggaaggctcttatctcttcactggtcatgaaatcaacttagtggattatgactagtattttttaaaaagtgatgtagaatagggctgggcgtggtgtctcacgctggaaatc

SEQ ID NO: 255010 - DNA, 422 bp, Homo sapiens
ctaactcggggtataatagtagtcttttatattcttgaagttgattttaacagaaaatatgatacatgttatttttagcacctatagtaaatattttgaatttatcctagaatttaagtatttctagagtgttaaagatcatgaggcacaaaagctctattgaacctagcaatttagtttgatcccacccacttgttctaatctcttgtgctcaatattctactcacagatcaaaatcaatgacctagaaaagatgaacccaggcatcaatgtagacagacagtataaaacaagaatggaaggctaaaatggtatgctaaaatgaatacatttcatttacatatactaaagatgaacacagactaattttgtatgttgtcatatgaaatttcttagtgttagtgtgtcctctgttagcctct

SEQ ID NO: 255011 - DNA, 3771 bp, Homo sapiens
cagtctgctgagtctaggctgttttcctcagcactgactgcatggcagctgtgtgctcagcccgcacaggcaggctgtgttgtggggtccagaggggctgatacatgtaaagttgatggaatatcctgctcaatggtgaatacgacctaagtgttagctgctgttatctcctttaatccatacaagaaccctctgagggaggtattatccccattttacagaggaagaaactgaggcccagagcggggaagtggcttgctctgggtcacacagcaaggacttgctggagccaaagcttctggcccaggggcagtgcccttccaggcagaagcagctgaaagccttgttctggcattgcagcccagtgtggaggggcgagacttggggtgctgagagggcctggctcccttcttggtgggctgggagcctcagtgtctggcaggtggctgtgctgggcttgtgcatttcccagccatgtctggttcagcccacagaccccggggctgccctttgcaggtgtgagtcaatgtgggaacccaggacattacggatagcccctgggctgccctcaccccagcattttgggtgtcccttgtccctgtgtcactgtcactcccctcaccaggatgattgactgggtgtcctggcccctggggaagaatattgacaagtggatcattgcactgctgaagggcctggctgctgttaagaagttcagcatcttgatcgaggtttcgctcaccaaaattgagaaggttttctctaagctgctgtaccccatcgtccggggagctgccttgtctgtgctcaagtacatgctcctgaccttccagcactcccacgaagccttccacctgctcctccctcacatcccccccatggtggcctctctggtcaaggaggactcgaactcggggaccagctgcctggagcagctggcggagctggtccactgcatggtgttccggttcccgggcttcccggatctgtatgagcctgtcatggaggccatcaaggacctccatgttcccaatgaggaccgcatcaagcagctgctggggcaggatgcctggacttcgcagaagagcgagctggcgggtttctatccccggctcatggccaagtcagacacgggcaagattggtctcatcaacctgggcaacacatgctatgtcaacagcatccttcaggccttattcatggcgtctgacttcagacattgtgtgctccgcttgactgagaacaactcacagcccctgatgaccaagctgcagtggctctttggcttcctagaacacagccagcggcctgccatttccccagagaacttcctctccgcatcctggacgccctggttcagccctggcacccagcaggactgctcggagtatctgaagtacctgctggatcggctgcacgaagaggagaaaacgggcacaaggatctgccagaaactcaagcagtccagctcgccctctccgcccgaggagcccccggccccaagttcaacctctgtggaaaaaatgtttggaggcaagatagtgactcggatctgctgtctctgctgcctcaacgtctcctcccgggaggaggccttcacggacctctctctcgccttccctcctcctgagcgctgtcgccgccgccgcctgggctctgtgatgcgccccacagaagacatcacagcccgggagttgcccccaccaaccagtgcacaggggccaggcagggtgggtcctcggaggcaaaggaaacactgcatcacagaggacaccccccccaccagcctgtacatcgaaggcctggactccaaggaagctggtgggcagagcagtcaggaggaaaggatagagagggaggaagaagggaaggaggagagaacggagaaggaagaagtgggggaggaggaggaaagcaccagaggggaaggagagagggagaaagaggaggaggtggaagaggaagaagagaaggtggagaaggagacagaaaaggaggctgagcaggaaaaggaagaagacagcctgggagcggggacccacccggatgctgccatcccctccggggagcggacatgtggctctgagggctcccgctccgtcctggacctggttaactacttcctgtcccccgagaagctgacagcagaaaaccgctactactgcgagtcgtgtgcctccctgcaggatgccgagaaggtggtggagctgagccaagggccgtgctacctcatcctcacactgctgcgcttctctttcgacctgcgcaccatgcggcgccgcaagatcctggatgacgtctccatccccctgctgctccgcctgccactggctggtggccgtggccaggcctatgacctctgcagtgtggtggtgcactctggagtgtcttcggagagtggtcactactactgctatgcccgtgagggcgctgcccgccctgccgcttctctgggaactgccgataggccagagcccgagaaccagtggtacctgttcaatgacactcgggtgtccttctcttccttcgaatctgtcagcaacgtcacctccttcttccctaaggacacagcctatgtgctgttttaccggcagcggcccagggaggggcccgaggctgagttgggctcttctagagtccggacagagcccaccctgcacaaggacttgatggaagccatttccaaagacaacatcctttacctacaggagcaggagaaggaggcccggagcagggcggcctacatctctgcactccccacatctccgcactgggggaggggctttgatgaagacaaggatgaggatgaaggctctccagggggctgcaatcctgcaggtggcaatggtggtgacttccacagactggtcttctaatgtgaacctgctgccaacctgaccccttccctccaggagccaggtagggcctgagggaagctgtggaggcaggccctaccaagaggaaggatggtacagctcatggcaccttagtcctcagcctgatgaagggtacacagagattctctcagatatggaagtaagacctaagtccctttcattggggatcagtcccattaaaactttacacccaagtgtcctggttaacttgaagcagccgagatgggcacacacgggtctttgcctccccctccttccctagcaggctccccatgcgggaagatctgatgatgttcaggaaacaggctagacctcagctccaatgttttgacatcaagtactattttccttccgactgctgtacggtataaagcacagcaggatccaagccttgcacaaaggggtggggggggcagtgtctcctctggctgtcctgtttgtttgtttctcatatgggggtggggggtacctgcactgtctgtacctttctgagaagaacagagaccgagacctgcccccttaccaagcgccactgcatggtttgggggggggggggcggggggctagcttctcacagcaggaggcctttgcccccacagcccctccacgcctgcctcagggcctgagaagccaccacttgtatcccccttgtggttagagtcctgattttactgcaaaggtgttcatgttccttgtgaagtgtgggctcttaggaagcctgtgggctcctctgagcagttggcctttgtagctgcaacagcagccacctgcaggttgggtgaagtgccctgacactgctgtagcccccttctaacttctaaccgaagacaagacagacacccatgttcataaataaataaaagtaagcctaagc

SEQ ID NO: 255012 - DNA, 520 bp, Homo sapiens
ttaagttcataacagttcagaatcttgcaagctcacttcaggtataacctgtgtctccaaccctgcagtatttggatattgctgtttaaacagtagatttggcatagatgatggtggcacaatggttgtaaaggaaaagaagcagaacacctcagtttgttcaattctctcattggggttttcagttgtatccagaatttaaaacagtaaaatttaagagtgtgaacagcaacattcacactttgtttagtaagtacaaagttgtgctcatacaggaagtttactgactttgaataataactttaaaaacaaaatttactcttttctaagtgttaattatttgttttaaaatttaagaatgaatcaagaaataaaacattacaccagtggtatgatttagtaattgtctgacttatactttttgtagacattttagttttatttaaattggcattctgatttttttactggtcttgagtctatacacaaaagttgaataaaagaaaagtttcactgacta

SEQ ID NO: 255013 - DNA, 410 bp, Homo sapiens
actccatcaccatgcctgagagtgtccaatcgtctctgcgggggccacatatttttgtattacactgtatttgaaataacaacaacaacaaaaaacccttcaagattcataaaattggacaactgtctttgtaacacttctagtggtaaaaccagtaaggatggctagtttgcaacccatctgagcagcctctctggtttcatagatatgttttctctctgacattgaatggctttcaacttgaaacggaatgctacatcacaaagataaacaggtttgaaaggaaccggttttccttgtaatcctaaacgttcaagtctgcgcattaaaagacattatctgaagaagggtgcacaagcttcctgttggccgccagaagggttctctgcaggacacagatcaagtaccac

SEQ ID NO: 255014 - DNA, 307 bp, Homo sapiens
tgaattcctcaccgactgccattatgttggtgtgtgggaggcagatacatgcaattgcctccctcaagtgtctgcaatgttgctaagtgttcactccccaacagattttttttgaatacctagttagtgcagggtacaaaatttgcaccctgtctacaaatgacagcggtaacaagaaacagcgtggtcagtcttacaaacaatggggccaatcatgtgccaagggatgagcattgagcaagacatgattttgaaaactcaacaaattcaaagctggtgtgaacggctctgcttcctggaagccatt

SEQ ID NO: 255015 - DNA, 513 bp, Homo sapiens
tcattcacaaagcctccatgagtataggagctcacactaaagcaatagttaacatttataactttatagagtgctaactcgtttgttacatcattagatctgtacatcagttcttttgtgagaatattaaagctcagagaatttttaactttttattttgaaattatagcaggcttgaaagttgcaaaactagtacaaagatttcctatatacctttcatccggattctccattgttaacattttaccatgtttgttttatcattctccctctgtataatatgtactaatttgttctgagctacttgacagtaggttatagacatgatgaatacttcagtgtgttatttcctaaaaacaaggaaattctcttatacaaccacaattataatatcaagatcaggaaattaacacagatatagtactattatcttatttaaagacctgtaaattttgctagttatcccacagtatcatttattttaaaaataaataaaaaaatgtatttttcaga

SEQ ID NO: 255016 - DNA, 377 bp, Homo sapiens
cacacaaatagggacagttttactttctttccaatttttatacctttatgactgttattgtactatcccagaccttcagtgacatgttgagtagaactgctgcaagtagacatccttgccctctttaaatgtgaagtggggggaaatgttcaatgcttcaaaacttaagttaactgtaggttttttaataggtgtccataagactgagtaaattatttttttagtttgctgaacgttttttgtttttattgtaaatgagtagtcaagttagtaaaatcttatttagcatctattgagataatcatatagtttttcttttttattttctgaatatggtaaattatgttgattaaaaatttttttgttgtaaaatgtaa

SEQ ID NO: 255017 - DNA, 687 bp, Homo sapiens
cctcaaatatttatctattgagttgcatacaatggaattacactctttaagttatttaaaaatgtacagttaggttattcttgactatagtcagcctgttgtgctatcagatagaaggtgttattcattctttctatttttttgtacccattaaccatctccaccttcctcccaaaccccaccacccttcccagtgtctggtaaccattcttcttctctctgttcatgaattcaatatgttatcattctcagtctctatggaaaaaacacaggtagagagtagataccttcaatcctactttcctaagggttttctaattgtgttggggtggaacaggtgtacttcgttttgaactaaactaaattaacccaatttcttctgggtcactcttttatatacaggcctgacctactttatgaattctgacaacagtcatgagtgaatgtgtatgcacctatgcagtttgtatgtggagggggaagtaaactaacatttaccgagtcaagattcatggcaaataattgtatttatttgggggacaagactagggaaaagcaaatgagacacttgctttaagctcaaaatttaagggggtgccaaaaaactcagtaatcacaacaaatcatagtttagtgcaatatttttaaaaaatcaaatcaaggccaggcttggtggctcacacctgt

SEQ ID NO: 255018 - DNA, 286 bp, Homo sapiens
actcaaaactctgaaacagctttgcagtgtttccaatgaaaagagaaacactattttgatgttacaaatataagaagtggggggtctgaggcactttacttttattatttcatttcactaggtataagaaagatggtcaagtgggagcttatgatttggggataaattagaatcagtttcattattataatttttatcttgagaaatgtattaactatcatttattatcttgagaaatttacatctcaaagctagaaatttacatatctgaaaatcacctaactgt

SEQ ID NO: 255019 - DNA, 430 bp, Homo sapiens
tcaacccacttgatcttcctgttctcatcccacatctttctgcaagtcttctctaggagctggctacagggtcttcccagaacagagcccacagttcaggaaaccctgcctcatctccagtgcgaggacggtgacagagaaggggcagagcagactgagatgaaacaagttcaaacagcttacgaaaacctgggaatccaagcagatatctgtccacaaaagcagacaacgtcaactgtatccgattcacatttagaatgcatacatgtttttataaatgtacatagctctacatatgtcaaatatcagtgttaaatttttttagtatgagaatcctgttaaaggtaatagctcatggatcctactgctatatatatttctggactaataaagaaagaaataatcgtattgaaagcagatattgtacagt

SEQ ID NO: 255020 - DNA, 581 bp, Homo sapiens
tgtactattgctttttcactgaattaaactgatttttacagagtgactgctataatcataacactgggctagactactgtgattaatacaggtaagtaaagacggttttaaaattatgaacagaacttagtcctagttcacagtctctaaactggtaggggtgtgtgtgtgtgtgtgtgtgtgaaactacgtgacaaggattatttacacaccattatagaagtcacactaattaaatctaatgaaagacatgtattcagttttgatattttccgtaagagtcaggcaaaagttcccaacaaacttctaaatctataatcaatccaaaggaaattataaacaataggctttgtatagagagagtaggtggatcatattaggcaataatcacatagttgatttcttactataaattatgatttatgtatcataaatagcatacaaatgtttgttaaatgaatgagatcttacaaactattactgggaaaatctttaattggcagctcttctctgatacggggactccaagggtccttggaacctggggactggggacttcctgattattttcaagtagaagt

SEQ ID NO: 255021 - DNA, 275 bp, Homo sapiens
gttttggcttctgtgtgtgagttttcaatacaatgtttcaaaggccagagcagctttccctcctcctcagggagtgagccagcatccaggtgtctctgaagaacaatacctacccttgactccccaggtggctttgtgatgctgagcctcacaaagacagggaggtcttgtggaagggaagccctcagccctcagccctcagccctcagggtgctgactggggtgagctccaggaaaagcttgcctaattctcacctagaaaaacagagctcttc

SEQ ID NO: 255022 - DNA, 405 bp, Homo sapiens
atcgctatcctgataatatcctgtttgagctatgctttggtatatggaactacactaagctttttaaaagaccgtcattaaattaatattcattgtatgactttaatttaaaaaatatagaattctgttaatatcaacaatattattcatcataatctatcttttctcaacttcagcagaactagcagcaattgcattaaaacttttctagcccttacaacattgaccatgattttgttagttccacgtctctatcatcaacattatcacattctatcacaaatgtttatgggactgcctgaaatatgcaccatgtgatgtgcgatgtaaggcttaaaattaaggcccaatattatgtgctgcctcaacatttagtgaaatccgcagggccatgaatggcctaac

SEQ ID NO: 255023 - DNA, 462 bp, Homo sapiens
aagaacttggtcaagatggggaatcttgggtcaggaaaatttggagacttacttgaagagaatatttgaaaaagattcaaagattttgaactatcagggtagagggaaattgtttctggtggttaaaatggtaggaagtggctttcaaatctgaaaaaatctaaatgttttaaggtgttccaggcactgtggttaacaatttatattccttttcttatttagtcctcccaacaaccctgccaaagaggtattattattcccctttgaagtgaggaatcttagtgcattcaaaaacattcatctactatttattgagcacccatatttctaagtgctgataatgtagttgtgaacaagacagcttatattttagaggagacaggtcattagcaactcaacaaataagtagcataattttcctaggaaaatatgttgtgcagaaggtaaggctaggttacaggt

SEQ ID NO: 255024 - DNA, 304 bp, Homo sapiens
ctccatgaaattttttttaactaacaaagaaacaaaacataatcatagtaggctaaattgcccagcggtgaataatatatccagaggcataaacaaagtgtgtcgatttccaccaagcccagcataacatgggctttcctctttatggtccaagatggctactttccagccgtcctgcctgcactccagccagcatgagtcctctttgttccagctatcctgggtttcttttggttaactaggaattgaattaatgaaattcaattagtaaattaaagcattaagttaataaatgtttgaatta

SEQ ID NO: 255025 - DNA, 286 bp, Homo sapiens
gagtctttgtcacctgcctgaatgctcctgatgcctcctaggccactggggagagctgtgcttgtcccacgctctggcacagagtgtctgtcccgagtgcttcctctaaacctttcctgtgcagaagctgggacaaattctgtgcatcctggtgcagaacacacctgttcagaaagtaactgggtggtgaggagtttcctttgcaaataccatttgtggccatcaagaatcactaaatgacattttcttccggaatgtacatattacaattcatcttcaaaaggca

SEQ ID NO: 255026 - DNA, 440 bp, Homo sapiens
agagccatcagcacagtcatctccctaataagccttgagagtgttgtcaaagacacttctggatataagtaagaaaccattgagactgagttgtatggttaaacagcacagtttttagggagaggcaaaggcaactctgtgttcagctcttagttctgacacttatgaactcagatttaaattccctgagcctcagtttccctgtctgtaaaatcaggataaaaatttcttgctcaaggccaacaaaaacaagcaatggggtaaaggactccttattcataaatggtgctgggatagctggctagccatatgcagaagaatgaaactgaacccttacctttcaccatatacaaaaattaactcaagatggattaaatcgaaatctaagacctcaaactgtaaaaatcctagaagaagtcgacgcggccgcgaatttagta

SEQ ID NO: 255027 - DNA, 583 bp, Homo sapiens
gatcatttttttattgacacactttttctcaaatatgacttgaaattttaagtctcaagggaatcggttttctgttaatcattaccatagttagtattattaataatataaagaagtttgttagtatgtttacttcactttaaaggagctctaaaaggcagaaacatttgaataagttatatattaagtttttcaccaacattttgacaattaaaaaatttaattacataagttaaggcaagccgctctcttgacagtacctcccatctctaccctcactgccttcacctcagaagagccaggtctatttgggacaggtttacaagggcactaaggaaaagaagattgtggtttacgtaattgctttacaagtagatttggattttggctacccacgctctaaacttgggcatgattgtaaagttatataccaaataatattttgcagtattaactgtgcatttgttataacattattattgagtttacttaatatttttcccagtgattcctactgcttgagttttatagatgtcttcattgtttagactctgaattagcttacattcctaaacagaactgt

SEQ ID NO: 255028 - DNA, 455 bp, Homo sapiens
aaatatttagttaacattatttttgaaggagtagcttaaaatttatcatttaatttctaatacagtaaatattggtaagtataacccacataaacaaaagctcattgagtaccttaatttttaagaatgtaaagggatcctaagaccaaaaacttgagaactgctctaggtcatgcacagaggtggctttctatattttgactttgatctaataatacattaaagtcaggtaaagagataactactcaacattgtcttaataaaacatagacatgacattaaaattctggcttatacagactacagtaggaaaaaagctgatataaaaactgcaggagctcacatctggaaaagcatagtaaaaatgcccaaatctagcaaaaagccatacagttaaccctccatatctgtgggtgctgcatccataaattcaaccaagaatcgaaaatatttgg

SEQ ID NO: 255029 - DNA, 494 bp, Homo sapiens
cgagcccgggagggcgcgacaggggcgaggcgaccccagtccagaggctgacttcctcaccgccctgggtcccaatcctgatctgggctaccctatctgtgcttctggtgaggtgggcccagaaccatcgtgtgaataatgattgacctcagctagtggttctcatggagtgattgattttgcttcccagaggacatcagcaatgtctggagacatttccagttgtcactacttgagaggaagcgtgatcggcctctagaagggagagaccagggatgccgctgctcaatatcctataatgcacagaacagcttctacgacaaagagttattccaccaaaaatgtcagtagtgccaaggttgagagaacctgctctagggtaatcagtgtggtcccaatctccctgtcagtaactgattcaactcacataataatcttatgggagtgtgatgtaattctagccaataaaatgcaatgggaagttggccgagata

SEQ ID NO: 255030 - DNA, 578 bp, Homo sapiens
atggggcgtccttactcccagtctttccagatgttcttcccactcctcaactgctcctggctcagaaaccctgcacacctggaagaaagtgagaaccagtttttcaacaaacacattgcacagacttattgtgaaccccgggtggaatcaagcatcggaggaagagaacgtgggtcttgctgtgtccctaggctggagtgcagtggtgcagtctcaattatgccagatggctctgaggtccaagtaaaagataatatttgcaaccaactcactggagttgaccatcaaaactcttttccaggtggaaaagcaccctgaatccagcttcctgctatgaatgaatactgagcttgggttggtggaaattgattttcgagataaagaatccagccaggactgtgaagccccagggaatggctgcacttcaagtcagaaggagcctgggtccctgaatcatcatgtggaaggctctccacccagttcaatggtgcaatggaccacaagcaggaacttaatttagaatgtgcttattttgttagattttgtaattaaaaaatggatcccactctgactgaaaa

SEQ ID NO: 255031 - DNA, 676 bp, Homo sapiens
atggggcgtccttactcccagtctttccagatgttcttcccactcctcaactgctcctggctcagaaaccctgcacacctggaagaaagtgagaaccagtttttcaacaaacacattgcacagacttattgtgaaccccgggtggaatcaagcatcggaggaagagaacgtgggtcttgctgtgtccctaggctggagtgcagtggtgcagtctcaattatgccagatggctctgaggtccaagtaaaagataatatttgcaaccaactcactggagttgaccatcaaaactcttttccaggcacactcaggcatcgcagaaaataatatgtattgtggaatccctcacttgatgaataatctagatgatcagaaatgtggcactattttggctttcaggtggaaaagcaccctgaatccagcttcctgctatgaatgaatactgagcttgggttggtggaaattgattttcgagataaagaatccagccaggactgtgaagccccagggaatggctgcacttcaagtcagaaggagcctgggtccctgaatcatcatgtggaaggctctccacccagttcaatggtgcaatggaccacaagcaggaacttaatttagaatgtgcttattttgttagattttgtaattaaaaaatggatcccactctgactgaaaa

SEQ ID NO: 255032 - DNA, 406 bp, Homo sapiens
aaagccacatgtggactccagccccatgcctaccaaccgtcttgtcactgtcactcggagctccttcctgcccagcggatgtgtccaccctctccttcttcctctaatgttcttcctgtcattgttcccatacgtaactccctcccatcctgtgttccagtgtagatgagcccattgcagcaaagcctttgtgtaccagcctctcatagagaatccagccaggactgtgaagccccagggaatggctgcacttcaagtcagaaggagcctgggtccctgaatcatcatgtggaaggctctccacccagttcaatggtgcaatggaccacaagcaggaacttaatttagaatgtgcttattttgttagattttgtaattaaaaaatggatcccactctgactgaaaa

SEQ ID NO: 255033 - DNA, 675 bp, Homo sapiens
gcaatacacctacctattagtctttattgaaagagtggatgtttaattcccattaattcatacttctataacaagtcagccaatgtttagaggaatttcagtggagaagaaatagctttatgaggtggtggctgagaaagtcaacattgacttttcacttgtttccttcctaagtgacattttggcaggagtaatgaatgagaaaattccctgttatatttaaaagttgacatttttagggcaatttgagttttctatatattatgcatgtttatttcttataatgtcttacaattttaatagaagaagttaaaaagtatgataggctacaagtatattactgaattaccaccacccgtagaagagactatatagaccacttcaagatcctggtctaaaccattgggcttagccttttttctctgtccttgcttctgtcttcccttctagaagagtttccactacgatttgaatatatggcatatgtttagcaatctctctgtctgtattggtctggtttaatccctagatgcttcctttggaagcataactacatgcagcacacaggccaacaccacatcacccttgaactcaccccaaaactcatccagaatctcagcttatgtatagcacctcaagcctatgatgttacaaaagggtctttctgagatagat

SEQ ID NO: 255034 - DNA, 125 bp, Homo sapiens
cccccccaccactccccaaccccagcgttcaaatgactcctgtcttcagctcaaatgttacctcctccaagaggccttccctgattttcctgtttcaagtagtcttccctgcactctgtcattat

SEQ ID NO: 255035 - DNA, 178 bp, Homo sapiens
actctcttacccaagctggagtggaatgtgatcatagctcactgcagcctcaaggctcattcctaggcttaagtgatcctcttttttttttttttgctagagataggatcttgttatgttagccaggctggagaaatttcaacaatattttgaacaataaaaaaaaaataaattaggt

SEQ ID NO: 255036 - DNA, 396 bp, Homo sapiens
aggaactattgtgcctgatctaaagctagctggttcctgtctgttcccagcctagttcttcaaaacttcccttcaaatccttgaaccccccagcatcctttcaatacattatcttttttcatgggcttgcaagagtaggtgcttgtaacaaaaccacctcagctaatgtgggtccatgatgccaatcacctcattctaattgtagtggcagcagatataactctggaatttagagactaagccttctacgcaatggagctgacatggtatttggcacattctaagggacaaggctcatgttcagggatggggcctactgatttgtatggaaatgacaactcatgcctgcaaagtggaaaatcaataaaaattattctgcaaccccacaaaaagtcc

SEQ ID NO: 255037 - DNA, 576 bp, Homo sapiens
caggctaattgtttatatgctaattgtttatatgggttagtcttaactcttttttcgacaattttataggatcttagcatgctcatatcatgtctcctactatttgggtctcttcctactgtcatattgcttggtacattgataggtgctagtacctaaagccttacctaaagccgatgaaactgttagcttagttggcttcttccaggtttgtctttatttggtcaccctgaaagcctaagtgtcttgcaaatactatctactaggtttgttgaatatctcattttgttttctataatcaataacaatgtaagcttggatgcaattttttaaaagtactttaaaaaccttaactctcagtttggatacttgtcccctagctgacagaaataccttggcaaagtagctaaagtcagccctgaagctgaaatcagctgaggctggatagtttaaatcatgcttttcctcttctcaaaagatgatagggaccaaatcaaaatctcaacagtaatttaaattgaactttccaagtagatttctagaattcatatgaaaaagtataataatttggagaaa

SEQ ID NO: 255038 - DNA, 410 bp, Homo sapiens
  misc_feature (359)..(360): n is a, c, g, or t
  misc_feature (391)..(391): n is a, c, g, or t
  misc_feature (405)..(405): n is a, c, g, or t
gctttatttacctcatgctcaatggccagagaatctacatggaaacccttaagttcagcgtgactttcaccatttttaagcacgtgcagcaaaagttcacctgtgtccagccccactgtttggcctgggcacacctaccgactctaccattgtaacatcagaatgataccatttctgtaaagtgacatctttcagttacctggtggcttttccatatatgcaacctcgatggcctgggtaatgtcacaagtgtttgtaaagttgaacgtgaagatttaaacctccttgatttccatgattgtgtagggttttctgggtcaagttgagttattgaacgtttccacaaatcacctccggcnnaggatccaaaattcctcaagttagtattatnatcaaccccgggantcccg

SEQ ID NO: 255039 - DNA, 299 bp, Homo sapiens
ctctgctgccgggccacacccgccaaccccgctcttggagcctctgaggtccggctgggcgtctagctcgcagttgaccccccgggagaggatcggcgcatccggccgcccgccagctccagacgccgggctccgcagcgccgctgtcctagcaccagggcccggcaagcaggggaacgggaccgccgggaccgatcaaggcgcgggcgcccagcaagagccgcgcccggggtctgcgcgccgctcagcgcgctcgcctttccgcccgcgccagggctggctgcgcgcaccctgagcgc

SEQ ID NO: 255040 - DNA, 584 bp, Homo sapiens
tctatgtttctcctaaaatatggtgtcaggaactgaacacagtattccaggaggagtcagatcagctgagagcagaaggaagctacttgtcactagctatccccatcccaggaatcttccattccagctgctaaatgtaatataaattcccatgctgcatggggatactgcttttcaatgacacgttaggttagtgtcaaagaataaaaagaaatacaagagacccacaagttcaggaaacaatcttgacttatcaattcactgcattctaaatccttatctatcaaattagcatgcacccaccgctcctaaggcttgtaggaaataacattgtcaactttaaagaatagtcataaattttattatctttcacaaactcctggttggttcttttagaaatgtgtgtttagggagaaaaacaaaggtattgatgataggtcagaattatgttctttgatgtcccgagaatgtgggaacttatctcccacagaattcaggtgggttttttatttgtttctgaaattatatcatgtttccactttggtagtaaaaacaataaattgatttcttttggaaattgtcta

SEQ ID NO: 255041 - DNA, 466 bp, Homo sapiens
gacttccttgcctgatatctcagatcatgaagctacagttctctccctgctttagagaaaaaaaaaaacagactttttgcaaaaatcaattattgaacatattcctatattctagatttataatgaagcatttttgtacatattcattaaaaagagcaattagaacatttttctctggtttatagtaactaggatggcaacacatatatatcttggaagtattttgtggtatgattcttcaacataaaattatttttcaaaacttcttagaagtctccaggtactcaggaataaggtcattttaaattattccttattgactataagaaaaataattaggcaagatcacaaaataaatgtttagactgtttctcctgtttcctgattttcaggttattttttatcccaattttattttgctgtatagtcataaatttcatctttgaaataaagcatataatcactt

SEQ ID NO: 255042 - DNA, 405 bp, Homo sapiens
gatagtctcttcaacacatggtattgagaaaatcagatatccatgtgcaaaagggggaaactggacttttatcttacatcacatacaaaacccaactcaaaatggattaaagatttaaacataaaatctgaagctgtaaaactcctagaagaaaacataggcgaaaagctctttgacattggtcttgtcaatgatttcatggatatgacccccaaaacacaggcaacaaaaacaaaaataagcaaagttacatcaaatcacaaagcttctcacagcaaaggcaacaatcaacagagtgaaaagaaaacctatgaaatgggagaaagtatttgcaagcgatgtatgtgataagggttgacatctaaaatatgtaaggaattcataactcaatagcaaaaaaaaaaa

SEQ ID NO: 255043 - DNA, 386 bp, Homo sapiens
aaaggctccaggcttcggtatcatcccgtggagagtgacggtgcctgcttcgcgcagtctgtctgagaatcaagtgagatgagagacacaaagtatctaaaaatctacttttctaccggtgcactttcaggtttattcaaattacagagaatgccaggcgtgattctccagccgagtctatgaaaaacaagaaaaagaaaagcttagcacttcttaatgtgtgcgcagccagacacaatgacaggcttgatgttttctctgtgaaatgagttatgagtcatctgactcatctgacaagggaatctgttgagatggaaaaaacaaaatatatgagtgatcagtgatgcaaataaagcaacaccgtcacgggccttgccctggaaaaa

SEQ ID NO: 255044 - DNA, 351 bp, Homo sapiens
tatttatttttttgagatgggctttcactgtattgccaaggctgacctcaatctcctcaagcagtcctcctgcctcagacttctgagtagttggaccacaggtgtgtgtgtgccatcacacctggcttaaaaggccctaattttaaaagaatgggcattgttgtgtaaaatgtaatttatagcaaagttgctatgccatgcaataagtttattcaaagctctccagctaaattagatttcttttttgaaagctgactgataatagaagtaataagtctgcaatcatttttcttttttaaggagatacataattgggtagttgagattattttccatgtatccattgctttt

SEQ ID NO: 255045 - DNA, 532 bp, Homo sapiens
  misc_feature (318)..(318): n is a, c, g, or t
  misc_feature (365)..(365): n is a, c, g, or t
  misc_feature (416)..(416): n is a, c, g, or t
  misc_feature (425)..(425): n is a, c, g, or t
  misc_feature (435)..(435): n is a, c, g, or t
tggccagagtgagtccccagcaccgcaacatctgcaggagatgatgctggtggaagaggtttcccaagcctttgaagggaaaggtgagaactgcctaaaaaatacagcacagagaaagcaagatttctgcaattcatggcttgatacttgatattccagggaatttttttttttttgtctgagactatggggcaagaaaaatgccagcgttcaaacctgggagaatgataagtgttcagcgtctgcaggggctgcctttatctgctcttctagcccaaatgggagttgtttcgcttttttttttttgagactgggtancaagagtgaaactctgtctcaaaaaaaaaaacaaaaaaacaacttcntgtctgggcatagtggctcatgcctgtaatcccagcactttgggaggccanggcaggtgnattgcttgancccaagagtttgagaccagcctgggcaacatgatgaaaccccatctctattttgaaaacagaaacagccaggcacggtgactcacgcaatgctagca

SEQ ID NO: 255046 - DNA, 527 bp, Homo sapiens
gtttcccagattcgtcacaatgcctattgtcctgtccttctctttcctttttcttccccattttgccatctgtctcttatgatttataaggggaaaaaaacttgttttgttagaggggcaggttagaagtcattgtataatttgtaggctttgtaatgattgaatgcaagcgtggaaatttaggctgaactctctatcaaaaggaaaaatgtggaggaaaagggaaaaatcaggagggaggattgcctcatgtattatttatttcgaccttttaggggagaaggaactcccccattctttcaagagattaaaaataaatcaacagtctgaaaacctaagcagacacggagcattatccggatcagccacacacgtgttcccttctatttattataaagaaatttttcatgggaaaatatgtattttttgtatattctacagagtttattctagtatgtatttacatcttgaagaacaagaaagttgttcttgtgattaaactataaataaactatctaattttcata

SEQ ID NO: 255047 - DNA, 693 bp, Homo sapiens
tccataaccttagtgtagtcttatttttcttagtgggtacctgtgatctctaatatgctttgctatctctctttttgttttatatctttaaaaaaatctctatgttttatttttttctggaaggaaacaggctcacttggaatatttacctagattctctctttcacaagaacacgcagtattttgtattcattatctcattatctcttccctggttgtgtctttagaaaagaaacaatggataacagagggtgagtttcagtaattttctcagctcacagagacctaataggacaaatactccaggaacgtatgccttagttcctgcagatgacaatatatgctaactgggattcaagctctaacaaacaggcaagaccaatgtcaaactaataaccataacgtggaagcacattacagtgattttggctatccaactaaatgtaataaatatcaaatgcccaccatttcagaagaattataataaggaatatagcatctttaacccatttctcatttgcctgaagaatacttgcagacagcatttgtggcttaatgtttaccctgaggtaacttgtggcttactgtcctaaccttatccccaaagtttgccatgtatctcacttttattattatttttgcataggtctagcatattgactttggaaacaaaagacatcattctatttgtag

SEQ ID NO: 255048 - DNA, 445 bp, Homo sapiens
ttgtggttttcttctaatgtctttgcctcactaatagcaggataatactcaccttataaaatgaattgggaaatgtcactcttctattttctgacagaatttatataatattaatattattccttgtttaaatatttactacaacttaccattaaagccatgtagaaacattttaaatcaccacatcatcttatttgttagatatatatcgatttcaataaaacaattattgtatcaatctttgtaatttgtgtcattcaattaatttgcccattttatcaaattgtaacatttattgtaatcaagatgttcataaaacatcccaatatcctggcaatatctgtaggatttataaaaatgttctcctttcttgtttgttatcgataatttgtgggtttcttttttccctttctagtctacctagagtttattaaattcaggggct

SEQ ID NO: 255049 - DNA, 688 bp, Homo sapiens
atttaagtattgaagataaaattgtatcccaaaactcatttggcccatttgatgtctctctcagcataagctaaacaggattgaaatgtcattaaacccaattcagctgctaatttgttagtgattgtttggtcataaagaacagtaatacagccaaactaacttaagcaaaacacaaaatgaaatttactggaagaaaactggacacaggccacagaaggctatgtgggtatctataggaactcaaactaggaactggcatgtcagggccaaattaccttccacgtctctgtggggctcggcctcttacctcctctcatctttgcagtttccaaagaaaccgcacacagcctcgtctagcgttcaggactcacaactccaagtctcctcctctgaaccttttaccagtacttgttaaactagacctgtgagacctctgggctctgcaggggtgccacagggcatccccaaatactcaagaatttatctaaaccagcaaacatgtagaccatctggagaatcccttcctgtcttatcttggctttgtcagttgaggttccgtgtaagagaggcatttgaaaaagaggttctgctgtctattttgtgcttccatggaactggtattgagaaggattgattaaaacaacaaaagagtaaaaactctaagttgtgggatgatagtttggat

SEQ ID NO: 255050 - DNA, 703 bp, Homo sapiens
gaataaacaggttgcagagctctcttacattgttggctaaatgaaaaatggtgaaaccaaattgaaaaacagtttgatagttgactagttctttctcacactgctaataaagacatattcaagactaggtaatttatcaagaaaagaggtttaattgactcacagttcagcatggcttgggaggccccagaaaacttgacaatcatgacagaagggggaaagggaagcaaacatgtccttcttcacattgcagtggcaagaagtgctgagcaaaagggggaaaagcctcttataaaaccattcagatcttgtgagaactcactcagtatcatgagaacagcatgagggtaaccgccccccatgattctattaccttccaccaggtccttcccgtgacacatggggattatgggaactacaactcatgatgagattcgggtggggacatagccaaaccatctcagtagtttctcatagaattaaatatactctttaccctagagcccagcaattccactcctacacacttactcaagaggaatcaaaatatatgtctgcaaaagacttgtacaagaacggtcaccgcgacttgattcataatgggtaaaaaccggaaggaaccccaacattcgttaaaagaacagatgaaaagattgtggtagaatcacataacagaatgcaaatcagcagtagaaatgagtgg

SEQ ID NO: 255051 - DNA, 434 bp, Homo sapiens
accgtgttagccaggatggtctcgatctcctgacctcgtgatccgcctgcctcggcctcccaaagtgctgagattacagacgtgagccttagcacccaggctttttttttcattattactgttttttaggggctttgcagcaaaacccagagggactgctagacagattctggaagagctgtgccactcataattttaggtgtaatgagtctgtctggttgtgctgccacgtctctccctgtgccccctggagagggtgtgacgctggttagagggcggagcagagcatcagggtgctgcactgcagcgagggagacaccccatttgttgtgaccccttgaaaatgacttctggtctggctttgacaatttttttttttaatggagctgacccaataaaggtgacatggaattatttttcttctgagctagttt

SEQ ID NO: 255052 - DNA, 513 bp, Homo sapiens
ttcacaagtgtgtaaagattctatagtattgaacacttagtcaaaggagtcctacttgaattctcaaatcaatgacaaagttgcttcctctctacccaagatcaggagcttccctagtttgcacatatccacattgaccagtggctataaagtcacactgcgattatctgggtcattttaaaataggtcattagcagtacttgtagtatcgcgtctgtctaaaaatcctccaacaccgagtgacttttaaactttggggtgccttggtaaccccagggacgcttattagacatgcagactccggggcccaagctccagactaattccatgggaatagggcgggtcccgaaaccggcatttttaatcatctgcccgggtgaatccgaagtgtggtccaaaagccacagtcgaggtgcctctgcctaacaagctccacagaaagctccgacttcagccgccccgacggcgatacggacgccgagttaggctgtcgggggtctgtctggcggccgc

SEQ ID NO: 255053 - DNA, 413 bp, Homo sapiens
tccatgcaaaatgaaaaatagttaaattgaaaaacagatgtccttgtgcctcctaattcccagcaggggctcttgtctgaagcctgagatggctccttgggtttctgtgaatgttgtcaagggcgccaaggatgccggacttgcatttagatgcccaagcctctgtgctggaaatgatgggaaaaaataggaactcttgaacttgagcaagtattagaatatgtgaggtaatggagaagcctcctccctcatgcccgtgctcttgtcaggcctgtttgttaaggtccaggccccacttcccactttttttatattattattatactttaagttttagggtacatgtgcacaacgagcaggtttgttacatatgtatacatgtgccatgttggtgtgctgcacccgttaacttg

SEQ ID NO: 255054 - DNA, 465 bp, Homo sapiens
cagagtcctcatcccattttttccgtaacaattaatgccccagatttgtatgctatgatgatatcattttatggtgtaatgctattattattcaaaatatgtggcttttctaaattcacagtacatattcttatctgccagatatggtctaggtctcactctgtcttaggaaggaaaggaagaggttcttctccatgcatttgtcatcttggccccccgtgtctgcagccccatccccagccgggctcactctgccccatctcctccactcccatgcacctgcacgttgtactttacctttttccaaatagcatttagccactttgatttccaatactgatgacatccttcttttcttctcccagtctgttttgagcaggattatgttatcaaaatgtcagattatacaatgtgaaatgaatactttacctaactggaattcaaccctaaatctgtttgtggttg

SEQ ID NO: 255055 - DNA, 311 bp, Homo sapiens
ctctattttttaaaaaattagccgggcgcagtggagcacaactgtagtcccagctactcaggagcttaaggctagggggtagcttgagcccaggagttcgaggctgcagtgagctgtgatcacatcactgcactcccacctgggtaacagagcaagaccctgtctcaaaaaaaaaaaaaaaaaaaaaagacccatagcacaattgtaatcatgtgggtcattgtggggtggtgagtcacagctggtgagtggcagaatcaagaccaggtccaggtggtacagccacagagctggtgcccccaagtactcgg

SEQ ID NO: 255056 - DNA, 120 bp, Homo sapiens
tctctgaatggaaaatttacacttctcaagtgatgacagcatagagacagactgtcatgccccccactgaacaagagtggggaaatgacattcttaagaccactgaccagacaacattta

SEQ ID NO: 255057 - DNA, 361 bp, Homo sapiens
ggcaccctttgagttgagaggtgcaaggtccctcccggatctcacctggggctgtgcttcctccccagtggccaagcagagaaagaatctctcaccctgagtgaggctggcagctgtccccctaccccctgcctctgccctggtgtgccaggcactctgatttcaggcaccgttagaatttcagcccagcaaacaaaacagccagctgcggcccgagcttagggacccagaccactgccttctgctttttcctttccaaatgaaatttgagatgtcacttgtttttttaatcacaaaaaaggctgagaaaagaaaataagtatttccttcgtgtctgtctctgcttcctgcccccactcac

SEQ ID NO: 255058 - DNA, 319 bp, Homo sapiens
ggggatgagaaggttgcattagtctgctcaggctgctataacaaaataccagcctatgactatgacaatagacatttatttctgacggttttggaggctaggaagtctgagattaagatgctggctgattcagttcctggtgaggccctcttcctggcttgcaaatggctgccttctcactgtgtcctcacatggcagacagagagctctctggtgtctcttttcatgagggcccgatcctgttggatcagggatccacccttatgaactcatttaacttgcattaactccttgtaagctttatctccaaatacattga

SEQ ID NO: 255059 - DNA, 1396 bp, Homo sapiens
  misc_feature (2)..(2): n is a, c, g, or t
gnccaggagcgcccgagcggagaggcggcccgggagcaggggggcggcccccactccggccgggtgcccggcccctggcccctgcctgccctctagatcgccgccgcagccgccgctactgggagtctgcctgttgcaggacgcactagccctccctccatggagttcggcctgctcagcgaggcagaggcccggagccctgccctgtcgctgtcagacgctggcactccgcacccccagctcccagagcacggctgcaagggccaggagcacagcgactcagaaaaggcctcggcttcgctgcccggcggctccccagaggacggttcgctgaaaaagaagcagcggcggcagcgcacgcacttcaccagccagcagctacaggagctagaggcgaccttccagaggaaccgctaccccgacatgagcacgcgcgaggagatcgccgtgtggaccaacctcaccgaggcccgcgtgcgggtgtggttcaagaaccggcgcgccaaatggcggaagcgcgagcgcagccagcaggccgagctatgcaaaggcagcttcgcggcgccgctcggggggctggtgccgccctacgaggaggtgtaccccggctactcgtacggcaactggccgcccaaggctcttgccccgccgctcgccgccaagacctttccattcgccttcaactcggtcaacgtggggcctctggcttcgcagcccgtcttctcgccacccagctccatcgccgcctccatggtgccctccgccgcggctgccccgggcaccgtgccagggcctggggccctgcagggcctgggcgggggcccccccgggctggctccggccgccgtgtcctccggggccgtgtcctgcccttatgcctcggccgccgccgccgccgcggctgccgcctcttccccctacgtctatcgggacccgtgtaactcgagcctggccagcctgcggctcaaagccaaacagcacgcctccttcagctaccccgctgtgcacgggccgcccccggcagccaaccttagtccgtgccagtacgccgtggaaaggcccgtatgagcggccccgcccgtagatcatccccgagggcgggggcaacgattcacagcctccgcggactggggtcattttgactggcttgctcccgccccagggtctgaaaggggtgtttgggcagctggggggcaccggctcaggagagggccttcccctcccagccctgaggggtggactaggccctacacacagaccgcgcccctgggactaaagccaggaacagggaccagctccccgggggccaactcacccttggcccatcccgccttctccaggcttcccctccctcgttttcaaagataaatgaaataaacgtgcgcggactgtcgaa

SEQ ID NO: 255060 - DNA, 1343 bp, Homo sapiens
  misc_feature (2)..(2): n is a, c, g, or t
gnccaggagcgcccgagcggagaggcggcccgggagcaggggggcggcccccactccggccgggtgcccggcccctggcccctgcctgccctctagatcgccgccgcagccgccgctactgggagtctgcctgttgcaggacgcactagccctccctccatggagttcggcctgctcagcgaggcagaggcccggagccctgccctgtcgctgtcagacgctggcactccgcacccccagctcccagagcacggctgcaagggccaggagcacagcgactcagaaaaggcctcggcttcgctgcccggcggctccccagaggacggttcgctgaaaaagaagcagcggcggcagcgcacgcacttcaccagccagcagctacaggagctagaggcgaccttccagaggaaccgctaccccgacatgagcacgcgcgaggagatcgccgtgtggaccaacctcaccgaggcccgcgtgcgggtgtggttcaagaaccggcgcgccaaatggcggaagcgcgagcgcagccagcaggccgagctatgcaaaggcagcttcgcggcgccgctcggggggctggtgccgccctacgaggaggtgtaccccggctactcgtacggcaactggccgcccaaggctcttgccccgccgctcgccgccaagacctttccattcgccttcaactcggtcaacgtggggcctctggcttcgcagcccgtcttctcgccacccagctccatcgccgcctccatggtgccctccgccgcggctgccccgggcaccgtgccagggcctggggccctgcagggcctgggcgggggcccccccgggctggctccggccgccgtgtcctccggggccgtgtcctgcccttatgcctcggccgccgccgccgccgcggctgccgcctcttccccctacgtctatcgggacccgtgtaactcgagcctggccagcctgcggctcaaagccaaacagcacgcctccttcagctaccccgctgtgcacgggccgcccccggcagccaaccttagtccgtgccagtacgccgtggaaaggcccgtatgagcggccccgcccgtagatcatccccgagggcgggggcccagggtctgaaaggggtgtttgggcagctggggggcaccggctcaggagagggccttcccctcccagccctgaggggtggactaggccctacacacagaccgcgcccctgggactaaagccaggaacagggaccagctccccgggggccaactcacccttggcccatcccgccttctccaggcttcccctccctcgttttcaaagataaatgaaataaacgtgcgcggactgtcgaa

SEQ ID NO: 255061 - DNA, 536 bp, Homo sapiens
ggcatctaacaggtctccacagatgtggctgttgtaatggaaggtcacgatgatggtgtacttgctctcgtggtatggtttgagaagtgagctttcaacttacctaacataaagcttgaatgggtacaaagtgagacttccctagagatgaccaggaacaccaggaatgtgagttgataattgtgagtgcctctgtcctttcattcacaggccacaggtgctttccagtctttctggaaagtctttctaaactgtccacatttataaaatctttctagaaagtttttctagtcttgagttgggagatttcctggagagggacttgaatgggtacttggaggaggtagaagttcagagatctgaaaagaatatgtatcattattgtccatattgagtttctaaacttgatcaatcattcagtactgaagttgtagattttggttttgcattgttttataaaagaatgtatgataaatattaaataccatagggaaattttttttgaattttatgaaacattaaagtctgactttgta

SEQ ID NO: 255062 - DNA, 250 bp, Homo sapiens
tccttctgtgtagcagagttttttccacaggaagttgaagggttatccttgaatcattattctctgtatctagtaaaggctcccctgagactgttcaactacattgattggtatgtctttgaaggacatttaaaaggtagtacacagctatatttgttaaggcctcctcttttaacccctaacttctgtgcaaagataattttattttcagcaatcatataaggaaaatggctatcatctctctacaact

SEQ ID NO: 255063 - DNA, 483 bp, Homo sapiens
agaagtcgagaattgaattggtagaggtcttggcctgataatgccgccactagctgcctgacaaaggcaaatgcaaattttctcagagagaatgcaccctcatcttggagaattagatctgatcaaggctgtagatccaacaaccaatttacagggattacagaggacacaggaatatgtgagacatcaggatgcaattaccaggatagactgggaaactgacaacacaatttctttaaataagttgaagataaaataaaaccacacaggtggagggagaacttacccattgaaacaaaagaggcttataccagttgcaatttgtggaccttttttgggtactggttcagcagaaaaacttgacaatcacacgacagttggcattgtgaacattgacttgataattaaagaacaattgttttttaggaatgatgtggttgtatttttaaaaggatctctatttttaaaaaagagatacatgct

SEQ ID NO: 255064 - DNA, 508 bp, Homo sapiens
ccaagggaacgggggagcttagagcaaagcagtaaaattgtcagtgaagccattaattgagaaaaataactttatgaggcttatcacatgggccattatgtcgtgcttctgcctggtttccagcccctgataggcaaggagtggaagagaagtccatgggagaacggggaatttgaaggacaataaaagttgatggtgatacatgctgagaaattatcagcacagtcaaacatttctcctgcttcgaaaacacaaaacccaaagctaagccatccccatgggcttttgacattaaccatctgtcaaaccctagcaggaactgcttaagtgaaagcattcattataaattaaaaagttaaaaagttgcgctaattaagcctgaaagggaaaccagggtacattaagcagtgagagaagaatagctcttcgtgaatgggactcatgattgtatctgtctattcttgtgttttttgtaaatatactaattataatcactaattatgtttcg

SEQ ID NO: 255065 - DNA, 494 bp, Homo sapiens
gatgcttttgggggcctgtggtccctgacgtgtggcatctatgtggaagacaatgagaaagacactgataaaaacaaagaaggaatgtaattaatgcctctcaattgtacacttagaaatggctaaaatggtaaacttgatgttatgtatattttatcacaataaagacatttttaaaaacccagcaggagagagatgcgggtaacagtgaatgagcaggacagtggctgtgacgcaactgtgtatgcgagcgagaggaagggcgcagaggaaacctatttgttcttagatgacaccgtgactctcatgagggcactgactgagtggctggtgggagcccagtgggcgacccagagtaccaggagtctggcatggtaactgagaactgagaaacccagtgaccccctatagtctgtctctcactggatacctgagattcccaccctgggaccaggacaagatgaggagataagtcagtcccagggagggggtga

SEQ ID NO: 255066 - DNA, 459 bp, Homo sapiens
tcaaatatgtcagttttattttctctgtacacacatttgttactgaaaattgcaaaaacagcacattgaaggtcctcttattggagttcacatttttgaaaaccagaaaatttaataattatgctcttgccaaactacccactgttttctttatattcttgccccacaagttgctttacttgaactcttgggttgggcttcatctcactgacttcaggcttctaacacacataggacacttaggacctactggctctttgggtcacatcagggaggagagctgaagtatgttgaagttactcaaatacattcaagctacatagatctctgataaattattggtggtatggtagaaatgaaaatatacccaaaaaaatcacagaactgtttattaaaattattggtatacaggctcttctaacatagattagctttctcaacctaatacataaaattacc

SEQ ID NO: 255067 - DNA, 550 bp, Homo sapiens
gaaggaatgagtgaaagaggtgtggagtagcccactctcatcatggacctctggaatcctagctgcaggagaccccatgacccccatagacatttgagttgacagggagaaatgcacagagagttggcagagacagaactccagcctgcatggagcccagagggtttggcacagggaatggctgcagtagatcatagccgtaagtgcccaagccccaagactcactatacttctcttgttggctttagccttttttttggctaccataattggacaaaacagaggtatttttcatgtgggacaggccaatctgatctgagtaaccctctgtcttctggcttatcccagagtctgccgggccacaagaacttgcagcatggccttggctgctcagttgagtcacttgccagcagccactgccatagcctttttgctggcagaccctgcctatcagagagcttttgcaggctacctccctcatgcacctgcccacagcccttccccaacttctctgtggcatgtgctcactcacagcttccccctactgctt

SEQ ID NO: 255068 - DNA, 402 bp, Homo sapiens
ggaatcagcctcctccctttcctggactggtctgtctaccaccagttgccatctagtcctaagtgatcacttcatgcccctcctcagttgacatcctcagggactctccttcagcatcaagctgccaccctcagatgtggtcccctgcacctccctccacaggctggcccctgcctgcctcctcacctcacatctccccagtcacctcctctgctccaaggcatggcaggttcctgcccttctctgaacaggccactctgtttgaacatgtctctgtgtctttaaatagccctcttttccccactgaagccctgtccctcccaccacgaataaagatgatctttgtcttctttaaaacttgccataagtttgcaaaacacaggatgcagtctgtaatagcct

SEQ ID NO: 255069 - DNA, 797 bp, Homo sapiens
tagtttccttgtgaagcacatttgtggttagatagatggttggttagcatgcaatgagttgaaagcttttagataagtttgatctgaaggcctgacagagggtgtcatgaattatccacgttctcactgcagagcacaccttgcctgttaaccagaaagtcagctcagctcctcagaccgtgctgacacgcatgaacaaatgcccatgccccatctcctcttctgccgtagaaaatttaactataccaacctggttttttgttataatacacacaagtatattttttcatgaaattgagttgacctgtgaatctagatctaagtgacactgagcccttggaagtgatatttatggactctacactacttcatttttaacattttataatgcaaatgagttctctttcaacacaactgaaacaaatactctaaagtatgacaacactttttgaatttttctttattttttactttagaataccattgctgttgttatcgttatggttatttggtgttagtatgacacttattttatgttgtccccaaagctctgctgattatgcatttctggtaaacataaatggaaaaatgagctagttattgataaacacactttacttagaaatagaaaactaaaatgaaaaacaagggagagcatcaggaagaatagctaatggatgctgagcttaatacctaggtgatgggttgatctgtgctgcaaaccaccatggcacacgtttacctatgtaacaaacttgcacatcctgcacatgtaccctggaacttagaagttgaag

SEQ ID NO: 255070 - DNA, 247 bp, Homo sapiens
  misc_feature (222)..(222): n is a, c, g, or t
cagctatgtccatggatcagtcaagtatatagagcatgaggcgtgcaggggtcagggctctgcctcctttcttctctgtcattggtcaggctcatgaccttgatcgtgtgcaataatatctgtccttcaattctctttgtgatcatcccaccatagcaactcagattttaaaaatatcagttaaggagatctctgcctgcattttggaagcttgctgagcanatggctttgctccctttggaaaagt

SEQ ID NO: 255071 - DNA, 302 bp, Homo sapiens
ggagaatcaccattagcccgggcaccaggaggcccagggtggcttacagacagtctcatctcactccaggacagacgcccagagactgctggggggcacttcctgagatattcacagagggcctatgacagcaactgggtcccccaaccttggacaattccagagaaaatgtggccacacgtagatcaggcaggcactggaaaaggcactgggttgagagtttggggtgacagttttggaggtgcggaggctgctgttgtctgcatcccaaggtcgtggggttcagactgcaaaagggaacc

SEQ ID NO: 255072 - DNA, 432 bp, Homo sapiens
gctcctcccgggccaactccagaggcagtgcgtgtcacctccagctctcctcccacaaaaatgctggcctttcagcctccagtgcgcttagttcaccccataaactctgctaatgcttaccacatgctgagcgtcggcgcccgtccccacccccagccccacaggctcccgggtcccgccctgggagaccctcccactggccgaccctgccccaagactcgcccactccacggtgggaaacctgcaatgtgtccctccctaccccgccctcctccagcgccggccaaaagtgaccttggacgcttctacaatgccatatccactcctctgaacaggaggcgagtttgcacccagtggtgcctttggttgctagaaattaaaaacccgattgcgcgtgtttgcaattacggtaacttggcgcgtcacccccaa

SEQ ID NO: 255073 - DNA, 1400 bp, Homo sapiens
tctcttctgatatgctgtatttaatggaaaacctggacaccaaggaaacagatatcatagagctgaacaaggaaactgaggaatcacccaaatgagtgccaccaagttctaggacctggttctagcctagattcttacctccccaaaagcagcatattaggcccaggacatacctgaaggctggtcgactttttaaaaaacatgatcacactgtataagctacttagaactttgaagggcattatgatcctgactttttgagagctgcgaaaaatcaaacgcattcacgtcatccaacacaacatggctttcatcagaagttacacagaccacagtgatttagccaaataagtcttaaccaaaaaaaggaatctgaaaaacatacatgacttataaattcatagattattagttgtggaaagagtctcatagatcatagtccaatcccctagacccaaaggcccagacacgcagggttctctatttctcttcttttttctctttctttttttctttagccataaagaaaggagatggatcacctaatgcctgaaagatcccctccttcctaacgtttttgtttgaggctttctaaccatctcattcctacttttataactattattgttattatcacttcctgattcttaagcttcatcagcaccagaacacttaattctcttcaatttccttttttacttttctctcttttccttttattctgtcatcctttttttcccttcccttctccctggttgtgctgcttttctagtaatctgtcccatttttcaggttataatatttcctcttgccaaatctgttgcttatgtcttgccatgaatttcaaaatataagacattggcaaagcctcctacagaatcatcaaaggtgtcaacaaatccagcctgatacccttccagtctcacttccagtggaaggcatataggagtgatggttccccccgtgcccttgcagccattgacatttctttctgcttccactatttggtgttgggcactggagaaaaacgaagccaagagaatatgaaatttgcatagccaaatgctatggaaccaaagaataagatgactcacatctgtttaacttgaactcttatgcaaaaatcctaatcgtgtcgcaacacgggaccagttactgtgtctatcgggtcatttgggaatgggcaggatactggagctgggaggctaatggggtccagagctgcataatggggatcggatgttggtactcctcccagggagctctcaggacagctgtttgtcgtgggctcccaagtgcctaggccatgccttacgactgctgcacttaccatttgtcatatgatggcacttgactacatatggctttagaaataaaataaccctcaaaactaaaaaaaa

SEQ ID NO: 255074 - DNA, 411 bp, Homo sapiens
tgtcattgtgtgtttcaggctgtctgggtccgactttcctgacgaggagtggctgtgggattatgagaagcatggccatcggcattccatgataagatgactcacatctgtttaacttgaactcttatgcaaaaatcctaatcgtgtcgcaacacgggaccagttactgtgtctatcgggtcatttgggaatgggcaggatactggagctgggaggctaatggggtccagagctgcataatggggatcggatgttggtactcctcccagggagctctcaggacagctgtttgtcgtgggctcccaagtgcctaggccatgccttacgactgctgcacttaccatttgtcatatgatggcacttgactacatatggctttagaaataaaataaccctcaaaactaaaaaaaa

SEQ ID NO: 255075 - DNA, 332 bp, Homo sapiens
tgtcattgtgtgtttcaggctgtctgggtccgactttcctgacgaggagtggctgtgggattatgagaagcatggccatcggcattccatgataagaagagtcaagcggttcctgagtgcccacgaacacccctccagccccagaagaagaagctacaggaggcagacaagtgacagctccatgttcttaccccgagatgacctcagcccagccagggacctactggatgtgccctcaagaaacccccccagggcctcacccacctggaagaaatcctgcttcccagaaggaagccccacgctgcacttcagcatgggagagctgtccacca

SEQ ID NO: 255076 - DNA, 431 bp, Homo sapiens
ggcctttttttgtgtggggggaggggaatggcatccccttcctgtctgccaaatcaaggaataccagtgccctcctaaacctgctttgttttagtggattgttaaaaagaagtgaatgaatttatgcttcattagggaaaggttacagtggaatactgaggagtaaggggtatttctatttaacaaatgacataacttgaaggaatgaaatcataaggatggaatttcaggcattaataaaaagctgatgagagatactttgagacaaaagagccttcccagtgtaaccgagatcacagcacctacttcacatacacaggaaaccagtcctatctgtctctcccatagagcagtagctgccttgtttttcctccctcctccatcattcattctaaatctccagtcctctacctgcacgacaacacataacc

SEQ ID NO: 255077 - DNA, 603 bp, Homo sapiens
gtcaatgtgtggccgacctgaaggctccactagggctttccctctaaagctaccctggtgactgtttcttactttgctttagaaaagacccaaaaacagagttaggggaggtgctcagtgtggcccccaaggacagtggcaggggttgaggcgccgggcacactgtctctgagtgtgtcccgactcgcaggaggggcattctggggtccaccaggtggccggggcctgaggcctactgggcccgcactactgctggaaaccacctctcgctccatttcccagcacccccagtgtgagcccgaccgcaggggcggggccggagccaggaagcgctccgtgttgtgcaagggccgccacgtgagcacccgctgggccacgacgctcaccccaagacccccgacacccacctcggagctccggatctaggctcagccccagaaggctcctggagcccctccctcgtgcccgggccggcccagaggtgctgagccctccctctctgcgatctgaccttgagctttctcctccacacgtgccctccctcccgtctcccccgctccagtgctccgagggaggccggaagaaatcattctgacgcccatt

SEQ ID NO: 255078 - DNA, 699 bp, Homo sapiens
gaccaagttctgaccaatgagatagaaactaagtatgtttctacttccggataatgttcttatatggaggaaagcaatttcttctccttcttgtcctgccttactgctgattgggatgttagttgtgatgactgtaactagagcaattaatctgcactttgaaatggaagtcacatgtgagaatggtagaacagcaacaagatagatgggattggtgttcctgatgagtatagctaatatactagtcctaggtggcatgcccttacatgagagagaaatacatttttattttgtttaagcagtggttatttgggcattttcctaaatcacagacccaagatcccatagctaggaagaggcagaacatgcatctcaacccatgtgtgataccagaccttctgatttctccagtctattctgctacttcctggaactctgagtgcctgatagtaatagtgagaaatatggctgggtgggcactgggaacatagcttctccttgagactaagccattgcttggctttttctcatgctgattagagggagaggcaaacaaccaaccaatcagtaatgtaacagaatccacatttccaaatctagtgctctttccaaattgccaaccattaagtcatcagtccaaaggacttgcgagtaatggcagaaatctcagaggcttagtttcctgatttcagtctcaca

SEQ ID NO: 255079 - DNA, 541 bp, Homo sapiens
agaaatttttaaaggttaaaataaataattttaagaaagctggttcacaaggtgccacatttgatgaaagcaaaatacagtggcttttattgttactagagtgatgttcttgcttgtttttcttttttggtgaagttagccccaaattattctcatagctaagcaaatacgagagtgactgtaaggacagttggcattcccggaattgctaaacttggtaggcaacgctggtttaagaatactgagttctagccgggcgtggtggctcacgcctgtaatcccaacactttgggaggctgaggcaggcggatcacctgaggtcgggagttggagaccagcctgactaacatggagaaacgccatctccactaaaaatataaaattagccaggccccgggtgtggtggcacatgccggtaatcccagctactcgggagactgaggcaggagaatcgcttgaacccaggaggcggaggttgaggtgagccgagatcatgccattgcactccagcctgggcaacaagagtaaaactctgtctcaa

SEQ ID NO: 255080 - DNA, 535 bp, Homo sapiens
ctcaatctagaatgtaaactacttttacattcaaaattgagttctgtgatctcctgttctatttaaaatgtttagtatacgaggaagcagagaagaatggttgtttccatttttcttcatgtactagatctaaggaatcctggtcatgtttccaactagcatttctcaaactgtgctctaccagttagtagttctcaaagacataagaagttcattaaaaaatatcccgtgctcaaatatgatttgtaaatgtgagttcaattgagttaaagaagtttctttactgaataagttctcaaaatctttttaatatatgttgtctctaagagggattgtggttatttttcaaacccgtttcttttcctcatagtcactgtcaccttgtcaattaccataaaagcattgataggattctgttatacatatgggcattgtggaagcagagacaagattttcttttgcactggacaggcactccatactagtattgtgttgtttgcaaattacagaaactgaaatccagctagcttaagct

SEQ ID NO: 255081 - DNA, 533 bp, Homo sapiens
tatgagaaaatgctttctttgttctacaatatattttatcggatccagttttgatttttagagcactaaaattggaacctttgattttgacaatattattgatttggctcttttaatttgtaatagtgtgtggtaagaacatcacaacaccttttcatattattgctgctaagagaattttgacttatttctgatatttttctcatttgctgctgcttctagtagtctgtattgagatctcattgccatacagagtctttctctacccttttcttccatacctggtattgtttgtagttctggctcagcctagaactttcgctatcttagtaataacactttttagccatctagctttgcacaccaagcaaaaacaccagaaaatcaacagttcccatgatcccttcccaaaagcataagcctgatgattaaacatgcacagcaaaatttgttgcctatagcctttctgtaccactgccaggtttttatgctgatattgttgccaagatgttctgttttaagaattgagtaaa

SEQ ID NO: 255082 - DNA, 915 bp, Homo sapiens
atggttctatcagtctcaaggtttatgggccccaagcttggctgaggccagacagagctttgtgcaaactctctttctttccatgttccagcctgggaggagcttttgctgacggatgcacagggaaagatcatgtttgacacagtgggtctctgcagcacatgggagagttttactcctgttgccaaggctggagtacagtggcacgatctcggctcactgcaacctccgcctcccaggttcaagcatgtacctctgcctcccacatagctgggaatacaggtggaatatcacccttacctcaaccaaagcaaactcctggagtactgtaagtccaaggacattgtcatgactgcatattctgccttggggtctgactcagacaaagactgggtgaaaaaaggaaacccagttctccaggaggatccaatactcaatgccattgctgaaaagcccaggcgaactccagcccaggttgccttgtgctaccagctgcagcgtggggtggtggtcctggtgaagagcttcagtgagaagagaatcaaagaaaacttccaggtttttgacttctagctgacaccagaggacatgaaaaccacagatggcttgaacaagaatatacgccatttgtaaatgtctatcttttctcatcacccagattatccatttcttgatgaatataaagaaaagagtctgtggttgttccagagtttattgatttgggttgagatgaatagagaatatctcatggatgggaagttttctagtttattccagattgattagcctgctcagtcacaagttggcctaagaccccggatcagaaaataaaagtatctaaacctagttttctcttgattcccgcccccaccccacccccacaactgccaaaataaagatgtatttgaaataacc

SEQ ID NO: 255083 - DNA, 495 bp, Homo sapiens
aagaagatgagttttaacagactcctttctgtaaaactgaatgatggaaagttcatgcctattctggggtttggcacctctgttgctaggaaggttgctatgagtaatgtagaagaagccgtccaggtagcaattgatgtaggctaccgccatattgactcagcttatacacacctgaatgaagaaggcatcgggcaggccatccgaaagaagattgccaacggcactgtgaagagaaaagatatattctataccacaaaggtgtggggcaccttttcccgcccagaattggtccaaagaggccttgaaatgtcactgaagaaacttcagctgagctacatggatctttacctttttcatttcccagtacctttgcagcctgggaggagcttttgctgacggatgcacagggaaagatcatgtttgacacagtgggtctctgcagcacatgggaggccctggagaagtgtaaggatgcaggattggccaagtcca

SEQ ID NO: 255084 - DNA, 669 bp, Homo sapiens
  misc_feature (1)..(1): n is a, c, g, or t
ngcgcaagaaatccgccacgagacatcccttagagggtggaatatcacccttacctcaaccaaagcaaactcctggagtactgtaagtccaaggacattgtcatgactgcatattctgccttggggtctgactcagacaaagactgggtgaaaaaaggaaacccagttctccaggaggatccaatactcaatgccattgctgaaaagcccaggcgaactccagcccaggttgccttgtgctaccagctgcagcgtggggtggtggtcctggtgaagagcttcagtgagaagagaatcaaagaaaacttccaggtttttgacttctagctgacaccagaggacatgaaaaccacagatggcttgaacaagaatatacgccatttgtaaatgtctatcttttctcatcacccagattatccatttcttgatgaatataaagaaaagagtctgtggttgttccagagtttattgatttgggttgagatgaatagagaatatctcatggatgggaagttttctagtttattccagattgattagcctgctcagtcacaagttggcctaagaccccggatcagaaaataaaagtatctaaacctagttttctcttgattcccgcccccaccccacccccacaactgccaaaataaagatgtatttgaaataacc

SEQ ID NO: 255085 - DNA, 801 bp, Homo sapiens
atggttctatcagtctcaaggtttatgggccccaagcttggctgaggccagacagagctttgtgcaaactctctttctttccatgttccagcctgggaggagcttttgctgacggatgcacagggaaagatcatgtttgacacagtgggtctctgcagcacatgggaggtggaatatcacccttacctcaaccaaagcaaactcctggagtactgtaagtccaaggacattgtcatgactgcatattctgccttggggtctgactcagacaaagactgggtgaaaaaaggaaacccagttctccaggaggatccaatactcaatgccattgctgaaaagcccaggcgaactccagcccaggttgccttgtgctaccagctgcagcgtggggtggtggtcctggtgaagagcttcagtgagaagagaatcaaagaaaacttccaggtttttgacttctagctgacaccagaggacatgaaaaccacagatggcttgaacaagaatatacgccatttgtaaatgtctatcttttctcatcacccagattatccatttcttgatgaatataaagaaaagagtctgtggttgttccagagtttattgatttgggttgagatgaatagagaatatctcatggatgggaagttttctagtttattccagattgattagcctgctcagtcacaagttggcctaagaccccggatcagaaaataaaagtatctaaacctagttttctcttgattcccgcccccaccccacccccacaactgccaaaataaagatgtatttgaaataacc

SEQ ID NO: 255086 - DNA, 580 bp, Homo sapiens
ctctctctctctctctctctctctctctctctctctctctctctctctctctctctcggtgaaaaaaggaaacccagttctccaggaggatccaatactcaatgccattgctgaaaagcccaggcgaactccagcccaggttgccttgtgctaccagctgcagcgtggggtggtggtcctggtgaagagcttcagtgagaagagaatcaaagaaaacttccaggtttttgacttctagctgacaccagaggacatgaaaaccacagatggcttgaacaagaatatacgccatttgtaaatgtctatcttttctcatcacccagattatccatttcttgatgaatataaagaaaagagtctgtggttgttccagagtttattgatttgggttgagatgaatagagaatatctcatggatgggaagttttctagtttattccagattgattagcctgctcagtcacaagttggcctaagaccccggatcagaaaataaaagtatctaaacctagttttctcttgattcccgcccccaccccacccccacaactgccaaaataaagatgtatttgaaataacc

SEQ ID NO: 255087 - DNA, 362 bp, Homo sapiens
  misc_feature (1)..(1): n is a, c, g, or t
ngcgcaagaaatccgccacgagacatcccttagagggtggaatatcacccttacctcaaccaaagcaaactcctggagtactgtaagtccaaggacattgtcatgactgcatattctgccttggggtctgactcagacaaagactgggtgaaaaaaggaaacccagttctccaggaggatccaatactcaatgccattgctgaaaagcccaggcgaactccagcccaggttgccttgtgctaccagctgcagcgtggggtggtggtcctggtgaagagcttcagtgagaagagtcgcttccaggtttttgacttctagctgacaccagaggacatgtctcatcacccagattatcctttctt

SEQ ID NO: 255088 - DNA, 480 bp, Homo sapiens
tggcataccatcactttcaccatattctgttggtcaaaacaagtaacatgaccagtccagagtcaaagggaggggagactttgcctcttgataggaggcaaagttacatttcagagggtatgcatatagacagttccagctatttttgcaatcttctacagtagggaagtgagttctagtacattttataatgcggagaatgaactacaagagactgattccaccaaacctcaaaaacatcaccactctctatagagaaaggactgaaagggtaatgtgaagcttgaaaggagctgtgtttgtgatgaatactgaagagaggaatgaacaaggatttagactttttcagagagagtatatattaaagctattcttagcaaaaagtaaataatttagcttttaactttagataaagcattgaagaccacaattgggtagttgcaatatagaaaatataaagtgtgctgtataaatgttttt

SEQ ID NO: 255089 - DNA, 591 bp, Homo sapiens
agtacagtgggggtgatttccaagaactctttgactaactaaaggttataaagattttatgttttctcttaaaagttttatagttttacatttagatatatatgatttattttgaattaatatttctgtaagatctgttttaggtcaggtttccttttttagatatggatgtctaattattccagcacctttgttgaaaacacaatctttctccattgaattgccattgtacctttaccaagaatcaattggttatatttgtgtaagtcgatttctccatgacttcctccttccctggggttcccctttttacttttccagccacagagatgagacattagaataggacgtacttcctgtgactgcttgcatttcgggccaagaggcagaaagacagaggaaaaaagcagcagatgtttgctcctacatcttgagatcagagctcctctgatcagagaggaaggttcctttccctcagagtatatgtgactgttgtccccgctgtccaccaccaccttggaattgccttggattgggaagcaagagaattaaaagaaaaaaaaaaggaaagaaaaatggagtgtttccccc

SEQ ID NO: 255090 - DNA, 815 bp, Homo sapiens
gggcctgcctgacacttgggcgctccttcagtctcgatgttgatggcaggacaaaggggcgcctggaccatgggtgatgtggtcgagaagagtttggaagggcccctggcaccttctacagatgagccctcccagaaaacaggagacttggtcgagatcttaaatggggaaaaggtcaaatttgacgacgcgggactctccttaattcttcagaatggcctggaaaccctgcgaatggaaaacgctctgacagatgtcatcttgtgtgtggacattcaggaattctcctgccaccgcgtggtgcttgccgcagccagcaactatttcagggccatgttctgcaacgatttaaaggaaaagtatgagaaaaggatcattattaaaggggttgatgctgagaccatgcacactctgttggactacacgtacaccagcaaggcgctgatcaccaagcagaatgtccagcgggtcctggaggctgctaacctcttccagttcctgcggatggtggatgcctgtgccagcttcctcactgaagccttgaacccagaaaactgcgttggaatactgaggctggctgacacacactcgctggacagtctaaagaagcaggttcagagttacatcattcaaaactttgtgcagattctgaactctgaggagtttcttgacctgcccgtggacactctgcaccacatcttgaagagtgatgacctttacgtgaccgaggaggctcaggtgtttgagaccgtgatgagctgggtccggcacaagccatcagaacgaatctgcttactcccctatgtcctcgagaa

SEQ ID NO: 255091 - DNA, 1275 bp, Homo sapiens
ccaggggagcctggggcctcccctcgactctcaccagggccttcgacccctccaggagcccccactctacctctagcttccccaggggctcctcagccacctcctgtgactccagagcgctcgttctcagcctctggggcccagatagtgtccaggtggcctcctctgcctggcaccctcctgacggaagcttcagcactttccatgatggaccccagcccctcgaagacccccatcaccctcctcgggcctcgcgtgctttctcccaccacctctagactctccacagcccttgcagccaccaccccaccctggcccccagcagcccccagtgggggcttctcggggggaagagtccaccatgtaaggaggtcactgtgtccgggagactctggagagaggacctctgccagtggcccagggtgtgtgcagggcagctccaaggatgaacctggtggggatgcctgggctccctcctgcaggggccctggtgaggatggaagacccccaaggctggatgtaaccttgttcccaagaagtgtttggaatgtgctgtaagaatggaggaagtcgtttccactgtcagcatcctccctggaccgcgtggctggctcatcttttgagaagggttgggactgccaagttctcctggaggaagagttgcgtccggctgggattccactcactgggactgtaccgccaggtgtcatgcgtctctctgaggtttcctgattaaaggttgtctcggtttccccatgctgcactgctcattcaccgcttacctgtgggaaggtgggaaacgtgaccccaagcccacaggtgacggagtttcactcttgttgcccaggctggagggcagtggtgtgatcttggctcactgcaacctccaccttccaggttcaagcaattctcctgcctcagcctcccaagtagctgggattacagacatgggtcaccacacccggccaattttgtatttttagtagagatggggtttcaccatgttggcctggctggtctcaaactcctaacctcagctgatctgcctgccttggcctcccaaagtgctgggattgcaggcataagccaccacacacggctgggaagtgacatttaagccacgtctgcagatgctaggtgttagcaagtcaagaaagagggaaaagcaacccaggcaaagggaacagcatgtgcaaagtctggaggtgggaagaacacatgggcttttgtggccgtgggaggccagggtggacggagctcagggtaacgggatca

SEQ ID NO: 255092 - DNA, 212 bp, Homo sapiens
gtttccccatgctgcactgctcattcaccgcttacctgtgggaaggtgggaaacgtgaccccaagcccacaggtggtaagtgagcatccacctttaccccactgctggggagaaaagctggcaccaaattgtgactgggctggggaagggtctcctgtaagcacttggcggccttttatattgggagacttctttttatttttttccccaag

SEQ ID NO: 255093 - DNA, 434 bp, Homo sapiens
tggcttcactcctgaagtcagcgagactacaaacccaccggaaggaacaaccagctccggatgcgcgccacctttaagagctataacactcaactgtgaaggtctgtggcttcactgttgaagtcagcaagaccacgaacccaccggaaggaagaaactctggacacatctgaacatctgaaggaacaaactctggacacaccatgtttaggaactgtaacactcactgcgagggtccatagcttcattcttaaagtcaccgagaccaagaacccaccgaaaggaaccaaattcggacccaatggtactatgttaattcttctaccagtcaacaattaagagcaactgtcttgcttgtagcctcagcaacatatttttgtccctcggttaaatgaagaacagccaaaaagataaacactataattaactgcaaa

SEQ ID NO: 255094 - DNA, 216 bp, Homo sapiens
ctcagccctaggatcactactttcattttaaggcttcattttgctcgttaagttactggggaaaataacttcttttttccgtttttagtgacagggctgtggtttcacaaccacttggtgaaaggcagacaactggttgagaacaggggccagtctatgcagattttcatttcctagcatggcggagaagggcttttggccaagctcatggttgac

SEQ ID NO: 255095 - DNA, 400 bp, Homo sapiens
tttaggcatgcctggagctctgtgtgcttggcccagagccacgagcaggccaaggatgctgcccgttgcatgggctagggttgcctggcctccgctgcgctagggtccagggacacattttcactgttcaggggagggagttagctgtgctccagtgtatatagggcaggcctcacacaagccagcaagtttactaatttccaccgtgattctgcgatcattaaggatgaagactttgaagaattttaatgacatgaagaaatgctcatgatgggcatgatagagaattaaacaaaacaagcaagatacaaaaccatacacatcatgatcccaattatgtgtgtgtatctttgtggaaagaaaagagacggaagtaaacacaccaacactttaacagaag

SEQ ID NO: 255096 - DNA, 661 bp, Homo sapiens
gggctaaaacaccacacatctcatagataatatttggtaagttgtaatcgtcttcactcttctcttatcacccacccctatcttcccacttttccatctttgttggtttgcaacagccccttctttttgcctgactctccaggattttctctcatcataaattgttctaaagtacatactaatatgggtctggattgactattcttatttgcaaaacagcaattaaatgttatagggaagtaggaagaaaaaggggtatccttgacaataaaccaagcaatattctgggggtgggatagagcaggaaattttatttttaatcttttaaaatccaagtaataggtaggcttccagttagctttaaatgttttttttttccagctcaaaaaattggattgtagttgatactacatataatacattctaattccctcactgtattctttgtttagtttcatttatttggtttaaaataattttttatcccatatctgaaatgtaatatatttttatccaacaaccagcatgtacatatacttaattatgtggcacattttctaatagatcagtccatcaatctactcattttaaagaaaaaaaaattttaaagtcacttttagagcccttaatgtgtagttgggggttaagctttgtggatgta

SEQ ID NO: 255097 - DNA, 488 bp, Homo sapiens
ttaatctataagcgcatttggcgtgtgcttatatgtctgcttatatgccaaatttgaaattccaaatttcgccatttggaatttcaaatggggaaaagcaaagactcttatctttcccataatcaaaccccttatgaagtaaaatccttaaggtctctctacaggttaaaaataattaggtgatatgatttggctgtgttcccacccaaatttcacctttaattgtaataatccccaggtgtcaagggtggggccaggtggagataattgaatcatgtgggttgttttccccatactgttagtgtggtagtgaataagtttcatgagatctgatgattttataaatgggagtccccctgcacaagctctcttgcctgctgccatgtaagatgtgactttgctcctccttgccttccgccatgattatgaggcctcctcagccatgtggaactctgagtcaattaaacctctttcttttatatattacc

SEQ ID NO: 255098 - DNA, 459 bp, Homo sapiens
agaccctttgttgtccagaagtagtgggcatggcatataaatttcttgaaaaatgtctatgggatattctttcttttattatttttaaaaacattctcattaatattctgtgacttgtgtctttcccttgttctcttgtttaaggatgtaatctatttgaaaaataaaaacactttcatgcttgcaaaattactttaaatcatttctaactctttattataacaattagtaaatcttgaaaaatcattaatagcaatttttttacctatgtcaatttttattgatattgccaacatgatggctgaaaaacttttaatcggaatgtaactgcattattgcaatagatatgtaactagtcatttgctttccatgcctgcaaattaaataggcttatactttgtttacaagaaaaagttcaaggccttgacatggcattccaggtgtcagaaatatgccatt

SEQ ID NO: 255099 - DNA, 229 bp, Homo sapiens
cagacaaagaaagccgttggagcctaggatgacaggacaaggacctcactcccttggccacccctccactgtggtgatcctaagtggctcaaaccatgggctagctctccaaggctctttttttgagagggagtctcactcggtcacccaggctggaggttgcagtgagctgagattgcgccattgcactccagcctgggcaacaagagtaagactccgtctcaaaaaa

SEQ ID NO: 255100 - DNA, 328 bp, Homo sapiens
ccacacattcttggcattagcacaccaaacagtggtagggtaccctgagaaaggaatgcagcttctcagaggcctcacttccagccagggaaacttaagacctgaaaggaataaggctctttgtgtattcagacagccttctggatgtatcgtatataacctgaaactctccactcttgtataccaactaacaaagtcttccttatgtaacatagattgcagtgtctgtatatggtcttcccattatctggtagtagcatcttgaaactggtcaaaacttgaatgccaatagctcagtcactcagaatatacgattctgcacttggga

SEQ ID NO: 255101 - DNA, 697 bp, Homo sapiens
gagaatatatattttaggctttgagggccacctatgatcttttttgcaagtttttattcattttattttgttttataatcctttaaaaatgtaccaagccatacttacttagctcatgggctgtacgaaaacatacacccaggttgcaggccggattttacccacaggccatagtttgcagacctctgtcttaagacaacaacatttattaattattattattattatttctcatggttctaggagtcgattggccttggctagatgattttcacttagggtctcttgtgtggttacagttatatggcggctgggcagtcacatagtgtctagagtcctcaacacatggctgaagtcatatatagaaaatcaggctaggtgcagtggctcacgcctatatcccggtactttgggaggccgaggcaggtggatcacctgaagtcaggagttcgagaccaacctgcccaacatggtgaaaccccatctctactaaaaatacaaaaaaattagccgggtgtggtggcacatgcctataatcccagccactcgggagcctgaggcaggaaaagtgcttgaacctgggagacggaggttgcagtgagccgagattgtgccactgcactccagcctgggcaacagagaaagactccatcaagaaagaaagaaagaaagagagaaagagagagggagagaggga

SEQ ID NO: 255102 - DNA, 437 bp, Homo sapiens
ctaatgtttactgattaagcttgaaggtttgtggaatttgacataatattttgtatctttttggatgtgtgagatactttatgatgaaattgaaatgaccaccgtgataatggtaaccactcagagtgtcactggtatgtgtgccacgtgcttgtcgtcccgggtctatggagcctgcctgcccatcactgaggcacccttagcctccaccctggattagactgtcatctccaagtatttgtgtatgaagttacatacatacatttatatgcacagatgcaaattcattttatcttgtaatgtgttatcacaaaatgcagtataggacttttttaaagatcaaatatttccaaataaaactttttcaaaaaatatttttcctggtagtaaaagaagcacatacatgtatggaaggctaggaaattgtacttaagtag

SEQ ID NO: 255103 - DNA, 207 bp, Homo sapiens
tttttatttttctttacctttaaaaaaagtatatatagtgattctcaatatactttggaaatatgtaaagctgaagaaatagtgatttcaaatttattaaggtgaaatggaggtctgtgaaaaagctggactttgcctcacccaaaagacacatttctgcattcagctgtcaagttagcaatatcatggggctgaaataacactcct

SEQ ID NO: 255104 - DNA, 370 bp, Homo sapiens
gaaataggtcagtctaccaacataatgggcattttcaacatacccctctcagtaattaatagatcttgcagagactaaattatgaagattattaaggacatagaagatttaaatagtacagctaatcaatttgatctgacagatacataacacacacatacataaaacacattgtacccttcagtaggaaaataagtttttgcaaaccaagtctaacagtgtattcaaaatgtaacaaatgatgaccaaaatggattggtctcaggaatacaagattggctttttaatgtaattaagaaatgctgtttataataggacaagaaaaagtacctaagaataaattttaaaatgagaaaatgataaaaaaaaa

SEQ ID NO: 255105 - DNA, 108 bp, Homo sapiens
tcaatgacttgccttccccaacccccataatgcacaccaccaccaccatcactttctggaaccatcaccaactcttggactagagcttatgttgaagcttgttagggc

SEQ ID NO: 255106 - DNA, 466 bp, Homo sapiens
tattaagttgaaagcccatttgggcagagaagtggttagtctcttgattatgtttaaagaaggacattaagaagcaataatttggttggcaatctttttctataaagggccggatattaaatattttagccactgcaagccatatggtgtctgtctcaactactcagttttgctgctgtagcaggaaagcagccatagatgatttatgaatgaatgagagtggctatgttttaattaaacttcacaaaagcaggtggtaggccattgtttgctgacccctgctttagaggaacaaaacttcatgagagaaaattaacagactggcatgttttgtcagtaggaaatgtgaatgcaagcttcatacttggcacatgataattgcttcataattattaaataagccagatctgcctgcctacctttctgctggtttgagcaaatataagtagatttgaatagcgttaaa

SEQ ID NO: 255107 - DNA, 528 bp, Homo sapiens
gtcgcaggaatcgtcttgcaattcccggccccactgactgaaactgagccgtaggcgattggtaccaaaatcaagtgagaagccctcgccgagaggcgtcgggagaagcgcgcagaagccgggagctctaagggtgcgcgcggagtgcaagtcttgcacgcggggcagcgccgcatctgcggagaagggacgccgagcggagcctgctgccttccgcactgctcgagggaaagccgcgccctctgattccgccgagggggaaggcgcccccgggcgcggagacaggtggcccgctactcggccgtcgctgtttccacgtctgcaccgcgcccagaaggcctctcgccgccccgggggcgccctgtgcacgcgctgagcgcttctcctgcccggcttctgctccgctcccgccgcccgcgggagccaggggcggggctcacctgtcagcccgagccccgcctcgcggcacccaatgtcgggaggggatggcggacggacggaccggccgtccaaccagcgcgcggccgc

SEQ ID NO: 255108 - DNA, 233 bp, Homo sapiens
gtaagccaccacgcccggcctagaatgggcttttttaaaacaattaagggcatgggaactactgctaggcaatgggggaaaggtctcaaagctcactggcagagtcttctgaaaaaaacctccagtctttcagcttttcttcaatactttaaactcacctttcctatccttccacattgttacaactgtcttctctctgacacaaacaatgccagattatcctactaagaatg

SEQ ID NO: 255109 - DNA, 529 bp, Homo sapiens
attgagagaaagcaagcccacatgctgggagtcagtgctgtggctgcagccacatggccggcacctctgcaactcttccatagccacctggtcttatgccacgcacgggagcttcctgtggactcctctgtacaggaatcactgctccagctttgattacgcccatcctctaccccaccccatgagacgtggcctaaaataccaactgctcctgcctcccagagcggtccttcccacccttccatgccctgccagtcttcatgacccctggcctggcctgtgtctactgaatgacttatcattgctgcgggattgtgtctctgcagtctgctcctccctgcctccaccaacaccccttctctcaggagagtcctagaagatgaccttctgtcttagtcatctctgtgctgtcagggcatatcaaatatggcctgctacacagggtagtctataaattttgttatctaaattaataaaaagtttctaccatacctaataggcaagctgtgaaaaagtgcaattctcacat

SEQ ID NO: 255110 - DNA, 497 bp, Homo sapiens
cagtaagaaactgatgtagtcttatatttgaagaaaaaacaattgaataacatgtttgtgggttaaaactcttatacaaaaattttctaaattcatatttccagagtcctttattgcattaagcattggttaaaaggctaatttttggtgtttttgttaagcagaactttttcaaaaaacataagacaagttttattagttttattttaaaattagtatcaagattctagcttttgggtacttggagatacttgtaattttattgtaactatggggtatttttatctactaatctgagctatttttggtcacttgtaagatctttgtatgatgatttgtagacttcagcacattgagattgaatgtatttgttttagcatatgagagaaaggagaaatttgtgtagattagaagttgtggtggaaatttaacttaaaatgtaaatcattttcaggtagttaataaatcctttttgttgcttccacctccccaatttg

SEQ ID NO: 255111 - DNA, 265 bp, Homo sapiens
  misc_feature (224)..(224): n is a, c, g, or t
gagaataacaagatggtgtttgcagaatcctacactgcactgtggagttgggtcagttgcatcatgaaatattagcattttccacacaggaacattttgtaacaagaaatgttagaaatcatttgtagagtagaagacatactagacgatagttggaaggaaaaagagactgtggaatgacgcataaatgcttctaattaaagggaggggactcaaaaagtgtnggaggcttgaggaatttagcacacaactacagatgtttctt

SEQ ID NO: 255112 - DNA, 2066 bp, Homo sapiens
  misc_feature (1247)..(1247): n is a, c, g, or t
  misc_feature (1251)..(1251): n is a, c, g, or t
  misc_feature (1550)..(1550): n is a, c, g, or t
ccatgacgcccgccctcacagccctgctctgccttgggctgagtctgggccccaggacccgcgtgcaggcagggcccttccccaaacccaccctctgggctgagccaggctctgtgatcagctgggggagccccgtgaccatctggtgtcaggggagcctggaggcccaggagtaccaactggataaagagggaagcccagagccctgggacagaaataacccactggaacccaagaacaaggccagattctccatcccatccatgacacagcaccatgcagggagataccgctgccactattacagctctgcaggctggtcagagcccagcgaccccctggagctggtgatgacaggagcctatagcaaacccaccctctcagccctgcccagccctgtggtggcctcaggggggaatatgaccctccgatgtggctcacagaagagatatcaccattttgttctgatgaaggaaggagaacaccagctcccccggaccctggactcacagcagctccacagtggggggttccaggccctgttccctgtgggccccgtgaaccccagccacaggtggaggttcacatgctattactattatatgaacaccccccaggtgtggtcccaccccagtgaccccctggagattctgccctcaggcgtgtctaggaagccctccctcctgaccctgcagggccctgtcctggcccctgggcagagcctgaccctccagtgtggctctgatgtcggctacgacagatttgttctgtataaggagggggaacgtgacttcctccagcgccctggccagcagccccaggctgggctctcccaggccaacttcaccctgggccctgtgagcccctccaatgggggccagtacaggtgctacggtgcacacaacctctcctccgagtggtcggcccccagcgaccccctgaacatcctgatggcaggacagatctatgacaccgtctccctgtcagcacagccgggccccacagtggcctcaggagagaacgtgaccctgctgtgtcagtcatggtggcagtttgacactttccttctgaccaaagaaggggcagcccatcccccactgcgtctgagatcaatgtacggagctcataagtaccaggctgaattccccatgagtcctgtgacctcagcccacgcggggacctacaggtgctacggctcatacagctccaacccccacctgctgtctcaccccagtgagcccctgganctcntggtctcaggacactctggaggctccagcctcccacccacagggccgccctccacacctggtctgggaagatacctggaggttttgattggggtctcggtggccttcgtcctgctgctcttcctcctcctcttcctcctcctccgacgtcagcgtcacagcaaacacaggacatctgaccagagaaagactgatttccagcgtcctgcaggggctgcggagacagagcccaaggacaggggcctgctgaggaggtccagcccagctgctgacgtccaggaagaaaacctctatgctgcngtgaaggacacacagtctgaggacagggtggagctggacagtcagcagagcccacacgatgaagacccccaggcagtgacgtatgccccggtgaaacactccagtcctaggagagaaatggcctctcctccctcctcactgtctggggaattcctggacacaaaggacagacaggtggaagaggacaggcagatggacactgaggctgctgcatctgaagcctcccaggatgtgacctacgcccagctgcacagcttgacccttagacggaaggcaactgagcctcctccatcccaggaaggggaacctccagctgagcccagcatctacgccactctggccatccactagcccggggggtacgcagaccccacactcagcagaaggagactcaggactgctgaaggcacgggagctgcccccagtggacaccagtgaaccccagtcagcctggacccctaacacagaccatgaggagacgctgggaacttgtgggactcacctgactcaaagatg

SEQ ID NO: 255113 - DNA, 506 bp, Homo sapiens
gactaaaatgcctgcgtggttgtgccaccaggttgccaaaacatgactggcttttatgcacccaaattaaaaatggcatcctgctcttagccttgggtatgggaaaatatccgcagcttttcctggtgtctttccctcagagtgtcttcaagcctcttcccatgttagctccaggggttgggagaaagaaagcgctgtccattggcctgggttgcttggatccccagtggaaagatgaatcatagggagaggctctctgcctctctcatgtactttaatcacttttattttttctcacctttatcagctgtatgccatcacaggggctttgctgacattcttctcccaaggatctgggatgtccctcacaattctggtggattcccattttccttcttgaattaaagctcacagagtttatctatatgcactatgttgttatttccaagtgcctgaggcatgctcaaatacgctgtcttgggaaaacaaaacaaaacaaaacaaaa

SEQ ID NO: 255114 - DNA, 446 bp, Homo sapiens
aatatagaaataattacacttccttatttttttaaccagcagcataaaccagacaccagattttatctcaccagactgatggaaaatttgatctcagccatatagaggctgccccatcacagtttagggattctcagggacttgggtcactggtcctcaccaattcatgatgagcggtccattggcagaacttgctcagctcctcgaggactgctgactgctgcttctgttaatggaaatgccaactgatgttggaaacctcagttccacaggttctctacttcatgtcttccaggcatcttccctctgaggtctcattgtttccccagtgctgtctcacagaggaggtggtgtgtcctccctgtccacaggatggatgacttctaaccccttcctggaagaaggcaggaaggaattgactggaagaaatctttcttatttccttt

SEQ ID NO: 255115 - DNA, 370 bp, Homo sapiens
tcctcatactacaatctgctgatatatattaatttctatctttgtttatttcctctcttacccattagaatgtcagctctataagagcaaagattttgggccaggcacgagggctcacatctgtaatccagcactttgggaggctgaggcaggaggattgtttgagttcaggagttcaagaccagccttggcaacatggtgaaacctcatctacactaaaaatacaaaaaattaaccaggcatggcagtgtgtgcctgtagtccctgctacattggaggctgaagtgagaggatcccttgagcctgtgaggttgaggctgcagtgagccatgattgctccagcctgggtgacagagcaagaccctatctc

SEQ ID NO: 255116 - DNA, 408 bp, Homo sapiens
cactgggattataggcgtgagccactgcgccctgctgaaaattcttaacttgtgagattctcactggaaaagaggatcggaaaatttcaccatcagcagaaaaagcaacaagaggcagagcagatgaaggatcagatcaccactgtcagtacaaacctcttttctgtcttatgggctctatctcagcctgtgatgtctctcttcctacacaaggctacctggattctggtccatgtggtatgatatcttattggggtgccatcaccatttttcagaccctgcccaatgacacagctccactacaaattagggcattgtgaagccccccttgggactatggaggccctagactcttctccagcctctcccaggccttctgcagcccagaataacttagaacaatggcat

SEQ ID NO: 255117 - DNA, 348 bp, Homo sapiens
tttgagacgaagtctcactctgttgcccaggctggagtgcagtggcacgatctctgctcactgcaagctccgcctcctgggttcacaccattctcctgcctcagcctcctgaatagctgggactacaggcacccaccaccatgcctggctaattttttttttatttttagtagagatggggtttcactgtgttagccaggatggtctcgatctcctgacctcgtgatctgcccacctcagcctcccaaagtgctgggattacaggcgtgagccaccgtgcctggcttggtgatactctttcaagccttgaaggggcctgttgatctttccctattccactgccaactt

SEQ ID NO: 255118 - DNA, 232 bp, Homo sapiens
  misc_feature (123)..(123): n is a, c, g, or t
aggactgccaggggcatggagtatggggatccccactttccagctctgtttacagtgcttggatgaccatagtatggacagctgaaggaatccaggggactgtgtctgtatttcctggagatnatcactgttcaggcaaagcatggggcacatgtcgtcatcaaatatggcttagggctggaaatgtccactgaatttcataggaaagaaaccttgtgggatccttggggaa

SEQ ID NO: 255119 - DNA, 340 bp, Homo sapiens
tagtggaatattaggcaaagtgaaggagaatatggggaattgcttaggaaatacaaatgatgaaatatgcccaggtgcagtggctcatacctgtagctactttggaagctcaggtgggaggatcgcttgagcccaggagttgaagacaagcctgggcaacactgtgagaccctatatctacaaaaacatttaaaaaattaaccatggtggggtgctcctgtagtcccagctactcaggaggctgaggcaggaggaccacttgaggccaggagtttgaggctgcaccgagctatggtcatgccattgcactatagcctggctgacagagcaagactctatc

SEQ ID NO: 255120 - DNA, 1126 bp, Homo sapiens
agcgggtctctcgctgcagctggagctgcaggtctcgccttcactgccctgtgtcctctgctcgcagaggcccagcctctgtggccctgtgacctgcaggtattgagagatccacagctaagacgccaggtaccccggaagcctagaaatgggcgacctgaggtctggagtgtatcctctcaagggagcaagtggatccctggggcagagaggaagcttctagtgtactcttactttgaaaaggagacgttgacatttagggatgtggccatagaattctctctggaggagtgggaatgcctgaaccctgctcagcagaatttatatatgaatgtgatgttagagaactacaaaaacctggtcttcttggcaggtattgctgtctctaagcaagacccgatcaccagtctagagcaagaaaaagagccctggaatatgaagatatgtgagatggtggatgaatccccgagtgagacctttggccagagcaagacataaaagattcttttcaacaagtgatactgagaagacatggcaaatgtgaacatgagaatttacagttaagaaaaggctccgcaaatgtggttgagtgtaaggtgtacaaaaaaggttataatgaactaaaccagtgtttgacaactacccagagcaaaatatttccatgtgatacatatataaaagtctttcataaaattttcaattcaaatagacacaagacaagacatactggagagaaacctttcaatgtaaaaaatgtgatgaatcattttgcatgcttttacacctacatcaacataaaagaattcatattagagagaattcttaccaatgtgaagaatgtgacaaagtgtttaagcggttctcaacccttactagacacaagagagttcatactggagagaaacccttcaaatgtgaagaatgtggcaaagcttttaagcactcctcaacccttactacacataagatgattcatactggagagaaaccctacagatgtgaagaatgtggcaaagccttctaccattcttcacaccttactacacataaggtaattcatactggagagaagcccttcaaatgtgaagaatgtggtaaagcttttaaccacccttcagcccttact

SEQ ID NO: 255121 - DNA, 1148 bp, Homo sapiens
agcgggtctctcgctgcagctggagctgcaggtctcgccttcactgccctgtgtcctctgctcgcagaggcccagcctctgtggccctgtgacctgcaggtattgagagatccacagctaagacgccaggtaccccggaagcctagaaatgggcgacctgaggtctggagtgtatcctctcaagggagcaagtggatccctggggcagagaggaagcttctagtgtactcttactttgaaaaggagacgttgacatttagggatgtggccatagaattctctctggaggagtgggaatgcctgaaccctgctcagcagaatttatatatgaatgtgatgttagagaactacaaaaacctggtcttcttggcaggtattgctgtctctaagcaagacccgatcaccagtctagagcaagaaaaagagccctggaatatgaagatatgtgagatggtggatgaatccccgagtgctatgtgttcttcttttaccagagacctttggccagagcaagacataaaagattcttttcaacaagtgatactgagaagacatggcaaatgtgaacatgagaatttacagttaagaaaaggctccgcaaatgtggttgagtgtaaggtgtacaaaaaaggttataatgaactaaaccagtgtttgacaactacccagagcaaaatatttccatgtgatacatatataaaagtctttcataaaattttcaattcaaatagacacaagacaagacatactggagagaaacctttcaatgtaaaaaatgtgatgaatcattttgcatgcttttacacctacatcaacataaaagaattcatattagagagaattcttaccaatgtgaagaatgtgacaaagtgtttaagcggttctcaacccttactagacacaagagagttcatactggagagaaacccttcaaatgtgaagaatgtggcaaagcttttaagcactcctcaacccttactacacataagatgattcatactggagagaaaccctacagatgtgaagaatgtggcaaagccttctaccattcttcacaccttactacacataaggtaattcatactggagagaagcccttcaaatgtgaagaatgtggtaaagcttttaaccacccttcagcccttact

SEQ ID NO: 255122 - DNA, 802 bp, Homo sapiens
agcgggtctctcgctgcagctggagctgcaggtctcgccttcactgccctgtgtcctctgctcgcagaggcccagcctctgtggccctgtgacctgcaggtattgagagatccacagctaagacgccaggtaccccggaagcctagaaatgggcgacctgaggtctggagtgtatcctctcaagggagcaagtggatccctggggcagagaggaagcttctagtgtactcttactttgaaaagcacaaggagcacgcttgacactttagcgcgactgctggccactacgcaacttcctcctctggcaggagctgggaactgcctgcaacccctgctcagccagcacactttactatactgacactgctgcactgcttacgcaagcacatcctatcacacacacaccctggctcctctccttgcgccacggctacttgcctgctcctcctacacgcacagcacccgcactcatccacgctctagcacgcaacgcacacacaacgagccccctgcgcaactactgaacgactactgctgacgcactggcctggcactgacactcccccacgcagcacccttctctgggccccagcacgtcacaggaccactacaacagcacttcctcttctcacacccaagctgcactacttgcagcaacgcacaactggcacacatgctgcaacactgcagcacacttctaccacgcttaacgacaaacggcctccgcccaacactgctggcttgcacctgtcacggctgctacccaccacaacggcttcactacatgaaactaaaaccacgt

SEQ ID NO: 255123 - DNA, 722 bp, Homo sapiens
agcgggtctctcgctgcagctggagctgcaggtctcgccttcactgccctgtgtcctctgctcgcagaggcccagcctctgtggccctgtgacctgcaggtattgagagatccacagctaagacgccaggtaccccggaagcctagaaatgggcgacctgaggtctggagtgtatcctctcaagggagcaagtggatccctggggcagagaggaagcttctagtgtactcttactttgaaaagggtcgcgctgttttgccaggctggagtgcagtggcatgatctcagctcactgcaacctccgcctcccgggttcaagcaattctcctgcctcagccaccgaagtagctgggactacatgcacatgccaccatgcccagctaatttttgtgtttttagtaggacggggtttcaccatgttggccaggatggtctcaatctgttgacctcgtgatccacccacctcagcctcccgaagtgctgagattacaggcatgagccaccacatctggcctatgcctctccttcttaaactgctataagataacttccagatgttgccatggcatttataaactatcatagcactggtgggagtatagcagagaggatgaccataggtcactctcatcaccatgttaattttggtgggttttatccagcttctaatactgcaaactgtgttatcagccaggtctttgtgacctgtatcttatgctgac

SEQ ID NO: 255124 - DNA, 776 bp, Homo sapiens
taaggccctgcacagcccacagccccatgaatcagactcagttgttgtgacacagtgacttcacttgtggtccctgaaaatgtgcagggtatagggagcttttcccttcactcacactgtggaggaagatgaggtagcatctccaggggaagactgcctaaggcgggcaggtgggagcccctccaggtaagcctctgcctggtcaaccagacatgcagggttcctcacctttccagactggaagggatttccccagatgccaatgcataatctctcttcccttataaagcaagagctagcagatattctggcttattctaggatgtctagccccttctgaaacagtggcagcaacgcccactccctctgacagagtctgttcccagagtggttgagatgacggcttccacagggcggcagaagcctcttcttctatctgtcaggcctgttttgctgctggttttgtgctgcacagttgcattgtctgtaaactcccctggctctgcctggcatcgtttggtcattgaccctgaacctgtgagttggtgaacacaaagggccctgcatttgcgagccagttcctggttctattcctctgccctgtttcctggcccattcagcagctttttctcagtggtatttacttaggcgttccgtgttgggaaaggtgggttgcttgctgttgggtttcatgcttttcctattccatactgctttttatccatattcttccaatatttaaaagaaaggattgtgtgcaaggcttagcatttttc

SEQ ID NO: 255125 - DNA, 389 bp, Homo sapiens
cccgtacctgtacctccttcacgcaagcaatgcccagtgttacaccatttttgaggctctcctctagccccacagactcttcaaccttttcagcactaaaattaaaagtaccttcttgctcatgcaaaacaattctacccccaagctattcatcaagcaagaatgtttctcttctaagaagaagtctgtgcagatacttagcacaaaatttcaccttctatctcacttagttatatacttcttaattcagcagccctgctgagtaaatcagtgagtcttgagaatgggttgtgtcaagaatatggatataaaatagtttcaggacaaagaatcactgtggaaatttcaaacagcagaacaatatcaaaggaaaaattatgtgttagacg

SEQ ID NO: 255126 - DNA, 698 bp, Homo sapiens
gttccctcccatgacacgtggggattatcgcaattcaaggtgagatttgggcaggacacagagccaaaccatatcacccgtcttacccaattctgttgaaataaacagacatttcctgagtacctgctatccattcaagttttttctatgagctaggctctggtccaggagtatagtaaccctacgggtgatttcagaccaataataagtaacactattaagaacacatcacagaagagtaacatctctgactcgctgatatccatttcaaaccacataacaatagcatgaagtagatgtcactgactcaaattaacagaagagaaaactagggtgcagtgtttgtgattaccttggactctcaccataatagactgagctcatgttttctgactcaaaacacaaaacttttcccttgatatagttgcctctagaagaagtcccttgtctccctcaaatagcaatcaagtagaagggaaaatagtgtaagtcaatatatattaagtactttcagtgtgattccaagaaactattgagttgcgatgctaaagggagcattttatttttcagccttgggatcagaaaaacattacataaagaagtgtttgggttggaccttaaaaaaaggtataccatttcagcaggtataaatggaatgaaatgcaaatagagttgggtaaggagcagtataagccaaa

SEQ ID NO: 255127 - DNA, 394 bp, Homo sapiens
gcagaattccctctttctcggaggatctcaggctttttctcctaagtccttcaaccaagtggatgaggccacccgcattagagaagggaaagctagctgatatgttatgaggacatttgagcagccccatggagaagtccacgtggaaggaactgaggcctcttgctaccgttatgtgagtgagccatcttggaagcagatcctccagcctggttgatcctttggatgactgcagccccaggtgccatcttgactacaacatcaggaaagattccaaattagactcccccatcccaggttgcccaaactaaataaaagaattccaaaagagcatttttggatttctgcccaagaagatgcccaaagatctggtataaaagaatggaacaatatc

SEQ ID NO: 255128 - DNA, 355 bp, Homo sapiens
caaatgtgcagctataaagaatacagcaattactagtatagtttggtgccactgctttgattcctattaagacacaagcagttttactcacagtaaagaaacaaccaatatcttaggtttattatgaaaataattttgacattggggactcttttgatagctgctattctagaataaaaaggcttattgcagtcacaaataagcctgagatatagggttatggaatttagtatagatgggttgttgagagaaaaatatgtggatatcaagggccagtttttcatatctgcagcttcctgagggctgactgtgggacttgattatctgcagattttgatattagtgaggggacctg

SEQ ID NO: 255129 - DNA, 2596 bp, Homo sapiens
tccagacactcagtggagtagcgggccacttccgctccgttactgtgaggttgctgcagttttgtccctggtagtttgggtcagttccgcgagacccttctgaatttcctggacctacgcactggatccttaacgaactggtgatcgaattaggggaaaagaaacctcgtcggagagcagaggcaggattctgctttcccttggactgtatcactcaggactctgaatattccctgaaataggaggaaaaatgaccacgttgaaggaggcagtgaccttcaaggacgtggctgtggtcttcactgaggaagagctgaggctgctggaccttgcccagaggaaactgtaccgagaagtgatgctggagaacttcaggaacctgctctcagtggggcatcaatcactccacagagatactttccacttcctaaaggaagaaaagttttggatgatggagacagcaacccaaagagaagggaatttaggaggcaagatccaaatggagatggagactgtttcagaatcaggaacacatgaaggcttgttcagtcatcaaacctgggaacaaatttcaagtgacttaaccaggtttcaagactccatggtaaacagctttcagttctccaaacaagatgatatgccctgccaggttgatgcaggactatctataattcacgttaagacagaaaccttctgagggtaggacgtgtaaaaagtcctttagtgatgtctccgtccttgatcttcatcaacaactacagtcaagagagaagtctcatacatgtgatgaatgtggaaagagtttctgttatagctcagctcttcgtattcatcagagagttcacatgggggagaaactctataattgtgatgtgtgtggtaaggaattcaatcagagctcacatctgcaaattcatcagagaatccacactggagagaaaccattcaaatgtgagcagtgtgggaaaggctttagtcgtagatcaggactttatgttcatcgtaaattacacacaggagtgaaacctcatatttgtgagaaatgtgggaaggccttcattcatgattcccagcttcaggaacatcaaagaatccatactggggagaagccattcaaatgtgatatatgttgtaagagcttccgtagtagagcaaatcttaataggcattccatggttcacatgcgagagaaaccattcagatgtgatacatgtggtaagagctttggtctgaaatcagcacttaatagtcatcgcatggtccacacaggagagaaacggtacaaatgtgaggaatgtggaaaacgcttcatttataggcaagatctttataagcatcagatagaccacacaggggagaagccatataattgtaaagaatgtggaaagagcttcagatgggcctcaggtctttcaagacatgtgcgagtccacagtggagagacaacattcaaatgtgaagaatgtgggaagggattttatacaaattcacaacgttattctcaccagagagcgcacagtggagaaaagccatatagatgtgaggagtgtgggaagggctacaaaaggaggttggaccttgactttcatcagagggtccacagaggagagaaaccctataattgtaaggaatgtgggaagagctttggctgggcctcgtgtcttttgaatcatcagagaatccacagtggagaaaaaccatttaaatgtgaagaatgtgggaaaagatttactcagaattcacaactttatacccatcgtagagtccacagtggagaaaaaccattcaaatgtgaagagtgtgggaaaagatttactcagaattcacaactttattctcatcgcagagtccacactggagtaaagccatacaaatgtgaagagtgtgggaagggcttcaacagtaagtttaatcttgacatgcaccagagggtccacaccggagagagaccttataattgtaaagaatgtgggaagagctttagccgggcctcaagtattttgaatcataagagactccatggtgatgaaaagccattcaaatgtgaagagtgtgggaagagatttactgagaattcacagcttcattcccatcagagggttcacactggggaaaagccatacaaatgtgagaagtgtggaaagagcttcagatgggcctcaactcatctaacccatcagagactccacagtagagaaaaactacttcaatgtgaggactgtgggaagagcattgtgcacagttcatgccttaaagaccaacaaagagaccaaagtggagagaaaacatctaaatgtgaggactgtgggaagcgctacaagaggcgcttgaatcttgatacgcttttgtcattatttttaaatgacacataactgttgtactcatttatggggtacagtgtgatagttaatgcaagtatacaatgtgtaatgatcaaatcagtgtaattaacatacctatcacctcaaacatttatcatttatttatgttgggaacccttaaaattcactgtcctagctatttgaaaataatacgttgttaattactgtcaccctgtagtggtgtaaaacactagaacttattcctcctacctgcc

SEQ ID NO: 255130 - DNA, 382 bp, Homo sapiens
gggcccagaatcacttttgtacaacatggtttccaaattggtagtcgtaggagcaatctgggtgagtagtcatacatagccactaccagaattccctcacacctagctattctatttagtcatcatgtccttatcttttgtcccctgtaatgatcagttctctactctgtttataaaccattgactcctgagctcatgattcttctcagtctgcctctcttgctttctctcttacttttccctaacacgtatagacactatgtgccgtcaagtctttgctgcttgctactccctgaatacttagtactttttcataccctcaatctttctcttctcagaggatgccattgcttgacatctctgcttattacagttcttttct

SEQ ID NO: 255131 - DNA, 140 bp, Homo sapiens
ttttgtttggattacaaaccacattacttgataaatatctgagaaaaatgggagtgggtaagtcggaaatcaaagtagatttcacttattctatgaatacagtccttctaagaacaaagattcttgcaagtgtttagttt

SEQ ID NO: 255132 - DNA, 422 bp, Homo sapiens
taggaagtactttcatttcgttttactttatcagttctatcctgctcattcataatgctgttcttttccaatcaagcctctggctgcaatatactaccacatttcatgcagtatattatccctccctcagccccccgatcttgatgttcaaggtccctgagcaccaagtttctcgtcttaaatggtgaaaaaaaatccaaaattactgatggtcctgttcacaacagtgtctcttcttcagagaatctggttattcacttaagaaaacaaggatatgtggatgtctagaatatgacagacatacacccaaaatacggataattaaaggatttgtatgacattgacttagcgatgtagaggctttactctttactcagaaggcaggcatacaaccaaataaacacaaaactgtctgttagcat

SEQ ID NO: 255133 - DNA, 1287 bp, Homo sapiens
cctgtgtgccacgtgctggacaaatcttaactcctcaaggactcccaaaaccagagacaccaggagcctgaatggggaacgattctgtcagctacgagtatggggattacagcgacctctcggaccgccctgtggactgcctggatggcgcctgcctggccatcgacccgctgcgcgtggccccgctcccactgtatgccgccatcttcctggtgggggtgccgggcaatgccatggtggcctgggtggctgggaaggtggcccgccggagggtgggtgccacctggttgctccacctggccgtggcggatttgctgtgctgtttgtctctgcccatcctggcagtgcccattgcccgtggaggccactggccgtatggtgcagtgggctgtcgggcgctgccctccatcatcctgctgaccatgtatgccagcgtcctgctcctggcagctctcagtgccgacctctgcttcctggctctcgggcctgcctggtggtctacggttcagcgggcgtgcggggtgcaggtggcctgtggggcagcctggacactggccttgctgctcaccgtgccctccgccatctaccgccggctgcaccaggagcacttcccagcccggctgcagtgtgtggtggactacggcggctcctccagcaccgagaatgcggtgactgccatccggtttctttttggcttcctggggcccctggtggccgtggccagctgccacagtgccctcctgtgctgggcagcccgacgctgccggccgctgggcacagccattgtggtggggttttttgtctgctgggcaccctaccacctgctggggctggtgctcactgtggcggccccgaactccgcactcctggccagggccctgcgggctgaacccctcatcgtgggccttgccctcgctcacagctgcctcaatcccatgctcttcctgtattttgggagggctcaactccgccggtcactgccagctgcctgtcactgggccctgagggagtcccagggccaggacgaaagtgtggacagcaagaaatccaccagccatgacctggtctcggagatggaggtgtaggctggagagacattgtgggtgtgtatcttcttatctcatttcacaagactggcttcaggcatagctggatccaggagctcaatgatgtcttcattttattccttccttcattcaacagatatccatcatgcacttgctatgtgcaaggcctttttaggcactagagatatagcagtgaccaaaacagacacaaatcctgccc

SEQ ID NO: 255134 - DNA, 618 bp, Homo sapiens
ctatttgctaacggcaggaattgattatttcacactgcacatctaattaaagtggagaggagtaatgagcagtgaagttataaaatgaatatgataatcaattaggtttttacttctgcttaaaataatttagaatagcccatctactgtatattgaaactaatataatcagtttaacagaccttgatgcattcagagagaacaacagactgccaaatcctgcctatctcctcgtaggacattatcaaaacaatatcttgagccttggtgagaaaaatcacaaaaaaaccacattaggcagaacatcacttttccattatgtcatacataccaaatgctttctggtcctgcttatgtttacagaacaaagtgggtcaaaggaatttactgagatcataaagggcaagataaatgctggagctgagcaccccagtagctgctagacttgatggaattaaaaatggaaaattaacctatgactcaggaaatcaaccttttagatagttctggaacactaagtgtggaaggacattcatttaatatagtacagactaagaacagcactgtgagatttactagatgtactagaaaagcatggtaagatgaaagagctagtat

SEQ ID NO: 255135 - DNA, 269 bp, Homo sapiens
tgcttctcatactctgaggctacacttttaaaaatataagaacctagtgatattatttttaataacacattttatttaacataatatatcccaaatattatcatttcaacaagtaatcaataaaaattaatatatcaaaaactaaaattaaaatgaaaaataacaaaactaaaattgcctgtgttgtttgcattatatttctattagagaggcctattctaaagttactttttctccagcttaattaaaatataattgacaaatgcaaa

SEQ ID NO: 255136 - DNA, 323 bp, Homo sapiens
  misc_feature (156)..(156): n is a, c, g, or t
aatcctgtcttctaactttttgaaatatactagctgggtgtggtggcgtgctgagtcccagctacccaggaggctgagacaggaggaacacttaagcccgggagtttgcagctatagtgagctatgatcacacttgtgaatagctgttgcacttcngccttagcaacagagtaagacccatctcaaaaaggagaaaatatacagtaagctattgtgtatccacccttcagtgcagcaaaactactgaattcattcctcctatgtagctgtaattttgtatctgttaaccaacatctacctcgccttttctccctgctaccatt

SEQ ID NO: 255137 - DNA, 430 bp, Homo sapiens
gcatcctctgccaccacatggcactctctccatgcagatactcggcatactgctctctctccatttgcagatacttcagccactccatcacctgcaagaatgggcacagaagttaggaagggctgtctggtcctcacatgcttctggccccctggggtcaccttccttccacatccctccctctgcaaagcctcacctgccccaggtgtgcttccagctgtgcccgttcgtctgtgggctgctgtaactgctggttagcgtcaggggcttcacaccagctagataactgaatgatgaagaaagagaagtttcaatctgaggagcctgggctgttccacacagtgccccttaaaagggctagagctaggttcaatgtacaacttggtcaataaagatctctactgtgaaggtgctttcctttagaaataaa

SEQ ID NO: 255138 - DNA, 399 bp, Homo sapiens
gagaaagctgcatctgcgaagactctatattgtctccagttgagagtgaatgtaaagtgaggaaacagtacatgaaggcttactcttcaacaagtctataccaagggaaaaagaagtaaagcaattgtgcacagtgacgtcctgggctgaaatatttctcccaccccagccttctgagtagttgggactacaggtgcacaccaccacacctggctaatttttttaaaaaatattttttgtagagatagggtctccctatgtttcccaggctggtcttgaacccctggattcaagtgattctcctgccttgacctctcaaagtgctgggattacaggtgtgagccattgtgcctgatatttgtttgtttttaagatatgatgtccttgaatatgttcata

SEQ ID NO: 255139 - DNA, 178 bp, Homo sapiens
aatgtgcacatctggtatttcctgtgtgagagcaaaactgcaggactcagtgagtggtttctgtggtttgcacttgtgtatctgggtgtatgggagtgtgtagccctgctgactgtgtagatatgaatgtgtgtgcagttgtgagtcttgcatgtggtcatctatgtgaaacaatgcc

SEQ ID NO: 255140 - DNA, 206 bp, Homo sapiens
tacagaagtagcctgacccattggcagaactgtctgcctctgctggagagacggctggacttgagcctgtgcaatcttcaccccttggctagatcttgaggcgtgggagaggcagactgtgtagtagcctgttaccatgatggggaattaagcagtagaaatgcagttagtaaaagtaaccattgctggatcctagttctcttcta

SEQ ID NO: 255141 - DNA, 408 bp, Homo sapiens
taaaagaatgatcaatatcttttatgttagtctttttatgaaatctgaaattttattctactaaacttagggatccataatttcagttcgtcatattagtaacatgtgtagtggccaggcacaatggctgacgcctgtaatcccaacactttgggatgccgaggaaggaggatcgcttgagcccatgagattggtaccagcctggacaacacagagagacctcatgcctaccaaaaattttaaaaacgagcatggtgacacgtgcctgtattcacagctactcaggaggctgaggcagtaagattgcttgaacctgggaggtggaggttgcagtgagcagtgatcatgccactgcactctagcctgggcaacagaacaaaagcctatccaaaaaaaaaagaaaagaaa

SEQ ID NO: 255142 - DNA, 1044 bp, Homo sapiens
ggccagaatgtggccatgttaaatgatatagctattaagctcacttttacaatctaaaaggaactaataaagccaggaaacccttctcatcctccttcacagccctcatcccacacatagatgtaaaaagcttagaaagaatattctgatggctttttcagaaggaaggaccttgatgtgtgtattgtggtaaaatgaaaagcaaaatgagacagtatttaaaagtgaaagagcagagttttgctctgctgaaaaccccttccctgaagaactgattgctgttgaagttaattggcccttagatgggaagccctaagccaagctcccacttacacagtgtcaaacatcccgaagtggaaacattttatgccagtcaggggagagacaggcaacaatagcccaaatgtcattgccaagaaacatctgatactttctaatttctaaaccccaatggaagtgaggcctttttcattgattctcagttctgaaactcccaccctgttaggatttccattccaaataattcaatgagaggtttccagagaaacagtcacagagctcaagagaaagaacacttaaatgctcctgctgtaattgcatcaaaaaatccgggttttaacatcaaatttggcaaatggtgggaccaacccaaggttaactaagtgggctttcattggcattgagctatgttacttataaattataacactatagttccaaggtttttcagccttttggccaacacacacacacacacacacacacacacacacacacactataccatcatctatcaatagtctaaatacataaataaatgcaggtcatttttatcaatggcctaactaaatttatatttaaaagaacaagacttttaaaaagtacatactcctgttggtttgtaagttatacacatttatctcttgtctttgatttaattaaattagtgttttaagtatgaatttattttcctttgctactcattacctgaccactttcactcctctagatacccttaggaataaacctgaactgttccaaatc

SEQ ID NO: 255143 - DNA, 333 bp, Homo sapiens
cttggtctttccagttttataaatctctgtatcctctctctctcttattcggataaagcctctttgagttggaggtagatctggagtttctaccacttgccatgaaaagattactggataaatcttcaataagattattgtcaactgaaacagtttacagaatgggctccagaattatattatagaaaaacatcattgaatacaaattctaatgcctgaaaaatatgttttttctatgagctactattaattattaacgaattaaggcatttgctcattttattcaatgtttattacaaatatatgatttatcaggcactgtgttctgcctta

SEQ ID NO: 255144 - DNA, 350 bp, Homo sapiens
gaatcaacacagttactgggtgaatttaggatgaactacgtgtgacaaatggtgccgttgagtcctctcaactgggaactagtcaccatctatctggagaccatgtgtgtaacgggttgcacctgcttggctggatacaaaggtgggatttctttctgtctttgtcatctcttagcagattgcatcacattttggcttaatgcttactcaatcataagacaagtttcttttacttctatggatgtgaggggggtttctgggctgagcagaaatttgtttcttaattatatttttccagcaacccccacccaacctaccccaccttctctgaagctacttcccccaggctt

SEQ ID NO: 255145 - DNA, 675 bp, Homo sapiens
tccctcaaagtgctggcatttgacaggtgtgagccaccatgcctggcctccatgtcccactttgatagatccttcttttatgttatttgaaaattcagagtaactctaagacaaaaatggacaaaatgattttttgttcccaaattgcatatgcccccctgtatatactgatacttggtctccttgaaaaaatcattgtcatagggctagaaatgagagtaagtcacagaccttgctctctaaaaatagaaatgggaaccactaatcaggatcgagtattctctagagtactggaagagtgctttgctctcttggacccaggtaagttctgtgttatggaagtaatttcacaggaacttgagatcaatgcccagtattccctagtgtaacttttgatattgaagagtgacagatttgcagtatgacatttacatttagtaaatatatcttttaaaatactcatcctgcatctgaataagatctactttacaaattcattttaatgtatattctgtgataattctgataatacataagaggtaagtgttattgttactgctatcttccttccttcctttgcacatttaagtctagtgtgtcttaaactctagtgggatttctactgtgtcttgcatagattggtcaagacagaatttttgtcctgaaggatcctgt

SEQ ID NO: 255146 - DNA, 1968 bp, Homo sapiens
cgcctgcgcttgctgtggcccgggtccctcagtgccgcggcggcccggaggtggcgggaggacggctccgcgctgcatgcggggcggggaccagggacccgtgcgggccgcctccagagaatgaggctgccagccttgagagcaccaccgttacctggttgaagaggggaggggaagtccagcattggcctctgcagcgtggatctcccggccaggctctcagctgtcagatcctacaaccagaactctgcgccccaggatggaggctccagcccagaaggctgggcagggaggactccccaaggccgatgcccagggtgcctccggggcccgggagaagaggcccgaggagccgaggcccctcgaagaggaccgagctgggagccgccccactcaaaagggggacctgcgtggagcggcgggcggtaggacgactcccccaggcgggggctcccggggctgcagcctcggggtgagccccggcccggggacccggcacagcgccgggaccagacccctcgtgcgggagccgtgcggccccacctcttctcagaaccctgagctggttatccccgaggggctgcaagcccgggagggcccctgtaggagcccagcgcgtggcggggactgcagcaggaactcctgcctggcgtggcatcgcggggcgcccgctggggagacgccacccgtgtgtgacccctgtccggagcggatccagaaccacccccggactcaactgtgtgaggtccacacggactgttggccgtgccaaccagggactggcgctccgacctgcccgaggaccccaaagccgacctcccgcgggaggaaccccttggtggagcagccccgggcttgcgcgtgcggcgaggcctttgcgtggagggccctgcggatcccccaggagaggctgcaggcgacggaggagccccgtccgtgtgcccggtgcgggaagcgcttccgccccaaccagcagcagcaggcgggcaagagtcccccagtgtgtcctgagtgcggccaaacctcgcgacctcgccctattgtccccgaccccccggcccagcgactgtacgcttgcgacgagtgcggcaaggccttcacgcgcacctccagcctgctgcagcaccagcgcatccacacgggcgagcggccctacgagtgcgccgagtgcggcaaggccttcgtgcgctgctccggcctgtaccgccaccagaagacgcactcggccgagcgccaccggcgtggccccgtcctggcgcggcgcgccttccggctggggtgcccgccctgcggggactacagcgagcggagtccccgacgggggtcgggagccggggagaagccgtacgagtgcgccgactgcgccaaggccttcgggctgttctcgcacctcgtggagcaccggcgcgtgcacaccggcgagaagccctacgcgtgccccgagtgcggcaaggccttcaaccagcgctcgaacctgagccggcaccagcgcactcacagcagcgccaagccctacgcgtgcccactgtgcgaaaaggccttcaagggccgctcgggcctggtgcaacaccagcgcgcgcacaccggcgagcggccctatggctgctccgagtgcggaaagaccttccgcggctgctccgagctgcgccagcacgagcgcctgcactcgggcgagaagccctacatctgccgcgactgcggcaaggccttcgtgcgcaactgcagcctggtgcgccacctgcgcacgcacacgggcgagcggccctacgcgtgcggagattgcggccgcgccttcagccaacgctccaacctcaacgagcaccggaagcggcacgggggccgcgccgcgccttgactgcagggagccgagagtcgacgcgtcgcccaagcgaaccctgcgtcgaggaggggcctttgtcccggaaaacccaccaacgtttgtaactttgattaaacttcactttgtac

SEQ ID NO: 255147 - DNA, 2222 bp, Homo sapiens
cgcctgcgcttgctgtggcccgggtccctcagtgccgcggcggcccggaggtggcgggaggacggctccgcgctgcatgcggggcggggaccagggacccgtgcgggccgcctccagagaatgaggctgccagccttgagagcaccaccgttacctggttgaagaggggaggggaagtccagcattggcctctgcagcgtggatctcccggccaggctctcagctgtcagatcctacaaccagaactctgcgccccaggatggaggctccagcccagaaggctgggcagggaggactccccaaggccgatgcccagggtgcctccggggcccgggagaagaggcccgaggagccgaggcccctcgaagaggaccgagctgggagccgccccactcaaaagggggacctgcgtggagcggcgggcggtaggacgactcccccaggcgggggctcccggggctgcagcctcggggtgagccccggcccggggacccggcacagcgccgggaccagacccctcgtgcgggagccgtgcggccccacctcttctcagaaccctgagctggttatccccgaggggctgcaagcccgggagggcccctgtaggagcccagcgcgtggcggggactgcagcaggaactcctgcctggcgtggcatcgcggggcgcccgctggggagacgccacccgtgtgtgacccctgtccggagcggatccagaaccacccccggactcaactgtgtgaggtccacacggactgttggccgtgccaaccagggactggcgctccgacctgcccgaggaccccaaagccgacctcccgcgggaggaaccccttggtggagcagccccgggcttgcgcgtgcggcgaggcctttgcgtggagggccctgcggatcccccaggagaggctgcaggcgacggaggagccccgtccgtgtgcccggtgcgggaagcgcttccgccccaaccagcagcagcaggcgggcaagagtcccccagtgtgtcctgagtgcggccaaacctcgcgacctcgccctattgtccccgaccccccggcccagcgactgtacgcttgcgacgagtgcggcaaggccttcacgcgcacctccagcctgctgcagcaccagcgcatccacacgggcgagcggccctacgagtgcgccgagtgcggcaaggccttcgtgcgctgctccggcctgtaccgccaccagaagacgcactcggccgagcgccaccggcgtggccccgtcctggcgcggcgcgccttccggctggggtgcccgccctgcggggactacagcgagcggagtccccgacgggggtcgggagccggggagaagccgtacgagtgcgccgactgcgccaaggccttcgggctgttctcgcacctcgtggagcaccggcgcgtgcacaccggcgagaagccctacgcgtgccccgagtgcggcaaggccttcaaccagcgctcgaacctgagccggcaccagcgcactcacagcagcgccaagccctacgcgtgcccactgtgcgaaaaggccttcaagggccgctcgggcctggtgcaacaccagcgcgcgcacaccggcgagcggccctatggctgctccgagtgcggaaagaccttccgcggctgctccgagctgcgccagcacgagcgcctgcactcgggcgagaagccctacatctgccgcgactgcggcaaggccttcgtgcgcaactgcagcctggtgcgccacctgcgcacgcacacgggcgagcggccctacgcgtgcggagattgcggccgcgccttcagccaacgctccaacctcaacgagcaccggaagcggcacgggggccgcgccgcgccttgactgcagggagccgagagtcgacgcgtcgcccaagcgaaccctgcgtcgaggaggggcctttgtcccggaaaacccaccaacgtttgtaactttgattaaacttcactttgtacacatggcgtccacaggcttcccctaactcgagttttatttgaccttttctaaccgggcgcacagcatccggttgcaggcataagcagtaataatctcgagtgggcgctgatacggcccagacgctgtgtccacgatctctagggtctttttctccgcagagccgcggagcgtgttactgggctctctggtatgcgaggaaacggggcaaagtgactctcctgaggcacgaacataagacgatggaggcaggatt

SEQ ID NO: 255148 - DNA, 2324 bp, Homo sapiens
cgcctgcgcttgctgtggcccgggtccctcagtgccgcggcggcccggaggtggcgggaggacggctccgcgctgcatgcggggcggggaccagggacccgtgcgggccgcctccagagaatgaggctgccagccttgagagcaccaccgttacctggttgaagaggggaggggaagtccagcattggcctctgcagcgtggatctcccggccaggctctcagctgtcaggtgagtctcacctcacacctctcagaagacatggacaatggcagtgaatggagccaggaggacccggagtgtcggcttgccactgagaaacggagggcaggaatcctacaaccagaactctgcgccccaggatggaggctccagcccagaaggctgggcagggaggactccccaaggccgatgcccagggtgcctccggggcccgggagaagaggcccgaggagccgaggcccctcgaagaggaccgagctgggagccgccccactcaaaagggggacctgcgtggagcggcgggcggtaggacgactcccccaggcgggggctcccggggctgcagcctcggggtgagccccggcccggggacccggcacagcgccgggaccagacccctcgtgcgggagccgtgcggccccacctcttctcagaaccctgagctggttatccccgaggggctgcaagcccgggagggcccctgtaggagcccagcgcgtggcggggactgcagcaggaactcctgcctggcgtggcatcgcggggcgcccgctggggagacgccacccgtgtgtgacccctgtccggagcggatccagaaccacccccggactcaactgtgtgaggtccacacggactgttggccgtgccaaccagggactggcgctccgacctgcccgaggaccccaaagccgacctcccgcgggaggaaccccttggtggagcagccccgggcttgcgcgtgcggcgaggcctttgcgtggagggccctgcggatcccccaggagaggctgcaggcgacggaggagccccgtccgtgtgcccggtgcgggaagcgcttccgccccaaccagcagcagcaggcgggcaagagtcccccagtgtgtcctgagtgcggccaaacctcgcgacctcgccctattgtccccgaccccccggcccagcgactgtacgcttgcgacgagtgcggcaaggccttcacgcgcacctccagcctgctgcagcaccagcgcatccacacgggcgagcggccctacgagtgcgccgagtgcggcaaggccttcgtgcgctgctccggcctgtaccgccaccagaagacgcactcggccgagcgccaccggcgtggccccgtcctggcgcggcgcgccttccggctggggtgcccgccctgcggggactacagcgagcggagtccccgacgggggtcgggagccggggagaagccgtacgagtgcgccgactgcgccaaggccttcgggctgttctcgcacctcgtggagcaccggcgcgtgcacaccggcgagaagccctacgcgtgccccgagtgcggcaaggccttcaaccagcgctcgaacctgagccggcaccagcgcactcacagcagcgccaagccctacgcgtgcccactgtgcgaaaaggccttcaagggccgctcgggcctggtgcaacaccagcgcgcgcacaccggcgagcggccctatggctgctccgagtgcggaaagaccttccgcggctgctccgagctgcgccagcacgagcgcctgcactcgggcgagaagccctacatctgccgcgactgcggcaaggccttcgtgcgcaactgcagcctggtgcgccacctgcgcacgcacacgggcgagcggccctacgcgtgcggagattgcggccgcgccttcagccaacgctccaacctcaacgagcaccggaagcggcacgggggccgcgccgcgccttgactgcagggagccgagagtcgacgcgtcgcccaagcgaaccctgcgtcgaggaggggcctttgtcccggaaaacccaccaacgtttgtaactttgattaaacttcactttgtacacatggcgtccacaggcttcccctaactcgagttttatttgaccttttctaaccgggcgcacagcatccggttgcaggcataagcagtaataatctcgagtgggcgctgatacggcccagacgctgtgtccacgatctctagggtctttttctccgcagagccgcggagcgtgttactgggctctctggtatgcgaggaaacggggcaaagtgactctcctgaggcacgaacataagacgatggaggcaggatt

SEQ ID NO: 255149 - DNA, 352 bp, Homo sapiens
ttttttttttgagacagagtctcgctttgtcgcccaggctggagtgcagtggcgtgatctcggctcactgcaagctctgcctcctgggttcacgccattctcctgcctcagtctcccaagtagctgggactataggcgcccgccaccatgcccggctaattctgtttttgtatttttagtagagacggggtttcaccatgttagccaggatggtttcgatctcctgacctcatggtctgcctgtctcggccttccaaagtgctgggattacaggctgagctaccacgaccagccagcatgtaacattttttaaaacacaagtttatgaccatacgtagacatctgtacctaa

SEQ ID NO: 255150 - DNA, 427 bp, Homo sapiens
ctgcttaatcttcatatcaaatctatttcctcatctagaataatagtatctaaggtttcttgtgaagattaaaagaaattatgtgaagggtttcccagtgtttcttagatactctattttttcccttaaaggacttggccaggtgtggtggctcatgcctgtagtcccagcactttgggaggctgaggcaggaggatcacttgaggtcaggagttcgagaccagcctggccaacatggtgaaaccctgtctctaccaaaaaatacgaaaattaccggggcgtggtggcgggtgccagtaatctcagctactcaggaggctgagacaggatgattccttgaacctgttgtggggaggttgcagtgagccaagattgcgccactgtactccagcctaggtgacaaagtgagactctgtctcaaaaaaaa

SEQ ID NO: 255151 - DNA, 377 bp, Homo sapiens
ttgttccttcctccccaccttcattccaccttaattacccaggcctcggtttgcattcatgagccaggaagacatgcatgtagataaagtgactcacctgcctcctctgttcctttctttacctgccttctctagctacaagatgcctccattgctctcatggtcctgggttcaagtctcagttatctgtgtgatttaagccttatgaccctgtacagggagcactttgcacctgaaggcctggctttctcatttgtggccaggcttggtggctcatgcctgtaatcctaacactttgggaggccgaggtgggaggatcacttgagtccagtagttcaggaccaacctgggcaacatagtgagaccctgtctctaca

SEQ ID NO: 255152 - DNA, 773 bp, Homo sapiens
cccacagcctccactgtgcatcagggagccaccacttctctggccaacatttcctagtggaaaggcccctctcctccccaaggagcaatgtcactcggcgagctcccagggaggaagtaagcatgcacagctctgcccttccctcctcttctttccaaagcccaccttcggggctcacaccttctctgcttcaccacttgttaagcctctggaagcagctctgccctactttgtggagagggtgaggcctaatgttgttcagtgccacctgaggttgcacgagccacagaattaagagcccactgtggccattcagacgagccatctcctctgtgtcaggtaacgatggccacagtcacgctgcataacaacatccatgaaacctcagcaccgtataacaataagcatgtagttagctcatgaacctgaaggtctgaaggttggctgccccgggtcgggcttgcctgggctgtctccaactgtggctcagctggggtcatctagtctaggtggcttggcctcccccagtgtgacacatcttcctcccaggaccaagacactagcaatgacagaagcacaggagggcaagccagcagctgcaggtccccaaagcaagtcacgtggccagcacccatgcagtagggaagggtactcctgcggaagtgagcaggagagagcaaatatttcccgacagtaatccagtctaccacagcctgccttcctagagacagttattcatgttccacatgcagaatatacccaatcaacacccc

SEQ ID NO: 255153 - DNA, 452 bp, Homo sapiens
tttgtctacagtcttgaagaacgggttgaaaacaacagtgtgccaagtcgcttctcacctgaatgccccaacagctctcacttattccttcacctacacaccctgcagccagaagactcggccctgtatctctgcgccagcagccaagacacagccttgcagagtcaccgctttcctgtgcagaaaccttaggggccctccaggaagctgtgggggccaccaaagccttcggtgaacatttcctgcaagagccccgacagaagattcagaacatcatagcacctgctcattcatccatgtggcaacgttacatcctatgctcatatttagagtgtgggttttctttagcgtgtgactctgccctgttaactgatttgaaaaatgataaacacattcagatctagtctttttaaaatccctttttaaattgtaaaataaagcaagcatgctat

SEQ ID NO: 255154 - DNA, 303 bp, Homo sapiens
gcctgcatcaggttcctgaatcagctctgctgagtattggctgggaaacttgggctccatggtttgcaaagagcttatacctgtctcatcccacttggtttgcccaattccctgggaggttgatggtcggtagtgccacccttacctgtgtggaggaggaaatggcagttttgggagttgagtaactgtgtaaggtcatcctgctccaggagatccagggacagcccctgcccaagtcttctgactccagatccagtattcttcccacccctctcctgaataaaggaaaccttgatttaaatc

SEQ ID NO: 255155 - DNA, 475 bp, Homo sapiens
catggttggggtgaggagaggaaaaggcttcatggagcaaaaggcactttagctgaaccttcctgaaaggtcaggcatctgataggcaaagaaaagggaaagatgtcctcactaccctttatggcaggctgtgtccccacagactctcagtgcaaattcctccttcctgaagaaagcagtcaccaagcccaacgtgcaactctcttggtacattataacttaatcaaggtgatgtttaattgctttcctcctgcttggcttcaggcttacatcaccaaagcctttagagaaacagtcaccttcacagctgtacattctgcaccaatgactacatactttagggaaggaccaaggttacagagggagactggtgccttcgctgcatgatgcacagactcagaacatccctgcactgaagtgtaggcaatattcttaatggcaatgtggcagtagcaaataaaattatatgcataaa

SEQ ID NO: 255156 - DNA, 522 bp, Homo sapiens
cagttgtttctcattcacttttaatcacgttttgagcacctgctaagtaccaggcattttgctaatgaggagcacagaggtaaaagacacatcactactgtatgaaatgcgtagctcagtggtgtgatacacaagcacagagaggtaacagagagcaaggagggcatggaagagaggcctctaactttggactgggaagggagaagatgtaagacaagaaagtcttccctaaggagctgatgcttgagctgtgccctgaggaatgaagagtagaccagttgggctaagcagacagaaaaggggaggaagctccagagagcaaatgagcatgagagtgcctgatgtagttagggcctgctctcactttaaatgaacacagacatagcattattgtggcacaaccatatagtgtggagataaaaaatggtggctatggaaattacaaagtagcagttaagaaataacgttaagcagtgttttataagtggactgtaagtataattatgtaaaatatacatatag

SEQ ID NO: 255157 - DNA, 693 bp, Homo sapiens
ggctacactcgtattatacctggtgatccattagaaaacatttgttttctatccccatgaccttagtctcttttgaattagagggctgacttccaaagggaggaatgcttccaccaagaaacacaatgattttattgaactggaagtcatgactgcaatccagctactctggcctcctcattcatctaaattaggcaaagagaaaatttattgtacttgatgggtgtttgatcctgattatcaagaggaaattgggctgctactccataatggaattggagatagtacatctggaatacaacagatcccttagggtatctgctagtactaccatgctactgtgtgtggcagtgggactagtgaattttatttccatgtgtccactgatgcactgcatttactgtgaagtgagctccttgatcagcaagaatattgtttggaagagtatgacattggataagaaattcaacaggtcccttagggtatctcttagtactgccatgctaccgtgtgtggcagtgggaccaatgaattttatttccatgggtccattgatgtaccacatttactgtgaagtgagctccttgatcagcaagaatgttgtttagaggattatgaaaatggataagaaattacataagtccacaaatagtaaatgataagtcatggatggcagaaatattccatacatgg

SEQ ID NO: 255158 - DNA, 690 bp, Homo sapiens
aaaaaattagctgggcatggtggcatgcacctgtagcccctgctactcaggaggctgaggtgagaggatgacttgagcccagtaggcagagattgcagtgcattccagcctgggctacacagcaagaccctgacaaaaaaaaaaaaaaaagaaaaagaaggtcacaaaaaaacagaaaactgcaaaatattgatgacaaaaattaaagaagacataaataaatggagaaatataccatgctcatggattggaagacttacattgctaaactgtcacttctccccagatggatctacagagtccacataatctcacttaaaactccagaagaaatttttgtaaagttgacagctgattctaaaattttacatagtaatcagaataggttgatattaggatagacagatagttcaatggaatagaatgcagagtttagaaatagacctacacagaaatagtccattgattttttaagagttgctttttgataagggtgctaaggtaatgtgatagagaaaggaaagtattttcaattcaaatggctgaaatgactggatatccattgagggaagaaagggactttagcctttcacacaatacacaaaaattatggaattctgaagaaaataagagaaaatgttcatgaacttggggtaggcaaaaatttaatagatgaggcaaaaaaaaaaa

SEQ ID NO: 255159 - DNA, 382 bp, Homo sapiens
cattcctgtagatgagtcttctggcttccagttttccggagaactctgaggctgtcctgctttttttttccccccactgttggtcatttgtttcttctgcctggatgcttttaagattctttgtagcttaccaagttcagcatgatatgcccttaacttgttgattcactcttatttgttgtttatttttcctggtacatagtaaggtcgtttaatctacaaattaagctcattattttagaagagacctcaagtatctctttctggaccatttgtactaatttatttcatagtgttccagatgtttgaggtatgttgatgaacaaagcagataaaaattcctgcccttgtgtagagcttaaattgtagctggggagataaa

SEQ ID NO: 255160 - DNA, 440 bp, Homo sapiens
tccaactctgagaattagttttcagtgttctcatgagactcagagaagtttaaatacctacccaaattactcagtgatagatccaaaagccaagagccaagacacacaccaatacacagaatcccaatttaatgcctttctactaatattgtctgcatttttaagaaaaatattatgaatagcaacatgagtactttacaatggcattagttatcagtttcatttcacatttcactgccatttttgtagcagacatggtcccacatcttctaattacattcccagatctcaaccactgtaaatatcttcagatcacctattttgcttaaatggtggcttctgtgtgggtaaatctggtgccctctgccttgagccccagctgtttgcatcctgctgtgtgtgattgtgagtgactcaatgttggacagcggcaacttcag

SEQ ID NO: 255161 - DNA, 336 bp, Homo sapiens
ctcctggtgattttaaggtggtgcaatttccatgacaaaccagcctaccaggtgttgtttgtccacctgagaaaacttctatttgagtattggcaccaaaattagagttcttattcttcaaaaagttgaaaaacagctgaggtcaatctcccaaaaggcaacaacgtttccattccaattcataaagtcgcgaagcagtaagatctgaaggacactgttttatttttatcggagatgaagcttgtttttatttacaatttccctggacgggtttaagccctgagaaggatgaattaactctgcctttgtatattaaacattatcaaacatccccat

SEQ ID NO: 255162 - DNA, 357 bp, Homo sapiens
cccaggctggagtgcagtggtgcgagcctggctcagcccatggggatggtggtgagctcctccatttatttatttatctggagtctcactctgccaccaaggctggagtgcagcagtgcaatcacagctcactgcagcgtcaaattcctgggttcaagtgatgctcacacctcagcctcccaagtaggtgggactacaggcacaccccaccatgcccagctaatttgtaaaaacttttctgtagagatgggggatggtctcataatgttgcccaggctggtcttgaactcctggcctcaaatgattctcctgcctcagcctcccaaagtgctggaattacaggcatgaaccactgtg

SEQ ID NO: 255163 - DNA, 483 bp, Homo sapiens
gctgttcatggaatagacacgtatggagccaggctctgtgctaggtgccagcaatgcaaagatgaaagacacctgtctcaaagagctcccaccagctgggcctggggcatcatccccaagctcacaccttgtcattcattttgcttgtctattcatggtggttaattcctgaggacaaggacttttttcatactcttcatgatacttatgtgctgagagtgggtgttgaaatgtatttgtactttgttttatttgggagaaaggccttattgtgtagcagctaagagagaaggccatagggttatatggattgggttcaaattcccctccaaacctatagctctgtggcttattaggaggatgactaggacaagttatttagcctttatatacctcagttttctcgtctgtaaaataggtgataggtaataatagcatcttttatttgaaatttaaacaaaatattgaacttggcacatagtg

SEQ ID NO: 255164 - DNA, 336 bp, Homo sapiens
tcagccccgagacactgcttcaataggaggaagaagtcaccacaggccctcactggaggtgcagcgcagtgtcagagaagtagatagagtgcctcccggccacacgccagcagggtgactctggctgactttcttagcctcttcgaacatctgttttcttttcttatttttcttcctttctgtaacctcaagaatatctgttttctcagtaataaaatgactagttgccatggggatgagaaaatggacctgttacaaagcgcgggggttgagagaagggccatggggccaccctgtctgggcttaagtcttttttttttttttttttgagaagga

SEQ ID NO: 255165 - DNA, 522 bp, Homo sapiens
gtaataaggagaactgatattctatagtgtctggaaaactcgcatgtatatgctacaaataataaaatcatgctttagaacaatattcagtgtcaagggatagtgtgcttaacatgtagctaaatgggataaaaaaccagtatgcacagtgtcatacatataaaatacaacagactttgcatatgattgtggttttcttctttgtgctttcctatatattttatatcaaacctgtattattttgttaatcatctccccacattcctattaaaccgaatataaaatagggaaaatgtacatgtatgatagcttgatagattgaaatatttatttaaggtctgtaacatttagcaggcggcagggctgactagaagataaaagaattaatctggagcggccgggtgttgtggctcacgcctgtaatcccagcattttgggaggccgaggcgggcagatcaccaggtcaggagatctagaccatcctggctaacatagtgaaactccgtctctactaaaaataca

SEQ ID NO: 255166 - DNA, 790 bp, Homo sapiens
agagcagtctttgtagaccattgctagatctttttggaatgggctgccttgaaagcagagagaatgtaaccatgtgtctttaagtggcattgtttagtggttcttcacggcagcccaaagagaaagtatctggcatcagatttgctggatgtgcagagatgccagtatctctcgtttgagctagcctctgcggtgtttttgctctcaaacctggtggtagagtgacggctttgatttgcttcctgcctgaagcctgctttggatgaatttaaaaacctgtttgtttccccatcggccggctgagccttacccataattcctgaactttgattatgggggttattacaggacaagagcttctttgtaaaagagcatgtttaatactctggggtctagcgtgactagcggatataaattgtatggaagcaattaaatgcgaaggaaatgtcatgtgggctgaatttaaacataacttgcggcattgattttttttttttaacttacactaagaaggatggagagagaaaaaagaaagagaatggaaacaggccaagcgagtcagagaagcacacgcagagacaagagaaaaggagtcatttttaacatttggttaaaagtccaaagcccagagctagcattatgtgaattatactagtattatgccattgccctttaaatgaactctttaaaaacacaaatgtcagggaagtatactgtacttggggcttgtatctctttccagttgctcctctttatcttaaggcatatatgtacatacagcagtgatttt

SEQ ID NO: 255167 - DNA, 405 bp, Homo sapiens
ccttaatcctcacaacaaacccacaggtagatactattattattcctagttttatagatgaggaagtggaagcctggaaaggttgagtcatttacccaaccagattcatacagctaaagtcatggagctgggaatccaacccatatggtttggctgtggagtcaccattctgacctaccttactgtatggaaaattaatggcaagagacgagagagaatgagttttggatatgttaggcttcagaaatatgagggacatctacctgggggtgtccaggagggtggttacatttgtatgtttttctgtagctcagaaaggacgagcagtgaaaccaagacaatgagagaagccacctgagaataaatacaataaaaaatagaggagagtgaatataaacactaata

SEQ ID NO: 255168 - DNA, 1072 bp, Homo sapiens
cctaagaaatcttaacatttcgccaggcaaggtggctcatcctgtaatcccagcactgggagagaatggcacacgtaatcctagcctttaggaggccaaggcgggaggattgcttgagcccaggagtttaagaccagcctgggcaacagtgagatcccatctttacaaaaaattgaaaaatcatccaggcatggtggcctgtgcctgtaatcccagctgcttgggaggctgaggtgggagaatcacttgagcccaggaggctgaggctgcagtgagccaagatcgcactactgaactccagcctgggtgacagagcaagagactctgtctcaaaaaaaaaaaaaaaaaaggaaatcttaccgtctttagttcctatcaccattactgcagatttagaagcaatctacctgaatcagaaaatagagctcaaataagttgtgtggcttggtataatctgggaaaatcagtttcaaaagttacctgcccttgggatagaactttttgtcaacaccagttttcaaaaagtaccctagttatgaggccgttgctgggtaaactttatcccattccagcttcaaccagaggaacctgtacatcctaaagtttcacataagattacacttgaagaataggtttctccattaaaagacttgaaaactactggtcttcaggctccctacctgtttaatctgtcaagacattgccagcttaaatttcggacagttacataagtgtccctgttaacttcaaatggccctgacaggaatgctaaaacgtcagacattcaaatgggccaagctttatcaggattataaaactttcaaagctcaaaaacatgccatctctatgggaaacagtatcttggatttgatgttacaaaaggaacaagaaaatggtttctgaatggcagctttcagtttacaagtagtggcaaagtaaatgcttggatgttatgaggtagttgatctaaattgtgaggctttcttaaaggcactcctttgatctcatggagtgagagactagaaatctattcaacgtattaaaactcctctcccagcaaaataaaataaac

SEQ ID NO: 255169 - DNA, 424 bp, Homo sapiens
gacttctctacgtagtcatctatggtttccccagtatgcatggctctgtatatctttagtgagaaggtcactttctctgcaaggtgtagcctacagcctttttacggaagcaaaaatacctacaacaagtgaaggacatttaaaggattgaactccaatgtgtgcaaaatcagcatgaactctacatgtgatgactaaggcattgatcatagagagtaggagataatcatgctggttgtccatggtgacacacacatacagatgtccctagctgggtaacgtactatacagacagttattacagcttataactcatctgacactatacttggcactctatagctcagatgtctacgacatattaactacgacgatacgctcacaatcatcatccatgaatctatacatccagggagtgcctgct

SEQ ID NO: 255170 - DNA, 1370 bp, Homo sapiens
cgcagagctgtcagcaagctccaaaccgcggctgccgcccggagggaagcagacggggagtcggtggcggccgccgagtccgcatgcgcaggctgcaaaggcccttttgggccggtcccgccgcgctaggttggcgagtgggactatttgatcctttccaggttcgccagcgtggtgttacgagaggaaagcgcagccgcagcgtacgaatgggaaggccaaacacggtcccggggagtctgagggaagctgcagggcgcctggaattggggtctcgagtgagccggtaaaaaccgcctcccgctgagcgtcccggaacaaatactgtctgaactgagccgtaagcaagaaacggtcaggagaagctggggcgatctgatgattagaacatttcagggactaccagagagaagtgcgtaattgctctaaggcaggtaggtaattggcctggaaacttgggaacgccccgccccccaccccgactttcagcaaaccaccgtgcccaggaaaaagagcgattgtggaagaccctgtgaagaagagaccaggaaggcactgtggcttaagagagcaaggcgttcctgaatgcagccaacatcaactggtaaacaaaaaactgtgagaacggatcctgaatcttgcgcttaccaggggaaattcaggagagatatgaacctgagcaagatgaggttgaagttactcaatgcggcattaagcctgttcacggccacttcctccggcgtcaccaacacacacactgtacaccagcagtatttttacacggggtatgtgtgttaagtactatcaggtggataattattacttcacctgtatttgctgccttgataccattagagaaactcatgaattataaatagcatagtgaatttgtgattccctgaagatatactaggtggacttttaaaaaggcttctattccaaagggaactaatatggaggaaatggtttcgagaaagaaaaaagaaaaaacggagtccttgattagttgtggggaaggcaacataatgtaatgtgaagaataaaggagtcagatccaggaaaccccataactattatgaaacatttctaggctgggcgcagtggctcacacctgtaatgctagcgctttgggaagccaagatgggaggattatttgaggccgggagtttgcgaccagcctgagcaacatagcaggatcctgtctctgcaaaaaaatttaaaactagccaggtgcggtggctcgtgcctgttgccctagctactcagggagactgaggcagaggattgcttcaacccaggagtttgaggttgcagtgagctaagatcatgtcactgcactccagactgagcaacagagtgacactttataa

SEQ ID NO: 255171 - DNA, 442 bp, Homo sapiens
actatgaggagaaataaatgttcagaaacaagtagagcacttataaacacctttttgtgccaaattaagaacaaaaaagtcagcattaagttaatgccaccatatacatccttccacatttatgtttacaaacttgtgcttttatttctaggaaacatttctaggctgggcgcagtggctcacacctgtaatgctagcgctttgggaagccaagatgggaggattatttgaggccgggagtttgcgaccagcctgagcaacatagcaggatcctgtctctgcaaaaaaatttaaaactagccaggtgcggtggctcgtgcctgttgccctagctactcagggagactgaggcagaggattgcttcaacccaggagtttgaggttgcagtgagctaagatcatgtcactgcactccagactgagcaacagagtgacactttat

SEQ ID NO: 255172 - DNA, 536 bp, Homo sapiens
cgcagagctgtcagcaagctccaaaccgcggctgccgcccggagggaagcagacggggagtcggtggcggccgccgagtccgcatgcgcaggctgcaaaggcccttttgggccggtcccgccgcgctaggttggcgagtgggactatttgatcctttccaggttcgccagcgtggtgttacgagaggaaagcgcagccgcagcgtacgaatgggaaggccaaacacggtcccggggagtctgagggaagctgcagggcgcctggaattggggtctcgagtgagccggtaaaaaccgcctcccgctgagcgtcccggaacaaatactgtctgaactgagccgtaagcaagaaacggtcaggagaagctggggcgatctgatgattagaacatttcagggactaccagagagaagtgcgtaattgctctaaggcagctttctgccatgtgaggacgctaccagaaggccctcatcagaaactcaaacctgcaagagccttgatcttggacttcccagcccccagaagtatgagaaaat

SEQ ID NO: 255173 - DNA, 722 bp, Homo sapiens
ggcgatagagtgagactccgtctggaaaaaaaagaaaaagaaaagtatccagaaacagggtggaaaagcattggtaattgtggagtaccaagtaatgagttcttactctactcttgctatttttatgtgtgttcggaattttccttactaagaaagtatgtgataccatgcgttgccacgatatggcatggcatgatgagaaggcacttcacctctgtggcgtttccccccaacccataagccctttctaatcattagaaaacattaaacaaacccaaattgagggacaattcacacagttcacacagttcatactgagacacggaccaggagaaggaaggatctgggggaacgggagactgacccagtctaaccaggacttcaaaactgccatggtcatggaagacaaggataaactgaagaagtgtcacagatcagggaaccctaaggagacatgatgactcaatgcaatgtgggatcttggattggatcctggaacagaaacagacattgatgggaaaacaggtaaaatccaaataaaacctaaagtttagttaatagtagtgtactaatgtaagttgttttgtttgggcatgtgccagttatgtgtattcactttgggggcggctggtgaagagcacataggaactctgtactacctttacaacatttgtgtaaatctaatcccaaaataaaaagttcatttacagaaaaagaagaca

SEQ ID NO: 255174 - DNA, 548 bp, Homo sapiens
catcctgggatgcagaggacaccccaaatgtccacagggccacgggtgagaaaccctgcttgagggagtaatgacttttggccaaaggatggcccagatggggccctaggtctgaggacttcggggccggccatgtgggtatgagggggcaggaagggagggggcccaggactgtggctttgtatcccctggctatggaaggtccttcacctgctcttctccccatgttttccttgaggaatcttgaccgacaatcccacgttcctactaatttcactcatccttcaagatctgcctcctccaactccaagaagccctcctgggctgccccagggttactggtgcttactctactttccatcttccaacttgagatgacattctgcctccatcaccctcccacataacatcccactgggctgcaccacggcccattccctgaactctgagtgcactctcccctctccaggcctttgcacacgcagttccccccctcctgggaccccctccctaccttcccgttatcaacttcttgtgctctcccacat

SEQ ID NO: 255175 - DNA, 527 bp, Homo sapiens
gcatgacactcaaaaggaaatgctcattagaggattttggatttcagatttttaggtttgggatgctcaacttgtaattagaaatgattgcttttgaaaatggaaattaagttaataagcctgattttttaactctaagtaatggaacgtgtataggttaggaattgaaagctgggtcctaaatctccttgtcctctcactaggtgtgagcttacagccaaatcatgtgactccctgaggctcagtgtccccaactgtcaatggatggctttacaggccagcactactctcttctcacctcttaaattgtaggagtgtaaagggatccttaaatctgcatgactgtgtcccaggcatccagtttttctgtgtgaattctagaatggttacaggcctcatctgagagccacttgtagactactttctttccaaatattaatatcaaaatgtcagattatgcagagattttctctttaattctgtacacaagcagaaatagctaaagtcaatattgtcttaaaaaaaaa

SEQ ID NO: 255176 - DNA, 392 bp, Homo sapiens
ggagctctgatggaaaatcttagtatcatgaaatgtcatcaaaattctccatttactctctgcttccccagttcagtttcttgttactagttatgtagttgctttagaaacaggatatgggctcagctcacttaagcaatgatgagctttatgattaaagctcgcagaaacggtgccaggtaaaattctgctccacagataaaacagccaacgtttagctggattagaagcagaacgtcctgctgtcaagagtaggattggcccttagcatgctgtgtagcttggcacccagaaggattcccaggacaaaaggaaaatctctaggtagatatatacagatattatctcaaacaccaaaaataacatttgtgaataaaaataatagaaaaact

SEQ ID NO: 255177 - DNA, 409 bp, Homo sapiens
tttcaagcaaggagaaggtcttccatcttccagcaagggagtgggccacctctgtaggcccagatattccggagaagctgggaggccaaggtccttaagtgtgtctaataagtttccccattccaattctcatgttcccacttttttccaatcaggaccctgattctcttgaaggagacttacacaggctgagaattaaccttctctggcgttctgccactcataagtacaggctgcacctgggcttcagttcagttggccttctggctgccagtgatgagggactttttaaaggcttccatggaggccctttgactctcacacttgggtttaaattggtggttaatagatttgatcctggcatctatacttagtgcatcaatggtgcttaccaataccctcccaattc

SEQ ID NO: 255178 - DNA, 122 bp, Homo sapiens
agtgttgggcaccctggtgctctccagcatgtggtgtttggcctaagtggcccatgtggactttgtttcaaggattttacgacaagaaacaccaaaatgaggacatctctgtggccatgttt

SEQ ID NO: 255179 - DNA, 375 bp, Homo sapiens
gagccaccacgtccaaccaagttaatattttttaaatgaagcactagtaagaggactgcgattccatccaaggtcagggattgtagcagcagacttcgctttagggagacagtgtgggaaaccagcagttttgattatctctttttagggctttccatttcactaaagaagagggctccactttttggcatggggtgaaacatggaaaaccctgactctctggattctgggcttcaagacaggacagaatgagaggaatcaggagttaccgtccaggcctttcattagtccttctcttcactgcatgactgaatcctgccctctggctttcctaagccccaggccactccagcattgtaggaagcagcagttcct

SEQ ID NO: 255180 - DNA, 2707 bp, Homo sapiens
  misc_feature (1327)..(1327): n is a, c, g, or t
ccccctctctcttacttttaacctgattatttcatatcagttatatgggacttcagaaaactttccttgttcctcaagtctaaattagccctctctggtcacttttatgccatagattttcaatatttataattacatatgtgcatatgtatatgtgtgtatttgatatcgtttaagtgttgactccaagcaattctaaataacgcaagcaccagaactgtgcctgtctgctcaaaagtgcagtcatcccttagtatctggggggattggttctagaaaccctgcaggtagcaaacactgcaaatgcctaacttctttatataagatagtgtagtatttgcatataacctatgcatatcctccctatgctttaaatcatctctacattacttataatacctgatatagctgtaaatgttatgtagatagttgctgtacagtattgttttttatttgtattatgttttagtgtcacattgttgtattttattgtgttttttttcccaaatatttttgatctgcagttggttgaatccgcagatgtggagcctgcatatatgaagggctgaccgtatactctctgctccttccagagtatctggcatgtgatgagctcgccacaaacatttagtgattcgataaggctctggttgatttacagtttctactttcctgacactctgttgctggtttgaataaaaatttcttcttgaaatgtcatcataaattgatttttattggaagatttacagaagaaaactaattttatatgttctgctcctatgaaaaatttaatattttagtgtgatatctttgccattaattactattttgagggtttgcagtattcttgatcatgtgttgtctgtgcaattcatttttagagcaaagaagagtgtgaagtttaaaaattaataaaccaggttttattttagtctttgtcttgatggcattaggagtaaggagatgtggagtaccttgtatgacgactaataccatggaaagatctggccaactaacaaatcatttatatcacgtttctggataactgtttataaacatacaatatattggactgataaaagctgataagtatatgattcaatgactaatacatgtccaagtgaaaaatttttacaaatggacaataccctattaccagtgagctatctgcccttagaaactcagatttattagaatcccaattacctgtcagaataccaaacttgtccaatatgaattcttcaatgccaaattactttgctcaactatattttcatataaagccctcttaaaatctttcttttccatgaagttgtgttttttngttttaattccatagctcttagcctacctaccaattctctcccaagtacacaagcaggagcaccatctcaaaggagtttttttctttatatatttacttgtttacttaaaaattcatttgttttgttttatttgtttatgaaatatgtatatatatataggtcttgctacatattagacactgctccaagctttttaaaagctttactcattgcttttgtcagttcatttcatccaaaagtaaaatattgtttaccatacaaagttgtcatttcaacaaattataatgttttctacaaaatgatatgtcatgacatttagcaatttagccctgcagtagattttatttactttgactcaccattagtctagaattaggattccatttttctctttctaaaaatgacaattattaatgttttcttattgaaaaaaataacatccattcatttttattaacaaataacagtataagtaagcctatagaagaaaaattagccatatcactaccctgtttagtttttctctgtctgtcttctgatcatatgtatatatctgaaaatggataatatttaagtgaagcaaaaataatattcaaaatgtacttcaattgaatccagattttatttgtatttcatttctcaatattttctcctctacaaaaacagagtgaagttgtaagaatactagacccaagtttcaaaatctcatgttaagtgagattttgcatgtcctccgtaaaatttctggagcactttataaaagtttattttcgtggaaatcaaaaaaccaggtcatgatattcttttctaagtccctaaacctgtctaacaatgcaaaggttgtctgtccttcttacatgtagactcatttgtctaagtgggccttaacatgtatgatttccatcaaggctgcttggcaaaggctttctgttagtgtgtaaggggaatatgatgaccaatataacaacctcagtatttcctctacctctcttcaactcctcaacgtgaacccaatgtttttgtggaacacaaagcctctgaatgcctgggaagtcaccagtgtgatcccagccaccacccattaatcttcttaactagcatgtccctcatcattacctcccttcccaaagccctttgcatgtgcctgttccctggcaagaaagcctcaactaaatggccaagagctaatgagaattccccccaaaatggaaaattgaatataaatgagaaagttttaaaaggtgccaagatcaggcccggtgcagtgtgtcacgcctgtaatcccagccctttgagaggccgaggtgggcggataacaaggtcaggagatcgagaccatcctggctaacacggtgaaacctgtctctactaaaaatacc

SEQ ID NO: 255181 - DNA, 296 bp, Homo sapiens
ggtcattaaaataatgtcttgaggccagagaatttatctttgaattatccttaaattttcaccgtgaagtttcttcagcacattctacacactgaaagagtcagaaaatcattttgggtctcctgaatttggtcttcaatttgtcagcaaagataaagtgatcatgttatattttttttcaaaaagagtgtcattaaatcaattcatttgaatacttgcttattatcacttcatcataggtaatgtacatacctgaagatatttttaaaattaaaaattgtgaagtaattatatgc

SEQ ID NO: 255182 - DNA, 395 bp, Homo sapiens
ccctataaacatgcttctccttagcttttagagcatcatcatcctgttagtcactcaagtcaggtccctctcctcatccaccacatccaacttatcactatgtctgtcagtttctttgtttttctttccctgctgtctttgccctagttaggtgtttgccaagtttgcctggttattaaaacctaccagaaaaaatgtattaatgataaagattcctaggctgttcccctggggttactgactcagtgattttggctagggtaggatccagaaatatgtatttttaacaagcaccttagatgatgtttatattcaggcaagtttgggatacagtgctgtatcaattaggatactttggttgtaagcaacagtaaccaactctggctaacttaagc

SEQ ID NO: 255183 - DNA, 911 bp, Homo sapiens
gcccggaagtgatgtcatcggaactgtgcaaggtcccgtccagagctggctgctgttccgctagcgagcggcatgcttagtgaagaaaagcttaaaggccgtctttgcccaaaacgctctctgtgcgcacctgcatttcccccagatttgcaggtgatgagagttctgtaaaattacacagctagtgactgatccagcggaggccgaatacagatggagtctcactctgttgccaggctggagtgcagtggtgccatctcagctcactacaacctccacctccggggctcaagcgattctcctgcctcagccttccgagtagctggaactacaggtgcctgccaccattcccagttaatttttgtatttttagtagagatgacatttcactatgttggccaggctggttttgaactcctgacctcgtgatccacctgcctcagcttcccaaagtgctgggattacaggcatgagccaccacgcctggcccaaatcctatttttcaatatttatttcctaattatgtcctactaggttaggttttattttcatttgttacatatttattgggttatttcctttatgctaggaactttattagtataaggatacagataaggtccattctctgttctcaagaatctgagtctacaggcagaagacaaaatgcagtacagaattatggaaatgtgaatggaaactgcattcagagaggggtattgcttgggaaaagccacattggcgtgccacagatgtatgccagcccggcaggcccatagtgtgattacttgagtttcaatatctgattcttttataggcttgaaattggtttatcaggtctggaagtgactggactctggagtactgagttacccaccacaaactgctaataaaatgctgtgtaaaagcca

SEQ ID NO: 255184 - DNA, 956 bp, Homo sapiens
tgggggaaaggcatgtatgctctctgaggcctgtctgtacttttatgcagatagttagaatgccactcatgggcattctcaaaaaatatggcctatgtaagttcaacataaatcgagagttccagctgaatctagatatgcttatttggtctcagatattgtgtgtctagctttccatttgtagccttcagaggaaaattttattattaatacatattatatattaaaacatataagaatctttctttttttttttagatggagtctcactctgttgccaggctggagtgcagtggtgccatctcagctcactacaacctccacctccggggctcaagcgattctcctgcctcagccttccgagtagctggaactacaggtgcctgccaccattcccagttaatttttgtatttttagtagagatgacatttcactatgttggccaggctggttttgaactcctgacctcgtgatccacctgcctcagcttcccaaagtgctgggattacaggcatgagccaccacgcctggcccaaatcctatttttcaatatttatttcctaattatgtcctactaggttaggttttattttcatttgttacatatttattgggttatttcctttatgctaggaactttattagtataaggatacagataaggtccattctctgttctcaagaatctgagtctacaggcagaagacaaaatgcagtacagaattatggaaatgtgaatggaaactgcattcagagaggggtattgcttgggaaaagccacattggcgtgccacagatgtatgccagcccggcaggcccatagtgtgattacttgagtttcaatatctgattcttttataggcttgaaattggtttatcaggtctggaagtgactggactctggagtactgagttacccaccacaaactgctaataaaatgctgtgtaaaagcca

SEQ ID NO: 255185 - DNA, 342 bp, Homo sapiens
caacagagtgaaaccctgtctctgaaaaatcaaaacaaaactaacaatttagtttttgaagagacatgaccaaatttccccgaaatctattaagactgtggggaagtatccacttgcctacatgcttagcgatgctagaaagtatccatcttttaatttttgtccatctaatgggtgaaaaatggtatcttgtgctttaaaatttattacttactagaggaactatacatctttcattacatttattattctctgtcacttgttctactgtaaatagtttatctgtctctacttgtatctatgtgtttttttccaataaaaaactggtttgtgtattactat

SEQ ID NO: 255186 - DNA, 323 bp, Homo sapiens
aaataaagccatgtgcaaacacaatatattaaaaggaggaaccttatctcaagcactggtaccggcactcatcaagacgacaatgctctaatgaagggctgaagataaagcctgctgaaaatatgcaccaaagtgcagatggtaactctggatagcagaatttcaagtaactttttttctttgcttattcatttttgacatgagttgcttatacgacaataggtaagacaaagagggatggcagaggatatgaagagtttggcctcctgtgttccctcctgtcagtcttcaatctaatacataaataaagaattgtaacctgg

SEQ ID NO: 255187 - DNA, 610 bp, Homo sapiens
ggttatgatgatggctacgggggtgaatatgatgaccagacctatgagacttatgataacagctatgcgacccaaacacaaagatactagatcatcactttgaatgccttctaccaactgagaaggtaaatgtgcacaagcccaggatgaggagattattcttaaacgggaaaggatcttaatttacactcccatctctgcacacatcccatgtgtcctaacttagtcacgagggcacatctagctgaaagggtggcacatctagctgaaagggtgtattcactattagtgcagccatttgtccaagtaaacatttatctatggaagaaatgagaagttatattttaataatctaaggtatagactgtggcagagtccattttgattattatacatcattttccattatcttccattattttacaaatatctagcatgctctgttctcccttgtttagagttctgaaagttaaaattccctcttgctgtgtatgtatcacttatgatagacaataactgtgcttctttatcatattctctcccactactgttctttttctgtctcttatcttaagcaattaaaataaaaagtgagaaacataaaaaaaaa

SEQ ID NO: 255188 - DNA, 462 bp, Homo sapiens
agcccagtggctagctgaacttagaagctgtggctgtgaaatatcaccccttgcattttcctgtggtttacacaggagaaaactcttgaatatgtaggtggatagaggtggcaagcaagtgttacctgtgttgtccatggtttatttgattctggattggagcagttcttatgtgaccattagaaatgaagtgtagaactttatagcaattgaaaaaaaggattgctttctttattaacaaataaaggtttgagtcacatggaagatatagacatagaactataaaactgtaattctctccatccatcaagtattaaaacattttagactattgtatcaaaacattttagaacccaactagaaactatttagataatgagatggctgggtcaaatggtatttctcatatgtaactaacctgcacaatgtgcacatgtaccctaaaacttaaagtataataaa

SEQ ID NO: 255189 - DNA, 711 bp, Homo sapiens
aataaggttacttgctcaaaatgacatagcagaaattgatattcaagcctacatttttttctgatcatagataggcagttaaagtgtataaatacagtggttccagagtcaaactacctgggtttaaactatatgtgtttatgcctcagttttcccagtaaatgaggttaataatgtgttttctcatagtttttataagaattaagtgaggtggtgtttgtaaggagtttagattagtacgtggtacatggtaaactccccaaggagcagatgttttgtctcaaaaaaagtattaaccttttactatataaccagtaacctataagatacagctttgagaaaagaggatataagggactcaattttatgtcctttgagtttgaatcagatgattaccaaaggaaaatgtccaataagccactaaaactagggatttggagctcatatgaacagcctgaaatagagatatagtcaattataccagataatggttgatgacatgggaagatatgggcggatccttggagagaaagcatgtggttagaagagactactgccaggacaccaaagatatgaggaagaaaatatgaatcagatgctttcaggcatctagtctgagatgactgctaagcttatttttaacaagggagataaagtacaaactcaatatgcattatgcatgttacacaacacctaggggaagaagacgtg

SEQ ID NO: 255190 - DNA, 310 bp, Homo sapiens
  misc_feature (118)..(118): n is a, c, g, or t
gctgcaagttaagaaaagccttcaaagccctgggttcttgatttcccttttactttcagcattttgccttgaatgaacgacctcaaataacttagatattcaaaaattgatgaatggnacttagcaaggtacaactcaaataaagatgatgagaactaagtcagccaccagtggcctgaaaatcatggcagcagcatgcttcctgtggaggcatctcttcgtgacattttcaaagggttcttcccatccatccactttcccaaaatcctctgcaatttaaggaatatctcccacactggcctgtggtgtt

SEQ ID NO: 255191 - DNA, 449 bp, Homo sapiens
ttatggacttgagcattggcttttgacaaggatgccagtgtctctaggccccagcatcctggggacagggccagagcataggccatggtcagtgctgccaggttttggatctctgccttgtgccggaggtgagagtgagaggcaggatgacagcagagctgggcagaccctgccacgaggggcccagcaggggctgggcggacagagctggccatgctgggagcagtgggtggaggcccttgagggccaagttcaggcaggacttaggaactctaaccccactccagtagaaaagccctcagccgccttacagaaaattcagaaagggagctgggtttggtagctcatgcctgtaattcagcactttgggaggtcaaagtgggaggatcgcttgagcctaggagttcaagaccaacctggccaatgtggtgaaaccccatctctacaaa

SEQ ID NO: 255192 - DNA, 1091 bp, Homo sapiens
cttctgtttgtgatgacatgatatatatgtagaataccctaatgcccaataaaaaagaactgttgcaataaattcaatatagttttaggatacaaaattaatgtacaaaaaccagtggcatttctgtacacaaacaactgtctgaaaaggaaattaagaaaacaatgccatttgcaacagcaacagaaaggataaaatgcttaggaataaccttaaacaaaaaggttgaaaacttgtacactgaaaactataaaacatcaataaaggaaattttagaagacacagataaatggaagacatccatatttatgaattggaataattaatattgttataatttttgtactacccaaagtagtctataaattcactgcaatccctatagaaatcccaaagacattctttacagaaatagaacaaacaatcgtaaaattcatgtgggaccacaaaagaccacaaataaaacaatcttgagcaagaaaaacaaggctggagaaatcacactttctaaatttcaaaatatatttcaaagctacaataatcaaaacagtatggaactggcaaaaaaaaacacataccagaccaatggaaaagaatggagaacccagaaataaatccatgtgtttatagtcaacttatcttcaaaagggtaccaaacacacacagtggggaaaggatagtgtcatcaatgaatgactctgggaaacctggatagtcccatgcagaaggatgaaaatggactcttaaaccatagacaaaaatcaactcatacaaaaatcagctcaaaatggatttaaaaacttaaatataaggtcctaatccataaaactactagaagagaacatagaaaaaaagcttcttggctttagtctgggcaataatattttggatatgactctgaaagccaggcaacaaaagcaaaaatagacaagtggaattcaccaaactcaaaagcttttgtacagcaaaggaaacaatcgacagagtgcataggcaacttacagaatgggaggaaatatttgcaaaccatgtatctgataagaggttaatatcccaactgtgtaagtaataagtacaactcaatagcaaaa

SEQ ID NO: 255193 - DNA, 405 bp, Homo sapiens
gcaaggtagagtggagatgcctcttcctgccacccctgcaccagacaggtgttgacggaggaatcaggagatgctgtccttgagtgaagccacgagtctctctgatgtggagttttaggcttggtgacacacacagcaggctcagcagaggaaacagagcgctttgcacacacacgtgggcctccgctctccagccaagcccaccctggctttggcagcagagccatgggcaacccagacggtgtcggggtcaagaaggtgaggccggcactaaagacatcccatcccccaagacctgccctgctgaggatcctgcagggccctaagtcacagtgtagctaattcttccttccagaaatttctgggagaacccagttatacctgcagatggaaagctttccacac

SEQ ID NO: 255194 - DNA, 255 bp, Homo sapiens
ccgggttcaagcaattctgcctcagcctcctgagtagctgggattacaggcaccagccaccacgcctggctaattttcgtatttttagtagagacggggtttcaccatgttggtcaggctggaactcctgacctcaagtgatcctctcacctcggcctcccaacgtgctcggattacaggcatgagccaccgtgcccggccagatgtccatcattttttaacactccaaagcacaatggatgttataaattaaaa

SEQ ID NO: 255195 - DNA, 721 bp, Homo sapiens
taaaaatagggttttatggtactctgtaggttcctggtgagccagggttccagggaaaagctgagaaaggatttggatggtggtgacggtgcaggctttggctgctacaggaagcggaggagaccagaatcccaaccctgaccttccttctccttaaagatgcatagacttcctggaaggctcacatggcctttctcaagtagccgatcctctttaggggagacctgccatcttccagccgcgtcatgttgcctttcagggcaagccttggccagtttgcagcgttgctgtttcttttgcagggcggggaggcaggggccggtgtcaccggtggggtcttggtgaagttcctccttcctccaggcagatggctcggtgagctgcaagaggacagactgtgtggactcctgccctcacccgatccggatccctggacagtgctgcccagactgttcagcaggtaatcccctgcctctgccccaagcccccagggcagggcatctcaggcatcgggctccttaagccctatacagccttcatctcatgtcgtcctaacaaccccaagggacaaccccattgcacagataaggaaactgaggtagaacagtttacccaagtcaggccccctctgagtgctcgaggcagatctgaagacacgcagggcttacggtgcaggtgggtggtacaggagctgcacctgtgagacaattggagaacagca

SEQ ID NO: 255196 - DNA, 978 bp, Homo sapiens
taaaaatagggttttatggtactctgtaggttcctggtgagccagggttccagggaaaagctgagaaaggatttggatggtggtgacggtgcaggctttggctgctacaggaagcggaggagaccagaatcccaaccctgaccttccttctccttaaagatgcatagacttcctggaaggctcacatggcctttctcaagtagccgatcctctttaggggagacctgccatcttccagccgcgtcatgttgcctttcagggcaagccttggccagtttgcagcgttgctgtttcttttgcagggcggggaggcaggggccggtgtcaccggtggggtcttggtgaagttcctccttcctccaggcagatggctcggtgagctgcaagaggacagactgtgtggactcctgccctcacccgatccggatccctggacagtgctgcccagactgttcagcaggctgcacctacacaggcagaatcttctataacaacgagaccttcccgtctgtgctggacccatgtctgagctgcatctgcctgctgggctcagtggcctgttcccccgtggactgccccatcacctgtacctaccctttccaccctgacggggagtgctgccccgtgtgccgagactgcaactacgagggaaggaaggtggcgaatggccaggtgttcaccttggatgatgaaccctgcacccggtgcacgtgccagctgggagaggtgagctgtgagaaggttccctgccagcgggcctgtgccgaccctgccctgcttcctggggactgctgctcttcctgtccagattccctgtctcctctggaagaaaagcaggggctctcccctcacggaaatgtggcattcagcaaagctggtcggagcctgcatggagacactgaggcccctgtcaactgtagctcctgtcctgggcccccgacagcatcaccctcgaggccggtgcttcatctcctccag

SEQ ID NO: 255197 - DNA, 712 bp, Homo sapiens
tgagtagagctgtctcttttacttggaaggatgtctgacaacagagtaacagaataaacccaaacgaaaccagcaaaccaggctttgtggagacaagtggtttgagaatatacacttgattatcccacaaacaagtggctctagggagagaacttactcactttttctttatgtatcattgcatttttgaagtaagggccttataactagatttttcagcagggcctaagacctaagacataactctaaaacgtaagacctaagagataactctgaaacatccaggggaataaattcctcttaccataggaacttttatgtgaaaagtgttgggagaaactccaccttgtccaagtcctgcaggttcaggcatccagcacatagcctttggcttggcataagaaagggagaatggaggctgggcgcggtggctcacgcctgtaatcccagcactttgggaggccgaggcgggcggatcacaaggttaggagttcgagatcatcctggctagcacagtaaaaccccgtctctactgaaaatacaaaaaaaaaaaaaattagccaggtgtggttgcggccgcctgtagtcccagctactcaggaggctgaggcaggagaatggcgtgaacccaggaggcagagcctgcagtgagccaagatgacgccactgcactccagtctgggctacagagcgagactccgtctcaaaaaaa

SEQ ID NO: 255198 - DNA, 435 bp, Homo sapiens
taaaaaccgaatccctgaagcactgtggaaatggttgctcttgttatccagggacaggaattttcctaggaataataattgagtagcagttggttagactggggcagagtaacagctcagcacctgaaactgacctgtgaacagatgagctggtgtatgtatctcaacacacatgcctgtatgtcttgttttgttttctaagtctaaaaatcaaaagaataagctaaaaaaatgatatgtttgtctattaattatcttaattttcctatagaactatgagtttttcaaaagcctcctacatagaatactcttattaatatttctgagtttttaatattgcaggttaacttttaaaagggattttgaatttctacaatagatttcattaggtgattacttagattatcttctctcatttaattatgcaaagcatct

SEQ ID NO: 255199 - DNA, 424 bp, Homo sapiens
aagaaaagtagagtttcagtttatcatggaactttttggtgattccttatgtttcatgtatagaatttaataattgtttgaataattgttacacagggcaatatcccatcaccaggaaccaatgaaactgctcacattttttggatgggggtaagaggatgcagtcttgatttgtttccttctagcttataacacagtgtgagggtagtgtgagaaagttttagaaaatgtgattaaatctcagtcatggaaatcagttctggcacagcattctgtagaaggtggtgagggtgacaagaggtgggtgcaaatctcagcatatacaaaggctttgctgagaaatacacaggggaaaggcaggtgccaagccacagcatgtattatatatacctgagtcagtagatcaaataaattcacaaaactg

SEQ ID NO: 255200 - DNA, 478 bp, Homo sapiens
gcttcaaagtcatcctggcaacacccagctggctgacaaaggaaaagagagggaatgagaagatacagtctttgtttactcttccggccagggaatgacacatccccttcacgtatgttccactggtccctcctagatatgaagaggctgggaaatacagtttagatacgtgcctagaaagagtaaatggggcccaggcacagtggctcacgcctgtaatcccagcactttgggaggccgaggcaggcggatcatgaggtcaggagtttgaaaccagcctggccaatatgttgaaatgctgtctctactaaagatacaaaaaaaattagccaggcatggtggcatgtgcctgtaatcccagctacttgggaggctgaggcaggagaatcgcttaaacccaggaggcggaggttgcagtgagccgagatcgtgccattgcactccagcctgggcgacagggtgagactccttctcaaaa

SEQ ID NO: 255201 - DNA, 305 bp, Homo sapiens
agtcttattggctatgtctacaaaaagaaaatcctgaatctgaccccgtataagcagctttaccactaccaccctggtccaagtcactgtcatttcccgcctggattattgcagttttctaattgttctacctgctccagtcctggtccattcagtgtattcctaacaagttgaagatattattaagatataggtcagatcttgtcagtcctctgctccatttctgtgctccaaactcttcaagagttgagtcttcctttctgtctgactcaaagtaacagcaagagacgttaaaacagcccatg

SEQ ID NO: 255202 - DNA, 283 bp, Homo sapiens
ttttagtagagaaggggtttcaccatgttagccagtctggtctcgaactcctgacctaaagtgatccacctgcctcggcctcccaaagtgctgggattataggcatgagtcactgtgcccggcccaaaatatgtgattcttaagtgtacattgtagtggatttgatacaggtacttgtactatactaacaaaatagatttatttaaattgactctttttgtcccatttacaactgcattaatagccataagctcatggttttgtagtctgttatatattttcc

SEQ ID NO: 255203 - DNA, 225 bp, Homo sapiens
gactggtggaaccagaccgttgctgtcccagggccatgctgacggtctgaaattggactcttcagaggagaggcctgtgggaggcctgcccgatgctgaccaaggcagggcagaagggaagcctcatgggagaccatcctatggcgggcattctttcctgggcaccccagtgaataatctcccgctctggccccctcctcgtccagcagtgcccactccccattc

SEQ ID NO: 255204 - DNA, 319 bp, Homo sapiens
ccagtaagtttttcaaaagaactatttggcagccctgaaacagattacaacgctggtacaaaccttgactgactgcagggttacagatgtcagaatcgtgtgtcttcagaaatatgcacaacaacaactggattccctgtcataatgcctggccctaccaacattgcaaaatgctggccggcagagaggacagaaaccattcggtcacagcctttttcctgagtaatagtggggtcctgcaagctacaactcagttgtcaataggactggaaattccttgactaaactcatataaactggacctttccatgcatgtctc

SEQ ID NO: 255205 - DNA, 622 bp, Homo sapiens
ctgtaatcccactactcaggaggcagaggcaagagaatctcttgaactccagaggtggaggttgcagtgagctgaaattgcgccactgcactccaacctgggcaacagagggagactgtcaaaaaagaaattgggaagtcaaggtgggaggatcacttgagcccaggagctccagaccagtatgggtaaccccatctctacaaaaaataaaaataaataaataaataaaaaaacgtagccgggtgtgattgtacatgcctgtggtcccagctactcaggaggctgaggtgggagatcactttagcccaggaggtcatggctacagtaagccatgatcatgctattgcactcaagtctgggcaacagagtgagaccctgtctcaaaataaacaaataaataaataaatcccaaaatgtttcattgtggctgtgaccttatgacctacacagaaaaactctaaactagatttaatttctcaagttttatgtttaatcagtgcttgaatcaacttcaagaaatgtgaattttcaaagttgttttatgaccttatttttcataaagacattaagtcatcagctcagtgtttcacttttttaaaaaacacattaagtcaaatatgtt

SEQ ID NO: 255206 - DNA, 538 bp, Homo sapiens
ggttctatggagcaggtttctgacagctattcattcattagggaagtgtttaacagtggcagttccagtaccaaagttggaagccaccaacatagaccttcagagatcagttttccctgcttgaatgtccttgagttcagagatagagatgcaactggatctgaccttgtgaaatgtctctttccccttttcctttcctaaagctttttctctgcctcatctcaccacactgatggtctccttcattaattcactgagtgccaagagtgtgcagtgccttgtgctgccaccaccaacttcacacttctcatctgattgaagagcatgggctgctctgacatgaatcattgcccggagactagaaaaggccttcccctgacattggctggccatttggagaaattgaaacactctgttgtttggcttcttactgttctccttcctacagaagacctaatggggtttgctggccttggctgcattctgaatttgttctctttttttccttttggaaacatcttatgtcatgttcttagaa

SEQ ID NO: 255207 - DNA, 455 bp, Homo sapiens
ccgtctacactataaagcagatctgaccgtatgcacgcttgccaccgtccggcgtttaacatgagatgcaactggatctgaccttgtgaaatgtctctttccccttttcctttcctaaagctttttctctgcctcatctcaccacactgatggtctccttcattaattcactgagtgccaagagtgtgcagtgccttgtgctgccaccaccaacttcacacttctcatctgattgaagagcatgggctgctctgacatgaatcattgcccggagactagaaaaggccttcccctgacattggctggccatttggagaaattgaaacactctgttgtttggcttcttactgttctccttcctacagaagacctaatggggtttgctggccttggctgcattctgaatttgttctctttttttccttttggaaacatcttatgtcatgttcttagaa

SEQ ID NO: 255208 - DNA, 328 bp, Homo sapiens
tagaacatcaataccaaaacctcataaaaagagcataaaacaaaagttaccgatcaaccacttgtgaattatagatgcaaaaactcctaaataaaattcaagtgatagactctaataccacattaagaaaataatactatgactaagtgggatttataccagcaatgcaaataaatatagttcaatattgaactatggcggccgggcgcagtggctcacacctgtagtcccagcacttcaggggactgaggcaggaggatcacttggggccaggagtttgagatcagcctgggcaacatggtaagatcccatctctactaaaaacacc

SEQ ID NO: 255209 - DNA, 883 bp, Homo sapiens
caaagagctattcaattaattgtacaacaggggtgttttcaccacacgtttaaagtttagggctggtctttttttataaccccccccaaataaactagaaatttggtccccgcatgaaaaaatctctttaaagtcctttagctccgaatgtatccttccaatggtttttgtttcgttgacttcaaaaaaaaacctggaccctcgtatatgtgctcacccttctctgctcagctctgtgcctgggaggctgacctctacaaactgcatcaccaggcttccgccctctggcttccagatggatttggccaatgggcagcaccagtgggaaaggagaggacaggaggagagacaggctgaggcctccctcctcctgtgtccctgacatacagtgacagtgctgccctgcagctcaggatggatgcagtcaaggacgacagcgcatgtccaaaaaagctgtctgctgaacatttgcccagcagattttagaaagaaaggaaacatcttagtgattttcttgcctccagaagattccctgatccaatctttccttggcacaaacttttagttattgtgtttacatatacattttatatatgtgtggtcattattgtatctgttttatttggggactttatcttgatgtgtgttatacctaatacactgcaatataaattatgtaattatgtgctttttttttttgagatggagtctcgttctgtcaccattgcacaccagcctgggcaacaagagtgaaactccatctcaaaaaacaaaacaaaaactgtttcgtgaacatgggacactcttgtaactccatcctactcattcaaatacaggccatcacccatgaaaataaaaagaaaataaaaggtgaatagcactg

SEQ ID NO: 255210 - DNA, 594 bp, Homo sapiens
atatggaaaagaggtcaggaagagatttcactctcacacacacacacacgctatcacacgaagggctagccaccaggagcaaacagaggcaaggaacacattccttcctacaaaattccagccctgtcagtaccttgattgcagcccaatgaaactgatttcagaccctccagaaccaggagagaattcattccgtcatcttaagccacccagtgtgtgataatttgatatagccttgggaaacaaatacacctgacctccaaaaccctcctcaccctgacccccaaaaccctcctgccttctccgtgtctaagcacgtcagatttatgggggatggaataatctagaataatctgaaataattttaaatgaaaaaagaaatataagagaaggtccttatgcaggccttttgcagaggaacttttgctgcatacaagggttactggacttagaggtgtgagacagcattgtagccccagctagtaaggtaggttgccttgagtaggtggaactgaccttgatcagagaagagagtggaggtgtattctggaggaaaactacatgaacaaagggatggaagtgaggagagggatc

SEQ ID NO: 255211 - DNA, 740 bp, Homo sapiens
aaagagggaagtctttggacactggaggggactgaattggagaaggaaaggaaggatgaaatgaatctcaggtacacagatgcctgcaggaagttgttcagcacaatgaatcaccaaatattttagagataaaatttcaacaaaaatttgagaaatatattttgtgcttagtactgtgccaatggttgtgaaacatataaaagaaatataagagcctggaggcagtggctcacgcctgtaatcccaacactttgggaggctgaggtgggcagatcacttgaggtcgggagttggagaccagcctggctaacatgatgaaaccctgtctttactaaaaatacaaaattatctgggcatggtggtgcatgcctgtaatcccagctactcaggaagctgaggcaagagaatcgcttgaacccaggaggcggaggttgcagtgagctgggatcacaccattgcactccagcctgggtgaccaagtgagactctgtctccaaaaaaaaaaaaaaaaaaaatgaaaaaagaaatataagagaaggtccttatgcaggccttttgcagaggaacttttgctgcatacaagggttactggacttagaggtgtgagacagcattgtagccccagctagtaaggtaggttgccttgagtaggtggaactgaccttgatcagagaagagagtggaggtgtattctggaggaaaactacatgaacaaagggatggaagtgaggagagggatc

SEQ ID NO: 255212 - DNA, 937 bp, Homo sapiens
atttctgtcaagggtaccgtataagtattaacagctgactatatcccagtgccaatgctcacctaggtgtccttggcatagtgcagctcaattaaacgtttatttaatattttattttatggagacagggtcgctctgtcgcccaggctggagagcagtggcactatcatacctcacttcagcctcagtgatcctcccgcctcagcctcactagtagctggtattacaggcatgagccacgcacccagactcaattcaacatttgtaagagtattccttgttcggtctccaagtgcttaacttttgagagccgtgaaaagccctcttctcccaagtttaatcacatctcctataaaatctcatccatctgctgacacttccaatagttttttacttttttcttttactgacctaatcctgaataaccttaaattgctgctttccttacttctccttaacttccccagacctctctgcaaacttctaattcccattcggctgaaacactgtaatacttctagtcccattattacaaattctaacaagtctccaaaagctgaaactgacttctccaaggtgaccaggctttcttagcgtttccaactctttccccctagatcctagaaaataactttaccctgatactcttctagttccttccctcaccatccttcttttttcacgtttttacctacgtttccaattcacctcatccagctctacctccgtattacttcttctcattccgaactatctcaagtttcctaaaagcacctactgttctagcacatactccaaaattcccgcactgcctttttctcctttctctactcttgggacaagcaatcacaattccttcgacacgcaactagctccatcttcccttctaggaaaccttctctagcctacccaagcactgttaatcactcccctctag

SEQ ID NO: 255213 - DNA, 458 bp, Homo sapiens
tcaaaacattaacaatacactgaactcttgaaattcttcaggaggctctactcagagtttgcagtacgaattttaatactgaagtcaaacatttctgaccccagctattttaagtgacaaaataatgtacaaaagacaatcaactactaacattattttacacacacagcagggttaacaagaatacagctatctgttgttattggtaggggactggttccaggacctccttcagataccgaattacataatacttaagtcacttacataaaatgtaatagtatttgcatataactaagcacattctcccaaatactttaaactatccctaaattacttgtaatacctaatataatgtaaatgctatgtaaattgtcatactgtattgttttaggaataatgacaagaaaaacgtccgtacatctttggttcagacgcaaccatgcctcttttttctc

SEQ ID NO: 255214 - DNA, 564 bp, Homo sapiens
gattgaaattgattttcagaggactttatcactgatttgtgaagcaaatggtacagatgaaataggcttttcattatgaaattccatgatagaatcattgtgctgtcagatttttgagtaagaatttgtacctttaacctatactcctagaagagcctcaggactgcctggaggaagagccttgtttgcaataaagcagcttgcttaagaactgtcagcttttcccagatgagtctgaagctctgtcactaagctatcatctggctcttgtttctcccctgctgggaaatgaagcattgtaccaccagggatccatttaagagagagtagtacatgttgttcttataccaataatgttctcactgaggcacaatttctaaaaagcttaatgtctctttgtcattctgtaaatattagaaaatatttggtgagtttctgtagggctgtgagagagagagatgaacattttggtataaattgagtttaatttttttgtttttcatttgctagaaagacagatggtctttaaaaagatgttatactaaataaatgttgtgttgtacg

SEQ ID NO: 255215 - DNA, 510 bp, Homo sapiens
aactcccggtctcaagggatcctcctgttttggcctctcaaagtgctgagattacacggatgagccactatacccagaacatacctatttatccatttaaaaaaatccacattatgtttggccaggttttacagagcacttttgatcacattacacaataggaagggcaagtaatataccaatttttcacttgtaaaaatggagactctgtgttttttttcagcaacacttacataaacacagtagaaatgtaatacttggttgtggaatgcctgaacaaatgaaaaataaatacatatgtctgtaatttttttaatttatttttaattgacaaataaaaattatacatatttatagtgtatgacatgatgttttgatacatcttttttttttttttttttttttttgagacaggatctggctctgtcacccagtctggagtgcagtggtgcaacctcggctcactacaacctttgcctactgagcttaagccatcctcctacctcagtc

SEQ ID NO: 255216 - DNA, 480 bp, Homo sapiens
ctgaaagactgaatgagaaatgcatctgatctaatgctgagacagtcgaatttgggaatttgaaatgcgatttaccagagagcaacttgggcttagcacatggctgaggaagagaggaagaggaaggttggactttccatttcagagatggaagaggtcaaggaaaatctgcatgctcaaacaatctcctgcctcaacttcccaagtggctgcgactacagttcattaaggagcacgcagtcacagctagcttcctgtttgaagaaaaagaaaacagtcccttgttcaaatatcataattcaccaaaatctcaccatgtttttcatttttttctattataaatttacgttaattgcatgctgcttaaatgtggttttacatatttactctcagcagctcacttttagagctacatatattttcccacaaatgagtctttcaaatcttcaataaatgctctttcaatatttgaaaaggtgg

SEQ ID NO: 255217 - DNA, 433 bp, Homo sapiens
ctgaaagactgaatgagaaatgcatctgatctaatgctgagacagtcgaatttgggaatttgaaatgcgatttaccagagagcaacttgggcttagcacatggctgaggaagagaggaagaggaaggttggactttccatttcagagatggaagaggtcaaggaaaatctgcatttcattaaggagcacgcagtcacagctagcttcctgtttgaagaaaaagaaaacagtcccttgttcaaatatcataattcaccaaaatctcaccatgtttttcatttttttctattataaatttacgttaattgcatgctgcttaaatgtggttttacatatttactctcagcagctcacttttagagctacatatattttcccacaaatgagtctttcaaatcttcaataaatgctctttcaatatttgaaaaggtgg

SEQ ID NO: 255218 - DNA, 361 bp, Homo sapiens
ttggaagtcttatacttgtaggaatgaaaaatggtatggctcctttgaaaatctaacagtttcttaaaggttaaacataacacaaatcagatagacagtcattcccttcctaggaatttacacactgtgtctgcacaatgatctgtatgtgtgtttccagaccaacctgaggggcgggctgctatttctcgtggctcagtaacaagacacagatgaactggggaggaagagagttttgacttctgcaactggttacagggaaacggcctggaaattatcaccagaccaactcaaaattggaaagttttcctgggctaatgtaccttctaagctatatgtgtatgtggaagtgtgcattcat

SEQ ID NO: 255219 - DNA, 430 bp, Homo sapiens
ttttttttttttcctttttctggagaacggggtctcgctatattgcccaggcaggtctcgaactcctgggctcaagcacgtcttgaaagtgttggccagttgtcaaattttcatgaatttcagagaagtgggtaataggtggtttctctcacggtatttaaagcgaagtagtaaagaggaaaaagactgaaaaggtaacctgggtcaactcattttttagggcgcacagaagtgtggtagcggagcctggacatcaggtggcctgaagcccaaaccaccagctcccccagcacaggagagtgcaaactgtagctcagtcttggccatctggggtcttctgcaaatgaactgcccatagtctggccaataattcacactgttgtattgctgtctttcattctctcttaagtagagcgttctgaacatatct

SEQ ID NO: 255220 - DNA, 693 bp, Homo sapiens
gccggcagtctcacataaactccaggctgaaatcacaacatccattagagtgctccacagctcagagcaagcaagcaagtggttgtcagtgcagctagtaaatcacctgatcctattacaaaatcaattactgcagtgcatttccattgctacacaatctgatgatgacaaaatgatattggatatctactgcaaggtcaagaaaactgctaagaacatctttaattggtcttttatttttaatcatttggtcttagtcataatgcatccattttcattgcatatttttatttgaaataaatctatgtagttacctttggttgcctgggacattcgatggataatctctgcaactggtctgatgtatggctacaagagaacaaatcggagcagcaggtcgaacggctcaacctcttcattaaagaagaaataatgctgcagccacagccacacattgacttgctcattagatgagaatttgacttaaaaaatcagaactggtgatgtcacatatatactcaaaattgtcaaactgcctcattctgcagctctctggctgaaagaaacactactaaaaaagaataaaacaacagctttgctacagaagatgccagccacaaactcatcgccaagaaaaactggatattaaaacagaagtctcccagctactctttagaaagaaggtaaggtgct

SEQ ID NO: 255221 - DNA, 716 bp, Homo sapiens
acccctagtgaggaggaaacattttacttacgtgtgacatttactcagaaacctgactataagtatggtgaatgtatggtttatggcataaacagcaacatgtttgtgaagtaaagatggcgttcttcataacaatggcggttcaaccagcatgaactagaactgtcctgggaaaactagaaaacacaactgaggaccgagaaacaaaaggtctcatgtataccccaaaatggtattaaaaagagacaaaatactaaagtataaatagcttattataagacacaattttgagcatgctttctttactttagatacaatttgcaaaatcttccctgtagctttatgtcagtccagggccgctgattatgaaattgcaaatttgaagaatgaggtggcttccttaataagtagcagttgataaccgctaaggaagcatgaacaacaaaagtggccaaatcaaaaggcacaagaagtgttcaaagtaaaccaaaatttaggagctacagttttatttcataagtgaaaatttagtaagcctcaaaaacatcacatagagtgtctgtctgggctgcaagaccctgaagtggcaactccatttccaaactttgcatcaaaatattccaatctgaatgggcttttattttctgagaggatgagttaaatcaatttacatgtgttgattgagttcttatcacttgtttaagaagtgtgtcact

SEQ ID NO: 255222 - DNA, 1180 bp, Homo sapiens
caaataatgttgctgtgaacattcatgtacaattttttctgtgaacatacaattcaaattattcaaatggttttctcttctcttgggtgtattcctgggagtagaattcctggatcatttggtagttctatgattaacattttcaggacataccaaactgttcttaatgtggctataccattttacagtcctaccagcaatgtgttagcgttccagtttctccttatgctagccaacacttgttattgtttttcttttttattttagccatcctagtggttataagatggtatctcattgtgatttttatttccctaaaggctaatggggttttcaggtgtttattaggcatttgtatctcttctttggagaaatgtctatttagatcctctgcctatttttaatagacttgtgtttttattgttgagttgtcagagtcctttatataaaggagactagacttttatcagaaatatgatttgcaaatacattatattctgtagggatttcactttctttatagtgtcctttgaagcacaaaggcttttaattttggtgaagttcaggttgtctattttttatttggttcttgtgctttaggtgttatatctaagaaacttgcctaatccagggtgacaaagatttacacctatgttttctcccaatagttttggtagtttcagctcttacattttagtatattgttcattttgagttggtttttatacagatgctcttgatttacaatggtattacagtttctaatgaatatatattgcatttgcactatcataatgttgaaaaatcttaaattgaaccattgtaagttaggaccatctttatatggtataagaaaaggcccaactttattcttttgcatgtggttttccagttgtcccagaaccatttactataagactgttctttccacattggattgtcttggcccccatgttgaaaaccaggtgatcgtgaacataaagttttatttctgaattctcagttctattacactgatgcacatgtctttttttaagtcaataccacactgtcttttgtagtaagctttgaaattagaaagtatgggtccttcacctatattcttctttaagattgttttgactatttgagtcctttacatttccacataaattttaagatcagcttgtgagtttctgcc

SEQ ID NO: 255223 - DNA, 507 bp, Homo sapiens
agcaaggaagattatagagagtaatgggttgatatgagggaatagagtattcaaggaatgcctcataaattagcaagaacataatttaagtatgggaacccactgtgccagcctttggggcaaaatcaaatgcaagtcaacaaggtgagttttttgagtttttcttagagcaatatgacattggttaacatttaaattacttccaattttaacaaatttggaagcaccatttttgttaaaatacttaataaatttttgcatgcgttcttacatttgttctcctcagttttcaaacctaccttgtccttgtatgtctttatgacaataatagtagaaagatatgagagtctatattaaaggatgttaatctagtgccatcttactccagagacataattcatatttatttagaggaaaaataaaacttaggaaaaaagaaaagaagtcttcaaagaatgttagaatatagaatatttaatttagaaatgaatttttatagctaagaca

SEQ ID NO: 255224 - DNA, 286 bp, Homo sapiens
ttgccaatgttgtaaatagtaatctccatctctccatcagatagagaagaaaatgggattaaaatgtagtaagagaaatttagatggtttataacagtttgaaaggaatcatgagttaaatttcatagtgtagaggcaggaggctaagagaggataaagatataccgctaatgtttataaattctgtacattatccactccttacctctcaaaagcctctttgctaaaagtaggtgtcattatgtatgcaaataagggaagctatgccatgaaatgtaatccttag

SEQ ID NO: 255225 - DNA, 709 bp, Homo sapiens
gcacattttcactggcatatggcataaactgattttttttaactaatggaagcctattcagggatcaattattacctcatggaaatatttgtcaaccattccttactttcctacttagaagcagggggaaagtgtgtttttaactactaggtaatttaatcattttttcccctctcacctcctatatatctactggggccaagtcagctgaaaaaataaaatcatataagcaaactgccacttcatcatcttgtctcagaaactcctgctggcagcatacattttatataccccaaatggggtgttctgaaacagacaggcgaattccagcttcccctaatttactgccctcctttccatagcatcagattcataaaacattgcctgggtggctggctggctgtctcactgtcttgaggctgaagcaaggcacaggggaccaggaaggagacattagttgccaagtctctgctgacaagaatacttgcctccgcccttttagagcatttaacataagcaaaagaaacaggggaaaaagacttggcttgccagcaaaccattacacaaatctaaagatgtggtattaagttttgttcctgtaagtgttctttccatgactagccctattaattggtgcttcagcttcaaaactatttcagtttttatgtcacagaagagacttgagaatccaattagctacgtttattag

SEQ ID NO: 255226 - DNA, 285 bp, Homo sapiens
acaaacccatcttgaaggctggccgggcgtaccacaaatataaggcaaaaaggaactgctggccacaattacggggtgtggccataaatcctgtggagcatccttttggaggtggcaaccaccagcacatcggcaagccctccaccatccgcagagatgcccctgctggccgcaaagtgggtctcattgctgcccgccggactggacgtctccggggaaccaagactgtgcaggagaaagagaactagtgctgagggcctcaataaagtttgtgtttatgccacc

SEQ ID NO: 255227 - DNA, 353 bp, Homo sapiens
agtacagatgataatttaactattttcactattataatttattagcataaaagggctttgaggccaggcacagtggctcacgcctataatcccaacactttggatggctgaggcgggtggatcactagaggccaggggttcaaggccagcctggccaacattgcaggaccctatctctactaaaaatacaaaaattagccaggcatggtggtgcatgcctgtaatcccagctgctcagaaggctgaggcaggagaatcccttgaacctgggaggcggaggttgcagtgagccgagttcgcaccactacactccgcctgggcaacagaacaggactctgtctcagaaaaaaaaa

SEQ ID NO: 255228 - DNA, 383 bp, Homo sapiens
tcaatgcaacaagaaaagctaactatcctaaatgtatatgcacccaatacaggagccctcagattcataaagcaatttctcagataaatcttaattgagatacatgctacaaaatgcatgaccagtacattgatttagggacttcagttagtcatagttatcaatattgtcctattaattgtgacaaaatacaccctgccaatgtaaaatattcttttaataggggaaaatcagaggtaggtatatgaaaataccctgtaccatcttcacaattttctgtaaacctaaaactgttttaaaattaagcttataacatatttcaaaaggaagagaactttaaaaacctagtattcttaaagagattaaggaagatattttataat

SEQ ID NO: 255229 - DNA, 556 bp, Homo sapiens
gatgataacataaatgaaaagctcagttgaaggattgaaagataaaagtaagaaaatatcccagaaataagagcaaaaagacagcaatgtaaaataggggagaagataagagaattagagaaccagcttaggagttctagaaagagaaaatgtagacaacaaaaggtaagaaatcatcaaagactggagtaggggaggtcatgctatctgtttctttttctattttttattttgagttacattttttttactgtgaaacaagcatatgtacatgagaatgaacaaaacaaatatgcagtcatgtattgcttaacaacagagataggttctgagaaatgcatcattaggcgatgtcatcattgtgcagacatcatagagtgaacttacacaaatctgaatggtatgtcctacagtacacctggaccatatggtatagctgttgcttccaggccacaaacttacagcatgttactgtactgaacactgcaggcacctctaatacatcggtaagtatttatgtatctaaacatagaaaaggtacaataaaaatacaata

SEQ ID NO: 255230 - DNA, 494 bp, Homo sapiens
gattgagccataattctgttgagttgtacatggagaatctagagatttagtattttaaaatggagaaaattgaggtaagtgattgcacaaggtcaaatgtgtagctgatgaagaagtcaggaatagaagccagctatctcttaaagattattttaatatgtaataacatgtttttaaaaagtacaaaaaggtatactgtgaaaggtaagttttttccctaccccatctctcagttcttccattaccttccccagaggcaagaagttaccaatttcttggactttcaagagctatttcatgtatgtgcaatcaaggagatgtatacattgtccttcacacagatggtagcatattatgcatacctttctgcaccttgcttttttttacttaacaatgtctgaaaattgtagagcccgggatttttttgttccttggtccatgaactttccattttgctatactgcctattattattaaacaactgttttttgtta

SEQ ID NO: 255231 - DNA, 937 bp, Homo sapiens
agacaactgagaggaaggaggtaccacgggcactctctcgcgagagggccgcagagccgcctttgacgggggcgtgtacctggagagcaacggtaaggacggagccgacggctccggcgtcgggtcggttccggcatcgacgtatcgtttggtcgccccagagaggagacaggtttcttcagcttgccgctgaggatgtggcatcggctgcgctcaccgccgccgcctctgtgaactgcgggagttgggacagcggccagggctagatgggtgggacgcgagtcctcgccgaaagcttgccctgtgcggggcgcacttggaggcgagctctgggccgtggcgagttttgcagcctaaggtcttggcaggcgcattgctgtgggctgccggagagcaggctggagttcgagaccgcccaccggagagcaggcgagagttcgaggcctaggtacagcgcatttcgctaggcatccccaagaatatccgcgtgatccttgtggccagagtttgttgagctaatatccccagcccaaacagtagagcacatcacatgtcggccacctgggagcgttgaacctggtagttactaggcgcccctggtggaaataaaactcattatgccctagttatgtcttagtgcctgggtgacgatgatgtagcggttaaagattaactgagcgcacttagaggttgtctttgtctacctaaggaaaatatcaatagattaaacccccaaccttaaagaatctccgtgaatttttctgaggaaacgtgcaatattgtcatacaaaaggccccaaatatgcaaacattgctttttgttaaaagtttgttttgttttgcagtgacatctgtttgagcagatgaatatgccattgggaaagtcaaggactgtcgcagaggaggacatggcagaccttaactaaagtgaggggga

SEQ ID NO: 255232 - DNA, 359 bp, Homo sapiens
ctttgagacagagttttgctcttgttgcccaggctggagtgaaactctgccaaaaaaaaaagtagaagatcgttcttactttgggaagctagtgcctataacagattgacccacaatgatggtactataacctaaaaaggtaaacaacaggactgtggtggcaggggaagaggagcatcagagatcctacatgagttcaactagatggaggactgcggagagaggagagagaatggaaaaagagggtgccaaaagccacagcctgtagcctgtgcagggaccagggacaggggtggctcagaaggaactgctgcttcctacaatgctggagtggcctggggcttaggaaagccagaggg

SEQ ID NO: 255233 - DNA, 515 bp, Homo sapiens
agttaaaaaaaaaaaaaaagaaacttttgcctattagtgaaattgtgctcagataaaagaaagtaatagtctcactgtgctctctgctgatcagatagtactggggcaccaaacactttatttcttctttcaaggtatgtgtaaactgtgataaaacaagataaaactatgagggcagttagggaactcaaaacctgatctcattggtcttaattgatggaccagggcatttagcttgggaaaaagaaaattaggagggaagtaataactgttttcaactatctgaagggctgggatgagaaagaaggactgctcttattctgtatttactcctacagtcagaattgggatgaatgggcaaaaaactaaaagaagcctgattcattaggcggcagaattttctaaatattagagctaatgatgttcaatagaatgggctcccattatcggacggctcaagtggaggtgctggccacctgtcagggatacttagggcagtaggatggccccttcca

SEQ ID NO: 255234 - DNA, 240 bp, Homo sapiens
ttcctgtcccagcatggtgtctgttatcatgggacagcaaatgtcacatatatcaatgttcaaaggggtcttttgatgatttatttatttattttccagtctctcagattcgccaaccccaggcatatgagaaactaagtcttatgtcatattgggaaatagtaaatgacactaacctattattagtgggtttccctctgttgtgatattgaagtaaaacttctttcttgaagggcagat

SEQ ID NO: 255235 - DNA, 1103 bp, Homo sapiens
gaggatcccacacgtgatttgaacttccatctagtgccaaaggagggaacacggacattatcagcttggccagatgggcagaataagaagagggagtgcagaggtataaatggtggtataagacaaaaatcacaaaatggaaactgactgtagtacaacactgaatatttactcttgcaacttctgatttctggccaggcatggccagaaattacaggctcatgcctgtaatcccagcactttgggagcccgaggcaggtggatcaccttaggtcaggagctcaagacgagcctggccaacatggtgaaaccccatctctactaaaaatacaaaaattagccaggtgtggtggcgcactcctgtagtcctagctaccagggaggctgaggcaggagaatcacttgaacccgggagacggaggttgcagtgagctgagatctcaccactgcactccagcctgggcaatagagtgagactctcaaaaaaacaaaagaaatttctaacttctttgttagggaagacctccgctttcttcataatagtagataatactcttcctttctgctgaacccatagggcccattacacaacgtcattcttgaaaatatttgtgaaatgctgtttaaattgcctaaaatatttttacagtagttcaatgcaaatgaatttgtggaaaagtttattacataatatgatcaagcaattttagccaaagggcatttttccaaaggctgtgttatattcatgtcttgttcagtttatggtattgtgtaacatattctccatagcttcttttctttttttttttctttttctttttagacgtggggtctcgctatgttggccaggttggtcttgaactcttggcctcaagcattcctcctgcctcagcttcccaaagtgctgggattacagccatgagccaatagtagtaaaatgactttttgtttttgtatatgatttttactttaaggattttttccttccatacattttaatccaaattatatgtttactgcatttcttctctgtgttactccagtgaacacttagaaaatacataaatgagggtgttgtttagaaataaaattttgtgacatga

SEQ ID NO: 255236 - DNA, 418 bp, Homo sapiens
ggcgggcggatcacaaggtcaggagattgagaccatcctggctaacacggtgaaaccccatctctactaaaaaatataaaaaattagccgggcatggtggcaggcacctgtagtcccagctactcgggaggctgaggcaggagaatggcgtgaacccgggacacagagcttgcagtgagctgagatcgcgcccctgcactccagcctgggcgacagagcgagactctgtctcaaaaaaaaaaaaaaagaaaaggaaaaatatgtacatttttaatagtggtagtaagaattttctgtaactacttacgggacatcttcactgaggggtctccagagctcctaaaactcagcactcccccagtgattcttacattttcctgccagacttgctcttcttcccacaatccccaccttaatg

SEQ ID NO: 255237 - DNA, 151 bp, Homo sapiens
aaaaagaagattgagagaaaaggagagagagagaaaatggggtaaggatgtcaaagtttcacatttgttggtttctagcaaaggggcagtataaagcaatttgtagttgtcacatttgaacacataaaattaaaattttttcaaaaagcaa

SEQ ID NO: 255238 - DNA, 188 bp, Homo sapiens
gtttttgtatcttacaatattgctaagtgcacttattctgttagttctggcagtttctttaggatttttaaatgtacacagtgattttatatgtgacaaaaacagccttagggccaggcatggtggttgacacctgtaatcccagcactttagaaagctgaggcaggaagatcacttgagctcagggt

SEQ ID NO: 255239 - DNA, 418 bp, Homo sapiens
ctgcttctcgggattgttgtgagttttacaggaaatcagatttgtaatagcgtagagctttgcatctagtggatgctcagtacatgcgtattatgaggggaacaatagtggtttttctttttggtaaagaattgctcattaaattaatttacatggtaaattaggggacccacccctgatacctcgtgggttagcctctgaagctcagtcaatgtgtaccacagaaatcaccccagtagcaccaagaacctccatgaaatgtcagatactggggaccccagagacttttccagacattacccccaaatcagaagactactttgattccaggtgtgtgtgtgttgctattgttgttgggctgagaaagtggattgggagtgttgctagctcaaataaatgtgcttcttataagagcttt

SEQ ID NO: 255240 - DNA, 377 bp, Homo sapiens
tctatataaggaatttagtctcaaataagcattcctcactttactggcctagactgaacaaggcaatggctagtggcaatctagtccacaattaatgaagatcatatttttgccgactccttggaccctgggttcatgaagatacgaagaattgaggcaacaacaaaaaaatacattaacaaaaagaaagcaaacattaaagcacaaaagcaccttcatcaatgttctcaccacctgtggttcccaacataaagaattttccatctctgttagctataacactctagagctaggaaagtaactagtactttacaaatatttttcctttcaaatgctttattacagttagaggaaaaaagaacgtaatgaacaaaaaa

SEQ ID NO: 255241 - DNA, 954 bp, Homo sapiens
gaaaataaaaatccaagtgcctatctcttgcatttccagttggtagtttcctatcatcgggtttgcctgttcacacaagtctttgcggcacaacggagtctgacttcccccaaattaatgcagttagtttattcctcgttctgatgattgccatatatagagaaagatctaattatttttatgtggcactattcctcatttatttcttggggactatgagtgatttagttaactccaccaagggaagtgtaagatgagcctcctcagggtggctgaattctattcgagagcatcacagggaggtggggaatagttgacgtgtgctgagataaactcttttacaagtatgacactgttgctttatttttttgccccagtctgcagggtgaaaaggacttttcatttcactgaggtgaaaagtgggtctgtgagtagagcgactttctttaaaaaaaaaaaaaaaaatcagaaaccaattacttgatatgcagagctgcaagcctcgttcctttaacaaaatcagtgcagtgtgcactgccgttaacctgaggaaagcagctgacatctcttgattacggctagaggtggaaggacccaaacttgcagcctccccctccccctcgagagagtgttagtccagtcctttagagaggttcggtttggctctctgtcatcaccgggacgctggcagggagtgtgtgtcatggttacaatagagtgtgctaacatataacaaccatgaaagcccagcgggaaaggctacagattccggggctgaccttggatctcactcccaggagcctgagtccaaccccatccagcccaggcagtccttgtagtcctctcttggcctttcacttttggagccctgtgtgtccaaatgctgggagaacatcaccccttggatgaattgccaccacattaaataaaacatatccaaagctcaaaaaaaaa

SEQ ID NO: 255242 - DNA, 293 bp, Homo sapiens
ctgcatgaatttggctcgaggaagagggctccagaaggagctgagtctccccagaagaggaagtttgatagattcccagaagtggaattgcttggtcaaacgtctcactcccaggagcctgagtccaaccccatccagcccaggcagtccttgtagtcctctcttggcctttcacttttggagggaatgatctgcactgaattctccctgtgtgtccaaatgctgggagaacatcaccccttggatgaattgccaccacattaaataaaacatatccaaagctcaaaaaaaaa

SEQ ID NO: 255243 - DNA, 1121 bp, Homo sapiens
gtgcagcgcgggagcacagtggagcgcagatcgcggacccgagcgggcatgtccccgcgcgcgggagcctccgtttgcggccgggcccgggcggctgtgaacttagcagcgggctcctgcggccccgtcactgccatgtagtcgctggcggggctccctgcagcccgggagcggcagtgccagtgagcctgagcccaggagcccgcgtcttccccgggaggcgctgagtgcgcgccgcgcccccgccgctcgggaggcactttgggccagacagggaaatgggggagaaagtttcggaggcgccagagccggtgccccgcggctgcagtggccacggcagccggactccagcctctgcgctggtcgccgcgtcctctccgggtgcttcctcggccgagtcctcctcgggctcagaaactctgtcggaggaaggggagcccggcggcttctccagagagcatcagccgccgccgccgccgccgttgggaggcaccctgggcgcccgggcgcccgccgcgtgggctccggcaagcgtgctgctggagcgcggagtccttgcgctgccgccgccgcttcccggaggagctgtgccgcccgcgccccggggcagcagcgcgtcccaggaggagcaggacgaggagcttgaccacatattatcccctccacccatgccgtttcggaaatgcagcaacccagatgtggcttctggccctggaaaatcactgaagtataaaagacagctgagtgaggatggaagacagctaaggcgagggagcctgggaggagccctgactgggaggtaccttcttccaaacccggtggcgggacaggcctggccggcctctgcagagacgtccaacctcgtgcgcatgcgcagccaggccctgggccagtcggcgccctcgctcaccgccagcctgaaggagctgagtctccccagaagaggaagttttctcactcccaggagcctgagtccaaccccatccagcccaggcagtccttgtagtcctctcttggcctttcacttttggagccctgtgtgtccaaatgctgggagaacatcaccccttggatgaattgccaccacattaaataaaacatatccaaagctcaaaaaaaaa

SEQ ID NO: 255244 - DNA, 293 bp, Homo sapiens
tcactgtcaggaagggcagcctccgaagagccatttcaactcagcccgacatcgccagagactagtggacccagctgcttcaaaaaaggagctgagtctccccagaagaggaagtttgtgcagaagcagtgattgtgactgggtaatagacaagagaagtgagagaaactgctttctaggcaagatgctgttatgagattgtcagccctgtgtgtccaaatgctgggagaacatcaccccttggatgaattgccaccacattaaataaaacatatccaaagctcaaaaaaaaa

SEQ ID NO: 255245 - DNA, 1722 bp, Homo sapiens
gtgcagcgcgggagcacagtggagcgcagatcgcggacccgagcgggcatgtccccgcgcgcgggagcctccgtttgcggccgggcccgggcggctgtgaacttagcagcgggctcctgcggccccgtcactgccatgtagtcgctggcggggctccctgcagcccgggagcggcagtgccagtgagcctgagcccaggagcccgcgtcttccccgggaggcgctgagtgcgcgccgcgcccccgccgctcgggaggcactttgggccagacagggaaatgggggagaaagtttcggaggcgccagagccggtgccccgcggctgcagtggccacggcagccggactccagcctctgcgctggtcgccgcgtcctctccgggtgcttcctcggccgagtcctcctcgggctcagaaactctgtcggaggaaggggagcccggcggcttctccagagagcatcagccgccgccgccgccgccgttgggaggcaccctgggcgcccgggcgcccgccgcgtgggctccggcaagcgtgctgctggagcgcggagtccttgcgctgccgccgccgcttcccggaggagctgtgccgcccgcgccccggggcagcagcgcgtcccaggaggagcaggacgaggagcttgaccacatattatcccctccacccatgccgtttcggaaatgcagcaacccagatgtggcttctggccctggaaaatcactgaagtataaaagacagctgagtgaggatggaagacagctaaggcgagggagcctgggaggagccctgactgggaggtaccttcttccaaacccggtggcgggacaggcctggccggcctctgcagagacgtccaacctcgtgcgcatgcgcagccaggccctgggccagtcggcgccctcgctcaccgccagcctgaaggagctgagtctccccagaagaggaagttttctcactcccaggagcctgagtccaaccccatccagcccaggcagtccttgtagtcctctcttggcctttcacttttggaggtaagcatgctccagggcctgcccagggctgctttgtctttctgttgccccatttcccaccaccagcatttgattacttcagactctgcaatccacaatccacagggtgaggaaactggttgaattgtttacttggtgacttacttgatcacttactctatttagcatatttactcatatttcacttggtgtctcttgactcattgttcaatgtgtgtgtatatgtgacagtttttcattttgctttcttagggaatgatctgcactgaattctgtaagttttgatcaatataaagatataatttattggtttctagaaaacatttcctaattcctatgagagtattataatacctgttgcctcaaactattttatacactattatttacaggataatgtatttaaattgtctaaagtgttaatattttttaaatcattttttagaactccaaggtatatactcctaccccctcactcataggctgattatattcactcttctctgtttgttagagaaatatccccaaggaactcttacattttagcatagtttgttataagaatacacgatagaaaatactgctactatagtatctatggtatgtatattctaatagacttttcatgaattcactatttatggatatagtgaatcttcctgtatctaatcggaagacacacatagtgt

SEQ ID NO: 255246 - DNA, 1555 bp, Homo sapiens
gaaaataaaaatccaagtgcctatctcttgcatttccagttggtagtttcctatcatcgggtttgcctgttcacacaagtctttgcggcacaacggagtctgacttcccccaaattaatgcagttagtttattcctcgttctgatgattgccatatatagagaaagatctaattatttttatgtggcactattcctcatttatttcttggggactatgagtgatttagttaactccaccaagggaagtgtaagatgagcctcctcagggtggctgaattctattcgagagcatcacagggaggtggggaatagttgacgtgtgctgagataaactcttttacaagtatgacactgttgctttatttttttgccccagtctgcagggtgaaaaggacttttcatttcactgaggtgaaaagtgggtctgtgagtagagcgactttctttaaaaaaaaaaaaaaaaatcagaaaccaattacttgatatgcagagctgcaagcctcgttcctttaacaaaatcagtgcagtgtgcactgccgttaacctgaggaaagcagctgacatctcttgattacggctagaggtggaaggacccaaacttgcagcctccccctccccctcgagagagtgttagtccagtcctttagagaggttcggtttggctctctgtcatcaccgggacgctggcagggagtgtgtgtcatggttacaatagagtgtgctaacatataacaaccatgaaagcccagcgggaaaggctacagattccggggctgaccttggatctcactcccaggagcctgagtccaaccccatccagcccaggcagtccttgtagtcctctcttggcctttcacttttggaggtaagcatgctccagggcctgcccagggctgctttgtctttctgttgccccatttcccaccaccagcatttgattacttcagactctgcaatccacaatccacagggtgaggaaactggttgaattgtttacttggtgacttacttgatcacttactctatttagcatatttactcatatttcacttggtgtctcttgactcattgttcaatgtgtgtgtatatgtgacagtttttcattttgctttcttagggaatgatctgcactgaattctgtaagttttgatcaatataaagatataatttattggtttctagaaaacatttcctaattcctatgagagtattataatacctgttgcctcaaactattttatacactattatttacaggataatgtatttaaattgtctaaagtgttaatattttttaaatcattttttagaactccaaggtatatactcctaccccctcactcataggctgattatattcactcttctctgtttgttagagaaatatccccaaggaactcttacattttagcatagtttgttataagaatacacgatagaaaatactgctactatagtatctatggtatgtatattctaatagacttttcatgaattcactatttatggatatagtgaatcttcctgtatctaatcggaagacacacatagtgt

SEQ ID NO: 255247 - DNA, 1276 bp, Homo sapiens
gtgcagcgcgggagcacagtggagcgcagatcgcggacccgagcgggcatgtccccgcgcgcgggagcctccgtttgcggccgggcccgggcggctgtgaacttagcagcgggctcctgcggccccgtcactgccatgtagtcgctggcggggctccctgcagcccgggagcggcagtgccagtgagcctgagcccaggagcccgcgtcttccccgggaggcgctgagtgcgcgccgcgcccccgccgctcgggaggcactttgggccagacagggaaatgggggagaaagtttcggaggcgccagagccggtgccccgcggctgcagtggccacggcagccggactccagcctctgcgctggtcgccgcgtcctctccgggtgcttcctcggccgagtcctcctcgggctcagaaactctgtcggaggaaggggagcccggcggcttctccagagagcatcagccgccgccgccgccgccgttgggaggcaccctgggcgcccgggcgcccgccgcgtgggctccggcaagcgtgctgctggagcgcggagtccttgcgctgccgccgccgcttcccggaggagctgtgccgcccgcgccccggggcagcagcgcgtcccaggaggagcaggacgaggagcttgaccacatattatcccctccacccatgccgtttcggaaatgcagcaacccagatgtggcttctggccctggaaaatcactgaagtataaaagacagctgagtgaggatggaagacagctaaggcgagggagcctgggaggagccctgactgggaggtaccttcttccaaacccggtggcgggacaggcctggccggcctctgcagagacgtccaacctcgtgcgcatgcgcagccaggccctgggccagtcggcgccctcgctcaccgccagcctgctttctcttttccttgtcttcaaacaaattgacatttgcggaggtgcgttgtgcagtagaacattcctcatgctgatgatcctctcctcctggcctctctgtctaccccttgcccctgtcgtagagctgtaagccatccttcccccgactccgcctgacatgtatcatggcacaccttcgtttttgttctttgtgtttatgtcgaatacctccctgctagactgcaagccccttgagggcagaattcttgtctgatttttactttctacttttcactgctctcaggacaatgccttgcacatagaaagcattcagtaaataatgttgaaggaataaataattatttatggaaaagt

SEQ ID NO: 255248 - DNA, 1128 bp, Homo sapiens
gtgcagcgcgggagcacagtggagcgcagatcgcggacccgagcgggcatgtccccgcgcgcgggagcctccgtttgcggccgggcccgggcggctgtgaacttagcagcgggctcctgcggccccgtcactgccatgtagtcgctggcggggctccctgcagcccgggagcggcagtgccagtgagcctgagcccaggagcccgcgtcttccccgggaggcgctgagtgcgcgccgcgcccccgccgctcgggaggcactttgggccagacagggaaatgggggagaaagtttcggaggcgccagagccggtgccccgcggctgcagtggccacggcagccggactccagcctctgcgctggtcgccgcgtcctctccgggtgcttcctcggccgagtcctcctcgggctcagaaactctgtcggaggaaggggagcccggcggcttctccagagagcatcagccgccgccgccgccgccgttgggaggcaccctgggcgcccgggcgcccgccgcgtgggctccggcaagcgtgctgctggagcgcggagtccttgcgctgccgccgccgcttcccggaggagctgtgccgcccgcgccccggggcagcagcgcgtcccaggaggagcaggacgaggagcttgaccacatattatcccctccacccatgccgtttcggaaatgcagcaacccagatgtggcttctggccctggaaaatcactgaagtataaaagacagctgagtgaggatggaagacagctaaggcgagggagcctgggaggagccctgactgggaggtaccttcttccaaacccggtggcgggacaggcctggccggcctctgcagagacgtccaacctcgtgcgcatgcgcagccaggccctgggccagtcggcgccctcgctcaccgccagcctgaaggagctgagtctccccagaagaggaagtttgtgcagaagcagtgattgtgactgggtaatagacaagagaagtgagagaaactgctttctaggcaagatgctgttatgagattgtcagccctgtgtgtccaaatgctgggagaacatcaccccttggatgaattgccaccacattaaataaaacatatccaaagctcaaaaaaaaa

SEQ ID NO: 255249 - DNA, 1008 bp, Homo sapiens
gtgcagcgcgggagcacagtggagcgcagatcgcggacccgagcgggcatgtccccgcgcgcgggagcctccgtttgcggccgggcccgggcggctgtgaacttagcagcgggctcctgcggccccgtcactgccatgtagtcgctggcggggctccctgcagcccgggagcggcagtgccagtgagcctgagcccaggagcccgcgtcttccccgggaggcgctgagtgcgcgccgcgcccccgccgctcgggaggcactttgggccagacagggaaatgggggagaaagtttcggaggcgccagagccggtgccccgcggctgcagtggccacggcagccggactccagcctctgcgctggtcgccgcgtcctctccgggtgcttcctcggccgagtcctcctcgggctcagaaactctgtcggaggaaggggagcccggcggcttctccagagagcatcagccgccgccgccgccgccgttgggaggcaccctgggcgcccgggcgcccgccgcgtgggctccggcaagcgtgctgctggagcgcggagtccttgcgctgccgccgccgcttcccggaggagctgtgccgcccgcgccccggggcagcagcgcgtcccaggaggagcaggacgaggagcttgaccacatattatcccctccacccatgccgtttcggaaatgcagcaacccagatgtggcttctggccctggaaaatcactgaagtataaaagacagctgagtgaggatggaagacagctaaggcgagggagcctgggaggagccctgactgggaggtaccttcttccaaacccggtggcgggacaggcctggccggcctctgcagagacgtccaacctcgtgcgcatgcgcagccaggccctgggccagtcggcgccctcgctcaccgccagcctgccctgtgtgtccaaatgctgggagaacatcaccccttggatgaattgccaccacattaaataaaacatatccaaagctcaaaaaaaaa

SEQ ID NO: 255250 - DNA, 1157 bp, Homo sapiens
gtgcagcgcgggagcacagtggagcgcagatcgcggacccgagcgggcatgtccccgcgcgcgggagcctccgtttgcggccgggcccgggcggctgtgaacttagcagcgggctcctgcggccccgtcactgccatgtagtcgctggcggggctccctgcagcccgggagcggcagtgccagtgagcctgagcccaggagcccgcgtcttccccgggaggcgctgagtgcgcgccgcgcccccgccgctcgggaggcactttgggccagacagggaaatgggggagaaagtttcggaggcgccagagccggtgccccgcggctgcagtggccacggcagccggactccagcctctgcgctggtcgccgcgtcctctccgggtgcttcctcggccgagtcctcctcgggctcagaaactctgtcggaggaaggggagcccggcggcttctccagagagcatcagccgccgccgccgccgccgttgggaggcaccctgggcgcccgggcgcccgccgcgtgggctccggcaagcgtgctgctggagcgcggagtccttgcgctgccgccgccgcttcccggaggagctgtgccgcccgcgccccggggcagcagcgcgtcccaggaggagcaggacgaggagcttgaccacatattatcccctccacccatgccgtttcggaaatgcagcaacccagatgtggcttctggccctggaaaatcactgaagtataaaagacagctgagtgaggatggaagacagctaaggcgagggagcctgggaggagccctgactgggaggtaccttcttccaaacccggtggcgggacaggcctggccggcctctgcagagacgtccaacctcgtgcgcatgcgcagccaggccctgggccagtcggcgccctcgctcaccgccagcctgaaggagctgagtctccccagaagaggaagtttgatagattcccagaagtggaattgcttggtcaaacgtctcactcccaggagcctgagtccaaccccatccagcccaggcagtccttgtagtcctctcttggcctttcacttttggagccctgtgtgtccaaatgctgggagaacatcaccccttggatgaattgccaccacattaaataaaacatatccaaagctcaaaaaaaaa

SEQ ID NO: 255251 - DNA, 311 bp, Homo sapiens
gtttcggaaatgcagcaacccagatgtggcttctggccctggaaaatcactgaagtataaaagacagctgagtgaggatggaagacagctaaggcgagggagcctgggaggagccctgactggtgagtcgcagcggcttggatgagagaaggaattgcatttctttacaaggtcctgcatggccccagagttccacatgtaatcagctttcttaagaatgggcctgcctctgcagaccatttcataaaaatcttatctaatccagaaagcagttaaattgaaaattttattaataaactttgctgaaatat

SEQ ID NO: 255252 - DNA, 473 bp, Homo sapiens
caggttcaagtgattctcctgcctcagcctcccaagtagctgagatcacaggtgcacgccaccaggcccagctaatttttgtatttttagtagagacggggtttcgccatgttggtcaggctggtcttgaactcctgaccttgtgattcgcccacgttggcctcccaaagtgctaggattgcaggcatgagccaccacacctggccaataatttctttttttatacaaactctcagagaacttaaaagaacacatgctcctaccgatcattttagtagtttaccataaccaaagccagataggacagtatataaatgaaaatttccaggcaaatctcactcatgaccatggatggaaaaatcctaaaataaatatcagcaatggggaaaaacaaaacaaaacaaataaattgcattccagtaattcaagattgggtcgacgcggccgcgaatttagtagtagtaggcggccgc

SEQ ID NO: 255253 - DNA, 446 bp, Homo sapiens
gttttttccttggggagtccccgccccgtgtggggtttcccgtcagtcggagcggcaggtcgcgagagcagggctggtggccagcggggagcctcgcagaggaaagcatcagtcttgctgaaataagcctagaattggaacgtaagggagttgtctgtagctgaatcgaccgatcgatagaaggatataactggggtggtgtctgtgcagatcggcatagaggatgagcagggtctgtctgggctttcgcgtccggcgtgtggagtggcaactaagattttttttttttttttttaagtgcctgttttctgaaattggcaggggccagggagaggaaacagttgcttgctatcagggtcatcccggagataacttgaagtttctagagcttattcttagaggcttcaggaaaaaaataaaaaaaaccaaaatcaaactttaaaagc

SEQ ID NO: 255254 - DNA, 328 bp, Homo sapiens
ggctctcagagggtgtcccatgcacgatttctcctcaccctcggaacaaacctagcaggtaagtattttcaccattcccaatttaagtctggggaaactaaggctcagggccgtaaatgaactcacttggggtcagaaggtgggcaggaggcagacctgggaccactgccgatccctcagcaggcaggcctttgtgtgttcagatgctcccccgagccctgtcgtgcgttcagatgctccgccgagccctgtcgtgcgttcagatgctctcccgagccctgtcgtgcgttcagatgcttcctgtcgtgcgttcagctcctgagccctg

SEQ ID NO: 255255 - DNA, 389 bp, Homo sapiens
ttctcagcataatatcatgttttccataaaagtggatcttgatcatcgccctctctcctagacagagaaaagccttgtcagtttttttatgagagagaaaatccagggaaccccaattggctttcatagtgcttagcaattctcatgaagggggtgaaatgtggagtagagaaatgtacagtgatttctggaacttttgttccagaagatgttaataaggtgaagttgttgttaactaaattttgcaggtataataaaacttgaagatgaagctatattcagggagaaaatctgcaaagagaggaatttcgtaaagggcagggtgaacagtaatgccgcttcagtagttcatgcctgtgcatagtcaaccttagaaaggcttttttaaa

SEQ ID NO: 255256 - DNA, 410 bp, Homo sapiens
gcatctcgtacccgtcagacgctgaactatgtgcagaggtaaagctgggcagcaacatcttattctcataacttctttaccactatgaaaaccaaaacaaagttactggtgaaacataactttagatttccagaaagtcaatccagatccaagtaacaacccgtatgtaatggggtagacaatggtcatgctaaaaccaagttccagtgttgagttccgtcagaaatttgttccctatctgaatgttatcattttgagatagaagaatcatttgaatcttcatcatgactatcattatctttggttttaattcatatttttcttattacttaatgagattgaacatcttttcatgtttattagccatttgaattctctctttggtgaagtggctgttctacttttcactt

SEQ ID NO: 255257 - DNA, 479 bp, Homo sapiens
tgagaaggacacaatgtcactgctgtggtctcctggcaaaaaaaaaagcacaatctgaatctaatcatgaagaaacatcaggcaatcctgaattgggactgtctgcaaaataactaacctgtactcttcaaaagtgtcaaggtcatgaaagacaaaggaagactgaggacctgtcagagatgagaagagtctcaattggtatcagaatcaaagaaactgtggggtcttggattggatcctggaccagaaaacgaacatttgctgacacatttggtaacatttaaggtctgtagcttagtttaacagtattggtcaatgttaattcaccagttttgattcttgaactatgattatgtcacatgttaccgtttgggatgctgagtaagggcacatgggaactctttcttcaacttgtttgtaagtctgaaattatttcaaagtaaagagtttatttaaaaactttctctattatctgaaca

SEQ ID NO: 255258 - DNA, 532 bp, Homo sapiens
acacacatatacctgattttttaagagttaaaattcatgtgtagcagcacaataaggtggacatagccataccccagaaagacatgccaagtcaaaagttgggctgatgctgcagggtttctgaccttctaatctaaatttggagataggttgcctagattttggaacctgcagggttacaggaacaaagagtgcaaagtaaaggcaggcacactgcctaaagcaagcctttgatagagttctccatttattcaataattcattcaacaaatattcaaagcctctaaaatgtccctggccttattccacagaaatccctgcttgtgtggaacatgcatcacagtgtagaggagctcatgggctaggagaaccagagtgagatggaaagtgggaagagaacctcctaaagaaaaactgaagcattttgttaggtgatctgtcatatcacagcagacgggggccctgaaatatcattataagacttgaatttcaaataaggataccagggatacaaaaaagctcaaaacattat

SEQ ID NO: 255259 - DNA, 346 bp, Homo sapiens
tgcccaggctggtctccaactcttaaagtgctgggactgtagctatgagccaccatacctggcttaattttcttattttaattttatataagtgattattattgttcctaagataattggggcagtgactcctttacaattgtagagatctaatttgtctattcacttcactgaaagagtatgccaatttgtttcatgagaaaatatcctatatttataaagcaggaaaattccttccaccaaactagggtgcattctaaagaaacgaattgtgctaagtaacatcacttaaagtgaaaacagaggcaatggtatctattaacaatgtttatcagtgaaggaaata

SEQ ID NO: 255260 - DNA, 567 bp, Homo sapiens
actaagtactatttacttctgttactctctaatttgttgatccttctactgtttgtaattttttaaaagtccttgtttttataatctatagtagactatgactttataagtatcaaaacctataaatctttagtagtttgtagagaaaacccactaaaatccttcatttaagttagttgcctctgcagactagaaaagtaccattctgtttcctgatatcctgtcttagagtcggtatgtggagagcaccattaactatttgtataattaaaatgaatgtgctaagttattttccacatttttgtttttggtgctgtaatatcaagtgctttgttttgtgttctgatgtatctgcatttacccttcagatgcaaataatggacctaaataggcttttattttaatatcagagggaactttatgctctaaggatacattctttttcttgctatatatagttttggtaaatactgaataagtgtgattagtacttaatagatctattcataatagctgtctgtaaatgacatagtatttgtaatgaataaaactatccttattttaaac

SEQ ID NO: 255261 - DNA, 323 bp, Homo sapiens
gcttgcaaacatttggttaacaaggcacgtcctgcacagccctacatgccttaaactttgatttcatacaacacatgtttttatgagctccagattgggtcaaagtggttggggcaaagtggctggggcaaagctacagattaacaacatctcagcaaagcaatggttgaaagtacaggtctttttcaaaatggagtctcttatgtcttccctttctatgtagacacagtaacagtctgatctctctttcttttccctacatatcccccttttcgttttgacaaaaccaccaccatcatcatggccccttctgtcgtcttctc

SEQ ID NO: 255262 - DNA, 168 bp, Homo sapiens
gcttgcaaacatttggttaacaaggcacgtcctgcacagccctacatgccttaaactttgatttcatacaacacatgtttttatgagctccagattgggtcaaagtggttgctgtctctctggagctgctggatacacctgtagactgtagcggtgattattaagaga

SEQ ID NO: 255263 - DNA, 275 bp, Homo sapiens
ggacaagaaacgtacctctcttccctcatatccagaggaagcaatggagggatgtggcgcttagactcactctactatccagtccatcgaagtcctaataatcttcaggatgcgacagagtgagactccgtctcaacaaaacaaaacaaaacaaccctaaggaaaagagagaatgtactggaggataggaagtatctaggagaaccttcttttttttttttcttatatttaaatttaagccttcatttatataaaataaaacgcatgaaacctat

SEQ ID NO: 255264 - DNA, 459 bp, Homo sapiens
cggttctcgagagaaagggaaggaagaggttccaagtatctgctgcccaacccactcttcaccatcctgggtgtcatcttctccccagtgccgtcctttcatcttcatttgaccaataaggacactgaggctcaaagccacagagggggctgagccagaacttgactgcagggccatgtgcttccaaagtccatgtcctttgcactttaccttcagttcaaaagaccaaagtggagtataaaatatgaaagcagattccattttgcttttcttagcccttagaaaaggggggagatcaccattctaactaagttaaagaaccagacacatttaaataaagtgactgaaatgctgtggaacagatgtgaataggaactaattttgctttttaatgagcattttgatcagatcaatactacaaaatgctaaactgtacaatgccattactgtttaaatgca

SEQ ID NO: 255265 - DNA, 492 bp, Homo sapiens
gccttagattttcaaggtcttagaggaagaaagggattacgtatgctgcaggcagttcatcatattgcttcttttaaatgagcatcgatcagtactggataacaatgagcaatgaatttagcaatggcaaaagcctacaaatagaattctggcttgccaagtaagttttgattgcttgtgttaaaggcgacaaaagccaggaataggccagccatggtggctcatgcatgtaatcccagcactttgggaggccgaggcgggtggatcccctgaggtcaggagttcaagaccagcctgaccaacatggcaaaaccctgtctctactaataatacaaaaattagctaggcatggtggttcatgcctgtaatcccagctacttgggaggctgaagcaggagaaccacttgaacctggggggtggaggttgtggtgagctgagatcataccattgcactccagcctgggcgaaagagtgaaactctgtctcaaaag

SEQ ID NO: 255266 - DNA, 2201 bp, Homo sapiens
gtcccttccctgggcaccaagagatgggctccccttgcctggcagagaaacagctggaaactggctccctgagacaagaagactggtaaacccagcgcttcctacctggtggtcttcagcaatgcccatgccttccagagacgggggcctgcatcccagacaccaccactatggttcccacagcccttggagtcagctcctgtccagccccatggagacgccgtccatcaagggcctttactaccggagggtgcggaaggtgggtgccctggacgcctccccagtggacctgaagaaggagatcctgatcaacgtggggggcaggaggtatctcctcccctggagcacactggaccggttcccgctgagccgcctgagcaaactcaggctctgtcggagctacgaggagatcgtgcagctctgcgatgattacgacgaggacagccaggagttcttcttcgacaggagccccagcgccttcggggtgatcgtgagcttcctggcggccgggaagctggtgcttctgcaggagatgtgcgcgctgtccttccaggaggagctggcctactggggcatcgaggaggcccacctggagaggtgctgcctgcggaagctgctgaggaagctggaggagctggaggagctggccaagctgcacagggaggacgtactgaggcagcagagggagacccgccgccccgcctcgcactcctcgcgctggggcctgtgcatgaaccggctgcgcgagatggtggaaaacccgcagtccgggctgcccgggaaggtcttcgcttgcctctccatcctcttcgtggccaccacagccgtcagcctgtgtgtcagcaccatgcccgacctcagggcagaggaggaccaggtgagcggcctctgatggcattcacggctccatcccgcagggtgcctgggcggagatgtcttttaggggcccaagaaaatgtcttcagatcttaaaataagaagaaaaaaatgaatattatccaacatgggttatattcattattaggccatcagtcataaaagataattttccatcttttttttttttattggagtcctgcaaaggcaaaagtgcctaaggctcaccgtgaaaatcattacgtggccctcagccatgcgtggactcagtgggccacacagacacagtgtcacctctcccagctctcccgagtctgtgactacaggcaaatcacgccacctcctctctgagcctgtctcccactccgtgaaatgggtaacatcacctcgaaggtttactcacccagtgaactcaacatgtgtttactgaacaccactctgtgctaagccctagagcaggtcaaaaacataaaatccctgccttcttgagctaacattctcctgggcatccccactccattttcagatgaggaaactgaggcatgggccatttattttcctcggagctccacagtaaggatgccaatgatgcaaaggtccccggcctcagtttccctgcagtgctcagtgtctgggccagtctcactggatgggaaactcacagatgagctgatctgtaagtcactctgccccaggaggccagagtaaaaagtgctgcttgcccacaccttcgtcccctttgcagggagttacaggagaccccgagacaccctccctccactcgggagccagatggtctgagaagtgaaataagaacctagcatttggttgagagggttattggaaagcttcaaacagagaattagattgtttcctgatttaaaaaatcactcctctccagcaccgagctcccccagggctgcccatcatcttaatgtttggagcttgccttgtaatcaacagagagagaaactaaacacatacgtaagatggtgcttgctctatttggctcctaacagttgccagcccacctaagttctcttcgcttaaagatatgtcccagggcaagacaacaggatcagagaacttgccagatagaaaagacttaaatggagaaccagcccatgcctcacagacagtaggatcccagtaaatatgggttgaataaaatgtgtcttgtccaacctacaaaagtttggccctaaaaaaacccacaaaatatttggacctttaaacagcttgttttcccatggagaagatgacaatgccaatcataggcattttttcattctacagcataaaaacatgagatttaagagcctgct

SEQ ID NO: 255267 - DNA, 2144 bp, Homo sapiens
tcggagctgaacttcctaaaagacaaagtgtttatctttcaagattcattctccctgaatcttaccaacaaaacactcctgaggagaaagaaagagagggagggagagaaaaagagagagagagaaacaaaaaaccaaagagagagaaaaaatgaattcatctaaatcatctgaaacacaatgcacagagagaggatgcttctcttcccaaatgttcttatggactgttgctgggatccccatcctatttctcagtgcctgtttcatcaccagatgtgttgtgacatttcgcatctttcaaacctgtgatgagaaaaagtttcagctacctgagaatttcacagagctctcctgctacaattatggatcaggttcagtcaagaattgttgtccattgaactgggaatattttcaatccagctgctacttcttttctactgacaccatttcctgggcgttaagtttaaagaactgctcagccatgggggctcacctggtggttatcaactcacaggaggagcaggaattcctttcctacaagaaacctaaaatgagagagttttttattggactgtcagaccaggttgtcgagggtcagtggcaatgggtggacggcacacctttgacaaagtctctgagcttctgggatgtaggggagcccaacaacatagctaccctggaggactgtgccaccatgagagactcttcaaacccaaggcaaaattggaatgatgtaacctgtttcctcaattattttcggatttgtgaaatggtaggaataaatcctttgaacaaaggaaaatctctttaagaacagaaggcacaactcaaatgtgtaaagaaggaagagcaagaacatggccacacccaccgccccacacgagaaatttgtgcgctgaacttcaaaggacttcataagtatttgttactctgatataaataaaaataagtagttttaaatgttataattcatgttactggctgaagtgcattttctctctacgttagtctcaggtcctcttcccagaatttacaaagcaattcactaccttttgctacatttgcctcattttttagtgttcgtatgaaagtacagggacacggagccaagacagagtctagcaaagaaggggattttggaaggtgccttccaaaaatctcctgaatccgggctctgtagcaggtcctcttctttctagcttctgacaagtctgtcttctcttcttggtttcataccgttcttatctcctgcccaagcatatatcgtctctttactcccctgtataatgagtaagaagcttcttcaagtcatgaaacttattcctgctcagaataccggtgtggcctttctggctacaggcctccactgcaccttcttagggaagggcatgccagccatcagctccaaacaggctgtaaccaagtccacccatccctggggcttcctttgctctgccttattttcaattgactgaatggatctcaccagattttgtatctattgctcagctaggacccgagtccaatagtcaatttattctaagcgaacattcatctccacactttcctgtctcaagcccatccattatttcttaacttttattttagctttcgggggtacatgttaaaggctttttatataggtaaactcatgtcgtggaggtttgttgtacagattatttcatcacccaggtattaagcccagtgcctaatattgtttttttcggctcctctccctcctcctaccttccgccctcaagtagactccagtgtctgttattcccttctttgtgtttatgaattctcatcatttagctcccacttataagtgaggacatgcagtatttggttttctgttcccatgtttgctaaggataatggtttccagttctaccgatgttcccacaaaagacataattttcttttttaaggctgcttagtattccatggtatctatgtatcacattttctctatccaatctattgttgactcacatttagattgattccatgtttttgctattgtgaatagtgctgcaatgaacattcgtgtgcatgtgtctttatggtagaaagatttatatttctctgagtatgtatccagtaatagcccattcatttattgcataaaattctaccaatac

SEQ ID NO: 255268 - DNA, 974 bp, Homo sapiens
tcggagctgaacttcctaaaagacaaagtgtttatctttcaagattcattctccctgaatcttaccaacaaaacactcctgaggagaaagaaagagagggagggagagaaaaagagagagagagaaacaaaaaaccaaagagagagaaaaaatgaattcatctaaatcatctgaaacacaatgcacagagagaggatgcttctcttcccaaatgttcttatggactgttgctgggatccccatcctatttctcagtgcctgtttcatcaccagatgtgttgtgacatttcgcatctttcaaacctgtgatgagaaaaagtttcagctacctgagaatttcacagagctctcctgctacaattatggatcaggttcagtcaagaattgttgtccattgaactgggaatattttcaatccagctgctacttcttttctactgacaccatttcctgggcgttaagtttaaagaactgctcagccatgggggctcacctggtggttatcaactcacaggaggagcaggaattcctttcctacaagaaacctaaaatgagagagttttttattggactgtcagaccaggttgtcgagggtcagtggcaatgggtggacggcacacctttgacaaagtctctgagcttctgggatgtaggggagcccaacaacatagctaccctggaggactgtgccaccatgagagactcttcaaacccaaggcaaaattggaatgatgtaacctgtttcctcaattattttcggatttgtgaaatggtaggaataaatcctttgaacaaaggaaaatctctttaagaacagaaggcacaactcaaatgtgtaaagaaggaagagcaagaacatggccacacccaccgccccacacgagaaatttgtgcgctgaacttcaaaggacttcataagtatttgttactctgatataaataaaaataagtagttttaaatgttataattcatg

SEQ ID NO: 255269 - DNA, 939 bp, Homo sapiens
cttaggtacgaggccgggtgttaatcggccgaggcaaacactcctgaggagaaagaaagagagggagggagagaaaaagagagagagagaaacaaaaaaccaaagagagagaaaaaatgaattcatctaaatcatctgaaacacaatgcacagagagaggatgcttctcttcccaaatgttcttatggactgttgctgggatccccatcctatttctcagtgcctgtttcatcaccagatgtgttgtgacatttcgcatctttcaaacctgtgatgagaaaaagtttcagctacctgagaatttcacagagctctcctgctacaattatggatcaggttcagtcaagaattgttgtccattgaactgggaatattttcaatccagctgctacttcttttctactgacaccatttcctgggcgttaagtttaaagaactgctcagccatgggggctcacctggtggttatcaactcacaggaggagcaggaattcctttcctacaagaaacctaaaatgagagagttttttattggactgtcagaccaggttgtcgagggtcagtggcaatgggtggacggcacacctttgacaaagtctctgagcttctgggatgtaggggagcccaacaacatagctaccctggaggactgtgccaccatgagagactcttcaaacccaaggcaaaattggaatgatgtaacctgtttcctcaattattttcggatttgtgaaatggtaggaataaatcctttgaacaaaggaaaatctctttaagaacagaaggcacaactcaaatgtgtaaagaaggaagagcaagaacatggccacacccaccgccccacacgagaaatttgtgcgctgaacttcaaaggacttcataagtatttgttactctgatataaataaaaataagtagttttaaatgttataattcatg

SEQ ID NO: 255270 - DNA, 2028 bp, Homo sapiens
tcggagctgaacttcctaaaagacaaagtgtttatctttcaagattcattctccctgaatcttaccaacaaaacactcctgaggagaaagaaagagagggagggagagaaaaagagagagagagaaacaaaaaaccaaagagagagaaaaaatgaattcatctaaatcatctgaaacacaatgcacagagagaggatgcttctcttcccaaatgttcttatggactgttgctgggatccccatcctatttctcagtgcctgtttcatcaccagatgtgttgtgacatttcgcatctttcaaacctgtgatgagaaaaagtttcagctacctgagaatttcacagagctctcctgctacaattatggatcaggttcagtcaagaattgttgtccattgaactgggaatattttcaatccagctgctacttcttttctactgacaccatttcctgggcgttaagtttaaagaactgctcagccatgggggctcacctggtggttatcaactcacaggaggagcagcttctgggatgtaggggagcccaacaacatagctaccctggaggactgtgccaccatgagagactcttcaaacccaaggcaaaattggaatgatgtaacctgtttcctcaattattttcggatttgtgaaatggtaggaataaatcctttgaacaaaggaaaatctctttaagaacagaaggcacaactcaaatgtgtaaagaaggaagagcaagaacatggccacacccaccgccccacacgagaaatttgtgcgctgaacttcaaaggacttcataagtatttgttactctgatataaataaaaataagtagttttaaatgttataattcatgttactggctgaagtgcattttctctctacgttagtctcaggtcctcttcccagaatttacaaagcaattcactaccttttgctacatttgcctcattttttagtgttcgtatgaaagtacagggacacggagccaagacagagtctagcaaagaaggggattttggaaggtgccttccaaaaatctcctgaatccgggctctgtagcaggtcctcttctttctagcttctgacaagtctgtcttctcttcttggtttcataccgttcttatctcctgcccaagcatatatcgtctctttactcccctgtataatgagtaagaagcttcttcaagtcatgaaacttattcctgctcagaataccggtgtggcctttctggctacaggcctccactgcaccttcttagggaagggcatgccagccatcagctccaaacaggctgtaaccaagtccacccatccctggggcttcctttgctctgccttattttcaattgactgaatggatctcaccagattttgtatctattgctcagctaggacccgagtccaatagtcaatttattctaagcgaacattcatctccacactttcctgtctcaagcccatccattatttcttaacttttattttagctttcgggggtacatgttaaaggctttttatataggtaaactcatgtcgtggaggtttgttgtacagattatttcatcacccaggtattaagcccagtgcctaatattgtttttttcggctcctctccctcctcctaccttccgccctcaagtagactccagtgtctgttattcccttctttgtgtttatgaattctcatcatttagctcccacttataagtgaggacatgcagtatttggttttctgttcccatgtttgctaaggataatggtttccagttctaccgatgttcccacaaaagacataattttcttttttaaggctgcttagtattccatggtatctatgtatcacattttctctatccaatctattgttgactcacatttagattgattccatgtttttgctattgtgaatagtgctgcaatgaacattcgtgtgcatgtgtctttatggtagaaagatttatatttctctgagtatgtatccagtaatagcccattcatttattgcataaaattctaccaatac

SEQ ID NO: 255271 - DNA, 3473 bp, Homo sapiens
aaaaaggaattgggattcgaatcggcggcggcttctagtttgcggttcaggtttggccgctgccggccagcgtcctctggccatggacaccccggaaaatgtccttcagatgcttgaagcccacatgcagagctacaagggcaatgaccctcttggtgaatgggaaagatacatacagtgggtagaagagaattttcctgagaataaagaatacttgataactttactagaacatttaatgaaggaatttttagataagaagaaataccacaatgacccaagattcatcagttattgtttaaaatttgctgagtacaacagtgacctccatcaattttttgagtttctgtacaaccatgggattggaaccctgtcatcccctctgtacattgcctgggcggggcatctggaagcccaaggagagctgcagcatgccagtgctgtccttcagagaggaattcaaaaccaggctgaacccagagagttcctgcaacaacaatacaggttatttcagacacgcctcactgaaacccatttgccagctcaagctagaacctcagaacctctgcataatgttcaggttttaaatcaaatgataacatcaaaatcaaatccaggaaataacatggcctgcatttctaagaatcagggttcagagctttctggagtgatatcttcagcttgtgataaagagtcaaatatggaacgaagagtgatcacgatttctaaatcagaatattctgtgcactcatctttggcatccaaagttgatgttgagcaggttgttatgtattgcaaggagaagcttattcgtggggaatcagaattttcctttgaagaattgagagcccagaaatacaatcaacggagaaagcatgagcaatgggtaaatgaagacagacattatatgaaaaggaaagaagcaaatgcttttgaagaacagctattaaaacagaaaatggatgaacttcataagaagttgcatcaggtggtggagacatcccatgaggatctgcccgcttcccaggaaaggtccgaggttaatccagcacgtatggggccaagtgtaggctcccagcaggaactgagagcgccatgtcttccagtaacctatcagcagacaccagtgaacatggaaaagaacccaagagaggcacctcctgttgttcctcctttggcaaatgctatttctgcagctttggtgtccccagccaccagccagagcattgctcctcctgttcctttgaaagcccagacagtaacagactccatgtttgcagtggccagcaaagatgctggatgtgtgaataagagtactcatgaattcaagccacagagtggagcagagatcaaagaagggtgtgaaacacataaggttgccaacacaagttcttttcacacaactccaaacacatcactgggaatggttcaggcaacgccatccaaagtgcagccatcacccaccgtgcacacaaaagaagcattaggtttcatcatgaatatgtttcaggctcctacacttcctgatatttctgatgacaaagatgaatggcaatctctagatcaaaatgaagatgcatttgaagcccagtttcaaaaaaatgtaaggtcatctggggcttggggagtcaataagatcatctcttctttgtcatctgcttttcatgtgtttgaagatggaaacaaagaaaattatggattaccacagcctaaaaataaacccacaggagccaggacctttggagaacgctctgtcagcagacttccttcaaaaccaaaggaggaagtgcctcatgctgaagagtttttggatgactcaactgtatggggtattcgctgcaacaaaaccctggcacccagtcctaagagcccaggagacttcacatctgctgcacaacttgcgtctacaccattccacaagcttccagtggagtcagtgcacattttagaagataaagaaaatgtggtagcaaaacagtgtacccaggcgactttggattcttgtgaggaaaacatggtggtgccttcaagggatggaaaattcagtccaattcaagagaaaagcccaaaacaggccttgtcgtctcacatgtattcagcatccttacttcgtctgagccagcctgctgcaggtggggtacttacctgtgaggcagagttgggcgttgaggcttgcagactcacagacactgacgctgccattgcagaagatccaccagatgctattgctgggctccaagcagaatggatgcagatgagttcacttgggactgttgatgctccaaacttcattgttgggaacccatgggatgataagctgattttcaaacttttatctgggctttctaaaccagtgagttcctatccaaatacttttgaatggcaatgtaaacttccagccatcaagcccaagactgaatttcaattgggttctaagctggtctatgtccatcaccttcttggagaaggagcctttgcccaggtgtacgaagctacccagggagatctgaatgatgctaaaaataaacagaaatttgttttaaaggtccaaaagcctgccaacccctgggaattctacattgggacccagttgatggaaagactaaagccatctatgcagcacatgtttatgaagttctattctgcccacttattccagaatggcagtgtattagtaggagagctctacagctatggaacattattaaatgccattaacctctataaaaatacccctgaaaaagtgatgcctcaaggtcttgtcatctcttttgctatgagaatgctttacatgattgagcaagtgcatgactgtgaaatcattcatggagacattaaaccagacaatttcatacttggaaacggatttttggaacaggatgatgaagatgatttatctgctggcttggcactgattgacctgggtcagagtatagatatgaaactttttccaaaaggaactatattcacagcaaagtgtgaaacatctggttttcagtgtgttgagatgctcagcaacaaaccatggaactaccagatcgattactttggggttgctgcaacagtatattgcatgctctttggcacttacatgaaagtgaaaaatgaaggaggagagtgtaagcctgaaggtctttttagaaggcttcctcatttggatatgtggaatgaattttttcatgttatgttgaatattccagattgtcatcatcttccatctttggatttgttaaggcaaaagctgaagaaagtatttcaacaacactatactaacaagattagggccctacgtaataggctaattgtactgctcttagaatgtaagcgttcacgaaaataaaatttggatatagacagtccttaaaaatcacactgtaaatatgaatctgctcactttaaacctgtttttttttcatttattgtttatgtaaatgtttgttaaaaataaatcccatggaatatttccctgtttt

SEQ ID NO: 255272 - DNA, 2013 bp, Homo sapiens
aaaaaggaattgggattcgaatcggcggcggcttctagtttgcggttcaggtttggccgctgccggccagcgtcctctggccatggacaccccggaaaatgtccttcagatgcttgaagcccacatgcagagctacaagggcaatgaccctcttggtgaatgggaaagatacatacagtgggtagaagagaattttcctgagaataaagaatacttgataactttactagaacatttaatgaaggaatttttagataagaagaaataccacaatgacccaagattcatcagttattgtttaaaatttgctgagtacaacagtgacctccatcaattttttgagtttctgtacaaccatgggattggaaccctgtcatcccctctgtacattgcctgggcggggcatctggaagcccaaggagagctgcagcatgccagtgctgtccttcagagaggaattcaaaaccaggctgaacccagagagttcctgcaacaacaatacaggttatttcagacacgcctcactgaaacccatttgccagctcaagctagaacctcagaacctctgcataatgttcaggttttaaatcaaatgataacatcaaaatcaaatccaggaaataacatggcctgcatttctaagaatcagggttcagagctttctggagtgatatcttcagcttgtgataaagagtcaaatatggaacgaagagtgatcacgatttctaaatcagaatattctgtgcactcatctttggcatccaaagttgatgttgagcaggttgttatgtattgcaaggagaagcttattcgtggggaatcagaattttcctttgaagaattgagagcccagaaatacaatcaacggagaaagcatgagcaatgggtaaatgaagacagacattatatgaaaaggaaagaagcaaatgcttttgaagaacagctattaaaacagaaaatggatgaacttcataagaagttgcatcaggtggtggagacatcccatgaggatctgcccgcttcccaggaaaggtccgaggttaatccagcacgtatggggccaagtgtaggctcccagcaggaactgagagcgccatgtcttccagtaacctatcagcagacaccagtgaacatggaaaagaacccaagagaggcacctcctgttgttcctcctttggcaaatgctatttctgcagctttggtgtccccagccaccagccagagcattgctcctcctgttcctttgaaagcccagacagtaacagactccatgtttgcagtggccagcaaagatgctgggtaagctgaaggtagtcctagagatcacagtgatgtgagtggcacctgtcaccttctttacatgacctgcattatcaggaacagtatgtaaaagatgaatgatgtctgccttttatttttagataggtatgttgttgaaaaagcaagtggcaaaacattgctcccaatcctttaggcttacttattccatgcttcttttagaatatttattttatactttcgtgaattaaaaattttcagtacctgaaagtcaacagtcactttgtaactgaagaatatacagctgttaggctaaaattccctttgctcactggctttgattgaatacctacagggatcataactgtctagacaattacttgacatgtgttctcatattccttctgtcttcccatagagagcagtttgggattaatacacatgattctgtctctcaaaatgtacctctgcactggaagtttttaccccaattttgagggatttttccagatttcagaaattatagttaatgtcatatcactcgtttaagttacatttttacctccagtcattttggctctcttttagctcgtttttatagggatttgtaaaattaaaaatgctttgcatgttttactttataccttaacagggtttattaagggaactccagcaatgttaaatagacatgttagatccactaccccaagtgcacttaaagtgtgatataaatgg

SEQ ID NO: 255273 - DNA, 646 bp, Homo sapiens
cttaaaaatggagactggtgtaatctaagcagttagaggtgacactctcctcaccagcaggagatctctggagaccttaaaccagagaatctctggccatggggtcaccagatgtaactgaaagcaggagtgaccacttaagtgaaaacagggagggagtggaagtgtgcatgcccagcagtgagatgcctcagagagaagaaacatatcctgggtcatatgacgactaaatagcagagcctggattcacactctggcttgttttgccctagtgctcaggccacttcactgaggttcttctactgcaaatacttcctgttacttatttataccatgctctttcattcccctgtactttttctctaactgttcctttttctttaggagtacccttcttgtttgatcatgtcgtgagtttttgaaattcacctcagacttacagataaccatgatggagtaaacataggcatttaactctgcttcctacagaaacctcattaaaataacaatgaaagaataaaaaggtataaacccacagggactaactaggagaatagaagcaggtataatagcaagtgtgagttgtcaacagaattttggataagtgtggcttgtagacgaaagaggtaaaaagaaaaaaacaaag

SEQ ID NO: 255274 - DNA, 224 bp, Homo sapiens
attcttttgcagaaatatttatgattacagtaatcattgctatgtttcagaatactttagagctttaattatgtcatttgggcttcagccaccagggaggtaagtgtggtgaaacagaaactcagagagagaagaaacatatcctgggtcatatgacgactaaatagcagagcctggattcacactctggcttgttttgccctagtgctcaggccacttcactg

SEQ ID NO: 255275 - DNA, 820 bp, Homo sapiens
tgtgtgccaatttgttcaggtaagtactgggaaatcttttaagtcatggagatgttttgatataaaattgtagtgaacataagaaagtgctgtgtgtgtaatagatgctccataattagccataaatattctttctggagtcagtttgtagctgcaagtaagagacagaaaatgtctatagtgaagaaatggcattaattgtgcatgtggagaggacatctgttcccaggctgcaaaactgactcattctgaatttaaagagggttttttttttaatttaaaagtaaactttaatgtcaaaaatgcaaacttagggaggacataaagatcacatacaaggctgccacttcacacttggagggttgcacagcatctgggcaaaggctctcctcacttcccagatggtgcagcagctggacagagatgctcctcacttcccagatggtggggcagccaggaagaggcgctccttactcccagatggtagggccgccgagcagaggcactcctcatttcttagtgcggccgccaggcagaggcacacctcgtgtccaagaaggtgtggcagccaggcagaggcgctcctcacgtcccaggcggtgcagtggccgggcaaaggcgcttctcattcccagacagggctgggggccagggagaggcgctgctcacttcccagacagtggggcagctgggcagaggtgcttctcacttcccagaaagttgggcagctgggcagaggcgctccttaaagaggatttgttttatgtttatcctcagctatgtatgcctcacagctcttctccttgtgttatggctacgg

SEQ ID NO: 255276 - DNA, 315 bp, Homo sapiens
attttctaattctctgaacaaccgtgtgaggtagttattatctcaattgtattgactgagaaaatgagacatgaacagatcaaggaagctgacaaatatggcgtagtttgtaaactgtaatgtgaggatttgaatccagagcctctcactccaagcactccatttaaactctactgtatgctgatttgagtttcataaacaacttgaaaatgtgcatatcccttgccgcccccactatcagaaagaaaacgttcccagaaccccaatacccagaggcaatctcctcactgagaattcagtggactagtagtagta

SEQ ID NO: 255277 - DNA, 693 bp, Homo sapiens
attccatttctaagaatacagcctaagaaaatagtcatgggcatatacaaagatatttgtatacaattgatcatttcagtttgtacaaagctattaattaaaacagagacaacttccaattctaaaagaggagaatattcaataaacaataatatattttccacatcagtgtttcccaacttgtgtggcatcagaatcacttgagggcactgactagatggacagaataccaggagccttccctgtagattctgattcacaatgtctgggcagctgccaaggagaaggtataacaacgagtgtctcgggtgcttcttaaggcaagtctgggaaatggtgctttatgtaacaaaatattttaaaatgcattaaaaatgatgaagtagaaatataggtaaatgtgagaaaaagttcctaatgtcgtctcaagtgaaaagcagttttttaaacagattctatagtatggtctcaattttgtatttaaaatgtatacatgccaatataaaacaggaggacattcactaaaattgtttaggatggttagctctggatcataagaccgtaggtgattttgcttctttctttgtacctatcttcagttttctaaattctctgccatgaagatgccttacctttaagaccaaattaagttataaccaaactctcctaagtgtcttttctttcacaaagaga

SEQ ID NO: 255278 - DNA, 301 bp, Homo sapiens
gtcacccagtttgaaagctgttgtattggaagatggttaaggcccttctaggtttcaaatgccttgacgtccccatgacctatgtccccccccccccaccatgtcaacccttcagaggggtgccgatggtagagaagccaagcttgctatttttggtgattgaggtttacaataaacaaaaccagctgttttctcattacctataattttttttcaggcaatgggtccattcactgaactaatctgtcttgcatagctgcttggatgtgggtgtggggaaaatggttgggtgagcagatat

SEQ ID NO: 255279 - DNA, 527 bp, Homo sapiens
caaatcggggaatgaatacaaatttatcttacagttctagaggtcagaagtctgatagaggtcttactgggctaaaattaaggtgttgacaaggctgcattcctttttggaagatctaagggaggctgtgtttccttgcctttcccagcttctcaaggccacccgcattccttggctcatggtcctctttttccatcttcaaaggctgcaaaggtgatcaactcctttccatagccctctttgatcacagctgggaaaggttctttgcttctgtaaacacattagatgagcccatctgggcgattcaggatagtctccccacctggtgggatctccccagcagtttccttaccttaattataaacacagtctcttttgccatttataagatcatattcacaagtactggggattacggtgtaggcttctttgttggccattgttttacctagcagaactatatagataaaataattatgtggaaatcagtaataaaaatatattaaaagccaagtttttgatataat

SEQ ID NO: 255280 - DNA, 256 bp, Homo sapiens
ttttttttaattatctgttttcctgaaataccaaggcttgcacatattaagaacaataaatactattaaaacatccatcatttaaaacaatttatactagtatatattagctttgggaaacaaaaatatgaataatttactgtaattgtatgactttctggacctttttaaacagttagagctaaattttctctgctttagatttttttcatcattgctttcccagattgggtaatgttgcaatcctgtggcaatg

SEQ ID NO: 255281 - DNA, 413 bp, Homo sapiens
aacaattaaaatggtaacatcaaagatcactgatcacagatcaccatagcagatatataataataatgaaaaagttggaaatattgtgagaattactgaactgtgacacagagacatgaagtgagcacatgatgttagaaaacttgcgccaatagtcttgcttgatgtacgattgccacaaatcttcaatttgttaaaaaatctgcaaataaatgaggcatgtctgtgtttgtttaatgattaacaatccgtcacaaactggataattcatcagcaataactcatccagtttgtgattcatcaatccatcttcgttttgctgcatttcaaaacaagcctcagtcatccatgtatttcatgcctaaacacttcagtaggtgtatcattaacttaagttcagtattgaacgtagt

SEQ ID NO: 255282 - DNA, 247 bp, Homo sapiens
ttgaaactcttatgatttcagttaatgtaatgtctgccctccaggaattcagcccagctgaagaggcaggcaggtggggagatagaataggatgtgttgcatgctctcagacatagttttacattggatgagatggtagggaaagctgcagaggggagatgttatttgaatttcgccttgatgagtgaggaagagttaaatcaacaaaagttggaaaagcattcagaacagagggagaaaaaccgac

SEQ ID NO: 255283 - DNA, 303 bp, Homo sapiens
cctggctggaaagatctgatgctctggaagccatgatgtgaaagctctgcagtggggacagggggtatcccgggtgataaaggttagaaagagaaactgctgatctcacgttcgtagggagctggccatggtcctgccctgcaaacaagagccgggagactgcaagaaaggctgagtaaagcccaaagagaaactcttccccctggatgatgatcaagaacctcattctgccggcttctggaggaatcttggccagaaaagaactcagaatccctttcaacctctttcaatttttctggtctg

SEQ ID NO: 255284 - DNA, 564 bp, Homo sapiens
gggttcaagcaattctagtgcctcagcctccttagtggctgtgactacaggcgtgtaccaccatgcctggctaatttttctatttttagtagaaatggggtttcacggtgttggccaggctggtcttgaactcctggcctcaagtaatccacccactttggcctcccaaagtgctgggattatgggcgtgagccgctgcatccggcctctgtattaaatactttagctgcatattctttcttcgaaatgaccacaaaaagaaggtattactgattaatatgcatatggtcttgcgtatggccagacttatgacttgcgtatggtcataaaggtagtaagttgcagagcagcactcagacctgcctggctttgatgaccgtgccttgatggcactggaagtggaaaggtgggggtgactggggaggtgaggttttgtccgttccctggatgctaaaaggaaatggaggagtgtaagaggttgattctttgaacctggatggctggggcaaagataacactgtaacaggaagaagagaggccggagggaacactgatgtgatggga

SEQ ID NO: 255285 - DNA, 504 bp, Homo sapiens
agttgatgttaatctagaatttttagttttttaaattatcgatatactttctgtcttttcctttttttttcactctctctgtatttgtgctttccccctttactctctttcccttcattccttctttctcactttcttcttctatttttcactcttgggtagattatcttttagaaaacagcaagatattatataatttactttatattctctttccaaatgattaaagtaataattaaaaatttttgatatgtgtgtatgcaaggataggaatcctcttgtaagtggaagaactctaccacatgcatgagtcattagtgtgttaaacactgggaagtggctttaggtccagctgggtgctctgaagaaggtaggtttcttcagttctttatgttaactgtctccttaccttaaaaaaggagtgaagaatactgactgcagaggttttgtgaggattccggtaacacagaagcatagaactggaaaagaatattaatatttgcc

SEQ ID NO: 255286 - DNA, 329 bp, Homo sapiens
aagtgcccccaggttattttaatgtgcagcctgagtttaaaaccactggattcggccgggcgcgttggctcacgcctgtaatcccagcactttgggaggcctaggcaggtggatcacgaggtcaggagatccagaccatcctggctaacacggtgaaacctcgtctctactataaatacaaaaaattagccgggcatggtggcgggcgcctgtagtcccagccgctcggcaggctgaggcagaatggcgtgaacccgggaggcggagcttgcagtgagctgagatcgtgccactgcactccagcctgggcaacagagagagactccatc

SEQ ID NO: 255287 - DNA, 1503 bp, Homo sapiens
gagggagggagcgagcgagcgaacgagcagccggcgccgtcctcccgcagcaccagccaggccacgccgccgcctcttcccctgcgccccgcgcccaggccgggccgagccgagccgagccgggtcgggcccgggccatgctgctcaccgtgtactgtgtgcggagggacctctccgaggtgaccttttccctccaggtcgacgccgacttcgagctgcacaacttccgcgcgctgtgcgagctcgagtctggcatccccgcagccgagagccagatcgtctatgcggaaagacctctcacagacaaccacagatcattggcttcttatggcttgaaagatggggacgttgtgattttacgacagaaggagaatgcagaccctcgacctccagtgcagttcccaaacttaccccgaatagatttcagtagtatagctgtgcctggcacatcaagtccccggcagcgccagccaccaggaacacagcagtcccactcatctcctggagaaataacttcatctcctcagggcttggacaatccagccttgctccgagatatgttgctggccaacccgcatgagctgtccttgctgaaggaacgcaatccacccctggcagaagctctgctcagtggagaccttgagaaattttctagagtcctggtggagcagcagcaggaccgagcccggagagagcaagaaaggattcgtctgttttctgctgatccctttgaccttgaagctcaggcaaagatagaagaagatataaggtaaagacctgttcatctaaagaacaaaacttagagactccagatttcccagactgcaggttatctgacattggttgggcatctgcttggaggtagcttctctgttttgcagttgagatagtaacctcagtcttttaggttagtctctcctctttcattttctatgcatttcgatttgacatgacaaagatataggtgcttagtttaatgactttctttctaaaattttaaggaggactccctgactagcagacagagcatcataacacagctttagataaatgacccccggactgagcagaagccaccatctggtgagaccacaaggctggttgcatattacatgggctgatttgactctctttctttagacatattgtataagtcctgattaaatccagggcttaaacatgattggattagagagggctctgcgccgatggaacgttggtagtcctaagtctgttttcctgctgcatttcttgtactggcctcagtggataaactgaatgctggacatgtttccagctctcagtttctgtaatgcggtggttctcacctggggctatagtaaaatcacatgagaaacttttaaaaatgcagatgcttggactcttctcccaaatctgatgaatcagaattgtcgggcatggagctcaagcaaggacagtgacgctgttccggcctcagtcacactgatagtcacaagcaagattctgttcagtcattctctg

SEQ ID NO: 255288 - DNA, 334 bp, Homo sapiens
tactgtaatagtctcagaagcccaagatggaattctgtgaacattcatggaggtcctaccatgactcgggcactgctccagatgttaaaaatatggggatatgtaaaacagatgaaggacctgtcctcagggagttatcttctattgagagaaactgcaaacaagtacattaatctgatcaggttatgccattttatataggattgccagggagagactatgcccagaggggattattttgaaaaataccaaaacccccatcacagaagtattctactgggtaacaatgtggtcaaatataatcaaacaacagctaagcagtagagctgaggac

SEQ ID NO: 255289 - DNA, 530 bp, Homo sapiens
atacccatgggttctgcatctgtgggtcaaccagctgcagattgaaaatatttggggaaaaataatggatggttgtgtctgtactgaacatgtacagactgttttttcttgtaattattcctgagcaatacagtgactatttatatagcatttacattgtattagatattataagtaatctagagatgatttaaagtatatgaaaggatgtgtgtaggttatatgcaaatattataaaccattttatgtgagagaattgagcatccgtggattttattttttaatccatgaggggagaggtcctagaaccatttcttcacagatagcaagtgacaacaatttatgttggtgtgagctcaaaattgctaatgttggatgttacaaagactggaataacaaatgaataagcaggttatatcattgaaataataactttatatcagtatgatcaatgaaagattgtacttcagttacatgagtgggtacgtgcttgtataaattctagtatgtcactatatatgcactgattc

SEQ ID NO: 255290 - DNA, 1070 bp, Homo sapiens
cgaggggagcgagaggcgcggagagtttggcaggcagacccagaaatccctggagcgcggcggacccggcggccggaggggcgaccccgcccgatgtaacgcgccccgcccgagccccggcccctgcacggggggggtgatgtgagcagagcccaggaatgccttatgtggatcggcagaaccgaatctgtgggtttctggacatcgaggagcatgagaacagcggcaagtttctgcggaggtacttcattctggacacccaggctaactgcctcctctggtatatggacaacccccagaatctggcaatgggggcaggagctgttggagctttgcagctgacctacatctcgaaggtgagcatagctaccccaaaacagaaaccaaaaactccattttgctttgttatcaatgccctgtctcagagatatttccttcaagccaatgatcagaaagatatgaaggactgggttgaagccctgaaccaagccagcaagatcaccgttcccaaaggtgggggcctacccatgaccactgaagttctcaagagcttagcagctcctccagccctggagaagaagccacaggtggcctacaagacggagatcattggaggggtggtggtccacacacccatcagccagaacggtggggatgggcaggaagggagtgagcccgggtcccacaccatccttcgaaggtctcagagttacatccccacgtcaggctgccgtgcttccactgggcctcccctcattaagagtggttactgcgtgaagcaagggaatgtgcggaagagctggaaacgtcgcttctttgcacttgatgactttaccatctgctacttcaagtgtgagcaggaccgagaaccactgcgcaccatattttttaaggatgttctgaagacccatgaatgtctggtcaagtctggtgatctcttaatgagggacaacctgtttgaaataataacaagctccaggaccttctacgtacaggcagacagtccagaagacatgcacagctggattaaggagattggcgcagctgtccaggccctcaagtgccacccc

SEQ ID NO: 255291 - DNA, 1004 bp, Homo sapiens
cgctggggcaccgaccccgcaacgactgcccgggctgcgggaggggaggagagcagagaacgtccccagggtgatgtgagcagagcccaggaatgccttatgtggatcggcagaaccgaatctgtgggtttctggacatcgaggagcatgagaacagcggcaagtttctgcggaggtacttcattctggacacccaggctaactgcctcctctggtatatggacaacccccagaatctggcaatgggggcaggagctgttggagctttgcagctgacctacatctcgaaggtgagcatagctaccccaaaacagaaaccaaaaactccattttgctttgttatcaatgccctgtctcagagatatttccttcaagccaatgatcagaaagatatgaaggactgggttgaagccctgaaccaagccagcaagatcaccgttcccaaaggtgggggcctacccatgaccactgaagttctcaagagcttagcagctcctccagccctggagaagaagccacaggtggcctacaagacggagatcattggaggggtggtggtccacacacccatcagccagaacggtggggatgggcaggaagggagtgagcccgggtcccacaccatccttcgaaggtctcagagttacatccccacgtcaggctgccgtgcttccactgggcctcccctcattaagagtggttactgcgtgaagcaagggaatgtgcggaagagctggaaacgtcgcttctttgcacttgatgactttaccatctgctacttcaagtgtgagcaggaccgagaaccactgcgcaccatattttttaaggatgttctgaagacccatgaatgtctggtcaagtctggtgatctcttaatgagggacaacctgtttgaaataataacaagctccaggaccttctacgtacaggcagacagtccagaagacatgcacagctggattaaggagattggcgcagctgtccaggccctcaagtgccacccc

SEQ ID NO: 255292 - DNA, 588 bp, Homo sapiens
cgaggggagcgagaggcgcggagagtttggcaggcagacccagaaatccctggagcgcggcggacccggcggccggaggggcgaccccgcccgatgtaacgcgccccgcccgagccccggcccctgcacggggggggtgatgtgagcagagcccaggaatgccttatgtggatcggcagaaccgaatctgtgggtttctggacatcgaggagcatgagaacagcggcaagtttctgcggaggtacttcattctggacacccaggctaactgcctcctctggtatatggacaacccccaggtgagagggtcagtgggaaggggtggggcgactgggtgcccatcactgcgccagaggaatgcacacagggttagcctccaggcctaggctcgtgagcaacacaacctgctgatcagcagggaggggacaaccctacaacacacacagacacacacacaaatgcacattcacgtgcacacacaccacacacaccccatacacaccacacacacgcacacacatgcaccttatacacacacaccacacacacaccgtacagacaaacacaaacacaacaaaagcaggcacc

SEQ ID NO: 255293 - DNA, 184 bp, Homo sapiens
aggggttggtcttgctgtctcaagagtggcaaaggtggaagaaatctgcgtataagtggacccacgcgtggatccatgcatttcaaacccatgttgttcaagggttcactgtagatggattgacccatgatggctcattaaaaggttaaatgcttaaagttaataaatggttaaaagctcaagt

SEQ ID NO: 255294 - DNA, 340 bp, Homo sapiens
tataatttttaaaaagccacagcaattgcacaaacaataaaaaacaaaggattcaaagcatgcaactgtgagaaaacatcaaatttcaaaggaagacagccagagaagaattaaaaataaaagatctacaaaaccaacataaaacaaattataaaatggaagtctgtacctataaataaccttgaatgtaaatgggttaaattctccaattaaaatacatagactggctgaatgtatttttaaaatcaaccatatactactgtctataagtgactcacattactagtaaagacacacaaagtctgaaagtgaggggatgaaaaaggatattccatgcaaa

SEQ ID NO: 255295 - DNA, 389 bp, Homo sapiens
cgctgccatatctggtcctggtgattgcaggagtagaggagagacacaggcaagatcaaaaggctgtcatctcagaaaagattgctaattgattgatcttcctgtctccagtttgcccttacaccaattcatctaccaaaagatgtctaaatttctctctctgaagaaatgctgtgctaatgttggtcgcagtaaaactccaatggctcccaccacctaccaaggaaatttcaaagccctccatgacatagatcctttccaaaactttatgctgatgctgcagctcaactggaaaactcatttccttccctttccctttcttctgtatctccacatgtcaaggtcttggtgattattaaagcccaagaaaaagtaaatcttttaatgaa

SEQ ID NO: 255296 - DNA, 219 bp, Homo sapiens
ggggtctagggtgctggtgatgttttctttcttgatctggtaactggttatagggatgtcaccaaattgtcactctgaaaattctccaagctggacacataagatttgtccatttttttctgtttatatactacattccaaaaaaaaaaaaaaggaaaaaaggaaacaccaagacaagttgttctgaacttgaagtaaaaatatcagtatgaactcaag

SEQ ID NO: 255297 - DNA, 250 bp, Homo sapiens
aagtcatatgagctctctgagcctcagtttccatatctgtaaactaagacaaagcttgccctacctccctcctgcaaggagctgttgagggatcaagaaggctaaggcagggaaggagctctgaaaactgtgatcgcggcactactgatgactgatcagcgcctcccctgcctggccctgggccaagctggggtgactggagggtgaagtgtgaatgggaagagggagaccccaatgtgccttttgcagc

SEQ ID NO: 255298 - DNA, 532 bp, Homo sapiens
aacacttgtgtattgcacattctggttcctctttggcaaattgccttggcattaagatagtaaattttccttgccacctacgctggttgagtcaggatgcttaattacttggaggtaaaaagcacctggctgaaatagccatccctgaggctgcctgttgaggataggagatgcttcatccatctttagatcctttcttggaaacgctgagcctggccagccatgcaggcttttccaagctctgatgctgccctgtgtccacaatagcatccccacagcctggatccatcattcccagcattatgatagctcctttgtctccttggaagagcccaaaacccacagctgaggcctcagggcttttctaatgtgcttagaacaggggtaaaggtaatgccaaccaaaatggggaaacctgtattcctgctcagtcactgcttagtcagcataaatcactccagaggatagtttgttactgacctcaaagactcagttacaaagatgatcaccatagcattgtttacagtagcac

SEQ ID NO: 255299 - DNA, 356 bp, Homo sapiens
actgaattctcagtgagtgcttctgtttggtgtgattggcagccaaagacagtatagaagcagaacagccagcgtccatgtctgacctaactcagggctgccgtcaatcagaaccaccattattttaaatgcaagtcagcaaccactctcacaggcaataagcactcatatttcatcttgagatcttatgtcactagaaagaggtcttttcctttaaacacattaatgctgagagaactgaaaacatttcacttccaaaggcaggtgaaacactgaaaaaaagcttcactaacttattgctacaatttagataactgagcacttgccagctattcttccaatgggattctacgtga

SEQ ID NO: 255300 - DNA, 483 bp, Homo sapiens
taatattgggaatttcccttggtgctaagaatggtgctgaggcactcgaacctttgtgcttcgtgctattgaattcctgtacattagctttctaagcacatttctaatttgtacacttaatgccttcatcttgaccagcctaatcattcacacagctagtaatgctaaattattgtctcacaatgccccttatctttggtgtgcatgtgtacctatatttatttaaaagggttaataacagagcttgtaattgtggaatgttcgctggtgaacaaatggcagaaggactcacgcaagtttatatcatcggcctttgttttccagagctcccccaaacagattttgattcttttctccctagaaatagtgttacctgtcatacaagcaactgattggtagggtctactactgaattccttattcctggaattagttcacaagatgtatcgtcttaaatgtactgatatgtgaaaaggagatacc

SEQ ID NO: 255301 - DNA, 721 bp, Homo sapiens
ccagctttctgaatccacaattccatctctccctcaaggggccattgtaatggcttcatatttatggagtgtatgaaaagtacatatgggctttggggaaaatggctcttcaggcacacctatcaacacaaaccatgaactgaaaacaaaatctagggcttcttaatgacatgaaatggactatcccagattcataaagacctttttttcagcctttttttttttttttttgcaaaaggatactgtttcctttttgcatgcttactgtgagcgatttcactaaggttttcttaagttgaagcccatggttaatttttcagcttcggaaagaacccaggctttttgaataggcacacattttggagacaaacctcggcttcacaagtgtaatttcttgagaagagaatttgctcaggaaggttttgtcactgttatttgggctcctcccattagcatttctttttcctttcttggttggcttaaccactcattagtgatgacagaacattacaccactgtgacatgacaaagacggctggaagggacacagccctgccagccagatggcaacacatggatgtcaaagagcacaacacccagttgtttggaagtggctgtcctttgaagagtcgcttaaatttatgtggccaatattttcgtcttgtggtatttatttctagtggtcacaagtcaacactagggagtgggagagacattagtt

SEQ ID NO: 255302 - DNA, 351 bp, Homo sapiens
gctgttgggtgacctgtttagagggataattgagaggtgaggccagctggacttcctgagttgagtggggacttggggaactttcctgtcttacaagcggattgtaaaatgcaccaatcagcactctgtaaaacgcaccaatcagcaggattctaaaagtagccaatcacagggaggattgaaaaaagggcactctgataggacagaaacggaacatgggaggggtcgataagggaataaaagctggccacccccccccagccagcaaggcaacccgctagggtcaccttccacgctgtggaagctttgtcctttcgctcttcacaataaacgttgctcactctttgggtc

SEQ ID NO: 255303 - DNA, 635 bp, Homo sapiens
tgagtgaacaatgaggaataccagaagagaaatgaaaactttcaaaaagaaccaaatagaaattttaaaagtgaaaactataacaacagaaattgtaaaatcctctggctaggcttcacagattgaaacagaaaacaagatctattaatttgatttcagatcatcagaaattatacgttatgaaaagtagagttaacaaacaacttcagtggagcagaaaaagtatctgaagaaatagtagccccccaaatctctaaatttatgaaaaacctaaacttacccatcaacaaatcttaagacaaccaattctgagaaatcaaacacacagtctctctcaagcacatcacagtaagattgctagatgtcaaacacaaaattctgaaagcagccaaaggaaatgatacattatatacaaggtaacaaggataggcaatgatgcatactctcctgacttctattcaacacagtattgaaaatcctagtccatgcaacatgtcaagaaaaagaaacagtctgggcacagcgctcatgcctgtagtgccagcactttgcaaggccaaggtgagagcatcacttgaggccaggagttcaagatcagcctggacaacatagtgatatcctgtctgtaccaaaaa

SEQ ID NO: 255304 - DNA, 100 bp, Homo sapiens
ctgtactcagctgcaccagtgtattttcccatccaaaacatacacaggggaggcttgatgccaccccaggaaacagaataaccccttctagggacttctt

SEQ ID NO: 255305 - DNA, 333 bp, Homo sapiens
ctccccaactccatcttaaaaaatccactgccttaagtgacagaagctctggctttaggccaggcacggtggcacaagcctgcagtcccagctctttgggaggctgaggcaggtggatcacttgaggtcaggagttcaagaccagcctggccaacatggtgaaacctcatctctactaaaaatacaaaaactaacaggatgtggcaggtgcctgtaatcccagctactcaggaggctgaggcaggagaatcacttgaacccaggaggcagagtttgcagtgagtcaagatcacgccactgcactccagcctgggcgacagagtgagatctgtc

SEQ ID NO: 255306 - DNA, 298 bp, Homo sapiens
attgtaaatggtaagtattagatacatgattctgtaagactttctacaaacagaaactcacataagtactataagttattttacagatggacaaacgaaaggcatgaaagtgaattaatttacctctcaggattaagtaacaacaaaaaaactcctaaaaccgactctatggtgttattcacttacttacttcacttatgtgggtatttgccttgtttgggttgtgattttttttttctttcactgagttattcaattttcaaaaataggactagtgcatgaaaacaaattaaagcat

SEQ ID NO: 255307 - DNA, 708 bp, Homo sapiens
gggagggggaagggggcgcggcatgacgttagcttgactgtcctgggtcatgttttttaatccagagtattggacatgtaacacagcaacaagagctgatcattttgtttaatcaccttttggatctttgccagatggtctctattgagagcgctgcaaacagagagagatgaactgcatctaacacgccaccagagctttcccgtaaatgtctgagaactgattccaacaagaatttagtctcagagcagaaagggatacatttaaaaactatgtgcattaactatacttttccccatagaatcctcacttggcatgaataatttacccactcttatgctaatgggatcatgaaagtatccctctgtctttagtgcagctattctcagctttcagtaattaccccacccagtgaaaataacatggcttctgcattgaacggctgactcgtacctgacaattagaaagatcatggctgacagtggaagagtctagaactggacagagaaacccttgtagcccaaggaagagcagagccatagagtaacactggccgtgagtgggaatgcatgccggtgagaagtggcaagaagggtaaaaagaaaaattctccactgtcaagcttttctttctttgacttattatcgagattttacttaaataaaaatatggttctctttcaattaccagatgtgaaagacattcatg

SEQ ID NO: 255308 - DNA, 410 bp, Homo sapiens
gactccatgtcaacaaaaatatgtatgtatacaaaaattagccaggtgtggtggcgtgcacctgtagtcccagctacttgggaggctgaggtaggtggatcacttgagcccaggaggctgaggctgcagtgagccgagattgcgccactgcactccagcctgggcaactgagtaaggcactgtctcaaaaaaacaagaggtgatgtgtgtcagctgaggcctgaaggatgtagtaaaatttaaccagaaggggagcatgaggttaaaaaggatattgataccccatcaggagtaaagaagaccagtgtgcaaactagtaagcctggggaagagtggcacaagatgaggttggggagatagaagtaaaggcaagtgactactcctttgccatcattcttagcctggtctgg

SEQ ID NO: 255309 - DNA, 1362 bp, Homo sapiens
  misc_feature (212)..(212): n is a, c, g, or t
  misc_feature (283)..(283): n is a, c, g, or t
  misc_feature (367)..(367): n is a, c, g, or t
cggttcagattcttcctcggcaagtttcatccagagggtaacggagcaacatccacaaatcacagtgaaaataggaacccgtaatgctgtggtcatctgacttgtcattggagccaaaaagccacaggcaaacattctcaaagagcctggaagaactcagggagtgccgcagccatgtgcgtgtctttaaaatctctgtgatagttacatcngggcaaagtgaatcacaaggaaaaggaaactggatattggggttgggggagggaagatgcagggaaagaangggagggggagggaatcctcacactagtgcaaaacccatggaaaggcagctttaaagggaaaaccaaatatgcttcaagttgtncttaaaatataaaaatcaagagacaggcattctctagcatgaaggacacaggcaacacagaacccatgatgcttgaaaagaaagaaaaaccatttcacaataaaatagagcctcaacatagaggaaaaagccttggaatggaaaagtcatgaaaaaaatgatgagaactgaatgcaacaaaatgtagaagactgccatctgcttgtctccactgtggtttattcgtttcagggttttaaatgacgtaataaaaagatagctgatcagcttccttgggttttgctgatgacacaagagagctttgcctgaagatggaaacactggagtcagaactgacctgccctatttgtctggagctctttgaggaccctcttctactgccctgcgcacacagcctctgcttcaactgcgcccaccgcatcctagtatcacactgtgccaccaacgagtctgtggagtccatcaccgccttccagtgccccacctgccggcatgtcatcaccctcagccagcgaggtctagacgggctcaagcgcaacgtcaccctacagaacatcatcgacaggttccagaaagcatcagtgagcgggcccaactctcccagcgagacccgtcgggagcgggcctttgacgccaacaccatgacttccgccgagaaggtcctctgccagttttgtgaccaggatcctgcccaggacgctgtgaagacctgtgtcacttgtgaagtatcctactgtgacgagtgcctgaaagccactcacccgaataagaagccctttacaggccatcgtctgattgagccaattccggactctcacatccgggggctgatgtgcttggagcatgaggatgagaaggtgaatatgtactgtgtgaccgatgaccagttaatctgtgccttgtgtaaactggttgggcggcaccgcgatcatcaggtggcagctttgagtgagcgctatgacaaattgaagcaaaacttagagagtaacctcccg

SEQ ID NO: 255310 - DNA, 270 bp, Homo sapiens
catgaccctcatgaccatggcccaccagataaaacccagcttggcattcaaggtgctgcagagctggcccttcctcccttcactctatacacaggcacttggaggtgcctacacatctacttgcccttgccctctccttagtttggccaattcttattcatcttccatcacaggcctatgtgaagagctaggaagcccttccttagctcttcactgtgttaagtgtatttcaccacctcccattctttccacagtagaccctccctccca

SEQ ID NO: 255311 - DNA, 277 bp, Homo sapiens
gggatccctcaagactggggtgggaggtactaaaaaagcccccaccctcagggccaggcttgggtcagagccaggggtctgaggaagcctggggtttccatccttaccccaaggagacgatacagccctcctttggtggggctcagcgtcccccagagcccacccttgtcagtgttgacttagtgggactgccaggtgtgtgggggttgtgtgtgtccgggggacatgggagtggagattttaatttctaccatgataaaaatgcgagacctgtaca

SEQ ID NO: 255312 - DNA, 152 bp, Homo sapiens
gggaaagcaaacagtgtatgtagtatttctaagtgacatgctacacgttataagaatctatttttgaaatcttatacagattatgcagaagtcagaataacaaatacaacacctcaatttttttatagagtctagcgttagtttactataag

SEQ ID NO: 255313 - DNA, 463 bp, Homo sapiens
cttggagaagtcatacaacggtgaaataggaagtggaaagaaatgcatccaatttagggagggaaaaggatgtaaggaagaatgaatcagcaagtagccctgcaccatccaatatggtaaacactaggtgaaaatatttatgttttgaatataaattaattcaaagtaaaaaattaaaaattaagtttctcaggtgcactagccatttacaaagtactcagccccatgtgtctgtctagcagctattaggttggacagtgcagacatagattacatccattattacagaaaattcttttggacagtgttggagcttgtaaaggaagagagaagatggaaaagcctgaaggatatgttatgttagaggagagtctctccccacctccacaacaactcaagccctaagtgagtgtatgtatagcctgtgagtcagatatgaggtaaagaagttgtatttattaat

SEQ ID NO: 255314 - DNA, 436 bp, Homo sapiens
caattgggaaatttgaacatggagcttgtatcaggaaacgctgttgtattgatgtaagatttcttgaatgataatgttattgtagatatgtaggaaaatgttcttgttctaagaagacacatgcttaagtatttagtggtggccatatgcgatggctcatgcctgtctgtaattccagtaatttgggaggccaaggcaggaggatcacttgagcccaggagttcatgaccaacctgggaaacatagtgggaccccatttctacaataaataaataaataaataagctgagcagagtagtgcacaactatagtcccagctactttagaggctgacgtagaggatcatttgagcctgggaggtcaaggctacatgagccctgatcacacccctgcacgccagcctgagcaacagagtgaggccctgtctaaaaaaaaa

SEQ ID NO: 255315 - DNA, 525 bp, Homo sapiens
ttctccatagtataaactgtcttagtcatctttataagaagaagcccagtgtttttaccaagtaagctattcatacatgtttttggacagctgattgtataaaggattacatgagttctacaaagttcattcttcttggagtttttattcactattagaatttttttttctcaatgactgttcttttttttttttgttagaaccgcactttaactagaagcctcatgacagatgtgttgtatgtggtgctggcggagaagactggggagaaggaggggcagaaacacttgctgggatttccacagaacttctgaaaactactggggaagaaaagctagtgccccgtctccagtgtgggagaggcattgcagaaggtggcagctcatggccagcccacagcgttcttgccagttcctctagaacaggggtgtccaatcttttggcttccctggccacattggaagtagaaaaatttcttggtcacgcataaaatgcactaacactaatgatagcttataagcaaaa

SEQ ID NO: 255316 - DNA, 496 bp, Homo sapiens
aacaagctacctcgtcagaaattaagatattaaaagcaagttgcaaaactatagcatgattctgtgtgtacagttacatgtacaggttgagtatcccttatctgaaatgcttgcgttgtatttaccagttcagcatcccaaatccaaagatccaaaattcgaaatgctccaatgagcatttcctttgagcattgttgtcactcaaaatatttctcatttttggatttggggtgctcaacctgtataataccattggatatacatttgatccttgaacaatgtgggagttaggggactctgaccgccccccgcccctccccacagtggaaaatttgcatataacttttcactcccccaaaacttactattaagtgcctgctgttgactctaagccttaccaataacataaacagttgattaacacatactttgtatgttatatgtattatataccatattcttataataaagtaagctagagaaaagaatgttacta

SEQ ID NO: 255317 - DNA, 219 bp, Homo sapiens
  misc_feature (10)..(10): n is a, c, g, or t
  misc_feature (65)..(65): n is a, c, g, or t
taactatttncctagccaccggacaggtaaagagacagagactgagaggcgagacctcacctcanaccatgtggcaggacagctgccactcacctgattccatgtggcttgagagccacggagccagagtagcacttgggtcatggcagggctgagcccttcacctaaactcacacatgggtcatggcagggctgagcccttcacctaaactcacacat

SEQ ID NO: 255318 - DNA, 551 bp, Homo sapiens
ctctcttcccagtaacactcagtatgtctgcagatgcaccccttgctgtagagtataagattgccggatatggaacatttaaagtattatttggctcccaaaattgaggatgaaaaaggattttagaaattcttagaatccaagaaaataaaactaagctctttgaaaattgcttctgagattccagcgtgtactgaagtcatttccatcaaaaaatttatgcctctgaatacacaggtagatgcggttttctgtaaataacatattttttcatctatcttctagaatctatttaaagtacaaaatccaaagtcaaatctggtctcattaacctagagagatatctgctttacttacaaatattccttctgatttttataacaagagggttataaaagggatcttgactctaaatgcaatttttaagaattgtgtttctgatttaaataaagtttaatctgaattttaaatgtcagaaaagaaactactatagcacattggcagagtaattttgtcttttgaatctactaataaaaaatgcagtttgtatt

SEQ ID NO: 255319 - DNA, 664 bp, Homo sapiens
gaatagatcatttttttcagtcttagatagcaaagttcaatgttttagaaaccataatatgactttgatgccctttaaataaatacatttgcagggctgtatataaatacgattaagttaagggcatatctatttcccttttagaaaaggaaaagataactcctccctattgtttagcaaagttttagggaaaatgtaagggagttaaaggagcatatcttgtttgtttgtgtgttttggaatgtatacaaagaaccttattttattcattttttttcttttgctaataaatagttgtttgttgttgttgctttaacccaatctcaacaactgcaatagaaaaattttctaccttatgaaaatatttttaagaactacatatttggctgcagttacacaactggaaggccatgttagacggcaaaatggttttctagaacatgaaatggaatatacattgccctcatttctataaaccaggactctaacaagggcttccacatttagcaaatgtagaaaaatttctgatactagtggcattaaatcctaaagttctattataaaattaatcttcattaatctttttttgtacttcatgaaagaaacgttgattcaagtaattatttcacaattttcaggaaatctttttcccactaactttaac

SEQ ID NO: 255320 - DNA, 550 bp, Homo sapiens
tcaagtgtctataactacatcccctccacaccctactcctaacctcgaagtccaccaaaattccttcacgatcataagagaaagacccagacagtttcacagatgtttaggggtcaagcccgggggtagttgccaccttttctgccgacatttcactgaccagaaatcagtcccagggcttcagccagctgtcaaggagactgggaaaagtagtcaagctgtatttgcagagagctggatccaaccagaactgggggtttgcagaacaggcacaaagaagcaagtgaaaggcaaagaattagtgaatgtgagcgaacaggtgaatatcaaaattgacctatgaattcaatttggaaaaggcaaatgaggagaggggtgaaggaagtgaataggtggcaggataaattgactttttaaattttaaagcttatagtgctttgataatatagtaaaggttaaaagaaccatctggggcttaattacatttttaagtttccttgagggctgtcacatttgtctgagtagcaaaagcctgtataaaatagccgag

SEQ ID NO: 255321 - DNA, 458 bp, Homo sapiens
  misc_feature (63)..(63): n is a, c, g, or t
  misc_feature (232)..(232): n is a, c, g, or t
cagggcatattcatgtgtacccacttggctggacactgggagcagagtcagaaagtgggtatngaggcacttctctcaaatgactttacaatttaggagaaaatcctggttgcaatgtaattcttccagaagcaatgactaaatcagtcaattcagcattatagaaccatgcaagtgtgtgcattaagccctggaaatactggaggcattttgtggggcagcccatttgaancacattggtgctgtgcttctgtgatttggtaaccagcagccacatgggccacctgagtcaccgagctgcctaaaatccgtagtgtacaggtgatgagggggactcctgagagaagggggtgaactaggtgatggcatcctagtgagaggtgacagcgtgctggcagtggtgacagcgagcccttgctcgctctgggcgcctcctctgcttgggctcccactgtggc

SEQ ID NO: 255322 - DNA, 393 bp, Homo sapiens
ccaaatatttaaggttgaagttttattgtcaattcagtggaaattcaagtcggagtcagccataaggatgatcaacaaggtctacataagcaaccccatccccaactcacacccccaaaaaaacctgcctggacaccaagcttcagcgagctttcctggttggcaataattcatgcacagaatcacacattgctgccaggagaatgcagcattgtctattactttactgggagaggacaactgaatgcctgtgcttggaattctcctgaactctgcccatgtacctccttccttgaattattttaatctgcattcttttgttgtaaaaaatcatatcaacaaacgtcacaagtttcagtgagtgatgtgagtccttcttgggaatcataagaa

SEQ ID NO: 255323 - DNA, 536 bp, Homo sapiens
gacattcaggtgtatggatacaagaaaatttttccccttttttcactaaaccatttttatgaactgtcatattgcacagaaccctaacacagagatatattaaaacagctgttcaggctgcattagaagggctactccacggtattcttgtagaacccagtgtggatggtggcccttctgggtgagagcaatatggcactcgcactggtgcccacccccttctcacccttaccccttgggtgttcatgggatcaactctctgtgccataagagttcctccatatttagtatggaaaaccattgactcgactcacttcgttattttacctgaggcagttggagtaagtgaattaccaaaggcatgcattctcaaaaaatgctctcggtgggaagtggcaaaaaaaatcgtactatacttatatatcaagtaagatacagtacagtacataaacagatgtatttctgtgatattaaaactttatgtcggcttgattaggaaaaaatggtctcagaagcctccttggaaggcgataacg

SEQ ID NO: 255324 - DNA, 604 bp, Homo sapiens
  misc_feature (496)..(497): n is a, c, g, or t
tgggtagtaggctataccttctaggtttgtataagtacactctatgctgttttacaatgaaatcgcctaatgatgcatttctcacaagtatctacattggtaaatgatgcatgactgtttatcaaatgaaaggcctaaattttgaagtgtcactctaaaatttttgtgtgattgtttctatgctataaaaccacaataatttctggccgggcatggtggctcacgactgtaatcccagcactttgggaggctgaggcaggtggatcacctgagatcaggagttcaagaccagcctgaccaacagggagaaaccatgtctctactaaaaatacaaaattagccaggcatggcggtgtgcacctgtaatcccagctactcagggggctgaggcaggagaatcacttgaaccagggaggcagaggttgcagtgagctgagataatgccattgcactccagcctgggcaacaagagcaaaactccatctcaaaaataaanngtcgaatacaattcactgcccgtcgtttacacgtcggaactggaaaccctgcgttcccaactaaatcgcttgagacatcccctttcgcagttgcgttcgggcccccc

SEQ ID NO: 255325 - DNA, 386 bp, Homo sapiens
ctgatgaaatttctttctaggtctgctactaatcagcacttttatatctcatcctgaaagataggaagattttaaaagataaaaacattttaggctgggtgtggtggctcacgcctgtaatcccagcactttgggaggccaaggcgggtggatcacccgaggtcaggcattcgagaccagcctggccaacatggtgaagccctgtctctactaaaaatacaaaaattagccaggtgtggtggcgggcacctgtaatcccaggtactcaggaggatgaggcaggagaatcacttgaacctgggaggcagaggttgcagtgagccgagatcgtgccactgcactccagcctgggcaacagagactccgtctcaaaaaaagaaaacaaa

SEQ ID NO: 255326 - DNA, 183 bp, Homo sapiens
tcttttcttttcttttttttgaaaaacaccacaagagtgatactgtttctttttcagtgaatcagtatcagaaggtagatgatactggtttgtctcaatattggtgatgttagctttgatctcttggttaatgtggagtttgtcaggtttctctgctttaaaattactatttccgtgtttata

SEQ ID NO: 255327 - DNA, 451 bp, Homo sapiens
agaaaaaaaactaggtggctgggatatagggatgagagagattgacttttctctgtatgtctttctgtaccttttgaatcttaaatcttgtgaatctaatacataaagataatcaaaatttctgataaactagtttccagttggaaagtgtaaagggggagttagttaattgagggaagatggcataaggaatgggaagatgactggaatggctcacaggagctacttggagatggaggctcaaactctggttttcaggctaaatgtctattgcataaattattttttctgtcctctaattttaagaaaaaggcaaatgcaaatcactgttttaaggtaccacctaataaaaattcaactgccattttattaggttcaggtgaacatttctgtgggaactcagctgtctgctctcctgctatcatgctatcaggctggtaaaccacttaag

SEQ ID NO: 255328 - DNA, 575 bp, Homo sapiens
accccagcgaatactcaagttccttatataaaatggcatatagtatctgcatctaacctatgcacatcttcctgtatactacttaaaatcatctctagattagttatcactgatacagtgtaaatgctattgaaatagttgctatactgtattaaagtttttagtatttttattgttgtattggtttttttaaatcactttttttgcccctcaaatgttttcaatctgcgattggttgaattctcagatgtggaacccatggaagtggagggctgactgtattcacagagttgtgcaactgttaaccactatataattttagaaccttttcaacatcccattgtaattgatagcaatcacttcccatttcctctcaaaccccgcagctcctgacagccattaaactgtgttctgtctctatgcatctgcctgttctggacatttcacatatctggtcttttgtgtctggcttttattttagtatattattttcaagattatcaaattgaagcatgtatcataagtattgcatttatttttgtggctgaataatactccattttgtagatctatca

SEQ ID NO: 255329 - DNA, 282 bp, Homo sapiens
cacgagggtgaactcagttaggaactttcttctttatcctaagggcaataggaagcctaggacggtatttaagcaaattctggttagcagaagggaggctggatcctgctaaggactgggaatgtagtgatggatcagaccaattcctgggccttgtcagcaaggaaaggactgaaagagccgcagacaaaccagcactcacaatacaatacactcagtgcaacagcggagaggtctgcgagggctatgatggaatcccataggagggctacctaatcttgc

SEQ ID NO: 255330 - DNA, 376 bp, Homo sapiens
acatattggaaaagtagcaaacaaaatattatgctattgtgttaaattaaaaattatgcagaaatgttcttagtatttcatcaggagagaggtcatttgaaattgatggaatagaagaaggcctgggaagatatacagaactgaagccaggcagtggagaataggttgggatttaaatgaacagatggggaaaggccattctgagaaaaggccattccaggcaagggttacaacataaaaggccacatgttgtcacaggacaccaaagcaagtgaccagactagagtgaattactgtgggaggagcagagagaaatattagatagctgatcagtagagtatgattgtttatattctttaaaaagattagacttgcc

SEQ ID NO: 255331 - DNA, 444 bp, Homo sapiens
tgctcctctaataccaggccttttccctctcagtgcccttgtaattgctgttccctctgcctaaatcaccatggttggaaatacaatcttacattaaacctggaggagagagacttcatcctgttgcttttttaagtgccttttattggtgaagaaatgccatggtactgaggatgggaaattaagtttcaaataacagaatgtgtttatactagaagtagcaagtccaagcattcacacctatgccagatgaaatactgtttttcatccacctacctgccattcttgctcatttatatctcttctatatgaagcagtcctgtcctttagatgaggtgggaatttctaggagactctctaatgccactaaagtgttcatttcatttggctccatttttgttcctctttactaccttttgtgattgagggtgaattagagggcag

SEQ ID NO: 255332 - DNA, 457 bp, Homo sapiens
aaggtgtacagcttaagttttgacatgtgtataatcccatgaaatcatcaccacattcaagatagtgatctatccatcattccccctcaatttctttgaacctccttgtagtcccccctttccttccctctttctgcttccatccccaagcgactactgatctgtctgctgtcactgtagattagtttgcattttcttaaattttgtataattggaaacataagttatctacttttgatttttgccctggctttttttagtgagcataactattttgagatccatccatgttgttgctagtgtcagttgtttattcttttttttattgccaagtgatatgccattgtatagatatttcacacattttttaaactcttcacctgttgatggacattttagtttccagttttgttgtacctttctattacaagtaaaactgctgtgaacattcatgtaa

SEQ ID NO: 255333 - DNA, 553 bp, Homo sapiens
ttaatccagacattggtggctggggtggcagaggcaggactggaaggggcattgaaccatggagttctagtctcctggagctgaaacaacctttaaggagaaactgaggcctggggcagaggtagggaggactcactgaaggtcatgcaatgcaccccctgtgagttcctggtggcatcctgggtcaccttggtgaaagtttgggaactctggcactagcccctggaaaaacagtaaggtataaacagatatgacccacattctcatggagcctggggcctatttggaaaggagggtggagagacaggtctatgaaggaaatcacaatgaatcgtcagcaccacctcctccaggaagtcctccctgatttcctaggccgggttgtgtttctgtcctcagaattcccatggaacctacagtgacatctgtcaccacagctgctgcagtttattgaaatgatctgtttatatgtttgtagaatcacattccctagagtaagaaagagaaagaattttaaaatatatatatagaataaacacataactcacctgca

SEQ ID NO: 255334 - DNA, 378 bp, Homo sapiens
aaagaattaatggcacatctcatagttctttcatttgctggctgattcattccagagtggttttgaggacagaatgaagcaagatgaaaaacagcactttgaaaatggagtgtgtggtattcatcttagatacacttttagagaagaagaaatgtgtctcagaaaaaggacctcttctgactcaaatttagcttacatccccttctcaaccatatcccaggtgataaaatatgacacccaggtaagcagtggccttgtggactctgaagaagttcttaacgtgtccacggcacattctcattttgtctggctctaaactactgtctcaagaaagctgcaaatatttgaaagtaacaataaagtgttaacagtaattct

SEQ ID NO: 255335 - DNA, 729 bp, Homo sapiens
tggatgcgggacatgaaatcaagaattattttggagcttgaaggttttatgtttgccctactgggtttcagatttgcctgaggcctgttgcccctttcttttgcccaacttcgccatttgggaattggaatatttacccaacacctgtactgcattgaatattggaagcaaataacttggctttgatcttataggctcacagatggaggaacgtaccttgaagttcagatgagatttcggacttttgagttgatgctgaaacagcttgagatttttggggactactgagagatgataattgtattgtgcaatatgagaaggacatgagatttggtgggcataggtgtgaaatgacattgtttggatgtgtttaccctccaaatctcttgttgaatgtgatcttaaacgttggtggtgggcctagtggaaggtgttgaatcatgggggtggactcttcataatttgcttagctccatccccttggtgatgagcaagtccttgctctgttgtgtcacatgagagctggttgtttaaaacagcctgccgtgttccccttcttgctattcatttctctcttgacacgtgatacactggccctcactttgccttcctctgtgattggatgctttctgaggtctcacccaaacctgagcaggtgctggtcccatgcttctactgcctgcacaactataaaccaaataaatattttttctctataaatttaaaaaa

SEQ ID NO: 255336 - DNA, 484 bp, Homo sapiens
taagagcaggactcccctcaaccccgggcatgagttgagggttgaggggttcccttaactggtggatgcttattcactgtttactggatgaatgaagtataaagtgtgggaagtcaacaacagaacagaacttattttcaagaagataaattagagaatgcaaaaaagctacagactaaggtagctaagttaaccgaactctctaacagtattgaaaatagcaattctttactcagaaaattctaaagggaatacttaatttgacagaactcctaataaagacattgtagccagatccagagccttccagcaagtgacactcagcaaacatttgggacagctgagagaattcaacaaagcccataccgttgtctcttgtataacatctcctagtacattcacctcagatcattgttagtcttacttagcagaaaatgtataaacacttaccaggtagtaaaatcaaatatcttggtataaatgt

SEQ ID NO: 255337 - DNA, 413 bp, Homo sapiens
tcacttcttagcttttcttaaacactctatatttcacattgtaaaactcttacacaaaaccttaccaggtagctactgtgaattatatattcccaaatacaccttgtccttttccagctcttcactagttttaactttgtcccaatccatttaaaaattctcttctgaaaggcatgctcaaatgcagctctaccatgaagacctcaatgattatcctcctcttaaataccttaacccttgtctataacaattgtactataaaagtgaaaattgttacaattttaaataaaattgttactcacaactttaaataaaattattactcaaaagaagctcctcctggacagcaagaaatgtacctgttatatcttagtatgtcactgtgatattaaatatttattataaataaagga

SEQ ID NO: 255338 - DNA, 952 bp, Homo sapiens
tcatttgacagatgggggagaaatggaggcacaaaggatttgtcacttggccaaggtcacaaagcagactcgaagctggtcctgtgacttgctcttgcccctgtgcttgtccttttgggagaggctttatctgttcatggaagtcaaggatgtttccttcaaatattttcccctcagcccctgcttttgaggatctgcactgggggagggagaacatttcttctgtggcttctcatgtctgtgggacacacagttcgtgacgaatatgaaataaaatggaaatagctcctgcatcctcccacacagacgagctgagagtctgcctctgatgtgagagccagcatggaaggagcgatggctctgactgtccccttctccttagttcccaactgccaagccaggaatcagacctgggagtgcaggcatgaagctccagttaggcaggccccagccttcctgcagcatgacttatgtctggtacccctgcgggttgcattcctgctacttctcataaggtagacacaaattggaggcctcctcgatggcaggcagtgcatgaggaatgctgggatgctgcagggtgctgcacatgtttcctgccttcggtgagctcctgatctactaccaaagtccgcctctgtcactcctccctacgcatcataggttggactcgagagcctgcagatttcctttaatgtcttcctgggcagagcaagttgctaagctggggctccagtccacaatcatcaagtgccacagaacaaagctgtgaggtcagttgtagcagagatggcttatgtgtccaccaaagcctacatcgtgggaaaacagctagactaaccagccatgcaagttcgggactaaccagccatgcaagttcggactaaccagccatgcaagttcggactaaccagccatgcaagtactggactaaccagccatgcaagtttcg

SEQ ID NO: 255339 - DNA, 503 bp, Homo sapiens
ataatccccacgtgtcgagggtgggaccaggtagaggtaactggatcacgggggtggtttcccccatgctgttctcatgatagtgagtgagtctcacaagatccgatggttttataaatagtgtctggcatttatcctgcttgcactcactccatcctgccattctgtgaagaaagtacctgcttattatttgccttccctccatgattgtaagtttcctgaggcctccctagccatgcagaactgtgagtcaattaaatctctttcctttaaaaattacccagtctcaagtacttcttcatagctgtgtgagaatgaactaatacattccatgaacaagatcttatttattgctggaaattttacttaagtcatatttctttttgaactcatatttctatccccactgatttttatcctacataataaattttatgcttgaaagtctttgtattgatcatatttctctgcaacaaggaattgtatctaaagatggttttaaa

SEQ ID NO: 255340 - DNA, 662 bp, Homo sapiens
aacttttctcgtgtgtgctgtgtactatttgtgagtgagcaatgaacgctgtggctccctggaggggctgtggtgggaagtttcactgcgatcaagtagaggtggtgcctttggacctcttctcctgaacctgcagggagaggcgcagaatattcacaaggtgaagatgcaacaattcaaatgagtgtccaggttttcagggtggttgctaaaccccaaaagaccgatagcttcgggcaaaagactgcagaaagaacagctttacatttttacggaagcaatgggaaatataccctgtaagccttgaaaaattcccgaagggattcctgttcattcctgtggatcctaatgggccagcatagacctgttagtcaaaagaggatttatctacattgcacactcattcaggcaggcagggaagtcaacgccactttcagatgtttgtagagcatgaactctgtccgttcccacgccctccaaaggctgttacacagggatgcccgcttctggacagaagtgattcatgcaggatgagaaccatgaccacagaagattttgtgcatgtggttatttcaatatttaatttaagtgtatgcatgagtgttcaggataaaaatgcttggagtgtactttaattccattaaaaatgtatacattattca

SEQ ID NO: 255341 - DNA, 468 bp, Homo sapiens
aacttttctcgtgtgtgctgtgtactatttgtgagtgagcaatgaacgctgtggctccctggaggggctgtggtgggaagtttcactgcgatcaagtagaggtggtgcctttggacctcttctcctgaacctgcagggagaggcgcagaatattcacaaggtgaagatgcaacaattcaaatgagtgtccaggttttcagggtggttgctaaaccccaaaagaccgatagcttcgggcaaaagactgcagaaagaacagctttacatttttacggaagcaatgggaaatataccctgtaagccttgaaaaattcccgaagggattcctgttcattcctgtggatcctaatgggccagcatagacctgttagtcaaaagaggatttatctacaagaacatcattgagaagctgcaggacatcatcacagccctggaggagcggcacatgcgctgggagcggcacatgcg

SEQ ID NO: 255342 - DNA, 454 bp, Homo sapiens
atgacagtgtgaccagaatggaagaaatgcatgaaaaagaatttcagcgggaagaaactgagcttgcctgggagttggcagatctcttattggcacagtacacaccatcatttgtgttacttcagttggatcctggctaattctcacaagaagaaaacatgtttcacaaaagaaagatgaaatcacagaaacatttcttttctagaggctctaagggagaattcacagaactgtagaaagaacccactaaagttagagacgagcctcaggcctatttttcagtttctttttattttctatttttcagtttctaggtgaaaatggctgcttttctgtgacttaagtttttccatttatatgaagtgggactgatttgctcagtaggagtaatagaagtataaaaatcataaatgtgaagcaaaaagaatacaacacctatttggaaaaagtacca

SEQ ID NO: 255343 - DNA, 462 bp, Homo sapiens
gagcagcaaagagaaagagcctggatggtagagtgtgaaaaggggggtggttatggctgcctcctaagccatttggtgaaaagactaggctgtgaaaggaaacggaagaaattcttgatggctaatgctgggtggtttttatttctaattattccttataacagctcataatgattagaatgccatatggagctggagttggggcttcacttgtgagagaataagctccccttcttaatctatgccatgtctagggaggctagctgaagactttttattttttatttttaattcttcctttatctttgctccagcaagaatcaaatccagttaccaaaaatgtatttacttcagccaacctggggttacagaatctttaaatgaaaatgttattgcttggctgggcgcgatggctcacgtctgtaatcccagcactttgggaggctgaggcaggcagatcac

SEQ ID NO: 255344 - DNA, 336 bp, Homo sapiens
catgtgcatgtgtaggattaagaggtgggtaatgaaaaagaagacaacatggccaggtgcagtggctcatgcctgtaattccagcactttgtggggcgaaggtgggaggatcacttgaacccaagagtttgggaccagcctggacaacatggcgagaccctgactccacacaaaataaaaaaaaatcagctggtgtggtggcgtgtacctgtaatcctagctgattgggagggtgacatgggaggatcacttgagccaggaggttgaggctgcagtaagccatgatcacgccactgcactccagcctgggtgacagagtgagaccctgtctcggaa

SEQ ID NO: 255345 - DNA, 678 bp, Homo sapiens
atgcacatgtttgatgacctacctcataattcattaacaaatctagaagcactccatcaagagccccttcatattcccttgcaaaatctatcaaattgtcctgtatctttattgatattatttcctgttaccatggacagaaagagtccctgtacctatggaagagcaatctgtccacttgtgccctggttcccattcctcagtgatttagctcctttctccatgccatatttattttctccttctcaactggggatcattttcagcagcatactaacatgctctagtgtctcttctcttgatagaaagaaccactctcgacctcatagctcactccaactattccctatctctctgcttctcagagagcagagccccttgaaaaatttctctattattctattagtcactgtcttacattgtcatctcactctcagtcccttccgattgaactttcatgttcatcattccacagagtctactcttcttaagaactccagtgaccttccatgtttgtggctcaattattattttaacctctcagcagcattttatatatttgaccattccctctttcttaaaggaaactatgatattggttctcatgacttcatactctcctgggtttcctccctcactagcccactctttctcaatttgctttgttcactgctttaa

SEQ ID NO: 255346 - DNA, 325 bp, Homo sapiens
cagatggctgtttgaaaaaatgctaagaaaattctattcagtgtcaggtcagaaagatatttcaggctgacaccttgtaacactgtgatatcagaagaccactgcaaatccacacctctgtatcaccttagatgtaaaagagatattgttaaatatctacttgagcccttcccaaaaaaaggatttcacagaaacccaatctgacataaaatgataattctgacccagatccccttatggtcttacacagtcaagcataaagcaaactgtttcattacggacaatttcagatcacgatgccagcattatttatttggtccacatc

SEQ ID NO: 255347 - DNA, 751 bp, Homo sapiens
tgtaaaaccggctcttggggaggcagaggcaggaggacagcttgagcccaggagtttcagacctgcttgggcaatacagcgagaccttgttcttgaaaaaggaaagaaaatgaacaggcaagccacagactggaataaaatatttgtaaaacacgtatctgacaaaagatcagtatccagaagaaaaagtcaagcaacccaattttaaaatgagcaacagatttgaaaagacatttcacaaaggaaaaatatatgaagagccaatcatgaaaatgtgctcaaccgcattagtcatcaggccaaagcaaattaaagccataatgagatgataccactacacgcccaccagaatgactaagatttcacagagtgacagcaccaaatgttggccaggatgtggagcaactagaactcgtatccattgctggtgggagtgtgaaatggaagggccactttgggaaaagatctggcagtttcttataaaactaaatgtatacctaccctatacctactctaggtgtttctacagaataaatgaacgcccatatgcacagaaaaacttgtacaagaagaaccagcgtaacaggtttactcataagagcctccagatggaaacagccaggggtctttcaacaagagaatgactaaaaacccacagaatgttcacacagtggacgttactcagcaataaaacagaacaaatcgctggcacctgcagcaacatgggtagctctaagaaacactcaaactg

SEQ ID NO: 255348 - DNA, 500 bp, Homo sapiens
agggaggatggaggatgagggaccatggcaaggttgagtccagtgtgatgcctcctatgtagagagaccccatctgtgggggggtcatggctgcccacctcatggtggttctgatggcaaatgggcaaatgtagtggtgatctcagggcaagtgcaggcacagtcagtgctcaggaatggcagcctatgagctggctacatttctcttaaaatcaccaatttcattgttgcccagcatgccatcagcctatagagtcaggtgccccagatattaaatccctgttaattaagagggtcaagttataagttcattcaccaaacacttggtaagcaagtctgaagtaacagcatatgcaagcgcaaggagcacaaatattataacctcttacaggaaaataaacacacaaaaaacatacaaacaggtccccattaatatggccccaaacggctaatggagattcattcttatctaattattaaaagggttgtttgtcaaaaaa

SEQ ID NO: 255349 - DNA, 3236 bp, Homo sapiens
agggagggagcgagggagggagcgagggaagggaaaggcgagcgtgagctgcctcaaatgcttggaataattccgcttccgtttggaaagccgcagcctcagtcccgccgccgcccgctgcgtccgcccagcgccagctccgcgtcccgaccggcccgcggcagcctgcgccgcgccatggccacctccccgcagaagtcgccttctgtccccaagtctcccactcccaagtcgcccccgtcccgcaagaaagatgattccttcttggggaaactcggagggaccctggcccggaggaagaaagccaaggaggtgtccgagctgcaggaggagggaatgaacgccatcaacctgcccctcagcccaattccctttgagctggaccccgaggacacgatgctggaggagaatgaggtgcgaacaatggtggatccaaactcacgcagtgaccccaagcttcaagaactgatgaaggtattaattgactggattaatgatgtgttggttggagaaagaatcattgtgaaagacctagctgaagatttgtatgatggacaagtcctgcagaagcttttcgagaaactggagagtgagaagctaaatgtggctgaggtcacccagtcagagattgctcagaagcaaaaactgcagactgtcctggagaagatcaatgaaaccctgaaacttcctcccaggagcatcaagtggaatgtggattctgttcatgccaagagcctggtggccatcttacacctgctcgttgctctgtctcagtatttccgcgcaccaattcgactcccagaccatgtttccatccaagtggttgtggtccagaaacgagaaggaatcctccagtctcggcaaatccaagaggaaataactggtaacacagaggctctttccgggaggcatgaacgtgatgcctttgacaccttgttcgaccatgccccagacaagctgaatgtggtgaaaaagacactcatcactttcgtgaacaagcacctgaataaactgaacctggaggtcacagaactggaaacccagtttgcagatggggtgtacctggtgctgctcatggggctcctggagggctactttgtgcccctgcacagcttcttcctgaccccggacagctttgaacagaaggtcttgaatgtctcctttgcctttgagctcatgcaagatggagggttggaaaagccaaaaccgcggccagaagacatagtcaactgtgacctgaaatctacactacgagtgttgtacaacctcttcaccaagtaccgtaacgtggagtgaggggctgccctgggcccaccactgcccaagagttcttgctgttggcgtactggaccctcctccgaactgccttaccctgcttattcctgtctcttgcactgtgctctcccacaagtccagctgcaacccagagatagtggaaactgaaattaggaaggaaatcatcaataactcagtgggctgacccatccctcccaggcgctggggaccaacctagcaatgaaggttgggaaggttgttcccttcccggtgccaggtccagatttccctccatgatttgggaaccagcttaggcaaaagagtccccacaagatgaaaataaagatcctagttaccattcaaaggatgctaactgtgtgtcaggccccacactaagtgctctgctctgatatactcaaggccattaatcttcaggactcccattgacgtaggtgtttcattccccttttacagatgaggaaactaaggcttggaggttaaatgacttgccagaagttggaatttttttcctctttgaacataacctctcccttctccctaaaggtaaccactattctgagtccaatcatcaaggttttgcttttctttttagctaagtatgcattcctcaatagtagacagtacaacatgtttataacaagccaattacattatgttctttgcatgttctaaagttgtgtatgtgtgtgcacatctgagcacgtgcacatgtacacctgagccaaaaacacgagaacccactgatctcaccactggggcaagctaggtcagagcttagtgattcacactgaaattggcaaattggatttaacccaattaatagtgtgtgtgtggcaggagtcatgtccctcacatcctttgtacaaatgaaaattactcttaattccttcagatttataataactctgtactttggtttcagggtgacatttgggaaggattttgtttagaattaatggagtggcacattttgcagcctttttgcttgattgcatgtaatggaaatgccctatattttcctgcaaaataagtactaaattcattatcgttaagcaaatgtacaatatgctcaggcaccgcagagagctgggcacgggcccatgtgagcatcactttggaagtagggctcttcaacagggacccttgaactttaaagaaaggaacttctttttgccttctaattgatcatttagactattctggctaagtctgcccacatgtaattaccggctaattcaagcgaggaaaaatgtaagtcatttagaccaaagccaagcagtttctttgcgtgggttactcaagggcttgtggttacttgtatctcctctatgtgaacttgactttgaaagacagagctctagtgtgccagcctgctaagtcctgtaagaatagggaagggcggaggggggtgggcagtgactaggggacgagaagcatggggaaaatatttgcactctaaacatacagagatagaggtggggcttgtggtacttaacacttgtagccatcaactgactgagaccttgggctaaataatcaattgtgctgatattacatctcgttatggaatgttcctaaatatgccaggtagacaccagcccaagtaccctcctccagaagtctgtgactaccttgtcactactttaggcccattccacaaagcccatctctggtttgagaattcattttgatctgtatctacaccacccaaagttaggcctcctataatgtccaaaacattcctttcagcctttttatttcttactgtactgtctcttactgtactgtctatctgcagtaattgaggacccataaaatttagataactacatgtctttgctcttagaattgtcactcagcataatgagcatttaacatacaaaggcaatgtactgttttgtgttgatctatgtaaaagaatacaattcttttttacataa

SEQ ID NO: 255350 - DNA, 1647 bp, Homo sapiens
agggagggagcgagggagggagcgagggaagggaaaggcgagcgtgagctgcctcaaatgcttggaataattccgcttccgtttggaaagccgcagcctcagtcccgccgccgcccgctgcgtccgcccagcgccagctccgcgtcccgaccggcccgcggcagcctgcgccgcgccatggccacctccccgcagaagtcgccttctgtccccaagtctcccactcccaagtcgcccccgtcccgcaagaaagatgattccttcttggggaaactcggagggaccctggcccggaggaagaaagccaaggaggtgtccgagctgcaggaggagggaatgaacgccatcaacctgcccctcagcccaattccctttgagctggaccccgaggacacgatgctggaggagaatgaggtgcgaacaatggtggatccaaactcacgcagtgaccccaagcttcaagaactgatgaaggtattaattgactggattaatgatgtgttggttggagaaagaatcattgtgaaagacctagctgaagatttgtatgatggacaagtcctgcagaagcttttcgagaaactggagagtgagaagctaaatgtggctgaggtcacccagtcagagattgctcagaagcaaaaactgcagactgtcctggagaagatcaatgaaaccctgaaacttcctcccaggagcatcaagtggaatgtggattctgttcatgccaagagcctggtggccatcttacacctgctcgttgctctgtctcagtatttccgcgcaccaattcgactcccagaccatgtttccatccaagtggttgtggtccagaaacgagaaggaatcctccagtctcggcaaatccaagaggaaataactggtaacacagaggctctttccgggaggcatgaacgtgatgcctttgacaccttgttcgaccatgccccagacaagctgaatgtggtgaaaaagacactcatcactttcgtgaacaagcacctgaataaactgaacctggaggtcacagaactggaaacccagtttgcagatggggtgtacctggtgctgctcatggggctcctggagggctactttgtgcccctgcacagcttcttcctgaccccggacagctttgaacagaaggtcttgaatgtctcctttgcctttgagctcatgcaagatggagggttggaaaagccaaaaccgcggccagaagacatagtcaactgtgacctgaaatctacactacgagtgttgtacaacctcttcaccaagtaccgtaacgtggagtgaggggctgccctgggcccaccactgcccaagagttcttgctgttggcgtactggaccctcctccgaactgccttaccctgcttattcctgtctcttgcactgtgctctcccacaagtccagctgcaacccagagatagtggaaactgaaattaggaaggaaatcatcaataactcagtgggctgacccatccctcccaggcgctggggaccaacctagcaatgaaggttgggaaggttgttcccttcccggtgccaggtccagatttccctccatgatttgggaaccagcttaggcaaaagagtccccacaagatgaaaataaagatcctagttaccattcaaaggatgcta

SEQ ID NO: 255351 - DNA, 358 bp, Homo sapiens
tgttcacgaggatcttctcggaccagttgtgcagaagcttttcgagaaactggagagtgagaagctaaatgtggctgaggtcacccagtcagagattgctcagaagcaaaaactgcagactgtcctggagaagatcaatgaaaccctgaaacttcctcccaggagcatcaagtggaatgtggattctgttcatgccaagagcctggtggccatcttacacctgctcgttgctctgtctcagtatttccgcgcaccaattcgactcccagaccatgtttccatccaagtggttgtggtccagaaacgagaaggaatcctccagtttctcgaaaagcttctgcacaacttggggtaccga

SEQ ID NO: 255352 - DNA, 169 bp, Homo sapiens
gcggccgcctactactactactactgctcgaattcaagcttctaacgatgtacggggacatgtctttgctcttagaattgtcactcagcataatgagcatttaacatacaaaggcaatgtactgttttgtgttgatctatgtaaaagaatacaattcttttttacataa

SEQ ID NO: 255353 - DNA, 4144 bp, Homo sapiens
gcggccgcctactactactaaattcgcggccgtgcggatcccaagtcgcccccgtcccgcaagaaagatgattccttcttggggaaactcggagggaccctggcccggaggaagaaagccaaggaggtgtccgagctgcaggaggagggaatgaacgccatcaacctgcccctcagcccaattccctttgagctggaccccgaggacacgatgctggaggagaatgaggtgcgaacaatggtggatccaaactcacgcagtgaccccaagcttcaagaactgatgaaggtattaattgactggattaatgatgtgttggttggagaaagaatcattgtgaaagacctagctgaagatttgtatgatggacaagtcctgcagaagcttttcgagaaactggagagtgagaagctaaatgtggctgaggtcacccagtcagagattgctcagaagcaaaaactgcagactgtcctggagaagatcaatgaaaccctgaaacttcctcccaggagcatcaagtggaatgtggattctgttcatgccaagagcctggtggccatcttacacctgctcgttgctctgtctcagtatttccgcgcaccaattcgactcccagaccatgtttccatccaagtggttgtggtccagaaacgagaaggaatcctccagtctcggcaaatccaagaggaaataactggtaacacagaggctctttccgggaggcatgaacgtgatgcctttgacaccttgttcgaccatgccccagacaagctgaatgtggtgaaaaagacactcatcactttcgtgaacaagcacctgaataaactgaacctggaggtcacagaactggaaacccagtttgcagatggggtgtacctggtgctgctcatggggctcctggagggctactttgtgcccctgcacagcttcttcctgaccccggacagctttgaacagaaggtcttgaatgtctcctttgcctttgagctcatgcaagatggagggttggaaaagccaaaaccgcggccagaagacatagtcaactgtgacctgaaatctacactacgagtgttgtacaacctcttcaccaagtaccgtaacgtggagtgaggggctgccctgggcccaccactgcccaagagttcttgctgttggcgtactggaccctcctccgaactgccttaccctgcttattcctgtctcttgcactgtgctctcccacaagtccagctgcaacccagagatagtggaaactgaaattaggaaggaaatcatcaataactcagtgggctgacccatccctcccaggcgctggggaccaacctagcaatgaaggttgggaaggttgttcccttcccggtgccaggtccagatttccctccatgatttgggaaccagcttaggcaaaagagtccccacaagatgaaaataaagatcctagttaccattcaaaggatgctaactgtgtgtcaggccccacactaagtgctctgctctgatatactcaaggccattaatcttcaggactcccattgacgtaggtgtttcattccccttttacagatgaggaaactaaggcttggaggttaaatgacttgccagaagttggaatttttttcctctttgaacataacctctcccttctccctaaaggtaaccactattctgagtccaatcatcaaggttttgcttttctttttagctaagtatgcattcctcaatagtagacagtacaacatgtttataacaagccaattacattatgttctttgcatgttctaaagttgtgtatgtgtgtgcacatctgagcacgtgcacatgtacacctgagccaaaaacacgagaacccactgatctcaccactggggcaagctaggtcagagcttagtgattcacactgaaattggcaaattggatttaacccaattaatagtgtgtgtgtggcaggagtcatgtccctcacatcctttgtacaaatgaaaattactcttaattccttcagatttataataactctgtactttggtttcagggtgacatttgggaaggattttgtttagaattaatggagtggcacattttgcagcctttttgcttgattgcatgtaatggaaatgccctatattttcctgcaaaataagtactaaattcattatcgttaagcaaatgtacaatatgctcaggcaccgcagagagctgggcacgggcccatgtgagcatcactttggaagtagggctcttcaacagggacccttgaactttaaagaaaggaacttctttttgccttctaattgatcatttagactattctggctaagtctgcccacatgtaattaccggctaattcaagcgaggaaaaatgtaagtcatttagaccaaagccaagcagtttctttgcgtgggttactcaagggcttgtggttacttgtatctcctctatgtgaacttgactttgaaagacagagctctagtgtgccagcctgctaagtcctgtaagaatagggaagggcggaggggggtgggcagtgactaggggacgagaagcatggggaaaatatttgcactctaaacatacagagatagaggtggggcttgtggtacttaacacttgtagccatcaactgactgagaccttgggctaaataatcaattgtgctgatattacatctcgttatggaatgttcctaaatatgccaggtagacaccagcccaagtaccctcctccagaagtctgtgactaccttgtcactactttaggcccattccacaaagcccatctctggtttgagaattcattttgatctgtatctacaccacccaaagttaggcctcctataatgtccaaaacattcctttcagcctttttatttcttactgtactgtctcttactgtactgtctatctgcagtaattgaggacccataaaatttagataactacatgtctttgctcttagaattgtcactcagcataatgagcatttaacatacaaaggcaatgtactgttttgtgttgatctatgtaaaagaatacaattcttttttacataattagtgaaattttattttttattaggaaacactaaatagtgtaatatttcttttgcttttaaaaaaattcctggtagcaaatcaagataaataattgcttcattttcttgagcaatactgaagcaggatgaagtaagaggaatgcattcatttaaacatgctttgctttatgaattttgtctcttttttggtctctttttcttatattcaagttacaaatgtacaagtatccttactaagagtgctccttttgtattttacatatatacagtatgaaaatacattggaacactaggaaagtttttaaataacagttctaatttatcagaaaattgtgttttgggattgagttctttgtctcagcccagaatcccaggtcctgggcctggttttctaatgctgtcatctcagttcgatattttactttagaacctggaatctcctacttaatatatgaccatgactttgaaaggcaaaagaggaatcaagaataaataaaacaaacttaatcttcatctttaaaaaaaagaaaaaagaaaccaaaatgagaatcaacacttcataggctcactgggttttcttttcttttctgttaatttaaactcagttatttttaatgcttaatacatacatggtgcaaaatttaaaaagcgcaaataggtatctagtggaaaacctaagcctccctctctcctccggcacccattacctctccctggaggcaactgttttgatccatttcttacacacactgccagagatactctaggcatgtaaagcacaaacatacatataaaatctgcgggcttcaaaaaatataagtaggatgtcatctatactgtcatacactttgttttttatcacttacttaatgttatatcttggatattgtattaccctgggtattaaaaagaactcctttcacattttaaaataacaatctgagcacttcataaatccaaatgcgtatctccagtctgctcgagctaggatatagcggatacgcaccttgtcaaaggaggcaactacgactacgacaacgaattcaaacgtaggctcttgtacaatcatcgtgactagggattaccggagac

SEQ ID NO: 255354 - DNA, 3959 bp, Homo sapiens
gcccggcggtgaatcggccgaggcgatgctggaggagaatgaggtgcgaacaatggtggatccaaactcacgcagtgaccccaagcttcaagaactgatgaaggtattaattgactggattaatgatgtgttggttggagaaagaatcattgtgaaagacctagctgaagatttgtatgatggacaagtcctgcagaagcttttcgagaaactggagagtgagaagctaaatgtggctgaggtcacccagtcagagattgctcagaagcaaaaactgcagactgtcctggagaagatcaatgaaaccctgaaacttcctcccaggagcatcaagtggaatgtggattctgttcatgccaagagcctggtggccatcttacacctgctcgttgctctgtctcagtatttccgcgcaccaattcgactcccagaccatgtttccatccaagtggttgtggtccagaaacgagaaggaatcctccagtctcggcaaatccaagaggaaataactggtaacacagaggctctttccgggaggcatgaacgtgatgcctttgacaccttgttcgaccatgccccagacaagctgaatgtggtgaaaaagacactcatcactttcgtgaacaagcacctgaataaactgaacctggaggtcacagaactggaaacccagtttgcagatggggtgtacctggtgctgctcatggggctcctggagggctactttgtgcccctgcacagcttcttcctgaccccggacagctttgaacagaaggtcttgaatgtctcctttgcctttgagctcatgcaagatggagggttggaaaagccaaaaccgcggccagaagacatagtcaactgtgacctgaaatctacactacgagtgttgtacaacctcttcaccaagtaccgtaacgtggagtgaggggctgccctgggcccaccactgcccaagagttcttgctgttggcgtactggaccctcctccgaactgccttaccctgcttattcctgtctcttgcactgtgctctcccacaagtccagctgcaacccagagatagtggaaactgaaattaggaaggaaatcatcaataactcagtgggctgacccatccctcccaggcgctggggaccaacctagcaatgaaggttgggaaggttgttcccttcccggtgccaggtccagatttccctccatgatttgggaaccagcttaggcaaaagagtccccacaagatgaaaataaagatcctagttaccattcaaaggatgctaactgtgtgtcaggccccacactaagtgctctgctctgatatactcaaggccattaatcttcaggactcccattgacgtaggtgtttcattccccttttacagatgaggaaactaaggcttggaggttaaatgacttgccagaagttggaatttttttcctctttgaacataacctctcccttctccctaaaggtaaccactattctgagtccaatcatcaaggttttgcttttctttttagctaagtatgcattcctcaatagtagacagtacaacatgtttataacaagccaattacattatgttctttgcatgttctaaagttgtgtatgtgtgtgcacatctgagcacgtgcacatgtacacctgagccaaaaacacgagaacccactgatctcaccactggggcaagctaggtcagagcttagtgattcacactgaaattggcaaattggatttaacccaattaatagtgtgtgtgtggcaggagtcatgtccctcacatcctttgtacaaatgaaaattactcttaattccttcagatttataataactctgtactttggtttcagggtgacatttgggaaggattttgtttagaattaatggagtggcacattttgcagcctttttgcttgattgcatgtaatggaaatgccctatattttcctgcaaaataagtactaaattcattatcgttaagcaaatgtacaatatgctcaggcaccgcagagagctgggcacgggcccatgtgagcatcactttggaagtagggctcttcaacagggacccttgaactttaaagaaaggaacttctttttgccttctaattgatcatttagactattctggctaagtctgcccacatgtaattaccggctaattcaagcgaggaaaaatgtaagtcatttagaccaaagccaagcagtttctttgcgtgggttactcaagggcttgtggttacttgtatctcctctatgtgaacttgactttgaaagacagagctctagtgtgccagcctgctaagtcctgtaagaatagggaagggcggaggggggtgggcagtgactaggggacgagaagcatggggaaaatatttgcactctaaacatacagagatagaggtggggcttgtggtacttaacacttgtagccatcaactgactgagaccttgggctaaataatcaattgtgctgatattacatctcgttatggaatgttcctaaatatgccaggtagacaccagcccaagtaccctcctccagaagtctgtgactaccttgtcactactttaggcccattccacaaagcccatctctggtttgagaattcattttgatctgtatctacaccacccaaagttaggcctcctataatgtccaaaacattcctttcagcctttttatttcttactgtactgtctcttactgtactgtctatctgcagtaattgaggacccataaaatttagataactacatgtctttgctcttagaattgtcactcagcataatgagcatttaacatacaaaggcaatgtactgttttgtgttgatctatgtaaaagaatacaattcttttttacataattagtgaaattttattttttattaggaaacactaaatagtgtaatatttcttttgcttttaaaaaaattcctggtagcaaatcaagataaataattgcttcattttcttgagcaatactgaagcaggatgaagtaagaggaatgcattcatttaaacatgctttgctttatgaattttgtctcttttttggtctctttttcttatattcaagttacaaatgtacaagtatccttactaagagtgctccttttgtattttacatatatacagtatgaaaatacattggaacactaggaaagtttttaaataacagttctaatttatcagaaaattgtgttttgggattgagttctttgtctcagcccagaatcccaggtcctgggcctggttttctaatgctgtcatctcagttcgatattttactttagaacctggaatctcctacttaatatatgaccatgactttgaaaggcaaaagaggaatcaagaataaataaaacaaacttaatcttcatctttaaaaaaaagaaaaaagaaaccaaaatgagaatcaacacttcataggctcactgggttttcttttcttttctgttaatttaaactcagttatttttaatgcttaatacatacatggtgcaaaatttaaaaagcgcaaataggtatctagtggaaaacctaagcctccctctctcctccggcacccattacctctccctggaggcaactgttttgatccatttcttacacacactgccagagatactctaggcatgtaaagcacaaacatacatataaaatctgcgggcttcaaaaaatataagtaggatgtcatctatactgtcatacactttgttttttatcacttacttaatgttatatcttggatattgtattaccctgggtattaaaaagaactcctttcacattttaaaataacaatctgagcacttcataaatccaaatgcgtatctccagtctgctcgagctaggatatagcggatacgcaccttgtcaaaggaggcaactacgactacgacaacgaattcaaacgtaggctcttgtacaatcatcgtgactagggattaccggagac

SEQ ID NO: 255355 - DNA, 4236 bp, Homo sapiens
tctgcccaatcaagccactcccaaaatgttatcttcctctcatcagcactgaatctcacccacactaaaaacaccaaaaacaaaaatcctatagatctcttaccaccactcaactactctccaccttcccaaactatctgaaagtagcaggttcatacttgagttttctaaaaattgtattttatttttgacattttcacctccccttcatgcctcaactgccacctggcttctctacctcttcgctatccccagtctactccagcaccctccactctctattgctggaccccgaggacacgatgctggaggagaatgaggtgcgaacaatggtggatccaaactcacgcagtgaccccaagcttcaagaactgatgaaggtattaattgactggattaatgatgtgttggttggagaaagaatcattgtgaaagacctagctgaagatttgtatgatggacaagtcctgcagaagcttttcgagaaactggagagtgagaagctaaatgtggctgaggtcacccagtcagagattgctcagaagcaaaaactgcagactgtcctggagaagatcaatgaaaccctgaaacttcctcccaggagcatcaagtggaatgtggattctgttcatgccaagagcctggtggccatcttacacctgctcgttgctctgtctcagtatttccgcgcaccaattcgactcccagaccatgtttccatccaagtggttgtggtccagaaacgagaaggaatcctccagtctcggcaaatccaagaggaaataactggtaacacagaggctctttccgggaggcatgaacgtgatgcctttgacaccttgttcgaccatgccccagacaagctgaatgtggtgaaaaagacactcatcactttcgtgaacaagcacctgaataaactgaacctggaggtcacagaactggaaacccagtttgcagatggggtgtacctggtgctgctcatggggctcctggagggctactttgtgcccctgcacagcttcttcctgaccccggacagctttgaacagaaggtcttgaatgtctcctttgcctttgagctcatgcaagatggagggttggaaaagccaaaaccgcggccagaagacatagtcaactgtgacctgaaatctacactacgagtgttgtacaacctcttcaccaagtaccgtaacgtggagtgaggggctgccctgggcccaccactgcccaagagttcttgctgttggcgtactggaccctcctccgaactgccttaccctgcttattcctgtctcttgcactgtgctctcccacaagtccagctgcaacccagagatagtggaaactgaaattaggaaggaaatcatcaataactcagtgggctgacccatccctcccaggcgctggggaccaacctagcaatgaaggttgggaaggttgttcccttcccggtgccaggtccagatttccctccatgatttgggaaccagcttaggcaaaagagtccccacaagatgaaaataaagatcctagttaccattcaaaggatgctaactgtgtgtcaggccccacactaagtgctctgctctgatatactcaaggccattaatcttcaggactcccattgacgtaggtgtttcattccccttttacagatgaggaaactaaggcttggaggttaaatgacttgccagaagttggaatttttttcctctttgaacataacctctcccttctccctaaaggtaaccactattctgagtccaatcatcaaggttttgcttttctttttagctaagtatgcattcctcaatagtagacagtacaacatgtttataacaagccaattacattatgttctttgcatgttctaaagttgtgtatgtgtgtgcacatctgagcacgtgcacatgtacacctgagccaaaaacacgagaacccactgatctcaccactggggcaagctaggtcagagcttagtgattcacactgaaattggcaaattggatttaacccaattaatagtgtgtgtgtggcaggagtcatgtccctcacatcctttgtacaaatgaaaattactcttaattccttcagatttataataactctgtactttggtttcagggtgacatttgggaaggattttgtttagaattaatggagtggcacattttgcagcctttttgcttgattgcatgtaatggaaatgccctatattttcctgcaaaataagtactaaattcattatcgttaagcaaatgtacaatatgctcaggcaccgcagagagctgggcacgggcccatgtgagcatcactttggaagtagggctcttcaacagggacccttgaactttaaagaaaggaacttctttttgccttctaattgatcatttagactattctggctaagtctgcccacatgtaattaccggctaattcaagcgaggaaaaatgtaagtcatttagaccaaagccaagcagtttctttgcgtgggttactcaagggcttgtggttacttgtatctcctctatgtgaacttgactttgaaagacagagctctagtgtgccagcctgctaagtcctgtaagaatagggaagggcggaggggggtgggcagtgactaggggacgagaagcatggggaaaatatttgcactctaaacatacagagatagaggtggggcttgtggtacttaacacttgtagccatcaactgactgagaccttgggctaaataatcaattgtgctgatattacatctcgttatggaatgttcctaaatatgccaggtagacaccagcccaagtaccctcctccagaagtctgtgactaccttgtcactactttaggcccattccacaaagcccatctctggtttgagaattcattttgatctgtatctacaccacccaaagttaggcctcctataatgtccaaaacattcctttcagcctttttatttcttactgtactgtctcttactgtactgtctatctgcagtaattgaggacccataaaatttagataactacatgtctttgctcttagaattgtcactcagcataatgagcatttaacatacaaaggcaatgtactgttttgtgttgatctatgtaaaagaatacaattcttttttacataattagtgaaattttattttttattaggaaacactaaatagtgtaatatttcttttgcttttaaaaaaattcctggtagcaaatcaagataaataattgcttcattttcttgagcaatactgaagcaggatgaagtaagaggaatgcattcatttaaacatgctttgctttatgaattttgtctcttttttggtctctttttcttatattcaagttacaaatgtacaagtatccttactaagagtgctccttttgtattttacatatatacagtatgaaaatacattggaacactaggaaagtttttaaataacagttctaatttatcagaaaattgtgttttgggattgagttctttgtctcagcccagaatcccaggtcctgggcctggttttctaatgctgtcatctcagttcgatattttactttagaacctggaatctcctacttaatatatgaccatgactttgaaaggcaaaagaggaatcaagaataaataaaacaaacttaatcttcatctttaaaaaaaagaaaaaagaaaccaaaatgagaatcaacacttcataggctcactgggttttcttttcttttctgttaatttaaactcagttatttttaatgcttaatacatacatggtgcaaaatttaaaaagcgcaaataggtatctagtggaaaacctaagcctccctctctcctccggcacccattacctctccctggaggcaactgttttgatccatttcttacacacactgccagagatactctaggcatgtaaagcacaaacatacatataaaatctgcgggcttcaaaaaatataagtaggatgtcatctatactgtcatacactttgttttttatcacttacttaatgttatatcttggatattgtattaccctgggtattaaaaagaactcctttcacattttaaaataacaatctgagcacttcataaatccaaatgcgtatctccagtctgctcgagctaggatatagcggatacgcaccttgtcaaaggaggcaactacgactacgacaacgaattcaaacgtaggctcttgtacaatcatcgtgactagggattaccggagac

SEQ ID NO: 255356 - DNA, 3260 bp, Homo sapiens
agggagggagcgagggagggagcgagggaagggaaaggcgagcgtgagctgcctcaaatgcttggaataattccgcttccgtttggaaagccgcagcctcagtcccgccgccgcccgctgcgtccgcccagcgccagctccgcgtcccgaccggcccgcggcagcctgcgccgcgccatggccacctccccgcagaagtcgccttctgtccccaagtctcccactcccaagtcgcccccgtcccgcaagaaagatgattccttcttggggaaactcggagggaccctggcccggaggaagaaagccaaggaggtgtccgagctgcaggaggagggaatgaacgccatcaacctgcccctcagcccaattccctttgagctggaccccgaggacacgatgctggaggagaatgaggtgcgaacaatggtggatccaaactcacgcagtgaccccaagcttcaagaactgatgaaggtattaattgactggattaatgatgtgttggttggagaaagaatcattgtgaaagacctagctgaagatttgtatgatggacaagtcctgcagaagcttttcgagaaactggagagtgagaagctaaatgtggctgaggtcacccagtcagagattgctcagaagcaaaaactgcagactgtcctggagaagatcaatgaaaccctgaaacttcctcccaggagcatcaagtggaatgtggattctgttcatgccaagagcctggtggccatcttacacctgctcgttgctctgtctcagtatttccgcgcaccaattcgactcccagaccatgtttccatccaagtggttgtggtccagaaacgagaaggaatcctccagtctcggcaaatccaagaggaaataactggtaacacagaggctctttccgggaggcatgaacgtgatgcctttgacaccttgttcgaccatgccccagacaagctgaatgtggtgaaaaagacactcatcactttcgtgaacaagcacctgaataaactgaacctggaggtcacagaactggaaacccagtttgcagatggggtgtacctggtgctgctcatggggctcctggagggctactttgtgcccctgcacagcttcttcctgaccccggacagctttgaacagaaggtcttgaatgtctcctttgcctttgagctcatgcaagatggagggttggaaaagccaaaaccgcggccagaagacatagtcaactgtgacctgaaatctacactacgagtgttgtacaacctcttcaccaagtaccgtaacgtggagtgaggggctgccctgggcccaccactgcccaagagttcttgctgttggcgtactggaccctcctccgaactgccttaccctgcttattcctgtctcttgcactgtgctctcccacaagtccagctgcaacccagagatagtggaaactgaaattaggaaggaaatcatcaataactcagtgggctgacccatccctcccaggcgctggggaccaacctagcaatgaaggttgggaaggttgttcccttcccggtgccaggtccagatttccctccatgatttgggaaccagcttaggcaaaagagtccccacaagatgaaaataaagatcctagttaccattcaaaggatgctaactgtgtgtcaggccccacactaagtgctctgctctgatatactcaaggccattaatcttcaggactcccattgacgtaggtgtttcattccccttttacagatgaggaaactaaggcttggaggttaaatgacttgccagaagttggaatttttttcctctttgaacataacctctcccttctccctaaaggtaaccactattctgagtccaatcatcaaggttttgcttttctttttagctaagtatgcattcctcaatagtagacagtacaacatgtttataacaagccaattacattatgttctttgcatgttctaaagttgtgtatgtgtgtgcacatctgagcacgtgcacatgtacacctgagccaaaaacacgagaacccactgatctcaccactggggcaagctaggtcagagcttagtgattcacactgaaattggcaaattggatttaacccaattaatagtgtgtgtgtggcaggagtcatgtccctcacatcctttgtacaaatgaaaattactcttaattccttcagatttataataactctgtactttggtttcagggtgacatttgggaaggattttgtttagaattaatggagtggcacattttgcagcctttttgcttgattgcatgtaatggaaatgccctatattttcctgcaaaataagtactaaattcattatcgttaagcaaatgtacaatatgctcaggcaccgcagagagctgggcacgggcccatgtgagcatcactttggaagtagggctcttcaacagggacccttgaactttaaagaaaggaacttctttttgccttctaattgatcatttagactattctggctaagtctgcccacatgtaattaccggctaattcaagcgaggaaaaatgtaagtcatttagaccaaagccaagcagtttctttgcgtgggttactcaagggcttgtggttacttgtatctcctctatgtgaacttgactttgaaagacagagctctagtgtgccagcctgctaagtcctgtaagaatagggaagggcggaggggggtgggcagtgactaggggacgagaagcatggggaaaatatttgcactctaaacatacagagatagaggtggggcttgtggtacttaacacttgtagccatcaactgactgagaccttgggctaaataatcaattgtgctgatattacatctcgttatggaatgttcctaaatatgccaggtagacaccagcccaagtaccctcctccagaagtctgtgactaccttgtcactactttaggcccattccacaaagcccatctctggtttgagaattcattttgatctgtatctacaccacccaaagttaggcctcctataatgtccaaaacattcctttcagcctttttatttcttactgtactgtctcttactgtactgtctatctgcagtaattgaggacccataaaatttagataactacatgtctttgctcttagaattgtcactcagcataatgagcatttaacatacaaaggcaatgtactgttttgtgttgatctatgtaaaagaatacaattcttttttacataaaaaaaaaaaacccccccacacacg

SEQ ID NO: 255357 - DNA, 3118 bp, Homo sapiens
gtgctctcccacaagtgcaagagacaggaataagcaggtaaggcagttcggaggagggtccagtacgccaacagcaagaactcttgggcagtggtgggcccaggcagcccctcactccacgttacggtacttggtgaagaggttgtacaacactcgtagtgtagatttcaggtcacagttgactgtgctctcccacaagtccagctgcaacccagagatagtggaaactgaaattaggaaggaaatcatcaataactcagtgggctgacccatccctcccaggcgctggggaccaacctagcaatgaaggttgggaaggttgttcccttcccggtgccaggtccagatttccctccatgatttgggaaccagcttaggcaaaagagtccccacaagatgaaaataaagatcctagttaccattcaaaggatgctaactgtgtgtcaggccccacactaagtgctctgctctgatatactcaaggccattaatcttcaggactcccattgacgtaggtgtttcattccccttttacagatgaggaaactaaggcttggaggttaaatgacttgccagaagttggaatttttttcctctttgaacataacctctcccttctccctaaaggtaaccactattctgagtccaatcatcaaggttttgcttttctttttagctaagtatgcattcctcaatagtagacagtacaacatgtttataacaagccaattacattatgttctttgcatgttctaaagttgtgtatgtgtgtgcacatctgagcacgtgcacatgtacacctgagccaaaaacacgagaacccactgatctcaccactggggcaagctaggtcagagcttagtgattcacactgaaattggcaaattggatttaacccaattaatagtgtgtgtgtggcaggagtcatgtccctcacatcctttgtacaaatgaaaattactcttaattccttcagatttataataactctgtactttggtttcagggtgacatttgggaaggattttgtttagaattaatggagtggcacattttgcagcctttttgcttgattgcatgtaatggaaatgccctatattttcctgcaaaataagtactaaattcattatcgttaagcaaatgtacaatatgctcaggcaccgcagagagctgggcacgggcccatgtgagcatcactttggaagtagggctcttcaacagggacccttgaactttaaagaaaggaacttctttttgccttctaattgatcatttagactattctggctaagtctgcccacatgtaattaccggctaattcaagcgaggaaaaatgtaagtcatttagaccaaagccaagcagtttctttgcgtgggttactcaagggcttgtggttacttgtatctcctctatgtgaacttgactttgaaagacagagctctagtgtgccagcctgctaagtcctgtaagaatagggaagggcggaggggggtgggcagtgactaggggacgagaagcatggggaaaatatttgcactctaaacatacagagatagaggtggggcttgtggtacttaacacttgtagccatcaactgactgagaccttgggctaaataatcaattgtgctgatattacatctcgttatggaatgttcctaaatatgccaggtagacaccagcccaagtaccctcctccagaagtctgtgactaccttgtcactactttaggcccattccacaaagcccatctctggtttgagaattcattttgatctgtatctacaccacccaaagttaggcctcctataatgtccaaaacattcctttcagcctttttatttcttactgtactgtctcttactgtactgtctatctgcagtaattgaggacccataaaatttagataactacatgtctttgctcttagaattgtcactcagcataatgagcatttaacatacaaaggcaatgtactgttttgtgttgatctatgtaaaagaatacaattcttttttacataattagtgaaattttattttttattaggaaacactaaatagtgtaatatttcttttgcttttaaaaaaattcctggtagcaaatcaagataaataattgcttcattttcttgagcaatactgaagcaggatgaagtaagaggaatgcattcatttaaacatgctttgctttatgaattttgtctcttttttggtctctttttcttatattcaagttacaaatgtacaagtatccttactaagagtgctccttttgtattttacatatatacagtatgaaaatacattggaacactaggaaagtttttaaataacagttctaatttatcagaaaattgtgttttgggattgagttctttgtctcagcccagaatcccaggtcctgggcctggttttctaatgctgtcatctcagttcgatattttactttagaacctggaatctcctacttaatatatgaccatgactttgaaaggcaaaagaggaatcaagaataaataaaacaaacttaatcttcatctttaaaaaaaagaaaaaagaaaccaaaatgagaatcaacacttcataggctcactgggttttcttttcttttctgttaatttaaactcagttatttttaatgcttaatacatacatggtgcaaaatttaaaaagcgcaaataggtatctagtggaaaacctaagcctccctctctcctccggcacccattacctctccctggaggcaactgttttgatccatttcttacacacactgccagagatactctaggcatgtaaagcacaaacatacatataaaatctgcgggcttcaaaaaatataagtaggatgtcatctatactgtcatacactttgttttttatcacttacttaatgttatatcttggatattgtattaccctgggtattaaaaagaactcctttcacattttaaaataacaatctgagcacttcataaatccaaatgcgtatctccagtctgctcgagctaggatatagcggatacgcaccttgtcaaaggaggcaactacgactacgacaacgaattcaaacgtaggctcttgtacaatcatcgtgactagggattaccggagac

SEQ ID NO: 255358 - DNA, 2270 bp, Homo sapiens
agggagggagcgagggagggagcgagggaagggaaaggcgagcgtgagctgcctcaaatgcttggaataattccgcttccgtttggaaagccgcagcctcagtcccgccgccgcccgctgcgtccgcccagcgccagctccgcgtcccgaccggcccgcggcagcctgcgccgcgccatggccacctccccgcagaagtcgccttctgtccccaagtctcccactcccaagtcgcccccgtcccgcaagaaagatgattccttcttggggaaactcggagggaccctggcccggaggaagaaagccaaggaggcgcagagagctgggcacgggcccatgtgagcatcactttggaagtagggctcttcaacagggacccttgaactttaaagaaaggaacttctttttgccttctaattgatcatttagactattctggctaagtctgcccacatgtaattaccggctaattcaagcgaggaaaaatgtaagtcatttagaccaaagccaagcagtttctttgcgtgggttactcaagggcttgtggttacttgtatctcctctatgtgaacttgactttgaaagacagagctctagtgtgccagcctgctaagtcctgtaagaatagggaagggcggaggggggtgggcagtgactaggggacgagaagcatggggaaaatatttgcactctaaacatacagagatagaggtggggcttgtggtacttaacacttgtagccatcaactgactgagaccttgggctaaataatcaattgtgctgatattacatctcgttatggaatgttcctaaatatgccaggtagacaccagcccaagtaccctcctccagaagtctgtgactaccttgtcactactttaggcccattccacaaagcccatctctggtttgagaattcattttgatctgtatctacaccacccaaagttaggcctcctataatgtccaaaacattcctttcagcctttttatttcttactgtactgtctcttactgtactgtctatctgcagtaattgaggacccataaaatttagataactacatgtctttgctcttagaattgtcactcagcataatgagcatttaacatacaaaggcaatgtactgttttgtgttgatctatgtaaaagaatacaattcttttttacataattagtgaaattttattttttattaggaaacactaaatagtgtaatatttcttttgcttttaaaaaaattcctggtagcaaatcaagataaataattgcttcattttcttgagcaatactgaagcaggatgaagtaagaggaatgcattcatttaaacatgctttgctttatgaattttgtctcttttttggtctctttttcttatattcaagttacaaatgtacaagtatccttactaagagtgctccttttgtattttacatatatacagtatgaaaatacattggaacactaggaaagtttttaaataacagttctaatttatcagaaaattgtgttttgggattgagttctttgtctcagcccagaatcccaggtcctgggcctggttttctaatgctgtcatctcagttcgatattttactttagaacctggaatctcctacttaatatatgaccatgactttgaaaggcaaaagaggaatcaagaataaataaaacaaacttaatcttcatctttaaaaaaaagaaaaaagaaaccaaaatgagaatcaacacttcataggctcactgggttttcttttcttttctgttaatttaaactcagttatttttaatgcttaatacatacatggtgcaaaatttaaaaagcgcaaataggtatctagtggaaaacctaagcctccctctctcctccggcacccattacctctccctggaggcaactgttttgatccatttcttacacacactgccagagatactctaggcatgtaaagcacaaacatacatataaaatctgcgggcttcaaaaaatataagtaggatgtcatctatactgtcatacactttgttttttatcacttacttaatgttatatcttggatattgtattaccctgggtattaaaaagaactcctttcacattttaaaataacaatctgagcacttcataaatccaaatgcgtatctccagtctgctcgagctaggatatagcggatacgcaccttgtcaaaggaggcaactacgactacgacaacgaattcaaacgtaggctcttgtacaatcatcgtgactagggattaccggagac

SEQ ID NO: 255359 - DNA, 465 bp, Homo sapiens
gtagccatatttctccttgaaattagttcagcctctgtccctctggctacagtgctgggctccttcacttcccagggccaggtcctggggctcctgggtgtgcaatggtacatgctgtctgcatctctcttgccaggtcttgaatgtctcctttgcctttgagctcatgcaagatggagggttggaaaagccaaaaccgcggccagaaggtactttgctctttcctgggtttgtgacaacagagtgagaccctctccctgcacatgagtactcagattttgtagcagagggaagcattttctgaagccttcgttgctggggaaggtgggactcggtgcagctgctcagtcccagagaccctttgtgagctgccagctgcacagccaggggaagaaaagaatctgaaatcccacacatgccatgcgtgggatcgcggggatcagggaccgagcagaactgctgctg

SEQ ID NO: 255360 - DNA, 3440 bp, Homo sapiens
  misc_feature (1510)..(1510): n is a, c, g, or t
  misc_feature (1849)..(1849): n is a, c, g, or t
  misc_feature (1986)..(1986): n is a, c, g, or t
  misc_feature (1992)..(1992): n is a, c, g, or t
  misc_feature (2017)..(2017): n is a, c, g, or t
  misc_feature (2281)..(2281): n is a, c, g, or t
  misc_feature (2283)..(2283): n is a, c, g, or t
  misc_feature (2285)..(2285): n is a, c, g, or t
  misc_feature (2287)..(2287): n is a, c, g, or t
  misc_feature (2578)..(2578): n is a, c, g, or t
  misc_feature (2585)..(2585): n is a, c, g, or t
  misc_feature (2641)..(2641): n is a, c, g, or t
  misc_feature (2648)..(2649): n is a, c, g, or t
  misc_feature (2690)..(2690): n is a, c, g, or t
  misc_feature (2694)..(2694): n is a, c, g, or t
  misc_feature (2727)..(2727): n is a, c, g, or t
  misc_feature (2756)..(2756): n is a, c, g, or t
  misc_feature (2810)..(2810): n is a, c, g, or t
  misc_feature (2836)..(2836): n is a, c, g, or t
agggagggagcgagggagggagcgagggaagggaaaggcgagcgtgagctgcctcaaatgcttggaataattccgcttccgtttggaaagccgcagcctcagtcccgccgccgcccgctgcgtccgcccagcgccagctccgcgtcccgaccggcccgcggcagcctgcgccgcgccatggccacctccccgcagaagtcgccttctgtccccaagtctcccactcccaagtcgcccccgtcccgcaagaaagatgattccttcttggggaaactcggagggaccctggcccggaggaagaaagccaaggaggtgtccgagctgcaggaggagggaatgaacgccatcaacctgcccctcagcccaattccctttgagctggaccccgaggacacgatgctggaggagaatgaggtgcgaacaatggtggatccaaactcacgcagtgaccccaagcttcaagaactgatgaaggtattaattgactggattaatgatgtgttggttggagaaagaatcattgtgaaagacctagctgaagatttgtatgatggacaagtcctgcagaagcttttcggtaggagagttgagtgctgcaatggatgtgtgtttaattgcaggtggttggatcacctacttgtagctagaaggagttattctcagtttacagtggcttacctggaaatggattacaaatgtgtggagcatggaataacagctcagtgaaggctttagatgtcctcttggaatgtttcatatgaatgaattgtagagggagtctccatgactaggtgggcctgctccttctagcagccaagaatcatcagctagatgaaaagaccccactgtatattaataactagaaagcacgcctccgcctctccagaaaagcatgcctgtgtggcctctgtcggtatatttacatgcatgggcctgagtatgcatttttagacctctgtcaccttcagatgcatgtgtgtgtgttcctctgtcatctgtggacttgtgtgtgtgtgtattcctccctgggtcactttgcagctgttcatgtgaaaatgtaaggacaatggggagagaaaggagaattcaggggtaatgttagtgttgaaaggacaaatttcagcttgaatggagttaaggtgtcccccactgctcctaatctaactgtggcccaaaccgtcccctcagattctcgacttcaatccttagctgccctctgggcacctctacctgaatctgctttagactgaattcatccacttttctaaagctgtttcatcccctctgagttcatagaatcctctcccttcctcctctgcccccatgtatacagggatcagcaagacccatttctacctctcctgaatacatcctctgccattttgacttctctgaactattgaaaaaacttccaaactcacttctttgcttcccatctcacctcctccaacctattccctacacagctagcagaggaaacttttaaaatcacaagtccagtcttgcctgnacttatttataactcttagtgcctctctcctgctggacaaagtccaaaccccttggcacaacattcaaagcattccatcatccgatgacccccagctgtctccttggtctcacccacacatgtggctcatccgtgtagtaatacgtgtaaagtgcttaggatagtgcctgacacatagtagatgctcgataaatgtctgtcatcattggttttactattttttttacataccattgctgcatttttatatatgccacacatattaacatgcctgtacctttgatcatgctagtccttctgcctctaaggcctgccttcctcctttacccaccagggganaccattattgctcatccttctgatctctagaattaatcaaattaatcaaatgtgcctccctattatagcctttacagtactgtcacttttttttttttcttgagacagattctcgctgtcacccaggctggagtgcngtggcntgatcttggcttattgcagtctcgncctccagggttcaagtgaccctcctgccttagcctcctgagtagctgggactacagggcatgtaccatcatgcccagctaatttttgtattttttctggagacggggttttgccatgttgcccaggctggtctcaaactcctgggctcaagcaacccgcctcagcctcccaaagtactgtgattacagcagtgagccactgcgcctggccctatagtcacatttagaaaagatagtcatatacttttttttgtgttcctccccncncncncacaaatgtttctctctctgagggactatatatacacttgcacatatgtgcatatatgtataggtgtgtagatataaacgtgtacacacatatctgtatacatacatgtaagtatatatacatgccttattataagactttccatgtcatctgtagctgtttaggtaaatgtgtataggcttcccaagggcacgagccatgtcctatatattatccaggcttctccagcaccatcaggtgtctagcatatgttgcctagcacttaatcaatgtatattgaggctgggcgcngtggctnatgcctgtaatcccagcattttgggaggccgaggcaggcagatcacctgaggtcangagtttnngagcagcctggtcaacatggtgaaaccctgtctctactaanaatncaaaaattagccgggcatggtggcgggtgcctntaatcccagctactcgggacgctgaggcnggagaatcacttgaacctgggaggcagaggttgcagagagcggagatcacgccnttgcactctagcatgggggacagagnaagactccctctcaaaaaaaaaaaaaaaaaagtgtattgaatgaatgaatggctaatgtaatttctaggaagttaaactgatttggttctcagacatcagtattaatgagtgttaatatttaaaggcttgtaaactccaactgaatacagagaggaaatgaaaaagcttcggcacatgaagacatggctaagccgggagcctcaccacgcatctgtcccagtgactacagcttttaactcctccagcagacatctagtcaggatctgaaactgccaaaatgttctatgctaggctgtcaaagcaaggtagaacatggccacagagtaatggaacatggttgtggaggaatcttgcctccaggaatggttacaaaaccatccagcatcacatctatgcaaccccacgttaggcattgcgtacaagcagattagatcatttcacatttcacccttcatgctgaaaaggtgattcactatggaggtgatgcttcttttgtgaacttaagtttagaccctaatctcaaaggtctgaggcagggcatacacattcaaagcccataatgggtaggatactcaggtggagggaaccagtttgcggtaaaaa

SEQ ID NO: 255361 - DNA, 4330 bp, Homo sapiens
agggagggagcgagggagggagcgagggaagggaaaggcgagcgtgagctgcctcaaatgcttggaataattccgcttccgtttggaaagccgcagcctcagtcccgccgccgcccgctgcgtccgcccagcgccagctccgcgtcccgaccggcccgcggcagcctgcgccgcgccatggccacctccccgcagaagtcgccttctgtccccaagtctcccactcccaagtcgcccccgtcccgcaagaaagatgattccttcttggggaaactcggagggaccctggcccggaggaagaaagccaaggaggtgtccgagctgcaggaggagggaatgaacgccatcaacctgcccctcagcccaattccctttgagctggaccccgaggacacgatgctggaggagaatgaggtgcgaacaatggtggatccaaactcacgcagtgaccccaagcttcaagaactgatgaaggtattaattgactggattaatgatgtgttggttggagaaagaatcattgtgaaagacctagctgaagatttgtatgatggacaagtcctgcagaagcttttcgagaaactggagagtgagaagctaaatgtggctgaggtcacccagtcagagattgctcagaagcaaaaactgcagactgtcctggagaagatcaatgaaaccctgaaacttcctcccaggagcatcaagtggaatgtggattctgttcatgccaagagcctggtggccatcttacacctgctcgttgctctgtctcagtatttccgcgcaccaattcgactcccagaccatgtttccatccaagtggttgtggtccagaaacgagaaggaatcctccagtctcggcaaatccaagaggaaataactggtaacacagaggctctttccgggaggcatgaacgtgatgcctttgacaccttgttcgaccatgccccagacaagctgaatgtggtgaaaaagacactcatcactttcgtgaacaagcacctgaataaactgaacctggaggtcacagaactggaaacccagtttgcagatggggtgtacctggtgctgctcatggggctcctggagggctactttgtgcccctgcacagcttcttcctgaccccggacagctttgaacagaaggtcttgaatgtctcctttgcctttgagctcatgcaagatggagggttggaaaagccaaaaccgcggccagaagacatagtcaactgtgacctgaaatctacactacgagtgttgtacaacctcttcaccaagtaccgtaacgtggagtgaggggctgccctgggcccaccactgcccaagagttcttgctgttggcgtactggaccctcctccgaactgccttaccctgcttattcctgtctcttgcactgtgctctcccacaagtccagctgcaacccagagatagtggaaactgaaattaggaaggaaatcatcaataactcagtgggctgacccatccctcccaggcgctggggaccaacctagcaatgaaggttgggaaggttgttcccttcccggtgccaggtccagatttccctccatgatttgggaaccagcttaggcaaaagagtccccacaagatgaaaataaagatcctagttaccattcaaaggatgctaactgtgtgtcaggccccacactaagtgctctgctctgatatactcaaggccattaatcttcaggactcccattgacgtaggtgtttcattccccttttacagatgaggaaactaaggcttggaggttaaatgacttgccagaagttggaatttttttcctctttgaacataacctctcccttctccctaaaggtaaccactattctgagtccaatcatcaaggttttgcttttctttttagctaagtatgcattcctcaatagtagacagtacaacatgtttataacaagccaattacattatgttctttgcatgttctaaagttgtgtatgtgtgtgcacatctgagcacgtgcacatgtacacctgagccaaaaacacgagaacccactgatctcaccactggggcaagctaggtcagagcttagtgattcacactgaaattggcaaattggatttaacccaattaatagtgtgtgtgtggcaggagtcatgtccctcacatcctttgtacaaatgaaaattactcttaattccttcagatttataataactctgtactttggtttcagggtgacatttgggaaggattttgtttagaattaatggagtggcacattttgcagcctttttgcttgattgcatgtaatggaaatgccctatattttcctgcaaaataagtactaaattcattatcgttaagcaaatgtacaatatgctcaggcaccgcagagagctgggcacgggcccatgtgagcatcactttggaagtagggctcttcaacagggacccttgaactttaaagaaaggaacttctttttgccttctaattgatcatttagactattctggctaagtctgcccacatgtaattaccggctaattcaagcgaggaaaaatgtaagtcatttagaccaaagccaagcagtttctttgcgtgggttactcaagggcttgtggttacttgtatctcctctatgtgaacttgactttgaaagacagagctctagtgtgccagcctgctaagtcctgtaagaatagggaagggcggaggggggtgggcagtgactaggggacgagaagcatggggaaaatatttgcactctaaacatacagagatagaggtggggcttgtggtacttaacacttgtagccatcaactgactgagaccttgggctaaataatcaattgtgctgatattacatctcgttatggaatgttcctaaatatgccaggtagacaccagcccaagtaccctcctccagaagtctgtgactaccttgtcactactttaggcccattccacaaagcccatctctggtttgagaattcattttgatctgtatctacaccacccaaagttaggcctcctataatgtccaaaacattcctttcagcctttttatttcttactgtactgtctcttactgtactgtctatctgcagtaattgaggacccataaaatttagataactacatgtctttgctcttagaattgtcactcagcataatgagcatttaacatacaaaggcaatgtactgttttgtgttgatctatgtaaaagaatacaattcttttttacataattagtgaaattttattttttattaggaaacactaaatagtgtaatatttcttttgcttttaaaaaaattcctggtagcaaatcaagataaataattgcttcattttcttgagcaatactgaagcaggatgaagtaagaggaatgcattcatttaaacatgctttgctttatgaattttgtctcttttttggtctctttttcttatattcaagttacaaatgtacaagtatccttactaagagtgctccttttgtattttacatatatacagtatgaaaatacattggaacactaggaaagtttttaaataacagttctaatttatcagaaaattgtgttttgggattgagttctttgtctcagcccagaatcccaggtcctgggcctggttttctaatgctgtcatctcagttcgatattttactttagaacctggaatctcctacttaatatatgaccatgactttgaaaggcaaaagaggaatcaagaataaataaaacaaacttaatcttcatctttaaaaaaaagaaaaaagaaaccaaaatgagaatcaacacttcataggctcactgggttttcttttcttttctgttaatttaaactcagttatttttaatgcttaatacatacatggtgcaaaatttaaaaagcgcaaataggtatctagtggaaaacctaagcctccctctctcctccggcacccattacctctccctggaggcaactgttttgatccatttcttacacacactgccagagatactctaggcatgtaaagcacaaacatacatataaaatctgcgggcttcaaaaaatataagtaggatgtcatctatactgtcatacactttgttttttatcacttacttaatgttatatcttggatattgtattaccctgggtattaaaaagaactcctttcacattttaaaataacaatctgagcacttcataaatccaaatgcgtatctccagtctgctcgagctaggatatagcggatacgcaccttgtcaaaggaggcaactacgactacgacaacgaattcaaacgtaggctcttgtacaatcatcgtgactagggattaccggagac

SEQ ID NO: 255362 - DNA, 4311 bp, Homo sapiens
gcagcatgcacgtggctagaaacagccaccctagttttgattgcgaatgatcatcagtcacgagcacaacttctgacaacagtctctccagcttagtgcagtcttaactggggccagctgatcgtctgctcttcagtaaagcagtagcgccctttggattaggtgttcacccaggttcaatcagctgtggcctagaaggggccacaaggaggaaacacagttgccaaggtgctgtgagtctgtgtgtgagagacagacagaaggacaaagagccagagtgagaacttgagatggtgtccgagctgcaggaggagggaatgaacgccatcaacctgcccctcagcccaattccctttgagctggaccccgaggacacgatgctggaggagaatgaggtgcgaacaatggtggatccaaactcacgcagtgaccccaagcttcaagaactgatgaaggtattaattgactggattaatgatgtgttggttggagaaagaatcattgtgaaagacctagctgaagatttgtatgatggacaagtcctgcagaagcttttcgagaaactggagagtgagaagctaaatgtggctgaggtcacccagtcagagattgctcagaagcaaaaactgcagactgtcctggagaagatcaatgaaaccctgaaacttcctcccaggagcatcaagtggaatgtggattctgttcatgccaagagcctggtggccatcttacacctgctcgttgctctgtctcagtatttccgcgcaccaattcgactcccagaccatgtttccatccaagtggttgtggtccagaaacgagaaggaatcctccagtctcggcaaatccaagaggaaataactggtaacacagaggctctttccgggaggcatgaacgtgatgcctttgacaccttgttcgaccatgccccagacaagctgaatgtggtgaaaaagacactcatcactttcgtgaacaagcacctgaataaactgaacctggaggtcacagaactggaaacccagtttgcagatggggtgtacctggtgctgctcatggggctcctggagggctactttgtgcccctgcacagcttcttcctgaccccggacagctttgaacagaaggtcttgaatgtctcctttgcctttgagctcatgcaagatggagggttggaaaagccaaaaccgcggccagaagacatagtcaactgtgacctgaaatctacactacgagtgttgtacaacctcttcaccaagtaccgtaacgtggagtgaggggctgccctgggcccaccactgcccaagagttcttgctgttggcgtactggaccctcctccgaactgccttaccctgcttattcctgtctcttgcactgtgctctcccacaagtccagctgcaacccagagatagtggaaactgaaattaggaaggaaatcatcaataactcagtgggctgacccatccctcccaggcgctggggaccaacctagcaatgaaggttgggaaggttgttcccttcccggtgccaggtccagatttccctccatgatttgggaaccagcttaggcaaaagagtccccacaagatgaaaataaagatcctagttaccattcaaaggatgctaactgtgtgtcaggccccacactaagtgctctgctctgatatactcaaggccattaatcttcaggactcccattgacgtaggtgtttcattccccttttacagatgaggaaactaaggcttggaggttaaatgacttgccagaagttggaatttttttcctctttgaacataacctctcccttctccctaaaggtaaccactattctgagtccaatcatcaaggttttgcttttctttttagctaagtatgcattcctcaatagtagacagtacaacatgtttataacaagccaattacattatgttctttgcatgttctaaagttgtgtatgtgtgtgcacatctgagcacgtgcacatgtacacctgagccaaaaacacgagaacccactgatctcaccactggggcaagctaggtcagagcttagtgattcacactgaaattggcaaattggatttaacccaattaatagtgtgtgtgtggcaggagtcatgtccctcacatcctttgtacaaatgaaaattactcttaattccttcagatttataataactctgtactttggtttcagggtgacatttgggaaggattttgtttagaattaatggagtggcacattttgcagcctttttgcttgattgcatgtaatggaaatgccctatattttcctgcaaaataagtactaaattcattatcgttaagcaaatgtacaatatgctcaggcaccgcagagagctgggcacgggcccatgtgagcatcactttggaagtagggctcttcaacagggacccttgaactttaaagaaaggaacttctttttgccttctaattgatcatttagactattctggctaagtctgcccacatgtaattaccggctaattcaagcgaggaaaaatgtaagtcatttagaccaaagccaagcagtttctttgcgtgggttactcaagggcttgtggttacttgtatctcctctatgtgaacttgactttgaaagacagagctctagtgtgccagcctgctaagtcctgtaagaatagggaagggcggaggggggtgggcagtgactaggggacgagaagcatggggaaaatatttgcactctaaacatacagagatagaggtggggcttgtggtacttaacacttgtagccatcaactgactgagaccttgggctaaataatcaattgtgctgatattacatctcgttatggaatgttcctaaatatgccaggtagacaccagcccaagtaccctcctccagaagtctgtgactaccttgtcactactttaggcccattccacaaagcccatctctggtttgagaattcattttgatctgtatctacaccacccaaagttaggcctcctataatgtccaaaacattcctttcagcctttttatttcttactgtactgtctcttactgtactgtctatctgcagtaattgaggacccataaaatttagataactacatgtctttgctcttagaattgtcactcagcataatgagcatttaacatacaaaggcaatgtactgttttgtgttgatctatgtaaaagaatacaattcttttttacataattagtgaaattttattttttattaggaaacactaaatagtgtaatatttcttttgcttttaaaaaaattcctggtagcaaatcaagataaataattgcttcattttcttgagcaatactgaagcaggatgaagtaagaggaatgcattcatttaaacatgctttgctttatgaattttgtctcttttttggtctctttttcttatattcaagttacaaatgtacaagtatccttactaagagtgctccttttgtattttacatatatacagtatgaaaatacattggaacactaggaaagtttttaaataacagttctaatttatcagaaaattgtgttttgggattgagttctttgtctcagcccagaatcccaggtcctgggcctggttttctaatgctgtcatctcagttcgatattttactttagaacctggaatctcctacttaatatatgaccatgactttgaaaggcaaaagaggaatcaagaataaataaaacaaacttaatcttcatctttaaaaaaaagaaaaaagaaaccaaaatgagaatcaacacttcataggctcactgggttttcttttcttttctgttaatttaaactcagttatttttaatgcttaatacatacatggtgcaaaatttaaaaagcgcaaataggtatctagtggaaaacctaagcctccctctctcctccggcacccattacctctccctggaggcaactgttttgatccatttcttacacacactgccagagatactctaggcatgtaaagcacaaacatacatataaaatctgcgggcttcaaaaaatataagtaggatgtcatctatactgtcatacactttgttttttatcacttacttaatgttatatcttggatattgtattaccctgggtattaaaaagaactcctttcacattttaaaataacaatctgagcacttcataaatccaaatgcgtatctccagtctgctcgagctaggatatagcggatacgcaccttgtcaaaggaggcaactacgactacgacaacgaattcaaacgtaggctcttgtacaatcatcgtgactagggattaccggagac

SEQ ID NO: 255363 - DNA, 3644 bp, Homo sapiens
cgagctcggcaccccgactccacctcagctcctgctccctctgcatcagagcccttcctttcttgggggatgggccttgccctcttctcttttcccttcctgtacctttgactaacgctcagcttccatccaagtggttgtggtccagaaacgagaaggaatcctccagtctcggcaaatccaagaggaaataactggtaacacagaggctctttccgggaggcatgaacgtgatgcctttgacaccttgttcgaccatgccccagacaagctgaatgtggtgaaaaagacactcatcactttcgtgaacaagcacctgaataaactgaacctggaggtcacagaactggaaacccagtttgcagatggggtgtacctggtgctgctcatggggctcctggagggctactttgtgcccctgcacagcttcttcctgaccccggacagctttgaacagaaggtcttgaatgtctcctttgcctttgagctcatgcaagatggagggttggaaaagccaaaaccgcggccagaagacatagtcaactgtgacctgaaatctacactacgagtgttgtacaacctcttcaccaagtaccgtaacgtggagtgaggggctgccctgggcccaccactgcccaagagttcttgctgttggcgtactggaccctcctccgaactgccttaccctgcttattcctgtctcttgcactgtgctctcccacaagtccagctgcaacccagagatagtggaaactgaaattaggaaggaaatcatcaataactcagtgggctgacccatccctcccaggcgctggggaccaacctagcaatgaaggttgggaaggttgttcccttcccggtgccaggtccagatttccctccatgatttgggaaccagcttaggcaaaagagtccccacaagatgaaaataaagatcctagttaccattcaaaggatgctaactgtgtgtcaggccccacactaagtgctctgctctgatatactcaaggccattaatcttcaggactcccattgacgtaggtgtttcattccccttttacagatgaggaaactaaggcttggaggttaaatgacttgccagaagttggaatttttttcctctttgaacataacctctcccttctccctaaaggtaaccactattctgagtccaatcatcaaggttttgcttttctttttagctaagtatgcattcctcaatagtagacagtacaacatgtttataacaagccaattacattatgttctttgcatgttctaaagttgtgtatgtgtgtgcacatctgagcacgtgcacatgtacacctgagccaaaaacacgagaacccactgatctcaccactggggcaagctaggtcagagcttagtgattcacactgaaattggcaaattggatttaacccaattaatagtgtgtgtgtggcaggagtcatgtccctcacatcctttgtacaaatgaaaattactcttaattccttcagatttataataactctgtactttggtttcagggtgacatttgggaaggattttgtttagaattaatggagtggcacattttgcagcctttttgcttgattgcatgtaatggaaatgccctatattttcctgcaaaataagtactaaattcattatcgttaagcaaatgtacaatatgctcaggcaccgcagagagctgggcacgggcccatgtgagcatcactttggaagtagggctcttcaacagggacccttgaactttaaagaaaggaacttctttttgccttctaattgatcatttagactattctggctaagtctgcccacatgtaattaccggctaattcaagcgaggaaaaatgtaagtcatttagaccaaagccaagcagtttctttgcgtgggttactcaagggcttgtggttacttgtatctcctctatgtgaacttgactttgaaagacagagctctagtgtgccagcctgctaagtcctgtaagaatagggaagggcggaggggggtgggcagtgactaggggacgagaagcatggggaaaatatttgcactctaaacatacagagatagaggtggggcttgtggtacttaacacttgtagccatcaactgactgagaccttgggctaaataatcaattgtgctgatattacatctcgttatggaatgttcctaaatatgccaggtagacaccagcccaagtaccctcctccagaagtctgtgactaccttgtcactactttaggcccattccacaaagcccatctctggtttgagaattcattttgatctgtatctacaccacccaaagttaggcctcctataatgtccaaaacattcctttcagcctttttatttcttactgtactgtctcttactgtactgtctatctgcagtaattgaggacccataaaatttagataactacatgtctttgctcttagaattgtcactcagcataatgagcatttaacatacaaaggcaatgtactgttttgtgttgatctatgtaaaagaatacaattcttttttacataattagtgaaattttattttttattaggaaacactaaatagtgtaatatttcttttgcttttaaaaaaattcctggtagcaaatcaagataaataattgcttcattttcttgagcaatactgaagcaggatgaagtaagaggaatgcattcatttaaacatgctttgctttatgaattttgtctcttttttggtctctttttcttatattcaagttacaaatgtacaagtatccttactaagagtgctccttttgtattttacatatatacagtatgaaaatacattggaacactaggaaagtttttaaataacagttctaatttatcagaaaattgtgttttgggattgagttctttgtctcagcccagaatcccaggtcctgggcctggttttctaatgctgtcatctcagttcgatattttactttagaacctggaatctcctacttaatatatgaccatgactttgaaaggcaaaagaggaatcaagaataaataaaacaaacttaatcttcatctttaaaaaaaagaaaaaagaaaccaaaatgagaatcaacacttcataggctcactgggttttcttttcttttctgttaatttaaactcagttatttttaatgcttaatacatacatggtgcaaaatttaaaaagcgcaaataggtatctagtggaaaacctaagcctccctctctcctccggcacccattacctctccctggaggcaactgttttgatccatttcttacacacactgccagagatactctaggcatgtaaagcacaaacatacatataaaatctgcgggcttcaaaaaatataagtaggatgtcatctatactgtcatacactttgttttttatcacttacttaatgttatatcttggatattgtattaccctgggtattaaaaagaactcctttcacattttaaaataacaatctgagcacttcataaatccaaatgcgtatctccagtctgctcgagctaggatatagcggatacgcaccttgtcaaaggaggcaactacgactacgacaacgaattcaaacgtaggctcttgtacaatcatcgtgactagggattaccggagac

SEQ ID NO: 255364 - DNA, 2594 bp, Homo sapiens
agggagggagcgagggagggagcgagggaagggaaaggcgagcgtgagctgcctcaaatgcttggaataattccgcttccgtttggaaagccgcagcctcagtcccgccgccgcccgctgcgtccgcccagcgccagctccgcgtcccgaccggcccgcggcagcctgcgccgcgccatggccacctccccgcagaagtcgccttctgtccccaagtctcccactcccaagtcgcccccgtcccgcaagaaagatgattccttcttggggaaactcggagggaccctggcccggaggaagaaagccaaggaggtgtccgagctgcaggaggagggaatgaacgccatcaacctgcccctcagcccaattccctttgagctggaccccgaggacacgatgctggaggagaatgaggtgcgaacaatggtggatccaaactcacgcagtgaccccaagcttcaagaactgatgaaggtattaattgactggattaatgatgtgttggttggagaaagaatcattgtgaaagacctagctgaagatttgtatgatggacaagtcctgcagaagcttttcgagaaactggagagtgagaagctaaatgtggctgaggtcacccagtcagagattgctcagaagcaaaaactgcagactgtcctggagaagatcaatgaaaccctgaaacttcctcccaggagcatcaagtggaatgtggattctgttcatgccaagagcctggtggccatcttacacctgctcgttgctctgtctcagtatttccgcgcaccaattcgactcccagaccatgtttccatccaagtggttgtggtccagaaacgagaaggaatcctccagtctcggcaaatccaagaggaaataactggtaacacagaggctctttccgggaggcatgaacgtgatgcctttgacaccttgttcgaccatgccccagacaagctgaatgtggtgaaaaagacactcatcactttcgtgaacaagcacctgaataaactgaacctggaggtcacagaactggaaacccagtttgcagatggggtgtacctggtgctgctcatggggctcctggagggctactttgtgcccctgcacagcttcttcctgaccccggacagctttgaacagaaggtcttgaatgtctcctttgcctttgagctcatgcaagatggagggttggaaaagccaaaaccgcggccagaagacatagtcaactgtgacctgaaatctacactacgagtgttgtacaacctcttcaccaagtaccgtaacgtggagtgaggggctgccctgggcccaccactgcccaagagttcttgctgttggcgtactggaccctcctccgaactgccttaccctgcttattcctgtctcttgcactgtgctctcccacaagtccagctgcaacccagagatagtggaaactgaaattaggaaggaaatcatcaataactcagtgggctgacccatccctcccaggcgctggggaccaacctagcaatgaaggttgggaaggttgttcccttcccggtgccaggtccagatttccctccatgatttgggaaccagcttaggcaaaagagtccccacaagatgaaaataaagatcctagttaccattcaaaggatgctaactgtgtgtcaggccccacactaagtgctctgctctgatatactcaaggccattaatcttcaggactcccattgacgtaggtgtttcattccccttttacagatgaggaaactaaggcttggaggttaaatgacttgccagaagttggaatttttttcctctttgaacataacctctcccttctccctaaaggtaaccactattctgagtccaatcatcaaggttttgcttttctttttagctaagtatgcattcctcaatagtagacagtacaacatgtttataacaagccaattacattatgttctttacaaaaaaaaaaaaaaaaaaaaaaaaaaatttggggggggccggggcccggaaaaattttaaaccctttggtgggggggggggccccggttaggttaagtcggaacatctgcggctctaaagcggggtccccccaagagaaacatcgcggcctaggacacaggcggtgcggggttttctccccaattaaaaaaagcggcgcgggggcacacgcgcctttttgtcggcaccaatccccgatgggggttcgcggaagcccaacggggtttcttaccaccagggatcccaggggaactcgttaatcaatagcggcgcgtggtggaatacacaaactaacacaacagccagctccatcccgagaaacagcgcaccaacacgcggataacactataacatcaaacacagaagtcggtaacccatcacacgcacgaaacacaactcacgccggcaccgaaaaaggcagcaaaacacgtaacaaacgtgatcccacaccgcacaaccaccacgccaccaacccaggatagacactacatagactatcctaataaaagatatgataagcacacttataggcataaacagagttacaaataatacgacgaacatatatcatactaacgagtataagaatgcttgga

SEQ ID NO: 255365 - DNA, 308 bp, Homo sapiens
cggcgtgttgacaagccttcattcatttactcatttcatgttcccatcagttgctggggtgggagcagataactgtgtctgttttatcttcatgtccctagcacgggacaaagggcggtataagtgcccaagaaatgttgcagtaaacgaggctatcaggctctttcccagggactcgctgtggctgggaccaggctccctgttgggcactgcaccaaggttagctgatttgaccttcataatggcagccctgtgagagaaaagggatacctgaagttacagtacaagttcatggctgaactcaaact

SEQ ID NO: 255366 - DNA, 427 bp, Homo sapiens
cggatcacgatgacagaagatggagaccatcctggctaaaacggtgaaaccccgtctctactaaaagtacaaaaaaattagcctggcgtggtggtgggcacctgtagtcccagctacttgggaggctgaggcaggaaaatggcgtgaacccaggaggcggagcttgcagaaagcagagatcgcgcctctgcactccagcctgggcaacagtgcaagactccatctcaaataaaaaaatgttaaaaaagaaaattcagcttttctttttgtctttcatgcccttgatacttgctttttgtagattattctgaagtttgattttttttctaatatttcttcatggttaaattcacataatatattttggcaagaatgccacaatgccgaagttgtccttctcagtgcatcatatcaggaggcacatgat

SEQ ID NO: 255367 - DNA, 394 bp, Homo sapiens
gtgggggtagttacatgggtttctataattattaagttttatgtacccttctgtttgtacatctcactatgagagaaagtggatcagcattcatgcatggacccaactctccaggcttttgacatcatggaggtttcacgttcagccgtccctaagatgaacctaagacacagcacaaaggttaggatgtaggggagcaaaagatgctaagtacgctcctcccctgcctcctctgcagtcctttgaatttgcatgctagaattactagagcaaaagctcagctaatctcctggctggcgtgattgttattatcatgcggcgcacacaggcatattcatccagatttaaagggaagaaataagcctccctcatggcactgctgataaacaacccc

SEQ ID NO: 255368 - DNA, 245 bp, Homo sapiens
cacaccgagacacacaacctctgacctttccaagcatgcagacagttttgtgtcaacatgctgaagaccacaatggaaatatttgaccctaaagcaacctgcagtcctgccctgacactatgaattgggacgcaacattctctggaggccttgctattaaaggactttggggacacgctggggcatgggctggagttgttgtcctgtcacatggtaactctcggagtggccctggttcccggtca

SEQ ID NO: 255369 - DNA, 1134 bp, Homo sapiens
ttgggcacattagagacaaatgtgctatactttacggcttagcctgcgcccggttcttatttatcgtcaactgtggacaaaatgattttgtttcatgagacaaagggggaccaccaacttctacggtaatgtctgccttttgctagatagactggctattacataaccatatgtagtttatttttaaggagaattacatatttttcttcacatgtcactgttagaagtaaatcccaatagtaagatttccctaaacaaagtatttcttgtaacatataactcataatatttagaaattacagactttaacctttagaataatcatggtttgttttgtttttgaacttactacctcagagtcacatggtatatatcccctatgatacctgtaaaagacatctaaattggtcaattcttaaatattttattgtgctaacacaaaagttttattttatttggagtgcataagatacagaaacaattctttatgatcttacatctctgtttttttaatattgcaaataacataccactttgacataggcagtttctcacttacaaaagtaaaatttgaaatgatcagtggtcaccccatctgtatatttttgccaccactaccagaagagccatgtcattaaaaaaaaaaaaaaaaaaaaaaagttcagaattagagaaataggtattgacagggggtaggaatggttcattttatattatcatcaagtaaaagtaatagtcatacagtatagttcaatgtagtcttttttttgttgctctttaaaaagagaaaaaatagatggtactgaaggacaaatactcaggcttacctaagctttaaatgttagttttttctgggtacatcttcatctctggttactactgtccacgacaaattgctaggattgaaatctagaatcaagagtgtagacatttctaattgttcttaataaatattaccaaattatcctcgagtaaagagtctctagaaatatgtaaactcagagaaatccatgttaaagctctattacccttatattctaaaatttagaggtactatggtgggaggtcttgggcagtttgggaactgagaggtaagaggtatcaaagaagacactgctgaagatcagttctgtt

SEQ ID NO: 255370 - DNA, 487 bp, Homo sapiens
gctctctgaactttcctctctccttcttccacgttgaatcaattactgagcccccaaagattttacctccgaaacatgttgtggcaaagtcagtgtgctgtgtttgccagacccagttcctttttgttctgggctctcagctggactatatagtccagcctccctcaagttagatggggccacatgtctgagttctggccaccaaaatatgcatgtgagtgatgtgctggccaccccccagacctggaccctaaacctcctgcaggatgctccatcctatttcttcccctcacccctttgctggccctctgcagagaactagctgaaaattccagggcccaagggaatggcagaacttctgcctgaaagagccaggattcctgaatgactgtgtggagcagagttctccttccccataccccaggccccatgcaggcccacagtggactgggaagtgaataagaaataaactcttaacatgtgaaaa

SEQ ID NO: 255371 - DNA, 301 bp, Homo sapiens
gcagcaccaaatcaacagatccacggggaaaagtcactcagctatgcaacatcttgattctccaagctcttggagctgcttaatccaactgcactaatgttcgttgtgataaccaattagtgttaccatgtgacccttctcacctaccagaagcaacttacagggcgcaatataatcagggcccaggccagtgcacctcggatgtagatcaacagcagaaaccagcctgatgttctcaccacactgacccaacaaccaaccctcaacatctcatgaacacacaccactcccaagcccgtcc

SEQ ID NO: 255372 - DNA, 318 bp, Homo sapiens
tagatctagaggtcccgagagtgggacacggggatgggacaggggaaaagtcactcagctatgcaacatcttgattctccaagctcttggagctgcttaatccaactgcactaatgttcgttgtgataaccaattagtgttaccatgtgacccttctcacctaccagaagcaacttacagggcgcaatataatcagggcccaggccagtgcacctcggatgtagatcaacagcagaaaccagcctgatgttctcaccacactgacccaacaaccaaccctcaacatctcatgaacacacaccactcccaagcccgtcc

SEQ ID NO: 255373 - DNA, 297 bp, Homo sapiens
tgacttgcccaaggtcactgagcagtgtgggagcccaggtgcaggcaggggctctgatctggcacaggaccagtccaggttctgggttagggaggggagaaggatttaggtggttcagggaccatgaatgaggtgctctggggaccagctcggctacccagcctgaggtgctcctggaggaagccgagcagtgctgctagagctccggccgcctgtacatggaggaggcctgcacacccctctgccatcccagctccagcccaagcttcctttgccctcccagcagctttgccttcc

SEQ ID NO: 255374 - DNA, 314 bp, Homo sapiens
ggtggtaaaaagaggaagcagtagacgctaagtggaataaacagcaaaaagaaaaatagaaaaatcaaaagttggtgccacaaaggtaaaaagatagctttaacacagcgataggaatagttaatactgtgaaatgctatggagggcaaagataaaaacagaactatgtcggccagtcgcagtggctcacgcctgtaatcccagcactttgggaggccaaggcaggcggattacgagatcaggagatcaaaaccatcctggctaacatggtgaaaccctgtctctactaaaaatacacacacacacacacacac

SEQ ID NO: 255375 - DNA, 328 bp, Homo sapiens
  misc_feature (243)..(243): n is a, c, g, or t
  misc_feature (261)..(261): n is a, c, g, or t
  misc_feature (274)..(274): n is a, c, g, or t
  misc_feature (288)..(288): n is a, c, g, or t
  misc_feature (313)..(313): n is a, c, g, or t
  misc_feature (325)..(325): n is a, c, g, or t
  misc_feature (328)..(328): n is a, c, g, or t
gagggcaccgacgttttcagctggctttcatacccgatctacggggcttctcaagcaggggagagctaactgagagagctcgccagagcggttctagctcaagccagtgtgcactgcctaggatggggcacgccccaccctgtgctcacagaataacacacgcagccaccttccagggagttcggacatgaaagcgtgacctaagtctgtggcccaaggtggcctctgcaggtttttgtactnatcacgatcctacttatncttatgacaagcntggatatcatttantgatgctaccctcactgagaattcngtggactaatantan

SEQ ID NO: 255376 - DNA, 624 bp, Homo sapiens
gtggtctgcgattagaggcatgttagttaggcatgctaataatgggatggcgaaagttgggggtaaagcaagtcacctagacctagcagcctgaggtggacttagtgggagctttgtgccttgggggaggctgggaaggcactggccgtgatcacggctctcagtaaactctgtgataatcactcagagtaacctttagagttcaaacattgtagtacattttatctccatatgatttgtcttcctacacaaatttttattgtttcttttaatgtaattatatttatgtagctgtataactatatgtttagttatctctgaggatttaaaagtttacctcttgacgcagttaaatttatccaactaatatatattttttaagtgtttactaagtgctaggtacacttttatgtgctggagatatagcagaaagcaaagtgccctcctgaagcttacattctagatgggagagccaagcacacaaaataaataagtaaattatatagtagattagaaggtcataagtgccatgaagagaaataaaacccaggagggaattagagaatggtaatggttggacttggtaatgatgtcatttaaataaggtagtcattgcagacctca

SEQ ID NO: 255377 - DNA, 433 bp, Homo sapiens
tctgccacccgggttcaagtgattctcctgccttagcctcccgagtagatgggactacaggcacccacccacattcggctcatttttgtatttttagtagagacagggaccttgccatgttggccaggctggtcttgaactcctgacctcaaatgatctgcccgcctcagcctcccaaggtgctggaattacaggtgtgagccactgcacctggcccatttcctatattttttcatttactctccctaacaaatctacgtactatttttaatccctgttccaaagttggggagaccaaagcatgcttaaaaacattgttaattaactagtgagaggcagaccatgaggcctaagtttgcagtcccttgtgagaagcaggcacctagtgtctctgagatgcgcctgtgtgagccttctacgaataacctttttt

SEQ ID NO: 255378 - DNA, 271 bp, Homo sapiens
ggtgctcagcacagcattcctttaaaactgggggaaacgggctgggcctgtaatcccaacactttaggaggcccaggagggaggattgcttgagcccagaggttcaagtccagcctgggcaacacactgggcatggtggcatgtgcctgtaatctcagctacttgggaggctaaggtgggaggatcacttgagcccaggagacaaaggctacagtgagctgagatcacactactgcactccggcctgggtgatagagtgagaccctgtctc

SEQ ID NO: 255379 - DNA, 277 bp, Homo sapiens
acaaaggccatcttactttccccgtgtactatttggggtgtactgctgaattgattgtcccatcaatctgatgtctcattaagtaaaatgaaaaagttgttaaaaccaaagataatgatagtcatgatgaagattcaaatgattcttctatctcaaaatgataacattcagatagggaacaaatttctgacggaactcaacactggaacttggttttagcatgaccattgtctaccccattacatacgggttgttacttggatctggattgactttc

SEQ ID NO: 255380 - DNA, 464 bp, Homo sapiens
ggctataatcaaaaagacaaataagtgttagaagacactgctagtggctatgtaaagtggtacacagcagctttggaaaacagcctggcattacctcaaatggggagtatgatcactaggtatgtacctaagagaaattaaaccatatgtccgcacaaaatttgtacataaatgtgcacagcagcattattcataagtcaaaaggtagatttccatttatatgaaatgtccagaacaggcaaatctacagagacagaaaatagattagtggttgttgagggatggctgggatggaggttttgggggcaacagctaagaggtatgtggtttctttttagaataataaaagcattctaaaattgtggtgatgcatgcactactctaccaatacactaaaaatcaataaattgtacattttaaatgagaattgtgaattatatgccaataaagctgttaaaaaatta

SEQ ID NO: 255381 - DNA, 404 bp, Homo sapiens
agaaggccacagatgacttcataaccctatgcatatgtacatacagaacccacatggagtgaatgttgcctattaacaaaactgtgaaatctgagttagaaacaaagctcagcttggactgaatatataaaaaaatcagtgaacagaagatattttcaaatggacacttacataaatacagcattccaagggaaaattccagcctcagatgcacttatttcatgaagactcaatattttatagcaatggttttccaaaattattagcaactcaagggatgagccgctgtccacttcatctttggaacatcagcttctagcacaggggctggttatattagacattcaataaatgtttgttaagcaaatgaggaataaatgagtaaatgtcaatgtgatactcaa

SEQ ID NO: 255382 - DNA, 315 bp, Homo sapiens
tggggaatctcagagtcgccacagccaaaaccaaactcctgcctgtcacctggaaactgctggcccagctcccccaagtcagtgaatggcaacccattgccccccgccaggttgcacaggccacagtcctaagaagtggtcacccgccacccacctcagccccacacacccaacctgggggccagtgtgcccaaccctcctctcctcagccattctggaggctccaaagcccccaagggtctcccgtcctccctctgcacctgcgctggtctcttccaggatggtggccagcatggctgctcagggtgctggcgg

SEQ ID NO: 255383 - DNA, 822 bp, Homo sapiens
ttggaaggctgaggcaaaaagatcacttgagcctgggagatgaaggctacaatgagctgtgattcacaccactgccctccagcctgggcaacagagcaagaccagtctcaaaagaatatataaatataacatttgaagtgctttgacaaggttatagaagacctcagcacatgtaatattgtaacagcttagtgagcctgtctttcagtgtttcttttaatatccctatagacccaagtttctatattcatattacctacagaaaatagaaataactgcttagtaccactcctcctgtaagcaaacaggaagctttctttgtgctagatttgtaaagcagaggttgaaactgggctaccacgggtccagagaagtgttcccagctcttgttctcttgcctgtgaagtgtactatgagagcctaaggcaataaagaggccaggccaccttcttgacaggcctctgtcccattcactcctttgagtttatttcaccagctgtggggaagttcagaatgaagtggctctataagggctcctggagacattaaaacttaccaatgggccaggtggtggctcacacctgtaatcccagcactttgggaggccacagcgggtggattgcgtcagcccaggagttggagaccagcctgggaaacatggcaaatccctgtctctactaaaaatacaaaaattagcctggtgtggtggagcacacctgtgctactcaggaggttgaggtgcgaggactgcagtgagctgagatcgtgccattgcactctagcctgggcaacagagcaagaccctatctcaaaaaagaaaag

SEQ ID NO: 255384 - DNA, 364 bp, Homo sapiens
cctcagagaagcacttcctttctaaggccctgtactcttggcctggggcctgcctacccctcttcagccaagacagagatcttcaggaactccttcctctcccgcacccacccccacccacaagctttcctgcatcctgggtgctttggcctcctgccctccaggctcactggaggtggagttggcttcctataactttactgggcacctgttcccagttgctgtgccctcctacagcaccggggtctctgcttaaacaatcatctcccctctcttctctctctttagcctcttccttcacctcattccttcccatcgccatttgaggatggttaagtcatgctctttgaaaagctgttccctg

SEQ ID NO: 255385 - DNA, 472 bp, Homo sapiens
cgaccctctcctatatcacggttcaatacttgtcattgctctcttcttgcccctttttgggtctaggcatggtaaagcttcaaagctctctgccagctcttgttggtttctcttaatcctgaccacacctttgtaaatagtgtcttccttcagctttctccaattatccctcttaggtacatttctgccaggaccctgaccaaggtagtccctttgtacaccagagagataaccccagcattgttctcagtactctactcgattataagacgtctcccccaccacctcatctctcctcccttacgactgtcttcactgacaacctggtgctctccaataatcatgcacatgctgtacttgatcactcaatgcttgtgtcttttgtcacagcatttctttgaatggttttctctcccaaagggcaaggctgtgctttaatcatcttggtaacccaagtgctgatcagcgaacc

SEQ ID NO: 255386 - DNA, 564 bp, Homo sapiens
ttattaggtgacacaagcttgtttgtatttttagtttgttaagtattttcctatgaatgaagtttgaatttgaatttttgcacagatatggaattgatcctaactttttttctttttctctttaatctgtccatgtgctctgtgtagcctggctttgctgtcaaagtcatagaatgcagtttgatttatttgttatttgttaacgttttctgaagtaatatgtgtatgataaagatgaactgatatttgaaattaggtaaaacttacatagaaaacgtttccttctggttacatttgaggggaaaatttttgttgcagttttaaatcctttaatggaaatccatttcttcagtcttttgtctctagtcaaatttggtagttaatatttttccagagaacaatatgtacattcaaacttttaaaattattgttcagttgttcatagaatatgcttagtagttttctgttgttgttgtttttgtttttttgagacagagtctcactgtcgccaagatcgtgccattacactccagcctgagcaacaagagcgaccctccatctcca

SEQ ID NO: 255387 - DNA, 321 bp, Homo sapiens
aaaaatcttgggagatggaaagaattgtcagttctaatactaattcaatggttaataatatagactttttaactgagaagcaacatagtttgttgcagtggttctcaaagtatcatctgaggattcctgacaagggggtacctgaaaccctttcagggggttcatgaaccgcaagtctatgtgaaagtttttctttatattcaaccaaagcagcatatctaatgaagacaccgacttaagaatccagtgtcttctattaaatcagatgtaaaagacattagcaaaaatacaaaaacaatgctagtctcactttttttgttt

SEQ ID NO: 255388 - DNA, 455 bp, Homo sapiens
ttttcttctactcattttataccttagccctagtaactttgctttctgtttccataattatcataatctgttataattgcaacatatttggctttttctaactttgtccattacagaattctactgaagtggtttgttattagggacaaatttttccatctggccaacaacttggaaatggtatggatgattcttttactgtcacccaccgcctttctacctcatatcactaataactcccatgttttatattctggccaaagttcagctttcttgtcaagttatttctttggctttgttacctatcttctggtttatccttcttctattagaagccctatgttctctgaatgttcttcttacctgaaagtcacagattatctctaacccagattagcaggtttttcatttaaaaactcttcagatttccctaactacaggcatcctttctttga

SEQ ID NO: 255389 - DNA, 251 bp, Homo sapiens
ttcttttttcctccatcaatgtgcctgaggtttcttaatattgttagtatgttcaaaaatttggccttgttgattatctttattaaatttttatatgattaattcctgattttacctttgttatttaactacttttgttttatttgaatctattacattgctctttttctaacttcttaaattatatacttagataattttaacctctcttttatatttatatatccatctctatatattgctgaagctgc

SEQ ID NO: 255390 - DNA, 2719 bp, Homo sapiens
  misc_feature (2)..(2): n is a, c, g, or t
  misc_feature (5)..(6): n is a, c, g, or t
  misc_feature (2703)..(2703): n is a, c, g, or t
  misc_feature (2712)..(2712): n is a, c, g, or t
  misc_feature (2719)..(2719): n is a, c, g, or t
gnacnnggagagaaatggctgaaagtggaaacccggagcggtttggggcgcttcgcaaagttctccagctcggcgagccggcggtgtgtctaccagaggctgggggccagtccatctggtcctgcccgacgccacttccaccccgcgagctctgggaaaggtctctacgtgacgccaagggccgtcgcggccccggggagagggatcgaaagactcactctgcgaggtgtttacactggaggtgggggacgggaagggactgggcaaagttacctggactcaactaaattcctgcgcttgcttagtgttgacatttgaataggatccgagatgttctgcttttatcccgggcagccctgatatgtcagcaacaggctgaggttccagacctgaaatcgcactgcaagaaaaaggggtttgctgaactaactccaagctggtgtgcctagcgtccgcgcggctgccggcccaagagctggagtcaccatggcggccggagttgcggcctggctgccttttgcccgggctgcggccatcgggtggatgccggtggccaactgccccatgcccctggccccggccgacaagaacaagcggcaggatgagctgattgtcctcaacgtgagtgggcggaggttccagacctggaggaccacgctggagcgctacccggacaccctgctgggcagcacggagaaggagttcttcttcaacgaggacaccaaggagtacttcttcgaccgggaccccgaggtgttccgctgcgtgctcaacttctaccgcacggggaagctgcactacccgcgctacgagtgcatctctgcctacgacgacgagctggccttctacggcatcctcccggagatcatcggggactgctgctacgaggagtacaaggaccgcaagagggagaacgccgagcggctcatggacgacaacgactcggagaacaaccaggagtccatgccctcgctcagcttccgccagaccatgtggcgggccttcgagaacccccacaccagcacgctggccctggtcttctactacgtgactggcttcttcatcgctgtctcggtcatcaccaacgtggtggagacggtgccgtgcggcacggtcccgggcagcaaggagctgccgtgcggggagcgctactcggtggccttcttctgcctggacacggcgtgcgtcatgatcttcaccgtggagtacctcctgcggctcttcgcggctcccagccgctaccgcttcatccgcagcgtcatgagcatcatcgacgtggtggccatcatgccctactacatcggtctggtcatgaccaacaacgaggacgtgtccggcgccttcgtcacgctccgggtcttccgcgtcttcaggatcttcaagttttcccgccactcccagggcctgcggatcctgggctacacactgaagagctgtgcctccgaactgggctttcttctcttctccctcaccatggccatcatcatctttgccactgtgatgttttatgccgagaagggctcctcggccagcaagttcacaagcatccctgcctcgttttggtacaccattgtcaccatgaccacactggggtacggagacatggtgcctaagacgattgcagggaagatcttcggctccatctgctccttgagtggcgtcctggtcattgccctgccagtccctgtgattgtttccaactttagccggatttaccaccagaatcagagagctgataaacgcagggcacaaaagaaggcccgccttgccaggatccgtgtggccaaaacaggcagttcgaatgcatacctgcacagcaagcgcaacgggctcctcaacgaggcgctggagctgacgggcaccccagaagaggagcacatgggcaagaccacctcactcatcgagagccagcatcatcacctgctgcactgcctggaaaaaaccactgggttgtcctatcttgtggatgatcccctgttatctgtacgaacctccaccatcaagaaccacgagtttattgatgagcagatgtttgagcagaactgcatggagagttcaatgcagaactacccatccacaagaagtccctcactgtccagccacccaggcctcactaccacctgctgctcccgtcgtagtaagaagaccacacacctgcccaattctaacctgccagctactcgcctgcgcagcatgcaagagctcagcacgatccacatccagggcagtgagcagccctccctcacaaccagtcgctccagccttaatttgaaagcagacgacggactgagaccaaactgcaaaacatcccagatcaccacagccatcatcagcatccccactcccccagcgctaaccccagagggggaaagtcggccaccccctgccagcccaggccccaacacgaacattccttccatagccagcaatgttgtcaaggtctctgtcttgtaaaaccactggacagagggccagagtgggtagtggggaatgaaggggactggcatgttggtgggtggtcactgagaccactccctcccccctttccccactatttctgcctgccccattgtacccctagcactgagacttgtgcctggaaggaaaaagaggtagcaaaggggcacctgaggttcacgctgctagcgtggacatagccctgtgatactgcatctcactggggccagaggaagggagggtggnggggtcggngataggn

SEQ ID NO: 255391 - DNA, 470 bp, Homo sapiens
tgaacttcttcctcctggcagtgaatcaagctttcttcgaagaaatccttttccacacttgatgtggccccagatacaggactcgtcatactcttacccccaggagtttgcaggaggctaggacacaccagccggctggccccgggaagagctggcagcgtttccgctgaagcttcctgcccacccactgggcccgaggcctgttccgcatccagccccctggccccctccactccccacggcaggcgcgctagcgcattctgagcatatggagaaggggttactccgcagccccctgactcatcctgctgctgaataagcctggaaggtgactgatctagggaacatgccagtttgctatcagggcctgatcactgggatgcagctccccggggacgagaaaatgaaaaatatgactaaactgtcctcccacacgggctgtcattaaaacagtgctcgctatgtcacag

SEQ ID NO: 255392 - DNA, 2662 bp, Homo sapiens
  misc_feature (2)..(2): n is a, c, g, or t
  misc_feature (5)..(6): n is a, c, g, or t
  misc_feature (2646)..(2646): n is a, c, g, or t
  misc_feature (2655)..(2655): n is a, c, g, or t
  misc_feature (2662)..(2662): n is a, c, g, or t
gnacnnggagagaaatggctgaaagtggaaacccggagcggtttggggcgcttcgcaaagttctccagctcggcgagccggcggtgtgtctaccagaggctgggggccagtccatctggtcctgcccgacgccacttccaccccgcgagctctgggaaaggtctctacgtgacgccaagggccgtcgcggccccggggagagggatcgaaagactcactctgcgaggtgtttacactggaggtgggggacgggaagggactgggcaaagttacctggactcaactaaattcctgcgcttgcttagtgttgacatttgaataggatccgagatgttctgcttttatcccgggcagccctgatatgtcagcaacaggctgaggttccagacctgaaatcgcactgcaagaaaaaggggtttgctgaactaactccaagctggtgtgcctagcgtccgcgcggctgccggcccaagagctggagtcaccatggcggccggagttgcggcctggctgccttttgcccgggctgcggccatcgggtggatgccggtggccaactgccccatgcccctggccccggccgacaagaacaagcggcaggatgagctgattgtcctcaacgtgagtgggcggaggttccagacctggaggaccacgctggagcgctacccggacaccctgctgggcagcacggagaaggagttcttcttcaacgaggacaccaaggagtacttcttcgaccgggaccccgaggtgttccgctgcgtgctcaacttctaccgcacggggaagctgcactacccgcgctacgagtgcatctctgcctacgacgacgagctggccttctacggcatcctcccggagatcatcggggactgctgctacgaggagtacaaggaccgcaagagggagaacgccgagcggctcatggacgacaacgactcggagaacaaccaggagtccatgccctcgctcagcttccgccagaccatgtggcgggccttcgagaacccccacaccagcacgctggccctggtcttctactacgtgactggcttcttcatcgctgtctcggtcatcaccaacgtggtggagacggtgccgtgcggcacggtcccgggcagcaaggagctgccgtgcggggagcgctactcggtggccttcttctgcctggacacggcgtgcgtcatgatcttcaccgtggagtacctcctgcggctcttcgcggctcccagccgctaccgcttcatccgcagcgtcatgagcatcatcgacgtggtggccatcatgccctactacatcggtctggtcatgaccaacaacgaggacgtgtccggcgccttcgtcacgctccgggtcttccgcgtcttcaggatcttcaagttttcccgccactcccagggcctgcggatcctgggctacacactgaagagctgtgcctccgaactgggctttcttctcttctccctcaccatggccatcatcatctttgccactgtgatgttttatgccgagaagggctcctcggccagcaagttcacaagcatccctgcctcgttttggtacaccattgtcaccatgaccacactggggtacggagacatggtgcctaagacgattgcagggaagatcttcggctccatctgctccttgagtggcgtcctggtcattgccctgccagtccctgtgattgtttccaactttagccggatttaccaccagaatcagagagctgataaacgcagggcacaaaagaaggcccgccttgccaggatccgtgtggccaaaacaggcagttcgaatgcatacctgcacagcaagcgcaacgggctcctcaacgaggcgctggagctgacgggcaccccagaagaggagcacatgggcaagaccacctcactcatcgagagccagcatcatcacctgctgcactgcctggaaaaaaccactaaccacgagtttattgatgagcagatgtttgagcagaactgcatggagagttcaatgcagaactacccatccacaagaagtccctcactgtccagccacccaggcctcactaccacctgctgctcccgtcgtagtaagaagaccacacacctgcccaattctaacctgccagctactcgcctgcgcagcatgcaagagctcagcacgatccacatccagggcagtgagcagccctccctcacaaccagtcgctccagccttaatttgaaagcagacgacggactgagaccaaactgcaaaacatcccagatcaccacagccatcatcagcatccccactcccccagcgctaaccccagagggggaaagtcggccaccccctgccagcccaggccccaacacgaacattccttccatagccagcaatgttgtcaaggtctctgtcttgtaaaaccactggacagagggccagagtgggtagtggggaatgaaggggactggcatgttggtgggtggtcactgagaccactccctcccccctttccccactatttctgcctgccccattgtacccctagcactgagacttgtgcctggaaggaaaaagaggtagcaaaggggcacctgaggttcacgctgctagcgtggacatagccctgtgatactgcatctcactggggccagaggaagggagggtggnggggtcggngataggn

SEQ ID NO: 255393 - DNA, 970 bp, Homo sapiens
  misc_feature (2)..(2): n is a, c, g, or t
  misc_feature (5)..(6): n is a, c, g, or t
gnacnnggagagaaatggctgaaagtggaaacccggagcggtttggggcgcttcgcaaagttctccagctcggcgagccggcggtgtgtctaccagaggctgggggccagtccatctggtcctgcccgacgccacttccaccccgcgagctctgggaaaggtctctacgtgacgccaagggccgtcgcggccccggggagagggatcgaaagactcactctgcgaggtgtttacactggaggtgggggacgggaagggactgggcaaagttacctggactcaactaaattcctgcgcttgcttagtgttgacatttgaataggatccgagatgttctgcttttatcccgggcagccctgatatgtcagcaacaggctgaggttccagacctgaaatcgcactgcaagaaaaaggggtttgctgaactaactccaagctggtgtgcctagcgtccgcgcggctgccggcccaagagctggagtcaccatggcggccggagttgcggcctggctgccttttgcccgggctgcggccatcgggtggatgccggtggccaactgccccatgcccctggccccggccgacaagaacaagcggcaggatgagctgattgtcctcaacgtgagtgggcggaggttccagacctggaggaccacgctggagcgctacccggacaccctgctgggcagcacggagaaggagttcttcttcaacgaggacaccaaggagtacttcttcgaccgggaccccgaggtgttccgctgcgtgctcaacttctaccgcacggggaagctgcactacccgcgctacgagtgcatctctgcctacgtgactgatctagggaacatgccagtttgctatcagggcctgatcactgggatgcagctccccggggacgagaaaatgaaaaatatgactaaactgtcctcccacacgggctgtcattaaaacagtgctcgctatgtcacag

SEQ ID NO: 255394 - DNA, 1994 bp, Homo sapiens
  misc_feature (2)..(2): n is a, c, g, or t
  misc_feature (5)..(6): n is a, c, g, or t
gnacnnggagagaaatggctgaaagtggaaacccggagcggtttggggcgcttcgcaaagttctccagctcggcgagccggcggtgtgtctaccagaggctgggggccagtccatctggtcctgcccgacgccacttccaccccgcgagctctgggaaaggtctctacgtgacgccaagggccgtcgcggccccggggagagggatcgaaagactcactctgcgaggtgtttacactggaggtgggggacgggaagggactgggcaaagttacctggactcaactaaattcctgcgcttgcttagtgttgacatttgaataggatccgagatgttctgcttttatcccgggcagccctgatatgtcagcaacaggctgaggttccagacctgaaatcgcactgcaagaaaaaggggtttgctgaactaactccaagctggtgtgcctagcgtccgcgcggctgccggcccaagagctggagtcaccatggcggccggagttgcggcctggctgccttttgcccgggctgcggccatcgggtggatgccggtggccaactgccccatgcccctggccccggccgacaagaacaagcggcaggatgagctgattgtcctcaacgtgagtgggcggaggttccagacctggaggaccacgctggagcgctacccggacaccctgctgggcagcacggagaaggagttcttcttcaacgaggacaccaaggagtacttcttcgaccgggaccccgaggtgttccgctgcgtgctcaacttctaccgcacggggaagctgcactacccgcgctacgagtgcatctctgcctacgacgacgagctggccttctacggcatcctcccggagatcatcggggactgctgctacgaggagtacaaggaccgcaagagggagaacgccgagcggctcatggacgacaacgactcggagaacaaccaggagtccatgccctcgctcagcttccgccagaccatgtggcgggccttcgagaacccccacaccagcacgctggccctggtcttctactacgtgactggcttcttcatcgctgtctcggtcatcaccaacgtggtggagacggtgccgtgcggcacggtcccgggcagcaaggagctgccgtgcggggagcgctactcggtggccttcttctgcctggacacggcgtgcgtcatgatcttcaccgtggagtacctcctgcggctcttcgcggctcccagccgctaccgcttcatccgcagcgtcatgagcatcatcgacgtggtggccatcatgccctactacatcggtctggtcatgaccaacaacgaggacgtgtccggcgccttcgtcacgctccgggtcttccgcgtcttcaggatcttcaagttttcccgccactcccagggcctgcggatcctgggctacacactgaagagctgtgcctccgaactgggctttcttctcttctccctcaccatggccatcatcatctttgccactgtgatgttttatgccgagaagggctcctcggccagcaagttcacaagcatccctgcctcgttttggtacaccattgtcaccatgaccacactggggtaagtcagcgctggtggatgaaaccaggacggaggttggagggcagctggatgacctctgaaaccttggatggtgtcaccatgggtagaggaggagggagtcccttacccaagtgttgggggcaggggaagttgctctatccgaagggtaaagcccatgagtcatctgtttgggggtggtagcttgctgggaattgagttttctttttgaggtcggggcatgtgttttatagagctaagaaaattaagtcaccaattcttttttcagccatgccttgtgtgcgtgtgaagtctcggggtgaggtgatgtctgcatttgtatatgcatttgcgcatatggggcagcgtggggagaaggtcagggcagttgttggggagggaggagactgttgagaagttcgg

SEQ ID NO: 255395 - DNA, 422 bp, Homo sapiens
gacatgatgacaatgatggcccggatgctgaggacagtgaccagacatccagggtgtgcttgagaagcacgacttccacagggccttggctggctgcatccatgttgcttcacccccagattgcagatcgcgaagggtctgcggaaagttctgaggcaaggatggctctgcgcttctcagggttcccaggaccccgcgggattcggcagccggacgccacccgcccaggtctggaatctcagccccagccagcatgcagaacgtgtttcggctcctctaagcccccttaattggtttttaacaactttaccttcttttggactttatataaatcatatataaatgcagtgtgtatttttttgtttgtttctggcgtcttttcctcaacatatgtttgtgagattaaatcatgttatgtatgt

SEQ ID NO: 255396 - DNA, 290 bp, Homo sapiens
gggggcggtgggggaaaaatcctgggcaaaaatatgagaaatgaaatcctggtgttaaattcgtcctctgtaatgcaaacgcagcaccatccattgattctctaacatgcaattttctttataccagaaggtcttgtgcaattcaaaatttgcacaagtcaagaataccacttcattaaaactgtggattttagaggttcagattttcagtatgctcttttatgagtatgtccaccaccattcaaattactttttgctgctgcaacagtcaagtcacattcacacgcaag

SEQ ID NO: 255397 - DNA, 433 bp, Homo sapiens
tccaaatactacccctgcagccaggagcacacacaccctgaacacacgcacatattcccttgccctttccatggacaagcactcccgaaaagtaatcattgacatcggcacaccggtgcacacggtgtgtggactcatctatctctctgtctgtgctaagttctactcatcttcctgaggaacagcacttgatacatttttacggcactgtcgctgaacccaaacctcatttgattcccccagccttccctgggccagactttatgtatctccgtcttacagatgatgagaaaactgagcttcagatggagcaggggactccccaagacaccccgatagacacagatggcatgggcagtcacagtcagatgtcctgactgcatcccagcaggggtagggttgtgggaaatggcacacaggcctaggtttgaat

SEQ ID NO: 255398 - DNA, 170 bp, Homo sapiens
aagtaagaaagtgttcagtctctgggaacaagacagacagacagggctaacctcatggagcatatacttcagtgggttttgctttctttaagaatgtctaaatagtggctgatcaccctcctttgtggaaacctagcacactagcagccattataattaaaatttcaaaa

SEQ ID NO: 255399 - DNA, 689 bp, Homo sapiens
tgacgcagaactggaaggtgtctatggattcttcaaggtcaaaatttgtacgttcacgtgacaaggctgcagccaaaaaaatattctcagttcttcttccaacatggaatgaataagtgactgcataaaacatcagtcttctagactatgattgccagtttacaaataatgagagagaaactgaggcaccacagatgatgtcaaccgtttctggtcacttgtggattgctaagcagtcaagaaattgaagtagctactgtttagtgtcccagtcctgttttctctccactccttcccaatgacaaaggtcttatttcaaagcacaatttggtttcatgctggccagtccttcacaaaccatcgaggtaatgtttattcaacctcacactttagcgactatttatgagcagtgtttacaagttccagagattgccccagcagttattaatgctatgcaaatcaaaagccgtctaaatttgttaatctagacaaaacacaggggcaactccaaaccaacgtgtgatattctgtctctgggtttattcaagtgtaatgcacctttaatgtcaacttagatttttcaactcttcaccagactcgcagtaattatagtcaacaggaaagtcgaactcagccaaagaggcaaggcaacaggaaattgtggggaaattttaaaaacaaaaccaaaa

SEQ ID NO: 255400 - DNA, 320 bp, Homo sapiens
aaaactttgtgatcttgaaccttaggttcataatctcacaaatgagaaggctccctccacactcttggaactgtacacccactgaaacccttaagatcaaaagaaactgcctctgtggagttgaagactaaatcaatttttcagccataaatgagcatgctaacaaagatcttggaatttgtatttatggtaaaatgctttacatgcattctcattgaggcatatgagattcttaaatttaatttttgttcttgttcctgcctcaaatccaccaatgacttttcattgacgttagaatgaacattaaactctgtaacaaa

SEQ ID NO: 255401 - DNA, 257 bp, Homo sapiens
gttatgaaaaccttctaggacatcagtgtgatgatgtccagagacaggggcagactcctgatctgtggctgtgcttggtactccctcaccccttcattggtctaatgggccagctgaagaatttacacaataggaaaattggccaaagccttaacattgttaccaacctgcatttcttcatgaagaaagcacaatacttgccttaactgagggaagtttcgcaggaaggggtattcagctgtgtgagtatgtgctct

SEQ ID NO: 255402 - DNA, 518 bp, Homo sapiens
catttgtaagagcatgggccctgggttcaaatcctgttcttctacccccaactggggagacttatgctaccagacatctccgtgcttcagtttcccatttgtaaaatggatttcaagaatgaactttgaatacccttttctcttcatttttccaaacacagagatgagactcaattttacaaagtttatgtgcgtcacctaaaaaactgcacgtgccttatggtaaaaccaagtcaaaagtcatggccttcaacctgtgaaacagacagaaaggaaacccctatcatgcctgcttctctccctacctcttttcatctctgtttttccatttatggttaagaaaacaagaaaattcgccgagcacaaaagttttccctctttttctgtctagaggggaatatgagtaatgaacttttccatcagggttgtttttcctggacatagtgcaccccctccagctgctaaaacatgtgatcctgaaggagaccttaaataaacttaaatgttccttatcggtc

SEQ ID NO: 255403 - DNA, 233 bp, Homo sapiens
aaacagtgagataaaatgactagagggcaagtgtgcaggtggtctccaagactgctccaggctcacttgtttgctaggaagacttcacacagagttagttgcattcatggctaagacatagtacagcaaaaaggaaataaaacaaaatcagcaagggaaaggcccaggatgctaaccctggaggaatcaggctcaagcttccaagagtcattcggtgaagctgcacaggacgc

SEQ ID NO: 255404 - DNA, 404 bp, Homo sapiens
aggtcactccttccttcccatcaaggatgaattgaccttggtatctcctcattgctcagaaaggtaattcaagtgttccacaggtcaatcccagagtcacttcacttttgtcaggaatccctgtgtctcttactttaactggactctgggtgacctatcttgtttgcacaaatatcttaaagtgaacatgccaattagtgtctcacctctacctgctcacaacctaaacctttccaccaaactaacattgagaaagtaagtagataaaagaattattggccaggcgtgatggctcatacctgtaatcccaacactttgggaggccaaggtgggtggattgcctgagttcaggagttcgtgaccagcctgggcaacacggtgaaacctagtctctactaaaatac

SEQ ID NO: 255405 - DNA, 442 bp, Homo sapiens
caccactatgcccagctaattttgtatttttggtagagacggggtttctccatgttggtccggctggtcttgaactcccaacctcaggtgatctgcctgccttggccttccaagtgctgggattacaggcgtgagccactgcacctggctagaccgttattaaaaagtctcacgtttgctgttcttcgtgcctctaagtccattctttgggtttgtacagtgagtgtgtttctcatttcacgtccccccccccccccatattttttatagctatatttgagctgggaaacctgaggagaggttagatataagaaattctaggctcacacctgtaatcccagcactttgggaggccgaggcaggcggatcacgaggtcaggagttcgagaccagcctggtcaagagactagcctggccaatatggtgaaaccctgtctctact

SEQ ID NO: 255406 - DNA, 370 bp, Homo sapiens
ctctagccctccttcctccacaaacacaatattaggtccacattttgagactttgaaagagtaggaaaaatgccatgctatagatgcagagagcatatcatgggactttgtctgccctgcttctgatgccaggaggcactttattttagagaactgagcctcctgtatgccaatcccaaccctaacctttgctgccaatcagagccactgctcgcacgggttggctccagacctggctggttccatcacagttctcagcacccctgggatagcatttgatgcagccacggacttattatccaggtgcagccaatgtgagatcttccctgaaactctcctccctgaagtcctttaaggagcgaaatagaaa

SEQ ID NO: 255407 - DNA, 420 bp, Homo sapiens
caactagacctaagaccatttccatacagctcttctgactggggaaggcactttcttctcctctctagagtgcttttactggatccagggtactgcactctcctttgcattttctttccctttatcttgttcagccctttagaaatacttcctttagggccaggcatggtggctcacacctgtaatcccagcactttgggaggccaaggcgggcagatcacttgaggtcaggagttcaagaccagcccagccaacatggtgaaaccccatctctactgagaaacacaaaaattagctgggcttggtggggcatgcctgtaatcccagctacttgggaggctgaggcaggagaatcacttgaacccgggaggaggaggttgtagtgagctgagattgtgccactgcactccaagcctaggc

SEQ ID NO: 255408 - DNA, 301 bp, Homo sapiens
ttttttacaaactgaaggtttgtagcaaccctgcatcaagcaagtctatcagcaacatttccaacaccatgtgcttacttcatgtctctgtgtcacaatttgataattctcacaatatttcaagctttttcaatatttttataactgttatggtgatgggtaatcagtaatctttgatgttactattttaatagtttcagggtgccacaaacagtgcccatataggatggcaaacttaatccattaatgtatgtattctgaacgctccactgaccagtcatccccctacctctcttcctct

SEQ ID NO: 255409 - DNA, 472 bp, Homo sapiens
agtaatgaatccagaccttgaagactggtgtgtgtgtaaaaggcaagaagtgagaagattcacgtgtagatccaggacaatctgaatttacttctgttcagtagttcccaaaggctttttctacatggagggactcggagtgacacagcagctccctcttgtgggcagattcccctgtgtaaggtgctggaggctgaggttccagcctgcagccgcttgtgatcctgatatgtggagagttctggaagactgatgactgctgacccccttcttaacctacgccatcgccatgctggtggtggggatggggctcttggccattcctgccccttggctgcccttccttggtctgagggtacgtgggtggcccttcgggtgtgccaggagctttgtgctttagtgaccaacagtcccctgatgtgtgaaggcccatcaatccgatttaaaataaaacatttgaagtctcttcaga

SEQ ID NO: 255410 - DNA, 483 bp, Homo sapiens
gcaagattttagtccagggtggtatgtttcaatcatttttgcaacacattttgaataaaagtccacctaagaaattgtcattgttactgagagggagccatataaagtcatttttttcctttgtcacaggcaattccctccatcaccgcacctcaatatagaacatcattttgtttctctagaggcttgaggtgtctatttgtataaaagcaacatctatgatgaaaccatcatcactttaactccatggttttctcaatatggcacagaaattacatgactgatatttcaaactgacagttccattaaattataatcaacattatattctatggttttgttttttactgagacctttacaaattgcttcattttatgcttctgctctgattattttccattgctacattataagccacattctgttggaaaaaaaagagaaataagcagctgctactctttttttaatctttctgtgttttg

SEQ ID NO: 255411 - DNA, 204 bp, Homo sapiens
agaaggttgagagtgaagtgggaatttggaggttttcagaatcaatataatatgtaaaacccaagggactgaagaaattacttaggaaatgagtgtagacagaaaagcaaagagttccaatgactggatcctggggcaactctaatacttagaggttgggaaaatgaagaggaatcagccaaagacactgagaaggaagagcca

SEQ ID NO: 255412 - DNA, 532 bp, Homo sapiens
ccaaaaagaaaatactacgttattaaacttagtttctacattcttgatattccaaatattctcaatcctgactgtgcatcaaaattgcttataagaaaattaatatggttatggctcagtctacatttattaaattagaatctatagaggtggggcttctatcaattttggcctttgaggaattccacagcaaattatgatttacaggtttgagaactagttggttaaaatataaatcacaggccgggcgtggtgactcatgcctgtaatcccagcagtttgggaggccaaggcaggtatatcacctgaggtcaggagtttgagaccagcctggccaacatggtgaaaccctgtctctactaataatacacaaattagctgggcgtggtggtgcatgcctataatcccagttacttgggaggctgaggcaggagaattccttgaactcgggaggcggaggttgcagtgagcccagatcatgacattgcactccagcctgggtgataagagtgaaacttcatctccaaagaaa

SEQ ID NO: 255413 - DNA, 474 bp, Homo sapiens
cctgggaggtcgcagctgcagtgagccatgatcatgccactggcttgacagaacgagatcctgtctcagaaaaaaacaaaaccaaaccaaaccatggaagtgtaatatggccaaatatttaatttaaaatattttagtagccgtattttaaaaagtggaaagaaacaagtaaaattaatttgaataatatattttatttaacataatataaaaatatttcactattcaatataaaaattaatgagttacatcctttttttcatacttaatcttcaagagtcttacgacaaccatctttttttttttttgagacggagtcttgctctgtcgcccaggctggagtgcaatggcacgatctcagctcactgcaacctctgcctcccgggttcaagtgattctcctgcctcagccacctgagtagctgggactacaggtgcccgccaccacgcccagctaatttttgtatttttagta

SEQ ID NO: 255414 - DNA, 473 bp, Homo sapiens
cactgctggctattgtcctgttttataaatttcagtagcaattttcaaaaatttcaatgaatgatctgatattgtaaagataaagaattttggtttttaagtgaccctaaggtccatggcacataagaatatatttttgctaaaaatgaatcacctgtgctaagagggttttttttgttgttattggggtgtatgtgtgtgttttaagtaagatgtgttcatttagttcagtggttctcagccctcactgtgtatcagttcatttggggcagggagaaaaagtcagaagggaaataaagaaatgccatccatcttaattgtttctttagaaaaatgattgttatataacaagatagatttatggattgctactcataagttaatgttacaatttggaaaaagttaatactttattcaaggagctgtttaaggcagtcattcaaacagctacctttggatgcattttttgcaga

SEQ ID NO: 255415 - DNA, 375 bp, Homo sapiens
cctatccaaggggcctttacagtgcttgaactcaccaatgaggtaacagatgaagggagaatagtgatggcctttacaaagccctcctgggggccggatgtggtggctcacgcctataatcccagcattttgggaggccgaggcgggaagatcacctgaggtcgggagtttgagaccagcctgaccaacatgaagaaaccccgttttttttaaaaaaatacaaagttagccgggcgtggtggtacatgcctgtaatcccagctacttgggaggttgaggcaggagaatcacttgaacccaggggacggaggttgcagtgagctgagatcatgccattgcactccagcctggggaacaaaagcgaaattcctcctc

SEQ ID NO: 255416 - DNA, 347 bp, Homo sapiens
acagatatctctttgacatactaattttaattcatttggatatatatccagaaatgagattactgggtcgtattttaatagtgaagttagattccatacttcaagttcctaaaaaggaatagggagatataaatggtgcctcttggaaaagaattgatgataaaggcaaaaagatagctaaagttggaagtggtcagaaaaacatgtttgatgtttggggtttgtatccctttttaaataaaagagcttccagcgtgcttacaaggtgaaaggaaggatatttgaagggaagatcagaaaagagatagataggtgaagtagcaaaatgggatggtactaacagccaa

SEQ ID NO: 255417 - DNA, 311 bp, Homo sapiens
ggccaaatgattatatgcttagagcagtgcctaataggtggagcttctcaacacgattcagcatgggtggtggtggtaagtgaagactgaagaagcagccagccacagtagcacaaaagcaggcaaaacagatctgtgctgttagaattcagcacagtggtactgggaggggacacagggcggcttctagtatgccggtaatgttgcttcttgatctgggtgctggttatacaggtacgttcagtttgcaaaaataaatctattagtacagttacgctatatgtactttctgtgtatgttcaataaaatgt

SEQ ID NO: 255418 - DNA, 344 bp, Homo sapiens
  misc_feature (66)..(66): n is a, c, g, or t
cagttgcttatcccccttgttgaggcggaacttggacttgcgcaggtctcggaagcgcccatgggngcgtagtgaagtccaccacccagggcagcacggggtggtagttggggtccccctgccgccgacctgccaaccgattcagctgcatgaggtagtggaagttgctgatgcggccgtggacccaatctagcacgaggctccgaagttcctcctggccagtgggttgcccaggttgccctccctgctcctcttgagacacaatgcccgcctcatcccttgccacaggggcctcctcattctcgtcctcctcgggcctctcataagcactcaggtccagtcgc

SEQ ID NO: 255419 - DNA, 382 bp, Homo sapiens
tctcagaagaagagggctgttttattaatgggttatcattctcatcagtgaagttgtgaccactggtaaaagtctaactgctttctacaataaattcccagagaacatttaaaattattttctccaaataattgcactttaaacaatcaagaattgtgataggccaggcgcggtggctcacacctgtaatcccagcactttcggaggccaaggcaggcagatcatttgaggtcaggagttcgaaaccaggctggctaacatggtgaaaccccgactctactaaaaatacaaaaatgagccgggcatggtggcaggtgcctgtaatcccacctactcgggaggctgaggcaggagaatcgctggaacccgggaggcagaggtc

SEQ ID NO: 255420 - DNA, 460 bp, Homo sapiens
aacatgaacatggtgcagtttagctatcggaagtaatagcattcatactgggacttacttagttttctgcattcagaaagagcagggcatgaaaggaatgtcattgaagtttagaatacccatgtttgctattagcatgtgctctccccatccgaggcccctgagaatggtggtaaagccaggtagctagtcaggtaggcagcagccctgatttcgacagctctgggattttctctctcatcatcattccctgaaaccgtacattttgacacttagaactgtaactaggattttctttggttaaagttcaaagacattattttattccactcttgttttccagtagtgcttgatgtcatttctggcacctaagtgcttaataaatgttgaataaatgagtaaatgaataaatgaacaaattgaattgaagtaaataaagtatattattatcacctgtttc

SEQ ID NO: 255421 - DNA, 515 bp, Homo sapiens
agcaggcactgggcccggcaccctcatcctgctcacggcagcgctcggaccgcgcctggagtccctgcgccaagggcgtgtcccgacggctgcaccgcgagggcgggcatggggagggggaccggggagacggacgctgggatggggtcagcggcgccctgccgaatcccgagggccgagcacccctccctcagccgcactgcacctgcccgtaggtgaccaacccacgggcggacccccagacccaatcctctccagagccagggtgggatgggcagggacaggagccggaggccctactggccccgggcgaaggcatcctggaaagcatccagagcgtccagcatccctcccgcggccacccgcaggctgaccgacccctgggcagaccctcagactcaatccagtccagggcggattaaggagtgggagacaagggagccggtggccccgctggccccgggccggaggcgtccagccaagtccggagggccgagcatccctcccgcggccgc

SEQ ID NO: 255422 - DNA, 388 bp, Homo sapiens
ggcagcagcctgagatttcaaattggaacccctaggttggggtgtctgtgcgctgtgtgtggcgagtgcagaggggctgatgtgcctggaggaggagccctgctcctgctgaaaacagggccctcagctctcctgggactgctcaactgggctgagggcatgtgctccgcccatgtgggtcctgaggtctcgggggaggtggtgacagggacaggtggggctcagaaaccttgtcctctgggagaatgggctgcctaggcatttcactacagctgcctactacaaaccaaacaaggaaaaagaaggtaacagaaaaagatctgcaagctgaggtagagatgtgaacagtaatacagagatggccggaggatgagtgaaatatcatgaa

SEQ ID NO: 255423 - DNA, 792 bp, Homo sapiens
agaaaaagaaaaatcagtgtttagaaatgttgatagttattgaatctttgaattgaattttaaaaatccattctagtaatcagagtatactttttttatagaacaaggtggcaggtggggagccctttacccttctggtgaagttaaaccatagaagtttacaatttgcctttcacaaacattagcagtccgggcatggtggctgaagcctgtgatcccagcatgttgggaggccgagtgggaggattgcctgagcctaggagtttaaaccagcctgggcaccatggtgagaccccatctctattatttaaaatgtttcttaaataaaaaaaacacaaacattagcaactagttggctagccataattcctcccttgtttcgattgccagttagaagcaatttttatttcactggttatttgcaagagaaggggtaaaaaaacagcatcagagtgcaacactgaagtgagcttactttaatttgtaagtgaagctgttgctgaacgtgaccactatcgttgctgaaatataaaattatactcactgattgtaatggttgaaattttcctgaataatcattagccaaagatcaactctctaatggtgctaatggcaatctagctaatgtgcaaatttaggaagtcttcagtactaagtacataattttcaaataatattttttaattgtctactttggatgttagctatgtcttgtgagtataaattccaattttaagcactattttgatgcaaaaaaatgaataaaaaatttaatttatgaaaaaaaaaaaa

SEQ ID NO: 255424 - DNA, 546 bp, Homo sapiens
gaaataatattggccttggagcatgtggtatttgactgcaaaattctgatgcttgacatcaccacaatatattatttgactttgggcaaggtacttgcttcaacctcttcattcacaaatcgtaatacttgccatgaaggtttacgacaagaactgaataattatgcacatgttcatacacacactcacacactcatatgcatagtatctaatagtgtccatcttgcagttcgttcgcaatatatttccccacgttttagtgcacctaaatattcagctttgttaattcatgcaaagataaattgcagtgatatatgctaggcaaagtaatgactattccctttgattctgaaaaccaattctgtcctctgaaaaattttaaattgagatgctttgtgtcacttctgaaaagaggctagtgcaaaactgctaactctcctctataccaactatcagcagttgacaaaaacagaacgacttgtttggcatctcaatataatttaaatattgaaagtgccagtaatctaattgtcaatgttagccaaa

SEQ ID NO: 255425 - DNA, 443 bp, Homo sapiens
gtctctgtcaccaataacactgggagccttcagcaagttgcctataatctcttatgcatttctatttataggtagactggaataaatattactgccttaaatttttaaaggaaaatatatatttttttattcttcagtgtttttctatacattggcaggaacaggatgaatataagagtttgctaaatgctgagtgcagtggctcacaccattaatcccagcattttgggaggccaagaaaggtaaataacttgaggccaggagttcaagaggaacctggccaacatggtgaaaccccatctctactaaaaatacaaaatatagccaggcgtggtggcacacacctgtaataccaactgcttgggaggttgagatgtgagacttgtttgaacctgggacatggaggctgcagtgagccaagattgctccactgcactccagcc

SEQ ID NO: 255426 - DNA, 423 bp, Homo sapiens
ggacatcccggggttgcggggcccggactggggtgggggtcgccggaccgggggtcaccgacgctgggccactggagggggacggtatcggcccgggcccgccaatgtcgtcctgccgatccactcccgggtgggacgggagaggaggagggcgccccagcccctgcttccctacagacgacctctccaaaaagttgtgggcgcttgtcccctccgtgcaccccactttctgccctgtcttctctccctttgttcgggatgttgagctcatggggctctgctggggcgggctggcaccttggctgtagcccaggcccgtgcgcctgccagaacgtggggtgcagtgtggcaaccccggcccgaggccccacatgtctagagcaggacctgcacccctgccaggtcctggacaagggagggagg

SEQ ID NO: 255427 - DNA, 313 bp, Homo sapiens
gggattacaggcatgcaccaccacgcccagcttattttgtatttttagtagagacggggtttctccgtgttggtcaggctggtctcaaactcctgacctcaggcaatctgcccacctcagcctcccaaagtgctgggattacaggcgtgagccactgcacccggctcaccactagtttttagccctttttgttgggggtggggtgggggcagaggagaggcggatacagaaacttgtgagaatgtgatgaacgctctgaaccccctataaaaaatgtgcatgtaaatatatactctcaacatttaaaagattt

SEQ ID NO: 255428 - DNA, 829 bp, Homo sapiens
ttctctttaaagagaagaacttttttattattatttttatctccaactgcaggtggtgtcttttgccaaggtctctgtatttttctttcagttgtctttgggaggggatgttaagtcaaatcactaaaacagggttctctttggattaaaagttctggatttattgcaactattttccttgagaaacattctcagcatcaggattgataaacaaatgtagatgattaaaataggataattggttttagataatatcttctactgccaaacttctggcaaatttacctgtgaatttcaaaatgttataaaatctcttgatatgcttttgtttttccttttagccattttctcttcaatttcttagtccctctgccctctgtaaatgtgttgagtgatatagctatcagatgtattgaaggcaaagttctcgcagaggtctctgttccagctctgtaaaggtcacaggaatcgtgaaggagctgagaaatcttcctctccggcccactgtctgtggcccattgtcattgtttcctcatgaaacattgcagagtttgaatcctcagtaactctcattgactggattagaggtgatggccacagcaaatgggagagcaaaatgttggcctacagagaatgacacaattttattcgcctttggtgttagttgccatagtgctgtatttgaaaatcgatgctttagccaaaagctgaatgaccaccgtttccgtagtttccactgttttgtctgcatagaattttcctgaactacaagcaaaaatgtattttgtccaatgtcacaaaagtgaaaatgttactaatcttagatgtg

SEQ ID NO: 255429 - DNA, 393 bp, Homo sapiens
ttatggagttattgaggaaaacgttttgttttgattcctaatagtataactgaaatggagcataagagacgggagttagcttgtatattgaacaaggtcatcaaaaccttgtcatccgttactatcttcccaatcactgatttgtttttaaattgctccgtcctaagttgttacatcactgtccaatagagcagcaacaagcctcacaggctactaggcacttgaaatgcaactaggctacattgagatgtgctgaaagtataaaatacccatcaggtttgaagacttaaaggacaaaagaacagaaactgtatcattaacatgtttcatatcgattatattttaaacaattttaaaatataatgagttaaataaaatattaaaattaattgc

SEQ ID NO: 255430 - DNA, 377 bp, Homo sapiens
agagtcacctctgctgcatggctttattttaaaggaatttgtctcttgggagttttcaggaaaaaattacccttgcaagctggttttcttcaaaaggcattctttgctcaatgttctttccttctacacatcacacgaattcctacttcttggccttggtagtctactgtactccactttaattccttccctatatttcttctgccattttatcacagcctgattctgttgctgggtcctctgtgaagtcttttgtaataattacacctacatcaacctttctcttttgtaaacttctattgtctgttccttagacttttatttatattttttgaggtataattgatgtataataaagtacctatttaaagtgtaaa

SEQ ID NO: 255431 - DNA, 294 bp, Homo sapiens
actgtgtggtatacacacaagaacacaactactggagtcatacacaacttggtttgaaacatactctacgacaaaactgttgtgtggtgttaagcaaattaatgtctctgaattccagttttcttatttctaaaatagtggtgattctaatgcctagttcacaatgtgttttgagaattacatagtctggaaaagttgaaagtgttgtccattgttaaatggagatgatgttctttagtcattcaacaaatgtttgctaagtatctcctatgttgtagtcaacagaaactgata

SEQ ID NO: 255432 - DNA, 459 bp, Homo sapiens
agtgactagaaagtgatggcccaaagaccgagagagaaggagagctcaagcagtcttattgggcttgtgagatgaaactcggaattcatgggccaccaagcagaaagaaccccgataaccatcccaggccttccattgggatccccaaagggctacagcctggaactggaggttgaaccagaatttgactcatctcaaagacagaagcccaactgtgaatctgttcaatctctaattagattaaagtgatatgcccatattctaaaagtgatacgtcacttccagaggcaatgggaagtcctctagagaaaggtcaccatcagcaacgtcaaattatctctgtttcttgtatacatgtccagcaatccattaaaaaccaaccaaacgaagcaggcaagccaggagataagaccaaatgaccaaaaaggagaaaaaacaaagaacagaaatagatccaca

SEQ ID NO: 255433 - DNA, 819 bp, Homo sapiens
ctcacctggccttcttaaaggaaaagggaaggagaaccataggccatggtgagggaagggccgcggtcgggctgccctaccccagggcctgtgggctggtcccctacagagcttgctaaagaaagaggaagttcccgtcctctggagggacaaaagtgtgagcactgcggggagggggtaggttcctcaggctctttgtccaaaatgtgggccttaactggtggaattgtgagcagtagatgagatcatcgagtgaaaggcacttccatcagcacctggctcacagtcagtgttcaatgcaggatttttgaaaaccataaaatgttggtggttcctgtcctgtcctctagggtttgggtgaggaggcaggtgtgagggagagtcttggggtgaagaggtttgagccttctcctgctctgtccgtggagcaagtcaaataaatgctgagaccgtcagctcctcatttctccttgaccagcaatctgatgttcccttgggttgagggttttgttttcttggtccatcagcagtttcatattgaaaagattacatttctgaaaacattgtccaaacggaaattccctctgtgggataaagcaagactcacattacttactgctaattgtggcgtgaaggtcaagatcagaaatggccattttgaggaagcgtgtgctccccccacagcagctcctggcccgggggcatgagcatggctgagggtgtggagtcttcccctaggttaggaatgggagaaaacagggtctccacttgcaaagaggtgtccacagttccagaggcaaatgctgttaataaaaattc

SEQ ID NO: 255434 - DNA, 1508 bp, Homo sapiens
acttccccgggagccggagagtcccgtctcacggttgccctggcagcgcgcgaggctggtgagtcggcagccctgtggcagccggcgggctggtttccatggttgcacgattaggaaccaccagctgctgcatcccatggccaggggtggcgtccaggtggcagagcagctaggaacgcaaggcctgaacctggggccagacaccctgctctcccggccatggtcaacgaccctccagtacctgccttactgtgggcccaggaggtgggccaagtcttggcaggccgtgcccgcaggctgctgctgcagtttggggtgctcttctgcaccatcctccttttgctctgggtgtctgtcttcctctatggctccttctactattcctatatgccgacagtcagccacctcagccctgtgcatttctactacaggaccgactgtgattcctccaccacctcactctgctccttccctgttgccaatgtctcgctgactaagggtggacgtgatcgggtgctgatgtatggacagccgtatcgtgttaccttagagcttgagctgccagagtcccctgtgaatcaagatttgggcatgttcttggtcaccatttcctgctacaccagaggtggccgaatcatctccacttcttcgcgttcggtgatgctgcattaccgctcagacctgctccagatgctggacacactggtcttctctagcctcctgctatttggctttgcagagcagaagcagctgctggaggtggaactctacgcagactatagagagaactcgtacgtgccgaccactggagcgatcattgagatccacagcaagcgcatccagctgtatggagcctacctccgcatccacgcgcacttcactgggctcagatacctgctatacaacttcccgatgacctgcgccttcataggtgttgccagcaacttcaccttcctcagcgtcatcgtgctcttcagctacatgcagtgggtgtgggggggcatctggccccgacaccgcttctctttgcaggttaacatccgaaaaagagacaattcccggaaggaagtccaacgaaggatctctgctcatcagccagggcctgaaggccaggaggagtcaactccgcaatcagatgttacagaggatggtgagagccctgaagatccctcagggacagagggtcagctgtccgaggaggagaaaccagatcagcagcccctgagcggagaagaggagctagagcctgaggccagtgatggttcaggctcctgggaagatgcagctttgctgacggaggccaacctgcctgctcctgctcctgcttctgcttctgcccctgtcctagagactctgggcagctctgaacctgctgggggtgctctccgacagcgccccacctgctctagttcctgaagaaaaggggcagactcctcacattccagcactttcccacctgactcctctcccctcgtttttccttcaataaactattttgtgtcagcttc

SEQ ID NO: 255435 - DNA, 1994 bp, Homo sapiens
agcggccttaccctcctaagagttcctctgctgtacgactgcactcccgcaccctcccctaaatcccccctcttcggcctgtttaccttttaacttggcttcgttgcacgtttgtgtgtgtgtgtttgctcttcgcagcctcttgagcgtcttttgtacttaattcttacactgtggacgctctctcgcgcccgccatcccccgacccctctgatctccgatccttgacgatgtctagcctgcattgattggcccttttccctgggtatggcagatctattgcttgatgatcctctccccccaagaattctaacacaggagctgtcctgaggctctggatgactttattcttcaaatggctttaccctcccagtagctccagagggaccctccattttccatatccaggaaaatgtgatgcgccacaggtatcagcgtctggatcgccacttcacgttttagccacaagtgactcagtggaagatccagagtcaacagaggctcgtcaggaagatgtctacagaaaaggtagaccaaaaggaggaagctggggaaaaagaggtgtgcggagaccagatcaaaggaccggacaaagaggaggaaccaccagctgctgcatcccatggccaggggtggcgtccaggtggcagagcagctaggaacgcaaggcctgaacctggggccagacaccctgctctcccggccatggtcaacgaccctccagtacctgccttactgtgggcccaggaggtgggccaagtcttggcaggccgtgcccgcaggctgctgctgcagtttggggtgctcttctgcaccatcctccttttgctctgggtgtctgtcttcctctatggctccttctactattcctatatgccgacagtcagccacctcagccctgtgcatttctactacaggaccgactgtgattcctccaccacctcactctgctccttccctgttgccaatgtctcgctgactaagggtggacgtgatcgggtgctgatgtatggacagccgtatcgtgttaccttagagcttgagctgccagagtcccctgtgaatcaagatttgggcatgttcttggtcaccatttcctgctacaccagaggtggccgaatcatctccacttcttcgcgttcggtgatgctgcattaccgctcagacctgctccagatgctggacacactggtcttctctagcctcctgctatttggctttgcagagcagaagcagctgctggaggtggaactctacgcagactatagagagaactcgtacgtgccgaccactggagcgatcattgagatccacagcaagcgcatccagctgtatggagcctacctccgcatccacgcgcacttcactgggctcagatacctgctatacaacttcccgatgacctgcgccttcataggtgttgccagcaacttcaccttcctcagcgtcatcgtgctcttcagctacatgcagtgggtgtgggggggcatctggccccgacaccgcttctctttgcaggttaacatccgaaaaagagacaattcccggaaggaagtccaacgaaggatctctgctcatcagccagggcctgaaggccaggaggagtcaactccgcaatcagatgttacagaggatggtgagagccctgaagatccctcagggacagagggtcagctgtccgaggaggagaaaccagatcagcagcccctgagcggagaagaggagctagagcctgaggccagtgatggttcaggctcctgggaagatgcagctttgctgacggaggccaacctgcctgctcctgctcctgcttctgcttctgcccctgtcctagagactctgggcagctctgaacctgctgggggtgctctccgacagcgccccacctgctctagttcctgaagaaaaggggcagactcctcacattccagcactttcccacctgactcctctcccctcgtttttccttcaataaactattttgtgtcagcttc

SEQ ID NO: 255436 - DNA, 1529 bp, Homo sapiens
acttccccgggagccggagagtcccgtctcacggttgccctggcagcgcgcgaggctggtgagtcggcagccctgtggcagccggcgggctggtttccatggttgcacgattaggaaccaccagctgctgcatcccatggccaggggtggcgtccaggtggcagagcagctaggaacgcaaggcctgaacctggggccagacaccctgctctcccggccatggtcaacgaccctccagtacctgccttactgtgggcccaggaggtgggccaagtcttggcaggccgtgcccgcaggctgctgctgcagtttggggtgctcttctgcaccatcctccttttgctctgggtgtctgtcttcctctatggctccttctactattcctatatgccgacagtcagccacctcagccctgtgcatttctactacaggaccgactgtgattcctccaccacctcactctgctccttccctgttgccaatgtctcgctgactaagggtggacgtgatcgggtgctgatgtatggacagccgtatcgtgttaccttagagcttgagctgccagagtcccctgtgaatcaagatttgggcatgttcttggtcaccatttcctgctacaccagaggtggccgaatcatctccacttcttcgcgttcggtgatgctgcattaccgctcagacctgctccagatgctggacacactggtcttctctagcctcctgctatttggctttgcagagcagaagcagctgctggaggtggaactctacgcagactatagagagaactcgtacgtgccgaccactggagcgatcattgagatccacagcaagcgcatccagctgtatggagcctacctccgcatccacgcgcacttcactgggctcagatacctgctatacaacttcccgatgacctgcgccttcataggtgttgccagcaacttcaccttcctcagcgtcatcgtgctcttcagctacatgcagtgggtgtgggggggcatctggccccgacaccgcttctctttgcaggttaacatccgaaaaagagacaattcccggaaggaagtccaacgaaggatctctgctcatcagccagggcctgaaggccaggaggagtcaactccgcaatcagatgttacagaggatggtgagagccctgaagatccctcagggacagagggtcagctgtccgaggaggagaaaccagatcagcagcccctgagcggagaagaggagctagagcctgaggccagtgatggttcaggctcctgggaagatgcagctttgctgacggaggccaacctgcctgctcctgctcctgcttctgcttctgcccctgtcctagagactctgggcagctctgaacctgctgggggtgctctccgacagcgccccacctgctctagttcctgaagaaaaggggcagactcctcacattccagcactttcccacctgactcctctcccctcgtttttccttcaataaactattttgtgtcagcttcttcttccttgactctgaaatg

SEQ ID NO: 255437 - DNA, 1366 bp, Homo sapiens
acttccccgggagccggagagtcccgtctcacggttgccctggcagcgcgcgaggctggtgagtcggcagccctgtggcagccggcgggctggtttccatggttgcacgattaggaaccaccagctgctgcatcccatggccaggggtggcgtccaggtggcagagcagctaggaacgcaaggcctgaacctggggccagacaccctgctctcccggccatggtcaacgaccctccagtacctgccttactgtgggcccaggaggtgggccaagtcttggcaggccgtgcccgcaggctgctgctgcagtttggggtgctcttctgcaccatcctccttttgctctgggtgtctgtcttcctctatggctccttctactattcctatatgccgacagtcagccacctcagccctgtgcatttctactacaggaccgactgtgattcctccaccacctcactctgctccttccctgttgccaatgtctcgctgactaagggtggacgtgatcgggtgctgatgtatggacagccgtatcgtgttaccttagagcttgagctgccagagtcccctgtgaatcaagatttgggcatgttcttggtcaccatttcctgctacaccagaggtggccgaatcatctccacttcttcgcgttcggtgatgctgcattaccgctcagacctgctccagatgctggacacactggtcttctctagcctcctgctatttggctttgcagagcagaagcagctgctggaggtggaactctacgcagactatagagagaactcgtacgtgccgaccactggagcgatcattgagatccacagcaagcgcatccagctgtatggagcctacctccgcatccacgcgcacttcactgggctcaggttaacatccgaaaaagagacaattcccggaaggaagtccaacgaaggatctctgctcatcagccagggcctgaaggccaggaggagtcaactccgcaatcagatgttacagaggatggtgagagccctgaagatccctcagggacagagggtcagctgtccgaggaggagaaaccagatcagcagcccctgagcggagaagaggagctagagcctgaggccagtgatggttcaggctcctgggaagatgcagctttgctgacggaggccaacctgcctgctcctgctcctgcttctgcttctgcccctgtcctagagactctgggcagctctgaacctgctgggggtgctctccgacagcgccccacctgctctagttcctgaagaaaaggggcagactcctcacattccagcactttcccacctgactcctctcccctcgtttttccttcaataaactattttgtgtcagcttc

SEQ ID NO: 255438 - DNA, 586 bp, Homo sapiens
acttccccgggagccggagagtcccgtctcacggttgccctggcagcgcgcgaggctggaaccaccagctgctgcatcccatggccaggggtggcgtccaggtggcagagcagctaggaacgcaaggcctgaacctggggccagacaccctgctctcccggccatggtcaacgaccctccagtacctgccttactgtgggcccaggaggtgggccaagtcttggcaggccgtgcccgcaggctgctgctgcagtttggggtgctcttctgcaccatcctccttttgctctgggtgtctgtcttcctctatggctccttctactattcctatatgccgacagtcagccacctcagccctgtgcatttctactacagggtgagaggggccttctatcaaaatagaggactcctatgggaattgtaaggcccttggagttcattcagttcaatcccctcatttacagataaggaaaactggagccaggtgtgcttccagggcctctcaactttcacagcccaaggctagatttgggttgccagggctagggttctagttctacctctgattactgaattctggttaaaa

SEQ ID NO: 255439 - DNA, 622 bp, Homo sapiens
gggtgtcaacatggaactctggcttttctttgccccttcaggtgggggttgagtggtctctttgccttccgtccccactgcttttccttggacacctttagtccgacacaagctggcttcaatcttaagctgttccaccatcttgcgtgcttgcccaatactcatagtgctgtcctgaggctctggatgactttattcttcaaatggctttaccctcccagtagctccaggtgagactgagagcaagaacctggcccatccctctccattgtctgagcaggtcaccgagggaagcgggcaggacgcgctggcagagtctgacggggccctgctgtgggtggagcaaagggtgcctcatatctctggggtgcttggggtcggccacaaaggtggtaggaaatggggtcgacagataggtgagggtgggccttgtgcttcagataacctcacatggtcaggcaagggttagggatgggatgcaaggagcctaaggggctcacaacaattactgacctaaggaagggcccaggagagggaaaagggaggagttgtgagaagggacaggggagctcagaggagagcacagaagaacttcttctcccggaaggggttctccgaagtg

SEQ ID NO: 255440 - DNA, 2003 bp, Homo sapiens
tgtctggatggctggtacctgaaggatgaaggatgctagaaggagctgctcagatcctggagcataccaactgcctggccagtgggggagcctagctgcctgcatccctgcgcacacccccactgtcgctagttcactgcctgcccctcccccattgcaggcatcctgactctgggctagagacctccccaacagagctgaggccaaggccgactccccctctcaaatggcgtggtctgggcctatgacggcccctgcagtggagtctgtactggctgcgggggaccctgctcatttgaaaatctgacatcagctgggcagtcgcccccctcctcctttcctccctctactctgacacagcacttagcacctgaatcttcgtttctctcccagggaccctccattttccatatccaggaaaatgtgatgcgccacaggtatcagcgtctggatcgccacttcacgttttagccacaagtgactcagtggaagatccagagtcaacagaggctcgtcaggaagatgtctacagaaaaggtagaccaaaaggaggaagctggggaaaaagaggtgtgcggagaccagatcaaaggaccggacaaagaggaggaaccaccagctgctgcatcccatggccaggggtggcgtccaggtggcagagcagctaggaacgcaaggcctgaacctggggccagacaccctgctctcccggccatggtcaacgaccctccagtacctgccttactgtgggcccaggaggtgggccaagtcttggcaggccgtgcccgcaggctgctgctgcagtttggggtgctcttctgcaccatcctccttttgctctgggtgtctgtcttcctctatggctccttctactattcctatatgccgacagtcagccacctcagccctgtgcatttctactacaggaccgactgtgattcctccaccacctcactctgctccttccctgttgccaatgtctcgctgactaagggtggacgtgatcgggtgctgatgtatggacagccgtatcgtgttaccttagagcttgagctgccagagtcccctgtgaatcaagatttgggcatgttcttggtcaccatttcctgctacaccagaggtggccgaatcatctccacttcttcgcgttcggtgatgctgcattaccgctcagacctgctccagatgctggacacactggtcttctctagcctcctgctatttggctttgcagagcagaagcagctgctggaggtggaactctacgcagactatagagagaactcgtacgtgccgaccactggagcgatcattgagatccacagcaagcgcatccagctgtatggagcctacctccgcatccacgcgcacttcactgggctcagatacctgctatacaacttcccgatgacctgcgccttcataggtgttgccagcaacttcaccttcctcagcgtcatcgtgctcttcagctacatgcagtgggtgtgggggggcatctggccccgacaccgcttctctttgcaggttaacatccgaaaaagagacaattcccggaaggaagtccaacgaaggatctctgctcatcagccagggcctgaaggccaggaggagtcaactccgcaatcagatgttacagaggatggtgagagccctgaagatccctcagggacagagggtcagctgtccgaggaggagaaaccagatcagcagcccctgagcggagaagaggagctagagcctgaggccagtgatggttcaggctcctgggaagatgcagctttgctgacggaggccaacctgcctgctcctgctcctgcttctgcttctgcccctgtcctagagactctgggcagctctgaacctgctgggggtgctctccgacagcgccccacctgctctagttcctgaagaaaaggggcagactcctcacattccagcactttcccacctgactcctctcccctcgtttttccttcaataaactattttgtgtcagcttc

SEQ ID NO: 255441 - DNA, 1665 bp, Homo sapiens
agcggggtacggccatcttggaatgggagtggctgtgggcgcagccatcttagagggaccctccattttccatatccaggaaaatgtgatgcgccacaggtatcagcgtctggatcgccacttcacgttttagccacaagtgactcagtggaagatccagagtcaacagaggctcgtcaggaagatgtctacagaaaaggtagaccaaaaggaggaagctggggaaaaagaggtgtgcggagaccagatcaaaggaccggacaaagaggaggaaccaccagctgctgcatcccatggccaggggtggcgtccaggtggcagagcagctaggaacgcaaggcctgaacctggggccagacaccctgctctcccggccatggtcaacgaccctccagtacctgccttactgtgggcccaggaggtgggccaagtcttggcaggccgtgcccgcaggctgctgctgcagtttggggtgctcttctgcaccatcctccttttgctctgggtgtctgtcttcctctatggctccttctactattcctatatgccgacagtcagccacctcagccctgtgcatttctactacaggaccgactgtgattcctccaccacctcactctgctccttccctgttgccaatgtctcgctgactaagggtggacgtgatcgggtgctgatgtatggacagccgtatcgtgttaccttagagcttgagctgccagagtcccctgtgaatcaagatttgggcatgttcttggtcaccatttcctgctacaccagaggtggccgaatcatctccacttcttcgcgttcggtgatgctgcattaccgctcagacctgctccagatgctggacacactggtcttctctagcctcctgctatttggctttgcagagcagaagcagctgctggaggtggaactctacgcagactatagagagaactcgtacgtgccgaccactggagcgatcattgagatccacagcaagcgcatccagctgtatggagcctacctccgcatccacgcgcacttcactgggctcagatacctgctatacaacttcccgatgacctgcgccttcataggtgttgccagcaacttcaccttcctcagcgtcatcgtgctcttcagctacatgcagtgggtgtgggggggcatctggccccgacaccgcttctctttgcaggttaacatccgaaaaagagacaattcccggaaggaagtccaacgaaggatctctgctcatcagccagggcctgaaggccaggaggagtcaactccgcaatcagatgttacagaggatggtgagagccctgaagatccctcagggacagagggtcagctgtccgaggaggagaaaccagatcagcagcccctgagcggagaagaggagctagagcctgaggccagtgatggttcaggctcctgggaagatgcagctttgctgacggaggccaacctgcctgctcctgctcctgcttctgcttctgcccctgtcctagagactctgggcagctctgaacctgctgggggtgctctccgacagcgccccacctgctctagttcctgaagaaaaggggcagactcctcacattccagcactttcccacctgactcctctcccctcgtttttccttcaataaactattttgtgtcagcttc

SEQ ID NO: 255442 - DNA, 1644 bp, Homo sapiens
agcgggtggtcgcagccatcttagtagctccaagggaccctccattttccatatccaggaaaatgtgatgcgccacaggtatcagcgtctggatcgccacttcacgttttagccacaagtgactcagtggaagatccagagtcaacagaggctcgtcaggaagatgtctacagaaaaggtagaccaaaaggaggaagctggggaaaaagaggtgtgcggagaccagatcaaaggaccggacaaagaggaggaaccaccagctgctgcatcccatggccaggggtggcgtccaggtggcagagcagctaggaacgcaaggcctgaacctggggccagacaccctgctctcccggccatggtcaacgaccctccagtacctgccttactgtgggcccaggaggtgggccaagtcttggcaggccgtgcccgcaggctgctgctgcagtttggggtgctcttctgcaccatcctccttttgctctgggtgtctgtcttcctctatggctccttctactattcctatatgccgacagtcagccacctcagccctgtgcatttctactacaggaccgactgtgattcctccaccacctcactctgctccttccctgttgccaatgtctcgctgactaagggtggacgtgatcgggtgctgatgtatggacagccgtatcgtgttaccttagagcttgagctgccagagtcccctgtgaatcaagatttgggcatgttcttggtcaccatttcctgctacaccagaggtggccgaatcatctccacttcttcgcgttcggtgatgctgcattaccgctcagacctgctccagatgctggacacactggtcttctctagcctcctgctatttggctttgcagagcagaagcagctgctggaggtggaactctacgcagactatagagagaactcgtacgtgccgaccactggagcgatcattgagatccacagcaagcgcatccagctgtatggagcctacctccgcatccacgcgcacttcactgggctcagatacctgctatacaacttcccgatgacctgcgccttcataggtgttgccagcaacttcaccttcctcagcgtcatcgtgctcttcagctacatgcagtgggtgtgggggggcatctggccccgacaccgcttctctttgcaggttaacatccgaaaaagagacaattcccggaaggaagtccaacgaaggatctctgctcatcagccagggcctgaaggccaggaggagtcaactccgcaatcagatgttacagaggatggtgagagccctgaagatccctcagggacagagggtcagctgtccgaggaggagaaaccagatcagcagcccctgagcggagaagaggagctagagcctgaggccagtgatggttcaggctcctgggaagatgcagctttgctgacggaggccaacctgcctgctcctgctcctgcttctgcttctgcccctgtcctagagactctgggcagctctgaacctgctgggggtgctctccgacagcgccccacctgctctagttcctgaagaaaaggggcagactcctcacattccagcactttcccacctgactcctctcccctcgtttttccttcaataaactattttgtgtcagcttc

SEQ ID NO: 255443 - DNA, 1644 bp, Homo sapiens
aagcaggctggtaccggcccgcgagttaggcaagggaccctccattttccatatccaggaaaatgtgatgcgccacaggtatcagcgtctggatcgccacttcacgttttagccacaagtgactcagtggaagatccagagtcaacagaggctcgtcaggaagatgtctacagaaaaggtagaccaaaaggaggaagctggggaaaaagaggtgtgcggagaccagatcaaaggaccggacaaagaggaggaaccaccagctgctgcatcccatggccaggggtggcgtccaggtggcagagcagctaggaacgcaaggcctgaacctggggccagacaccctgctctcccggccatggtcaacgaccctccagtacctgccttactgtgggcccaggaggtgggccaagtcttggcaggccgtgcccgcaggctgctgctgcagtttggggtgctcttctgcaccatcctccttttgctctgggtgtctgtcttcctctatggctccttctactattcctatatgccgacagtcagccacctcagccctgtgcatttctactacaggaccgactgtgattcctccaccacctcactctgctccttccctgttgccaatgtctcgctgactaagggtggacgtgatcgggtgctgatgtatggacagccgtatcgtgttaccttagagcttgagctgccagagtcccctgtgaatcaagatttgggcatgttcttggtcaccatttcctgctacaccagaggtggccgaatcatctccacttcttcgcgttcggtgatgctgcattaccgctcagacctgctccagatgctggacacactggtcttctctagcctcctgctatttggctttgcagagcagaagcagctgctggaggtggaactctacgcagactatagagagaactcgtacgtgccgaccactggagcgatcattgagatccacagcaagcgcatccagctgtatggagcctacctccgcatccacgcgcacttcactgggctcagatacctgctatacaacttcccgatgacctgcgccttcataggtgttgccagcaacttcaccttcctcagcgtcatcgtgctcttcagctacatgcagtgggtgtgggggggcatctggccccgacaccgcttctctttgcaggttaacatccgaaaaagagacaattcccggaaggaagtccaacgaaggatctctgctcatcagccagggcctgaaggccaggaggagtcaactccgcaatcagatgttacagaggatggtgagagccctgaagatccctcagggacagagggtcagctgtccgaggaggagaaaccagatcagcagcccctgagcggagaagaggagctagagcctgaggccagtgatggttcaggctcctgggaagatgcagctttgctgacggaggccaacctgcctgctcctgctcctgcttctgcttctgcccctgtcctagagactctgggcagctctgaacctgctgggggtgctctccgacagcgccccacctgctctagttcctgaagaaaaggggcagactcctcacattccagcactttcccacctgactcctctcccctcgtttttccttcaataaactattttgtgtcagcttc

SEQ ID NO: 255444 - DNA, 1795 bp, Homo sapiens
acttccccgggagccggagagtcccgtctcacggttgccctggcagcgcgcgaggctggtgagtcggcagccctgtggcagccggcgggctggtttccatggttgcacgattaggtaggggctccgggcgctttgcccacccccgagctggaggggactggcgggaagcggcggttggctgcagggcgctccgccgggcgtggggtgtagccgtgtcggtgagcgagctctgctcgaggcggagaggagaaactcgggaagcaattgtggctactctaaggctactggtttcgagtcaggccgtgcgaccttaggcaagtcgcacattctctccgtgcagctgcctagcagtgtggattcagtatcaccgtgtgtgtaaagctctttctaagaatcgtaaggaaccaccagctgctgcatcccatggccaggggtggcgtccaggtggcagagcagctaggaacgcaaggcctgaacctggggccagacaccctgctctcccggccatggtcaacgaccctccagtacctgccttactgtgggcccaggaggtgggccaagtcttggcaggccgtgcccgcaggctgctgctgcagtttggggtgctcttctgcaccatcctccttttgctctgggtgtctgtcttcctctatggctccttctactattcctatatgccgacagtcagccacctcagccctgtgcatttctactacaggaccgactgtgattcctccaccacctcactctgctccttccctgttgccaatgtctcgctgactaagggtggacgtgatcgggtgctgatgtatggacagccgtatcgtgttaccttagagcttgagctgccagagtcccctgtgaatcaagatttgggcatgttcttggtcaccatttcctgctacaccagaggtggccgaatcatctccacttcttcgcgttcggtgatgctgcattaccgctcagacctgctccagatgctggacacactggtcttctctagcctcctgctatttggctttgcagagcagaagcagctgctggaggtggaactctacgcagactatagagagaactcgtacgtgccgaccactggagcgatcattgagatccacagcaagcgcatccagctgtatggagcctacctccgcatccacgcgcacttcactgggctcagatacctgctatacaacttcccgatgacctgcgccttcataggtgttgccagcaacttcaccttcctcagcgtcatcgtgctcttcagctacatgcagtgggtgtgggggggcatctggccccgacaccgcttctctttgcaggttaacatccgaaaaagagacaattcccggaaggaagtccaacgaaggatctctgctcatcagccagggcctgaaggccaggaggagtcaactccgcaatcagatgttacagaggatggtgagagccctgaagatccctcagggacagagggtcagctgtccgaggaggagaaaccagatcagcagcccctgagcggagaagaggagctagagcctgaggccagtgatggttcaggctcctgggaagatgcagctttgctgacggaggccaacctgcctgctcctgctcctgcttctgcttctgcccctgtcctagagactctgggcagctctgaacctgctgggggtgctctccgacagcgccccacctgctctagttcctgaagaaaaggggcagactcctcacattccagcactttcccacctgactcctctcccctcgtttttccttcaataaactattttgtgtcagcttc

SEQ ID NO: 255445 - DNA, 2386 bp, Homo sapiens
  misc_feature (2017)..(2017): n is a, c, g, or t
tgtctggatggctggtacctgaaggatgaaggatgctagaaggagctgctcagatcctggagcataccaactgcctggccagtgggggagcctagctgcctgcatccctgcgcacacccccactgtcgctagttcactgcctgcccctcccccattgcaggcatcctgactctgggctagagacctccccaacagagctgaggccaaggccgactccccctctcaaatggcgtggtctgggcctatgacggcccctgcagtggagtctgtactggctgcgggggaccctgctcatttgaaaatctgacatcagctgggcagtcgcccccctcctcctttcctccctctactctgacacagcacttagcacctgaatcttcgtttctctcccagggaccctccattttccatatccaggaaaatgtgatgcgccacaggtatcagcgtctggatcgccacttcacgttttagccacaagtgactcagtggaagatccagagtcaacagaggctcgtcaggaagatgtctacagaaaaggtagaccaaaaggaggaagctggggaaaaagaggtgtgcggagaccagatcaaaggaccggacaaagaggaggaaccaccagctgctgcatcccatggccaggggtggcgtccaggtggcagagcagctaggaacgcaaggcctgaacctggggccagacaccctgctctcccggccatggtcaacgaccctccagtacctgccttactgtgggcccaggaggtgggccaagtcttggcaggccgtgcccgcaggctgctgctgcagtttggggtgctcttctgcaccatcctccttttgctctgggtgtctgtcttcctctatggctccttctactattcctatatgccgacagtcagccacctcagccctgtgcatttctactacaggaccgactgtgattcctccaccacctcactctgctccttccctgttgccaatgtctcgctgactaagggtggacgtgatcgggtgctgatgtatggacagccgtatcgtgttaccttagagcttgagctgccagagtcccctgtgaatcaagatttgggcatgttcttggtcaccatttcctgctacaccagaggtggccgaatcatctccacttcttcgcgttcggtgatgctgcattaccgctcagacctgctccagatgctggacacactggtcttctctagcctcctgctatttggctttgcagagcagaagcagctgctggaggtggaactctacgcagactatagagagaactcgtacgtgccgaccactggagcgatcattgagatccacagcaagcgcatccagctgtatggagcctacctccgcatccacgcgcacttcactgggctcagatacctgctatacaacttcccgatgacctgcgccttcataggtgttgccagcaacttcaccttcctcagcgtcatcgtgctcttcagctacatgcagtgggtgtgggggggcatctggccccgacaccgcttctctttgcaggttaacatccgaaaaagagacaattcccggaaggaagtccaacgaaggatctctgctcatcagccagggcctgaaggccaggaggagtcaactccgcaatcagatgttacagaggatggtgagagccctgaagatccctcagggacagagggtcagctgtccgaggaggagaaaccagatcagcagcccctgagcggagaagaggagctagagcctgaggccagtgatggttcaggctcctgggaagatgcagctttgctgacggaggccaacctgcctgctcctgctcctgcttctgcttctgcccctgtcctagagactctgggcagctctgaacctgctgggggtgctctccgacagcgccccacctgctctagttcctgaagaaaaggggcagactcctcacattccagcactttcccacctgactcctctcccctcgtttttccttcaataaactattttgtgtcagcttcaaaaaaaaaaaaanaaaaattacaaaaaaatactataaacacaataactatatataatcttactcaattctactcatattccttcaattattaatcatacttattcctcaaaaccctaacaaaaaaaaaaactctggggggggccccggtccaaatttcccttattggggtcgttttacaaataattgcccccttttaacaacgtgggattggaaaaacccgggggttcccaactttaatcccttgggaaaatacccccttttcacgtgtgggtaattccaaaaagcgccctccctattgcctcttcaaacaatggccacctttattggatattggaaatatgtagcgctataatttttgtaaaaatcgggaaaaatttttta

SEQ ID NO: 255446 - DNA, 1452 bp, Homo sapiens
acttccccgggagccggagagtcccgtctcacggttgccctggcagcgcgcgaggctggaaccaccagctgctgcatcccatggccaggggtggcgtccaggtggcagagcagctaggaacgcaaggcctgaacctggggccagacaccctgctctcccggccatggtcaacgaccctccagtacctgccttactgtgggcccaggaggtgggccaagtcttggcaggccgtgcccgcaggctgctgctgcagtttggggtgctcttctgcaccatcctccttttgctctgggtgtctgtcttcctctatggctccttctactattcctatatgccgacagtcagccacctcagccctgtgcatttctactacaggaccgactgtgattcctccaccacctcactctgctccttccctgttgccaatgtctcgctgactaagggtggacgtgatcgggtgctgatgtatggacagccgtatcgtgttaccttagagcttgagctgccagagtcccctgtgaatcaagatttgggcatgttcttggtcaccatttcctgctacaccagaggtggccgaatcatctccacttcttcgcgttcggtgatgctgcattaccgctcagacctgctccagatgctggacacactggtcttctctagcctcctgctatttggctttgcagagcagaagcagctgctggaggtggaactctacgcagactatagagagaactcgtacgtgccgaccactggagcgatcattgagatccacagcaagcgcatccagctgtatggagcctacctccgcatccacgcgcacttcactgggctcagatacctgctatacaacttcccgatgacctgcgccttcataggtgttgccagcaacttcaccttcctcagcgtcatcgtgctcttcagctacatgcagtgggtgtgggggggcatctggccccgacaccgcttctctttgcaggttaacatccgaaaaagagacaattcccggaaggaagtccaacgaaggatctctgctcatcagccagggcctgaaggccaggaggagtcaactccgcaatcagatgttacagaggatggtgagagccctgaagatccctcagggacagagggtcagctgtccgaggaggagaaaccagatcagcagcccctgagcggagaagaggagctagagcctgaggccagtgatggttcaggctcctgggaagatgcagctttgctgacggaggccaacctgcctgctcctgctcctgcttctgcttctgcccctgtcctagagactctgggcagctctgaacctgctgggggtgctctccgacagcgccccacctgctctagttcctgaagaaaaggggcagactcctcacattccagcactttcccacctgactcctctcccctcgtttttccttcaataaactattttgtgtcagcttc

SEQ ID NO: 255447 - DNA, 2024 bp, Homo sapiens
tgtctggatggctggtacctgaaggatgaaggatgctagaaggagctgctcagatcctggagcataccaactgcctggccagtgggggagcctagctgcctgcatccctgcgcacacccccactgtcgctagttcactgcctgcccctcccccattgcaggcatcctgactctgggctagagacctccccaacagagctgaggccaaggccgactccccctctcaaatggcgtggtctgggcctatgacggcccctgcagtggagtctgtactggctgcgggggaccctgctcatttgaaaatctgacatcagctgggcagtcgcccccctcctcctttcctccctctactctgacacagcacttagcacctgaatcttcgtttctctcccagggaccctccattttccatatccaggaaaatgtgatgcgccacaggtatcagcgtctggatcgccacttcacgttttagccacaagtgactcagtggaagatccagagtcaacagaggctcgtcaggaagatgtctacagaaaaggtagaccaaaaggaggaagctggggaaaaagaggtgtgcggagaccagatcaaaggaccggacaaagaggaggaaccaccagctgctgcatcccatggccaggggtggcgtccaggtggcagagcagctaggaacgcaaggcctgaacctggggccagacaccctgctctcccggccatggtcaacgaccctccagtacctgccttactgtgggcccaggaggtgggccaagtcttggcaggccgtgcccgcaggctgctgctgcagtttggggtgctcttctgcaccatcctccttttgctctgggtgtctgtcttcctctatggctccttctactattcctatatgccgacagtcagccacctcagccctgtgcatttctactacaggaccgactgtgattcctccaccacctcactctgctccttccctgttgccaatgtctcgctgactaagggtggacgtgatcgggtgctgatgtatggacagccgtatcgtgttaccttagagcttgagctgccagagtcccctgtgaatcaagatttgggcatgttcttggtcaccatttcctgctacaccagaggtggccgaatcatctccacttcttcgcgttcggtgatgctgcattaccgctcagacctgctccagatgctggacacactggtcttctctagcctcctgctatttggctttgcagagcagaagcagctgctggaggtggaactctacgcagactatagagagaactcgtacgtgccgaccactggagcgatcattgagatccacagcaagcgcatccagctgtatggagcctacctccgcatccacgcgcacttcactgggctcagatacctgctatacaacttcccgatgacctgcgccttcataggtgttgccagcaacttcaccttcctcagcgtcatcgtgctcttcagctacatgcagtgggtgtgggggggcatctggccccgacaccgcttctctttgcaggttaacatccgaaaaagagacaattcccggaaggaagtccaacgaaggatctctgctcatcagccagggcctgaaggccaggaggagtcaactccgcaatcagatgttacagaggatggtgagagccctgaagatccctcagggacagagggtcagctgtccgaggaggagaaaccagatcagcagcccctgagcggagaagaggagctagagcctgaggccagtgatggttcaggctcctgggaagatgcagctttgctgacggaggccaacctgcctgctcctgctcctgcttctgcttctgcccctgtcctagagactctgggcagctctgaacctgctgggggtgctctccgacagcgccccacctgctctagttcctgaagaaaaggggcagactcctcacattccagcactttcccacctgactcctctcccctcgtttttccttcaataaactattttgtgtcagcttcttcttccttgactctgaaatg

SEQ ID NO: 255448 - DNA, 1836 bp, Homo sapiens
tgtctggatggctggtacctgaaggatgaaggatgctagaaggagctgctcagatcctggagcataccaactgcctggccagtgggggagcctagctgcctgcatccctgcgcacacccccactgtcgctagttcactgcctgcccctcccccattgcaggcatcctgactctgggctagagacctccccaacagagctgaggccaaggccgactccccctctcaaatggcgtggtctgggcctatgacggcccctgcagtggagtctgtactggctgcgggggaccctgctcatttgaaaatctgacatcagctgggcagtcgcccccctcctcctttcctccctctactctgacacagcacttagcacctgaatcttcgtttctctcccagggaccctccattttccatatccaggaaaatgtgatgcgccacaggtatcagcgtctggatcgccacttcacgttttagccacaagtgactcagtggaagatccagagtcaacagaggctcgtcaggaagatgtctacagaaaaggtagaccaaaaggaggaagctggggaaaaagaggtgtgcggagaccagatcaaaggaccggacaaagaggaggaaccaccagctgctgcatcccatggccaggggtggcgtccaggtggcagagcagctaggaacgcaaggcctgaacctggggccagacaccctgctctcccggccatggtcaacgaccctccagtacctgccttactgtgggcccaggaggaccgactgtgattcctccaccacctcactctgctccttccctgttgccaatgtctcgctgactaagggtggacgtgatcgggtgctgatgtatggacagccgtatcgtgttaccttagagcttgagctgccagagtcccctgtgaatcaagatttgggcatgttcttggtcaccatttcctgctacaccagaggtggccgaatcatctccacttcttcgcgttcggtgatgctgcattaccgctcagacctgctccagatgctggacacactggtcttctctagcctcctgctatttggctttgcagagcagaagcagctgctggaggtggaactctacgcagactatagagagaactcgtacgtgccgaccactggagcgatcattgagatccacagcaagcgcatccagctgtatggagcctacctccgcatccacgcgcacttcactgggctcagatacctgctatacaacttcccgatgacctgcgccttcataggtgttgccagcaacttcaccttcctcagcgtcatcgtgctcttcagctacatgcagtgggtgtgggggggcatctggccccgacaccgcttctctttgcaggttaacatccgaaaaagagacaattcccggaaggaagtccaacgaaggatctctgctcatcagccagggcctgaaggccaggaggagtcaactccgcaatcagatgttacagaggatggtgagagccctgaagatccctcagggacagagggtcagctgtccgaggaggagaaaccagatcagcagcccctgagcggagaagaggagctagagcctgaggccagtgatggttcaggctcctgggaagatgcagctttgctgacggaggccaacctgcctgctcctgctcctgcttctgcttctgcccctgtcctagagactctgggcagctctgaacctgctgggggtgctctccgacagcgccccacctgctctagttcctgaagaaaaggggcagactcctcacattccagcactttcccacctgactcctctcccctcgtttttccttcaataaactattttgtgtcagcttc

SEQ ID NO: 255449 - DNA, 2210 bp, Homo sapiens
tgtctggatggctggtacctgaaggatgaaggatgctagaaggagctgctcagatcctggagcataccaactgcctggccagtgggggagcctagctgcctgcatccctgcgcacacccccactgtcgctagttcactgcctgcccctcccccattgcaggcatcctgactctgggctagagacctccccaacagagctgaggccaaggccgactccccctctcaaatggcgtggtctgggcctatgacggcccctgcagtggagtctgtactggctgcgggggaccctgctcatttgaaaatctgacatcagctgggcagtcgcccccctcctcctttcctccctctactctgacacagcacttagcacctgaatcttcgtttctctcccagggaccctccattttccatatccaggaaaatgtgatgcgccacaggtatcagcgtctggatcgccacttcacgttttagccacaagtgactcagtggaagatccagagtcaacagaggctcgtcaggaagatgtctacagaaaaggtagaccaaaaggaggaagctggggaaaaagaggtgtgcggagaccagatcaaaggaccggacaaagaggaggaaccaccagctgctgcatcccatggccaggggtggcgtccaggtggcagagcagctaggaacgcaaggcctgaacctggggccagacaccctgctctcccggccatggtcaacgaccctccagtacctgccttactgtgggcccaggaggtgggccaagtcttggcaggccgtgcccgcaggctgctgctgcagtttggggtgctcttctgcaccatcctccttttgctctgggtgtctgtcttcctctatggctccttctactattcctatatgccgacagtcagccacctcagccctgtgcatttctactacaggaccgactgtgattcctccaccacctcactctgctccttccctgttgccaatgtctcgctgactaagggtggacgtgatcgggtgctgatgtatggacagccgtatcgtgttaccttagagcttgagctgccagagtcccctgtgaatcaagatttgggcatgttcttggtcaccatttcctgctacaccagaggtggccgaatcatctccacttcttcgcgttcggtgatgctgcattaccgctcagacctgctccagatgctggacacactggtcttctctagcctcctgctatttggctttgcagagcagaagcagctgctggaggtggaactctacgcagactatagagagaactcgtacgtgccgaccactggagcgatcattgagatccacagcaagcgcatccagctgtatggagcctacctccgcatccacgcgcacttcactgggctcagatacctgctatacaacttcccgatgacctgcgccttcataggtgttgccagcaacttcaccttcctcagcgtcatcgtgctcttcagctacatgcagtgggtgtgggggggcatctggccccgacaccgcttctctttgcaggttaacatccgaaaaagagacaattcccggaaggaagtccaacgaaggatctctgctcatcagccaggtaaaggtgttggctggggagctgttgaggtgggctaggttgagctgggctgggccagaaggagtccctgcttcatccagtatgaggcttagggtatcaccgactgagacaagggtcaaaggaaaggcgaggaaggtgaggttggcactgccgtccaggcacagccaccctaaccctaacctgtcctctccctctttggaggtgcagggcctgaaggccaggaggagtcaactccgcaatcagatgttacagaggatggtgagagccctgaagatccctcagggacagagggtcagctgtccgaggaggagaaaccagatcagcagcccctgagcggagaagaggagctagagcctgaggccagtgatggttcaggctcctgggaagatgcagctttgctgacggaggccaacctgcctgctcctgctcctgcttctgcttctgcccctgtcctagagactctgggcagctctgaacctgctgggggtgctctccgacagcgccccacctgctctagttcctgaagaaaaggggcagactcctcacattccagcactttcccacctgactcctctcccctcgtttttccttcaataaactattttgtgtcagcttc

SEQ ID NO: 255450 - DNA, 1341 bp, Homo sapiens
acttccccgggagccggagagtcccgtctcacggttgccctggcagcgcgcgaggctggtgagtcggcagccctgtggcagccggcgggctggtttccatggttgcacgattaggaaccaccagctgctgcatcccatggccaggggtggcgtccaggtggcagagcagctaggaacgcaaggcctgaacctggggccagacaccctgctctcccggccatggtcaacgaccctccagtacctgccttactgtgggcccaggaggaccgactgtgattcctccaccacctcactctgctccttccctgttgccaatgtctcgctgactaagggtggacgtgatcgggtgctgatgtatggacagccgtatcgtgttaccttagagcttgagctgccagagtcccctgtgaatcaagatttgggcatgttcttggtcaccatttcctgctacaccagaggtggccgaatcatctccacttcttcgcgttcggtgatgctgcattaccgctcagacctgctccagatgctggacacactggtcttctctagcctcctgctatttggctttgcagagcagaagcagctgctggaggtggaactctacgcagactatagagagaactcgtacgtgccgaccactggagcgatcattgagatccacagcaagcgcatccagctgtatggagcctacctccgcatccacgcgcacttcactgggctcagatacctgctatacaacttcccgatgacctgcgccttcataggtgttgccagcaacttcaccttcctcagcgtcatcgtgctcttcagctacatgcagtgggtgtgggggggcatctggccccgacaccgcttctctttgcaggttaacatccgaaaaagagacaattcccggaaggaagtccaacgaaggatctctgctcatcagccagggcctgaaggccaggaggagtcaactccgcaatcagatgttacagaggatggtgagagccctgaagatccctcagggacagagggtcagctgtccgaggaggagaaaccagatcagcagcccctgagcggagaagaggagctagagcctgaggccagtgatggttcaggctcctgggaagatgcagctttgctgacggaggccaacctgcctgctcctgctcctgcttctgcttctgcccctgtcctagagactctgggcagctctgaacctgctgggggtgctctccgacagcgccccacctgctctagttcctgaagaaaaggggcagactcctcacattccagcactttcccacctgactcctctcccctcgtttttccttcaataaactattttgtgtcagcttc

SEQ ID NO: 255451 - DNA, 1780 bp, Homo sapiens
tgtctggatggctggtacctgaaggatgaaggatgctagaaggagctgctcagatcctggagcataccaactgcctggccagtgggggagcctagctgcctgcatccctgcgcacacccccactgtcgctagttcactgcctgcccctcccccattgcaggcatcctgactctgggctagagacctccccaacagagctgaggccaaggccgactccccctctcaaatggcgtggtctgggcctatgacggcccctgcagtggagtctgtactggctgcgggggaccctgctcatttgaaaatctgacatcagctgggcagtcgcccccctcctcctttcctccctctactctgacacagcacttagcacctgaatcttcgtttctctcccagggaccctccattttccatatccaggaaaatgtgatgcgccacaggtatcagcgtctggatcgccacttcacgttttagccacaagtgactcagtggaagatccagagtcaacagaggctcgtcaggaagatgtctacagaaaaggtagaccaaaaggaggaagctggggaaaaagaggtgtgcggagaccagatcaaaggaccggacaaagaggaggaaccaccagctgctgcatcccatggccaggggtggcgtccaggtggcagagcagctaggaacgcaaggcctgaacctggggccagacaccctgctctcccggccatggtcaacgaccctccagtacctgccttactgtgggcccaggaggtgggccaagtcttggcaggccgtgcccgcaggctgctgctgcagtttggggtgctcttctgcaccatcctccttttgctctgggtgtctgtcttcctctatggctccttctactattcctatatgccgacagtcagccacctcagccctgtgcatttctactacaggaccgactgtgattcctccaccacctcactctgctccttccctgttgccaatgtctcgctgactaagggtggacgtgatcgggtgctgatgtatggacagccgtatcgtgttaccttagagcttgagctgccagagtcccctgtgaatcaagatttgggcatgttcttggtcaccatttcctgctacaccagaggtggccgaatcatctccacttcttcgcgttcggtgatgctgcattaccgctcagacctgctccagatgctggacacactggtcttctctagcctcctgctatttggctttgcagagcagaagcagctgctggaggtggaactctacgcagactatagagagaactcgtacgtgccgaccactggagcgatcattgagatccacagcaagcgcatccagctgtatggagcctacctccgcatccacgcgcacttcactgggctcagatacctgctatacaacttcccgatgacctgcgccttcataggtgttgccagcaacttcaccttcctcagcgtcatcgtgctcttcagctacatgcagtgggtgtgggggggcatctggccccgacaccgcttctctttgcaggttaacatccgaaaaagagacaattcccggaaggaagtccaacgaaggatctctgctcatcagccagggcctgaaggccaggaggagtcaactccgcaatcagatgttacagaggatggtgagagccctgaagatccctcagggacagagggtcagctgtccgaggaggagaaaccagatcagcagcccctgagcggagaagaggagctagagcctgaggccagtgatggtgaggggcatcctgcagcgtgac

SEQ ID NO: 255452 - DNA, 1693 bp, Homo sapiens
tgtctggatggctggtacctgaaggatgaaggatgctagaaggagctgctcagatcctggagcataccaactgcctggccagtgggggagcctagctgcctgcatccctgcgcacacccccactgtcgctagttcactgcctgcccctcccccattgcaggcatcctgactctgggctagagacctccccaacagagctgaggccaaggccgactccccctctcaaatggcgtggtctgggcctatgacggcccctgcagtggagtctgtactggctgcgggggaccctgctcatttgaaaatctgacatcagctgggcagtcgcccccctcctcctttcctccctctactctgacacagcacttagcacctgaatcttcgtttctctcccagggaccctccattttccatatccaggaaaatgtgatgcgccacaggtatcagcgtctggatcgccacttcacgttttagccacaagtgactcagtggaagatccagagtcaacagaggctcgtcaggaagatgtctacagaaaaggtagaccaaaaggaggaagctggggaaaaagaggtgtgcggagaccagatcaaaggaccggacaaagaggaggaaccaccagctgctgcatcccatggccaggggtggcgtccaggtggcagagcagctaggaacgcaaggcctgaacctggggccagacaccctgctctcccggccatggtcaacgaccctccagtacctgccttactgtgggcccaggaggtgggccaagtcttggcaggccgtgcccgcaggctgctgctgcagtttggggtgctcttctgcaccatcctccttttgctctgggtgtctgtcttcctctatggctccttctactattcctatatgccgacagtcagccacctcagccctgtgcatttctactacaggaccgactgtgattcctccaccacctcactctgctccttccctgttgccaatgtctcgctgactaagggtggacgtgatcgggtgctgatgtatggacagccgtatcgtgttaccttagagcttgagctgccagagtcccctgtgaatcaagatttgggcatgttcttggtcaccatttcctgctacaccagaggtggccgaatcatctccacttcttcgcgttcggtgatgctgcattaccgctcagacctgctccagatgctggacacactggtcttctctagcctcctgctatttggctttgcagagcagaagcagctgctggaggtggaactctacgcagactatagagagaactcgtacgtgccgaccactggagcgatcattgagatccacagcaagcgcatccagctgtatggagcctacctccgcatccacgcgcacttcactgggctcagatacctgctatacaacttcccgatgacctgcgccttcataggtgttgccagcaacttcaccttcctcagcgtcatcgtgctcttcagctacatgcagtgggtgtgggggggcatctggccccgacaccgcttctctttgcaggttaacatccgaaaaagagacaattcccggaaggaagtccaacgaaggatctctgctcatcagccagttcctgaagaaaaggggcagactcctcacattccagcactttcccacctgactcctctcccctcgtttttccttcaataaactattttgtgtcagcttc

SEQ ID NO: 255453 - DNA, 1012 bp, Homo sapiens
cggacgcgtgggtcgacccactgatgtatggacagccgtatcgtgttaccttagagcttgagctgccagagtcccctgtgaatcaagatttgggcatgttcttggtcaccatttcctgctacaccagaggtggccgaatcatctccacttcttcgcgttcggtgatgctgcattaccgctcagacctgctccagatgctggacacactggtcttctctagcctcctgctatttggctttgcagagcagaagcagctgctggaggtggaactctacgcagactatagagagaactcgtacgtgccgaccactggagcgatcattgagatccacagcaagcgcatccagctgtatggagcctacctccgcatccacgcgcacttcactgggctcagatacctgctatacaacttcccgatgacctgcgccttcataggtgttgccagcaacttcaccttcctcagcgtcatcgtgctcttcagctacatgcagtgggtgtgggggggcatctggccccgacaccgcttctctttgcaggttaacatccgaaaaagagacaattcccggaaggaagtccaacgaaggatctctgctcatcagccagggcctgaaggccaggaggagtcaactccgcaatcagatgttacagaggatggtgagagccctgaagatccctcagggacagagggtcagctgtccgaggaggagaaaccagatcagcagcccctgagcggagaagaggagctagagcctgaggccagtgatggttcaggctcctgggaagatgcagctttgctgacggaggccaacctgcctgctcctgctcctgcttctgcttctgcccctgtcctagagactctgggcagctctgaacctgctgggggtgctctccgacagcgccccacctgctctagttcctgaagaaaaggggcagactcctcacattccagcactttcccacctgactcctctcccctcgtttttccttcaataaactattttgtgtcagcttc

SEQ ID NO: 255454 - DNA, 1541 bp, Homo sapiens
tgtctggatggctggtacctgaaggatgaaggatgctagaaggagctgctcagatcctggagcataccaactgcctggccagtgggggagcctagctgcctgcatccctgcgcacacccccactgtcgctagttcactgcctgcccctcccccattgcaggcatcctgactctgggctagagacctccccaacagagctgaggccaaggccgactccccctctcaaatggcgtggtctgggcctatgacggcccctgcagtggagtctgtactggctgcgggggaccctgctcatttgaaaatctgacatcagctgggcagtcgcccccctcctcctttcctccctctactctgacacagcacttagcacctgaatcttcgtttctctcccagggaccctccattttccatatccaggaaaatgtgatgcgccacaggtatcagcgtctggatcgccacttcacgttttagccacaagtgactcagtggaagatccagagtcaacagaggctcgtcaggaagatgtctacagaaaaggtagaccaaaaggaggaagctggggaaaaagaggtgtgcggagaccagatcaaaggaccggacaaagaggaggaaccaccagctgctgcatcccatggccaggggtggcgtccaggtggcagagcagctaggaacgcaaggcctgaacctggggccagacaccctgctctcccggccatggtcaacgaccctccagtacctgccttactgtgggcccaggaggtgggccaagtcttggcaggccgtgcccgcaggctgctgctgcagtttggggtgctcttctgcaccatcctccttttgctctgggtgtctgtcttcctctatggctccttctactattcctatatgccgacagtcagccacctcagccctgtgcatttctactacaggaccgactgtgattcctccaccacctcactctgctccttccctgttgccaatgtctcgctgactaagggtggacgtgatcgggtgctgatgtatggacagccgtatcgtgttaccttagagcttgagctgccagagtcccctgtgaatcaagatttgggcatgttcttggtcaccatttcctgctacaccagaggtggccgaatcatctccacttcttcgcgttcggtgatgctgcattaccgctcagacctgctccagatgctggacacactggtcttctctagcctcctgctatttggctttgcagagcagaagcagctgctggaggtggaactctacgcagactatagagagaactcgtacgtgccgaccactggagcgatcattgagatccacagcaagcgcatccagctgtatggagcctacctccgcatccacgcgcacttcactgggctcagtctgggcagctctgaacctgctgggggtgctctccgacagcgccccacctgctctagttcctgaagaaaaggggcagactcctcacattccagcactttcccacctgactcctctcccctcgtttttccttcaataaactattttgtgtcagcttc

SEQ ID NO: 255455 - DNA, 1868 bp, Homo sapiens
tgtctggatggctggtacctgaaggatgaaggatgctagaaggagctgctcagatcctggagcataccaactgcctggccagtgggggagcctagctgcctgcatccctgcgcacacccccactgtcgctagttcactgcctgcccctcccccattgcaggcatcctgactctgggctagagacctccccaacagagctgaggccaaggccgactccccctctcaaatggcgtggtctgggcctatgacggcccctgcagtggagtctgtactggctgcgggggaccctgctcatttgaaaatctgacatcagctgggcagtcgcccccctcctcctttcctccctctactctgacacagcacttagcacctgaatcttcgtttctctcccagggaccctccattttccatatccaggaaaatgtgatgcgccacaggtatcagcgtctggatcgccacttcacgttttagccacaagtgactcagtggaagatccagagtcaacagaggctcgtcaggaagatgtctacagaaaaggtagaccaaaaggaggaagctggggaaaaagaggtgtgcggagaccagatcaaaggaccggacaaagaggaggaaccaccagctgctgcatcccatggccaggggtggcgtccaggtggcagagcagctaggaacgcaaggcctgaacctggggccagacaccctgctctcccggccatggtcaacgaccctccagtacctgccttactgtgggcccaggaggtgggccaagtcttggcaggccgtgcccgcaggctgctgctgcagtttggggtgctcttctgcaccatcctccttttgctctgggtgtctgtcttcctctatggctccttctactattcctatatgccgacagtcagccacctcagccctgtgcatttctactacaggaccgactgtgattcctccaccacctcactctgctccttccctgttgccaatgtctcgctgactaagggtggacgtgatcgggtgctgatgtatggacagccgtatcgtgttaccttagagcttgagctgccagagtcccctgtgaatcaagatttgggcatgttcttggtcaccatttcctgctacaccagaggtggccgaatcatctccacttcttcgcgttcgtacgtgccgaccactggagcgatcattgagatccacagcaagcgcatccagctgtatggagcctacctccgcatccacgcgcacttcactgggctcagatacctgctatacaacttcccgatgacctgcgccttcataggtgttgccagcaacttcaccttcctcagcgtcatcgtgctcttcagctacatgcagtgggtgtgggggggcatctggccccgacaccgcttctctttgcaggttaacatccgaaaaagagacaattcccggaaggaagtccaacgaaggatctctgctcatcagccagggcctgaaggccaggaggagtcaactccgcaatcagatgttacagaggatggtgagagccctgaagatccctcagggacagagggtcagctgtccgaggaggagaaaccagatcagcagcccctgagcggagaagaggagctagagcctgaggccagtgatggttcaggctcctgggaagatgcagctttgctgacggaggccaacctgcctgctcctgctcctgcttctgcttctgcccctgtcctagagactctgggcagctctgaacctgctgggggtgctctccgacagcgccccacctgctctagttcctgaagaaaaggggcagactcctcacattccagcactttcccacctgactcctctcccctcgtttttccttcaataaactattttgtgtcagcttc

SEQ ID NO: 255456 - DNA, 1137 bp, Homo sapiens
tgtctggatggctggtacctgaaggatgaaggatgctagaaggagctgctcagatcctggagcataccaactgcctggccagtgggggagcctagctgcctgcatccctgcgcacacccccactgtcgctagttcactgcctgcccctcccccattgcaggcatcctgactctgggctagagacctccccaacagagctgaggccaaggccgactccccctctcaaatggcgtggtctgggcctatgacggcccctgcagtggagtctgtactggctgcgggggaccctgctcatttgaaaatctgacatcagctgggcagtcgcccccctcctcctttcctccctctactctgacacagcacttagcacctgaatcttcgtttctctcccagggaccctccattttccatatccaggaaaatgtgatgcgccacaggtatcagcgtctggatcgccacttcacgttttagccacaagtgactcagtggaagatccagagtcaacagaggctcgtcaggaagatgtctacagaaaaggtagaccaaaaggaggaagctggggaaaaagaggtgtgcggagaccagatcaaaggaccggacaaagaggaggaaccaccagctgctgcatcccatggccaggggtggcgtccaggtggcagagcagctaggaacgcaaggcctgaacctggggccagacaccctgctctcccggccatggtcaacgaccctccagtacctgccttactgtgggcccaggaggtgggccaagtcttggcaggccgtgcccgcaggctgctgctgcagtttggggtgctcttctgcaccatcctccttttgctctgggtgtctgtcttcctctatggctccttctactattcctatatgccgacagtcagccacctcagccctgtgcatttctactacagggtgagaggggccttctatcaaaatagaggactcctatgggaattgtaaggcccttggagttcattcagttcaatcccctcatttacagataaggaaaactggagccaggtgtgcttccagggcctctcaactttcacagcccaaggctagatttgggttgccagggctagggttctagttctacctctgattactgaattctggttaaaa

SEQ ID NO: 255457 - DNA, 1689 bp, Homo sapiens
cttattctttgttatatagctgtgaatgagaatcaaggtggtttgtcccagcatcaaatgactggagaaggaattccactgaggagatttagcactgggcgggagggaacacagtggaggaaagggaaggggtaattggcagagtggcacaatcatttggagaaaggccatatatatgaaacaatgactttgctatcctgctatctctcgttcctcaaagccagtccagtaagctgttttgtccccacctccctggggaaaggagtcactcttttccctcaccctctctttccaggaaccaccagctgctgcatcccatggccaggggtggcgtccaggtggcagagcagctaggaacgcaaggcctgaacctggggccagacaccctgctctcccggccatggtcaacgaccctccagtacctgccttactgtgggcccaggaggtgggccaagtcttggcaggccgtgcccgcaggctgctgctgcagtttggggtgctcttctgcaccatcctccttttgctctgggtgtctgtcttcctctatggctccttctactattcctatatgccgacagtcagccacctcagccctgtgcatttctactacaggaccgactgtgattcctccaccacctcactctgctccttccctgttgccaatgtctcgctgactaagggtggacgtgatcgggtgctgatgtatggacagccgtatcgtgttaccttagagcttgagctgccagagtcccctgtgaatcaagatttgggcatgttcttggtcaccatttcctgctacaccagaggtggccgaatcatctccacttcttcgcgttcggtgatgctgcattaccgctcagacctgctccagatgctggacacactggtcttctctagcctcctgctatttggctttgcagagcagaagcagctgctggaggtggaactctacgcagactatagagagaactcgtacgtgccgaccactggagcgatcattgagatccacagcaagcgcatccagctgtatggagcctacctccgcatccacgcgcacttcactgggctcagatacctgctatacaacttcccgatgacctgcgccttcataggtgttgccagcaacttcaccttcctcagcgtcatcgtgctcttcagctacatgcagtgggtgtgggggggcatctggccccgacaccgcttctctttgcaggttaacatccgaaaaagagacaattcccggaaggaagtccaacgaaggatctctgctcatcagccagggcctgaaggccaggaggagtcaactccgcaatcagatgttacagaggatggtgagagccctgaagatccctcagggacagagggtcagctgtccgaggaggagaaaccagatcagcagcccctgagcggagaagaggagctagagcctgaggccagtgatggttcaggctcctgggaagatgcagctttgctgacggaggccaacctgcctgctcctgctcctgcttctgcttctgcccctgtcctagagactctgggcagctctgaacctgctgggggtgctctccgacagcgccccacctgctctagttcctgaagaaaaggggcagactcctcacattccagcactttcccacctgactcctctcccctcgtttttccttcaataaactattttgtgtcagcttc

SEQ ID NO: 255458 - DNA, 2027 bp, Homo sapiens
tgtctggatggctggtacctgaaggatgaaggatgctagaaggagctgctcagatcctggagcataccaactgcctggccagtgggggagcctagctgcctgcatccctgcgcacacccccactgtcgctagttcactgcctgcccctcccccattgcaggcatcctgactctgggctagagacctccccaacagagctgaggccaaggccgactccccctctcaaatggcgtggtctgggcctatgacggcccctgcagtggagtctgtactggctgcgggggaccctgctcatttgaaaatctgacatcagctgggcagtcgcccccctcctcctttcctccctctactctgacacagcacttagcacctgaatcttcgtttctctcccagggaccctccattttccatatccaggaaaatgtgatgcgccacaggtatcagcgtctggatcgccacttcacgttttagccacaagtgactcagtggaagatccagagtcaacagaggctcgtcaggaagatgtctacagaaaaggtagaccaaaaggaggaagctggggaaaaagaggtgtgcggagaccagatcaaaggaccggacaaagaggaggaaccaccagctgctgcatcccatggccaggggtggcgtccaggtggcagagcagctaggaacgcaaggcctgaacctggggccagacaccctgctctcccggccatggtcaacgaccctccagtacctgccttactgtgggcccaggaggtgggccaagtcttggcaggccgtgcccgcaggctgctgctgcagtttggggtgctcttctgcaccatcctccttttgctctgggtgtctgtcttcctctatggctccttctactattcctatatgccgacagtcagccacctcagccctgtgcatttctactacaggaccgactgtgattcctccaccacctcactctgctccttccctgttgccaatgtctcgctgactaagggtggacgtgatcgggtgctgatgtatggacagccgtatcgtgttaccttagagcttgagctgccagagtcccctgtgaatcaagatttgggcatgttcttggtcaccatttcctgctacaccagaggtggccgaatcatctccacttcttcgcgttcggtgatgctgcattaccgctcagacctgctccagatgctggacacactggtcttctctagcctcctgctatttggctttgcagagcagaagcagctgctggaggtggaactctacgcagactatagagagaactcgtacgtgccgaccactggagcgatcattgagatccacagcaagcgcatccagctgtatggagcctacctccgcatccacgcgcacttcactgggctcagatacctgctatacaacttcccgatgacctgcgccttcataggtgttgccagcaacttcaccttcctcagcgtcatcgtgctcttcagctacatgcagtgggtgtgggggggcatctggccccgacaccgcttctctttgcaggttaacatccgaaaaagagacaattcccggaaggaagtccaacgaaggatctctgctcatcagccagggcctgaaggccaggaggagtcaactccgcaatcagatgttacagaggatggtgagagccctgaagatccctcagggacagagggtcagctgtccgaggaggagaaaccagatcagcagcccctgagcggagaagaggagctagagcctgaggccagtgatggttcaggctcctgggaagatgcagctttgctgacggaggccaacctgcctgctcctgctcctgcttctgcttctgcccctgtcctagagactctgggcagctctgaacctgctgggggtgctctccgacagcgccccacctgctctagttcctgaagaaaaggggcagactcctcacattccagcactttcccacctgactcctctcccctcgtttttccttcaataaactattttgtgtcagcttcaaaaaaggaaggggagatcccgtg

SEQ ID NO: 255459 - DNA, 1453 bp, Homo sapiens
gattactagaacagaaccaccggctggtgcagtcccatgaggctaagtgtaggattgctaacatttggctgtattcctatagaggatcgctgggcctgaatactggcttgaaactcatgatttcccgaccgcactgggtcggacagaccgcatccagttatgcaacaatattctggtagggcaccatgtgagagtggtcataagctggtagtgctagtgcacgaggacgtcaaggctgatggtcgaatgatcagagttatggctctctctgcggcatcctccttttgctctgggtgtctgtcttcctctatggctccttctactattcctatatgccgacagtcagccacctcagccctgtgcatttctactacaggaccgactgtgattcctccaccacctcactctgctccttccctgttgccaatgtctcgctgactaagggtggacgtgatcgggtgctgatgtatggacagccgtatcgtgttaccttagagcttgagctgccagagtcccctgtgaatcaagatttgggcatgttcttggtcaccatttcctgctacaccagaggtggccgaatcatctccacttcttcgcgttcggtgatgctgcattaccgctcagacctgctccagatgctggacacactggtcttctctagcctcctgctatttggctttgcagagcagaagcagctgctggaggtggaactctacgcagactatagagagaactcgtacgtgccgaccactggagcgatcattgagatccacagcaagcgcatccagctgtatggagcctacctccgcatccacgcgcacttcactgggctcagatacctgctatacaacttcccgatgacctgcgccttcataggtgttgccagcaacttcaccttcctcagcgtcatcgtgctcttcagctacatgcagtgggtgtgggggggcatctggccccgacaccgcttctctttgcaggttaacatccgaaaaagagacaattcccggaaggaagtccaacgaaggatctctgctcatcagccagggcctgaaggccaggaggagtcaactccgcaatcagatgttacagaggatggtgagagccctgaagatccctcagggacagagggtcagctgtccgaggaggagaaaccagatcagcagcccctgagcggagaagaggagctagagcctgaggccagtgatggttcaggctcctgggaagatgcagctttgctgacggaggccaacctgcctgctcctgctcctgcttctgcttctgcccctgtcctagagactctgggcagctctgaacctgctgggggtgctctccgacagcgccccacctgctctagttcctgaagaaaaggggcagactcctcacattccagcactttcccacctgactcctctcccctcgtttttccttcaataaactattttgtgtcagcttc

SEQ ID NO: 255460 - DNA, 1918 bp, Homo sapiens
tgtctggatggctggtacctgaaggatgaaggatgctagaaggagctgctcagatcctggagcataccaactgcctggccagtgggggagcctagctgcctgcatccctgcgcacacccccactgtcgctagttcactgcctgcccctcccccattgcaggcatcctgactctgggctagagacctccccaacagagctgaggccaaggccgactccccctctcaaatggcgtggtctgggcctatgacggcccctgcagtggagtctgtactggctgcgggggaccctgctcatttgaaaatctgacatcagctgggcagtcgcccccctcctcctttcctccctctactctgacacagcacttagcacctgaatcttcgtttctctcccagggaccctccattttccatatccaggaaaatgtgatgcgccacaggtatcagcgtctggatcgccacttcacgttttagccacaagtgactcagtggaagatccagagtcaacagaggctcgtcaggaagatgtctacagaaaaggtagaccaaaaggaggaagctggggaaaaagaggtgtgcggagaccagatcaaaggaccggacaaagaggaggaaccaccagctgctgcatcccatggccaggggtggcgtccaggtggcagagcagctaggaacgcaaggcctgaacctggggccagacaccctgctctcccggccatggtcaacgaccctccagtacctgccttactgtgggcccaggaggtgggccaagtcttggcaggccgtgcccgcaggctgctgctgcagtttggggtgctcttctgcaccatcctccttttgctctgggtgtctgtcttcctctatggctccttctactattcctatatgccgacagtcagccacctcagccctgtgcatttctactacaggaccgactgtgattcctccaccacctcactctgctccttccctgttgccaatgtctcgctgactaagggtggacgtgatcgggtgctgatgtatggacagccgtatcgtgttaccttagagcttgagctgccagagtcccctgtgaatcaagatttgggcatgttcttggtcaccatttcctgctacaccagaggtggccgaatcatctccacttcttcgcgttcggtgatgctgcattaccgctcagacctgctccagatgctggacacactggtcttctctagcctcctgctatttggctttgcagagcagaagcagctgctggaggtggaactctacgcagactatagagagaactcgtacgtgccgaccactggagcgatcattgagatccacagcaagcgcatccagctgtatggagcctacctccgcatccacgcgcacttcactgggctcagatacctgctatacaacttcccgatgacctgcgccttcataggtgttgccagcaacttcaccttcctcagcgtcatcgtgctcttcagctacatgcagtgggtgtgggggggcatctggccccgacaccgcttctctttgcaggttaacatccgaaaaagagacaattcccggaaggaagtccaacgaaggatctctgctcatcagccagggcctgaaggccaggaggagtcaactccgcaatcagatgttacagaggatggtgagagccctgaagatccctcagggacagagggtcagctgtccgaggaggagaaaccagatcagcagcccctgagcggagaagaggagctagagcctgaggccagtgatgggccccacggttcaagcgctccctgcggaaggattgcacgcttttggctggaaccggaggccagaccttggcctaggcgtcctggctccctggcgttacattgctttcctgggcacctagtaccttaagaagacctactgggggcaagcttcttgaaacccg

SEQ ID NO: 255461 - DNA, 1805 bp, Homo sapiens
tgtctggatggctggtacctgaaggatgaaggatgctagaaggagctgctcagatcctggagcataccaactgcctggccagtgggggagcctagctgcctgcatccctgcgcacacccccactgtcgctagttcactgcctgcccctcccccattgcaggcatcctgactctgggctagagacctccccaacagagctgaggccaaggccgactccccctctcaaatggcgtggtctgggcctatgacggcccctgcagtggagtctgtactggctgcgggggaccctgctcatttgaaaatctgacatcagctgggcagtcgcccccctcctcctttcctccctctactctgacacagcacttagcacctgaatcttcgtttctctcccagggaccctccattttccatatccaggaaaatgtgatgcgccacaggtatcagcgtctggatcgccacttcacgttttagccacaagtgactcagtggaagatccagagtcaacagaggctcgtcaggaagatgtctacagaaaaggtagaccaaaaggaggaagctggggaaaaagaggtgtgcggagaccagatcaaaggaccggacaaagaggaggaaccaccagctgctgcatcccatggccaggggtggcgtccaggtggcagagcagctaggaacgcaaggcctgaacctggggccagacaccctgctctcccggccatggtcaacgaccctccagtacctgccttactgtgggcccaggaggtgggccaagtcttggcaggccgtgcccgcaggctgctgctgcagtttggggtgctcttctgcaccatcctccttttgctctgggtgtctgtcttcctctatggctccttctactattcctatatgccgacagtcagccacctcagccctgtgcatttctactacaggaccgactgtgattcctccaccacctcactctgctccttccctgttgccaatgtctcgctgactaagggtggacgtgatcgggtgctgatgtatggacagccgtatcgtgttaccttagagcttgagctgccagagtcccctgtgaatcaagatttgggcatgttcttggtcaccatttcctgctacaccagaggtggccgaatcatctccacttcttcgcgttcggtgatgctgcattaccgctcagacctgctccagatgctggacacactggtcttctctagcctcctgctatttggctttgcagagcagaagcagctgctggaggtggaactctacgcagactatagagagaactcgtacgtgccgaccactggagcgatcattgagatccacagcaagcgcatccagctgtatggagcctacctccgcatccacgcgcacttcactgggctcagatacctgctatacaacttcccgatgacctgcgccttcataggtgttgccagcaacttcaccttcctcagcgtcatcgtgctcttcagctacatgcagtgggtgtgggggggcatctggccccgacaccgcttctctttgcaggttaacatccgaaaaagagacaattcccggaaggaagtccaacgaaggatctctgctcatcagccagggcctgaaggccaggaggagtcaactccgcaatcagatgttacagaggatggtgagagccctgaagatccctcagggacaggtgctctccgacagcgccccacctgctctagttcctgaagaaaaggggcagactcctcacattccagcactttcccacctgactcctctcccctcgtttttccttcaataaactattttgtgtcagcttc

SEQ ID NO: 255462 - DNA, 1780 bp, Homo sapiens
tgtctggatggctggtacctgaaggatgaaggatgctagaaggagctgctcagatcctggagcataccaactgcctggccagtgggggagcctagctgcctgcatccctgcgcacacccccactgtcgctagttcactgcctgcccctcccccattgcaggcatcctgactctgggctagagacctccccaacagagctgaggccaaggccgactccccctctcaaatggcgtggtctgggcctatgacggcccctgcagtggagtctgtactggctgcgggggaccctgctcatttgaaaatctgacatcagctgggcagtcgcccccctcctcctttcctccctctactctgacacagcacttagcacctgaatcttcgtttctctcccagggaccctccattttccatatccaggaaaatgtgatgcgccacaggtatcagcgtctggatcgccacttcacgttttagccacaagtgactcagtggaagatccagagtcaacagaggctcgtcaggaagatgtctacagaaaaggtagaccaaaaggaggaagctggggaaaaagaggtgtgcggagaccagatcaaaggaccggacaaagaggaggaaccaccagctgctgcatcccatggccaggggtggcgtccaggtggcagagcagctaggaacgcaaggcctgaacctggggccagacaccctgctctcccggccatggtcaacgaccctccagtacctgccttactgtgggcccaggaggtgggccaagtcttggcaggccgtgcccgcaggctgctgctgcagtttggggtgctcttctgcaccatcctccttttgctctgggtgtctgtcttcctctatggctccttctactattcctatatgccgacagtcagccacctcagccctgtgcatttctactacaggaccgactgtgattcctccaccacctcactctgctccttccctgttgccaatgtctcgctgactaagggtggacgtgatcgggtgctgatgtatggacagccgtatcgtgttaccttagagcttgagctgccagagtcccctgtgaatcaagatttgggcatgttcttggtcaccatttcctgctacaccagaggtggccgaatcatctccacttcttcgcgttcggtgatgctgcattaccgctcagacctgctccagatgctggacacactggtcttctctagcctcctgctatttggctttgcagagcagaagcagctgctggaggtggaactctacgcagactatagagagaactcgtacgtgccgaccactggagcgatcattgagatccacagcaagcgcatccagctgtatggagcctacctccgcatccacgcgcacttcactgggctcaggttaacatccgaaaaagagacaattcccggaaggaagtccaacgaaggatctctgctcatcagccagagggtcagctgtccgaggaggagaaaccagatcagcagcccctgagcggagaagaggagctagagcctgaggccagtgatggttcaggctcctgggaagatgcagctttgctgacggaggccaacctgcctgctcctgctcctgcttctgcttctgcccctgtcctagagactctgggcagctctgaacctgctgggggtgctctccgacagcgccccacctgctctagttcctgaagaaaaggggcagactcctcacattccagcactttcccacctgactcctctcccctcgtttttccttcaataaactattttgtgtcagcttc

SEQ ID NO: 255463 - DNA, 1925 bp, Homo sapiens
tgtctggatggctggtacctgaaggatgaaggatgctagaaggagctgctcagatcctggagcataccaactgcctggccagtgggggagcctagctgcctgcatccctgcgcacacccccactgtcgctagttcactgcctgcccctcccccattgcaggcatcctgactctgggctagagacctccccaacagagctgaggccaaggccgactccccctctcaaatggcgtggtctgggcctatgacggcccctgcagtggagtctgtactggctgcgggggaccctgctcatttgaaaatctgacatcagctgggcagtcgcccccctcctcctttcctccctctactctgacacagcacttagcacctgaatcttcgtttctctcccagggaccctccattttccatatccaggaaaatgtgatgcgccacaggtatcagcgtctggatcgccacttcacgttttagccacaagtgactcagtggaagatccagagtcaacagaggctcgtcaggaagatgtctacagaaaaggtagaccaaaaggaggaagctggggaaaaagaggtgtgcggagaccagatcaaaggaccggacaaagaggaggaaccaccagctgctgcatcccatggccaggggtggcgtccaggtggcagagcagctaggaacgcaaggcctgaacctggggccagacaccctgctctcccggccatggtcaacgaccctccagtacctgccttactgtgggcccaggaggtgggccaagtcttggcaggccgtgcccgcaggctgctgctgcagtttggggtgctcttctgcaccatcctccttttgctctgggtgtctgtcttcctctatggctccttctactattcctatatgccgacagtcagccacctcagccctgtgcatttctactacaggaccgactgtgattcctccaccacctcactctgctccttccctgttgccaatgtctcgctgactaagggtggacgtgatcgggtgctgatgtatggacagccgtatcgtgttaccttagagcttgagctgccagagtcccctgtgaatcaagatttgggcatgttcttggtcaccatttcctgctacaccagaggtggccgaatcatctccacttcttcgcgttcggcagagcagaagcagctgctggaggtggaactctacgcagactatagagagaactcgtacgtgccgaccactggagcgatcattgagatccacagcaagcgcatccagctgtatggagcctacctccgcatccacgcgcacttcactgggctcagatacctgctatacaacttcccgatgacctgcgccttcataggtgttgccagcaacttcaccttcctcagcgtcatcgtgctcttcagctacatgcagtgggtgtgggggggcatctggccccgacaccgcttctctttgcaggttaacatccgaaaaagagacaattcccggaaggaagtccaacgaaggatctctgctcatcagccagggcctgaaggccaggaggagtcaactccgcaatcagatgttacagaggatggtgagagccctgaagatccctcagggacagagggtcagctgtccgaggaggagaaaccagatcagcagcccctgagcggagaagaggagctagagcctgaggccagtgatggttcaggctcctgggaagatgcagctttgctgacggaggccaacctgcctgctcctgctcctgcttctgcttctgcccctgtcctagagactctgggcagctctgaacctgctgggggtgctctccgacagcgccccacctgctctagttcctgaagaaaaggggcagactcctcacattccagcactttcccacctgactcctctcccctcgtttttccttcaataaactattttgtgtcagcttc

SEQ ID NO: 255464 - DNA, 1453 bp, Homo sapiens
tgtctggatggctggtacctgaaggatgaaggatgctagaaggagctgctcagatcctggagcataccaactgcctggccagtgggggagcctagctgcctgcatccctgcgcacacccccactgtcgctagttcactgcctgcccctcccccattgcaggcatcctgactctgggctagagacctccccaacagagctgaggccaaggccgactccccctctcaaatggcgtggtctgggcctatgacggcccctgcagtggagtctgtactggctgcgggggaccctgctcatttgaaaatctgacatcagctgggcagtcgcccccctcctcctttcctccctctactctgacacagcacttagcacctgaatcttcgtttctctcccagggaccctccattttccatatccaggaaaatgtgatgcgccacaggtatcagcgtctggatcgccacttcacgttttagccacaagtgactcagtggaagatccagagtcaacagaggctcgtcaggaagatgtctacagaaaaggtagaccaaaaggaggaagctggggaaaaagaggtgtgcggagaccagatcaaaggaccggacaaagaggaggaaccaccagctgctgcatcccatggccaggggtggcgtccaggtggcagagcagctaggaacgcaaggcctgaacctggggccagacaccctgctctcccggccatggtcaacgaccctccagtacctgccttactgtgggcccaggaggtgggccaagtcttggcaggccgtgcccgcaggctgctgctgcagtttggggtgctcttctgcaccatcctccttttgctctgggtgtctgtcttcctctatggctccttctactattcctatatgccgacagtcagccacctcagccctgtgcatttctactacaggaccgactgtgattcctccaccacctcactctgctccttccctgttgccaatgtctcgctgactaagggtggacgtgatcgggtgctgatgtatggacagccgtatcgtgttaccttagagcttgagctgccagagtcccctgtgaatcaagatttgggcatgttcttggtcaccatttcctgctacaccagaggtggccgaatcatctccacttcttcgcgttcggtgatgctgcattaccgctcagacctgctccagatgctggacacactggtcttctctagcctcctgctatttggctttctttgctgacggaggccaacctgcctgctcctgctcctgcttctgcttctgcccctgtcctagagactctgggcagctctgaacctgctgggggtgctctccgacagcgccccacctgctctagttcctgaagaaaaggggcagactcctcacattccagcactttcccacctgactcctctcccctcgtttttccttcaataaactattttgtgtcagcttc

SEQ ID NO: 255465 - DNA, 1223 bp, Homo sapiens
tgtctggatggctggtacctgaaggatgaaggatgctagaaggagctgctcagatcctggagcataccaactgcctggccagtgggggagcctagctgcctgcatccctgcgcacacccccactgtcgctagttcactgcctgcccctcccccattgcaggcatcctgactctgggctagagacctccccaacagagctgaggccaaggccgactccccctctcaaatggcgtggtctgggcctatgacggcccctgcagtggagtctgtactggctgcgggggaccctgctcatttgaaaatctgacatcagctgggcagtcgcccccctcctcctttcctccctctactctgacacagcacttagcacctgaatcttcgtttctctcccagggaccctccattttccatatccaggaaaatgtgatgcgccacaggtatcagcgtctggatcgccacttcacgttttagccacaagtgactcagtggaagatccagagtcaacagaggctcgtcaggaagatgtctacagaaaaggtagaccaaaaggaggaagctggggaaaaagaggtgtgcggagaccagatcaaaggaccggacaaagaggaggaaccaccagctgctgcatcccatggccaggggtggcgtccaggtggcagagcagctaggaacgcaaggcctgaacctggggccagacaccctgctctcccggccatggtcaacgaccctccagtacctgccttactgtgggcccaggaggtgggccaagtcttggcaggccgtgcccgcaggctgctgctgcagtttggggtgctcttctgcaccatcctccttttgctctgggtgtctgtcttcctctatggctccttctactattcctatatgccgacagtcagccacctcagccctgtgcatttctactacaggaccgactgtgattcctccaccacctcactctgctccttccctgttgccaatgtctcgctgactaagggtggacgtgatcgggtgctgatgtatggacagccgtatcgtgttaccttagagcttgagctgccagagtcccctgtgaatcaagatttgggcatgttcttggtcaccatttcctgctacaccagaggtggccgaagcgatgttcactagtcacgactgcgttgatcttccattaaccgttcctattctgctactcacgacagctgtatatcacttgtcttcatcttagc

SEQ ID NO: 255466 - DNA, 1003 bp, Homo sapiens
agcggccttaccctcctaagagttcctctgctgtacgactgcactcccgcaccctcccctaaatcccccctcttcggcctgtttaccttttaacttggcttcgttgcacgtttgtgtgtgtgtgtttgctcttcgcagcctcttgagcgtcttttgtacttaattcttacactgtggacgctctctcgcgcccgccatcccccgacccctctgatctccgatccttgacgatgtctagcctgcattgattggcccttttccctgggtatggcagatctattgcttgatgatcctctccccccaagaattctaacacaggagctgtcctgaggctctggatgactttattcttcaaatggctttaccctcccagtagctccagagggaccctccattttccatatccaggaaaatgtgatgcgccacaggtatcagcgtctggatcgccacttcacgttttagccacaagtgactcagtggaagatccagagtcaacagaggctcgtcaggaagatgtctacagaaaaggtagaccaaaaggaggaagctggggaaaaagaggtgtgcggagaccagatcaaaggaccggacaaagaggaggaaccaccagctgctgcatcccatggccaggggtggcgtccaggtggcagagcagctaggaacgcaaggcctgaacctggggccagacaccctgctctcccggccatggtcaacgaccctccagtacctgccttactgtgggcccaggaggtgggccaagtcttggcaggccgtgcccgcaggctgctgctgcagtttggggtgctcttctgcaccatcctccttttgctctgggtgtctgtcttcctctatggctccttctactattcctatatgccgacagtcagccacctcagccctgtgcatttctactacaggaccgactgtgattcctccaccacctcactctgctccttccctgtctccgattccgctgcattgggatcctctagaatcagccgca

SEQ ID NO: 255467 - DNA, 1218 bp, Homo sapiens
tgtctggatggctggtacctgaaggatgaaggatgctagaaggagctgctcagatcctggagcataccaactgcctggccagtgggggagcctagctgcctgcatccctgcgcacacccccactgtcgctagttcactgcctgcccctcccccattgcaggcatcctgactctgggctagagacctccccaacagagctgaggccaaggccgactccccctctcaaatggcgtggtctgggcctatgacggcccctgcagtggagtctgtactggctgcgggggaccctgctcatttgaaaatctgacatcagctgggcagtcgcccccctcctcctttcctccctctactctgacacagcacttagcacctgaatcttcgtttctctcccagggaccctccattttccatatccaggaaaatgtgatgcgccacaggtatcagcgtctggatcgccacttcacgttttagccacaagtgactcagtggaagatccagagtcaacagaggctcgtcaggaagatgtctacagaaaaggtagaccaaaaggaggaagctggggaaaaagaggtgtgcggagaccagatcaaaggaccggacaaagaggaggaaccaccagctgctgcatcccatggccaggggtggcgtccaggtggcagagcagctaggaacgcaaggcctgaacctggggccagacaccctgctctcccggccgactcgcaagatggcgccgcagaaagacaggaagcccaagaggtcaacctggaggtttaatttggaccttactcatccagtagaagatggaatttttgattctggaaattttggtaccttccctagtgaatatctagggttctcttccctagttttgcattttttctgttttaaaataggagcaatttctacgggagaaggttaaagtcaatggcaaaactggaaatctcgggaatgttgttcacattgaacgcttcaagaataaaatcacagttgtttctgagaaacagttctctaaaaggtatttgaaataccttaccaagaaataccttaagaagaacaatcttcgtgattggcttcgagtggttgcatctgacaaggagacctacgaacttcgttacttccagattagtcaagatgaagatgaatcagagtcggaggactaggcaaaggctccccttacagggctttgcttattaataaaataactgaagtatacatgag

SEQ ID NO: 255468 - DNA, 303 bp, Homo sapiens
aattgctgctattaaatctttttcccacttccatgcctatgtgcatgcaattcctctgtcctgatgtacccacatggccaaatcttacccttattctaactctcaatttagagaatctccatccatcaaacctacactgacctttcctttccccaccactaagctaaaatgaacttctctctcatctctgaacatccattgcattctatctgtgcttttcttttgacattattacccagttgatacaataattatttaaaaacatgaaatctcattttctagatcctacatagtgagtgttac

SEQ ID NO: 255469 - DNA, 288 bp, Homo sapiens
acaaaaaataccataaactcggcagcttataaacaaccaacatttctttctcacagtctggaggctgggaagtctatgatccaggcaccagtagatgtggtgtctggcaagggtttgctttctggttcctagccggcaccttctcactgtgtcctcacaaggtgggaggaatgagggagctctccggggtcttgtttactcgggcacgaatcccattcatgagggactccacctttatgacctaatcagctctcaaatgcctcacctcgtaataccattacattgaag

SEQ ID NO: 255470 - DNA, 405 bp, Homo sapiens
caagagtgtccacgtatatttagcagaatatacaaagttgcatattgaatccttattttaaaagtgaaacaggctgggcgtggtggctcacgcctgtaataccaacactttgggaggccgaggagggtggatcacctgaggtcaggagttcgtgaccaacctggccaacatggcaagatcccatctctactaaaaatacaaaaattcaccaggcatggtggtttatgcctgtaatcccagctactggggaggctgagacacaagaatcgcttgaacccgggaggcagaggctgcagtgagccgagattgtgccactgcgctccagcctggatgacagagcgagactccatctcaaaaaaaataaaaaataaataaaagcaaaacagttatggtgggatgggagta

SEQ ID NO: 255471 - DNA, 829 bp, Homo sapiens
agcggaggggagcgggcgccaggccggccgggcaggatgcgctaccgggcgtcggccctgggcagtgacggggttcgggtgaccatggagagtgcgctcaccgcccgtgaccgggtgggggtgcaggatttcgtgctgctggagaacttcaccagcgaggccgccttcatcgagaacctgcggcggcgatttcgggagaatctcatctacacctacattggccccgtcctggtctctgtcaatccctaccgggacctgcagatctacagccggcagcatatggagcgttaccgtggcgtcagcttctatgaagtgccccctcacctgtttgccgtggcggacactgtgtaccgagcactgcgcacggagcgtcgggaccaggctgtgatgatctctggggagagcggggcaggcaagaccgaggccaccaagaggctgctgcagttctatgcagagacctgcccagcccccgagcgcggaggtgccgtgcgggaccggctgctacagagcaacccggtgctggaggcctttggaaatgccaagaccctccggaacgataactccagcaggttcgggaagtacatggatgtgcagtttgacttcaagggtgcccccgtgggtggccacatcctcagttacctcctggaaaagtcacgagtggtgcaccagaatcatggggagcggaacttccacatcttctaccagctgctggaggggggcgaggaggagactcttcgcaggctgggcttggaacgggaacccccagagctacctgtacctggtgaagggccagtgtgccaaagtctcctccatcaacgacaagagtgac

SEQ ID NO: 255472 - DNA, 1386 bp, Homo sapiens
ggccgggagcccccgtgcacgaggcaggggtcacggccggggatcgctggggccgaagaacggccgcgtggacccgtgcgggggggggggggtcccacgacccggaggcgccggcgcagcctggtggagacttagatttacctgcggggagcgggaggcggggaagagcggcctgggctgcaggacccaggaccctgcgcgcccttcgggccccgcccgcagccctgctccgctctgggttccggagaagccgcctaaacccgccccttcccgttctccgcccctggggcccagcgcgccccgagtgtgacgggcggggggctccggggtggccggagaaggaggatggccacgcggccctcagtcctcacgctccggcctcccgcgcacacgcctggctctgagattcattcattcatccaggggtccgggaaggggtgactgagccccaccgtgtgcctcgctgcgtgtagggagtgggagccgtctcctgggagggactgacaaggaaacagctgattcctgcggggtgcgataaggaggcgctgcgtgtttgggagaatcaggaaggggttctggaggaggtgacacctgagccgagtctcagtgaggccctgggcagtgacggggttcgggtgaccatggagagtgcgctcaccgcccgtgaccgggtgggggtgcaggatttcgtgctgctggagaacttcaccagcgaggccgccttcatcgagaacctgcggcggcgatttcgggagaatctcatctacacctacattggccccgtcctggtctctgtcaatccctaccgggacctgcagatctacagccggcagcatatggagcgttaccgtggcgtcagcttctatgaagtgccccctcacctgtttgccgtggcggacactgtgtaccgagcactgcgcacggagcgtcgggaccaggctgtgatgatctctggggagagcggggcaggcaagaccgaggccaccaagaggctgctgcagttctatgcagagacctgcccagcccccgagcgcggaggtgccgtgcgggaccggctgctacagagcaacccggtgctggaggcctttggaaatgccaagaccctccggaacgataactccagcaggttcgggaagtacatggatgtgcagtttgacttcaagggtgcccccgtgggtggccacatcctcagttacctcctggaaaagtcacgagtggtgcaccagaatcatggggagcggaacttccacatcttctaccagctgctggaggggggcgaggaggagactcttcgcaggctgggcttggaacgggaacccccagagctacctgtacctggtgaagggccagtgtgccaaagtctcctccatcaacgacaagagtgac

SEQ ID NO: 255473 - DNA, 1064 bp, Homo sapiens
agattttccttgttctgttttgtttggagacggagcttcgctctgtcgcccaggctggagcgcagtggcacaatctcggctcactgcaacctccgtctcccgggttcaagcgattctcgtgcctcagcctcccgagcagctgggattacacaggcgcccaccaccacgctcagctaatttttgtattttctagcagagagggggtatcgccatgctggtcaggctggtctcgaactcctgaactctgatgatccgcccgcctcggcctccgaaagcgctgggattacaggccctgggcagtgacggggttcgggtgaccatggagagtgcgctcaccgcccgtgaccgggtgggggtgcaggatttcgtgctgctggagaacttcaccagcgaggccgccttcatcgagaacctgcggcggcgatttcgggagaatctcatctacacctacattggccccgtcctggtctctgtcaatccctaccgggacctgcagatctacagccggcagcatatggagcgttaccgtggcgtcagcttctatgaagtgccccctcacctgtttgccgtggcggacactgtgtaccgagcactgcgcacggagcgtcgggaccaggctgtgatgatctctggggagagcggggcaggcaagaccgaggccaccaagaggctgctgcagttctatgcagagacctgcccagcccccgagcgcggaggtgccgtgcgggaccggctgctacagagcaacccggtgctggaggcctttggaaatgccaagaccctccggaacgataactccagcaggttcgggaagtacatggatgtgcagtttgacttcaagggtgcccccgtgggtggccacatcctcagttacctcctggaaaagtcacgagtggtgcaccagaatcatggggagcggaacttccacatcttctaccagctgctggaggggggcgaggaggagactcttcgcaggctgggcttggaacgggaacccccagagctacctgtacctggtgaagggccagtgtgccaaagtctcctccatcaacgacaagagtgac

SEQ ID NO: 255474 - DNA, 575 bp, Homo sapiens
acaaaacttagcacaagttcaagaaaatttgctatagctcacttggtaaaaattctgtgttaaatggctgggcatggtggctcatgcctgtaatgccagcactttgggaggctgaggtgggcggatcacctgaggtcaggagatcgagaccagcctggccaatgtggtgaaacccctactaaactgtctgtactaaaaatacaaaaaattagccgggcgtggtggcaggcacctgtaatcccagctatatgggaggctgaggcagaagaattgcttcaacctgggaggtagaggttgcagtgagccgagattgcaccactgcactccagcctgggcaacagagagagactcagtcaaaaaaaacaaaaacaaaaacaaaaacaatagaaggtttattctctcaccctctttttcttgtctctgtcctgtttgagtttgtgctggtattttctgctattttaaaataatttggtcctttaaatgtctatcagcttctccctacttcctaacatgcctcacacataggcctcatggttttccaggtggaacaaccctaagatcataatgctgttgat

SEQ ID NO: 255475 - DNA, 424 bp, Homo sapiens
atgggagagggtctaggactcagacgcacccttatgaggatactacatgacccattacaaggcacaaagtaattaccataggcaaaccgctgatgagagctcactccagtttggaatatattcatgtttccatataagagaaaaattcgtccctggttcagttcatcttggcatcagtacacggatgggattcagagacatgtaggtgtggaataccagattccaccaaacttaaaaagctggcatactaagttgataaaacgatgtagagtgtgaagttgagttgagaatgcttatgccatacagtttatgtatcttataatagccttaatcacacttccagtaattttccctatcattgggtgctaaaaaataaaattaaagaattagaataaaaaatatatatatacctctttgagtggaa

SEQ ID NO: 255476 - DNA, 272 bp, Homo sapiens
tgacaacaagcagcctgtcccaggtgccaatagtgtggaggttgggggaccctggcttagaggaaagaggtgacaaaccctaagatctttgaaggaggcttcccggggagatttacatgctctggcaaggttccctgttcccggggccacgtcctggatcctgagatgctcccacgcttcaccctcctggaattttgctgtatctgacaccactggccactccctcttgcagttcttcctgttggcttccaggtccccacctctgctggctt

SEQ ID NO: 255477 - DNA, 428 bp, Homo sapiens
ttacccattccttaagattaaattgaaattagagttctccttgttttctataggaaatcaattttaaaagacatctttcttttaaagcttttataggtatatcatggtttggaatcaggtcaaatgcaagcagtttgtgtcttaagttacattctacaagtgattttatttattttgtttgtaagttgattatctagaattctaacaggtatctatctctgtaggtatggtattctaaaactaagttaggtctccaagatgagtcatcaagcatacacacacagacagacacatgtttatgtcaatagtagtataaaatcgaaccatcttaaatagcatcatttccatgggacataatataccattatattttctactcagagtatccggaagatgtctcatagaaactccctctccatagctactta

SEQ ID NO: 255478 - DNA, 297 bp, Homo sapiens
ctgagaaggtcccctgcctgcttgaggaaccctgtggagccaggaaagccatttcttctattaggagcttgcaaggctgtgttgttgggcctggccggcctcaattcttcccacctgaagcagaagaaagggttgctcccccacaccctgttctcctccttgcctgcccagagcccccagactccctgcgcacttgctcctgttcttctggtcctcgcaattacatgcatggatttctactaaattgccagtccccgccttcctgtctactagcttggcccccctccaggaggaact

SEQ ID NO: 255479 - DNA, 431 bp, Homo sapiens
gtgtatttagccctctgactagcatgtattatattaggttgttaataaaggtttgttaaagggatgcatgaatttaggagaaaagaaagacgaacatcatggggaaggcatgggagacagaaaataatactaattgatgtagcatagtcattatgagcttgggcagagtcagacagtcctagattcaaacgttagctcttccattctctgtcttcagtttcctcacctgtaaattgggctaataatagtaccttctgcactgtacggtagttaggcaattcctataaagagataagcacacttagggccgggcatggtggttgatacctgtaatcccggcactttgggaggccaaggcaagtgaattccctggggtcaggagtttgagacccttgggcaacatgatgaaatcctgtctctactaaaaatac

SEQ ID NO: 255480 - DNA, 743 bp, Homo sapiens
attgtatttcacatatataaatattaatgtgtaattttatattatcaggatcattctatgcattcttttctgtaaccacagaaaatatattatgactgtatatagtttttataatggttgtacaaaattatatttcagagaaatacttaatttattaaactatttatggataatatctaggttgtttataattttataaccttttttatactctagaggaaatttttgctaaatattttattcatgtgaaagaatatttattatatagttaagtgaaagatacagtagactgaatatctacagagcctgttcccaacttatggaaattctagccaataaattgaaattttttgcatgttcattcccaatggtacatgtcttttgtgatctggaaagtttatcttattttttaattactttatggtttgattgtatatgtatttatctttaagatacaaattgttggccaggtgcggtggctcatgcctataattccagcactttgggaggctgaggcaggcagatcaagaggtcaggaatttgagaccagcctgaccactatggtgaaaccccatctctactaaaaatgaaaaaaatagctgggcatggtggcacacccctgtaatcccagctactcaggaggctgaggcaggagaatcacttgaaccaaggagacggaggttgcagtgggccaagatcacaccactgcactccagcctgggtgacagagcaagactctgcct

SEQ ID NO: 255481 - DNA, 621 bp, Homo sapiens
gacagggtctcactctgttacccaggctggagtgcaatggggcaaacttggatcactgcagccttgaactcctgggctcaagcaatcctcccacctcagcctcccaagtagcttggactataggtgtgcaccaccatccttggctaattttttaaatcttttgtagagacagggtagtgctctgttgcccaggctggtctcacattcctggcctcagttgatgctctggtctcagccttccaaaatgctgggattacaagtgtgagccactgcacctggcccccaatttcatcctttacaaagactactttcaaccataaatcaacggaaacttcagctccctcagacatatttgggatccaaggatattttcccaaatgattaatgctaatttcatatcaatacatttttgcaaaacctacaaaaatggactagtaaagaaagactcttaatttgggaaagacagttacttggagagaagagaaacttaagaggcaggtcgagttcagtgttcagaaatgagaggatcataaagagatagccataaaaatgtttctccctatattgcctgctgatagggtgtatcagtgaaggtcttactaaggaccttgtaccttttca

SEQ ID NO: 255482 - DNA, 434 bp, Homo sapiens
ggttggaaggttgcttgtgcctaggagttccagatgaaccttgggtacaaagtgagaccctgtctcaaaaaaaaaaaaaaaagggatatagtgtcatccgttcacttcttgccacagctggaattggtcaccactgaggcattatagtcctaaccctaacggggtaactaacatttcattactgtcaacagcgagtacctcactctagaaaacagtcttttatgtgtagtgccatacaaccccttttgctttatgtaaaagctgtgtctgctacagctactaaaaagtgaaggtgcttgtgattttatgatacttctgaatgtttctggtaggaaactgtgctactgtccttttgttgtcatgcagtctgagtgagggaagccattgctttggctcagaaacctctctcccacacaccttcaactggaaattca

SEQ ID NO: 255483 - DNA, 1167 bp, Homo sapiens
tctcctcccacacatactcttttagcataatggttgcagtgaaaacaattccgtatagcctctggttattaagtaaatatttatatatttctattaggctgaacacatttatgtgtacttggctcagttaaaatagggcatgcaggaatgtatgtgggggagcatgaagaggacatgaatctgttacctaaattaatatacattgttacttatgttggatcgcaaaagtggtagtataaggtgaacattggcccagttagagatttctcatctagaacagagagtattattttcaccttagtgaccatgagccagtgaagagcaacttctccagatccagtccaaacttgacctaagtctaatgttccccaaagattaggctcttattttctgtcttcagacttagaccaaaacttgaggggtttactgggaaaaaaaaaatctacaatgaggttgacttagaaaaaaaaaaagaatccatgctctatttttgagtcataaggatatagtgtcatccggccgggcgcagtggctcacgcctgtaatcctagcactttgagaggctgaggcgagttgatcacctgaggttgggagtttgagagcagcctgaccaatatggttaaaccccgtctctactaaaaatacaaaaattagctagacgtggtggtgcgtgcctgtactcccagctactcaggaggctgaagtgggagaataacttgaactctggaggaggaggttgcagtgagctgagatcgtggtactgcattcaaacctgggcaacatggggagaccctgtctcaaaaaaaaaaaaaaaagggatatagtgtcatccgttcacttcttgccacagctggaattggtcaccactgaggcattatagtcctaaccctaacggggtaactaacatttcattactgtcaacagcgagtacctcactctagaaaacagtcttttatgtgtagtgccatacaaccccttttgctttatgtaaaagctgtgtctgctacagctactaaaaagtgaaggtgcttgtgattttatgatacttctgaatgtttctggtaggaaactgtgctactgtccttttgttgtcatgcagtctgagtgagggaagccattgctttggctcagaaacctctctcccacacaccttcaactggaaattca

SEQ ID NO: 255484 - DNA, 328 bp, Homo sapiens
gaaaatgctaaggaagagaaaatacatttactagccactaagtggagtgtatcatcgtaacgggctcccctgattgtcttcacgttgagtaggctgtgagcaggaggagggggcggttgtcttgctgtctcaggagtggcagaggcaggagaaagtccacatataagtggaccacacgattcaaacccctgtccttcaaggattgtgaagggcccaggggagggacaggggatctgtgggtataaacagacttctattttattttatttttgagactgagtttctctcttgttacccagcctaggcacaagagcaaaactcgctctca

SEQ ID NO: 255485 - DNA, 435 bp, Homo sapiens
gacttcctgggctcaagtgatcctcctacctcagcctcctgagtaggtgggactacagatgtgtgataccatgcccagctaatttttaaaatttttcgtagagacgaagtcttactgtgttacccaggctggtctcaaactcctaggcacaagatgtcttcctgccttggccatcccaaagtgctaggactgctgatgtgagccactgagccctgccgattcttctgctattttaatcgttagctagagaacagtggccacatgttcatttatgtgtatgtttttctattctagatcataccctcttgtaggattatctcagcccttctaggttcatgacagcacccttcattcacgtgggtggtgcttagcatatatttgctctttctaaagaatgccccaagacaaaaggcagttcttgttgttcttctcctt

SEQ ID NO: 255486 - DNA, 418 bp, Homo sapiens
taacacattaacaataataaatatttatcaaatacctgctaagtgctattcattgcagtagtctctgcaggaagagatcagatgaggaattccatcttcatagggcttatgatctggttgtagtttgtcataaatatgtttatctaaagtaaccttttaataattttacctagatcattccatagaagagattaagtttttctcaattaaactctttcatggtttttataagatttcccattaggaggggatcaagaaggctatgccatataatagactgtcatgttatcaacaccagccctaaatatatatgacttctcagctcagcaagccaccatcaacttactgctttctggtctcatacttgtagctcttaaaagaaaaaaacaaatcaacttgtcttcttctctatccacag

SEQ ID NO: 255487 - DNA, 398 bp, Homo sapiens
ctttgatgttcagctttcatgatgtgatccctgctcttccttccagttgtatcccctggaatctaccccatatatactccagctgttcagaattgctgtcccgtgttttttctcacttctgccaatgaatccctcttttactgtgccctcatcatgcttgactgcagcagacagaggcatcgattttaaagtgtctcctcatacctgcatttttggtttctatatctgttttttcatggaatgtgagacttgcaagggcaaagacaggtttaatgcgcctctacatcttgaaaaaaaaacagagagcaggcctataacaagttttccaaagggatgaacaagtgaaagaaggaataaatattgattttgcaatgttactgataaaggcaaacacaaaa

SEQ ID NO: 255488 - DNA, 512 bp, Homo sapiens
tagagtgtgttggatcacttatcaattgctgcgtaacaaaccgtctaaatttgtcgctgtgaaaacaacactaatgtgactgggtgatattttcattagtctcctttatgctcactcacgtggctgtagtcagctggtagcttggttgggactagatggtctaacatgggcttacttgtgtgtctggtgcctcagttgagattggaatgactaaacttctttctctttgtgtctttcccctgggctttttcacatgatggtgggcaaattccattggacaagtgcttataaaggctctgctctgttgtgtttgctgatgttcccttggccaaagcaggtcatgaactaagctcagagtcagtgtgtgagagggctatgaaaggacctgggactgggcacggtggctgatgcctgtgattccagcactttgggaggctgaggtgggaggattgcttgagtccaggaatttgaggccggcttgggcaatacagtgagacaccatctctaaaaaa

SEQ ID NO: 255489 - DNA, 266 bp, Homo sapiens
ggaattactaggtagaactctcctcaatattgctgttaataatgatcaaaggttttgtaaagtttgtcttactataatactgctagtttgcacagtccagatttggaaataaaatattcatgtatgcagtacatatattaaccactgggtggcctaatttcactttattaaatcaacctggtaaattttcataccttgaatatgattggacttgtcctcaagattgtataataaagattttttttttgtctgtgataaagatttcg

SEQ ID NO: 255490 - DNA, 311 bp, Homo sapiens
cgatgggacagtgacagacagagggggacccagctgggcctgtctgggttcctcttggcctccctgtgtggcgttccttcttcctgcgtgtagggcagggccccttctggaatgagggtcttataacctactttcaggaaagtaagtcagagaacttctttatggccagctcttactcagaaaggcagggaaagttccagtagtgattctagtttctaatggctggctttggggaaagagattctagtttccgtgacctgctttagggaagaggatttctggtttctatgactcacttcttgggggaatga

SEQ ID NO: 255491 - DNA, 378 bp, Homo sapiens
acatacgttctgaaaatcatataaatgtgttcaacactttccctacctctcccagaaagaggaaattaaatgaatccagcttttaacatgcatgaaattttaccaccaatttcaaggggacaatgagaatatataattttctttgagatatttttatagctgttgaaacactatggaactcagcttcatagaacacttaaaatacccttagaaaaaccctacatcaaacttcatttttatcactacctctccaataaataacaataaaaatcagacttaatcatcattattctcctaccagagactatggcaaaaattatttctaacaaatatgtagcaaagtgaattaaaacgaattgttaaaattattaaagtaaa

SEQ ID NO: 255492 - DNA, 444 bp, Homo sapiens
tgcgtgtgcctgtgtgcatatgtgtatgcgtgttgcatattcagtcatggtttctgaaggtgattacaatttttaacactagcagttcaagtccaggcatctaccctgtggcttctgagtttacagattttcaccctttcacaaatgtgcaaaaatgttactggtggtcatgcagaagagatgtacttggtcctgaataaataatgactttcctgaattagttatctgaggactctcttgattgtcaatccatgaggttagtgggcgactgtgtctgtcttgttcgtcttcttgtctccccatccaagatctagaaacttagtccctgctggtttgaaacctgtgtcatgtggaagtgagaccttaaagcgagaaaatcaaagaaagtgagggaaggagatgtcaaagtctaaggcttgagatattggttgtggttgagattat

SEQ ID NO: 255493 - DNA, 486 bp, Homo sapiens
aaagtttgtaggtaagtgggagccacacagaatcatgtactctggcctgcttgtgggaattaaaatcaagtaactgctcgtcatgtgcccatgaaaatcccagagacgttttcaaactgttgtcagcctggtttttgttttattttggcaacatgtcaatctatgccagtaggagcatgtgtgctcacacttactcatctcctcattccattggtatccagtggtctatgggcaggtccctctgctaagcactgggaatacaaaggtgactgaaaggtcctcctgttaataggtaaacaaaagcagccaagaaaatacattcaatacacagcacacccagaagccaaaaaggaaattttaagaacttaaaatttaaaacatttatatggcaaaaaaataaaaaataaaaaaatccatagccaaagtctaaggacaaatactacattggttgttcaaaataaatgtgacagataaatggctacttaa

SEQ ID NO: 255494 - DNA, 755 bp, Homo sapiens
aaaaaaaaggcctggatactgcttttgctgtctctgttatgagatggaagacttacatgtttgtgataaaaggggaccatgagaatgaattggcttggcttactttccccctgaaatcctctctcctgcagactgtcttgaagacctggtgactggtaaataaagccctgcatggaggctgcacagcaggggcaagaggcccatcccccagcatctcactgaggacagcttcaggctgccttcctctgaacgtggtccacaccttcctctcctccacagagagggtgccgccagaatcccctgtcgctttctgtgtctgcaatggggggcagcacagggatcaaagccatctaaagagtttccagagaaagtattaattcagaacaagccaaagaccctgagcctcaccacaaacaggccttttggagtgtgaatttgagttgaagatacaagatcggagaatgattttctggtcttaactaatcctcgtcttcatgtttgatctttaagaagtcatcacccattgatttcagttttgctgtacctcttgaaagttaaagagacatctcagcactttaggaggccgaggcgggtggatcacttgaggtaaggagtttgagactagcctggccaatatggtaaaaccccatctctactaaaaatacaaaaattagccgggcatggtggcatgtgtctgtagtcccagctactcgggaggctgaggcaggagaatcgcttgaacccaggaaacggag

SEQ ID NO: 255495 - DNA, 223 bp, Homo sapiens
gtacaacgcaccgtgccccacagcaccctttgagagacacctgcccagcaggaaggaggctgcactggaaacatcacctgagcactccaggcgaaaaccggtgaatcagctctagagggtggcttagatctttcccgcctgggtttctcactgccctgccccaagcagtagaaactgtaattccttcacacaagtctaagcaacatgatttcttcataaacct

SEQ ID NO: 255496 - DNA, 422 bp, Homo sapiens
gagagagagaaaagagagagagtctcttgcaaggaaaggaaacagggccagatgaggtttagagtccaaatttataatatctgtgctgcatgaagcccttagtatactcttagatgcaggaagcccctgggctgatactacaatggctgctaaaaagtaacagaacacttgagaaaatgatctacttgagctagtcagcagatatagcaaacaaaaggattatctaccagaacttgagatgataaataagagactaccaaaagactatttaaacatgaaagagataaaaggaggaatagaaaccacaaggaaagaatgattctatttaaaaaagagatttgtaaaaagaatctaacacttctagaaatgaaaaattggaattaagaccacaatatgtgttgccaaactcattagatacagca

SEQ ID NO: 255497 - DNA, 2194 bp, Homo sapiens
tgatagattggtccaattgggtgtgaggagttcagttatatgtttgggattttttaggtagtgggtgttgagcttgaacgctttctcgatgggtgtcggcaaagatccaggataaggaaggcattcctcctgatcagcagaggttgatctttgccggaaaacagctgggagggatgccttccttgtcttggatctttgccttgacattctcaatggtgtcctactgtctatttctgacccagctcatggaattttttcatcttatactgagctccagaaaggacgtaacttagcatggatcaccaatcaatcaaaaaataaataaatcactaaggattggagaactcatagaacaaggtgaaagacatgagtgccctcccaaagtctgagtgcacgaaaatttctctcttgccttgaggagcagaaaagcttctgatggacatgggcttctgtgagacttatcacacatagtgtatcgtggcatgaagcccggcacatagcaggccctgcatattgatggacaaatggatggcctgcctgccttccctgtccgttcacctgtgcaaaggcttcctcagacatgccactctgtggctcccaatatagggtgcagacaagagcaatccctgacatgacattatagcctgggaaagggctggctcactgatgagaatgtggaggcatcagcaaggatctcggtgggttgctcagagaggtgatgcactaagccttaatcctggacaccagtacccctgcagcatggcttgctcaacaacagtctttgagtggcatagaattccaaagaaaatggtgctgggtggagaatggagagagcatgatggagcagagtcccagtcactgaccaactaactggtcgtttgattaggaaacagtttggccaaagtaccacctttgagacctaagttcttttgatacctttgagaagagccactgagcctgagttgaaatatttttagcttagtcatctgtgtttgctataggagaaattgtaacacaagaaataactcctttttacatgatcatttatatctatatacatatatatacttgcatacactatcactgcattaaaaaatgagtttgggctgggcatggtggctcacacctataatcccaacactttcggaggccaaggagggacaaacgaacccttgaggccaggagttccagactaacttgggcaacacagggcgacccccatctctacaaaacataaaagatttttaaaaaattagccaggcatggtggcacatgcctgtggtctcagctacttgggaggctgaggcaggagaatcatttgagcccaggaggtcaaggctgcagtgagctttgatcacaccactgcactccagcctgggcaacagagcaagaccccatcctccacccccccaaaaaatagaaagaaaaaaaaagtttgcactaattgaggtacatctgcaagtgagactttttgtcaggaaaaggcaatatatcaggtctcctcaggacgatggaggccttatatggtgtgttaccttgaaaactgaatatcaacgttcaccttgattcaggaaagctgggtgctgtctccatgccatgaatcatgagagcaaaggatcactgcttaaaaatactgaatttaccttcacaaaagatttctaaagatttatgtaatgtgttttaaaagcgccagtaaaccatcggatcaattggaaagaaggcaactcttcagcctttgttatctagctgaaaacaaatgacaactttcaaaacattggcagtagttgttgaaaaagacgtctattgttcaaagtttctttctccttaaaggacggtgttccaatgaattcagtagagcccactttcctccactgtggaggaagaatccctaagagatactcaaatgattaaattaaaattggatcatcaaactcaagagaggcataaacttagacacagtcttgcatttttgtctttcctgaactcttctgccattttcctccttcactcgtcctgaaaatctgcaagttacataataaaactttagatatttgtctgacaaagtgtaattactcaactgaataaatgactgagaacaagttacaaaaggaatcatgaatcctggtaaacaataaagaagattcagacactgagggaaaaaaataaagctttttacttaaataatgcaaaaaaa

SEQ ID NO: 255498 - DNA, 335 bp, Homo sapiens
gtctaggccaagaacccaaaagaggctttgaccattcctcctgctggaatagatttgggggtgccttttttttgcatctctttaaatccaccaattaaagctaagaactcatagatcagaagaggtaaaaagaaatggctaaagtgagaagctatgcttgatctaaaggaatcaacaaatttgcctagagcacctgtgtagccaagctgttccccgaagtaaattcacagtggagagcgccagacccacacttgatccaaatgttcatttattccacaatgaaagaacatgttccttttgttaatgggaccaacccataaagaaaaacaatgata

SEQ ID NO: 255499 - DNA, 355 bp, Homo sapiens
ctgtgccagcctttgggttgctggcctggacaccagatgctgtgcagagttgctctggctgaggctgccttagcaacaccctctttccagtctgggaagatccagaatgtgggcaacttcgggaaatgggaaaatcagaagatacatcctggtaggactgggggcagagaccaggagagacaatctgaaagataagtattttttgaatacctaccaggtgcttagccctgggctggacctgggaaatacaaagatgaccctctagtcccagctactggggaggctgaggcgagaggatcactcaagcccaggagtttgaggttacagtgagttgtgatcacaccactgcgctcca

SEQ ID NO: 255500 - DNA, 415 bp, Homo sapiens
tgcatgtgattaacgctgtcttacgattgggctgttgatgctccgccaacattgggttacacagagttcagcaagccatctgggaagaaaactggaagaatcatgagaggatacctctgtccccttaaggtgttaggagtgtgacttggtgttgagccctgtggctacagccagtggcagtggcaccaaccgctcccaagttacactggggagaaacacatctgagtgccgtgcgtctgtacatatctatcaggagggagggggcagagggcgatacttcatcgagataaatgccagcggtgtattttaatacattcttgattcagaaggcactgtttggaattgcatatttaaaaggaaactgccatccccttttgaaggtatgtgacatttaaaagatctgtagcagaagatt

SEQ ID NO: 255501 - DNA, 413 bp, Homo sapiens
tctgttatttccattttatgaaagaaaaagtataaggggagaagacagcagaagtgttttaagtaaaaatttccacataatttcaatataaataacttgcaatgtgaaaataatatatttataaccaacaaaacattttaactgattaaaaagttaccaggctgggtgcagtggctcacgaggtctggagttcgagaccagcctggccaacatggtgaaactctgtctctactaaaaatacaaaaattagctgggcatagtggcaggcacctgtaattccagcaacttgggaggctgaggcaggagaatcacttgaatccgagagcagaggttgcagtgagctgagatcacaccactgcactccagcctgggcaacagactgagactccgtctcaaaaaaaaaaaaaaaaaaa

SEQ ID NO: 255502 - DNA, 118 bp, Homo sapiens
ccaacatatgcacacaaagaatgtttattcaagtgttgtttataatagcaaaaaatatatcagcaacctaaggttctagtaaaaggaaatcatttaaacgctggtgcttccccacaat

SEQ ID NO: 255503 - DNA, 424 bp, Homo sapiens
tcttcaagttttacagtactctctgaaactttaccatgagcttctgtgcgggggtctttcccgcagaccctgacccaatgatagatgaataacgtacactgaaacagatattctgcttgtcagtctagctaaggatctgcgcccctcacagacaccaaggaaggtgctgtaaagagttggcagccacagccttgactagctggcctggctggcatttattcagcacacattaaatgacaaaggctttgagtcaacacacctgtgggtaattaacctggtcacacccactctggagagggccatcttgcctgccaatgattaaaggttagtcttaggaccacatgagtaaacaagctatttagataaactattctacattcttttgtatccgcaccctaagctctctggctcctgaaaacagact

SEQ ID NO: 255504 - DNA, 454 bp, Homo sapiens
cgataccgctggggacccctagcaagctgtgagggatgacccatggatcacaggtcatcccgggggttgttaaccctctcccacagccaggtttccaaacatatcacaatgacaaaatgagtgtcctcagcatctcacatcatggtggcagaggagcccctgagcagaaagtgggaggagtgagaagctgggatctgttgcagctgatgccaggacatggctggggagaaggtgggcaggaggatgaaaggcaggctgcaaggtaccccattagtaagtgagagacattagcactcagcctcacgcaagggtaaactcacccagtccagcctggactcccagctcagagacgaagagctagtctaatcttattacttaatattgttagaagattctggaaagacagttttcttagaaaggaggagagcatgggcagaaagaaagaaaaaaaaga

SEQ ID NO: 255505 - DNA, 600 bp, Homo sapiens
gcgaggaccaggagaaagacgaagctcgaaattataaatgtggccaagcacgagagctgaaaacaaagcgtattttcccgtcagatgtttctacaaataaatttcgccagagttctgttttctgaatcagagaggcaagggaaatcgaacaaagacagtatttcaccctgggctggcaggcagctgttagaggtatttacggccttgccgcagtgcggcggccaggcagccgggtagggtatgcgggggcaccggaagctggggagaagccatgaagaactcagaatttcaacttaaattcaatttagggtcacgttttcggaaatggcgtgaacagatgccctctttctagggactggtcctttagacttgatagttttgcagaatgagggagaagttgtgctctctggatgtaggatggttttccccgccttgaagaacgactcaaagggaagcggtgcccaagatgtgacatttctgatccacataacaaccttcagagtgttcattggcaacgaggagatgctgcttgttcggcggaatagggtttgcaaatcagaaaggacagttgaagcttttaatacatgttttcctgaaaaa

SEQ ID NO: 255506 - DNA, 604 bp, Homo sapiens
tgagttgggcttatataattgcacccatttactcactcattcgttcaatcaattatttgttcctattttatgccaagtaatgaacagaaggtgttggggatgcaaaacccaactaattggaatttctatgttacaggagcttatgctttagtgaaattatagacaaattattatacagttttaatccagaatagtaagtgctatgggagcatgcacagaggaaacaacccaatcttaaggaatcaggaaggtttgcagaggactgacaggaaaagtgggcaggtgaagaagatgggcagtgagaggaggagtggaagcacttttgctagggaaaaacatgaataaaagggataattttctgctcttacccctgggtgatctttgcgtggtactgtccatcacagttgggagagacggctcctcagagctgctccacactgttcacagaggatgccattccaaggaaactggggaatagggaaagtctttagcttattcctctttgaggtttgtttgagatgcagtttcttcaatattttgagtctatgaaaacatgttgtatacttaaatatataccacaaaaaataaaaaaaattgcgattta

SEQ ID NO: 255507 - DNA, 566 bp, Homo sapiens
ttttccccaccggttcccctccaacccgcgtccatgtgtgacacctcgttgtactgctattgttataacccaaccagaggtccaagtatagaaatccccttatgggcgtccccacagccaggcgatataagcttttgttcttttgctagtagagatatatcacctgttaaaaggaatcgtgcttaagcatccataggacgtgtttaggatagccccaggatcagatgctctttttttttgtggtttggtccaaagatacacctgatccataataataatggtttgatggtgattatgtttagattaaaggttaagcccagattatctgtttaggaaaaaaaaaaaagaaaaaaaaagaaagaaagaaagacctgaaaagaactaattaacgctcatacatagaatttttgatgagaaccttctggctctaaagaaagtattggtcaactatactgtctaggctaatttcttagaaaataatgagcatagttaaggataactgagaaaatgtaaactatggagactgtatcccatgtcaaaattaaaaaattggtggactgatggga

SEQ ID NO: 255508 - DNA, 573 bp, Homo sapiens
gagctgattattatatttttccctttacttttttggggcactgctaaagatgtatctgaagcagggcatggaggtatgcacctatagtcccagctactcgggaggccaaggcgggaggatcctaggaattcaagactagcctgggcaacatagcaagatccccatttatgcaaaaaattttaaaaaattagccgagcctggtggcatacacctgtagtcctggctactcgggaggctgaggcgggaggatggctggagcccaggagtttgaggctgcagtgagctatggttgaatcactgcactccagcctgggcaacagagagagaccctgtctgttaaaaaaaaaaaaaaagaaaaaaaaagaaagaaagaaagacctgaaaagaactaattaacgctcatacatagaatttttgatgagaaccttctggctctaaagaaagtattggtcaactatactgtctaggctaatttcttagaaaataatgagcatagttaaggataactgagaaaatgtaaactatggagactgtatcccatgtcaaaattaaaaaattggtggactgatggga

SEQ ID NO: 255509 - DNA, 437 bp, Homo sapiens
actgcctccctttcctgcaaggacacacaaggtcgcctattttcatcacaggttcgcacctccaagccttcatccttcatgcacctccttcctttgcctgggttgccgttccttttctctctgctcttccttctcggagataacgtatattctcctccaggaagccgtcctgaatgcccccagtcagcctcacctgctctgagctcccaagtacagtcctatttttgggcctcaatttgtcaccttttgtgggacccgctggtactctgggttctctagttaatctttgacctttttcctagtacagggacggcgcacatagtagggccacaggcacagtttgttgaattaaatgaggctggagagggcgatggacgcagtcctctggagctctccaacttcctggaaagttgtaccttaaataaaaaacccatcct

SEQ ID NO: 255510 - DNA, 500 bp, Homo sapiens
gttgtcccctcaagcactccctgctaataagcactcagccttccaccccaaacatctagtctgtctggtgaattcctggtgattcttcagtggtctgtctcaaatatatcttctacgctcttttctctttagtcttaactgccatccaaggcaacattagttagtccctcattataagaggcaatataagctggtgagaggtatatacccacagtcctagctacttgggagtctgaagcaggaggattgcttgaggccagcctgggcagcatagcaagaccttgtctctttgaaaaaaatagaaagaaaatgctgggattacagtcatgagccactgcgtccagatggaaagtatctttttaaactttatatccctccctagaatttatcccctaatatatggtgtttatggaggtggttggaatcaactactttttataaatatattattaaagagttgacaacccctaaaaatcttttagatgctagacaaaaaaact

SEQ ID NO: 255511 - DNA, 704 bp, Homo sapiens
cacatatgtccaaagagaaaccatgaggttttaattgtggtcaaaagcattctacttatagacttgaatccagatggatgaattcactgctcaacagcataggtatgaatttgtttaatcaacttcgtaagaaccaagtcaagttcagatacacttactttgcagtctaattttctaggggtcccaaagttttaatacaatcatcttctctgatttcccacaggaaatgatgatcccatacatttaaaatgttttaattactcaaggaatacaggaatacatgattaaacacaaacactacagataagcctcaagtgcccttttgcttctgtctgaaattcttgtcccttctcctgcttttgtaggtaaaaactgctatgaatttgatgccttcaaagcatcatttctctctctctctctgtgtgtgtgtgtattcacaaccacattatatatattattttgcataggtgcattttacataaatggttatatatacatatatatgtgtatgtgtctgtgtgtacatatatagtaagtgttgctgttttcagctaactatatgtcatagtaatctactggctttaactcaatcctttgaccagctgtcccaaattctaggctattaaatatgataatgcactgtttattgtgccatccccttgttggaggacactggagttgtttccagttttttggctgttgga

SEQ ID NO: 255512 - DNA, 638 bp, Homo sapiens
tccgcctgcctcggcctcccaaagtgttgggatcacaggtgtgagccaccgaccccggccataaagaacttttatatgacaaaaatcacaaagtgaaaatgcaagccaggaacagagagaagatatttgcaacctctataaatgtcaagaggttaataccaagaatacataaagagcacgtcaattcagcaggaaaaagcaccaaacagaaaaatttgcaaaggatatgaataggcagtacagggtggtggaaaccaaatggccaataaatacaggaaaggaccaccaacctaaatagcaatcagagtaacataaattttaaagcatcaaagacacaatttcaaacttatcagattggcaatagtccaaaaacatcaagttattggcaatatggagcaagaggaaatcttacttattgctggtgggagactaacttgttacagacattttgctgaacaatttggaatacctaggttacaatggaaaacatgaacatctcacattccaatagttcccatttctagtgataggtcttagagaagccttcacacactgcagaagaatatttgtgtgctatttttaatagtgaaaggtaggaaaaatgtaactttacctcagtaaggaaaaggctttatctg

SEQ ID NO: 255513 - DNA, 465 bp, Homo sapiens
tggaccgagcggaggggagctgaggaaactttccctgcttggccaagggaaagctggcttggggtggggctcctcatcagctccttcacctcctcgtcttctctggacaatttcagatagacatcaaaggtggcaagaaatagtacagataattccatttgcccatacccaggttccctgaatgttcgcattttaggacttttactttgtgtgtgtactcgtgtgtgtgtgtgtgtgtgtgtgtgtgtgtgtgtgtgattttcttctgatccttttgggagtaaattgcagacatgatgccccttcatcctaaaaggtgtccatatttcctaaaaccagtacattctcttatataaccgcattgtaattatttcaatgttaattccctgcttttaataacaccatcacctcatctacaggcctcattcagatcttgccatttatcccaacaatatcctttatagc

SEQ ID NO: 255514 - DNA, 363 bp, Homo sapiens
cattgggttaatgtgagacttgaatgacagaatgtatatgaaagcttttcataaaccagagtcctgtataaacactgtcattatctccactcatgaaattcccaagcccagtgtataaactgtttgtgcattccagttttttgtttagctgtcttacaaatgtatggcattattgcataataaaatgaacatttattgaacacctcctgtgtgtaaaagcgaagtgttaggtgcttgctggtggtgggaggagaaaggaaggggtttagaaataaacaagatgtgccgggcgcagtggctcacgcctgtaatcccagcattttgggaggtggatcatgaggtcaggagatcgagaccatcctg

SEQ ID NO: 255515 - DNA, 364 bp, Homo sapiens
aggctgagctctgataagtaaaccattctctgatgtcaggcctttaaaacagcacccattggctgggcatggtggctcacgcctgtaatcccagcactttgggaggccgaggtgggcggatcacaaggtcaggagatcgagaccatcctagccaacacggtgaaatcccgtctctactaaaacaacaacagcaacaacaacaaaaccccaaaaagttagccgggcatggtggcgggcgcctgtagtcccagctacttgggaggctgaggcaggagaatggcgtgaacccgggaggcggagcttgcagtgagcagagatggcgccactgcactccagcctgggcgacagagcgagaccctgtctc

SEQ ID NO: 255516 - DNA, 278 bp, Homo sapiens
  misc_feature (143)..(143): n is a, c, g, or t
gtttatgggtttctatagtacagatgacagggcaatagtttactcacatattgattaatgttctgtttgcttataaaattgtaattgaaaacattactctcagtttaagagatttgaagtgcatcagtaaaatctaaattggnatatctagactgattagaataatatatatgtcctgcataaatcataatgttgtttaacaagggtagcatagtcttaggaatctacttgagttttatttatgcatgaataccatccacaccctttgtggatacatg

SEQ ID NO: 255517 - DNA, 695 bp, Homo sapiens
agcctccctcagacttagtttcttcgtctgaaaaatgggcgtaattactacctgatggggttattgtgagaatcacatgagccaatctatgctcatggtgcaaagcatggaactcctcttgccttctgaaattatgtgagaagatctccagcaccactccttcatcccgagactctcccagccttgcacagtccagagaaggtcactgcagattaaaatagacctaaaagacacatctaccaaatgcagcgtgtggactttaggtggattctgactgaaacccaccaatcccgcttgatccgtggttccactttccaccattgcagttgtctgtggtacaattcaataagatagtcttagggagatagaccacattcacataacttttattacagtgcattatcaattattgttgttaaactcttactgtgcctcatttataattacactttattataggtgtgtatgtataggaaaaaatatagtatacaagggctcggcattatctgtggtttcacggcatccacaggatctcggaacatacaccccgcagataagggggtacagctatataaaaatgtattcttgagaaaatcaggaaaaggcaaataaggattgggcattaaaagatgccaaagtggctgggcgcactggctcaagcctgtaatcccagcactttgggaggcctaggcagg

SEQ ID NO: 255518 - DNA, 463 bp, Homo sapiens
aaatgttttcaaggttcatcgatgttgtagcgttgtgaatgttggctttttctgtgattaacttttttaccccttatagctgtctcaggctttggcatatgcaaacatagtcaacatatctattaggatccgtatacctcttggtgttattgattgttaatgtttttctaagaatatagtgcgaattcagagctgttttaccaacatataagtttgttcaagactaaaggtttcagcagatgttatcttggcaaattgtcagtgtaacttgaaaaaatcactagaatacttttcacttttgatttttcagatattttacactgtgccacgtgttactttctgtagctgatgttctgaatagttatacctcctgctaatgtccaattgtttaaagtatattctagaatgtttcaagactgaaaaaccagtcaatggcacctgtcaactctttggtaaaaaaaaa

SEQ ID NO: 255519 - DNA, 247 bp, Homo sapiens
gcaacatagtttattgcccactcttcaatcctggagaccctgacctatattttgctttagatacccacatccattaccatttgctagactttgtcttcacttgcaactactccacctttggaaattattttgacttcattatctcactttctaaccacaatgacttattcttccagcaatcccattcccataggagttactctttgaatttattgatatcacaagcatcttaactctctattttatg

SEQ ID NO: 255520 - DNA, 465 bp, Homo sapiens
ctcttcttgaggcatttgaacaggattacagggcagtgaagcttaggattgtatgtgctatagatttagaaggtgatttttaaatccctagatgtagatgagccgctggagttggtaaaacagacatttcttccctggaggtatcttgactgcctccattgtgaagtggggaagggtatctagcccacctaatgagctgccagtgcctgattgtagaatgagtggctatcctcagtgagtaattaggatttgtatttttctctcccaggagctattagtagaattctgacatctgatacagaatgagtcacagactgagaagtaaaagttaatgatcagtgacacacagataattagagaaataaagacgatgtagtccatttccatgaaagatgaagtgggcaaaagagacattagtggaacttatctcatactctttgtcttttttctaatctttcttcccac

SEQ ID NO: 255521 - DNA, 567 bp, Homo sapiens
acactaaaagtaaagaaaactgtagagcaatatcccttatgaaggttgatgccaaaatcatcaacaaaatactagcaaatcaaattcagtagcaggctgaaaggattatacaccctgaccaagtacagtttgttcctggaatgcaaggatggttcgacacatgaaaactgatcagtgtaaacagaatgaagggggaaaaacacatgatcatctcaattgatgccaaaaaaaaagcatttgacaaaattcaacatctttcatgatgaaagcactcaatatactagaaatagaaggaaactacctcaacataataaaagttatatgaaaaatctacagcaaatatcatactcaatggcaaaaaaactgaaatcttctcatctaaaatcaggaacaaggcaataatgcccacttctattcaacatattactggaagttctagctagagcaattggacaagaaaaagtggggggtgggggagaagaggcatccaaactggaaaggaagaagtaaaattatctctattcccagatgatgtgatcttatatgcagaaaaccctaacagttcca

SEQ ID NO: 255522 - DNA, 674 bp, Homo sapiens
taacaaaatatttaacttctaaagttaaaaaagatagctataattaaattttaaaaaataaaatacccattgattatccagttttccaaaaaataactaatgtgtaacatgtaaaataaaatccatgtgtaagaacagatgactaatacctcttgcatgaagttcttattcacttccaaatttatagattacaataacaatagcattattttatatatcattttatacaattctcaggtattataaattatccttgaagtatgtgttaacagtgataaacttttaataaattatattctcccccatgtcatctgcatttgcttttttgtattcctacacaatatttcatatccaaactgaatcactgtaatttaagacaatgtcaaaatctcaccacttttgctctgtctgcttaagacccagtgccaaatatccttggaaaattggcagagtttaaggtgaaatctatagatgttgatagagatcaatgtggtctctaagaagtagatggttatcttgctcaaagtcattttttcacttaagaaatgtaaaacacttccattcaccattataatcaatagtctttgtaagtgatgcaactagagacacttgagcaggtacaaacgagctgtccagttataactgtctacctggaatattataagtccatctcc

SEQ ID NO: 255523 - DNA, 681 bp, Homo sapiens
gttggtttcctcattggtaaaatgtcaattagtatctaagtggtgttttgagcattaagcaagagaacatctgcaaagggcccagtccagtggatgacccatagtaggtgtggagtaaacgcagctttccagcagctgaatcaccaggagattttaaaccctttcaggtttagcagccaagagccatccctggatgcagggatttcaggtgattaagcagaaggagcttccccaaattcaggtttaaactggtggggagcattcactgagcctgtcttttggactgtgtcccaggctgtgaggagcagacaaagccagataagctagcgtcactgcctctgagccatccatactttcttggacagccagatgtgtaaggagctgatggcaattctatgcagatgataaaggtatattactggagtttgaacctatccctgtgggattccaaaggagacagcaattcattctaactgggaggatcaggaaaaaattacaaggcattgagcttgtaaatcaagtaagatattgaaagagaagatcggaatggctttctggaagaccgaacagcctaagcaaaggtagaggatagtagacaggaatgttggatatttctgcatctgtatcagaagagtccacattaaagtgtccatttgtgcattttacctatctatgggcctc

SEQ ID NO: 255524 - DNA, 403 bp, Homo sapiens
gcagccttgattcctaaacaagaagttggtcctaagtgcatcctcttgatgtggggcagagaagaaatctgagacagtctcatgcccccaccgccatcgtccccccacttttttgtgggggtgcccaatctgtgctctgccccctccccaggctccgctcctgtgggctgcgtcgtggtttctcctctctgtgggacgtgtgctgggcccctgggggtggatgcagaccgagcctgggcccatgtagaccaactggcgtgggtgtgagagagagagacgcatacccactcaggcacatacacgtgcacacacacacccatgcacgcgtgtgcacacacaccctggccctgttccctaccagtccccaccccctcctgctgcatgtgctcctggttccctctct

SEQ ID NO: 255525 - DNA, 440 bp, Homo sapiens
gaccagtctgggcaacatggcaaaaccctgtctctacaaaaaaaaaaatatatatatatatattagtcaggtgtggtggcatgcccctgtagtcctagctgcttgggaagctgaggtgggaggattgtttgagccagggaggtcaaggctgcaagtaagctgtgatcatgccactgtactccagcctggctgacagtgagatgttgtgtcaaaaaaagtaaacaataaaaattaaaaagtcacaataacagaagaatctgcttctgctaaccaagacgcagcagacaagttcccagatgccattaagaaaatcactgagggtttggcgcagtggcttacatctgtaatcccagcactttgggaagtcaaggcaggcagattgcttgagcccaggagttcgagaccagcctgggcaacatggcaaaactccatctctacta

SEQ ID NO: 255526 - DNA, 433 bp, Homo sapiens
gatgacaaagcaaagatttcagaaaggagcaagttttaagaataaatgtgatgtgatagaagcagaggcaaggttggcagctaactggtttggtgtgatttcatggtttgcaaccaggactgagtgtctgattctttgattttctagagacattcctaatttcatccctaactctccccagataaattctcatctcttatcaaaaacaaggtccctggaatggaaagtcagggaactccctgaggaaatgagtgtttagctgtattctcagtcatgtaggttttgttgatcatagatatttttgaattgatgctttcttgtccccatctctccttcccttaattcaagtcatacttatcactcctttcagcctctggttattccccctttctgattcatctgtcgtatggacctcaaatttaaaaagaagaaa

SEQ ID NO: 255527 - DNA, 646 bp, Homo sapiens
gtccggggagggttttttcccttctaaccacccgcgctctcacactttgcctccgctccgccgtttccatggctccggtttcctactttcctcttgtctcctccgtcctcagcctgttctgtaatgtgggatttactagaagagcagggctggtgttcgaggaggagaagttgaaatcctagagggaggaaggcggggaagccaatactacttgctatttccactgcaatgaacgtctctgtgtcatcaaaataagaacttcaaccccaaggttgaaacagccaagcagaatttgatggaaatatatttaggaacagctaaattagcagtgcgacgcgtgttttcttttcattgaagaattcagccagttaaaacgagtctaaatggaagtctgaaagctttttcttcattgttgaggaataaaatatttcgtgtatttttcgttttccagattcattcatttaacaaatatcagttgagcactttccatgccgtagggcctgtacaaggcacatagcattctagacatctgaagcatcaaaactaatcatttttattttgaagaaaatcactcaaaatattttatgtactttgtgcctttcatgaacagaatattccaagcattctctgcaaaatacgcatgaaa

SEQ ID NO: 255528 - DNA, 809 bp, Homo sapiens
aatgaatatagaatctaccttacaggggtttatgaggattaaatataatgttaaaaaaaatgcttggtctaatgcctggcataacactaagctctcaaaggtagatgctattaataagcattgtgtgtgttcctatgaaaaaattgaattattctctgtatttaattgatttgtaattgtacctaatgattaatatatctgtttctctgataatccagtttcatttgtatgagcagctgtcataattaaaagccgataaaagtttaaacaagatgcttactatgtgccaagtaccttattagtcaagattttcagtttacagtcttaaggtttttgttccataattttctttatcagaactttccttttggggtggtagaaatattcgaattgtggtgttggttgcattcaacttggagaacatactaaaaaccattgactaggacactttgggtgaattgtatgttatgtgagttttatctcaataaagctgtttttaaaaaggttaagcatatatatgttacacaaaattaaagtagtttttcagaatttaacttacagatctttcaaaacttaagagcttttacagaacttagtagaaaaagaaatgaacaaaagcatgtcgtgagtggtgacaacaggatttatttaaacctgtatttatttatttatttatttgttgttttgttgttgaaacattaacattctttaacttagaaagccatgtttccattgaggctagagtgtgtattccagaaaaatgccacactatatgttgtggaaggaaaatccacatccttttattgagt

SEQ ID NO: 255529 - DNA, 945 bp, Homo sapiens
acctaaaactgctaaaacaaaaatataaagacaaggactaggtgattaaggggagagaaaaatcatctcttttccaggaaacctttgctaaaagaagcaaaacttgactctatgcctcatggaaactgacacaaagaaaagaaactgatggattgcacaggccttgttatagaaatagatctataaaaagatctgtccacaggaaatatacaccttctcctggttctgaacttcaatggggatttgtcacctaggtctccatctataggaataccttcacatacctatctattcatgcacatattctgaaaacaggtacatacaaaattacaacaaaggaaaaaaattctattgaacacttaaaaatagaaacaggccaggcacggtggctcatgctgtaatcccaacaatttgggaggctgaggctggtggatcacctgaggtcaggagtgtgagaccagcttggccaacatggtgaaaccccgtcactactaaaaatacaaaaaaaaattagcctgtgtggtggcacactcctacaatcccagctactcgggaggctgaagcaggagaatcgcttgaactcaggaggcagaggttgcagtaaaccaagatcacaccactgcactccagcctgggagacaagagcaaaactgtgtcttaaaaaaaaaaaaagaaacaattagaatggatagctacacatcaaaatataaaaaggaaatagaaaaatagaattaattatgtgtaagcaaacccagatttggctgctgtctgctcaatagccgaacactagaagtgagagttgatgggaggaaaagcaggtttattcagagagccagcaaacatgaagatggtgatccagcatcctaaagtaccatcttaactcagtacacattgtaggctctttttatgttaagggcagggagaaaagaagggggttgaaatcaa

SEQ ID NO: 255530 - DNA, 818 bp, Homo sapiens
agccataagggagagaaaacatacatactattaagtggaagtagataatcataaaagtatcttccctgtcttcatattgagtagcctaaggaagaagagcaagaggaagggttggtcttgttgtctcaggggtggcagaaatgaaagaaaatttgtatttaagtggacccatgcagttcaaacccgtgttgttcaagggtcaactatattttgctgtcataaaccaattaaaatttttaggtgatttttaaaatcaatagataattagtttaaaataagtaagtaattgaagtttggcattgaggttagtatagtatagtatttaagttagtatatgcataattttaatagcaaatgctgaaaaataactattaaatagattagatgctatctgaatagagtattatatagccatttgtattagtccattttgtgttgctgtaaaggaatacttgaggcgctgggtaagttataaagaaaagaagtttattttggctcacagttttgcagaccatacaagaagtgtagcaccagcatctgcttctggtgagggcctcaggaagcttacaatcatggtaagacaaagtgggagcaggcacctcacatggccagagaagaagcagaggaggggagaaggaccagagacagaggaggggacatatatccaaactatatcaccattgaaaattgttgggtgggcatgctggcttatacctgtaatcccagctcttcgggaggcggtgggaggattgcttcaggccaggagtttgagactaacctgggcaatagagtgagtcctcatctctaccaaaaggaaa

SEQ ID NO: 255531 - DNA, 425 bp, Homo sapiens
aaacactgtcagtgctttcataaactgggtcactgcggctagtgctctgggatgtacaatgacagggcaggaagtgcccttgaattacacagtgagaccctctaattctctttccttctgattacaacaaggaggttgtttcagtttggagctgatggatttgaacacctttccaacacttgcttgttactattattactgttttaacaggccatatgttcagagctttttggcaggtttctggctagaatttaatttgtttgctttgtttttgttgcatttatttttgtaattaacttctgttcatggccattgatattggtcttccctttatgttgtgatcatgtattttaaaaaataaactgaagtcagacataaaagttctatttaaagaaagaaatagttatgatgttgtgcaacgtggc

SEQ ID NO: 255532 - DNA, 462 bp, Homo sapiens
gaactgttgaccaaaatgaaatagattattaatggttacatctgttagatggtaacaattactgaatggtaatttttcattagttagaaaagtttggaaagagcatctacttatatagctttttttccgatgttctctttcaaaaacaacagcagggttttttgccccattgcatggtgcttacaataattcattaatttatattcttgggatgtgctagaaacacttagtccccagatacatctttggaattgagtaataatgaatcttttctcttttcagccctccccctgccttttgtggcaaaggaaggagagaaagagaaaatgcagctagtgataagcaaactagccaaagtatctttgtgttgttattctgaagtgaggtctactcactttttatcaccatttaaacagaacttttaaaaattgagatggtatgatacaatatttcatttcttat

SEQ ID NO: 255533 - DNA, 342 bp, Homo sapiens
tgctcctgaatgctttcatccatttaaggaacatttacggcactgtgagagaggatgccaaggataccaagagacctgccaaggataccaaggatgccaagagatctgatgcatagtcttaccctcaatgggcttacaaagtactggggggagactccgatccggccgctgccatgttggccaccaagggtatgggtttggtggcctctgagcaaaatgcctgcctttggcagggagacggacctagctctgctgctgaccagcagtgtggcattggccaaccatcctaaacttcttgcatccttatccataaagggcaacacgagagctatcatttaccac

SEQ ID NO: 255534 - DNA, 424 bp, Homo sapiens
ggcaaacttttttctgcaaaaatcactttggatttgcagactagtctctgtaaactataaaacttctgttgtaaggagaaagcagccataggcaatatgtaatggaataagcttggctacatttggcccacaggtcctagattgccaatccctgatctgtagaacaaactaccaaaatagggatatacattcattagaactacggagcagctgagacatctattttgaaactagtcattcattttttccacctattagaacaaaaaatatacctcccagtacctgtttccttgacttaaccctagctaccacacaaactggttgcccaacaagcagcccataaaacaaacagtacaaataatatatattcttaaatgaatgccatatattctccaccccatgatcctacaagattgctggcagg

SEQ ID NO: 255535 - DNA, 354 bp, Homo sapiens
  misc_feature (41)..(42): n is a, c, g, or t
acccaacacacacatacactcacacacccaacacacacacnnacaacacacactgacacacactcacacacacccaacatacacacaccccccaacacacacactcacatacactcaaacacacacccaacacacacagaggagtccttctccatgctgctaacctgagcagccttctctatgcctccatcgcatctcacaactctgtggcttaagattctccagtggcttcccactgcacttagacaacaatctgtgagggtgacgtgaaggtgcaacatttatggggagcaactctggggcacagtgaaagggagtgaaggagaaaaagccccgatcattaagccagacaag

SEQ ID NO: 255536 - DNA, 692 bp, Homo sapiens
  misc_feature (532)..(532): n is a, c, g, or t
  misc_feature (555)..(555): n is a, c, g, or t
  misc_feature (568)..(568): n is a, c, g, or t
  misc_feature (578)..(578): n is a, c, g, or t
  misc_feature (609)..(609): n is a, c, g, or t
  misc_feature (659)..(659): n is a, c, g, or t
gaaatgaagactggctctgtggtttgaatgtatcctctctaccttctccttttcctccttcttcttctttgggctatgtatccttaaatcacttctttagaaaaacagcatgagaagtactttctaaatacaggcatacctcagatatattgggggttgtgtttcaggccaccataattgtgataaactgaatatcacaaaaaggtaagtcatgcaaattttgtggtttcccagtacatataaagtcctttccccattgcttgttattgttgattttgtcaatgaccagatgattgcaggtgtgtagctttattcatgggttctctgtcctgttccattgatctatgtgtttgtttttgcatcagtaccatgctgttttggttactgtggtcttgtagtatagtttgaaatcaggtagtgtaataccactggctttgttccttttacttagactagttctcactctcgtgccggttttatctggttaatattaagcactggcatggtctttataaaattaggctatttcttnaatttatatcctttagttataantttaaaagatgtnaaccattaanttacattttagaaacattctatttgacactngtattaactcgcatcatgtgaataacattaaatggatatgaaatagcagnctttaaagaaatagtgttttaaatactgtggtt

SEQ ID NO: 255537 - DNA, 692 bp, Homo sapiens
  misc_feature (532)..(532): n is a, c, g, or t
  misc_feature (555)..(555): n is a, c, g, or t
  misc_feature (568)..(568): n is a, c, g, or t
  misc_feature (578)..(578): n is a, c, g, or t
  misc_feature (609)..(609): n is a, c, g, or t
gaaatgaagactggctctgtggtttgaatgtatcctctctaccttctccttttcctccttcttcttctttgggctatgtatccttaaatcacttctttagaaaaacagcatgagaagtactttctaaatacaggcatacctcagatatattgggggttgtgtttcaggccaccataattgtgataaactgaatatcacaaaaaggtaagtcatgcaaattttgtggtttcccagtacatataaagtcctttccccattgcttgttattgttgattttgtcaatgaccagatgattgcaggtgtgtagctttattcatgggttctctgtcctgttccattgatctatgtgtttgtttttgcatcagtaccatgctgttttggttactgtggtcttgtagtatagtttgaaatcaggtagtgtaataccactggctttgttccttttacttagactagttctcactctcgtgccggttttatctggttaatattaagcactggcatggtctttataaaattaggctatttcttnaatttatatcctttagttataantttaaaagatgtnaaccattaanttacattttagaaacattctattgacctgantatacttgcttcatgtgataccataatggtatgaattgcagctttaaggaatgtgtttaaatcctaaagtaggtattgcgtcc

SEQ ID NO: 255538 - DNA, 359 bp, Homo sapiens
atttggttttccaagtagatacaataattctaaatgtctatgcatttaactaaagcgctttaaaatgcacaaagcaggccggccactgtggctcacgcctgtaatcccagcactttgggaggcccaggtgggcagatcacttgaagtcaggagtttgagaccagcctggccaacatggtgaaaccccatctctaccgaaaatataaaaaattagccaggcgtggtggcatgcgactgtaattgcagttactcaggaggctgaggcaggagaattacttgaacctgggaggcggagcttgcggtgggccgagacctgccactgcactgaagcctgggcaacagagtgagactctgtctca

SEQ ID NO: 255539 - DNA, 283 bp, Homo sapiens
tttttttttttgagaccaagtcttgctctgttgcccagactggaatgcagtggcatgaacggggctcactaaagcctcaacctcctgtgctcaaacaatcctcctcccaccagcctttccaatagctgggaccacaggcgagcaccaccatgcctggctaattttaatttttctattttatgtagaaatgcaacctcaccctgttgccctagctggtctaaaacccctgggctcaagcaatcctcctatctcagccttccaatacctgggattacaggtatga

SEQ ID NO: 255540 - DNA, 503 bp, Homo sapiens
gcatccatccctaaataatttgcttaattcctagaactgaaaatacttcctctgtttttaaggacttcagtttatgtttccacgtttataacgaagctcctagtagctatttatactaacattagcagcatacgttttgcgcatgcccatttattcccaaatctttgccaatgctgtgtattgtctttttaaataatctttgccaaattaataggcataaattatattttgatctttaaaattaacttattgttcttttttcctagttaaaaaaaaaaagacatccatattatagaaaatccaaagggacaggggaagcacaaagtaaaacccccataatgctgaattcagagataatcattaacctttgggtaatttttctttgcatatacataatatatatttgaataacaacggagttatactgtacataccatttgtaacctacttttttcattgactatatcatgactatctttccatgtcattaaagaatcttccac

SEQ ID NO: 255541 - DNA, 703 bp, Homo sapiens
ggatgatctgtgcagcaaaccaccatgggacacatttacgtatgtaacaaacctggatgtactacacatgtatccctgaacttaaaagttggaaaaaataaatgaaggagtggtctttaaccatgtttgctcaattatctctgaaattttttttaaaaaactacatattccttgtatgtttaaaattgacttactttttattataattttaaatagttgtagagaataacttgtttaaatattgatattaaaatataacttttttcatccagtgggatttaaaaatcgtacacattatccgttaaaaaatgcttgaacaatctcttcattaaagttggaaatttaacatcgtgtctttttccattgaactcctgtgtccattttactttgcaagattccattgtaatttatatagtttatgcttgtcttttattgatcatgctgccatttctctacaataaaaacatataaattgaaattgtttatattaaattttttctgttggcattaggctttcttttgcattaagcaaatattttctagtgtaacattttaattcctttaatgatttatatatatatatatataaaatatgaaatttttttgagacagattctcactgtttcgccctggctggaatgcagtggcacaatctcggctctctgcaacctcagcctcccaggttccagcgattctcgtacct

SEQ ID NO: 255542 - DNA, 295 bp, Homo sapiens
gggaggtgttctgcaagatactgggttagtcagcagacaagtcactgaggatttgacatttaaatggaaacttcaaggtcaggtaggcaaatattggggagcatcagatcaagtcaggagagaggtcctagtgtctgaaggagtggacaaggccatcgcagctcatcgttagtgcaagagagaactgccatcagccagcgcctgaggaaagctcccaatggcattgggaggccattggagagactgacgcaaggaagtgatgagatactggttggttataaagatgatttgttat

SEQ ID NO: 255543 - DNA, 448 bp, Homo sapiens
agaaatgattgactgtcacccaagtctttactgaacttggaaacatcaaataacttgacgaagcaagtcagtgaaagagctggctagaaggctggcatcccccagggtgctgggataaaattcttaactcttcatggatagcagtgaccaaagtccatagggtggaggggtggagagcagggtagggtgaggacagaagctgccaggggccaggtgaagggactgagacccgcagctgggtttgtgtccaggctcccggcttctcagacacagctttgctgtgtgcatgacccctgcatccgaccctggcatgggatcctggctcccatgaaatcaccggccaggatgtcagttctacaataaccctgtcaggaaagttaactctccaggtagcacagctggagggcagaacttgggcaagagcccaggccgctgagcaccaggccag

SEQ ID NO: 255544 - DNA, 448 bp, Homo sapiens
gattgctttatccaggtaagaggtcaatcacagtcttctgttactttgctaatacccccatatctctcactgttaagtagtctacagcctcatttgaattgttggtgccacaattttgtgacctttggtaaggtattaagcctctgtgtgcctgagtttccctttctgtaaatctggccacgatatttgtgatacccaatacatagggctattgtaaagatgtaaattacaaagaataagaataactcctggatattagcaattttatacttacaaagtcccacagtatagtgatatggtaagcagtgaaaggcagtttataatatgacatggaaaaagtctgatggacactgagagtctaataagaaaaagttccaagagaagaaatatggagcactcaaagcaagaggaagcctgggcatcttgcagaaaactattgtgtttggtt

SEQ ID NO: 255545 - DNA, 403 bp, Homo sapiens
aggcactcctgggtgactgggggccttgtgagagtctctagggggctgaccccctgctatgtgcagcagccctgctgggagatccccagcaaaaattaattttaaaaatggcttgttagccgggtgcagtggctcacgcctgtaatcccagcactctgggaggccgaggagagtgggatcatgaggtcaggagattgagaccatcctggctaacacggtgaaaccccgtctcgactaaaaatacaaaaaattagctgggtgtggtggcacgcacctgtagtcccagctactcgggaggctgaggcaggaaaatcacttgaacctgggaagtggaggttgcagtgagccaagatcgcgccactgcactccagcctgggcaacagagtgagactccgtctcaaaa

SEQ ID NO: 255546 - DNA, 445 bp, Homo sapiens
tttttttttctatgatttaaaaacaacactgacaagcccagctaaaactttcatcaaaattaccttgaaagcacaaactggcctcctttgtctcaattttccctgtgactggccttttttttttttttttttttgagatggagtctcactctgtcgcccaggctggagagcaatggcgccacctcggctcactgcaagctccacctctcgggttccacgccattctcctgcctcagcctcctgagtagctgggactacaggcgcctgccaccacgcccagcaaatttttctgtatttttagcagagatggggctaaggcaggagaatcactcgaatccgggaggcagaggttgtggtgagctgagatcgagccattgcactccagcctgggcaacaagagtgaaattctgtctcaaaaaaaaagaatggtgagacagttgaatat

SEQ ID NO: 255547 - DNA, 475 bp, Homo sapiens
aatatcaacccctccttcctcccccactgcagctgcaaacattttgttttgccattagaaatgacttacttaagggaagcagaattttacaggcagtttacaggctggtcttgttcagtagtttccaaaagccaggggagggcggaggcggccagcagtccccacaagttgggatggattggaagtgagaagtgagtcctgtgtgacggacactttctcctgcacagccgcacgcccctcggtgggctctcggcacgttgcgggcattagggagaaaggcagcgggaggccctcgctatactctgatagatccagccccctcagtcctcctggaatagcctggccctggctccgaggagagaagaggggctgttgctgggcccacagaagaaaaggcaaccccaggcataaagaggctctcagcagcccctgcccgaacgctcctggcaggcaagggccccatagcaccctgggg

SEQ ID NO: 255548 - DNA, 455 bp, Homo sapiens
attactcagagttcaggtgcagataatagaaaccacttgagcaattttgagcagttttaatataggcatatggtgcttataaacctgtgggaaggggtggaacagcaggcttccggtgggccctccagaaatgattcttaaattgacacttcaggacctatctgcttcttggcctcaggaacacacaccttagccatgatctgtgtataaaataagcaagccaactcagaaccaagctgcacctgttagattctttttagcaaaatggagtcatagtgcctggcccttctctccctttaattcaatagcaaaatcaaatcttggaagagtgtatctgattggagcaatctaaatcacttccagaactctaactgcaaggaatttggggaaataaattctttagtttttttaatctgctattgttcaggaacgaacactaagaagagagatggatg

SEQ ID NO: 255549 - DNA, 603 bp, Homo sapiens
ctgccagggcctcgaatgcgttggcatgccaaggtggtggatgcaggtttggccaaaaccttcctgggaatggggaggggggtgtctaggtgcctggcacccgaccctgactaaaacagctgaaaacagttttataaaatagtataaaattgcttacccacgaatacgtatcaaggtcttaaggaattaacaggtcaaaatttttattcattcatttattcctttgttttgcttggtcattcagaggcaaggtcagcatttgatggaggcaggagagaagcagcccttccacctggccctggagctggttttgcccctcactgcttgagccaactggaacgtggcatggtggcctcagggctgggcatggaaggccgactccaaggctgactccgagccgcctgtcagtgatgtgcaagtctttaccctgctgtgaggggtaggaggtcaactgagtcaaggagcaaagccaagaaccagatctgtacaaaagagaaaaaaaaagtcctgctgacagcctgggagtgaggctgccttgcacaggcagaacaaatgaataaatgaatgaacgaataaaaattttgacctggtaaaaaaaaaaaa

SEQ ID NO: 255550 - DNA, 267 bp, Homo sapiens
gaattcaagcttctaacgatgtacggggacatggaaggccgactccaaggctgactccgagccgcctgtcagtgatgtgcaagtctttaccctgctgtgaggggtaggaggtcaactgagtcaaggagcaaagccaagaaccagatctgtacaaaagagaaaaaaaaagtcctgctgacagcctgggagtgaggctgccttgcacaggcagaacaaatgaataaatgaatgaacgaataaaaattttgacctggtaaaaaaaaaaaa

SEQ ID NO: 255551 - DNA, 746 bp, Homo sapiens
gggacctctgccctcaatggacatgagaattatctgagacatttatttaaaatggagctatctcctgccctacctttaaatgactgatttcagcagatgtgggatgaaattctagaaattgatctcttcaagttgtgctgcagccactccacaccaggacaataccccttacaatatcctcattagcttttgatccagtcccatacctcccataatgttttcctcaaaacactggtcccttcagaggactttaaaaataagttctatagtcaaataagtttgagacttacttcacatcagatgcctctgtctagggatcacaattcatattagcatagtgaatgctgtaaatatttctctaggaaagaataattctataccagctttaagccagtgttttctaaacttacgtgagcacataaaatttcctttgtaatacttagtaacagtttcctggaacaggagatcttgatattaattgactcattgtgaatacttcctacagcccccttctagggcagaatgatttcttttttccttgcaaagtgagcctctaaagagatgtagttctgagcattatgcctcgatcagtctgtaaaaatccgggttctgtttggatacagaccgtgagggaccctgtctctactgttcaatggtagatcatctaaagaaaataaatgcaatcctgtccttcatcatggatcggcattcctgctatagaagcttcaggagatgacctcattcaa

SEQ ID NO: 255552 - DNA, 379 bp, Homo sapiens
gaggccccactgataggtgggcttcaaataaatcaaaacgaatgcaaggctttcctttgactcttccttaaaccatcccataggcttccattttcacatgtaactgacatccacctattagtgacctactaagagtgttattaaaggtactctagagaactgtaaatcagtattttactaggaattctgactgaaacacagtatttggtaaacttgccaagttactaccatatatgtgggcaaacggaagtgctaccatttccagacaatacatttgcatgaccatcattccaagttagtcagtttcccattgctgctactctgctttctaatgaccaaatgttagtttggctttaccatcatcaatttcatttgctat

SEQ ID NO: 255553 - DNA, 288 bp, Homo sapiens
gccacatatatctaaccatgagacccaacttaattcaactattctatcaattgcctactgagtgccaggaactgtggtgtactaggcctagagtaagtcgtgagcaaaacagactttttcctgctataggagcagaaaggtgtagtacctttcttcatccatcataagcgttacagttgacactcctataacaaaagacagattaacaagagaaaagcataacaaatttatttaaccaaagttttacatgaaatgggagcctttagaaatgaatagcccccctccccc

SEQ ID NO: 255554 - DNA, 439 bp, Homo sapiens
gatagctgatcatcctgcaatggttacaagtttttcttccatctgaagccatcctgagcaattgaattaggcaaggagcgctttgctcctttcaaatcagggaaaagtaagaacttcatgtaagttttgtatattgaacacatattaaatggaatatatctaatttttccagttgatataagacctttggattggatacatagaacctatttcactaaaaaatttagaggttcttaaatacagcattctacaagaataggatttataataatcgacctttcctttttaaattttcatcctctcaaaaattaactatgtcaggccaggcatggtggctcatgcctgtaatccagcactttggaaggcctaggcaggtgaatcacttgaggtcagcagttcaacaccagcctagtcaacatggtgaaaccccatctctact

SEQ ID NO: 255555 - DNA, 247 bp, Homo sapiens
ggcacatgtaccatgtgtcctgctgacagtaaaaggtgagctactttccatccaaggaacaattgaaatgtctccaatacaagacgctgtgagaaggtcatagagatgataggtaaagagttttctctgtgtttattacctctcagtggagtcattctctggattattgccagatgcaaaactcttcaagggccaggtggcaactcccaccgccccagttaagccacactcactcaatgtaccagca

SEQ ID NO: 255556 - DNA, 452 bp, Homo sapiens
gatgaggggacaactcaggaccagctctaagcagtgcagatcaccacctaaggggagggtcatttgaattgactgacatgccagcctcccttaggatcttaaatgccacccactgaaatcatttttcctgggatcttccatgtttagggggctgcccaaacccccgggtcagtatacggaacctaatgacaacaatagacaagagttagtgagtccttccatgtgtcaggcccaatgataagagcttaacattaatgttcactacaaccatatctatggtattatccctttcacccccatcattctcactcccttaactgtgctgcatgtttttcatagcatgtactcttgctaaaattatatatttatttgttttattttttgttacctgactcaaacttgtgagctctatgaaggaactctgtgttgttaaccctcataggcaggttgct

SEQ ID NO: 255557 - DNA, 817 bp, Homo sapiens
aggtccctggagctgccgctctggctcctgggcgattccggggagccattctccccaatttgccaactccctgggcatctctctctctcttcctggtcccgccacacccaaacaactcttatagttccacccggtatactggtctcttgacaggaacttttgggaaatgcccctcccccagccccttgtctggggcaacttccttgtctcttctcccccaccggtgttggggagttccttgtctccactcccaaccacagagccacaagtacattatctatgcccaggcgagtccctatgcccaggctaggagagccgcacttcttcctacagctgacacgtttggtttttggaggggaaaggggagctgtagctgaatcagtaatggaaattggtaagtgaccaaagaagtttgagacactaaaaaaatgagtcctttaacgatcctagtccttgatcctgagctcattctgatctccagttagtcatgaacagagaaatcgattattgatgactaattcaacacggaggcaacatcctccagaccttttggagacccatcgctgaggaagacttcctggctcttaggaatagctgccgtataccctccttgcctgtcgggtatatcagagcctcagagagactattacctagattaatttgattaccaaatgttgctatcttatttctttatataccaaatcacatttctgtttgtgcatactgtgtgggtttgttaacattgatgtttattttggcctctaaagagcaaggatcgcatttagcttaatatgccacagatgctgttgatggtgaa

SEQ ID NO: 255558 - DNA, 420 bp, Homo sapiens
ttccccctgtctgaagaaggggagcaggtttctgagtactccggggcgcggtgcctccccctaaacgcgaatggaacttttgggaaatgcccctcccccagccccttgtctggggcaacttccttgtctcttctcccccaccggtgttggggagttccttgtctccactcccaaccacagagccacaagtacattatctatgcccaggcgagtccctatgcccaggctaggagagccgcacttcttcctacagctgacacgtttggtttttggaggggaaaggggagctgtagctgaatcagtaatggaaattgatgaacctgtgatgtgactcctgggagtagtttgcaatcaccattggcccaaaaggagccatctacgtgctcagtggggtctagtaaaggataatattaattctta

SEQ ID NO: 255559 - DNA, 348 bp, Homo sapiens
ctatcagctcctccaatttaatgtacaaaatgagactatactgaatataccttttatatcctgttatttaacttaacattatattgtgactactttctcgaatcaatgcatataattttgtctggttttgctttctttttcatcaaagatgtacatgcacataatctaagaatcagtagttcaagtccctcttctatcctgctccccagatcaaaacttgaaatattttagtcaattcctttgggatttacttccatgtcttaaaataacaccgtattcatattctacttaccagcacgtgactatcagacatcacctactgacttctgactctggaaatgggggttt

SEQ ID NO: 255560 - DNA, 689 bp, Homo sapiens
ctgcctgccttggcctctcaaagtgctgggattacaggcatgagccaccatgcctgaccccgaattcttttagatgacaaggtatccaggttaccttcactctttcttactgtgagcctggagccacttatatgagttactcctggctgccacattcagtggggcagcttgtgtactgcacgactcccaggaggcattcacatcacagtcagtatgaatgtgcttcctggaggaacgcagtgagtaagttgtgtagccacaaatagtgaccctatctgaggccccatcccagttctcctgaatcagaatctctagtgggagcacccaggaatctacatcttcacaaatctcacaggttcctattaacactaaagtttgaaaatcactgcttagggataggttttgagagatacatcagaaggaaagaaatgtgggaaattatctcagcatctatgctgtccctggatcctttgctttccaggcttaaatgtacacagtgggtttcatggataactcagtgaatcattgccgttcagagtatgatggccctgctagtgatctggtcatcttttcatctctttccaagcaggcctctcttgttttattttctgagagcttttatattcaaaaattttaagagagaagttctatcagggcactccatattgaatggtggcccccattgggta

SEQ ID NO: 255561 - DNA, 351 bp, Homo sapiens
ttttttttgagaccaagtctcgctctgtcgcccaggctggagtgcagcggcatgaactcagctcactgcaacctccgccttccgggttcaagtgattctcgtccctcagcctcccgagtagctgggactacaggcattagccaccacaccaggctaatttttgtatttttagtagagatggggtttcgctgtgttggccaggctggtcttgaactcctgacttcaggtgatccacctgcctcggcctcccaaagtgctgggattacaggcatgagccactgtgcctggccttacatcccttaatctatgtgcacagcaattatgtctatcttaaaggatttacagcataaa

SEQ ID NO: 255562 - DNA, 303 bp, Homo sapiens
  misc_feature (303)..(303): n is a, c, g, or t
gcctgctccacacctgggtctgaccagggtgagtggatcttttggaacctagacagagcacaactgaaagggttgactgaactcccacaaagatgtcctgcaccagtctcatgcatctcgttcatcagtgcctttcataccttcaagagctcttgcctcagagcattgctatgcctgaggtgtgtctcagaagcagccattggcacagtggcttggggctgggctcaaaaatttgctctcttgaagtttggatgtgattgctctgaacaagctgctttgccacaataaatattttcaagtttn

SEQ ID NO: 255563 - DNA, 241 bp, Homo sapiens
gctgggggtttactttgtagctgaggtaagtcacttaacctcaccgcatctttctagtgtgtgcaacttgacttatcgtcattgaaagctttttattctatctgacattttacacttgtcagtctagggttgccttcatgtgggctgggcaaggtgtagtgtgttcctcccgttaggaacgactttccatggctgtgatgataaaatgacaaggtgtgaggctgatgagcgtctccgtgtt

SEQ ID NO: 255564 - DNA, 381 bp, Homo sapiens
aaaggatgagtggataaacaaaatgtggcctctacatttactgaaatatgagtcagctttaaaaggaaggcagttctgacacacactacaacatggatgaaccctgaggaccttacacttagtgaaataagccagtcataccgtgtcagcttatttataagaggtacttagagtagtcaaaatcacagagacagaaagtagagtgcttgccagtggttgaggggagagaagaaagggaattactgtttaatggggactgagtttcagtttacaagacgagttgcggagatggatggtggtgatagacacacaacgttgtgaatgcgtttaacactaccaatgtgtactctttagtatagttaggatgcgaaattttatgtt

SEQ ID NO: 255565 - DNA, 251 bp, Homo sapiens
gcagagaaaaagtcctcataactgatgtttagatgggaaggcaaagagacaatctcagtcaatctgatgtgccaggtaagaaagcctcgtgtgctgtccacaggaccgaacttcagtactaaatcaggatcaggacaaccatttgaactgagtaaactaacatatctacatccaaatctttgggtctcctttgcttctgggctactcactggcaaaagtcctgagcggctctcacaatatctgcttttcca

SEQ ID NO: 255566 - DNA, 293 bp, Homo sapiens
agaaaaatgctgtcacactctgatttaaaaaaaaatatgcaacagaaaggaaaatacattataatcatgcaactaaaccagcagccactgaggcaagttttaagattagaacagccccagatttttggagtacatgaatagaatttttaaaatattttatctggtttgctcatccctgatccccattccctacttcaccaccaatgaaatattttttccacttgaaagattaggtaactggtatgtttgagtaatcccacatgcttaataaatgattacataacagtttattt

SEQ ID NO: 255567 - DNA, 577 bp, Homo sapiens
actcatcttctactgcagtaagaagggtatcataggtattttttgtggttctaatgggtactcagaaaatccttatgtgatttaatatactcttaaaaggaccgtctgaaaccaaaacatgtactaatatccagtggcctttctctctgtatactggtttaataataacattctgcatcaaatcctttcagaaacctatgaacagaagtaaaatgatatgatacctgagaattattttaaaatgcttcagaaaagaaaatggggcagggggaggtgctgaaacaagaacagcaaaatgtggtcaatttttgaagctggatgatgtatatgtctgaaatttaacataataagttttaaaatcttcttagagagttggcagatcatatactatacacaaatattgtacatgttataggatcaaaatatgggattaaactaagggactgaaactacttatagaatgtcattctcaagccaggcacagtggctgatgcctataatcccagcactttgggagatttcttgagcccaggagttcaacactagcctggccaacacagcgaaactctgtctctac

SEQ ID NO: 255568 - DNA, 273 bp, Homo sapiens
gggcaggcgttcactgttgtgtgcggagaatattctctaaagatgcaggatggggaagagggggtggagcagagagtggggaggagggaaagaaaaaggacaagtgtggtgggtcacatgcccattctccccaccccccaccccttgccagttgcctgctcaatgcttctacccatgacatctcactgttgggaagaaatgagatctttcagtttcaaatgtctgccaaagaaaagggacggaggcttaagttctcactcaatggtcagccag

SEQ ID NO: 255569 - DNA, 499 bp, Homo sapiens
cctgggctcaagcaatccacctgcatcagcctcccaaaggctgttattacaggcgtgatccaccactttatttaaaattttagttacagttaaataaaagtatttcattgtgtactgtctgcaatcattttgttcagtaccaatgtacacaccacactgggaaacactggcatatatatagtggcacttctacatgcattgtacatcaaattgcattgataatactaagtgagcttttctgagatgattataacgggagaagagaggttcccttgtggttgcatgttatctcaacaccctttctccttccttttgtaagctgaaatatttcattggaaatttacaaattatgtagagaggatcttaagaccgtctattttcagagatacttctctcttccattggaagaatgactgtaaacttggtatcaattttcctaagagtcccaaaatacagtactgtaaattgtaatattcagactgtcttatgttctacctaa

SEQ ID NO: 255570 - DNA, 436 bp, Homo sapiens
tcccacagcctgggctggaaactatgtggggaaaaggcagggacttaaggctgaagcagaaaaactagagaaagaaaaaaaggtggagacttaaaacagaggtgggaactccaagaaaaagtgcaatatcataaaaactcagtgcacatttctcgggccgctggctcattctctatcagcagcccgctctgccttatcttccagagtacactgtctctctaaataaactatttgctctctgtttttcttcagtaaattctcttttttgcctaaattgtctcttggccaaaactttctcccaagacaaaggacagaggattgccatacttgctttctgtaagtggtttcatggtattttctatccctttttcatgttaataagaacgtttaatgtgtgatataccctctgaataaaattttaagtacataatacagt

SEQ ID NO: 255571 - DNA, 441 bp, Homo sapiens
gggaaaaaaaatcactggtcaaattatgattagccaaaatgaagttcgattaactacaattgagtataaagttcattttcttctttagaataactcaagattttaaaaaagacctacctaattgaaaaaaaatacatatgtctcatacacacatattcatccatgaggtacatgtgcccattcctgtccatttcacctgaaatacacagacaacatatacaatatgtctgtcttttcgatgcctatggtatagtaggtgttgtgtatatgttggttaccatgaatgtttgtaaacttgttaaataaatttttcatcttcaattctgcaaggcattgtaataaatattttatgcttcaagttcattgaacctgtaaattatctctctgtaatgtgcatttgtgtgtaaggttggctttatttcattaaagaaaattttattt

SEQ ID NO: 255572 - DNA, 417 bp, Homo sapiens
cccatctgaaacatgagggatatatgttaatatttcttttagttttaatgttttcttattttggcatgtgaaatggctggggaatgatctttaaaagagtttagagactagttaagcattctactctagatagaataggagaaatctgcttgaaaaggcttcataagaaatatgacttcatgtttattttttaatttattttattttatttatttatttttttgagatggagtatcgctgtctcccaggctggagtgcagtggcgcgatctcggctcgctgcaagctctgcctccggggttcacgccattctcctgcctcagcctcccatgtagctgggactacaggcacctgccaccacgcctggctaattttttatatttttagtagagacggggtttcaacgtgttagccagga

SEQ ID NO: 255573 - DNA, 501 bp, Homo sapiens
tcaagctgaactatgtgaaactagccaaggggaaaggcactcctaggggacataaaattagtgattactttgagtttgctgggggaagcgggccaggaaccagccctggcagaagtgttccaccagttgcacgatcctcaccgcaacattccttatccaatcccttaccgtgacgagtagcacagcccctctatggtttagatggcagtgctgcaaaggaggcaacagaggagcagtctgctctgccaatcctcacgtcagtgatgctagcaaaacctcggcttgacacagagcagctggcgtaaaggagagctggcctctgcttcacttttgtttcagctcagcaaaacagtccctcatctacgggatctggcaacacagagcattcctgcagctcccaaaaacagatctccatccagcacagacagacccagtccaacctcacaatagaaaaaatatctgcactagaaaacaggaagaattctgaccgaatatcggggg

SEQ ID NO: 255574 - DNA, 1687 bp, Homo sapiens
ccattgcgcttggttaactttttaaaatttcttggccaggtgtccactaaatcttaatcgtttctagcgtttgatttaaagtgagaccaccttgaacatctaaaggccagttcttgtggggagtcaatactctttgttatactcagttttaagaggaagacagtgattcaggagttgtctgggccagttatatctgtttatatattcaatattttgtgtatactcactgcttttcctaacgtgaaaaatttaccaaaatgctaattgtgacttataaggtatttaacagactcccgacaaaaagcagaatgatcagcgaaatcggaaaagaaaagctgaaccatatgaaactagccaaggtagtaataatttcgtatcaacaaaagtactcaattctaatgtacttagatagaattttctaactcatactaaataattagtttgtacacagggattcctgataaaggaggtttgtgtatcttaagggaatatcagactgtttattacagacttgccatttgatatatacctgacaaaacagtgttagttcttcggggactctttgttttccctgttgtaagctaacaatcttcttaaccacaggtttttctttacaccaagcatatattgtacaaatagaggttatgtcagagttttaactctgtcttttgttagatcagtgatttgttaatgacagccggctgaaagtgcttcatttacattactgtcctttctgcctactgctcttccatggcagttgtttagttgaatattggaacccactgggataaatctgtaaacatgatggttataatgccaaatatctttatataatcaaagaaagaaaaaatggcttggctttttttctcccattctaaggaatagaaagcccagtcttgttgcatccttcttatcttttaaaatctacagataattcattttgtctttgggagcaaaattctcccaaagtgacaagaaaaattacagaatcttaaacctgtgaaaaattcttcctttcactgcttgttcagtcctttattttatggaggaaatagtctgttcttaggctaaggtattttggctcatttgttacaagtaaagctgacacttgggtttatagcaatgtatgtagttactgaatgtatagtacattttagtgaatgatggtttatatgtgtattgcaaaaactgtatttactttggtttcattttccagggaaaggcactcctaggggacataaaattagtgattactttgagtttgctgggggaagcgggccaggaaccagccctggcagaagtgttccaccagttgcacgatcctcaccgcaacattccttatccaatcccttaccgtgacgagtagcacagcccctctatggtttagatggcagtgctgcaaaggaggcaacagaggagcagtctgctctgccaatcctcacgtcagtgatgctagcaaaacctcggcttgacacagagcagctggcgtaaaggagagctggcctctgcttcacttttgtttcagctcagcaaaacagtccctcatctacgggatctggcaacacagagcattcctgcagctcccaaaaacagatctccatccagcacagacagacccagtccaacctcacaatagaaaaaatatctgcactagaaaacaggaagaattctgaccgaatatcggggg

SEQ ID NO: 255575 - DNA, 777 bp, Homo sapiens
ccattgcgcttggttaactttttaaaatttcttggccaggtgtccactaaatcttaatcgtttctagcgtttgatttaaagtgagaccaccttgaacatctaaaggccagttcttgtggggagtcaatactctttgttatactcagttttaagaggaagacagtgattcaggagttgtctgggccagttatatctgtttatatattcaatattttgtgtatactcactgcttttcctaacgtgaaaaatttaccaaaatgctaattgtgacttataaggtatttaacagactcccgacaaaaagcagaatgatcagcgaaatcggaaaagaaaagctgaaccatatgaaactagccaaggtagtaataatttcgtatcaacaaaagtactcaattctaatgtacttagatagaattttctaactcatactaaataattagtttgtacacagggattcctgataaaggaggtttgtgtatcttaagggaatatcagactgtttattacagacttgccatttgatatatacctgacaaaacagtgttagttcttcggggactctttgttttccctgttgtaagctaacaatcttcttaaccacaggtttttctttacaccaagcatatattgtacaaatagaggttatgtcagagttttaactctgtcttttgttagatcagtgatttgttaatgacagccggctgaaagtgcttcatttacattacttgcactccagcctgggtgacagtgagaccctgtctccaaaaaaaagaaaaa

SEQ ID NO: 255576 - DNA, 626 bp, Homo sapiens
aaatgctaccgataaggtaaatggattcaaagtaataaaactacagaaagtgacctttagggagcagtgatgtagcaatcagagacagacaaggtaacagcaatcctgtgatcaattctgtgatagaagtacgcctaggcaccatgggagcacagagtgaggaactcactctaggctgaatgaggaaaggaaactcttctttggggaaagggattgccggtcctgagtcgaaaaggtcaagtaggcattaactgggctggacttggtggggatggggctgtaatacaagaactctgggtgagaagaacatgatgagattggtgaacaggatcatatttggagaggctaaagggcatgtgttaagggatgaagcaggaaaggaaaataaaaaccttgtctacaaaatatagttcatatacttaaggaaaccacccctaccagcactttttgacatagatttatcatgtttgtgtggtttccttttttctgtatttcaaacactgaaaaaaatgtagatgatttttaaatgggaaacatggatagcttcttctgtcctgacttttaaaaatgtgcttagtaaccaaatttgtttctaaatagattgtttacaagtaccatttaacttt

SEQ ID NO: 255577 - DNA, 475 bp, Homo sapiens
cttcaatattctacttccaataaaggtagaacaaccagacataagactaataaggaaacaaaggactcgaacaacactgtagaacagttggacctaacagacatatacagaacactccacctaacatcagcagaatacacattcttttcaagtgcacatagattatgctcaaggatagagcttatgttaagccataaaacaagtctcaacaaatttaagaagattgtaatcataccaggtatcttctgtgaccaaaatggaatccagccagaaatcaatagtggaaggaaaatgagaagagtctcaaatgtatggaaattaaacaacatactagttaggagaaggaaggaaataataaagaataccacataaataaacaaaatggagaatagaaaagcaatagagagaatcaatgcaagttgttttttttttgaaaagattaagaaaattaacaaaccgttatccagactaaaaa

SEQ ID NO: 255578 - DNA, 346 bp, Homo sapiens
gcatagaacatcacgttgtctttagggaatattctataattattcaaaaattccttttttgacttgaaggcatgagtcttttaagtatagcttagattttttttcctgtaaatgccttacttttcatttgtccatgctgtaacatacctgccatttcctcgcatgtaattttttaacactcatatctcagtgggctcttagaggtaatccaaggtaagaaccacctttttagttaggtctgatggttagaaagcttgagttgaagcgtgcccttctggaattgccactttgggcccaattttgtctacacgggaactgcttagagcaagtctggtttgtcttctgc

SEQ ID NO: 255579 - DNA, 554 bp, Homo sapiens
gtgagcctctgcacagcaaaaggaataatcatcagagtgaacagacagcccacagagaggaagaaggtatttgcaaactatgcatctaatgtcaagaatccacaaggaactcaaacaaatcatcaagaaaaacacaatcccatcaaaaagcgggcaaatgggccaggcgtggtggctcacgcctgtaatctcagcactttgggaggccaaggtgggcagatcatgaggtcaggagatcgagaccatcctggccaacacggtgaaaccccgtctctactaaaaatacaaaaaattagccgggtgtggtggcaggcgcctgtagtcccagctactcgggaggctgaggcaagagaatggtgtgaacctgggaggcgaagcttgcagtgagccaagatcgagccactgcactccagcctgggcgacagagtgagactccctctcaaaaataaaataaaataaaataaaaattaaaaaagtgggcaatagacatttctcaaaagaagatatacaaatggccaacaaatatatttaaaaatgatcaacatcgctgggca

SEQ ID NO: 255580 - DNA, 404 bp, Homo sapiens
gctctgcctgccttcacccccctggctttctagatgatggagtgcgaggctagactaactcctgcctcaggctaacaatgtaactttgggcttccttttgagaattaaaaatactactttcgggctgggcacatcggctcacccctgtaatctcagcaatttgggaggccgaggagggtggatcacttgaggtcaggagttcaagaccagcctggccaacatgatgaaacctcgtctctactaaaaatacaaaaattagccaggcgtggtggtgtgtgcctgtagtcccagctactcaggaggctgaggcacgagaatcgcctgaacctgggaggcagaggttgcggtgagttgagatcacaccattacactccagcctaggcaacagagtaagaatctgtgtc

SEQ ID NO: 255581 - DNA, 342 bp, Homo sapiens
tttttaatttcaataaagcaaaatctaataaaatagcatttcatatgataaaattatagttttcctaaataaaataatcctaatatacttaaaaacactcagaaaatatgcagtcatagaaaagagttatataaaaaggccaaaaaagtctaagcaatacattggctttattaaatctaaaataaaaaataaatcctgatagaactcatcaaatttgttttaataaacaaaaatctacaaagtgacagcaagagctttgatatcacctaaatattttaaaaagtgaacatgactattacatgaaagagaaaaatgaaaatacttttaggtttacatattatt

SEQ ID NO: 255582 - DNA, 441 bp, Homo sapiens
tataggcagaaatatatatatttggctattttcctctgaagaactctgactaatacaacctgtgttttaattaggatacttttgattacatataaaagcaaccctgagtcaaactgacttaaacttcattacacaataaggacaggtagcacaactttcaggactggttctttccctggctaacatttatgcatatcttatcaaagatgcagaatttattttatctgtcacatctaccatgctcataatcagtttcatcttcaaactgcagctcatactgcaagtaatcttattattacccaaacacaatcatattcaggagaagaagctaaaacattttttttctgtgtccattgatattaatgagtacatttttttttccagaagcttattagacaacttctcttcatgattgaagaattggggagttgggtctcatac

SEQ ID NO: 255583 - DNA, 383 bp, Homo sapiens
caaatggaactgatggatgccagacattgtggatatctgcaagtcctggttggtgaccagggacttgaagagtagactttcttctcaaacttatctttgtgctgttttccttccccagacctcatagtctggagcccatgtttccaggggtggaatttgattttcccagagaggagctgtgttcggcttctaggctgaggagctaagctgccgagcctctgccagccctctgtggattcgctcctgcattattcagcgcctttgctgacagagcaccatgttccactgctgagcagatcagggtgaatttccaagagggaacattgcagatggttttgcctttagggatggattttcttactcccaagtgactcacttctggt

SEQ ID NO: 255584 - DNA, 503 bp, Homo sapiens
cagctttctcagaaatgagctgggaatgatgcgattatgaggtcatggtgaggacagggagaccaagctcataaggaaggcatcttgcaaaatagctggtagatggtagagcctcacccctcccgctggttaaatgaaaatatttccactcagaagatcagcaaaaggtgttcattgaagttcatttaataaaccttagggtgtagcagctcaggctctgggatttccagtttctctttcaaaagataagggaaagcccctgtctccaagattagaattcagatccttacgagatgaagagatcctaaaaatgcatacacagttaaactctgagatttgtatctgtgatctgtggataattattctccatgacatacagacacagatatggccacacacagaagtattcagcaggggcacagatatttcatagaagacaaaatgtatattgggcaaaagaaggtcacctggaaataaaccgaaatctttttaccttaaaataa

SEQ ID NO: 255585 - DNA, 423 bp, Homo sapiens
tatcagccggttgcctgccgttgctcacatcaatgttgttataaaggaagagcattggtggccacttcccttggagcctgcttctctgtagaagctagccttatgggcttttgtgccatacgttaatgtacagataataatcttagttactgtgaattataatagcaccgtatttaaattctggactgagttagccagatgatctatacctgtgagaaatcaagtttcaagaatttgcagtgcactcacaccaagcgatttctggcatttctttctgggtgtgcagaccaccctgggcagagagggagtgattttagcttcacgtgcttcagttagggattcagcaaagcctgagaatttcccttcttaacccaaaccacgtttaatgcatcactaggaaaagcaggttggtaaaactcatcc

SEQ ID NO: 255586 - DNA, 764 bp, Homo sapiens
ctgagattgggccaatgcaatacaacccgggccacaaaatgagaatttttttccaaaaaaaaaaaaaaaaaaaaaaaacaaaaaacaaaaccacatatgtactaagtcctttcctctctcaccctttcacagtaaatgctcaggccacctagacttttttttaaatataagttttctattagatcatcacagagtctcttgagtctctgccttttttctggaattccatgtctataacattctgtctacctacacccccttcctctccctgggcttcaagaaatacatacaaagtacacagtgaaaaatctcttttctttccatgtcctgtcattcctcagcttccttcccaaaggtattctatgcatatacaagttttatgtacatgaatgaatacaggcagattggcatgttagattgtgaaccctgaaaccaggttgcctgagtttaaatcgtggcttttcttcctagatatgtgactttggggatattactagtatctgccttgtaagcttattgtgaggatttcttacagcacttcctggcacatggtaagcactcagtaaatgtttgccattactattgttgtgttgttgttatataacagcataatatattcaaaagagagcaacatttaaaatctagagacataggtttgaatacagcttcctaattactttatgcttaagtcatttaatccaagttaagccttgtatgtttctttatagtgggggtaatgacatatagttttggttttgattacc

SEQ ID NO: 255587 - DNA, 364 bp, Homo sapiens
ccagcttgtgggaaagaagctttgaggggtccctaagggcaagaaggcctttcctggctcagtccaatcagatacctgctgtggctgtgcttcttctggccacaggtccctgtctttgttggttccctgcactgacctggccaaaaggaagctgcttgcttctgggcagcagctgtcccctcccccagaaagtctaaaaggacacagaggacgtcttcagtatttccgtagaggtcacaagctaagtgggtcgctgtcgctgttttacgtttggttggtgctgagacacttcctctttcatttatgtcttattcaggccacctcctccatcccccttgaagactgaaaaaggggaacttgaaag

SEQ ID NO: 255588 - DNA, 314 bp, Homo sapiens
  misc_feature (11)..(11): n is a, c, g, or t
attcggcacgnggagagaagaggaggtagaagagggaagatatcttaggagctactccagcctgggtgacagagtgagatcccattaaaaaaaaaattcacaaattagagaataagaattagtcaaatcttagattcataactgtgtacagtggacatagaaataatttaaatatatatcatcattaaactgaaggaacagacatggtctttgagtattcattaaatacacaagtaactcagattaagccaagcttcttaatccctttatgcctagtgttccattattggaacgctaagcatgtgggagttatt

SEQ ID NO: 255589 - DNA, 469 bp, Homo sapiens
aaaccattcttaaaaacatcttactattccatagtcatagttgtatttgtgaaataagccttgtattcgattgtattgtggggcatcctgatcgctgtaataaatgaaatatgttactgttgttctctactacttgtgttttaataggatggtgctgtgttacgtttccagttttgctaagaaagtgttcttaagcactgttcattgcttaatgtatcctgtttccagagattagattttctcgtaaccaacaaatgctgtcccaaaaccaccttggcgaccttaccaaaaggaaagattctgccattttcttctaaccaggtcccagtgatatttttcatattcttctgtcaaactcagctcttatcctctacttttgtcttaggatcatgacgtgcttgtggaacattaaaactgaaagaagcagaggtatcatttagccccaccctttcatttaagagagaagcta

SEQ ID NO: 255590 - DNA, 542 bp, Homo sapiens
aaaagaatggaagcttttccacaggaattattcacgtgtattgctttctaggagtaattgaatagttgacattgcatttatatcaaagtaaaatatgtgatggttattctcatttgtattattcttaagcaataagaaatgtaaagtaatctctattaggtttctttattcggattcagaaatcttcatagttttctgtaatgtccaaatgtgtaccttcttataacagctatgggaactttctctcctctctgtaaaatggagagttatacctaccacgttgagctgttttgagagtcaatggagaaaatagtgagaaaaccactcaaatgtgttttgttacttgatgtgttctttcctctgtatgatccaacttcttacatgttttatcctattttgggtttcaatttggttcatcttcacaaagtagagcttcaagttttatttagaattaaataatattgatactggcttggaaaactgaataacacaagatttagagaaaaaatactctaagtaaaatgtcatgacaaattgaatga

SEQ ID NO: 255591 - DNA, 622 bp, Homo sapiens
tgtgaatcccgccagccgccctcactacgcctccgccatcccggtgcctcgtgcctcttcccagaccaggattcctacaccgggcgcttctccccagctgcggccacgccaggccggcctggccctgagcccacagagagcagcctcccccagactgggaaaggctgcaggtccttctagaaactcctctcctagggccttccgggggagaggctctcccaagtttgctggggcggtgagggagtcagctgaggatggggaaggccccttcagctccccatggaatagtcccaggacaaccccgaaagcagccctctccagccgggctggatccggaagaattggcgagagacaaggcacccagggaaagaagaaaaaagcccaggaagggactccagtctgccagacccggggcagaagcccttctcggacgagctttcacggagaaactcaaataccaggggctccggaaggtcggaagcctccaagctgcccaggaaaagaccaaagagatataaactacaaaagttctgggacccccaggtctttggagcctgatgagggggcagcttcgtgggcttcctctccagtctgcagcccagtgcagggcaagcgcccctct

SEQ ID NO: 255592 - DNA, 172 bp, Homo sapiens
agattgtgccatgcactccagcctgggggacaagagcaagacttcgtctcaaaaaaaaaaaaaaccaaaacctggaaacatctgaatatccattatcagtagaataaatgaatgtaaaaataagttcatttaatggatattatgcagtgatggcaatgaacaaactgtagct

SEQ ID NO: 255593 - DNA, 416 bp, Homo sapiens
tggcccatcgtccagactggaaacaaaaggcaaagccagatgttgctgatgggaatccactcatcattccagacccagccccggtcccacctccggcaggtgattctcctggctcccacagctcgtctcctctgcaccctcccacaggccagcagtcacccagatggtcccacgtttcctgctgttctctgatcactccaactgtgttatttctgcctccctaactcagtagccagggcagcgtataccttccacttcttttctacccatgaaagtgcccatcacactgctaaatccagaaccggtgctcaaaaaatacttcttaatggattgattcaatcgctgtagctgtcctaaattgttataacaattaaaatgttataaataaataaatattataaagattccaaaagaaa

SEQ ID NO: 255594 - DNA, 244 bp, Homo sapiens
atgccagcgaaagaaataaagaaaactccagttcaatatctctcatgaacatagaaacaaagattatgaaattttagcaaatcaaatccagatatgtgtgtgtgcatgtgtgtgtgcctgtgtgtataaagatataaaaagtaatacatcctgaccaagtaaggtttaccataggaatgcaggattagttttaatatccaaaaattaatcattgcaattatgctatattatcagaaaaaaaaga

SEQ ID NO: 255595 - DNA, 280 bp, Homo sapiens
gtaatcccagcactttgggaagctgagatgggaggatcccttgaggccaggagtttgagaccagtgtgggcaacatagttgagacttgtctcttttattaaaaaaaaaaaacaaaattttagcagggcatggtggtacatacctgtagtcccagccactctgggctaagatgggaggatcacagaagcccaggagaggagggcgaggctgcagtgagctatagtcataccacctcactcccacctgagcaacagagtgaggccctgtccctttaattaaa

SEQ ID NO: 255596 - DNA, 169 bp, Homo sapiens
atgctgaccgttagtggtagagttaagagagcattggaggccatcctggtggctcacacctgtaatcccagaactttggaagcctaggtgggaagattgcttgaggcaactagttcaagaccagctgatgcaacaaagtgagaccccatctctacaaaaaataaaataa

SEQ ID NO: 255597 - DNA, 128 bp, Homo sapiens
acctgtttttgcccattgttctcaggacataatgggtcattccatctggaaatacatgttcaggtccagaaaagttacttgcattatttctgttactattttctttgctccatttttttttctattac

SEQ ID NO: 255598 - DNA, 426 bp, Homo sapiens
tgaactttcttttctttaccttaattacaagtgccttcactctggcaggttcacatgagtctgttctgtaaagaattttaataatctgttttgtgattttgtgatttggagaaacttgtttaagataaaattgtgaggccgggcacggtggctcacaactgtaatcccagcactttgggaggcccaggcaggcggatcacgaggtcaggagctcgagaccatcctggctaacacagtgaaaccccatctccgctaaaaatacaaaaaattagctgggcgtggtggcaggcgcctgtagtcccagccactcgggaggctgaggcaggagagtggcgtgaacccgggaagcggagcttgcagtcagctgagatcgcgccactgcactctagcctgggcgacagagtgagactccgtctcaaaaaaaaa

SEQ ID NO: 255599 - DNA, 450 bp, Homo sapiens
tcacatttaccccagcaactgagagccaggaccagcccttcttggggacctgcaccttaactctgtttccaggaatgcaaatggctttgttttgaaccatccacagatttgcccaagcgcccattgaccggggcccagtgactggcagccgagagcatctgggcagccgttgtgttgggggcagggttctctcagtaattagcgcttgtgaccttggccccgctagttcctaagtaagcaggagtgtggagcaagtcccccgctgagggccaggcacgctggatcagggggagcccgagatgaagggggaaggctctgtctgggccagggaggacaggacggctgtctttgcaaggcgtgtgggcgtcctggtgagggtgtcccattttatctttgggacaattaattattgtcttaatgttttttaataaatccacattcctatagaac

SEQ ID NO: 255600 - DNA, 302 bp, Homo sapiens
cacacccggctaatttttgtattttggtagagacagagtttccctatgttggccaggctggtgacgaactcctgacctcaagtgatctacctgcttcagcctccccaaaatgcaggaattaccggtgtgagccactgcacccggccgtaattttatcttttgccaacttaaatgaatacctaagagataactggtataaagagtgctttttgaaagttctccaggaaaggagatctatagcttctgaatcttgcccattcgtaggtttaataactggaactacaaagttttaaagtaaactt

SEQ ID NO: 255601 - DNA, 414 bp, Homo sapiens
ggtgtatatatttatgggttacagaagatattttgatataagcatgcagtgttttataattacatcaggtaaatggggtatccatcacttcctgcacttatcctttgttacaaacaacccagtaatactctttcagttatttttaaatgtacagttaaattatttttgaccatagttttttaagagcagaaataaattttatagtgggtctatctcatacagtccacttactttgtagacaatttctcttttgctcagatttatttgagttgctaaaaaaaatagccatgtaaattctaggtttattcacactaagtgctttcctttttctcttttaatgaaaacctgtgtttttttctttccttctcagcaagaacccgtattattcaatttgcaactttctagagagtcagc

SEQ ID NO: 255602 - DNA, 439 bp, Homo sapiens
tatgtgtagtgcctaatgttcactttgaaagttcattttagtaccaaagaatatgcattttagatgttctaaatcacctctagaaagcaatgcagttttctttgaagacgtatgttttgggaatattttggccagcagacagatttattactggtgacttgctgtcagtctgtttatgacaagacagagcaggctgagagggtttacatgggggcacacagaatgtgtaggggagagcagacagtgagcttgtggcttgagagagacacaaagcccacatcaaagggaagtgaagggcaagtgagcccaggcacaccacagtcaggcaggagaagacagaaacatttgggctggggggatgtgattccatggctggaaggacagagtcttcaggtcggtcgacgcggccgcgaattcagtagtagtagtaggcggccgc

SEQ ID NO: 255603 - DNA, 288 bp, Homo sapiens
ctcagccttccaagtagctgggactacaggcatgtgccgccacaccccgctaatttttgtgtttatagtagagaggggtttcatcatgttggccaggctgatcttggactcctgacctcaggtgatctccctgccttggcccccgaaagtgctgggattacaggcgtgagccgccacgcctggccagattaaaattttaatataaggtaatttccaagtaattctgtatatcttttccaatgcttaatatatactaaaatgttggttgctgtgagctatttctttaaa

SEQ ID NO: 255604 - DNA, 418 bp, Homo sapiens
caactgacccggcaggactgaccgtctgcatttaacagggaggtccggccgcctgctctgggtttccagggcccacccataggtggccagggccctagcctggggctagagccttcacgcaccgtcagtctgaagccaagagcattaaactgaagtgcacaattggtaaaactctcagaatgagaaggagttcattatctaggaactccattacaggattcactgctgacatctaactgtggggctgtattttcaggatcccagtgacttgtcaacctctaccccatagtctacaaacggttggcagactatgccacaggccagacccaaccctctacctctcttcatacagccctaggctaagaatcgttcttgtatattcactgaaaacaataacaagagtatgtcatgactcaaa

SEQ ID NO: 255605 - DNA, 684 bp, Homo sapiens
ccattaccatgcatagttactactgtgtgtgtatatgtgatgaggacacttagaaggagatgttggtcaaaggatacaagattgcctcacatgattaacagcatttttcagtgtagctggtgtctgctgtacatcagaagggaagtgatgtaattaacacatttttctaaggtatgaatgagtgatgccttcttgatcttaccaggattatacatactttaaaaaggtatgcttaaaatatatatgttgaatcacagggtatgtttagaatctaagttaagctttagtttgtagaaatcaagcccttttgtatgttgaacggaaaatgagattttaggcaatatgagagacagattatacagtttttatggcaatgtggacaagtatccattcttgtggcatgcttgaccaagagcttctttatttcattgggaaagacccttttatagaacactgttaagtaatgcatgtatttacaactataaggaattctaatttgaaaacatttgccaatggttttgagtttccttctgggaagatggtgacaattccagaaaaatttcagcaacaaggcagcacaagaaccaatgccatttgaattggtttaacataaagaaaaccaggtggatggaaaaattctgacttttcatctcagctagggacttacaggccccctgatgaaaa

SEQ ID NO: 255606 - DNA, 530 bp, Homo sapiens
cctcctatcaaatccataatttgaagattgactaagtcacctactttgcattcagatgttgataattatcaagccagcctaggttaaaacaagttttttaccttttacaaatatatttttttaagaattgtgtatcttggggacaaaacattataataaggttaatgagaaaaggagcaacacaaatctgttttcattaatcttaacagagctttaatcacagcacagggggaaacagctgctctggaagggagactaggagcagatcagtagaagctgattatccattaatgagagggctttggtggggagccctgtggaaaacccaccagactcaatcctgccagccatttgctgaagaggtggtgtatatgaatcgcttgtttgatgtaaaaaattcaaaacagattcttctcagcagcctggggactgtcatacatcactgatctcttatctgtttatgttaaggaaatagcatccttcagtaagtaaatgtgtgtggtatttaattaaactcattgctgagctct

SEQ ID NO: 255607 - DNA, 1267 bp, Homo sapiens
  misc_feature (411)..(411): n is a, c, g, or t
  misc_feature (786)..(786): n is a, c, g, or t
cattgctcctgaagcatttccgtctgaagatttgcacaataagaccctgagtcagcaaacctgtaaatcacatgttgacactgagaagccctaccctgcttcaattccagaacttgcttctactgaaatgataaaagttaaaaatcatagcgtcctgcaaagaacagaaaaaaaagtgttaccttcaccattggaattatctgtcttttctgaagggacagataataagggaaatgagcttccatctgctaaattacaggacaagcaatatatctcatcagtggataaggctccattttcagaaggctctagaaataaaacacataagcaagggagtacacagagtcggttagaaacctcacatacttccaagtcatcagagccctccaagtcacctgatgggataagaantgaaagtagagattcagagatatcaaagagaaaaactgcagagcaacacagctttggaatctgtaaggaaaagagagctaggatagaagatgatcagtcaacccggaacatatcatctagcagcccacctgagaaagaacagcctcccagagaggaaccaagggttccccctctcaagattcagctttccaaaattgggccaccttttataatcaagagccaaccagtctccaaacctgagtctcgagcatccactagcacatctgtcagtggcgggaggaacacaggagccaggaccctcgcagatatcaaggcccgggcccaacaagctcgggcccagcgagaggctgctgcagctgctgctgtggctgctgnagcgagcattgtctctggagccatgggaagtccaggagagggtggaaagacgagaactctggcacacatcaaagagcagacaaaggctaagctctttgcaaagcatcaagctcgagcccatctcttccagacctctaaagagacccggttgcctcctccgctcagctcaaaggaagggcctccaaacttagaagtctcttctacccctgaaacaaaaatggaaggttcgactggtgtcattattgtcaatccaaactgtagatctcctagcaacaagtctgcccacctccgggagaccaccactgtactacagcagtctcttaacccaagtaaacttccagaaactgccactgacttatctgtgcatagttctgatgaaaacatacctgtgtcacatttatctgagaaaattgtttcatctacctcttctgaaaatagcagtgtgcccatgctttttaataaaaattctgtccctgtaaaa

SEQ ID NO: 255608 - DNA, 659 bp, Homo sapiens
atggcgaaaccccatctctactaaaaatacaaaaattaggtggatgtggtggctgcgtgcctgtaatcccagctactcgggaggctgaggcaggagaattgcttgaacccaggaggcggaggctgcggtaagccaagatcgtgccactgcactccaacctggcaagaagagtgagactctgtctcaaaaaaaaaaaaagaaaaaaaagaaaacttgttctccttcctgtctctccctcaccccctgcttctctaagttaacacttgcagctgagattttctgctacttcccagttctcttcccttgccctctgtcccttgaccaacctcctctccttcagagcccagctaaggctcaggacggcaactgcatcttcctgactcaacactccatcctgacccaagggactccccttaggtcagcaacacttgaggctgactcagtgcttggctgggcccttcctgggataggaatgtgttcatccccagagccagccacactccactgtcaagggcccatgctcaatctggctggggtaaggggcttatctgtgattgcaattaaggcccagactgagccagaagaatgttcctttaatgtttaaaactaatttggtcatatacaactgagatttacagtaaaaaaaaaaattgataaaa

SEQ ID NO: 255609 - DNA, 581 bp, Homo sapiens
ataattcatgaccctcatcttatcactttactccatctttttatcctattaaattatttttgacaagatgtcctggtagactaaaggtgaacagatttgctcttgctcatcttctggtggatattttaacttgctattcacaatcaggacaaccaaagtcaaggacccagatgaaccacaaggcagctagtcagctacttagaggttggttacattcgaataaaaagtagtcagggaatgggggaggtggggagttggggagtacttggcagttgggatatgatccatttttttaaacaagttttttgtagatcccttgtaaaataataataataatgttgtgaatctccatgccaagtgaaaaaggcctaaagatgagttgaatttgtgataccatgggtaaggcatggaagaactcttgaatgtgttggccattttctctaactaacatgtggtatgtatggtcccctatattagatagaagtctttgctacatgtaattcaaaagcatctcgcttttctcaggaaccaaaggcttatgatgtaggacaaagaaatcatcttagaactgtcaagcatat

SEQ ID NO: 255610 - DNA, 1212 bp, Homo sapiens
  misc_feature (707)..(707): n is a, c, g, or t
ccggtataacgccgctgactgcatccaacgcctagactgcatccaacgccgcctgactgcatccaacgccgcctgactgcatccaacgccgcgctcctcctcctcctccgcctccgccgccgttgcttgaatggtggagccgaagctcggctcgtgaacacacactgacagctatagggcaggcggcggcaccgtccccgcttcccctcggcggcggggtgtcccgtcggcggccctgaagtgacccataaacatgtcttgtgagaggaaaggcctctcggagctgcgatcggagctctacttcctcatcgcccggttcctggaagatggaccctgtcagcaggcggctcaggtgctgatccgcgaggtggccgagaaggagctgctgccccggcgcaccgactggaccgggaaggagcatcccaggacctaccagaatctggtgaagtattacagacacttagcacctgatcacttgctgcaaatatgtcatcgactaggacctcttcttgaacaagaaattcctcaaagtgttcctggagtacaaactttattaggagctggaagacagtctttactacgcacaaataaaagctgcaagcatgttgtgtggaaaggatctgctctggctgcgttgcactgtggaagaccacctgagtcaccagttaactatggtagcccacccagcattgcggatactctgtttncaaggaagctgaatgggaaatacagacttgagcgacttgttacaactgcagtgtatcagcactgcaactgcataagcgaattcttggacacttggtcatcctgtgtactggtgttaacttttgatacgaacactggcagaacggatcttcaccggcacccgcatgacctcgtcctcgtgccacatatggggcaacacgcacgacgcgaaggtagctagataacctacacacgaacagcaagcgacatactcgcacgggtcgataaaccttcataatccctgtacacccagtgaaactaggcgaacagctggacccacctcggcgtcttaaccaccgatgcacgacatgaggacacacgaggccagcggactggtagcacacaaagatacgcacatgcgaagtgagcaaacagactattctccgggcgaagcacagtcagtaccagacccacccaaaacccgctacacgaccagacacgagacaacatctacttatctcagtgaca

SEQ ID NO: 255611 - DNA, 694 bp, Homo sapiens
ccggtataacgccgctgactgcatccaacgcctagactgcatccaacgccgcctgactgcatccaacgccgcctgactgcatccaacgccgcgctcctcctcctcctccgcctccgccgccgttgcttgaatggtggagccgaagctcggctcgtgaacacacactgacagctatagggcaggcggcggcaccgtccccgcttcccctcggcggcggggtgtcccgtcggcggccctgaagtgacccataaacatgtcttgtgagaggaaaggcctctcggagctgcgatcggagctctacttcctcatcgcccggttcctggaagatggaccctgtcagcaggcggctcaggtgctgatccgcgaggtggccgagaaggagctgctgccccggcgcaccgactggaccgggaaggagcatcccaggacctaccagaatctggtgagacattcacgtcgcagagcaaagaaacttttccctgagtcgaataaaaattgaatttcccgcaattttttacagagacaaaaacttggccctagaacgtgaaagctccaaaggccatggggagggttgggaggccggcgcggggtctgcgggggccagtggccgggggtactcgtacttcggggccgcaggggctgcggacaatttatttgtgatattttgttaatgtgctagaaataaagatacgtc

SEQ ID NO: 255612 - DNA, 916 bp, Homo sapiens
  misc_feature (411)..(411): n is a, c, g, or t
tatatggagtctattcctcctcgccggtctggagatggacctgtagcaggcggtcaggtgctgatacgcgaggtggcgagaaggagctgctgccccggcgcaccgactggaccgggaaggagcatcccaggacctaccagaatctggtgaagtattacagacacttagcacctgatcacttgctgcaaatatgtcatcgactaggacctcttcttgaacaagaaattcctcaaagtgttcctggagtacaaactttattaggagctggaagacagtctttactacgcacaaataaaagctgcaagcatgttgtgtggaaaggatctgctctggctgcgttgcactgtggaagaccacctgagtcaccagttaactatggtagcccacccagcattgcggatactctgtttncaaggaagctgaatgggaaatacagacttgagcgacttgttacaactgcagtgtatcagcactgcaactgcataagcgaattcttggacacttggtcatcctgtgtactggtgttaacttttgatacgaacactggcagaacggatcttcaccggcacccgcatgacctcgtcctcgtgccacatatggggcaacacgcacgacgcgaaggtagctagataacctacacacgaacagcaagcgacatactcgcacgggtcgataaaccttcataatccctgtacacccagtgaaactaggcgaacagctggacccacctcggcgtcttaaccaccgatgcacgacatgaggacacacgaggccagcggactggtagcacacaaagatacgcacatgcgaagtgagcaaacagactattctccgggcgaagcacagtcagtaccagacccacccaaaacccgctacacgaccagacacgagacaacatctacttatctcagtgaca

SEQ ID NO: 255613 - DNA, 263 bp, Homo sapiens
gctgccgccgccggcagggcgcggggcgcggggctcggggtccccgccggggcgcggggcgggcgggggaggggagcgggcgggtaggggccgggggccgggctcacggggtgtcctctccccgcagctgctgccccggcgcaccgactggaccgggaaggagcatcccaggacctaccagaatctggtgagacattcacgtcgcagagcaaagaaacttttccctgagtcgaataaaaattgaatttcccgcaattttttac

SEQ ID NO: 255614 - DNA, 587 bp, Homo sapiens
ggggaggagcgggtgggggtctcactgtgccgcgtgcggagcgctggggacgaggggtcggaggcactccttttttagcgccggggggcgggggcgcgggccagagccggggccgagccctgggccgcgaaggcggcggactcctttctgcggcggagggatccgcggcggaggcggccacggccgtagtcgctgcctgagagttgttgtttcctcctcctcctcctccgcctccgccgccgttgcttgaatggtggagccgaagctcggctcgtgaacacacactgacagctatagggcaggcggcggcaccgtccccgcttcccctcggcggcggggtgtcccgtcggcggccctgaagtgacccataaacatgtcttgtgagaggaaaggcctctcggagctgcgatcgggtaagtcggggggctgccggggccgctggcaccgggcgattccgcccgcggtcccccgccccccgccgcccgaccgctcagcctgtgtgtctccccgtccctctctcccgcgcagagctctacttcctcatcgcccggttcctggaagatggaccctgtcagcaggcggctcag

SEQ ID NO: 255615 - DNA, 824 bp, Homo sapiens
gcttcagtgtctccactgctgaaaagggggaagtcacatacacatctgcgttattgtacagacgataaatgacaacttctcagccacaatctgaatgagaaaactaagcactgctttcttggagtccatgtggaaccctgggcctgatcctgccccggggttggtcaagcaatgaatttatttaggaaaaataccagtgaagagtgggcttgatcatgaccaattcacaatctccagaggatgtgatggctcaatagcattacctgtgcccacaactgatggtaactgagacagcaggctctgagacccagagttcctcccctctaggaattttcagcccacgtagaggaagatataaaataatgacacgaataattacaaaaccaaatagcatatattgagtaatgacacaagaatttttctcttctctttttctttgcaagttattagtcactataaagcaatggctaagagcacaggctgaggaggctggcttcctaggttggaatcccagcttcacctttcacttgctgcatggcttctggaaaattacttcacttctctgtgctgccgtcttttttattacaaaataatcagccgggtgtggtggctcacgcctgtaatcctatcactttggaaggacaaggtgggcggatcacttgagatcaggagttcaagaccagcctggctaatatggtgaaaccctgtctctactaaaaaaaaaaatacagtaattagcctggcatggcggcaggtgcctgtaatcccagctactcggaaggctgaggcaggagaattgcttgaacacaggaggcagaggttgc

SEQ ID NO: 255616 - DNA, 400 bp, Homo sapiens
atcatgccatgtacataaccactgtcagtatcagtgggggcgttttctgaatcgtggcttttgttttctgtgagctcattgccccctttcccctttaatattctagtaaagcttattttacaaagaaaaatgcctgcagtgaaaagcatttcttgatcatctttggatcaatatgtaatatttatatttcactgaatcttcatgccgtgtttcaggtttagcttctgtgtcaattttgaaatgatctgtggtaaattccatattggaaagacatgggtctcctctactgacttattttcttcttattccctgaaaagcctttcttatcaccccaggaattgtggagataaattttttcactcatgaggcataatatagttagtcgatgatatatttgttg

SEQ ID NO: 255617 - DNA, 692 bp, Homo sapiens
actcagcatggtgcctggcttatagtaaggagtcaatagagggaacttgatcatgatcccttttgttgaagttacctaggtgcctccctcctggatcctcatatgacaggacacatacacacacatgcacacacacaccaaacaggccagagaagcagcctcaagcagtggttcttaaagtgtggtccctggaccagcagcatcagcatcacctgggaacttgtcagaaatacaaataaattatcaggcccacactagacctactgactcagaaactctagaagtgggacccaccaatctgtgttctaatgagccttctaggtaattcaaatacatgcaagtttgagaattatgggcctagagcaaggggcagatgaagaaaaccagattcctggtcagaattccagtggctctctccaatgcatagagaaaaggcagagaaggatctggatagctccaggttcaaggtcagtgaacctcaccattttgcagccatcagcctggccttgcttctctgttgctggcagaagagtttggcctccatgcatcacaaagaaagtgcctttggctatgggatgaagagcatgtgccgagccactgtcactggggccagttctccactcggtgtcctgtgcacctgctctgccaggggccaaccaagcagagatgcaacaggaagctagactgaaagc

SEQ ID NO: 255618 - DNA, 336 bp, Homo sapiens
aacatcttttgtcttaattttttgcagtttaaaaaaatatttctttccaaataatggtgtaagtaattttatcaagcattatttgaaaatgtttggacctacattgaggtcattagaaaccatttctacttggagggcattaaaaactataaataaagtatgtcttaaataatatatatatgggaaacaattagtttttcaaaaaatcaaatagtttttctagggacacacacacatatatatgtgagagtgtgtgtgtgtgtgtgtgtgtgtgtatatatatatatatatatacatacacacacatatacatatatatagagagatatattttta

SEQ ID NO: 255619 - DNA, 411 bp, Homo sapiens
cagtttcccgttttttaaattgactttttcatgaggtcagtgtggccaccttacacgctgtccccacactctagatttgtctgattgtgtttacttatagtatcattttccttccggcccttgtatttcctataaactggaagttaagtctagactagagttggagtaaacaattttggcaagaatactttaaaggtaacatattctttactctgaaccacactaaaaagtgtataatgtctcatcctagtctgagggttgctgagtttaatggaacctttgtaaaaacaaaagttgctaggcgcagtggctcacgcctgtaatcccaacactttgggaggccgaggcaggtagatcacgaggtcaggagatcgagaccatcctggctaacacggtgaaacccgtctacta

SEQ ID NO: 255620 - DNA, 739 bp, Homo sapiens
ttcctcactggaaacatctactttgagtctcactcaagtgaacgcacttgaatgtgcattcagatcacccaggggattttcctaaaacacagttttaagtatgagatggggccaaagcgtttgcatttctaacaagttccctttgacatccaagctcctcatccagccactacattctgagtagcaaggttttatgtgatcctgtctgacattgctttgtatgccaatttaaaaatgctatagctgcttctgtccaggactaacatgcctgaagggtttaggaaacttgaattgtgacatacatgtgccaggcactgtttagagtgctttttatggattagttcatggcacatggttaaacccacaggcttggagaagagacagaactgggttcaaaggtcagctagggccacttacaagctgtataactaagatacattgccaaacttgtcttgcgttaatgtttctatcaaataatccttatatgacaatatagctgtgagaatgtgttcttgtatgtaaagtgtttaggactgtgcctagcaaatagtaagtgcaaaataaatggtagctataattattatggttatcatcattattatttataatagactcgttgtttttacattaacgggtgtatcttgataaggaggcatttggatacaagaaatcaaatccatcaaaaccagcatcagcaaatatagtgactttactgggtaaataaaagagtacgagctca

SEQ ID NO: 255621 - DNA, 522 bp, Homo sapiens
agacgtctctgcaagtcaaattcaccagtagcaaaaccgttaatttcctctagagctgcactgttcagtaacgtagctcctatactcatacggctattaatcacttgtaagtgtgacaagtctgaattaagatgtgctgtaagtgtgaaacacacaccagatttctaggacagtatgaaaataatgtaaactagctcataaatattttatgttggctacatattgaactgatagtatttatgaagtattgatttaaaatatactaagtaaatgagtttgatgtttctttttccttttacaatgtggctactagaaaactgaaaaatacgtatgtggcttgcatttgtgccttgcaatacatttctattggacagtgctgctcaggaacatttgtatttgtttcagtcagctcatgtatctccatcatctgaattgcaaaggtagaaaattctatctttaattactcaaaaaagttttgtgtagctctattaaagtttgcagtctctccttgattcctaatct

SEQ ID NO: 255622 - DNA, 392 bp, Homo sapiens
tcatggaaagcctctgccccactgccgcgactcaggcctggccccgggtgcaagttcaagcacagcctcaagcactgttctgttcacagtgcatagaatgtgcttccccagaatgcaggcagcggccgctgcagggaaggagaccacaccaagctctccgggctgccagcactgggaaaccacagggaaggcaccagccctcaaaggcgctgagctggacaagagcagtgacatcgtccaatcttctgaggactttctatttttccagagactgacacaaaaaaccagttcattgttttccctaacaacagatgagaacagaaaggaaggggaagcagattttgaatggtgacatttaaacccaaaacttcattcctcccagagtctcaaga

SEQ ID NO: 255623 - DNA, 363 bp, Homo sapiens
attaatatgcaataaggataggattaagtgtcttagtgttctcgtcgtgttacgctttatgttatcttttggagaaaatgccatattgtcccgttgatttagggtgttgtgtgttgtgatttccagagctagctcctggtcggcagtcgggggttggcactcacactgcatacctgacttcaccccagccattgttggctcttctagctttgggtcccctcatgcattcatagggcattcccaggtctctcttccagaccttgtgcaagacagacaccatcggggtgttcctgttccaaacctaggaggtttatcttacataagaaaacttctcaaacccatggtaactccgttttctttaaa

SEQ ID NO: 255624 - DNA, 219 bp, Homo sapiens
gtcaattatttttctgcctccattgagatgatcatgttatcttttccttcattctgtcaatgacacatttattgattttatatgtcaaactctttcatcctgtggataattcccatttggtcatggtgtatgatgttttcgatgtgctgttaaattcagtttgttagtgttttattggggatatttacatctatattcatcagggatattggcttgtag

SEQ ID NO: 255625 - DNA, 437 bp, Homo sapiens
tctaactctgccatggtgaatgtgatggaggttggagccgatcacagctggtccctggagagagggctgtgtgtgtcagatttattgtgctgcagctccagttttgttttggtttagtttttaaatccccagtgtcagttttgctgatttcagttaaaactaaagattgtgaagggagacagagacaggttcatgccctctgagttttagagattggtgatatagtcgttgggtgagggccctctgtcttatatcctttgcttaaaacatttcaccttggaaaggcagaaattagccttgttgaacttcaactccctctgcaagaggaagaaatactgaatactgtttcattattgatatctttttaatgagtactgaaagccactacaggatctttgtttcaccttcagataaaatgtttcatctttcattctctg

SEQ ID NO: 255626 - DNA, 730 bp, Homo sapiens
ggagccatattgaaaaagataacaactgctaacattttggagaaatgaaaatgggcatgaatttattgattaaagaaatgtaccaagtcttggcagcctgaatgtttaaatgtgctataataaaagataaattatgataaaaagtattcatagaatagtgacagtttgcctgtcattagactttgatcagatttctcatcaccagtagtagacaccagaagacgacaacgggcattctccaaatggtagagaaagtaactttcagcctaggttttcatacacagcaaaactatcattcaaacctgaatgagaagggttttttttcagagagaatttttgaaaggactactaaagaaaaatgccttttgagaagaacgttatatttgaaggggaagaaatggaatgcattaagcagtgattaggaaagatgttggtaaatacgatggtaaatttagataagtgattatttaaaaagtaatggacgaaggttaaaacatcctgtaaaaaataatgataagtttacaggtatagagattgtagttaaaagattctaggggccttatatgggaagatagactggtattttaaaactgtaaatttaaatttacatgtagaaattagtggtaatcactgtgtgctaccttataagagaaaaatccacttccattttatatttgtgaccacatgactgaaccatgcatactaatcagtatggtttcttggattcttg

SEQ ID NO: 255627 - DNA, 294 bp, Homo sapiens
gttaaattttaattttacccaggtcagtaaaaaaaacaaaaaaattctaaatgaaagctcccatcagtactatggtttttatattcttacctttacttttgcattcagacttctatagcagaataccatagacttggaagcttatatacaagacaaatttatttttcctcatagttctggaggcagggaagcccaagatcaaggtgctaatagattaagtgcctagcgaggccgtcctggttcatggatggctgcgtttctagtgtgtcctctcatggcaaaacggaacaaagg

SEQ ID NO: 255628 - DNA, 965 bp, Homo sapiens
tgaggcaacccacacaggcaggctggagaggagtggcaagaagctcaccttcggacagtagtgagcagagcaacagaggcccccagagacttcgcacaacggaaaagagatcaactcccgcatttgcaggggacgtgaaagtgcaatactgtgaggaacaaaaggaagcctcatctctggaagccgggaggaaaaacagtcggtgtagacagcagcggcagggaccagagctgaccagaaggctgggtcccagcaacaattagagacaggcagcagctgaggccccttctctgagaaccatttcaattgcacagtggccacagaaggctccattggcccggcagccagctctgcagagccatttgtccacaaggaaaataatagccccggcctcattgctttgggctgcagggaggacaatgacccaccatgaaaagagttaaaaagattctggggaaggggaaaggcaggcccacacggtggcaattcaagatcttttggatgccgtgagcgtgttctttaattaagcccctcttcttcagctcatcctgcagaaacgcacctgcttcccatctgccatccaaaacggcaagcacaagaatgacttcacactgtcactttcagagttccgctgtggcccacagtgatttttcaagaaaggcagccacagactcgctcgcgctttctctttctcctttcctctgaaagactctataaaaaccacattaaaaagtgtgtgagccaagcaatttcatttatcaaaggaagaaggtcatccatagcattcattctaagaatatcaggcacacggccagccctggacacaaggcatgaagaccagagggccctttattgacctaatctctattttgtcgccaaactgcatctgtgtctgaaagctgggacacacaatatttccctctaccaaaataattttattttctgcagcagcatgtaacaaacaa

SEQ ID NO: 255629 - DNA, 94 bp, Homo sapiens
gctggcgggtgggggaggcggagagctcgatgcaggtgctgtcctcctcgccacgactctgctagctgtgcagtagccctcgctccgccactta

SEQ ID NO: 255630 - DNA, 778 bp, Homo sapiens
aggtctggtcatttttctaaggagagtcagcggacagcggctggctttgaacccagggctgaatggctccaggggctgtgtccctgactgctaacccggtgggctccaggctgatcgccccctcagccaagggctgagaggggaacgttccttttgaaaagctggcggaacatcctggaaatgttcagaggcagccagaatggaaaaagatgctcaaaggggacagaacttctcaaaggggtggaggctgccctgccatgggtgacacgtggaaaacttgagacatgtgacatccaggcggttagtgggagaattggtcatgctctttggcaaattgcgccctcctcctccctccttctccctgctcctccaaactctaccctgggagggagcacttgggaccacctcagaggaggcctggtggctgtgacccagtcccaaatgtctgcccagacttggagactgcaaagagcgggagcccttccttgagcctcaggagcagtggggttcacagggcccctctagtcaccgtttttaagcccctggtctcagactgcccctccctcaggtctcctgagcttagccacatcatccacgcccttggcacagccacgggatgatgggtgtgatgcgggcatccctcgtgttggcatcctggaccgatatccagggccctgctttctccccatcctcctgcctctcccatgcccctcctcaaaactccttggcctccatcctgccctcagaatcaccacctgtgactcaggcacaccaatcc

SEQ ID NO: 255631 - DNA, 212 bp, Homo sapiens
  misc_feature (100)..(100): n is a, c, g, or t
cacagttttttgactctgagaaatttaattaaactttctaagcctcagttttcttatttataaattgtgacagataaaacctaaggtgtgagttttcttnggttgtgtgtcaaattaccacaaacttggtggtttaagacaacctgctcttattatctcaccatttccattagtacagagtctgggcacagcttaactgaatccactgttca

SEQ ID NO: 255632 - DNA, 468 bp, Homo sapiens
acttggtctgaattccctaatagacattctcctagcgggatgagtccccctttacagcactcgggaaatgcctgctcctctagctgtctctgatccacctctcctgtctttcaactaaggcccccacatgccagaccatcgttggtggacctcgtcaccagcatgaagtgggctcttggagttgtcgactgactagttcacaattagtgactcatagcatctcactcatttccttttcatcagtaggaggcagcagtctgcacttttgcatcacatttcaaagacatctgtgtgtttgttctcgtgcagaacactttgactattgtaacctctaggtccatgaatgaccctcatcttcagtaaaagtggattcacgctggcaaagtctgctttgttttattgtgacacatggaacattatggattttggtgaataaaaactaacttaaattgaagtattcttgtaaaa

SEQ ID NO: 255633 - DNA, 675 bp, Homo sapiens
tggatatatatcatttctagacttgactcattaaaaactcccatgtatggtcctttaagctttatttgctccctgtctagtggaatggagaagactgtcatggaagtcttggatggcatagggtgaagatggcagagtatctgttggccatttggaggagaattgttctctgatctgtttactcttgtaaacaagaaatacatttccattatgtgctatttcatattttgagtccatttgttgcagtagctagttgatcttgcctaataaaaacaagattattgaagaagtaaccgtaagcacatgtattaataaattcatcctgaatgaaacatcatttacttctagcttcacattattgtttgtaatcaattttacaataatacttgtataactatgtggtcctaattcaatgtctaaatcaccaaattattttttatggtgaaaacagtaagttttaagtgaaataattaaattcagcatgaaaagagctaaattaaaagaatatttctggcttatgtcatgatctattaaagtgcattttatataatcagaaatctgtcctactcctttcctttggcttagattttctctatgttgatttcttttctgcacaggttctctatggtgaagatggcaacttgctgactcagtctcagaatgcgttaaatccac

SEQ ID NO: 255634 - DNA, 431 bp, Homo sapiens
agctggaaactagatacgcactcacccagctttaagcttgcagacgatgccagtgccccagaggagggcagagctgcccttctagcctgggtccctggatgaccttgggaagtagaggatgtctacctgtcctattactggcaggagatgtttcaccattgcctttggagtctctttgctacaacctttactctagttaacatggtaacatatttattattattgtgttttccctgcatattagaaaacaaaacaacctgtatctcagggactaattgcagaaaatagccacaaggcagaacatcatttaattagaatacatggcagatggtgatttaaaattttttcattaaaacactcaagatgaggctgaaaattttcagataataataaagctggttgatttcttacatgctattaactaaggaaaa

SEQ ID NO: 255635 - DNA, 224 bp, Homo sapiens
  misc_feature (211)..(212): n is a, c, g, or t
  misc_feature (215)..(215): n is a, c, g, or t
  misc_feature (217)..(217): n is a, c, g, or t
  misc_feature (219)..(220): n is a, c, g, or t
  misc_feature (223)..(223): n is a, c, g, or t
gtgtgtgtctacatccttctaagtggagatccatgtctctctccccactccacctgtcctgttccaccattcgctagctggccatccacttggagtcagcagtgcttcctgtggtgagtgtgccctggagtttgccactgctttggtcctgaccacagctttctcaggccacgcagggctaggtgtctaggtggcagtgttttgtatctgnntgngncnncang

SEQ ID NO: 255636 - DNA, 462 bp, Homo sapiens
aagaagtctaaataaatgacacagttctttcataaaatttttatcatgtgctttgtgactgtgaaaagcctgtcattaagagggtacttaaaacagtaaaaaaatacatgagcagagattaggtcaaatcattaatcaaatttgctaactctgcccaagaaaaccctgcaaatggtatcacagaaatataaagcagagatggtcattatcaagtagggatacttgatattagttcctttataaaacaaaggaaaaacttatagaggaaatttagtgctttggatgaatttaagtggataaaagaaaccactcaaacccagatctttcatcacttaataaagagatctacttgggatgctttgtgaaaatatgttcacttatcatcttgtctccatcatttggaaggatgatggtcagtacctgggattaaagttttgtcagtggggacactgactggggggt

SEQ ID NO: 255637 - DNA, 405 bp, Homo sapiens
gacaagagagcttgatttcacatggggcctccagacctgaggtgagaggagattgtccccaggtggaaataaagatctggtgcttcccataacaagttctcattagccaaaggctatagtgttgaaaatacatgctatgtataaaaggtgacttgtcttcaaatttttcttgtaactagaaagattgtcagaattttaaatgctccaccaccctagccaacatggtgaaacaccatctctactaaaaatacaaaaatcagccaggcgtggtggcacgtgcctatagtcccagctacttgggaggctgaggcataagaatcacttgaacccaagaggcggaggttgcactgagctgagatcccgccactgcacaccagcctgggcaataaagtgagactgtgtctc

SEQ ID NO: 255638 - DNA, 401 bp, Homo sapiens
attggggaagtgataaatgtccacgaaatcttcacaatttatgttcagagattgcagtaaagacaggcataagaaattataaaagtattaatttggggaactggatgaattcttggaaatacaccatctcccaggattggactaagaagaaacataaatcctgaacaggccaataatgtgtaatgaaattgaatcagtatttttttaaaaaacataccaaccaaaaaaaaaaaaaaagccttgaataggatggatttacagccaaattctaccagacatacaaagaagagctggtactagtgctactgaaattatttcaaaaattgaggagaagacactccttcctacaatattctacaaaaccagtatcatcctgataccaaaatctggcaaagacacaa

SEQ ID NO: 255639 - DNA, 438 bp, Homo sapiens
actgttccccatgcttttttcttccttctctttacttttttttccatatcatggatttttttttttctgtgtttaacaaaaagtaagttgtttatgtagcaaggatttttatattcagtatggagtattgcatgttaatgtgtaggaaaaaatcaggctgaggccgggtgcggtggctcacacctgtaatcctagcactttgggagactgaggcaggtagattacctgaggtcaggagtttgagatcagcctggctaacacggtgaaaacccatctctactaaaaatacaaaattagtggggtgtggtggcaggtgcctgtaatcccagctactcgggaggctgacgcaggaggtggaggttgcagtaatctgagatcgcaccattgcactccagcctgggcaacggagcaaaaactccatctcgaaaaaaaaaagaa

SEQ ID NO: 255640 - DNA, 537 bp, Homo sapiens
atggagagaatagtgcattgtgaaggtattgtgagttgggacaacttgtacagagaatataacacaatggcaagtacatttgggcctaaagatatcttagttctccctcttgccactgactctttttttgtgattggaaaagttacttcctctctctgggcctcagtttcctcgttcttaaataataaaaaaatccctcatggggcatggctcctctctccctgccttcactttctgcaggcactgctggtgtgtgctcaggtgtacctgcctcttcccgtcaggtccctgctttgcatttgcacctgccccccttttgtttgtagtctaagtgacacgggtctccctctctttcctccaactgcatcgctcaatcctgcaatgtgtcacaatggtgtggagctgtcattctggatgatgtggcgtgacctcacactgatgccattcccctcccaccaagccaacctggcttcctcctccacccatggaataagccagaatgctgaaagtgggagggaaatagagcaccaaggttaa

SEQ ID NO: 255641 - DNA, 331 bp, Homo sapiens
agaaggactatcagccatgaatagatctaagctgaagtggaaaaaaaagtgatctgaatatgtaaagtcactcaagaaagtatccatattggtttcctgcaaaattcctttggaggcttcctggacgttgcattccgaaagcatcttacggaacatggtgtcgtcttcactacgtcatgaccgccctgccagggacttgtgtgtcctgcattggcaaattccaagtccctcatcatggtctagaaacaaatcacccccggttcctatgtcttcattttcctttcatgtgttccagtaaggcattaaagaacagataacactgtaacactga

SEQ ID NO: 255642 - DNA, 632 bp, Homo sapiens
atagccagtgtttaagtttctgcaatcaggcccctaaattcatactctgaactagtggttctcaaacttttgatcataaaacccatttagactcttgaaaattattgaggacctcaaagagttttggtttatgtgggttatagctatcaatatttaccatattggaaattaaaactaagaattaaatatcagtaagcacaatatgtgttcacatagataagtttatgaaaaattaatgtagttttcaaacaaaatgagatgaatggcaatttttttgcaaaacttttaatgtttggcttaattaaaaaaatctgattcccatatttgcttctgtgttaactcctagagctatatcattttgattgaaggtcagtttggcctcatacaggtatgtacttgggaagggtaagagggattgttttagtagctttttcaggtaatcgtggatatccctctttgcactactaatttggcatgtggtggttgcttaagattagttccaaggtggaacctgaaaccatatcagtgaacctgaccacgttctgtaacattaaaatctgttgatctgtcttgaagtttgaatagatcttttccctatatatgattttctaatattatgcattgattatttg

SEQ ID NO: 255643 - DNA, 708 bp, Homo sapiens
aaggtaaaaaaatctttatatgtcccactaggtcctatgcgatgtgctcctcgccaacctacagcttcatccctcattatcctcccctcttacatccatttccagccctatctctcaattcacatttcaagtcacagcaacacaaaactggctgtggtttctgcccagtaatcaggccacttccatctctgggtgtctgctaatgctgggatttctgttttcttgcccttttctgtaagtttctaggctcacttcttccccctttgcctccctaactcatttctcattactggacgctccaccatgggggctgcttcactaggaaggcttctgtaagctcctccctgcccattgtcccaggccagaccaaacacctgtgccttatgcccccagtgctgtctgtgaatctctcaccaacatgttctccttctttatatccctagtactgtacctggcacagagtaggtatttaaaatgatttgtgggtgggcgcagtggctcatgcttgtaatcccagcactttgggaggccgaggcaggcagatcacttgaggtaaagaggtcgaggccagcctggccaacatggtgaaaccccgtctctactaaatatccaaaaattagccaggcatggtggtgcaaacctataatcccaggtacttaggaagctaaggcaggagaattgcttgaacctgggaagtggaggttgcag

SEQ ID NO: 255644 - DNA, 473 bp, Homo sapiens
tttgtttttcatctctaagattatggtataaaaacaggaatttatgttttagaattgtttgggtagaatcacttaaggtagatgatttgcttattcattcatttgtttatttattaagcacattattgaaatgcccattatgtgccaggcataataatatagtaagtaaaatagatggcattcctaacctcagtgttactctaattgcatagacaggaatgctggggaaagaatttatctttcagccagctattctcctgcctgggacccagctttagctagtcttggctctacaaaggaagttgtaacctaattggaacataatttcttctccgtaaaaactgagggttacaccaaatactttcaccacttctacctctaaaattcttgcttttaatgtgaattttagattaatttagattagattaatcccttaaaactacattcattacattcataccattcttgcatgg

SEQ ID NO: 255645 - DNA, 523 bp, Homo sapiens
ttggaaagatttttagtactccattggcatagctatttcatacaaggattaggagaaactttgaaaggttatccacttgacttttctgattttagaaaggactaccattaaaccaccctatcagacaaaaaaaactggtttttagaaacctgagagaaggaattttataatttccctgagtaagctgttacagggaataacaaatctcctgccacatgtggcacagtgtaagtaatgctggagcacacatactgcattgtaaagaaggtaggaaaggtggggggacttttgttagctttaattttaaggctaaaagcatttcttctcagtttgaactacttttaaatgttataaatgtcatcataaaaatcattagaaaactcatttctccttatgttgtcgttgtaccattgggtattgtatagagaccaatttctaagagattttttcacctctgtttctgttatttgctatactggaggtaatataataataatgaaatatagctttttttttcaactca

SEQ ID NO: 255646 - DNA, 293 bp, Homo sapiens
aaccacctgatactggctctaaaggttttcccctgagaactgtgtacagggcaggagtgaggggttggtgatagaggtgatgatttcgtgtgttggtagcactgacgtattcaatgttgaatgtattctatgatattttatgattatcctgttacatgttttcagtataatttagcattacttttcagagacgtaccagttggcaataaaaagccttttctgtatttaacactgtgaccgaatctgctggaaatttttctgtccaaataaatttcctgaaggcatacatctta

SEQ ID NO: 255647 - DNA, 428 bp, Homo sapiens
tgatgatgtttagtctggggatatcagaaaaagattaatatggtctttacctgacacttgtccttcaggttcaagtgctacctcctttctgaagctttcctgacaccttcagatggagtgaatcattccaccttgtgcctctgaagtactgggcacatgacactactcatgcacaatacaatactgtaacacaactttgtttgcatgcatgtctgtgcaactagattctaagcttttgggtggttggagcaagttgtatttacttcttagtatggtagctgacccattgaataaatatatgaatagatatattaatgcacatatatgatgaactaagtgtgcagaaatcacttaagaaagctggagaaacttgagtcaactacatctcactctctagaaaattaaaggattaagattaaataattaaa

SEQ ID NO: 255648 - DNA, 8555 bp, Homo sapiens
  misc_feature (2781)..(2781): n is a, c, g, or t
  misc_feature (3139)..(3139): n is a, c, g, or t
  misc_feature (4212)..(4212): n is a, c, g, or t
  misc_feature (8197)..(8197): n is a, c, g, or t
  misc_feature (8256)..(8256): n is a, c, g, or t
cacacacacacacacacacacatacacctacacatgaccgattgcctcgcctctagcattgggaatcagtcaccgtgctgtccttgtggagtcttgtggcccaacaagaggaagctctcccctgacattgcccctccaaagtgcgccacttccagtgcgccccactgtcatgcccggcctgtggacagccagaccctgccatccctcccacccccgaccaagcatgggggtgctctgtaggtagctgtgtggcctgacagtctctaccagtcctgctgtccctcagctgagaatcaaacccatttctggatgacagggaatgtgtcttctgctggctgtgttctctgtggagctcaggggagggaaaaggccaagctatttctagggtgctgtcaggaccgatgaaaaggtcacaccctttccaagagacacttttcctggaaagcccctggagcttagctggctcttatcctgtgataagccagaggctctggggggtgagggagcagaaaccctcctcaccccagccaacggggacctgtatacctctgccagtctctcacttggccttgctgctgtcctctgagactgcctgttcctccctctctgtgactctacaccaccatcacctcctccaggaagtcctctggattgactcctagcttattacatctttattgtgcagaccctctccattcaaagcccctcttcaactgcccccccccactacctccaagacagagattctgggttcttgcaactgcagcccctcagagagtgtaagaggggcagaaaaaggagatcaggaggtgagggaagcagcgctgtcagagtttccaaagccccggccagcaaggcctcagaggcctctgttggagtgggggcctccctggctatgcgctccagctgcacaaggcagcctctgtgagcctctcccactcagccctacaggaagcagcagggcccagcctcaatggacccattcagaccccagcgctccggaaagtacctctgcttcctgccaccattccactctggccaaacaggctctactctcttctgatgggaggaggccgcaggcaggtggttcagtggttagggccaaccatctacttcagttcctgtctggcccagatctctgaccttgaccatgccctagtgggtgtatgtatacctttagtgcaagggtggtgtgacagttaatactgagtgtcaacttgattgggttgaaggctgcaaagtattgacctactggaagtgtctgtgagggcattgtaaaaggagataaacatttgagtcagtgggctggggaaggcagacccacctttaatactggtgggtaccatctttctaatcagctgctagcgaatataaagcaggcagaaaaacatgaaaaggtaagattggcctagcttcccagcctacatctttctcccatgctggacacttcctgccctctaacatcggactccaggttcttcagttttgagactcggattggctctccttgctcctcaaacttgcagacagcctattgtgggaccttgtgattgtgtaagttaatacttcataaactcccctttatatatctatctatatctatatctattatctatatctatatctatatctattatctatatctatatctatatctatatctatatctgtctatatctcctattagttctgtccctctagggaaccctgattaacacaggtgggtaggcacagggaaatgtgcccccttccccgtgggtgctgggtaggtaaatgtttcgcaaagggctttcttggggagagggaaccctgattttcagtatttgcctcttttcctggtataaatattcccactgtgggcagtatcacctgcctctcaaaattcctgaaaattcaacagttggctcctggcagctgctgtgagccgttccagccggtgactgtggtggctccatcctgcagggccatgtgcccccaccccttgtgctatggcctccctcactttagtgtgctgtgttttgctcttaggaatcaatgtctttgcagataaggcaccccagtagctggccaccacctgcagttccctggtctgtctcttgctggcaccaagctgtgctgtgcctgctgagactgctgggccacccccgtgcatatggtctgcggggcttacttgattcccttagcttcccagccaaggtgctggtgttgccagcagtgctggcaggaggaggggataactagaggggatttaactcaacccgaggggctcttacgggatctttcctggatatccctccaggtgggactggctgccctgagggtatacaaacctccaactcctccaatggctgaagctacttcctcgagcagatggcagctggctcaggctggctagggaccagtgcatgtgaggtcggtgctggatcaccccatcaaggccatcagcctgtgcttgttcttggggtttgagggaaacccaacagggatgaatcacagtttttaacctgtgtttgtctgccccccagccctggacatctgcaggcaaagttaaagttatatttggctcttatcaccgcaaaaggcataaaccagaaattatggcatcgggttggaagtcagggaggctaatttggggaaactgcctggaggaagcagcaactcaaaagaggaggagtcccactgtgggacagaacaggccctgcataagaaccactaatcccaggcaagcccagacatggccttctgcctggggaggccctctttggcctgctcagcagaccntcagccccttctaggccctgtcttcagcctcagactgagtggtggcctggggaggttgggagctgagctgttctcatccctggttccttggccacggtggaaacaatggggccggatctgactgctcagcggggactgtgaatagctctctagcaggaagcaacagcaggggtagtggaggaagtgtgggcccactttggtttgacactgcatatggtccccatctggcctgagagcctttactccttggcaaactcaggccaataagctcctgcccccaccctcaatggcagctggaagaatggcctgagggagaagcagggataggtgggctgcagtgacatcacccccagatccnagccgtggccccagccaacccatggaggtggggcatggcacggcaggtgctgcacaggagcccaagcacaagagcacttaggagaaggaatctgagcagggatcgatctggcctggtggtgattctccagaaactccattcctcagggctgtgaccaccaagccaggtgatcaggccagtgatgtttccctttgggccaggtcggggagccagacctgggagggagactcctctggggcccaggggaggtgagtcagagctggcagaggcctctggctccaggaacctccaaggaggagacctgagttgctgggaatttctgggtctgacctcctgccaagtcaaggtctgggctggacacaaggtgaggctgtgccttctggtgccaggaccaaggaaatgctgggatctgggcagtgctcagaggcagcaccgtatggcagaaccatgagggtgcaccagcacggacccctttctgcaacccacccatccctccctgcagcacctcgcctcctccaggcaagaatctgagccttgaccacagctccctctctcacacagcttccttctttggttagaaccacccggaggtgactgtggccatggctctgactgacatagacctgcagctgcagttctccatgtcccaacccgaagccctccttctcctggcagcaggcccagctgaccacctcctgctgcagctctactctggacacctgcaggtcaggcttgtcctgggccaggaggagctgaggctgcagaccccagcagaaattctactgagtgactccgtcccccacaccacagttctgactgtctcagaggactggcccacattgtcagtcaatgggtttctgaatgcctcctctgtagtcctgggagcccccctagaagtcccctatgggctctttgttgggagcactgggagacttggcctgccctacctgaggggaaccagccatcccctgaggggttgcctccatgcagccgctctcaatggccgcagactcctccagcctctgacccccaataagcatgagggctgtgctgaagagttttctgccaatgangatgtggccctgggcttctctgggtcccactctctggctgccttgcctgcctggggcactcaggatgaaggaaccctggagtttacactcaccacacagagctggcaggcacccttggccttccaggcagcaggctggcatggggacttcatccatgtggacatatttgagggccacctgtggtccatggttgagaagggccagggtactgtattgctcctcaacagtgtgcctgtgactgacgcacagccccacaaggtcagcatccacatcaacattcaccagctagaaatctccatggaccagtaccccacacgaactgaggagtcctcagctacctggagccacgtgacagtctccttcttggggagctggttgcagaggcctctcatcacctccaggaacaccgctcaggcctgacaccaggggctgccaatgcctccctgctgggctggctgcatggaagacctcagtgtcaatggctagaggcaggggctgtgggaagccttgctgacgcacaacatggtggctggctgcagactggaggaggtagacaatgcctatggccattatgaagctttctccaccctggctcccaaggcttggctgtctgtggagctagctgagccatgcgtgcctgagccagggctacctcctgtctttgccaatttcatccagctgctatcagcgcagtggtggtgaccgagggtggcacagcctggcttgagtggtggcatgtgcagcccatgctggcactgatggaggctgaactgcgtaaatcccaggtgctgttcagtgtgacctgaggggcacactacagcgagctcgagctggatgtcctgggtgcccaggcatgaaaaatgttcaccctcctggacgtggtgaactgcaaggcccgcttcatccacgatggccctgaggacacctctgaccagctggtgctggaggtgtcagtgatggcttggttgcccatgccctcatgcctgcggaggggccaaacagacctcctgcccatccaggtcaaccctgtcaatgacccaccccacatcatcttcccacatggcagccttatggtgatcctggaacacacacagaagcctctggggcctgaggttctccaggcctatgacctggactctgcctgtgagggcctcgccttccagctccttggcaccccctctggcctccccgtggatcaccgagaccagcctggggagccggtgactgagttctcctgctgggagttggaggccggcagcctagtctatgtccactgtggtggccctacacaggacttgacattccgggtcagcaatggactgcaggccagccccccggccatgctgaaggtggtggctgtccagctggccatacaaatccaccgcagcacagggctgcatctggcccagggctctgccatgcccatcttgcctaccaacctgttggtggagaccagcgccgtggggcaggatgtgaccgtgctgttccatgtcaccggaggcctgccgttcagggagctgcagaagcagggggctggtggggtggaggatgctgagtggtgggtcacacaggcgttccaccagcaggatgtggagcagggccacgtgaggtaccgcagcactgacccacagcactacaccgaggacaccgtggagaacctggatctgcaggtgcaggtgagctgggaaatcctgagcaatctgtccttcctagtgaccatccagagagccactgtgtggatgctgcagctggagccactgcacactcagaacacccagcaggaggccctcaccacagcccacctggaggccaccctggaggaggcaggcccaagccccccaaccttccactgtgaggtggttcaggctcccaggaaaggcaactttcaactacagggcacgatgctgtcagacggtcagggcttcacccaggatgacgtacaggctgcagaggtgacctatggggccatggcacgtgcctcagtggcagtggaggacaccttctgtttccatgtcacagctccaccatatttctccccactctgtaccttctccatccatattggcggtgacccagacatgcctgtcctcaccaatgtcctcgtggtgcccgagggtggtgggtgtgtcctctctgctgaccagctcttcgtcaagagcctcaacagtgccaggtacctctatgaggtcatgtagcagccctgccatgggaggttcttagcgtgggacacaggacaagatcactatggtgacatccttcaccaatggagacctgttgcgtggccagctggtctagcagcatgatgactccgagatcacggaagatgatatgccatttgctgctgccgccaggaccagagcagtggtgacgtggcctgggaggaggtacggggccatccagcctgtgaatgaccacgcccctgtgcagagcatcagctgcgtcttccatgtggcctggggtaggtggcagctgctgactacagacaacatggccttcagcaatgctgattcgggctttgtggatgcccagctggtgctgacccacaaggacctcctctctggcagtatcatggccacggatgagcccatgcagcccatctgctgcttcatccaggaggggcctcaggaagaggcgagtcctgttcacgcactcaggctgactacagctggatcctgctgcaggtgtccgacaggcagcaccaggccatcatggtgctggaggtgcaggccttggagccttacctctgtgtggccattctctttggccacaatggcagcctcagctcccgcaacaccctggccttctcaatggatgtggggccttctcaatggatgtggggccagtgcacacagatgccaccctacaagtgaccattgccctagagggcccactagccccactgaagctggcctggcacaagaagatctacatcttccagggagaggcagctgagatcagaagagaccagctggagaccacggagttcatcatctcggagccactggccaatatgtactcgcgtgggaaccagaacacactgatggaggagtgggcagagtaggcacagtggcacgacgagatgctgcgcatgcaccacgtgctgaaggaggcgctcagcatcatcagtgacaccaccaggaccaccgtcagcatgcccatgcccctgcccgcggacgacacctgggtgcaggtgcagagcatctctgaggaacaaaggtgccagggcctgccccccacagccccaaagtaccccccgcccgggccgcacagagggatgcccctgcatcggggtggctcccacctggagtgaggggtggagcttgccaaggagcactggctgcggggcggggtggagctgggatgttctcaccactggggtctgggcttaagcttgggcgactgcctcggggcacggcagggaggagcttccgtgcatgggtgtggccggggcggggcctcaggggggcagagccacccatctctcccctccctatgccttgcaggtcgcccaagtccagccccaggatgcccagaccccaccatgtccctagcccggcctgggtggcggggcccagctcttgggcttcctcttgccaggtccgcccttggggaagcgtgccccgtaccctccaggctagaggcttcccctgatcccttcagcccctaccccgccaagtgcgctcatgccccacgcggggtctccaagtgagtaggggctgaatgcagccaaagaggctgctggacgggcgtggccgggaaggaaatgggactggagtccagagcatcagacctggccgcctccatccaaggcattgggaccatgggtgccggagccacgtgtggctgagggctggcggagcctgctccccagggagcactgattcctggaggtggtcgtttttgagggggctgtggggcttgtcttacctgcccccttctgtccagcacttgcatggcacttccctctattttcactcttggcggntgcccacacgttgcatttctcttcctttcttcttctcgctgtcctccatcctccattcngtccaactcctatcccagcccctggggagcctacctcaggtctgagagtctgggtgtgtggatttccttcagctacccggatgtccccacaggcaatctgattttttctccacatctggacccctccccctctatccctaaccctgtctaaactaatggcgcagtggtagctgcaagggcagggatgggagtggctgaagcctacttcactcccaaagatttctaaggaaaatggttctactgcatcctttggctgggccttgttgacccgtgaccctcttccaagaacattcactctg

SEQ ID NO: 255649 - DNA, 404 bp, Homo sapiens
agcatctccccagtttctgccttcatcttcatgcggcgctctccctgtgtgtgtgtgtctccaaatttctcctctttataaggacaccagtcctactggattaaggcccaccctaatgatttcattttaagttgactgtctcagccaaggccccatctccaaatcaggtcacattctgggatgctgggagtttgaatttcaacacatgaattttggaggacacaattcaactcgtctcaccggttcaggtgtccagaattggtttatttcccatcttaattgtagatttacaatgtaaatgagccatacattttgtcaattttgtttttgcaagaagtatttaatttgttggtcttacctattttactacttagaagaaattaaaattgcctaagtaagagttc

SEQ ID NO: 255650 - DNA, 378 bp, Homo sapiens
tgtctatactctccatccacatcaattcctgccaggtattattttaatagtctcccctctaatgccaggctccttcttcacctactctcttacccgcagttctaatatgagattcaccattccaacaggattagaccagatgaatagatgatctctaagggccctttcagctctaagactgttgagatttgcacgcacattaggtaaagatgcccccttcttctgaacagtgacgcccaccatcaatgtttaattaatactgaggatgccacaaatctaactcactctgcttttaatggcaggttgactgtgggcttagtttatcaagcctgtccaaatgactaactggatggatattatgcccctggcagagctgat

SEQ ID NO: 255651 - DNA, 281 bp, Homo sapiens
cccatttttaaatcactgaggcttagaaagataaagtgagttagtcagggtcccactgttagtggaactgagattcaaaccaggtttgacagcaaagcctgtcctatttttggcagctgggataatgtggttaaaaggaagtgatgtctacctgagtgttgcaggcagatcagataacacagggagagagagagagctgggactttcccggcacagaaaacagcatatgcgaagtccagagctgcacctggttcagaatttggccgcctgggccagtggtt

SEQ ID NO: 255652 - DNA, 310 bp, Homo sapiens
cccactcctaagtagctagaactacaggtgcatgccaccacgctcagctaattttttatttttgtagagatggggtcgttgtgttgcccaagctggtcttgaactcccagactcaagcagtcttcctgcctcggcctcatgcccgcgccaaccagttctttatttttaatattatgttgtatttgatgtgctatcctattcatttagtataagcacatttttctttatgtcttcagcataattatatgctttttcagaattttaacatcaggactgcttccagggtagctttattgccctttgtcttaag

SEQ ID NO: 255653 - DNA, 407 bp, Homo sapiens
gctccatagcttgtcatattttagattatttcattagggtcaattctcagaagtgggagtacaaggtgaaaggcttgtttgaatattaatagagcaatggtacctaaaaaaattagtatcacaagtgtatgactcctgcctgacagagagtgctctgaggatagggccacaccacacatccaccgcagtctccttttcaagctctagcacacctgttagggagtctgttttcagtatatccacactgaatttatttccttgagcaccctgcattattactagacacaaagccatcaagagccaaagggctacgaactgcccagagtaacaatgtgaggggcatggcggcaaggcaaacactaacattaaagtgagaatgttggcaaataaattttatctgtctgcca

SEQ ID NO: 255654 - DNA, 341 bp, Homo sapiens
gaagttacagacaactcaaaagaggctgccccatcacatgtggattattgtaaagcaagtaatttaatatgcctttaggcaaattggttttgaggaaccaagacagctccctgtgcccaggaggtccagacctcagaacccttcctctgaccttcctaaatatgaatcactctctgcttttcctttctgagactctgttttgctgtctgtaggatgggaaaaacaacactacccatgtcttagggtggttgagaggactgagtcagatagtaagggcaagtgcttagcccagtactcagcacatagtaggtgctcaataaacagctgccatctccttaaca

SEQ ID NO: 255655 - DNA, 274 bp, Homo sapiens
cttctcatctccactcctctctatgcacctgctgttcttttcctgttttcagatttcccctacttctttggtcccctggcaaaagcacagcctcctcatagctcctgagcttttctgacacaggttcaaccatagaaggcagtgggaatatcttttgtctccatttccatcttgctgctgtgtgatgctgactgtttagtggagtgataccaaacaaccatggacagggtttcagggtcacagttaataaaatgccttctaggcaccaccatca

SEQ ID NO: 255656 - DNA, 561 bp, Homo sapiens
tcatttctgtggcatctgttgtactgtcacctattttatttatgattttagtatttgagatttctctttttttcttaatatagctgtgagttttaaaatttttattgatctttaaaaaaacaaactcattgttttttttccttttttttctggtcttattctgcttatctctgctctaatctgttattttcttccttttgcttggtttgtcattagttttttttttccccccttcaggtgtaatgttaggttattgatttgagatctttcttctttttaatttaagaacctgcagctataagcttccctttagcaagggtttgagatatttcttctttttaatttaagcatctgcagctgtaagcttccctttagcatgggtttgagatctttcttctttttaatttaagcatctgcagctgtaagcttccctttagcactgcctttgttgcctcctcctgagtttgggtatgtcatggtttcgttttcatttgcttaaacattttttgtcctattgtaatataattttgttgtttttaataaaggtaattaatgaaacac

SEQ ID NO: 255657 - DNA, 448 bp, Homo sapiens
ggggaggcttctaaaatgaccgctctgggagtgtctgtcttatgcagttgtagataagggatgaaatacaccctggtctcctgcagcgctcccaggcttgctaggattaggaaattccagcctggagaattctagtcagactggtcctctgctcttgaaccctgtttcctgttaagatgtttatcaatgacaatgcatgcacagcgggacatggaacttcattagtgattctaattttgccctggccttgtgatcttgctctactcccatttgccttgtgatattttattgccttggaagcatgtgatctctgtgacccacactattcctacactccttcccctttgaaaatcgctaataaaaacttgctggttttgcagctcaggtgggcatcacggaacctgccgacatgtgatgtcacccccagagtcccagctgtaaaatttct

SEQ ID NO: 255658 - DNA, 408 bp, Homo sapiens
ggtttttagttacatgaccatgagtaagtcccttaacttctctgagcatcagcttccatatctatgaaatctaaacaacgtgagcagcaattttattttgaataatgaactaagaaaaccgggaggctgggcatggtggctcacgcctgtaatcccagccctttgggaggccaaggcgggtgaatcacctgatgtcgagaccagcctggccaacatggggaaaccatgtctctactaaaaatacaaaaaaatagccaggtgtggtggtgggcacctgtaatcccagctactcgagaggctgaggcaggagaattgcttgaaccccagaggtggaggttgcaatgagccgaggttgcaccatcacattgcagcctgggcaacaacagcaaaacaccatctcggaaaaaa

SEQ ID NO: 255659 - DNA, 575 bp, Homo sapiens
ttttaggctttgtgggccatgtgccctctgctgcagctactcagctctgcctttgtagggggaaagcagccactgacaatatgtaaacaaatgagggtggctgtgtttcaacagaattttatttatggaaactgaaatttatatttcatataattttcatgtcatcaaatattctcttattttttttttcagccattaaaaaaatgtaaaaaccattcttagctcatgggtcatacaaaaacaggtggcaggctacatttgacccatggccatagtttgccagtgtctgatatagcccagtggtttccaaatctggctatctttcacagtgacctggagacctttaaaaatgttgattcgaagtgcccctctctcgtccttgaggattctgattctgtaggagtgaggaatctgtattttttataaaagctgttcaggtgatagacatacactcagggttgtggaattagcagtactgatctcactcatttaactgttgaagaaacagccctagaagatttatgtgacttcctgataattaacagcaaataaatggcatgaccaaaattcgaacc

SEQ ID NO: 255660 - DNA, 509 bp, Homo sapiens
catgccatgctggtggtccagcagctcatcctcttcctgctctcactgatgtggaagctgagccccggcacagagccagctccctgggtgcaaaccctgcctcagccacttctggaattctgagccctgggcacagcactggacctctctgagcaagttcacttcttcatccataaaacagggttagagtggcctccacctcatggaaatgtggcttggattaagtacggtaatgcacttacagaaggtgcagcaggcgtagtgcattacagcaacactgaaaaacgcatcgtccgacatcaacacgtacttgagctctcaagaagagggatgaagcaggtcgtagagctcgtggcctcactgcctaatgccacctgaaatctgctccaagttcctgtccccaaggctgagttctcaccccagccacagggctgccccattgaaatcagatgtgagccacagacataatttaaaattttagcaactgcatgcttttaaaaattgaaaaa

SEQ ID NO: 255661 - DNA, 625 bp, Homo sapiens
gcagggccagccatgcctcccacatctgcccggggtttgttactaagctttggcagctcctctcccagaataggcaggccccaaaactcaatccagcaagggtgtggctttgtccccgcactcagctcttcctaccctccctactcttggttagcggaatctgcccttgtggcctaatttgcaatttctcgtgtgtccaggttctccccgccacataccccctctcccctcttaggagggtcccttcccacagtgccctgatccctgagtctgagaaagggaatgggtggtgaaggggagaggctggagggctgcagggagaagcaccttgtaagtccaggatcatagctctgtctcgtttcttctcttgcaagagaggagagttcagccttgagtttcctgtgactgatggggcagtcaggggaactggcaaagtgaccgtctgagaagagacaggcagactgaacatggaaaggagggtggagggggctgccggccgagtgtaaagtctggagctagagtccaggctggcgcagctctggccccaagaatcagaatctagtggccttggtttgggtgaacgtccaatgcaagagagggctgacgtctggccattggtgggccc

SEQ ID NO: 255662 - DNA, 318 bp, Homo sapiens
  misc_feature (165)..(165): n is a, c, g, or t
  misc_feature (167)..(167): n is a, c, g, or t
  misc_feature (312)..(313): n is a, c, g, or t
  misc_feature (316)..(316): n is a, c, g, or t
ccaactgtatatttaaagagactcatcagttagagagagactcaactgcatcctagggagctgacctaagaatcactgtagccatatgcagcacaggaacctgaaactctaggctcagctgcagccttttcagtgatgaagtcaatgcttaagtctagactagtnangaataaggtagctgtaagtaagaatagttcatcacccactgctgggtttgcatcctcctccaaataggccctccttatttgcttcctgtggctgctgtagcaaattatcacaaactgggaggcttaaaacaacagaaatttattnntcnca

SEQ ID NO: 255663 - DNA, 640 bp, Homo sapiens
  misc_feature (403)..(403): n is a, c, g, or t
  misc_feature (443)..(443): n is a, c, g, or t
  misc_feature (460)..(460): n is a, c, g, or t
  misc_feature (465)..(465): n is a, c, g, or t
  misc_feature (492)..(492): n is a, c, g, or t
  misc_feature (496)..(496): n is a, c, g, or t
  misc_feature (542)..(543): n is a, c, g, or t
  misc_feature (559)..(559): n is a, c, g, or t
  misc_feature (570)..(570): n is a, c, g, or t
  misc_feature (585)..(585): n is a, c, g, or t
  misc_feature (603)..(603): n is a, c, g, or t
  misc_feature (625)..(625): n is a, c, g, or t
  misc_feature (636)..(636): n is a, c, g, or t
tccatgatctgtatagactcatggaaaatagaaaagtccacctatatcagtatttgtttagttttcaatgtttcaaaataaaatttagatttgctaaatgtgtgacatagtataaaagtatggactttttatactttttatgacttattataaaagtaatccatggtggggtacagtggctcacacctgtaatcccagcactttgggaggccaaggtgggcagatcgcctcaggccaggagtttgaaaccagcctggccaacatggcgaaaccccatctccactaaaaatacaaaaattagctgggcgtgttagcaggtgcctgtaatcccagctacttgggaggctgaagcaggagaatcgcttgaactcagaaggtggaagtccagcctcagcaacaagantgaaactttgtctcaaaaaacaacaacaacaacaacaacnacaacaaaacttcctangccanatgtggtggctcatatgtataatcttncacnttgggaagccaaggcaggaagatgcttgaagcgaagaatcaagacnncccagcacataggganaccccactctncaaaattaaaaattncctaacatggtggccccnctgtatcccaatacccgtagcnaaggtgaagangtga

SEQ ID NO: 255664 - DNA, 143 bp, Homo sapiens
ttgcccttccctcagtgaccaagttgctgcacatttgatagcacaggcaaccacagcaaacgactgatacggacttacccagttaattacctaaagattatattactggaaaaagctaaatcatcaactcaaccatgtgtaaa

SEQ ID NO: 255665 - DNA, 461 bp, Homo sapiens
gggatccctggcaacaagaacctgagggatgcccctctgatgctgcctgaggcgctccccatctggtcccagtgtgggatggtgagtgagactgggggccatgggtgccgatgatgtcgctgggaaactcccaatttgtgtgtcgatttaagcttaacaagggtggttctcagctggtgaatcccatttggttgagaagcctcagactaaagaggttcataggcagggcttactggatttgacacagttccgcagcccaacacaaggtctgtgtaggaggaactctcctgaaccccactccacaaccagggaggagcccgctgggtggcgtgcacctgtaaccccagcaactccctaggccggggcaagaggatctcttgagcccaggagttccaaaccagcctgggaaacacactgaggactcatctctacaaaaaaattaataaaattagccaggcatg

SEQ ID NO: 255666 - DNA, 334 bp, Homo sapiens
gcttaattttcaagattggggttttgatttttatggagctcaattttggagggccttaggtttggggacacatggtgttgaagtaaacaggtgagaagaagaaaagtgagatttctagaactatattagctgctcagtgagttgggcaattggatatttttggttttatgatttcagattttatagaccagtggaatacaggccttgtgcatatgaagatcaggtgacaagtttgctgcctaccagcctccacagcaatatgccctttcacggtgaggtcctaattttaacaagctaaagaaagtatcaggttaaaaattgtcaaattttatcc

SEQ ID NO: 255667 - DNA, 675 bp, Homo sapiens
cctcagtcctgtactagtgccacgtatttttattcaggagaatgaagtcaaacattagcatcaaagccagtcttggaataaagaatataaggtacataaccgttgagaaatatgtacaagtgccttagaaatgatggattggatgtgtgtttactggttttgagcagtaagttgattgtgtatgtgacatatgtcaggtcttaggtcatatttagctttggctggaggaacttccctcagtcattgccattttctcttctcaggtgtccagagcttataaagtggtatatttgtcagagaattgacaagcattctgcttagtgtttctagtaaagaaacactttttgacagtttaatctgcctccattcttaattcttttgtgtttctagaatgcttacttcttttgttttctattctctgtgtctattttgatttctaaaataaattatatgatcagataggtaaataattgttttagtaataattcatacattagaacatcttcaactattaatgtgctattctagatattgttaaattatgtgaagggaaaatggtatagggaaagaagtttttctgggatggaatgaaaataggtgcccacaaaaatattaagagataatggcaaagtgctaatgtttaatgagagtcctaatatttctcatctttgctga

SEQ ID NO: 255668 - DNA, 677 bp, Homo sapiens
gttgactctgccatgtgacatgttgataccagaaacatggtgctatcagcaacttcttaattgttctccatcagcatctctgtggtttctgacaatgcctatagacatggaactcttgaagctctgttccaaataaaggtaggcccctcaggtggagctgcagagttttcatccttatggcatgcctttcttcctggcagaacttctgtgccagtgcacaagagcagggacagcagcccacttctcccaagatgatatgcctgctctctgagtgggcactgagaagagtcgagtctctggtcatcttggcttgccttttctggcacaaacgactgctgtacaagcaagctaaaagacagaggtgataagagggcgctagtattctcagcctgttcctgctcactctacaagtagatgctaggtagggaaagatagcctcatcctctcctcagagtctactaggaacaaagcttctgcaatacttaagtcctaacgctcccagggtgaaacctgaaccacagcccttcacctaaagtgagggaagatggagtcctgccttttttcccacacctgcttggagtacagcatccagaggagggcttctatattacaggactggagagaaataggagagaggtagcagtagcggcgtgaaaccccagacttgctgttcttac

SEQ ID NO: 255669 - DNA, 430 bp, Homo sapiens
gagccatgggggctcagaataaaggcatttcctgtgtgcacgtgacaatgggtccggacttccggcgccctctggtggcggccattttgattggtgttgggtttatttgtcggagaggctcctgagcgctaggtcggcactgcggtgactgaacccagaaggcggagaacagttgtcctctgctgcacagaggcgactctggagctctgtgacggcgccaagcgtgacccacccctgggccaggatagggaccgtcatgcccatatctcctggctggtcaccctctcctcccaaccctgctttaaaccacgtggttcgatggcggtggtggccacgctgaggctctctgctcaggtaattgtggtgccttccatgccctcaggtcacctcatcatcacccaaaagcctgtagtcttgcaaggaagagtct

SEQ ID NO: 255670 - DNA, 417 bp, Homo sapiens
ctcctagagttgagtcctaatgggggcggcatccttgtacggaaacacgaaaggttaatagcaataacaatagaaacctcgtgtttgtgtatggagagccttacgcttcccaaatactttcccacagatgacctcatttaatctttgttttgtcacagagatattttattcccatctaaaaaagtaggacacccgggatcacagtcaaaaaggtattaaactctgtgttggaatgatggtttaagctacttcttgtgacttctattccaattttccccatgtcatcacggctgattagagaataattatgataatacaactgagaataatataagatgtagagacttaagtcccatgtgccaggcactaatcacccagtttgcaggtgaaaaaactgtgcatagagtggttgggtaa

SEQ ID NO: 255671 - DNA, 275 bp, Homo sapiens
taggaactcaagatgaactcttgaagaaggaaggtgtgcttgcatcaccagttattttggaacttccaccagactcaaaattcctcaaatctgcttccttcacactatactccaaaaggagtcaaagctatgtggcatactgtaagaacagaaccaacagcctacaaaatacttccattctaatcctactattacttccggggacactgatttataaaataagaattataaaataagaatttttaaaaataggaataaatatagccatcttcgtc

SEQ ID NO: 255672 - DNA, 307 bp, Homo sapiens
gcaaacatttccagatgtatagttggtggggtagtttttagaaacaagtagttaaatccttgaatactgaaaaggatggtagaggccactggagaatacataatagacagtcagcttctgaggtagtgaaaatgatttcccaaacaatgagaacagtgtttgaacttttaaattttgccactggtgcctttacttcttataattgttgttaaaacctgccaactctatgtatgtttagttgaagtcaaggtttactggctcataggccattattgtctttattacaggtccaggtctacaggtattt

SEQ ID NO: 255673 - DNA, 424 bp, Homo sapiens
ctaacccaatcttagaggatcaaggaacacttcctgaaggaagaaaatctaagctaagacttgaactatgagtaagagaaagccaggtaaataggtgggaggaggagtagcccaagtaaaggccataccatcccgaaggtgtgagaatataacccattctgaaaattgcaggtagtttaatttgacttgaatggagaattgacaggtggtaagagaagaaccagagaggaaaataggatccaagtcatgaagacctgtatgtcatgttaatttgtttgtatagtttcttaagtgcagtgggatgcagttgaaggattttggacaaggagtgacatagtttgatttgcagtttagaagttagctgcaaatggagaatcatgtaaggaaggcaagagtatagtcctattaaagactgctgtaatcc

SEQ ID NO: 255674 - DNA, 379 bp, Homo sapiens
ctcccaagaggctggtgcatctgtttaaaggagcaggcactaggcagagcagcccccaccccaccctccatggcagagtgcagtgggggaagggatgggatttcaccatgttgtccaagctggttttgaactcctggggtcaagaaatccacctgcttcggcctcccacagtgctgggattacagattgtgcttttggtgttacatctaagaaatctttgcttttgattattttaaaaattgattttctcatcaagtaaaagaaaatgtactttcaagttcctttaagtatatccacgttgcctaggcaaccaagttatttatcaataggtgatcatttgtaatgatttgttaataaaggaattagaaaatcttgcctt

SEQ ID NO: 255675 - DNA, 368 bp, Homo sapiens
aacccaggaggcgtagtttgcagtgagccgagatcgcgccactgcactccagcctgggtgacagagcgagactccatctcagagaaaaaaaaaaaaaaaaagaagtaacctgatgtgggtaagggaaccacaagaggcttcacgtggggttttgttacatataaaaattgtaagttctgcgattatgttttaggctttagtaagtatctgtattttcaaaacaaataagttaaaaatccaccacatgattcatttaaacaatatttgcaggaattgagaaatccatatacaagtgcatgtattaacatgctaacactggttatcactgtgtgttctgattatggggcattgcaaaatgtataagttat

SEQ ID NO: 255676 - DNA, 374 bp, Homo sapiens
  misc_feature (223)..(223): n is a, c, g, or t
  misc_feature (274)..(274): n is a, c, g, or t
  misc_feature (313)..(313): n is a, c, g, or t
  misc_feature (323)..(323): n is a, c, g, or t
aggatggtctcgatctcctgacctcatgatctgcccgcctcggcctcccaaagtgctgggactacaggcatgagccaccgcgtctggcccaatatcttgagttttaataattaagcattctggatttttaaaagaagattatgattgtaggaaaatatctctgtcagttacccaggcctacgggaaacctggctggttgggacatgcggcatttaagcaaagnaccacactcggtttatatctgtgcatcctaaaaccggtaagatcgttaganaaaaaaatgaacagcacttaagaactgagctcaaaatgncctataaggntatttccctatagtggtcgattatatagtggggggtgaggtgggatatggg

SEQ ID NO: 255677 - DNA, 284 bp, Homo sapiens
acttggaattttttctgtatccacaaacacacatttggcaaaccactgaacactggttaggtgcctggagttttgctagacactgaagataaatacacagatgaggcaaaactggcttttttttttttttttttgctaggagagttcagatattgtgttgacagctgagcaggtcatatttgtaggaatccaaatttttattaaatggtataaacctctgcttatttgttctaaatttctccatgatgcacatggaatccagtgctgtccatggtccctggggt

SEQ ID NO: 255678 - DNA, 496 bp, Homo sapiens
aaaatttcaaatacctacatcacctgatcttaagaaatgacaacttccaatgcatggtcagaataaaagcggccaggaaagggtccctgcaggatgggcagccaccaaatcactcttcagatgcacatcagcaaccacactcaagtccacctctttccctaaaatcctgcatcaggctcctcccccaaatctcaaccccaatccagtgtcttctgaagttttcccagtgccaggctagcccggcacggcaccttctgtggttgtgggttgaagctgacagaccacaatgagtagggtggatgcctgagcctccaaagggaggaaaggtattcagaagagagaaaagcgagaaacaagagatttagctacttcagtatatcctaaaatggtggcccacatggctctgatccactgcaatatatttctagacttaagtgacctttatggaagaactctgagcaacattcagtcattaacaaatgaaaggcagccaaaa

SEQ ID NO: 255679 - DNA, 688 bp, Homo sapiens
aagcacacaagtcagtcttctgacattcctgaacaaatagatttcctttaactcatttatctccatggagtcaggttgactgttgggcagagaagttggagagttggaggggaagagtgacagaaacattttaattacaaagttaggttcgttatagaaatgcaagcctgtctcaacagttggtaatcagtatgatagatctctcagtatgagagatttgaagtaaataggccatatcatcagtagaaacagaaaaaaagctaattctacccaactgtatgtttgtacccattaaccattccctgtctacctccccctgccactacccttctcagcccctggtaaccattattctactctctatctccacgatttcaatttttttagcttccacatatgagtgagaatatgtgatatttggctctctgcacctggataattaaaaattttaaaaattaagaaaataatgccaactcttaaacacgtcgaagtgcatttaccataaaccaatagtaaacatcataataaatagagaaatataaatggcattttcattaaaatcagaaacaagacagggatttccccattgttactactattcaacactgttttagaagtactcgttagtgttgtgtgccatggaaaagaaattagttttataaataggaaaatgacaaaattattatta

SEQ ID NO: 255680 - DNA, 382 bp, Homo sapiens
ctccggttgccacaccactgaaagactgccccacagtgcgagggacgtccacatctgcctggctctccgagggatgaacagccttcagttcagcttcctgtcacaccccaaaatccaccagggctctgcagtcatagagccctggaacccagaggtggaaacttaaaggaatgagtgctctctcgctccaaaaccacagatatctggtccatagagaacccaccacacttgtatacattttcatacgtctgcgcacatacacaaatgcacaaacacatgttcagctgttgataatcatctgatcttttgctctttcgatgtaaatatggccagatatctctggctttaattctcattaaaattttgaaagttatactttcta

SEQ ID NO: 255681 - DNA, 430 bp, Homo sapiens
aatacagggtttctatacagagataaatatttaacatgtaggtctgaattaaataaaaatggctaaaatatataattcaaaattttaattttcatgtttatataggaagagtagaaaccatgaatgaatatattctcaaaagagttttggccaggcgcggtggctcacgcctgtaatcccataactttgagaggccgaggcgggcggatcacgaggtcaggagatcgagaccatcctggctaacacggtgaaaccccgtctctactaaaaatacaaaaaattagctgggtgtggtggcgggcgcctgtagtcccagctactcgggaggctgaggcaggagaatgatgtgaacccgggaggcagagcttgcagtgagctgagatcgagccactgcactccagcctgggtgacagagtgagactccgtctaa

SEQ ID NO: 255682 - DNA, 789 bp, Homo sapiens
aaataactgaaatccatgtgcataatgtcattctgctgagcaaggaaaataaaacaattatttcataatatgattataagatagagggtaatgatcagtttgtttataaagtcagctaatcagtctgggtgtggtggctcatgcctgtaatcccaacactttgggaggccaaggtgtgtggatcacctgaggtcaggagttcgagaccagcctggccaacatggtgaaaccctgtctttactaaaaataaaaaaaatgcctgtaatcccagctactcaggaggctgaggcagaagaatcgcttgaacccaggaggcagaggttgcagtgagctgagaatacgccattgcactccagcctgggcagcaagagcaaaacagtctcaaaaaaagtgtttctaatttaagtaagtattctctcagcacccccacagctccatattctgctaagcgtttttagtaatatgaaacaaattgttattcttgattcttgtgccagaattttttcttcaatgaaattatttgtagaacatcatcaactgctttacttggtgctatagtctgtttaagaaagatggctgggcacgatgtctcacacctgtaatcccaactctgggaagccaaggtgggctgatcacttaagcccaggagttcgagaccagtctgggcaacatggtgagacctcatctctacaaaaaatacaaaaaattagctgagcatggtggcgtacccctgtagtcctagctgcttgggaggctaaggtgggtggatcacttgagctcaggagttgg

SEQ ID NO: 255683 - DNA, 490 bp, Homo sapiens
cacaggtatgttactaggtgaaggaagcaagaaatgggccagtagctcagaacacccagatataacatatgaaagtcagagagaaggcggctgaggatgggatcccaaggaacaccagcatgcaagatatagcagaggaagaggcaccaataaaagggactgggaagaagcctagagaggcagcagaaaaactggcccaatcctttagaagccaggaagtttgtaagcacgcatgctccatagaattgaatgagaattgttagcactggaagagggaaagaaaaacaaactggatagaaggttactaagaccttcacaaaaagccagatgggttaaggggtgtcctacttctcagaggcagcactggcccaccaccccttccgggaatgctttctctccttatttcagggcagcactttcttctcggccatccctcagctcaatgattgctcttccttttcctcttcccttgctcttcttcctcatctca

SEQ ID NO: 255684 - DNA, 2099 bp, Homo sapiens
  misc_feature (1329)..(1329): n is a, c, g, or t
  misc_feature (1347)..(1347): n is a, c, g, or t
  misc_feature (1422)..(1422): n is a, c, g, or t
  misc_feature (1956)..(1956): n is a, c, g, or t
  misc_feature (1958)..(1958): n is a, c, g, or t
tgggagtccgtgctcctgctcctcggttggctcctaagtgccccgccaggtcccctctcctttcgctctcccggctccggctcccgactcttcggcccgctggcatctgcttccctcccctgcctcgtttctcgtcgcccctgctcgctccccccggcgctcgcccgggcgctgtgctcgctcctggatcgccagccgcgcagccgggctcggccggccgcccgcgcgccactgtgcagtggagtttggtggaatctctgctgacgtcacgtcactccccacacggagtaggagcagagggaagagagagggatgagagggagggagaggagagagagtgcgagaccgagcgagaaagctggagaggagcagaaagaaactgccagtggcggctagatttcggaggccccagtgcacccgtggactccttcggaacttggcaccctcaggagccctgcagtcctctcaggcccggctttcgggcgcttgccgtgcagccggaggctcggctcgctggaaatcgccccgggaagcagtgggacgcggagacagcagctctctcccggtagccgataacggggaatggagaccaactgccgcaaactggtgtcggcgtgtgtgcaattagagaaagataaaagccagcaggggaagaatgaggacgtgggcgccgaggacccgtctaagaagaagcggcaaaggcggcagcggactcactttaccagccagcagctccaggagctggaggccactttccagaggaaccgctacccggacatgtccacacgcgaagaaatcgctgtgtggaccaaccttacggaagcccgagtccgggtttggttcaagaatcgtcgggccaaatggagaaagagggagcgcaaccagcaggccgagctatgcaagaatggcttcgggccgcagttcaatgggctcatgcagccctacgacgacatgtacccaggctattcctacaacaactgggccgccaagggccttacatccgcctccctatccaccaagagcttccccttcttcaactctatgaacgtcaaccccctgtcatcacagagcatgttttccccacccaactctatctcgtccatgagcatgtcgtccagcatggtgccctcagcagtgacaggcgtcccgggctccagtctcaacagcctgaataacttgaacaacctgagtagcccgtcgctgaattccgcggtgccgacgcctgcctgtccttacgcgccgccgactcctccgtatgtttatagggacacgtgtaactcgagcctggccagcctgagactgaaagcaaagcagcactccagcttcggntacgccagcgtgcagaanccggcctccaacctgagtgcttgccagtatgcagtggaccggcccgtgtgagccgcacccacagcgccgggatcntaggaccttgccggatggggcaactccgcccttgaaagactgggaattatgctagaaggtcgtgggcactaaagaaagggagagaaagagaagctatatagagaaaaggaaaccactgaatcaaagagagagctcctttgatttcaaagggatgtcctcagtgtctgacatctttcactacaagtatttctaacagttgcaaggacacatacacaaacaaatgttttgactggatatgacattttaacattactataagcttgttattttttaagtttagcattgttaacatttaaatgactgaaaggatgtatatatatcgaaatgtcaaattaattttataaaagcagttgttagtaatatcacaacagtgtttttaaaggttaggctttaaaataaagcatgttatacagaagcgattaggatttttcgcttgcgagcaagggagtgtatatactaaatgccacactgtatgtttctaacatattattattattataaaaaatgtgtgaatatcagttttagaatagtttntntggtggatgcaatgatgtttctgaaactgctatgtacaacctaccctgtgtataacatttcgtacaatattattgttttacttttcagcaaatatgaaacaaatgtgttttattttcatgggagtaaaatatactgcatac

SEQ ID NO: 255685 - DNA, 2237 bp, Homo sapiens
  misc_feature (1467)..(1467): n is a, c, g, or t
  misc_feature (1485)..(1485): n is a, c, g, or t
  misc_feature (1560)..(1560): n is a, c, g, or t
  misc_feature (2094)..(2094): n is a, c, g, or t
  misc_feature (2096)..(2096): n is a, c, g, or t
tgggagtccgtgctcctgctcctcggttggctcctaagtgccccgccaggtcccctctcctttcgctctcccggctccggctcccgactcttcggcccgctggcatctgcttccctcccctgcctcgtttctcgtcgcccctgctcgctccccccggcgctcgcccgggcgctgtgctcgctcctggatcgccagccgcgcagccgggctcggccggccgcccgcgcgccactgtgcagtggagtttggtggaatctctgctgacgtcacgtcactccccacacggagtaggagcagagggaagagagagggatgagagggagggagaggagagagagtgcgagaccgagcgagaaagctggagaggagcagaaagaaactgccagtggcggctagatttcggaggccccagtgcacccgtggactccttcggaacttggcaccctcaggagccctgcagtcctctcaggcccggctttcgggcgcttgccgtgcagccggaggctcggctcgctggaaatcgccccgggaagcagtgggacgcggagacagcagctctctcccggtagccgataacggggaatggagaccaactgccgcaaactggtgtcggcgtgtgtgcaattaggcgtgcagccggcggccgttgaatgtctcttctccaaagactccgaaatcaaaaaggtcgagttcacggactctcctgagagccgaaaagaggcagccagcagcaagttcttcccgcggcagcatcctggcgccaatgagaaagataaaagccagcaggggaagaatgaggacgtgggcgccgaggacccgtctaagaagaagcggcaaaggcggcagcggactcactttaccagccagcagctccaggagctggaggccactttccagaggaaccgctacccggacatgtccacacgcgaagaaatcgctgtgtggaccaaccttacggaagcccgagtccgggtttggttcaagaatcgtcgggccaaatggagaaagagggagcgcaaccagcaggccgagctatgcaagaatggcttcgggccgcagttcaatgggctcatgcagccctacgacgacatgtacccaggctattcctacaacaactgggccgccaagggccttacatccgcctccctatccaccaagagcttccccttcttcaactctatgaacgtcaaccccctgtcatcacagagcatgttttccccacccaactctatctcgtccatgagcatgtcgtccagcatggtgccctcagcagtgacaggcgtcccgggctccagtctcaacagcctgaataacttgaacaacctgagtagcccgtcgctgaattccgcggtgccgacgcctgcctgtccttacgcgccgccgactcctccgtatgtttatagggacacgtgtaactcgagcctggccagcctgagactgaaagcaaagcagcactccagcttcggntacgccagcgtgcagaanccggcctccaacctgagtgcttgccagtatgcagtggaccggcccgtgtgagccgcacccacagcgccgggatcntaggaccttgccggatggggcaactccgcccttgaaagactgggaattatgctagaaggtcgtgggcactaaagaaagggagagaaagagaagctatatagagaaaaggaaaccactgaatcaaagagagagctcctttgatttcaaagggatgtcctcagtgtctgacatctttcactacaagtatttctaacagttgcaaggacacatacacaaacaaatgttttgactggatatgacattttaacattactataagcttgttattttttaagtttagcattgttaacatttaaatgactgaaaggatgtatatatatcgaaatgtcaaattaattttataaaagcagttgttagtaatatcacaacagtgtttttaaaggttaggctttaaaataaagcatgttatacagaagcgattaggatttttcgcttgcgagcaagggagtgtatatactaaatgccacactgtatgtttctaacatattattattattataaaaaatgtgtgaatatcagttttagaatagtttntntggtggatgcaatgatgtttctgaaactgctatgtacaacctaccctgtgtataacatttcgtacaatattattgttttacttttcagcaaatatgaaacaaatgtgttttattttcatgggagtaaaatatactgcatac

SEQ ID NO: 255686 - DNA, 364 bp, Homo sapiens
tataattattataaatttggtcaggagtccctatcagtctttgaacagctgctttttttttttgtttgaggtaaagtcttgctctgtcacccaggctggagtgcagtggcatagtcttggcccactgcaaccttggcctcctgggttcaggctattctcctgcctcagcctcccaagtagctgggattatgggcgcctgccaccatgcccagctaatttttgtatttttagaagagatggggtttcggcatgttggctaggctggtctcgaactcctgacctcaagtgatctgcccgcctcagcctcccaaaatgctaggattataggcgtgagccaccgcacctggccatgtttgaggaaaca

SEQ ID NO: 255687 - DNA, 603 bp, Homo sapiens
tcctcacctcgttagctgcaggtggtgccagcaatccttggcattctcagcttgtacacacatcaccactcaagccttttggccatcttctcctgcatgtcttcacatcctctttcctctatgcttgtctggctcagcatccaaatttccctttttcataggacacatatggattatggcccaccctaatgatctcattttaacttgattacctctgtaaaaacctaatttccaaatgagattatttgttaggtactgggggttaggacttcaccgtatcttttggggaggacacagttcaagtcataatgacattagtataatttttgatgactagaggacattttggtcacctaactttatagctatatattctttaactctatgtgtatttgtgtgtgttttagtttatataggctgttttcccaaataccctaggctgggtaacttgtaaacaacagaaattggccaggcatgttggttcacacctgtaatcccagtgattcacacctgtaaccccagtgatttgggtggccaaggtaggcaggtggcttgagcccaggagttcaagaccagtctgggcaacatggaaaaaccctgtct

SEQ ID NO: 255688 - DNA, 389 bp, Homo sapiens
  misc_feature (389)..(389): n is a, c, g, or t
gtccacctggatctgccagtgctccctgggtgcccccacggggcaggcgctgggtgaggttcttggtcacaaatcaacctcgtctaatgcttgcctcaaccccctgccctggagaccacatccctcatgttccatgtcaggactgtggcccctcggggaggttaagcagcttgctagaggtcagcgacttcccgagggcctccagctccaggagcactggcagatccaggtggacagaggctgtgaaaagaaaacttgtctctcctcccctgatcaccagcctgggccagggatacagctggtgctacttggcaccttttagctgaggaaactaaggctttattcacccaatcaatctcactgagaattcagtggactagtagtagtan

SEQ ID NO: 255689 - DNA, 219 bp, Homo sapiens
agaatagcagcaatattaaaggcagaaaaggatcttagtttgttttggcacgtgttctatttttattagcttatgagttgctctaggacgtaatgcagtaactaagcttgatttagtttggtcactttggagtgaaaaagcagttacttttctgcttggtcattaagggaaaatacgaatctcttttgatgttgtccctgaaatttaagttatatcacc

SEQ ID NO: 255690 - DNA, 297 bp, Homo sapiens
atttggggtggtggtggttaaaaagcaaagcaaaataaagaaacacaaaaccaggtaatgagtgagcaggctctccccaaagctagtctttaggctggttccatcctgaaatatgccagtgcctcactagtagatcccaatgggcaaaacagcaggaggtcaaatgggataaaaatgtgaatgtaatgattcctcacatttacatagcacttcacagtttataaaacacttatacagatgattccatttgaacttcataaaatccttacataggaggcaaagtagaaaaggcttcct

SEQ ID NO: 255691 - DNA, 386 bp, Homo sapiens
caaggccagcagtcatgtagagtgtgccctcccccttgtttgaagaatccagcggagtgagagctgaagggtacctatgaaactcatctcacccggcgcctcattttataaaatagacactcaagaatgagagaaaggaggtgatctgtctgaattcacccagaagttaaacagcaaagctgggctaggatttggagtattcacttgctccttctttgtggcttcttttctccaaactgccttttcacaatgtgcccatatgcctctgtgttgagggtggggcaggagcagagacagagacagagacagagagggagctcagaagtgcttcctactccccactgtgcccctctcaaggactctctttgctgatgaagcgtcgacgc

SEQ ID NO: 255692 - DNA, 1519 bp, Homo sapiens
  misc_feature (973)..(973): n is a, c, g, or t
cacacacagccctgctcggtttgattttctccacgtggttgatattgtcttcagttgctaaggttgcttttgctaaatttcatttatcatccccttggtacgttcagttgctggctaagttgattttgcaaatttcatttatcaaacctcggcctacgattacctaagtacgtttctgcaggttaactgtatctacgctcagtcatatccttcaaagttactaatgcaactgccaaagagggacagtgtcaatatcattgtcttcattagaaggacggctgccccacactgtgagaacactgctgttcctaacagtagtttacttttagagggatgtgagaattagtttgaccttaattccagatgtgcattagccctcaaaagaaaaatcccattctccttccttttggggagcacttttggtggcaccaaggctggtgtggggtagtggagagagcactgagcttagagtcacaaccagatgaactgctctggtcttactcagctgtgtgacttgggctgctctggtcttactctagctgtgtgacttgggcaagcagcttgcagtctctgagcctctgagactccctgatggacgaggagaacaatgaccccctccccaggctgtgctgagagagggaattgatcttggatatgaaaatgctgccctggcacagaggtaggagctgagcaacactgctggatgaataaacacatgtaatgcagggtgaacagaacatttcatctcgaacagctgaaggcacacgttacctatgcccatggaaagaactgcgtggaaaattcatttgttgcatttttgccaggttgatgtttgcaaagcagggcactctccccacatttccccaaaaccaatcagagggagactccacattgtttccatctcctcccctcaaacaattatcaaaccatgtagaacaaacggctgtctgccaactggtagaggcaaagcagncaataatctggaattccgatcaacaaaatggtatttgttctcatactatgataaagacatacttgagaccgcattatttatggggaaaagaagtttaattgactcacagttccacaggctgtacaggaggtcatggctagggaggcctcaggaaacttagaatcatggtggaaggtgaagaggaagcatgcaccatcttcacatggcagagcaggagagagagagcaaagttggaagtgctacacacttttaaacaaccagatctcttgagaactcactcactatcacaagatagcaagggagaaatccacccccatggtccaatcatcttccaccaagcccctcttccaaccttgggtattacaattgaatcatgagatttgggtggggaaagaaaagcaaaccatatcagagattgaatcaataatccaaagcctttcagcaaagaaaagcctgcaaccagatgttttactagtgaattccacaaacatttaaaaaatataaatgccaatacttttcaagctcctcaaaaaaattgaaaagggc

SEQ ID NO: 255693 - DNA, 964 bp, Homo sapiens
agagtaactttccaacataggacttgaatgagcggctggtgattatcaaaatctgtctatgttgtaaatctaggacatcacttatgtacataggaatagtaataaatattaataatgtgctatgataaacatcctgcactcttccaaatcttacaataaaactgcttcaatttcacttgtttagcttttatacttagttttttagttcatctatgcttattttaaggaacctgaactactctaatagaatccacataatttttatattagtcaaactgcttctttctaactctggttctaatagttataaaaagataatgataaatttatgaagtagatacagtcaaacctgaatttcttaaagtatatgcttagaatcggttataatttttagatattctttcttgacagtcttttcccaaactcatgatgtcctctctaggtaatattgccacactcataaattagaaataaaggcaaaaatgtgaaaactacagtaatttaagagaatgtaggttttctatatgccatttctattggctactgaaaatagtggaaataagtacataaatagctacctgtccagaagcgtctcatgcaaaaatccatctttctgcgtctttttaagaattttactgcttcttgacttattttaagtttgtggtcttggaagctctgaaatttctttctgcaaagaaaatgccttcattgaaaaaacctcaaactctgattatacatatttactattaaatttataaatactgttaatttctttttcacttattaaaaaagtctaattgtaggccaggcacagtggctcatgcctgcaatcccagcactttgggaggccaaggcaggcagatcactcgggaggctgaggcaggagaatcacatgaacctgggaggcagaggttgcgatgagccgagatcatggcactgcactccagtctgggggacagagcga

SEQ ID NO: 255694 - DNA, 481 bp, Homo sapiens
agagattttacgtaaaattcccagcttctagtctgggtgcctcttttctctgctgtttaggccactggatttaaaacttagcagatcactctcaggtttccctagccacaaccactgctgattcctgtgtgagctttgtgacctgtttgattaaatctcctgtttggtgacacctgaaagttttttagtgggacgttcagtgttttataaggaggatatgggtgaaccatcccttgtctctacacctcatactgcccagcctaataccttttccatagcagacatttggtaactgttgcactgaaagaaaaatctagaaaagttttaagtgttaactctttcataggaaactagacaccaagtgtcacattgccattgtcttccggggtttgccttcctgcttccaagcttaagctccaaaaaaaaatgatcccttcagttgaaattatgatttcctcacccaatttttaaaataaaaggt

SEQ ID NO: 255695 - DNA, 768 bp, Homo sapiens
ccaatagaaacaaaaacaaaacttcctaaaaaggctcgagttttaattattaatatcaaattaccatcacctttcttctaaacaaagaatgcctcattaggcttcagctttgcctgtatgactcatgaattaacacacacgaaccagtctaaattactctttgagggacagaatgaaaaatgggcacaattgtatctgtttttgtggtattggattctagttctatatttgtcaccttggagaacaactcttttttttttttttttttttgagacgggatctcactctgtcgcccaggttggagtgcagtggcacaaatcttggctcactgcaacctccacctcccgggttcaagcaattcctcctgcctcagcctcccgagtagctggaattacaggcacccaccaccacgcctggctaatttttgtatttttagtagaggtggtttcactgtgtttgccgggctagtcgccaactcctgacctaaagtgatccgcctgcctcagcctcccaaagtgctaggatttacaggcatgagccaccctgcatggccaggccatacttttcaaagtatgtctgtgggcataatttcctggtttaggaattgtgtcagaatatattgtactgtatttaaagttgatatgcctaactcctcccaccctcatcaccaaacacatacttcctgtgcccttaatttatacttccccctaaaactttttttttttataagagtccccattctttcatactcttgccaagatttttgcc

SEQ ID NO: 255696 - DNA, 568 bp, Homo sapiens
gcacgagagaaatgtagttaatgaatgtgaaatcactgtcatttggtatattactatatagcaaatacttgtcatacttctttagagtggggaatacacttgttatttacatgaaatattgccccccgtcaaatggcaatcttagtatataccattactgtcagtatggatagcttagtccagcttctggttgaatttgttatgaatgaaaataatattttatcatctataatcacacttgactttctgcccatggtttttaataagggacaggtgtcgtttatagatagaatgttcttaggctcattactttaagccagttgtgcttaagaacacacagatttttgacatagcctctaagatgccatcagttgttaatgagccgttatgttttacaaagaaagagaaaagctgccaattaaagagtttccatatcacttggaattttatttataaatattgaaaatgctccttcaaacttaactatacgtacatctttaatccaaataacttttgtgattacgtacaagtaaaatataagtaaaataaagtattcttaaaatttgct

SEQ ID NO: 255697 - DNA, 552 bp, Homo sapiens
tacatagcactttagagtttaatgtactagtgatctttttagactttccgatcaactgttaatagccagtgataactttgctttttaattttccaattgcttctttcctctaaactttttatttcaacacataaagttgaaagaatagtacaacacccgtaaaccctccacctgcttcatctctttctatatgtctacatattttgttgttaaactaattgaaagtaacttttagtcattatgacattttatctctaagtactttagcacacatctccgaaaacaagacattgttttaccaatcagtggtaccattattacaaccaaaaagacaaaatagtagttatgtactatccaatattaaacgtttattcacattttgtcaattgtacccaaaatagctttttaactattttccccaaaccagaatccaaggcaaaatttaacatgttgtgttttgttaagtcctcttagtctctctaatggcttttgaagtttaatttctttagtcatcttatctgacttagaaaacttcatatgacctaaaaaaaa

SEQ ID NO: 255698 - DNA, 728 bp, Homo sapiens
gacctatgtgaaatacccaacaccctgcccaacctatgtgagtgcccagcttccctgccagaccaacctaatgtaaaatgcccaaccccctgccaaacctacgtgaagtgcccagctccctgccagatgacctacatcaaaagtccagctccctgccagacccagacgtgctatgtccagggtgcttctccttgccagagctattatgttcaagctcctgcaagtggctcaacctcccagtactgtgtcactgacccatgctctgctccctgttccaccagctactgctgtctggctccccggaccttcggggtgagtcccctgagacgctggattcagcggccccagaactgcaacacaggatcatctggctgctgtgagaattcgggaagctctggatgctgtggttctgggggctgtggctgcagctgtggatgtggcagctctgggtgctgctgtttgggaattatccccatgaggtcccgaggtcctgcatgctgtgaccatgaggatgactgctgctgctaaacatacgacagctcaactccagaatgcactgccccgctaccccttctggaacatgcaccagcttctggccccctctctgttagtgccagtgatgtagaacctcatcactttgcctctgtgctttgcttctctaccaaggcagcctgccagagttagtacagtccccaaactttggcatgaataaaactcgatgcatttcg

SEQ ID NO: 255699 - DNA, 505 bp, Homo sapiens
cattcctaagaaagtgaataccattgttctcagggtcttaattgggttttatgagtgtgaccatcctttctgggacatagtactgctttgccagctacacccttcctaatgaggggaagtgggtggcacagaggggacccaggtatcccaaccgaggcaatagctgtctgcctccatttggtctgatagaaaatcagggatataagccaggtgtggtggctcatgcctgtaatcccagctcccagcactttgggaggctgagggaggggtggatcacctgaggtcaggagttcgagaccagcctgaccaacatggtgaaaccctgtctctactagaaatacaaaaaaattagctaggcatggtggcacacacctgtaatcccagctatttgggaggctgaggcaggagaatcgcttgaacctggaggtggaggttgcagtgagccaagatcgcgccactgcagtccagcctgggcgacagacagcaagactctgtctcaaaaaaa

SEQ ID NO: 255700 - DNA, 178 bp, Homo sapiens
acacaaaccctaaccatatcaagtccctacctcaaggagttctctggctttctgctcatcttcagtccacctgtccttctagcagagcctctgctgccttccaacaggtaatcatggtcccctccgctgaacgtcaaatccctgtgagatcctaagagggcatcagtcagcttaggct

SEQ ID NO: 255701 - DNA, 1665 bp, Homo sapiens
agcgggcgtggctccctgggcctggaacgcgctctgagcgcgccggtcccttccaggttgcgcgggctccggacgagacccagcccagccgggcagccccgcgcgctcccgggtcccgccggcctcgcgccgcccggttgccgtgggaaccacggagcctcggagcgcccgcagactagcccgtgtctgagggggtgagggatactgaggcccaggcatggagctgccagatccggtgcgccagcggctgggaaacttcagccgggccgtgttcagtgattccaatcggaccagtccagagtccaatgagggtccggaaaatgaaatggtctccagtttggcactgcagatgtcactttattttaatacctactatttcccactgtggtgggtgagcagcattatgatgcttcacatgaagtattcaatcttgcctgactactacaaattcattgtgatcactgttatcatcctaataaccttaattgaagccatccggttgtatctgggctacgtgggtaacctacaggagaaggttcctgagttggctggcttttggcttttgagccttctattgcagttacctttaattcttttcttgctctttaatgaaggcctaacaaatctgcccttggaaaaagcgatacatatcatcttcactctcttccttgctttccaagttgttgcagcatttcttaccttaaggaaaatggttaatcagttggcagttcgtttccacctccaagactttgaccggctctctgcaaacagaggagacatgagaaggatgaggtcatgtatagaagagatctgatccagtgttgttgagtgaaaatctgacagatcattctagagactgtaagagttaggaaaatatcagagctctgagaaaagggacaaagcaagtgttttgaattgtatatgctctcactctgaaattccaaggttgggggcaatgatgaaactttgtacagtatatgaaacagtatattaaccctaaaacctagatgttgtccacctgatgccaaatttcttaattttttttgatgttgttgtctttttcaggagtgtagaaatctatgtattggtggttgtcatttgccagctctctcgtagcatttctggttagaatctttaactagagatgtatacatttctttaaaacttgttggttatccatgtcttgtctgtacatatgaccatgtttcttgacatggaaataccagtcagtgttcctatgtatttgtctatatttgtaaaccaagagaccggctgggtgtggtggctcacgcctgtaatcccagcactttgggaggccgaggtgggcagatcatgaggtcagaagatcgagaccatcctggctaacacggtgaaacccagcctctactaaaaatacaaaaaaaaaaaaaattagctaggcgtggttgcaggcacctgtagtcccagctacttgggaggctgaggcaggagaatggtgtgaacccaggaggcagagcttgcagtgagccgagatcaagccactgtactccatcctgggtgacagagcaagactccatctcaaaaaaataaataaataaaaaataaaacaagagaccaaattttcatgtctgctagggttaaattctaaccctaatattagctgttatactgagacaaagggaaaca

SEQ ID NO: 255702 - DNA, 381 bp, Homo sapiens
acattcaagttccctaatgctcttagaacctgaagatgaccatgtgtagttttcttaagacctctgaacccccatggtgatgaagacttgaagacatttgcagctatctgctgcagtctggtagattcatacttatctaaagaagtcaaaaaatttattcgtgcaagtgcttgcaggaagccagtgcttattagtagtgaccctgcttctatcaacgttattgagacaacacatattctattctaagggagaaagagggaggaagagagggagggagggaggaagaagagggagggagcgaggaaggaagataggagatgggtaggggggtaaagagaaaaggagggagaagggaaggaaggaaagaagagaggaaagaaa

SEQ ID NO: 255703 - DNA, 349 bp, Homo sapiens
cttattgccagcttatattatactttcgtctcttttctgtcccagtcctactattttctttttataccatgttgctttttttattttccaagccacctacctgtcatttaccctggaatatcattttaatgctggacttgggaaacaggactaacaacctccttaaaatcgatccatactattccaagcgtttattacacgtgtggttcaaaggatgtggtgtatctgaatttatgccacaacaagctgtattacaactggtttataggcttttttaccgcatcctcactccatggtttaatacatggaggtagcatagtacaatggaaaaaagtatgggttttgaagg

SEQ ID NO: 255704 - DNA, 451 bp, Homo sapiens
ccaaatcagagttgaaaacatgaagtttaagtaagtcatctcatagacagtaatctggacacttaccaaaatactacagagaagtcagaccatgttccacagggaaaacaagaatcttatatatcccagccaggcatggtggctcacacctgtaatcccagcactttgggaggccaaggcgggcagatcacttgaggccaggagttctagaccagcctggccaacacagtgaaaccccatctctaccaaaaattacagaaattatcttagtcatatggtttgaatgaacctctgtgtacagacttcacgaacaccatcaagattagccatggcaagagaaaaatggggcccccagtggtcactacacatatctgagggcagatggcagcagcacaggagggagggaagaaagagaggaaggaagacaggaaggaaaggagagagatacgga

SEQ ID NO: 255705 - DNA, 2089 bp, Homo sapiens
  misc_feature (873)..(873): n is a, c, g, or t
  misc_feature (1787)..(1787): n is a, c, g, or t
  misc_feature (1909)..(1909): n is a, c, g, or t
tgctcaagtccctgataaaaaaataaaagcagtggtgccctcgggttcaaaaacctgaacggtggtcttcagttgttcccccaagctcctctatcagaggcccagacactccaagaggctgggaagaggcaagtggctttccctgactggcatcagactcctggatggctgtgtttctgcatactccaccatcaacaatcagaagggcactgctttcttcaagaaggggaccttgcaaagaactgtctcagatgggctatctttgagttcatcttgttctgaatgtgagtctgagtctttgtttccagatgacacagtgctgtctgagtcctctgaatcacctgcctcagagctgcagcaaagtttctgctgcccagaaactgaatgggctgcttgtaatgcagattcttcctcctggacaagaagtgctgctgcttctagttcttccagttctaaccccaactgggcctttgtaagggagacttcctttaaggcttctgcaagagctgccaacgttttggatttgactttctgagtccacacacagtagtatgagatgtagagatcattcagtatgtatgctgggtcgttttcctgaaaaattttgtgaatatccaggagacactttaaaactgcacttttacttaattgcagtatctttatagtctccccgtaggccttcatcgccagtttgaaatggcgatagagcaggtaacacaatacccttcttccaaaagacaccatgatatcatgaacattagtccaagtctcaaaccagcatagtattggactcaagtttcgtgatattccatgcagattcaacgttcttgtctccttcagtgacacgggtttcttagcaatatgccagaaggntatcaatcgaactgtagtacacttgacgacaggctctgttgtctagcagataagatttattgacaaattcttgtagctgatatttctcttcttcagaaaaagacactaatgcagcatgattttcttgcttctgactcttttccaaaaaggccgtcattttttaatatttgtcagtccaccaaggattatacttcaaaatctgttcaactgcctcatcttcaaaaaagtcagctagataatgatcaggatcaaacttggccagctcggcggccaggtgcttttgttttcgttctgctgcagggatgaaatctggatccttaataacatcactcaattcatcctgtaactgctgaaacactcctgatcgtaagtttccaaacccatagtggcatgaggattcaaagcactttctgttacctcttcatagggtgtctgctcaatttcccaatcaaactcttcatcgtcaactacttcctcaggaatttcagaatcacctattgcttccacaagtggttttgctgtcccggattttcctggtgccagaagagcaacacatgttcagcccctcaaaatgctggccaggggtttctctgggcaggcgagtggtaaaaattcctttatctgcatcataggacccttgctcgcttccgtatccgtattctacaattcttccaggaggggttaatctgagaaagtacggcttggcatagtagtctaggccgacccctcgaagtagacgttgaactcggaggccggggcatagggcacgcggatggcgatggtcaggaaatccggctcctggctgaggctgaacgccggggtcagcatcgcggcaccagacgcaggggccagcgcggctcgccctcgctgccgcggcggtcccaccaagcaactctctccaattttaccttttnaaaataaaagatgtctgggccaggcgcagtggctcacgcttgtaatcccagcactttgggaagccgaggcgggtggatcctgacctgaggtcaggagttcaagatcagccccgccgacatgncgaaactccgtctctactaaaaatacaaacatcagccggacgtggtggtgggcgcctgtaatccccactactcgggaggctgaggcaggagaatcacttgaacccgggaggcagaggttgcaatgagccgagatcatgccactgtactccagcctgggtgacagagtgagactctgtctc

SEQ ID NO: 255706 - DNA, 411 bp, Homo sapiens
cgccctttcccaagagggaatggacatttgagggatcattatatcatagagaaacgattttagacataggaggactttagggaaattagtacaatttcttcatttcataaaggcataagaaacagatgttacctgaaccatacagcagcagctgtgggagaagagtgcgtgtaaccggtgttccttcctttacaccaaaagtcaacaaatcaacattgccagtatttgtaacaggttgttaaaatgaggggatttggtcaatttagtcaaacatttcctcactaaaatattgccatcaaaagtttaagggaacctaaattggctccatagtcctattaataatcaatcaataatcaaaaaccccaatttgtaataccaggctccaatgagatgacccttgccttaaaaaaa

SEQ ID NO: 255707 - DNA, 466 bp, Homo sapiens
ctttactttctcatgctattaggccaagctgtgacccttagtttcatctccagattatcagacataaaaggcccacaggaatccagaagctagacagagcataggtattccaatctctcaagaaaatgggcagtaagagatttactaatagtatgtttgctcacctggcatttagaaagtttaaaattctccctcttaattgttctattttgtttgttaatattgtgttcaggtattttctatatcatagtagaatcagcactattatcaattcttaattatctaacaatatttattttgttcattacctgaggtcgaattttaattcgggttgacttttccctgaaatttagcacaacaaacatctcagctcatttaccccctacagctcaaatagtttaagctcatggaaggcaaactaattttaaaataagcaagggacttgaaaggcaagcctttgctgcca

SEQ ID NO: 255708 - DNA, 399 bp, Homo sapiens
ttagcttgtcttttgggttattatcattttcactttcattgtcactttttgagaggtaaatatttgcagaggaaatcaagaaacatcataaacatctctggatcactttaaaaagggaatcaaaggtctgataaaatttggtttttcttactggagaaagacacctcttgcgctttaggaatcttttgatttttttccctatgcataaaggtacttaaagcaccattgaggagtgagtttacccattccctgtgctcatggtcaatgctgcatcacaactgaaacaatgctgatggaacagccctcacccagggaatggaagacaatgtggctgatggggagtgtgcccatgggtcccaagatgactgcaagagacagatgtgtgtccacagacgtttc

SEQ ID NO: 255709 - DNA, 377 bp, Homo sapiens
  misc_feature (173)..(173): n is a, c, g, or t
aatggtgtgaacccggggggaagagcttgcagtgagccgagatcatgccactgcactccagcctgggcgacagagcgaggctctgtttgttggcttaaatatgtgtttctttatgaaaccactcatgacatggcagagagaggaaacagagaaaggagaaacgctatgagacncttcggatacaggattctgcataacgttttattattatcctctctatgatcttttcgcttatcatttcagataagaccagaaattcccattcctgaagagttagatgacgatggatgttgaggatgtggatctttcagttcctggctcttgctatctcctgttgccactcactccacctttggttctaccaggtgactcctttc

SEQ ID NO: 255710 - DNA, 428 bp, Homo sapiens
aagctttgctcagtgctagtcctgacgtcaggtcctggtcgtgtcgtgctagtcagtagtcctgatcgttttccgtgtcggcaggttgcgtcgacgcgtgttctgctctcagtctgccgttctgctgctctaggtctcagctacggtcagtgtctatcatgcaggtctgctgctagtccatcctggatcagggctctttgccagcagctgactttatgtgatccggcatgtacagccagctaggacgatccagtgactggtccgtaccgagaccgaatgcagacgaccgcagaccagactaggaccaggcagcccgagacaggcctattattatattaaaattatgtgattattttacaaaattagacttacagaaaagaactatttcctacccaaaaagctgttatggttatatgcagcatgttttg

SEQ ID NO: 255711 - DNA, 412 bp, Homo sapiens
aagcttttaccgccaacccacaccaacagtccagccaaaaaaaattagttcgtgacttgcatgagcgatgctagcactagactgactgaagcggcaactgcaggtccgaagtcgtctgagtacgtccgcagacagtcttggacggctatgacggtcgcatgcagcgtgtacgtgtgtggtgtggtagagctgccgcgctttgtgtgtgttgttgtgtgtgtgtgtgttatatcgagcggtggtaaagtctgacaccataacacttcaaaatattgtatttattcattcaaaattcattgaaaaatcacatgctattatattaaaattatgtgattattttacaaaattagacttacagaaaagaactatttcctacccaaaaagctgttatggttatatgcagcatgttttg

SEQ ID NO: 255712 - DNA, 419 bp, Homo sapiens
gatgtatgtctaccacctcactgacaccccaatttctccttattatatagtagttggacatgcaggtgtttgagagaatgaattgggtagaactcctgtacaatctgtggtcaggagcagaattaatatggaaggctcagccagtcagaccttgagtttggagcagccgtgactaccagggtgatttttgccaagtcagttcacctcctccagcctcagtttccccatatttaaaatgtaggcaatattatgcttccctgtgagagttgctgacaggaccacatttatttattcaacaaatacttgcttaacacttagtatctgcctggcccctgttttatgaactgagggatccacaggaagcacagcagaaaaactaagacagaaattctcacagagcttccagtctactggggagt

SEQ ID NO: 255713 - DNA, 461 bp, Homo sapiens
caaatccagcaatataagaaaagaaatatacaccgtgatcaagtggaatcccaggaatgtaagggtggttcaatatccaacacatacttaatgtaatcatattaatcgaaattttaattgcatgatcatctcaatagatgcaaaaaaagcatttgacaaaatccaacacttttgcataataaagacatttcaccaagtgtgaatagaagagaacttcctcaacctgaagaatgacatctacaaaaaattcactgttaatatcatccttaatgttgtgaaagaccgcatgctttccccctaagatcaggaacaaggcaaagatatctgttttgcagtttctattcaacattgtgctagaggttctagccaaagcagttaggctgaggcaggtggatcatgaggtcaggagattgagaccatcctggctaacatggtgaaaccccgtctctactaaagatacc

SEQ ID NO: 255714 - DNA, 255 bp, Homo sapiens
caggtactcagaaggagccacactcatctacacatcttgtaacaggcctaccttatgtgaacccaacggcagaaccctgccctggtatctgccccacaaaacaaagttctgaaagcaaagtctgctcaaaataagaaaggatttacaagaagactacattatgtctaattcaaatacttctattttaacatattactgaaaatcctaggtataacaatgtggcaataaaatgaaaaaagccatctgaaattaaaa

SEQ ID NO: 255715 - DNA, 347 bp, Homo sapiens
taccctgtcattgagaaacatggtgggcctgataggtcatttagctatgtcatgcaagaccccatgaaaatctcataaatgatttaatagaggtatgaggcatcctaatggtaaaagaaacatatgtttcatataaatccatgaaacgttcaattttccagttataaacatgatttactcatgttggatccctagagcttctctacgtattgcttagtcaacaattaacttttgcaaagcctcaatgaggcacgcacatctcaatagctgattgctagagcaatagtagaatgctgatttttttcattaggcctgcacagctttcaagttctaattcgcccagatgt

SEQ ID NO: 255716 - DNA, 456 bp, Homo sapiens
cacccaggctggagtggagtgcagggatgtgatctcagctcactgcaacctccactgcccaggttcaagcgattcccctgcctcagcctcctgagtagctgggattacaagcacaccccaccacacctggttgattttttttaatttttagtagagatggagtttcgccatgttgaccaggctggtctcaaactcctggcctcaagtgatccacctgctttggcctcccaaaatgctgagattacaggcagtagccaccatacccagctggtacacaatcttttcaacatgttcctgaactcagtttggtagcatttgttgaagattgttgcattagggttcataagggatattactgtgcagtttcattttcatgtagtatctttgtatggctgtgatatcaaagtaatactaacctcacagaacaaatttggaagtgttcccttcattttaatt

SEQ ID NO: 255717 - DNA, 425 bp, Homo sapiens
agggttgttgttcctagacagttaaggttaactagggataacatcaagagagctggcccaaggtcaccatttcttcccagcttttaaccaacgttttgagaatacagtattccccatcaaaatcgtggctcaccacggctgtgagtttcacccagcggcctgggtggtcatggtgaaagctagaaatacatctctggaagacattttcaggtatgctacagaggctggcatacccgggctaagagctgctggcctggctaatgaactaagatcactcgttgaaacaacaggtataaatctccaagcagaaaagactcgcttaacatggatggcaaatgttgtctaccaagaagacccaagaaaataatcaaataccctttgccaagaatgtctggttataaaataaagatataaatgacaataac

SEQ ID NO: 255718 - DNA, 418 bp, Homo sapiens
actgcagcaggacagctgtttgtgtgagtccagcttgccataacacagatgacttttcttgttttgaaactactgctcagctggcggggacactctgaacagtcgtttcagtcatttgtgactgagagttattatttcctcatgagaatgaggaacacaaattatatgtttgtgtttcaacaaacatttcctcatgatctcccaaccctttcacatccctctgccctctctaccttcacatatgtcatgtcaaagaaggtagtttggaaatagacactccagggtaaacagctggcttacttttaaacattggaaactgtggtttcacctgtcttggcaaggggcctcagtcagctttggggctatttccttgactgactcagggtgtgagttctgatacaattgaccttgatccaaa

SEQ ID NO: 255719 - DNA, 205 bp, Homo sapiens
gcgtggcaagcctttttattctcatacctgttttacaatagaggctgaagcacagagagggtaaattgctttgcccttagtcacacagctggtaagcgacaaagtcaggtttgactcacacagcctggctccagaacttccggtcttaagcacagctcttcatatgatctctgaaactccagtaactcccttctgtcgtcttctc

SEQ ID NO: 255720 - DNA, 109 bp, Homo sapiens
gggcatacttgcagaagatttttttttcagatgcaagaacattgtgggttgaataagctgactaaatccattcactatttctatagaacatttttaaagtctaacttat

SEQ ID NO: 255721 - DNA, 919 bp, Homo sapiens
tcggcctttctgtttcccagaggaactgtacaccaggagctggtgggttcaaatggcaaatttaataaaagcagacgatgacattaagcgccattagaaaaatgaaattctctaaagtgttgtatttgttactatatctgggggaaaatactcagatgtagaaaagtggaatcctgtaaaacgttaagaaatacatcccctcaaagacttctgctttaagtgacagcattttgagggtttttgtttctcatttttccccgggggtggggggtgtgatcacagctggtgtcacagtggcggtccacgtgcacacaccgggagccgcctctataccgttatctgattagtgtaacaaggcctggttcatctggtcactggctgacagttttaaagcagctagccccagagtggcaaatgccaaggtcagagcacccagctgcttcctgctccattgctgctggtgtaaatatcctcaactctgggtacacaagaggtgtgaacagaaattacttaaggctggctgtggtggctcacttctgtagtcccaagactttgggaggctgacgtggaaggaagcttgaagccaagaatttgagaccagcctgggcaacatggcaagaacctgtttctacaaaagcattttaaagaactatctggcgcagtggcacatgcctctagtcttaactactgggaaggctgagccaggaggatcacatgtgcccagaagtttgaggctacgtcgaaccatgattgcactactgcactctgacctgggtgacagagcaagggcctctttaaaaaaaaaactttctaaagctaaggaaaagattgccattgtctgtttgctcacagaaacaaatgtgacctgtgaaggttggagaaaagctggttttcacatgctttaaaatgtttgctgtac

SEQ ID NO: 255722 - DNA, 261 bp, Homo sapiens
ggctcattcctgcatcacttcatctcccactcaataaagtgaatgccatcatgattatggaataatcaggaaaccactgagatttattagcaaaaggtaaaccactgaagaacatgagcacattaaatgtcatgaggaatacatacttgccatgtccagcacacgtgagagagacacagtacgtatggttcagaacctggctccttgtacatagtgtgggccatggactggctgtatcagcatcacctgggagctggttag

SEQ ID NO: 255723 - DNA, 675 bp, Homo sapiens
ccaatttccagaagaaatggctgggatactgacaagctgaaacttactttaaacttacttctgatcttacaaaaacaaaaattggagtttatggcatgataaggaagagagtggtggctggtctgtcagcctgactaatgggctcttaaggttgcttagggatctgggttgggaactgatgttaaaattgcagaatacagactaagctgtaaatagattgtcctctttagggatttgtgctcagctttaaattatcttaacttatgattggattaagatggtgtgcaggattgctagtgcccctagtacttgcaagaatcaaacataaatccccattagagaaataaaacttcattctagcctcaaagtacctctataagctttcacatagtgtctcagtcacacaatacaatttaaccagtcaggtgaggagacaacgagtgttttggaaaaccaagagaaacaacagaaaactagaaagagatttacaggtgttacagacaatgcactatgaataagatgctcaagggaaatcaaagaaaagattgggaatgtttggcaaagaatttagagaacaacaacaaaaaaaagccagtaggaactctagaactaaaaaacattaactgaaattaaaaatcaacgtgtgaccttaacagcagtttagatacaactaaa

SEQ ID NO: 255724 - DNA, 767 bp, Homo sapiens
catttatttatccatatccacagagaacagacttccgtatctatgccagtagtaaacccaccagcaagatcaatattaaataaaagaaaggatacttatatcaatctcccaacaagacttaagaaaaacactattttccatactcaattactcttgaagcctttttaactcctactctggaactggtatcaaagtacaattctatcaatgacctaggtaggaatctattataatgaggtagcatttaacttacacaaattgaactatactttcaacaaatttcctcttcaataaaagcaggaatagagaattatactcatcattctattcaatgtacatatgcttcagaatgcatataaaatgagataaatgaatctgctcctccctcagtcagcctgagcaaagccatgcatctcttcatagtataagcatctcactggaccaagtgacactctggcgtctaaagatacagtatgtgactttttgtacatcatgggtcgagtgcaagccactggaacactacttagtcttgtgctgaagcaaaggaaaaactacctattccagtgctgaaagaaaactaggttctgctggacctactgaaaaatccaagctatgggtgataaagtggtattaagggtaatttttaactacatgatttctgccctatactgtagaccctaacccccatatatatgataaaattctacaatttatatctgtcaatcagctaacatcatttaccatatcttcaaacggtctttaacttc

SEQ ID NO: 255725 - DNA, 478 bp, Homo sapiens
cctcctgggttcaagccattcttctgcctcacagtctcctgagtagctgggattagaggtgtgtgccaccatgccaggttaattttgtatctttagtagagacggggtttcccgtgttggccaggctggtctcaaactcctgacctcaggtgatctgtgcacctccacctcccaaaatactgggattacaggcatgaaccaccacgcccagcccattctgaaggcttttaagtgctcctggtaagcacttagtgatgctattagtgtattagtgtagccaagtttgatcacttgattaagctagtgcccactatagcttaccatttttttctgttcataaaaataatacgtgttcctagtagaatgaaaagacagcgcaaagaagattatatattaccctaattccatggctaattatttttctgaacttttcagtcatgaaaattttcaagcatacaagaaaaattcaaaaatagta

SEQ ID NO: 255726 - DNA, 114 bp, Homo sapiens
tcaaccagcccctctctgttttaaaaagaaaattaagctacccactttctgtttacttacatagaattccactatttaggcttttgaaaatagcccttctgacttgtaaataac

SEQ ID NO: 255727 - DNA, 395 bp, Homo sapiens
gaatcatttgctcgttctttgattcagaggaatgttttgatgagaagggatatcccaaatctaacaaaatatcagataattctggcaagagatcagtttaggaaaaacccatctccgaatattgtgggaatacaacaaggcataatcgagggagagtttgctatttgtattagtttatatcatggttatgaattattgcagcaaatgggaatgagatcattatatttcttcctttgtggaattatggatggaactaaagggatgacacggtcaaaaaatgaacttggccgaaatgaagacttcatgaaactctataatcatctagagtgtatgtttgcacgtacacgtagtacttcagcaaatggtatttctgctatccaacaaggtctggtttt

SEQ ID NO: 255728 - DNA, 354 bp, Homo sapiens
atttccttaacttattcgttgagccattgatcgttcaggaacatgttatttaatttccatgtatttttacagtttcagaagttcctcctgttactgatttctagtcttgctctgttgcagccagaaaagatattgatatgatttgactttgtttaattaatttgttgagacttgttttctggcctaacatgtggtctattctggagaatgttttaggtactgatgagaaaaatgtgcattctgcagcagttggatgaaatgttttatggatgtctgttagggctagttggcttagagtataatttatctccaatgtttctttgttgattttccacctggatgatctgtccgttg

SEQ ID NO: 255729 - DNA, 289 bp, Homo sapiens
ttagagatgacgtctcgctatgttggaccaggctggtcttgaactcctggacttaagcaatccgctcgcctcagcctcccaaagtgctgggattacaggtatgagccactgcatccggcccctactttcataatcagaaagaaaacaaatctgatgtcttaaacacactaaatacaacgagaacaacaataaaacaagtttgttcacgccttctgtagaactgaaccttggggtgccctgatcgtggctcaactggctgaatttcaggctctaactctccagatcattc

SEQ ID NO: 255730 - DNA, 633 bp, Homo sapiens
cgaatcttgagtgtaggatcatatgttagcatctaccctagagaacaactcacaaatgcaaaaacaggcatgggccgggcgcggtggttcacgcctgaaatcccagcaacttttggaggccgaggtgggtgggtcacaaagtcaggagtttgaggccagcctggccaacaaaatacaaaaattaggcaggtgtgttgtgtgcctgtaatcccagctactcaggaggctgaagcaggagaattgctttaacctgggaggcagagggtgcagtgacccgagatcgtgccactgcattccagcctgggtgacaggacaagactccgtctcgggaaaacaaaaacaaacaaacaaaacaaaaacaggcgtgtattggcagaaatgtgaaagtaacctaaatggtcatcaagagaatggctaagtaaattgttctgtttatactgtagagtactgtgtggcagttaaaataatgtaggatatatgtactgacaaatttctgagtaaattgttgaatttaaaaaaaaaaggaggtcatagataatatgggtagtatgatactggttggattaaaaaaaccaaactaggctggccatggtggctcacgcctgtaatcctagcaagcactttgggaggccg

SEQ ID NO: 255731 - DNA, 395 bp, Homo sapiens
cagtcctctagccaaaactctgggactttatttaccctactttgccacatgcttcctgcatctatgcctgtagaagagctgaaagaagacagggagagaaagagctcagtggagtttatattgtactcttagggccacagctcctcctactggagaggaagttttccctccctcaaagttttaaattcttgcagttatcattatctctgctactaccttgaaggctaggatgcaagagaatgaaggagaaaagggcaatttttctcttctttgagacttttcctgctccttgagcctaaactataaggattctcctagagccttcactgccatgccccagggcccactttcaggttttaagctcccttgaatccaggccaggggtaccttttaaa

SEQ ID NO: 255732 - DNA, 334 bp, Homo sapiens
gatttgaaagcagcacatgagataataggttcttagagttttgtgtgtgtgcgtgtgtgtgtgtgtatgtgtacagatatatatgtatctgtatatttctggtgagcagcctgaaagctacagtcacttgccacttgagcagttctcaggcaatcacccaccccgaaggctggtgggtggatgaggttcaaagacagagctttgaagaacatcggtttctcctgctttctgtattggttcttcaacctacaataaaaatctttgttcttaaacatgtagaggcccttcggcatatccccaattctaccaagatatgaaattgtggtctatgctc

SEQ ID NO: 255733 - DNA, 708 bp, Homo sapiens
cacccctagacacatgttcactgcattatctaatccacacaggattgtaaccactcaaaggcagaagagaccttagtggcatttaatataatcgcttaattttacagaagaaacagatgctcagagaccataactggtgatcagaggtcagccatctggttagagggcctggaaagcagaccttcactcccctctccgttactccccactggtggccatgcctacttcacagcaggtggtcagaggtgcagtgggaaattacctccctggaagtgcttttaataaaaaagaaggaaattctgcaatacgcaacaacttgaatgaacctggaggacattatgctaagtgaaagaagccagacacagaggggcaagtgctgcatgattccacttctatgagatatctaaagtggccaaactcatagatgcagaaagtaggatggtggtggccaggggctgggggcagggggaaatggggcgtttgctagttgatggacatcaagttctagttaagcagataaatccattctcgagacctgctgcatgacattgtgcctatggtcaatgacaccatgtaaaacacagatttgctaagggggtaaatctcatgttaaatgttcttactacagtaagataagattttaaaaaattgtaaagggccatttggaggtaagacattgtatatttttatactgagaagtgggccatc

SEQ ID NO: 255734 - DNA, 253 bp, Homo sapiens
actataggcctggcatggtggttcattcctgtaatcccagcactttgggagaccaaggcaggaggattgcttgaacccagggcctcaagaccaacctgggccaacaaagcaagacctagcctctacaaaacatgaaaacattagcccgacatggttactactcagctactcaggaagctaaggcaaagatcccttgagccccagagttcaagtttgtagtgagctatgattgcgccactgcactctagcttgg

SEQ ID NO: 255735 - DNA, 516 bp, Homo sapiens
gtcagtgctaagtgaatatgactggagtggggaaatggtactgttgaggtcatcaggaagcagtttattggaagggatgtgtgaaggttatttggaggagacttctgttacaggaaaactagaggtgtttttatcttccaactcctgtagtgataatggctctgtttttcatgaaaataaacacgtatttctgccttatgatttagtccatttgtgttctaaaagtaaataattggcttttaattcacaatgaagaattttttaatttaacaattatggaattatcaaagagttgttattaacttgtcattcccctaggctctgtaagctttgttcctgtatgatatccacagaaatgaccttggatgatttcagtttaccaagcatttttttttcttttttcttatccttatagcttacagacagtgataatgttagtattttttatatggaacagtgacaattttgtgctgatagtgtaatcaacattaaataaaagaaaataatgtatgtgtt

SEQ ID NO: 255736 - DNA, 590 bp, Homo sapiens
gcttattccccaaacactggtctagactgacccagatgtccctgattactgttctagtctttcagacctagttttacatacaccaagacacaaccattccctaaccaagaacagctagtcgtctacagtccttttggggagatgattagatgtggggtgagctcagggtaggggatggtggtaagtactgcattctgaacaagacagcgataaggctgagtcactatcggcctttgttaggatatacacagcccaagagaactgtctgaggacaaaaggtcatccccagccagccaacagacattactcccttggaagcattattttggcaattttctgtgtgttttgacttaaaccatccaaatgaggaacagtaggtaaggctgaaaacaaagaacagttctatttcgtgactatgacctggcacctcagtttctttctcaaaaaggtataaggattgggcagaaagctctctaagggcctttctagctgaagaacacgcatgactcaagcatgaataaactcaggaccagaaaccccaataactgaacacacaactttcctatgcactgtgttgtcctgtacattga

SEQ ID NO: 255737 - DNA, 326 bp, Homo sapiens
tcatggaacttttacacaaatatgccatatatggcaaagtcccctaatggaatagaacaggccattgcaagagagaacatgggggcctctgaagagataacatttaagctgacatcttaagaatgagcgagctgagactgttgagagatgctggtgaaaataaccaggaaaccatgagcctccagcctagctgtcaaccacccacccaccaatacccaagaagtaatgaagagaaaggccctgtctcaacctaggtccagaagcactatcaaggttcccaagacaaccttgaaagggaagggagacctccaagggagttccaggga

SEQ ID NO: 255738 - DNA, 741 bp, Homo sapiens
ctgtgggtgtggatttcacctaatggaatgaactgcaagaagattcacaagagatttaaaaagtttttaagataatatatcaatagaaacaatgccggcttgtatgaaaagggacagaaggagtacaaaatgaaaggcctttgggcctgccaaatttctcctagcaggaaataggctggaaggactacttacctgcatctcctataaaaggaagagtggctcagtggaaataagatccagaagggaaagccaagggctatgacgtctgggcagaagcaaactgagacttaatcaaagaacttgctacatattcccagttggatctcagaattgctagaaaccaagactactatgtgccactcatttctctcttctattgaaaaggaattgtaaatgtatataggagtgtgtgtttcacatgtgggaggtatgcatatcattacagccagagggcacactgtggtaataatcgtgtaagatacccccaactaatccccacctcctagtactcatgtccttgtgtattcccttcccacattctattatggaaggtctgtgtgtctgatagaataaaacagaagagacagggtgagactttggaatctataggacataaaagacattgaaaattctctctctctctctctctctctctcgttataaacaaacctatacaattgatatttgaatcacattctgtagcccatgtcaaccctccagatgattgcagccccagctgac

SEQ ID NO: 255739 - DNA, 2169 bp, Homo sapiens
atggctgtgcgcggcgccaacaccttgacgtccttctccatccaggcgatcctcaacaagaaagaggagcgcggcgggctggccgcgccagaggggcgcccggcgcccgggggcacagcggcatcggtggccgcggctcccgctgtctgctgttggcggctctttggggagagggacgcgggcgcgttggggggcgccgaggactctctgctggcgtctcctgccggtaccagaacagctgcggggaggactgcggagagcccggaaggctgggactcggactccgcgctcagcgaggagaacgagagcaggcggcgctgcgcggacgcgcggggggccagcggggccggccttgcggggggatccttgagcctcggccagccggtctgtgagctggccgcttccaaagacctagaggaggaagccgcgggccggagcgacagcgagatgtccgccagcgtctcaggcgaccgcagcccaaggaccgaggacgacggtgttggccccagaggtgcacacgtgtccgcgctgtgcagcggggccggcggcgggggcggcagcgggccggcaggcgtcgcggaggaggaggaggagccggcggcgcccaagccacgcaagaagcgctcgcgggccgctttctcccacgcgcaggtcttcgagctggagcgccgctttaaccaccagcgctacctgtccgggcccgagcgcgcagacctggccgcgtcgctgaagctcaccgagacgcaggtgaaaatctggttccagaaccgtcgctacaagacaaagcgccggcagatggcagccgacctgctggcctcggcgcccgccgccaagaaggtggccgtaaaggtgctggtgcgcgacgaccagagacaatacctgcccggcgaagtgctgcggccaccctcgcttctgccactgcagccctcctactattacccgtactactgcctcccaggctgggcgctctccacctgcgcagctgccgcaggcacccagtgaacccgcttgggctgaggcagcgagtgattcccgcgctccggctccggaccggcgctgacagctgtaggctgtagcctgcacggggcgccccgccaaggaggcacctggaggtgaaacccagctccagctcccgttagccaggacttgtcccctggcagctgggctgagtctgccctgagggggcgcctttttctaatttgaacagaggcaccctatggcctaggggccctgatcgcccacctgcctggaagcccctgggctctatttattatcatgacaatgttggaattaaattttgattcgaatatgtctgcctgggggtggggttttccctgagcggcaactcctggagaccacatagcctgaatcctcagaatttcaggcctgctgggagctttctgcactaggccacactagttcatggtatccatgctaccaatctatgtgtatctacatatcttttatttttggaaattgcatttgtaaccaaggggtgcgaaaccctggcagtcccaggcagcaccaggccaggggttgatttgaaacgtgaaggattgggttttcaggccctctgctccacccctcctgtgtgtcagagctagggtgggggtgcccgattcgggtgctgaatgtaaggaggggagcctccaagtgtggtgcaagccgggggtctccacatcttccttctctgaagtccaggtacctgcacaagcaggaagcgcctgggagccccggaaggaggagagcgcacacccaggcagccctctgcggaaactttccttggtttctttttatttgtgtaaaggaggttaagacgtgtcgcacttttcagttgtttgtattcaaatgacgattatttttctactcaatgtgaatatccctggccagcctttccacggcgcccaccgcagtgccgctgcctggccctcagtgtctaccttccgccctctgcgactccagtgctctggcccgggactcccctatccgcccctcacttacccttaaacaggtgatcccacctgtcttgtcaacctcgccgcttttcgcctccttaatggcactgtgcactcaactagagtattaactgtaaaaagatttgtgaagtttggaagctctattcgctgtattttttctttaatttataaacttttagtttaacatgcacct

SEQ ID NO: 255740 - DNA, 901 bp, Homo sapiens
ggcccaggaagggactccaggactaaggcgggaccgcgggcggggacgcagggccgggggtcgcagggaggctgccagcgcccgggcccggatacccgccccaaatcccgcctggtcccggcgccacccgggccgactcgcctctgtgccggcctccaggctggccccgagcccctgtgctcgttcttttcgtttgaacaagatccctcgtgagcccgcggcctctaaaccgtttgctcttgtgggccctccaggctgccgcgtgggtctcaaggtgaaggcctggagggcagaggggtggcggtgaccccgttgctccagctctcggggcctgtgactgccccagccacgtgcggcgcgggcgacgccgcggttcgcgcggttccaagagtgcggccgcccggagcccagcgcctctcaaccttgcccgggctcggaacgtcgcggggcgtgttctccgacacagagaattcgtgtgagccgactggcctcgccctgacctgcccctcttaggacaacacggaaaaccgctggtgcagggtttgcgagtagctggttgcgtccgccgggacccgacagaccggcaggtacgaggggcaggtggggaggcaccggagcctcagcgcagccccgcccggcaccacctgcccgctttcaacgaaacacgtcgcccaggcccagagaactccgggactgtctggggaacgcgccaggcccatgtcggctggggcgctcggagctgggagagggcggagagcctccatccaggccggagcatcccagagcccgaggtgcggagcagcatggagcgcccgaggcgggcggcgccagggccagagtctacccaggggatttctgccgcctttataggctggaaaaataaagatcaaaaacaaaccga

SEQ ID NO: 255741 - DNA, 813 bp, Homo sapiens
ggcccaggaagggactccaggactaaggcgggaccgcgggcggggacgcagggccgggggtcgcagggaggctgccagcgcccgggcccggatacccgccccaaatcccgcctggtcccggcgccacccgggccgactcgcctctgtgccggcctccaggctggccccgagcccctgtgctcgttcttttcgtttgaacaagatccctcgtgagcccgcggcctctaaaccgtttgctcttgtgggccctccaggctgccgcgtgggtctcaaggtgaaggcctggagggcagaggggtggcggtgaccccgttgctccagctctcggggcctgtgactgccccagccacgtgcggcgcgggcgacgccgcggttcgcgcggttccaagagtgcggccgcccggagcccagcgcctctcaaccttgcccgggctcggaacgtcgcggggcgtgttctccgacacagagaattcgtgtgagccgactggcctcgccctgacctgcccctcttaggacaacacggaaaaccgctggtgcagggtttgcgagtagctggttgcgtccgccgggacccgacagaccggcaggcccagagaactccgggactgtctggggaacgcgccaggcccatgtcggctggggcgctcggagctgggagagggcggagagcctccatccaggccggagcatcccagagcccgaggtgcggagcagcatggagcgcccgaggcgggcggcgccagggccagagtctacccaggggatttctgccgcctttataggctggaaaaataaagatcaaaaacaaaccga

SEQ ID NO: 255742 - DNA, 720 bp, Homo sapiens
gagtggaggaggagggtcatttcaacagcagcaaaactcagccatgccattttccctgacagcactttaattatgatgaaagaacaagattttttttttccggtttttacagaggaggctcgtggtggggggaaaggagggggctctgaaagagatgtgagctgccaaggtacagagtgcaaagcggctgtcactgccaaatgacagatgcagttggagagggggagagaagcccttccctgagcctgtgcaccagtggcctattctgtgggggcccaggactagtcagccaggggcaaatggtgaataggatggcccaaaggagccacctgctacatgctagcttccccctttccttccgtgagattttaaccccagggctggttctcctagttgtgctctgctccaccagctttgaaagccttggaggggtttcaagtggtcacataccttattgttgaaaaggatgtttttctttaaagtcaggtgctaagtcaggtgtgaggttgaaatggacacttaagggcttcagagcaggataaagggacagagcccaggaagcccaggactgatgctctgatgggcagaagccagccgtgttttaggaatggggaaagagttggagcaccagatgttaagaggctacagtcagctcaagcaagaacgagagaacggcgctgtcactgacttcccacctcccggccttgccggtaatccctg

SEQ ID NO: 255743 - DNA, 374 bp, Homo sapiens
gaccacccactactctctcaggtgtcattctaccacttccatgttgatatgaacttctaaagtctctgatcgctcttgcctagagaacttctggaaatcaatgaagtcattgatttttaaaatgtctggaacattgatttctatcaggcctcacgcaaagatcttggctgacctttgtcttctaggatgtcgcagtctagcagggcatgctgccttcaaaactgacacacaagacctagatcctgtggctgcaagtctaatgcctggactgtgttctatggtactgcagaggtcagcagagaaaataaaagatttgagaaatcagcactaaagcagcaaaccctatgcacccaaccccatccacctcgcctgtt

SEQ ID NO: 255744 - DNA, 471 bp, Homo sapiens
gcaattgaacccttgaaatccgcaataagacaaaaaggttattgaaagttgtaatccaaatttaaagcaaacaactgctccatgattttgagtaattggcatggtttgagaaaaggtcaaccatttaatcctgacattatctttcaaggaactggagaaagagaaaattttagttttcatttcgtaactttctgtgctacatgatttttttaactatgtattatagaggcaatataataatgataacagagttattgaaaggcattttgtgagcatagtcagcacaggtagcccagagtaagaatattcaaggaagccttctgagaggagatagatgtgtaatacattaccaaacaaattcagaagtaattctgcaataagtgggaaggatggcaagaagacagagacaggatagggtggaaggaattccagcaagaagagaatgagcaaagaaagagaacaatgaacaat

SEQ ID NO: 255745 - DNA, 1412 bp, Homo sapiens
  misc_feature (400)..(400): n is a, c, g, or t
  misc_feature (473)..(474): n is a, c, g, or t
  misc_feature (1105)..(1105): n is a, c, g, or t
ccttccttgaattgggtgttattggccagaagggctagtcaatactagacctgcttgcatttaatgactgtgttaatgacccaatagtgagaactacagggttatggaataatgctgtaatttattaaaataggcaaaaaagtatcaagaagccccagaaattaatctgacttatttatgaaaagattggtttcaggggtttatctgtggccatgaagaaactatgagaaactataaaattgagcactcggtattcccccaatcaaaaaaaagtgaacaccatgaaggtaggatatctctgtttttttccctaatgtatacctattacagttcctgaaacatagtaaatgctcaataaatatttttgaatccttgagtgaacaaaaagtgctaggcatcnttggtgtgggccttggaaagaaaacaaaatattacctcactccgagtagagtatattgtttctacaaatgggnncagaaaaggaaacagagaatatcaaaaacacacttaacctggccgggcgcggtggctcacacctgtaatcccagcacttaaggaggcagaggtgggcggatcacgaggtcaggagatcgagaccatcctggctaacacggtgaaaccccatctctactaaaaatacaaaaaaattagccgggcgtggtggcgggcctgtagttccagctactcgggaggctgaggcagaagaatggcatgaacccgggaggcagagcttgcagtgagcggagatcgcaccactgcactccagcctgggtgacagagcgagactccatctcaaaaaaaaaaaaaaaaaaaaaaacacttaacctagcttaaatagtccccagtagttctctctcaagttctacttgctggttaggttactatgtttcaggaaagacaccagagctacccaatgacaggctgctaaaaactcaagaacatggtttgatacaaagaccattgaaaattgggattcactgatgcctgtgggaccatggcaaggaattaacttttatttaataaaaatatttttaggaaaataaagtattatataactggaaaagtgaagctatttatagggtgatcatattctgagtttgcttgngatagtccaatttataccgtggaaagtacgaccttccttgaattgggtgtttattggccagaagggctagtcaatactagacctgcttgcatttaatgactgtgttaatgacccaatagtgagaactacagggttatgggaataatgctgaatttattaaaataggcaaaaaagtatcaagaagccccagaaattaatctgacttatttatgaaaagattggtttcaggggtttatctgtggccatgaagaaactatgagaaactataaaattgagcactcggtattcccccaatcaaaaaaaaaaa

SEQ ID NO: 255746 - DNA, 318 bp, Homo sapiens
ataatatttgtaaatgcataaaataaaatataaactatagttatcaaaatacagtggtccccccttaactgcagtttcaatttctgtgatttcagttacccaaggtcaacctggtctgaaaataagtacaataagatactttgtgtatgagacagaaggaccatattcacataacttttattacaatataattgtcctattttgttgttaatctcttcctgtgcaaatttataaattaaactttatcataggtatatctatggataggaataaactgtataatcacatttggtgctgtgtgggggacactactatatt

SEQ ID NO: 255747 - DNA, 400 bp, Homo sapiens
atacactagtacgaagtcaatgccggttccggacatgtgctgtatgcgagcgtgttggcagattcctgctactgattttgtgtatccgtatatctagtgctgtagctacaccttaatgtggctttgctactctctgcttctcacatcctatggggatctttctacagggagagtgcattctagagcatctctggcagctggtcaaggctctgggattgaatacctccatgaaatagagctctctgcctctgaatcagcctggtggacagctctggctgttcgatagagcttccttgagttaaagagagatttagcttccttagaacctttaactattgactgccttctgtcttttgaggaaacatcaatttcattcaagggccatttactgaacgctggc

SEQ ID NO: 255748 - DNA, 332 bp, Homo sapiens
acagtcccttgccatcagatttgttggtgagccctggacatcagaggcaccagagggctaaagctgtgtgctggctctaaagatgccggttgcagggctgtcagacaggccagagcccaaagggcccatcctggctgcttagatgttgtcattgttccctctggagcccagggtcccagagaggagtcttcagtctcctggagcacagccctccccctgcgtcaggacacggcctccctgttaaccttttcacaggtgtggttgctaagagatctcgctcttctagcccagcctggctcctgcccactccccttgctgctgctctgtgtgtg

SEQ ID NO: 255749 - DNA, 441 bp, Homo sapiens
gataacatgcatttcccctgacacctcccagcagtgctcagcagccccactgaccaggtccctgctgaccagatcccgcacatcaggtcctccctgaccacactctcactgattaggcccccatcaccaggccccactaactagattcccgctgccaggcccacagtgtccaggaccccactgacaaggacctcactgacaaggcctcactgaccagggcctcactgacaaggcctccctgaccacattccaccaatcatgaccccattgcctggccccacagatgaagccccactgaccaggtctccagggaacaggctgccagtgaccaggtccctactaaccaggcctgcggtgaccagatgccccgaccaggaacctagtgactaggcaccactgaacaggcatgtaccgctcagacccccgttgaccaggtcaccc

SEQ ID NO: 255750 - DNA, 321 bp, Homo sapiens
cagtgcattcgccaccgatttaataatcgaggatggcttaagatttgtcttttgcagttctttccaccttagtgtatctctaggggtgcacagtctgatagcttctggaacattccctgtctgtgagcttatgcccccagttggagacattgggttcatttgttttcttttattttcatttcttagagatcacttttaaaaatataactgttctgtaattatttaaaatattgtcgtagttccaaagtcaaatttaaaagacaaggtgtactatattgaaaaaagtctagattttaattcctgtctcctccatcctgttct

SEQ ID NO: 255751 - DNA, 487 bp, Homo sapiens
acttgcacccatacagctagcacagagcctaggcacagtgggtactgtttatattgtactgagataatagaaactgtgtgggtatatggttcaccttaaaatccatgccttatttttttttgagctcatgatgcctgtattaccatttgctgaactcaaaatactccaatggtttcctgccaaaatgtaatcatgttatgattgtccaccaagaccatttctaaggtagaaaccttacatcagaagatgttatatgtttctttttctaaacaagttcaggaaaagtatgtcctgatacaggaaatttattcagacttaacaccagcagtgtctctggttatgttacataattacatggaaatcatagtaataatatttgcagtgcctaaatttgaagtgctcaatggtgtcatctagtggtgtaagcactatagaaggtgcagctttattactcagtgcttttgggacagaatttgtgtatttaaaa

SEQ ID NO: 255752 - DNA, 318 bp, Homo sapiens
acaggcgtgtcctctgcacccggcccacatttattttttaaatttaagtgttttttgtttctttttttttggagacagagtctctctctttcacctaggttgaagtgcagtggcacaattttggctcactgtaatctccactttgtgggttcaagtgattctcaattctagtacctcagcctcccaagtagctaagactaaaggcatgcgccaccacacttggctaaatttttgtattttatttatttatttatttttaatttttgtttttgagatggagtcttggtctgtcattcaagctggagtgcagtggcacga

SEQ ID NO: 255753 - DNA, 442 bp, Homo sapiens
acgaggccgaccaccactacgtttgcggacaacagaagtaaattccagtctcagccctattatttagctgtgtgaccttagataagtcatttaaagagggaactaaaatgctgccttcctcctacggtgattgttagaattaaataattcatctcaagagcttgacagagtttggaagacagtaagtgttcaataaataattcctactaccaccctcgtaagtgcctgactaccaccaaatagaactatgtaagtaggggttgacatactttttatgtaagggccacacagaaggtatttgtgggccatggtctctgttatttattttttgttttgttttgttttacaatcctttaaaattgtaaataccattattaatagctcaaaggcccatacaaaagaggcatggctagtctaccctgcagcctagtctgccaacttc

SEQ ID NO: 255754 - DNA, 510 bp, Homo sapiens
aaatattccacagggtttgggggaaagggggcagagttgtagttgaaagatgcattggcactttgctggctgctgacattctgctaatttcactagataacagggacccagatgttgttatatgattaagtcagtttcaactagaaatattgtgaaaatcttgtggccagaggaagcctctcatattcagagtaaaaaaaatctaatttagtaaaatgtgtgatgtcttatgggctgtcttatatccttaagttcttttcaataggagagcaaaagagaaatctgttggcagtacagtgcttgccacattcctgttgctaagcaaagggaagctagggagaagaggaaaagcgaaggtctgtgaatcaggggcagtaaaattctaatcaactcttggtgttatgcttggctgactttctagagaaggaaaggcagcagtctgcattggtatatccaaaggctcaggaatgtagtcccagtattcacaaaggaaaacgcttccactgtgaa

SEQ ID NO: 255755 - DNA, 449 bp, Homo sapiens
catgaagccttctcaaattccaacagttacagttaaggtcttcagtctcagtgttctcttagcacaatgagaacactttttactaggcagagactgcatctcattcatcttgctacatgcctggtgtctaacacaacaccttgctcaaagaagagaagtattgaattgacacactgaatttacaacatcttcagtattaacagagagagcaaaagagaaatctgttggcagtacagtgcttgccacattcctgttgctaagcaaagggaagctagggagaagaggaaaagcgaaggtctgtgaatcaggggcagtaaaattctaatcaactcttggtgttatgcttggctgactttctagagaaggaaaggcagcagtctgcattggtatatccaaaggctcaggaatgtagtcccagtattcacaaaggaaaacgcttccactgtgaa

SEQ ID NO: 255756 - DNA, 372 bp, Homo sapiens
ggacagttgtgttatactctgttattggcatgttcctgtatattcctccctgcatctcctataatttgtgctttataaaaatatgcatgtgttatcttgtgcataaatattcataactgttttgccttcattgggaattgtgactttcagcatttacaaagacaaaaacaaagtttggggactagggtgaaagaatatgaaaacgttttagattttgagacagaaagagagcattaaaagagaagaaaaaggaacaaggaaaaggagagcaagaaaaaactattgcatcattaataagtggaagtaaaaagatttaatttaaatctaagtcaattatggccaggcacggtggctcatgcctgtaatcccagc

SEQ ID NO: 255757 - DNA, 471 bp, Homo sapiens
agtggctcggcttctggtgccccaccctgcctgatgggagcttgggtcctgactcagcttgccgagctaaagccaggcttccaaaaaattccaggatggggcagaaaccagaggacagccagctagccacagttagtataggctggggcatgaggattctgctatagcccttacattagttgattcactcattcattcatttattcagaagtcttttatgaactacctgctatgaacgtttccctttggtaggcaccaggagaaaacaagatgaacccaaaaggactcctcccagctcccaaggggaaaaaaaacaaaaacaaacaaacgaacaaaaaacagcttaagaaacgagacttgtacagaactatagagcaaagtgggaaagtgaacatcagaagacagttgcacataaaatacaaaatactgttggttttcagataatacttgcaaaatccctcatggtcatcc

SEQ ID NO: 255758 - DNA, 424 bp, Homo sapiens
aaagctgtatttggtaggtaattagaatttttgtttgatttttaatatatgttatcccactttaattttttccaaacaggaattatttttttaatctaccatttattattactattactttatttaaaaatactattattaggctgggcgcaatggctcatgcctgtaatcccaacactttgcaaggccaaggcgggcagatcacctgaggtcaggagtttgagaccagcctggccaacagtgagaaaccccatctctactaaaaatacaaaaattagctgggtgtggtggtgggcgcctgtaatcccagctactcagggcactgaggcaggagaattgcttgaacccaggaggcggaggttgcggtgagctgagatcatgccattgcactccagcctgggtgacagagcgaaaatctgtctca

SEQ ID NO: 255759 - DNA, 105 bp, Homo sapiens
tgtggttgagccacatttgagctcctgggggcaggccctgggcctggcactcagcactggaagtggtgtataggccagtttaattggagaagctcctgaatgtct

SEQ ID NO: 255760 - DNA, 566 bp, Homo sapiens
tatattcccctgtgtgtgtcccagctacccatctacagaattaaaacagcagcagtgacataagaggtgtgagcatccttgagtctcaagttcagcaagcttggtaagtcaggtgtgtccaaagggtcactctccttctgaatgaggagcagaggctcctaaaggaacatggccacagggaaggcgaggcatgggaaggtaggatggaccttccaacagctcccagaaggtgccagcgctgtccgggagggaagcaaagtcagagaacatcctcacactgctcctaggggtccaagagatagacagaagctgggcatggtggctcccacttgtaatcctagcactttgggaggccaaggcgggaggattgcttgagtccaggagtttgaggccagcctgggcaacaacaacaaaaaaacagctggccatggtggcacgtgcctgtagtcccagctactggggaggatgaggtaggaggatctcttgagcccaggaaatcgaggctgcagtgagctatgatcatgccactacactccagcctgggcaacagagacgctgtctcaaaa

SEQ ID NO: 255761 - DNA, 359 bp, Homo sapiens
accaacttgcttatgtagctcccatcatctttattaatgttgccaatcagtacctcatcaaatatttattaagttctcattctaagaccttctcaatgtaaaatagtaaatctgcccaaaaagctagattgaggccaagccatgggaccaaactaaaactttaactgtccagcttacttgcaatttatatttatttctgcaattatattttttcaaccagaccagtcatttatttaattttgtcaacataatttctcttgaaccttataggctgatttttccagcattttacctagcaaataatggtaagtttaagaacactaaatgactcataatgtattcacgtttcatttgcctta

SEQ ID NO: 255762 - DNA, 405 bp, Homo sapiens
taagggagacgaggtggctgggaaaccaaaataaggtttggctaatttttgaagtaccccgaatgtcatgcgaaagaggctgagttttgtgcagtcaatagaaaagcattaaataattttgtttggcctgggtatgatggctcatacctgtaatcccaggactttgggagatcgagagaggaggatcacttgagcccaggagttcaagaccagcctgggcaacaaagtgagaccctgtctctacacacacacacacacacacacacagaatcaaaaaattagccaggtgtggtggtgtgcatctatgttcccagctacatgggaggctgaagcaggaggatcgcctgagcccaggaggtcaaggttgtagtaagccatgactatgccacaaaacaagaccctgtc

SEQ ID NO: 255763 - DNA, 690 bp, Homo sapiens
accatacagttgctttctttgaaagaaggatttgtcaagcaaactaatcatatatgcaaatcaaaaggcaactatttaaagctactcaaaagaataaactgattaagcattctcaagtacatacaccctatattaaagcatctttacccaacatatttgtaggctcattacaaattgtctattaaccagtcgttccctcatgggactgtagaaagcctttctttgttgacctgtttcctgtcactgtcaatacttgaatgcaatgacattgtatctcttttaaaagatttcataattcaaacttttcactaattcagaccaagcttccacaaattagtctgaattaaagaagtttggctgtactaggttgacccatatgaaattggtgctatgcaaccattttttacctaaaaaatgacaattttatatggttcaatctaatacatttcttttctggtgcccctttccaaggaactaaaagcattctttattcccatgctttcctcctatggtattttaaaaataaaagcagaagagtgggattgactgccacagcccccaaccacctgcccctcagttcacaagtacagaaactgggagatttaacagaaagaagaaaatcattcaaaacacaacttctgctttctttgctgtacagagcttttacattcgatgtggtcctacctgctt

SEQ ID NO: 255764 - DNA, 860 bp, Homo sapiens
ttcaaatacatttgatgttaatgctgtcattacttgcactttgattcactaataacatttctaggtagttaccagttttgtcatttttctggaaaatattttggagttgtaaattgtttctctttttcttctagagttacaaattgaatttttaaatccaagcacctttgttgtggtgtggagagaagtatcacaattttatgtttattttaccttctcaaccttctcttggggtactttgcaaatacctgagtctaaacagaagtaccaaatacatgctctatgaactctatccttagtaaatctattaaacctgaataacttaaaagatcatgtgtgttttgtaatagcaaaatttgattttaattttttatttggaattggtgtatttatcatggggacttccagtttttcttcactttgcaaatggatattggctatagttttatgttttaatgggaatgaatttcaagtcaattaataatcagaaaatttttagttttacttttttcttttacaatatggacttttgttgttatttggatagtagttcaataaatcttaagctcagataattaaacactattttgaatcttaacaagatactgagcatttttttgtatgggatgatatcagcctatgtacaatgaatttaataaacttaagtattatcagatattttgcacattttagatcaataaaatctgaattaactgttcaagatttttttatctgtatttggaaatataattttgtaaaatcaatgtcttacctttttattacaatagatcatgttttgtattcaataaagcaagaagcccttttatctgttgtttttcagggaagggagtaacatttaa

SEQ ID NO: 255765 - DNA, 405 bp, Homo sapiens
gaacctgggatggccctcagaggtgtcacatattggagaaaagaggctgagctctgaactcccgtgttggccagacatggcatgggagctttccctgggaggagggcatccctgggtaaggcagttcctttggccaggggaaatgcccagtgagagactcagccacaaactgtcaggggcaatgttcccggcagctgggagaatgagcactgcagtctttttttttttttttttttttttcctggagccagtctcgctctgttgcccaggccggagtgcagtggcacaatctcggttcactgcaacctctgcctcctgggttcaagcgatgcttgtgcctcagcctcccgagttgctcggactacaggcatgagccgccatgcccggctaatttttgtattttta

SEQ ID NO: 255766 - DNA, 400 bp, Homo sapiens
aatcctttaaaattaatcagaatttttcattgtggttttgtagaaaggtgtggtaaaatgttacattttgtggacctaattaaaagatttatgagtgatatgtacttttgtaacttttcaaaattagtttggggaaattttcaaaagaaaaagttgaagggaaaacttagaatgaattaaaaataagaaataggcaaaagcaaatattttaatttaagtaaattttaaagactttttaaacatatttttggggaaaaatagaattgtattaaagaagggccttttaaaatttttctaggccaggcgcggtggctcatgcctgtaatgctagcactttgggaggccaagtttcaggagttcgagactagcctgggcgacatggtgaaaccccttatctaca

SEQ ID NO: 255767 - DNA, 142 bp, Homo sapiens
ctgtagcagaactgagtctctgtcccagccttgcacttccttatggagtataatctaggagagttttgagttggcctcaggcaggacttgggaatttgctcatctttacaatgggtgataatgcctacctcctgggattttg

SEQ ID NO: 255768 - DNA, 228 bp, Homo sapiens
gcctccctctgtcaaagaagggccagactcctttgaacactcctcccagcctctgctgccaggggtggggtatggagaaggaaaggaagaggaaatagctccagcctgccttgcttaggagctggcctctgggcaaagccccccaccaacccccagcaaagtatggggatggagatcttggcgccccactgcagcccaactgcactcaaagccagggaggtgacaaac

SEQ ID NO: 255769 - DNA, 439 bp, Homo sapiens
ctgaatgcactccttgcataaggttgggagtcccagagaattccctccttatgaaaaagactaaaaacttcacagccagtctgaggaaatggcaaggcagccagtcaactgccagggcttgggaaggaaatagaagccagctgagagctttgctgggcacagacaggtactcaacaaggattaatatttatcaatggaatgaaaattaatatttatcaatggaatggttaggccttggcctaaaccatggatgtgtgtaaaggtggggtttacattccttgttccatgggaagaactccttaagttaaaatgcaaacactcctagatttagtggaaacccctgcaagaagtggaaatcatgcaagaagagagttccacaaatcagggcacaagaggctgctatgaagagaacccacgggatgttctcacagtgaagatg

SEQ ID NO: 255770 - DNA, 460 bp, Homo sapiens
ccaccagcaaaggcatgtctgttgcttctagaggctggaaaagacaaagaaactaatttttccctagagtctacagaaggaacacagctctaccaatccaatttggacttcagaccttcagaggtgccaggtaatacatttgctttattttaagccactaaatttgtggttacttattatggtagcaataggaaactaatacaggtacctcaactgttagccgtggttactccctagaggtttggaaatgaagatcagagttgaagaggacttttattctccattcttcatgttatttgaactgttatcatggatttatgttggttttattatggatctatattgcttcttaaataaaaataattaagagcagaagtagctaatattaagtgaaaagatagtgtagaaaattgtataaagggtaattgttcaaccatgaaaaaatagaaaaaaaataaga

SEQ ID NO: 255771 - DNA, 5192 bp, Homo sapiens
cgacccggccccacgcccgcccgccacccgcgcgcgcccgtccgcccgtggcctcgcgtccgccgctgcgccgtgagcgccgctggtcggagggaagagctcgccggggcgccgggccaggacggggcggcaggcgccttcgcggaccgagcctgacggagccggaggctgggagccgcggcggcctggggaagtgtttggattgtgagctatttcagaactgttctcaggactcattattttaacatttgggagaaacacagccagaagaacactgatatttgcatttaatggggaacaaaagatgaagaaggaaaaggaatatattcactaaggattctatctgcttactgctacagacctatgtgttaaggaattcttctcctcctccttgcgtagaagttgatcagcactgtggtcagactgcatttatcttgtcattgccagaagaaatcttggacagaatgtaacagtacgtctctctctgattgcgatggaaggtgataaactgatactcctttattaaagttacatcgcactcaccacagaaaaccattctttaaagtgaatagaaaccaagcccttgtgaacacttctattgaacatgactcatggagaagagcttggctctgatgtgcaccaggattctattgttttaacttacctagaaggattactaatgcatcaggcagcagggggatcaggtactgccgttgacaaaaagtctgctgggcataatgaagaggatcagaactttaacatttctggcagtgcatttcccacctgtcaaagtaatggtccagttctcaatacacatacatatcaggggtctggcatgctgcacctcaaaaaagccagactgttgcagtcttctgaggactggaatgcagcaaagcggaagaggctgtctgattctatcatgaatttaaacgtaaagaaggaagctttgctagctggcatggttgacagtgtgcctaaaggcaaacaggatagcacattactggcctctttgcttcagtcattcagctctaggctgcagactgttgctctgtcacaacaaatcaggcagagcctcaaggagcaaggatatgccctcagtcatgattctttaaaagtggagaaggatttaaggtgctatggtgttgcatcaagtcacttaaaaactttgttgaagaaaagtaaagttaaagatcaaaagcctgatacgaatcttcctgatgtgactaaaaacctcatcagagataggtttgcagagtctcctcatcatgttggacaaagtggaacaaaggtcatgagtgaaccgttgtcatgtgctgcaagattacaggctgttgcaagcatggtggaaaaaagggctagtcctgccacctcacctaaacctagtgttgcttgtagccagttagcattacttctgtcaagcgaagcccatttgcagcagtattctcgagaacacgctttaaaaacgcaaaatgcaaatcaagcagcaagtgaaagacttgctgctatggccagattgcaagaaaatggccagaaggatgttggcagttaccagctcccaaaaggaatgtcaagccatcttaatggtcaggcaagaacatcatcaagcaaactgatggctagcaaaagtagtgctacagtgtttcaaaatccaatgggtatcattccttcttcccctaaaaatgcaggttataagaactcactggaaagaaacaatataaaacaagctgctaacaatagtttgcttttacatcttcttaaaagccagactatacctaagccaatgaatggacacagtcacagtgagagaggaagcatttttgaggaaagtagtacacctacaactattgatgaatattcagataacaatcctagttttacagatgacagcagtggtgatgaaagttcttattccaactgtgttcccatagacttgtcttgcaaacaccgaactgaaaaatcagaatctgaccaacctgtttccctggataacttcactcaatccttgctaaacacttgggatccaaaagtcccagatgtagatatcaaagaagatcaagatacctcaaagaattctaagctaaactcacaccagaaagtaacacttcttcaattgctacttggccataagaatgaagaaaatgtagaaaaaaacaccagccctcagggagtacacaatgatgtgagcaagttcaatacacaaaattatgcaaggacttctgtgatagaaagccccagtacaaatcggactactccagtgagcactccacctttacttacatcaagcaaagcagggtctcccatcaatctctctcaacactctctggtcatcaaatggaattccccaccatatgtctgcagtactcagtctgaaaagctaacaaatactgcatctaaccactcaatggaccttacaaaaagcaaagacccaccaggagagaaaccagcccaaaatgaaggtgcacagaactctgcaacgtttagtgccagtaagctgttacaaaatttagcacaatgtggaatgcagtcatccatgtcagtggaagagcagagacccagcaaacagctgttaactggaaacacagataaaccgataggtatgattgatagattaaatagccctttgctctcaaataaaacaaatgcagttgaagaaaataaagcatttagtagtcaaccaacaggtcctgaaccagggctttctggttctgaaatagaaaatctgcttgaaagacgtactgtcctccagttgctcctggggaaccccaacaaagggaagagtgaaaaaaaagagaaaactcccttaagagatgaaagtactcaggaacactcagagagagctttaagtgaacaaatactgatggtgaaaataaaatctgagccttgtgatgacttacaaattcctaacacaaatgtgcacttgagccatgatgctaagagtgccccattcttgggtatggctcctgctgtgcagagaagcgcacctgccttaccagtgtccgaagactttaaatcggagcctgtttcacctcaggatttttctttctccaagaatggtctgctaagtcgattgctaagacaaaatcaagatagttacctggcagatgattcagacaggagtcacagaaataatgaaatggcacttctagaatcaaagaatctttgcatggtccctaagaaaaggaagctttatactgagccattagaaaatccatttaaaaagatgaaaaacaacattgttgatgctgcaaacaatcacagtgccccagaagtactgtatgggtccttgcttaaccaggaagagctgaaatttagcagaaatgatcttgaatttaaatatcctgctggtcatggctcagccagcgaaagtgaacacaggagttgggccagagagagcaaaagctttaatgttctgaaacagctgcttctctcagaaaactgtgtgcgagatttgtccccgcacagaagtaactctgtggctgacagtaaaaagaaaggacacaaaaataatgtgaccaacagcaaacctgaatttagcatttcttctttaaatggactgatgtacagttccactcagcccagcagttgcatggataacaggacattttcatacccaggtgtagtaaaaactcctgtgagtcctactttccctgagcacttgggctgtgcagggtctagaccagaatctgggcttttgaatgggtgttccatgcccagtgagaaaggacccattaagtgggttatcactgatgcggagaagaatgagtatgaaaaagactctccaagattgaccaaaaccaacccaatactatattacatgcttcaaaaaggaggcaattctgttaccagtcgagaaacacaagacaaggacatttggagggaggcttcatctgctgaaagtgtctcacaggtcacagccaaagaagagttacttcctactgcagaaacgaaagcttctttctttaatttaagaagcccttacaatagccatatgggaaataatgcttctcgcccacacagcgcaaatggagaagtttatggacttctgggaagcgtgctaacgataaagaaagaatcagaataaaatgtacctgccatccagttttggatctttttaaaactaatgagtatgaacttgagatctgtataaataagagcatgatttgaaaaaaagcatggtataattgaaacttttttcattttgaaaagtattggttactggtgatgttgaaatatgcatactaatttttgcttaacattagatgtcatgaggaaactactgaactagcaattggttgtttaacacttctgtatgcgtcagataacaactgtgagtagcctatgaatgaaattcttttataaatattaggcataaattaaaatgtaaaactccattcatagtggattaatgcattttgctgcctttattagggtactttattttgcttttcagaagtcagcctacataacacatttttaaagtctaaactgttaaacaactctttaaaggataattatccaataaaaaaaaacctagtgctgattcacagcttattatccaattcaaaaataaattagaaaaatatatgcttacatttttcacttttgctaaaaagaaaaaaaaaggtgtttatttttaactcttggaagaggttttgtggttcccaatgtgtctgtcccaccctgatccttttcaatatatatttctttaaaccctgtgcatctgtgcatttggcaaaatgtcttaacaaatcagatcagatgttcatcctaacatgacagtattccatttctggacatgacgtctgtggtttaagctttgtgaaagaatgtgctttgattcgaagggtcttaaagaatttttttaatcgtcaaccacttttaaacataaagaattcacacaactactttcatgaattttttaatcccattgcaaacattattccaagagtatcccagtattagcaatactggaatataggcacattaccattcatagtaagaattctggtgtttacacaaccaaatttgatgcgatctgctcagtaatataatttgccatttttattagaaatttaatttcttcatgtgatgtcatgaaactgtacatactgcagtgtgaatttttttgttttgttttttaatcttttagtgtttacttcctgcagtgaatttgaataaatgagaaaaatgca

SEQ ID NO: 255772 - DNA, 4608 bp, Homo sapiens
cgacccggccccacgcccgcccgccacccgcgcgcgcccgtccgcccgtggcctcgcgtccgccgctgcgccgtgagcgccgctggtcggagggaagagctcgccggggcgccgggccaggacggggcggcaggcgccttcgcggaccgagcctgacggagccggaggctgggagccgcggcggcctggggaagtgtttggattgtgagctatttcagaactgttctcaggactcattattttaacatttgggagaaacacagccagaagaacactgatatttgcatttaatggggaacaaaagatgaagaaggaaaaggaatatattcactaaggattctatctgcttactgctacagacctatgtgttaaggaattcttctcctcctccttgcgtagaagttgatcagcactgtggtcagactgcatttatcttgtcattgccagaagaaatcttggacagaatgtaacagtacgtctctctctgattgcgatggaaggtgataaactgatactcctttattaaagttacatcgcactcaccacagaaaaccattctttaaagtgaatagaaaccaagcccttgtgaacacttctattgaacatgactcatggagaagagcttggctctgatgtgcaccaggattctattgttttaacttacctagaaggattactaatgcatcaggcagcagggggatcaggtactgccgttgacaaaaagtctgctgggcataatgaagaggatcagaactttaacatttctggcagtgcatttcccacctgtcaaagtaatggtccagttctcaatacacatacatatcaggggtctggcatgctgcacctcaaaaaagccagactgttgcagtcttctgaggactggaatgcagcaaagcggaagaggctgtctgattctatcatgaatttaaacgtaaagaaggaagctttgctagctggcatggttgacagtgtgcctaaaggcaaacaggatagcacattactggcctctttgcttcagtcattcagctctaggctgcagactgttgctctgtcacaacaaatcaggcagagcctcaaggagcaaggatatgccctcagtcatgattctttaaaagtggagaaggatttaaggtgctatggtgttgcatcaagtcacttaaaaactttgttgaagaaaagtaaagttaaagatcaaaagcctgatacgaatcttcctgatgtgactaaaaacctcatcagagataggtttgcagagtctcctcatcatgttggacaaagtggaacaaaggtcatgagtgaaccgttgtcatgtgctgcaagattacaggctgttgcaagcatggtggaaaaaagggctagtcctgccacctcacctaaacctagtgttgcttgtagccagttagcattacttctgtcaagcgaagcccatttgcagcagtattctcgagaacacgctttaaaaacgcaaaatgcaaatcaagcagcaagtgaaagacttgctgctatggccagattgcaagaaaatggccagaaggatgttggcagttaccagctcccaaaaggaatgtcaagccatcttaatggtcaggcaagaacatcatcaagcaaactgatggctagcaaaagtagtgctacagtgtttcaaaatccaatgggtatcattccttcttcccctaaaaatgcaggttataagaactcactggaaagaaacaatataaaacaagctgctaacaatagtttgcttttacatcttcttaaaagccagactatacctaagccaatgaatggacacagtcacagtgagagaggaagcatttttgaggaaagtagtacacctacaactattgatgaatattcagataacaatcctagttttacagatgacagcagtggtgatgaaagttcttattccaactgtgttcccatagacttgtcttgcaaacaccgaactgaaaaatcagaatctgaccaacctgtttccctggataacttcactcaatccttgctaaacacttgggatccaaaagtcccagatgtagatatcaaagaagatcaagatacctcaaagaattctaagctaaactcacaccagaaagtaacacttcttcaattgctacttggccataagaatgaagaaaatgtagaaaaaaacaccagccctcagggagtacacaatgatgtgagcaagttcaatacacaaaattatgcaaggacttctgtgatagaaagccccagtacaaatcggactactccagtgagcactccacctttacttacatcaagcaaagcagggtctcccatcaatctctctcaacactctctggtcatcaaatggaattccccaccatatgtctgcagtactcagtctgaaaagctaacaaatactgcatctaaccactcaatggaccttacaaaaagcaaagacccaccaggagagaaaccagcccaaaatgaaggtgcacagaactctgcaacgtttagtgccagtaagctgttacaaaatttagcacaatgtggaatgcagtcatccatgtcagtggaagagcagagacccagcaaacagctgttaactggaaacacagataaaccgataggtatgattgatagattaaatagccctttgctctcaaataaaacaaatgcagttgaagaaaataaagcatttagtagtcaaccaacaggtcctgaaccagggctttctggttctgaaatagaaaatctgcttgaaagacgtactgtcctccagttgctcctggggaaccccaacaaagggaagagtgaaaaaaaagagaaaactcccttaagagatgaaagtactcaggaacactcagagagagctttaagtgaacaaatactgatggtgaaaataaaatctgagccttgtgatgacttacaaattcctaacacaaatgtgcacttgagccatgatgctaagagtgccccattcttgggtatggctcctgctgtgcagagaagcgcacctgccttaccagtgtccgaagactttaaatcggagcctgtttcacctcaggatttttctttctccaagaatggtctgctaagtcgattgctaagacaaaatcaagatagttacctggcagatgattcagacaggagtcacagaaataatgaaatggcacttctagaatcaaagaatctttgcatggtccctaagaaaaggaagctttatactgagccattagaaaatccatttaaaaagatgaaaaacaacattgttgatgctgcaaacaatcacagtgccccagaagtactgtatgggtccttgcttaaccaggaagagctgaaatttagcagaaatgatcttgaatttaaatatcctgctggtcatggctcagccagcgaaagtgaacacaggagttgggccagagagagcaaaagctttaatgttctgaaacagctgcttctctcagaaaactgtgtgcgagatttgtccccgcacagaagtaactctgtggctgacagtaaaaagaaaggacacaaaaataatgtgaccaacagcaaacctgaatttagcatttcttctttaaatggactgatgtacagttccactcagcccagcagttgcatggataacaggacattttcatacccaggtgtagtaaaaactcctgtgagtcctactttccctgagcacttgggctgtgcagggtctagaccagaatctgggcttttgaatgggtgttccatgcccagtgagaaaggacccattaagtgggttatcactgatgcggagaagaatgagtatgaaaaagactctccaagattgaccaaaaccaacccaatactatattacatgcttcaaaaaggaggcaattctgttaccagtcgagaaacacaagacaaggacatttggagggaggcttcatctgctgaaagtgtctcacaggtcacagccaaagaagagttacttcctactgcagaaacgaaagcttctttctttaatttaagaagcccttacaatagccatatgggaaataatgcttctcgcccacacagcgcaaatggagaagtttatggacttctgggaagcgtgctaacgataaagaaagaatcagaataaaatgtacctgccatccagttttggatctttttaaaactaatgagtatgaacttgagatctgtataaataagagcatgatttgaaaaaaagcatggtataattgaaacttttttcattttgaaaagtattggttactggtgatgttgaaatatgcatactaatttttgcttaacattagatgtcatgaggaaactactgaactagcaattggttgtttaacacttctgtatgcgtcagataacaactgtgagtagcctatgaatgaaattcttttataaatattaggcataaattaaaatgtaaaactccattcatagtggattaatgcattttgctgcctttattagggtactttattttgcttttcagaagtcagcctacataacacatttttaaagtctaaactgttaaacaactctttaaaggataattatccaataaaaaaaaacctagtgctgattcacagcttattatccaattcaaaaataaattagaaaaatatatgcttacatttttcacttttgcta

SEQ ID NO: 255773 - DNA, 7550 bp, Homo sapiens
cgacccggccccacgcccgcccgccacccgcgcgcgcccgtccgcccgtggcctcgcgtccgccgctgcgccgtgagcgccgctggtcggagggaagagctcgccggggcgccgggccaggacggggcggcaggcgccttcgcggaccgagcctgacggagccggaggctgggagccgcggcggcctggggaagtgtttggattgtgagctatttcagaactgttctcaggactcattattttaacatttgggagaaacacagccagaagaacactgatatttgcatttaatggggaacaaaagatgaagaaggaaaaggaatatattcactaaggattctatctgcttactgctacagacctatgtgttaaggaattcttctcctcctccttgcgtagaagttgatcagcactgtggtcagactgcatttatcttgtcattgccagaagaaatcttggacagaatgtaacagtacgtctctctctgattgcgatggaaggtgataaactgatactcctttattaaagttacatcgcactcaccacagaaaaccattctttaaagtgaatagaaaccaagcccttgtgaacacttctattgaacatgactcatggagaagagcttggctctgatgtgcaccaggattctattgttttaacttacctagaaggattactaatgcatcaggcagcagggggatcaggtactgccgttgacaaaaagtctgctgggcataatgaagaggatcagaactttaacatttctggcagtgcatttcccacctgtcaaagtaatggtccagttctcaatacacatacatatcaggggtctggcatgctgcacctcaaaaaagccagactgttgcagtcttctgaggactggaatgcagcaaagcggaagaggctgtctgattctatcatgaatttaaacgtaaagaaggaagctttgctagctggcatggttgacagtgtgcctaaaggcaaacaggatagcacattactggcctctttgcttcagtcattcagctctaggctgcagactgttgctctgtcacaacaaatcaggcagagcctcaaggagcaaggatatgccctcagtcatgattctttaaaagtggagaaggatttaaggtgctatggtgttgcatcaagtcacttaaaaactttgttgaagaaaagtaaagttaaagatcaaaagcctgatacgaatcttcctgatgtgactaaaaacctcatcagagataggtttgcagagtctcctcatcatgttggacaaagtggaacaaaggtcatgagtgaaccgttgtcatgtgctgcaagattacaggctgttgcaagcatggtggaaaaaagggctagtcctgccacctcacctaaacctagtgttgcttgtagccagttagcattacttctgtcaagcgaagcccatttgcagcagtattctcgagaacacgctttaaaaacgcaaaatgcaaatcaagcagcaagtgaaagacttgctgctatggccagattgcaagaaaatggccagaaggatgttggcagttaccagctcccaaaaggaatgtcaagccatcttaatggtcaggcaagaacatcatcaagcaaactgatggctagcaaaagtagtgctacagtgtttcaaaatccaatgggtatcattccttcttcccctaaaaatgcaggttataagaactcactggaaagaaacaatataaaacaagctgctaacaatagtttgcttttacatcttcttaaaagccagactatacctaagccaatgaatggacacagtcacagtgagagaggaagcatttttgaggaaagtagtacacctacaactattgatgaatattcagataacaatcctagttttacagatgacagcagtggtgatgaaagttcttattccaactgtgttcccatagacttgtcttgcaaacaccgaactgaaaaatcagaatctgaccaacctgtttccctggataacttcactcaatccttgctaaacacttgggatccaaaagtcccagatgtagatatcaaagaagatcaagatacctcaaagaattctaagctaaactcacaccagaaagtaacacttcttcaattgctacttggccataagaatgaagaaaatgtagaaaaaaacaccagccctcagggagtacacaatgatgtgagcaagttcaatacacaaaattatgcaaggacttctgtgatagaaagccccagtacaaatcggactactccagtgagcactccacctttacttacatcaagcaaagcagggtctcccatcaatctctctcaacactctctggtcatcaaatggaattccccaccatatgtctgcagtactcagtctgaaaagctaacaaatactgcatctaaccactcaatggaccttacaaaaagcaaagacccaccaggagagaaaccagcccaaaatgaaggtgcacagaactctgcaacgtttagtgccagtaagctgttacaaaatttagcacaatgtggaatgcagtcatccatgtcagtggaagagcagagacccagcaaacagctgttaactggaaacacagataaaccgataggtatgattgatagattaaatagccctttgctctcaaataaaacaaatgcagttgaagaaaataaagcatttagtagtcaaccaacaggtcctgaaccagggctttctggttctgaaatagaaaatctgcttgaaagacgtactgtcctccagttgctcctggggaaccccaacaaagggaagagtgaaaaaaaagagaaaactcccttaagagatgaaagtactcaggaacactcagagagagctttaagtgaacaaatactgatggtgaaaataaaatctgagccttgtgatgacttacaaattcctaacacaaatgtgcacttgagccatgatgctaagagtgccccattcttgggtatggctcctgctgtgcagagaagcgcacctgccttaccagtgtccgaagactttaaatcggagcctgtttcacctcaggatttttctttctccaagaatggtctgctaagtcgattgctaagacaaaatcaagatagttacctggcagatgattcagacaggagtcacagaaataatgaaatggcacttctagaatcaaagaatctttgcatggtccctaagaaaaggaagctttatactgagccattagaaaatccatttaaaaagatgaaaaacaacattgttgatgctgcaaacaatcacagtgccccagaagtactgtatgggtccttgcttaaccaggaagagctgaaatttagcagaaatgatcttgaatttaaatatcctgctggtcatggctcagccagcgaaagtgaacacaggagttgggccagagagagcaaaagctttaatgttctgaaacagctgcttctctcagaaaactgtgtgcgagatttgtccccgcacagaagtaactctgtggctgacagtaaaaagaaaggacacaaaaataatgtgaccaacagcaaacctgaatttagcatttcttctttaaatggactgatgtacagttccactcagcccagcagttgcatggataacaggacattttcatacccaggtgtagtaaaaactcctgtgagtcctactttccctgagcacttgggctgtgcagggtctagaccagaatctgggcttttgaatgggtgttccatgcccagtgagaaaggacccattaagtgggttatcactgatgcggagaagaatgagtatgaaaaagactctccaagattgaccaaaaccaacccaatactatattacatgcttcaaaaaggaggcaattctgttaccagtcgagaaacacaagacaaggacatttggagggaggcttcatctgctgaaagtgtctcacaggtcacagccaaagaagagttacttcctactgcagaaacgaaagcttctttctttaatttaagaagcccttacaatagccatatgggaaataatgcttctcgcccacacagcgcaaatggagaagtttatggacttctgggaagcgtgctaacgataaagaaagaatcagaataaaatgtacctgccatccagttttggatctttttaaaactaatgagtatgaacttgagatctgtataaataagagcatgatttgaaaaaaagcatggtataattgaaacttttttcattttgaaaagtattggttactggtgatgttgaaatatgcatactaatttttgcttaacattagatgtcatgaggaaactactgaactagcaattggttgtttaacacttctgtatgcgtcagataacaactgtgagtagcctatgaatgaaattcttttataaatattaggcataaattaaaatgtaaaactccattcatagtggattaatgcattttgctgcctttattagggtactttattttgcttttcagaagtcagcctacataacacatttttaaagtctaaactgttaaacaactctttaaaggataattatccaataaaaaaaaacctagtgctgattcacagcttattatccaattcaaaaataaattagaaaaatatatgcttacatttttcacttttgctaaaaagaaaaaaaaaggtgtttatttttaactcttggaagaggttttgtggttcccaatgtgtctgtcccaccctgatccttttcaatatatatttctttaaaccttgtgctacttagtaaaaattgattacaattgagggaagtttgatagatcctttaaaaaaaaggcagatttccattttttgtattttaactactttactaaattaatactcctccttttacagaattagaaaagttaacatttatctttaggtggtttcctgaaaagttgaatatttaagaaattgtttttaacagaagcaaaatggcttttctttggacagttttcaccatctcttgtaaaagttaattctcaccattcctgtggtacctgcgagtgttatgaccaggattccttaaacctgaactcagaccacttgcattagaaccatctggagcacttgttttaaaatgcagattcataggcagcatctcagatctacagaacaagaatctctgctaagtggacctggaatcttccatctgcatcttaacatgctctctaggtgtttcttgtgtttgagaaccatgacttatgactttcctcagaacatgagactgtaaaacaaaaacaaaaaactatgtgatgcctctattttccccaatacagtcacacatcagctcaaaatttgcaatattgtagttcatatattaccgttatatctttggaaatccgggttcagaacactttttatgacaaaaattgggtggaggggataactttcatatctggctcaacatctcaggaaaatctgtgattatttgtgtgttctaatgagtaacatctacttagttagccttagggatggaaaaacagggccacttaccaaactcaggtgattccaggatggtttggaaacttctcctgaatgcatccttaacctttattaaaaccattgtcctaagaacaatgccaacaaagcttacaacatttagtttaaacccaagaagggcactaaactcagattgactaaataaaaagtacaaagggcacatatacgtgacagaattgtacacaatcactccattggatcttttactttaaagtagtgatgaaaagtacatgttgatactgtcttagaagaaattaatatattagtgaagccacatggggtttcagttgcgaaacaggtctgtttttatgttcagtttgtacaatccacaattcattcaccagatattttgttcttaattgtgaaccaggttagcaaatgacctatcaaaaattattctataatcactactagttaggatattgatttaaaattgttctacttgaagtggtttctaagatttttatattaaaaataggtgtgatttcctaatatgatctaaaaccctaaatggttatttttcctcagaatgatttgtaaatagctactggaaatattatacagtaataggagtgggtattatgcaacatcatggagaagtgaaggcataggcttattctgacataaaattccactggccagttgaatatattctattccatgtccatactctgacaatcttattgtcaacactatataaataagcttttaaacaagtcatttttcttgatcgttgtggaaggtttggagccttagaggtatgtcagaaaaaatatgttggtattctcccttgggtagggggaaatgacctttttacaagagagtgaaatttaggtcagggaaaagaccaagggccagcattgctacttttgtgtgtgtgtgtgtgggttttgttttgtttttttggttggctggttgttttcgttgttgttaacaaaggaatgagaatatgtaatacttaaataaacatgaccacgaagaatgctgttctgatttactagagaatgttcccaatttgaatttagggtgattttaaagaacagtgagaaagggcatacatccacagattcactttgtttatgcatatgtagatacaaggatgcacatatacacattttcaaggactattttagatatctagacaatttcttctaataaagtcatttgtgaaagggtactacagcttattgacatcagtaaggtagcattcattacctgtttattctctgctgcatcttacagaagagtaaactggtgagagtatatattttatatatatatatatatatataatatgtatatatatatatattgacttgttacatgaagatgttaaaatcggtttttaaaggtgatgtaaatagtgatttccttaatgaaaaatacatattttgtattgttctaatgcaacagaaaagccttttaatctctttggttcctgtatattccatgtataagtgtaaatataatcagacaggtttaaaagttgtgcatgtatgtatacagttgcaagtctggacaaatgtatagaataaaccttttatttaagttgtgattacctgctgcatgaaaagtgcatgggggaccctgtgcatctgtgcatttggcaaaatgtcttaacaaatcagatcagatgttcatcctaacatgacagtattccatttctggacatgacgtctgtggtttaagctttgtgaaagaatgtgctttgattcgaagggtcttaaagaatttttttaatcgtcaaccacttttaaacataaagaattcacacaactactttcatgaattttttaatcccattgcaaacattattccaagagtatcccagtattagcaatactggaatataggcacattaccattcatagtaagaattctggtgtttacacaaccaaatttgatgcgatctgctcagtaatataatttgccatttttattagaaatttaatttcttcatgtgatgtcatgaaactgtacatactgcagtgtgaatttttttgttttgttttttaatcttttagtgtttacttcctgcagtgaatttgaataaatgagaaaaatgca

SEQ ID NO: 255774 - DNA, 4487 bp, Homo sapiens
cgacccggccccacgcccgcccgccacccgcgcgcgcccgtccgcccgtggcctcgcgtccgccgctgcgccgtgagcgccgctggtcggagggaagagctcgccggggcgccgggccaggacggggcggcaggcgccttcgcggaccgagcctgacggagccggaggctgggagccgcggcggcctggggaagtgtttggattgtgagctatttcagaactgttctcaggactcattattttaacatttgggagaaacacagccagaagaacactgatatttgcatttaatggggaacaaaagatgaagaaggaaaaggaatatattcactaaggattctatctgcttactgctacagacctatgtgttaaggaattcttctcctcctccttgcgtagaagttgatcagcactgtggtcagactgcatttatcttgtcattgccagaagaaatcttggacagaatgtaacagtacgtctctctctgattgcgatggaaggtgataaactgatactcctttattaaagttacatcgcactcaccacagaaaaccattctttaaagtgaatagaaaccaagcccttgtgaacacttctattgaacatgactcatggagaagagcttggctctgatgtgcaccaggattctattgttttaacttacctagaaggattactaatgcatcaggcagcagggggatcaggtactgccgttgacaaaaagtctgctgggcataatgaagaggatcagaactttaacatttctggcagtgcatttcccacctgtcaaagtaatggtccagttctcaatacacatacatatcaggggtctggcatgctgcacctcaaaaaagccagactgttgcagtcttctgaggactggaatgcagcaaagcggaagaggctgtctgattctatcatgaatttaaacgtaaagaaggaagctttgctagctggcatggttgacagtgtgcctaaaggcaaacaggatagcacattactggcctctttgcttcagtcattcagctctaggctgcagactgttgctctgtcacaacaaatcaggcagagcctcaaggagcaaggatatgccctcagtcatgattctttaaaagtggagaaggatttaaggtgctatggtgttgcatcaagtcacttaaaaactttgttgaagaaaagtaaagttaaagatcaaaagcctgatacgaatcttcctgatgtgactaaaaacctcatcagagataggtttgcagagtctcctcatcatgttggacaaagtggaacaaaggtcatgagtgaaccgttgtcatgtgctgcaagattacaggctgttgcaagcatggtggaaaaaagggctagtcctgccacctcacctaaacctagtgttgcttgtagccagttagcattacttctgtcaagcgaagcccatttgcagcagtattctcgagaacacgctttaaaaacgcaaaatgcaaatcaagcagcaagtgaaagacttgctgctatggccagattgcaagaaaatggccagaaggatgttggcagttaccagctcccaaaaggaatgtcaagccatcttaatggtcaggcaagaacatcatcaagcaaactgatggctagcaaaagtagtgctacagtgtttcaaaatccaatgggtatcattccttcttcccctaaaaatgcaggttataagaactcactggaaagaaacaatataaaacaagctgctaacaatagtttgcttttacatcttcttaaaagccagactatacctaagccaatgaatggacacagtcacagtgagagaggaagcatttttgaggaaagtagtacacctacaactattgatgaatattcagataacaatcctagttttacagatgacagcagtggtgatgaaagttcttattccaactgtgttcccatagacttgtcttgcaaacaccgaactgaaaaatcagaatctgaccaacctgtttccctggataacttcactcaatccttgctaaacacttgggatccaaaagtcccagatgtagatatcaaagaagatcaagatacctcaaagaattctaagctaaactcacaccagaaagtaacacttcttcaattgctacttggccataagaatgaagaaaatgtagaaaaaaacaccagccctcagggagtacacaatgatgtgagcaagttcaatacacaaaattatgcaaggacttctgtgatagaaagccccagtacaaatcggactactccagtgagcactccacctttacttacatcaagcaaagcagggtctcccatcaatctctctcaacactctctggtcatcaaatggaattccccaccatatgtctgcagtactcagtctgaaaagctaacaaatactgcatctaaccactcaatggaccttacaaaaagcaaagacccaccaggagagaaaccagcccaaaatgaaggtgcacagaactctgcaacgtttagtgccagtaagctgttacaaaatttagcacaatgtggaatgcagtcatccatgtcagtggaagagcagagacccagcaaacagctgttaactggaaacacagataaaccgataggtatgattgatagattaaatagccctttgctctcaaataaaacaaatgcagttgaagaaaataaagcatttagtagtcaaccaacaggtcctgaaccagggctttctggttctgaaatagaaaatctgcttgaaagacgtactgtcctccagttgctcctggggaaccccaacaaagggaagagtgaaaaaaaagagaaaactcccttaagagatgaaagtactcaggaacactcagagagagctttaagtgaacaaatactgatggtgaaaataaaatctgagccttgtgatgacttacaaattcctaacacaaatgtgcacttgagccatgatgctaagagtgccccattcttgggtatggctcctgctgtgcagagaagcgcacctgccttaccagtgtccgaagactttaaatcggagcctgtttcacctcaggatttttctttctccaagaatggtctgctaagtcgattgctaagacaaaatcaagatagttacctggcagatgattcagacaggagtcacagaaataatgaaatggcacttctagaatcaaagaatctttgcatggtccctaagaaaaggaagctttatactgagccattagaaaatccatttaaaaagatgaaaaacaacattgttgatgctgcaaacaatcacagtgccccagaagtactgtatgggtccttgcttaaccaggaagagctgaaatttagcagaaatgatcttgaatttaaatatcctgctggtcatggctcagccagcgaaagtgaacacaggagttgggccagagagagcaaaagctttaatgttctgaaacagctgcttctctcagaaaactgtgtgcgagatttgtccccgcacagaagtaactctgtggctgacagtaaaaagaaaggacacaaaaataatgtgaccaacagcaaacctgaatttagcatttcttctttaaatggactgatgtacagttccactcagcccagcagttgcatggataacaggacattttcatacccaggtgtagtaaaaactcctgtgagtcctactttccctgagcacttgggctgtgcagggtctagaccagaatctgggcttttgaatgggtgttccatgcccagtgagaaaggacccattaagtgggttatcactgatgcggagaagaatgagtatgaaaaagactctccaagattgaccaaaaccaacccaatactatattacatgcttcaaaaaggaggcaattctgttaccagtcgagaaacacaagacaaggacatttggagggaggcttcatctgctgaaagtgtctcacaggtcacagccaaagaagagttacttcctactgcagaaacgaaagcttctttctttaatttaagaagcccttacaatagccatatgggaaataatgcttctcgcccacacagcgcaaatggagaagtttatggacttctgggaagcgtgctaacgataaagaaagaatcagaataaaatgtacctgccatccagttttggatctttttaaaactaatgagtatgaacttgagatctgtataaataagagcatgatttgaaaacaaacaaaaaaaaaaaacaaacaaaaaaaaaaaaaaaaaaacacaacccgagagacctctataacaagcggcagggcagagcaaaaagaagacaaaaaacagaagcacacatgacgaaaaaaagaggttgacatacccaccaactatcgttagacacaaaggagggaaaacacaggggcgggccccccaataggagcggcagaaaaaagatcaacaaacaggcgagaaacacccagcaagaacgaaagcgggaagacagacaacaacgacagaacaaaaaacaaaacgacagcaaccaaaaacaagagagaaaacgacga

SEQ ID NO: 255775 - DNA, 512 bp, Homo sapiens
aacacaatatgagatggtttatttttatcatttaatcctcgcaaccatccctctgcagtgtgctatggtcttcatttggcagtgacgctgttctagcagaaaggttagataacttgtttaaagtcacaattagaaagtggtaggggccaggcacagtgattcacacctgtaatcctagtactttgggagtctgaagcaaaaggattgcttgaggccaggagtttgagaccagcccaagatatcacaatagtagacccaagactggaattaagattttctatttctctatgctttttttctacaaagaaatcagaaccatcaaagctaatttggataaagaaaataaattcacatactgagtaattatatgtaccaaacacaatatgagatggtttatttttatcatttaatcctcacaaccatccctctgcagtgtgctatggtcttcatttggcagtgacgctgttctagcagaaaggttagataacttgtttaaagtcacaattagaaag

SEQ ID NO: 255776 - DNA, 380 bp, Homo sapiens
aagctaaatctactgatatgtttaaaatattgcttaagcatgtcttatataaatgataaacattgtagtacataatatttattttcagaaaatacggaggctaaggcaggatgatcgcttgaggccaggagtttaaggccagcctagacaacatagtgagaccctgtttctaccaaaaaaaaaaaaagagagaattagctgggcatggtggtgcatgcctgtagtccccagccacttgaggggctgaggctggaggatcgcttggtcccaggagtttgaggttatggtgagctatgatcatgccaatgcactgtagcctggtagacagagcaagactctgtttcttaaacaaaaaacaaatacagaaactcttgagttac

SEQ ID NO: 255777 - DNA, 256 bp, Homo sapiens
accaggaggctgtgaatctccccactctgtaggaacagctgccgcttcctgggtccccattccccaacggaacgtgttccatgacatctgtgcagcatccgctgtgtgccaggcacagttctaggccccggagacaaagcgggaacagcacagacaggaacctccactcttacagtgaggagagaaagaggagtgaggcttggggaggttgggcaggacagctgcagggagagggagggcagaggacgggcgagtc

SEQ ID NO: 255778 - DNA, 379 bp, Homo sapiens
attcacctgcagatccctctaagagatggtgtcagcaataaggaggaggaagatgagaagataatagaggcccaaagtgggtcatgagtccccaaacccagccttcccaggtgtgagatttggtaggcagcaggctctgagcagttggagaagcagccagagaggctaccgcagagagggcaggacttgtcacccagccaggtgcaggtgcaggccccaggccagggaaaaggaggcaaagaagccagagaaagaagcaaaggagaacaagaaactcaggagaaagccctgaacgaggaaccaggagtgagttctggctccaacctgggcagccttgagcaggtcactgtcccttgctaagcctgtttctccatctcta

SEQ ID NO: 255779 - DNA, 651 bp, Homo sapiens
agaaaacaaatttgagcagaaaacggaaatgactttttttttcgttttctgtgaatcagctgttgcgaattttaaaaatcatttaaaattatttaaacaattgatttttacacgtggggagtatttgttaattaatgtcatatgatccatgatttcctatgcaccagaatatagtattattcagatattttattttggtttctgtattttcataatttatgtcagttctgaaatgcttaaaaacatactttttcaataataatatcaaaaaactctcaatgaataacacacatatataaggtggcaattttttaaaattatctatttgcacttactacaccaaataagacaaatcacaatattatataattatatacatgggtttattattatcacagtagtaagattaaagtatacagcacagtaaaatgattatcatgacttctataatccttaggcataacaagcctttttatcatttttaagcataataaggcctttaaactctatttatttatacacatttgcaggtgtgtgtaaataaataatttcctacagaaaaacaatgtaatccttgaggtaaagatttcagatgcaattgttgcactctagatgtttccctttacacctatttcaaaattgtattggtca

SEQ ID NO: 255780 - DNA, 451 bp, Homo sapiens
cagatagaaaatgcagttgaaagatatttcataaaggaagaaaagaagtatgaatacaggtgagagatattactgagattttttttcagtgcaatcctgggcttttctgactagcaatatttttatgtgcagaagtagtagaaaagataaatattttgtacagtagaaaaacacattatttctgtgccatggaagagagaactcacaaagatgacagcttctggctatgttggatactaaccagtactgtaagtacccaacgatctgactttaacactggctgtaaagctcctttaatgttccttgcaaggatttgaacctatttactggaaccctcatcgcttattgagttgaaaaacattgttgatatgtgtttatcttatatttgcagtagagtcataattttactttttagaaaattatatattaaacaaaaaaagacacatgaaat

SEQ ID NO: 255781 - DNA, 157 bp, Homo sapiens
ccagtcctcattttcagcctgtgaagccgcagccactgtggtgacccgggcagttagaaattgtgctttctcttcgtttctaaggaaatcagcttcctgaagctaaacagtgattagaacagtcctgtttcatggttgcctttgagagccatatgac

SEQ ID NO: 255782 - DNA, 423 bp, Homo sapiens
cattcatgtctgtgatccattctgagttaatttttgtgaagggtgtcaggtctgtgtctagcttcattttctgttgtagatgtccagttgtcccagcaccatttgttgaaaagattatctttgcatcattgttttgcctttggccttttgccaagggtcagttgactatatttatgtggatctatttctgggctctttattctctatattctttataatcaagtataataagttttgaagttgggtagtgtccatcctatggatctttggctcctcaagttttaagagtgttatcttagaccaggtgctgtggctcatacctatagtaatcccattgctttgggaggctgagctgaaaggattgcttgtggccaggagttcaagaccaggctgggcaacatagtgagactctgtctctaaaaa

SEQ ID NO: 255783 - DNA, 488 bp, Homo sapiens
aagattggtgtatctcaagtgagtccttttggtgggtgaatttgttggaggatttgtggtcacccgtgattaggtcagaactctgaatgtttgccaaaaagtctccctctgactactttggctgagtgggatttggttcccagggaaaattccaaagcctctctgtaaattccaagttacaactgagcaaaatgggtaactcattgaaggtcccatctgattcatcactggctttagcagtagaaaaatacgagatgcctagaatattgtcagtaggtctcttttttaaaaataaaaggcttcttttattctctcacatttggcataagcatacttataaaaatcctgctttgcaacggtcaaaagaaggctcatttgaagtagacaaattgatgtatttacaggaattctcagaaaaaccccactcaaagggattattggtatctctggatctcaggaaataaaagaaggaatgaagtgggcagcca

SEQ ID NO: 255784 - DNA, 93 bp, Homo sapiens
tcttagggtctgtgtgactagttataaaactattttctcttttaatcttccatttcctctgctataaaacagagataatactactactgacct

SEQ ID NO: 255785 - DNA, 208 bp, Homo sapiens
acaagaccaaagggctgaggagccaggctatagcttaaagaggctgggggagaaaagcttggctgagacaacccatagggagctagaggtttttaatatatcctattctgaataagagacgaattcattcagatcagtggtttcaaaccgtgctctgggcaactcaattgctaagggttccacaaacaggataaagtttcttatatac

SEQ ID NO: 255786 - DNA, 207 bp, Homo sapiens
tggccagggccagccacaatctggagctccagtgtcctggcttccttcttgggcccaccagctagactttccagcttaacccacagtgtctcatcctggtccatcccactagtcaccactctctgttcctctcacttaccccttgctcttcaaagcccatacagtaggtatacaagtggacaaaaaaagttgctcatttatgcaatc

SEQ ID NO: 255787 - DNA, 506 bp, Homo sapiens
actccctccacccctccacctgcctccagccagaattgcacagccagctacttccagaatcgctggtccaaagaaatcacgacaggcgctaagtttggggcaatccatttaatgctactaagttgtgggatggtttgtttgagcagccccagataacaaacattccttgaggtcacacgctaaccaagctgtgattcgaacactgcctctcaaattcacgagcaaaagagggggaattctgtttgaaatgccaaaaagaactctttcttgcttttattatttttaatttatgtataataattgtatgtttatataataattgtaataatttacgggatacaggtgatatttcaatatatgtatgcaatgtgtaatgatcacatcagggtgattagcggattcatttcctcagttatcatttctttgtgttgggaacattcaaaatctgctcttctacctatttgaatatagaaaataaattgttttgttttgtttttgaaaaagag

SEQ ID NO: 255788 - DNA, 749 bp, Homo sapiens
ggctcacacctgtaatcccattactttgggaggccgaggcaggaggatcacttgaggtcagcagttcacaaccagcctggccaacatggtgaaaccccatctctactaaaaatacaaaaaattgaggtgggtatggtggcacatgcctgtaatctcagttacttgggaggctgaggcatgagaatcacttgaacccaggaggcagaggttgcaatgagctgagattgctccactgcactccagcctgggtgatggagtcagactctgtctcaaaaaatataataacaataataataataataaaagaggaaccaactgtgaatctatataggacagtataaggaaaagagaaaggtacaaggaaaaacaagtgttagagaatattcgcccaaaaaaaatgttgccatggagcaaataaaattagtgctatttcagatttaaaacctttaaaatgagaaagcagagattttacgaattcagggaagatagagtaagatattataagaagatcaaatgggagctatcagagttcaggtaggaaattgaaaagaaaaaataaagctattggaaattatggtgacattattaatagaaacaccacaaagaacactaaatacttctgtaaggacattaaggatggagataagtgagcaaaaggaagtagaaaggaacaaataatttttaaaatattaggcagaaaaattattgatgcagaggaaaaataaaatatgtggagttgccagaaaaaa

SEQ ID NO: 255789 - DNA, 592 bp, Homo sapiens
ccgctaagtgggactcgggccagcctgccatgaaggaggtagctgctgcagctttcaggaaggaacaccaggtgtcaaccccaccgggtggccaaccccacctggctaggacccagtccctggtggctgctctcccaagaggcgggcagggctggggctaggggctgtccaggagtgttctggactgtcccttcgccacaattcccacaggctgctcaggaccgaggctgagacgggcgaccaggacgggattgtatggctgcaggaggctacacagtcccaggaggctgcttctaagaggcccacgtggcctgcatggggatgcgcctggctgtccagcatgtggtcatttgaattgtacatgtttcactgggatgcctacagaaaagtagacagaagatgtggaaaaagtttttgaaatgttgcaaacttagctacttttaaaataaaaaaaatagctttataattataaaagcaatatgtaaatcttaaaataatttgctacattctagtaagcatcttatgatctctatgtgccctataacattatgttgtatagtttaaatatatacaataaaatctattttaaaaa

SEQ ID NO: 255790 - DNA, 464 bp, Homo sapiens
acttccatggacccttagccatgccaaggggcagtaccggctttctgctggtgctgatgagctgtggtgtgaactcacgaaggctgctcaggaccgaggctgagacgggcgaccaggacgggattgtatggctgcaggaggctacacagtcccaggaggctgcttctaagaggcccacgtggcctgcatggggatgcgcctggctgtccagcatgtggtcatttgaattgtacatgtttcactgggatgcctacagaaaagtagacagaagatgtggaaaaagtttttgaaatgttgcaaacttagctacttttaaaataaaaaaaatagctttataattataaaagcaatatgtaaatcttaaaataatttgctacattctagtaagcatcttatgatctctatgtgccctataacattatgttgtatagtttaaatatatacaataaaatctattttaaaaa

SEQ ID NO: 255791 - DNA, 453 bp, Homo sapiens
ccgctaagtgggactcgggccagcctgccatgaaggaggtagctgctgcagctttcaggaaggaacaccaggctgctcaggaccgaggctgagacgggcgaccaggacgggattgtatggctgcaggaggctacacagtcccaggaggctgcttctaagaggcccacgtggcctgcatggggatgcgcctggctgtccagcatgtggtcatttgaattgtacatgtttcactgggatgcctacagaaaagtagacagaagatgtggaaaaagtttttgaaatgttgcaaacttagctacttttaaaataaaaaaaatagctttataattataaaagcaatatgtaaatcttaaaataatttgctacattctagtaagcatcttatgatctctatgtgccctataacattatgttgtatagtttaaatatatacaataaaatctattttaaaaa

SEQ ID NO: 255792 - DNA, 634 bp, Homo sapiens
catcattccaaaacaaatgtctagttgatctaatagacaaaataagccataaatattaacatatacaacatttaatgcaaaaagattagaataccccaaattttcctaattccaagaacattttattattgataatataatgcctacatgcatttatcattttgtattttaacgcaactttgaaagggaaatctattacttaaactatcttgagagtggtgtaattcttaattttgaaggaaaaaagccataaaaaccagttttgttgaaatatctgtgtttaattaataaataattaaccataactgaaatatttccacatccccattgcctgaaacagcacctagcatgtggcaggtactcaataaacatttgttgaatgaataatcaataataatggaagaagaaaatgttaagtgatgccataggcatttatacctagtggtatagacaagcatcattcttggaggcagtcagtgtacctctgagctgaagataaaataaggaatagccttaattctgcttatgggaagcagaaatccacaagggaagggagtcttgaagacacagccttcctgtaagcaattggctatacaaggctcttggcccattcatggctggaagctctccttaa

SEQ ID NO: 255793 - DNA, 498 bp, Homo sapiens
cttcaacatgaaatgaatttaggagcgactttagttgtctgaaacagagaggggagcattgtcaggtaggatattccttagactgggaagtgtggaaatagagaatgacttgcgaaagtcctgagacaagatccatccatgtccactgttcagtataacctatgtaattattagatggctattatactcaggaagagccaaaaatctctctacaaatttctactgttcctagttctgccctctggagcaattcatagttcgtctcttgctttttgtacatgaagcttttcaaacaactgcaggcatttattacactagccctcctcctattctcccaaattttttcttcctgacttgcagatgtttgctaactcctgaaaatatggcattcagaacttacatttggcacataaaacaccattatagttcttgagggcacaatcatgcgttgtttggctttgtaccccagcacccagcaaaacacatgaccaacacatt

SEQ ID NO: 255794 - DNA, 453 bp, Homo sapiens
tcaagatgagtgcccttttgtgctttgcaccccataggtggttattaaatacatgttgattggttggttggctgtttgtctggttagaagtggagagtcagagctaggtggaaatagcacttgcaaccattgcagctgctgttggaatgacacaggcaagagatcacttttgggccaggcgcggtggctcatgcctgcaattccagcactttgggaggccgaggtgggcagatcacaatgtcgggagttcgagaccagcctgcccaatatggtgaaaccccgtctctactaaaaatacaaaaattagccaggtgtggtggcaggcgcctctagtcccagctactcaggaggctgaggcaggagaattgcttgaacccgggaggcagaggttgcagtgagccgagatcgcgccactgcactccagcctgggcgacagcgggagacttcgtctca

SEQ ID NO: 255795 - DNA, 732 bp, Homo sapiens
tggagagaactcgtctcgactttttttttttggattcttttctctgacttgagaaaaataattttaagaatgcatactaatttagttttgaaataattaactgttttaagaaatagaataatctgagtaaagaatcaaagtccttaacatttttcaattgaattattaataaagattatattaatgtacagtattttacccatgcaggtaaaagttgcattagctttctttgctgcatttaggctattgcaaatttagtagcaagataaatgtaagataacatttgttatgttacagtatctgtggatcagaagtctggacccagcttagatgggttttctccttcacgatctctccataatgaactcacagtgccagctgggatgagttttcatgtggaggtcagagtagggaaggacctatttccaagctaacttaggttattagtagaattcagttccttgctcgtgtaggacctaggccctctgatcctgaagactgcctgaagtttcttgctacatgaacctctcaataggtagttcatactatggttgttgcctcttcaaggccaacaggagaagaagactatttagtgagaaggccttacataatataagacaaccatggtagtaacatccatcacttttgccacataatgttgcttataaggattcagaaattctgcctactctaaaaaggaagaaattttataaaggcatgagtataaagagg

SEQ ID NO: 255796 - DNA, 347 bp, Homo sapiens
ctccattcctctctagttttaaatgaaattatggaagaaagaggaggaagaaagaaatagaggaaaaagagggaggagacttgcaattaaatttttataatttaaaaaatgtgtaattgcatctgatggcatactcattaagacgagattcaaagtagagaaggggaaaatagtgacagcaaagctgagacaagcgaggcctgtatcatccaagttccccagcttaatggtccaccctgtcagagcagtcagatgagctgaagaaatgccggtgctgccgacaccataaaaaccatgcgccctctttattcgattatctccctgtggctagagccactgagaattac

SEQ ID NO: 255797 - DNA, 898 bp, Homo sapiens
ctaaaatatagacaaatctatattgcatgaccaagaagaaacagagggtgctattgtagttgctctatttattcacaacatgtgaaatattatgtaataccgtatataaaactatctctagtaagtggtaggtactaggataacaaaataaataaaacccagacagatcctatatttataaacttatagtctagagagaaaaatacagttaaataagtaatgctagtacagtattgataggtgcatttaaagaggcatgtacaatgagccctgttggaattcagagaatgaatgaaccacgtggaggctttagggaaggcctctcagaggaagcagcatctgagctggatcttggaaaagttcagttccatcagaaaaaggaaaacttgctcaaccattcagacaacggacacaaaagcattttggagtgacattcagtatgccttgttctatgaatggtgtaaagagtattattattgacttgtggatttttatatagtaagtgcataccaatcagttacggcgattgttttcttttagacactcaaattgtcccatctttggccaatgagatccacttcaagttggttccagggtccttttgacataactcacttagatttttagagcttacatgctgtgttttgtggcacaatgagatgcctcaagctcaccttgtaaattctccacactatacctaggagcaaccattatttcaagaatccctggtatccgcagtgggaaacagcatttagagaccaacatttgggcagtggggttggttattatccctggagcattatggtctaggttctgcagacaaaggtaggatatatacatatgtatacacattatatgtatattctatacatataaataaagttacatagtttccatt

SEQ ID NO: 255798 - DNA, 194 bp, Homo sapiens
cctggagtagctgcgggtgggatgcgatgtaccacatttgtgttcatgaggggcctggatgccgtacgggcggacgcagagtctcagaggagactgcactggaagctgacagcacggtccttagagtcaaatttcgtctgtccatttgctcagtagccctgggtcttgactcacaggtggaatgggagtgcaaa

SEQ ID NO: 255799 - DNA, 279 bp, Homo sapiens
cccatggatacaccagccacccccatcccctgcaacactgtccactcaaagatcccttttccatttgcatcttttgagagagtgatacttgccctttgcctggtgatatggtttggctgtgtcccacccaaatctcaccttgaattgtaataatccccacgtgtcaagggtgggggcaggtggagataattgaatcatgggggtggtctccctcatactgttctcctggcagtgaataagtctcacgagatctgatggttttataaagggtagttcccc

SEQ ID NO: 255800 - DNA, 476 bp, Homo sapiens
tatttctctactaacatataatctaattcacttttataaatattatattggttaccataagttttacaataagaattgtatataattagattctataagaattgtatataattggattctaatgcagatactgtgatggccttgatatgaagaacagagacagtgtaactgtgtgctttgaattcctccttctcactgctctttcttgtttattcccagtttgcacttacatatactataaaacataatatataaattttttattcctttcatagttatataatatagcaattacaaagataaaaactgcacttcatcttgattttcccattttgtacagtcttaatttcttcgtatagatttatgttttgaatgtatatcacacggctactagcagagaaagtttgttaaaatgtgcactgaagcatgaatgtgctgacaataaattgtctcaagatctttttgtaatgacagaa

SEQ ID NO: 255801 - DNA, 223 bp, Homo sapiens
ttaagataggaaaaggaaaaaaatctatcattaaatggaggaagtactacatataaaataggaaagcatgcctgcaaggaaacaaactagattcagtgattcccaaactctgatctcagggccctttcacactctaaaaattgatgacctcaaagagtttttgtttatgggagggtagagctagtgatatttaccattttaggagtgaaaatgagaacaactt

SEQ ID NO: 255802 - DNA, 472 bp, Homo sapiens
tagtagagatggggtttcaccgtattggctaggctgctctcgaactcctgacctcatgatccgcccaccttggcctcccaaagtgctgggattacaggcgtcagccaccgcgcctggccaagactggacactctctaaccaataaaaggctctaggtccaaatatccccagaaacttacatctctgaggggctgtcatggtcagaacattggaattgagctagcactttatatgcagcatctcattaatcctgatgctgcccttggaagtagtgataattactgtcccacttttcagatgaggaactgaggcttataagggttaaatcacttacccaggagtcctcagctggtaaacagcagagccaggacttgaaccagcggcttcggctgctgagcccaaagcaccaggagcatcctgctgtgctgagccctgcatgggcctcaccctcgcctctcagctgggccctgcc

SEQ ID NO: 255803 - DNA, 427 bp, Homo sapiens
gtccagcaagttctttagtattgttccaatgaagtttcaagattctttcctttttgaatatttcaccagaacattaacttctagtgaaaaactcaagcattttgttttttctattcttacgcttgcaaatattgtttatatttgaggcacagcatcttgatcaggcaccgtacatctttttcagatccatttctatctttttaatccagttcctttatccaatagcctgagaggtttcctgtcagtcagtgccttaacacccaggtgactcaggttccatctcagaccaataaaaaccacaacatgtgggagctccagtgtgaggtttgggaccattccatataaattatttttccaccagttttgtgaaatcagagtggcttggacaaatggatataagccaatcaaaataaacacgatataaact

SEQ ID NO: 255804 - DNA, 410 bp, Homo sapiens
caggagatgaaatggcagattagaaatatctggtgaatatgtacctggaatatgagagagagagaaagagatacagttcggaattttaaaataaaaaatttaattattatttcaagaatattactaatttgactgttataattgggactattcttatcgtatgaagttgaggaatactgagaagttctgcttctgtcaaactcatgattagcatcacacacctctttgtggttgttgtagcctcctttttcattttgccattgtttcagattgacgttgcaatatccagttcgctaaatatgttcaatagaggtagcaaaggtgcctaacctgaatttaatcatgaggaaacaccagacaacctgacgtttagggacattctacaaaacaactggcctgtactcctcaga

SEQ ID NO: 255805 - DNA, 834 bp, Homo sapiens
tagtgccacctgcctccccagtggcccaggaacctcctgactgtcctctccctctggttaccgttccctccttcacaagcaccgcttccacctccccggaccccgtgcccgagtcccccgccgtgctgtgctacttccccatctcctgccccactccggctgagacccctgtgctgtgccttcagggccccagaaggcccagtaggatttacctcatgtggtaagtcactcttgcaaggcacacagcacagcgcagtcggggagaggggacttcgggcttccggaaggcaggtggacaggagaggggccagaggccacaccaagaacaataccaggcggcgtggtgttcgggggagcaggaagatgggacagcgtggccactgcactggggctgcaccttctagcgccaaaggagcgagcgaccaataaaatcccatcctctctggaaaaaaaaaaaaacaaaaaaacaaaaaaaaaaaaaaaaagaacacaaaaaaagcgacaaaacgacgaaaaaaagacgaggagaggaacgagagaaaagaaaaagagcagagaacgacaatgagtaagggagcacaaggacgacagagaagggagaagacaagagaagaagagagccggaggcagaagcgagagaaagaagaagggaagagaaagatgaaagcaagagagggagagaggaaagaagagcgagcggggaggagagaagaaaagaaaaacagagacgagagataggaaggggagagaacaggagaagacgggagcgcgaggcgagacaggcgaccgcgagcaaggaaggaagagaaaaggcagaaagacggagagcagcgc

SEQ ID NO: 255806 - DNA, 1111 bp, Homo sapiens
caccaagtagtattagttcattgatatttgacattgtgccaatgtcttgaatagcggtgtgtaactgatcactaatttttttagactaagtaattgaattggaaatttattacgtctgtcttcctacctttgggtatctctctttacctccttctcaccaaatcttgagccaggatgttctgaaacactatgtataattaaagtctcttgatccaatatcagaaattcatccacaccattcccatcattgctgccaaatgagctttttgaaatggaaagccaactattcgccttcagaatgtcacagaacaaagtctaggttcttgggtgtggcatataagccctcaggcataaaagagcctgcattatttccttccagcctgcaattctaacttcacttcttttttttacaggtacactgacaggctgtcaaagaatgacatacagttctccaaaagtgactatcttgtttgtttatttctttccatttgactttactccatcctttctgctctaactgctgtggtttcttcatttcacttattcatcatcctgaaaggtttaattttgtgcatcccctcctctgcgaaactttcattcagaccctcaaatagggtgaatttactttgtattctttattgtgacaattattgcattatcttataaatgatatatttttatatcccatgcagtaagaaatacactggtcttctgtaaatttcaaaaatttgttatttgaatcacttataatagtgcctagaacatagtctggtcttaattaatattgttgaatgaataaataaatgaatgctattcaaagcaatcgggatagagttctaatttacatttatttgttattttaaatgataatcactactacattaagtacgtattttgtgtgaagcattatacacatattatttcatttatttaaaaaaaccccaagatattgttgttcctattttacagatgaggaactaagactgaaataaacaacatttccatgtctaaaagacaatctaaaagattgttaagttgtaggttttgaacaacatctgctatactctttagttgcaattctaaaccatatgctcacatgtgaactatgcat

SEQ ID NO: 255807 - DNA, 932 bp, Homo sapiens
  misc_feature (911)..(911): n is a, c, g, or t
  misc_feature (919)..(919): n is a, c, g, or t
  misc_feature (921)..(925): n is a, c, g, or t
  misc_feature (929)..(932): n is a, c, g, or t
gaaagcctgccagcacctattccacctcccagcccagcatggcacccctgctgcccatccggaccttgcccttgatcctgattctgctggctctgctgtccccaggggctgcagacttcaacatctcaagcctctctggtctgctgtccccggcgctaacggagagcctgctggttgccttgcccccctgtcacctcacaggaggcaatgccacactgatggtccggagagccaatgacagcaaagtggtgacgtccagctttgtggtgcctccgtgccgtgggcgcagggaactggtgagtgtggtggacagtggtgctggcttcacagtcactcggctcagtgcataccaggtgacaaacctcgtgccaggaaccaaattctacatttcctacctagtgaagaaggggacagccactgagtccagcagagagatcccaatgtccacactccctcgaaggaacatggaatccattgggctgggtatggcccgcacagggggcatggtggtcatcacggtgctgctctctgtcgccatgttcctgctggtgctgggcttcatcattgccctggcactgggctcccgcaagtaaggaggtctgcccggagcagcagcttctccaggaagcccagggcaccatccagctccccagcccacctgctcccaggccccaggcctgtggctcccttggtgccctcgcctcctcctcctgccctcctctcccctagagccctctcctccctctgtccctctccttgcccccagtgcctcaccttccaacactccattattcctctcaccccactcctgtcagagttgactttcctcccattttaccactttaaacacccccataacaattcccccatccttcagtgaactaagtccctataataaaggctgaggctgntctgccanannnnnttcnnnn

SEQ ID NO: 255808 - DNA, 976 bp, Homo sapiens
  misc_feature (955)..(955): n is a, c, g, or t
  misc_feature (963)..(963): n is a, c, g, or t
  misc_feature (965)..(969): n is a, c, g, or t
  misc_feature (973)..(976): n is a, c, g, or t
tcaaactggatctccctcctcgcgcctctgctggcctggcatgactttcgccttgcccccagcccacccctcacctcacgcggattggggggtcctcacgccaggccggagctggacgccatgaccagcattttccagcctcaggtctcaaggatagaggtgccaccacttcccaatggaccaacatttgacttcaacatctcaagcctctctggtctgctgtccccggcgctaacggagagcctgctggttgccttgcccccctgtcacctcacaggaggcaatgccacactgatggtccggagagccaatgacagcaaagtggtgacgtccagctttgtggtgcctccgtgccgtgggcgcagggaactggtgagtgtggtggacagtggtgctggcttcacagtcactcggctcagtgcataccagcatttcctacctagtgaagaaggggacagccactgagtccagcagagagatcccaatgtccacactccctcgaaggaacatggaatccattgggctgggtatggcccgcacagggggcatggtggtcatcacggtgctgctctctgtcgccatgttcctgctggtgctgggcttcatcattgccctggcactgggctcccgcaagtaaggaggtctgcccggagcagcagcttctccaggaagcccagggcaccatccagctccccagcccacctgctcccaggccccaggcctgtggctcccttggtgccctcgcctcctcctcctgccctcctctcccctagagccctctcctccctctgtccctctccttgcccccagtgcctcaccttccaacactccattattcctctcaccccactcctgtcagagttgactttcctcccattttaccactttaaacacccccataacaattcccccatccttcagtgaactaagtccctataataaaggctgaggctgntctgccanannnnnttcnnnn

SEQ ID NO: 255809 - DNA, 490 bp, Homo sapiens
ataaagtgttggaacaattggaactctcagacagaaaacaggttgatagtctcctatagagttaaacatgtacctaccatatgacccacccattacactcctagatgtacacccaagggaagtagagggatatatatgaaagttcatacataaatgtccatagtagcatcatttctaatagacaaaagttagaatcaactcaaatgcacatcaacagatgaatggataaacaaattagatagttagaaggaataagatctaatgctcagtagcacaatagggtgactacatttaacaataatttattgtatatttcaaattactagaagagtgaaattggaatgttcctaacgtaaagaaataataaatgcctgatgtgacggatatcccagttaccctgatttgatattacacattgtatgcttgtatcaaaacttcacaagtaccccacaaatatgtacaactattaggtatccataaaaaataaaaa

SEQ ID NO: 255810 - DNA, 507 bp, Homo sapiens
ccattaagattcatggtaacatttacatgtcaagggcagtttggagaatatttattggttggtttgctgtgaaatttgcgtgtggtttatacatttgtcttcaaaccggccagactttccagggtcttcccaaggtcagacacagaagtgcaattgctcatcacaggataaatgtgcattacagatgttgaggagatgaaaacattccttttcccgacataagctgtttgtggttctctttgtccctttctctaggcaagtttatttttcctgactgccattactaactaaactctgtctgcctcacttacaagctcctgggagggaaccgagtcttgggaggtaaaattgatgatggactgttttccagaccagggcttgaagacacaacgcttgttggcagttaaccaacttcctggtgagccccatataggaaatccacattcagcttcttagggagagatcctgactttcttataatgaataaatgtatgacactaaacactt

SEQ ID NO: 255811 - DNA, 654 bp, Homo sapiens
tgagccaagatcacatcactgcaatccagcctgggcaacaagagcgaaactccgtctcaaatatatatatatatatatatatggggagccaatgagtagtggagaaaggaagaggtgggagataaagtgggaaaggttagtgaagaccaggtcaagaagagccttgttagaccttgaagagtttgcactgccttagttttcaactttgttttgtaccagctatgattgggaacatgtcatgaatgcaggtgcccaatatcatcccagacctgcagaataatactctctgggattggggctggatctctacaacaagttccctaggaaattaccaaaaaccaagggaaactattttagaatctggggagacactggccgggcatggtggctcacgcctataatcccagtactttgggaggccgaggcgggaggatcacgaggtcaggagattgagaccatcctggctaacacagtgaaaccctgtctctactaaaaatgcaaaaaattagccaggcttgatggcgggtgcctatagtcccagctactcgggagactgaggcaggagaatggcatgaacccgggaggcggagcttgcagtgagccgagatcatgccactgcactgcagcctgggcaacagagcgacactctgtctc

SEQ ID NO: 255812 - DNA, 312 bp, Homo sapiens
tcccacgccccatccccaacccctgacagccattcatctcttcactaattctataattttgccattttaagaaagggatataaatggactcctagaatagtgagcctttggggactggctctttcactctgcatgagtctctggaggctcatccaggttgtggcgtgtgtctctggttggttccttcttattgccgagtagtattccacagtgtggctgtgccctgccacattttgtctaattgttcacccagcaaagcgtctgtggagtatttcctggttttggctgttatgaataaagggctgttacaaa

SEQ ID NO: 255813 - DNA, 525 bp, Homo sapiens
cactagagcatagagaagcaaagatacttgccaaagtcatgtagcaaaaacttgtcaaagctaggattcaaactcagatcctagtccttccccaccaggcaaggctgaattactctacagagagagagtgagtgcgtgcgagagacagagagggagagagaaaattctttcctagctctgccttatttctctggctctgatgataggaaagcagtggccacattgtcataagctccagtcactctccaagatggcagaacattccaacactggttaatggctctgggatcatcccatattgagggacatccatccctttgtgttctgacattgatgttactgtcagttgacagtgagctttatcatcaatcccttcaagtacaaaaggccactgttcagaaactgttattaaaagcagcctctctttttaaaagccgtctctcttttattccttccataataggagccagtgtaccagaagaggctgaccttaagttgcgcctgtttagttaaacaaacaacaaa

SEQ ID NO: 255814 - DNA, 343 bp, Homo sapiens
caccatcagtctgaacatttcggccctattctgtttatgttgaagtaatgtgagatgtagagaaatctctaggatggaaaagtacatttatttcatatcgcagaacaccagagagatgttgttcaagatttgctttgtagatttgcaactttttagacaaatcttatattttatgttcaaataattatgatttaagttaaaaagtgtaaagagagagtggaaatggtttatgtttagtggcagagggatgaaatccaggttccatgtctactagatttttttttccactataccatagcagtttgaaaataagtcgtctttgcaaatagttattctaattaaa

SEQ ID NO: 255815 - DNA, 389 bp, Homo sapiens
gactcctgtattcagttcgtcccatatgacagcttcccctaacccaagaaatgaaagcttgggacaaagcagcaccagcctgatggcacggaatagcaggtgcggcctcgaagaaaaacaaacttcacatgattcatgttcaaggtgaattttgtgcaacttgtggaggggaaaaaataaaacccagcaagatgtggcagtgattgagcaaataagctccaaatgagtcacaggctccacaggactcagtcctccacaaggctttctgagagacctggtgaagcaggtgtcagagcggcctcctcccgcctgccttctgcagctccacaagtagaggcgtgggcgctgctcacagaggcttggacgccttctccgagtgcgtctccttc

SEQ ID NO: 255816 - DNA, 541 bp, Homo sapiens
aaaagccatatatgaaaaacccactgctaacattataatcttttggataaagcttaaaacttttcctctaagattatgaacaaggaaaagatgctcactccctctgctgctattcagtattctactggaagtcccagtgtgttagtttgtttttgcattgttataaagaaatacctgagattgggtaatttataaagagaagtttaatttgcccatgtttctgcaggctgtacaagcatggcttcagcatcttctagtgagggcctcagggagctcataatcatggcagaaggcaaagggagagctggcagtgccacatggcaagaaagggagcaagagagagagagaagggagaggccccagactcttttaaacagccagatctcatgtgaactacttgagaaagaactcacttatcacaaggggatggtgctaaatcattcatgaaggatatgcccccatgacccaattacttctcaccaagccacacctccaacattgggaatcacatttcaacatgagatttggaggggacaaacat

SEQ ID NO: 255817 - DNA, 864 bp, Homo sapiens
aaaaacagacaagagttcattaaatctcccagaagttgattcagatgttgctaagcccaaccaggcatgtatttccacggtgacagcagaagatctcttaaggagcagcatttcttttccttcagggaaaaaaataggggtcctctctcttgaaagtcttcatgcatccacaaggtcatctgctagacaagcacttggtataactattgttcggcagcctggtcgaagaggaactggtgacttacagctagagccttttctgtactttattgtgtcccagccttccttgcttctgagttgtcaccacagaaagcagcgagtggaagtatccatttttgatgctgtgcttaaaggggtggcctctgattacaaatgtataggtaagaaccttcaaacttactggagtgctaataattactatctaataagttgtattcccatagtttccagattgattaaacagaaacagctggcagacaaaagtcttttctctacagaatatggaaagttcatgttccacagctgaatcctgtttaagtaaatgtttgaaatgtattgaggtttagcttagtattcttactatgcctctgaatattcattctttttccaggaactgaatgaatcaggaactctttcttgactatagagatgcttaacagtttccagtgtttggaaagcatagctcgttttcatattaatggcccataggtatgctttccatgttaatgcttctattcagattaaaaaagaaaagccttagaagatgaagtttgtttttggtattcttttgatgtaatcatcttcatgcaatagcatcgtattaaatgtaattgagaaggtttattaataaagattatttaaaga

SEQ ID NO: 255818 - DNA, 482 bp, Homo sapiens
aaaaacagacaagagttcattaaatctcccagaagttgattcagatgttgctaagcccaaccaggcatgtatttccacggtgacagcagaagatctcttaaggagcagcatttcttttccttcagggaaaaaaataggggtcctctctcttgaaagtcttcatgcatccacaaggtcatctgctagacaagcacttggtataactattgttcggcagcctggtcgaagaggaactggtgacttacagctagagccttttctgtactttattgtgtcccagccttccttgcttctgagttgtcaccacagaaagcagcgagtggaagtatccatttttgatgctgtgcttaaaggggtggcctctgattacaaatgtatagatcctgggaagactctgcctgaagcccttgattattgcactgtttggctacagacagtgcctggagaaatagacagcaaaagtggtattccaccttccttta

SEQ ID NO: 255819 - DNA, 243 bp, Homo sapiens
tgggggagagatacagggaggaggaaggaatgttccaagaaggagaaacagcacagtaaaggcctggaggcgtaagagtgcacagggtatgggaggctaagaatgctgaacagatgtgagggcccataagaggcacagacaaaggaatgcgaagagaaatcattttcagctgaagaatgaggaaagcttcttggagaaagtagcttttgctgggctggaagcttgagcaagactttgaccttc

SEQ ID NO: 255820 - DNA, 475 bp, Homo sapiens
gaattctgttttataatagccatcaggcttggcccaatattttacctgttaccattgttgttcatatttccttatagttcatttcatcatcctgtattttatttatctttgtaagccatttaaccacttaggccttttttgaaacaaggcttaagtaagtttaaaatcagtaaatacaaaggacaccatcaagaaagtgaaccaacattccaaaaacaagagaaaatttttataaattacctatctgataatggactgggactcgtatctagaatatataaagaattcttatagtttaatcatataatacaattaaaaaatgaataaaggatctgaataggcatttctccagagatgatatacaaatggccagtaagcacatatgaatagatgcccaataccattagccatcaaggaaatgcaaatcaaaaccacaatgagataccacttcacaccaactaaaatggctataacc

SEQ ID NO: 255821 - DNA, 612 bp, Homo sapiens
ttggtgttggatagagctagtttcaggaacagtgaggcaggctaaagcctctttcctcaccaaatggcatgctgggagaaaatgaaacaatggtggagatattgtagaactgggaaaactggcacttttcagaagttaaaatatataattaaaattagcagattctcaaaatcagttttgaactcttactgcttatcagcatgtggtaattcagttggcctcttcaaactccagctggagttcaagcttcccaggtcacacacgctgccttcggtgaggtccatgatttatgtctgtgtaacctctagggcctactgcagagccattgggtctctggaaaggaaatataaatataccccctgcccctgtgacatacacataccaccccaaaaccttttatctgtgagcttcaaacatttgtgttgacacctgttaggccagctgtaatatctttacaataatgtcttcactaataaaagacaaaattgaacacaaactcagatgttttacctttgttttgctatattattatttatgtctattcttttatttattaaatatgttttgaacatcatatacatgctgttctcccttcttggaaaaagagtaggg

SEQ ID NO: 255822 - DNA, 930 bp, Homo sapiens
gttttctccaagcacccctgtggtctaccctgccgggtaagcattccctctggcacatgtccagccaggacagcactagccttcccccttcctggaagcctcctgtttgctgccggggtttcccctccctgctgcacacccttgtgagaactcggcagtctcttctgaaggacattgatgctgtgccacaatgtcatatgctggctgcttcatgcctggttctgcttgaacctcatctccacgcaaaccccagcctgggccacaggatggagcccagcgctcgccttcctggtgcttccggagctcatcacttactccgtgatgtttgttggtgtctgtgtgtcccacccttgaggatgccagctcctagcaggcaggggcttccgaattctgttcctgactgtgaccccggcactcagagcagtgcccggcacacagcgggtgctcaggaaacttgctgagtaagagagtgggtacatgaatgaatgaagaggactttctgggcagtccatctggccctttgtccttgtctttggccctcactggcgagctaggccctgcactgcctgaaagctcatccgagggctcgcctcctccctgaagccctctcacactccccaccttccaggccacctttctctgaattctccagtcacttgctttcctcatgctgactgcacactggcccgcatgaccttgaactgtgggagtctgtggtcctgtcttcctgaccagacatcagctccttgaggggcaggacactgctgcaccttttgtgtcccgagcacagggccctgtaaacagcagatgttcagtgtgtgctgatgacgctgatgcggtgaagtcagcgaacaaagtccagccagagtcgttcacagctccagatgacatctccccagcagacctcccacagcttcatgggtaagactt

SEQ ID NO: 255823 - DNA, 713 bp, Homo sapiens
caaaggtagaagagatgtagaccatgcttgaataagcaagcttctctaagtgacacatgcaagtaaaacatattggttttagtctgccagggctttgcaagaacaagcaattaagcattcctagactctttgcacctgtggcaatgccagttccaaattcattaagcaggcatctgtgtccagaaaaagaaggtctgttgattttgtatttgctagcataaaaaccaaagcttatttacacattgctacaggaaattaaaaaagaaaagattgtcattccaagcagttttagttgctggtgttttgttgttgttgttgctttgtttttatttgtatttagtccctagggaactttgtagctttaaatgatctatagtgaaacttattatttctgtatttttactttgatataaaattgacattaaatatattgtaatatatttaaggtaactaaataataaaatggtattattaattggttactttatgtgttattttagatattgctagaatatttttaggactgttactaaaatgacaactttgttattttccaagtcaaagaaaaaaattaagaaatttgtctttagatattttaatccagatatattatagctgatactattatatgaccaatgtattttgatatcatgtttgtacattttttcatagtagcctcaatttattctgccaaccacaaggtaagccaacca

SEQ ID NO: 255824 - DNA, 435 bp, Homo sapiens
taaaaataaatcctcatgtcctgggacacccaagccttagaattaatgagtgtttattcatttattcaaaaagtatacaactgctatgtaccaggcactctctaggcattgggaatacgtgggtatacaaaagtaacaaaaatccccgccctctcagaatttagattctaatagagaagaaagagcatatatagaatcattaaaaattaaagttatgcatagtatgttagggataagaatagaaataaagcagcaaaaggagatatgaacagtcagagatgatcgctggtaatttcgttaagggagcaagcctcaatgacaatcatctgcaaagcagggagtgctgtggtcggagcacaggctgtggcatcagctctgggtacagtcctggccctgctgctgcccagctgcatccccttggacctgttgctcact

SEQ ID NO: 255825 - DNA, 207 bp, Homo sapiens
gagtcacttgtagtcctagattacattaacctaatttagattgaggtgatttcaaattgacttgtgtccctgtgaaggctgagatatttctggaacatttttattccttgggtacaacaactttttacccatccaaaatcctgtggtgtttattaggtttcctactagctgacaggctttaaactctgactttttcctccctcagct

SEQ ID NO: 255826 - DNA, 599 bp, Homo sapiens
ttttggatgacagaggtgatgtaagtgtaggagaaatgtatgcctagaggacctaaagtcacctagtttttctaatgacgtaaaattacccttggtttttttctgctgagaagaatgggtgtgtgaaatacacgttaatactttggaatttaagtgaagaaagaactccatttaatacactaagcatttgtaccatctagtattatatttttaatctgcatcagacattatgtcatccgaatatcagcccatgagtatagaggtatgctcttcttagtagctatacctgctgccacctgactgtgcacaaggagcaccatgctttggatccttccctatgggaatcgctgggatgtgttgtagatacctgtctatatatttttcagttgaaattagaaggataatcttacagatatttaaatgtgttaaaccttaaatgtaacaaatattttagattaacatatatagactattaacattgtgtttgattcgctcttattactctaatcttaattctagaactttcaaaggttgaaagtcattaccaagaaaaaaatcatgacatcacaaataatttggggcaggcagttagatatata

SEQ ID NO: 255827 - DNA, 354 bp, Homo sapiens
gtcttgctctgttgcccaggctggagtgcagtggtgcgatctcagctcacgacaacctctgcctcccaggttcaagcaattctcctgcttcagcctcccgagtagctgagatcacaggcgtccaccacaacgccaggctaatttttgtatttttagtagagacggggtatcaccatgttggtcaggctggtctcaaaatcctgacctcgtgatctaccgacctcggcctcccagagtgctgggattacaggcctgagccaccacgcctggccttctgtataatttttaacaaatattacctagcatgccattgacaagctacattccactgatgggtagtgtgctgctacaaca

SEQ ID NO: 255828 - DNA, 225 bp, Homo sapiens
aagcaccagcatctgtcagaggcagcaggggcaggaccaagggggagctctaagccagagcctttactggggtttccaagggaaaagcaaggcagagcagagcctacagcacaggactggctagctggagtaattcctgtgggctttcagctgtgggagtgttccccagctgcttggctcctgttccggggatgattaagacagaggaatactgtctcctgcggt

SEQ ID NO: 255829 - DNA, 299 bp, Homo sapiens
cagttccctccacctgtctgctcttccttcccctcagtgtctgcaaggctcactccctccaagttcatgttcttgctcaacagtcgtggggaaacctcctccaaggacccacctcaaagagcatccaccctcaccctctggtccctcaccctgacccctttctcagcatttcctgccacctggcactatatttacaaaatctcttgactgtctgcctccttttgttcaccactgtacccccacagggcccaaaacagggcctggcacacaattcagtcaataaatatgtttgaatgaat

SEQ ID NO: 255830 - DNA, 291 bp, Homo sapiens
ctgcactatttctgttcactattatgtcatgagggcttactacaatgtctatcacatgttacatgctgtatgtttgaacaaattatttctcattttaattcatgtagaatatcgatctttttccaaaatatatcatcaactttaaaaatggtcatgcatagctgttactagtcatgaggaaaagatgcccatcagttgtgaaggcagagtccatttccattgacaaaggcaggttgagagtataagtaataggcttccagtgaagtaacaaagctgagcaaagggaaagaa

SEQ ID NO: 255831 - DNA, 388 bp, Homo sapiens
  misc_feature (51)..(51): n is a, c, g, or t
  misc_feature (110)..(110): n is a, c, g, or t
cgtaagtacagcagagtggttcccaagctttatgactagagaagctactcngggagaagcctgagatggaccttccaggtgcatccctgagaccgtgatttgggaggtcngcagtgggcctgaggaccatcgtcaatcattaacaaacattctaggtgactctaactcaaaggatctaggatttgaccaacaataaggggctgtttttagtccatatcaccagatgccaacagtgaggtcagtgatgaaggagctttgagtcttgactattctttaactgccaggagcccttatgtaaagggcttagcatggtgccaaggtcaagggaagcactttatgtgtcttcatcattgttaccatgtgggtgagggggaggaggatgccacgg

SEQ ID NO: 255832 - DNA, 255 bp, Homo sapiens
  misc_feature (250)..(250): n is a, c, g, or t
aactaagttgtatatctattttgagcatatcattcttccacctattttttgaaaacttttaaacctcaggaaatttgaaagaattgtatgatatatccaatgtaactaagttgtatatttattttgagcatatcattcccctacctattttttgaaaagttttaaacctcaggaaatttgaaagaattgtatgatatatccagaaactgcactctagcctggacaacaagagcaaaactctgtttcaaangaatt

SEQ ID NO: 255833 - DNA, 590 bp, Homo sapiens
cttatggcaagtataatatgtcagtcactgattgtctttataaatcccacaacaggcctaagaggtagatgttatcaatatcctcatcttatagatgagaagactgagggtcataaagattaagttattaagttactatgcagttaatagtttgtagaatcaggatttgaacctttgcagtccgatctcagagtccatgcacataaacactacatcataaagcttcttctttctggttcactagcaatttgatttgcctagaatagatgatttgtattggggacaggtaagaaataggcttggcaaatggtcaggatggtgccaactgtggtgcaactttaggatcaagaagaagaatttcaatttgatgctataggcaatagggagtcatggaaggttttagaccagtgaagacataaccacaatggtattttcttaactttattatttaaatcttccatgttcttactaattttgtgttttcttgatctatcagttactgaaagatgtgttgaaactttctactttgattataaattcccattctgtatttgatgctctaatattaaaagcataacattttgaaaaaa

SEQ ID NO: 255834 - DNA, 480 bp, Homo sapiens
tcaggctcagagagtttaagtgctcaagatcacacagatgattggtatcagagctggattctgatccaggtgagtcttatcccagagccgaggctgttcacctctgctcagtactgctctattgtgccacagtgcaaggcaggatgtaaaagtgctaggaaggcacgcttgatgtgggcaagcttagagaaccttcctgaatcaggcagcatttgaaaggtgagccaggtattgagagggagaggactgcggtagtgtcttggtcaaggcccagaaataaacagaaaccaaggtaggttggtttaaggtgaggattatttaggaaagtattaaaagagaaaggctggccggatgaggtggactcacaccttactgtaatcccagcattttggaaggctgaggcagaaggatcacttgaggctaggagtttaagaccagtctgggcaacatagtgggaccgccgtctataaaaaaaaaaag

SEQ ID NO: 255835 - DNA, 435 bp, Homo sapiens
gctttagggctatcggtttattctttagagtgttatgaagggtcaaatttagagcactgtctaaacagtcaatttgtggaagggccccagttctcttacagtgaattttagcttcctttttcttacaagggggtgaggtagagaagctgttacctttaattagctcatttgcccctaaaactcagcccaagttgtgaagttgtaattattgcatcaatcacattatatatatatatttggagacaggatcttgctctgttgcccagactggagtccactgatactaccatagtttactgcagtcaggccgagcgaagtggctcacgcctgtaatcccagcagtttgggaggccgaggtgggtggatcacctgaagtcaggagttcaagaccagcctgaccaacatggtgaaaccccatctctactaaaaaaaaaa

SEQ ID NO: 255836 - DNA, 236 bp, Homo sapiens
  misc_feature (166)..(166): n is a, c, g, or t
  misc_feature (218)..(218): n is a, c, g, or t
gggatccacctcttcctgaaggctggggcactttggggcatgaatatcaactcagaactgagttagttaaatgaactgtagctcttgctgataattcactcccacatgagaatgggagttcacccacacgatttagttttcccattgataagagaaaatgaggccntgccagagaaatgcatgttccataccaatgcagtcggctttgtgtttgtgcntatctttccaggtgaagg

SEQ ID NO: 255837 - DNA, 690 bp, Homo sapiens
acatcaacatccctgccctctgagaaacctttaagatcggtaatccaaccacctaaaagttgctagaaatacttatttctcttagcctgtgaactctaatagagcacaatttttctttagttgcacatctgtgagcctgattccatatagagcctaacatggaatcatgttttaaaatatgttatttttaacacctgtagtcaaatctcatttatctcttacaattggtttactttctattttatttgtggtgggtttttatacccaaattgaattggtttagccactagttttgcttttatcacttggcttgtacccaaggaacataggtcgtttttcatattattctgagaaaaatgtaatcaaataaatctcttttaaaaattaatagaccattcaaagccaactagtagtggtttgcaagttatttttgatcatccgtgtttctacctttggttaatatcaaaagttgtttgtggcacaatataattcttgagcagaacagtggtcttctggttataatacttataatatcagccatctgtcctatatgaatttacacaccagagtctcagattctttactaaacacctacccatatttgaaatcagtgttaaccccaggttcatttgtttagaggaataaatatacttaataaaactgaagttggtattattgggttgaactaag

SEQ ID NO: 255838 - DNA, 338 bp, Homo sapiens
gacagagagagactctgtctaaaacaaaacaaaacaaaacaaaatgtaaaaaaacaacaaccgcccccctccccccacagaattggtggtatgaagctaaagcagtacttccaaataaattttagcattaaatgtttttattagagaaaaaaaggtctaaaaaaaaatcagtgatctaatcttccaccttaaaacaaaaactagaaaaagagcaattgaacacaaaataagtagatgtagaaacaattaagaatgtaaggaaatgagagtgaaaataaatgaaatagaacacagaaaaataatagagaaagtaaataaaaccaaaagctgttctttga

SEQ ID NO: 255839 - DNA, 507 bp, Homo sapiens
catttctattaaaaaattgttttaaaaaagaaatatatatttggtctctgcccccagttttttggcacacagctcctaaaacttttggaatttctggagtggtaacagtgtcttttgtatgctaatgagacaattggtggctgggggtccccatacagcttcaggatggtggctggattagaggtctgggacttttggcaccacccccaaactccagagaggggagaggggctgaaggttgagccagtcaccaatggccagtgatttaatcaatcatacccatttaacgaagtctccatacaaactcaaagggacagggtttggatgaacttttgcggtcggggttcttggagggtggtgttccaggagagggcatgaaaactccctacccggtcccacatatgttgccctatgcagcttttccatctggctgttcatctatatcctttgcaataccctttataataagtgggtaaacataaaataaagtgtttctctgagttctct

SEQ ID NO: 255840 - DNA, 460 bp, Homo sapiens
ctctgcaatccctggcctcagcttcacagacagactcaccagcttgtggagaggagctctgtctttctgacagactctcatcagccaagcttccgagactggcataaagcagaatacagcttcctaaatttatggtagaactctggtcagctcagcaggtcaaccagagagctcaggacaataataagggtagcaccaaagatgcactaagattttgtccagggccaggagcagtggctcactcctgtcatcccagaactttgggaggctgaggcaggcagatcacttgaggtcaggagtttgagaccagcctggccaacatggcgaaaccccatctctaccaaaaatacaaaaattagctgggtatggtggcgggtgcctgcaatctcagctatttgggtggctgaggcaggagaatcgctagaactcaggaggtggaggttgcagtgagctgagatta

SEQ ID NO: 255841 - DNA, 423 bp, Homo sapiens
agtcaagaatctggtgacaaagaagcttcatcctttcaatcttacaatttcaatctcctatctcaagaaagctcatttctatgtattaccagtgcatcctccacatgctcttctgcagttgttccttctgcgggaaatgatctctccttttgtcgaggcttggtgaaatcctttgaaattctgttgattctgtaagagccaacacaaataccaactgccctgaatactttctggctaaactgccacaatgaacgaggattcctcacccatgtccctccctttcccttcctttctttttataatggtatgcttattgttttttaatgtaacatttttcttacaaaaggaatacacattcagtgttaaaatggaaatgtagaaaagtcttcagaagaaaataaaaatcacctgcaaatccaattc

SEQ ID NO: 255842 - DNA, 330 bp, Homo sapiens
actcctgtcacatttgggcgatcagagcaacagctggggagactttttcaacaaagatgagtgtcagataatcctgatgagattccacatccaacatcttttgtaattatgtcacattcagctgtaatggaataattcaagctgaaagaacaagctttgatcctttcttaaacctttccctgtggactggctatctaaaagatttaaagatatttctgttacaagatctagtgtttcctcagagaagtcatgcttctgaagcatcgtgatctacaagaacaatatcaagtttgccaaacacatttctgaaagcatcgtgttttgggggga

SEQ ID NO: 255843 - DNA, 451 bp, Homo sapiens
ctcgcgccgccctcggctctgcggactcggatcccgccaaatttgaacgcgagattgtcaggccctgaggggcttgaggggcgggggaacgacgccgctctccaaagttggaccccgtggcgagcggcggcgacagccgggtgctcgctgcctcccgaggtgctcccttttcccgccgaagccctccacagcggcaggccgaggcgcagcgacgtgtccctgtaccccgagttcagcgcgggcgggaaaacgacctgcacccggggaggcagcggcttcgcgggcagagcccacgggagcgcgccctgctaggagccaggccggataatcgcctttctttgtcctcctccctcttcgagtccaatcaatgccctttctccttaatgaacgaggtgtccttggagtttgaggttttgttggatgattttaaataaaattattaagttataaa

SEQ ID NO: 255844 - DNA, 695 bp, Homo sapiens
aaatatccccctggatttagcagcctttgatgattcttgcctgaacaaaactttattatggtagatgtaaaatgaagattttcatttctagcacttcttccacatttaccagctacattcagccttcttgtggataagactctcccctttctcccaaatgtttattgtttttattagtatggactcacgatttcctgttcttctcaatggcctataatttattactatctttaattatattagtgctcaaattttcccagtttggccagtgggatcccctccaagttggctattatttccttgtgacatacccactttttctttctttctctttctttttctttccttttaaaactcacttctttacttcctgctccagccctggaatcagccatttctctgaaaaactgtggttctttcaagtggacaaaggtattagagaccaaaatttgggcacaagatatgcactttaacaaggacccactttaagtgcagtttagtgaatttgaatgaatgcatgaacttctgtaactactaccacaatcaagatatagagtttctgtcaccctaaatctctttctgctgccatggacacacacacatagacacacactctatacctccctttatacactcacacacacacacacacatatgggacacacacagcaatgttaaattatctttttaaggag

SEQ ID NO: 255845 - DNA, 805 bp, Homo sapiens
aaatatccccctggatttagcagcctttgatgattcttgcctgaacaaaactttattatggtagatgtaaaatgaagattttcatttctagcacttcttccacatttaccagctacattcagccttcttgtggataagactctcccctttctcccaaatgtttattgtttttattagtatggactcacgatttcctgttcttctcaatggcctataatttattactatctttaattatattagtgctcaaattttcccagtttggccagtgggatcccctccaagttggctattatttccttgtgacatacccactttttctttctttctctttctttttctttccttttaaaactcacttctttacttcctgctccagccctggaatcagccatttctctgaaaaactgtggttctttcaagtggacaaaggtattagagaccaaaatttgggcacaagatatgcactttaacaaggacccactttaagtgcagtttagtgaatttgaatgaatgcatgaacttctgtaactactaccacaatcaagatatagagtttctgtcacctctcaaagcctccttttcttgcttgctcatatgcaattacctctgtccaaaatgaccctttccctttcctctacacacttggcaaagccatgattgaacatttattccttcttagattttgttccattttcctcagcaaaggttctttgtttcctcttcttcatgctcacaaaagagagagtaaaagtgcttgctcaacagttcttcaactgctctaataaagattgattctcttacc

SEQ ID NO: 255846 - DNA, 485 bp, Homo sapiens
cactccacctgacttcaaaatatactataaagctatagtaaccaaaacagcatggtactgccataaaaatagacacatagaccaatggaatgcaataaagaatcaaaatttacagccaactgaatttcaaaaaaggtgccaagaacattcactggggattggacagtctctttaagaaatagtactggcagatagacattggcaagatggccaaataggaacagctccagtctgcagctcccagcgagaccaatgcagaaggtgggtgatttctgcatttccaactgaggtaaactgttcatctcattgggactggttaggcagtggttgcagaccatggagagtgagcagaagcagggtggagcatcacctcacccgtgaagtgcaagcagccggggtctccctcccacagccaagggaagccatgagggactgtgctattcggcccagatactatgcttttcccacggtttctgcaatctgca

SEQ ID NO: 255847 - DNA, 597 bp, Homo sapiens
gtaaagtatttatgaaattgagacggactctttgaccactcttggtttttgaggcacattcctgggatacagttatttaatgtaacctaaatgtgaaggtcctcatttgcaaagtgggtgcagattgacctcattccctggaacaggcttgcctccttgaggcaattcagagatgaggaggatgtttagaaggtatttctacaaaatcctggtgtgaaatcaagtaagttgaatctgagaacaacctttgtttaaatttaagcaaaagaagcaaaccactgatattctttggaagacttgctaaataaccacactttggaaatgttgatctgatgacttttaaaaagagtagcataaccaatccctagttgaccaagtgcatgtttatcccattagattcaagtgggttctaaaggcttgaaaacaaatatttcctgagaacagtccttggggagagttattttgtcaatggaaagatttccaaatgtaaccccaaatctgtagaactgtaaataaatcataccataatgccatcaagacattttctggtaaaagttaagtaaatgctgtttactgagggtcaaatacccaagcact

SEQ ID NO: 255848 - DNA, 133 bp, Homo sapiens
tttctgctttctcatttttacatctgggactggagaaattgctagaatttcaatgttttatttgaaatcaggcaacagaacatcccagaaaagactgaaggttggatgtactggataatgcctttaggtgagg

SEQ ID NO: 255849 - DNA, 465 bp, Homo sapiens
agactcagtcactccttcttctcaacctcctgagtagctgggaccagcggtacacactaccatgcccagctaattttttatatttagtagagacaaggtctcactctgttgcccaggctgatcttgaactcctgggctcaagtgttcctcccatctcggcctcccacagtgttgggattacaggcatgagccactgcacccagccctggaggccagtttgaaacctcagagtattccacattgccgttgagctctcaaagcttttgctgtgttgatcctggttgttttcacacatgggcacttcgagggcatggccaggacttctacacatatttaacccatttcccatttaggaaaaaaaaagtgcagcttgctgctagcgttcatttaattttgcataaacacacttttgagactgaagtaaatctgactgattttcaatgcgaaaataaaatatgaaaactg

SEQ ID NO: 255850 - DNA, 410 bp, Homo sapiens
tcaaaataactccttgaactctttgccccacaattggcaccattactattagattcccattttatgtgaatgcacttgagtgagtctttctttccagttcctttacccttgggtactggagaacagtcaatggcatgcaatgaggtcctcttccattcttctagatatataaattctgcccaggcatccatccaggctgccagaaagtccctggaccaccacctcagcctaggacaaccttccacctctcatttctttcctactgtctttatcttagatctagacccaaaccacccaaacaatccctcacataagtgcttagcagtgtcatcaaaaacaacatccaggctgggtgctcacgtctgtaatcccagcactttgggaggccgaggcgggcagatcacctgagg

SEQ ID NO: 255851 - DNA, 406 bp, Homo sapiens
catttcttactgaaacagctgtacttggttatgttattagaggagacacactatggacttattttgacagtgaaatatatttagactaaaattttaaattactcatctagctaaggtgtgttgctattccataatacttctcaagtgttttgtgtttcaactttcgggtttctttaagaaaacaaaaacaaaaacaaagaaaactccatcaagttagaatagaatgtgagaaatttggtgtataagataaatctgtctttatgtttctccaggcaaataatgttttatactagagcaggcttcctgcctttggtatgctcagataaattaatttgactgtttatgatgttatttaattttcaataattattcaagcatatataaccacagacatctatgtagtagg

SEQ ID NO: 255852 - DNA, 429 bp, Homo sapiens
gtcatgtttactaatgtcctagcgaaaaaaaaaaaaaaaaaaggtagataggtgggtctcaggcatcatctctttaataaagctcacttgcaatattaaaaaaaaaacccactgggccagtcataatggcccatgactgtaatcccagctttgaaaagttaaactgacagattgcctgaactcaggagttctagagaagcctaggcaacatggagaaaccctgtctctacaaaaaaatacaaaaattagctgagcatggtggcatgtgcctgtagtctcagcaacttggaggtctaagttgggaggatcgcttgggcccatgaggttgaggctgcagtgagccatgctcacaccactgtactccatcctggatggcaaagcgagaccccgtctcaattaaaaaaaagaaagacctaaaaaccagcaagt

SEQ ID NO: 255853 - DNA, 428 bp, Homo sapiens
accataccaaagtgggtacccagaatagatcttctaacttatttatcttttgcaaatccaggaatgcagtgttttgtgaattttacatattcttttcaattaaatggacaagataaaagagtcaaggctttgggtaatgtctcagtttaattcaatagatagctagtgatcaataaatgtttgttaagtgagggaatgcaagtatgaaagtagaagaaatcctcaaagtatttagcacatggagagaaaagggttgattattctaactacaaatataacctcattacattgttgactacacagaagagaactcagcagtaacatatttcaggaatcaggaaatctgggttcagagtctgccaccataaagcatatgacctcagtaactttttttgtttgtttgtttgtttgttttatggcagaaatgc

SEQ ID NO: 255854 - DNA, 622 bp, Homo sapiens
gttgtaaatggacatattataaataattttataaatgtattaacttgtatatcatttgaagaacttacatagtaaccaatggataaatgaataaaacccatgcccaagtaattaaaagaagaggaaaaatagttaatatgtgaaaaggtttattcttgctggtcatcaaaaaaattacaagttaaaatgatgtattatttcatacataatatataaataataaaagtgattttcaaatgttatttcttatcgctgataaatttgtggtaaaatggtacttttatgcattactaggattcaaatgcctgttcaatctgttgtgagctatgagactttagagtagtcactaaatcttcccacatgagatagtgttagtattaaaatagtgtgcaaataaataattccaagagaattattctcttagtaatcatatataattatatataattataaataaattaataataaataatttctaagagaattctcttagaaaagcaatttagtttcaagaagtttaaaaccttatatcctttgatgacagaataattccactcttaagaatttattttcaggacataattcaatagagaaaaaatgcttaatacattatgtataattc

SEQ ID NO: 255855 - DNA, 843 bp, Homo sapiens
gcgtgggaaaccagcaagttgagagaggatccagaagtaaccccttctaaaacgggaaagatgccttccgaaagcacttggccctaaagagaaaacactaggaggatgggaaccagggacagagaagctacttgctctgcagctgtttgggccagtatgttccctaatcttgatggccatcctgggcttattttcctgagagtctctaagtgactcactgcatcacgtaaaactaagaaaaaggatgtcctgaaaaaaaaaaaaaaaaaaaaaaaaaacaacgttggtgggggcccgccgcgggaccctccgagaaaacaagctttctaaggacacactcgtggtggggcggcgcggggccccatgaggtaaacgcaaaccggtggccaaacagcgggtccccaagagaaacccggggcaagacacaagggggggggtttccccccaattaaaaacaggccgggggacgaccgggcgcttctgacacacacccaagggaagtcgggaggccccaacggggcctcctacaccgaaggaggctcccaaggcggagggccgagaatataaaaataacgcccgggagggggggatcatacgccaacaacacggcgtacgtaacatcagccacctaagacgatagcgaaaccaaccgaatcacaagagcgagcagaaactagagcaacaggtaccacacacaaagggacgcgcagcaccgaacagcacgaaagcggacagcgcaacgcccgagacgcagaacaccagacagcagaccagagaacgagcaaacagcacgagcgaaacgcaagcgaaggactagtacaagcaaccacgacgaagcacacg

SEQ ID NO: 255856 - DNA, 482 bp, Homo sapiens
gcacacagtcaatattagttggtcgagttactgatagaacaacgctcttgatccggctccagggcagaaaggggagctcacagaggaggggatatccagctaacccagtgggaaccagacacgctggcaaaccccatcccacgggctaggctttcagttaaccctctcattcatgcatgagggggtgcttattaagccattttccagataaggcaatggaggcccagagaagtgaagtgacttgcacaaggccacatggcttgtatgctgcagagctgggtcttggcctggctttctgagatcgacagcccttttcctctccagggttccaaggctgtgattccgagagatcaccacacagggaaggaatcctgacagcctgtgaagtgcctggcactgggtcaggttatttgccaaggtttgttcatgtgcctgctctgtcttcataggtctattttacagatgtcaaactgaggcccaga

SEQ ID NO: 255857 - DNA, 368 bp, Homo sapiens
taagaaaagattgcagtgggtgatgaccgcaaatgtcctgtaaaagatttgatgttataggaacatggagaccctgtgacaaggagaactcctaatttagggccaaagaggggggatggagattggccccacatccaatcctttctacctcttgagaggagatataatcactggtcttccctgtcttcatttaaatgccaccccaaaatttggaatttttattttctctcaaattttcatgtgttaccgagaagctttagactcccaggaatttcagttgggagtatcaaatacctgggcggtaagtcttgagacactatagtttatgctaacgccaacctttttcaaaattcatagtaggccggcct

SEQ ID NO: 255858 - DNA, 316 bp, Homo sapiens
accatgcataactcaaaaacgggcatcaaattctccaaaaatctgttgttctctctgtgagcagcaacaccattcacagttgctcaagacataaatctagacatcatcctgaattccttcttcctcatgccccatatccaagcaatcacaatgtcctattatcattctacctcctaaataccttgatgctatctcactcttatctccactaactaccaaaagcggaccatcatttcttctcacctggattatagcaaccaccttctaaaggactctcttgccccaatgaagttaatgacgtcgacacactgcaagt

SEQ ID NO: 255859 - DNA, 534 bp, Homo sapiens
ccctctgacatgcagtgtaatctgcaaaaagtaatgacttctctgtagacctcagtcttcccatccgtacaatgggagaaggcctccagctctctccctacacctgtctctcacggtataattaatgacctagaaaagagctttccgaaaactctttcaaatgcactctgcaactttcagcttcacagcgaccctcgtcgttgttgttatcgttgtttttcatttttaggtggccctaaagcatgcgggggttggaggatggcgctttgcggaaagcacgtgcgagttcaaatcccaactccacactttctcacgatgtgcgttccctgggacgagtcggtttggctccccgggcctcggtttccccacccgtacaatggtagtgatcgtccgttctccactgagcaggtgggaggccttggccccggcctcgcaccgttcgtccccacctatggggcactcgtcaagtgtgagttctcccctctttgctccctttgacagatgggaaaactgaggcccaaggaggggcggccg

SEQ ID NO: 255860 - DNA, 775 bp, Homo sapiens
ggccgcgcgttggttctactgctccaaagcgtgggacacggaaccggacctagacgtccccagctcccaaggcggagggaaccaagaaaggggaatggagcatgaaggacttcgatgggggcgatgggctgatttcaggcagtgggagccacggaacaagcttcaggacgctgaaaggggtggacaggactgggggcatctggggtccatgggtttttaaggctgcagtgtttgatggcacactcagcggggaggccttggggcctggggctatgagaccctttggtgaccgattttcaggggcagtgacataattagattatttgtggccaggccgggcgcggtgcctcacatccgtaatcccagcacttcaggaggatgaggcgggtggatcacttgaggtcaggagttccagaccagcctgcccaacatggtgaaaccctgtttctactaaaaatacaaaaaattagccaggcatggtggtgggtgcctgcagtacgagctactcaggaggctaaggcttgaacctggagaatcgcttgaacccgggtggcagaggttgcagtgagccgagatcgtgccactgcactccagcccgggtgacagagtgaggctccgtctccaaaaaaaaaaaacaaacaacaaaacaaacctgtgtgcggccgcgccctgggcccctgcggaaaagtttttaaaaccattcgcgtgggggcgccgcggggcccccaagggctacctggcacctggggccatacgggtcccaagggaaacccga

SEQ ID NO: 255861 - DNA, 666 bp, Homo sapiens
cagtatctctgatgaatattgtaaaaatcttccacaaaatactagcaagatgaattcaataagacattaaaaggatcttacaccatgaccaagtggaatttatctctgggatgcaaggatggctcaacatatgaaaatcaataaatatagaatatatacaatattaacaactgaggacaaaaatcacatcatttcaactgattcagtaaaagtactgacaaaacataatacctttttatgataaaaacactcaacctaggaatagaaggaaattatctcaacataataaaggtaatatgtgaaaaactcacagctaacataatcattagtgaaaaatgaagtttttcctctaagatcaggaacaaggcaagaatgcccactcatcactttcttcaacattgtaatagaaatcctagctagagcagttagacgagaaaaagaaataaaaagcatccaaattggaaaggaggaagtaagattatccctaatcacagatgacttggttttacgtgtacaaaaccaaaaaaaataaaaaataaaaaaaactgtaagaactgttaaaccaattcagccaagttgcaggatacaaaatcaactctccaaaatcacttgtgtttctgtgcactaacaattaaggaaataaagaaaatctcatttacagtagca

SEQ ID NO: 255862 - DNA, 505 bp, Homo sapiens
agatggaggatgggtctttggaaagctgggtcatggcccaacaaatgtcagggcacatgcgtccagtcatagtaagtagactttttctagaaaattctgtccaatggtagaacataagtcctgtgaataagaaacaaaagcaccaccacggtgactacggtgcaaggatcagagatggcgctgtctccttttaaagttacagatggtgcctggcctccttcccttcagggcagcgtttaacggcagccctctcttagagcaaacaaagagtcttcctttgcatacttgataacaacttatttttctcatagatcacacatgcaaacaaatataggtaatatgtaaacaaaaagtaagttttctctgccttttcagctagtctcttccccaaatcactataatgaagttgattaccgtctccaccctggcgccggcaagcacgtgtgcaggccctgctttatacacggagggtggcacagtgttcacacgggtctagattggcacg

SEQ ID NO: 255863 - DNA, 401 bp, Homo sapiens
ttagctgtcactgattcctggaataaacttcccttattcataatagtatactataacaggtatatagtggtagatttattgctaatattatattcaggatttttatatttatttatttttatacagacaggggtctcactatgttgcccaggctggtcttgaaatcctaggctcaagcagtcctcctgccttggcctcccaaagtgctgggattacaggcgtgagctgctgcgcctggcttccgtgaatctttaggctctgtaattattcaaataccataagaatgatctgtttcttgaaggtttgaaggccactcacctagaggaccatctgatgcctttatagaaggggtattttatttaaaaataagaaaaaaaataaaaggttttctgtttatttag

SEQ ID NO: 255864 - DNA, 944 bp, Homo sapiens
tctaaattttgggttctttttaaaggctagcatggaatttttaaataatagactttcattttccagactttatgaagccttttgaagaagtgacttttcccatgtgttagaaaaatcttcaatatatgatgatgatcttatttcaggcttcattctcttctgagaggatgaaattgactgaggcagtcactctgtgaattatttttgaatttaaacgaagtgcagataggatttaattgatactggctttgcaagaagtgtactcatcctcaaccatttgtttgtataatataatacatatagatagaggggcgataatatactggtagacaaagaatgcaggaaatgcccttattcatcacaccaccaagcaggcctcaccctaaagaccagcaaaagtaacaaaagcacatttggaaacccaggaagccagtaaaagtaaatctaaaggctgacagggtgtacattattatgtatgtgcaatataaatcaaattcaaagctgttttctcttaaattttgatacttatagagacaggacttgccatggggaatttctttccccttactatataattttattactagaaggaaaagtaatagcaatgataataatgaacagacttcgtgtctttattacatttgctttcctagttacctttagactgtcacttctgagttctttctctgacatgcttttcttttctcgtgaagcgtcttacattctgactaaattttgtttttttgttgttgttttagtgaggtgatttttaaaacatgctctaggtcaataagacaaagttaatgatgagcagtaaaacaattcttgaacaattttgtactttttttctttatataatatatccgtaagccaaagtctttcttgacaagtacagcgttttactctgctttcttagtttggaggatatacaagtagttttagct

SEQ ID NO: 255865 - DNA, 878 bp, Homo sapiens
gtttagttttggtatgaactctcttgaatccttctgacctactcagatcatttcacagccatgtcttttattggccatgagaagctcctaagcagtggtcataactgggctacgggggatactgattgatgaacatgtacagtgtgtgttaacttagttgttgttggctgataaacgtggtctttccaccttttttgtagacccgacccagctttgtattatgtgaggccccaggcagcctttggataaagctttttcttcagcctcctttcactggggatgccagaggcttagaagtagatactgaatgtgaatttacaggaccatagtattaagaagcttacatttatagagtcattgatggaggtggaccactacgttctctgataaagttcaatgcttagaattacttcctggcccaaatctcactagtcttctgttcaacaaacttgtttgatgctgcttaaaacacatattaacctaattgcatcatatttacaaaatggtaggagaaaagagactgtgtgtgtgtatgtattttcaaaaagttcaaaatgttttcagaagactcttcagatgcattccaaagaatccagctaatcacatcttcaattttgtaatcattgtgttcaccctgttttggcatataatactgatgaaggtttgcttttatggataaattttgatgttctaatcaggacctatatttgcaagacatggttgcttgcaaagctggatttggtcatgagtactgtgaatggaaattgatctcaggacccccaaatcactaagccaaaggaaaaggtcaagccaatgggaactgcactgggcaaacctgactcccattctattcctaaaataagatagctatgaagata

SEQ ID NO: 255866 - DNA, 474 bp, Homo sapiens
tgatgctgcttaaaacacatattaacctaattgcatcatatttacaaaatggtaggagaaaagagactgtgtgtgtgtatgtatatgtaatccattatttactgctgccatctggtttaagaagacctttatcaggtattttcaaaaagttcaaaatgttttcagaagactcttcagatgcattccaaagaatccagctaatcacatcttcaattttgtaatcattgtgttcaccctgttttggcatataatactgatgaaggtttgcttttatggataaattttgatgttctaatcaggacctatatttgcaagacatggttgcttgcaaagctggatttggtcatgagtactgtgaatggaaattgatctcaggacccccaaatcactaagccaaaggaaaaggtcaagccaatgggaactgcactgggcaaacctgactcccattctattcctaaaataagatagctatga

SEQ ID NO: 255867 - DNA, 451 bp, Homo sapiens
agcctccctcttttgacagggctggggtaccccatctcttagctctgcccagggggctggtgaggaccctaatgtagggagtgtatgtaggccgcctgtcattgacaagttctcggcctttgtcagatgttggacaaggccataaggttcctggcttggtgcagatgctggaggaggaacttggaggatggtatccatggtacccatgaggaagagctgcatcctttttggggatcaggttctaaagtcagcacagcacattagacagaaatcatgtgtaaacaacagtggctttgaaaactctgcagattaccatagtgtaaggtggatgtggttttgcatatacacttcttttacgatgtttgcatacatgtgttacatgtatactcatatataagaatgggtatacatagaagataaaataattgtaattttaaagttacattcatgc

SEQ ID NO: 255868 - DNA, 324 bp, Homo sapiens
acatacgggtttaaggaccaggaatcctgtgtgtccacgtgtgcatgcacacacattgtcactagataaaacaccacattccaagacaataacatctggctgtccaaagattacttctggttaaagtcgcaaataatcagtattgccatatttccctttataaagtacctcttcacactcttccttgctcaatgcttaaaatgtcaacatttacttaaaatgttgtgcaggctgggcacagtggatcaagcctgtaatcccagcactttgggaggctgaggcgggcagatcacctgaggtcgggagttcgagaccaacctaacc

SEQ ID NO: 255869 - DNA, 648 bp, Homo sapiens
cacgcagctcggggtcgatggcaaagcggccgctggtgaagagagagctggcggccacacctaggggtcagaaggggtgtcagggagccccagtgggtcaggctgcttgggcaggagtggggaggagggccaagagagtaggctgcgagtagaacctggctgggactcactgaggcctgtctcgttgcgtttgtagtgctccccgaaggacaccagcccaatggagatggtctgcaggaatggccggatggcaggcgtgaactgtggagagacgcggctgcgtcacccaccgctcaagagagggatggggacagggcaggagcgaggcacagggatgtgcggggaagacacattcattcagtaaacgtttcatgagctcctactgtgtgctgggcatagctctcggctggttcacggacctgatgttctcaaagggaaaacaaatgatcagcagataagcaaagccacgcgcagtatcatgacaaggaatgacgaatggtttggaaaaaaaaaagggcagtaggtggggagggcaccagtgatgactaggggtcaggctacttagcgggtctcggaggagagatctgactgaagcgaggggagggtgttccctgcacagggaacagagagcatgaaggcttaaaggtg

SEQ ID NO: 255870 - DNA, 514 bp, Homo sapiens
tggtccactccgcagaggcccgagcgggctcgcgagggaacgggttctccgagtctggccggtgctccccgaaggacaccagcccaatggagatggtctgcaggaatggccggatggcaggcgtgaactgtggagagacgcggctgcgtcacccaccgctcaagagagggatggggacagggcaggagcgaggcacagggatgtgcggggaagacacattcattcagtaaacgtttcatgagctcctactgtgtgctgggcatagctctcggctggttcacggacctgatgttctcaaagggaaaacaaatgatcagcagataagcaaagccacgcgcagtatcatgacaaggaatgacgaatggtttggaaaaaaaaaagggcagtaggtggggagggcaccagtgatgactaggggtcaggctacttagcgggtctcggaggagagatctgactgaagcgaggggagggtgttccctgcacagggaacagagagcatgaaggcttaaaggtg

SEQ ID NO: 255871 - DNA, 520 bp, Homo sapiens
cggcggtcgccgcagcagcagcagcaaaaggcagcggtggcgtgcaggtccagccgtctcggtgaccgtgctccccgaaggacaccagcccaatggagatggtctgcaggaatggccggatggcaggcgtgaactgtggagagacgcggctgcgtcacccaccgctcaagagagggatggggacagggcaggagcgaggcacagggatgtgcggggaagacacattcattcagtaaacgtttcatgagctcctactgtgtgctgggcatagctctcggctggttcacggacctgatgttctcaaagggaaaacaaatgatcagcagataagcaaagccacgcgcagtatcatgacaaggaatgacgaatggtttggaaaaaaaaaagggcagtaggtggggagggcaccagtgatgactaggggtcaggctacttagcgggtctcggaggagagatctgactgaagcgaggggagggtgttccctgcacagggaacagagagcatgaaggcttaaaggtg

SEQ ID NO: 255872 - DNA, 508 bp, Homo sapiens
ggccaggacttgcctggagccatcagcccacattcactcagctcttattcagtctgacccagccctgaagctcatcctgaattcaactctgattagcctcccccaggcaatcaatagatgcagagtttgagcttggatttgtgacttttctcattttcccaatttccccacatcctcctgctcctgcagactgaccatcatcaagctccagccacaaaccaatcagaaattaactctacctgggcctgacttagtggtccacacccttcatgcttgacatccagccccacgctagtgttaactttgagcctgatccccaacccacagccatgtgatcatatacccgtaacatcatgtgcatcaacctcaccccatattccacaaactagttccaggaaacgctggtatctttcagagtgttttgggtcttctaaaggtgaagaaggagatcaacatgcttttggatatgctgtggctcatcatattaaactggttccctagtgcagga

SEQ ID NO: 255873 - DNA, 388 bp, Homo sapiens
atctttcttggaggattcttagggactttagttttagctcatgtgacaaggctgggacgccccccaaggccagacttccatgtccctcgtattactgactcaaccaagagagtgaatttttatgacagttttttccaaaccgtcataacataaaaattaccattttagtaccaatcgcctgccccggcccaggacgcctgctctttttctgaagaggttatcactacaaaccgtaaagtctgaaaatagttgcattagatgttttggtgaacacaccgtgcacgacagcaccagcacagtggtcccctgttgcttctgccccaagactctccttcctaaatcatgcaaaaggctttaggaccactgaagacacccagaatgaaggaaa

SEQ ID NO: 255874 - DNA, 498 bp, Homo sapiens
gagattagaagttcgagaccagcctgccaacatggtgaaacccggtctctactaacgatacaaaattagtcgggtctggtggtacctgcctgtaatcccaactacttgggaggccgaggcaggagaatcacttgaactcaggaggcagaggttgcagtgagccaagatagcgccactgcactccagcctgggcaatacagtgagactctgtctcaaataaaaaaaaaagttcaaataagtactctgatttctcttatgtctcatctctcatttttcctttatcttgagaatctcaaacagcttaacttcattcctttatcctaactctgtctgatttgctcatgatgaagagcataggatagtttcaaggaagctgactttttatagttattttagcaggttagaaatataattaaatattacatagtgccactgcattaaaaagtgaaggaggtccagttacatgacattctggaaaagacaaaactatggagacaa

SEQ ID NO: 255875 - DNA, 510 bp, Homo sapiens
atgtgaggagccatcttggaagcagatctgccagccccagtcaagccttcagaggactgcagccctgggcaacatcttgactaaaacccaatgagctactctagtgagaaccacccagctaagccttcctggattcctgactctcaaactgtattaaccaactgtcaaggacctcagctgccagcagacaggcctcgatgatgaagaatgtcagacacccacggcaggcaccgtgtggacactccaggcctgacccctccccgtggaaggcacaggggcagtgctggtgaacttctggatggccctgggtagttgattgctggctgccaccatcccccaacagggcaggaagaaacctgttttgtgccagatgacaaggtgagatttcctggctctgactctttaagacaaaaattgtgatttagaaagagactggcctgcagaggagcatcatcaaaacagttttgtttttctaaaaataaattttaaacagaatggcaaaattattaa

SEQ ID NO: 255876 - DNA, 459 bp, Homo sapiens
cgactccaagaaggcagtcccctgacagcctgtactgctgggtccagggccttgatgccgggaagttatttcgtttatgtttgcctgtttaaagtccccatttgcttttcttcaaggtccagcttccaagtctagttgactttttaccatcactcactgggctggccacacagtgccggaattcatgggcctccctggacaggctattttccgagacccatggaaatcagatcaatgctcgctcgctctgtgactttcatcatccacgtgctttctaaatatgaactcattcttcttgcaagaatcaggttaagcattgttatccccactttacagatgggcgtgcccagatttcattattccgaagatagattttgagtccatgataaatgtacttagcattatagtaaattgaagatgaaaaggcctaataggttacccggtattgccctccctctt

SEQ ID NO: 255877 - DNA, 664 bp, Homo sapiens
tactactactaaattcgcggccgcgtcgacggccggcgggagctccaggttcacctcctcctcctccaggaaatctcacttccaactggatgtctggatgaactactgaaagctgctgagtgtcctgcagcagcttgactaccacacaaatgaatccactcaaatgttggcaagtggagcagagtcccaggacaggtacagaaacacccccagttcaaggatcttcacacctggatttaggcctactcctgcaactaccccagaacctggaatttatatgttcaacatggagccatcccagccatgacaacagagaatgtaccactctcacgtgagtaagaggggtaggcagtgctcctgtatcaccagcccttaatgagaccctgaggaaaccacatcatggagatcagcccttctctcctgtaaggaactcatcctatgaaagagcaattagtgcctgcaagagctgtctctgggacagcggttcatgtctatatctgcagggtaacactcatagtcatatgcagtcatatccatagtcatatcgggagtcagactccagtttgactgagtgaatggagaaactaaacatttattactgaataataacattaataaaccatcttaatgataataataataaacatattgatgagtattaaca

SEQ ID NO: 255878 - DNA, 893 bp, Homo sapiens
ctcaattaacagggtagaggatgacctattgaaagattgggcattcatgtgtgggaggtaaaggcaagtcctgtgagtggtaggcagtccgaggcaagtgttctctctttttgttgtttgattctaaatttatgacaactgaagaaagggccttggcctggtctggatcaacttggtatggagcccatgagaaatgaaagatgattcataaacatacctaattcatcccaggcaacagcagaaatgaccatgaaaaatgagccatctgagaattctcaacgattcttggagaatgtcattaattacatttttattacagggcagggatgcccaagctgacatatgggttacaaaggcaaagtagaatttccctctatgggttttgttaatgtaaaatataaattaataagctttttgcttttactaatatgaaacatacccatcaattagttgtcttcaattcagaaagaactaaactagagttcgatagtatcttaaatccaaaaaataaaaataaaaacccaaccagcagccatttgctgaattcctgagtgcttaggagtctccatttctagtctagcaaatgtcttccagttgcaattttaaacatttttcccagatctttcaagaaacctgtaatagtatcaagtccagcacacaaagctagctttctgtaagcaatcagtctcatctacccacctttactttatacagcctcctaaattcaaccttagaataaaaagtacttttttgttgttaaaagtctgttctctagccaggtgtggtggctcatgcctgtagtcccagcactttgggaggctgagaccagaagattgcttgaaaccaggagtttgagatcagcctgtacaatgtagtgagaccaccatgtctta

SEQ ID NO: 255879 - DNA, 249 bp, Homo sapiens
atggtctgacttgaaagtgttttcggtaagtgtgtcttacagaaagttgtggtattaaagttagatattaaactgttcctggtaaaatattttttaaaagctgacctaaaatgattgtaatacaactacagattgaaatagttttgtggaattcaaagttacctgctgactgattgagtgtgggaaatgtttgggatgggaagaaagttgtgagggaaagaggagagttagatgacaagataatcatgg

SEQ ID NO: 255880 - DNA, 703 bp, Homo sapiens
tactctaataaagaatatcaagaaaaagtacagatgctatgaactgatatagcaagaaaaccttatttagactggggcgtgggtggaagatcagggggaggcttcccaaggaaatgacctatgtttccttccatgtctaaatgtatctctgtatagacatgaacggataatcatgaaaacttaaaggtgactatctccaggcagtggaattatgtgggattattttttccatatatatttatataatatgggaggaaggtttttctcaaccctcttagggtccctgagagagctgacacagacagattagcaggagagaagcattacgaatttatttaacataagtttgatgtgacacagaagccttcagaaatgaagatccaaagacctgttgtcccagccactggggaggcagaggaggggagatcaattgagcccaggggtttgaggctgcagtgagctatgattgcagcactacattccagtctgagagacagagctagactctgtcctaaagaaaaaaaaataagcacccgcatgccggccgaatttcgagctcactttgcccaattcgccctataatgagccgatttacaattaactggccgggggtttacaacggtgtacttggaccttggcgttcccaacttaaccgcttggagctccccctttccacgctgcggtagcgataggccccccccct

SEQ ID NO: 255881 - DNA, 438 bp, Homo sapiens
acaggagcaagtgccagctctggggttgcctgagatggtaagggcttcaccattcccctgggcccctttcacagcttagctggggcatgatggaagggtcagagtgtacgcctaggagcctggtggcttggcacagcggcttcttcctctctgagcctagtgtattcctctgtaaactggtctaagaaagtacctgtttttgagaaggatgaggagtcagtgacatgagcctatagaggctctttgttttttcttttctgtttttctttctttctttcttttcttagcctgactctgttgcccaggctggagtgcagtgacaggattagggctcactgtagcctggaactgctgggctcaatccatcctcccgccttggcctccgcctcccaagtggctgggactaaaggcgcaggccaccatgctggctaatttttc

SEQ ID NO: 255882 - DNA, 399 bp, Homo sapiens
gtacaatatgcataattaaaagaatatccatatagggaaagggaaaggaagttagctgaattatgctttctcaagcctccctcctacccccttacaattcctattgatttatttgtcttcaggtactaaacctatttggtggccagagtacagccaactgacttatgttttctatgccattcaacttcccattacatagaagttatgttttattaagaacttatcagcacggcatcaagagtagttgaagaagcacttagtgttcattttgaaactcaacgcattaagtctaaagtttcttaccagtttaaggcttaataacaacttttcccaaattcacctctttcttcagagctatttaatttatacactccttaccagtaagaagagtatcttgct

SEQ ID NO: 255883 - DNA, 426 bp, Homo sapiens
ctgagactgtctttggcaagaggggacacgtgcttggcaacggaagtcaagtaactcaggctgcaaactctggctgttctaaggccattggagccctggcctcatctcgaagatcctcctcagaagggctctctaaaggcaaaaaggctgccaatggccttgaggctgataacagttgcccgaattccaaggctcctgttctatcgaagtatccttatagctgtagaagccaagagaacatccttcagggattttcaacctcacataaagaaggggttaatcaacctgcagcagttgtgatggaagacagcagtccgcatgaagccttgaggtgtcgagtcatcaaatccagtggcagagagaagccagactcagatgatgacttggacatagcatctcttgttactgccaagttggtaaatacaa

SEQ ID NO: 255884 - DNA, 757 bp, Homo sapiens
tcctccagggcgcccacaccagctcccagccaggctgtgggatctgatcgcctctgtcctgggctgtgtccaagaatcaggtgcccagtgggtcgggatggcagtgccaggagtcctggatgggcaccctgctcccatcatcccggagatccggcttcatctccatctgggggcggggcctgtgactgccagctccagagccctatggagagctccctgggacaacagggcaggactggcaggggagagtcctggggccatcccagagggatcctgatgctcacagacctgtcccacacctgctgaggtggagcaggcgtgggtggtggccttcaagtttagggaggtggtatggggctcttcccaaggggctggagctcccctacatccaccctgggtcctccaggtgtctgagttcagagctgtatccacaagcctgagttagtccccttgtagtgccctgtgcatgcagggccctctgtggggtgggagacagactgggagggaccaggatgccacagaggctgcaagtccttgtgtggagacagctggccaggctgaaccagggagggttccaggggttccaggaggtgaagacacaggggcgccagcatggccttcccaagagggcctgtccaccttcaccaaggtgttcaggctgaggcgggcggatcacaaggtcaagagatcgagaccatcctgaccaacatggtgaaaccccgtctctactaaaaatacaaaaattagccgggcgtgg

SEQ ID NO: 255885 - DNA, 375 bp, Homo sapiens
tgtttcccagacttgcttacagcaagggacttagatcccgccagccagaggcactcccgtgagatgggcagctgtgcaggaggcatctgtcctgccgtgcaatgctcaggcacaaccagttttggagccaacagtcctgacattgactttctatccctcagacgccagccaaggcagtgcattcctggaatcaacgctctcaatagcagcttcccaatccttggccaaagtgatgtcactcagagccagcggttaggacagaggattctccagcctcagattgcggcagagttcacagtaccctggggtgggctgattctgcagggttgttttttatgtcatttctgaaggtccaattaatagcccatttctcca

SEQ ID NO: 255886 - DNA, 373 bp, Homo sapiens
tgtagaaacatagtgctaaggcataaaggtcagtacacaaaatccacttaatcctaatgtacatgaagcatagaacatactgaaacccaatcaccatgtaggtcatagtttctatggggaaaatgattttagaattgtgtattacaagccagaaatccatctcttttagctacaatgggatcacaattatgcctcccattctaaagtgtgtagtaggaagaaaaactctctcattcctgactttagtggcagttcctgcagccagtgggcctgcaagggcataggtagcatggaggattggcagaggtctttaaacctttgtaaagatgaggacatcttactaatatcatctcaccagagacccccctggttc

SEQ ID NO: 255887 - DNA, 334 bp, Homo sapiens
cctgggctcaagtgatcctccagcctcagccttcctagtagctgggactccaggtaagtgccactgtgcccatttaatttttgtgtttttttgtagagacagggttttaccatgttacccagggtggtttggaactcctgggctcaaatgatccacctgcctcagtctcccaaagtgctgggattacagacgtgagccgccatgcccagcaaggtataaattttaattaaatatttaaatgatatactcagggcagtattccaaaaaatggtaattcctcaggccgcagaagtaaaatggtgtcgacgcggccgcgaatttagtagtagtaggc

SEQ ID NO: 255888 - DNA, 427 bp, Homo sapiens
gcaggcccagccaatttttcaaaacattttttgtagagatggagtcttgctgtgttgcccaggctagtcttgaactcccaagctggagcaatcctcagcctgccaaagtgctggaattacaggcataagctgtaattacgcctggcttctttgctcctgttttttccctctgcctttgctcctgtttttttccctctgccttttccagatgtactttgtacatctgggcaaactgaggctccaagaggatttatcctcttgggggataaatctttgggaaatcttttggggacttcccaaagtcccccaagaagcatccgctggataaggtctccactcttcaggctccgccagttatctggcacctgtgtgaccttgggcaagttcactaacctctctgagcttgattttcacttcctggaaatgg

SEQ ID NO: 255889 - DNA, 485 bp, Homo sapiens
ccaggctggtctcgaagtcctgacctcgtgatctgcccacctcagcctcccaaagtgctgggattacaggtgtgaaccaccatgcccggcagtgattcatttctaaacccagcttgttaaaaggtgaggactctcctatctggactaaaccaatagtttagtttagttaggatagatgttgatgctcatatctgggcttggaaccacaggaaagatcttcttggacaaaggtcacagaggattaccactcttgcatattgtataaatcatcaagtgaaactatcataagagaacatagcacatgcgtgagattttgtcttttgaatgtacacccaggcaacagtaaagattgtcattctcccatataaacacatctcactgttgaggttctgaatgtcagacacagagactgtgaaaagttgaataattgactctcacgtggatctggactagaggtggactggtgactctcagagcaagattca

SEQ ID NO: 255890 - DNA, 4670 bp, Homo sapiens
agctgccctgagggtggtctcctgtgcagttaagtctcacctgagcagctccatgggagggggcttgccccccgcctgcacacgggctcagaaggccagggcgacagccgggcacgatgtgacagcacatccagcacacccaagaccccagatggtggacactcctctcaggagataaagtctgagacctcatccaatcccagctctccagaaatctgccccaacaaggagaagcccttcatgaagttgaaggaaaacggccgcgccatctcccgctcctcctccagcaccagcagcgtcagcagcactgcaggggagggcgaggccatggaggagggcgacagtgggggcagccagccgtccacgacctcacccttcaagcaggaggtgtttgtctacagcccgtccccgagcagcgagagccccagcctgggggcagctgccaccccaatcatcatgagccggagtcccacagatgccaaaagcagaaactccccgagatcgaacctgaaattccgctttgacaagctcagccatgccagctctggtgcgggtcactaatgtgaaagtggagtccttcgcctgtccaagggaatcccctcttctgtcctggaaaaggctcctgacctcccagtgtgatgtccgggtcctttatcatcctattcatcctggagaggaaaagtgtcgggcaaagggggatctggggggagctcagcagtgactggggagctggtctgcctcagagacagagtagggggtgggagcagagcctcggtgagggtcttggccacagggcagtgccttcctgaacgtggcaggctttactaccaggaacgcactcggtggtggaggccccatgttcccaggagccaagattcgtagcatccttgaggccatcctgataaaattcggcgctattgcccccgtagctctggagctctaaaccgtctatctgcttctgtgctgaacgcctttcccatctgctgacgtaggcccagggctgccctgcccctgctgccagtgtaccgtgagcggggctccagccagttcaagctcagagccagagctggacgggccagaactgcgctgcacacttcctggactgaggcggggactttgggtcccacccggtttctcctgattatggctgctgtggggtgaggggagggaggggcagccccgaggcagtctcttccctttgagaagatattttcccacaaaggggtgggaagccaggagtgagaaggaattcagggagagcaaaggagccagtgctgagatgctgctgtgttggttgaggaaaacctcgggcctgagggccaggccggagcccaggtctctgctgacaatgggggttcaaggaagacgtcgttatctcccctccccacttactcgaggagagaggtgagggggggatgacttgcgggttctgatcaggcccctgggtggggaaggggcacagtgtccctcagcagcttacgcccctggagtcttggggggcccagcctggccctggggccttttccagctactgtgcccttgggcagctgcgtctggggctcaaccccccaatcctgttcccctctccagctgcgggtctgtaggcagctgtcacatctgaagggtttctgcaacctggaccccatctgggtgtgggtcagaccctgtgacccacatgccacccccaccctccacagagcccccttgctgggacagccagctcacctccaaggacatcccctcctggcttctcccccttccgagtctgcagcgccgtgggcttctctgccgatgggcccgggttggggttaaggtgggcatcctccaggtacaacgagcctgaagagcccctttcagtgcagacggggctgcagagtgacactggctgggcacctgccccacgaccaatgacaaggatttccagctgaatgctttattcccatagggatctggacctgtgcccaagatataaatactacactttttttttttttttttttttaactgacattgtgaaattctccctatagcttttgccattcaagcaacattgtgatctttcttccccgccacgtgtgtgggaatgattgagtcctgtttgcaagctggagaggagctctcccttcgctagtactttctctaaagtactagtctagtaaaatttattcttgttagaaggtcaacaaaatatctgtttagcttttatgaagagtcaccgtagcagcccccacggctggaaagaggcccgtacgttctggacgcgttttgttggctgggcttctggaggcactggcaaggtcaaactgcatttctttaagaacagttgcaggatctggcttgcctctgtgggaagccggcattacaggtgcttggtggatgggccgtgtcacattgccatctggggtcctttggggtttccaggttgtcagcatgctgtcccatttgggaatcccatacctgcctgtccccactgcgctggctgacccttgctgcctgctgcctcttgggagggctttgtccctgcctctgagctggtgggcaggatggctgggtggcccccagagaagcacagacctgggatggggtctccatgcccggtttgctgttggaatgatctgaacaggaccccaaatgcctcttccctctggtcatgcctcactatctctaggagctccatcctgtggcttccagagtgtgcacttccagcccacccgggcagtgctgagagggaggaggagaacaaggatggcccagcctcccctccctcccctagaccacggggcgggcagctcgggttcctggagggctgtttcccccacgctgtccctacatctgctctgatctaaaatgtctttccttttatgctgcgcccagtcttggggctcaaagatttgcccaaacctcattggccctcgtgactaggctcatctagatggtgctcacgctggtgtttgaggcatttccactgtgatctccacgaggggatgttttccgggacacatctctggctctgggaactgcctgactcactgaagaaactacttttcaggcactgtagggtcacccatatgcctccagctcagttgacgcttaaaaacaggtgcagaaaagctcgcgatggaaggtcttaatgagagtgtctgtctatgccagtcatgtaaaatgacgtttcttgaaaaagattcagtggttcagctttgtcagcatcatctcaacacaagcctgctggctctttttagcatctcatccaaccatgtcatcgtccagatgagaaatcttagcccaggtgaggggaataacttgcttgaggtcacacagctggctgttggcaaagctgggattagaaccctcaacccagggtcccttcctctgcagcgcctacatggttggttgaataagtggctgcgtttcctggggccctgggttttggggaagccagttagctgctgctttggcactggcatggaggtgagcagtcaaggatgctggtgaggccgcagtttctgctctttttcatcaggggggatagtctctaggatttttcagtgaggacccttgggctttggatgcagcttgaaccaagaaaacgaggagggaaagggattcagtgaactattcctcagtgggatcggttcttcagctcctgatgggggctgtgtaatgggggcagaggccagggaaaaagatgctgttcacccaccctcagcttcccttttcctaaattaagaggaaaagtggtcaaagaaaaactcttcatttctccctgattcttaagcgaaggtggttaatagaaactcaggctcccgtgacaaggcaggacaagagcctgtttcgctttcctccctgaccctgccaggtgccaactcaaacactacctttctcattggtttctaagtcagtagagacagatctgttttaagcagttgggggttcgagtagatctcatgggtacaggaggccagcagggaccaggccagtcagccatgctcaggacccctcggctcctcccccagcctctagctaccctgtatcgaggcaaggggaggccagtaaagtttgccaagcctgatcctgcagcctggtggggctggctggggtattcttttaccaaactctgttttaccgccagccccttgtacaccccaatcccatgtctccctcccttcagctggaccgtgtgcccctttgggaggaagaagacaagccccactagggccaagggcagcagagccctgccgagtgagaggctgtggggcagcggctctgtcctgtgccttaccagccctggggagggggacatttggctggaagactggaatttaattgccatcgtctttgattttgtgacatttctgcttggaagtgtgaactaccctcccccccccgcttcctgctccttagcatgcgtgcagctctctcctgttttgggtgttccccttggacactccagctcggggactgctggcgtgtgaatgtgcagattcccctgtgtggtcgaacctaagaactgtggcttggaagtgatgctccatgtgacgacgactttgctttctttcctcttagtgaggaggtgattcgtagatcccaactgcctatgtaatgtaaataatgtacatttaatttattgctatggtagcacattgtatttgttaatgtacaaaacaaattct

SEQ ID NO: 255891 - DNA, 5532 bp, Homo sapiens
tgctctctaaggttccccgccccttgcgcacttctccaggctgaccctggaggaggagctatttgggaacaatgaggagagcccagcttttaaggagttcttggacctgctgggggacacgatcacactgcaggatttcaaaggtttccgaggaggcctggacgtgacccacggacagacaggggtggaatcagtgtacacaacattccgggacagggagatcatgtttcacgtttccacaaagctgccatttaccgacggagacgcccagcagctccagagaaagagacacattggaaatgacatcgtggccatcatcttccaagaggaaaacacgccgtttgtcccagacatgatagcctccaatttcttacatgcctacatcgtcgtgcaggtcgagaccccaggcacagagaccccatcctacaaggtctctgtcactgcgcgggaagatgtgcccacctttggtccacctctgcccagtccccccgttttccagaagggcccggaattcagggagtttctgctcaccaagctcaccaatgccgagaacgcctgctgcaagtcggacaagtttgcaaagctggaggaccggaccagggctgccctcctggacaaccttcacgatgagctccacgcccacacacaggccatgctgggactgggcccagaggaggacaagtttgagaatggaggccacggggggttcctggagtcttttaagagggccatccgcgtacgcagccactccatggagaccatggtgggcggccagaagaagtcgcacagtgggggcatccctggcagcctcagcgggggcatctcccacaacagcatggaggtcaccaagaccaccttctcgcctccagtggtggcggcaacggtgaagaaccagtcacggagtcccatcaagcgacgctcggggctcttcccccgcctgcacacgggctcagaaggccagggcgacagccgggcacgatgtgacagcacatccagcacacccaagaccccagatggtggacactcctctcaggagataaagtctgagacctcatccaatcccagctctccagaaatctgccccaacaaggagaagcccttcatgaagttgaaggaaaacggccgcgccatctcccgctcctcctccagcaccagcagcgtcagcagcactgcaggggagggcgaggccatggaggagggcgacagtgggggcagccagccgtccacgacctcacccttcaagcaggaggtgtttgtctacagcccgtccccgagcagcgagagccccagcctgggggcagctgccaccccaatcatcatgagccggagtcccacagatgccaaaagcagaaactccccgagatcgaacctgaaattccgctttgacaagctcagccatgccagctctggtgcgggtcactaatgtgaaagtggagtccttcgcctgtccaagggaatcccctcttctgtcctggaaaaggctcctgacctcccagtgtgatgtccgggtcctttatcatcctattcatcctggagaggaaaagtgtcgggcaaagggggatctggggggagctcagcagtgactggggagctggtctgcctcagagacagagtagggggtgggagcagagcctcggtgagggtcttggccacagggcagtgccttcctgaacgtggcaggctttactaccaggaacgcactcggtggtggaggccccatgttcccaggagccaagattcgtagcatccttgaggccatcctgataaaattcggcgctattgcccccgtagctctggagctctaaaccgtctatctgcttctgtgctgaacgcctttcccatctgctgacgtaggcccagggctgccctgcccctgctgccagtgtaccgtgagcggggctccagccagttcaagctcagagccagagctggacgggccagaactgcgctgcacacttcctggactgaggcggggactttgggtcccacccggtttctcctgattatggctgctgtggggtgaggggagggaggggcagccccgaggcagtctcttccctttgagaagatattttcccacaaaggggtgggaagccaggagtgagaaggaattcagggagagcaaaggagccagtgctgagatgctgctgtgttggttgaggaaaacctcgggcctgagggccaggccggagcccaggtctctgctgacaatgggggttcaaggaagacgtcgttatctcccctccccacttactcgaggagagaggtgagggggggatgacttgcgggttctgatcaggcccctgggtggggaaggggcacagtgtccctcagcagcttacgcccctggagtcttggggggcccagcctggccctggggccttttccagctactgtgcccttgggcagctgcgtctggggctcaaccccccaatcctgttcccctctccagctgcgggtctgtaggcagctgtcacatctgaagggtttctgcaacctggaccccatctgggtgtgggtcagaccctgtgacccacatgccacccccaccctccacagagcccccttgctgggacagccagctcacctccaaggacatcccctcctggcttctcccccttccgagtctgcagcgccgtgggcttctctgccgatgggcccgggttggggttaaggtgggcatcctccaggtacaacgagcctgaagagcccctttcagtgcagacggggctgcagagtgacactggctgggcacctgccccacgaccaatgacaaggatttccagctgaatgctttattcccatagggatctggacctgtgcccaagatataaatactacactttttttttttttttttttttaactgacattgtgaaattctccctatagcttttgccattcaagcaacattgtgatctttcttccccgccacgtgtgtgggaatgattgagtcctgtttgcaagctggagaggagctctcccttcgctagtactttctctaaagtactagtctagtaaaatttattcttgttagaaggtcaacaaaatatctgtttagcttttatgaagagtcaccgtagcagcccccacggctggaaagaggcccgtacgttctggacgcgttttgttggctgggcttctggaggcactggcaaggtcaaactgcatttctttaagaacagttgcaggatctggcttgcctctgtgggaagccggcattacaggtgcttggtggatgggccgtgtcacattgccatctggggtcctttggggtttccaggttgtcagcatgctgtcccatttgggaatcccatacctgcctgtccccactgcgctggctgacccttgctgcctgctgcctcttgggagggctttgtccctgcctctgagctggtgggcaggatggctgggtggcccccagagaagcacagacctgggatggggtctccatgcccggtttgctgttggaatgatctgaacaggaccccaaatgcctcttccctctggtcatgcctcactatctctaggagctccatcctgtggcttccagagtgtgcacttccagcccacccgggcagtgctgagagggaggaggagaacaaggatggcccagcctcccctccctcccctagaccacggggcgggcagctcgggttcctggagggctgtttcccccacgctgtccctacatctgctctgatctaaaatgtctttccttttatgctgcgcccagtcttggggctcaaagatttgcccaaacctcattggccctcgtgactaggctcatctagatggtgctcacgctggtgtttgaggcatttccactgtgatctccacgaggggatgttttccgggacacatctctggctctgggaactgcctgactcactgaagaaactacttttcaggcactgtagggtcacccatatgcctccagctcagttgacgcttaaaaacaggtgcagaaaagctcgcgatggaaggtcttaatgagagtgtctgtctatgccagtcatgtaaaatgacgtttcttgaaaaagattcagtggttcagctttgtcagcatcatctcaacacaagcctgctggctctttttagcatctcatccaaccatgtcatcgtccagatgagaaatcttagcccaggtgaggggaataacttgcttgaggtcacacagctggctgttggcaaagctgggattagaaccctcaacccagggtcccttcctctgcagcgcctacatggttggttgaataagtggctgcgtttcctggggccctgggttttggggaagccagttagctgctgctttggcactggcatggaggtgagcagtcaaggatgctggtgaggccgcagtttctgctctttttcatcaggggggatagtctctaggatttttcagtgaggacccttgggctttggatgcagcttgaaccaagaaaacgaggagggaaagggattcagtgaactattcctcagtgggatcggttcttcagctcctgatgggggctgtgtaatgggggcagaggccagggaaaaagatgctgttcacccaccctcagcttcccttttcctaaattaagaggaaaagtggtcaaagaaaaactcttcatttctccctgattcttaagcgaaggtggttaatagaaactcaggctcccgtgacaaggcaggacaagagcctgtttcgctttcctccctgaccctgccaggtgccaactcaaacactacctttctcattggtttctaagtcagtagagacagatctgttttaagcagttgggggttcgagtagatctcatgggtacaggaggccagcagggaccaggccagtcagccatgctcaggacccctcggctcctcccccagcctctagctaccctgtatcgaggcaaggggaggccagtaaagtttgccaagcctgatcctgcagcctggtggggctggctggggtattcttttaccaaactctgttttaccgccagccccttgtacaccccaatcccatgtctccctcccttcagctggaccgtgtgcccctttgggaggaagaagacaagccccactagggccaagggcagcagagccctgccgagtgagaggctgtggggcagcggctctgtcctgtgccttaccagccctggggagggggacatttggctggaagactggaatttaattgccatcgtctttgattttgtgacatttctgcttggaagtgtgaactaccctcccccccccgcttcctgctccttagcatgcgtgcagctctctcctgttttgggtgttccccttggacactccagctcggggactgctggcgtgtgaatgtgcagattcccctgtgtggtcgaacctaagaactgtggcttggaagtgatgctccatgtgacgacgactttgctttctttcctcttagtgaggaggtgattcgtagatcccaactgcctatgtaatgtaaataatgtacatttaatttattgctatggtagcacattgtatttgttaatgtacaaaacaaattct

SEQ ID NO: 255892 - DNA, 5336 bp, Homo sapiens
cggcccctggcatccatgtgcatggctctggacgaacatctggatggagaggagcagtggggagttgggtgcgtggatgtggagctggggcagagggccgggctgggattcactcttccttctgctcctctaccaccagggtggagctgtggcagtggtgggacgacccagggagaagggcagggggagtagagcaggaggccgagcacgcagccttcatcttagctgcagcatttgtgagcacgaagctcagctcagcagtaggtccacaccgttgctgggccgggctgggcagaatgtcagcctccaggccaggtgtctggagctcacaaggagcaggcacatctctgctctcagagccagcttctccatccccaccctcttcccttctaggaccggaccagggctgccctcctggacaaccttcacgatgagctccacgcccacacacaggccatgctgggactgggcccagaggaggacaagtttgagaatggaggccacggggggttcctggagtcttttaagagggccatccgcgtacgcagccactccatggagaccatggtgggcggccagaagaagtcgcacagtgggggcatccctggcagcctcagcgggggcatctcccacaacagcatggaggtcaccaagaccaccttctcgcctccagtggtggcggcaacggtgaagaaccagtcacggagtcccatcaagcgacgctcggggctcttcccccgcctgcacacgggctcagaaggccagggcgacagccgggcacgatgtgacagcacatccagcacacccaagaccccagatggtggacactcctctcaggagataaagtctgagacctcatccaatcccagctctccagaaatctgccccaacaaggagaagcccttcatgaagttgaaggaaaacggccgcgccatctcccgctcctcctccagcaccagcagcgtcagcagcactgcaggggagggcgaggccatggaggagggcgacagtgggggcagccagccgtccacgacctcacccttcaagcaggaggtgtttgtctacagcccgtccccgagcagcgagagccccagcctgggggcagctgccaccccaatcatcatgagccggagtcccacagatgccaaaagcagaaactccccgagatcgaacctgaaattccgctttgacaagctcagccatgccagctctggtgcgggtcactaatgtgaaagtggagtccttcgcctgtccaagggaatcccctcttctgtcctggaaaaggctcctgacctcccagtgtgatgtccgggtcctttatcatcctattcatcctggagaggaaaagtgtcgggcaaagggggatctggggggagctcagcagtgactggggagctggtctgcctcagagacagagtagggggtgggagcagagcctcggtgagggtcttggccacagggcagtgccttcctgaacgtggcaggctttactaccaggaacgcactcggtggtggaggccccatgttcccaggagccaagattcgtagcatccttgaggccatcctgataaaattcggcgctattgcccccgtagctctggagctctaaaccgtctatctgcttctgtgctgaacgcctttcccatctgctgacgtaggcccagggctgccctgcccctgctgccagtgtaccgtgagcggggctccagccagttcaagctcagagccagagctggacgggccagaactgcgctgcacacttcctggactgaggcggggactttgggtcccacccggtttctcctgattatggctgctgtggggtgaggggagggaggggcagccccgaggcagtctcttccctttgagaagatattttcccacaaaggggtgggaagccaggagtgagaaggaattcagggagagcaaaggagccagtgctgagatgctgctgtgttggttgaggaaaacctcgggcctgagggccaggccggagcccaggtctctgctgacaatgggggttcaaggaagacgtcgttatctcccctccccacttactcgaggagagaggtgagggggggatgacttgcgggttctgatcaggcccctgggtggggaaggggcacagtgtccctcagcagcttacgcccctggagtcttggggggcccagcctggccctggggccttttccagctactgtgcccttgggcagctgcgtctggggctcaaccccccaatcctgttcccctctccagctgcgggtctgtaggcagctgtcacatctgaagggtttctgcaacctggaccccatctgggtgtgggtcagaccctgtgacccacatgccacccccaccctccacagagcccccttgctgggacagccagctcacctccaaggacatcccctcctggcttctcccccttccgagtctgcagcgccgtgggcttctctgccgatgggcccgggttggggttaaggtgggcatcctccaggtacaacgagcctgaagagcccctttcagtgcagacggggctgcagagtgacactggctgggcacctgccccacgaccaatgacaaggatttccagctgaatgctttattcccatagggatctggacctgtgcccaagatataaatactacactttttttttttttttttttttaactgacattgtgaaattctccctatagcttttgccattcaagcaacattgtgatctttcttccccgccacgtgtgtgggaatgattgagtcctgtttgcaagctggagaggagctctcccttcgctagtactttctctaaagtactagtctagtaaaatttattcttgttagaaggtcaacaaaatatctgtttagcttttatgaagagtcaccgtagcagcccccacggctggaaagaggcccgtacgttctggacgcgttttgttggctgggcttctggaggcactggcaaggtcaaactgcatttctttaagaacagttgcaggatctggcttgcctctgtgggaagccggcattacaggtgcttggtggatgggccgtgtcacattgccatctggggtcctttggggtttccaggttgtcagcatgctgtcccatttgggaatcccatacctgcctgtccccactgcgctggctgacccttgctgcctgctgcctcttgggagggctttgtccctgcctctgagctggtgggcaggatggctgggtggcccccagagaagcacagacctgggatggggtctccatgcccggtttgctgttggaatgatctgaacaggaccccaaatgcctcttccctctggtcatgcctcactatctctaggagctccatcctgtggcttccagagtgtgcacttccagcccacccgggcagtgctgagagggaggaggagaacaaggatggcccagcctcccctccctcccctagaccacggggcgggcagctcgggttcctggagggctgtttcccccacgctgtccctacatctgctctgatctaaaatgtctttccttttatgctgcgcccagtcttggggctcaaagatttgcccaaacctcattggccctcgtgactaggctcatctagatggtgctcacgctggtgtttgaggcatttccactgtgatctccacgaggggatgttttccgggacacatctctggctctgggaactgcctgactcactgaagaaactacttttcaggcactgtagggtcacccatatgcctccagctcagttgacgcttaaaaacaggtgcagaaaagctcgcgatggaaggtcttaatgagagtgtctgtctatgccagtcatgtaaaatgacgtttcttgaaaaagattcagtggttcagctttgtcagcatcatctcaacacaagcctgctggctctttttagcatctcatccaaccatgtcatcgtccagatgagaaatcttagcccaggtgaggggaataacttgcttgaggtcacacagctggctgttggcaaagctgggattagaaccctcaacccagggtcccttcctctgcagcgcctacatggttggttgaataagtggctgcgtttcctggggccctgggttttggggaagccagttagctgctgctttggcactggcatggaggtgagcagtcaaggatgctggtgaggccgcagtttctgctctttttcatcaggggggatagtctctaggatttttcagtgaggacccttgggctttggatgcagcttgaaccaagaaaacgaggagggaaagggattcagtgaactattcctcagtgggatcggttcttcagctcctgatgggggctgtgtaatgggggcagaggccagggaaaaagatgctgttcacccaccctcagcttcccttttcctaaattaagaggaaaagtggtcaaagaaaaactcttcatttctccctgattcttaagcgaaggtggttaatagaaactcaggctcccgtgacaaggcaggacaagagcctgtttcgctttcctccctgaccctgccaggtgccaactcaaacactacctttctcattggtttctaagtcagtagagacagatctgttttaagcagttgggggttcgagtagatctcatgggtacaggaggccagcagggaccaggccagtcagccatgctcaggacccctcggctcctcccccagcctctagctaccctgtatcgaggcaaggggaggccagtaaagtttgccaagcctgatcctgcagcctggtggggctggctggggtattcttttaccaaactctgttttaccgccagccccttgtacaccccaatcccatgtctccctcccttcagctggaccgtgtgcccctttgggaggaagaagacaagccccactagggccaagggcagcagagccctgccgagtgagaggctgtggggcagcggctctgtcctgtgccttaccagccctggggagggggacatttggctggaagactggaatttaattgccatcgtctttgattttgtgacatttctgcttggaagtgtgaactaccctcccccccccgcttcctgctccttagcatgcgtgcagctctctcctgttttgggtgttccccttggacactccagctcggggactgctggcgtgtgaatgtgcagattcccctgtgtggtcgaacctaagaactgtggcttggaagtgatgctccatgtgacgacgactttgctttctttcctcttagtgaggaggtgattcgtagatcccaactgcctatgtaatgtaaataatgtacatttaatttattgctatggtagcacattgtatttgttaatgtacaaaacaaattct

SEQ ID NO: 255893 - DNA, 636 bp, Homo sapiens
  misc_feature (508)..(508): n is a, c, g, or t
tgctctctaaggttccccgccccttgcgcacttctccaggctgaccctggaggaggagctatttgggaacaatgaggagagcccagcttttaaggagttcttggacctgctgggggacacgatcacactgcaggatttcaaaggtttccgaggaggcctggacgtgacccacggacagacaggggtggaatcagtgtacacaacattccgggacagggagatcatgtttcacgtttccacaaagctgccatttaccgacggagacgcccagcagctccagagaaagagacacattggaaatgacatcgtggccatcatcttccaagaggaaaacacgccgtttgtcccagacatgatagcctccaatttcttacatgcctacatcgtcgtgcaggtcgagaccccaggcacagagaccccatcctacaaggtctctgtcactgcgcgggaagatgtgcccacctttggtccacctctgcccagtccccccgttttccagaagtgcgcntgggtgcgcacccaggcgcacttctgggagctcctcatgaacgtgaagagggggacctacctgccgcagacgtacatcatccaggaggagatggtgtcacggagcatgtcagtgacaagaaggcgcca

SEQ ID NO: 255894 - DNA, 536 bp, Homo sapiens
tgctctctaaggttccccgccccttgcgcacttctccaggctgaccctggaggaggagctatttgggaacaatgaggagagcccagcttttaaggagttcttggacctgctgggggacacgatcacactgcaggatttcaaaggtttccgaggaggcctggacgtgacccacggacagacaggggtggaatcagtgtacacaacattccgggacagggagatcatgtttcacgtttccacaaagctgccatttaccgacggagacgcccagcagctccagagaaagagacacattggaaatgacatcgtggccatcatcttccaagaggaaaacacgccgtttgtcccagacatgatagcctccaatttcttacatgcctacatcgtcgtgcaggtcgagaccccaggcacagagaccccatcctacaaggtctctgtcactgcgcgggaagatgtgcccacctttggtccacctctgcccagtccccccgttttccagaagtgcgcctgggtgcggggagtcctctagagtgacg

SEQ ID NO: 255895 - DNA, 551 bp, Homo sapiens
cagggcctgtgctggcgatgctcacaggagtattttgtttgtgttctgggaagaggaggagggagaaggtgagtagctttgtaaggagcgtggctcccgtaggggcagcgctcgtctcttccctccaggtccgtaccatgactctgtttcactcaggtctctgtcactgcgcgggaagatgtgcccacctttggtccacctctgcccagtccccccgttttccagaaggtaggacactcttccttctgcccctctcgcatccacgatgccaggtctcagtgcttgagtagcaatggttgggatggagccaaattcaggctgggaacattagggagctccttttgcaggttttggggggaacctcctttcttggggtctctccccacctctttcatgctgccagtctggcccagcataggaccacttgtcagggtgtttgacactggggttgcttttctgctgaaagacgggcttttatgttgagccccggtcaaggagccttgggcaggaatgagctccagtcgtggaagtgccactgtggcttcccagga

SEQ ID NO: 255896 - DNA, 744 bp, Homo sapiens
cgcttacaggtaggtggaggtggggatgggagattgtttacatacccagagattgatgaaataagtttattaaaaacaataagaaacagaattcttactgttggaaagagtagttataaatacaaaacaggagaaaattggaatagactatgggctatggaattggaattaaaacatcaatgttgtgttatttttctattgctgccttaacaaattatcacacactttatgatttacaatacaaatttattattttacagttctgaaagttagaaatctaacataggtcttactgggctaaaatcaaggtgttggcaggggtgcatttctttatgaaacgcaagatgtcatttttttcccatgcctttttcagcttctagaggctgcctgggtgccttagattgtgccctcttcctccatcttcaaagccagcaatgacagacttttgagtttgccacatctgcgtcacaacttaattcttgaaaaggccgtataaaatgctgcttcctcaggatgcctgctctttatcagcatccctgtctccatggtgatagccttcttgccgtaatcagagggatgacctacttaaccatggaaatattggcttcattcgagttaactttgctggtaatatgcacgtatgtgtttaattccatttttgatccaaactgccacaattgtatctgtctatagtaggttctctaagaagaatgtaaaatccgtttttgtcttgcttgcccgaaa

SEQ ID NO: 255897 - DNA, 500 bp, Homo sapiens
cgcttacaggtaggtggaggtggggatgggagattgtttacatacccagagattgatgaaataagtttattaaaaacaataagaaacagaattcttactgttggaaagagtagttataaatacaaaacaggagaaaattggaatagactatgggctatggaattggaattaaaacatcaatgttgtgttatttttctattgctgccttaacaaattatcacacactttatgatttacaatacaaatttattattttacagttctgaaagttagaaatctaacataggtcttactgggctaaaatcaaggtgttggcaggggtgcatttctttatgaaacgcaagatgtcatttttttcccatgcctttttcagcttctagaggctgcctgggtgccttagattgtgccctcttcctccatcttcaaagccagcaatgacaggtgaggcatgctcacattgcatcactaccttcctttttcacttttaaggtcccttgtga

SEQ ID NO: 255898 - DNA, 2236 bp, Homo sapiens
  misc_feature (1444)..(1444): n is a, c, g, or t
  misc_feature (1895)..(1895): n is a, c, g, or t
  misc_feature (1897)..(1897): n is a, c, g, or t
  misc_feature (2096)..(2096): n is a, c, g, or t
gcgatgttactttaaacccttaagccaacaccaccaacctgggaatactgtctcatgtgaattaatattggtcaatataaaacacgaagacacaaacccctaggaccttacatgttcaaatgattactgaattaggcctagcaatttctcctctccaatattaagagttataaaaaaaatatatttacactttcatcgaaagaacaaacagaaagggaagaaatgatttgcaatttgaagggactgagcccaaatatttctttatctctttatgtgtatgtgatgaaaaagttgctcaacaattatttcttgacatgtcaacaaaaatttaccaaaggctttggttgcaacgaaacttgatttacagacagtgaaatttgaatttcatagaattttcatgtcatgatttttttcccagtcatttaaaaaagttaaagcccttcttagctccaaggcagtacaaaaacaggagattggttggatttggcctatggggcatagtttgctgactcctgttcttcaccaaggcagcaaattagaatcatgtaacagctttaaaaaattatatgtctctcccacacacccagatgcttaggccctatctgtagaaatcaatttcctggctagatgaaaggtgagggtgagggggagtacaataaaactatgagatttgttaaatattccagatgattctaatgtgtagccagggcttaagactatagaatttagaatcaaatggacattccatagcttcctaaattttgacaagacacctattctttcagattcttggtttccgcatcgatactgttcagaactggcacataagtgctcagtattatcattccctttcactgctgcactgtacacagtaactgcttagtacacgtctgatcaacacaattctgcacaaaacatactcctctcctttaaataatttaagaaaaataaggcaagaacacatgtaaaccaaaacgcagaaatgtctgtaatgaaataactattaacacaatacattgctgtttgcagaaatgtgacaaccagcaacaaaaagaagagactccaggattatattttagaatagcagaaagggagtaacagtgaaaagatcctaagaataacatacctgtttgataaaagacccaaaacactgagagtacttccttcttctattaattaattataggtcaactatcacttgctgaccaaagaacagagtactaagtcttccagcttcctcagcatttctgcctaatgccttggggtaggtgaaatgtgcccccaaagtattgagagtctgctcagttttaaatgataaatacttgaccattgtgataggaagctttcaacaattagggtgaaaaaaaatggagaaaaacagccacttcctctaccacaaaattatgtatcgtttaaggtataaaggtttggttttcattaatcnacttaatgttgagttataaattttttaaatactatgtataattttcaggaaggtggcttaataaaaaaatatacaaaacaacagcttacctattaaccaggaacaaatataaaacacaaagtatatcagatctcgatagcaacaccaacaaaattaaaacatctagaaatatatttaataagtaatacgccagctgatatttaaaaagccatgaagtttactgaaagatatggaatatctaaataattcattctaatgtcttaaacttctaattgaaagatgccaaattaatatacgtaactagtgcaattccaattaaagccccaaagacgtttatggccaggcgcggtggctcatgcctgtaatctcaatactttgggaggctgaggcgggtggatcacttgaggtcaggagttcaagaccagcctggccaacatggcaaaaccctgtntntactaaaaatagaaaaaattagtggggtatggtggtgcacaccctgtagtcccaactgctggggaggctgacgcaggagaattgcttgaaccctggagagattcaaatgattgcagtgagccgagagagatcacaccactgcaatccagcccgggtgtcctagtgaggctgtctcaaaaaccaaacaaacaaacaaaanaaaaaaacccaaaaggacgtttgtaagtggtgtaaaaaaaagtctagagtaatttaaatatgactaacaaagagaacttattccaccacatagaaccataaagttccagtaatcacaactatgtaattaaaaaaaaaaaa

SEQ ID NO: 255899 - DNA, 4832 bp, Homo sapiens
  misc_feature (1486)..(1486): n is a, c, g, or t
  misc_feature (3453)..(3453): n is a, c, g, or t
  misc_feature (4515)..(4515): n is a, c, g, or t
tgagtttgagtcaagctccgagtcctcgccctcatcctcggaggatgaggaggaggtagtggccagggaagaggaggaagaagaggaggaggaggagatggtggccgaggaaagcatggcttctgcaggccctgaggactttgagcaggacggggaggaagcggctctggccccgggggcacctgcagtggactcgttgggcatggaagaggaggtggacatcgagactgaggctgtggcccctgaggagcggccctccatgctggacgagccccccttgcctgtgggtgttgaagagccagcggactccagggagccgcctgaggaaccaggcctgagccaggaaggggccatgttgctgtctccagagccccctgccaaggaggtggaggctcgacccccattgtcccctgagcgagctccagaacatgacctggaagtggagccggagccccctatgatgctccccttgccgctgcaaccaccattgccgcccccacgaccaccccggccacccagcccaccgccggagcctgagaccacagatgcctcacacccatctgtccctccggagccccttgccgaggaccaccccccgcatactccaggcctctgtggcagcctggccaagtcgcagagcacagagacggtgccagccacaccaggcggggagcccccgctatcagggggcagcagtggcctgtccctgagctctccgcaagtgcccggcagccccttctcctacccagccccgtcccctagcttgagcagtgggggcctccctcggacacctggccgggacttcagcttcacacccaccttctccgagcccagcgggcccttgctcctgcccgtctgcccactccccactggccgacgcgatgaacgctccgggcccctggcctccccggtgctcctggagacgggcctgcccctccctctgccccttcccctgcccttgcccttggcattgcccgccgtcttgcgggcccaggctcgtgcgcccaccccgctgccacccctgctgcccgcccccctggcctcttgccctcccccaatgaagaggaagccgggccggccccggcgatccccaccatctatgctctccttggatgggcccttggtccgaccaccagcaggggccgcccttggaagggaactcctgctcctgccgggccagccacagacccccgtcttccccagcacccatgacccccggacggtgaccctggacttccggaacgcggggatcccagcccctccaccaccccttcccccccagccacccccacccccacctcccccacctgtagagcccaccaagctgccctttaaggagctagacaaccagtggccctccgaggccattcctccgggcccccgtgggcgcgatgaggtcactgaggaatacatggagttggccaagagccgggggccgtggcgccggccacctaagaagcgccatgaggacctggtgccacctgcnggctcgcccgaactctcgccaccccagcccctcttccggccccgctcggagtttgaggagatgaccatcctgtatgacatctggaacggtggcatcgatgaggaggacatccgcttcctgtgtgtcacctacgagcgactgctacagcaggacaatggcatggactggcttaacgacacgctctgggtctaccatccctccaccagcctctcttcagctaagaagaagaaacgggacgatggcatccgcgagcacgtgacgggctgtgcccgcagtgagggcttctacaccatcgacaagaaggacaagctcagatacctcaacagcagccgtgccagcaccgatgagccccccgcagacacccagggcatgagcatcccagcacagccccacgcctccacccgggcaggctcggagcggcgttcggagcagcgccgcctgctgtcctccttcactggcagctgtgacagtgacctgctcaagttcaaccagctcaagttccggaagaaaaagctcaagttctgcaagagccacattcacgactggggcttgttcgccatggagcccatcgcggctgacgagatggtcatcgagtacgtgggccagaatatccgtcaggtgatcgcagacatgcgggagaagcgttatgaggacgagggcatcgggagcagctacatgttccgggtggaccatgacaccatcatcgacgccaccaagtgcggcaacttcgcgcgcttcatcaaccacagctgcaaccccaactgctatgccaaggtgatcacggtggagtcacagaagaagatagtcatctactcgaagcagcacattaacgtcaatgaggagattacctatgactataagttccccatcgaggacgtcaagatcccctgcctctgtggctccgagaactgccgggggaccctcaactaggccccggcaccagactcaaaggatgtcagccgtagccctgggactcccgagcgtggagcccctggccccggggcccggccccccgcgcccgcccccatttcaggtgctgtcctctacccagcggccattcagggcctggcgccccacactaccccctggagcccctggctccggcccctccgcgggaaagggcttctctgtcgttcagcccacgtctctctcattttaacaaacgcccctttcaggatttctgtttaactccagcatcagcttctctctctccgtctctcctcccctctctctcttctctgtctcttctctctcccaccatcaccctcggcctcttcctgtgaatgctgctacgttgttttgtcttctctatttttttcctcgttgtgagaaaagacatttaaccgttgaaatgtgaaggtggaatcagagaggggccccgcgggggtctgcagaggcctcagtgtggctgtgcgtggcccgtgtcctggaagccacccggacctggacgcagggccaggtgctgtgggaaggatggaggcccccacggccttgacctcagaacactacgccctgaaagcgcccctcactgcccgtgggcacagtgaggagaccccacacctttccccacccgagctgcagcctgttccttccccagaggcctggggcaccactgacccggtggaccctgatggagctaagctgtcccaggcaggggtctccgctctgggctttccctgccacctcacaccccagcaccccctaaaccttgggttcaatgtttactttctcattcggatgccagcaacgcgggagcctctcggaggccccagtgcaggtgaggggcgctgagaacgcgggcagccactctcttctgcccttgccttcgccctgggtgggacagggctcccaagggcaggcgggtcccccagtcccgccattacgggttgtcagaccgtctgcgtgtggcattttttggcttataagcttcacccactcacccccaacccacaccccacatccccctnccggcagcccctcaacctaagaaggccagagcatatttattttcggagggagcagattacttctcccagagaaaggaaaatcttggaaaagatttaaaaacacaaatctaagccttgacggtttttttttcccttttgacccccttcccatctcttcagaatttattcccatggcttttttttttcttgtgcgtgtataaaatcaaaaggaaggggaaaaaggtttttgaagttcagaaccaacttctgtatatagaggctgccgcaaaggactttctcttgggaacattgtttcttgtagaaacatgcgggaagacattttttgctcatttctttgtacttccaaaaaaaaaggaaaaaaaagacaaaagcaagtccccccgtaccccagaaagcagaggaggcgtgtaaataatttctggaaagtgactgttgtgacccggagtcctcatcaagatgagcgcgctccatgagggagctgctcccaccctgcggacgcaggcggccggagcctctggtatctcagcttgtgtcaagcttgttatcatgtaaattctgtacaaagaattgttatttttctcttttttgttgttggtggttttgttgtgtgttttttgttgttttttttttattcctttcccccaggccctctctatttgagactgtgcccgccggtttcaagatcaaggaaattggtggcaacaagacacagatggggtacctgggcacagcggcgaacttctcttccgtttgcggttttctgcctaattgtgcaactgaggaaataatttatttttcacatgaggaaatgcgtagcttgtagagacggctgattcaagttacatgtacagcctccaaagggctgtctccattctgtccccttcccataaaagaagtgggggtgttcgagaagaccagggaagggacccttgcctcacccctccccctggcctcaccttgctcccagccatcgtgcccagtgttaacctcggctggccttcactaaggggactagacctccctctccccaggagccccagccccagagtggtttgcaataancaagatatgtgtcgagtcatttttctttcaactccctcatttttcattgaacaaatctctgcttttcaagagttgggggtttctgctattttttgctttctctccctccccctgcaaagatgagaaccaatgagttttagggatgtttgtgcgggtagactccatcatccatatgtaacttgttttgaagagaagtgtttccgttgtgtgtcttgatgtaaatatttgttcatatttttgtgaattcaatactatgtaccattgtattatagtaacttttataaagcaaaccataaatatactgacttttcttacag

SEQ ID NO: 255900 - DNA, 4885 bp, Homo sapiens
  misc_feature (1539)..(1539): n is a, c, g, or t
  misc_feature (3506)..(3506): n is a, c, g, or t
  misc_feature (4568)..(4568): n is a, c, g, or t
cgcacatcggcggacatgcgggaccaggacaccgggaaggagaacgagatggactgggacgactctgccctgaccatcaccgtcaaccccatggagacctatgaggaccagcacagcagtgaggaggaggaagaagaggaggaggaggagatggtggccgaggaaagcatggcttctgcaggccctgaggactttgagcaggacggggaggaagcggctctggccccgggggcacctgcagtggactcgttgggcatggaagaggaggtggacatcgagactgaggctgtggcccctgaggagcggccctccatgctggacgagccccccttgcctgtgggtgttgaagagccagcggactccagggagccgcctgaggaaccaggcctgagccaggaaggggccatgttgctgtctccagagccccctgccaaggaggtggaggctcgacccccattgtcccctgagcgagctccagaacatgacctggaagtggagccggagccccctatgatgctccccttgccgctgcaaccaccattgccgcccccacgaccaccccggccacccagcccaccgccggagcctgagaccacagatgcctcacacccatctgtccctccggagccccttgccgaggaccaccccccgcatactccaggcctctgtggcagcctggccaagtcgcagagcacagagacggtgccagccacaccaggcggggagcccccgctatcagggggcagcagtggcctgtccctgagctctccgcaagtgcccggcagccccttctcctacccagccccgtcccctagcttgagcagtgggggcctccctcggacacctggccgggacttcagcttcacacccaccttctccgagcccagcgggcccttgctcctgcccgtctgcccactccccactggccgacgcgatgaacgctccgggcccctggcctccccggtgctcctggagacgggcctgcccctccctctgccccttcccctgcccttgcccttggcattgcccgccgtcttgcgggcccaggctcgtgcgcccaccccgctgccacccctgctgcccgcccccctggcctcttgccctcccccaatgaagaggaagccgggccggccccggcgatccccaccatctatgctctccttggatgggcccttggtccgaccaccagcaggggccgcccttggaagggaactcctgctcctgccgggccagccacagacccccgtcttccccagcacccatgacccccggacggtgaccctggacttccggaacgcggggatcccagcccctccaccaccccttcccccccagccacccccacccccacctcccccacctgtagagcccaccaagctgccctttaaggagctagacaaccagtggccctccgaggccattcctccgggcccccgtgggcgcgatgaggtcactgaggaatacatggagttggccaagagccgggggccgtggcgccggccacctaagaagcgccatgaggacctggtgccacctgcnggctcgcccgaactctcgccaccccagcccctcttccggccccgctcggagtttgaggagatgaccatcctgtatgacatctggaacggtggcatcgatgaggaggacatccgcttcctgtgtgtcacctacgagcgactgctacagcaggacaatggcatggactggcttaacgacacgctctgggtctaccatccctccaccagcctctcttcagctaagaagaagaaacgggacgatggcatccgcgagcacgtgacgggctgtgcccgcagtgagggcttctacaccatcgacaagaaggacaagctcagatacctcaacagcagccgtgccagcaccgatgagccccccgcagacacccagggcatgagcatcccagcacagccccacgcctccacccgggcaggctcggagcggcgttcggagcagcgccgcctgctgtcctccttcactggcagctgtgacagtgacctgctcaagttcaaccagctcaagttccggaagaaaaagctcaagttctgcaagagccacattcacgactggggcttgttcgccatggagcccatcgcggctgacgagatggtcatcgagtacgtgggccagaatatccgtcaggtgatcgcagacatgcgggagaagcgttatgaggacgagggcatcgggagcagctacatgttccgggtggaccatgacaccatcatcgacgccaccaagtgcggcaacttcgcgcgcttcatcaaccacagctgcaaccccaactgctatgccaaggtgatcacggtggagtcacagaagaagatagtcatctactcgaagcagcacattaacgtcaatgaggagattacctatgactataagttccccatcgaggacgtcaagatcccctgcctctgtggctccgagaactgccgggggaccctcaactaggccccggcaccagactcaaaggatgtcagccgtagccctgggactcccgagcgtggagcccctggccccggggcccggccccccgcgcccgcccccatttcaggtgctgtcctctacccagcggccattcagggcctggcgccccacactaccccctggagcccctggctccggcccctccgcgggaaagggcttctctgtcgttcagcccacgtctctctcattttaacaaacgcccctttcaggatttctgtttaactccagcatcagcttctctctctccgtctctcctcccctctctctcttctctgtctcttctctctcccaccatcaccctcggcctcttcctgtgaatgctgctacgttgttttgtcttctctatttttttcctcgttgtgagaaaagacatttaaccgttgaaatgtgaaggtggaatcagagaggggccccgcgggggtctgcagaggcctcagtgtggctgtgcgtggcccgtgtcctggaagccacccggacctggacgcagggccaggtgctgtgggaaggatggaggcccccacggccttgacctcagaacactacgccctgaaagcgcccctcactgcccgtgggcacagtgaggagaccccacacctttccccacccgagctgcagcctgttccttccccagaggcctggggcaccactgacccggtggaccctgatggagctaagctgtcccaggcaggggtctccgctctgggctttccctgccacctcacaccccagcaccccctaaaccttgggttcaatgtttactttctcattcggatgccagcaacgcgggagcctctcggaggccccagtgcaggtgaggggcgctgagaacgcgggcagccactctcttctgcccttgccttcgccctgggtgggacagggctcccaagggcaggcgggtcccccagtcccgccattacgggttgtcagaccgtctgcgtgtggcattttttggcttataagcttcacccactcacccccaacccacaccccacatccccctnccggcagcccctcaacctaagaaggccagagcatatttattttcggagggagcagattacttctcccagagaaaggaaaatcttggaaaagatttaaaaacacaaatctaagccttgacggtttttttttcccttttgacccccttcccatctcttcagaatttattcccatggcttttttttttcttgtgcgtgtataaaatcaaaaggaaggggaaaaaggtttttgaagttcagaaccaacttctgtatatagaggctgccgcaaaggactttctcttgggaacattgtttcttgtagaaacatgcgggaagacattttttgctcatttctttgtacttccaaaaaaaaaggaaaaaaaagacaaaagcaagtccccccgtaccccagaaagcagaggaggcgtgtaaataatttctggaaagtgactgttgtgacccggagtcctcatcaagatgagcgcgctccatgagggagctgctcccaccctgcggacgcaggcggccggagcctctggtatctcagcttgtgtcaagcttgttatcatgtaaattctgtacaaagaattgttatttttctcttttttgttgttggtggttttgttgtgtgttttttgttgttttttttttattcctttcccccaggccctctctatttgagactgtgcccgccggtttcaagatcaaggaaattggtggcaacaagacacagatggggtacctgggcacagcggcgaacttctcttccgtttgcggttttctgcctaattgtgcaactgaggaaataatttatttttcacatgaggaaatgcgtagcttgtagagacggctgattcaagttacatgtacagcctccaaagggctgtctccattctgtccccttcccataaaagaagtgggggtgttcgagaagaccagggaagggacccttgcctcacccctccccctggcctcaccttgctcccagccatcgtgcccagtgttaacctcggctggccttcactaaggggactagacctccctctccccaggagccccagccccagagtggtttgcaataancaagatatgtgtcgagtcatttttctttcaactccctcatttttcattgaacaaatctctgcttttcaagagttgggggtttctgctattttttgctttctctccctccccctgcaaagatgagaaccaatgagttttagggatgtttgtgcgggtagactccatcatccatatgtaacttgttttgaagagaagtgtttccgttgtgtgtcttgatgtaaatatttgttcatatttttgtgaattcaatactatgtaccattgtattatagtaacttttataaagcaaaccataaatatactgacttttcttacag

SEQ ID NO: 255901 - DNA, 871 bp, Homo sapiens
  misc_feature (754)..(754): n is a, c, g, or t
  misc_feature (801)..(801): n is a, c, g, or t
  misc_feature (803)..(803): n is a, c, g, or t
tttgaaagcgaggccaaagtgggtgggagcgcgtgctgttgggagttgcttggaggttggcggcgcggggctgaaggctagcaaaccgagcgatcatgtcgcacaaacaaatttactattcggacaaatacgacgacgaggagtttgagtatcgacatgtcatgctgcccaaggacatagccaagctggtccctaaaacccatctgatgtctgaatctgaatggaggaatcttggcgttcagcagagtcagggatgggtccattatatgatccatgaaccagaacctcacatcttgctgttccggcgcccactacccaagaaaccaaagaaatgaagctggcaagctacttttcagcctcaagctttacacagctgtccttacttcctaacatctttctgataacattattatgttgccttcttgtttctcactttgatatttaaaagatgttcaatacactgtttgaatgtgctggtaactgctttgcttcttgagtagagccaccaccaccatagcccagccagatgagtgctctgtggacccacagcctaagctgagtgtgaccccagaagccacgatgtgctctgtatccagaacacacttggcagatggaggaagcatctgagtttgagaccatggctgttacagggatcatgtaaacttgctgttttgttttttcctgccgggtgttgtatgtgtggtgacttgcggatttatgtttcagtggtactggaaactttcccatttattcnagaaatctgttcatgttaaagccttgattaaagaggagttttataancnaaaaccaaaaaaacaccacctacaaacacaaacaactgtgtggccgctccgcccagaaacttttaaac

SEQ ID NO: 255902 - DNA, 817 bp, Homo sapiens
  misc_feature (700)..(700): n is a, c, g, or t
  misc_feature (747)..(747): n is a, c, g, or t
  misc_feature (749)..(749): n is a, c, g, or t
tttgaaagcgaggccaaagtgggtgggagcgcgtgctgttgggagttgcttggaggttggcggcgcggggctgaaggctagcaaaccgagcgatcatgtcgcacaaacaaatttactattcggacaaatacgacgacgaggagtttgagtatcgacatgtcatgctgcccaaggacatagccaagctggtccctaaaacccatctgatgtctgaatctgaatggaggaatcttggcgttcagcagagtcagggatgggtccattatatgatccatgaaccagaacctcacatcttgctgttccggcgcccactacccaagaaaccaaagaaatgaagctggcaagctacttttcagcctcaagctttacacagctgtccttacttcctaacatctttctgataacattattatgttgccttcttgtttctcactttgatattttagagccaccaccaccatagcccagccagatgagtgctctgtggacccacagcctaagctgagtgtgaccccagaagccacgatgtgctctgtatccagaacacacttggcagatggaggaagcatctgagtttgagaccatggctgttacagggatcatgtaaacttgctgttttgttttttcctgccgggtgttgtatgtgtggtgacttgcggatttatgtttcagtggtactggaaactttcccatttattcnagaaatctgttcatgttaaagccttgattaaagaggagttttataancnaaaaccaaaaaaacaccacctacaaacacaaacaactgtgtggccgctccgcccagaaacttttaaac

SEQ ID NO: 255903 - DNA, 818 bp, Homo sapiens
  misc_feature (701)..(701): n is a, c, g, or t
  misc_feature (748)..(748): n is a, c, g, or t
  misc_feature (750)..(750): n is a, c, g, or t
acttaacttgccttgtagagactgtttcacagtaatcttgtcgaatccagtgggagaacgtagcaaaagcggagctggaagtttcctggcgtccctaacagacatgtcatgctgcccaaggacatagccaagctggtccctaaaacccatctgatgtctgaatctgaatggaggaatcttggcgttcagcagagtcagggatgggtccattatatgatccatgaaccagaacctcacatcttgctgttccggcgcccactacccaagaaaccaaagaaatgaagctggcaagctacttttcagcctcaagctttacacagctgtccttacttcctaacatctttctgataacattattatgttgccttcttgtttctcactttgatatttaaaagatgttcaatacactgtttgaatgtgctggtaactgctttgcttcttgagtagagccaccaccaccatagcccagccagatgagtgctctgtggacccacagcctaagctgagtgtgaccccagaagccacgatgtgctctgtatccagaacacacttggcagatggaggaagcatctgagtttgagaccatggctgttacagggatcatgtaaacttgctgttttgttttttcctgccgggtgttgtatgtgtggtgacttgcggatttatgtttcagtggtactggaaactttcccatttattcnagaaatctgttcatgttaaagccttgattaaagaggagttttataancnaaaaccaaaaaaacaccacctacaaacacaaacaactgtgtggccgctccgcccagaaacttttaaac

SEQ ID NO: 255904 - DNA, 461 bp, Homo sapiens
tgggtcttatccaaggcctgcggtaatcactgcctggtgaccacttatgttcactcaagaaggagtctctccacatatccaccacagctgggattgtgctgggtcatatctgaagctagcacacatctaagtctcatccaaggcccacacctggtaagaaaaatccacatcgtgacacggaagagatggaggaagaagagaaaacaaaagaaaatgtattaataagataatgttgtaaatgctgttgcaactgcaagctgcattacgtggcctcatattttcttccactgacaaaaaagtatgtataacatactatgaatctggaaatatatggaaatatcaacttggttgcaggctgaagtccatgccctttgccattcacatcctcttccatggaatgaggactcatcagataaaatattgttttaaataaatggaccttgtgaaattgcacatgatat

SEQ ID NO: 255905 - DNA, 1058 bp, Homo sapiens
ggccattcgtggtctacttttgataattattttgtaacctttctttctgcctgccatatatttttctccttgcttgtgaattgttgtgatcttagaaacaaaaaatgtggcctggtatggtggccttacgcctgtaatcccagcactttgaatcgcttgaactcagtagttcaagaccagcctggccaagatggcaaaatcccatttctggcctggcaccgtggctcatgcctgtaatcccagcactttgggaggccaaggcgggcggatcacctgaggtctactaaaaatacaaaaattagtggggcgtggtggcgcacacctgtaatcctggctactccagaggctgaggcaggagaattgcttgaccctgggaggcagaggttgcaatgaactgagatcgtgccactgcactccagcctgggagacagagcgagactccgtctcaaaaaaaaaaaaatatgttttaacaacaaatacctattttggatttttaaactccttaaagaactaagtcaataaaagaaacatcaagaagtaatacagacattgtaatttcttgggatatatgtagtacatgaatacaaatattttaaaacatttttagccttttcaagtacttctaaaacttaaaaattatagaagtacagatacaaaaggatgaatacatgactccacttaattgaggtacctagagtagtcaaattcttagagacaaaatagaatggttgttgccaaaggctggagagaggagagaatggggagttactgtgtagtgggtacagagttttagtttggaaagatgaaaacgtactggtgatggatggtggtgattccacaacagtgtgaatgtagttcatgccactgaattgtacagctacaaatgtttaaaatggtaaattttatgttatgtatatttttaaaaaatcaacatatacgcccctccttatgcctgcagaatcatcccttatttttttccctcagctcagagatggcagctgacctcactcttttagagtgagaccccaaaataatagtttatgtgatataaatttaaa

SEQ ID NO: 255906 - DNA, 396 bp, Homo sapiens
tttaatcatcaagcacatctacttttttctaatggttcatattgatttgaaactaaaaacattttgtggatggatgaaatttattaatcttgctacaaatccttcagaaaatttgaccattaccccatttgggagtattcatttccatgtagcattacatcaaacatgcaacacacattatccttatcacaaagtgtaatacagttgacccttaaacaatacgagttcaaactgaatgagtctacttatgtgtggattttctttcacctctgccacccatgaaacagaaagaccagcccttcctctttctcctcagcctgctcagtgtgaagatgacaagggcgaagacccttatgatgatccacttacacttaattatcagcacatacattattc

SEQ ID NO: 255907 - DNA, 2515 bp, Homo sapiens
  misc_feature (607)..(607): n is a, c, g, or t
  misc_feature (1386)..(1386): n is a, c, g, or t
  misc_feature (2303)..(2303): n is a, c, g, or t
ctttgcctttctttaattgtgtcaccttctttgttagagaaacccaaatcttctgtttcttgaagaagctgctttttttaaaaatgtatcttttagatacctattgtggaaataaaacaacttgtggtttttttttaagagaaatgatggtttcttatatggagagaggctagtagcgaggcaaatatttatgcaaagatgtttgctccaagaacctaaactgaaaataaaattagactgaatttttagttaaagctgcacctggattgcatgcatatttgaaaacattatataaggtttaacaaatgtatgattagagcattgaccagtgttattctgttaagtagttttgcaggattttctcttgcaagaagaatttgttgtactcgcattattgtttcctttgggatcgtagacaatgactctgtagtgtgattcattaatattggttgtcttcagcagagagtatccagatttgacctgccaagtattaaatttttaatgtattactagttctttcacagagtaaggcttgtctttgttctttgtatttttgtaccagtatagcttgaatcagatacagatttaatttgtagtatcactaaanatgcctcatttaaaacacgcacaatacacatataaaaatgtttattgatgaaaatatttcaatatgaatagctacctttttaaatatttgaaagtatgcacttccaaatttattttgaaaagtgccagggggtgctgtgtgctatgtgcaataagttaattattatgctattaacattgatgatggtgaatgtatattagttaatgtgttaacgacgtgttaattactgtacatgttgtgaagacccttcaggcttgttctatgatgcagcatgtcaacttgaactagaccaagtaatctgcaaagcagactgtaactcttaaaaataacacttgtaaacataaattataaattaaattatgctttttattattctttttctttctggtagaatgaataagtaattcttctgctatctgcacctgttagaacccaatactgtcagactctgttttccccaagaggattgaaagagatttgttatgcaataacttccgctttgtttacgctctggcatttagtgtatattttatatagattcatttgttttgcagcctgaaagatctttctttttttgtttaccagcttgatttgaaatgaaagacactcacacttagtctttgtgtaagcaggtgaaaagtggccttgtttgattaggactactagttgatactaaactaatctgtatatacacatgtgattcagttatagctcttcaagtttagttggccaaatagttgaaatctcaagggaccagacataaaaacaaaaaactcaangacagtttcaaatcatttacaacagaggccagaatttgttgctgtttgtgagaacatggcattatatatttgttgtccttttcatcagtatatcttgatgccttgaaaatgtcaaatatttgaattttattactttaacttttgaattagtggttgcccatttctttctaattgtcagtatttttgaaaaatacacctgatgataatcctcaagagactaatttggagaaatacaaaattatagaattcgatgttattcatacaatggtatttcttatttttatgtcttcaaaatctttgtttcatattaaacaaaagaagtaagttaacaaatgagagttcccaaatttactgagggtcttgtgaggatgttttttaaatgacccaaaaccaactcttgaaaatacaaaaataaaatagaaatgagtgtttctgtaaggcatttactctgtcttttagattcttctaacataatatgtataagaggtggtaaagagttagttcagactgtaaagccagactgtcctgcatccagttctagctttttcaccttccagctgtgtgactatgagcaatggatctaactgtggtgtgcctcagtttcatgataattaaaatgggcttaataatagtacctgccttacttaggggtgattagttaatacaggtaaagtactttgagtagtgcctagcacacagaaagctctcaaaaaatgtgaggtcttattattaacctgcctttgatattatactaaaaattatttggaagcatttaattttcacaaactctttgatttccctaggacccattttgaatgtgagtttttggtttccagtcattatagtctcgtacttcatcatagaaaaacaccttatttttaatgatggttttattactccagtgttgtttacatccncctggagtcatcccagatttttccattcgtctaaccttgcttgatttcctatagcacagctcttgttgaagatttatattggtgtggaaggatattctgaccaggattttggtttctcttgcaaatatttgtgtatctcttgtttacagccccagtgtcctcttgtaaaacccatgcaaaatgggattctaataaatcttgtgctcagcatt

SEQ ID NO: 255908 - DNA, 545 bp, Homo sapiens
gctctgacggtgatgataatggggagcatgtgcactgttatgccttacaagaagcaggccatccctaacatttcctgtttttctctgaattttactgaaccaacatttttaatcttttttaaaattgtatttttaaggtcgatttactttttctttgttctaacctacctaaagttttaacggtgattgtttaccagtaacatatctggtggtaggaagatgaaattaggtggggcagttgaagctgtatgcatggatggatgatggatcattcctaagtgaaaaaataatatctgtaaattccaggccagtttcattctagaagatatatattttcttgcctaaagtgattggcttttcacttttaagtggctgggtccatttgagtctgacaaagcacttggcctttgaagtttttggtgatcctttgggtgacgtcttttcacaaagcttcagcattcagccacttcgtttcagtggcatctgtaagatactctttaatatgaagatgttgaattaaaagtcaaaatactgatgtgagttga

SEQ ID NO: 255909 - DNA, 565 bp, Homo sapiens
acagagaaaaaagggatcaagttccaccattatgcaaaagggactcctgtaagccaggtgaagaaggggcaaggcccttcttggtcagcagggataaggcagttgcgtatgggagagcatgcgaggagggcgagggctgggggagatggagcaggaacatttggttggggctctgaggcactcttctgcttggggagtgtgtgggcaaaggcaggggctgtgcaggaaggatttagctaaagccataaagctggaagagggtttggggaacggctttgaagttacatttgttttgcaagttctttgtttttattaatgtttgcatgttatttgggtagctgtagggagtaggttttcggggagttaaagtgcactctctcacccctccttcagtcctactactgcccctagatacacaatcacctcaagtgactttcacgtcaccaggaatgggcaaagtctagattttggaacagaaaatattttaggtccccgtccctctctgtaaccaataaccaatgccatataaatggaaaagtataaagaagtccagaaattcttaaaa

SEQ ID NO: 255910 - DNA, 382 bp, Homo sapiens
acagagaaaaaagggatcaagttccaccattatgcaaaagggactcctgtaagccagaccctgagccgttgtcaaaacacagcttaatccccattccctgggcccgagaccctgcagcccccacgctgcccggcttccggtcttacctggggcaacctgaccaacaagaacgcggaaggccaggagccaaaaacagagactcctgatgggtaacagaaggaaaaggcaggacatcccagtgctaaggagagtgacctcagacaccagagacacagcaagtgcagcagagctgacggctctgggaacactggtcttcaaagtcttccccgttgttggttttgttgtctttatttacaaataaagtaaatatttcttatttata

SEQ ID NO: 255911 - DNA, 280 bp, Homo sapiens
ttgaacaaactatacgtgatatcattctgtagcatagttttacatctggattcttattgtcaatataatggctctgaaattatttcggttgttgcttatatcagtagttcatttttaacagtatcattgaggtataattgacacataatcaattacatatttgaagcatacaatttgataagttttctcatatgtattccccccagaaaccaccaccacaatcagataatgcacatatccatcacccaaaagtttttgtagccgtaggtaaccttcattt

SEQ ID NO: 255912 - DNA, 846 bp, Homo sapiens
ggaaatctgagagcctgactgctacttcaagggacttcccattcctctctctggattttccctccaccctcaaccttcagttaggtggtgccttccatagctcagcttctcccaggttctgcagtgggaatcagcttactccttaccggactttccccttcaattctctctggcattaagtttctgcctgttctgctctgccagcagccagcttcagctcaacaaagacaacaccctaggggctggtgaacagcaggatggaaaggacttgggtctctaaatgaacacgtgaagcagagccacccaccatcctggaccattcgcctccagactattagagacagggtttctccatgttgtccaagctggtctcaaacctctgagctcaagcaatcctcccgcctcagccttccaaggtgctgggattacaagcatgagccactgcacccagcccaaattcatctttcaaggtatagtttgtggctaaatgaaacgcatttgcttttattaatgattttaaatgtcctttgtttgggtattatttcaataatagtaatgaatctacatctatatccacatctatctccatctatatctatattatatacaacatatataatatataaagatgtaatgtattaacactatatataatatataaacccttctataatcttgttacaattctttgagatgaatgaaaattctatattcatagatccaatgttatttttaaattaagtccatttaaaattacaaattgtatgattctgctcttatatcatcaaccaacctaagataaattacaccattcctttatttcagcagcccataaaatgccaatgc

SEQ ID NO: 255913 - DNA, 391 bp, Homo sapiens
tgcttctgaggcaaccatgtgacctagagttatagtaactacaagatgggctcttgtgccatcaaggaattccatgaagtactaacaggagaataatggccactctcatgctacaaatgggccatttcagcatcacaccaaaaagttttcaatacaataatttacgctctgaaaagaaggtacttttactaaatagggagaacaaaatgcaagcacgcaagcacacccatcagtgaatgactccgagcgtccataactttctaaacaccaaactaacaaaaatgattgacgcatggtaagtgctcaagcgtttgacagtttgttattcaacgcccaatgtgcaaatagtattaacatttttgtccattaagataaaattttggctaacatc

SEQ ID NO: 255914 - DNA, 424 bp, Homo sapiens
ttctttttttttgagacggagtttcactcttattgtccaggctggagtgcaatggcgcgacctcagctcactgcaatgtccgcctcccaggttcaagggattctcctgcctcggcctcccgagtagctgggattacaggtacccgccaccatgctcggctaattttttgtatttttagtagagactgggtttcaccattttggtcaggtaggtctcaaactcctgaactcaggtgatccacccgcctcagcctccaaaagtgctgagattacaggtgtgagccactgcgcctggctggatgcctacatattaatgagggttacagaagcctctggaagcagcttgtacttgtgacatcttcaggggatgggaagtgccgtgaagttttagactacagcttggcagctgggacctgaaatctgga

SEQ ID NO: 255915 - DNA, 183 bp, Homo sapiens
atttcaccaattatattattcatttcctggattgctaattgttttttgttttttgtaatcacctgttcctatttcaaggatactaatactctccctttctctctgaggatgttacagtttaagtcctctacctattgtgttaactctgtttcctcagtgatgagcctccaagcctttctcaag

SEQ ID NO: 255916 - DNA, 439 bp, Homo sapiens
tgcctagtgagaaagcagccatgagaaataaacaaggacatcagagcagctgtgtttcaataaaactttatttacaaaaacaacaggggaccagatttgccaacctgtgatataagccttatatattgattcaactaaaaatagctgggggtggctgggcacggtggctcacacctgtaatcccagcactttgggaggctgaggcgggtggatcacctgatgtcaggggttcaagactagactagccaacatgatgaaaccccgtctctactaaaaatacaacaaattacctgggcatggtggtgggtgcctgtaatcccagctactcgagaggcaggagaattgcttgaatccgggaggcagaggttgcagtgagcagccaatatcgcaccactgcactccaacctggacaaaggtgaaactccctctcaaaaaaaaa

SEQ ID NO: 255917 - DNA, 189 bp, Homo sapiens
aagtctttttgttaaatctgtaactatctcatccaaatgccaaggggcacaagtctaaatcctttgcccctttcaatattccttacctcaccaattgataccaccaacccccaagttgattgagtctaaaaattgcagttatcctagattcctttgccttccgtatgaacaaaacaattctttctatgt

SEQ ID NO: 255918 - DNA, 532 bp, Homo sapiens
aagttggtgttttgaaatgagacaaattaaccttaatataagaaatttatgagaaaaatttttttgataatttaaggggaaaaagacaagaaaatagcaagaaaaattagcatggctctgaaaaatgggaaagtaacaaaaataaaatcaatgcttcccattcaagaaactgaaacaattttgcaaatagctccctaattctaaaaacgaatagataccatgtctattattaaaatgtagattagatattttagcagtttgagcagagcataaagtagttaacagtgaagctttttaaaaccaacttatcatacaacaccttaagcttattctaacagtaaccatgttctctttcaggtcacctcactatgccaataaaaaattttcaaatcctacatggttacaatacttagagcaagtcaaatatttcatgccctcctctccccaaccactgacatcaactaaagggctcctactttgctaatgcagaattgaccttacacacatccccttccctatggttttagtgata

SEQ ID NO: 255919 - DNA, 269 bp, Homo sapiens
tttttataatctgtggttatacatataatcagtgattaataaatacatatttcttcagagcaagtataaaaattgctattccttataaatcttttttttattattatactttaagttctagggtacatgtgcacaacatgcaggtttgttacatatgtatacatgtgccatgttggtgtgctgcacccattaggtaaaggcctttttaggcatctttaaagtggtgttcattgggggaagctaagtaaagcatacagaaaaactctctg

SEQ ID NO: 255920 - DNA, 425 bp, Homo sapiens
caacaagttttgcctagaaatgtggataaaaattgaacattgttttaccagctgccagcaaaaaggtttgtcatgccatttgttcaaattatagtacccttgaatttggtacccaagtatgaatcattagaatagccagagagggctgggcgcagtggctcacgcctgtaatcccagcactctgggaggccaagatgggcggatcactaggtcaggagatcgagaccatcctggctaacacggtgaaacccccctctactaaaaatacaaaaaaattagccgggcatagtggcgggcgcctgtagtcccagctacttgggaggctgaggcaggagaatggtgtgaacccaggaggcagagcttgcagtgagctgagattgcgccgctgcactccagcctgggcgacagagcgagactccgtctca

SEQ ID NO: 255921 - DNA, 409 bp, Homo sapiens
aggtgtagcctgactcataacatcactaaccctactaccaatggtgatgtgtaagcactttgtgctgggttaaagtttcaaacattttcttatagagattagatgatctaagcagtagagtcccttaaatcaaggttcagggccaggcgcggtggctcacgcctgtaatcccagcactttaggaggccgaggtgggcggatcacgaggtcaggagatcgagacaaccccgtctctactaaaaaaaatgcaaaacattagctgggcatggtggtgggcgcctgtagtcccagctactagggaggctgagacaggagaatggcgtgaacccgggaggcggagcttgcagtgagccgagatcgcgccactgcactccagcctgggcgacagagcgagactccgtctcaaaaa

SEQ ID NO: 255922 - DNA, 423 bp, Homo sapiens
aagcaaaataagccaggaatagaaatttcaacaccacatgttctcactcacgcagaagctaaaaaaaaaagttgatcttatagaagtaaaaagtagaacagaggatactgcaggctgaaaagggtagggagaaaggaggaatagtaagagatttgttaatggatacaaaattacagctaggtaggagtaataagttctagtgttctatagtaccgtagatgactatagttaacaatactatattatgtagtttaaaatacctaggagtagtttgaatgttcccaacacaaagaaataataaatgtttgagatgatagatatgctaattaccctgatctgatcaccatctacatgtactgaaacatccccgtatagccatgaatatgtataatctttgtcaatttaaaaagtaaaaaaaaaaaa

SEQ ID NO: 255923 - DNA, 271 bp, Homo sapiens
tatgggaccactatcatatatgtggcccattgttagccaaagcgtcattatgtggtgcatgaccatacatgaattgaatattccccactgacatatccatttttagtatttttgtaaattggcctaacggttatttgtgctctatatgcacaaggtaagttattttatccccattttacagatgaggaaatcgttttaaaggacttaaagcattgtcattgcttaagaccagtggtattctcttgcattattcctttaagccagagataaa

SEQ ID NO: 255924 - DNA, 479 bp, Homo sapiens
cgagctcaagctgatgctcggtgaaactgaaaaaggtcaatgcattatactcttgctagctactagttactgtcctcagcagatactcttgttcatttttatgtcctctactatgtctaccataatgtagtgagtactaaacaagtgtttcttaaacaaatggattgaaagaaaataagctcttctactctctaatggtaagagatgtattagtaaatgtccctagtgattataatattgaaaccaaaaagacaatactgtttttatttatttcctgtaatataatattcaaaccatatttgtgtggatgcagaaaaaaacagatacatatgaaatgttaaacagacaaaattattcaacagagctggtaaacgaaaatcacttaatagtgccacattttatttaacagcaaaaccctcagaggtaattcctccctgagtgagagccacagtccagcaccacagggagaataattggag

SEQ ID NO: 255925 - DNA, 701 bp, Homo sapiens
cccagctagtttctaatcacatgatctccttcctcagtgtttttcaaatcactgtaaaatttgcagaacaaatgaacatttattcacctccaacatctataactgatgctaattgtccccaaataaatgataaatggaattagattctgtttgtacacttgccaggtccccaaaaggttaggtatgagcttgtttttatttttactgtaaatctgtttttaagcacacttgcctaaatggttgcctaatcattctgggaagtatcttcattaaaacggagtgattatctgatatactctcataagtccagattttgacatacgtgcttaaaatgctagccccacatcattaatgagagtgagaaaaatgaaggtagactaaaaacagcaaaaaatacttgaactttcaaaatgctacaattttcactcacttaacatagattatcccgtttgactctcagaacaatcccatgaggaaggaagaggatttattacttctgttttccaaatgatgagattgaggctcagaggtttgactgctccagcttcagagtaggaagagatggggaatagaatagactaggaaccaggtcatccatctcacatttcccatcatgttccttcccatcactgtgtgatgcagggcacatgaatgctaagtgttgtcacctggatcaatgaatgagtgactgatgaatgaat

SEQ ID NO: 255926 - DNA, 537 bp, Homo sapiens
agtatttcttagtcccctaccaaatttaggatgtgtaccatgttaggaatactatattttttcccaggagacctgcacatattgggtgttcacaccttggttcctactgagagtcaaaaattggggttttgggatttgaagcagcttgaaaactcatttgtcagagctcattagagtcagtattgatcagtgactctcagaaggcttggaatgcccaatcagagttgcaatgcatagcaaagaactcctgagtttcaggggatgtcattttgtaaggttctggtggaaagacactgggatcaaagggaacactgagggtctagaaataagttctccatttaaatgtcttattttaaataatggaaacacacttcaacatagtttccttcttggagttgaaaactcgatagtcctcatagaaaaggaaaaaagttaaacctcgtcttcaaataccaaactcaggtaaaataacactctgctgttcatagattgttgatcattataaagatgcaaaataaaattctaagagatgttggc

SEQ ID NO: 255927 - DNA, 566 bp, Homo sapiens
agacgcgactcccgcagacacgtgacctcctcccagccgccgcttcccgcgacccagatccgtccccggaacccgtgcccggcggggcgggccgggggacacgtagcgggcgccccagtccctgctgcgccctggtgcatgtacctttggcgttcttctcccctcggttcacttatcaccggcaataatcaacgtttcagagatcaccccggggagaatgagcacacgcggccccaaacgtcgtcatctgctgctgtgattagtggcaccgcaattccggctgctgcggggaagtttagttggcccagggacgccgtgtcaccgaaagacacttggattgcgacattcggacccagtgacaacgttttcatgtatcttaaatccttcaaggagcggattgcaagttgcttcttctcgaggcaacctctccacccagcgccaaggagtccctccaggccaccgatcacacaatcggtggaaaagcaaaaagccacgttcacattcctgcaccgtaacaacggacgaacccagggagtcgcattttggagccaaggaagctcaggctg

SEQ ID NO: 255928 - DNA, 659 bp, Homo sapiens
agacgcgactcccgcagacacgtgacctcctcccagccgccgcttcccgcgacccagatccgtccccggaacccgtgcccggcggggcgggccgggggacacgtagcgggcgccccagtccctgctgcgccctggtgcatgtacctttggcgttcttctcccctcggttcacttatcaccggcaataatcaacgtttcagagatcaccccggggagaatgagcacacgcggccccaaacgtcgtcatctgctgctgtgattagtggcaccgcaattccggctgctgcggggaagtttagttggcccagggacgccgtgtcaccgaaagacacttggattgcgacattcggacccagtgacaacgttttcatgtatcttaaatccttcaaggagcggattgcaagttgcttcttctcgaggcaacctctccacccagcgccaaggagtccctccaggccaccgatcagtgagcaaacaagtctccaaaatttcctttgggactcaagtttacccaccgcgaattctcttttcacttcctttctatggttcaaaccaacagcacaatcggtggaaaagcaaaaagccacgttcacattcctgcaccgtaacaacggacgaacccagggagtcgcattttggagccaaggaagctcaggctg

SEQ ID NO: 255929 - DNA, 422 bp, Homo sapiens
gagctgttacatgtactcactttcatgacatttgcaaattcactctttctttcaggtcacttatttgaaaatatgaaaaggcatagattcctaacaccaaccaacaatgttaataaattgtatggaaagggttgatataaaggctctacagtgaaaggaaggaagctggctcatacttagcaacattctacttagctgtctttccactcttccatattctctttgattatattagtattaaattttcttgattttgtcagtataagtaggaataccactgccattcctagtgtgcttggtttaggtaggctggaatgcagtggtatgatctcggctcactgcaacctgggaggcagaggttacagtgagcccagatcacatcactgcactccagcctgggcaacagagcaagactctgtctc

SEQ ID NO: 255930 - DNA, 428 bp, Homo sapiens
gtcctctgctattctgaaattctatcctcaccattgacactatggagcccggttcaatagagccacttcccctacaacgaactccagcctacaaaggtcaccaccactgagcttcccaacaaggccagtgccacctcactagcacatttcttattgctattatgatgggaagacctctggacactccggagaacaacagaagctggtccatataatgaattcatgcaatcatacccacctccacgtgccttttgactcattcttcaatactctgccgaggaagttctggcatccccacttcatttactaaagaccatcatttttccaagcatcagctccagatgtccttgccaggacgctaaattctgagtcatgggacagtgtctccaaatcattgctcctcctttcccaatcttttccccacaagt

SEQ ID NO: 255931 - DNA, 212 bp, Homo sapiens
tgatttgtaaactctaaagtgctgtccacgtgctttggaggaaaaagctttcctcaggactggcctcgtgagctggtcaagcaaacagtgggactggggctgtcttgattgattgctgactttgagtcagcctgggcgggtgacgtctctattggataaatgtgaaaaccaaggctcacaatggttaagccacatccacaaaggtgcagggc

SEQ ID NO: 255932 - DNA, 416 bp, Homo sapiens
attctttaatgcaaatgggtgcaaatcagtagaactaaagcgacaaaataataaacatgggcttcaggatataatatgtttatatggtttttaaactgttttcgggcagagtttgatcccatatcataacctgaggattgatttaaccctcttgtgatgagggattctttatttttgaagtgggatacattgaacttgttagcgtgtctatgctagtagaataagtagtcttttttaaaaacagctaatcagttcatggtaaattatttgctttgcacaggactatggtaaacctagtataaatattaggcatagcactccagtagggaagcattcattagttgaatcattttgacctgatccataggacgattggtttaactaggactatttttaccacgaattaagacaaacta

SEQ ID NO: 255933 - DNA, 160 bp, Homo sapiens
tgtgagggccatatatgttttcctggagggcggacctgtgactcctcagattccaaaagggatccaagactcccaaatgctcaacactcattgtttgagtagccgaaatgttaattgcctagcatcacctgaattagccattctcttaagtgtttagtct

SEQ ID NO: 255934 - DNA, 438 bp, Homo sapiens
aaagaagtttggtctggcagttccaaaagacatcagtgaagaggcaggtaactggttaatcttacttgacaaaacctattactaatgtgctactgatgctgttaaagaaagacttggccaacttcaagaaaacacatcgaatttcctgagtgacaccaagtccatcagatcatcctgggcataattggaaatggtgcctgcacttttaagaagcgaaccagtgcaacgactggttgcaaagaagagtttctccttagctttgggtgccaactagagacctgaactcagaatatcatcagatttggtctacttccttcctttgttgtctatctggtcctttcaagtactacatggagctaccagccaaacttgtgcttgagtgatgtggctctttcctcccaggcaggcaaataaattcagctttgtttcagatgactg

SEQ ID NO: 255935 - DNA, 325 bp, Homo sapiens
aaatgtatttgtaatgatgtaactcatctgcatattgagtgaatacccattacacgaaggggtaagttcacattctagcgtgacacatatcttatatggtttggccccattttatctcttcatctctttcctctgtgttccagttttacgacatcaccttggcacccctcaattgccatgttgtttcatgccttattattttacacatgctattgcacctagagtctttgtatcctgactctgcactttgtctgtccttcccaatatggccccattatggcagcattttctatgcttttcagataaaactgattgttctctcctt

SEQ ID NO: 255936 - DNA, 278 bp, Homo sapiens
cagtggaaggtgccggcttcagcattgaccggctggccgagttctccaaggaggacgacgagtacgaggccttccgcaagaagatgatgctggcctaccgcttccggcccaaccccctgaacaatcccagacggccttactactgagcgttctggaaatacatactttttgaatgaccacccgtccctggactgtggaatgttccggcctgcatttttgccccccccttccgttgtcacgagtgccatgccgtgtaataaagtcccagtgttcttcca

SEQ ID NO: 255937 - DNA, 414 bp, Homo sapiens
caggctggagtgcagtggtgcgtgcaatctcggctcaccgcaacctccacctcctgggttcaagcaattctcctacctcatcctcccaagtacctgggattacaggcatgtgccaccacaccccgctaattttttatttttcgtagagatggggtttctccatgttggccatgctggtcttgaactccttacctcaagtatccaccccaccaccccccgcctcccaaagtggtggaattacaggcatgagccaccgtgcccagcccaactctgcttcttttctatttatgtctccatgactccaaagtttgtctgattcttttattctttttatggctagctctgtggctttacattaatttgtttatttatatccagcctgggtgacagagcaagactccgtctcaaaaacaa

SEQ ID NO: 255938 - DNA, 452 bp, Homo sapiens
gcttcatgcgttagtcagtgtctctgttaggagctgaattgtgtccctgcaaaagggatgtatttaagttccaaccccttgcatctcagaatgtgagcttatttggaggtgggatcttaaccgagtgtgactggcttccttagaaaaagaggaaatttggacacactcgtacagggaaaaggccatgtgaacagccacctccaagccaaggagacaggctcagaacagattctccctcacagccctcagaagaaaccaaccctactgacgccttgatgtctctgaattctgcactccagaaccgtgagagagtcagtttctgtgaagccaatcagcttgtggtactttgttatgttgggcctatgaaattcatctactgttactagcctttcccaaatatttcagtccatgaaatgcacccagcatggcaactcttcaacttacagaaatgg

SEQ ID NO: 255939 - DNA, 342 bp, Homo sapiens
ttatctgaggattaaaatagccctcttgcagtgctcaacattaaagtcttccgcatttgcaaaattgcaaacagatgcaactcaagtacctgcaaataatctgccaagaccaatttcaaaagggagatttcaaaatatgtggaagtcattaggacatgtattatttttgcaatgaataggcgccaggagtgtctcaaggagcagatgggtgctactttgtttataaaagatcaacagaatattcggctgtaaatgaagacatataagctatatgaaacaattatggtaaaatggcgaacatttcaaagctaattgtaatggtcttttaagatctgaattcct

SEQ ID NO: 255940 - DNA, 645 bp, Homo sapiens
agacacaggggagaatgccacatgaagctggaggcagagattggagtgatacattgtgggaaccctcagaagataggaaaaaagcatggaatagattctccctcagagttccagtagttgccaaccctgctaacatggttttgcacatctagcatccagaacagtgagaatgtatttctgctgttttaaggtacccagttcatggtaatttgttacagcaatcctaggaagctaatactctgacagaaaaaaatcttggataatatgcatgagaaaaatccttcaataaacacaaaattggtttcaaaatgttttcatgtaaaaataaattaacttttctgtaattagattgtgttttatagtaattcttgcctgcttcttagtctttgttgtaggatgcataataaaatacatgaatgagttttaaatggttagctttggagaatggttttgggaagttcctacagtacacagaaataaaagctaatgttactatgaatgcgcattacttttctaataaaatgtttctgaatctctgtcttgactgccttctatgaatcattttaacatagtatcaatgtcattatgtagtacatcagttcttaacagtttttagttcattacttaaataaaatttaataacta

SEQ ID NO: 255941 - DNA, 264 bp, Homo sapiens
taaaattttttaaaaaatcacataatcatttcaatagattcagaaaaatgacatgatataatgtaatactagtcatgataataactctcagcaacctagggatatatgaaaacttctttaaggaaataataaaaagtatgtacaaaacaatacagctagcaccacacttaatggtaacatattgaacactttcaccctcaggtcagaaacaatgatgtccagtatcatcaattttatccagcattatataaaaggtcttagtgc

SEQ ID NO: 255942 - DNA, 327 bp, Homo sapiens
cccctgccctgctacttccactgaccacagctggactcttccgctcaagcttcagagacagcgccagaatgaagcccaggagccatgtccttcctaccagtcccatcttttctggcttttgccacccctccaaccccatcagcacctcccaaggcctcctaaatggcattcctttgctgatctggaatccatgagctcctgtagcagcccagtatcataccccatgcagggtgacacacaccaacccatactcccgtgaccagatcccactgcctttgtccgtcactccctttccacacattggcatggagggagcatgcatctgta

SEQ ID NO: 255943 - DNA, 498 bp, Homo sapiens
caagaagtgtttgagaatgacagatgtggccgggtggctgtgccagagatggggaggcatgccatcagagagagacgcagggcagtcggctgcttgtgacatttcttccagaagctcagtgatggctctggttgttcatgacatgctttgtaccttttttcttgatccaaagtattttataataattgtttttaaaaacaaggtaagtggctgggcacggtggctcacgctggtaatcccagcactttgggaggccgaggcgggcggatcacgaggtcaggagatcgagaccatcctggctaacatggtgaaaccccgtctctactaaaaatacaaaaaattagccgggcatggtggcgggcgcctgtagtcccagccactcaagaggctgaggcagaagaatggcgtgaacccgggagacagagtttgcagtgagccgagatcgtgccactgcactccagcctggttgacagagcgagactccgtcccaaaaaaaaa

SEQ ID NO: 255944 - DNA, 223 bp, Homo sapiens
tttgtgctgctcacagtgttctagctacagacaagatgctcttttaagcatagaaaatccatgaaacaaatcactgccgacctgtagcatttgcctgttcctgttgtataaatactcccaccagggccaatttcaagttgccaacatgacttgcgtgaacatgggttcgagatgcgcagcagcacagcacgatagagtacttccgcctggagacacagtcagt

SEQ ID NO: 255945 - DNA, 451 bp, Homo sapiens
gctgacaccccttatcactccccatcaataccctgccacaccactatcccagacccaggttcatatgctcagagtctctggcatgcaacaaactcattcccaccctcaatcatgctgggtctccttctcctaacatactctttcccctcctttctacgtaaatcctattaacttcttagagcccaagactgactacttctgtattttgcatccaaaatgaagcactccggaagcacagcctttcctacatttttttctaactgctccatgtactttatgtcccactttttaaatttttgtctgatcccacccaaggcacataatgcagccacttgttcaactgtactgaaatgcctaacggtaatttaattaattcatcaatttagaaaagcattcttcctggacagcagtggacatgtccacagttttaaaaccatcactgcaccgagaa

SEQ ID NO: 255946 - DNA, 897 bp, Homo sapiens
gggacccagggaagacacagaggggacggatggtctgcgccagagcagggaaaacgcgaaaccaaggagaaggagaatgatgagtttaaaaataataatagctcatgctgggggaagggagaatgtaaaggcctccccgacaggtttatggtgggcaggactgtagattcaatgcagagagcagcagccgccttctctgcagtgggaggggagccatgaatcttccctttggaaatgcaagcgccataaagcactgcaggaaggatgctcaacccagctgggcccagggagcccgggagacaggctggccttccaggttccgcaggcaagagtgggccctggggtccagctggccccacagcatgcaggcagcccaggggcgcagagagggtcagcgcctcgctggtggagaggtctttcctgcccccacactacacgccccctcccggcaccccgctccttcagagggcccacctgggatctggcctgcccagccctgcatgcggcaggagtcaggcggccgctcctaatgcactgggatgactattaagaggctctgagccgccactcagctgggctcacttccccaaatctcgcagccagccaattactggcgattaattacccatctccggaggtaggcgaggactccgcgtagccaaggtcagccagttcaaacgatccagctgcccggccgcccacatccaacctcttcactcaatgtgcaggactcccagccaggggtcaggtcgggtgcggggcacagctctgaccccggggtgggagagaatccccccaagaggctggcatctgtctcccagacccttggagctgtcccctacacccctgatacggaacggcgaccttcctcgggtatcccagggatgtaataatggc

SEQ ID NO: 255947 - DNA, 283 bp, Homo sapiens
aacctctgtctcctggtttcaagcgactctcctgcctcagcctctcgagtagctgggactataggcacacaccaccacacttggctagttttttgtatttttagtacaaatccatgttggccggtctgatctcagactcctgacctcaggtgatccgcctgcctcagcctcccaaagtgctggaattacaggcgtgagccactgtgcctggccaataccctttttctagtcaatattcttgttggcttttcttgtctcggccagcactcccaggtgcaatggt

SEQ ID NO: 255948 - DNA, 279 bp, Homo sapiens
cttgattatcacatccagttgtgcacatagaaatctctaaaggattacctcattaggtgctttcctttgaaagaaagaggtgccttttaagggtttaatttaaatataggagaggagtgccaggatagctccttgatttcttatctctagctgtaaactgtagacccaaaacatcctctttagtggaagaactctaaatcattttggttgtctttttttatatgtaagcaggagtcatttttctatttacttcctcttggtaaatttttaattttttgt

SEQ ID NO: 255949 - DNA, 435 bp, Homo sapiens
aaaccaatgatcagagcccagatatgagagggtggaaggagaattcagagttgcccactgacctggaacatctggatatggactgttgaaagggcttccagatgtctgtaagggatgttgggctcgatggacaaggcagtgcaaagctaggctaggtgcacagcgtcccttatcatcccccaccccccaacatatgcaaggagttggctggggccatgactgctccttcctcagccccagacttccaaacagcacccccagaggagaaacaaaatcagcttccattctctccctgtgcatagcaatagctttaacagctaaagagagagtgagaggaaggaagttgtcttagtccattttctgttgcttgactgaatgtctgagactgggtaatttataaataaaaggaaattatttcttacagttctgaaggct

SEQ ID NO: 255950 - DNA, 594 bp, Homo sapiens
tcctcaggttgtattccttaaatatatataatttaaggatatgtattatatatatatataaatatatatgtaattccttaaatatataattttaatacaattttttttttgagacggagtctcactcttgtactccagcctgggtgaaagagtgagatcctgtgcagaaacaaaagaagaaaaaaagagatgtgaaagcctatatattgaagactaccaagtactgcttagagcagttaaagacctttggaatagaaaatgtttcttcttgcatttcaagattgcttttgttttggggggacacactattttttaggaatatgaagttcttgttaggcattcctgtaaaaaaggccactttttgataggattgtattgaatctgtgggttgctttgagttgtatttttatcttaaccatgttacaacttccaacccatggacacaagatgtctgtccattgatttaggtcttcctgaatctcctcgagcaatgttctgtagttgtctgtgtacaagtactgcaccttcttgaacaaatttattcccaggcatattattcttaccagtgctattataaatgaaatcattgtgtca

SEQ ID NO: 255951 - DNA, 639 bp, Homo sapiens
tcataagcttgaaactagcctaggcaacatggtgggccctcatctctactgaagatcagaaaaattgtccgggtttggtggtgtgagcctgtagtcccaggaatcagtggatgaggccctaggatgtcataggcctgagaattccatgctgcagtgagctgtgattgtgccactgtactccagcctgggtgaaagagtgagatcctgtgcagaaacaaaagaagaaaaaaagagatgtgaaagcctatatattgaagactaccaagtactgcttagagcagttaaagacctttggaatagaaaatgtttcttcttgcatttcaagattgcttttgttttggggggacacactattttttaggaatatgaagttcttgttaggcattcctgtaaaaaaggccactttttgataggattgtattgaatctgtgggttgctttgagttgtatttttatcttaaccatgttacaacttccaacccatggacacaagatgtctgtccattgatttaggtcttcctgaatctcctcgagcaatgttctgtagttgtctgtgtacaagtactgcaccttcttgaacaaatttattcccaggcatattattcttaccagtgctattataaatgaaatcattgtgtca

SEQ ID NO: 255952 - DNA, 663 bp, Homo sapiens
cccctacttaccctccttacctccattaaggactttctgctcccagatataaggaatcagcctaggatttgaagcagtacagctctacatactgagttaaatttcctattttggactatcctaaaaatgtaccactgtgtatagtactacttttgtaagaaaatgagttcctcattccaagccactatttgctcggctggcaatgccctgtagactctggtatgcagtgcccatagtaaagctcgttaaacattagttcttagaaagaaataaatgcattgaagttcttcaatgtaactatattcctgaacaaaaaaaactaaccaaattcattctaatatgtgtaatggccaagtttagaccagactgtgattaaaacattcattcgtcaactcagaagccacctttgatatagcaactacaaaaatcttctcaatagctggaggccatatgttaaagaaacttgatgaaatattttcagcagtgaatgccagcttttcacatctaggactgtcagaatgttgagttctgaaatttgatctaaattcagtttcacattaataaatgaaaggttatttttctgttactgacactgaaaatacacaaatggcactttcaaatttgaccatgttccctggttaaattttcaaattagttaagaaa

SEQ ID NO: 255953 - DNA, 694 bp, Homo sapiens
aaatatctaaacaaaagtatttaccattcatatcctacctttagctgggtgagtcatttgatggcaattttctattatttgcatagcacatgttagagtttagaaataaacagacatatgtcattcaaatttttataggaaagtgtttaattgctgagaagtaaaacacaaaatgacctcgcagcataattataaaaaagaagcgtaaacacgaaaacaaagggaacagaaaggcaatgcaataaatatcacaatcaaacacctctttcatcaaaatatcagttccctttttaaattctgaagtgaatgctctaaatttattgttgaggctgctttaatattatagtttgatgtactatcttcgaattgatctgatgttataatcaaccttgggtcagtaacagagacaaaatccatagcttcatgccacttaactaaataaatatcaacattcaggtgaagggctttggattctatgattttacacgttcctcacctaagtcttattatcaggcaattttggtaattgatgtgctaatataattgttctcaacacctaattgggtgtcaactttaagttcaaaaggagctatgccaaagaagcgtttttacgtttctcactctttatttttctgtactagtgagtatagaagtctggtttgaaaacagtgataatatcagataacttcaggga

SEQ ID NO: 255954 - DNA, 479 bp, Homo sapiens
  misc_feature (25)..(26): n is a, c, g, or t
  misc_feature (33)..(33): n is a, c, g, or t
  misc_feature (36)..(37): n is a, c, g, or t
  misc_feature (53)..(53): n is a, c, g, or t
tctctagcacgatccccccccttgnngagctcnagnnacacagtctttttttnctgagatagagtctctctgtcatccaggagaattgcttgagcctgggaggcagtggttgcagtgagccaagtttgtaccactgcacttcagcctggcaacagagtgagattccgtctcaaaaaaataaagaagaaaaaaaaaggaaagaaagaactctaaacaataaagtaacaccctggatagaagtagagagcactttcagaggacacctgaaagtaaaaataaaaaaactttctgatgagagaagtctgtggtttgagagcttaaattaaagcctaccaagaaagcaggtttctccagaatctgcccctcaaattgcttaacagccttcggacagctctaacaaccttgatagaggttaaagctctaacaacctttaaacatacctacatacatacagaattttataacatttgtttgactac

SEQ ID NO: 255955 - DNA, 301 bp, Homo sapiens
tgtctaaatgtttctttctcagagaggcattccctaaccctcaatgtagatcaaggccacttgttatatgctctcacaatgcctgtcgtctgtagctggccttttcagcacttatcatcgtgataacaacatagttatttatgtgtttagctgttcagtgcctgtctctctccctctgccacgttttatgaaggcaagaactatggctattttcttctttcctctttccccagcacttaatgcctgacatgggagcttaatacatatttgttgattgaataaataaatggtaatagtgata

SEQ ID NO: 255956 - DNA, 380 bp, Homo sapiens
atgctctgccctttgtgcagtgcgtgagtctactctgagtccatttccatgtctagttcatgctatctaattctttgctcttgtcatcggtagccttattctttctgcagtttcactcatctcagtctttagtttccctcactctgcttcccacatttttctctgacttttccaacaaaacctccaaaacgtgattcctctttccttggcattattgtatgttagaaggtctggcaggagtgttttcacagccttggtcaggccaaggttgggggagtccttaccttcattgctttgattctctttgggaccagggtggacaatgggggagggcagaaccttctctcctgtgagatatgggcaagggatgaatgaataaa

SEQ ID NO: 255957 - DNA, 498 bp, Homo sapiens
agtaatcatgataagtaacatattaatatgatgtttttaaaaatcaaaatgaatgcagagaatctatgatgaacaaaatattaaaattttaagtaaagacataatcagtgtaaacatagaaggatcaagggatcaagactgatttgggggcacacaccaactctacatcccaattgaagcattgaaacaatttcttagtaaaagtggcagtactctggcctggcacagtggctcacgcctgtaatcccagcactttgggaggctgaggcaggcagatcacttaagtccaggagtttgagaccaggctggtcaacatagtgaaacccccatctctactaaaaataaaaaaattagctggtcatggtggtgcgcacctgtaatcccagctacttaaggctgaggcacgagaattgcttgaacctgagagttggaggttgcagtaagccaagatcccaccacagcactccagcctaggtgacagtgatactctatcttaac

SEQ ID NO: 255958 - DNA, 185 bp, Homo sapiens
ctgtagagatgggggtctccctaggctgcctaggctggtttcaaactcctgggctcaagagatcctcccatcttggcctcccaaagtcctgggattacaagagtgactcaccatgcctggccctaactaatttttaatgatggatgtttgcatacttggaaatgtcttttttaaaagcacaaaga

SEQ ID NO: 255959 - DNA, 448 bp, Homo sapiens
acgggcaggctggtctcgaactcctgacctcatgatctgcccgcctcagcctcccaaaatgctgggattacaggcatgagccaccacacctgacattaatttttattccctttaagaattagaattctcagtcttttggggtgaatttgcccttgtggaaatgttgttttattcctatttttagtcagaataatttttctgtattaaacaatacaaaatgtgaaagcctggaattgtgggaattaaaaatgtatgtcttagaagcaaaatagcctccttttcttttactaaaatttgtgaagttttaaagtaatccctttttttaatgttcagagaagaatatatgtatgttaaagaatcctagtgataatgtaatggaatggggtatctgggcatgatgctcctgcttgtctgaatacatatatatgggaattttaaaaattgttgt

SEQ ID NO: 255960 - DNA, 240 bp, Homo sapiens
tttcctttgcatgtagacccagaggttggattgctggttcatatggtagttccatttttagtttttgaggaacctccatactattttccattatggctgtcctaatttacactgggaaaacagtgtacaagggattccttttttccatatcctcccaacactttacacaaagcttttcttaacattaaaccgaaatctaactgcctgtacttactatcctagagtgcttggagcttccta

SEQ ID NO: 255961 - DNA, 394 bp, Homo sapiens
tttttccaaactgcagcttattacatgggtcacacaaggacagtttgcagcataaggacagctagctgcttatacaagaacatgtgcctgacacagtctcacaagcccagtccaaaactacaagggcctaactgtaactccaggattacaagtcctacctaataactattgacactcgccagtcagaactcaccagctcttttgttgctgccagcaccaataagctttcttccaaaaccaacgcatagcctccgcctttcccaataaactctaaccttttcctttattctgtggacactccagaggccaatctggtctgtatatatgtcccagattgcagtcctacttcttgtatattattctcaaataaaacaatttttacttaagagactca

SEQ ID NO: 255962 - DNA, 460 bp, Homo sapiens
cgggcatggtagcaggtgcctgtaatcccagctactagggaggctgaggcagagaattgcttgaacccgggaggcagagggtgcagtgagccgagatcgtgtcacagcacttcagcctgggcaacagagagaaatttggtcaaaaaagatgtccttcccaaacactttaagcctgcacactgcctgtggtttaacgtgcctctagtatgagacctcattgtcttccttattactttgtaaactgtgaagtaacatgttcgctatctagttccaagctttgttcagtgatttagaggataaatgcctatgactctcagtgtcagaaacagagtaaaattacatatcttatttacttattttcttgtttaatatatgttccctctactggaatttaaactatacaaggtggagaacttgatctgccaataatgttatcctctgtgcctagaacgatgtctga

SEQ ID NO: 255963 - DNA, 510 bp, Homo sapiens
agaagggacagtgggagggaggtgaggaatgaaaaactacatattggagtacaatgttcactacttgggaaatgggtacactaaaatcccagacttcaccactctacaattcatccatgtaacctaaaaccactgcaccccctgaagctgaacccccaaaaggatgagtttccatggcatggagatagctatataagtgcaggtggccccactcatcatgctggcagtcaccagagagtcaagcaggaaggctggtggctccacagtccacaaccacacgacaggaagccatgaggctgactcgtgattgaagggccacagtacctacgtgtatcttatgtacaaggtgcagcatgccttatcagctaaaatatggcacgtatgtgctatgaacttaaattactatctctgtgagtttggcccatgagagacagaattaaagaattgaaagagacttcagaagaaatcagccagtccaattccctcaccttgtttccacaaacaagaaaa

SEQ ID NO: 255964 - DNA, 115 bp, Homo sapiens
aaggctttgatttcaataacaaaatttgttacttccacattgagtatagaagatcccaacttcaatatatacatattgtaaaaagtctcttcaaaaattgtgtttttatgatatg

SEQ ID NO: 255965 - DNA, 417 bp, Homo sapiens
ttcacagagcaggaatggaggaatggaggaaaggaggtctgggagacaaaatctctagcaaggggttgacagtcccttagagtcacccctcagcttgaggacctattattctttggaaaagggagaccagtacattctgagaaagaacccaggctttggagcctgaaaatctcaacttcttcctcttgagtgtgtctttggtaagttatttatcccatctgtacctcggtttcctcatctgtgaaacaggcaacacaccacctcctatagttatagagcaggatcaatgagattgtctttgaaaagttgcccagcatttgcaggtatttaataacaatatcttttattattcaaaggtcattcagccatttgtattggtgctccagtactcttgtaggtattgggaatatagcagtg

SEQ ID NO: 255966 - DNA, 1548 bp, Homo sapiens
  misc_feature (12)..(12): n is a, c, g, or t
  misc_feature (1196)..(1197): n is a, c, g, or t
gtggtggcaggngcctgtcattcattccagctacttgggaggctgagacagggggatctcttgaacccaggaggcagaggttgcagtgagccgagatcacgccactgcactccagcctgggcaacagagcgagactccatctcaaaaaaaaaaaaaattgtataaaattatcttcagacttttgtataaggtgtacatgaaacataaatgaatttcatgttatttcatcatgaatacatcaatattccgaaatccaaaatctgaagcacttctggtcccattttagagaagagatatttaacctgtattcaaagtagatggcccttctttttaaaaaatgctgagttgctaagcaatccagttcctttcaattttagggtcatctctaattattatggctttgaagaaaaagccattcttcctatctaagcatttccagataccaaagatttagcttttcacacttgttaatctgatagaatatactggcactgacgtgacaggtagtttaattcaccatcacatcttttaatgctttaaaattgttctccctccctaggttggttggggagcaaagtgtaatcccaggttgcctaatctaatttggcagttttagttccaatggtattgcagaatgtgctaatgggaactaacatttgctactgcacagtgaaaagaacaagaatagtgtgattaagaacaatagttcaaatttggccaaagattaaatggcctaggcattcagacttctgtcttatggctcctgtctttacaacgaccctggggttaaggtggcatattccattgaaaggctgcgtggtgtgagttttctacgatttgaaaattatgagcttctgcggcaacaaacttggaacctggggatggaacttggggcctgacttgttaagttccaattcttttcatattctctgtaagtgtaccagtctgtttcatgtcatctggaccattctgatgtgcctagaaatcaatctttttccctccctcaatcctgcatggggtcaggcctacacctctgcacaaactataaggccataaacataatcctaaagtacaaataacctgtgtagcaagactataggacatctctacagatggttgtcctccagcatatcctgggattctaggaaactaagatgaaacagagaggagaaaggggtggtgcataggtgaaccanngacttcaaactaagggatttgctggtttctcttctgctgccacagtagcttacattagagcaggaaaactacgagaccttcaatactatagtcaggacagcaacagcaacttccactttaccttgcaaatattgagagcttggacaatagtctaacaaattcaatttcaaacatctgtcgagaattggatgatgctgacattctaacatttcaacatgcccccaaatttgtggaaagtacacgtgtttacaccaggagagttctatctctgagtcagatgtggggaaactactactctagaacaggattctcaaccagaatgtgaccccctgggcacatttagcaatgtct

SEQ ID NO: 255967 - DNA, 855 bp, Homo sapiens
gaatttgtagctgatagtagaggctttacttgtgtaccccaaatgcactttgatgtggtgtagatggttttgtgagttatctgagccatgtaactcagagaatagtatttccttgtacataaagtgacctcacttttaatcagcccatttatggtatgttgaaatcactgtgtgtaatgagagatactgagagtttctcacgcatatgagtacaaagggttgagaactatattatacaaagtaagtcacagtgcatggcaactctctacaggttggattacaagacttcgtatgtggagtaagataattatattgggaaaaattattttcactaactttaagactccagagacacttttctcagccatgaccagtaatgtttttaaaagattttggaaggaatagctcctcactataccaccagttcgtgattttaagggaggagacaacccctcatactgtcttatgcccaatttctgcctccaaagaaagaagtaaaatctaaaaggcagaaatgaaatccacaagcagacagcctggccccacatcctgggcctggtagttaaagattgacccatgacctaatcggttatgttatctatagattacagacattgtatagaaaagtaccatgaaaatccctgtcctgtcctgttccattctaattaccggtgcaggcagccccgagtcacgtaccccctgtttgctccatcgatcacgaccctctcatgcggacccccttagagttgtgagcccttaaagggacaggaattgctcactcggggagctcggtttttggagacatgagtcttgctgaagctcctggctgaataaagccctttcttctttaactcg

SEQ ID NO: 255968 - DNA, 421 bp, Homo sapiens
gcagccgctgtaggagacagtttggtagtttcttataaatgtgaggatacgtgttccgtacaacctacaagtcccatccctaggtatttagcaagagggatgagaactgtgtccacgcaaacactgggagatgcatatttatcaagcagctttatttagaattgtccccagtggaaacaacacaaatatccttcgactgctgaatggacggagaccctgcgaggccttcacgaggagacactgcaaggcctccatgaggcagccagcactcaggagccaaggcacaggcctctggcagacgcgccaccgtgggggaatctcgactgctgaatggacggagaccctgcgaggcctccacgagacagccagcacttgggagtcaaggcagagacctctgtcagacatgccaccgtgggggaat

SEQ ID NO: 255969 - DNA, 327 bp, Homo sapiens
cttttgccacattggccaagctggtctagtactcctggcctcatgtgatcctccctccttggcctcccaaagtgatgggattacagtctgagtcactgccctcagcctatacatacatatttgcacacttatttattttggatacattttctagaagtgtaactattgggtcaaaggatgggcataattttgaaatgtgattattttctaaagagcttttatactgatatgccattgttggataaagccctgctagtagtgaataggagtgcgcccccacaacctttaaacttattctaactggcatagtgattctagtaaaaaaaa

SEQ ID NO: 255970 - DNA, 627 bp, Homo sapiens
gaccagccaagaggccaggaatttaagaccagctagactgagtgatagggcaagactccatatctaacaaataaataaataaacagaaaaataaactttgaataaagccacaacagataatttggtaaatgtgatgtcatggcatgtcatggattagcagtaacccattttccatgggtaataaggtcatcattatattcaaactgtacaagctacctaacccaagaatcacatcactgaattaacaagacaaaaacaaaaacaaaggagagtaccttattgttttaaaacaatagactgtaatttagaggtctaattcaggagccttgttacattgtattgagtctgagagaagtaaaataaaaagtacaccacagattagtaattgctgacagtggctgcttcatcaagttcttggaaaacaaaagtgacaaaacggtgtaatcagagcccagaagaacactcagtgcttccctgctagggtagctagtttagacagtgctgaaaccatgacgaagaaggcctgcagcttgtcctagaaccatgcaagagggaccattgaagctgaaggtggattgctgttgggtggaaaggatgtagtcactcaaaaatgctgccagaagaaga

SEQ ID NO: 255971 - DNA, 235 bp, Homo sapiens
aaaaaaattattttagattgtgcttcctaatattttgggattaaaatgtcctatttaaaaatcacattattggccaggtgcagtggctcatgcctgtaatcccagcctttgggaggccgaggcaggtggatcacaaggtcaggagattgagaccatcctggttaacacggtgaaaccccgtgtctactaaaaatacaaaaaattagctgggtgtggtggcgggcgcctgtagtcc

SEQ ID NO: 255972 - DNA, 296 bp, Homo sapiens
aactaataacttttttctttgtggctattacagcacttcaatttagaagctacattcaaagacaaaagctaaacaaaagctaagggtctgtgtcttagaatgctaaatcaccattaaaataaaccatttcaaaaactcaattagctgttcaattttatactgtgattattctttctccaggtttttcctgacatacaaaaaatagaaaatttggtttgttttttccatattaagaaagctgatgtcacgcctgtaatcccagcactttgggaggccgaggcgggtggatcacgagg

SEQ ID NO: 255973 - DNA, 789 bp, Homo sapiens
gggcccggcggccgcatcgggagcccggcggaaacatggcggcgcccggaggccggggccgcagcctctccggcctgctccccgcgcagacctcgctagagtacgccctgctcgacgccgttacccagcaggagaaggacagcctggtctaccagtatctgcagaaggtggacggctgggagcaggacttgtcagtacccgagtttccggaaggattagaatggctgaacacagaagaacctatttctgtctacaaggatctatgtggaaaaatagtcgtccttgatttcttcacctactgctgcataaactgtattcacctattgcctgatctccatgcattagaacacacatactctgataaagatggtcttcttattattggtgttcactcggctaagtttccaaatgaaaaagtcctggataacattaagagtgctgttcttcgatacaacatcacccaccctatggttaatgatgcagatgccagcctttggcaagaactagaagtttcctgctggccaactctagtcatacttggacctcgtggaaacatgttgttttctttgattggagagggacacaaagataaattatttttatatacttcaattgctttaaagttttacaaggacagggggcgatcagagataataaaattgggatagaactctataagaatcttggcagcttcaccattgctatttcctggccaagtaacagtagaccaagttactgatagattggtagtagcagacactgggacatcgtgataatgaagcctcgtgg

SEQ ID NO: 255974 - DNA, 538 bp, Homo sapiens
gggcccggcggccgcatcgggagcccggcggaaacatggcggcgcccggaggccggggccgcagcctctccggcctgctccccgcgcagacctcgctagagtacgccctgctcgacgccgttacccagcaggagaaggacagcctggtctaccagtatctgcagaaggtggacggctgggagcaggacttgtcagtacccgagtttccggaaggattagaatggctgaacacagaagaacctatttctgtctacaaggatctatgtggaaaaatagtcgtccttgatttcttcacctactgctgcataaactgtattcacctattgcctgatctccatgcattagaacacacatactctgataaaggtatctgctctttaattagtttctaacagactgtcctggcatagtcactggaagagtggctgactcattagctcataggagaatgaacatttggcaaggcttcagggattctaaaagtaatctcttatctatgaattaaagacttcatgtaccttttcataaaggattaagc

SEQ ID NO: 255975 - DNA, 1921 bp, Homo sapiens
  misc_feature (117)..(117): n is a, c, g, or t
  misc_feature (1017)..(1017): n is a, c, g, or t
ggtgcagctgcaggcaagcctggccactgttggctgcagcaggacatcccaggcacagcccctagggctctgagcagacatccctcgccattgacacatcttcagatgctctcccanctagccatgctgcagggcagcctcctccttgtggttgccaccatgtctgtggctcaacagacaaggcaggaggcggataggggctgcgagacacttgtagtccagcacggccactgtagctacaccttcttgctgcccaagtctgagccctgccctccggggcctgaggtctccagggactccaacaccctccagagagaatcactggccaacccactgcacctggggaagttgcccacccagcaggtgaaacagctggagcaggcactgcagaacaacacgcagtggctgaagaagctagagagggccatcaagacgatcttgaggtcgaagctggagcaggtccagcagcaaatggcccagaatcagacggcccccatgctagagctgggcaccagcctcctgaaccagaccactgcccagatccgcaagctgaccgacatggaggctcagctcctgaaccagacatcaagaatggatgcccagatgccagagacctttctgtccaccaacaagctggagaaccagctgctgctacagaggcagaagctccagcagcttcagggccaaaacagcgcgctcgagaagcggttgcaggccctggagaccaagcagcaggaggagctggccagcatcctcagcaagaaggcgaagctgctgaacacgctgagccgccagagcgccgccctcaccaacatcgagcgcggcctgcgcggtgtcaggcacaactccagcctcctgcaggaccagcagcacagcctgcgccagctgctggtgttgttgcggcacctggtgcaagaaagggctaacgcctcggccccggccttcataatggcaggtgagcaggtgttccaggactgtgcagagatccagcgctctggggccagtgccagtggtgtntacaccatccaggtgtccaatgcaacgaagcccaggaaggtgttctgtgacctgcagagcagtggaggcaggtggaccctcatccagcgccgtgagaatggcaccgtgaattttcagcggaactggaaggattacaaacagggcttcggagacccagctggggagcactggctgggcaatgaagtggtgcaccagctcaccagaagggcagcctactctctgcgtgtggagctgcaagactgggaaggccacgaggcctatgcccagtacgaacatttccacctgggcagtgagaaccagctatacaggctttctgtggtcgggtacagcggctcagcagggcgccagagcagcctggtcctgcagaacaccagctttagcacccttgactcagacaacgaccactgtctctgcaagtgtgcccaagtgatgtctggagggtggtggtttgacgcctgtggcctgtcaaacctcaacggcgtctactaccacgctcccgacaacaagtacaagatggacggcatccgctggcactacttcaagggccccagctactcactgcgtgcctctcgcatgatgatacggcctttggacatctaacgagcagctgtgccagaggctggaccacacaggagaagctcggacttggcactcctggacaacctggacccagatgcaagacactgtgccaccgccttccctgacaccctgggcttcctgagccagccctccttgacccagaagtccagaagggtcatctgcccccccactcccctccgtctgtgacatggagggtgttcggggcccatccctctgatgtagtcctcgcccctcttctctccctcccccttcaggggctccctgcctgagggtcacagtaccttgaatgggctgagaacagacc

SEQ ID NO: 255976 - DNA, 1758 bp, Homo sapiens
  misc_feature (117)..(117): n is a, c, g, or t
  misc_feature (1017)..(1017): n is a, c, g, or t
ggtgcagctgcaggcaagcctggccactgttggctgcagcaggacatcccaggcacagcccctagggctctgagcagacatccctcgccattgacacatcttcagatgctctcccanctagccatgctgcagggcagcctcctccttgtggttgccaccatgtctgtggctcaacagacaaggcaggaggcggataggggctgcgagacacttgtagtccagcacggccactgtagctacaccttcttgctgcccaagtctgagccctgccctccggggcctgaggtctccagggactccaacaccctccagagagaatcactggccaacccactgcacctggggaagttgcccacccagcaggtgaaacagctggagcaggcactgcagaacaacacgcagtggctgaagaagctagagagggccatcaagacgatcttgaggtcgaagctggagcaggtccagcagcaaatggcccagaatcagacggcccccatgctagagctgggcaccagcctcctgaaccagaccactgcccagatccgcaagctgaccgacatggaggctcagctcctgaaccagacatcaagaatggatgcccagatgccagagacctttctgtccaccaacaagctggagaaccagctgctgctacagaggcagaagctccagcagcttcagggccaaaacagcgcgctcgagaagcggttgcaggccctggagaccaagcagcaggaggagctggccagcatcctcagcaagaaggcgaagctgctgaacacgctgagccgccagagcgccgccctcaccaacatcgagcgcggcctgcgcggtgtcaggcacaactccagcctcctgcaggaccagcagcacagcctgcgccagctgctggtgttgttgcggcacctggtgcaagaaagggctaacgcctcggccccggccttcataatggcaggtgagcaggtgttccaggactgtgcagagatccagcgctctggggccagtgccagtggtgtntacaccatccaggtgtccaatgcaacgaagcccaggaaggtgttctgtgacctgcagagcagtggaggcaggtggaccctcatccagcgccgtgagaatggcaccgtgaattttcagcggaactggaaggattacaaacagggcttcggagacccagctggggagcactggctgggcaatgaagtggtgcaccagctcaccagaagggcagcctactctctgcgtgtggagctgcaagactgggaaggccacgaggcctatgcccagtacgaacatttccacctgggcagtgagaaccagctatacaggctttctgtggtcgggtacagcggctcagcagggcgccagagcagcctggtcctgcagaacaccagctttagcacccttgactcagacaacgaccactgtctctgcaagtgtgcccaagtgatgtctggaggtaggtgcagggtggggtgaagctccgcccacccacaggctcacccagattgacactcccattccctccccaggttcttgtgcgcccaggtgctgtcaggaggatgggtgcaggtctgggccttgcccacccataagctcacctggctgtgccccttcggtgccttcccccattgagtccttgaagtcccctccaggtctcacctcctcctaaagctggcaccaccagttttcctcagagacaaggctaaagaaacactgagtgcagggccccgggggggaggcaccctataccctatcagt

SEQ ID NO: 255977 - DNA, 423 bp, Homo sapiens
ggtacctgtaatcccagctacttgggaggctgaggccctgagaatctcttgggcccgggaggcggatgttgcagtgagccgagatagtgccactgcactccagcctgagcaacagagtgagactccatctcgaaaacaaaaaacaaaacaccatgtgtacatacttatgttaacctcaaagttaccactgtctaagaaacttaatgttccaggccatatccatgtctcctaattggtttgaaaaaggttgcagcaaaagaaactgaggttgcttacgccacccagtaggggccacacactgcagtccttattagcaacacagccttcatttacttctgcaaagaactttacagcttttgttttaagacagggtctcactctgttgctcaggctggagtgcagtggcataatcacagctcactg

SEQ ID NO: 255978 - DNA, 520 bp, Homo sapiens
ctacaagaggcaagaaatgatcatccctggaggcttcagagggagcacaacactggcaatgccttgctttcctgctgttgaacatgagattccttgttcttcagttttgggactcaggctttccttacttctcaactggcagacagcctattttgggacctagtgattgttctttcagtttcacatggctggggaagcctcacgatcatggaaaaaggcaaggaggagcaaatcatgtcttgcatggatgtcaacagtcaaagagagcttgtgcagagaaattccaccttataaaaccatcggacctcatgagacttattcaccatcacaagaacagcatggaaacagctgttccttaagtttaagacagaaacttggtctgaaaagtgacacacgctctgtttctgcagatgtctccaaaaacagaagttgttgcacctgacagtgaatattaaaggtttggcctgctttatctctcgctttcacaatgaatcatatctcaataaattctgtctcacca

SEQ ID NO: 255979 - DNA, 429 bp, Homo sapiens
acagccaaactccttgaaagagttttgaatattaaatgtttcctttccctctgctctcaccaactccccagctcccttccatcttgctattgctttcaccattccagaaaccagctcttgctaagattgtctgattgctaaatttaatggatccttttcaatcattacctcctttgacttctcaaaagcatttgccactctgaggcgctcatctttctttgcctttctcagcactgtactttgtaatttttcttacctatctctgtgtatgctgggtgttcttccactgtacatcctccagatgttcctgttttgtttgaggtcctctccctgggaaaccttattcactcctgtggcttcaatcatcatctatatgctgatgacttctgatcattatctccagcctctcttttgctcctcaataccgta

SEQ ID NO: 255980 - DNA, 407 bp, Homo sapiens
tcccaggccacagccaaatggaaccatctgcaccatgaagctgaagataaagccgcagaaagattgctgtattgtgagtggagaagagccctgcttctcttcactggctgatgtgcagacatttattagtaaatcttcacggcggtctagggaggcctttgactgagcgctgttcatcgagtccagccccggctttgcaaataaacagctgacaccaagagaggagaagcaacacggctgaggccacagggtgacaaagccttaacagcaagaaggggagaaggcagtcatctggaaacgaggaagacagccctcaccagaaactgacactgttggacctcgatcttggacttgcagcctctagaattgcaagaaaataaatttaagctgtggactctgttatttaa

SEQ ID NO: 255981 - DNA, 200 bp, Homo sapiens
cacatgtaggaagcggcatctgggctaagactgggcctgactgtatggtctgagcttcatgaagagagagtgctacagaagtaggttgcgggaccaaagtatatgagttttgaagcatggtgcataagcagtatgaatgacatcaaatagtgacaccaaagagaggaaaaaaatctctgcaaaacacggcacccctttgg

SEQ ID NO: 255982 - DNA, 444 bp, Homo sapiens
tattttgcatggcagaaattattttaacctggaaaacatggctccttctactttctatccttgttaggctggtaatacattgataatatatatctaactatatgaaatgaatgaattttttaaaatatccctgagtaattgtataaatgacttgatttttcacatactgtatttgattatttggaagacatacttaacatttctgtaatcagaatgccttttagaatagatcatgtgttatagttttaactgacaaccttttttaccttggtgttttataaaatgatgatgcagtcccaattcgtagcatatgagatttgataaaatacagtaatatagtaggaagcattaaagtttagagactgcaaaatattttagttttaatataattattgttgtgctacactttttggggctataggtgatattttctctctctctctg

SEQ ID NO: 255983 - DNA, 278 bp, Homo sapiens
atcaactaaaataaaacaggtgttgttatcaatttgactttttgatttttctcccaaaatgcatcttctccataaaattcttctaacagccaatgttttcaccagtgcctaccacctactcaacactccacagatgtttattgaatactcacatgaatgaatgaatgagtaaatgaatgaacaaatgaatatttcaaagagtttgtctgcttctctgagataattatatgttcacatgtgttatccaaagaaaatgagtttttctatttctgaggttt

SEQ ID NO: 255984 - DNA, 434 bp, Homo sapiens
actatctgtaatcaaatctttatctcactctgcattctggggaacccaaacaaagatggtaagtttgcctatctacatttatgtcttatttgctacaagtattactggtaattttcttgacaaaagtaatatgatatctgctgataggccaaaataatacatatttatagtgataactgcagcaaaaatgtgaaaaccaattttaaaaagttattttcactagtttaagaaaaatgaagaaattgaacttttaaaaaatgcagtaatacctcctaacacattatgaagaggaatattttcataactgtagaaatggttggtaaggctgtcaactatccaaggattatattgaaatagctgtcattggccaactactatgactaatgaaatcaacattttcaccatgcaggcaaaataaacgtcatgagtcaaat

SEQ ID NO: 255985 - DNA, 147 bp, Homo sapiens
gcccctatactgaaggaaataggcaaaaaaaaaaaagtctgagtcatttattcctgctaacaagaagcttgcaaaaatagttgggaagatcggaccaactcatatgaactaatcagagaacaagataggatagataaaaagataatg

SEQ ID NO: 255986 - DNA, 138 bp, Homo sapiens
ggggagataacagctttagtcatctggttgattaaatgaccttcattagctcctccaatacttggtttctatatttaaatagatttctaccgcagagggtgtgtgcatgtggggatgccgcctactgaccctcttcct

SEQ ID NO: 255987 - DNA, 451 bp, Homo sapiens
cacatgattttatattttagaaaagtattggtcagtgatggatttggtggaaatactgatctttcactacagatagtttgagaagtattgacctaagccattataaaacaaaatatgggggaaaatgactgagaactgcaatttgtatgtatatattggatgaaaggcttaaaatggtgtatctttacacttcttttctgatatataatgacaattttatttgcattaaagtcattgtggaattacaactaaatttttagtcctaggatttgactattgtattagttttcatgctgctgataaagacatacctgagactgggcagtttacagaagaaagaagtttaatcggacttacagttccatatggctggggaagcctcacaatcatggggaaggcaaggaggagcaagtcacatcttaatggatggcagcaggcaaaggaaaaaaat

SEQ ID NO: 255988 - DNA, 484 bp, Homo sapiens
aggtcaactttcatttctgcaagatattcattttagagtaagatacagttatctccaattggacagaaatttggggcaagggctgaattatggtacaaacatatgacagatgatgatgtactttaaaaaatcaaattctcaaataatttttaatgacagggagaatgttcataagatgttaaatgaaaaaagcaggcccagtgcggtggctcacgcctgtaatcccagcactttgggaggctgaggtgggcggatcatgatgtcaggagatcgagaccatcctggctaacatggtgaaaccccgtctctactaaaaatacaaaaaaaaaaagaatcagctggatgtggtggcaggcgcctgtagtcccagctactcaggatgctgaggcaggagaatggcgtgaacccgagaggtggagcttgcagtcagccgagattgcaccactgtactctagtctgggggacagagcgagactccgtctta

SEQ ID NO: 255989 - DNA, 440 bp, Homo sapiens
tccaccatataacataattggcaaagccgttgtcattgtcaaattaattagcaaatcaggcttactttcatatagacatggctttctattatgttttctaaatcatttcaaatacacatgttagtacacattcctcagcaaacattacttctgaattctcattctaagctacatagctggctggctggctggctggatggatggatggatggaggcaaagaaactcaccatgactttgtcacctgaatgaaacagtgccacatctttaatatttcctcccaaaccttcctttcctttactttcctgtgactctctctcagaagggatgcatgtctaaattctttatttggtacccagaagtcttttacagctcagggtaatagtgctccacaggaagatgcaggattgcagggagagctgtttgtcttcttttccaaact

SEQ ID NO: 255990 - DNA, 561 bp, Homo sapiens
ctggcactccacagggttctgtgacacaggcttcattctgtggtgtccctgcggcttcctgggagagaggagaaaagtcaaaggcaggaccccatcaaacccaccgtggtaacccgcacaagaaacagtggctgagccaggcatggggcaggcttgtggagcggtgcatagtgcctggaagacggggacacagggttttggctgaatgtgaggagagcacgcaggaggcgtcaggaaggacttcccctctcactgctcagtacacgtgtgagcatcgatgtcacaggcttccaggcagaggagtgcgtacgtgagggtctgctgtgcgctcagtacagagtgggtgtgggtttctggctcaggagcctcccgttgttgtcacttctcctcctctgtctctggtcctcccacctccctcattgtagggatcattgtggtgaccccaacagtctccccatctaaagatcctcaacgtgggtctttcctttccatgtagggtcacatattcacaggttgtagggattaggatatggccatcattcaacccactaagtcacggta

SEQ ID NO: 255991 - DNA, 558 bp, Homo sapiens
ctgttagcacacttctatttcatttttaatgtataatttcagtaggcatgcataattaaatgaaaatttgagaataaatgctatttgacatttctattagtaagacgagcacttaaaacatgacatcttttaatatcttcttaaactgagatcacttaatattctatcactttcaatttacttctcagtgtcatcatatgatgtaacatacatgtcattggtgcatgttacacttgtaacatacatgtgttatcctgtgtgataacacagtctttctgcggccttctgaaaaaatgtgtcttatctcctcttttgatgtcaggctgcccactggggttttttgctagtctagtgtacacacttgcattgggtgaatttctaccctttttctcttcttgtttttcctcaccatcacaaacaccaagatgatgctgatgtcagtaatttcccaaagcccctccccaaagtagcagttttgctttcctatcaatctatggattgattcttctgtataactaaatctggagccagttgatgagccaagtagaaaaaacattt

SEQ ID NO: 255992 - DNA, 1615 bp, Homo sapiens
tttttttttttgagatggagttttcgctcttgttgcccaggctggagtgcaatggcgcaatctcagctcaccgcaacctccgcctcccgggttcaagcgattctcctgcctcagcctccccagtagctgggattacaggcatgtgcacccacgctcggctaattttgtatttttttttagtagagatggagtttctccatgttggtcaggctggtctcgaactcccgacctcagatgatccctccgtctcggcctcccaaagtgctagatacaggactggccaccatgcccggctctgcctggctaatttttgtggtagaaacagggtttcactgatgtgcccaagctggtctcctgagctcaagcagtccacctgcctcagcctcccaaagtgctgggattacaggcgtgcagccgtgcctggcctttttattttattttttttaagacacaggtgtcccactcttacccaggatgaagtgcagtggtgtgatcacagctcactgcagccttcaactcctgagatcaagcatcctcctgcctcagcctcccaagtagctgggaccaaagacatgcaccactacacctggctaatttttatttttatttttaattttttgagacagagtctcaactctgtcacccaggctggagtgcagtggcgcaatcttggctcactgcaacctctgcctcccgggttcaagttattctcctgccccagcctcctgagtagctgggactacaggcgcccaccacgcctagctaatttttttgtatttttagtagagatggggttcaccatgttcgccaggttgatcttgatctctggaccttgtgatctgcctgcctcggcctcccaaagtgctgggattacaggcgtgagccaccacgcccggcttatttttaatttttgtttgtttgaaatggaatctcactctgttacccaggctggagtgcaatggccaaatctcggctcactgcaacctctgcctcccgggctcaagcgattctcctgtctcagcctcccaagcagctgggattacgggcacctgccaccacaccccgctaatttttgtattttcattagaggcggggtttcaccatatttgtcaggctggtctcaaactcctgacctcaggtgacccacctgcctcagccttccaaagtgctgggattacaggcgtgagccacctcacccagccggctaatttagataaaaaaatatgtagcaatggggggtcttgctatgttgcccaggctggtctcaaacttctggcttcatgcaatccttccaaatgagccacaacacccagccagtcacattttttaaacagttacatctttattttagtatactagaaagtaatacaataaacatgtcaaacctgcaaattcagtagtaacagagttcttttataacttttaaacaaagtatcaggtaaataattgtatttcctaagtaacctgaaggtgttacttcaaactgagaaagcctgccctccacacagcagaggcaaattcaaaccctccaccattctggagggcctttactggtaagggttgcattggagaactcccaaatctggctgtgcatacaactcacctaggaagctcg

SEQ ID NO: 255993 - DNA, 564 bp, Homo sapiens
acttacaaagggattctaaaaaacttaatcttattgaagtagagagtaaagtggtggccaccagacaccaaggtatttaggagacaggagggtttgaaaagatgttgatcaaaaaatacataattatagttaatagaagttcaagagatatttttgtacagcgtagtgactatagatcaaaataatgtatttgtagttttgaaaaatgctgacaatgtcacttgctcttgccacagaaatgttaactatgtggcgtaattacctagaattaagcatttaacaatgtatatatacttccaaacattatgttttacaaaataaatatacatttattgattacagatggtaatggtatgaaagccactgaaagggcaggcgttgcttatggtcttatgactggccactttgtgaacacaataaacaagtttgcattaaaaaaacccagaaaatggtttaatctaaaagttgccatgatcttcagaatttttccagagaaaatgaccaagaagttgactacagttaggtgactaagaatataagctgtagacaccttcacccactaaa

SEQ ID NO: 255994 - DNA, 393 bp, Homo sapiens
gcctcagtaaaagtggtagacagaggcttccctgtcgctcaaggagctcccagggctttctaggcttcccgttctcctcctgtttcccaggacccaccagagtgccccctgcaggtcaggacgggaaccgacacctggcctttgtcaaaacgcattccagcgcccagtgaattactgtcctcacgcctgtcacctctccatctccggctcctcgctgctctggctccttaaagtcctgctctgggcaaagtggccttaacaggaaatcaaagctgagtcaaactaataatagtttggctattgatcaggcagcccctttaaatcacccggtgttttgtttaattgcagaaaaatacacataacataaaattttccattttaaatgtacagtta

SEQ ID NO: 255995 - DNA, 250 bp, Homo sapiens
agtatcggctgcctttggacaccaatctccagttaaagctcacaacactgacatcagaacatgcagaactcagctgcagtgggagcccggccacgttagtcaagctcacttgtttccagacaaaacattttaattcctggcatgggagaggggacctggggaagcagtgttggaagagaatggagaggagggaagaagaagaggggagaatgaaaagggcatcattagcccagcgccaagatatttggct

SEQ ID NO: 255996 - DNA, 435 bp, Homo sapiens
tgatctccctttagcctttgttatgagcaggtttgtgaagacataaaaggaggacagggagtggactgatacaaagttgtttgtcaggaattctctttggcttaaggaaataacattgattagtgactggcaatatattgttaagctataaaagttacagtgtctgaagtattattgcggttgattcatagctacttgcaagcaatagcaagcagtttcaagagatgaatacataggtcaaggagggagtaggttgtgattctctctttttatttttgatacagggtctcactgtgtttcccaagctggagtacagtgacaattgtagctcaatgcagctttgaatgcttgggctcaagcaatgatcctcctgcctcagtcctccaagtagcttggactacaggtctgcaccaccacatctggccaggttttaaa

SEQ ID NO: 255997 - DNA, 550 bp, Homo sapiens
atttctaggaaatcctgggaatcgttttctagaaaaaacacctctgtccatatgatgacttttccatttgctttgtattctgatccgtggaatatcttcacatttgttatagtctccatggacttcccatctataggacttagacacccttgctaacgttcttgtcatcatccacccaccggatgtgcatgcgctcctggggatcctccgcgtctgccttcccacaggtgatgctgaagtccctcgtctctagcagtgcctgcctcgaggaatccatgttctctgcagtgatctggaccataacgccatcttccacaatactggacttggcaaggtatccagaagaggatttcagagcgccaccgaacacaaaaaaactgctttgagtttgcatatagttacagtagtactgaaaaatcctcgcaatttaggtttttgttttcagttttgtttctctgttttctagtgcataatgacttaataaatattcatttaacaaaaattgaaatctcaaaggtacatataaataaacaatataaataaccatcct

SEQ ID NO: 255998 - DNA, 451 bp, Homo sapiens
gccgctccctccctcctcccgcccccttctccccgcgcttggcaagaaaagcgggcaacgtggagcgggaacaaaggaccccgcggcccacggcgatcggggactccgtgccaccctactccaggcccggggctggctgcccgcccacacgagccgagtctcgagagctcttccagaagagaatcccaaaccccaggcaaacccgaggcgaggcgtccgttcctgacagcaagaacggggagtcccgcgccctccttccggcgggtcatccccgcccgcggcgccctaacccaggccccccaaaacccttcgaacaaaaaactcttgttcctcccagcctgcctcacccgcgccagtgtagcaaaggggctccagcctccgcgctctccgaggcgaccggcgcccgctctcggccgccaacgcaacttggcaaccatggcagcgctggagc

SEQ ID NO: 255999 - DNA, 282 bp, Homo sapiens
gttttttgtttttttacatggagtgttgctctgtcacccaggctggatatgttgcatggtgtactggttttctggaactgaggaaacaaagcaccacaaaccgaatggcttcaagcaacagaaatctactctcttacagttccagggactagaagtctgaaatcaaggtgtcagcaggaccacgctccttccaaagtctccagggaagaatccttcctactatctgtgggtggctgcctgcaatctttggcattcctgggcttgctgatgcccttattccat

SEQ ID NO: 256000 - DNA, 454 bp, Homo sapiens
atttcagaaaaatattgcaagtcatttgacttagctacttagcttgcactctatgtaaaaattttagaattttacctctttgaaaaactcctaatatcaatagtgatattgttgttttgcagcctcaaatgattttgttactttggactaattttcactgagctagttaataagtgactttttattgtctaaaaaattcttaagtgtatcatagagagaaagattattgggtcactaagtggctttctatatatatacctttgtccatatttaatttttgcaaaactcaaattaaggtggtaaacttagtgtggatatacattcatgtattgtattgataagattaactacattttaaaactaaagtggaaagttttaaagaaaattgtcattcaactatgtatgtatttctgtaaaacacacacgtaatgatgaattcgaattaataagcaaa

SEQ ID NO: 256001 - DNA, 711 bp, Homo sapiens
gcaaggtcatcattattgctaccatctatgtcaactttggggacctcttgactcaacagctgcagacacattgctttctgctggagctgtagtttttgccccttttttgctgactcaagcttgccaacactttttgctaaggaacccaccacagtgagggcatttcctgccacattgtcaagataacttctctgaaatctcacctgtttttaatgtaacagctaggagagttttccagggcaacagggttgaccacaagaaattctttatatttatttcagtcatttctcattctttagtgggtgacctttattagcattataaattctctgcagtatcctctgaatactatcagtctgtcaattttgggtggagcctaatttatctgtcttaaggaactctccctaaaaaggccaaagctttcttagaggacaggagcctctgcctaggaccctaagacattattttagatagatagttcgaagaaggcctcactgaagaggtgatattttagaaggatttgtttaaattgtgaacatgaactgtgtgggtatttggtggaagagtggtccagaaagtgaaacagccagttaaaggatcctgaaacaagaatctgaggagtacaagagaagaacaacagagaagccaatgtgactgaaatagtgtgaaggaagaaacatgtggtaggaaattgtttccaatataatattt

SEQ ID NO: 256002 - DNA, 500 bp, Homo sapiens
cagggaccatgtttcctcacagtcttggagttgtgatggaggcgttctctgtcctgaagttttgcctccctttgtaattgcatttatatgttggcctgaactgatcagtaagtttagatactgttttggatgggccaggtgagactgaatgcaacctcaggcgttcacatctcgaggtggcctttggggaagagctgcctcgtgctgggtcctgcctctttcagagcaggccagcacagctccttggagcaggaagacccttctggcagacgccaggccgcggcgtcttgctgcctctgggcaggagactgaagttaaaaacagacttgcaaggctcggccatggctgggttttacaagaatgatggcccggtgtttggcgagctgaggagtggatcctccccctgccagcgatattagggacgatgaggagcacgtggcaataagacggcaagggtttggtcccctcacacccaataaaaaaacgcctttcatgagaga

SEQ ID NO: 256003 - DNA, 343 bp, Homo sapiens
caaatagccagtactacaggtgcacaccaccacggtcacctaattttttttttcaatttttaacagagatgtggtttctgtttattgcccggtctggtctcaaattcctgagctcaaacaatcctcctgcctcagcctcccaaagtgctgagattacaggtctgacccactgcacccagcattttgttttttatgagatggggtctttccctctgtcacccaagctggagtgcagtggcacagccatagctcattttaacttcaaactcctggcttcaagcaatcctcctgccttgggctccatagatgctggggttacaggcatgagtcaccatgccccacc

SEQ ID NO: 256004 - DNA, 428 bp, Homo sapiens
acagtgagcaccccctgccctggtctgagccacttcagatttctcaacagcaggcagcactgggtcttgccttggttcttggttttgctgccagaagcccacagtcccttggatacatggcaccagggcaggactgctggatccccacagaaagctggatcccttggagtcccactcagctgaagagcccctgagttctgagcagataaaccttcttgccctcatggtctgtggtgatttaaaatatgcctgcaaattctctgctatttcccctttccaaggtggaggctgattccctttcccttgaaagtgggtcagacttaaatgactcgcttctagtgcacagaatgtagcagaagtgatgctatagaagtgacttcaaaggcttggctgtgaagaggttacagctccctcctacatcctgactc

SEQ ID NO: 256005 - DNA, 330 bp, Homo sapiens
tggagtcttgctctgtcgccaggctggagtgtagtggcacaatcttggcccgctgcagcctcccctcccagattcaagcaattctcctgcctcagtctcctgagtagctgggactacaggcgcgcacagccacgtcctactaatttttttgttatttttagtagagacagggtttcaccatgttggccacgatggtcttgatctcctgacctcgtgatctgcctgccttggcctcccaaagagctaggattacaggtgtgagccaccgtgcccagcctcagttgaattttttttaaagagcaaaatggaagaatggctaattgaatgtta

SEQ ID NO: 256006 - DNA, 350 bp, Homo sapiens
ccccatctgctagactcctttcttcccttgggttccagacacttcttcttcctggtttgcttctagctcactggcccccgatcaccctgctggttcccccacctcctgtcctccaggtatggcaagctcagacctcggcagctgcctgtctctccagtctccccctcggtactttccttccgaccatggattttaacattatctagatactgatgactcccaaagtgacatctccaagccctacacttccccaggggtgtttcacaggcatctccaactttccaaattcaaaactgaactcctaagttttcccctccaggcctgttcttccttcgggcttccccagcgga

SEQ ID NO: 256007 - DNA, 297 bp, Homo sapiens
ggggtttcgtcttgttcatcactgtatcttccctagtcccttgcaccgtgtctggctccagtcagcttatagtaaataccgattaaacaaatgattgatgaataccaaatacagcctgataaatctccctctttccactccctggtctgcatttctccctgccttacggatatctgcaactggatattccacttgcatctcaaaattatcatgtctaaaaccaaacatttgatctttctcccaagccattccttcttgtgatgtcctgatttgtaaagtcccaccatgctcacaaac

SEQ ID NO: 256008 - DNA, 315 bp, Homo sapiens
aaaatgttgtacagccttattatgcaacacactctgttttgctctgtgtgagttccactcccactgtcacagctctgtcagcagaccctgaggcctgggcatcaatttcaaatcttcatggagagccaatgctgtgggaagggtgtcctttagtctgtgatattcacgagtgagggacagagctggacattttagtgaatctcagagctgcagggaaagtactgtcttcagctactcttctctgcctagacttgggactattctataatttcctcactggattaataatcggtacctgttgaatcctgtgtccac

SEQ ID NO: 256009 - DNA, 473 bp, Homo sapiens
ttccgcttcctacaatggccctcctaccacctcagtatttcttctatccatctatcctgaagtaacagtagtatatgttttcataagaggaaattgaagcccagagatgtcaagtgactttcaactggcttgggacttgttttctgattctcagacttaagaattcttagtgtttttttcagacttgacagattgcttccagaaagagtcagcaaaaacacataaggtttttcgatttagatgcttgggcttatctactcatataggctttaatactgagtgcatgaataataacatttgatacgtttttaagcatgatgctaatttctagaacatgactggggataaagggaaactaatagaaaaaagttgtgatttatatttagcttctgcaaactgcttttcaagccatcatttccaataaggaactttgtactccagcctgggtgacagaatgagactctgtctttaaa

SEQ ID NO: 256010 - DNA, 269 bp, Homo sapiens
ttagtggccaaactgcacagtgtattattttactctgttaggcgctgtggtccatagcgctgattttttgagctataggacacgtctagattccgttcactttcctcagaaaaccacagaagcttgaagctcttatccagagcattccttctaggatgtcactgtgaaccagcacttgtctgcacctcagcttgcaacttagcggattccttctttattctttgtctgttagaataagcaaatatgaaatgttactttaatttttgaaa

SEQ ID NO: 256011 - DNA, 144 bp, Homo sapiens
tggcagagccccatggtggggtggggatggctttgcttatcaaaatggcttgggaatccggtattccgcgggcagcctagcacctggactcttcagaactgcgttgtctgtggcctcccgcatccagaggagggaggcggaagt

SEQ ID NO: 256012 - DNA, 442 bp, Homo sapiens
ataccccagagtcagatccgcagaccttagttcactgtgtatcctgaagcagccttgcaactcagttccatcaactctcagccatggtgcagggcctgtcctgcccacttaaggacccacaaaatgacttggtgagaatcctgtcatggaccaggtgtgagttatccatgtatgtgctaggaaacaggcccatcatctgaagacctaactgtagaccacaaaatagatctgtgtcctagcaccagctttactggctaagatcctgaaggaagtcccatcttcccaggaaccaagaaagatccatgctgcccgagtccctggtaacaggcccaccaacactgaaccccactgcagactcagtgacagccatgtaacctgcctttaactcttcttgtcagagattgcagaggcaatcccattagccttgggacctgagagacaa

SEQ ID NO: 256013 - DNA, 503 bp, Homo sapiens
gctctaaggctggctttgggaggagagagctccacacaaagacaccagctgcctgagcagctcccctaaacaagctgcaccccagaggagtcatgtgagtccctcatttttgctggagtgtctgcccttcctcacagaaccctcctctcctcactttgttcacaaagggcaagctctgagaccagctgccaaaccctggcttccacagtccagttaagaatttgcattaggccgggttacctgaggtcaagagtttgagaccagcctggccaacatggtgaaaccccatctctaccaaaaatacaaaaattcgccgggtgtgttggcgtatgcctgtaatcccagctactcaggaggctgaggcaagagaatcacttgaacctgggaggcagaggttgcagtgagccgagatggtgccactgcactccagcctgggtgacagagtgagactccgtctcaaaaataaataaataaataaacaaataagaatttgcactaaagtt

SEQ ID NO: 256014 - DNA, 440 bp, Homo sapiens
gaaaaaaattagctgggtgaggtagtggtacacacctgtggtcccagctactcagaaggctgtggcaggaggattgcttgagcccaggagtttgacattgcagtgagctatgaccgcaacactgcactctatcctggaggacaaagggagaccctgtagacagctcgaggagccacaataagcttctcacccatgaagcactcctgccaaaaatgacgaatccaatcaagccttcacacctgacagtttataggaaatacaaggatagaggatcaagttaaacatcacaagaaaacagccaaatccaaaatgcggaatactctgatctgttgaccggttcaaattgtcaatattattgggaggaaaaagtgggagggctgttctagaatagagattaaagggatataaccaaatgcaatgactgaatcttgattgaatcc

SEQ ID NO: 256015 - DNA, 834 bp, Homo sapiens
  misc_feature (650)..(650): n is a, c, g, or t
cttatcaccgccatgcctaatcttcatttaccgggagcagtgtgctgatgtttcttagttagaccagagtaagaagtttatggtcagttgatgaatttttaattataactgtttaaaaagaagacgatgactatgaacagcagctcactcgtagcaatctttggacagtacttcgaagtgacccactttcccatttaactcttgggaagcctgggttgccctgttttcgactttggaggtccgtgggctagattcagagtgccctggcaggctggcttgggtttgaggctgtggctgcagcctccgcaacaccctatctcagcacctgggaactggccccttggtacccgattctttcttctttgtgtgtgtgtgtaaatcattttcattttttctaatgatcaaagtatacattaaaataaatgaaagcaatacaagtccatgtgtatggtagaaaatctggacaatactaaaaatgtacagaaatggcttttaaagattaattttcaacctataaagtaagctacttttcattttagtgtctttttaaaggcagcttttaaaaacattttaaagggctcatcatgttcaagaatgagggaatgtttggctacaaggccttcagtatgactctatcctatagctggagngtttaataatcaattatattaaagcttttctaagcctccagaagggtttgtctgggtcttatttactataacaggcaagttaaagaaacttgagtttaatttatatttcagttcactttttttagacaacaagtgcaatttgggctttatttatggaaggagagagttgtccttctccccggaa

SEQ ID NO: 256016 - DNA, 700 bp, Homo sapiens
aaaatactgacatacaaatttaataaaatatgtgtaagatctacatgaggaaaactacaaacgctgatggaaaataaaatcaaagaactatataactggagagatattccatgttcatgaataggaaaacctcaatctaaagtttatacagacaggcaaaagacccagaatagccaacacaatactgaagaagagcaaagctggaggactgacattacccaacttcaagacttactagaaagctgcagtaatcaagacagtgagatattgttgaaagaatagccaaatagatcagtagaacacaatagagatccaagaaatagacccacataaatatagtatattgacctttgacaaaggggcagagacaataagatggagcaaagacagtcttttcaacaaatgctgctgacataactagacatccatgtgcaaaacacatatgaatctatatacaggccttacacccttcacaaaattaactcaaaatgcatcatagacctcaatgcaaaacacaaaaatataaaagtagaagataacataggataaaatctaaatgatcttgcatatggagatgaccttttgatagaacatcaaaggcatgatccatgaaggaataattgataagctaaattaattaaaatggatacctactgctctgaaagacaatgttagaagaatgagcaagccacaaactggg

SEQ ID NO: 256017 - DNA, 478 bp, Homo sapiens
aagtactcttctaagtgctttatatatgttatcccatttagtttcactttagtactcctaacagccctgtgataaaggtactactgtactcccagagtacagaggaagaatttgaaacataaggaagccaagacacaggataaagtcaagatctttaccatggcctttaagaagctgcctacttcttcaacctcatttattcccatttatgtttttgcattatgtgttcttgtgacaccaaattgctttgagttctcctgacaacatgctgttttatgcttttctatcttcgttcatcttgtttcctcagcctaaaatatgttctttctgttcttccttcatacccattttgagccacttcttccagagagtcttccctgatctttctcatgaggataaaatatcctttccccaatacatctatcatagccctggaccactttacattgaagtaacccaattgcacatctggggctgt

SEQ ID NO: 256018 - DNA, 406 bp, Homo sapiens
tgagtggaaatctcagctttaatttttgagtcagaattgtgtaagctaacgtccgtcaagatgtctgtggtgttgactgtcattcctgttgttaatcaccagtcctcttcagttgggatgcaaacaaaatggatttttgtcctcacaaattgatgcggatgttccgtcactgcaggctttatcttcaacatcatctcatcctttaaaatgagttgtccattttttttgacccctgaactttttattggcctcctcctccccagagcggaccctacttctgctggcttaatgttttagaactttggtgtcactggtctcgggcaccactttgccatccactatccggtggctggtggtcttttggatgttttgcatggaattgctgctgtccagggcatcaccaaga

SEQ ID NO: 256019 - DNA, 1604 bp, Homo sapiens
cacacacacaaacgcacagcacacacaaacgcacagcacacacgcacacacagcacacacacgagcacacagcacacaaacgcacagcacacgcacacacatgcacacacagcacacacactagcacacagcacacacacaaagacacagcacacacatgcacacacagcacacacacgcgaacacagcacacacgaacacagcacacacagcacacacacaaacacagcacacacatgcacacagcacacgcacacacagcacacacatgaacacagcacacagcaccatatggcgcgcacacacacacacacacacacaggctgagagacaaggtggagatccagggagaccccagggagcagtgcaggtgtccgtggattctgctttcagttaaacccctgatcacttcacctccctgagcctcagttaccttatctgaatatcgggatcatgacggataattgtatgtcatctattctaccgacggcagccagaggacgcctgtgagcacctgagtcagggcccatccctgctctgcctacagccctccatggctcccaccttcctatgcgtcaaagcccaagtcctccctgcagtccacaaggccctgcacaccttgccctgtcccttccctgccctcccctcctccctctctccccctcgttcactcttctggagccacacgggccatcctccctgttcctccaacacccaggtgcagtcctgccttggcgccttggcacgggctgtgccctcttctcaagaaaaccctcttcttccaaatatccacacagcttgttctctctcctcctttaagtctttgctcaaatgtcaccaatgtctcaattttacaatgaggtctctctgagtaacctataaagtcgcaaatacccaccctgagcgtcccccctccccgctacacacactcctccttcctgccatgtcctgcaaatgagatttattcatttgataattgcttctcccatcgcctcgccctctattgaacctaaatccctccaggaaggaattgttatgtttgttgagggttttgtcacctgaactcagcacaatgctggtatatagttgggtttaataaaaaacttactggaagaagcgagaaggatgggaggagagaaggggaaggagggtgttctcatagaattatcatgaggatgtgttgaaatcatacaaggctaggtgcagtggctcacacttgtaatcccagctgtttgggaggccaaggcgggaggatcgcttgagcccaagagtccaagaccagcctgggcaacacagccagaccctgtctctacaaaaaagaaaagttaaaaacaaacaaaaaaacagctgtgtgtggtggtgcttgcttgtggttgcacctcctgggtagctgggaccacagacgtgcgccaccacatccagctaattttaaaaaatttttgtagagatggagtctccctacatttcccaggctggtcttgaacccttgaccttgagcaatcttcccacttctgcctctcaaagtgctgggattacaggcttgagccattgcgctcgccctaatacattattttttgagatggggtctcgctctttcacccaga

SEQ ID NO: 256020 - DNA, 342 bp, Homo sapiens
  misc_feature (5)..(5): n is a, c, g, or t
  misc_feature (145)..(145): n is a, c, g, or t
  misc_feature (202)..(202): n is a, c, g, or t
  misc_feature (214)..(214): n is a, c, g, or t
  misc_feature (247)..(247): n is a, c, g, or t
  misc_feature (318)..(318): n is a, c, g, or t
cctgnagttttaattgaattgactttggttttgtttctcaaaaagtgggacaacaaaaatacctacttaagactactgtttcaggcactgtctaattgcattcatcagatcttattatattcattccatgaggaatcgaagaccnattcagtcaagcagcagcccaaggttacacgtctaataaagggcacattcccagatnaagcccatgtangctgactctagattctgattttgaactgctctntttctgaattggagtttaactcctctgttacccctagattaatggtgagtattttctctcacccaagttanttccattaactctaatcagaaccc

SEQ ID NO: 256021 - DNA, 331 bp, Homo sapiens
gtctcaaataacaacctctccctaagcagcactgaagaagcctaaaaaaggaaaacaagaaaaggaaggcagtgcctccaggagcccagcgctctttgattataacccactgaagccacctgcgtccttaagaggagcgggtgctcaggtggacagctgactctttagaaactgggcctcgtgggtggcacgggacactccgttgctggcgtatcatttgctcttccccacatgggcaatactgtggtgggtctgtatggtggggaatgagggaagggctggtaaatatcttagaataacaaacaaacaaaaccctgtacgggatttctca

SEQ ID NO: 256022 - DNA, 471 bp, Homo sapiens
agtcctttgaggtatccaggtggttcgtaaggccacataagtctgtcaaatatcatcgctttagagatttctgagatttcagaggatatcaggtcttgatgcttggaaagaggcaatcggcaagattttagcaaagggactctgagacaaaagccacaggtttttgttcgtccatgcatgctttcctcagtttcactgtgcagcacctctcaaactttcatgagaaatttggggtgccctggcactctgtgtttttctaaccggctcccggccgacactgaggctagtggttcttgaaccacgcgtcggtattagggtgctgtgcagtacgtagctcgaggaaggcacttccacagaaggcagtagcctacctccaccctgtttaccacctgcaggattcatctcatctcttcactcaagaaaattgggcagccctgtgcgggaggcctgacttgcactagcggctggaga

SEQ ID NO: 256023 - DNA, 271 bp, Homo sapiens
tggtgggtatgagttccaaggttatccccccaccccactgttccccctcctccctgtcccagagtgagagttccatggggtatactttggtctgcaaatctactgtcaactcttgaggagagatccctcttggagcacagttagatgaacttgccctgtagggaatgtctggtgagggggaggtaaagcgttgtatttgcatttctaaagggctaaataggaagctgaggaacaggggaaaaggagaaaataagagaaaataataaaaaaa

SEQ ID NO: 256024 - DNA, 528 bp, Homo sapiens
agctgccaagaacagcacatgctaaggaaaagaagaaaattatagaaataaacaggcagcatcattctgtttatataacgttcaaaagcaggcactaaaggagatatggttcacagatacacacacgagtggtagacgtgcaaatccctccaatcacctctggctgaacgtcctaaaggtaccaagtagagtaaagcgaatcagatgcttcccactatcgtattctgtgcctgtgagtctgaagccacctataatactgagatgtctcaggaaggaaatattcttgtaacatggtttcactgataactcttttaaaatctgaaatccttaatatctgaaataataaagaatttctttccatattatgacatacagtgcatacccattggctggtgataaaactattacagaaataagatataaattgcttgaaaaggtgtttggaattttgtaagataaaaagtatttcagtctcctatttctttgtaacttacaaattaagaattaaaagatattcattccaacatg

SEQ ID NO: 256025 - DNA, 376 bp, Homo sapiens
gtattttaattgtctttaccattattaaggaaaacaatctgatcagatagtggcaggaagttgtgaaagatttaacacattagattatacagtgttatttgcactttatttgacctgcctgaaagaagtaatgtttactccaatagcatacatttttattgcagaatttcaacaatgtggccagtaagtagttcctgcctaccccatatgtgtgcaagtcctaacccaataacatattacaaaatgaacaaattcatgacctcaatcacaattcttggcattatttttttaaaaaagaaagtggtctgggagagacacaagacataaaatttgccctagtttttgaaggtgtggtaaaataaggctaatcagagaa

SEQ ID NO: 256026 - DNA, 424 bp, Homo sapiens
ggaagctaaaacagacctctctttcagttttgtgtcaggtgacgtgctgggtgaaataacagaaaccctcaactccatagattcacaaggggagcatggtgtgtcttttagcagaaaagaaactgatggtgtctagaacgttttatatttctgtcagtttgttgtagtgtatgtatttgagtaatttcaaaacagattcctaggatagtcttttatatatatataatatatataaaattcatatatatataaaatacgtatgggtgtatatgtgtgcatgtgtgtgaataataacattgaccataaattatgaagcctagtatatttcatatatataagtatgtgtattttatgatagctaattgtatgatatttcatttgaagaatttatctctctttgtaattaagaaattacagcatttat

SEQ ID NO: 256027 - DNA, 311 bp, Homo sapiens
gcctctcagcttttgtaaattgttacactttttttaaatggttgggtaaaggaaagtctggaggaatctaactctagcactgtccttgagcagctctcatcaagtataacagctgctgtgtatgtaagagaagtgggggatgactgggaaagttgttccagtgtgatctcctgaaatagatagaagacttgcaatttcacaccaagatccacagcctggccttgttttctagttgcagatctgaagtagtagtagtccatctgtcagcctgacatctttttatgctccctttcaatcactcccagaggaaa

SEQ ID NO: 256028 - DNA, 347 bp, Homo sapiens
aattcagtggcttaaaataacacatttactatcttagagttctgtaggttagaaatctgacctctgatggggctaaaatcaaggtgttggtggggctgcattcttcctggaggctccataagagagcctgtttcctggtcttttcccacttctagcagagctcacattctttggctcctggccccttcctccatcttcaaagccagcaatgtctggttgtgtccttctcacatctcatcactcttacactaattctcctgctatcctctttcacattttaaagacccctgtgattgcatcggacccatctgggtaatccagattaacctccctattttaaagccagc

SEQ ID NO: 256029 - DNA, 361 bp, Homo sapiens
attattccaatttctgactaaattaaagtaacttttcatcaggcttgacttcaggttctctaaatgggcttcccataagagaagcaatcacactgcaggaggtttttctttatattttaaaagttttcctaggaaaactgacttgcatcttatcaaaatgattttctttttcctgtttttttttttttttttttttatcagggcctttgattaagtggtaaaactgagtgatctctgttaaaggtctaaggcttgcttgtttttttttccccctaaactatgtaactttctctaatttcttttaaagtcttttagttatcaccctggtgaaataaatgactgttgtttcatgatcacctgt

SEQ ID NO: 256030 - DNA, 206 bp, Homo sapiens
tttggcccccaaatcaggtaaatggaaattatagatctgttaatggcttaaataccggataatagattttatacaattgattgaatgtataacttgaaacagtgtcgccgctgccagcctgcctgcaagaatctttcttgtggttttgctttgtaaaagtaaatgttttccccgtgaatcttctgtagtgttttattcttggtgtt

SEQ ID NO: 256031 - DNA, 546 bp, Homo sapiens
gatttagaaatatatctaatatttcactgttcccacttccctacacagtggaaattgaaagagaagagactttgatgtcattggagaacctcaattaaactgataacaagtgaaatagctgaaacacgtaagatattattaaatgattaggttgaatattgaatggttaatatagcctgtagaagtgtgagaaaatgtagttccacatccctgatgagaaaaataaggatttatttgcctggttactggattcattcaagttccattcttattcaactttaaaaatatatttattataggattttaataatattctaaggctagggactataaatatatttgcaaatttatattttgattaaaatgctttaccactcaacctaaagagataagcctttcatgaaaagtgtctaacaacatgttatctctacttcccaatctgagttatagagagctaaagaccatgtaatatgagaacattctattctcatgtaactgttcattgtggatttcttgcttaaaaatacattgttaagacattaaata

SEQ ID NO: 256032 - DNA, 613 bp, Homo sapiens
  misc_feature (593)..(593): n is a, c, g, or t
cggcacgagatacagtcacacaatgaagcctgagggcaacagaaggagattaaattgtgtgaaggacaaaaaaattagctagtctcataacccagtcttgaaaaaaataaagaaataaaagaaccacaatggcacttcaaccctcttaacagcaacaactaggtccatggacctacccaaaagtcattttccagctccctaaatgtatagtttgggatggatattgtattggaaattggcagagtccgacgctgattcctgtcaagacaggaacacacaggacaagtaaggaaatgtcaaggcctgaatgattccatcagtaaagctgtaacatgctgcttttagatttagatggtttattacttacatagacagtgaaaacaagaataagcccccagcctggacaacatggtgaatccccatctctacaaaaaatacaaaaattagctgagcatggtggtgcacacccgtagtctcagctactccaaaggctgaggtgggaggaccccttgagcccgggaggtcggggctgcaatgagccttgatcgcaccactgcattccaacctgggcaacggagtgggaccctgcctcnggcagcggatcacctgaggt

SEQ ID NO: 256033 - DNA, 150 bp, Homo sapiens
gttgtgttggaggccaaatgtaactacttacagtaaaattgtgatgttatacaacctacgctcttccctggaaagaatcatgaagaagtttcatagtagtttggtattattggagacattttagctaatacattctaactatgcattttg

SEQ ID NO: 256034 - DNA, 196 bp, Homo sapiens
cctggccaaaatctcagagactgcaggacactgtggagttccctgggagaactcagtgggataagtacacatttccaccagagaaggaaagccagctggtctctgagtgttaataaggctacgtggattagatgttcatgctgagttattaagcctcatttaggagttagtttttccaagttcctactcaagtttt

SEQ ID NO: 256035 - DNA, 333 bp, Homo sapiens
gggatctttaaaggttcgattgccttctcttctgagaatattcctatgatagagtctcaagagtccagagaattcaggcaaagctgaggagaatgacacaggccattaagctctgccccggacctatctcatctgccctttttagttgttaagtcgcagtagggtagaaatcttaacgaggtcagaagtgatgggtgacacagctctaaatgccaggtactgagttttcacatcctggtctcctcggaggccccgggcatacagagtcacctactcctaaagcaactgcgcctttcagaagtgcagccttattctaaaattaaagattctcag

SEQ ID NO: 256036 - DNA, 389 bp, Homo sapiens
gctgtatttacccagtgcctgtacccccattgtatctaggaagtaactaacttgttttcaattttacaggctcataggcagaagggacttgccttgtctaagatgaggctgggctgtggccttttagttaatactgaaatgagttaagactttggggaacttttgggaaggcatgattggttttgaaatgtgaggacatgagatttgggaggggccaggtgcagaataatatggtatgattgtgtctccacccaaatttcaccttgaattgtaataatccccacatgtcaaggatgggaccaggtggagatcattggatcatgggggtggtttcccccatactgttcttgtggtagtgaataagtctcacgagatttgatggttttaca

SEQ ID NO: 256037 - DNA, 527 bp, Homo sapiens
tataccatactaatgtaagataagtgtttatattagtacattactaatacaatgtaataatatgggaaactgtgtgcaggggtatatatgagaattctctgtgctttttgtcaatttttccattaatctaaaactgctctgaaaaataaagcctgtttaaaagtatatataaatgttatatgtgtcaaaccaaactaaattatgtcaaaatgtcatagtccaaattctacagataatgtctatctattcagctcatttatgtctgtatgtagttgataccaaagtaaagtaagagaatattaagtaaagcaaaagattattaagttaaccatctcagtcagatgcaggatgtgcactaaacatctgtgtgactggctccttttaaaagttttcaaaagatttagccaggcacagtggcttgttcctgtaatcccagccactcagaaggctgaggtgagaggtccacttgaggccacgatgttgagactagccgggacaacatagcaagacaattgtctgtaaaaaaa

SEQ ID NO: 256038 - DNA, 605 bp, Homo sapiens
cttgaggccaggagttcgaggctgtagagagctatgattgcaccactgcattccagcctgggcaacagagtaagattctatctcaaaaaaaaaaaaaaaaaagctgtgaataaatttgggatcacaataataacaattggccacactccttttctaagcttccagattctcactggtaacattaaaatataatagtacctactcacagggtgctcagcacagggctcaatcagcataagttgtaattatattatagccaattaagaaagggagagagaaagagaaactagggagaaggaatagaatggaggaaaggggttgagattatgtcttgaaggttgggatggggagggctctatggagagtatgttgttgatgctactatgaagaactaatcattatttgggtcctggttacctgttatcactgaactttgtggtttttattagctcattgacaatttagaaacagttctttctatagcaggaaaacagattctcggtaattttaaacgtcgagagtttttttcatcacagtgactatgtttggatggtggaaccacgggtggattttcttttctctattttatacatttttaataatgg

SEQ ID NO: 256039 - DNA, 397 bp, Homo sapiens
gccattagattcaactcagttcaacaaactggtccctactgtgtgctagggtctgtgttaggcactgaacataatgcctggatacaatgaatcccatagggttcagcttctaccaagacaagaaagttatcttggggggggaaaaaaaagtaaaaagtacttgtcaaagaaacacatttttcctaaacaaaacttaacatcataaatctggagagaaaaatatccagtaataatatactctctgaatggaaaattcccacaataataacaaaaataacaatgatctgtatacttagtacagctctatttttgcttttcatctaatgatttcaaagagtttagcaaccactgctgagctaatccttagtactaaacttgactcttccatccttctttg

SEQ ID NO: 256040 - DNA, 487 bp, Homo sapiens
agcacaaagatggtggaattgggattaagaggaacaaagggagcccacatcccaatgagaaacattcaggatgtggaggccccttgctggtctccaatgaggtgtttttgtttcacttttggtgcccttcagcaggggcacctcctccaggtggaccaattgacatccaaggacacgtttaaatgttcaggtgccatggactcgatgtgttccttaaaattcatatgctggaaattaatctccaaagtgacagtgttggaatatgggccttttgggaggctccaaccacatgaatggattaatgtcaactataaaaagggcttgtgggagtcggttcactctcaagtccttctgccttatccgtttcaatgctggggacacagcaaggccccatcttggaaccagagaccaaatctattggcgccttgatcctgaactctccagcttctagaactatggaaataaatttatgttctttataaattac

SEQ ID NO: 256041 - DNA, 327 bp, Homo sapiens
tataaaaaagaaatcagatagttcatttttctctgaagtgatattatatgatgaaatctttttctcagtttgaagttttctacacatggagtttataaaatatcatgagatggatctaagtggatttaaaaaaatttcccaatcactaaccagttttagcaacatagtatatttaataatctattccttacacaattatggcagctgtataaatctagacactcataccatttaaacaattctaaaatattttaaaactctctattacgaaaatattctcaagatacaaaactagagtgagtagtataagaaaccccatacatagtg

SEQ ID NO: 256042 - DNA, 122 bp, Homo sapiens
ctatcaaacacctgtgaaggcaaagatcagctctgttctgctctacacggcctctgcagcagctagcagtacttagctctcagtagcacccactccaacagcaagttgtttagctgttcctt

SEQ ID NO: 256043 - DNA, 1053 bp, Homo sapiens
actgcctgtccaacctggactgacatcatccttgttattgatctttgtagccaaatataattattttaaaacaaacaaaaaagaagaatgtaagcagtataagactttaaaacacacaaatgaaaaatatacatgactacatgcttcagtgaactaaaactttcatctgtgatctttattttgcaacgttctgaagtaacattacagtcttttcagtgtgctgtgtcatttatatcccttactttatcctgggaatcctgtattgccattgagcatatgcaaattgagacatgtgcatagcttctccccgttgagcccatcagtggggaggagctatgtaccggggacatttggcaaagattttcatgagtctgttggatgtaacagctccttaagaaaacctcagtttaccttccctattttttaccatttgtaaaactaaggctcagtgatgtaaaatataacacattctgtgctgtggcataactgcagcttaggtttttatattcaagacaagcagaggtatagttgaaaaggtatgaacacttattatgcttcaagatccctttgttggtttagttgtggcattttagaacagcggacttgggactaaagcatctttctatctgggatcagtatttctaagttgcctttaagctgaataaacatttggtttttatatttaattgcttcgatgtgaaacactgcaatttaaaaaattacacatatgtaatacagtattttacactaaataatagtgactggcagtccattggccgaagaagtattatttttcagatattctgctctgtcatcagctgtagacactgacctggtatttatctggaaaggcttgctgtcaggggttcacagtgctgcttgtgggttatctccagaccctttacatacagcactttaggacagcgtgagtcacaggttgcactagaatttgcctttgaaattagacctaaactatgtggaactggaacccttgtacacaaagctctctatcatccaaatcctgctgaactctcttaggaaagaacagtttta

SEQ ID NO: 256044 - DNA, 501 bp, Homo sapiens
gataacaaccttgcaggacagttaacagatgcatgtgaagtgcctacctcatgccagacacacagtaagccacctacagaaaccccttatcttgacatgggaggtgttccacaaggtggcccagccaatctctgtggtcctaactctcattcctcacccacacattggccatccacttactattccccaaaaatgcctctgtgtactttccaaactcagcattttacttgtggctttcccccctgccacaatactccccccaacatccctgatgaaggttttcccaacccttgcaagatgggcttgaagaacccatccttcacaaaatgtgcccttcatcacatactctgagatccttccccaccaggccttaagtggcttgggagtgacactggtctgaatcatctccatccagaacattgccccatatagtgcctggcacagcacagatggcactaaaattttgttgatcaaatgaatgaatgaatgaatggttctaaa

SEQ ID NO: 256045 - DNA, 458 bp, Homo sapiens
taaggtttagactccaagtttaatttgaatatattagctaaaaggttccgttgaggaaagacgtgtggtttttgctgttacttttcatgatgtaggaatgaaaaaggagaaagtagaagcctgttgtgcggttggagaatggaaacctcgtatctattggctggtccagactcctcgtgacttactttgttccttgcaaagaaaaatgtgcccactagagatatattttggcccaagcaccaatttgtcatttcccctcctttactaatattttcatacattttattctttctgctagatctttcggctttttgcccccttagaaaaaggattgaatcataatgtaaaactttataaatttcaaatgtcgcttctctgatggtgagtgatgggacttgtgccatttaaatacaagattatctgccctctatttgtaaataaaatctgctgtacaatga

SEQ ID NO: 256046 - DNA, 699 bp, Homo sapiens
gcagaagaaatttttgacctgttcaggaaatctataatatctgcctacctattttgtaataactgggctggaccaggtatcagctgactgatctgatacggaagtcagcctgtgtaccacaccaatctaattaaaaccattggcttgcatgtctatgcagtctgtaatagaggagacaacagtctccttacaggggtaaacccaatttgaataaaaatcaattttacttgactttttcagctgttttgttgtttggaagtacttgcagcatgtatttttatcttcttttgcttattttttacctgtatagtggttggctaaaatttttgctagctctcctgaaaaatagagccaaatgttacagagtctgtaacaacatatttcatcatgagaaatgcattcttgttgacttggtttgactactttttcctgggctgcggagacagagataaagttaaccacctgggctgagtgtttgtgtggtcccttctttctttccctcctcaattatggtttttaatgagtggattctaaaaacttttttgatgttcttaatccatccatcctcttttcctagtactattaaatacattaagtatttttttttttaaacagaacttatcttatatctggatgatattttagtgcatcttggaatctatcccaggtatgtgcctgggcagaaagacatcaaggctt

SEQ ID NO: 256047 - DNA, 522 bp, Homo sapiens
cccacaaaggtggttttgacctgactgaccctgtgcaaggaggcacagtctcctcaccagcataagcacgtggcatcagatgcggagacagttttggacgtggatggatgtttacacactgagactccttcagtgtcccttcaagaaaatgtggacacaatgtctctgaagcctgttagtgaccatagaattaatttcactaatacctttcggtcaccgactcctgaaaagagaacacgtgaatatcatgagtccgttgaaaaaagacagtaagtgggcttgaaaaaacagaataaaagaaacacaagttttcattttgatcaaggttaaaaggatgcagttaaggaacagctgccttccacctgaatgagccactagatgctaaaacacttttgcttgtctgtaaacatgtgaatacaattaggtttatattactttgaagaaactattgtgttatctaaatttgtaacgtcacatttgagagactcagtgattaaaaacagctattttcactgtagttaa

SEQ ID NO: 256048 - DNA, 6313 bp, Homo sapiens
tgtttgctctgcagaatactttacctgggcaccaagtcttccttccagcattcctgctgctacagcctatttgctgagtaaccaggggttacagcagcgttgccaggcaacgagggacagcggtcctgttgaagagccatttgtcacactgaggggactggttgaaatgcaataaagaaatgataccagcagctactcatgtcttcgccattgctaagaacgtcgttggtattaccttactctgagaacgtgtctgcagtttccagaaaatggagtatcgcaacatcacttaaagtaccctgcttcaaagtattgctggcaagtggcgtgggcctgattatttatttagaaatgctttatcaggaggagaatgctttttgtaaacatgaattgcccagttctttcattgggctctggcttcttgtttcaggtcattgaaatgttgatctttgcctattttgcttcaatatccttgactgagtcacgaggtcttttcccaaggctggagaacgtgggagctttcaagaaagtttccatcgtgccaacccaagcagtatgtggactcccagaccgaagcactttttgtcacagctctgctgctgctgaaagtattcagttctgtacccagcggttttgtattcaggattgcccatacagatcttcacaccctacctacactgcccttttctcagcaggcctcagtagctgcatcacaccagacaagaatgatctgcatcctaacgcccatagcaattctgcaagttttatttttggaaatcacaagagctgcttttcttctcctccttctccaaagctgatggcatcatttaccttagctgtatggctgaaacctgagcaacaaggtgtaatgtgtgttatagaaaagacagtagatgggcagattgtgttcaaacttacaatatctgagaaagagaccatgttttattatcgcacagtaaatggtttgcaacctccaataaaagtaatgacactggggagaattcttgtgaagaaatggattcatcttagtgtgcaggtgcatcagacaaaaatcagcttctttatcaatggcgtggagaaggatcatacacctttcaatgcaagaactctaagtggttcaattacagattttgcatctggtactgtgcaaataggacagagtttaaatggtttagagcagtttgtcggaagaatgcaagattttcgattataccaagtggcacttacaaacagagagattctggaagtcttctctggagatcttctcagattgcatgcccaatcacattgccgttgccctggcagccacccgcgggtccaccctttggcacagcggtactgcattcctaatgatgcaggagacacagctgataatagagtgtcacggttgaatcctgaagcccatcctctctcttttgtcaatgataatgatgttggtacttcatgggtttcaaatgtgtttacaaacattacacagcttaatcaaggagtgactatttcagttgatttggaaaatggacagtatcaggtgttttatattatcattcagttctttagtccacaaccaacggaaataaggattcaaaggaagaaggaaaatagtttagattgggaggactggcaatattttgccaggaattgtggtgcttttggaatgaaaaacaatggagatttggaaaaacctgattctgtcaactgtcttcagctttccaattttactccatattcccgtggcaatgtcacatttagcatcctgacacctggaccaaattatcgtcctggatacaataacttctataataccccatctcttcaagagtccgtaaaagccacgcaaataaggtttcattttcatgggcagtactatacaactgagactgctgttaacctcagacacagatattatgcagtggacgaaatcaccattagtgggagatgtcagtgccatggtcatgccgataactgcgacacaacaagccagccatatagatgcctctgctcccaggagagcttcactgaaggacttcattgtgatcgctgcttgcctctttataatgacaagcctttccgccaaggtgatcaagtttacgctttcaattgtaaaccttgtcaatgcaacagccattccaaaagctgccattacaacatctctgtagacccatttccttttgagcacttcagagggggaggaggagtttgtgatgattgtgagcataacactacaggaaggaactgtgagctgtgcaaggattactttttccgacaagttggtgcagatccttcggccatagatgtttgcaaaccctgtgactgtgatacagttggcactagaaatggtagcattctttgtgatcagattggaggacagtgtaattgtaagagacacgtgtctggcaggcagtgcaatcagtgccagaatggattctacaatctacaagagttggatcctgatggctgcagtccctgtaactgcaatacctctgggacagtggatggagatattacctgtcaccaaaattcaggccagtgcaagtgcaaagcaaacgttattgggcttaggtgtgatcattgcaattttggatttaaatttctccgaagctttaatgatgttggatgtgagccctgccagtgtaacctccatggctcagtgaacaaattctgcaatcctcactctgggcagtgtgagtgcaaaaaagaagccaaaggacttcagtgtgacacctgcagagaaaacttttatgggttagatgtcaccaattgtaaggcctgtgactgtgacacagctggatccctccctgggactgtctgtaatgctaagacagggcagtgcatctgcaagcccaatgttgaagggagacagtgcaataaatgtttggagggaaacttctacctacggcaaaataattctttcctctgtctgccttgcaactgtgataagactgggacaataaatggctctctgctgtgtaacaaatcaacaggacaatgtccttgcaaattaggggtaacaggtcttcgctgtaatcagtgtgagcctcacaggtacaatttgaccattgacaattttcaacactgccagatgtgtgagtgtgattccttggggacattacctgggaccatttgtgacccaatcagtggccagtgcctgtgtgtgcctaatcgtcaaggaagaaggtgtaatcagtgtcaaccaggtttttatatttctccaggcaatgccactggctgcctgccatgctcatgccatacaactggcgcagttaatcacatctgtaatagcctgactggtcagtgtgtttgccaagatgcttccattgctgggcaacgttgtgaccaatgcaaagaccattactttggatttgatcctcagactggaagatgtcagccttgtaattgtcatctctcaggagccttgaatgaaacctgtcacttggtcacaggccagtgtttctgtaaacaatttgtcactggctcaaagtgtgatgcttgtgttcccagtgcaagccacttggatgtcaacaatctattgggttgcagcaaaactccattccagcaacctccgcccagaggacaagttcaaagttcttctgctatcaatctctcctggagtccacctgattctccaaatgcccactggcttacttacagtttactcagggatggttttgaaatctacacaacagaggatcaatacccatacagtattcaatacttcttagacacagacctgttaccatataccaaatattcctattacattgagaccaccaatgtgcatggttcaacaaggagtgtagctgtcacttacaagacaaaaccaggggtcccagagggaaacttgactttaagttatatcattcctattggctcagactctgtgacacttacctggacaacactctcaaatcaatctggtcccatagagaaatatattttgtcctgtgcccctttggctggtggtcagccatgtgtttcctacgaaggtcatgaaacctcagctaccatctggaatctggttccatttgccaagtacgatttttctgtacaggcgtgtactagcgggggctgtttacacagcttgcccattacagtgaccacagcccaggcccctccccaaagactaagtccacctaagatgcagaaaatcagttctacagaacttcatgtagaatggtctccaccagcggaactaaatggaataattataagatatgaactatacatgagaagactgagatctactaaagaaaccacatctgaggaaagtcgagtttttcagagcagtggttggctcagtcctcattcatttgtagaatcggccaatgaaaatgcattaaaacctcctcaaacaatgacaaccatcactggcttggagccatacaccaagtatgagttcagagtcttagctgtgaatatggctggaagtgtgtcttctgcctgggtctcagaaagaacgggagaatcagcacctgtattcatgatccctccttcagtctttcccctctcttcgtactctctcaatatctcctgggagaagccagcagataatgttacaagaggaaaagttgtggggtatgacatcaatatgctttctgaacaatcacctcaacagtctattcccatggcgttttcacagctgttgcacactgctaaatcccaagaactatcttacactgtagaaggactgaaaccttataggatatatgagtttactattactctctgcaattcagttggttgtgtgaccagtgcttcgggagcaggacaaactttagcagcagcaccagcacaactgaggccacctctggttaaaggaatcaacagcacaacaatccatcttaagtggtttccacctgaagaactgaatggaccctctcctatatatcagctggaaaggagagagtcatctctaccagctctgatgaccacgatgatgaaaggaatccgtttcataggaaatgggtattgtaaatttcccagctccactcacccagtcaatacagacttcactggtaagtgtgtttgacattgctttatttaggagacacgaagctccaaaatgttttctatattttcatatccctttacaatgaatttttattatacctacttagagaaatactaattcagccctttgatagcttttgcctgattgtttcagcatgtccatctttttagaattctggggaaaaaagtcaggtaagtgaaggaaaggaaaaataaaagatgaagatgaagaagcagccttattggatcaaagtatgtgctttgtatttgtctttttgtgaagtatgtgccaggacatgtttcttgaaatattattcactgtgttctctgagcaaatgagtttgcaaaatgccctcatgctattggagattctcagtatgcaccccgttactgaaactccaaaaagcattgtaagaaagctattcaactttgcttagctaatcatgcctaacagatatttgatgtaatgttttctttttctttctcttgctgtttccttcttctttttttcactgtgacaacttaatatctcatgttctatgaagaacattgtggggaaaactaatcccagggaaaagataacttctctaagccaggactatggtaaagcaagtgaggctcttgtttcggtcacaaaatttaaaggcactaaaaaactcagtgttaatgtaaattttaatgcaatatttttaaaaatgaaaatcaatgtgaaagcactataaaaatattatcaaaagcttaaataaagacagattgaactctgtaccagcacaatcctgcctcactggccttaccctcctcctggccttactagtaccgcaatattttggaagtcccatgacctctgtgacttacagcttctaatagcatgatttcaatatagctgtaaaaaaactctacttatggtacaccatttttccaatttttaaaaaaatttacaaagtataagatatatattattatgtaaactcataaagatgttcatttaatcatccatgagaaagtcattttggagcaaatagctagtctttaaaatattgcatatgtgaagacaatgaaatggaattcgagctataaaaatttgtattgttttatttttacttaaaatagtaaatagtttgcttttcattgagactggctgctgatgcaccttggtaatgaatcatgattatattctaactgagatatattgagattaatgcatgattaactactctctcagtacatcaaaatcattgcagagtattagaaattgaaccattgagctaaaaatgctcaacttctgctttatattcttaaaatggca

SEQ ID NO: 256049 - DNA, 185 bp, Homo sapiens
aacactgagtcccaacatgacaccattctctggtggcaggttggttacatcggactgcttttttctcactgaaatagacactatggatatggatttgccttccttatacaaagtgctgccaccaaactaccctgaaaagtaatccctgaaaggtctgattatttattttccccactgtaacgtat

SEQ ID NO: 256050 - DNA, 433 bp, Homo sapiens
gcctcagcaatatggaaacattaatgttgtccattcttggaaagataaattaatatcattgttaattatagggtattgtataaatatttggatttttataactttgttaaagtagggagtcaaaggttgtttctcactaaagtggatgataatagactgttactgggcacctacattgaataactcaaggagaacaatcatatcatccacatggacaaatcctttgtgtctaaaatacatcaaattcaatcctcactattagtataacagcaggagaaactaaaagtatgacacgtggacttgaacctgtgctgttttcaagcatgcaatttgacttacttcttccttaatgtataaattagatgaaggttcagaccatgctttgttttgtttataatctctgaatatttctaccttctctgccatggtgttt

SEQ ID NO: 256051 - DNA, 207 bp, Homo sapiens
ctccctgatgttataattgcaaccatattttgtaaggtttaaattagttggatagggtggctctttaatgacaatcaattctgagctacttagttaatgcaataatatactatttattattattattttatgttcttcattaaacttagttgaaaatttgtcatcactgatacgcatgatgaaatttaggtagttacccaggtgttt

SEQ ID NO: 256052 - DNA, 428 bp, Homo sapiens
cacatgcagaaatatttaattctgtctaggacagtaagagaaagcttttttggaatttgttttatttgagtctcagcaggtaaagaatggagacaggataaggcatttgaagccaaaaaaaaaaaaaggatgtacttgaagaaggtagagagagagatgctggcacaccttgaaacctgtccgccatccagcccaggtggagggcagggcacttaatcctagtagcagcatctttggaaagtagggaagtccagagtcatttttccatcttacagaagagagagtggaggttcagagtacttaagggttaggcctggaagctcctatttaaggagctaaatcactgaccttgaactgaaggcttccagcttctggtctagggatttaaccacctcaccaaatgcttcttttttctttggctatgtaga

SEQ ID NO: 256053 - DNA, 454 bp, Homo sapiens
ctaatagtgctactgggctatgcagcaactgcaatgggaagccccatgaaacacaccaatagacaaatgctcaacaaacatgataaaatacaagagcagcacacgataagactcatttttccattcattttgacaagggtaatttagttttaattactaatgataatatatattgtctactagtaaatgtctggtggtgaattttgtgaacttttcatcttaggatatcatagtactcctgaatttgttcgttaaacctttgttgcaagccagaagaaaatgagcaagtttgtgaattgagaaggaggcataaataagctcctactgtagcaactatatatggtactttgaaaattagagaacaagatacagtggccttttaaaatatttttattcaattggaatactataatttcaaaattaataaattgaatggccatattcaattctgtct

SEQ ID NO: 256054 - DNA, 357 bp, Homo sapiens
tctctgaaaccacatgattatttatgagctacgtgcaacttactgcattctttttgagctagcaataaaaataatccacataatcatagagcctatgtggcattggactttaactgctgggatagcatgtcccacgctatgttcccaggaaccagggatgacaaggacaggacattattgcatccactgcctccagccctgtgccccctgcccatggccggccaaccactgaacttgctctggctgagcctgacaccacttcagaatccttcccatcagcattgctggcagcctctaccaactgggaaacagaatgggaatctattttgatcccttcttgaaagctagtcctgagga

SEQ ID NO: 256055 - DNA, 379 bp, Homo sapiens
cccacaacagccccccagccacccccaacctggcctccagcatctctctctgccgagtccttgcctctcccccgaggagagcggagcctccaatcagggcctgggaaagcaatttttcaatctccaactgcaaacactaataccgctgaagctaattttacagatttccacttcgaggccttgcctttgtcccagaatccctcagcccgggagattagcagtttagagactggaaaaaataagggagacgtcaaagccgccaggaccagtcaaagtaatatgcctgcgaccggcacatggacttttatttcttctccctccacgctccagagctgctcctgcggcgtggagagataaatattttaaatagcgacacttt

SEQ ID NO: 256056 - DNA, 309 bp, Homo sapiens
ggcctcagtgttcagatctaggaaatgggggcatagattgaagcctgggtaggctcgagcctggtttagccatcctggccccttttctgcatggggcccggggacctgccctggaggtttgaggagagggttcagtgcggtggtcttccccatgccgcagtggacattgggagcccccttggggcaaatggcctgtgtcactcaccactgggctggcccggactctgctccccaggctggttcctggcactgactggcataaggccaggctgcctgggtactcagctcccatgctggccacaggggctc

SEQ ID NO: 256057 - DNA, 468 bp, Homo sapiens
caggtgtaaatgtttcagtttttcaggagtctgctgataagatgtaaactaggccattccactgtctaataactttgccgaagaacaaataatcatgatagttacttagaactatttgcagtcaggagatgactagaaggcagacagtggcagagcagcccacatccctgctcactttgtggtatactatgacccgcattttccttatagatgatgtaagcactgttacaaagggaatgctcagggaggtatggttaaataacagcacctgaaggagttatctccttgaggggatctttgaggtccaggaacttactatgatgaaatctgtctttctcttatcaacctgtattgggtctgtgttccttatgtattttcagtaatgataatctaaactaactcaggaagcctgtaaaatagttatattcccctcattgtgtgtttttatatttacctgtaatcccctct

SEQ ID NO: 256058 - DNA, 191 bp, Homo sapiens
  misc_feature (183)..(185): n is a, c, g, or t
  misc_feature (188)..(190): n is a, c, g, or t
ggcacttgatgtacattcgcgttccatcttcgtaaaaagcctgtggaataggtaggtattatcttttatagatgtggaaatgtaggcttcgttattttaatagcttgtcgaagctttacacaggtagtaagaggcagatttgaacctaggcattctgattgcaagtaattccctttcattatnnnacnnng

SEQ ID NO: 256059 - DNA, 363 bp, Homo sapiens
atatctgtattagggctctctagagaaacagaatagatagatagatagatatagatacagatacagatagataatagataggtatttcaattcaaatgttatttagaatgatcaaaatatttggaaatttaacaaaaaggttgactgtttgaaagcttgtttaggccaggcacggtggctcccagccgtttgggaggccgaggcaggtggatcacctgagatcaggagttcgagaccagcctggccaacatggcaaaaccccatctctactaaaaatacaaaatttagccgggcgtggtcgtgtggtcgtgagcacctgtaatcccagctactcaggaggctgaggcaggagaatcatgtgaa

SEQ ID NO: 256060 - DNA, 706 bp, Homo sapiens
gacagcctgacgtatggtcgggcggacagttagaatgagcgaatgcgtggatgatgtactaccagtctccgaccaccaccagttttccctagccggaaactagtagcaaagcttccccgagaccgctctaaagctgcagttctccagacggccgccggaagagggcgctgcggatcgcctcggtctgcaaccttcagaccccaagtcctaggcagcgagggagaattcagcctccctcaagtcccagaaaacattgggcctcggagattccccctccacccttccctcacacccaccccaatggcctggggtcgatactgcggccaccggaaactgcctgggacaagtgttggggatgtgggggagacgggctgtggtgggaggttggagaggaggaaaggagcggaggagggaaccccagcgctgctggcaagcccgcgggaaactcgaacacccaaggcccacgggctcccactgttgggactgagatttgttggggaacagagggcagaaagagctataggtttcgactacctaaagctgaatgaggctgcacaggtcctggggcgaaaacagccgcgccgccacaaggatgcttcgggaatctgtcctttaattatcaggagcagctgcgaaacttaccttagcgcagcacgaaccctagagcgcccccgagggtgtccctgccccttccgacgggggcgtc

SEQ ID NO: 256061 - DNA, 290 bp, Homo sapiens
gctaagctattctattgccaaagtagttaaaatcttattttgttcaacctaattctgaaaaggcaaaggttatagtgaacccagcaagtctttctcccactttgtagtctctcacctgtggaagtcatggctggcatttattcatttctttcacttgtgagttttccctttgccatcgttctgtccttcaacattcattgcaaatattttacagtgcccacactatgctgagcactgtgctaagccctgaagatgcagcagtgcataatgatcccttctgtcgtcttctc

SEQ ID NO: 256062 - DNA, 738 bp, Homo sapiens
aaagctaacatccaactaacaggaattccaaaagataaaagagagagataaagcagaagggagaaactattcaaataatatcacaagcaaaatggtcagaattgaaataaagttgtccatttgaaagggccctggagagcaaagcacaacaaatgaatttaacacccacatcaaggcaaaccatcatgagattttagaatcaagggatcaaagagaagagccagaaaatttcagacaggcaaaacaggtgacatagaaagacaggatcaataatcagaatggcatcaggtttcttattagcaatgctggaagttgcaagacagtgaactaaattaatttccaaactctgcatttatacttaccaaatatttatgcagttgtgaggattaaggataaaattttttttccagacatgtacaatttatatatatatatatatagtgtctctcaattgaatcccagtaaggtaggatatatatatatatatatgtatatcttctataaactcttagtcaggaggctactggataatgtggtaaaccaaaatgagatagtaaagcaagaaagaggtatacatgtaatccccaaaacaggacccaacacaggagagatgtcaagcttcaagggaagccttggaagctgaaactaaccagaactgatggaatcaggggaatggatatttccaggagggtttccccaagaaagtaaaatggacttgataaattacccaatgtgcct

SEQ ID NO: 256063 - DNA, 289 bp, Homo sapiens
gacgacccctgcctcacatcttccctctctgccctatgctgggtggggctctgggcacttcacacacgtgggttgctggagcctggacttgaggaagcctgactccagcactgctggccaccagggtcccaggcatccttgccttgtcacttccctctggctttagctcagatgcgaaggtgctgtcatctgcgacccctctaagggaggctccccagggaggcccgaggggcagtttaatgaggaaacaacgtggccaacacgtgtctcccggggagcagtcagggcc

SEQ ID NO: 256064 - DNA, 427 bp, Homo sapiens
gcaggacccctagcaatggggcacggtggcctgtccccagaacttcagactgatggctgtcctggagaaggagctgggttttctatggatgccgacaaagctgggccagactgcagggtgccaccagtggaaatgatggctgttgtcttcctgagagtgagagagccctgtgggcttcactgtgatgggtggttcatggcatgactgccagagcaagactgctggcttcagtggctgtgtgccttgggacagatgacatagctcctttgcctcaattttctcatctgtaaaatgtgcatggtactagaacctaaggtgactgtgaagatcaaactaattaattcagagaaagtgcttggaaaaaactgattgccagctcctctggcccagaggactcaataaacattagctatgatcactttttctc

SEQ ID NO: 256065 - DNA, 295 bp, Homo sapiens
accatagtgggtttataacttagtttaactagccccacagaggactcaaactatgaccctgacctcaaaagcacaggttcccaccaatcatttatgtgttggcacccctataaaccttggcagtgcctgaccattggccaactaagttcatgctaacatttctgttctaaacatgggagtttaccaaaccacgcttttcctcagagattctttgtctctgaaaagacaaagaactattctccttaagaagaaaagagcaaacagtaggctgaaactacattcaatatatttgaaa

SEQ ID NO: 256066 - DNA, 146 bp, Homo sapiens
cccctcaagcctctcacctagccactcattgctcagtcatcagccacatgatatgctagccatcacgacagcctggtccctggctaggaggcccctcccatcatgttggccagctcctgctcatccttcaataccctttctgctgc

SEQ ID NO: 256067 - DNA, 611 bp, Homo sapiens
gcttgatgttcccctgagcagcatgatgcttctgtatttcatactcagaaggcaaatgatgaatagatagttaatcaggtaaaataggatcaaaatgcagtagaggttttaacaatctcattctgcctttcctttttagaatcttatgagatatagtgctccattgagagagaaggacatggggggtgagagcaagagagagtagtctattatcttactcgatttcctgatgcagtggttaacaaaagggggcctttttatattagatatgtgaatcacagatgaagcctaaggtggtgtcagaaggaaggtttgggctttgtgaaacagagaaggaagttattttacgtggatctgcggcagaagatttaaaaggaggatcctcattgttcctttccaattgccattctatccaggagggatggaagtgaacaaaggcaagcagagtaatgatagccttattacaacacagactgaagagacagcttctgaaggcagacagtaacacagcttatggagagacatgggcaggactaaccatagtagagtaacagtcctttgaatgccacttgtgggagaattgggaaatatttctcacatctgtgtgtcaa

SEQ ID NO: 256068 - DNA, 402 bp, Homo sapiens
tagcataactcttgaatctctacatagggattcagaatacagctttactgagacttattagacttccagccctttgcccttgaagttaacaagattagcattctgcaggatatcttttggggaaaactgctataggtaaataaatggataacatttcaaattagacacaggtgtttaatattaagcgctatgacaaaggcagttacaaagtactaacatgtaaagagtttttttctaagcatagacatttatttcaatcagctgttttaaatttctccacatatttgtgaagacaatgtgatcaatgtctacacctcacagattagaaaatgaagcaacaggccgggcacagtggctcacatccataatctcaatactttggggggctgaggagggtggatc

SEQ ID NO: 256069 - DNA, 536 bp, Homo sapiens
ccatgaactttaaacagtgattgcttcaaaatttccaagagccatactctccctccagctgctgtgtgtgtgtgtgtgtgtataaatgcacactattttaacctaaaatggtgccctgtggctgccattctctaactcttgcatacttaaacatttattcttggtcaaattaaaacctcatgcatttccaaagatataaatgccttgcctggagaagttagatcttgcaagtctcaggagggccgagatggtttgtcttatgcctatagctgtttatgtcccaccagtgggtgtttgtttcattaggtgccgtttccagccaaatgttctcattcttcacatcttcaatgttgagtagcaaacagaagaacatccttcttagcataatattgcttcactggactgattgtgaactcaaaatacctcttgtttcttgtgaagggtttgccttttgtaaacaatataagatcacttttggtcaaccaccctgtctgaatttatctgggctgctataataaagtatcataaactggaag

SEQ ID NO: 256070 - DNA, 454 bp, Homo sapiens
ggagtttgagaccagcctggccaacacagtgaaatcccatctctactaaaaacgcaaaaattagccaggcgtggtgtgcgtgtctgtaatcccagctacatgggaggctgagtcaggagaattgcttgaacccaggaggtggaggttgcagtgagccaagattgtgccactgcactccagcctgggtgacagagtgagactcagtctcaataaaaaaatttaaaaaaattaaaaaaacctatatgtgaactcttgaaaatgctaacttataatatatgatagttaaaaacatcatggcaatatgatgagatttacttcattttatattttaaaatagcttttttatcaggatggaaaataagaggatgattggctgtgataagaattcacaaccttattgaagatcacagtgtcaaggtgccaaatcttttaacaggaacctgctaaatctttt

SEQ ID NO: 256071 - DNA, 451 bp, Homo sapiens
catatgttcaacttgtgtagataatgccaaattgttttccaaagtagttccattatttcacaatactatcaggagtatatgagagttctgttattccacattcctgtcaactcttactatggtcggtctttctaattctagccattttagtgagtgtataatagtatctcactgtggttttaatttgcatttccctaatgactaatgaggttgaacctctttcatctgtttactgaccatttaaatattctctttttgaagtgttttctcaagtgttttgcccatttttagttgtgtttttgtatattattagtaagagttcctaatattatctatatacaagttatctgttgattataagcattaggactattctctgtctctctgtggtttgccatttcacttttctaatggcatcttttaataaacagaagttctttgtttcaatgag

SEQ ID NO: 256072 - DNA, 417 bp, Homo sapiens
cgctgctgtgagccccaaggcagagagacgtcgctgcggttttggggttggcatcctgtcctctgtgcgcccctttttcctgggatgagcggttagcggaggggcgatcggcccatgacgccctctggtggcggaggaggccaaacgctggaggctcggctggtttctgggctcccaggtcctggagggggtgcagctggcgagagggaacgaactgcatgggccagggtgggtctactgcagggacagataggtgtcaaaccccccaagacggattttaatctttggttaagtgagaacgtgaactctagaggcagcctgctgggtttgaatcctacccacgtcactttgtaactgtgatcttgggcaagttactcgacctctctctgcctcagtttcatcaaatacaaaacaagg

SEQ ID NO: 256073 - DNA, 371 bp, Homo sapiens
aaatgcagttcaattatatactgcagcttgaggtgagatagaagtgaagatggcttaacacgtgaagtgggtaaaaaaaatgtgtaattgaaacagtatgatgttgatgaggcagtgtgtgaggctgtcaggaggcattataataagctgatgaacgagactagcttcctagttctgctgtatgcaaatgttccattatttttggtggaggaaaggaacctggcatattaattggctttgtttttagagatgcaggtgaagccttttcattttgctttctgaaaagaaacttgcaatatgtccttaaattatgtttaattttgagtgtcgacttacaaagaaataaaaactcttcatttttaaaaaattta

SEQ ID NO: 256074 - DNA, 321 bp, Homo sapiens
aaatattcttatattggacatacaaaaatgtcatgctaaattcttcaattataataagttagcatatcattattttgcatcagttgagacacaaaattatcaacagccctttaattgcactctaaaaataaaactagagttcatttttatcagcttcctattttctgagagtaattttaaattaaaaaatatataactttgaaatggggggaaatctctccctcataggatttcatggcaacactgacttctgaaagactaggatagttattcaaatgtagggagtgtgagcagttcattctgaaatccccaactgagctg

SEQ ID NO: 256075 - DNA, 406 bp, Homo sapiens
gcactcttcatccaacaagatgtgctggtcccacttgctacactaaatgctctcccagcacagtctgagtcagtcaaaattcttgatcttggggccgggcacggtggctcatgcctgtaatcccatcactttgggaggctgaggcaggtggatcacttgaggccaagagtctgagaccagcctggccaacatgatgaaaccttgtctctactaaaaatacaaaaattagccgggcatggtggtgcgcacctgtagtcccagctactcaggaggctgaggtaggagaatcgcttgaatccaggaggtggaggttgcagtgagccgagatcatgctactgcactccagcctggccaacagagcgagactctgtctcacaacaaaaacaaacacacaaaagaaacaaac

SEQ ID NO: 256076 - DNA, 443 bp, Homo sapiens
tgtgacatactctaagctttaatttatttttcagtaaaatgagaatgacaatagcagctaatatatagactgattatgatgaataatggtgtaatacattaaatgtcccagcacaaagtcaagaacataagaggtccctccttcggattaaggagcgagatcaggcccaaactccattgagggcaatagaaaaggagatgaatggagaaaaaccaagaaaagtatgtgttttacttggttctaaattgatgttttcagttttgcttttggaacatgtatttaaactcttgaagacttgaatggaaatgataactttcctacattctgctagagacagctctctgcaatgcagccagcagctgctcgtagcagtcctgttctgtgcaaataccatagtctccatccatcaactgagcaccatcaagttttcaaagcttgccttg

SEQ ID NO: 256077 - DNA, 399 bp, Homo sapiens
cagcagaaatctatctgactgttttggaagcttgaagtctgacatcaaggtgtcagtacgtttggttccttctaaaagctgtgagggaataacctgttctaggcttctctccttggcttctccttggcttctccttggcttctgtgtctcttcccatagtctggcctctatgcctacctgccactgaatccaatcaggtatcagggattcgggcccaccataatggccttattttaacataagcacctctgtaaagaccctatcttcaaataaagtcatattctgagggactgggcattagaactccaatatatcttttttggaaggacacaattcaacccatgtcagcatctcagagttctttagccttttacattctgaagatattttggctccttc

SEQ ID NO: 256078 - DNA, 537 bp, Homo sapiens
tgagatttgacaggtagaggattttttaatggaatgaataagacaaaataggtttttattttctttagtagtgttttgtcctttcatttataaagggaaaactggattccttttagtaatttagatccatgtgctgttaccgggtcaaaggaagcggtgaatgacggaagccacagttgaggcagtcagcggaaacacagaaacaagggcacagacagtgggaacatccactgaaactctaaaagtgaatgtgaatttattccctgactgaacttggaagatgagtatgtctgcatataccacccacttgcagatgcaattataccagcaactgagagatggaggaaatactataaatctgttttaaatattatgatccttagggacatactggcctgttggccttgggcctatgtaatttctgataatgttttctttggattattgttatctataaaactttgtgattatgtggaaagattaaagtacattatagtattaacttacatttctgcttttttttaaaaaaaaaatttt

SEQ ID NO: 256079 - DNA, 499 bp, Homo sapiens
  misc_feature (332)..(332): n is a, c, g, or t
gatctatattactattttaatgtacttttaaattatctttatgaatattttattgagaattttggctctcatatttaaaaatgaaattgtctgtaatactttcccactctccggcacctgagtccatggctttggcagccatagtgatcatgaacttccggctatgtcctagagtcatttatctccgaggatgtcaggaggaaccccaaaatgtcatcaagacactggctacaggtctaaactccaataaaatccagctgggttacatcaattcagacatctggataaaagggtgaaaaaattttttgtttgcggggggcaaaaaaaaaaanaaaaaccccccccccaaattgtgttttaaccccaaaataatacagaattatgcatgccaggaaaaaaaattatactgcctaaaagctgcaaccttcatgacatcaaatctattttaacactggctggttatgtgaggaaaaggctaataaaaaaaaatcttgccgta

SEQ ID NO: 256080 - DNA, 946 bp, Homo sapiens
actttccaactatttgtatcttttgttctaaagtgtctcttctgtagacagcgtatagttgctcatgtttaaaaaacaacggaatttcctaatctcttaaaaatttaatataattgtcatatggctgggtttatgtctgtcattttcctatctgttttctatatgtcttattggttcctctgttcatctttaactgccttcttttgtgttaaacagatcttttcggttattctattttaattctttggttgttcttttaatattttttgaattgttttcttactggtggtcctagtgtttataaaatacaacttaaatgatcacagcctccctcagattaacaatatatgtgtaacatggccttttatatgacttgaaatcaatttgagagaagcaattctattgctcagtccagatttccaaaagatactgaagccatcatcaatccaggcatgtttataaaagggactgtgagcctgagataggagacagacactacacactaacaattctgtcacacttggacacaatgacaccatcaccacactaagtcatagagaccaggatacaggaacgatgatccagccacatggctgactaccattatcattggaatgttatagttccctaagaagaatattctctggacaaaatgcttactgtgagaattcccactggcctgtgagcatggaatggtataattatttctgatactttctgtcatatttcaagggcaatgtttaaactctttcatatgacattcacattttggtctacatgacctgtggaaatggagtaaaaatatgggaagatgagaaatatacatgtccatttgtcaaatatgcataagaaaggaggcttcactatgtatctgcatataaaatgtactaattcattactctactaggatgtctctgatattattcaaaatataaattgtgcaaaa

SEQ ID NO: 256081 - DNA, 427 bp, Homo sapiens
aagagtacttgttgcctttttggtgataaaattgtctttattgacatagtataaaattgtcaaaattgtttttttccagcttattttcttctacttcaaatggaaatacccatttcattgcattattaaatgaaatggtattaataaaattcttagtgcagtactaagaattacaaatataagcctataattctctcgtctgtggctaagcagtcttgccctagtttctcttaacatttgatttttttttccttcaccatcatgctttttaaatttgaatgttatataggacttgagtttctacttgtttttagttctctatatttcagtttcagaaaatagtctggatttaagtctagataattttctggttagagtaaaatcatgtgtggttgtatttgagatagactactacacttaaaagcaa

SEQ ID NO: 256082 - DNA, 246 bp, Homo sapiens
aggcaggagaatcgcttgaacccaggaggtggaggttgcagtgagctgagatcgtgcgaagactccatctcaaaaaagaaaaaaaagaatgtacaaagtctttttagtgatctatccactttaagtagtatatgttagccctaaagcatattatgttctgttaaattatagccttttctgccttttttttaggttgacttaaaatctgacactaataaagttaaaatattacatttttagaaatat

SEQ ID NO: 256083 - DNA, 655 bp, Homo sapiens
gtataataaactgtctctggtgattattcaccccctgagccttagactcctgttttctactgccacgagtttgccagtctagttcagggacggttgcctattcagagcaaatcaaaaccaagcttttagggtcactagctggacttagaatcaaaagagatacagaaatatctttattctattttttctgttctatatattaataagaaaagaatttaaaaggaattaatcttgaataagttcaggttagtgaaaaaggagagagttagctttggatgaaaagattcttaagagacataacaaatcaaatgtattgtggaccttgtttagatcctgatttaaataaaccaattgtgagacacattttgaggcagttggggacgtctgaatatggactgattggtgttaatattgttagtgtgataatgactttttggttatgtccatattttgtgtgaatgccgattgcagtatgtataagtaaaaagaggaatttaacaaaatgaagtatgtataggtgagatgagtgacatctgggattgctttacaatatttaagcaaagtaaaaagacatatttgaagcagctgtgacaaaatcttgataacttttaaatctgggtgatgggggttcattttattatttcttttgttatat

SEQ ID NO: 256084 - DNA, 417 bp, Homo sapiens
tttaaaagaaagtaaaataagagggatgaggtatgttatatttttaaaaatgggtatattgcaaagccatctaagataagagaatcattgagggaggaaacaatgcagctattgggattaagatcatttcaagcctaggaatcagtggatgtaaaggccccgaggcaggagcatgctgggcttctgggagaaatatcagcgtgggcaaaacagagtccaggaagagtgatggtggtggggctaggagtggggagtagagcatgtagggcattggtagtcatgatagtctttacattttacattgattgagacaggaagactgaagaatgtttatcagagaagctaaatgatgttgctggttgtttttttaatctaccgttttgttgaggacagattaaaggacaaagattaaaacag

SEQ ID NO: 256085 - DNA, 255 bp, Homo sapiens
gggcacagtcaatgactatggagaagaatcagtgtcaaaccatagttctgcttttagcttcctatttctttagtacaaaatagagataatcataatttgcctctatcatcctgatacctaccctgcagaatagtagtgggagttaattgggagtatggatgcaatgtgctcaccatactcctgacatagaagatactcaatcaatagcagacatcactaacacgcattcaatacttttttaaattgttaagttct

SEQ ID NO: 256086 - DNA, 474 bp, Homo sapiens
atcttccactttgacctcttattcctcattggcagaaagccgatctcccttgtaggaagatggaaagtaccagaacttatcctcctagcctcccttgcagctagggcaaggtcatattacctgactgtgcccagtgagttccttgggacagtttgctcatgagttttgggaaaaattttcccttagtaaaggagactcaagggaagaaaagccatttctccttttcactggcctggttgggtctgcatatgatgctgggaaccgcttttgctatcttgtaattatgaagagaaacataagtcatcctgaggaaggcagggaagaaagatgacaccattggaattctccaacttcttgatatctcagggaggataaatacagtttctcaatgtttcggttttaaattatatgccctgttacttgaagcaataagatactgaaccgttttttcaataaactttttgagtatatgct

SEQ ID NO: 256087 - DNA, 536 bp, Homo sapiens
atgtaccctaggaaatatagaaaaaaaatgtagatgaatattaaccttgaaatgaggaaagagaactttctaaacagaaatagaaaggaaaaaccaataggtttagctttataaaaataacttcttatagattagaaaatgctgtaaagaaaatctaagagatgactgttaaatggggagagaatatttgcaacatttaatatataaagtgttttatcaatcaatgtgatttaaatggctaaaaatcttgaaaaaaatgcaggcttactaacaactgaaatgaagtgaattaaaattgtgagaccctgttgttttatataaaaaaacatgtaaaaatagaccatttttacactcctaaaatcaagagtttgaggatctgggactcttaagtgcagttatgggaatgaaacgattagagcctcatctaatcaaagcacatgtatgcttttgtccagaaattctgagaatttaaggatggtatcaaaagcgtacataaagttttaactcagagtacgtttgctggagcgttctttgta

SEQ ID NO: 256088 - DNA, 346 bp, Homo sapiens
aaggccaaagccagtcattctcttagcaatccactttgaagttttatttgcccttcatgttctggtaaaaatctcaccaaaggattgttttcaatctaagtaaataactcgttagagcacactttcaaatatcttctgtgatttgttttttttttttcgacagctttctggttatgcttaagactgttttgcctagttacaaaaggaggaagaaaacactctaaggcacgacaacctagagaactgggcgttgtccaagctttggggaagcaggccatttttcagtagaccagttgctgctaagcgttttctgacccacacacccacaggtagtgcacacactgtc

SEQ ID NO: 256089 - DNA, 428 bp, Homo sapiens
tacagattgacgccaaccacatttcctcagagcgaaggaactcgtgtttggttacctaggtctcacttgtgttttagtgcagagaattaaacatgtgtccaggcgccctccttactgtaccagatctgcctgtaaaaccatgaactggtttgtagcaaaacctgcctcacactttaagtggagttatgttgtgtttgtgacgtgtgcctggtgcaatagaatcagtgctttgaaaggagtctctctgcctcctgcctcaacccctccaggattaactaagaagagtgattgtcccagaaactgcggtctattgtgtatcatttcatggggattttatatcagtaatcccgtgagtgcttttcggtgtaccgtggatgtctgatgaatggccacattttatagcatattatataaaggcatttattgtg

SEQ ID NO: 256090 - DNA, 663 bp, Homo sapiens
aaatgggacagcatcaagagtacaaacgtgtacagtggaattttcaaaggagagaagagagagaaaggggcattaaatacatatccaagagactcaacaaactccaagtatgataatctcagagagccacacttagatatatcatagtcagaggatcaaaagccaaagacagacaatcttgaaagaatcaagagagaagtgatggatcacattcaaggatcctcaataacagctgatttcccatcagaaaccatagcagccagaaggcagtaaggaaacataaagtgctgaaagaaaggattattaaccaagaattctacatactacaaaactgcccttcaaaaactgaaagataaattaagacaaacaccgagaacatctgttcctaacagacctgtccaacaagaaatactaaagggagtccaggctcaaacaaaaggacaatagatagtaactcgaatctgtatgaagaaatgaagactccagtaaaggactagaaaagaaaactatacaggtaaccacaaaagacaatataaatgtagtttttgtttgtagctcttttcttctcctgattaaagagacaatggcaaaaaacagtaattttaaaactgtgttgagcttgtaatatataaataatgtaatttgtatgacaataacacaatg

SEQ ID NO: 256091 - DNA, 426 bp, Homo sapiens
ctgctctagtcacacaactggaaactgactagtctacgcatggccaaagcttgaggagtcatcatcaaatgagtagatgtacatctagttcttctatttgtctacctataggtgcactcataacattttaatttatttcatgtgttgtcatcgttatcctctgtattactctgagaaagaagatgttacctgtttgtgaaaaagagggtcacagagtatgtgtgaaccaatacttcatttgagacagcctcacatggagaatgcaatgagccattctcttctcacatacaggtaaattggaagttgaatatgacatttactgcagtttgatcactaagcataagacctttctttaaaaaaaattatgtaagcaaatttcttctttttcaaagggtttttaatacaatgtttatgcttcattatggc

SEQ ID NO: 256092 - DNA, 590 bp, Homo sapiens
ctgctctagtcacacaactggaaactgactagtctacgcatggccaaagcttgaggagtcatcatcaaatgagtagatgtacatctagttcttctatttgtctacctataggtgcactcataacattttaatttatttcatgtgttgtcatcgttatcctctgtattactctgagaaagaagatgttacctgtttgtgaaaaagagggtcacagagtatgtgtgaaccaatacttcatttgagacagcctcacatggagaatgcaatgagccattctcttctcacatacaggtaaattggaagttgaatatgacatttactgcagtttgatcactaagcataagacctttctttaaaaaaaattattgcactccagcctggaccacagagcgagactccgtctcaagaagaagaagaaggagaagaaggagaaggagaagggaaaaaagaatcctcatcattaatgcaagtggaaggaaactcttcaccaaagaattgatcacatcatgaaaggtgaaatcattacggaattgcttaaatatataatttgaatctggatttaaaaataataaatgtaagttttttcttta

SEQ ID NO: 256093 - DNA, 273 bp, Homo sapiens
gcccagggaacatgagatccaatggtctaggacaacactggggatactgaagtcttgggggaaagcaatcgggagccaggggctctggaagcgagggaaacgggtgtggaaggacggaccctggaagagcatggggcctgggggcccaaaggaggaggaatgaagcggcactagggagttgctggggacaggaggcctttcacctgagccagcactgtcagttgaaaaggcaagaacgcaacagctcttcactggagtttcttgcctccagat

SEQ ID NO: 256094 - DNA, 151 bp, Homo sapiens
tctgggtgccaaggacccaaggcccagaaaactgcatgcagagttgttggaaaaaagtaaaacagtgattcctgttttgttgttttctaactcactaaaaacttgcccagatagtccattaaaccagcataccagttttctcagcatgcta

SEQ ID NO: 256095 - DNA, 241 bp, Homo sapiens
ccctgagcgatgattaaccatagccaccagagtgtggtaataaattctagaaagtggactcatacagagcatgatttagttaaaagtctttcagttaagtaaggtatgttagaagacgcaacacataccttcaggctaatgcctgcccagctaaattcttagcctgttttcaaacaaacaaacaacaaactttctgcaattatgtatactatacaaattcacaagttaacatgtgtgatgc

SEQ ID NO: 256096 - DNA, 298 bp, Homo sapiens
tttttttgcatacatacaccaatgcaaattatctttttctcctgtttttttttttccaaaaaacacaaagggtatcaaatcatacatactgttctgcatcttgctttcatcacttaactgtctgccttgcagatctttctatatcatattaaattatgttttaattctctcgttttgcttgtcaagaacagtttttacttcatttcaccatagttcagtctagcacacaaggcatccagcagccctaagaactacctgaaacaactgatgatggctccatgctacacactaaagaccc

SEQ ID NO: 256097 - DNA, 236 bp, Homo sapiens
gggtggagaatgggagggaatgattgtttgataactatttcttctatgattgttggcatggtttagttttttcttttatccgaagttttggtaaaaatatatttttcagtcccagctactctggaggctgaggcacaaggattgcttgaatccaggaggcagaggttgcaatgagctgagattgcaccactgcactccaacctgggtgatggcgtgagacagtctcaaaaaaaaaa

SEQ ID NO: 256098 - DNA, 376 bp, Homo sapiens
tacctatgtacacacacaatcctctcacatatgcacattcacacttacacacatacatgcattacacaaacttacatatatgcatacaaatataggttaaggaaactttttcaaggctcaaaaagatctaggccatggtgagacagaacacagttgtgtttttactgaaacccctcgtgatagtgcacacatgaacacacatgcacacaagccccaaagctgagaatcatttgccatcacttcctgctcccctgtcagagtcagcgcaagaggagaaaaatcggaattctttccctgtctcaaaagtaaaagggacaaattagtttcttgtcagtgcactgcaataaatacattgtcatttttatcccccagtgaa

SEQ ID NO: 256099 - DNA, 351 bp, Homo sapiens
ggccatatgtccaaaagtcctttgttcctgaatattctgggtaaaggtatcacctgtaaaaactttagtaactgagaaaaataagcaattactctaacaaagccttcaaccaaattatgaatatgcaaataactattgtgccttcaatgtctgttttatcctaaattaaaatgcacaggaaacagaatctttaaaaagttagttgcagccgggcgcagtggctcacgcctgtaatcccagcactttgggaggccaaggcaggtggatcacctgaggtcgggagttcgagaccagccctggcaacatagaccagcagctctacaaaaaattaagaaaatacctggggcatgg

SEQ ID NO: 256100 - DNA, 346 bp, Homo sapiens
ggccatatgtccaaaagtcctttgttcctgaatattctgggtaaaggtatcacctgtaaaaactttagtaactgagaaaaataagcaattactctaacaaagccttcaaccaaattatgaatatgcaaataactattgtgccttcaatgtctgttttatcctaaattaaaatgcacaggaaacagaatctttaaaaagttagttgcagccgggcgcagtggctcacgcctgtaatcccagcactttgggaggccaaggcaggtggatcacctgaggtcgggagttcgagaccagcctgatcaacatggagaaaccccgtctctactaaaagtacaaaattagccag

SEQ ID NO: 256101 - DNA, 460 bp, Homo sapiens
acctagtgtaaatgacgacttaattggtgcagcacaccaacatagcacatgtatacatatgtaacaaacctgcacgttgtgcacatgtaccctagaacttaaagtataataaaaaaataaataaataaaaagaatcactctaacgagctgcaaggtaaaatccttggagaaggtgtgtgccgacttgatcaatggatcaaaggaaaagaatctaaagtgataggaccagtttgaatgcctaccaagactttgagaaacattacaagaaaaacttcttatgaaggttctgagacatggtattgtttccagatgagaatccataagtgactcattgacttccacagtctttctgagattgttaagcagattacttccatcattattgagccaggagttgaggttgaagtcaccattgcagatgcttaagtcaactattttaataaatgattaccagttgttt

SEQ ID NO: 256102 - DNA, 383 bp, Homo sapiens
tatgaatacattgttatttattagtaaacaaaacagcaaaaataaactgattttctttggtccaaaaggcctagtttgattttataactaaaattctttctcttcactagaagtcttccgattgtagttgggcacagtcttacagaacgtaagcgagcgccagtgcagcttctactcatgtccagctactcctcagcctcctttagcaggggcaggaggagccaaaacctcccatgttggtaaagatgctccatgagggcagaacccaccaacccagcagcactgcagttaacacctgcactcatctgagattcccatgctgtatctgacagctgtctaaaagcccacacagtatttacctaaggaaacagcatggctctgag

SEQ ID NO: 256103 - DNA, 374 bp, Homo sapiens
ccaggctggccttgaactcctgagctcaagcctccaaaagtgctgggattacaggcatgagccaccgagccgggcccctgtctattaaattctgtgtgtagttgttgaaagtgtgtctcacctcattggtctgcaaggctcatgagtacagggactgtgtctgttttattcacagcaatatccccagtgcctgagacagtgcctggcacatagtaaatgctcaagaaatacatgtaaaggggtgaatcgtttccccagaaatcccctcggctggaactgggaaacctgccacttctctgtccacagcagctacatgtccctccccaggggttctgcgctgcttaccatatgtcttattgaaaagctcctggacc

SEQ ID NO: 256104 - DNA, 620 bp, Homo sapiens
  misc_feature (15)..(15): n is a, c, g, or t
  misc_feature (43)..(43): n is a, c, g, or t
  misc_feature (48)..(48): n is a, c, g, or t
  misc_feature (65)..(65): n is a, c, g, or t
  misc_feature (69)..(69): n is a, c, g, or t
  misc_feature (81)..(82): n is a, c, g, or t
  misc_feature (99)..(99): n is a, c, g, or t
  misc_feature (126)..(126): n is a, c, g, or t
  misc_feature (141)..(142): n is a, c, g, or t
  misc_feature (158)..(158): n is a, c, g, or t
gggatgggggcggtnacaatttcacacgggaacagtggaccangttancccaagttttataggantcantatagggaaagnnggaacgctgcaggtacngtccggattccgggtggatattattantagccgttctagaannagtggatctgccattntcaaacaggctgtgggtgttgctgctggcctggcagcccgagggacagcagagagaaaaggacagaaaagattagggtagttcctgtcatcacagtggtatgaaggctggcctctaagttcacggactggatatttcagctctgagcactaattctaaaatctatcacttactcctaccttcacctccagtttcaaatctactccgacactgacttccctaactctggtggtagcaatggctaacactttgtaaggtggacactaatctaagcatattttccctattttacaaaccaggagactaagggctaggaagcttcacgaaggcagtaagtggcaaagcttggatttgcacccaaatattcggtgtctttaaccacttggatgccagattatagcaagtaggagccatttctaggacctggcagaggttagcaccctcaccatcttcagtgtgatat

SEQ ID NO: 256105 - DNA, 500 bp, Homo sapiens
agagggcagagggcagagcaagtggatggagtcagcggggagattacctgtgggtgttgctgctggcctggcagcccgagggacagcagagagaaaaggacagaaaagattagggtagttcctgtcatcacagtggtatgaaggctggcctctaagttcacggactggatatttcagctctgagcactaattctaaaatctatcacttactcctaccttcacctccagtttcaaatctactccgacactgacttccctaactctggtggtagcaatggctaacactttgtaaggtggacactaatctaagcatattttccctattttacaaaccaggagactaagggctaggaagcttcacgaaggcagtaagtggcaaagcttggatttgcacccaaatattcggtgtctttaaccacttggatgccagattatagcaagtaggagccatttctaggacctggcagaggttagcaccctcaccatcttcagtgtgatat

SEQ ID NO: 256106 - DNA, 210 bp, Homo sapiens
  misc_feature (17)..(17): n is a, c, g, or t
atggtccaggtaagagntctgcccttgttcccaacatgccaaggaaaacaagaccctttagttactatcttttttcagaagccttctgtcaaggtggcccatggtatttcacctcttccctagcctttttttgttgttcttgtctagacaggatcacaccactggactccagcctgggcaagaagagcgaatatttcgtctaaaaaaaaa

SEQ ID NO: 256107 - DNA, 415 bp, Homo sapiens
aaagaaacattaagagacaggaagaggcttttggacatttaaaatgggattatggagataaaaattcaacacaagggtcaaaagataaagttgaggacatttcccagtaggcagaataaaaagaaaaagagaggccgggcctggtggctcatgcctgtaatcccagcactttgggaggccaaggcaggcagatcacgaggtcaggagtctgagaccagactgaccaacgtggtgaaaccccgtctctaccaaaaatacaaaaattagccagacatggtggtgcgctcctgtaatcccagctactcaggaggctgaggcaggagaattgcttgaacccgggaggcagaggttgcagtgagccgagattgcaccactgtactccagcctgggtggcagagtgagacttcacatcaaa

SEQ ID NO: 256108 - DNA, 500 bp, Homo sapiens
accatacaatgttggcactggcaggggttttaaaaatcatccattccagtcatatttactaaggatcagaaaggggaagtgatctgccaaaaatcccattattaactaatgggaactccagaactccttactttttctttttgagatagagtttcactctgtcgcccaggctggagtgcagtggcacaatctcagctcactgctagctccgcctcccaggttcacaccattctcctgcctcagcctcccaagtagctgggacgacaggcgcccagcaccacacctggctaatttttttgtatttttagtagagatggggtttcaccgtatcagccaggatggtcttgatctcttgacctcatgatccacccacctaggcctcccaaagtgctgggattacaggcgtgagccaccgtacccggcctaaaataaaattttcaaactagaatcaggtttattatgctacaccatacaatgttggcactggcaagggggtttta

SEQ ID NO: 256109 - DNA, 714 bp, Homo sapiens
ccggaagcccgttcaaactgtataagggtgatcagctatcacggagaaggctttagcaagtcggggccagtggcgcaatggataacgcgtctgactacggatcagaagattctagaagcccatggaaacaaggcgatgacggcgcttgagggtgaccagacctcctcaatcattccatcagccacccaggactcaacagcagaacctcagaggactcagctgaaagaggttttcactcgagcactaaccacagagaaatgggaagtgccatcctgctgtcatacgcagccgatggctgggtaggactaaatgcccttctgtggtgagatgaaccaagacggcagatgggggaataacatcagtgagagagagattacgaatggatccttgtattgcagatcaaactgggttgtctcttctcaaaccacccaggcagtttctgaatgtcccaagataggggtaggagaaaagaaaaaaaagacaaaacaggagacggtgggtaagaaaacctaaaaggcacaatgaggcaaaggcctaagatggaggctggctttgggatctgaaatccggccacaatcctccttgttttacctcaagtccaagaattgtcaaaaagaaaacccagaagggctattcattctaaattttaaaatcttttcttcctggcctaccaagtccttgtgttttctttctaggcgcccataaatacaaccc

SEQ ID NO: 256110 - DNA, 2115 bp, Homo sapiens
  misc_feature (871)..(871): n is a, c, g, or t
  misc_feature (1477)..(1477): n is a, c, g, or t
ccatggaatccatggagtcacagtcaagcactcctggagggatctgggtgccggcatctccagccagccctgtgatagagatctgaggagttccccttagagcttctcaaggaaatccttgatgcaataagccgcacacttagggaagctgttctctccagacagggtacaacttgagaaatggtttcaaaatgttttgacatgttcctgaatggcaggtctatgggagaacagaacgggggctgtggtatgtttgaggctttctgtgacctaggggtaggtgtcaggaaagcttccaaactctccctagaggccaagccagggctgcctgagaggctggacagtgggcactcaggccccactgggcagggacaccagtgtgtcatgcttgttgtcacacttggcttatttgctcttctccaccaggaattctgtggggcaggggattgcacactgcacacatcacagctgctcatccagggttcagggagcacaggtgttgtggcacttgcttcatcttgagtggcacggagcacagagcagcccctgtggagtgtggaaacaccaaaccctgagtcaccactgactgttgccctgggcatagaaccccaggtgaaggcacttaacactggttatccctgtgcatccaggaagctgaatggcggccaaagaaaaaagttacaatgcagtcaggctggaccagagaattcctgcatgtgcaagtttgtgcgtgtgtatgttttggaagtcaagccagatgtcgtctttcctcatgtgacatttggtatcttttttccacagcagtgttccattatgttctagttcttgaaagaggcagtgaggcaacaagtgtacgacgaaattgatttgngaaatgatttatgtgtattatagtcttctcttagaggatcacaaagtatattagcatattaaaggctctgagaagtcctgtaataaaggagcctggttgattgaatgattgtggaactcattgtgggtggatcattcgcatactggatggaatggggtgccaggctgactgtgcagagggtgattagtccctgaaatgtagataggggccacctagagaatggtggagcgtcggacatggatgggtgaactgaccaactgggctatgcatttcagccccaaagcacttaaagcataaggtagattgtaagatcctggagttcacctgccttaaacacctcctttcataggagaaggacaccaaggtcgttagagaagaactgagttactcatgatcaccagtcagagctcttggctgcaccacatagatgccaatgttggatacctagggagaatgagatttgatggaaggatatggagaaggccactgaacccactggaagactggagaaccgggtccagaaaacaagcagaagccaagggaaagtgggctgctgagagcatagccagatcatgccacgaaatctgattagcccacttcagctanggcccatgatgcatcagaaatggacccatggctctctgtgttcttcccagtgggtacaggtgattggctgagcacagactgcgttcccctccctggctgttagggtctgggagaacaggtgggaggcttttgtggcttctgcagcagaagcccggagcccatctctcccaacgactcacacaggaaggaagcccccatctggttgggggcagaatgaggttacaaagcccatctcctgtcttgcagttcagattatgcagccaagggtactcttttacataagtgtttaaaatcttgatttaatcagcaacatagaccttgcagcgttcctgcttccatgatagaaggatatgaactatttgaaacattcgcaactactgctctccttggggattcctaccctccttccattctttactcactggcctcatggtagagtaactagagcagaaatgcagagcgagagagaaacaaatatgcagctttcgaaacccatggcagagacaatagtttgagagtctcaaaatcttgcctttcgagaatccgagtcctgacacacagaaatcaggaggactagtgtatggtttgttaagctactttttcccacctacccagtctacattaatgactccctgagc

SEQ ID NO: 256111 - DNA, 1839 bp, Homo sapiens
  misc_feature (595)..(595): n is a, c, g, or t
  misc_feature (1201)..(1201): n is a, c, g, or t
tagttgagatggggtttctccaggttggtcaggctggtctcaaactcccgacctcaggtgatcagcccgcctcggcctcccaaagtgctgggattacaggcgtgagccactgcgtgcccggcagcagatgaactttcaattggagcaatggaattctgtggggcaggggattgcacactgcacacatcacagctgctcatccagggttcagggagcacaggtgttgtggcacttgcttcatcttgagtggcacggagcacagagcagcccctgtggagtgtggaaacaccaaaccctgagtcaccactgactgttgccctgggcatagaaccccaggtgaaggcacttaacactggttatccctgtgcatccaggaagctgaatggcggccaaagaaaaaagttacaatgcagtcaggctggaccagagaattcctgcatgtgcaagtttgtgcgtgtgtatgttttggaagtcaagccagatgtcgtctttcctcatgtgacatttggtatcttttttccacagcagtgttccattatgttctagttcttgaaagaggcagtgaggcaacaagtgtacgacgaaattgatttgngaaatgatttatgtgtattatagtcttctcttagaggatcacaaagtatattagcatattaaaggctctgagaagtcctgtaataaaggagcctggttgattgaatgattgtggaactcattgtgggtggatcattcgcatactggatggaatggggtgccaggctgactgtgcagagggtgattagtccctgaaatgtagataggggccacctagagaatggtggagcgtcggacatggatgggtgaactgaccaactgggctatgcatttcagccccaaagcacttaaagcataaggtagattgtaagatcctggagttcacctgccttaaacacctcctttcataggagaaggacaccaaggtcgttagagaagaactgagttactcatgatcaccagtcagagctcttggctgcaccacatagatgccaatgttggatacctagggagaatgagatttgatggaaggatatggagaaggccactgaacccactggaagactggagaaccgggtccagaaaacaagcagaagccaagggaaagtgggctgctgagagcatagccagatcatgccacgaaatctgattagcccacttcagctanggcccatgatgcatcagaaatggacccatggctctctgtgttcttcccagtgggtacaggtgattggctgagcacagactgcgttcccctccctggctgttagggtctgggagaacaggtgggaggcttttgtggcttctgcagcagaagcccggagcccatctctcccaacgactcacacaggaaggaagcccccatctggttgggggcagaatgaggttacaaagcccatctcctgtcttgcagttcagattatgcagccaagggtactcttttacataagtgtttaaaatcttgatttaatcagcaacatagaccttgcagcgttcctgcttccatgatagaaggatatgaactatttgaaacattcgcaactactgctctccttggggattcctaccctccttccattctttactcactggcctcatggtagagtaactagagcagaaatgcagagcgagagagaaacaaatatgcagctttcgaaacccatggcagagacaatagtttgagagtctcaaaatcttgcctttcgagaatccgagtcctgacacacagaaatcaggaggactagtgtatggtttgttaagctactttttcccacctacccagtctacattaatgactccctgagc

SEQ ID NO: 256112 - DNA, 345 bp, Homo sapiens
ccttgaataaatctttataatttaaaacacaaatcatccaaagaaaggactcagttattctctgagtggataagtcaagagcaaactagaagagcattctcatctctaccccggtgaccttcatttcagcatttcggtgctattgcttccccatttcccagtggcaggtctgaggcatcatctcaggccccttagtcaaaaacttgtcctacatcagtgcctcatctgggcatggtggctcaagcctgtaatctcagcactctgggaggccgagacaggtggatcacctgaggttaggagttcgagaacaacctggccaacatgggaaaactccatctctactaa

SEQ ID NO: 256113 - DNA, 248 bp, Homo sapiens
ttcttttttcttttcccattaaaccaagcacttttaaattaaaactgacttcgtggtgggttgggaagaaaaattatgccattcacaaatgctcaaccagcatatgtaacgtttatacaccaaaatgactactaatgaagaaaacaaaacaaacaaaatcatttttccaaatcagctctgaaacattatttttgtttttgctgctgctgttgttgttgttgttgttgttgttgttgttgttgttgttt

SEQ ID NO: 256114 - DNA, 471 bp, Homo sapiens
aggctggtctcaaactcctgacctcaggtgatccacttgcctcggcctcccaaagtgctgagattacaagtgtgagccaccacgcccagcctctcccctttaaatttgatcttggccttgtaacttgctttggccaatgggacattagtaaatgtgatgcagtcagaggtttggtaataacctatgcatcaggacttacatcacttgctgctctatggagttgagaccaccaagtaaagcatcctgggctagcctaccggaggatcagagaccatgtggaacataaatgaatcatcccagttgagccctgtccgcagatcaaccagcctaccaacttccagacacgagtaaagccatcctagactatatccaaccccagtcaggctgacacagaccataagaattgtacagataatccacagaactgtgataaataataaagatgtttgtaattttaatacataaagagtg

SEQ ID NO: 256115 - DNA, 140 bp, Homo sapiens
cccagctttcatgcaattctcaccaagtccctgacccaggctggcagagacccctctctggtggaacatgtttaggtggaggaggggtataaccagcaagaggggtggaggctacagtagtcctgagggatggcctaggc

SEQ ID NO: 256116 - DNA, 711 bp, Homo sapiens
caggggcccaggcagggactgacgttagagtcaatactccacagctgtttgttgaatgagtaggtaacagcatggctggctggtcctggtgcagaaagtcttgggaggcctcagtttgcatcgtgcttctgtcatcagccagctgtgtgattctgcacaagtattttaacctctctgggcctcagtttccccatctgtaacttgggggcctacctcaaatggttcctggtgaagagtaacaagaccataccctaagttccagttgccttttcctctgcctttccaccttcccctccagcccctccaagtctcttttgttaagacagggtctcactctgtcacccaggctggaatgccgtgatctcggttcactgcagcctctatctcccaggctcaagtgaaacccaccacagcctcccaaagtgctgagtgctgggattacaggtgtgaaacactgcaccagctacatgtagaactttgataaagactggctttcaccgtgtatgagatggggagccatcttcagttctaatgcagctgggactacaggtgcgtgccaccacacccggctaattggtatttgtgtttttttttggttggtttctgtttttttgtacagacggtttctctcatgttggccaggctgggctcgaactcctggtttcaagtgaacctccacttggcttccccgtgctgagattacaggcgtga

SEQ ID NO: 256117 - DNA, 166 bp, Homo sapiens
gcccctccctccctcctacccccttcccaatatttggtttcacagctgtagttaaagcttgggatttggttatttttccccctcccaggaatttttttttcttgtttttcttttcctaggtgtgagggttggatggggagggtccccagcacccccggctgcacag

SEQ ID NO: 256118 - DNA, 433 bp, Homo sapiens
atgaccatggggaaggagaaaggcgtgcttggcatgtgtgccctgaaaagacgggacatacttattcatagagataacacttgttccgatgaagtcagaggcctggtgggagtagcctctttcacagggcttcaagggattgtggatattgtgcctgagaggaaggtgaggcaaccatctactccctgatgtgtgaaaatgaaggaacacagaggggaaaggagaggcagggacccaatgccagggaccgttccttactctgatgtgtgcacagccaccaaagctggcccttttcttccagcctcttgccatccctctaaaagcttgaattagcagaggcagttaagcaggaggtagaggagtgtcagaaccagacctttgcttccttccaaacagccaggcccacagccccagcccccctggggttgggagc

SEQ ID NO: 256119 - DNA, 509 bp, Homo sapiens
taagtgacatcttctttggtttcttccagcgtcaacatgtggtagatctaatttgaaatgagttccagagctgaggcaaggctatgatagaacacaaggcaaacagctgaaaactgtagtcaaaaggcagggaagctgagaaagtgattcaaagaagcccatctgaaatcggaagcaacagggacgcttttagggaggtcctgggtgcttcagaacacgggccttcagctgagacctctccaactgcctggaccctggctgctggcagaccaagttgctcaacacccagaattaacttgggactggagtccccatgtgaggccacgacaggaggcacacagcaggacctctcagaagggcctggaggggaaagatccctcagctccagcctgtaaagaaggtgcactgggatgcccacacaaagaggattcccttggcagcaaggaaaaccattagccctgtgctgtttatagatagcagagaataaagagaaataagaagcactgttc

SEQ ID NO: 256120 - DNA, 448 bp, Homo sapiens
acaatgattactttttatcttagcactgggctgcctagaactgaatcacagctctgccactcgctagctctgtggcctttgacaagtcccttagccttcttgggcctctgttcctcattagcaaaatggaggataacaataatacttttctcgtaaggtcactgtaaggatttaatatattaaaatatgtgatatatttaaaacacttcctggaatatagtgagctctatataagcaatggctattatcatcattatcaattttactgttactactatgtttatgctatgtgtgcccatatcttatctgctataatagatttgagcctttgaaggcaagaactgtacctgattcatttttcattttccccagtgagtagtaaaatgcattcacatagtatgtgctcaataagtatttgtgaagttaataaataaatgatcaaattaat

SEQ ID NO: 256121 - DNA, 276 bp, Homo sapiens
ggggattacagttcaacatgagatttgagtggggacacagagccaaaccatatcaagggttttgaaggggatctgttttcctttctctgtacacattgctgaattctgccattggtacaaaaggcagagtggtttaatgaaaaggttgttgatatgataggaggcccatacttcactcatctcccttcactcatctagtctctctcggagtctgcttttcccatgggggggcgaaggggagggaggtaggcaggcccttcaccgcaaatggcttcc

SEQ ID NO: 256122 - DNA, 688 bp, Homo sapiens
acaaaattcaacttaaagtagattgtaaacttcagtgggaagactaaaactttagaactcttatgggagaaaatacaagagtaaatctgtgtgaccttatgttagacaatggtttcttagaaatagcaccaaaagcacaaatgaccaataaataaataaattggattttatcaaaattaaaaatgtttctgctgaaaatggtaccgtcaataaagtgacaagacaatcctgataatgggagaaaatatttgcaaatcatatatctgataagagatttatatctagaatatataaagaactcttatattttgctatggtctaaaagtttgtgtgctcccaaaattcatatgttgaaatactaccccccgccaagattatattattaagaggtggggcctttggaatatgattaggtcatgagggttgaactctcatatatgggattagtgtccttataaaagaggttagaggccgggcatggtggctcatgcctgtaatcctagcactttgggaggccaaggcaggtggatcaactgaggtcaggagttgagaccagcctggccaacatggcaaaaccctgtctttattaaaaatacaaacttaacctgggatggtggcacacgccctttccaggttctttggagtactggagaagggttccctggcccccggaggtgtcggtgccggc

SEQ ID NO: 256123 - DNA, 686 bp, Homo sapiens
acaaaattcaacttaaagtagattgtaaacttcagtgggaagactaaaactttagaactcttatgggagaaaatacaagagtaaatctgtgtgaccttatgttagacaatggtttcttagaaatagcaccaaaagcacaaatgaccaataaataaataaattggattttatcaaaattaaaaatgtttctgctgaaaatggtaccgtcaataaagtgacaagacaatcctgataatgggagaaaatatttgcaaatcatatatctgataagagatttatatctagaatatataaagaactcttatattttgctatggtctaaaagtttgtgtgctcccaaaattcatatgttgaaatactaccccccgccaagattatattattaagaggtggggcctttggaatatgattaggtcatgagggttgaactctcatatatgggattagtgtccttataaaagaggttagaggccgggcatggtggctcatgcctgtaatcctagcactttgggaggccaaggcaggtggatcaactgaggtcaggagttgagaccagcctggccaacatggcaaaaccctgtctttattaaaaatacaaacttaacctgggatggtggcacacgcctgtaatcccagctacttgggagactgaggaagggaatctcccccattgggttggtcccccg

SEQ ID NO: 256124 - DNA, 524 bp, Homo sapiens
tagatactacattttttaattatttattttataacttatttatttataactttttaattatttaattgaaaggcatgagatttccaaccctcccttctctccaagaagcaaacccccaaattgtcccaatttttttcttccctcccacaaaaaccttatcactttatccaaaaaaaagcttgttagaaatacttaagacagctacaaagttgaaggcatccatcatgcctttgaggagaatggagttttgattgtctaaagtagtcccgtgtttaaaagaagacataccttgtacatgactgaaaataaatggctccttttaaaattcttaacattaggaaaagacaccccctaggtcagctccaagagatcattagattcagtttaaggcccaaagcaaacctaataatgaatattattatatggcatgtattacctttattcatatatcagaatagacagttatctttgataaggcctgctaaatgtattaccttctggatgttagaagtctttgatgttta

SEQ ID NO: 256125 - DNA, 356 bp, Homo sapiens
cgaggggagcctaaaagccaaagccacgtcttccaccggtggcacaagcaccttcctcgtgtcctccttggttgctgcgcagccctgggcctcctgctcctgttcgtttccaggggcctctgcccttcccgcggtgtgcacagccccaggttctgccttgagacctctcccctctgcagtggaaagagtgccggctctaagtcacagacctagcttcagttcctggctctgctctttcctgccaatgtgactcaacctctcagcattagtcccacactgtaaatgggcttgagtgttcttccaatatgggagtatgggattcaataaaatctccctacagcacacccagtaaaaaa

SEQ ID NO: 256126 - DNA, 446 bp, Homo sapiens
ttaggtgacctgggggcaatagtgtgaccaaagagagcagactggccacaggctgagtctggccccctctgtgtttgtgtttgacccaggtggtggtttagaaactgaaaaatgtgtgtgtgcatataaaccagatttcaacatctcttgagaagctggaggatccagccccagtgggcaccagtcccgaaggcacctgcagtagtgggagctaaggagagctgcctgtgagagtccagactcctcctgtcccctggttcccactcttccctgcgacctccccaccccagtggactcctgtcctttgcccaccaggcctctggaggctttggagctcgccacgcttgagttagcctttccttgggagcagataaccaacagatacagacctcatgatacaattcaatgattcaatctcttaaaggtgtacttttaaaatatatata

SEQ ID NO: 256127 - DNA, 395 bp, Homo sapiens
gagacggagtctcgctctgtcacccaggctagagtgcagcggcatgatctcggctcactgcaagctctgcctcctgagttcaagcaattttcttgcctcagcctctggagtagctgggattacaggcattcgtcaccatgcctggctaatttttgtatttttagtagagacggagtttcaccatgttggtcaggctggtctcgatcccctgaccttgtgatccacccacctctgcctcccaaagtgctgggattacaggcgtgagccaccacgcccagccatttcgtttttttaaaatgaggcttgcacacctattaagttggtttcataatctgtcatttgaaaatcctgtattaggtgttaagaccctttcccccactcccactggggagggc

SEQ ID NO: 256128 - DNA, 241 bp, Homo sapiens
tagtgtctccaatcgcgtgctgtgttaaattttaactttataaccaaccatcatttgctacttccatctaaccaagccagtttccttatgatgcacacacttgtgtttagctcacaatttgttctacatgcttgcttatttattcattcagcaagtatttattgagccccaactgtgcactagctgctgtctcaggtgctggggagacaggaagatcaaaataaaacccctgccttcaagt

SEQ ID NO: 256129 - DNA, 312 bp, Homo sapiens
acgagcttattcgtggttggaataaattaaaagaatggcctttataagaaagattcagaatctgtatgaagcaaatgactaggtcagtaggtagacagatttttccccatttttgtattggagattttcaaatgtatacaagagtaaagaagatggaaaatgactcccttgagcccgtcgcccagcatcaatatgtatccacatttcgctattcttgctttatctaaccgtctcacttatctcaaaaccacaatatgttaagataagtgaactgaagacctgaataaatgcaaacatcttatgcaaacatac

SEQ ID NO: 256130 - DNA, 365 bp, Homo sapiens
ggtgagatccttcatcttaaataacaggacaagtgttatctattgtgcgtgtgttggtatacacgtttttcttcatgattagcaacttaaaatattccggaccatttgtatggcctttaacaaaaaatcaccttattactgaaatttcagggtggcggcgggtgctgctgattgtttaccattaaatttttacaagtgttctgactcctggcggatgccaggttcttaatgctgttaagtcatgaatcttctttgagaaccaggaaagctctgcccgggaaaatgtacatgcagtttcagataatttatggacttcctgaaactcatcctctgaaccctgttccccaaatcaaacatttaactta

SEQ ID NO: 256131 - DNA, 767 bp, Homo sapiens
cagattcaagggatcatcccagctgggcctccccaagtgctgagattacaggcgtgacccagcacctggcctggtttttcttttaaataaggttaatacctatttatgagtgaaatgccctttatttttatttggtaaatttcctttgcatgaggtaaatttaatttttatttggtaaatttcttttgcatgaggtatacacacagaagcacattaatctttgtctctgattatagctattcttaaatcacaaaaagacattcaaatatttcatgagtgaagtgaatacttcataggaggaaatcctggtatatcttataggaagagtactctgtaaaagtgcttgtctgttttataggtgaatttgccatgtgatgttgatcacagacacattttataaacgccaaaaattaagaaacctctcacgttgccattcaaagataaaatatacaacacataattccttaaattaaaaacaagggtggccgggcacagtggctcatgcctgtaatcccagcactttgggaagccatggcgggtgtatcacctgaggtcaggagttcgagaccagcctggccaacatggcaaaaccttgtctctattaaaaatacaaaaatattcgcagggcgcggtggctcacgcctgtaatcccagcactttgggaggccgaggcaggtggatcacgaggtgaggagatcgagagcagcctcatcaacatggtgaagccccgtctctactaaaaatagaaaaattagttgggcacggtg

SEQ ID NO: 256132 - DNA, 356 bp, Homo sapiens
ttttgtgtgacctccacacattaaaaaataatacaatgttataaaatacctttatttcaataaaaatgttcatgcctttaaaatatgatttattaatatttgttcctacttctcttaaatttacagatataagaagaatctctgcattaatatcatatcattttatgaatggatgtttaacaaagatacttttaagacataggttcagttattcttgaaataatatttagcctattttataataatttcaattggctttgccattctgcccacctcagtttttaaatggttcttaagagtgagatccactcagagaagaatgaactctcattttaaagaagcctgactgagttttc

SEQ ID NO: 256133 - DNA, 414 bp, Homo sapiens
ggcctgtgaagtctcaagtcttaggtttttaaaaaagaagcatctaccttaagagagggaaggataaaccatagaaagtccaatccttatcaacaagagaaaaagggaagaagaaaagtttggattttataaaaattgaccaactacagacgagataatgaagacatccatctttctggaattcttttgtaaagactgaaatatctagtcaataactttccagtgacaaaagaggttacaccagtagtccttccattcagttcatacttttcatatggatgaacataatttataacttctccataaattagaacttctccaattttgccggatatccggaatccactcagtaacaccactctgaattccttcctgtacctcaaagacagaaatgaaagaacctggctcattaaa

SEQ ID NO: 256134 - DNA, 728 bp, Homo sapiens
tttttttctaaaaatattgattttttttggtttaaagtaaaaggtaggggctttctttgaaatctgtagttcctaggatgatttaatttctcaatttcaaaaaggtgtgtgttgagatatattaaaaccaatcataaacaggttattttaaaaacactctatttcaactccttcagatcaaattccactattgggtcatatttaaaataaaattacagacatctgttttatgaaaagttagttattgaggtgggaaaccatattctcttaatcaaagcttggagtgtttcttgaaatgcacatattgaacaaaaagcacttcagtaaaccacacaaactgcaaaacttgatagccatctagagctgttagagaattgatcctttttgataactggattgtttttcaaatgactgggattttgcccatttgtctcagtgatgaattgtttggtcacaaggaagagaaattcactgcaactgagttgggccacaaataataaataaaggatgacttggaggacactaggggactccaggactgaaattccccggggttctctggagggagtggggttggaccttcaaagctatttaggactcaggcctgagcctgaatcttggcttctcttgagaatgcttatcttctctcatgcctacatgtctgcccgagaactatgacaacctgctagcctaatcacacatcccatggtgcaaacacaaatgtcccg

SEQ ID NO: 256135 - DNA, 256 bp, Homo sapiens
catgcctgagtcagattcccttattattcacacttttctatgagaaaattgaggcttaaaaagttaactaacattcctgaagtgacacggtaaacaactaagggagtcaggatctatgcccaggaagatctgcaccacagtcagaagttcctggtccctaagctctgatcctgtaaatcatgtttttgtttattccccaacactaacctcactcctttactattcagtgcagggtgactttcctgactaggaaatt

SEQ ID NO: 256136 - DNA, 235 bp, Homo sapiens
ctggtagtatttgataatcccccgtccctttagctattctaggcctgtttagttgtcgggcgttgtcggactgaattgctaaaaataacaaataagcgggaggtggttctaaggccagccctggctactgtctgtaatctgtttaatttagttcctggggagaaagggcaaaaagaacatggtgccattctcattgaatggattttttgtttaaagtgctcatgagagcattgtt

SEQ ID NO: 256137 - DNA, 445 bp, Homo sapiens
gacagcatgtggccacttgaaaacaactcagtttttgccgcagttcctagacaacatttttgccctgttgggtttttgcaactgtagccataaacaagttctagaaaattgggagagaataaggctttctcgttggtaacatggcagaaaacaatatgatatcattctaagtgaaatgagccctaggttactaatgaatgctccatcagtagcaattgaagcaggtcacagttgagggatacgattacatttcacatttggccagtgcttagtggcctcattgctgtataagtgtgaaggtctgtggtcctggttgtctgagagaaagtgagtagtttctactccatctgccagggctttggacactcaaattgatgttccttccataaacatcttctgtggtgtgaccaagtgtaagaggtggagctgagcactgtgggggatg

SEQ ID NO: 256138 - DNA, 498 bp, Homo sapiens
ccagcctcgagattaggtgaaccccaaacaaccttttacaatgtaagtgaaactgctctgtgtgtggaaacgaggggcccaacgtgttccctgcccaacgcttctgagccgcctcccaatacgctgccctaagcatttcactgagtcagggcaagatgtggcccagcgaaacctctagttctgataacaagcatgtgggctcatgtgttatcagtgcagcagagaatgtcactgggacttccagacggaggctataaaacgttcccccacttaagccgtttgcgtttcagcctcccagctagcaaagtaagcagttctgtgtgccagtcatgcttagctgcttgattctaggcagagccttgcaaatctgggcaggaagagaaatatcgatctccacaggtccccctcatctcctccattgactgtgtagacttgacaatcattgcggggcctccgttgctatattccattgtctgggctccggctgtaacccacatc

SEQ ID NO: 256139 - DNA, 506 bp, Homo sapiens
gagaaacaagttctttggaaccaaaattataagaaaagcagggacagactttcagatccagattcttccctgaacctctctcctcccatccctgcttggcagggagctgacatgtcagctatcagtgccaagctgctctggaccttgagagaagggctccatttaaggatagcaaaacctctttcatttggagcccttgcagagaagcacagtataaatgagtgaaaaacctaaattagataatttttaaaagaatggtagcttcattattttcaagtacacagagtaacttaaactcagtcatgaagtgttcctttgtagaagcccttagggactttccttaatgagtagattataattattggtaatcagcataaacggttctctgcaatgcatgctttgaaagcaattgagcatattaagtgattttgatgttccacagggcaattttgtttacagcatttatctgctcagtatataccctttatagctataaccctctgctt

SEQ ID NO: 256140 - DNA, 322 bp, Homo sapiens
taaggtggatgggatagtggtgggaggagatggaaagcatttcaggcagagtgggaagatacaggactggccttatttatgaagccctttctctctctctcaggattcctactctgttgccttgggaatttcacttatcagacatctggtctccccaactctagtttaagtgtcttaagaataaagatgcttgtcatttccttgggattccttaggaaattactagaaagtagcaggcactattaagtacatacgtattgaaagatcaccttatatcctataaatatgtacaattattatttgtcaactaaaattaaaactt

SEQ ID NO: 256141 - DNA, 1147 bp, Homo sapiens
aagtcagatattgacattgcagtttggataagtaaagagtaggatttgccgtatggactcctttcctagcatcatctgggctaacaataagggaatataatgtggccttcatagagctgtgatatttaaaaaactatttaagggctttggaaacaaaaacaaccagattcattttctggttttgccacttactgtgactttgggcgaaaaaatataaccactgtgagcctcaattttctgatctgttaaatggggataatacaagtacctcacaggatatgtagaggtttcaaatgtaaaataatgtataagagagaaattatataaaatagtgcctgccatataatttgtgctatacaaatcgtagttgctatcatcccttatttacttgctccctatttggttgcaaaacaggattataatgattttttgaattgcccagctattcagctatcaatttctcagcaattcgctgtcccacttccaaacccagtgaactgagaggaaagttacctgatatagtttaacttcttggattaatgggaatgctaacagaagacattaaatatatgaacaaaaatatttggggaaaggctttttcaaataggccagtaatcagattcctgcatagactacttaccttgggtgtatttttaattctgggttattttcttttacaatagattttattttttcatagtagattttatttttcattgatgaccaaagtatgttcctgcttctgcattgtcctcagctgacagttgtgagattaaggaaatggcagggaatttacaaatgaaatcaccaacctgattcacctgaactgtccctgctatctaggcattacaggcaatgctttaccttgatttatgcctctgcccttgggatgggtgctattatcccttctgtttttccagtgaggaaactgaggcataggacaagtatgtgccagaacccaaaagcctgattctgaaatccatattctgtaactcttcatagcttggctgtatttattttgtcagtgtttatttttgtttttcacattttgggagtataacagaaagccaaatgagtctcagttatatttaattaagttgtcagaagttgatctttgaatccttttggaggttaactattttgaatt

SEQ ID NO: 256142 - DNA, 680 bp, Homo sapiens
atacatatagatttgttctaattcagaaggtggaagcctcttaattattaggatcctatgattaagattgaaatggtggtgttgtttaagttgcatgctatgaagttagaaaaacctttgataatttctttgagtgttgttccaataagtgacaaaaaatatgattactgcatcttctgtcctttatgtattcctaatttattaatcttttcctactttttgttgacagccaagcaatttattacatagtagtatgtattgcctaatatgcaaatacaactatatgaggcagtcatatttttttaaatagaatccctactgtttttgtagtggggaaattggtatagctgtctttaaaaaattgcagggaatagtatctaggcatgacaatataaaataatatgaatttgtgtttttatcttcagcttacaccttttgcccttattggtttagcttctggtgtgaatacaaacataagagcatacgatgactgtttttaacgaaacttgagaaagattgatgaggtggtcatagagctaaggaccaattttacccacataactggttcacctttatacagtaaaaagaaagcatgcaaaaataagttatttcattaagcatgtttacataaatgcctgctatgttacaaaatcctaaaagactaaagttgacaggttttt

SEQ ID NO: 256143 - DNA, 817 bp, Homo sapiens
gcctattgactgcattaaaactgtggttattgttgagtgtttgcttcaaaagctgtttggttttaaaagcaagtaagagtttctttggcactaaagaaatttcagtatctgggcggatcacttgagctcaggggtttgagaccagctgggcaacatggcaaaaccctgttattacaaaaaaaaaaaaaaaattagaaaaaattagtcgggtgtggtgacatgcatcttttatcccagcctccagagtagctgggattacaggtgcacaccgctgcactcggctgattttttgcatatttaatagagaagaggtttcaccatgttggccaggctggtcttaaactcccaacctcaggtaacccactcacttcagcctcccaaactgctaggattacaggcatgagccaccacgcccggcctgaaaagtttttaaagaatgaaactcaagtattttctcattcatcatccattggagtttaaggtgattttatttctatcatggaaagaatagccacttggtcatgtattgaggagtaataaatggtccctgatcagctcaacgttttttcccctcatatatttctgctttatgcctgtactaaaatagtgtctagagtgcgtgattaacaggaaaagcattagcagtaagtttcttctatcacatgctgtcccttatgcctcccctccctcttcccactcccttgttcctcttccctgtcacacacacatttattttggaatccgaactttcgagatgaaaagcagtttactttcataaagtagcatgacacatcatgcctgacttgaagtaaagaaa

SEQ ID NO: 256144 - DNA, 1747 bp, Homo sapiens
gtcgctcggggtcccgggaaattgctccgtgggctttcagcggcggtttttatcgccggccggggtgtgcctgtctgcggctcgcctctcctccgggaccgtaaagctgctgccgtgatttatcctccccttctcccaaatccgattaaatggaggagctcggggccggggcgccgcggggcccgggagccgggagggggcggcgggaaggacggggccaaggaggggaggacaaacggcccctcagagagtggcggatttgcctttatttacagccgcggctttctttttattttttattttttatggggtttggtgagcttttcccgtctttctcgtgctgcgttcaagcacgatgcagggacggcaggggtttggaactggataggccttgtcgccctgttccaaagggcagggcaggtcctgtctgggagacaaggaggcctaggaaagatgagggccaggaagcctcccccacctccttccatcaggggaagggcgagcgaaaggggagagaaaacccacgttcaggagagcatgggggcgggaggggagggcgctgcttatcccaactcgcgtagttgaaacctgagcagaggctcgggcaagcctggagtgacctcgcaaccttacagcgggtcgcaggtgcccgttattcctagactgtcccaggagccaggaaagagggattcggatcatatttaaccctatcttctggctcgcagatgctgcttctctcatggtttatcaccggaatggaaaggaggaaacggggagtgggggaaagggcgaagccaccagaagcagctgcggcattttgctgactattcgcccatggagccggtttgccatccagtgatgccagagtcccggcgcgacagaaagcaggactcccaagatcttcctcctgctgcattttaggcactgaaccccaatcccgaccgtatgttaacactgaattctgagtaggagttttgttttggcagtgtgacgactgcgcatgctcggaaaggggacgcaagtccgagatcccaaacgcggtacagaccaaaccgcagtccacgttacggatcggcttactccgcggagttggcctcatttctgcacagtcggcgctccctgtagtttctcctctcgaacgccagctctcctgccacagctcctcaccccctgaaaatgttcgcctgctccaagtttgtctccactccctccttggtcaagagcacctcacagctgctgagccgtccgctatctgcagtggtgctgaaacgaccggagatactgacagatgagagcctcagcagcttggcagtctcatgtccccttacctcacttgtctctagccgcagcttccaaaccagcgccatttcaagggacatcgacacagcagccaagttcattggagctggggctgccacagttggggtggctggttctggggctgggattggaactgtgtttgggagcctcatcattggttatgccaggaacccttctctgaagcaacagctcttctcctacgccattctgggctttgccctctcggaggccatggggctcttttgtctgatggtagcctttctcatcctctttgccatgtgaaggagccgtctccacctcccatagttctcccgcgtctggttggccccgtgtgttccttttcctatacctccccaggcagcctggggaacgtggttggctcagggtttgacagagaaaagacaaataaatactgtattaataagaa

SEQ ID NO: 256145 - DNA, 779 bp, Homo sapiens
ctgtgtggggtttctggaagaagtcatgacttcagggttttaattctatttctgccaatgacttaaggtcagtcactgttttctgggccagttaagctttctagggccccttttctgctaataaggatatagtttagtgaataaggagcgtttacaatactgcttctgtaattccagctctcctgccacagctcctcaccccctgaaaatgttcgcctgctccaagtttgtctccactccctccttggtcaagagcacctcacagctgctgagccgtccgctatctgcagtggtgctgaaacgaccggagatactgacagatgagagcctcagcagcttggcagtctcatgtccccttacctcacttgtctctagccgcagcttccaaaccagcgccatttcaagggacatcgacacagcagccaagttcattggagctggggctgccacagttggggtggctggttctggggctgggattggaactgtgtttgggagcctcatcattggttatgccaggaacccttctctgaagcaacagctcttctcctacgccattctgggctttgccctctcggaggccatggggctcttttgtctgatggtagcctttctcatcctctttgccatgtgaaggagccgtctccacctcccatagttctcccgcgtctggttggccccgtgtgttccttttcctatacctccccaggcagcctggggaacgtggttggctcagggtttgacagagaaaagacaaataaatactgtattaataagaa

SEQ ID NO: 256146 - DNA, 666 bp, Homo sapiens
  misc_feature (32)..(32): n is a, c, g, or t
  misc_feature (35)..(35): n is a, c, g, or t
  misc_feature (42)..(43): n is a, c, g, or t
  misc_feature (45)..(46): n is a, c, g, or t
aattcgcgggccgcgtcgactacggctgcganagncgacagnngnngctctgcagtgggagcagctctcctgccacagctcctcaccccctgaaaatgttcgcctgctccaagtttgtctccactccctccttggtcaagagcacctcacagctgctgagccgtccgctatctgcagtggtgctgaaacgaccggagatactgacagatgagagcctcagcagcttggcagtctcatgtccccttacctcacttgtctctagccgcagcttccaaaccagcgccatttcaagggacatcgacacagcagccaagttcattggagctggggctgccacagttggggtggctggttctggggctgggattggaactgtgtttgggagcctcatcattggttatgccaggaacccttctctgaagcaacagctcttctcctacgccattctgggctttgccctctcggaggccatggggctcttttgtctgatggtagcctttctcatcctctttgccatgtgaaggagccgtctccacctcccatagttctcccgcgtctggttggccccgtgtgttccttttcctatacctccccaggcagcctggggaacgtggttggctcagggtttgacagagaaaagacaaataaatactgtattaataagaa

SEQ ID NO: 256147 - DNA, 647 bp, Homo sapiens
tagctagtagagctgggtgtgaatcggccgaggcagtgggagcagctctcctgccacagctcctcaccccctgaaaatgttcgcctgctccaagtttgtctccactccctccttggtcaagagcacctcacagctgctgagccgtccgctatctgcagtggtgctgaaacgaccggagatactgacagatgagagcctcagcagcttggcagtctcatgtccccttacctcacttgtctctagccgcagcttccaaaccagcgccatttcaagggacatcgacacagcagccaagttcattggagctggggctgccacagttggggtggctggttctggggctgggattggaactgtgtttgggagcctcatcattggttatgccaggaacccttctctgaagcaacagctcttctcctacgccattctgggctttgccctctcggaggccatggggctcttttgtctgatggtagcctttctcatcctctttgccatgtgaaggagccgtctccacctcccatagttctcccgcgtctggttggccccgtgtgttccttttcctatacctccccaggcagcctggggaacgtggttggctcagggtttgacagagaaaagacaaataaatactgtattaataagaa

SEQ ID NO: 256148 - DNA, 643 bp, Homo sapiens
  misc_feature (40)..(40): n is a, c, g, or t
cagtaactataacggtccggtttggtagcgaggctgggtngctctcctgccacagctcctcaccccctgaaaatgttcgcctgctccaagtttgtctccactccctccttggtcaagagcacctcacagctgctgagccgtccgctatctgcagtggtgctgaaacgaccggagatactgacagatgagagcctcagcagcttggcagtctcatgtccccttacctcacttgtctctagccgcagcttccaaaccagcgccatttcaagggacatcgacacagcagccaagttcattggagctggggctgccacagttggggtggctggttctggggctgggattggaactgtgtttgggagcctcatcattggttatgccaggaacccttctctgaagcaacagctcttctcctacgccattctgggctttgccctctcggaggccatggggctcttttgtctgatggtagcctttctcatcctctttgccatgtgaaggagccgtctccacctcccatagttctcccgcgtctggttggccccgtgtgttccttttcctatacctccccaggcagcctggggaacgtggttggctcagggtttgacagagaaaagacaaataaatactgtattaataagaa

SEQ ID NO: 256149 - DNA, 1790 bp, Homo sapiens
gtcgctcggggtcccgggaaattgctccgtgggctttcagcggcggtttttatcgccggccggggtgtgcctgtctgcggctcgcctctcctccgggaccgtaaagctgctgccgtgatttatcctccccttctcccaaatccgattaaatggaggagctcggggccggggcgccgcggggcccgggagccgggagggggcggcgggaaggacggggccaaggaggggaggacaaacggcccctcagagagtggcggatttgcctttatttacagccgcggctttctttttattttttattttttatggggtttggtgagcttttcccgtctttctcgtgctgcgttcaagcacgatgcagggacggcaggggtttggaactggataggccttgtcgccctgttccaaagggcagggcaggtcctgtctgggagacaaggaggcctaggaaagatgagggccaggaagcctcccccacctccttccatcaggggaagggcgagcgaaaggggagagaaaacccacgttcaggagagcatgggggcgggaggggagggcgctgcttatcccaactcgcgtagttgaaacctgagcagaggctcgggcaagcctggagtgacctcgcaaccttacagcgggtcgcaggtgcccgttattcctagactgtcccaggagccaggaaagagggattcggatcatatttaaccctatcttctggctcgcagatgctgcttctctcatggtttatcaccggaatggaaaggaggaaacggggagtgggggaaagggcgaagccaccagaagcagctgcggcattttgctgactattcgcccatggagccggtttgccatccagtgatgccagagtcccggcgcgacagaaagcaggactcccaagatcttcctcctgctgcattttaggcactgaaccccaatcccgaccgtatgttaacactgaattctgagtaggagttttgttttggcagtgtgacgactgcgcatgctcggaaaggggacgcaagtccgagatcccaaacgcggtacagaccaaaccgcagtccacgttacggatcggcttactccgcggagttggcctcatttctgcacagtcggcgctccctgtagtttctcctctcgaacgccagctctcctgccacagctcctcaccccctgaaaatgttcgcctgctccaagtttgtctccactccctccttggtcaagagcacctcacagctgctgagccgtccgctatctgcagtggtgctgaaacgaccggagatactgacagatgagagcctcagcagcttggcagtctcatgtccccttacctcacttgtctctagccgcagcttccaaaccagcgccatttcaagggacatcgacacagcagccaagttcattggagctggggctgccacagttggggtggctggttctggggctgggattggaactgtgtttgggagcctcatcattggttatgccaggaacccttctctgaagcaacagctcttctcctacgccattctgggctttgccctctcggaggccatggggctcttttgtctgatggtagcctttctcatcctctttgccatgtgaaggagccgtctccacctcccatagttctcccgcgtctggttggccccgtgtgttccttttcctatacctccccaggcagcctggggaacgtggttggctcagggtttgacagagaaaagacaaataaatactgtattaataagaaaacaataaaaactccagggggggccggtcccaattgctctata

SEQ ID NO: 256150 - DNA, 783 bp, Homo sapiens
  misc_feature (32)..(32): n is a, c, g, or t
  misc_feature (35)..(35): n is a, c, g, or t
  misc_feature (42)..(43): n is a, c, g, or t
  misc_feature (45)..(46): n is a, c, g, or t
aattcgcgggccgcgtcgactacggctgcganagncgacagnngnngctctgcagtgggagcagctctcctgccacagctcctcaccccctgaaaatgttcgcctgctccaagtttgtctccactccctccttggtcaagagcacctcacagctgctgagccgtccgctatctgcagtggtgctgaaacgaccggagatactgacagatgagagcctcagcagcttggcagtctcatgtccccttacctcacttgtctctagccgcagcttccaaaccagcgccatttcaagggacatcgacacagcagccaagttcattggagctggggctgccacagttggggtggctggttctggggctgggattggaactgtgtttgggagcctcatcattggttatgccaggaacccttctctgaagcaacagctcttctcctacgccattctgggctttgccctctcggaggccatggggctcttttgtctgatggtagcctttctcatcctctttgccatgtgaaggagccgtctccacctcccatagttctcccgcgtctggttggccccgtgtgttccttttcctatacctccccaggcagcctggggaacgtggttggctcagggtttgacagagaaaagacaaataaatactgtattaataagaatgtttcttgagtctcctgtgtatatttcttttccacagttggctgagtgccttcgtgagagtacaaggcccgaagggtagtgatggtgctaaactcaacatggatttggctgagctc

SEQ ID NO: 256151 - DNA, 672 bp, Homo sapiens
  misc_feature (492)..(492): n is a, c, g, or t
  misc_feature (496)..(496): n is a, c, g, or t
  misc_feature (507)..(510): n is a, c, g, or t
  misc_feature (512)..(512): n is a, c, g, or t
  misc_feature (514)..(515): n is a, c, g, or t
  misc_feature (518)..(519): n is a, c, g, or t
  misc_feature (521)..(521): n is a, c, g, or t
  misc_feature (523)..(526): n is a, c, g, or t
  misc_feature (537)..(537): n is a, c, g, or t
  misc_feature (541)..(541): n is a, c, g, or t
  misc_feature (586)..(586): n is a, c, g, or t
gcctactactactaaattcgcggccgcgtcgacgcagtattaatacagtatttatttgtcttttctctgtcaaaccctgagccaaccacgttccccaggctgcctggggaggtataggaaaaggaacacacggggccaaccagacgcgggagaactatgggaggtggagacggctccttcacatggcaaagaggatgagaaaggctaccatcagacaaaagagccccatggcctccgagagggcaaagcccagaatggcgtaggagaagagctgttgcttcagagaagggttcctggcataaccaatgatgaggctcccaaacacagttccaatcccagccccagaaccagccaccccaactgtgggcagccccagctccaatgaacttgggctgctgtgttcgatgttcccttgaaatgggcgctggttttggaagctgcggctagagacaagtgaggtaagggggacatgagactgccaagctgctgagnctcncatctgcagtnnnncngnncgnncngnnnnactgcagatgngagnctcagcagctgtgaggtgctcttgaccaaggagggagtggagacnaacttggagcaggcgaacattcttcagggggctgaggagctgtggcaggagagctgctcccactgcagagaagacagagagggggc

SEQ ID NO: 256152 - DNA, 618 bp, Homo sapiens
tttgagacagtttccctcttgttgcccaggctggagtacaatggcgcaatcttggctcaccgtagcctctgcctcctggattcaagcaattctcctgcctcagcctcctgagtagctgggattacagctctcctgccacagctcctcaccccctgaaaatgttcgcctgctccaagtttgtctccactccctccttggtcaagagcacctcacagctgctgagccgtccgctatctgcagtggtgctgaaacgaccggagatactgacagatgagagcctcagcagcttggcagtctcatgtccccttacctcacttgtctctagccgcagcttccaaaccagcgccatttcaagggacatcgacacagcagccaagttcattggagctggggctgccacagttggggtggctggttctggggctgggattggaactgtgtttgggagcctcatcattggttatgccagagccagcatctccctatgttgcccaggctggactcgaacccctgagctgaagtgatcctccccactcggtctcccaaagtgctgggattacaggcatgagcactgtgcctgttcaaacaacttaaataaaccatgtctaaagaatgacc

SEQ ID NO: 256153 - DNA, 355 bp, Homo sapiens
attcgcggccgcgtcgactttttttttaaacatcttattaatacagtatttatttgtcttttctctgtcaaaccctgagccaaccacgttccccaggctgcctggggaggtataggaaaaggaacacacggggccaaccagacgcgggagaactatgggaggtggagacggctccttcacatggcaaagaggatgagaaaggctaccatcagacaaaagagccccatggcctccgagagggcaaagcccagaatggcgtaggagaagagctgttgcttcagagaagggttcctggcataaccaatgatggtcgacgcgggcgcgaatttagaacatagtagtcctacctgctaat

SEQ ID NO: 256154 - DNA, 377 bp, Homo sapiens
ccaaggccatgggctttaggtggagatggaggacacttaatacactgtatgctatagtgctccagcttttgccactggcagcacatgcccctgtgcactgctgctaactggtattacttggcctagtctactgacttcagttggaagcatttagtcctaggaagatgatctccttggggcagcaagaatagactagggcctcagcctggtcaatatggtgaaaccctgtctctgctaaaaatacaaaaattagccaggcgttgtggtgggcgcctgtagtcccagctactcgggaggatgagacaggagaattgcttgaacccgggagacagaggttacagtgagccaagatggtgccactgcattccagtctgggc

SEQ ID NO: 256155 - DNA, 209 bp, Homo sapiens
ttggtaggttagcagtattaaatggtttttcaaagtatgatggatttattggcacataaccctatggtaagttgaggagcatctgtatatatttcccttgttgagtgaggcaaatgcttctgaggcttagatttcttcttgttctcagactttgctttaaggaaagaacgtctacttccgttgggccagtaagggagcatccaaccgtg

SEQ ID NO: 256156 - DNA, 1936 bp, Homo sapiens
gtcgctcggggtcccgggaaattgctccgtgggctttcagcggcggtttttatcgccggccggggtgtgcctgtctgcggctcgcctctcctccgggaccgtaaagctgctgccgtgatttatcctccccttctcccaaatccgattaaatggaggagctcggggccggggcgccgcggggcccgggagccgggagggggcggcgggaaggacggggccaaggaggggaggacaaacggcccctcagagagtggcggatttgcctttatttacagccgcggctttctttttattttttattttttatggggtttggtgagcttttcccgtctttctcgtgctgcgttcaagcacgatgcagggacggcaggggtttggaactggataggccttgtcgccctgttccaaagggcagggcaggtcctgtctgggagacaaggaggcctaggaaagatgagggccaggaagcctcccccacctccttccatcaggggaagggcgagcgaaaggggagagaaaacccacgttcaggagagcatgggggcgggaggggagggcgctgcttatcccaactcgcgtagttgaaacctgagcagaggctcgggcaagcctggagtgacctcgcaaccttacagcgggtcgcaggtgcccgttattcctagactgtcccaggagccaggaaagagggattcggatcatatttaaccctatcttctggctcgcagatgctgcttctctcatggtttatcaccggaatggaaaggaggaaacggggagtgggggaaagggcgaagccaccagaagcagctgcggcattttgctgactattcgcccatggagccggtttgccatccagtgatgccagagtcccggcgcgacagaaagcaggactcccaagatcttcctcctgctgcattttaggcactgaaccccaatcccgaccgtatgttaacactgaattctgagtaggagttttgttttggcagtgtgacgactgcgcatgctcggaaaggggacgcaagtccgagatcccaaacgcggtacagaccaaaccgcagtccacgttacggatcggcttactccgcggagttggcctcatttctgcacagtcggcgctccctgtagtttctcctctcgaacgccaggtggagcaaccggccggataccgccacagccctggcaggcggcgctgtgatgcctgagctgatcctgtatgttgcaatcactctatccgtggctgagcgactcgttggcccgggtcacgcatgcgctgagccttcctttcgctcttcccgctgctccgcccctctctgtcttctctgcagtgggagcagctctcctgccacagctcctcaccccctgaaaatgttcgcctgctccaagtttgtctccactccctccttggtcaagagcacctcacagctgctgagccgtccgctatctgcagtggtgctgaaacgaccggagatactgacagatgagagcctcagcagcttggcagtctcatgtccccttacctcacttgtctctagccgcagcttccaaaccagcgccatttcaagggacatcgacacagcagccaagttcattggagctggggctgccacagttggggtggctggttctggggctgggattggaactgtgtttgggagcctcatcattggttatgccaggaacccttctctgaagcaacagctcttctcctacgccattctgggctttgccctctcggaggccatggggctcttttgtctgatggtagcctttctcatcctctttgccatgtgaaggagccgtctccacctcccatagttctcccgcgtctggttggccccgtgtgttccttttcctatacctccccaggcagcctggggaacgtggttggctcagggtttgacagagaaaagacaaataaatactgtattaataagaa

SEQ ID NO: 256157 - DNA, 1813 bp, Homo sapiens
gtcgctcggggtcccgggaaattgctccgtgggctttcagcggcggtttttatcgccggccggggtgtgcctgtctgcggctcgcctctcctccgggaccgtaaagctgctgccgtgatttatcctccccttctcccaaatccgattaaatggaggagctcggggccggggcgccgcggggcccgggagccgggagggggcggcgggaaggacggggccaaggaggggaggacaaacggcccctcagagagtggcggatttgcctttatttacagccgcggctttctttttattttttattttttatggggtttggtgagcttttcccgtctttctcgtgctgcgttcaagcacgatgcagggacggcaggggtttggaactggataggccttgtcgccctgttccaaagggcagggcaggtcctgtctgggagacaaggaggcctaggaaagatgagggccaggaagcctcccccacctccttccatcaggggaagggcgagcgaaaggggagagaaaacccacgttcaggagagcatgggggcgggaggggagggcgctgcttatcccaactcgcgtagttgaaacctgagcagaggctcgggcaagcctggagtgacctcgcaaccttacagcgggtcgcaggtgcccgttattcctagactgtcccaggagccaggaaagagggattcggatcatatttaaccctatcttctggctcgcagatgctgcttctctcatggtttatcaccggaatggaaaggaggaaacggggagtgggggaaagggcgaagccaccagaagcagctgcggcattttgctgactattcgcccatggagccggtttgccatccagtgatgccagagtcccggcgcgacagaaagcaggactcccaagatcttcctcctgctgcattttaggcactgaaccccaatcccgaccgtatgttaacactgaattctgagtaggagttttgttttggcagtgtgacgactgcgcatgctcggaaaggggacgcaagtccgagatcccaaacgcggtacagaccaaaccgcagtccacgttacggatcggcttactccgcggagttggcctcatttctgcacagtcggcgctccctgtagtttctcctctcgaacgccaggtggagcaaccggccggataccgccacagccctggcaggcggcgctgtgatgcctgagctgatcctctctcctgccacagctcctcaccccctgaaaatgttcgcctgctccaagtttgtctccactccctccttggtcaagagcacctcacagctgctgagccgtccgctatctgcagtggtgctgaaacgaccggagatactgacagatgagagcctcagcagcttggcagtctcatgtccccttacctcacttgtctctagccgcagcttccaaaccagcgccatttcaagggacatcgacacagcagccaagttcattggagctggggctgccacagttggggtggctggttctggggctgggattggaactgtgtttgggagcctcatcattggttatgccaggaacccttctctgaagcaacagctcttctcctacgccattctgggctttgccctctcggaggccatggggctcttttgtctgatggtagcctttctcatcctctttgccatgtgaaggagccgtctccacctcccatagttctcccgcgtctggttggccccgtgtgttccttttcctatacctccccaggcagcctggggaacgtggttggctcagggtttgacagagaaaagacaaataaatactgtattaataagaa

SEQ ID NO: 256158 - DNA, 639 bp, Homo sapiens
gcctactactactaaattcgcggccgcgtcgacgcagctctcctgccacagctcctcaccccctgaaaatgttcgcctgctccaagtttgtctccactccctccttggtcaagagcacctcacagctgctgagccgtccgctatctgcagtggtgctgaaacgaccggagatactgacagatgagagcctcagcagcttggcagtctcatgtccccttacctcacttgtctctagccgcagcttccaaaccagcgccatttcaagggacatcgacacagcagccaagttcattggagctggggctgccacagttggggtggctggttctggggctgggattggaactgtgtttgggagcctcatcattggttatgccaggaacccttctctgaagcaacagctcttctcctacgccattctgggctttgccctctcggaggccatggggctcttttgtctgatggtagcctttctcatcctctttgccatgtgaaggagccgtctccacctcccatagttctcccgcgtctggttggccccgtgtgttccttttcctatacctccccaggcagcctggggaacgtggttggctcagggtttgacagagaaaagacaaataaatactgtattaataagaa

SEQ ID NO: 256159 - DNA, 631 bp, Homo sapiens
cccactgcagagaagacagagaggggcagctctcctgccacagctcctcaccccctgaaaatgttcgcctgctccaagtttgtctccactccctccttggtcaagagcacctcacagctgctgagccgtccgctatctgcagtggtgctgaaacgaccggagatactgacagatgagagcctcagcagcttggcagtctcatgtccccttacctcacttgtctctagccgcagcttccaaaccagcgccatttcaagggacatcgacacagcagccaagttcattggagctggggctgccacagttggggtggctggttctggggctgggattggaactgtgtttgggagcctcatcattggttatgccaggaacccttctctgaagcaacagctcttctcctacgccattctgggctttgccctctcggaggccatggggctcttttgtctgatggtagcctttctcatcctctttgccatgtgaaggagccgtctccacctcccatagttctcccgcgtctggttggccccgtgtgttccttttcctatacctccccaggcagcctggggaacgtggttggctcagggtttgacagagaaaagacaaataaatactgtattaataagaa

SEQ ID NO: 256160 - DNA, 729 bp, Homo sapiens
tttgagacagtttccctcttgttgcccaggctggagtacaatggcgcaatcttggctcaccgtagcctctgcctcctggattcaagcaattctcctgcctcagcctcctgagtagctgggattacagctctcctgccacagctcctcaccccctgaaaatgttcgcctgctccaagtttgtctccactccctccttggtcaagagcacctcacagctgctgagccgtccgctatctgcagtggtgctgaaacgaccggagatactgacagatgagagcctcagcagcttggcagtctcatgtccccttacctcacttgtctctagccgcagcttccaaaccagcgccatttcaagggacatcgacacagcagccaagttcattggagctggggctgccacagttggggtggctggttctggggctgggattggaactgtgtttgggagcctcatcattggttatgccaggaacccttctctgaagcaacagctcttctcctacgccattctgggctttgccctctcggaggccatggggctcttttgtctgatggtagcctttctcatcctctttgccatgtgaaggagccgtctccacctcccatagttctcccgcgtctggttggccccgtgtgttccttttcctatacctccccaggcagcctggggaacgtggttggctcagggtttgacagagaaaagacaaataaatactgtattaataagaa

SEQ ID NO: 256161 - DNA, 2200 bp, Homo sapiens
gtcgctcggggtcccgggaaattgctccgtgggctttcagcggcggtttttatcgccggccggggtgtgcctgtctgcggctcgcctctcctccgggaccgtaaagctgctgccgtgatttatcctccccttctcccaaatccgattaaatggaggagctcggggccggggcgccgcggggcccgggagccgggagggggcggcgggaaggacggggccaaggaggggaggacaaacggcccctcagagagtggcggatttgcctttatttacagccgcggctttctttttattttttattttttatggggtttggtgagcttttcccgtctttctcgtgctgcgttcaagcacgatgcagggacggcaggggtttggaactggataggccttgtcgccctgttccaaagggcagggcaggtcctgtctgggagacaaggaggcctaggaaagatgagggccaggaagcctcccccacctccttccatcaggggaagggcgagcgaaaggggagagaaaacccacgttcaggagagcatgggggcgggaggggagggcgctgcttatcccaactcgcgtagttgaaacctgagcagaggctcgggcaagcctggagtgacctcgcaaccttacagcgggtcgcaggtgcccgttattcctagactgtcccaggagccaggaaagagggattcggatcatatttaaccctatcttctggctcgcagatgctgcttctctcatggtttatcaccggaatggaaaggaggaaacggggagtgggggaaagggcgaagccaccagaagcagctgcggcattttgctgactattcgcccatggagccggtttgccatccagtgatgccagagtcccggcgcgacagaaagcaggactcccaagatcttcctcctgctgcattttaggcactgaaccccaatcccgaccgtatgttaacactgaattctgagtaggagttttgttttggcagtgtgacgactgcgcatgctcggaaaggggacgcaagtccgagatcccaaacgcggtacagaccaaaccgcagtccacgttacggatcggcttactccgcggagttggcctcatttctgcacagtcggcgctccctgtagtttctcctctcgaacgccaggtggagcaaccggccggataccgccacagccctggcaggcggcgctgtgatgcctgagctgatcctgtatgttgcaatcactctatccgtggctgagcgactcgttggcccgggtcacgcatgcgctgagccttcctttcgctcttcccgctgctccgcccctctctgtcttctctgcagtgggagcagctctcctgccacagctcctcaccccctgaaaatgttcgcctgctccaagtttgtctccactccctccttggtcaagagcacctcacagctgctgagccgtccgctatctgcagtggtgctgaaacgaccggagatactgacagatgagagcctcagcagcttggcagtctcatgtccccttacctcacttgtctctagccgcagcttccaaaccagcgccatttcaagggacatcgacacagcagccaagttcattggagctggggctgccacagttggggtggctggttctggggctgggattggaactgtgtttgggagcctcatcattggttatgccaggaacccttctctgaagcaacagctcttctcctacgccattctgggctttgccctctcggaggccatggggctcttttgtctgatggtagcctttctcatcctctttgccatgtgaaggagccgtctccacctcccatagttctcccgcgtctggttggccccgtgtgttccttttcctatacctccccaggcagcctggggaacgtggttggctcagggtttgacagagaaaagacaaataaatactgtattaataagaaaaaaaaacaaaaaaaaaactcgaaactagtcctctcgtaggacggagggtacgtgcgtctagagaccgcatatcccagggatttgacgaaggcgtgtcgcgctgcagtgcaatgtaggccttaggcaagcctaagggttggaccggatagtacggaccgggagcgcatggggcccaacccacgccggggtcggaccccggcaagttcccagggagggccgaggaccctaaacctccggggctggacccagcggggcatggcacg

SEQ ID NO: 256162 - DNA, 2149 bp, Homo sapiens
  misc_feature (2137)..(2137): n is a, c, g, or t
gtcgctcggggtcccgggaaattgctccgtgggctttcagcggcggtttttatcgccggccggggtgtgcctgtctgcggctcgcctctcctccgggaccgtaaagctgctgccgtgatttatcctccccttctcccaaatccgattaaatggaggagctcggggccggggcgccgcggggcccgggagccgggagggggcggcgggaaggacggggccaaggaggggaggacaaacggcccctcagagagtggcggatttgcctttatttacagccgcggctttctttttattttttattttttatggggtttggtgagcttttcccgtctttctcgtgctgcgttcaagcacgatgcagggacggcaggggtttggaactggataggccttgtcgccctgttccaaagggcagggcaggtcctgtctgggagacaaggaggcctaggaaagatgagggccaggaagcctcccccacctccttccatcaggggaagggcgagcgaaaggggagagaaaacccacgttcaggagagcatgggggcgggaggggagggcgctgcttatcccaactcgcgtagttgaaacctgagcagaggctcgggcaagcctggagtgacctcgcaaccttacagcgggtcgcaggtgcccgttattcctagactgtcccaggagccaggaaagagggattcggatcatatttaaccctatcttctggctcgcagatgctgcttctctcatggtttatcaccggaatggaaaggaggaaacggggagtgggggaaagggcgaagccaccagaagcagctgcggcattttgctgactattcgcccatggagccggtttgccatccagtgatgccagagtcccggcgcgacagaaagcaggactcccaagatcttcctcctgctgcattttaggcactgaaccccaatcccgaccgtatgttaacactgaattctgagtaggagttttgttttggcagtgtgacgactgcgcatgctcggaaaggggacgcaagtccgagatcccaaacgcggtacagaccaaaccgcagtccacgttacggatcggcttactccgcggagttggcctcatttctgcacagtcggcgctccctgtagtttctcctctcgaacgccaggtggagcaaccggccggataccgccacagccctggcaggcggcgctgtgatgcctgagctgatcctgtatgttgcaatcactctatccgtggctgagcgactcgttggcccgggtcacgcatgcgctgagccttcctttcgctcttcccgctgctccgcccctctctgtcttctctgcagtgggagcagctctcctgccacagctcctcaccccctgaaaatgttcgcctgctccaagtttgtctccactccctccttggtcaagagcacctcacagctgctgagccgtccgctatctgcagtggtgctgaaacgaccggagatactgacagatgagagcctcagcagcttggcagtctcatgtccccttacctcacttgtctctagccgcagcttccaaaccagcgccatttcaagggacatcgacacagcagccaagttcattggagctggggctgccacagttggggtggctggttctggggctgggattggaactgtgtttgggagcctcatcattggttatgccaggaacccttctctgaagcaacagctcttctcctacgccattctgggctttgccctctcggaggccatggggctcttttgtctgatggtagcctttctcatcctctttgccatgtgaaggagccgtctccacctcccatagttctcccgcgtctggttggccccgtgtgttccttttcctatacctccccaggcagcctggggaacgtggttggctcagggtttgacagagaaaagacaaataaatactgtattaataagaaaaaaaaacaaaaaaaaaactcggggggctctctttgccgggggggggaacacacgcggtcctgacatgggcccttggtcatagcttgtttcctgacccagctttctttgtccaaaggtggtaaatctcgccaggtcccccctatggggagtcggtattaattcggataaagccaggtaacctgccttgttccgacaacggnccacgacctaaa

SEQ ID NO: 256163 - DNA, 2028 bp, Homo sapiens
gtcgctcggggtcccgggaaattgctccgtgggctttcagcggcggtttttatcgccggccggggtgtgcctgtctgcggctcgcctctcctccgggaccgtaaagctgctgccgtgatttatcctccccttctcccaaatccgattaaatggaggagctcggggccggggcgccgcggggcccgggagccgggagggggcggcgggaaggacggggccaaggaggggaggacaaacggcccctcagagagtggcggatttgcctttatttacagccgcggctttctttttattttttattttttatggggtttggtgagcttttcccgtctttctcgtgctgcgttcaagcacgatgcagggacggcaggggtttggaactggataggccttgtcgccctgttccaaagggcagggcaggtcctgtctgggagacaaggaggcctaggaaagatgagggccaggaagcctcccccacctccttccatcaggggaagggcgagcgaaaggggagagaaaacccacgttcaggagagcatgggggcgggaggggagggcgctgcttatcccaactcgcgtagttgaaacctgagcagaggctcgggcaagcctggagtgacctcgcaaccttacagcgggtcgcaggtgcccgttattcctagactgtcccaggagccaggaaagagggattcggatcatatttaaccctatcttctggctcgcagatgctgcttctctcatggtttatcaccggaatggaaaggaggaaacggggagtgggggaaagggcgaagccaccagaagcagctgcggcattttgctgactattcgcccatggagccggtttgccatccagtgatgccagagtcccggcgcgacagaaagcaggactcccaagatcttcctcctgctgcattttaggcactgaaccccaatcccgaccgtatgttaacactgaattctgagtaggagttttgttttggcagtgtgacgactgcgcatgctcggaaaggggacgcaagtccgagatcccaaacgcggtacagaccaaaccgcagtccacgttacggatcggcttactccgcggagttggcctcatttctgcacagtcggcgctccctgtagtttctcctctcgaacgccaggtggagcaaccggccggataccgccacagccctggcaggcggcgctgtgatgcctgagctgatcctgtatgttgcaatcactctatccgtggctgagcgactcgttggcccgggtcacgcatgcgctgagccttcctttcgctcttcccgctgctccgcccctctctgtcttctctgcagtgggagcagctctcctgccacagctcctcaccccctgaaaatgttcgcctgctccaagtttgtctccactccctccttggtcaagagcacctcacagctgctgagccgtccgctatctgcagtggtgctgaaacgaccggagatactgacagatgagagcctcagcagcttggcagtctcatgtccccttacctcacttgtctctagccgcagcttccaaaccagcgccatttcaagggacatcgacacagcagccaagttcattggagctggggctgccacagttggggtggctggttctggggctgggattggaactgtgtttgggagcctcatcattggttatgccaggaacccttctctgaagcaacagctcttctcctacgccattctgggctttgccctctcggaggccatggggctcttttgtctgatggtagcctttctcatcctctttgccatgtgaaggagccgtctccacctcccatagttctcccgcgtctggttggccccgtgtgttccttttcctatacctccccaggcagcctggggaacgtggttggctcagggtttgacagagaaaagacaaataaatactgtattaataagaactttgctgcggccgattaggctactggccattcccctttaggagcggatcaatcaatgcccgcgtttaacacgcggacgggccggcgtccct

SEQ ID NO: 256164 - DNA, 2053 bp, Homo sapiens
gtcgctcggggtcccgggaaattgctccgtgggctttcagcggcggtttttatcgccggccggggtgtgcctgtctgcggctcgcctctcctccgggaccgtaaagctgctgccgtgatttatcctccccttctcccaaatccgattaaatggaggagctcggggccggggcgccgcggggcccgggagccgggagggggcggcgggaaggacggggccaaggaggggaggacaaacggcccctcagagagtggcggatttgcctttatttacagccgcggctttctttttattttttattttttatggggtttggtgagcttttcccgtctttctcgtgctgcgttcaagcacgatgcagggacggcaggggtttggaactggataggccttgtcgccctgttccaaagggcagggcaggtcctgtctgggagacaaggaggcctaggaaagatgagggccaggaagcctcccccacctccttccatcaggggaagggcgagcgaaaggggagagaaaacccacgttcaggagagcatgggggcgggaggggagggcgctgcttatcccaactcgcgtagttgaaacctgagcagaggctcgggcaagcctggagtgacctcgcaaccttacagcgggtcgcaggtgcccgttattcctagactgtcccaggagccaggaaagagggattcggatcatatttaaccctatcttctggctcgcagatgctgcttctctcatggtttatcaccggaatggaaaggaggaaacggggagtgggggaaagggcgaagccaccagaagcagctgcggcattttgctgactattcgcccatggagccggtttgccatccagtgatgccagagtcccggcgcgacagaaagcaggactcccaagatcttcctcctgctgcattttaggcactgaaccccaatcccgaccgtatgttaacactgaattctgagtaggagttttgttttggcagtgtgacgactgcgcatgctcggaaaggggacgcaagtccgagatcccaaacgcggtacagaccaaaccgcagtccacgttacggatcggcttactccgcggagttggcctcatttctgcacagtcggcgctccctgtagtttctcctctcgaacgccaggtggagcaaccggccggataccgccacagccctggcaggcggcgctgtgatgcctgagctgatcctgtatgttgcaatcactctatccgtggctgagcgactcgttggcccgggtcacgcatgcgctgagccttcctttcgctcttcccgctgctccgcccctctctgtcttctctgcagtgggagcagctctcctgccacagctcctcaccccctgaaaatgttcgcctgctccaagtttgtctccactccctccttggtcaagagcacctcacagctgctgagccgtccgctatctgcagtggtgctgaaacgaccggagatactgacagatgagagcctcagcagcttggcagtctcatgtccccttacctcacttgtctctagccgcagcttccaaaccagcgccatttcaagggacatcgacacagcagccaagttcattggagctggggctgccacagttggggtggctggttctggggctgggattggaactgtgtttgggagcctcatcattggttatgccaggaacccttctctgaagcaacagctcttctcctacgccattctgggctttgccctctcggaggccatggggctcttttgtctgatggtagcctttctcatcctctttgccatgtgaaggagccgtctccacctcccatagttctcccgcgtctggttggccccgtgtgttccttttcctatacctccccaggcagcctggggaacgtggttggctcagggtttgacagagaaaagacaaataaatactgtattaataagaatgtttcttgagtctcctgtgtatatttcttttccacagttggctgagtgccttcgtgagagtacaaggcccgaagggtagtgatggtgctaaactcaacatggatttggctgagctc

SEQ ID NO: 256165 - DNA, 2011 bp, Homo sapiens
gtcgctcggggtcccgggaaattgctccgtgggctttcagcggcggtttttatcgccggccggggtgtgcctgtctgcggctcgcctctcctccgggaccgtaaagctgctgccgtgatttatcctccccttctcccaaatccgattaaatggaggagctcggggccggggcgccgcggggcccgggagccgggagggggcggcgggaaggacggggccaaggaggggaggacaaacggcccctcagagagtggcggatttgcctttatttacagccgcggctttctttttattttttattttttatggggtttggtgagcttttcccgtctttctcgtgctgcgttcaagcacgatgcagggacggcaggggtttggaactggataggccttgtcgccctgttccaaagggcagggcaggtcctgtctgggagacaaggaggcctaggaaagatgagggccaggaagcctcccccacctccttccatcaggggaagggcgagcgaaaggggagagaaaacccacgttcaggagagcatgggggcgggaggggagggcgctgcttatcccaactcgcgtagttgaaacctgagcagaggctcgggcaagcctggagtgacctcgcaaccttacagcgggtcgcaggtgcccgttattcctagactgtcccaggagccaggaaagagggattcggatcatatttaaccctatcttctggctcgcagatgctgcttctctcatggtttatcaccggaatggaaaggaggaaacggggagtgggggaaagggcgaagccaccagaagcagctgcggcattttgctgactattcgcccatggagccggtttgccatccagtgatgccagagtcccggcgcgacagaaagcaggactcccaagatcttcctcctgctgcattttaggcactgaaccccaatcccgaccgtatgttaacactgaattctgagtaggagttttgttttggcagtgtgacgactgcgcatgctcggaaaggggacgcaagtccgagatcccaaacgcggtacagaccaaaccgcagtccacgttacggatcggcttactccgcggagttggcctcatttctgcacagtcggcgctccctgtagtttctcctctcgaacgccaggtggagcaaccggccggataccgccacagccctggcaggcggcgctgtgatgcctgagctgatcctgtatgttgcaatcactctatccgtggctgagcgactcgttggcccgggtcacgcatgcgctgagccttcctttcgctcttcccgctgctccgcccctctctgtcttctctgcagtgggagcagctctcctgccacagctcctcaccccctgaaaatgttcgcctgctccaagtttgtctccactccctccttggtcaagagcacctcacagctgctgagccgtccgctatctgcagtggtgctgaaacgaccggagatactgacagatgagagcctcagcagcttggcagtctcatgtccccttacctcacttgtctctagccgcagcttccaaaccagcgccatttcaagggacatcgacacagcagccaagttcattggagctggggctgccacagttggggtggctggttctggggctgggattggaactgtgtttgggagcctcatcattggttatgccaggaacccttctctgaagcaacagctcttctcctacgccattctgggctttgccctctcggaggccatggggctcttttgtctgatggtagcctttctcatcctctttgccatgtgaaggagccgtctccacctcccatagttctcccgcgtctggttggccccgtgtgttccttttcctatacctccccaggcagcctggggaacgtggttggctcagggtttgacagagaaaagacaaataaatactgtattaataagaaaaaaaaaaggaccaaaaaagcaaaacaaaaaacaccatcaaacaaacaacacacaaaacaaacaaaacaaaacgg

SEQ ID NO: 256166 - DNA, 907 bp, Homo sapiens
  misc_feature (40)..(40): n is a, c, g, or t
cagtaactataacggtccggtttggtagcgaggctgggtngctctcctgccacagctcctcaccccctgaaaatgttcgcctgctccaagtttgtctccactccctccttggtcaagagcacctcacagctgctgagccgtccgctatctgcagtggtgctgaaacgaccggagatactgacagatgagagcctcagcagcttggcagtctcatgtccccttacctcacttgtctctagccgcagcttccaaaccagcgccatttcaagggacatcgacacagcagccaagttcattggagctggggctgccacagttggggtggctggttctggggctgggattggaactgtgtttgggagcctcatcattggttatgccaggaacccttctctgaagcaacagctcttctcctacgccattctgggctttgccctctcggaggccatggggctcttttgtctgatggtagcctttctcatcctctttgccatgtgaaggagccgtctccacctcccatagttctcccgcgtctggttggccccgtgtgttccttttcctatacctccccaggcagcctggggaacgtggttggctcagggtttgacagagaaaagacaaataaatactgtattaataagaaaaaaaaacaaaaaaaaaactcgaaactagtcctctcgtaggacggagggtacgtgcgtctagagaccgcatatcccagggatttgacgaaggcgtgtcgcgctgcagtgcaatgtaggccttaggcaagcctaagggttggaccggatagtacggaccgggagcgcatggggcccaacccacgccggggtcggaccccggcaagttcccagggagggccgaggaccctaaacctccggggctggacccagcggggcatggcacg

SEQ ID NO: 256167 - DNA, 963 bp, Homo sapiens
ttggtaggttagcagtattaaatggtttttcaaagtatgatggatttattggcacataaccctatggtaagttgaggagcatctgtatatatttcccttgttgagtgaggcaaatgcttctgaggcttagatttcttcttgttctcaagagctataaaaggatatagcaaggttggatgctcccttatggcccaaaggaagtagactttctttccttaaagcaaagtctgagaagcaagagaaatggtgtggttctttaatttagactttgctaaaaggaagaatgatccaaaactctaacgtacatgtgaagatggaaaggccatgagaggaaagaaaatcttgtctgatgatgtaacaacgtggcatagttctgaaactcctctccagtcttccttgaccttcctgcccctgtatgtcattcctgctaggtcaagagcacctcacagctgctgagccgtccgctatctgcagtggtgctgaaacgaccggagatactgacagatgagagcctcagcagcttggcagtctcatgtccccttacctcacttgtctctagccgcagcttccaaaccagcgccatttcaagggacatcgacacagcagccaagttcattggagctggggctgccacagttggggtggctggttctggggctgggattggaactgtgtttgggagcctcatcattggttatgccaggaacccttctctgaagcaacagctcttctcctacgccattctgggctttgccctctcggaggccatggggctcttttgtctgatggtagcctttctcatcctctttgccatgtgaaggagccgtctccacctcccatagttctcccgcgtctggttggccccgtgtgttccttttcctatacctccccaggcagcctggggaacgtggttggctcagggtttgacagagaaaagacaaataaatactgtattaataagaa

SEQ ID NO: 256168 - DNA, 1121 bp, Homo sapiens
  misc_feature (138)..(138): n is a, c, g, or t
  misc_feature (1006)..(1006): n is a, c, g, or t
agtgacagtggaaacagaaagcctattagccaacattttaagccagaacttgaagttgctactgacagcaatcttctcaggcaagtagcaggccatgccaggtgaaaataatttaaaatgttatgctatttcaaatanaatttgcctgtcacagaattaagaaaaagtgagctcagccaaatccatgttgagtttagcaccatcactacccttcgggccttgtactctcacgaaggcactcagccaactgtggaaaagaaatatacacaggagactcaagaaacatcttattaatacagtatttatttgtcttttctctgtcttctctgcagtgggagcagctctcctgccacagctcctcaccccctgaaaatgttcgcctgctccaagtttgtctccactccctccttggtcaagagcacctcacagctgctgagccgtccgctatctgcagtggtgctgaaacgaccggagatactgacagatgagagcctcagcagcttggcagtctcatgtccccttacctcacttgtctctagccgcagcttccaaaccagcgccatttcaagggacatcgacacagcagccaagttcattggagctggggctgccacagttggggtggctggttctggggctgggattggaactgtgtttgggagcctcatcattggttatgccaggaacccttctctgaagcaacagctcttctcctacgccattctgggctttgccctctcggaggccatggggctcttttgtctgatggtagcctttctcatcctctttgccatgtgaaggagccgtctccacctcccatagttctcccgcgtctggttggccccgtgtgttccttttcctatacctccccaggcagcctggggaacgtggttggctcagggtttgacagagaaaagacaaataaatactgtattaataagaagtattaatacgaaaaaaacaacaacaaaaaaaacaattttggcgccctcgccccgaaaatttnaacccattgttggggcgcgccaagaaggcaactgccacggtcggagaccggcacacagggggggtcccaaaaagcgcggcggcgtgacaaccgggtgggccggctccggccccac

SEQ ID NO: 256169 - DNA, 865 bp, Homo sapiens
ccaaggccatgggctttaggtggagatggaggacacttaatacactgtatgctatagtgctccagcttttgccactggcagcacatgcccctgtgcactgctgctaactggtattacttggcctagtctactgacttcagttggaagcatttagtcctaggaagatgatctccttggggcagcaagaatagactagggcctcagtcttacacttcttgaccacacctgaatcttaaaggcatttgaagtctacatcctacgttaaaaggttctacttgccagcattttagggcgttaaacaattttctgtttgggggagaaacaatgggatttggcagcttaaagggttttaaatggtacaaaagttaccaaagcaaaaaactttaccttctacctgcctctttttcacagagcctcagcagcttggcagtctcatgtccccttacctcacttgtctctagccgcagcttccaaaccagcgccatttcaagggacatcgacacagcagccaagttcattggagctggggctgccacagttggggtggctggttctggggctgggattggaactgtgtttgggagcctcatcattggttatgccaggaacccttctctgaagcaacagctcttctcctacgccattctgggctttgccctctcggaggccatggggctcttttgtctgatggtagcctttctcatcctctttgccatgtgaaggagccgtctccacctcccatagttctcccgcgtctggttggccccgtgtgttccttttcctatacctccccaggcagcctggggaacgtggttggctcagggtttgacagagaaaagacaaataaatactgtattaataagaa

SEQ ID NO: 256170 - DNA, 2257 bp, Homo sapiens
  misc_feature (2077)..(2077): n is a, c, g, or t
  misc_feature (2081)..(2081): n is a, c, g, or t
  misc_feature (2092)..(2095): n is a, c, g, or t
  misc_feature (2097)..(2097): n is a, c, g, or t
  misc_feature (2099)..(2100): n is a, c, g, or t
  misc_feature (2103)..(2104): n is a, c, g, or t
  misc_feature (2106)..(2106): n is a, c, g, or t
  misc_feature (2108)..(2111): n is a, c, g, or t
  misc_feature (2122)..(2122): n is a, c, g, or t
  misc_feature (2126)..(2126): n is a, c, g, or t
  misc_feature (2171)..(2171): n is a, c, g, or t
gtcgctcggggtcccgggaaattgctccgtgggctttcagcggcggtttttatcgccggccggggtgtgcctgtctgcggctcgcctctcctccgggaccgtaaagctgctgccgtgatttatcctccccttctcccaaatccgattaaatggaggagctcggggccggggcgccgcggggcccgggagccgggagggggcggcgggaaggacggggccaaggaggggaggacaaacggcccctcagagagtggcggatttgcctttatttacagccgcggctttctttttattttttattttttatggggtttggtgagcttttcccgtctttctcgtgctgcgttcaagcacgatgcagggacggcaggggtttggaactggataggccttgtcgccctgttccaaagggcagggcaggtcctgtctgggagacaaggaggcctaggaaagatgagggccaggaagcctcccccacctccttccatcaggggaagggcgagcgaaaggggagagaaaacccacgttcaggagagcatgggggcgggaggggagggcgctgcttatcccaactcgcgtagttgaaacctgagcagaggctcgggcaagcctggagtgacctcgcaaccttacagcgggtcgcaggtgcccgttattcctagactgtcccaggagccaggaaagagggattcggatcatatttaaccctatcttctggctcgcagatgctgcttctctcatggtttatcaccggaatggaaaggaggaaacggggagtgggggaaagggcgaagccaccagaagcagctgcggcattttgctgactattcgcccatggagccggtttgccatccagtgatgccagagtcccggcgcgacagaaagcaggactcccaagatcttcctcctgctgcattttaggcactgaaccccaatcccgaccgtatgttaacactgaattctgagtaggagttttgttttggcagtgtgacgactgcgcatgctcggaaaggggacgcaagtccgagatcccaaacgcggtacagaccaaaccgcagtccacgttacggatcggcttactccgcggagttggcctcatttctgcacagtcggcgctccctgtagtttctcctctcgaacgccaggtggagcaaccggccggataccgccacagccctggcaggcggcgctgtgatgcctgagctgatcctgtatgttgcaatcactctatccgtggctgagcgactcgttggcccgggtcacgcatgcgctgagccttcctttcgctcttcccgctgctccgcccctctctgtcttctctgcagtgggagcagctctcctgccacagctcctcaccccctgaaaatgttcgcctgctccaagtttgtctccactccctccttggtcaagagcacctcacagctgctgagccgtccgctatctgcagtggtgctgaaacgaccggagatactgacagatgagagcctcagcagcttggcagtctcatgtccccttacctcacttgtctctagccgcagcttccaaaccagcgccatttcaagggacatcgacacagcagccaagttcattggagctggggctgccacagttggggtggctggttctggggctgggattggaactgtgtttgggagcctcatcattggttatgccaggaacccttctctgaagcaacagctcttctcctacgccattctgggctttgccctctcggagaactatgggaggtggagacggctccttcacatggcaaagaggatgagaaaggctaccatcagacaaaagagccccatggcctccgagagggcaaagcccagaatggcgtaggagaagagctgttgcttcagagaagggttcctggcataaccaatgatgaggctcccaaacacagttccaatcccagccccagaaccagccaccccaactgtgggcagccccagctccaatgaacttgggctgctgtgttcgatgttcccttgaaatgggcgctggttttggaagctgcggctagagacaagtgaggtaagggggacatgagactgccaagctgctgagnctcncatctgcagtnnnncngnncgnncngnnnnactgcagatgngagnctcagcagctgtgaggtgctcttgaccaaggagggagtggagacnaacttggagcaggcgaacattcttcagggggctgaggagctgtggcaggagagctgctcccactgcagagaagacagagagggggc

SEQ ID NO: 256171 - DNA, 1861 bp, Homo sapiens
gtcgctcggggtcccgggaaattgctccgtgggctttcagcggcggtttttatcgccggccggggtgtgcctgtctgcggctcgcctctcctccgggaccgtaaagctgctgccgtgatttatcctccccttctcccaaatccgattaaatggaggagctcggggccggggcgccgcggggcccgggagccgggagggggcggcgggaaggacggggccaaggaggggaggacaaacggcccctcagagagtggcggatttgcctttatttacagccgcggctttctttttattttttattttttatggggtttggtgagcttttcccgtctttctcgtgctgcgttcaagcacgatgcagggacggcaggggtttggaactggataggccttgtcgccctgttccaaagggcagggcaggtcctgtctgggagacaaggaggcctaggaaagatgagggccaggaagcctcccccacctccttccatcaggggaagggcgagcgaaaggggagagaaaacccacgttcaggagagcatgggggcgggaggggagggcgctgcttatcccaactcgcgtagttgaaacctgagcagaggctcgggcaagcctggagtgacctcgcaaccttacagcgggtcgcaggtgcccgttattcctagactgtcccaggagccaggaaagagggattcggatcatatttaaccctatcttctggctcgcagatgctgcttctctcatggtttatcaccggaatggaaaggaggaaacggggagtgggggaaagggcgaagccaccagaagcagctgcggcattttgctgactattcgcccatggagccggtttgccatccagtgatgccagagtcccggcgcgacagaaagcaggactcccaagatcttcctcctgctgcattttaggcactgaaccccaatcccgaccgtatgttaacactgaattctgagtaggagttttgttttggcagtgtgacgactgcgcatgctcggaaaggggacgcaagtccgagatcccaaacgcggtacagaccaaaccgcagtccacgttacggatcggcttactccgcggagttggcctcatttctgcacagtcggcgctccctgtagtttctcctctcgaacgccaggtggagcaaccggccggataccgccacagccctggcaggcggcgctgtgatgcctgagctgatcctgtatgttgcaatcactctatccgtggctgagcgactcgttggcccgggtcacgcatgcgctgagccttcctttcgctcttcccgctgctccgcccctctctgtcttctctgcagtgggagcagctctcctgccacagctcctcaccccctgaaaatgttcgcctgctccaagtttgtctccactccctccttggtcaagagcacctcacagctgctgagccgtccgctatctgcagtggtgctgaaacgaccggagatactgacagatgagagcctcagcagcttggcagtctcatgtccccttacctcacttgtctctagccgcagcttccaaaccagcgccatttcaagggacatcgacacagcagccaagttcattggagctggggctgccacagttggggtggctggttctggggctgggattggaactgtgtttgggagcctcatcattggttatgccaggaacccttctctgaagcaacagctcttctcctacgccattctgggctttgccctctcggagaactatgggaggtggagacggctccttcacatggcaaagaggatgagaaaggctaccatcagacaaaagagccccatggcctccgagagggcgagcggccgcgaatttagtagtagtaggcagc

SEQ ID NO: 256172 - DNA, 2019 bp, Homo sapiens
gtcgctcggggtcccgggaaattgctccgtgggctttcagcggcggtttttatcgccggccggggtgtgcctgtctgcggctcgcctctcctccgggaccgtaaagctgctgccgtgatttatcctccccttctcccaaatccgattaaatggaggagctcggggccggggcgccgcggggcccgggagccgggagggggcggcgggaaggacggggccaaggaggggaggacaaacggcccctcagagagtggcggatttgcctttatttacagccgcggctttctttttattttttattttttatggggtttggtgagcttttcccgtctttctcgtgctgcgttcaagcacgatgcagggacggcaggggtttggaactggataggccttgtcgccctgttccaaagggcagggcaggtcctgtctgggagacaaggaggcctaggaaagatgagggccaggaagcctcccccacctccttccatcaggggaagggcgagcgaaaggggagagaaaacccacgttcaggagagcatgggggcgggaggggagggcgctgcttatcccaactcgcgtagttgaaacctgagcagaggctcgggcaagcctggagtgacctcgcaaccttacagcgggtcgcaggtgcccgttattcctagactgtcccaggagccaggaaagagggattcggatcatatttaaccctatcttctggctcgcagatgctgcttctctcatggtttatcaccggaatggaaaggaggaaacggggagtgggggaaagggcgaagccaccagaagcagctgcggcattttgctgactattcgcccatggagccggtttgccatccagtgatgccagagtcccggcgcgacagaaagcaggactcccaagatcttcctcctgctgcattttaggcactgaaccccaatcccgaccgtatgttaacactgaattctgagtaggagttttgttttggcagtgtgacgactgcgcatgctcggaaaggggacgcaagtccgagatcccaaacgcggtacagaccaaaccgcagtccacgttacggatcggcttactccgcggagttggcctcatttctgcacagtcggcgctccctgtagtttctcctctcgaacgccaggtggagcaaccggccggataccgccacagccctggcaggcggcgctgtgatgcctgagctgatcctgtatgttgcaatcactctatccgtggctgagcgactcgttggcccgggtcacgcatgcgctgagccttcctttcgctcttcccgctgctccgcccctctctgtcttctctgcagtgggagcagctctcctgccacagctcctcaccccctgaaaatgttcgcctgctccaagtttgtctccactccctccttggtcaagagcacctcacagctgctgagccgtccgctatctgcagtggtgctgaaacgaccggagatactgacagatgagagcctcagcagcttggcagtctcatgtccccttacctcacttgtctctagccgcagcttccaaaccagcgccatttcaagggacatcgacacagcagccaagttcattggagctggggctgccacagttggggtggctggttctggggctgggattggaactgtgtttgggagcctcatcattggttatgccaggaacccttctctgaagcaactggtaggtcctgccattaagctctaacatcaagcagctgaatactttctccctcattgagccttcctccattatcatccctctcccgatgataaaccactggaatatacctaagtaaaaaaaatggtggctttctttaccaagggcttcccagagacacaaacaagcaacccccaggtttctgaagcatccccataaaatacatcagaaggcccttcccttacctgtcagcaccacgggcacaggaaccatttccttttttccctaccagcctgcgtcctgtgcctggccagaagctcataaaaccaaaacagggcaatgtcc

SEQ ID NO: 256173 - DNA, 1791 bp, Homo sapiens
gtcgctcggggtcccgggaaattgctccgtgggctttcagcggcggtttttatcgccggccggggtgtgcctgtctgcggctcgcctctcctccgggaccgtaaagctgctgccgtgatttatcctccccttctcccaaatccgattaaatggaggagctcggggccggggcgccgcggggcccgggagccgggagggggcggcgggaaggacggggccaaggaggggaggacaaacggcccctcagagagtggcggatttgcctttatttacagccgcggctttctttttattttttattttttatggggtttggtgagcttttcccgtctttctcgtgctgcgttcaagcacgatgcagggacggcaggggtttggaactggataggccttgtcgccctgttccaaagggcagggcaggtcctgtctgggagacaaggaggcctaggaaagatgagggccaggaagcctcccccacctccttccatcaggggaagggcgagcgaaaggggagagaaaacccacgttcaggagagcatgggggcgggaggggagggcgctgcttatcccaactcgcgtagttgaaacctgagcagaggctcgggcaagcctggagtgacctcgcaaccttacagcgggtcgcaggtgcccgttattcctagactgtcccaggagccaggaaagagggattcggatcatatttaaccctatcttctggctcgcagatgctgcttctctcatggtttatcaccggaatggaaaggaggaaacggggagtgggggaaagggcgaagccaccagaagcagctgcggcattttgctgactattcgcccatggagccggtttgccatccagtgatgccagagtcccggcgcgacagaaagcaggactcccaagatcttcctcctgctgcattttaggcactgaaccccaatcccgaccgtatgttaacactgaattctgagtaggagttttgttttggcagtgtgacgactgcgcatgctcggaaaggggacgcaagtccgagatcccaaacgcggtacagaccaaaccgcagtccacgttacggatcggcttactccgcggagttggcctcatttctgcacagtcggcgctccctgtagtttctcctctcgaacgccaggtggagcaaccggccggataccgccacagccctggcaggcggcgctgtgatgcctgagctgatcctgtatgttgcaatcactctatccgtggctgagcgactcgttggcccgggtcacgcatgcgctgagccttcctttcgctcttcccgctgctccgcccctctctgtcttctctgcagtgggagcagctctcctgccacagctcctcaccccctgaaaatgttcgcctgctccaagtttgtctccactccctccttggtcaagagcacctcacagctgctgagccgtccgctatctgcagtggtgctgaaacgaccggagatactgacagatgagagcctcagcagcttggcagtctcatgtccccttacctcacttgtctctagccgcagcttccaaaccagcgccatttcaagggacatcgacacagcagccaagttcattggagctggggctgccacagttggggtggctggttctggggctgggattggaactgtgtttgggagcctcatcattggttatgcaggaccctctctgagcacagctcttctctacgcattttggcttgctctcggagccatgggctctttgcttaggtagctgtcaacctttgcatgaagggcgttcactcatagttccggc

SEQ ID NO: 256174 - DNA, 670 bp, Homo sapiens
  misc_feature (490)..(490): n is a, c, g, or t
  misc_feature (494)..(494): n is a, c, g, or t
  misc_feature (505)..(508): n is a, c, g, or t
  misc_feature (510)..(510): n is a, c, g, or t
  misc_feature (512)..(513): n is a, c, g, or t
  misc_feature (516)..(517): n is a, c, g, or t
  misc_feature (519)..(519): n is a, c, g, or t
  misc_feature (521)..(524): n is a, c, g, or t
  misc_feature (535)..(535): n is a, c, g, or t
  misc_feature (539)..(539): n is a, c, g, or t
  misc_feature (584)..(584): n is a, c, g, or t
attcgcggccgcgtcgactttttttttaaacatcttattaatacagtatttatttgtcttttctctgtcaaaccctgagccaaccacgttccccaggctgcctggggaggtataggaaaaggaacacacggggccaaccagacgcgggagaactatgggaggtggagacggctccttcacatggcaaagaggatgagaaaggctaccatcagacaaaagagccccatggcctccgagagggcaaagcccagaatggcgtaggagaagagctgttgcttcagagaagggttcctggcataaccaatgatgaggctcccaaacacagttccaatcccagccccagaaccagccaccccaactgtgggcagccccagctccaatgaacttgggctgctgtgttcgatgttcccttgaaatgggcgctggttttggaagctgcggctagagacaagtgaggtaagggggacatgagactgccaagctgctgagnctcncatctgcagtnnnncngnncgnncngnnnnactgcagatgngagnctcagcagctgtgaggtgctcttgaccaaggagggagtggagacnaacttggagcaggcgaacattcttcagggggctgaggagctgtggcaggagagctgctcccactgcagagaagacagagagggggc

SEQ ID NO: 256175 - DNA, 1190 bp, Homo sapiens
  misc_feature (1010)..(1010): n is a, c, g, or t
  misc_feature (1014)..(1014): n is a, c, g, or t
  misc_feature (1025)..(1028): n is a, c, g, or t
  misc_feature (1030)..(1030): n is a, c, g, or t
  misc_feature (1032)..(1033): n is a, c, g, or t
  misc_feature (1036)..(1037): n is a, c, g, or t
  misc_feature (1039)..(1039): n is a, c, g, or t
  misc_feature (1041)..(1044): n is a, c, g, or t
  misc_feature (1055)..(1055): n is a, c, g, or t
  misc_feature (1059)..(1059): n is a, c, g, or t
  misc_feature (1104)..(1104): n is a, c, g, or t
gtcacatgtagtcccccctggggataagaaattagtggcgctgcgcgaagagatcacgaattgcccgcaggagtggccgcaggagtatttttcgtaggcgcgacgacgggcatcattagtgcgccgcgtcatgtggtggactccaccctgtagtaggacaccgtgtgagagagtttgtttattatattgttcccctggtgaggagggcgctcgttgataaatcgcgcgcgggggggggtgggttggtggccccgattgtgtgtcgcgcccctgagatgcgtgtatatgtggtgtcgtctctgtcgcggatggtgttccccggggtggcgctcgatttttcccccgctgttgacgcgccgtgtggttgtagaaacgctgcgtggccccgtggccgctggtgttataattatacggcctcccctctttgtggggcccccttggtcccagagcggggggcgcgcggtggggggccccccggggggatcttttgggggcgcgcgcccccctctttttttttttttttttttttttttttttttttttttttttttttcttattaatacagtatttatttgtcttttctctgtcaaaccctgagccaaccacgttccccaggctgcctggggaggtataggaaaaggaacacacggggccaaccagacgcgggagaactatgggaggtggagacggctccttcacatggcaaagaggatgagaaaggctaccatcagacaaaagagccccatggcctccgagagggcaaagcccagaatggcgtaggagaagagctgttgcttcagagaagggttcctggcataaccaatgatgaggctcccaaacacagttccaatcccagccccagaaccagccaccccaactgtgggcagccccagctccaatgaacttgggctgctgtgttcgatgttcccttgaaatgggcgctggttttggaagctgcggctagagacaagtgaggtaagggggacatgagactgccaagctgctgagnctcncatctgcagtnnnncngnncgnncngnnnnactgcagatgngagnctcagcagctgtgaggtgctcttgaccaaggagggagtggagacnaacttggagcaggcgaacattcttcagggggctgaggagctgtggcaggagagctgctcccactgcagagaagacagagagggggc

SEQ ID NO: 256176 - DNA, 881 bp, Homo sapiens
  misc_feature (701)..(701): n is a, c, g, or t
  misc_feature (705)..(705): n is a, c, g, or t
  misc_feature (716)..(719): n is a, c, g, or t
  misc_feature (721)..(721): n is a, c, g, or t
  misc_feature (723)..(724): n is a, c, g, or t
  misc_feature (727)..(728): n is a, c, g, or t
  misc_feature (730)..(730): n is a, c, g, or t
  misc_feature (732)..(735): n is a, c, g, or t
  misc_feature (746)..(746): n is a, c, g, or t
  misc_feature (750)..(750): n is a, c, g, or t
  misc_feature (795)..(795): n is a, c, g, or t
ttcccccaatcctaaaaaccacggttaaccctggcgtttaaccggaatattaataaccgacccccccttataaggggagacccgcgccaaatatttaccccctttggaccaaaaaaactctggggtccaaggaaaccaacctatatgacccacatgggcccaatttccaataacaccctctttttcccgcccccccgacaaaaaaaagcccccgagatttttttttttttttttttttttttttcttattaatacagtatttatttgtcttttctctgtcaaaccctgagccaaccacgttccccaggctgcctggggaggtataggaaaaggaacacacggggccaaccagacgcgggagaactatgggaggtggagacggctccttcacatggcaaagaggatgagaaaggctaccatcagacaaaagagccccatggcctccgagagggcaaagcccagaatggcgtaggagaagagctgttgcttcagagaagggttcctggcataaccaatgatgaggctcccaaacacagttccaatcccagccccagaaccagccaccccaactgtgggcagccccagctccaatgaacttgggctgctgtgttcgatgttcccttgaaatgggcgctggttttggaagctgcggctagagacaagtgaggtaagggggacatgagactgccaagctgctgagnctcncatctgcagtnnnncngnncgnncngnnnnactgcagatgngagnctcagcagctgtgaggtgctcttgaccaaggagggagtggagacnaacttggagcaggcgaacattcttcagggggctgaggagctgtggcaggagagctgctcccactgcagagaagacagagagggggc

SEQ ID NO: 256177 - DNA, 567 bp, Homo sapiens
attcgcggccgcgtcgactttttttttaaacatcttattaatacagtatttatttgtcttttctctgtcaaaccctgagccaaccacgttccccaggctgcctggggaggtataggaaaaggaacacacggggccaaccagacgcgggagaactatgggaggtggagacggctccttcacatggcaaagaggatgagaaaggctaccatcagacaaaagagccccatggcctccgagagggcaaagcccagaatggcgtaggagaagagctgttgcttcagagaagggttcctggcataaccaatgatgtagaaggagaagagaaaagactgaatttctagttcacacaaagaaaaggataaatatctaagatgggctcagggagaatccccctcttcaagattatctcacataataaagaagcttttagggtaacaccatcatgcccaaattcttgccctgattccccaaaggctctacaggaactgaatgaagggggagcaggcaatctaaaatcctgtaacatggcccaggtatttggcccttaatcgaggggaaccgagctcg

SEQ ID NO: 256178 - DNA, 1668 bp, Homo sapiens
gtcgctcggggtcccgggaaattgctccgtgggctttcagcggcggtttttatcgccggccggggtgtgcctgtctgcggctcgcctctcctccgggaccgtaaagctgctgccgtgatttatcctccccttctcccaaatccgattaaatggaggagctcggggccggggcgccgcggggcccgggagccgggagggggcggcgggaaggacggggccaaggaggggaggacaaacggcccctcagagagtggcggatttgcctttatttacagccgcggctttctttttattttttattttttatggggtttggtgagcttttcccgtctttctcgtgctgcgttcaagcacgatgcagggacggcaggggtttggaactggataggccttgtcgccctgttccaaagggcagggcaggtcctgtctgggagacaaggaggcctaggaaagatgagggccaggaagcctcccccacctccttccatcaggggaagggcgagcgaaaggggagagaaaacccacgttcaggagagcatgggggcgggaggggagggcgctgcttatcccaactcgcgtagttgaaacctgagcagaggctcgggcaagcctggagtgacctcgcaaccttacagcgggtcgcaggtgcccgttattcctagactgtcccaggagccaggaaagagggattcggatcatatttaaccctatcttctggctcgcagatgctgcttctctcatggtttatcaccggaatggaaaggaggaaacggggagtgggggaaagggcgaagccaccagaagcagctgcggcattttgctgactattcgcccatggagccggtttgccatccagtgatgccagagtcccggcgcgacagaaagcaggactcccaagatcttcctcctgctgcattttaggcactgaaccccaatcccgaccgtatgttaacactgaattctgagtaggagttttgttttggcagtgtgacgactgcgcatgctcggaaaggggacgcaagtccgagatcccaaacgcggtacagaccaaaccgcagtccacgttacggatcggcttactccgcggagttggcctcatttctgcacagtcggcgctccctgtagtttctcctctcgaacgccaggtggagcaaccggccggataccgccacagccctggcaggcggcgctgtgatgcctgagctgatcctctctcctgccacagctcctcaccccctgaaaatgttcgcctgctccaagtttgtctccactccctccttggtaaagctattaaagtcaaccttcaaaattcttagctctataagatgcttaataaacactgattgaattggagggttaagatgcccgggacataaacatagactcctttgctttggggatggtttaagacccttacattgattgactgattgactgattgattgactggagacagggtcttcctctgtcgcccagcctagagtacagtggtgcgatcacagcacactccaacctccacctccagcaattctcctgcctcagactcccaagcagatggaactacaggtgcatgccaccactcccagctaattttgcatttttagtaggcatctgtagtcccagctactcgggagctgaggcaggagaatggtgtgaacccagaggacg

SEQ ID NO: 256179 - DNA, 368 bp, Homo sapiens
tgctgttcagaggatcccgaggtgacagctggacagcacagagggggtggctggttctggggctgggattggaactgtgtttgggagcctcatcattggttatgccaggaacccttctctgaagcaacagctcttctcctacgccattctgggctttgccctctcggaggccatggggctcttttgtctgatggtagcctttctcatcctctttgccatgtgaaggagccgtctccacctcccatagttctcccgcgtctggttggccccgtgtgttccttttcctatacctccccaggcagcctggggaacgtggttggctcagggtttgacagagaaaagacaaataaatactgtattaataagaa

SEQ ID NO: 256180 - DNA, 731 bp, Homo sapiens
  misc_feature (551)..(551): n is a, c, g, or t
  misc_feature (555)..(555): n is a, c, g, or t
  misc_feature (566)..(569): n is a, c, g, or t
  misc_feature (571)..(571): n is a, c, g, or t
  misc_feature (573)..(574): n is a, c, g, or t
  misc_feature (577)..(578): n is a, c, g, or t
  misc_feature (580)..(580): n is a, c, g, or t
  misc_feature (582)..(585): n is a, c, g, or t
  misc_feature (596)..(596): n is a, c, g, or t
  misc_feature (600)..(600): n is a, c, g, or t
  misc_feature (645)..(645): n is a, c, g, or t
ttatacgaatcagctcgtaccctctatagggcctagggacatcgacacagcagccaagttcattggagctggggctgccacagttggggtggctggttctggggctgggattggaactgtgtttgggagcctcatcattggttatgccaggaacccttctctgaagcaacagctcttctcctacgccattctgggctttgccctctcggagaactatgggaggtggagacggctccttcacatggcaaagaggatgagaaaggctaccatcagacaaaagagccccatggcctccgagagggcaaagcccagaatggcgtaggagaagagctgttgcttcagagaagggttcctggcataaccaatgatgaggctcccaaacacagttccaatcccagccccagaaccagccaccccaactgtgggcagccccagctccaatgaacttgggctgctgtgttcgatgttcccttgaaatgggcgctggttttggaagctgcggctagagacaagtgaggtaagggggacatgagactgccaagctgctgagnctcncatctgcagtnnnncngnncgnncngnnnnactgcagatgngagnctcagcagctgtgaggtgctcttgaccaaggagggagtggagacnaacttggagcaggcgaacattcttcagggggctgaggagctgtggcaggagagctgctcccactgcagagaagacagagagggggc

SEQ ID NO: 256181 - DNA, 628 bp, Homo sapiens
  misc_feature (448)..(448): n is a, c, g, or t
  misc_feature (452)..(452): n is a, c, g, or t
  misc_feature (463)..(466): n is a, c, g, or t
  misc_feature (468)..(468): n is a, c, g, or t
  misc_feature (470)..(471): n is a, c, g, or t
  misc_feature (474)..(475): n is a, c, g, or t
  misc_feature (477)..(477): n is a, c, g, or t
  misc_feature (479)..(482): n is a, c, g, or t
  misc_feature (493)..(493): n is a, c, g, or t
  misc_feature (497)..(497): n is a, c, g, or t
  misc_feature (542)..(542): n is a, c, g, or t
catacggtcctgattatttgcttatattgttttgcccaatgacactgtagagtctaaagttgcagagtctgtaattggcgctcgtaggaagccaaccagacgcgggagaactatgggaggtggagacggctccttcacatggcaaagaggatgagaaaggctaccatcagacaaaagagccccatggcctccgagagggcaaagcccagaatggcgtaggagaagagctgttgcttcagagaagggttcctggcataaccaatgatgaggctcccaaacacagttccaatcccagccccagaaccagccaccccaactgtgggcagccccagctccaatgaacttgggctgctgtgttcgatgttcccttgaaatgggcgctggttttggaagctgcggctagagacaagtgaggtaagggggacatgagactgccaagctgctgagnctcncatctgcagtnnnncngnncgnncngnnnnactgcagatgngagnctcagcagctgtgaggtgctcttgaccaaggagggagtggagacnaacttggagcaggcgaacattcttcagggggctgaggagctgtggcaggagagctgctcccactgcagagaagacagagagggggc

SEQ ID NO: 256182 - DNA, 317 bp, Homo sapiens
attcgcggccgcgtcgactttttttttaaacatcttattaatacagtatttatttgtcttttctctgtcaaaccctgagccaaccacgttccccaggctgcctggggaggtataggaaaaggaacacacggggccaaccagacgcgggagaactatgggggtcaggagttcgagactagcctggccaacatggtgaaaccccttctctactaaaaatacagaaattagccaggcatggtggcagatgcctgtaatcccagctactcaggaggctgaggcaggaaaatcacttgaaccctgaaggcggaggttgcagt

SEQ ID NO: 256183 - DNA, 528 bp, Homo sapiens
ttcccccaatcctaaaaaccacggttaaccctggcgtttaaccggaatattaataaccgacccccccttataaggggagacccgcgccaaatatttaccccctttggaccaaaaaaactctggggtccaaggaaaccaacctatatgacccacatgggcccaatttccaataacaccctctttttcccgcccccccgacaaaaaaaagcccccgagatttttttttttttttttttttttttttcttattaatacagtatttatttgtcttttctctgtcaaaccctgagccaaccacgttccccaggctgcctggggaggtataggaaaaggaacacacggggccaaccagacgcgggagaactatgggggtcaggagttcgagactagcctggccaacatggtgaaaccccttctctactaaaaatacagaaattagccaggcatggtggcagatgcctgtaatcccagctactcaggaggctgaggcaggaaaatcacttgaaccctgaaggcggaggttgcagt

SEQ ID NO: 256184 - DNA, 184 bp, Homo sapiens
tctaaaatcctgtaacatggcccaggtataatcatgaccttcactaatggttcacccatctcattaccacaaattaagacctcttggcccagacacttaatatccagggcccaaataggatggaagggtctatctagagcagtgttttcaaactttaagcagaactccaatatagtaaacatct

SEQ ID NO: 256185 - DNA, 854 bp, Homo sapiens
  misc_feature (32)..(32): n is a, c, g, or t
  misc_feature (35)..(35): n is a, c, g, or t
  misc_feature (42)..(43): n is a, c, g, or t
  misc_feature (45)..(46): n is a, c, g, or t
  misc_feature (687)..(687): n is a, c, g, or t
  misc_feature (723)..(723): n is a, c, g, or t
aattcgcgggccgcgtcgactacggctgcganagncgacagnngnngctctgcagtgggagcagctctcctgccacagctcctcaccccctgaaaatgttcgcctgctccaagtttgtctccactccctccttggtcaagagcacctcacagctgctgagccgtccgctatctgcagtggtgctgaaacgaccggagatactgacagatgagagcctcagcagcttggcagtctcatgtccccttacctcacttgtctctagccgcagcttccaaaccagcgccatttcaagggacatcgacacagcagccaagttcattggagctggggctgccacagttggggtggctggttctggggctgggattggaactgtgtttgggagcctcatcattggttatgccaggaacccttctctgaagcaacagctcttctcctacgccattctgggctttgccctctcggaggccatggggctcttttgtctgatggtagcctttctcatcctctttgccatgtgaaggagccgtctccacctcccatagttctcccgcgtctggttggccccgtgtgttccttttcctatacctccccaggcagcctggggaacgtggttggctcagggtttgacagagaaaagacaaataaatactgtattaataagaacaaaacaaaaaaaaaaaacanttgtggggcgcgcggccggaaaagtttaaacacatnggtgggcggggccagtgaggaacaggccaggggccaagaaccggccagcaggggggttcccaaaaacggggccgggctgaacccagggggggctgtcaacggcacacccccccgcacggggaaatacaaag

SEQ ID NO: 256186 - DNA, 757 bp, Homo sapiens
tagctagtagagctgggtgtgaatcggccgaggcagtgggagcagctctcctgccacagctcctcaccccctgaaaatgttcgcctgctccaagtttgtctccactccctccttggtcaagagcacctcacagctgctgagccgtccgctatctgcagtggtgctgaaacgaccggagatactgacagatgagagcctcagcagcttggcagtctcatgtccccttacctcacttgtctctagccgcagcttccaaaccagcgccatttcaagggacatcgacacagcagccaagttcattggagctggggctgccacagttggggtggctggttctggggctgggattggaactgtgtttgggagcctcatcattggttatgccaggaacccttctctgaagcaacagctcttctcctacgccattctgggctttgccctctcggaggccatggggctcttttgtctgatggtagcctttctcatcctctttgccatgtgaaggagccgtctccacctcccatagttctcccgcgtctggttggccccgtgtgttccttttcctatacctccccaggcagcctggggaacgtggttggctcagggtttgacagagaaaagacaaataaatactgtattaataagaaaacacacccaaaaaaacaacatttttggggcgcccgcggtaaaaaaatttgggcccagaaaagtttttaacacccatcgtgggggccggcgggcaccaaggtatggaacc

SEQ ID NO: 256187 - DNA, 871 bp, Homo sapiens
  misc_feature (646)..(646): n is a, c, g, or t
gcctactactactaaattcgcggccgcgtcgacgcagctctcctgccacagctcctcaccccctgaaaatgttcgcctgctccaagtttgtctccactccctccttggtcaagagcacctcacagctgctgagccgtccgctatctgcagtggtgctgaaacgaccggagatactgacagatgagagcctcagcagcttggcagtctcatgtccccttacctcacttgtctctagccgcagcttccaaaccagcgccatttcaagggacatcgacacagcagccaagttcattggagctggggctgccacagttggggtggctggttctggggctgggattggaactgtgtttgggagcctcatcattggttatgccaggaacccttctctgaagcaacagctcttctcctacgccattctgggctttgccctctcggaggccatggggctcttttgtctgatggtagcctttctcatcctctttgccatgtgaaggagccgtctccacctcccatagttctcccgcgtctggttggccccgtgtgttccttttcctatacctccccaggcagcctggggaacgtggttggctcagggtttgacagagaaaagacaaataaatactgtattaataagaacaaaaanaaacaaacaacaacacacacaaaacgtgcggcgcgggccgcgctagagagaagcttaagcacaactggtggggggcggggccccaggggaacgagaacttggccacgcgtggcccaagcagaccgcgctccacaagcggggggtcccccaaaaaaaagcggggggacacggcgcgtaacacaccacaggggtcggccacgggctacaaaggcaggccgaaccccg

SEQ ID NO: 256188 - DNA, 943 bp, Homo sapiens
  misc_feature (138)..(138): n is a, c, g, or t
agtgacagtggaaacagaaagcctattagccaacattttaagccagaacttgaagttgctactgacagcaatcttctcaggcaagtagcaggccatgccaggtgaaaataatttaaaatgttatgctatttcaaatanaatttgcctgtcacagaattaagaaaaagtgagctcagccaaatccatgttgagtttagcaccatcactacccttcgggccttgtactctcacgaaggcactcagccaactgtggaaaagaaatatacacaggagactcaagaaacatcttattaatacagtatttatttgtcttttctctgtcttctctgcagtgggagcagctctcctgccacagctcctcaccccctgaaaatgttcgcctgctccaagtttgtctccactccctccttggtcaagagcacctcacagctgctgagccgtccgctatctgcagtggtgctgaaacgaccggagatactgacagatgagagcctcagcagcttggcagtctcatgtccccttacctcacttgtctctagccgcagcttccaaaccagcgccatttcaagggacatcgacacagcagccaagttcattggagctggggctgccacagttggggtggctggttctggggctgggattggaactgtgtttgggagcctcatcattggttatgccaggaacccttctctgaagcaacagctcttctcctacgccattctgggctttgccctctcggaggccatggggctcttttgtctgatggtagcctttctcatcctctttgccatgtgaaggagccgtctccacctcccatagttctcccgcgtctggttggccccgtgtgttccttttcctatacctccccaggcagcctggggaacgtggttggctcagggtttgacagagaaaagacaaataaatactgtattaataagaa

SEQ ID NO: 256189 - DNA, 2078 bp, Homo sapiens
gtcgctcggggtcccgggaaattgctccgtgggctttcagcggcggtttttatcgccggccggggtgtgcctgtctgcggctcgcctctcctccgggaccgtaaagctgctgccgtgatttatcctccccttctcccaaatccgattaaatggaggagctcggggccggggcgccgcggggcccgggagccgggagggggcggcgggaaggacggggccaaggaggggaggacaaacggcccctcagagagtggcggatttgcctttatttacagccgcggctttctttttattttttattttttatggggtttggtgagcttttcccgtctttctcgtgctgcgttcaagcacgatgcagggacggcaggggtttggaactggataggccttgtcgccctgttccaaagggcagggcaggtcctgtctgggagacaaggaggcctaggaaagatgagggccaggaagcctcccccacctccttccatcaggggaagggcgagcgaaaggggagagaaaacccacgttcaggagagcatgggggcgggaggggagggcgctgcttatcccaactcgcgtagttgaaacctgagcagaggctcgggcaagcctggagtgacctcgcaaccttacagcgggtcgcaggtgcccgttattcctagactgtcccaggagccaggaaagagggattcggatcatatttaaccctatcttctggctcgcagatgctgcttctctcatggtttatcaccggaatggaaaggaggaaacggggagtgggggaaagggcgaagccaccagaagcagctgcggcattttgctgactattcgcccatggagccggtttgccatccagtgatgccagagtcccggcgcgacagaaagcaggactcccaagatcttcctcctgctgcattttaggcactgaaccccaatcccgaccgtatgttaacactgaattctgagtaggagttttgttttggcagtgtgacgactgcgcatgctcggaaaggggacgcaagtccgagatcccaaacgcggtacagaccaaaccgcagtccacgttacggatcggcttactccgcggagttggcctcatttctgcacagtcggcgctccctgtagtttctcctctcgaacgccaggtggagcaaccggccggataccgccacagccctggcaggcggcgctgtgatgcctgagctgatcctgtatgttgcaatcactctatccgtggctgagcgactcgttggcccgggtcacgcatgcgctgagccttcctttcgctcttcccgctgctccgcccctctctgtcttctctgcagtgggagcagctctcctgccacagctcctcaccccctgaaaatgttcgcctgctccaagtttgtctccactccctccttggtcaagagcacctcacagctgctgagccgtccgctatctgcagtggtgctgaaacgaccggagatactgacagatgagagcctcagcagcttggcagtctcatgtccccttacctcacttgtctctagccgcagcttccaaaccagcgccatttcaagggacatcgacacagcagccaagttcattggagctggggctgccacagttggggtggctggttctggggctgggattggaactgtgtttgggagcctcatcattggttatgccaggaacccttctctgaagcaacagctcttctcctacgccattctgggctttgccctctcggaggccatggggctcttttgtctgatggtagcctttctcatcctctttgccatgtgaaggagccgtctccacctcccatagttctcccgcgtctggttggccccgtgtgttccttttcctatacctccccaggcagcctggggaacgtggttggctcagggtttgacagagaaaagacaaataaatactgtattaataagaacaacaaacaaaacaaacaaaaaaaatttttggggcgccggccccaaaaagttttaaaccacctcgttggggcgcgccccccaggtctttacccactggccaacgggtcacaaaaactcgggccagaatcgggtggggttccc

SEQ ID NO: 256190 - DNA, 1979 bp, Homo sapiens
gtcgctcggggtcccgggaaattgctccgtgggctttcagcggcggtttttatcgccggccggggtgtgcctgtctgcggctcgcctctcctccgggaccgtaaagctgctgccgtgatttatcctccccttctcccaaatccgattaaatggaggagctcggggccggggcgccgcggggcccgggagccgggagggggcggcgggaaggacggggccaaggaggggaggacaaacggcccctcagagagtggcggatttgcctttatttacagccgcggctttctttttattttttattttttatggggtttggtgagcttttcccgtctttctcgtgctgcgttcaagcacgatgcagggacggcaggggtttggaactggataggccttgtcgccctgttccaaagggcagggcaggtcctgtctgggagacaaggaggcctaggaaagatgagggccaggaagcctcccccacctccttccatcaggggaagggcgagcgaaaggggagagaaaacccacgttcaggagagcatgggggcgggaggggagggcgctgcttatcccaactcgcgtagttgaaacctgagcagaggctcgggcaagcctggagtgacctcgcaaccttacagcgggtcgcaggtgcccgttattcctagactgtcccaggagccaggaaagagggattcggatcatatttaaccctatcttctggctcgcagatgctgcttctctcatggtttatcaccggaatggaaaggaggaaacggggagtgggggaaagggcgaagccaccagaagcagctgcggcattttgctgactattcgcccatggagccggtttgccatccagtgatgccagagtcccggcgcgacagaaagcaggactcccaagatcttcctcctgctgcattttaggcactgaaccccaatcccgaccgtatgttaacactgaattctgagtaggagttttgttttggcagtgtgacgactgcgcatgctcggaaaggggacgcaagtccgagatcccaaacgcggtacagaccaaaccgcagtccacgttacggatcggcttactccgcggagttggcctcatttctgcacagtcggcgctccctgtagtttctcctctcgaacgccaggtggagcaaccggccggataccgccacagccctggcaggcggcgctgtgatgcctgagctgatcctgtatgttgcaatcactctatccgtggctgagcgactcgttggcccgggtcacgcatgcgctgagccttcctttcgctcttcccgctgctccgcccctctctgtcttctctgcagtgggagcagctctcctgccacagctcctcaccccctgaaaatgttcgcctgctccaagtttgtctccactccctccttggtcaagagcacctcacagctgctgagccgtccgctatctgcagtggtgctgaaacgaccggagatactgacagatgagagcctcagcagcttggcagtctcatgtccccttacctcacttgtctctagccgcagcttccaaaccagcgccatttcaagggacatcgacacagcagccaagttcattggagctggggctgccacagttggggtggctggttctggggctgggattggaactgtgtttgggagcctcatcattggttatgccaggaacccttctctgaagcaacagctcttctcctacgccattctgggctttgccctctcggaggccatggggctcttttgtctgatggtagcctttctcatcctctttgccatgtgaaggagccgtctccacctcccatagttctcccgcgtctggttggccccgtgtgttccttttcctatacctccccaggcagcctggggaacgtggttggctcagggtttgacagagaaaagacaaataaatactgtattaataagaaaacaataaaaactccagggggggccggtcccaattgctctata

SEQ ID NO: 256191 - DNA, 2114 bp, Homo sapiens
  misc_feature (1999)..(1999): n is a, c, g, or t
gtcgctcggggtcccgggaaattgctccgtgggctttcagcggcggtttttatcgccggccggggtgtgcctgtctgcggctcgcctctcctccgggaccgtaaagctgctgccgtgatttatcctccccttctcccaaatccgattaaatggaggagctcggggccggggcgccgcggggcccgggagccgggagggggcggcgggaaggacggggccaaggaggggaggacaaacggcccctcagagagtggcggatttgcctttatttacagccgcggctttctttttattttttattttttatggggtttggtgagcttttcccgtctttctcgtgctgcgttcaagcacgatgcagggacggcaggggtttggaactggataggccttgtcgccctgttccaaagggcagggcaggtcctgtctgggagacaaggaggcctaggaaagatgagggccaggaagcctcccccacctccttccatcaggggaagggcgagcgaaaggggagagaaaacccacgttcaggagagcatgggggcgggaggggagggcgctgcttatcccaactcgcgtagttgaaacctgagcagaggctcgggcaagcctggagtgacctcgcaaccttacagcgggtcgcaggtgcccgttattcctagactgtcccaggagccaggaaagagggattcggatcatatttaaccctatcttctggctcgcagatgctgcttctctcatggtttatcaccggaatggaaaggaggaaacggggagtgggggaaagggcgaagccaccagaagcagctgcggcattttgctgactattcgcccatggagccggtttgccatccagtgatgccagagtcccggcgcgacagaaagcaggactcccaagatcttcctcctgctgcattttaggcactgaaccccaatcccgaccgtatgttaacactgaattctgagtaggagttttgttttggcagtgtgacgactgcgcatgctcggaaaggggacgcaagtccgagatcccaaacgcggtacagaccaaaccgcagtccacgttacggatcggcttactccgcggagttggcctcatttctgcacagtcggcgctccctgtagtttctcctctcgaacgccaggtggagcaaccggccggataccgccacagccctggcaggcggcgctgtgatgcctgagctgatcctgtatgttgcaatcactctatccgtggctgagcgactcgttggcccgggtcacgcatgcgctgagccttcctttcgctcttcccgctgctccgcccctctctgtcttctctgcagtgggagcagctctcctgccacagctcctcaccccctgaaaatgttcgcctgctccaagtttgtctccactccctccttggtcaagagcacctcacagctgctgagccgtccgctatctgcagtggtgctgaaacgaccggagatactgacagatgagagcctcagcagcttggcagtctcatgtccccttacctcacttgtctctagccgcagcttccaaaccagcgccatttcaagggacatcgacacagcagccaagttcattggagctggggctgccacagttggggtggctggttctggggctgggattggaactgtgtttgggagcctcatcattggttatgccaggaacccttctctgaagcaacagctcttctcctacgccattctgggctttgccctctcggaggccatggggctcttttgtctgatggtagcctttctcatcctctttgccatgtgaaggagccgtctccacctcccatagttctcccgcgtctggttggccccgtgtgttccttttcctatacctccccaggcagcctggggaacgtggttggctcagggtttgacagagaaaagacaaataaatactgtattaataagaagtattaatacgaaaaaaacaacaacaaaaaaaacaattttggcgccctcgccccgaaaatttnaacccattgttggggcgcgccaagaaggcaactgccacggtcggagaccggcacacagggggggtcccaaaaagcgcggcggcgtgacaaccgggtgggccggctccggccccac

SEQ ID NO: 256192 - DNA, 1979 bp, Homo sapiens
gtcgctcggggtcccgggaaattgctccgtgggctttcagcggcggtttttatcgccggccggggtgtgcctgtctgcggctcgcctctcctccgggaccgtaaagctgctgccgtgatttatcctccccttctcccaaatccgattaaatggaggagctcggggccggggcgccgcggggcccgggagccgggagggggcggcgggaaggacggggccaaggaggggaggacaaacggcccctcagagagtggcggatttgcctttatttacagccgcggctttctttttattttttattttttatggggtttggtgagcttttcccgtctttctcgtgctgcgttcaagcacgatgcagggacggcaggggtttggaactggataggccttgtcgccctgttccaaagggcagggcaggtcctgtctgggagacaaggaggcctaggaaagatgagggccaggaagcctcccccacctccttccatcaggggaagggcgagcgaaaggggagagaaaacccacgttcaggagagcatgggggcgggaggggagggcgctgcttatcccaactcgcgtagttgaaacctgagcagaggctcgggcaagcctggagtgacctcgcaaccttacagcgggtcgcaggtgcccgttattcctagactgtcccaggagccaggaaagagggattcggatcatatttaaccctatcttctggctcgcagatgctgcttctctcatggtttatcaccggaatggaaaggaggaaacggggagtgggggaaagggcgaagccaccagaagcagctgcggcattttgctgactattcgcccatggagccggtttgccatccagtgatgccagagtcccggcgcgacagaaagcaggactcccaagatcttcctcctgctgcattttaggcactgaaccccaatcccgaccgtatgttaacactgaattctgagtaggagttttgttttggcagtgtgacgactgcgcatgctcggaaaggggacgcaagtccgagatcccaaacgcggtacagaccaaaccgcagtccacgttacggatcggcttactccgcggagttggcctcatttctgcacagtcggcgctccctgtagtttctcctctcgaacgccaggtggagcaaccggccggataccgccacagccctggcaggcggcgctgtgatgcctgagctgatcctctctcctgccacagctcctcaccccctgaaaatgttcgcctgctccaagtttgtctccactccctccttgactttgctaaaaggaagaatgatccaaaactctaacgtacatgtgaagatggaaaggccatgagaggaaagaaaatcttgtctgatgatgtaacaacgtggcatagttctgaaactcctctccagtcttccttgaccttcctgcccctgtatgtcattcctgctaggtcaagagcacctcacagctgctgagccgtccgctatctgcagtggtgctgaaacgaccggagatactgacagatgagagcctcagcagcttggcagtctcatgtccccttacctcacttgtctctagccgcagcttccaaaccagcgccatttcaagggacatcgacacagcagccaagttcattggagctggggctgccacagttggggtggctggttctggggctgggattggaactgtgtttgggagcctcatcattggttatgccaggaacccttctctgaagcaacagctcttctcctacgccattctgggctttgccctctcggaggccatggggctcttttgtctgatggtagcctttctcatcctctttgccatgtgaaggagccgtctccacctcccatagttctcccgcgtctggttggccccgtgtgttccttttcctatacctccccaggcagcctggggaacgtggttggctcagggtttgacagagaaaagacaaataaatactgtattaataagaa

SEQ ID NO: 256193 - DNA, 1867 bp, Homo sapiens
gtcgctcggggtcccgggaaattgctccgtgggctttcagcggcggtttttatcgccggccggggtgtgcctgtctgcggctcgcctctcctccgggaccgtaaagctgctgccgtgatttatcctccccttctcccaaatccgattaaatggaggagctcggggccggggcgccgcggggcccgggagccgggagggggcggcgggaaggacggggccaaggaggggaggacaaacggcccctcagagagtggcggatttgcctttatttacagccgcggctttctttttattttttattttttatggggtttggtgagcttttcccgtctttctcgtgctgcgttcaagcacgatgcagggacggcaggggtttggaactggataggccttgtcgccctgttccaaagggcagggcaggtcctgtctgggagacaaggaggcctaggaaagatgagggccaggaagcctcccccacctccttccatcaggggaagggcgagcgaaaggggagagaaaacccacgttcaggagagcatgggggcgggaggggagggcgctgcttatcccaactcgcgtagttgaaacctgagcagaggctcgggcaagcctggagtgacctcgcaaccttacagcgggtcgcaggtgcccgttattcctagactgtcccaggagccaggaaagagggattcggatcatatttaaccctatcttctggctcgcagatgctgcttctctcatggtttatcaccggaatggaaaggaggaaacggggagtgggggaaagggcgaagccaccagaagcagctgcggcattttgctgactattcgcccatggagccggtttgccatccagtgatgccagagtcccggcgcgacagaaagcaggactcccaagatcttcctcctgctgcattttaggcactgaaccccaatcccgaccgtatgttaacactgaattctgagtaggagttttgttttggcagtgtgacgactgcgcatgctcggaaaggggacgcaagtccgagatcccaaacgcggtacagaccaaaccgcagtccacgttacggatcggcttactccgcggagttggcctcatttctgcacagtcggcgctccctgtagtttctcctctcgaacgccaggtggagcaaccggccggataccgccacagccctggcaggcggcgctgtgatgcctgagctgatcctgtatgttgcaatcactctatccgtggctgagcgactcgttggcccgggtcacgcatgcgctgagccttcctttcgctcttcccgctgctccgcccctctctgtcttctctgcagtgggagcagggtcaagagcacctcacagctgctgagccgtccgctatctgcagtggtgctgaaacgaccggagatactgacagatgagagcctcagcagcttggcagtctcatgtccccttacctcacttgtctctagccgcagcttccaaaccagcgccatttcaagggacatcgacacagcagccaagttcattggagctggggctgccacagttggggtggctggttctggggctgggattggaactgtgtttgggagcctcatcattggttatgccaggaacccttctctgaagcaacagctcttctcctacgccattctgggctttgccctctcggaggccatggggctcttttgtctgatggtagcctttctcatcctctttgccatgtgaaggagccgtctccacctcccatagttctcccgcgtctggttggccccgtgtgttccttttcctatacctccccaggcagcctggggaacgtggttggctcagggtttgacagagaaaagacaaataaatactgtattaataagaa

SEQ ID NO: 256194 - DNA, 2154 bp, Homo sapiens
gtcgctcggggtcccgggaaattgctccgtgggctttcagcggcggtttttatcgccggccggggtgtgcctgtctgcggctcgcctctcctccgggaccgtaaagctgctgccgtgatttatcctccccttctcccaaatccgattaaatggaggagctcggggccggggcgccgcggggcccgggagccgggagggggcggcgggaaggacggggccaaggaggggaggacaaacggcccctcagagagtggcggatttgcctttatttacagccgcggctttctttttattttttattttttatggggtttggtgagcttttcccgtctttctcgtgctgcgttcaagcacgatgcagggacggcaggggtttggaactggataggccttgtcgccctgttccaaagggcagggcaggtcctgtctgggagacaaggaggcctaggaaagatgagggccaggaagcctcccccacctccttccatcaggggaagggcgagcgaaaggggagagaaaacccacgttcaggagagcatgggggcgggaggggagggcgctgcttatcccaactcgcgtagttgaaacctgagcagaggctcgggcaagcctggagtgacctcgcaaccttacagcgggtcgcaggtgcccgttattcctagactgtcccaggagccaggaaagagggattcggatcatatttaaccctatcttctggctcgcagatgctgcttctctcatggtttatcaccggaatggaaaggaggaaacggggagtgggggaaagggcgaagccaccagaagcagctgcggcattttgctgactattcgcccatggagccggtttgccatccagtgatgccagagtcccggcgcgacagaaagcaggactcccaagatcttcctcctgctgcattttaggcactgaaccccaatcccgaccgtatgttaacactgaattctgagtaggagttttgttttggcagtgtgacgactgcgcatgctcggaaaggggacgcaagtccgagatcccaaacgcggtacagaccaaaccgcagtccacgttacggatcggcttactccgcggagttggcctcatttctgcacagtcggcgctccctgtagtttctcctctcgaacgccaggtggagcaaccggccggataccgccacagccctggcaggcggcgctgtgatgcctgagctgatcctgtatgttgcaatcactctatccgtggctgagcgactcgttggcccgggtcacgcatgcgctgagccttcctttcgctcttcccgctgctccgcccctctctgtcttctctgcagtgggagcagctctcctgccacagctcctcaccccctgaaaatgttcgcctgctccaagtttgtctccactccctccttggtcaagagcacctcacagctgctgagccgtccgctatctgcagtggtgctgaaacgaccggagatactgacagatgagagcctcagcagcttggcagtctcatgtccccttacctcacttgtctctagccgcagcttccaaaccagcgccatttcaagggacatcgacacagcagccaagttcattggagctggggctgccacagttggggtggctggttctggggctgggattggaactgtgtttgggagcctcatcattggttatgccaggaacccttctctgaagcaacagctcttctcctacgccattctgggctttgccctctcggagaactatgggaggtggagacggctccttcacatggcaaagaggatgagaaaggctaccatcagacaaaagagccccatggcctccgagagggcaaagcccagaatggcgtaggagaagagctgttgcttcagagaagggttcctggcataaccaatgatgtagaaggagaagagaaaagactgaatttctagttcacacaaagaaaaggataaatatctaagatgggctcagggagaatccccctcttcaagattatctcacataataaagaagcttttagggtaacaccatcatgcccaaattcttgccctgattccccaaaggctctacaggaactgaatgaagggggagcaggcaatctaaaatcctgtaacatggcccaggtatttggcccttaatcgaggggaaccgagctcg

SEQ ID NO: 256195 - DNA, 2054 bp, Homo sapiens
gtcgctcggggtcccgggaaattgctccgtgggctttcagcggcggtttttatcgccggccggggtgtgcctgtctgcggctcgcctctcctccgggaccgtaaagctgctgccgtgatttatcctccccttctcccaaatccgattaaatggaggagctcggggccggggcgccgcggggcccgggagccgggagggggcggcgggaaggacggggccaaggaggggaggacaaacggcccctcagagagtggcggatttgcctttatttacagccgcggctttctttttattttttattttttatggggtttggtgagcttttcccgtctttctcgtgctgcgttcaagcacgatgcagggacggcaggggtttggaactggataggccttgtcgccctgttccaaagggcagggcaggtcctgtctgggagacaaggaggcctaggaaagatgagggccaggaagcctcccccacctccttccatcaggggaagggcgagcgaaaggggagagaaaacccacgttcaggagagcatgggggcgggaggggagggcgctgcttatcccaactcgcgtagttgaaacctgagcagaggctcgggcaagcctggagtgacctcgcaaccttacagcgggtcgcaggtgcccgttattcctagactgtcccaggagccaggaaagagggattcggatcatatttaaccctatcttctggctcgcagatgctgcttctctcatggtttatcaccggaatggaaaggaggaaacggggagtgggggaaagggcgaagccaccagaagcagctgcggcattttgctgactattcgcccatggagccggtttgccatccagtgatgccagagtcccggcgcgacagaaagcaggactcccaagatcttcctcctgctgcattttaggcactgaaccccaatcccgaccgtatgttaacactgaattctgagtaggagttttgttttggcagtgtgacgactgcgcatgctcggaaaggggacgcaagtccgagatcccaaacgcggtacagaccaaaccgcagtccacgttacggatcggcttactccgcggagttggcctcatttctgcacagtcggcgctccctgtagtttctcctctcgaacgccaggtggagcaaccggccggataccgccacagccctggcaggcggcgctgtgatgcctgagctgatcctctctcctgccacagctcctcaccccctgaaaatgttcgcctgctccaagtttgtctccactccctccttgactttgctaaaaggaagaatgatccaaaactctaacgtacatgtgaagatggaaaggccatgagaggaaagaaaatcttgtctgatgatgtaacaacgtggcatagttctgaaactcctctccagtcttccttgaccttcctgcccctgtatgtcattcctgctaggtcaagagcacctcacagctgctgagccgtccgctatctgcagtggtgctgaaacgaccggagatactgacagatgagagcctcagcagcttggcagtctcatgtccccttacctcacttgtctctagccgcagcttccaaaccagcgccatttcaagggacatcgacacagcagccaagttcattggagctggggctgccacagttggggtggctggttctggggctgggattggaactgtgtttgggagcctcatcattggttatgccaggaacccttctctgaagcaacagctcttctcctacgccattctgggctttgccctctcggaggccatggggctcttttgtctgatggtagcctttctcatcctctttgccatgtgaaggagccgtctccacctcccatagttctcccgcgtctggttggccccgtgtgttccttttcctatacctccccaggcagcctggggaacgtggttggctcagggtttgacagagaaaagacaaataaatactgtattaataagaaaaaaaaaaggaccaaaaaagcaaaacaaaaaacaccatcaaacaaacaacacacaaaacaaacaaaacaaaacgg

SEQ ID NO: 256196 - DNA, 2054 bp, Homo sapiens
gtcgctcggggtcccgggaaattgctccgtgggctttcagcggcggtttttatcgccggccggggtgtgcctgtctgcggctcgcctctcctccgggaccgtaaagctgctgccgtgatttatcctccccttctcccaaatccgattaaatggaggagctcggggccggggcgccgcggggcccgggagccgggagggggcggcgggaaggacggggccaaggaggggaggacaaacggcccctcagagagtggcggatttgcctttatttacagccgcggctttctttttattttttattttttatggggtttggtgagcttttcccgtctttctcgtgctgcgttcaagcacgatgcagggacggcaggggtttggaactggataggccttgtcgccctgttccaaagggcagggcaggtcctgtctgggagacaaggaggcctaggaaagatgagggccaggaagcctcccccacctccttccatcaggggaagggcgagcgaaaggggagagaaaacccacgttcaggagagcatgggggcgggaggggagggcgctgcttatcccaactcgcgtagttgaaacctgagcagaggctcgggcaagcctggagtgacctcgcaaccttacagcgggtcgcaggtgcccgttattcctagactgtcccaggagccaggaaagagggattcggatcatatttaaccctatcttctggctcgcagatgctgcttctctcatggtttatcaccggaatggaaaggaggaaacggggagtgggggaaagggcgaagccaccagaagcagctgcggcattttgctgactattcgcccatggagccggtttgccatccagtgatgccagagtcccggcgcgacagaaagcaggactcccaagatcttcctcctgctgcattttaggcactgaaccccaatcccgaccgtatgttaacactgaattctgagtaggagttttgttttggcagtgtgacgactgcgcatgctcggaaaggggacgcaagtccgagatcccaaacgcggtacagaccaaaccgcagtccacgttacggatcggcttactccgcggagttggcctcatttctgcacagtcggcgctccctgtagtttctcctctcgaacgccaggtggagcaaccggccggataccgccacagccctggcaggcggcgctgtgatgcctgagctgatcctgtatgttgcaatcactctatccgtggctgagcgactcgttggcccgggtcacgcatgcgctgagccttcctttcgctcttcccgctgctccgcccctctctgtcttctctgcagtgggagcagctctcctgccacagctcctcaccccctgaaaatgttcgcctgctccaagtttgtctccactccctccttggtcaagagcacctcacagctgctgagccgtccgctatctgcagtggtgctgaaacgaccggagatactgacagatgagagcctcagcagcttggcagtctcatgtccccttacctcacttgtctctagccgcagcttccaaaccagcgccatttcaagggacatcgacacagcagccaagttcattggagctggggctgccacagttggggtggctggttctggggctgggattggaactgtgtttgggagcctcatcattggttatgccagagtctgactctgtcacccaggctggagtgcaactgtgtaatctcagctcactgcaacctctgcctctcgggttcaagcaattctcctgcctcagcctcccaagtagctgggattacaggaacccttctctgaagcaacagctcttctcctacgccattctgggctttgccctctcggaggccatggggctcttttgtctgatggtagcctttctcatcctctttgccatgtgaaggagccgtctccacctcccatagttctcccgcgtctggttggccccgtgtgttccttttcctatacctccccaggcagcctggggaacgtggttggctcagggtttgacagagaaaagacaaataaatactgtattaataagaa

SEQ ID NO: 256197 - DNA, 1083 bp, Homo sapiens
  misc_feature (903)..(903): n is a, c, g, or t
  misc_feature (907)..(907): n is a, c, g, or t
  misc_feature (918)..(921): n is a, c, g, or t
  misc_feature (923)..(923): n is a, c, g, or t
  misc_feature (925)..(926): n is a, c, g, or t
  misc_feature (929)..(930): n is a, c, g, or t
  misc_feature (932)..(932): n is a, c, g, or t
  misc_feature (934)..(937): n is a, c, g, or t
  misc_feature (948)..(948): n is a, c, g, or t
  misc_feature (952)..(952): n is a, c, g, or t
  misc_feature (997)..(997): n is a, c, g, or t
cgctggctgtggtgtgtgtgtacgtgtgcggtcgctcttgtggtgtcgtggtgtcgccatgtgttcccgacgccgggcggcgtaatttgattatactcgacgtcctcgcgtgggcacccccgtgttggagttatgatacgcccgggtgatgtcccctctccggagctcctcctcctgggagttgtggtttcccgggaccacgctcccggcgttcccccccccgcgcgcgtttttttttattgggggagaggaactcccccgccccttgtcgccgggcccgcgggtttcctctgggaaccccccttgggacccactgtgtccccttacaccctggggccccgcgcggcgcccaaaccaacggtggcgtttcaaaaagccttttcgccggggccccgcgggcgcgggccacaacacatttttttttttttttttttttttttttttttcttattaatacagtatttatttgtcttttctctgtcaaaccctgagccaaccacgttccccaggctgcctggggaggtataggaaaaggaacacacggggccaaccagacgcgggagaactatgggaggtggagacggctccttcacatggcaaagaggatgagaaaggctaccatcagacaaaagagccccatggcctccgagagggcaaagcccagaatggcgtaggagaagagctgttgcttcagagaagggttcctggcataaccaatgatgaggctcccaaacacagttccaatcccagccccagaaccagccaccccaactgtgggcagccccagctccaatgaacttgggctgctgtgttcgatgttcccttgaaatgggcgctggttttggaagctgcggctagagacaagtgaggtaagggggacatgagactgccaagctgctgagnctcncatctgcagtnnnncngnncgnncngnnnnactgcagatgngagnctcagcagctgtgaggtgctcttgaccaaggagggagtggagacnaacttggagcaggcgaacattcttcagggggctgaggagctgtggcaggagagctgctcccactgcagagaagacagagagggggc

SEQ ID NO: 256198 - DNA, 785 bp, Homo sapiens
gtcacatgtagtcccccctggggataagaaattagtggcgctgcgcgaagagatcacgaattgcccgcaggagtggccgcaggagtatttttcgtaggcgcgacgacgggcatcattagtgcgccgcgtcatgtggtggactccaccctgtagtaggacaccgtgtgagagagtttgtttattatattgttcccctggtgaggagggcgctcgttgataaatcgcgcgcgggggggggtgggttggtggccccgattgtgtgtcgcgcccctgagatgcgtgtatatgtggtgtcgtctctgtcgcggatggtgttccccggggtggcgctcgatttttcccccgctgttgacgcgccgtgtggttgtagaaacgctgcgtggccccgtggccgctggtgttataattatacggcctcccctctttgtggggcccccttggtcccagagcggggggcgcgcggtggggggccccccggggggatcttttgggggcgcgcgcccccctctttttttttttttttttttttttttttttttttttttttttttttcttattaatacagtatttatttgtcttttctctgtcaaaccctgagccaaccacgttccccaggctgcctggggaggtataggaaaaggaacacacggggccaaccagacgcgggagaactatgggaggtggagacggctccttcacatggcaaagaggatgagaaaggctaccatcagacaaaagagccccatggcctccgagagggcgccgctcgcgatctagaactagt

SEQ ID NO: 256199 - DNA, 3174 bp, Homo sapiens
  misc_feature (1279)..(1279): n is a, c, g, or t
  misc_feature (1982)..(1982): n is a, c, g, or t
  misc_feature (2916)..(2917): n is a, c, g, or t
  misc_feature (2922)..(2922): n is a, c, g, or t
ctgtgggagtttgctctcttaaactcccacgttccaacctcagccaagctctccgggcagccacacttccctttgccagctgtgaccaccaatactgccaccaggggggtctgcaggacctgcagggccacactcattggcacctcggtgacttcacttactctggtcaccctgctgtctctcccaggcctcctccctcacagaccttctagggaaaggttctctatcatggtcaactttgagccgtgtatattggccacaggcatccctccttctattagggcgccatactgctcacttattattgcctaaaacctgctcccttgtaggctttctttacagggctctagcggattcttagagatagtagacagctcactggtaaccacagttcaaatgcaaaccaaccaattcacagccacaccctcaccactggctttattgggctcgaactccaggccacacccacctaccctaatcaccccatagccatgggtcagacacctaaagacaacccctgtgtcccagagcccatggaaatgacccaagccagccaatcctaagcctgcttaccctgcctggccccttctttcctgtgaaaatcacaataaaaacattttttaaaaaaatttaagttccagggtacatgtgcaggatgtgcaggtttgttacataggtaaacctgtgccatggtggtttgctgcacctatcaacccatcgcctaggtattaagcccaacatccattagctattcttcctgatgctctccctcccccaaccccactcctcacaagccccagtgtgtgttgtttccctccctgtgtccatgtgttctcattgttcagctcccacttacaagtgacaccatgcggtatttggttttctgttcctgtgttagtttgctgaggataatagcttccagctcaaaactcttgacagttctccccctctccctctgcctcctgcccaaccctggggctttcccaggtaactccctgtggcatgtggagtccccatggatctgtgagtaacaaaccatctttgcaatagcagtcatttcctcatcttggccttaccataccacaataagaataaaacctgttaaaacagagagaacagagggagaaaggaaggagaaaaggaaaatgaatgaagaaggaataaagaatgagtaattaaatgaacaaatgataagttacttaaaatctgctttttcttaggaggagaaagaactaacagagatgcagaagtcctcttctactcgggctggggatatgcntgagaaagacacgcgtggatgccgtatgagctctcgttctgaatgcggaaatctgacctcccaccggatactcagttcagggggctcctggaccctccagctgctcctctactcatcgctccctcactcagaaaaccagcagagaagtgaacttcctcaaatgactgacggtaaatatccagcatggagctggattacaaaactgtataaactgtaaatagcatcacgctattcccttttaaagaagtgtcagtgcttttattcattaagattcagatgctatggagggggcagatgcgccttctcccctcctggatcccaaataaaacaccccgtatggaagcagatggctttgtgtaaatcagatgacagtttacggagtgagacggcctcatcggaacggcattacaagtatcatcttttgaggggaaatggggttaatcaagtccagctttaattggaggtcacatttgcatgtgaaattctgggtccctgtaaggactgcctgggtccctgggtcatcaggccagtaacctctccaccattttctttccagagggagccccaggtaatgcatgagaaaggaagtgttataagaagccaagaatgggtgccccccaccccccaaccaagagccagttctgttaacacagcagagagccctccccaggtctcaaagtctccctgcctttgctgccacagntaagagggggtggttttgctcactgcaaaccacataacagaaacaacacctgcttgggcacttaaccctggaacgggaaagctgaaagtggtttctgtttattttgatctcgagcgtaaaatgaagagcaatcatgtccctggagtctcggcagaggacaaacaaagctgatggaggaagacaaagtctgctttttcaggatgcttcatgggaggctggggtgttaagcgctcctcagcctgcctgtgtgatctgagaaacggggcgggggcaggtggggcgggggcagtggcatcaggtgcctgcctcccgccgagggtattcaccattcaaagcacaggcgcgaagagcaaacagctaccagacagaatcctttaggtctaggctattcctttcctttgaaccagagacaggaacagaacaccttagcccagcctccctgcaacattccaacacttgaattgtaggatgggagtcccaatttcccagacatcagggcaatattctcccatttccttacaacactgggtcaatgtaaaggttaaaaatttaaataaatataaataaataggagatcaacatcctcctttcttgggaaaattcagacaatgctacacaaaagtttggaagacgagatatctaaagatcacccagaaaaaagatataggagcatgctgttttcattaggtttcttcaaaaatcagtggtatgatttcacagtattttgtttcatggaatatattcacgatatttgtttcatggaataaattcatgatatttgtttcatggaatatactggatatctgtttcatggaatatattcacgatatttgtttcacacaatatattcatgatatttgtttcatggaatatattcacgatacttgtttcatggaatatattaggtatttgtttcactgaatatattgactgnnactcngaatcctaacatgcaatgtctttcttcaaaagacagtgtcatgcattccttacagtggatttatcaattaatgctgagtccccagccaagtgataagtcataccatctctcttactccttttttcttaatccttaaaaaaaaaattaggtccgccctcagcctttatattccaattcttcattccacactcctgactttttcccaagttattcaaggatggaaaagcgtatcatctccaagctagctctttc

SEQ ID NO: 256200 - DNA, 553 bp, Homo sapiens
ccctcagatccccacaatacccttgaaacataaagaagagattttaaccccctctctttgcatattgagaaacccagggaaatacagcgtcttacacgggacagtagaatcagcgttcaggagagcagaaaccaacgccctgttctcttggctcccagttctctttgtaatcagattaaaaaccctcttcactaagtacttagatacatgtgctggaaaggaagaagtgcttcccatctaagaaatagtctttaaaataagaagaatctagatattaaaaataaaatttgattaggaagtgatatgttcagacagtcgttgatataagcaacttacattctattctgttatctttaaggtgtgtgttaatattttgctaatgtaagcccttaggcccaggaactgtgtcatatacatgcatatactttataaataatttaacacagcatttcccaaccattgtgtgcaaactcatttggtgtgatcagttgggtggagtgtcacaagtaatttgttattaataacagtttttgtattgtgtggatattaaaag

SEQ ID NO: 256201 - DNA, 755 bp, Homo sapiens
caactccattctattgcattacccagtccaccaatcctagtccctttgggcacccagaatgccaatctccaaccccttcctctcccctaccaacccctcattcccaaaggtgcttttaaaaccacatgtctcaattttgagttttgacagcatgatccctgaccacattcgtataaccaaccccctgacccccttccattattaggactccctcagcagaaacacctaggtcaccagagaaggcaggaaacgtggggcaattcattgaggggcagtgaatcacctcggttctctctctgcatcccctgaagatcctcagccccagaatatcaatccaaagcctctgagaccacattagaagccagttctgaagaagacaggtgtgactggagtctgggaatacttaggacaaagccattgcgtgggggtctagggactcactgggagatcaagagccactggctgacatccctgtggccctgggatagggaggagcgtcaggaaagagcagggagtctccatgcagtactggggttgggcggactgcactcttgggcttaaaaggcactttctcttagtaatgtaacccacacccagagttttctattctacattttatgttttagatttaatttcttttgttttgtgtattcaatcacaaaattttaattggtatgtttgttggttgttagttggctgaacacagagtagttgcctattttggtcatttagtaaactctacctaaatgctaaca

SEQ ID NO: 256202 - DNA, 355 bp, Homo sapiens
tccattccaccccaaacctcactggactcagactctcagggatacactataatgactgctaactttggtagcacctgcacctagtgtagcttcctaatgcttccgtgaatcccagggagaacactgtaaaatgatcatatgatcttttatttctcacttaattcattctgtgtcattccattggtttgtgaattgtgtcaatagatagaaagtttggactgtgggtgtctggaaatatatccaccccttctacattaattcttatgaaaaaatattttattcaccttttttactgtaagatgaatttcccagtaatgtaaccttgatgcaaataaatgctctaaccgttgtgcca

SEQ ID NO: 256203 - DNA, 354 bp, Homo sapiens
cttgaactcctgggctcaagcattcctcccaacttgatctcccaaagtgctaggattacaggcatgagccaccgcacccagactaaataatactttttaaagtgtcagtttgcttggataattgccctggatgtttagtttcaggaagtcactgtaacagatctgatcactataaataaattatattcaggtaatgatttaaaatatatatcagcaggcattgaatattcaggtataatgagttttaactgattataagaatgcttcctttgagatgattcaaagcttcccttgttggatttgctgctggaaatgcagtcaaaaagatttctttttttttttttttttttgaga

SEQ ID NO: 256204 - DNA, 728 bp, Homo sapiens
gaatgattaacattgaactcctggccagcagcactacatacattcttgaacaaagttgcctatgaacgtattttctctgtaagagaaatgtcagcttccttgcccttaggaggacggaacaacactatcctgtaggggtgagggtaacagaaaaattaccagcaaaaggaacaaaaatgcagaaaaggtggctctaaacagactggaaaaagtacacttgttaatagggagtacagaacataagagcagaacatcactttgttagaccccagtttttccccacttgtgcatgtctgcaaatgaccaaacggcactacaggtattgattgaagagttacagatacgttctagctggtagggaaattcacaaatatgaaatcttaataatgaggattaacttgatatacattagtgggcaagttgagattcctgaaattaaatgcaactgactgctctacatttctaaccctaagtattacgcatcaacatgagttcaagtggaagcaaaaataaatgattcctacaacatgcttcccagtaaatgtgtttttccacttaatgggtgatggaagaaaggcttaactactttacatcacaatgaaaattctgaagaaaatgcctatatcatttaagacctaaaggcataaatgaagaatataaaaaggtgacttgacaagggaaaacagaaatgaagtctcttgagaaaagttgtccaatgttatttttgt

SEQ ID NO: 256205 - DNA, 201 bp, Homo sapiens
cgtcgaccctagtaaacctcttgctcttggtatctgcttctggagcagctcaaactaacacaccaaagaagtgctgggtggtagagacaagccttttagattccttgtggcactggcctgcctgctctggagcccagctctggggataaggtcaagagaagcatgccctgggttggcagggagaacctggggcgtcttggt

SEQ ID NO: 256206 - DNA, 402 bp, Homo sapiens
caacacccacctatccacctacccacatgcatgctttggaggattttggaagagtgctgaatggcatgttataatttttcaattcgtttaaatatttaaaaagtgatagtcttttatgactgggtgcggtggctcacgcctgtaaacccagcactttggaaggctgaggcaggtggatcatttgaggccaggagtttgagaccagcctgagcaacgtggcaaaacaccattctactaaaattagaaaaattagccagatgtggtggcacaggcctgtgatcccagctactcgggaggctgaggcaggagtatcacttgaacccgggaggcagaggttgcagtgagccaagatcgtgtcactgcactccagcctgggtgacagagtgagactctgtcttcaaa

SEQ ID NO: 256207 - DNA, 658 bp, Homo sapiens
aatgcttgagaatagttcacaagtaagaattaaaatataggcccgttgttccataatgaaatcctataatttggccataaaactaatatttttaattatttgcataattggattagggagcaagggtaaagctgatagacttatttgaaaatattacttctgggtttagatgagaaagtgctagatacttcacacaagttagtagctagccccagaatcatctttttatcaaagagatgcagtagttttagtctcaggagtgatggtatatccacccagcagtttatcactcagtcccatctgccaatcctacttttacctatccctacccttcagtccccaccccacacctgagtttaccaaccccttcagaccctcagtgtttcattcccagcaggttctccctcttctccttttgcttcagttgttaatatgtagtgtccaacatcacaaagtcctttagcacaatcagaactaggaatttatttaaaatataggtatgtaatttacgtcagtgctagagagaagttttaatggaaacgttgtttctagctctccactgaacatttctacatggttgtcatgtaggcacctcaagcccttcaagtcctaaaatatatcagaatctccccaccaaatctccatctcctatgtcctg

SEQ ID NO: 256208 - DNA, 291 bp, Homo sapiens
  misc_feature (71)..(71): n is a, c, g, or t
  misc_feature (216)..(216): n is a, c, g, or t
cttggcctcccaaagtgctaggattacaggcatgagcccctgcgcctggcctgctatgtgtatattaatgngtggtcttgatcttgaactgaggctctgaaagggtatgacaaatactgacggccatctgccaactacagagctgtgaactgttcactcattaacagtttataaacaacaagataacatcctccaacttatcttcctgctctagcngaggtgggcagtgaggataactgttcaggtcccctctttggaggtctggtgtcatgagcatgagccctcctgcag

SEQ ID NO: 256209 - DNA, 366 bp, Homo sapiens
ggcttccagatcagctaaagtctcaacaagaatgaaaatgacacttcaaaggatttaagtgaagagagtgtcgtgaagattatttgtagagatgtgggatcggatgagaaacaccctgggaccagaaacagcagaagccctaatgcctgccgaagggcaagaccagggtgagctcctacccacagtatctggcgagagctggagccctgagacagggatggggcctactggcacttggaaagtgtactggggtcttagtgaactgatgtcatttcctcttctcttccccaggatttgagatttctaaaaacaacaacaacaacaacaacaacaacaacaaaaccctatacaaatctaaattagtta

SEQ ID NO: 256210 - DNA, 255 bp, Homo sapiens
atttatatttaaatctacctttgaattaccgattgtgactgaggtctcatgtggcttactggtgaatccagtagttgaggaaacgaaagccgtcacttctgctaactcttttaccaactcacctgctgtcaccttacacaaccccaactgtgtttcagctttggagtaatgaacacaccattttcttcctacttaaaagtccactcaggataatgattaagaaatacattgatgccgagtaataaatactttaaa

SEQ ID NO: 256211 - DNA, 508 bp, Homo sapiens
  misc_feature (6)..(6): n is a, c, g, or t
  misc_feature (313)..(313): n is a, c, g, or t
ggtgcntgattcactacaggaaatcgacaagagcgcgttttcgaccgttatctcgcgaaaactaagggacccgcgcatgcgtccctagcgaagccgcagccgtttccgccctggctggcggcgccgcggacgggcgcggcttctgcgcctgcgcccggcgtatcgtctcttttccgggtgggaggtggggccttgggtgtcctgagagcctgcaggtggcccagctctctgcggtgaggcggtcgcgctctgccgagtccacctgtttgcaaagccggtgcggccctactgtgtgcagggccggggcggggangcgcagcccgaacgtcacgtgccctcacatctgttggtgaccaaggttacttatgcattaacgtttagggacaaacgtggaaaatgcattctttggtgcccctggagacatcttgtgtgtgcagaaaacactactcagaagtttatgtgcgtttaaacatgtgatttaaataatacatgatttccaaagtaaaaa

SEQ ID NO: 256212 - DNA, 492 bp, Homo sapiens
ttgggcagtaggacagatgaggatggttatcttttaatcatcttttgaaataatactcttaacactttagattataaaatgtttagacatgtggaaagtgccttcagttgatcactgggagagactataaacatggatcaggatgctaagattatgtatcttgttttaaaaaaaatcattcttatttaaaaggtcttaatgtcaggccgtgtgcggtggctcacacctgtaatcccagcactttgggaggctgaggtgggcagattgcttgagcccagaaatttgagaccagcctgggcaacatggcaaaaccctgtctctacaaaaaaatacaaaaattagccaggcatggtggcgcatgcctgtagttccagctacctggaaggctgaggtggtaggatcccctgagccctggaggtcaaggctgcagtgagctgggatcatgccactgcactccagcctgggtggcagaccaggaccctgtctctaaaa

SEQ ID NO: 256213 - DNA, 628 bp, Homo sapiens
agcacaccaagtatagcaacatacaaggattgtataccatgaccaaatggatttatgcaagtttggttcaacatttgaaaatcagtttatgtaatacactgtgttaatagaataaaggacaaaaaccacatgatcgtttccataggagcaaaaaagcatttgacaaaatccaacaccctttcatggtaaaaacaaaaactcaggagagaacttcctcagcctgttaaagggcatctacaaaaacccatggctgacatacctaatggcaaaaaattgaaagcttctaccactaagatcaggaacaagacgagttcctgatcgtttctggaagtggcagtgccattgccacttctcttcagcatcgtattggaggttctggctagggcagttaggcaagaaaaagaaattaaaggcatgcaaattagaaaagtagtgaaactgttcacagatgggatgatcttatatgtagaaaaatctaaggaatctactataaaaaccagtaaactaataaataggttcaacaaaggttcagaatacaaggctaatattaaaaaatgagtagtatttctatagagtagcaatcaacaaaccaaaaattaagaaaacaattttatttataataggatca

SEQ ID NO: 256214 - DNA, 694 bp, Homo sapiens
actaaggatccctcccccagctccccacacagactccctagaacacaacctctttctccttatatccctctccttgccagcacttccagggtgtttacactaggggttggaaaacttcttctgtgacagtccagagaggaaatattgtaaactctgcagatcccacaatcacggtgataactcctcaaccctgctgttggggtggaacagcagccacagcaagaaatgcttggccatggctgtgttccagtacaatgttatttatagacactgaaatttgaattgcatgttactttctcatgtcataaaatagtattcttcctttggttctttttcaaccattaaaatgtgaaaatcattcttggctcctgagctgtacaaaaacagacagtgggctggatttggcccatgggccatagtttgctgactcctggtttatgtatctgagtagtgttggtctcttgcttagactgggagcttgagacaaaagccacatctaagcttccttacctttaaaccccgggcccacaccacagtgtcagaaaacataagaagtacaagaaataagtttaggccaggcacggtaatcccagcactttgggaggccgaggcggatggatcacaaggtcaggagatcgcgaccatcctggctaacatggtgaaaccccatctctactaaaaatacaaaaaatta

SEQ ID NO: 256215 - DNA, 762 bp, Homo sapiens
cgtggcagatgaatgtagatgccggttctggaggctcttctgggtagaccagaagcacccacctcctccgctcacaccctagggcacagccaccttcccctctgccctttcccctcccccaggctctgctgcactccactttccccagcacttccagggtgtttacactaggggttggaaaacttcttctgtgacagtccagagaggaaatattgtaaactctgcagatcccacaatcacggtgataactcctcaaccctgctgttggggtggaacagcagccacagcaagaaatgcttggccatggctgtgttccagtacaatgttatttatagacactgaaatttgaattgcatgttactttctcatgtcataaaatagtattcttcctttggttctttttcaaccattaaaatgtgaaaatcattcttggctcctgagctgtacaaaaacagacagtgggctggatttggcccatgggccatagtttgctgactcctggtttatgtatctgagtagtgttggtctcttgcttagactgggagcttgagacaaaagccacatctaagcttccttacctttaaaccccgggcccacaccacagtgtcagaaaacataagaagtacaagaaataagtttaggccaggcacggtaatcccagcactttgggaggccgaggcggatggatcacaaggtcaggagatcgcgaccatcctggctaacatggtgaaaccccatctctactaaaaatacaaaaaatta

SEQ ID NO: 256216 - DNA, 664 bp, Homo sapiens
ggagaaggggtagttaacctgcttaggtgaatcagggaacgcttcacagaggaagtgatgtttacgcagagtcttgaaggacagataacagcttgctaggagagaaggtgggcatgaggggagaaggaggaaggcatgttgtaggcacaggggctggctggtacacgcaaagtgtcaaaagcatggaagggcatgatgtctatgggaaactttagttcaatatggtctaagcaaaaagaaaggtagagaaattgaaagatgtggcttgtccagagtaaggcatatgcaagttataattcaggctccagaactcattagctatataggtgaccttgagtaagtcacttgatttcttgagtctcagtttcaacatctgtaaaatgaggtgggcaatacctgtgtcattgtgtggtgatgagtatctaagatgataacagccatcatagccaacactcactgtgagcttcctcggtgccagctcatacctcaagtgcccactgagcacatgggaagtgcttggtgaaagctgttatactgaggctgtgctgcaacatgtggacttcatttcttaagccgagatgatgagggaagttatctgatttgctgtttagaaggattacgcggaagcagatagttatcaatctatgtttcaatccattctgaa

SEQ ID NO: 256217 - DNA, 1680 bp, Homo sapiens
aggcgtgtggggcaggaccagtccttcagcggccgggttcgcgccgcggtcgccggctgcttacgtgggcgggcctagtgtggggctgagggtgcgggtcgctatggcggtggacatcacgctgctattccgggccagcgtcaagaccgtgaagacgcggaacaaggcgctgggagtggcggtgggcggcggggtcgatggcagccgggacgagctgttccgccggagcccccggcccaagggcgacttctccagccgggcccgcgaagtgatttctcacattggcaaactgagagattttcttctggaacacaggaaagattatattaatgcttatagccataccatgtctgaatatgggaggatgacagacacagaacgagaccagatagaccaggatgcccagatattcatgaggacctgttcagaagcaattcagcaactacgaacagaagctcacaaggagatacattcccagcaagtgaaggagcacaggaccgctgttttggatttcattgaagattacttgaaaagagtatgtaaactttactcagaacagagagccatccgagttaaaagagtggtggataagaaaagattatctaagctggaaccagaaccaaatacaaagacaagagaatccacatcttctgagaaagtttcacagagtccttcaaaagactctgaagaaaaccctgccactgaagaacgtccagaaaaaattttggctgaaacacaacctgaattgggaacgtggggagatggcaaaggcgaagatgagttatccccagaagaaatacaaatgtttgaacaggaaaatcagcgactaattggtgaaatgaacagcttgtttgatgaagtgaggcaaatcgaagggagagtggttgagatttccagactccaagagatattcacggaaaaggttttgcaacaggaagctgagattgacagcattcaccagttagttgtgggggcaactgaaaatatcaaggaaggcaacgaagacataagagaggccattaaaaacaacgctggcttccgcgtgtggatcctcttcttcctcgtgatgtgctccttctccttgctcttcctcgactggtacgacagctagccagggccacgggggcccagcacgagagtcctcatgggcactcacagactgcgtgctttcatgtacttccagtgctggagcatggtatgaccagattttatcacagtgccatttgaagggaaaggagttcagacagacagacgtattccccaaaaagggataccccaggccgatggtgttcagccatttagcagctgaaaaaggaaacagtgcacaccaatgggaggcagcctgcgtagccctcatcaggcaagacagactgaatgcaggagtgggtgattagctgctccttgaacttgaggctgccttggcagcaggggcacagcaggcctcaagagcccctaattgtctcagggttcaaaggaagacactgacctttcccatcccggtagcttcagggaagatcatagttaataacgtctctcaacaaatgattacttctttgtttccttgtggcttcttgtctgtctgagtcaacgaatacacagacttactggattatagaagagaaaattcacatctgccttgttaatctaataaatataattacagccccttaaaaaaaaaaa

SEQ ID NO: 256218 - DNA, 1054 bp, Homo sapiens
aggcgtgtggggcaggaccagtccttcagcggccgggttcgcgccgcggtcgccggctgcttacgtgggcgggcctagtgtggggctgagggtgcgggtcgctatggcggtggacatcacgctgctattccgggccagcgtcaagaccgtgaagacgcggaacaaggcgctgggagtggcggtgggcggcggggtcgatggcagccgggacgagctgttccgccggagcccccggcccaagggcgacttctccagccgggcccgcgaagtgatttctcacattggcaaactgagagattttcttctggaacacaggaaagattatattaatgcttatagccataccatgtctgaatatgggaggatgacagacacagaacgagaccagatagaccaggatgcccagatattcatgaggacctgttcagaagcaattcagcaactacgaacagaagctcacaaggagatacattcccagcaagtgaaggagcacaggaccgctgttttggatttcattgaagattacttgaaaagagtatgtaaactttactcagaacagagagccatccgagttaaaagagtggtggataagaaaagattatctaagctggaaccagaaccaaatacaaagacaagagaatccacatcttctgagaaagtttcacagagtccttcaaaagactctgaagaaaaccctgccactgaagaacgtccagaaaaaattttggctgaaacacaacctgaattgggaacgtggggagatggcaaaggcgaagatgagttatccccagaagaaatacaaatgtttgaacaggaaaatcagcgactaattggtgaaatgaacagcttgtttgatgaagtgaggcaatcgaggggtggtgaattcgatccgggaatttcggaaggttgcacggatggattggagttacagttggggggacgaattcaagaggagagatcaaggctaacagggcggggctcagggggcggccggggggaattagggggtaatcaagaagcgtgaagggttcggtggtcgacttttctttgctcg

SEQ ID NO: 256219 - DNA, 1845 bp, Homo sapiens
aggcgtgtggggcaggaccagtccttcagcggccgggttcgcgccgcggtcgccggctgcttacgtgggcgggcctagtgtggggctgagggtgcgggtcgctatggcggtggacatcacgctgctattccgggccagcgtcaagaccgtgaagacgcggaacaaggcgctgggagtggcggtgggcggcggggtcgatggcagccgggacgagctgttccgccggagcccccggcccaagggcgacttctccagccgggcccgcgaagtgatttctcacattggcaaactgagagattttcttctggaacacaggaaagattatattaatgcttatagccataccatgtctgaatatgggaggatgacagacacagaacgagaccagatagaccaggatgcccagatattcatgaggacctgttcagaagcaattcagcaactacgaacagaagctcacaaggagatacattcccagcaagtgaaggagcacaggaccgctgttttggatttcattgaagattacttgaaaagtatttcattttcttttaaaggtcaaatgtaacatttcacaatagatgtgatgcagaatttagctttgctagctgaagactgtagtatctcattatatttaatgatggctttgcctgagaagctgttttaagcagtctctcttctggtattttcttctgcaacaggagtatgtaaactttactcagaacagagagccatccgagttaaaagagtggtggataagaaaagattatctaagctggaaccagaaccaaatacaaagacaagagaatccacatcttctgagaaagtttcacagagtccttcaaaagactctgaagaaaaccctgccactgaagaacgtccagaaaaaattttggctgaaacacaacctgaattgggaacgtggggagatggcaaaggcgaagatgagttatccccagaagaaatacaaatgtttgaacaggaaaatcagcgactaattggtgaaatgaacagcttgtttgatgaagtgaggcaaatcgaagggagagtggttgagatttccagactccaagagatattcacggaaaaggttttgcaacaggaagctgagattgacagcattcaccagttagttgtgggggcaactgaaaatatcaaggaaggcaacgaagacataagagaggccattaaaaacaacgctggcttccgcgtgtggatcctcttcttcctcgtgatgtgctccttctccttgctcttcctcgactggtacgacagctagccagggccacgggggcccagcacgagagtcctcatgggcactcacagactgcgtgctttcatgtacttccagtgctggagcatggtatgaccagattttatcacagtgccatttgaagggaaaggagttcagacagacagacgtattccccaaaaagggataccccaggccgatggtgttcagccatttagcagctgaaaaaggaaacagtgcacaccaatgggaggcagcctgcgtagccctcatcaggcaagacagactgaatgcaggagtgggtgattagctgctccttgaacttgaggctgccttggcagcaggggcacagcaggcctcaagagcccctaattgtctcagggttcaaaggaagacactgacctttcccatcccggtagcttcagggaagatcatagttaataacgtctctcaacaaatgattacttctttgtttccttgtggcttcttgtctgtctgagtcaacgaatacacagacttactggattatagaagagaaaattcacatctgccttgttaatctaataaatataattacagccccttaaaaaaaaaaa

SEQ ID NO: 256220 - DNA, 1581 bp, Homo sapiens
gggggccgcttgggtcccccccacccctggtccctggctgcttcccaccccgggctctctcctggcctcccacccccgcgcccggcttccaccatgacggtgatgtctggggagaacgtggacgaggcttcggccgccccgggccacccccaggatggcagctacccccggcaggccgaccacgacgaccacgagtgctgcgagcgcgtggtgatcaacatctccgggctgcgcttcgagacgcagctcaagaccctggcgcagttccccaacacgctgctgggcaaccctaagaaacgcatgcgctacttcgaccccctgaggaacgagtacttcttcgaccgcaaccggcccagcttcgacgccatcctctactactaccagtccggcggccgcctgcggaggccggtcaacgtgcccctggacatgttctccgaggagatcaagttttacgagttgggcgaggaggccatggagaagttccgggaggacgagggcttcatcaaggaggaggagcgccctctgcccgagaaggagtaccagcgccaggtgtggctgctcttcgagtaccccgagagctcggggcccgccagggtcatcgccatcgtctccgtcatggtcatcctcatctccatcgtcatcttttgcctggagacgctccccgagctgaaggatgacaaggacttcacgggcaccgtccaccgcatcgacaacaccacggtcatctacaattccaacatcttcacagaccccttcttcatcgtggaaacgctgtgtatcatctggttctccttcgagctggtggtgcgcttcttcgcctgccccagcaagacggacttcttcaaaaacatcatgaacttcatagacattgtggccatcattccttatttcatcaccctgggcaccgagatagctgagcaggaaggaaaccagaagggcgagcaggccacctccctggccatcctcagggtcatccgcttggtaagggtttttagaatcttcaagctctcccgccactctaagggcctccagatcctgggccagaccctcaaagctagtatgagagagctagggctgctcatctttttcctcttcatcggggtcatcctgttttctagtgcagtgtactttgccgaggcggaagaagctgagtcgcacttctccagtatccccgatgctttctggtgggcggtggtgtccatgaccactgtaggatacggtgacatgtaccctgtgacaattggaggcaagatcgtgggctccttgtgtgccatcgctggtgtgctaacaattgccctgcccgtacctgtcattgtgtccaatttcaactatttctaccaccgagaaactgagggggaagagcaggctcagttgctccacgtcagttcccctaacttagcctctgacagtgacctcagtcgccgcagttcctctactatgagcaagtatgagtacatggagatcgaagaggatatgaataatagcatagcccattatagacaggtcaatatcagaactgccaattgcaccacagctaaccaaaactgcgttaataagagcaagctactgaccgatgtttaa

SEQ ID NO: 256221 - DNA, 15789 bp, Homo sapiens
atggacagccagaacctggctggtgaggataaagattcacaaccggcagctgatggacctgcagcctctgaggacccaagtgccactgagtcagacctgcccaacccacatgtgggagaggtctctgtccttagttctgggagtcccaggcttcaggagactcctcaggactgcagtgggggtccggtgcggcgttgtgctctctgtaactgcggggagcccgctctacacgggcagcgggagctacggcgctttgagttgccatttgattggccccggtgtccagtggtgtcccctggggggagcccagggcccaatgaggcagtgctgcccagtgaggacctatcacagattggtttccctgagggccttacacctgcccacctaggagaacctggagggtcctgctgggctcaccattggtgtgctgcatggtcggcaggcgtatgggggcaggagggcccacaactatgtggtgtggacaaggccatcttctcagggatctcacagcgctgctcccactgcaccaggctcggtgcctccatcccttgccgctcacctggatgtccacggctttaccacttcccctgcgcgactgccagcggttccttcctatccatgaaaacactgcagctgctatgcccagagcacagtgagggggctgcatatctggaggaggctcgctgtgcagtgtgtgaggggccaggggagctgtgtgacctgttcttctgtaccagctgtgggcatcactatcacggggcctgcctggacactgctctgactgcccgcaaacgtgctggctggcagtgccctgaatgcaaagtgtgccaagcctgcaggaaacctgggaatgactctaagatgttggtttgcgagacgtgtgacaaaggataccatactttctgcctaaaaccacccatggaggaactgcctgctcactcttggaagtgcaaggcgtgccgggtgtgccgggcctgtggggcgggctcagcagaactgaatcccaactcggagtggtttgagaactactctctctgtcaccgctgtcacaaagcccagggaggtcagactatccgctccgttgctgagcagcataccccggtgtgtagcagattttcacccccagagcctggcgatacccccactgacgagcccgatgctctgtacgttgcatgccaagggcagccaaagggtgggcacgtgacctctatgcaacccaaggaaccagggcccctgcaatgtgaagccaaaccactagggaaagcaggggtccaacttgagccccagttggaggcccccctaaacgaggagatgccactgctgcccccacctgaggagtcacccctgtccccaccacctgaggaatcacccacgtccccaccacctgaggcatcacgcctgtcgccaccacctgaggaattgcccgcatccccacttcctgaggcattgcacctgtcccggccgctggaggaatcgcccctctctccgccgcctgaggagtctcctctgtctcccccacctgaatcatcacctttttctccactggaggagtcgcccttgtctccaccggaagagtcacccccatctcctgcacttgagacgcctctatccccaccacctgaagcatcgcccctgtccccaccatttgaagaatctcctttgtccccgccacctgaggaattgcccacttccccgccacctgaagcatctcgcctgtctccaccacctgaggagtcacccatgtcccctccacctgaagagtcacccatgtctccaccaccggaggcatctcgtctgttcccaccatttgaagagtctcctctgtcccctccacctgaggagtctcccctttccccaccacctgaggcatcacgcctgtccccaccacctgaggactcgcctatgtccccaccacctgaagaatcacctatgtcccccccacctgaggtatcgcgcctatcccccctgcctgtggtgtcacgcctgtctccaccgcctgaggaatctcccttgtccccaccggccctgtctcctttgggggagttagagtacccctttggtgccaaaggggacagtgaccctgagtcaccgttggctgcccccatcctggagacacccatcagccctccaccagaagctaactgcactgaccctgagcctgtcccccctatgatccttcccccatctccaggctccccagtggggccggcttctcccatcctgatggagccccttcctcctcagtgttcgccactccttcagcattccctggttccccaaaactcccctccttcccagtgctctcctcctgccctaccactgtccgttccctccccgttgagtcccatagggaaggtagtgggggtctcagatgaggctgagctgcacgagatggagactgagaaagtttcagaacctgaatgcccagccttggaacccagtgccaccagtcctctcccttccccaatgggggacctttcctgccccgcccccagccctgccccagccctggatgacttctctggcctaggggaagacacagcccctctggatgggattgatgctccgggttcacagccagagcctggacagacccctggcagtttggctagtgaacttaaaggctcccctgtgctcctggaccccgaggagctggcccctgtgacccctatggaggtctaccccgaatgcaagcagacagcagggcggggctcaccatgtgaagaacaggaagagccacgtgcaccggtggcccccacaccacccactctcatcaaatccgacatcgttaacgagatctctaatctgagccagggtgatgccagtgccagttttcctggctcagagcccctcctgggctctccagacccggaggggggtggctccctgtccatggagttgggggtctctacggatgttagtccagcccgagatgagggctccctacggctctgtactgactcactgccagagactgatgactcactattgtgcgatgctgggacagctatcagcggaggcaaagctgagggggagaaggggcggcggcgcagctccccagcccgttcccgcatcaaacagggtcgcagcagcagtttcccaggaagacgccggcctcgtggaggagcccatggagggcgtggtagaggacgggcccggctaaagtcaactgcttcttccattgagactctggtagttgctgacattgatagctctcccagtaaggaggaggaggaagaagatgatgacaccatgcagaataccgtggttctcttctccaacacagacaaatttgtcctaatgcaggacatgtgtgtggtatgtggcagctttggccggggggcagagggccacctccttgcctgttcgcagtgctctcagtgctatcacccttactgtgtcaacagcaagatcaccaaggtgatgctgctcaagggctggcgttgtgtggagtgtattgtgtgtgaggtgtgtggccaggcctccgacccctcacgcctgctgctctgtgatgactgtgatattagctaccacacatactgcctggaccccccactgctcaccgtccccaagggcggctggaagtgcaagtggtgtgtgtcctgtatgcagtgtggggctgcttcccctggcttccactgtgaatggcagaatagttacacacactgtgggccctgtgccagcctggtgacctgccctatctgtcatgctccttacgtagaagaggacctactaatccagtgccgccactgtgaacggtggatgcatgcaggctgtgagagcctcttcacagaggacgatgtggaccacgcacccgatgaaggctttgactgtgtctcctgccagccctacgtggtaaagcctgtggcgcctgttgcacctccagagctggtgcccatgaaggtgaaagagccagagccccagtactttcgcttcgaaggcgtgtggctgacagaaactggcatggccttgctgcgtaacctgaccatgtcaccactgcacaagcggcgccaacggcgaggacggcttggcctcccaggcgaggcaggattggagggttctgagccctcagatgcccttggccctgatgacaagaaggatggggacctggacaccgatgagctgctcaagggtgaaggtggtgtggagcacatggagtgcgaaattaaactggagggccccgtcagccctgatgtggagcctggcaaagaggagaccgaggaaagcaaaaaacgcaagcgtaaaccatatcggcctggcattggtggtttcatggtgcgacagcggaaatcccacacacgcacgaaaaaggggcctgctgcacaggcggaggtgttgagtggggatgggcagcccgacgaggtgatacctgctgacctgcctgcagagggcgccgtggagcagagcttagctgaaggggatgagaagaagaagcaacagcggcgagggcgcaagaggagcaaactggagggcatgttccctgcttacttgcaggaagccttctttgggaaggagctgctggacctgagccgtaaggccctttttgcagttggggtgggccggccaagctttggactagggaccccaaaagccaagggagatggaggctcagaaaggaaggaactccccacatcgcagaaaggagatgatggtccagatattgcagatgaagaatcccgtggcctcgagggcaaagccgatacaccaggacctgaggatgggggcgtgaaggcatccccagtgcccagtgaccctgagaagccaggcaccccaggtgaagggatgcttagctctgacttagacaggatttccacagaagaactgcccaagatggaatccaaggacctgcagcagctcttcaaggatgttctgggctctgaacgagaacagcatctgggttgtggaacccctggcctagaaggcagccgtacgccactgcagaggccctttcttcaaggtggactccctttgggcaatctgccctccagcagcccaatggactcctacccaggcctctgccagtccccgttcctggattctagggagcgcgggggcttctttagcccggaacccggtgagcccgacagcccctggacgggctcaggtggcaccacgccctccacccccacaacccccaccacggagggtgagggcgacggactctcctataaccagcggagtcttcagcgctgggagaaggatgaggagttgggccagctgtccaccatctcgcctgtgctctatgccaacattaattttcctaatctcaagcaagactacccagactggtcaagccgttgcaaacaaatcatgaagctctggagaaaggttccagcagctgacaaagccccctacctgcaaaaggccaaagataaccgggcagctcaccgcatcaacaaggtgcagaagcaggctgagagccagatcaacaagcagaccaaggtgggcgacatagcccgtaagactgaccgaccggccctacatctccgcattcccccgcagccaggggcactgggcagcccgccccccgctgctgcccccaccattttcattggcagccccactacccccgccggcttgtctacctctgcggacgggttcctgaagccgccggcgggctcggtgcctggccctgactcgcctggtgagctcttcctcaagctcccaccccaggtgcccgcccaagcgccttcgcaggacccctttggactggcccctgcctatcccctggagccccgcttccccacggcaccgcccacctatcccccctatcctagtcctacgggggcccctgcgcagcccccgatgctgggcgcctcatctcgtcctggggctggccagccaggggaattccacactaccccacctggcacccccagacaccagccctccacacctgacccgttcctcaaaccccgctgcccctcgctggataacttggctgtgcctgagagccctggggtagggggaggcaaagcttccgagcccctgctctcgcccccaccttttggggagtcccggaaggccctagaggtgaagaaggaagagcttggggcatcctctcctagctatgggcccccaaacctgggctttgttgactcaccctcctcaggcacccacctgggtggcctggagttaaagacacctgatgtcttcaaagcccccctgacccctcgggcatctcaggtagagccccagagcccgggcttgggcctaaggccccaggagccaccccctgcccaggctttggcaccttctcctccaagtcacccagacatctttcgccctggctcctacactgacccatatgctcagcccccattgactcctcggccccaacctccgccccctgagagctgctgtgctctgccccctcgctcactgccctccgaccctttctcccgagtgcctgtcagtcctcagtcccagtccagctcccagtctccactgacaccccggcctctgtctgctgaagctttttgcccatcacccgttacccctcgcttccagtcccctgacccttattctcgcccaccctcacgccctcagtcccgtgacccatttgccccattgcataagccaccccgaccccagccccctgaagttgcctttaaggctgggtctctagcccacacttcgctgggggctggggggttcccagcagccctgcccgcggggccagcaggtgagctccatgccaaggtcccaagtgggcagccccccaattttgtccggtcccctgggacgggtgcatttgtgggcaccccctctcccatgcgtttcactttccctcaggcagtaggggagccttccctaaagccccctgtccctcagcctggtctcccgccaccccatgggatcaacagccattttgggcccggccccaccttgggcaagcctcaaagcacaaactacacagtagccacagggaacttccacccatcgggcagccccctggggcccagcagcgggtccacaggggagagctatgggctgtccccactacgccctccgtcggttctgccaccacctgcacccgacggatccctcccctacctgtcccatggagcctcacagcgatcaggcatcacctctcctgtcgaaaagcgagaagacccagggactggaatgggtagctctttggcgacagctgaactcccaggtacccaggacccaggcatgtccggccttagccaaacagagctggagaagcaacggcagcgccagcggctacgagagctgctgattcggcagcagatccagcgcaacaccctgcggcaggagaaggaaacagctgcagcagctgcgggagcagtggggcctccaggcagctggggtgctgagcccagcagccctgcctttgagcagctgagtcgaggccagaccccctttgctgggacacaggacaagagcagccttgtggggttgcccccaagcaagctgagtggccccatcctggggccagggtccttccctagcgatgaccgactctcccggccacctccaccagccacgccttcctctatggatgtgaacagccggcaactggtaggaggctcccaagctttctatcagcgagcaccctatcctgggtccctgcccttacagcagcaacagcaacaactgtggcagcaacaacaggcaacagcagcaacctccatgcgatttgccatgtcagctcgctttccatcaactcctggacctgaacttggccgccaagccctaggttccccgttggcgggaatttccacccgtctgccaggccctggtgagccagtgcctggtccagctggtcctgcccagttcattgagctgcggcacaatgtacagaaaggactgggacctgggggcactccgtttcctggtcagggcccacctcagagaccccgtttttaccctgtaagtgaggacccccaccgactggctcctgaagggcttcggggcctggcggtatcaggtcttcccccacagaaaccctcagccccaccggcccctgaattgaacaacagtcttcatccaacaccccacaccaagggtcctaccctgccaactggtttggagctggtcaaccggcccccgtcgagcactgagcttggccgccccaatcctctggccctggaagctgggaagttgccctgtgaggatcccgagctggatgacgattttgatgcccacaaggccctagaggatgatgaagagcttgctcacctgggtctgggtgtggatgtggccaagggtgatgatgaacttggcaccttagaaaacctggagaccaatgacccccacttggatgacctgctcaatggagacgagtttgacctgctggcatatactgatcctgagctggacactggggacaagaaggatatcttcaatgagcacctgaggctggtagaatcggctaatgaggaggctgaacgggaggccctgctgcggggggtggagccaggacccttgggccctgaggagcgccctccccctgctgctgatgcctctgaaccccgcctggcatctgtgctccctgaggtgaagcccaaggtggaggagggtggacgccacccttctccttgccaattcaccattgctacccccaaggtagagcccgcacctgctgccaattcccttggcctggggctaaagccaggacagagcatgatgggcagccgggatacccggatgggcacagggccattttctagcagtgggcacacagctgagaaggcctcctttggggccacgggagggccaccagctcacctgctgacccccagcccactgagtggcccaggaggatcctccctgctggaaaagtttgagctcgagagtggggctttgaccttgcctggtggacctgcagcatctggggatgagctagacaagatggagagctcactggtagccagcgagttacccctgctcattgaggacctgttggagcatgagaagaaggagctgcagaagaagcagcagctttcagcacagttgcagcctgcccagcagcagcagcaacagcagcagcagcattccctactgcctgcaccaggccctgcccaggccatgtctttgccacatgagggctcttctcccagtttggctgggtcccaacagcagctttccctgggtcttgcagttgcccgacagccaggtttgccccagccactgatgcccacccagccaccagctcatgccctccagcaacgcctggctccatccatggctatggtgtccaatcaagggcatatgctaagtgggcagcatggagggcaggcaggcttggtaccccagcagagctcacagccagtgctatcacagaagcccatgggcaccatgccaccttccatgtgcatgaagccgcagcaattggcaatgcagcagcagctggcaaacagcttcttcccagatacagacctggacaaatttgctgcagaagatatcattggtcccattgcaaaggccaagatggtggctttgaaaggcatcaagaaagtgatggctcagggcagcattggggtggcacctggtatgaacagacagcaagtgtctctgctagcccagaggctctcggggggacctagcagtgatctgcagaaccatgtggcagctgggagtggccaggagcggagtgctggtgatccctcccagcctcgtcccaacccgcccacttttgctcagggagtgatcaatgaagctgaccagcggcagtatgaggagtggctgttccatacccagcagctcctacagatgcagctgaaggtgctagaggagcagattggtgtacaccgcaagtcccggaaggctctgtgtgccaagcagcgcactgccaaaaaagctggccgtgagttcccagaagctgatgctgagaagctcaagctggttacagagcagcagagcaagatccagaaacaactggatcaggtccggaaacagcagaaggagcacactaatctcatggcagaatatcggaacaagcagcagcaacaacagcagcagcagcagcaacaacagcaacagcactcagctgtgctggctctcagcccttcccagagtccccggctgctcaccaagctccctggtcagctgctccctggccatgggctgcagccaccacaggggcctccgggtgggcaagccggaggtcttcgcctgacccctgggggtatggcactacctggacagcctggtggccccttccttaatacagctctggcccaacagcagcaacagcaacattctggtggggctggatccctggctggcccttcagggggcttcttccctggcaaccttgctcttcgaagcctcggacctgattcaaggcttttacaggaaaggcagctgcagctgcagcagcaacgtatgcagctggcccagaaactgcagcagcagcagcagcagcaacagcagcagcagcaccttctaggacaggtggcaatccagcagcaacagcagcagggtcctggagtacagacaaaccaagctctgggtcccaagccccagggccttatgcctcccagcagccaccaaggcctcctggtccagcagctgtcccctcaaccaccccaggggccccagggcatgctgggccctgcccaggtggctgtgttgcagcagcagcaccctggagctttgggcccccagggccctcacagacaggtgcttatgacccagtcccgggtgctcagttccccccagctggcacagcagggtcagggccttatgggacacaggctggtcacagcccagcagcagcagcagcaacaacagcaccaacagcaagggtccatggcagggctgtcccatcttcagcaaagtctgatgtcacacagtgggcagcccaaactgagcgctcagcccatgggctctttacagcagcttcagcagcagcagcagctgcaacagcaacagcaacttcagcagcagcagcagcagcagctacaacagcaacagcaacttcagcagcaacagcttcaacagcagcaacagcagcagcagcttcaacaacagcagcagcaacagcttcaacagcagcaacagcagctacaacagcaacagcaacaacaacagcagcagtttcaacagcagcagcaacagcagcagatgggccttttaaaccagagtcgaactttactgtcccctcagcaacaacagcagcagcaagtggcacttggccctggcatgccagcaaagcctcttcaacacttttctagccctggagccctgggtccaaccctcctcctgacgggcaaggaacaaaacaccgtagacccagccgtttcttcagaggccactgaggggccctctacacatcagggagggccgttagcaataggaactacccctgagtcaatggccactgaaccaggagaggtaaagccctcactctctggggactcacaactcctgcttgtccaaccccagccccagcctcagcccagctctctgcagctgcagccacctctgaggcttccaggacaacagcagcagcaagttagcctgctccacacagcaggtggaggaagccatgggcagctaggcagtggatcatcttctgaggcctcatctgtgccccacctgctggctcagccctctgtttccttaggggatcagcctgggtccatgacccagaaccttctgggcccccaacagcccatgctagagcggcccatgcaaaataatacagggccacaacctcccaaaccaggacctgtcctccagtctgggcagggtctgcctggggttggaatcatgcctacggtgggtcagcttcgagcacagctccaaggagtcctggccaaaaacccacagctgcggcacttaagtcctcagcagcagcagcagctacaggcactcctcatgcagcggcagctgcagcagagtcaggcagtacgccagaccccaccctaccaggagcctgggacccagacctctcccctccagggcctcctgggctgccaacctcaacttgggggcttccctggaccacagacaggccccctccaggagctaggggcagggcctcgacctcagggcccaccccggctccctgccccaccaggagccttatctacaggaccagtccttggccctgtccatcccacacctccaccatccagccctcaagagccaaagagaccttcacaattaccttcccccagctcccagcttcccactgaggcccagctccctcccacccatccagggacccccaaacctcaggggccaaccttggagccgcctcctgggagggtctcacctgctgctgcccagcttgcagataccttgtttagcaagggtctgggaccttgggatcccccagacaacctagcagaaacccagaagccagagcagagcagcctggtacctgggcatctggaccaggtgaatggacaggtggtgcctgaggcatcccaactcagcatcaagcaggaacctcgggaagagccatgtgccctgggagcccagtcagtgaagagggaggccaatggggagccaataggggcaccaggaaccagcaaccacctcctgctggcaggccctcgctcagaagctgggcatctgctcttgcagaagctactccgggcaaagaatgtgcaactcagcactgggcaggggtccgaggggctgcgagctgagatcaacgggcacattgacagcaagctggctgggctggagcagaaactacagggtacccccagcaacaaggaggatgcagcagcaaggaagcctttgacaccgaagcccaagcgggtacagaaggcaagcgacaggttggtgagctcccgaaagaagctgcggaaggaggacggcgtcagggccagcgaggccttgctgaaacagctgaaacaggagctgtccctgctgcccctaacggagcctgctatcaccgccaattttagcctctttgccccctttggcagtggctgcccagtcaatgggcagagccagctgaggggggcctttggaagtggggcgctgcccactggccctgactactattcccagctgcttaccaagaataacctgagtaacccgccgacaccaccctcgtcgctgccccccaccccacccccatcggtgcagcagaagatggtgaatggcgtcaccccatctgaagagctgggggagcaccccaaggatgctgcctctgcccgggatagtgaaagggcactgagggatacttcagaggtgaagagtctagacctgctggctgccttgcctacaccccctcacaatcagactgaggatgtcaggatggagagtgatgaggatagcgattctcctgacagcattgtgccagcttcatcccctgagagcatcttgggggaggaggcccctcgtttccctcatctgggctcaggccggtgggagcaagaggaccgggccctctcccctgtcatccccctcattcctcgggacagcatcccagtcttcccagataccaaaccttatggggcccttggcctggaggtccctggaaagctgcctgtcacaacttgggaaaagggcaaaggaagtgaggtgtcagtcatgctcacagtctctgctgctgcagacaagaacctgaatggcgtgatggtggcagtggcggagctgctgagcatgaagatccccaactcctatgaggtgctgttcccagagagccccgcccggggaggcactgagccaaagaagggggaagctgagggtcctggtgggaaggaaaagggtctggaaggcaagagcccagacactggccctgattggctgaagcagtttgatgcagtgttggctggctataccctgaagaggcaactagacatcttgagcctcctgaaacaggagagccccgccccagagccacccactcagcacaggtatacctacaatgtctccaatctggatgtgcgacagctctcggccccacctcctgaagaaccctccccgcccccttcccccttggcaccttctcctgccagtccccctactgagcccttggttgaacttcccaccgaacccttggctgagccacccgtcccctcacctctgccactggcctcatcccctgaatcagcccgacccaagccccgtgcccggccccctgaagaaggtgaagatacccgtcctcctcgcctcaagaaatggaaaggagtgcgctggaagcggcttcggctgctgctgaccatccagaagggcagtggacggcaggaggatgagcgggaagtggcagagtttatggagcagcttggcacagccttgcgacctgacaaggtaccgcgagacatgcgtcgctgctgtttctgtcatgaggagggtgacggggccactgatgggcctgcccgtctgctgaacctggacctggacctgtgggtgcacctcaactgtgccctttggtccacggaggtgtatgagacccagggcggagcactgatgaatgtggaggttgccctgcaccgaggactgctaaccaagtgctccctgtgccagcgaactggtgccaccagcagctgcaatcgcatgcgttgccccaatgtctaccattttggttgtgccatccgcgccaagtgcatgttcttcaaggacaagaccatgctgtgtccaatgcataagatcaaggggccctgtgagcaagagctgagctcttttgctgtcttccggcgggtctacattgagcgggacgaggtgaagcaaatcgctagcatcattcagcggggagaacggctgcacatgttccgtgtgggggggcttgtgttccacgccatcggacagctgctgcctcaccagatggctgactttcatagtgccactgccctctatcccgtgggctacgaggccacgcgcatctattggagcctccgcaccaacaatcgtcgctgctgctatcgctgttctattggtgagaacaacgggcggccggagtttgtaatcaaagtcatcgagcagggcctggaggacctggtcttcactgacgcctctccccaggccgtgtggaatcgcatcattgagcctgtggctgccatgagaaaagaggctgacatgctgcgactcttccctgagtatctgaagggcgaggagctctttgggctgacggtgcatgccgtgcttcgcatagctgaatcactgcccggggtggagagctgtcaaaactatttattccgctatgggcgccacccccttatggagctgccactcatgatcaaccccactggctgtgcccgatcagagcctaaaatcctcacacactacaaacggccccataccctgaacagcaccagcatgtctaaggcatatcagagcaccttcacaggcgagaccaacaccccctacagcaagcagtttgtgcactccaagtcatctcagtaccggcggctgcgcaccgaatggaagaacaacgtgtacctggctcgctcccgtatccagggcctggggctctatgcagccaaggacctagaaaagcacacaatggttatcgagtacattggcaccatcattcggaacgaggtggccaaccggcgggagaaaatctacgaagagcagaatcgaggcatctacatgttccgaataaacaatgaacatgtgattgatgctacgttgaccggcggccctgccaggtacattaaccattcctgtgcccctaactgtgtggccgaagtcgtgacatttgacaaagaggacaaaatcatcatcatctccagccggcgaatccccaaaggagaggagctaacctatgactatcagtttgattttgaggacgatcagcacgagatcccctgccactgtggagcctggaattgtcggaaatggatgaactaa

SEQ ID NO: 256222 - DNA, 16614 bp, Homo sapiens
atggacagccagaacctggctggtgaggataaagattcacaaccggcagctgatggacctgcagcctctgaggacccaagtgccactgagtcagacctgcccaacccacatgtgggagaggtctctgtccttagttctgggagtcccaggcttcaggagactcctcaggactgcagtgggggtccggtgcggcgttgtgctctctgtaactgcggggagcccgctctacacgggcagcgggagctacggcgctttgagttgccatttgattggccccggtgtccagtggtgtcccctggggggagcccagggcccaatgaggcagtgctgcccagtgaggacctatcacagattggtttccctgagggccttacacctgcccacctaggagaacctggagggtcctgctgggctcaccattggtgtgctgcatggtcggcaggcgtatgggggcaggagggcccacaactatgtggtgtggacaaggccatcttctcagggatctcacagcgctgctcccactgcaccaggctcggtgcctccatcccttgccgctcacctggatgtccacggctttaccacttcccctgcgcgactgccagcggttccttcctatccatgaaaacactgcagctgctatgcccagagcacagtgagggggctgcatatctggaggaggctcgctgtgcagtgtgtgaggggccaggggagctgtgtgacctgttcttctgtaccagctgtgggcatcactatcacggggcctgcctggacactgctctgactgcccgcaaacgtgctggctggcagtgccctgaatgcaaagtgtgccaagcctgcaggaaacctgggaatgactctaagatgttggtttgcgagacgtgtgacaaaggataccatactttctgcctaaaaccacccatggaggaactgcctgctcactcttggaagtgcaaggcgtgccgggtgtgccgggcctgtggggcgggctcagcagaactgaatcccaactcggagtggtttgagaactactctctctgtcaccgctgtcacaaagcccagggaggtcagactatccgctccgttgctgagcagcataccccggtgtgtagcagattttcacccccagagcctggcgatacccccactgacgagcccgatgctctgtacgttgcatgccaagggcagccaaagggtgggcacgtgacctctatgcaacccaaggaaccagggcccctgcaatgtgaagccaaaccactagggaaagcaggggtccaacttgagccccagttggaggcccccctaaacgaggagatgccactgctgcccccacctgaggagtcacccctgtccccaccacctgaggaatcacccacgtccccaccacctgaggcatcacgcctgtcgccaccacctgaggaattgcccgcatccccacttcctgaggcattgcacctgtcccggccgctggaggaatcgcccctctctccgccgcctgaggagtctcctctgtctcccccacctgaatcatcacctttttctccactggaggagtcgcccttgtctccaccggaagagtcacccccatctcctgcacttgagacgcctctatccccaccacctgaagcatcgcccctgtccccaccatttgaagaatctcctttgtccccgccacctgaggaattgcccacttccccgccacctgaagcatctcgcctgtctccaccacctgaggagtcacccatgtcccctccacctgaagagtcacccatgtctccaccaccggaggcatctcgtctgttcccaccatttgaagagtctcctctgtcccctccacctgaggagtctcccctttccccaccacctgaggcatcacgcctgtccccaccacctgaggactcgcctatgtccccaccacctgaagaatcacctatgtcccccccacctgaggtatcgcgcctatcccccctgcctgtggtgtcacgcctgtctccaccgcctgaggaatctcccttgtccccaccgcctgaggagtctcccacgtcccctccacctgaggcttcacgcctctccccaccacctgaggactcccccacatccccaccacctgaggactcacctgcttccccaccaccggaggactcgctcatgtccctgccgctggaggagtcacccctgttgccactacctgaggagccgcaactctgcccccggtccgaggggccgcacctgtcaccccggcctgaggagccgcacctgtccccccggcctgaggagccacacctatctccgcaggctgaggagccacacctgtccccccagcctgaggagccatgcctatgcgctgtgcctgaggagccacacttgtccccccaggctgagggaccacatctgtcccctcagcctgaggaattgcacctgtccccccagactgaggagccgcacctgtctcctgtgcctgaggagccatgcttgtccccccaacctgaggaatcacacctgtccccccagtctgaggagccatgcctgtccccccggcctgaggaatcgcatctgtcccctgagcttgagaagccacccctgtcccctcggcctgaaaagccccctgaggagccaggccaatgccctgcacctgaggagctgcccttgttccctccccctggggaaccatccttatctcccttgcttggagagccagccctgtctgagcctggggaaccacctctgtcccctctgcccgaggagctgccgttgtccccatctggggagccatccttgtcgcctcagctgatgccaccagatccccttcctcctccactctcacccattatcacagctgcggccccaccggccctgtctcctttgggggagttagagtacccctttggtgccaaaggggacagtgaccctgagtcaccgttggctgcccccatcctggagacacccatcagccctccaccagaagctaactgcactgaccctgagcctgtcccccctatgatccttcccccatctccaggctccccagtggggccggcttctcccatcctgatggagccccttcctcctcagtgttcgccactccttcagcattccctggttccccaaaactcccctccttcccagtgctctcctcctgccctaccactgtccgttccctccccgttgagtcccatagggaaggtagtgggggtctcagatgaggctgagctgcacgagatggagactgagaaagtttcagaacctgaatgcccagccttggaacccagtgccaccagtcctctcccttccccaatgggggacctttcctgccccgcccccagccctgccccagccctggatgacttctctggcctaggggaagacacagcccctctggatgggattgatgctccgggttcacagccagagcctggacagacccctggcagtttggctagtgaacttaaaggctcccctgtgctcctggaccccgaggagctggcccctgtgacccctatggaggtctaccccgaatgcaagcagacagcagggcggggctcaccatgtgaagaacaggaagagccacgtgcaccggtggcccccacaccacccactctcatcaaatccgacatcgttaacgagatctctaatctgagccagggtgatgccagtgccagttttcctggctcagagcccctcctgggctctccagacccggaggggggtggctccctgtccatggagttgggggtctctacggatgttagtccagcccgagatgagggctccctacggctctgtactgactcactgccagagactgatgactcactattgtgcgatgctgggacagctatcagcggaggcaaagctgagggggagaaggggcggcggcgcagctccccagcccgttcccgcatcaaacagggtcgcagcagcagtttcccaggaagacgccggcctcgtggaggagcccatggagggcgtggtagaggacgggcccggctaaagtcaactgcttcttccattgagactctggtagttgctgacattgatagctctcccagtaaggaggaggaggaagaagatgatgacaccatgcagaataccgtggttctcttctccaacacagacaaatttgtcctaatgcaggacatgtgtgtggtatgtggcagctttggccggggggcagagggccacctccttgcctgttcgcagtgctctcagtgctatcacccttactgtgtcaacagcaagatcaccaaggtgatgctgctcaagggctggcgttgtgtggagtgtattgtgtgtgaggtgtgtggccaggcctccgacccctcacgcctgctgctctgtgatgactgtgatattagctaccacacatactgcctggaccccccactgctcaccgtccccaagggcggctggaagtgcaagtggtgtgtgtcctgtatgcagtgtggggctgcttcccctggcttccactgtgaatggcagaatagttacacacactgtgggccctgtgccagcctggtgacctgccctatctgtcatgctccttacgtagaagaggacctactaatccagtgccgccactgtgaacggtggatgcatgcaggctgtgagagcctcttcacagaggacgatgtggaccacgcacccgatgaaggctttgactgtgtctcctgccagccctacgtggtaaagcctgtggcgcctgttgcacctccagagctggtgcccatgaaggtgaaagagccagagccccagtactttcgcttcgaaggcgtgtggctgacagaaactggcatggccttgctgcgtaacctgaccatgtcaccactgcacaagcggcgccaacggcgaggacggcttggcctcccaggcgaggcaggattggagggttctgagccctcagatgcccttggccctgatgacaagaaggatggggacctggacaccgatgagctgctcaagggtgaaggtggtgtggagcacatggagtgcgaaattaaactggagggccccgtcagccctgatgtggagcctggcaaagaggagaccgaggaaagcaaaaaacgcaagcgtaaaccatatcggcctggcattggtggtttcatggtgcgacagcggaaatcccacacacgcacgaaaaaggggcctgctgcacaggcggaggtgttgagtggggatgggcagcccgacgaggtgatacctgctgacctgcctgcagagggcgccgtggagcagagcttagctgaaggggatgagaagaagaagcaacagcggcgagggcgcaagaggagcaaactggagggcatgttccctgcttacttgcaggaagccttctttgggaaggagctgctggacctgagccgtaaggccctttttgcagttggggtgggccggccaagctttggactagggaccccaaaagccaagggagatggaggctcagaaaggaaggaactccccacatcgcagaaaggagatgatggtccagatattgcagatgaagaatcccgtggcctcgagggcaaagccgatacaccaggacctgaggatgggggcgtgaaggcatccccagtgcccagtgaccctgagaagccaggcaccccaggtgaagggatgcttagctctgacttagacaggatttccacagaagaactgcccaagatggaatccaaggacctgcagcagctcttcaaggatgttctgggctctgaacgagaacagcatctgggttgtggaacccctggcctagaaggcagccgtacgccactgcagaggccctttcttcaaggtggactccctttgggcaatctgccctccagcagcccaatggactcctacccaggcctctgccagtccccgttcctggattctagggagcgcgggggcttctttagcccggaacccggtgagcccgacagcccctggacgggctcaggtggcaccacgccctccacccccacaacccccaccacggagggtgagggcgacggactctcctataaccagcggagtcttcagcgctgggagaaggatgaggagttgggccagctgtccaccatctcgcctgtgctctatgccaacattaattttcctaatctcaagcaagactacccagactggtcaagccgttgcaaacaaatcatgaagctctggagaaaggttccagcagctgacaaagccccctacctgcaaaaggccaaagataaccgggcagctcaccgcatcaacaaggtgcagaagcaggctgagagccagatcaacaagcagaccaaggtgggcgacatagcccgtaagactgaccgaccggccctacatctccgcattcccccgcagccaggggcactgggcagcccgccccccgctgctgcccccaccattttcattggcagccccactacccccgccggcttgtctacctctgcggacgggttcctgaagccgccggcgggctcggtgcctggccctgactcgcctggtgagctcttcctcaagctcccaccccaggtgcccgcccaagcgccttcgcaggacccctttggactggcccctgcctatcccctggagccccgcttccccacggcaccgcccacctatcccccctatcctagtcctacgggggcccctgcgcagcccccgatgctgggcgcctcatctcgtcctggggctggccagccaggggaattccacactaccccacctggcacccccagacaccagccctccacacctgacccgttcctcaaaccccgctgcccctcgctggataacttggctgtgcctgagagccctggggtagggggaggcaaagcttccgagcccctgctctcgcccccaccttttggggagtcccggaaggccctagaggtgaagaaggaagagcttggggcatcctctcctagctatgggcccccaaacctgggctttgttgactcaccctcctcaggcacccacctgggtggcctggagttaaagacacctgatgtcttcaaagcccccctgacccctcgggcatctcaggtagagccccagagcccgggcttgggcctaaggccccaggagccaccccctgcccaggctttggcaccttctcctccaagtcacccagacatctttcgccctggctcctacactgacccatatgctcagcccccattgactcctcggccccaacctccgccccctgagagctgctgtgctctgccccctcgctcactgccctccgaccctttctcccgagtgcctgtcagtcctcagtcccagtccagctcccagtctccactgacaccccggcctctgtctgctgaagctttttgcccatcacccgttacccctcgcttccagtcccctgacccttattctcgcccaccctcacgccctcagtcccgtgacccatttgccccattgcataagccaccccgaccccagccccctgaagttgcctttaaggctgggtctctagcccacacttcgctgggggctggggggttcccagcagccctgcccgcggggccagcaggtgagctccatgccaaggtcccaagtgggcagccccccaattttgtccggtcccctgggacgggtgcatttgtgggcaccccctctcccatgcgtttcactttccctcaggcagtaggggagccttccctaaagccccctgtccctcagcctggtctcccgccaccccatgggatcaacagccattttgggcccggccccaccttgggcaagcctcaaagcacaaactacacagtagccacagggaacttccacccatcgggcagccccctggggcccagcagcgggtccacaggggagagctatgggctgtccccactacgccctccgtcggttctgccaccacctgcacccgacggatccctcccctacctgtcccatggagcctcacagcgatcaggcatcacctctcctgtcgaaaagcgagaagacccagggactggaatgggtagctctttggcgacagctgaactcccaggtacccaggacccaggcatgtccggccttagccaaacagagctggagaagcaacggcagcgccagcggctacgagagctgctgattcggcagcagatccagcgcaacaccctgcggcaggagaaggaaacagctgcagcagctgcgggagcagtggggcctccaggcagctggggtgctgagcccagcagccctgcctttgagcagctgagtcgaggccagaccccctttgctgggacacaggacaagagcagccttgtggggttgcccccaagcaagctgagtggccccatcctggggccagggtccttccctagcgatgaccgactctcccggccacctccaccagccacgccttcctctatggatgtgaacagccggcaactggtaggaggctcccaagctttctatcagcgagcaccctatcctgggtccctgcccttacagcagcaacagcaacaactgtggcagcaacaacaggcaacagcagcaacctccatgcgatttgccatgtcagctcgctttccatcaactcctggacctgaacttggccgccaagccctaggttccccgttggcgggaatttccacccgtctgccaggccctggtgagccagtgcctggtccagctggtcctgcccagttcattgagctgcggcacaatgtacagaaaggactgggacctgggggcactccgtttcctggtcagggcccacctcagagaccccgtttttaccctgtaagtgaggacccccaccgactggctcctgaagggcttcggggcctggcggtatcaggtcttcccccacagaaaccctcagccccaccggcccctgaattgaacaacagtcttcatccaacaccccacaccaagggtcctaccctgccaactggtttggagctggtcaaccggcccccgtcgagcactgagcttggccgccccaatcctctggccctggaagctgggaagttgccctgtgaggatcccgagctggatgacgattttgatgcccacaaggccctagaggatgatgaagagcttgctcacctgggtctgggtgtggatgtggccaagggtgatgatgaacttggcaccttagaaaacctggagaccaatgacccccacttggatgacctgctcaatggagacgagtttgacctgctggcatatactgatcctgagctggacactggggacaagaaggatatcttcaatgagcacctgaggctggtagaatcggctaatgaggaggctgaacgggaggccctgctgcggggggtggagccaggacccttgggccctgaggagcgccctccccctgctgctgatgcctctgaaccccgcctggcatctgtgctccctgaggtgaagcccaaggtggaggagggtggacgccacccttctccttgccaattcaccattgctacccccaaggtagagcccgcacctgctgccaattcccttggcctggggctaaagccaggacagagcatgatgggcagccgggatacccggatgggcacagggccattttctagcagtgggcacacagctgagaaggcctcctttggggccacgggagggccaccagctcacctgctgacccccagcccactgagtggcccaggaggatcctccctgctggaaaagtttgagctcgagagtggggctttgaccttgcctggtggacctgcagcatctggggatgagctagacaagatggagagctcactggtagccagcgagttacccctgctcattgaggacctgttggagcatgagaagaaggagctgcagaagaagcagcagctttcagcacagttgcagcctgcccagcagcagcagcaacagcagcagcagcattccctactgcctgcaccaggccctgcccaggccatgtctttgccacatgagggctcttctcccagtttggctgggtcccaacagcagctttccctgggtcttgcagttgcccgacagccaggtttgccccagccactgatgcccacccagccaccagctcatgccctccagcaacgcctggctccatccatggctatggtgtccaatcaagggcatatgctaagtgggcagcatggagggcaggcaggcttggtaccccagcagagctcacagccagtgctatcacagaagcccatgggcaccatgccaccttccatgtgcatgaagccgcagcaattggcaatgcagcagcagctggcaaacagcttcttcccagatacagacctggacaaatttgctgcagaagatatcattggtcccattgcaaaggccaagatggtggctttgaaaggcatcaagaaagtgatggctcagggcagcattggggtggcacctggtatgaacagacagcaagtgtctctgctagcccagaggctctcggggggacctagcagtgatctgcagaaccatgtggcagctgggagtggccaggagcggagtgctggtgatccctcccagcctcgtcccaacccgcccacttttgctcagggagtgatcaatgaagctgaccagcggcagtatgaggagtggctgttccatacccagcagctcctacagatgcagctgaaggtgctagaggagcagattggtgtacaccgcaagtcccggaaggctctgtgtgccaagcagcgcactgccaaaaaagctggccgtgagttcccagaagctgatgctgagaagctcaagctggttacagagcagcagagcaagatccagaaacaactggatcaggtccggaaacagcagaaggagcacactaatctcatggcagaatatcggaacaagcagcagcaacaacagcagcagcagcagcaacaacagcaacagcactcagctgtgctggctctcagcccttcccagagtccccggctgctcaccaagctccctggtcagctgctccctggccatgggctgcagccaccacaggggcctccgggtgggcaagccggaggtcttcgcctgacccctgggggtatggcactacctggacagcctggtggccccttccttaatacagctctggcccaacagcagcaacagcaacattctggtggggctggatccctggctggcccttcagggggcttcttccctggcaaccttgctcttcgaagcctcggacctgattcaaggcttttacaggaaaggcagctgcagctgcagcagcaacgtatgcagctggcccagaaactgcagcagcagcagcagcagcaacagcagcagcagcaccttctaggacaggtggcaatccagcagcaacagcagcagggtcctggagtacagacaaaccaagctctgggtcccaagccccagggccttatgcctcccagcagccaccaaggcctcctggtccagcagctgtcccctcaaccaccccaggggccccagggcatgctgggccctgcccaggtggctgtgttgcagcagcagcaccctggagctttgggcccccagggccctcacagacaggtgcttatgacccagtcccgggtgctcagttccccccagctggcacagcagggtcagggccttatgggacacaggctggtcacagcccagcagcagcagcagcaacaacagcaccaacagcaagggtccatggcagggctgtcccatcttcagcaaagtctgatgtcacacagtgggcagcccaaactgagcgctcagcccatgggctctttacagcagcttcagcagcagcagcagctgcaacagcaacagcaacttcagcagcagcagcagcagcagctacaacagcaacagcaacttcagcagcaacagcttcaacagcagcaacagcagcagcagcttcaacaacagcagcagcaacagcttcaacagcagcaacagcagctacaacagcaacagcaacaacaacagcagcagtttcaacagcagcagcaacagcagcagatgggccttttaaaccagagtcgaactttactgtcccctcagcaacaacagcagcagcaagtggcacttggccctggcatgccagcaaagcctcttcaacacttttctagccctggagccctgggtccaaccctcctcctgacgggcaaggaacaaaacaccgtagacccagccgtttcttcagaggccactgaggggccctctacacatcagggagggccgttagcaataggaactacccctgagtcaatggccactgaaccaggagaggtaaagccctcactctctggggactcacaactcctgcttgtccaaccccagccccagcctcagcccagctctctgcagctgcagccacctctgaggcttccaggacaacagcagcagcaagttagcctgctccacacagcaggtggaggaagccatgggcagctaggcagtggatcatcttctgaggcctcatctgtgccccacctgctggctcagccctctgtttccttaggggatcagcctgggtccatgacccagaaccttctgggcccccaacagcccatgctagagcggcccatgcaaaataatacagggccacaacctcccaaaccaggacctgtcctccagtctgggcagggtctgcctggggttggaatcatgcctacggtgggtcagcttcgagcacagctccaaggagtcctggccaaaaacccacagctgcggcacttaagtcctcagcagcagcagcagctacaggcactcctcatgcagcggcagctgcagcagagtcaggcagtacgccagaccccaccctaccaggagcctgggacccagacctctcccctccagggcctcctgggctgccaacctcaacttgggggcttccctggaccacagacaggccccctccaggagctaggggcagggcctcgacctcagggcccaccccggctccctgccccaccaggagccttatctacaggaccagtccttggccctgtccatcccacacctccaccatccagccctcaagagccaaagagaccttcacaattaccttcccccagctcccagcttcccactgaggcccagctccctcccacccatccagggacccccaaacctcaggggccaaccttggagccgcctcctgggagggtctcacctgctgctgcccagcttgcagataccttgtttagcaagggtctgggaccttgggatcccccagacaacctagcagaaacccagaagccagagcagagcagcctggtacctgggcatctggaccaggtgaatggacaggtggtgcctgaggcatcccaactcagcatcaagcaggaacctcgggaagagccatgtgccctgggagcccagtcagtgaagagggaggccaatggggagccaataggggcaccaggaaccagcaaccacctcctgctggcaggccctcgctcagaagctgggcatctgctcttgcagaagctactccgggcaaagaatgtgcaactcagcactgggcaggggtccgaggggctgcgagctgagatcaacgggcacattgacagcaagctggctgggctggagcagaaactacagggtacccccagcaacaaggaggatgcagcagcaaggaagcctttgacaccgaagcccaagcgggtacagaaggcaagcgacaggttggtgagctcccgaaagaagctgcggaaggaggacggcgtcagggccagcgaggccttgctgaaacagctgaaacaggagctgtccctgctgcccctaacggagcctgctatcaccgccaattttagcctctttgccccctttggcagtggctgcccagtcaatgggcagagccagctgaggggggcctttggaagtggggcgctgcccactggccctgactactattcccagctgcttaccaagaataacctgagtaacccgccgacaccaccctcgtcgctgccccccaccccacccccatcggtgcagcagaagatggtgaatggcgtcaccccatctgaagagctgggggagcaccccaaggatgctgcctctgcccgggatagtgaaagggcactgagggatacttcagaggtgaagagtctagacctgctggctgccttgcctacaccccctcacaatcagactgaggatgtcaggatggagagtgatgaggatagcgattctcctgacagcattgtgccagcttcatcccctgagagcatcttgggggaggaggcccctcgtttccctcatctgggctcaggccggtgggagcaagaggaccgggccctctcccctgtcatccccctcattcctcgggacagcatcccagtcttcccagataccaaaccttatggggcccttggcctggaggtccctggaaagctgcctgtcacaacttgggaaaagggcaaaggaagtgaggtgtcagtcatgctcacagtctctgctgctgcagacaagaacctgaatggcgtgatggtggcagtggcggagctgctgagcatgaagatccccaactcctatgaggtgctgttcccagagagccccgcccggggaggcactgagccaaagaagggggaagctgagggtcctggtgggaaggaaaagggtctggaaggcaagagcccagacactggccctgattggctgaagcagtttgatgcagtgttggctggctataccctgaagaggcaactagacatcttgagcctcctgaaacaggagagccccgccccagagccacccactcagcacaggtatacctacaatgtctccaatctggatgtgcgacagctctcggccccacctcctgaagaaccctccccgcccccttcccccttggcaccttctcctgccagtccccctactgagcccttggttgaacttcccaccgaacccttggctgagccacccgtcccctcacctctgccactggcctcatcccctgaatcagcccgacccaagccccgtgcccggccccctgaagaaggtgaagatacccgtcctcctcgcctcaagaaatggaaaggagtgcgctggaagcggcttcggctgctgctgaccatccagaagggcagtggacggcaggaggatgagcgggaagtggcagagtttatggagcagcttggcacagccttgcgacctgacaaggtaccgcgagacatgcgtcgctgctgtttctgtcatgaggagggtgacggggccactgatgggcctgcccgtctgctgaacctggacctggacctgtgggtgcacctcaactgtgccctttggtccacggaggtgtatgagacccagggcggagcactgatgaatgtggaggttgccctgcaccgaggactgctaaccaagtgctccctgtgccagcgaactggtgccaccagcagctgcaatcgcatgcgttgccccaatgtctaccattttggttgtgccatccgcgccaagtgcatgttcttcaaggacaagaccatgctgtgtccaatgcataagatcaaggggccctgtgagcaagagctgagctcttttgctgtcttccggcgggtctacattgagcgggacgaggtgaagcaaatcgctagcatcattcagcggggagaacggctgcacatgttccgtgtgggggggcttgtgttccacgccatcggacagctgctgcctcaccagatggctgactttcatagtgccactgccctctatcccgtgggctacgaggccacgcgcatctattggagcctccgcaccaacaatcgtcgctgctgctatcgctgttctattggtgagaacaacgggcggccggagtttgtaatcaaagtcatcgagcagggcctggaggacctggtcttcactgacgcctctccccaggccgtgtggaatcgcatcattgagcctgtggctgccatgagaaaagaggctgacatgctgcgactcttccctgagtatctgaagggcgaggagctctttgggctgacggtgcatgccgtgcttcgcatagctgaatcactgcccggggtggagagctgtcaaaactatttattccgctatgggcgccacccccttatggagctgccactcatgatcaaccccactggctgtgcccgatcagagcctaaaatcctcacacactacaaacggccccataccctgaacagcaccagcatgtctaaggcatatcagagcaccttcacaggcgagaccaacaccccctacagcaagcagtttgtgcactccaagtcatctcagtaccggcggctgcgcaccgaatggaagaacaacgtgtacctggctcgctcccgtatccagggcctggggctctatgcagccaaggacctagaaaagcacacaatggttatcgagtacattggcaccatcattcggaacgaggtggccaaccggcgggagaaaatctacgaagagcagaatcgaggcatctacatgttccgaataaacaatgaacatgtgattgatgctacgttgaccggcggccctgccaggtacattaaccattcctgtgcccctaactgtgtggccgaagtcgtgacatttgacaaagaggacaaaatcatcatcatctccagccggcgaatccccaaaggagaggagctaacctatgactatcagtttgattttgaggacgatcagcacgagatcccctgccactgtggagcctggaattgtcggaaatggatgaactaa

SEQ ID NO: 256223 - DNA, 379 bp, Homo sapiens
acagaagcttctttcttatttcatatagcagcatggggtggatgaataagtgtccatggacgctctctatgtagtcattcaagaacccaggtgggttggggctcttccatcttcaacagctgggttcctgaatgattgcatggaggagacaaccatggacgcttgttcatcagttcatcactagtagtcatcagtcaagaaatctaagaataagaatgccatggaggcagggttatcagataaaatgtagaacaacaatgctatatgtagaacatactagcactaaaatattattctgtatttacctgaaatttaaatttaactagattttccatattctgtttgctaaatatggcagcactacatgtaactatgtaag

SEQ ID NO: 256224 - DNA, 219 bp, Homo sapiens
cattatgtactatttacaattgattatatggcacattatacctttttatggtccctgacatgtcactactgatttaaaactaagaaaacttagagtgttgctttgaaccaggttgttacaaaatagctgctttatcacttatggaaaaaacattctgtccaactaacaaagcagagggatcttcaggaaaaagcacttatttttaggtttgacctgctg

SEQ ID NO: 256225 - DNA, 565 bp, Homo sapiens
agcctgtcttggcttattggactaaatgagaggctaagaagggaatgctgtcctatgtcagggcgttataggtaagtcatgaaattttctctaatgagatttacaaagggtggtctttaacaccagaaggtatagctactagttataaccagtattcaaaatgagctgggcttgaacctagtgaaagtgtcatagtttcatcaaagacctgtatgaccagaatagaaaattatacctatagggctaccagatgtccatagaaaggtaaatagaactttggttggacagggttaggatttaaaatcacactggtacactgtagaagtagaataaaggagagtgaagtctggtaaagacgatgctagacaagattatagtactaaacatagaaaacaattttgtacagtgatcagataggaaataatggctagtatacattccagcagaaaacataatttgtggacttgttaaattattttctgttctgttgttccatcatttcataattcagcctcctgtctgtcaattcttctttcagtggaaataaagccagtggagaaaccaa

SEQ ID NO: 256226 - DNA, 468 bp, Homo sapiens
agcacaaggctagacaaatagaccagtgggacagagcgtccagaaataaacccaaatgtatagaactatctagttgatgaaaatgatgtcattgcaatgtagtaaggaaatgatcgtcttttcaataagtggtatggaagcagttggatatccatattaaaggagaacatagaatattggtcccatcatgccatgcacacaaatcaattccagatgatcctagacctaaaaataaaaggtgaaagaaagcttctagaagatagcatatcttcctgtccttggtaggcaaagacagggtacaaaaaacaggatacaaaaaagcactgaccctaaagaaagactgacaaattgggctgcattaataggtttgcatcaaaatacaccgttaagagagaagggcaacccacagagtttgcaatacatctatctgagaaattataatgaggctataaataactcctatgtagc

SEQ ID NO: 256227 - DNA, 444 bp, Homo sapiens
cctaaaataagtcttctaagtaagtcattcacaataaacacttttactatcaatatgtgattttagacagttgcctttagtctcagtaatgtgatgatatttctaattcatacttgggagttacctaataaaaatcagtgaaaaggaggacagcttgtcatcattctggtgtttactctcttgtagcatgcacttctcatcatgtgtttaagccccagtgtagcaatgcagaatggggattgtattaagatgttcacactactattcagcaatacccataggttaaccaagcataaatttctatagtatgtaggtgtcaatgtacctaaaataataaatacacatattatgtaaatttaaatgagttattattttaatatatggagcatacatttaatatattttcaaaacttaaagtttttgttggaaaacttcacaaaatga

SEQ ID NO: 256228 - DNA, 501 bp, Homo sapiens
tgttcaataaaaatcattactttcactttaccacatattcacattttgaatatcctaacaagtccccaaacatccccatttctaaatccccttttacggaagtttagaacggggaaagtcacaaagccctaaggccttaagctgacttgagactttccgggtggtaggaggcttctgctttgttctctgtgttcgctaacgccttggggcagcagtgccaagtgagctgggaaggtgagtggtgtctttgttttgtagaacggaagaaatagtgtggatgccacggttttgcttttgttagagggctgtatgaaagctcagaattaccttaaattccaaattaattaggtcatcctgtaaaattacccttgctgaggcaccccttagaaggtttcaaggtggccctagggttagacatatcccacatgaagacctctggtccagtgttgaaaatttctgttatttttgtatgttaataaaatgttttcatcagtaaaaaag

SEQ ID NO: 256229 - DNA, 413 bp, Homo sapiens
attctggagtgtgttaatgtggtaatatacgtggaaggaccagcagggtgggtcactgcttccctgggtctgactcttagctgttagaataaaaaacaacatttttggcagggcctggtagctcatacctgtaatcctagcactttgggaggccaaggcaggcagatcacctgaggttcggagttcaggaccagcctggccaacatggtgaaaccccatctctactaaaaatacaaaaatcagctgggtatggtggtgagcgcctctaatcctagctacttgggaggcttaggcaggagaatcacttgaacgcaggagaatcacttgaacccaggaggcagaggttgcagtgagccgagatcatgccactgcactccagcctgggcaacagagcaagactccatctcaaaaaa

SEQ ID NO: 256230 - DNA, 441 bp, Homo sapiens
gcatgggaagaatgctctgggagaacagatgagactgaaggatgggaaggagcagaaacaaaggacaggtggcgaataaggaaggaagagatctgccatttgtgactcttcttaaggtcacagcaagaagccagtggggtcatggacagctaccatgggacagctactccccagcagctctgcctccttttctgcctcaaggaagcagggagaaatgtccagagcacggaaatagctcttcccagccaagcaccactccccagcaagcgtccccacctggtttgctttcatggctggcatttgacacagcctgatttatagaaactgagaaagtgaccgttctcaaattccctcttaacttgggatgcctcaaattcaattaaaaggagatgaacacagagtgggaagaacttggagaaataataaattcatatgaatgag

SEQ ID NO: 256231 - DNA, 284 bp, Homo sapiens
tagattaaagaaaacaaatataggtcagtatttgaaaaataaagctcacaacagttctttatgaccagaatcaaagtgtgtgtcctgttaaccaagatttgtctctcagaagtttgatgatctgttaaaaaatatatatattatcagtgtcaagtattttagtcccacctgtcactaatttaatgacggcattgcctaggaatttcatgagcaacaaaactgttgatttagcctcataattttggaacatattaaaaatattttcttgctatcaacacttagat

SEQ ID NO: 256232 - DNA, 436 bp, Homo sapiens
accaaacactggcaatgcggagaaaatggatcactcagacactgctggcaggcatgtacaatggcaggaccactctagaacaaagtatggcagcttcttacaaagtcaatgtgcccttatcatatgactgggagcaccactaggcaataaaaatgaattaactattgattcatgcaacaacttggctggatatcgggaattacgctaagtgaaaaacaccaatcccagattatatactggctggttccatttaggtaatactgggggcttttcatttttgttttctttttgttttgagacagcattgctttgtcacccagggtggagtgcagtggtgctgttatagtaggtagctggtcaggtctgagcagggcaggagagagcccctcacaaccccaaaccaggaatgttaggcaaccaccaggtgatggtcaag

SEQ ID NO: 256233 - DNA, 335 bp, Homo sapiens
ccttgttgctcacacttagcctgttcagggtgtctcttcaattagacgcatgcataacaccaactactcagggggttgaggtgggaggatcgcttgagcacaggagtcaaggctacagtgaacagtaatcctgccactgcactctggcctgggcgaccgagtgagattgtgtcccaaaaattaaaaaagaaagaaagagaaagaagagagagaaagaagagaaaaagaaaaagaaaagaagagaaagaacaaacgaatgaaaagaaagagaaagaaggaaagaaagaaagaaaaagaaagaagaaagagaaagaaagaaaaaggagaaaagaaag

SEQ ID NO: 256234 - DNA, 541 bp, Homo sapiens
tgagctgctgttcatgattcaggttggcatcaatcaaattggaagcacatgaattatacattattgtttctgagccacagttttttgtttttatctgctaaagacatgaagaatgggaacactaccattgcatctcccagccccagagaaggatgttcactcccatgttctcaccttttcttcatctttatttgatggctataactttgtcattcatattttttaaaaatcgtgggtggatgttttggatttttttaagatatacagtaaataccaacttcttaaattttccctcgctgcttccagaggaggctggtatattttttctctgttcaacaacgagagaagtatcaagttttaggctcccttcaaatcaagacagttcgtgtgtatctttgtggttcataatctgaaaacaaagcagattctgtgtgactgagatgggatcctaggggctggaaaccatcactgtttgcctgtactgtccttctcctgtcgtaccatacccttttcttttaataaagacttatgtgagtataaa

SEQ ID NO: 256235 - DNA, 375 bp, Homo sapiens
taaacagatcacattcctgcctgccaaggccacagcactgagatagtcccatccttctctcccaaccccttttcagggacctcagcacatttcataaaggtcccaatgatttccctgttgtatgctacactttactttcccttaggagtagtactccctgagggctagatccctgggaaccctgcagttatcttgggtccagctagcactgtactgctgctgctgtctgagtaggtgctgaggaatacctgcaagaactcccaagatgtggagcacaagagctgaggttcccagggaaagatacagtcccccagtggctgtgccctgacaatggcaacacaccacagtcacttgagtgtcaggggaaggcaagtg

SEQ ID NO: 256236 - DNA, 196 bp, Homo sapiens
gctttgactttttcagctaggaaatacattaaattttcttttatccagcattgccagaaaatgtagtcctctagttattttaatattcaggttaagagatggagctagcatatgtcacagatagatttcaagaaatgtatattgtatattgcatacatatgatttcgagaaattataatacaataaaatacactaa

SEQ ID NO: 256237 - DNA, 478 bp, Homo sapiens
catcacagattatagttctcagctaaaatttaagtaaaatgtaagaattagaaaacctctttctaataacctccactgttgtcatctctcttccaccctgatgaagctcaccaaattcaagtaaaacagtaacgtttaaaggttgagacattacaaacaacccatgagttagtttagaagtagttaaaagcaaactttgttttttaactagtagaaaaaaaattcctgattacatgattattcattttatggatgatattttactagcagccccaacggagccaatacctttaaatttgtttacctctgtcataaggaatacacaactgaaaagtttagtcactgcacctgaaaaagtacccatgttccctccttgaaaatatcttggatatctgttaatctcctggtcagtaagacctcaaaagtttaacctaagtactaacaacttacacacattaaatgattagcagaaattatt

SEQ ID NO: 256238 - DNA, 413 bp, Homo sapiens
agtgatcagtttacaggaaataaatgaaagaaggaccgacaaatgtcgccacaaagatatcgtcaccacatccaaattgtgggagattttatatgacaaatgacccatgtttttcctcaggaataaatagcataggggccaaaagggaaagggcattgctacagaggatcagacactcagctgccatttccagaaaatgcactgggtggactaaacttggatcctgatccaagcaaatcaacagcaaaggcacatttttgagataaccggggaaaactgaagacagacccggcgttaatagatgtgaatgcataaatatggatcttgctgaatgggataatgatattgccatcaggccaaagtagtaaagagcccttatcgtcgacgcggccgcgaatttagtagtagtaggc

SEQ ID NO: 256239 - DNA, 375 bp, Homo sapiens
tacatgcccactttattcttctaaaatttaccagtcagattagtcactccacccctcatgaagtagagtggggaaagtgatagaaagaggccgaggacgctacggtcattgagcttccgtcacatggaaggaaacatcgagaggagagaagagatattctccccaacagttggcaattctatcacaatgacagcaatgatagactcagaccaaaaagataaatagagtaaaaaattttatacttaataaacacattggcagtttaaaaatcttaacatgttaagtaagcatcagttttaaaaaagaaagattattgtgctggtatttggcaggcattacctgattgatgaaagcctgtaaatacaaatatcctgt

SEQ ID NO: 256240 - DNA, 826 bp, Homo sapiens
cattgaaatgaaggatcaagtgactgggtgtctgtgtaaaactcaaaaacagatgagagagtataattgagaaagctagagagttgggagatggtggtcaaagtggggtgaccgagtattatgttagggatagttgtctaatgtgatgggaaaaaatttcatggtttggtcatggaagttgtgtggctgagttttgaatagtactgaagattatggagatgataggtccaggatttgggaaggtgctgaataagtcatatacctagacagtgaagttgtccaaaatgatgacaagacttggagttgaaggaagaaaacaaacttccctgacacttttaaaattatgccaatagatagtacagaggagggtagcgagagaatagtgtcttactaggtgtatgcctctgcttgaccgatacagcagatgaattcacaaatgggaggtaaagcagatgttcagactacacatgcttcatctttacctcaaatatttcagaatatccatttcttcccctttcccccaaagaattctcgctgtactgagttactgtcactgtgtttgttagaatgggaacagaaaaaagaatacaaaccttaaggtagtttatgatgaaaaagtggaggcatctttacaggagaggtagtagaaagaaatcattaagaactacatcagccaccctgaggtatggaagatgttggaagaaatacagcatctattgttgagaggacaatacagttaaagatagatgtagaaacacaaagagaagagatggaggatataaggaagcattcttaatttaatgggggtttcagaaaacaagtagaa

SEQ ID NO: 256241 - DNA, 687 bp, Homo sapiens
gtccccggaaaaaaaagcagttgctgtgttttctactctgcttgttaacttagacactttttagcagattcatttgtaggagttggtgttcatttgctttatgacaattaaaaagattaattttgttcattgagtagtttatttgaaactgtagaatcattcttggaactacagaatagggaattattgattagttggagtttctgaagatgaaatttgagtttcgtaaggtagtctcaaaggacacttttgctttattgtccagaaaccaggagaggcaaacttgtttccaaagtagggcaagaggttttatttcaagttcagtcatcaggattattctctggaggttgtcagtacttttttacaaaccctagtcactttaaccctagggaataggtttctcttgttcaggctgtcttctttcttggatgaagagctctaccatcgtcactatattttagctcatttgtggaacgaaggactatcaaaatgtttcctgaaaataagtccagggagggccttaagagctttatgctttattgaatcgtctttcatttgacattttctttgctgtattttacttaacataggctatgattagattgataaaaagctaaaaaaaaatacaccaacatttttaacttgtggaatttcacagccgatttattacaacctattttatatgcg

SEQ ID NO: 256242 - DNA, 990 bp, Homo sapiens
tttataggtcctttgaaggaaaattctgtgggcaaataagattgtgatacatggtatttcagttttcccaaatgtggccagcccgatctggtcaaaaattttattttttaaaagctatagtgtctttttttcttaaatttgaggcaacatgcacaaaattggagatttgaaattaaagccaagatttgtagtttctctggaaagacctggcaagattggactggattgctatgtgaccagggtcccactagatggggctgcatcctctaatccccaaatccttatgttccctgcatgctcacctttgttacctgcctgacacctgtggggcttttaactttatggcaactgccctattctctggatccttcctgaggatttatgatgcgtaatactccaggaatctggttagctttgcttaacacatttccaaaacttgtttgaatgcatgagtacagtcactagtagcattctgtgcagtacaatgtatgggggcttaggagtttagggtagtatacaggattagggataggacttgagtctaatcctaactcttagcagttacactggatgacattagagcaaatggttctttacgtctacattttcttcatctgtagatgtaataatttccatatcaactatgatgtacagtgctaattccaatgaaatgttacatgtgagaagtctttgaaatgtaaaaaacactacagatactgaagcagtttggagaattaaaaaacactacgaaaacacagcttggtaaataattttttttttcttttgagacagagtctggctctgtcatccaggctagagtgtagtggcagaatcttggctcactgcactccaggctgggtgacagagagagactccatctcaagaaaaaaaaagcgagacagggtcttgctctgtcatccaagctggagtgcagtgatgtgatcatggctgactgcagcatcaaatttctgggcactcattatgaggggt

SEQ ID NO: 256243 - DNA, 759 bp, Homo sapiens
tttataggtcctttgaaggaaaattctgtgggcaaataagattgtgatacatggtatttcagttttcccaaatgtggccagcccgatctggtcaaaaattttattttttaaaagctatagtgtctttttttcttaaatttgaggcaacatgcacaaaattggagatttgaaattaaagccaagatttgtagtttctctggaaagacctggcaagattggactggattgctatgtgaccagggtcccactagatggggctgcatcctctaatccccaaatccttatgttccctgcatgctcacctttgttacctgcctgacacctgtggggcttttaactttatggcaactgccctattctctggatccttcctgaggatttatgatgcgtaatactccaggaatctggttagctttgcttaacacatttccaaaacttgtttgaatgcatgagtacagtcactagtagcattctgtgcagtacaatgtatgggggcttaggagtttagggtagtatacaggattagggataggacttgagtctaatcctaactcttagcagttacactggatgacattagagcaaatggttctttacgtctacattttcttcatctgtagatgtaataatttccatatcaactatgatgtacagtgctaattccaatgaaatgttacatgtgagaagtctttgaaatgtaaaaaacactacagatactgaagcagtttggaggttcggcgtgtgcagggtaccgagctc

SEQ ID NO: 256244 - DNA, 435 bp, Homo sapiens
ttttaatgtaagtttaagagataataaagcattgtcccctaactgtaacatttttaccaaaaatgtcaaggaaaggaagaagttcaatagaattcacagaaataatacttatctaaagcaactgcctttgaaacttaaaacagcaaacaagaaaacagaaaagtcagatgtctccttccagtgtctccccttttcatgtattgatactcaatagtttcttgcattctcaacaacagagaattgaacacagttttgtttgttaagtttgctgcatttttgagtgtagtttccattatcattttgaataaaacatctttccttaagcaaaaatgtttctgaaattattatgcaaatcaataggaaaatacaattttcttagagaaattctgtttttcacatttttcaggtttaaaaagcctaggctttaaagtggat

SEQ ID NO: 256245 - DNA, 400 bp, Homo sapiens
atctgtgatacatcatatccacaatctccctgatgcatgactttcctctatttctgaaaatagaatgaaacaatagcaatagtaaaacatgtgtagttctttatttcctaaatggagacactttaaagttcccaaacccgaattttccacaatctgaatttaatttgtatttcaaaagttatcttgcaaagcatccattaataaatctttggtcactaaatatctgcagcatgttttatgacatgcaccagagcagggtgcccaacctccaggccatggatgtgaaccagcctgtggcctgctgggaaccaggccacacagcaagaggtgaggagtgggcaagggagcattaccacctgagctccacctcgtgtcagatcagcgatggaattagaatctt

SEQ ID NO: 256246 - DNA, 135 bp, Homo sapiens
ctctggcccccatcactcacccaaattaataaccctttttgtgtactcactaagccattaaaaatgttcttgttggccaggcgcagtggcttacgcctataatcccagcactttgggaggccaaggcgggcagat

SEQ ID NO: 256247 - DNA, 514 bp, Homo sapiens
tgacagagtctggctctgtcacccaggctggatttcggtggcacgatctcggctcactgcaagctccgcctcccgggttcacgccattctcctgcctcagcctctacgagtggctgggactacaggcgcccgccactacgccccgctaattttttgtatttttggtagagaggggtttcatcgtggtctagatcgcctgacctcgtgatccacccacctcggcctcccaaagtgctgggattacaagcgttagccaccgcacctggcctctggacagtgtttttcacaggtcagattaatttttatataaatcatttattttatttttattatgtaaaattttataatttttaattttatttttaatttcctttttaaaagttaaataaaattttaagtgtaatgatgcaaaattttgtttaaaagtaaatgtatataaaaatgttgatatagactaaaaaattgaataagtaagaaggtagttagttgtcacagtaggagtgaagtgaaaagc

SEQ ID NO: 256248 - DNA, 402 bp, Homo sapiens
gtcttcagtgattttactgactcttctgtcacctctaatctgctattaaacctatcaagtgaattcttcatttcaattatttaacttttcagttatagaatttctttttggttctttttgtatagtgttatctgctgacatttcctatcagttcactcattaaggccgccttttaagcctttgaacatatttataatagattctttaaagtctttcctaaatgtaatatctgtaccatatcaggttctgtttcttttcttttttcagagacagggtctcactctgtcaccaggctgaaaagtgcagtggcacagtcatagctcctgcagcctccaactcctgggctcaagtgatcctcccacctcagcctcttgagtagctaggacccacaggcatgtacca

SEQ ID NO: 256249 - DNA, 5979 bp, Homo sapiens
ccgcggagggagcgagctaggagcgtccacgcccaacgcagtcaccgtcccacggcctcagagagcgaaccgcggctccaccgtcggcggggcgacccccccctccggaccccgcccgcaccccgccccccctccgccgccgtcgcggcggcggggccaggcggcccgagccgtgcagtcggaggtccttgtgcatgaagacagatttgttctatggcctcggagttgggtgccagggatgatggaggctgcactgagctggcaaagcccctctatcttcagtacttggagagggccctccggttggaccattttctgcgacaaacgtcagctatcttcaataggaatatttctagtgatgacagtgaagatggactggatgacagtaatccattattgccccagtctggggatcccttaatacaagttaaggaagaacctccaaattcattgcttggtgaaacttctggagcaggcagttctggaatgttaaacacatattctctgaatggagttctacagtcagaatcaaaatgtgataaggggaatttatataatttctctaagctgaagaaaagcagaaagtggctaaagagcattctgctaagtgatgaatccagcgaggctgattctcagagtgaagacgatgatgaagaagaactcaatctcagcagagaagaacttcacaacatgcttcgactacacaaatataagaaacttcaccaaaataagtatagtaaagacaaggagttgcagcaatatcagtactacagtgcaggcctgctctccacatatgaccctttctatgagcaacaacggcacctacttggacccaagaaaaagaaatttaaggaggaaaagaaacttaaagctaagttgaaaaaagtgaagaaaaaaagacgaagagatgaagaactttcctctgaagaatcccctcgtcgccatcaccaccagaccaaagtctttgccaagttttctcacgatgcacctccccctggcactaagaaaaagcacttatccattgagcagctgaatgctcgtcgcaggaaagtatggctcagcattgtgaaaaaggaactaccaaaggcaaataagcagaaagcttcagctcgtaacctgtttctcaccaatagccgaaagcttgctcaccagtgcatgaaggaggtgcgtcgagctgccttgcaggcccagaagaactgtaaggaaaccttgcctcgtgcccgccgcctcaccaaggagatgcttctgtactggaagaaatatgagaaagtagagaaggagcaccgcaagagagcagagaaggaagctttggagcagcggaagttggatgaggaaatgcgggaggccaagaggcaacagcgaaaactcaacttcttaattacccagacagagttgtatgcccatttcatgagtcgcaaacgagatatgggtcatgatggtatccaggaagaaatcctaaggaaactggaagacagttctacccagagacaaatcgatataggtggaggagtggtagttaacatcacacaggaggattatgatagtaaccattttaaagcccaggccctgaagaatgctgaaaatgcttaccatattcaccaagctcggacaaggtcatttgatgaagatgcaaaagaaagtcgagcagctgccctacgggcagcaaacaagtctggcactgggtttggggagagttatagcctggctaacccatctatccgggctggtgaggatattccacagcccacaatttttaatggcaaattgaaaggttatcaactgaaaggcatgaattggttggccaatctatatgaacagggtattaatggcattcttgctgatgaaatgggccttggtaaaacagtacagagcattgcccttctggcccatctggctgagagagagaacatttggggacctttcttaataatttcacctgcgtctacacttaacaattggcaccaggagtttactagatttgttcctaaatttaaggtgctaccatattggggaaatcctcatgatagaaaagtcatcagaaggttctggagtcagaagaccctctacactcaggatgcccccttccatgtggttattaccagctatcagctggtggtgcaggatgtaaagtatttccagcgggtcaagtggcaatacatggtactggatgaggctcaggcgctcaagagtagttccagtgttcgttggaagatcctcttacagttccagtgtcggaatcggcttttgctaaccgggaccccaattcagaacaccatggcagagctttgggctctgctgcatttcattatgccaacattatttgattcacatgaggaatttaatgaatggttttccaaggacattgagagccatgccgaaaacaaatctgctattgatgagaatcaactttctcgcttacacatgattttgaagccatttatgctgaggagaatcaagaaagatgtggaaaatgaattatctgacaagattgagattctaatgtattgccaactgaccagccgacagaagctgctatatcaggcactaaagaacaaaatttccattgaggatttattgcagtcttctatgggctctacccaacaagcacagaacaccaccagcagcctcatgaatctggtcatgcagtttaggaaggtgtgtaatcacccggagttatttgaacggcaagaaacttggtctccatttcatatttccctaaagccataccacatttcaaagtttatctaccgtcatggacagatcagggtcttcaatcattcacgagacaggtggttaagggttctttctccatttgcaccagactatatccaacggtctctctttcacagaaaaggtattaatgaagaaagctgtttctctttccttcgctttattgatatatctccagcagaaatggcaaaccttatgcttcagggacttttggccagatggttagctcttttcctgtctctgaaagcctcctacaggctccatcagctacgctcctggggagcgccagaaggggagagccaccagagatacctgaggaacaaggatttccttcttggggttaattttccactctcctttccaaacctttgcagctgccctttgttaaagtctcttgttttcagcagccactgtaaagcagtgagtggctactcagaccaggttgtccatcagcggagatcagctacctcctcgctgcgtcgctgcctgctcactgagctgccatcttttttgtgtgtggccagtccacgagttaccgcagtgccattggattcttactgcaatgaccgaagtgcagaatatgaaaggcgagttctgaaggaaggagggagtctggcagccaagcagtgtttgttgaatggggcccctgaactggctgcagactggctaaatagacgatcacagttcttcccagagccagctggaggtctgtggagcatcagacctcagaatggctggtctttcatcaggattccaggcaaggagagcctcatcactgacagtggaaagctgtatgcccttgatgtcctgctgactcggctcaagtctcaagggcatagggtccttatctactcccagatgaccaggatgatagacctactggaggaatacatggtttacaggaagcatacctacatgaggcttgatggctcatccaagatctcggagaggcgagacatggttgctgattttcagaacaggaatgacatctttgtgttcctgttaagcacacgagctggaggactgggtatcaatctcactgctgcagacacagtgattttctatgatagcgactggaaccccactgtggaccagcaggccatggacagggcccaccgcttagggcagacaaagcaggttactgtgtaccggctcatctgtaaaggcaccattgaagaacgcattctgcaaagagccaaggagaagagtgagattcagcggatggtgatttcaggtgggaacttcaaaccagataccttgaaacccaaagaggtggttagtcttcttctagacgacgaagagttggagaagaaactgaggctgcggcaggaagagaaacggcaacaggaggaaaccaaccgagtgaaagagcgcaagcggaagcgggaaaagtatgcagagaagaagaaaaaagaagatgaattggatgggaaaaggagaaaagagggtgtgaacctggtgatcccatttgttccctcggctgataactccaacctctctgctgacggagatgactccttcattagcgtggactcagccatgccaagccctttcagtgagatctccatcagcagtgagctgcacactggctccattcccctggacgagagcagcagtgacatgctggtcattgtggatgacccagcctcctcagcccctcagtctcgagctaccaactctcccgcatccataacaggctccgtctcagataccgtgaatggaatttccattcaggaaatgccagctgcaggacgtggtcactcagcccgaagccgaggccgccccaaaggttcaggaagcacagccaaaggagcagggaagggccggagccgaaagtccacggcaggcagtgctgctgcaatggcaggagccaaagccggggctgcagcggcctctgcagctgcctatgccgcatacgggtacaacgtgtctaaaggaatctccgccagcagtcctctgcagacatcccttgttcggcctgctggccttgctgactttggaccttcaagcgcctcttctcctttgagttcccctttgagcaagggaaataatgttcctgggaatcccaagaacctccacatgaccagcagcctagccccagactctctggtccggaaacagggcaaaggcaccaacccctctggaggacggtaaccatctgggccctccgacttccttcaaccaaaccagggctagagtcctgacctgccagtggtctttggatggcttgcccgtgcagcatcttgcatcctgagtcagaagtggaaatgtccagcaggggaaggacaggcaggtggatggtgtgagcacttttatcatctgtgtctcatcaggagcatctggggtgcctgtaggaggaaggccacagggcatggatcagccccactgcatctcaagtgaactgtatagccaagtcttaaacctctcacggggcaagcctgacacagaccccctttagatgctcaggcatactgtttccatcccgattccactcttcggctctgacacgtcccttgcaaagtctccgcaggtgctgtgaagagccttccatggtagagatttctcttaagagtgtgatttctcatagggctagtaagggagattgtatacctgttgtccacagtcttcaggcagctccccaggtctctgaaccccagagtgtcatcattggagagagcagtgactgcgagagatggtggaggccgctaagcatggtagaggctagaggaagtctatccacaggcagttgtgttcccagcaattcctcccatcctgcatggttcacaccaagagaaccttcagatcctaccagcaaccgtagcaccttccacccaggggactcccagaagccagtaaagagaccaggagccacctcaatcagcagtgtttgcatgggaggtgtttctgcctgtccctgcctgatgtccctggtggagcaggtacctccgggcgggcaagcctctgatttgcacacctgaaaatcgcggaattgagtttcgatagattgatttttaaaacttttttggagtagggggtataggggaatcatttaatttaaatcattaagattcccctgctcaaacccagattcctgtgtacagatgctatttagagggaatcagaaaaatgccaagccttttctctttgaatgtgctatttttataactgaacttgtacatatgtataaagagagacacatcttccttttactaactggataaaaaaatcttaaataaaatggagtgagat

SEQ ID NO: 256250 - DNA, 490 bp, Homo sapiens
gcggtggctcatgcatgtaatcccatcactttgggaagctgaaacaggaggacctcttgaggccaggggttcgagaccagcctgggcaacatggtgagcccttgtccctactaaaatttttttttaaaaattagcaaggcatggtggtgcacactcgctcgtggtcctggctactcgggaggctgaggtaggatgattgctagctagagtccaggagttcaggattaaaatgagctatgatcataccactgcactccagcctgggtgacagagtcaaaatttatctcaaagtaagtgtttagattgtggtttttgtgcataaatgaaaaaaaaaataaaagaagaagaaaaaagataaagcacataatactttaaacatattgatgcatatgagtgatatgggaagaataaattcaaatttcaaagttggaattaatataggtattattattttggaaggggaaatctcaaacctttacactaaatcaaa

SEQ ID NO: 256251 - DNA, 468 bp, Homo sapiens
acaactgctaaactggcttgtttctaaaagtctgaatttacatggtttcaagtttctctgctggtgtactcggccactaggtggtgactgaggcttgtggctctgaggcttctgctgcaaggtggcagaattgccatgctctgcccgaggttgagcagggaggaattttagccctgcctgaaatatgaagggaaactgacctggggacgggccaaggctagactgagccctggctctgtcagaatggcccctagccccagcagcaggatggaatgtcagtctaaaatgagaaggcttggccaggtacggtggctcatgccaataatcccagcactttgtgaggccaaggcaggtggatcacttgaggccaggagttcaagacaagcctggccaacatggggaaaccccatctctactacaaatacaaaaactagcctggtgtggtggtgggtacccataatcccatct

SEQ ID NO: 256252 - DNA, 252 bp, Homo sapiens
gtgtcagcatccaacagtacttttttctaaggaaagggataacttgccacaggaaaagaaaatgctgtggctttagacacagccacccatcctgtctccaggctctggtgacagactctgtcctggggccgctgctggttaattcaggcttctccatgctgggaattcgcttccagaagagtggcccccaggatgctttgccttcagggtcagccctgtccgccttacctcaggcccagcagaaatagcagg

SEQ ID NO: 256253 - DNA, 473 bp, Homo sapiens
atatattatcaaatacttaactctgtgtcatgcctgagttggaaaccagagattgagtgatgaaaaagatgatacagttccagccctcatagagctgacaatctagtggaagagatgaataattaaacaatgacaaaagtgggatatgggataaaagagagcaagccagctggtaaagagtatcaaggcataggccgggcccggtggctcacgcctgtaatcccagcactttgggaggccaaggcgggcggatcatgaggtcaggagatcgagaccatcctggctaacacggtgaaaccctgtctctactaaaaatacaaaaaattagctgggcgtggtagcaggcgcctgtagtcccagctactcgggaggctgaggcaggagaatggtgtgaacccgggaggcggagcttgcagtgagccgagatcacgccactgcactccagcctgggtgacagagcgagactccatctc

SEQ ID NO: 256254 - DNA, 1010 bp, Homo sapiens
ctggaatgcctgtggtttctccagcacctgggtcctgctggcaaccagcagcacccagtggccagcagcgtactctttcacctcttcttgggtgactttgtggaatgctccaatgtgacatctccctgtgaacgcctttcctgacaccctaaaaagtgtcaggaatttccagcaagttccagagagcaggtttccagcaagtttggtcagtatgacaccacagcgatatctctgccattcactgaacttggattcttccttcttcaatgagagatgttcaagaaaaagaacaacttcagtggaagaagaagaagataggagcccaggtcctgtgtttcaccaagacagccgtgcaaagcagatgctgccaaaaaggtgcaaagtggtttgtcagctcttctgcatgttctaacaaattagacatgcatcccaaaaggtttcctagactttccatcaccaccagtgaattctgagtgacaatagtgtggaatttggaagaatggaagagaaactgaagtggagagatggtgaaagagaagaaaaaatgaagaaagatgcttgcaaaaatactgctgtgggtcctgagatgaggattctgggagggtaggtgtggcaatatctcccattctgtgcttacctgggcctcgactggtaccagcagacagggatgggcagtcagttaaggagtgtggctagcgactgttgtgtcatgcattgcactggttttctgctcctcaggctgaaatggatgcccctgacagctccctttgagttcctgttcatctgaagtacaccagctttctagatatgctgtcactttccttctgcagagccacagtggtgtcctgtcttctcagacctcttctcacctcaaatcacttaggactcggcaccagacagatttgggatttcagaacttttcagatgttagaaaggtaaatggtatatattgcatatgtagtatttccagtagagtctgggtcagcacctcataagcaaatgtattaata

SEQ ID NO: 256255 - DNA, 874 bp, Homo sapiens
ctggaatgcctgtggtttctccagcacctgggtcctgctggcaaccagcagcacccagtggccagcagcgtactctttcacctcttcttgggtgactttgtggaatgctccaatgtgacatctccctgtgaacgcctttcctgacaccctaaaaagtgtcaggaatttccagcaagttccagagagcaggtttccagcaagtttggtcagtatgacaccacagcgatatctctgccattcactgaacttggattcttccttcttcaatgagagatgttcaagaaaaagaacaacttcagtggaagaagaagaagataggagcccaggtcctgtgtttcaccaagacagccgtgcaaagcagatgctgccaaaaaggtgcaaagtggtttgtcagctcttctgcatgttctaacaaattagacatgcatcccaaaaggtttcctagactttccatcaccaccagtgaattctgagtgacaatagtgtggaatttggaagaatggaagagaaactgaagtggagagatggtgaaagagaagaaaaaatgaagaaagatgcttgcaaaaatactgctgtgggtcctgagatgaggattctgggagggctgaaatggatgcccctgacagctccctttgagttcctgttcatctgaagtacaccagctttctagatatgctgtcactttccttctgcagagccacagtggtgtcctgtcttctcagacctcttctcacctcaaatcacttaggactcggcaccagacagatttgggatttcagaacttttcagatgttagaaaggcgattaggagcttctgcgatgagaaagggatccagactgatcttagactttatgcacccagagtattgagcac

SEQ ID NO: 256256 - DNA, 1183 bp, Homo sapiens
ctggaatgcctgtggtttctccagcacctgggtcctgctggcaaccagcagcacccagtggccagcagcgtactctttcacctcttcttgggtgactttgtggaatgctccaatgtgacatctccctgtgaacgcctttcctgacaccctaaaaagtgtcaggaatttccagcaagttccagagagcaggtttccagcaagtttggtcagtatgacaccacagcgatatctctgccattcactgaacttggattcttccttcttcaatgagagatgttcaagaaaaagaacaacttcagtggaagaagaagaagataggagcccaggtcctgtgtttcaccaagacagccgtgcaaagcagatgctgccaaaaaggtgcaaagtggtttgtcagctcttctgcatgttctaacaaattagacatgcatcccaaaaggtttcctagactttccatcaccaccagtgaattctgagtgacaatagtgtggaatttggaagaatggaagagaaactgaagtggagagatggtgaaagagaagaaaaaatgaagaaagatgcttgcaaaaatactgctgtgggtcctgagatgaggattctgggagggtaggtgtggcaatatctcccattctgtgcttacctgggcctcgactggtaccagcagacagggatgggcagtcagttaaggagtgtggctagcgactgttgtgtcatgcattgcactggttttctgctcctcaggctgaaatggatgcccctgacagctccctttgagttcctgttcatctgaagtacaccagctttctagatatgctgtcactttccttctgcagagccacagtggtgtcctgtcttctcagacctcttctcacctcaaatcacttaggactcggcaccagacagatttgggatttcagaacttttcagatgttagaaagggcatgagcatgaagatgctgacaaagctgttcctacacttcctgtgctggctgggaagggatctgattcgggctgagccttaagaatcacagttccaagctttcttctcattccagattttagtcgggaaagtaggcattctggaagtagagtccgtatctatactttatatgttccccttaggtttgatgagcaaaaagtaataaaggaaacacaaactcaggaaagaaaagatttttctaggaaa

SEQ ID NO: 256257 - DNA, 265 bp, Homo sapiens
cctgcaggatccaaggatgcccccaggacagccagcggctccaagggctcacccttccctggatcagtgtttctattttgttcccggcctcttgggggcttccctcacctgcctgcaggccccgtccattcactaggcaggcgttctcaccatcctttaccgtgcctcagtgcagtgtggtaggaaataggacagtctctagcccaccacagtggatggtaactagactgtaactttatgcttacaatcagcaaaaatgaatgtt

SEQ ID NO: 256258 - DNA, 507 bp, Homo sapiens
attgcccttcattttgttcctcatcaatgccatggcttgctcctaacttagggcttttgcactatgttcactctgttgggaactcttcctaaatcattacatgagtgactacttttcatcatttcatgttgtagttcaaatatcatcttttcagacaagcattgctacctaaccatccttccagaatgacactagcctcatccccctcaatcccattaccttttttacttaaaaatttcttcaaaccatttatcagtatctgaaattatgtttttatattattttataatctccatactcactagaatataagccccgtgatatcaatgatcttgtctctttttgtttttgtttttgagatagaatctcactcggtcaccccaggctggagtgcagtggtgtgtgtgatcacggctcactgcagcctggaactcctaggctcaagtgatcctcccacctcagcctcctggtagctaggactataggcaacaactaccatgccgagct

SEQ ID NO: 256259 - DNA, 512 bp, Homo sapiens
aagtttgaggacttgcaaagtcttaatcccagttccgctggacttcaaaacccaagccataaactaccatgctgccatgtctcccagtgaccacatacagtggccgccaagaacacagtggggtaggggaatggtctctgggttggtgtgtgccacgtcctgtacaccactgcccccagtggaaggccagggaaggcatgtgattcgtggtcagggtctgcagcctcccatctctaggcatcatcatttattagacatcagctgagtactcaggggtcgaacagaagactcagatttccctcttttcttccaccataggaacatcttttatgcgtgcctaataacctaaaaacatctacagttcacccttgaacaacacaggggtaagaggcaccaaccccctgcacagttgaaaatctgagtataacttttgacttcccagaaacttaactgcttattagcctactgttgactggaagctttaccaataataaaaagttaatacatatttt

SEQ ID NO: 256260 - DNA, 382 bp, Homo sapiens
caagatacttgaagtctaactcaccaagaggatgaagttctcatcattccatctgacgaacaagcgagaactagccaagtgctggccaaaggtgagtcaaatctagaatgactgataaaggaagaagatgataaatatcagttttgcttctgggaccacctgcagtaacaaggactccatcttgtttgctaacattttttatgtctctggaggagactgaaattgacaactactttgaagaactgaacttgttccttcttttctgagaaagaagcaagggtctctttttctaataacagctttgggtaccatataaaggcataagtgctatttaattggtatgaagggtaaactaataaagattcagttcacgtaccaccca

SEQ ID NO: 256261 - DNA, 335 bp, Homo sapiens
aaggagaccatatttggagttttaaatgccaggaaatagtatttcataatttaaattgctggtaaaaggaagagtcaaattagcaaaataattataattgctaacatttattgcatctcactatataccaggcactgtactaagggcctttaaatattacttaatttcattctcaaaactctcctataaggtatggccccattattatcatcttatgaataagaagagtaaagcctagaaaaattaagtaatttgcccaaggacacacagcctatatgtaatggctgagattttatcccaggtagtctgactccatagcgtgtgctcttgagatg

SEQ ID NO: 256262 - DNA, 407 bp, Homo sapiens
ctttattgaaaagaatgcaacagccctggaatatgctttgatgtggcaatgggtttttttggatctcttcttgcctgatcattacttggtttacacaggacttggccagggaggaagacacacccctttgacaggtagacaggaagcactattggcagggagcagctgcgaagcaatcctagttgccatcattggggtgctggcatagtactggtcctgcaggtttctaacttgtcatcctagctggtaatgtctcctggtttttatggaaggcttaattggagagtgtctgatgcctgaaggactttcctggttgacaaccttgaaaatggtgaaagaaagaaattgaaaccaggtaagctcttccttgtgcattcttccctccctcacaggtggagcctggcaaa

SEQ ID NO: 256263 - DNA, 4449 bp, Homo sapiens
  misc_feature (1669)..(1670): n is a, c, g, or t
  misc_feature (1733)..(1733): n is a, c, g, or t
  misc_feature (1795)..(1795): n is a, c, g, or t
  misc_feature (2181)..(2181): n is a, c, g, or t
  misc_feature (2605)..(2607): n is a, c, g, or t
  misc_feature (2729)..(2730): n is a, c, g, or t
  misc_feature (2750)..(2750): n is a, c, g, or t
  misc_feature (2752)..(2752): n is a, c, g, or t
  misc_feature (2789)..(2789): n is a, c, g, or t
  misc_feature (2809)..(2809): n is a, c, g, or t
  misc_feature (2933)..(2934): n is a, c, g, or t
  misc_feature (3013)..(3013): n is a, c, g, or t
  misc_feature (3152)..(3152): n is a, c, g, or t
  misc_feature (3526)..(3526): n is a, c, g, or t
  misc_feature (3813)..(3814): n is a, c, g, or t
  misc_feature (3818)..(3818): n is a, c, g, or t
  misc_feature (3926)..(3926): n is a, c, g, or t
  misc_feature (4021)..(4021): n is a, c, g, or t
  misc_feature (4078)..(4078): n is a, c, g, or t
  misc_feature (4146)..(4146): n is a, c, g, or t
  misc_feature (4416)..(4416): n is a, c, g, or t
gcgaccgtcgggatcccggggccgcgcgctcagcttcacccgacttacttcaacctggccgaggccgaggatttggccaccgccacctgcggggagaggggacccggcgaggggagccccagcccgagctctactgcaagttggtcgggggccccaccgccccaggcagcggccacaccatccagggccagttctgtgactattgcaattctgaagaccccaggaaagcacatcctgtcaccaatgccatcgatggatctgaacgttggtggcaaagccctcccctgtcctcaggcacacagtacaacagagtcaacctcaccttggatctggggcagctcttccatgtggcctatattttaatcaaatttgcaaattctcctcgccctgaactttgggtcttggaaagatctgtagactttggaagcacctactcaccatggcaatattttgctcattctaaagtagactgtttaaaagaatttgggcgggaggcaaatatggctgtcacccgggatgatgatgtactttgtgttactgaatattcccgtattgtacctttggaaaatggtgaggttgtggtgtccttgataaacggtcgtccaggtgcaaaaaattttactttctctcacaccctgagggagtttaccaaggcaacaaacatccgcttgcgttttcttagaaccaatacgcttcttggacacctcatctccaaagcccagcgagatccaactgtcactcggcggtattattacagcataaaggacatcagcattggtgggcagtgtgtttgcaatggccatgctgaagtgtgcaatataaacaatcctgaaaaactgtttcggtgtgaatgccagcaccacacctgtggggagacgtgtgatcgctgctgcacagggtacaatcagaggcgctggcggcccgccgcttgggagcagagccacgagtgtgaagcatgcaactgccacggccatgccagcaactgttactatgatccagatgttgagcggcagcaggcaagcttgaatacccagggcatctatgctggtggaggggtctgcattaactgtcagcacaacacagctggagtaaactgtgaacagtgtgctaagggctattaccgcccttatggggttccagtggatgcccctgatggctgcatcccctgcagctgtgaccctgagcatgcggatggctgtgaacagggttcaggccgctgtcactgcaagccaaatttccacggagacaactgtgagaagtgtgcaattggatacaatttcccattttgcttgagaattcccatttttcctgtttctacaccaagttcagaagatccagtagctggagatataaaagggtgtgactgtaatctggaaggtgttctccctgaaatatgtgatgcccacggacggtgcctgtgccgccctggggttgagggccctcgatgtgatacctgccgctctggtttctactcattccctatttgccaagcctgctggtgttcagcccttggatcctaccagatgccctgcagctcagtgactggacagtgtgaatgtcggccaggagttacaggacagcggtgtgacaggtgtctctcaggagcttatgatttcccccactgccaaggttccagcagtgcttgtgacccagctggtaccatcaactnnaatttggggtattgccaatgcaagcttcatgttgaaggtcctacttgtagccgctgcaaactnttatattggaatctggacaaagaaaaccccagtggatgttcagaatgcaagtgccataaggngggaacagtgagtggaactggagagtgtaggcagggagatggtgactgtcactgcaagtcccatgtgggtggcgattcctgcgacacctgtgaagatggatattttgctttggaaaagagcaattactttgggtgtcaagggtgtcagtgtgacattggtggggcattgtcctccatgtgcagtgggccctcgggagtgtgccagtgccgagagcatgtcgtgggaaaggtgtgccagcggcctgaaaacaactactatttcccagatttgcatcatatgaagtatgagattgaagacggcagcacacctaatgggagagaccttcgatttggatttgatccgctggcatttcctgagtttagctggagaggatatgcccaaatgncctcagtacagaatgatgtaagaataacattgaatgtagggaagtcaagtggctccttgtttcgtgttattctgagatacgttaaccctggaactgaagcagtatctggccatataactatttatccatcctggggtgctgctcaaagcaaagagatcatcttcctgccgagtaaggagccagcctttgtcactgtccctggaaatggttttgcagacccattttcaatcacaccaggaatatgggttgcttgtattaaggcagaaggagtccttctggattacctggtgctgctccccagggactactatgaagcctctgtactgcagctgccagtcacagaaccatgtgcctacgcaggacctccccaagaaaattgcttactctaccagcatttgccagtgaccagattcccctgtacccnnncttgtgaggccagacacttcctgcttgatggggagccaagacccgtggcagtgaggcagcccacacctgcacaccctgtcatggtggacctcagcgggagagaggtggaattgcatctgcgnntgcgcatcccacaggttggncnctacgtggttgtggtcgagtattccacggaggcagcncagctgtttgtggttgatgngaatgtgaagagctccgggtctgttctggcaggccaggtgaacatttacagctgcaactacagtgttctctgccggagtgctgtgattgatcacatgagccgcatcgccatgtatgagctattnncagatgcagacattcagctcaagggacacatggcccgattccttctgcatcaagtttgtatcatacctattgaagaatnctcagctgagtatgtgagaccacaagtccactgcattgccagttatgggcgatttgtcaatcaaagtgccacctgtgtctccttggcccatgaaactcctccaacagcattaattttggatgttctaagtggcaggccnttccctcacctgccccagcagtcgtcaccttctgttgatgttcttcctggggtcaccttgaaggcaccgcagaatcaagtgaccctgagaggacgtgtaccacacctgggccgatacgtctttgtcatccatttttaccaagcagcgcacccgacgtttcccgcgcaggtgtcggtggatggcgggtggccacgggcaggctccttccatgcctctttttgcccccatgtgcttggctgccgggatcaagtgattgccgaacagattgagtttgacatctcagagcctgaagtggccgcaactgtgaaggttccagaaggaaagtccttggttttggtccgtgttctagtggtgcctgcagaaaactatgactnccaaatacttcacaaaaaatccatggacaagtcactcgagtttatcaccaattgtggaaaaaacagcttttaccttgacccccagacagcctccagattctgtaagaattccgccaggtccctggtggccttttaccacaagggcgccctgccttgtgagtgccaccccactggcaccggccctcactgcagccctgagggtggcagtgcccatgccagcccaacgtcatcgggcggcagtgcacccgctgtgcaacaggccactacggattcccacgctgcaagcnnaagncgtgcagctgtggtcggcgcctttgtgaagagatgacggggcagtgccgctgccctccccgcacggtcaggccccagtgtgaggtgtgtgagacacactcattcagcntccaccccatggccggctgcgaaggctgcaactgttccaggaggggcaccatcgaggctgccatgccgagtgtgaccgggacagcgggcagtgcngatgcaagcccagaatcacagggcggcagtgtgaccgatgtgcttccgggttttacngctttcctgagtgtgttccctgcaattgcaacagagatgggactgagccaggagtgtgtgacccaggnaccggggcttgcctctgcaaggaaaatgtagaaggcacagagtgtaatgtgtgtcgagaaggctcattccatttggacccagccaatctcaagggttgtaccagctgtttctgttttggagtaaataatcaatgtcacagctcacataagcgaaggactaagtttgtggatatgctgggctggcacctggagacagcagacagagtggacatccctgtctctttcaacccaggcagcaacagtatggtggcggatctccaggagctgccngcaaccatccacagcgcgtcctgggtcgcaccc

SEQ ID NO: 256264 - DNA, 1120 bp, Homo sapiens
cctagaggatcccggaggcacacggaacagagtcaagctcacctggatctggggcagctcttccatgtggcctatattttaatcaaatttgcaaattctcctcgccctgaactttgggtcttggaaagatctgtagactttggaagcacctactcaccatggcaatattttgctcattctaaagtagactgtttaaaagaatttgggcgggaggcaaatatggctgtcacccgggatgatgatgtactttgtgttactgaatattcccgtattgtacctttggaaaatggtgaggttgtggtgtccttgataaacggtcgtccaggtgcaaaaaattttactttctctcacaccctgagggagtttaccaaggcaacaaacatccgcttgcgttttcttagaaccaatacgcttcttggacacctcatctccaaagcccagcgagatccaactgtcactcggcggtattattacagcataaaggacatcagcattggtgggcagtgtgtttgcaatggccatgctgaagtgtgcaatataaacaatcctgaaaaactgtttcggtgtgaatgccagcaccacacctgtggggagacgtgtgatcgctgctgcacagggtacaatcagaggcgctggcggcccgccgcttgggagcagagccacgagtgtgaagcatgcaactgccacggccatgccagcaactgttactatgatccagatgttgagcggcagcaggcaagcttgaatacccagggcatctatgctggtggaggggtctgcattaactgtcagcacaacacagctggagtaaactgtgaacagtgtgctaagggctattaccgcccttatggggttccagtggatgcccctgatggctgcatccgtaagtttcatttcaagttggtgtatcttagcctgtgtgtactgcctcagcgaagtcatcaggctaactttggatcagttaataacttccttcatgccctctctcttcagagtattagttgtgctcgctatgtgacctcagtcacttacacagtctctttgaattttggatttattgcatgtaaatggaaatgataatgtatttcataagattaaataaaatgcaatcaaaagcatg

SEQ ID NO: 256265 - DNA, 2305 bp, Homo sapiens
  misc_feature (1388)..(1389): n is a, c, g, or t
  misc_feature (1452)..(1452): n is a, c, g, or t
  misc_feature (1514)..(1514): n is a, c, g, or t
  misc_feature (1900)..(1900): n is a, c, g, or t
cctagaggatcccggaggcacacggaacagagtcaagctcacctggatctggggcagctcttccatgtggcctatattttaatcaaatttgcaaattctcctcgccctgaactttgggtcttggaaagatctgtagactttggaagcacctactcaccatggcaatattttgctcattctaaagtagactgtttaaaagaatttgggcgggaggcaaatatggctgtcacccgggatgatgatgtactttgtgttactgaatattcccgtattgtacctttggaaaatggtgaggttgtggtgtccttgataaacggtcgtccaggtgcaaaaaattttactttctctcacaccctgagggagtttaccaaggcaacaaacatccgcttgcgttttcttagaaccaatacgcttcttggacacctcatctccaaagcccagcgagatccaactgtcactcggcggtattattacagcataaaggacatcagcattggtgggcagtgtgtttgcaatggccatgctgaagtgtgcaatataaacaatcctgaaaaactgtttcggtgtgaatgccagcaccacacctgtggggagacgtgtgatcgctgctgcacagggtacaatcagaggcgctggcggcccgccgcttgggagcagagccacgagtgtgaagcatgcaactgccacggccatgccagcaactgttactatgatccagatgttgagcggcagcaggcaagcttgaatacccagggcatctatgctggtggaggggtctgcattaactgtcagcacaacacagctggagtaaactgtgaacagtgtgctaagggctattaccgcccttatggggttccagtggatgcccctgatggctgcatcccctgcagctgtgaccctgagcatgcggatggctgtgaacagggttcaggccgctgtcactgcaagccaaatttccacggagacaactgtgagaagtgtgcaattggatacaatttcccattttgcttgagaattcccatttttcctgtttctacaccaagttcagaagatccagtagctggagatataaaagggtgtgactgtaatctggaaggtgttctccctgaaatatgtgatgcccacggacggtgcctgtgccgccctggggttgagggccctcgatgtgatacctgccgctctggtttctactcattccctatttgccaagcctgctggtgttcagcccttggatcctaccagatgccctgcagctcagtgactggacagtgtgaatgtcggccaggagttacaggacagcggtgtgacaggtgtctctcaggagcttatgatttcccccactgccaaggttccagcagtgcttgtgacccagctggtaccatcaactnnaatttggggtattgccaatgcaagcttcatgttgaaggtcctacttgtagccgctgcaaactnttatattggaatctggacaaagaaaaccccagtggatgttcagaatgcaagtgccataaggngggaacagtgagtggaactggagagtgtaggcagggagatggtgactgtcactgcaagtcccatgtgggtggcgattcctgcgacacctgtgaagatggatattttgctttggaaaagagcaattactttgggtgtcaagggtgtcagtgtgacattggtggggcattgtcctccatgtgcagtgggccctcgggagtgtgccagtgccgagagcatgtcgtgggaaaggtgtgccagcggcctgaaaacaactactatttcccagatttgcatcatatgaagtatgagattgaagacggcagcacacctaatgggagagaccttcgatttggatttgatccgctggcatttcctgagtttagctggagaggatatgcccaaatgncctcagtacagaatgatgtaagaataacattgaatgtagggaagtcaagtggctccttgtttcgtgttattctgagatacgttaaccctggaactgaagcagtatctggccatataactatttatccatcctggggtgctgctcaaagcaaagagatcatcttcctgccgagtaaggagccagcctttgtcactgtccctggaaatggttttgcagacccattttcaatcacaccaggaatatgggttgcttgtattaaggcagaaggagtccttctggattacctggtgctgctccccagggactactatgaagcctctgtactgcagctgccagtcacagaaccatgtgcctacgcaggacctccccaagaaaagtcagtgtggggcagaaggtgcagccgca

SEQ ID NO: 256266 - DNA, 482 bp, Homo sapiens
gggtcatgtttcaggttccaacttgaagatgctaccactggctggctaaggatatgaaacttgagtattaacaagaataacttcagtagattgatatgtatcaattatatctaaatccatgaatttctaagactactactactactactacaacaaaaatttgttactgttggaggattctaggaagccaactcactttaacaactgattctgccttttctatataaactgtgctattaggtaatcaaataatagatgagtttgttcttattagaataatattccagctaatgagtgaagaaggaatgttggagttaaaatactaccatttgcaatccctgataagctattgggatctaggcatcaaggctcagtggctgacagataactaaaaagaatacaaccaagcattatgtgcctcctgatagaaaaatacaacactatccaagaagtagtcttgccaaccccatgccttaaaaaag

SEQ ID NO: 256267 - DNA, 455 bp, Homo sapiens
catttaaagtatacaactcaatggttttacatattcagagagttgtgcatacaccactactatcaattttagaacattttcattaccctaaaaagaaaccctgctttgcttagccagctttaccaatctctcccctcatactccagtcaaccatgaatctactttctgtctttataaatttgcctcttcagaacgtttcatgtaaatggaatcataaaatgtggtcctttgtgactggtttctttcacttaatgtaatgttttcaagagtcattcatgttgtagcatgtatcggtgcttcatttctgtttattactgaatagtattccattgtatggatatactacatgtatttatccattcatcagttgatgaatattggattgtttccactttttggctactataaataaagctgctgtgagcactcatatacaagtttttgtgtggacatgc

SEQ ID NO: 256268 - DNA, 902 bp, Homo sapiens
tttttatttcgcgctaatgatagattagcaactacacaaattttagttcacaatatgtaatttttattgagtgatcaccatgtgctgatttccataatagggattcacgtttgaactgtcttcaaaacaaccctatgatttagttaccagtatactttctcagttgaataggtgaagaaaccaaagtaaatagaggttaagcaattttccgaaggccgtaaagctgatgactagcagagcagggattcacatccaggtagtctgactctaggtaccacatgctacacatcctgtaccacaacttattatatttgatcctcataccaatcctataatggtagattttttagagtgtcttctcagattgtaaaccaactccagaccatgtctcgttggttgatttaaaccaaatcctagcacatgatgattataacatgatgagcctcgtgacctagtctctatctcttattattgtgttctttataataaagatgatttattgaatatataattctatctcagtgtttatatatttgtaagactttctctatcaatccccaaaccaggaactatccctttgccatgtgttttgcttggattgaaatatagttacatgcacagcatgtgcttaatttatatacattgaatgaataatataagggagatgtaggacggggttgagttgggagggtcttagacatttcctaggtggtaaattgatgttcccagttgaaatgacgtacccatggtcatgtggatggaattggtcagttttatattccactatctgtgttagctaccagtgtatctccagtgataatcacaatgcttgacatatagtgaagcataatagctatttgatgaataaataaatcactgatttgactaacaatatgtgttat

SEQ ID NO: 256269 - DNA, 357 bp, Homo sapiens
tttatttattttgagacagagtctcactctgttgcccaggccagagtgcagtggtgcaatctcggctcactgcaacctccacctcccgggttcaagcgattcttctgcctcagcctctcgagtagctgggattacaggtgcccaccagcacaaccggctagttttcatatttttagtagagacacggtttcaccttgttggccaggctggtccccaactcttgacctcaagtgatctgcctgcctcgccctcccaaagtattgagattacaggtgtgagcccctgctcccggcctatatttttaaatcacaaaaataatatataaaaaaaagttgttaatcctggaatgtacaaagt

SEQ ID NO: 256270 - DNA, 786 bp, Homo sapiens
caaagtcctgggtgggagcattagtttggttaacaaaggtcacatgactgatgatcaataatcaaataactaggaaagggactatcccagactttttgagatttcccaaaataaggaatgtgttcagacactgggcagccatcaacagatgtcatttacacgtatgtgtgcatgtagacacacgcacacacacacacacacaaacacacatattcgatgattgcttcccaatgccagagatttctcattaaatttgtaacagcatggtgttcaaatacttttctttttaaatttatgttttactacctaaaacataatgtttcatggtctaaaggaagaaaaacacaagtaaaggaaaagaaataaaaaacttttaaaattccagtacctgattaaaataacagcaacatttttgtgtatattcttccaggctttgttcaatacatagaaatgaactctttagccaaagtaggatgatagtacatattatagtaagaccatctttttaaaattcacaatgtattctaaacatctttctatggcaattttagaaggacatactattctgttccatggatgtatcataatttgttcaaaaatcacagattattgaacagttagattatttacagttttctgtcataaacaatgctttgataaaaaactattttttcatacccttttcacattattgaattacttcagaaaaataaattgctagaaatgcacttgcctcatcaaaatataacacattttaaaggctttcagttgttaccctcaatttac

SEQ ID NO: 256271 - DNA, 506 bp, Homo sapiens
  misc_feature (379)..(379): n is a, c, g, or t
tgtggagtagaggacaggctgaaggtcaaggcagggtggggaatccagcctggaagtgactgcagcctagctgagagagccgtggtggccaggaccagtgaggcagcagcgtggatggagagagaggagggatgcagagatgtttaggacatgagctggctggtgatggatagcatggggcaggctggtggtggtaaggggtccagggtccagctgccactaggagggtgggtaggtttgggcacaagcccttgtctttctgatccttgttcaggtgagatccccctgcacagatttcacctgcttttttttttttccctggagccatttaaaacggcctccgggggatggggtcggcatgattttattaatttatttnatttattaagacagagtctggctctgtaccccaggctggagtgcagtggtgcgatctcgattcactgcaacctccgcctcctgggttcaagtgatcctcctgattcagcctcctgagtagctgggat

SEQ ID NO: 256272 - DNA, 438 bp, Homo sapiens
atacctgatgtgaaaggttttatgttcaaactggattccagtgtataacagaaataagctctgacctctctaaccgtatgactaatttttcttaacttttaggttttaatttttcttttttcccttgtttaggccaacagtgcaccctagagaaaatgtgagttattttctcttctagcagttaagaaaacagactccagtgccagatgtcctgacttctaatcctagctttgcttttcctagttgtgtgacctccaaagcacccaaactctgtggcccagttgcctgtaaaatgaggacagaaactatttcatgggattttgaaagaaattaatctacagcaggtgcctggtacatagtgccactttatcattattgttacacataaatgaaatttttgaaaaacataagttccaaataaaaaacctcaaccatatt

SEQ ID NO: 256273 - DNA, 307 bp, Homo sapiens
tttgtggttccccgttgggaatcctgatgcaatagtgaaagggttagagtctggatttttcagagtcccccacgcaggcacagttgtctcctaggggcctcggggaggagcagacgggagtgcagcccctccgggtgagagtgggagcagcggccgtggggcggggccagtctgggtgtggaggtgcagggcagtgagggctggatggtgtaacctccacggggtgcacgaagctgctttgctttttcccagtcgttgccttctgtcaaccaccctgcccttggccacactccatcgtgtggcgttg

SEQ ID NO: 256274 - DNA, 185 bp, Homo sapiens
cccttcctgtgtccatgtgttctcattgttcaattcccacctatgagtgagaacatgcggtgtttggttttttgtccttacgttttttaattaaagaaagtcatcaagtgtaccaagtagagtggtaaaaaaagttgctactcaggaaattataatgaaaatgatctcaaattcagatttgcatt

SEQ ID NO: 256275 - DNA, 305 bp, Homo sapiens
ggtcatgggcctttttctttctttgtttgccatgttatctccaacatctggaacagagtctggcacaaagcttttttactgcagggcttccgtgaatttggagatttttctgagctgggagaaccaagattttcagagaggcaaggctaagcaccagccaggtcctccatcttccaaccccaaaattcatccagaatgtaccaggatgggcctagaagtcaacttcaaactttgatcttcaatcctacaaagaatgatcatctcagaaaacttagggcaaaagtaaatatgcatggatttacaaa

SEQ ID NO: 256276 - DNA, 271 bp, Homo sapiens
cccatcccggaaaaaaaggggagaacacggggggcaatcggcggagaggggaaggcagaaaatgttaccagaggtgccaaatgaggtgagaaagaccagggtaggaaacataagaaaggcgggactctcgggcaggaaggtctgtttggggtagggaaggcatgtcaggacagagctttccggacagccgaccttccttctttccagcccctccatccccgacaaactcactttctcagcaaccctaagcccgtgggtcaccctcgccttg

SEQ ID NO: 256277 - DNA, 411 bp, Homo sapiens
gtaactgactgtggctttcatgtgaccctggtttgtgatgagctgtgctgtgttttgggaatagcattaatattttcttgcagtttgagtttaactatcaacggtttcctggcatcttttggttgatgtcagacagtaacattttagatatggcagcctgattgtcacctgcacatttagagacaattattagactagtggttttccttctaaagccaaagagttttttgataatcttcctatatatactgttacaccccccagttttgtgaacacacaataactagtcttatgacttgcggtaatgctgaataatacatctgttgtgttactttcctaatgtatgatctaagttgtattaccattgtcttatgttttccttaacattaaaacctttcttttgtttgttta

SEQ ID NO: 256278 - DNA, 714 bp, Homo sapiens
cagtacatcaccttcatgagcgcatcagtgaacaccagtctaaggaagacatctctgaacgtaattttggagattttgatgagttccattgaaacaaggaggaatgtgatgtccagtatcagttctgcagacccaaggacaaagaaaattctgtgataaactcatccagtgtgactgtaatgtgggtatctatttgatacctccaagtaactgtttattcttgtgccagttgagtagatggtacgggccagttggtgttgattagtgaaccacggacaaagggcatatgtcacatgagttgctcctggataaagtcacccagtcacttcctgatgaatatcctgcataaactccaaagacaaaagagagttaaggttgtttttctcaccttagaccaggcagtgatagaagaactgggggaagagataattgtatttatcttggtgaaggtgacaaatcatggcaaatgagcaaaatgaaaaaggtttgcagatttcaacaaacttctaaaagatcagcttacagtcatgtatacatctcttcctttgtttctagtttatttgcatctcattactatgttctcggtttaggatacaagacaccggactttcaaatcaacaattgtttcaaaagactcctactggattcctgctagtgatgggagaaaattatcattctgtgagttgtcaataaatgtttaaccacaaaaaaaat

SEQ ID NO: 256279 - DNA, 608 bp, Homo sapiens
cagtacatcaccttcatgagcgcatcagtgaacaccagtctaaggaagacatctctgaacgtaattttggagattttgatgagttccattgaaacaaggaggaatgtgatgtccagtatcagttctgcagacccaaggacaaagaaaattctgtgataaactcatccagtgtgactgtaatgtgggtatctatttgatacctccaagtaactgtttattcttgtgccagttgagtagatggtacgggccagttggtgttgattagtgaaccacggacaaagggcatatgtcacatgagttgctcctggataaagtcacccagtcacttcctgatgaatatcctgcataaactccaaagacaaaagagagttaaggttgtttttctcaccttagaccaggcagtgatagaagaactgggggaagagataattgtatttatcttggtgaaggtgacaaatcatggcaaatgagcaaaatgaaaaaggatacaagacaccggactttcaaatcaacaattgtttcaaaagactcctactggattcctgctagtgatgggagaaaattatcattctgtgagttgtcaataaatgtttaaccacaaaaaaaat

SEQ ID NO: 256280 - DNA, 945 bp, Homo sapiens
tgcctctcaaagtgctttattcattcagtgatttttttcatttgtatttgtttattaaacctggtgctgcccatttatacccttttccccacccaccttagtttcaaattaaatgtacacattgaaacttctttactgagatagtttcctaatccctgagggaatctgtatcagaaatatgcataaaagtttgaggccaggcacagtggctcatgcctgtattcccagcactttgggaagccaaagtggaaggatcacttgagccatccaggagtttaagaccccatccctatttataaaaataatttaaaaattaagaaatatgcatgaaagtttgacccccatgttattttttagttccagttcaactttgttttgcgtaactctaatttgcattcccatctgtattaaagacaagttctcaagtagcaaactttttaactctgccaaggctgaaacttttgagactaagtagaaggaaggcatttttgactaaggtttttatccactgtgctcaattagcttagtcatcttttttcttcttaagatctttgtggcagatataaagtacaactctttacctacaattctgtacgtgtatgtgtattatcagttgaagcctcataccagatgcttttagttattcaagatatgtgttcgaagacattgatacatgatgtttatttttcttctacttcagcatacctgagggatacaacatactcctgtcagtaacagattcactgttacagagattctcacttgaactaggaagcatgctctttaggaaagaggcctatcagaatctaaaaaggggaaatgaaggttagaaaagtaccagcacccccatagatgtttaatttggtacactcgtctcctccagcagctgaaaattgctagttttaagagattgagccaggcgccgtggctctcgcctgtaatccc

SEQ ID NO: 256281 - DNA, 178 bp, Homo sapiens
cctcttcttctttttttttacctttttccttccttcagccaataattattaagccagtctctctgctacatgttggaggtacattcatggaacggacagaacatcctcgaaagagcccaggattcagatttatctctacctctcacttccttcacttccccttcctgatggattgctc

SEQ ID NO: 256282 - DNA, 411 bp, Homo sapiens
ccactgcactcaaccttgagtgacagagtgagaacctccgtctcaaaaaaaaaaaaaaccttgcccagcccaatgttgtagagtatttctgtatgttttctagtagttttgtagtttcaagttacatttaatcctaatccattctgagttgatttttgtgtatggtgagaggtaggggtctagtctcattcttcttcatggggatgttcaatttccccagcactgtttattgaagagactgtcttttccctcgtgtgtgttcttggcacctttgttgaaaatcggttgactgtaggtggcatacgcaatatataaagaggaaaatcagccacggaccaatacagaatgttaatttgaagtgattattttttaattactgaataattgttcagttcaacgtattttctagta

SEQ ID NO: 256283 - DNA, 781 bp, Homo sapiens
tgtaccttcacagacaaattcagatctaagattattttcccaaatataccttcacagacaaatttagatccaagattatttccccaaatataccttgacagaaaaactcaggttcaccatctgtgcttatgtggggtaagcttttttaggcaaggaaatcttgcataacaattaaaaaattaatgcatttttcaggtggacattttcagctttcttttcacacaatcccttctggctagaattgctatggttacatggcaggatatatcagaccagattctaggaattcattatctcacttttctgtgaatatattgacattcattaggttatgggtttagctactatgatttataagatataaggtgaattgagctacttttagtaaaattcttgtttgaataccagcttgtcttccagaatacacatttttttgttctaaatattctaatattcagaattattgaacattacttttctacagttgggaataaagaagtagcagaaagagaaagtagatttcagtaaatagtattttacttccaaaagattttctatgtaaatatatagatcatatattcctaagcaaaattatcacatgaagttttatgtattgcctaatgtaaggtctgatattagaacaatactttagatcaaaactgtgccaaaatccataatgcacttcttactctacacaaagggaattactaagttgataatattttcttttacattttcaatttgttgttacttgccaatgaaagacaagtagggaagagcc

SEQ ID NO: 256284 - DNA, 473 bp, Homo sapiens
gtaacctgaggaaagcccatcctttagtcctaagagaggctctgaccaacaccttgcaggaaaggggtcatgtaagggagaattctgcttccttcatagcctgcaataggcaaacagtcttccacatatcacagtgggatattggaatattcagcttaaaggaaggcatcatccataaggaaaaaacatccatgctccactgcattctgaaaggatgagtcagatctttaaaatactttttaaccagatcatatttcttaaatgctttttatttcacaaatggaaccccatttttatattcattattgtagttgtagcccactgttttcaccaatgaaattttttctgatattcaatatgatgattagcaaagggtcagttatctgttgaaatacaaatagtagtggcacttacggtggccaaatctggaatgtagatttttactatggctaaaatgaactattccctataaa

SEQ ID NO: 256285 - DNA, 547 bp, Homo sapiens
tgagacagggtctcattcttgcccaggctggagtgcagtggcctgcactgtagcctctacctctcaggctcaagcagtcctcccacctcagcttaccaagtagctgggactacaggcacaggccaccacaccagctaatttttgtgttttttatagagacagggttttccattgttgcccaggctggtctcaaactcttgggctcaagtgatctgcctgcctcagcctcccaaagtcctgggattagacacgtgagccaccagcctagtgcccttatttttaagatggagtctgtgggttgaagaggttcatgagatggggagacttcttaaaaaggcctccaaaggaaaagcagcaatgcaaaatacatgcaaagagccataaaataccagctctgtcctcataagaggcctcgtctactcgccagccttcaggcaaggccacacctccattgtccccaacagttaagtattcatcaaataaattggaattccagtaaaacaggaagtgcactccactgatttgctggttctcacagttattgctg

SEQ ID NO: 256286 - DNA, 397 bp, Homo sapiens
gcacgaggccggtaaccgggccctttccacctccgcctccatgttcagtttaaatattaatcttgctctatctagaaccccaagaatcatctaagctgactcttaaattatatccaaaaacttacggttgtgatattcaaatgtataaacagacagatgtaagacattaatagaaaagacattgtatccaaaacaccattaagaaaattaaaagacaaaaattaaactgctaaaaagattgcaacaaaatgtccaaatttatatttaaaaagtttttgcaagtcaataagaaataatattactaacctaatacaaaaatgagcaaagaacatgagctggcaaattatgaaaaaagaaatacaaatagctaataaataggtagagaaaagtttgacct

SEQ ID NO: 256287 - DNA, 457 bp, Homo sapiens
aaaagaaaaacacttcccaaggcccggcacttttcagcagtggaaagcaggctccgcgtaggaggcagcgcagcaaaagaattccctactccgcacttttcccgctcttgcaccctgcgagcagcaggattatataaagtgaccggcgcctgcttctgctagcagctctgctcggcggtcggaggcgggacgaacgcgcgcagcctcgctggggaccaaaaatctgctgcccgtggtggcctcggacgccgggaggctagtccgacttgcggaggccggctcggcacttgcttgtacgccggtggcagtggaaaagctgagggggcttgggaagggaggggacaccaggcgccaggctgtgactagcgctgcaatcgtcgtaaatcaccgacgggtagagtcagcccatccaagttgaaagagagggggaaggcgatggaggttgcggtcagtttct

SEQ ID NO: 256288 - DNA, 116 bp, Homo sapiens
aagtaattagttctttactgattgaaccatttttttctcctcttttagtatttggaactggaacaacttacttttgatgattcttacttactggtccagtctcagcccacctgcac

SEQ ID NO: 256289 - DNA, 526 bp, Homo sapiens
atcccattcctgtcatcacagttgactcatggcaggcacacagcttgctgcaagtatggaaagagatttctcaagcacaaagggctcaaagcacacagaggacttgctgttcctgacagactttgtcaaggacagaaaggaacttacagactcacacactgatccacaaagaaaattagaaactcaccagaccctctccattttaagggaaactaaggagggtggcgggagatgggacaggaaatgactgcccaagtataatgcaacataaactagtatttcttgtgaaatgttttcttatcctcaagtctaaagacatggcacgtgcgtgcctgcgtgtgtctctgtgcatgcacttgcacttgtgttcgcagtggtgtggagggtaggaaggactaatagcatgattgaaatgatcatattaactagattactctttgacatacttggattttgacttgtcttctgattggaagtttttcttcagcatctttggcattaaagaggcttgttttgggaagtaaca

SEQ ID NO: 256290 - DNA, 463 bp, Homo sapiens
ccatgtattgatgtgattttatctgcaattcttgcctccctaaaacatataaaaaccaaactgtgggccaggcatggtggttcatcccagcactttgggaggccaaggtgggcagatcgcttgagcccaggagttcaagaccagcctgggcaacatggtgaaattgcatctctacaaaaatacaaaagctagccgggcatggtggtgcacatctacagtcccagctacttgagaggctgagatgggaggatcacctgagcctgggaagtcgaggctgcagtgagccgtggtcacatcactgcactccagcctgagctacagagtgagaccctgtctcaaaacaaaaaacaagaaaagttgtaactcaactgccctaggcgcactttctcagggcctcttgagactgtgtttcccaggccgtgctcactcatattggctcagaataaacctttaacaaatattg

SEQ ID NO: 256291 - DNA, 551 bp, Homo sapiens
aattaacagtataccaatatatataattaaaaatagaaaccaaatagattctctgtatttggcaacagagtggcagaacaatagtggcatctccacatttgttaggatgaacatagccctttcccctctccttccataaaagtgcacagaacatgttagtgcagatacagtcctcagaacattaacattccattttgcaaaagacattttccagaatcttggcagtaggtaattctgaaacacttttgaattaccttcaatcatcccatataattaggaatccagaatacaaagtacaaacttggcaattgttatgattgaaactgtcactgatgcttaagggaaattgaagcaagaagcataatttcttcctttaggttatatttcagcaaaatacttgacagcaacatacaatgaacagcttgtttggagagatgatatgatacaatgtaatagtgatgtcaaaataacctggaggaatatccaaaaaccagaaaaacgttaaaatgaagcccaactcatgaacctctctaactgaagcccagtcaaaa

SEQ ID NO: 256292 - DNA, 323 bp, Homo sapiens
caaggagaaaaatgagaatgctagggtctgaatgtttatgtcttcccaaagttcacatgttgataacctagcccccaaggtaatggtatgaggaggtgggcatttagaaagtatttagttcatgaaagtggagccctcatgaatgggattagcacccttatcaaagagacgccagagagattacttgcccatctgccacgtgagaacacagtaaaaagatgccttggaattggactcttgccaaacaatgaatctgccagtgtcttgatcttggacttcccagccttcaggactagaaataaatttctgttgtttataagcca

SEQ ID NO: 256293 - DNA, 487 bp, Homo sapiens
tcagcacactcagctgagcaagactagcagcaatctcaggcctcctgtcctaacagcattctttttatttttttagctttagggttttcatttgttgtaaattaaaatagttaaaaatctttatcggaggagagtagcttgtacacttgaggttgctttgttttctaattactgttggagatggtagtaagcagaataatggctccccaaagatgttcacatcctaattcccagaacctatgaatctgttgtgttacacagcttgaacattcctagtctgaaaatccaaaatgctccaaaatctgaaactttttgagtgccaatgtgacaccataaatgaaaaattccacacctaacgtcacatgatgggtcgtagttaaaacagtcaaaactttgtttcatgcacaaaattatttagaacatacaaaattaccttcaatctgcatataagatgtatatgaaaagtaatgacaatattccaaaattc

SEQ ID NO: 256294 - DNA, 637 bp, Homo sapiens
gtttattcttgggaagtactggacacacatatttcagcacctacgacagaacctgtttcttagaaatctagagtattgattttagccaacggggtatctttgtatcttcaaatctcatagaacttagagtttacggtggggccaggcatggtagctgacgcctgtaattccagcactgggaggccgaggtgggcggatcaactgaagtctggagttcgagaccagcctcgccaacgtggtaaaaccccgtctctaataaaaatacaaaaattagctgggcctggtggtgagcacctgtagtcccagctacttgagaggctgaggcaggaaaatcacttgaaccctggaggcagaggttgcagtgagccgatatcatgccactgcactccagcctgggcaacacagtgagactctgtcttaaaaaaaaaaacacacgtatatgtatatttttttctcaatgtgtcatgtgtataactcatgtctccttaactaaattgtaagttagttgcataaatcagtgtcaatatcacaactgaagaaaggtggcacgttcgggagtaattcaaggagttaagctatgaaggggccccttatcatgaacaaggtaatgccacccggggcttgtaatgatttagcc

SEQ ID NO: 256295 - DNA, 613 bp, Homo sapiens
gaaacatggcaaataaaaatttacactgtcggggggccaggcacagtggctcacacctgtagtcccaacactttaggaggccaaagcaggaggattgctgagcccaggatcagtccaccctgggcaacaaagggagaccccatctctacaaaaaatcttaaaaattagcagggcgtggtggaatgtgcctgcagacccagctattcagtgggctgaggtgggaggaacacttgtgcccaggaggtagaggctgcagtgaaccatgattgtgccacagcacgccagcttggatgacagcgtgagaacctgtctccaaaaaagaaggctatgcggctagaaggaagatacagccagcagctgatgttaaagttttataatagaatggttgttatgcttcatgtatatggcaatgttggtcatctggaacataaattaagctgcagaagttaagaaggctactgggtagtaaaaatagaagttataaaattgatacattaaagtttatgcatttttctcacagctgagtccctcaaaccttacttcacagcctaattaactcttattttagacacatttccaacacacttgattgtctgctattccagacccaggc

SEQ ID NO: 256296 - DNA, 357 bp, Homo sapiens
tgaatgagagagagcatatatactttattcatagcatagcttgatataaacacgtctttgcaagatagtgctatcatctggattgttactaggatacaagtgttccatcacattcttggggaaaaaaaagaaaacttgtacccagtggacatattccagcaagcatagtgagcatgatccaccattttgggctcaagaaaaaggactccatgcaggttaatcagaactttttatgaaaactattcaaaagaagttgaatatactcctgaaacatttacaaaagaaaaaagtgggacctaaaactggccacatactttttaattattaaagttgaacattatattgtatgtgcattta

SEQ ID NO: 256297 - DNA, 429 bp, Homo sapiens
acagagtatgcagtatcccccatgatgattcaaccccagattttatttttcactgagcatctcacacttagtagtgtatcttttctatgcattgggcactgggagacgacgtgtagtcatctcaacagagacctggccttcagacgccaccactcactgccgctctgtccaggcgagcatcaacttgcactgtttcagaagcaaaaggaaaatgaaccgcagccactgaagtccctcagaactgaggaaaagttattgactttcctgatttgtgttcaatctggctggccatgggtacagacacagctggtttccccatttgtgagctggacggatttaattcctggctgtttgaatgatgtatcccctcatcagtgaaaccaacagagtagctcaacttaattttctctttctatggcatgccattta

SEQ ID NO: 256298 - DNA, 419 bp, Homo sapiens
ggctagagaagtcaccctccttcgcctcggagtgggatgagattgagaaaatcatgagttctattggagaagggattgacttttctcaggaacggcagaagatctcaggtaccgtactaagtggccattttccccacagaaactggcagtctggctcttttctggctcaggctttcctctaacacagaagacagacattcagtgggtgggagaggtcagcttcagaccacgtcatgctcctataattcagtctccaatacctagacagccccatcttgctgttatttttagagccatgactccttttacatatgggaggggaaaagggacaaaatgaattttaagctgcctattgggaaaaatttttagatcaacaatcgtaacttattcattattttatgggctttcttagatgggct

SEQ ID NO: 256299 - DNA, 529 bp, Homo sapiens
gatagacttagcacaatagcagaagagagggaaggcagaagacctgaaggaagagcagcagaggaggggcaggcataaagaatggtaaacatagaatggcaaccatagtcacctcagggatcagctcatggcctcctggtcaagcttcctctccctgtgattcttggctgtcttccatctgcagctaagtagccagaccagaatagtcaataattctagtgatctggcaactataattttctagtcttgatgagtatcggtattgtcactgtattaaacttcccctattcgtcatctccatctgatcatcattattattctaagaatcccatgtggaagtaggaactggggtgacaagaatctgggtgctggctgccccttgaatgcatcccatggccccatagccatgactgcggtgccagtgaagcagcagttcccaggaaatacatggattgccttgcctggggctgaatgggagtgcttcaatggtgggtctgtaagcaaagattgtgaacttgttcaggacaaa

SEQ ID NO: 256300 - DNA, 1714 bp, Homo sapiens
  misc_feature (509)..(509): n is a, c, g, or t
cggctgggactaaggcggcagcgggctgagcgctcggccacccccagcgtgcgcagcccgggcgggcttcgcccgcggagcttgacctagggtcgggacccgtcgggttgcaccgccgcactcgggaagacccggcttcgagcctctcctctccgtctccaaagcgccctcccgcctcccggcgctccccatgcacctgccgggctgcgcgccagccatggccgacgggagcttctcgcttgccggccacctgctccgcagcccgggcgggagcacctcgcgacttcacagcatcgaggccatcctggggtttaccaaggacgacgggatcctcggcaccttcccggcggagcggggcgcccggggcgcgaaggagcgggataggaggctgggcgcgcggcccgcctgccccaaggcgcccgaggaaggctccgagccctccccgccgccagccccggcgcccgcccccgagtacgaagcccctcgaccctactgccccaaggagcccngggaggcacggccgagcccagggctgcccgtcgggccagccaccggcgaagcgaaactgtcagaggaggaacagcccaagaaaaagcatcggcggaaccgcacgactttcaccacgtaccagctgcatgagctggagcgcgcgttcgagaagtcccactacccggacgtgtacagccgcgaggagctggccggcaaggtcaacctaccagaggtccgggtccaggtgtggttccagaaccgacgggctaagtggcggcggcaggagaagctggaagtgtcctccatgaagctgcaggactcgcccctcctctccttcagccgctccccgccctccgcgacgctgtcgcccctcggggcgggcccgggcagcggtggcgggccggctgggggcgcgctgccgctggagtcctggctcgggccgccgctgccgggcgggggcgccacggcgctgcagagcctgccgggcttcgggccgccggcgcagagcctgcctgccagctacacgccaccgccgccgcctccgcccttcctgaactccccgccgttgggccccggcctgcaacctctcgcgccgccgccgccctcctacccgtgcgggcccggcttcggggacaagttcccgctggacgaggcggacccgcgcaacagcagcatcgcggcgctgcgtctgaaagccaaggagcacatccaggccatcgggaagccgtggcaggccctctaggggcactggggaacgtcttgggatccgaccccgggccgaccgcaccgtacccgcatcctctctcccagggacaacccccctccccagctcggcccctctttccctgtcgcctgcagccacccgccaagcatagttcagggccacgcgcctgctcccgatgcacggggagaagggcgactttcaggcctgaggagaggccctctggccgcctcaacgcacttcgcggacctcagccctgcagctggagggcaacaggctgccgggccccgctggccacgccgctcccatcaccgcaggcgctggagcctccaggcccaaacaggctgaagctcctaaacttggccattcccaggaggcttggagacccccagataaccataacagggaagcaggggaggcggaaaaatagagtttgagaaacttttgtataagtagtttcaaactatttgagaggagaattaaagacatgcttgttttgtttcg

SEQ ID NO: 256301 - DNA, 2007 bp, Homo sapiens
  misc_feature (623)..(623): n is a, c, g, or t
  misc_feature (647)..(647): n is a, c, g, or t
  misc_feature (713)..(713): n is a, c, g, or t
  misc_feature (802)..(802): n is a, c, g, or t
cggctgggactaaggcggcagcgggctgagcgctcggccacccccagcgtgcgcagcccgggcgggcttcgcccgcggagcttgacctagggtcgggacccgtcgggttgcaccgccgcactcgggaagacccggcttcgagcctctcctctccgtctccaaagcgccctcccgcctcccggcgctccccatgcacctgccgggctgcgcgccagccatggccgacgggagcttctcgcttgccggccacctgctccgcagcccgggcgggagcacctcgcgacttcacagcatcgaggccatcctggggtttaccaaggacgacgggatcctcggcaccttcccggcggagcggggcgcccggggcgcgaaggagcgggataggaggctgggcgcgcggcccgcctgccccaaggcgcccgaggaaggctccgagccctccccgccgccagccccggcgcccgcccccgagtacgaaggtgagtgcgcaccctggctgtgcgaggccgttcgggcgcccgagcttaggagttggccagacgagagcgccccttccttaacttttattaaggcaactgggcgcggggttggggaccgtctatggcgggagttccaatttgcancagagaaagcttaggacccatcgncgccctcaccacggacctccccgggccatctcggccaggcgggctggccagtgcccacagcgaggnggggtcggcccaagggtgttttggggagtgcatctgactcccgggcctcgtcgccccagcccctcgaccctactgccccaaggagcccngggaggcacggccgagcccagggctgcccgtcgggccagccaccggcgaagcgaaactgtcagaggaggaacagcccaagaaaaagcatcggcggaaccgcacgactttcaccacgtaccagctgcatgagctggagcgcgcgttcgagaagtcccactacccggacgtgtacagccgcgaggagctggccggcaaggtcaacctaccagaggtccgggtccaggtgtggttccagaaccgacgggctaagtggcggcggcaggagaagctggaagtgtcctccatgaagctgcaggactcgcccctcctctccttcagccgctccccgccctccgcgacgctgtcgcccctcggggcgggcccgggcagcggtggcgggccggctgggggcgcgctgccgctggagtcctggctcgggccgccgctgccgggcgggggcgccacggcgctgcagagcctgccgggcttcgggccgccggcgcagagcctgcctgccagctacacgccaccgccgccgcctccgcccttcctgaactccccgccgttgggccccggcctgcaacctctcgcgccgccgccgccctcctacccgtgcgggcccggcttcggggacaagttcccgctggacgaggcggacccgcgcaacagcagcatcgcggcgctgcgtctgaaagccaaggagcacatccaggccatcgggaagccgtggcaggccctctaggggcactggggaacgtcttgggatccgaccccgggccgaccgcaccgtacccgcatcctctctcccagggacaacccccctccccagctcggcccctctttccctgtcgcctgcagccacccgccaagcatagttcagggccacgcgcctgctcccgatgcacggggagaagggcgactttcaggcctgaggagaggccctctggccgcctcaacgcacttcgcggacctcagccctgcagctggagggcaacaggctgccgggccccgctggccacgccgctcccatcaccgcaggcgctggagcctccaggcccaaacaggctgaagctcctaaacttggccattcccaggaggcttggagacccccagataaccataacagggaagcaggggaggcggaaaaatagagtttgagaaacttttgtataagtagtttcaaactatttgagaggagaattaaagacatgcttgttttgtttcg

SEQ ID NO: 256302 - DNA, 603 bp, Homo sapiens
gggaagagaatgtatttcttttgtttatatgaccaagctttctgagaaattttaatttggtgtacaaaacttttagtagttagtgaatgagtaagatgatttgtgtattgtgcagtttggctttaagagcaaaggagaacttagagactatgggttctagatgctgtgtctgcctttcacagtttctctgaactttgtgattgaactggattcatattggagttatatatcagacaaaaaccaaagtcattgggcacaagcagaataagtccaaattaaaagtataatcatgagtttgttaaataatgctttatatacttctttaaaatatacttatttaatattaaggatttttttttccttgaatccatataatttgaaaggtctaaggggaaaaacttgttttgagccactttatgatgtgaattcacttcataggaaataacatgcttgtttttaatgtactttaaccctttaaagtacactggaccaaattttagagagcatatacatagtgttataaaatttttaaagtagttaatttttatattctcgattatcaaagcaaaatcatttaactttgaaaagctcttatacttgttt

SEQ ID NO: 256303 - DNA, 678 bp, Homo sapiens
aaactcatttttttaaagtctgttttctcttcctccattctaattctgttctcagtgcagtgaggatgaagttcgacttcaccctcatcattctaccaaactcttcaggtcaaggtcatcggtgactttccacactagcaaatccagaattaaagctcagtgctcatctttatctatcagcatatccatgacatacttgatcatttcccctttatgaaacactttctttactttgattctagaacactgtttcttatttattcttctttcttactatttgtattctctcagtctcctttgctggttcctcttcatcttctcaacctctaaatgttgaaatgcctactttcaaaccttatttttttatccactgcactcactttctacgggatctagaaataccatttttaagttggctcacaacaaatacttcagtgtctttaatatgccagtcactgttctgcatgtaagggatacattagtgaataaaaactctctgccttagtggcttatagtaatagccattttattatatctagtgttttataggtgaggcatttgatacgggctcagctggatgatttgcctctgcttcatgatgtctggggcctcagctagagtggtttaaacccatctggagatgactgaagctgtatgtctaggtcctctgttctccat

SEQ ID NO: 256304 - DNA, 686 bp, Homo sapiens
ggggaagggggtttgaggccttctggatggaaggcaagggttctgccagctactctgggcacctagctgggtgtctttgcacctctattcctatggaaggggggttgaggccttctggatggaaggcaagggttctgccagctactctgggcacctagctgggtgtctttgcacctctataccctagggaaggggggtttgaggccttctggatggaagggaagggttctgcctactactctgggcacctagctgggtggtctttgcacctctatccactggggaaagggggtttgaggcattctggatggaaggcaaaggttctgcttgctactctgggcacctagctgggtccagagagcagggtggcattgacagagcaagagcctcccagtgatatgatctgagccacaccgtcttgtttactgccatctgcctgaagactgtgcttaaggaacaatttctttgtcaaaacacacgacagagagcctgctttggccccaggcttctgtttcataactcttttttattggagcagaaagaagcagcacattattgttctcttgctccgcgttttctcatggatcaagaaagcaacaagcactttgtgcaaatagaaaagcctgctttgttgtctgaagacaaggaggtgaggttgtaagaagcagagctttcacagatcataa

SEQ ID NO: 256305 - DNA, 346 bp, Homo sapiens
tgtagattcctcagaatcatcaagtagagtctgaatatgcatatctgtccccaggcttcctctgttttgatttgtaacagaatttcaggcacaggaaagataaaaatctgctttttatttgtaatgaatttgaaaggtctttgtgcaactctcatgattggtgaaatgttttctgtaattatgtattccgagagttcacatattctggaatagtgttcccctgttttgcctaataagattcacacatggcatgtgattccaaggctctgactcagaacaacgcatcatctccagcgggggagggtcctgagagttgtggttttaaaactagtgccccaggtgattc

SEQ ID NO: 256306 - DNA, 189 bp, Homo sapiens
agagaagtgtactttaaatatgaagacatatgttggttaaaagtaatgggatggagaaagatatgtcatgctaacgtaaatgaaaagaaagctggagtggctatagtaatcaaagtagatttcagagcaaagactatgaaagataaagacagtcatttcataatgataaaagtcaattaatcaagagga

SEQ ID NO: 256307 - DNA, 349 bp, Homo sapiens
gaatctgtattttttttaccttcctgtctgtctcctttttggttttgtctgtatcttctacatctgtccatgttttttatcatctcctccatctcccccttttctccctccttttcctttttgattatcatcatcactactctctgccatatgtagaccaaaaagcacgcatatcaattaaggatttgaatgtcagcaatagaaatcatcacatgttgtcttaggcagaaaaattttgcatcaaaaagttacaaggtgctcacagaattgactggcagctaaaggaccaggcttcgaaaaatgcaggaaaaactgtatagaaggttccacacaggaaactaatcaattt

SEQ ID NO: 256308 - DNA, 438 bp, Homo sapiens
aggaatatgaaaagattcttggaacataggcaagtattacctcaaaccggacaaagaatgtactgatgaacccgcaggatgacaacgagaggatcaactcagctctgccttagcttctccgcagtgccctggatctgggctagtagtcatgcaggctctagtgagggcttggggtttctctcccacatgatttctgcatgcctctcccactcctctctttgccctgggatcttactttaatctctgggagcaaaatctctgtcaaaatatatctgaatctttttatgtggggctaaagtcagtggttttttggagagttaatggttgaatatttgtcaccctgattttcttcagtctactctgtataactcatgtctattcatttgcacagtctgggatcagaaactaataattcgaaggattgtccaaccacaaaac

SEQ ID NO: 256309 - DNA, 493 bp, Homo sapiens
tgagacagagtctcgctctgttgcccaggctggagtgcagtggtgtgatctcggctcactgtaacctccgcctcctgggttcaagcgattcgcctgcctcagcctcccgagtagctgggattataggcgtgagccactgcacccagcctaatttatttaaaataaaatatatattagtaattaaaccacacataatctcatttagtatatccttaggaattcccggctttagaacttttctgaaacaaaaagcttatttctcctattacaggaatctcaaaaaatattttaatggcataaaagataattcaaataaaaagctttattatacaaaaaatatgtctattttctgattaatatcagtctgtctagaataataacaattatcattattaagctatgtgaatatcagaattacttaagttattcaattatttaatatttttcctttctttctgaaggcaaaggtacttgatagtgaactgggagtggc

SEQ ID NO: 256310 - DNA, 442 bp, Homo sapiens
cgcccacctcgacggccatgttcgtgggtggggagaggccagcccgaccctcggacggcgggactcgcgggctactttagggttaccaatgatcctgatctgcccaaggctgaggagtttcccaggatatgggactttcactgctaaaaccaggatagtcccatgcaaagcagcatggctgatcaccctacttgctgccatgagactaccaccatcctcgaggatgatagatcccaaggagagagtgacccagtcaacatccagccccatcagcatgtgacttatccagccccagtccagtcaccagataatagcaaatgcatgagttaattcaggtgagaccatcagaacgatctagctgaacttgtctcaaattgctgtcctctgttggagtttttctgcacataaaaaataaaattgctgtcctacataactgtaaaaa

SEQ ID NO: 256311 - DNA, 420 bp, Homo sapiens
ggaaagacaaatggagccaaactacctgggttcaaatcctgactccaccacacgctacggttaccaatgatcctgatctgcccaaggctgaggagtttcccaggatatgggactttcactgctaaaaccaggatagtcccatgcaaagcagcatggctgatcaccctacttgctgccatgagactaccaccatcctcgaggatgatagatcccaaggagagagtgacccagtcaacatccagccccatcagcatgtgacttatccagccccagtccagtcaccagataatagcaaatgcatgagttaattcaggtgagaccatcagaacgatctagctgaacttgtctcaaattgctgtcctctgttggagtttttctgcacataaaaaataaaattgctgtcctacataactgtaaaaa

SEQ ID NO: 256312 - DNA, 219 bp, Homo sapiens
accgctagtctgtgaaagatcagttgccacagtttttggtttccacatatgtaaagattcgtcataattagcaagttcacccttagtaggctgtatcacctcttgttccccacatcccagatttcagtccgtccttggctctcggatgggaggccactctgattgcagccacagttcatgccccacacagacattcactgagcctctgcccagcgttct

SEQ ID NO: 256313 - DNA, 562 bp, Homo sapiens
cgagccctgcaatccctcccgagggctacagacctgagacgggctccaggaaaaggagggaaggctcgccccgacaccgacccgggcttccgcggtgtgagccagtttcagcgaggagctagttggttatgaccggaacgtgccgtaggtggggtgggggaaatagcaaaaggcgaggttggagggattgaaaaatgcagacggctgcgtggggcttgcttaggtgcctggagtttattctttaggcaacagggaacctttggagggctttaagcaggaagtgataactgatttgtgttatttaaaaaaaaaaaaaagtcactctggcaaccttgtggtcggaaatgaaaccagaagaaccctcaaggctgcaactttcatttttatggtgtcattttgatgctaaccacaagccaggaagcaggacagacaggcaccgaggccttttgaaaggtgaacaccctgaagcccagagaggtgacacacgtcattgcattaggagcttttataaaagtaaaaatgaagtaaaataaaaagcttttgcttatcaagattttaccat

SEQ ID NO: 256314 - DNA, 299 bp, Homo sapiens
cctgtagacattgtgcatcccccaatgcctttccccttaaaaaaaattatattctaatccagtccatcaaataaagtctacgttcattagaaacatattctcttggtttttataatttcagtttttttcagacacagatagtgcatatgcagatttgttacttttgtacagtgcaccctggtagtgagcatagtacccagtaggtagttattcagcccatgctcccctctttcccccacccccgtagcctgcagcatgtcttgttcccatgttaatgttcctgtgtgctcagtgtttag

SEQ ID NO: 256315 - DNA, 391 bp, Homo sapiens
tagctcatcatgtatcattaatgttagtgtattttctgtgtggcccaagacatttctttttccagtgtggcctggggaagccaaaagattagattccccggaattatagcacactgtccctaaggcgtggggtggctcagcagggcccacgatctcctctggggaccccgggccagggatggaggtctccttctgcctggatgtcacatcgcagattctcactgtggggtttggccccctcagacacagcttttgagagaactcgactcccgtctctgctctgcacagcccccctccctggccccattcacaaaccattccctatacagcctctccattccagctggaggagtctgaaccctgcctccattgtgtgcatgctgtgtggcct

SEQ ID NO: 256316 - DNA, 454 bp, Homo sapiens
tttttaaagcagctgactttttatccatcttctcaaagtattcagcttcattttcacagaaatgataattctcatctctcactcaaattttatgtttgcataaattttcatcaaacacataattacagtaagtttaactggaaaaaataagagagactctactgttaaaagcaaaaaggcccaggcttctgaagagacgcgccttctcccctggtgtttgtcatggcaccagccaacacagcaagatggagccaccagtccagccagggagcttctgcagtgtttcaaacaaggcggcaccagcacagaaatccacaggccctgcagtgggaagggatgaatgagtccccaaaaacagatccaaataaaaataaggacggagaaaaggaaacaccaagctaacaggaaggggtgttctaagacacaaagagctatttggaaaacatcacataag

SEQ ID NO: 256317 - DNA, 459 bp, Homo sapiens
ccaaaaagactgcaaataagagtttgataaacagaaaacaacatgacaatagtttctgggtaactctttgaacttgttaggtacagcatatactgtccttcacacacctgctgtattttgagaatctgagcttatcgaaagccacacggcatcagtggaactgactagctgggtgactgcatgcaagcagttagccactctgcctcagtttccctaaaaatacaatgaaatggatagtcagttgagtggtcctcagacttttacatcttatagtatggaagcggacatggatttgctatatttcatttttctgtgtaagtacattaaaaatcaaaactactgcctactattaccatctttcatgaaaaaaaatattttttagcctgaaagcattgagacgaacataacctcagagtaagcgatggtccttgaaaagtgaataaatttaacggtttggta

SEQ ID NO: 256318 - DNA, 433 bp, Homo sapiens
aagtatctaacatacaggcagatgccaaaacaaacatacaagaaaaaaaattggggggaaaaacaggatatacaaaaagaagataacttaaaaaaaacaacaacccattcttaatctcctcagggagatataagaagatgttatatggccttaaaaggacattcaaagggtccttcagagggcctcactctgtcaccaaggctggagtgcagtggcaccatcatagttcactgcaacctcaaacttctgggctcaagggataattttaaagaacttttttgtagagacagggtcttgctgtgttgctcaggctggtcttgaactcctgggctcaagcgatcctcccacctccccctcccaaagtgctggattataggagtgagccactgtgcctggccctccttgttaattctgcactgagtttacttaactt

SEQ ID NO: 256319 - DNA, 249 bp, Homo sapiens
cttatttatgaagtaatatgaatttaaatgttgaagggaagaagactgcttctgtgtatttgagattagtgcgctacttccatgtatctgaaattgtctggtattttagtatggtctagaatgagggctgtaccagaggataagctaaaaagagccatgttttaagactagaggttctaaaaaaaacaatttaacagcatggtggcaagagggcctaggcataacaatggaaaatttagtctagaacta

SEQ ID NO: 256320 - DNA, 167 bp, Homo sapiens
agtcttctataacacagcataatcacatgcgtgatatcccatcgtattcccaggtcctgctcatcttcacagagagattatatagggagatacagcagggcttgggaatcttggaggtcctcttacaagtctgacacagagaggaattctgataggaatttatggtc

SEQ ID NO: 256321 - DNA, 593 bp, Homo sapiens
atgcttcaaaatttttttagagaatgcagttttaataatttgcctctaaatgttagttataactactgtccctcagctattcattcatttgcttattccatcaacaaatatttattcagtgtctagtatgtaccagaaaatacttttggcatcaaggatgtagttgtgaactttaaaggtagttttctttctacttttctggtacctatatctaaagaagaacctgaaaagtaagatgaatgaatgaatgattggtcaaataaatgaatgaataaacaaagagaaataagataatgagaaaaataaatgaggtactatgataaagaatcatgaccagttaatattgggagggcaaggaagaggaggtgtctctgagaaagtgagacataaaccaagaccttagtgacagtggaatgtaaccatgctaggagctctggcaaggatatagtaggcatgaggctcagcaaatccaaaggccttaaatttcaaacaaatttgggggtcttcagaacataccaaagtggagtctaacttgaccaatgcaaagaccagggctagtgttataacatgaggttggaaaaggaggtaatggc

SEQ ID NO: 256322 - DNA, 398 bp, Homo sapiens
attgaacaaaagttatgaaacattatccaagggatggccgcttgttttctggtgcatggatcgcattagcgccatgtcttacagaagaagtgctgtgaggtttgatccttgccaagtgcctgctgtgtgataaatagcaagtgtccagtgcttggccaaaaataaaggaatgagaaatagataagtacagtcttctcaagtctcacagtctgttagggagacccctgcacagacaggtcactggatattgcatccaatggtagcacaaagaaggagtagtgttttcaggtaaatttaggagaacagaatcttacgtgaatgacagcagctctggcaaaagcatggaggcctgaacccacagcatttgtgagctatcagactgtgccatgtggctagta

SEQ ID NO: 256323 - DNA, 433 bp, Homo sapiens
taatattagaaacatgacatatcagaatttgagggatgcagctactaaattactgaagcaatgctgtatggctatacatgtttgtattaggaaaggagaatagtgtagtctgtggtctaagtctcctacttaaaaagcaataaaaataatactaaattaaacccaaagcaaatagaaggaaaaggtgatgataaagagtggatattcacagaatataaaacatgaaaacaatggagagaattataaacttctagcaagattatttagaagaatactaatagcaggaagaaggaaaaatatcactatagatgttctggcattgtggaataattgggggatacaaaccattctctgtattcccaggttctgtatctgtgtatcaactaactataaatggaaatagccaagaaaaatataaaataatgcaataata

SEQ ID NO: 256324 - DNA, 639 bp, Homo sapiens
tcccttaagtccttgtttcttcaggtctttggatccaatttgaagaagcaggaattcctttatgataccatctctcaaactgaggttctcctgttaagcaatcagggcctcagacagatgacttctgattgaaaatacgtaataaaggaaaacttttaaagaaaaaaaacacccaaaattccactgtcctcataatttttagctttttcataatgctatcaaaagtctcttgtttcttgttcgcatacttagataaaattttacttagttgaaacttactgtacatatacattgtatatcaaaattttaacatatttgtcttatttttaataacaaaaatgtcaatgactaacactgatgtaatcttgaaaaagcatttaaatagaatttctggtttctctcataaaatctatatggatttatgctgtttgaaacagtacgcactagccatacatggctaatgagcacttgaaatgtggctagtatgaaatgagatgtgctgttaatatgtaaagtatacctggatttgaaaaaagtataaaatatctcaataatttttatattcattatatgttgaaatattttgaatatattgatttaaatacttaaacatgaaaattattaaagaaaatttacctt

SEQ ID NO: 256325 - DNA, 460 bp, Homo sapiens
ccaggctggagtgcagtggcacaatcttggctcactgcaacctccacctcctgggttcaagcagttctcctgtctcagcctgctgagcagctgggattacaggccggtgccaccatgctcagctaacttttctactttttttttttaattattatttttttgagacagagtctcactctgtctataaggagtgtatgtgttatatacatttttagttttagtagttactgaagatattaattataacatctatttttgactgatttaaatctattattatttagtaaagtctcctcctaaacaatgcaaagaccttagttctctttaacatcatttatcttcattctgatttatatgttcttaacatattttaatttttaattttttttttttttgagacggagtctcactctgtcgccctggctggagtgcagtggcgcgatcctggctcactgcaact

SEQ ID NO: 256326 - DNA, 434 bp, Homo sapiens
aatagataggacaatctcctagctctcctccaattgagaaaacactccaattgggctttgctttaaactttgtgttcttaagtgatgtcaaagccatttccagcttaatgttctgtgggtaccttgggggccattcatgcagggagcatggccaggcagggtatgagtacattgtttctgatttctttcatacatcagggttcctcgggaaatttttgtattttttttttaagtcctgctgctttaaaaatttgaaagtggctcattaaactaaacaggctaatgtaatttgttgcttatgccaagcctagactgttgagaattgacgtttttaaagattatcaaatacctcagtaggtaaaatgagcccatgatcttccactgagtggtgagcatactcccagcccatggacaaggccggaagagacaggctt

SEQ ID NO: 256327 - DNA, 439 bp, Homo sapiens
aaaaagaaggaaaaaaaaaaacccactcacaatctaatgccaatggagagaatggtattttaatctacgaaactgtaatgaaggctcttaaacaatcccactttccataattgaggctttcaaaagggccaggtagctggtggtgtttgtattaacatctcataggctctggatcattcacagccacgtattgatctatgtggttttgacgtttaaattttaatgaagcagccttagtggggaagaaaacagctatgcatgtgcctggtaagggggaagaggacctgttcattcctgtttctaagccagcatcttaagagtaggtattacctgtgtgtgaaatcaaagtattttaaaattaactctaggaagaatgttggattttcctgtgttgttttcagtggttggagaaagggtttctggagagaaaaaaaaaatt

SEQ ID NO: 256328 - DNA, 405 bp, Homo sapiens
caataagcatctacagagagctatgtccagagtcctaggctaaaagacaagaaggctattgagttaataatctaataacaaagatactgtggctgaagtccagaaacttaatgatgtgtgtctgcagtcgggagcttggttctgtctgtgtgggttgagcacccaccccatccaggcccagtacaagggaatgccaatacaattaagacacagatgccagcatgacatttacacttggcagaaggtaacagatgtgtgagaagtacttccctcttcctgccagtcaaaggaaggaaattccaccaggtggtgtgagcactgaccgcaaaccggtacacatgcctccaaagttgttaatcctataggcctcgttgaaatgcatgtattaaacatgttctatttata

SEQ ID NO: 256329 - DNA, 375 bp, Homo sapiens
cttgagcccaggagttcaagacaagcttgggaaacatagagagactctgtctccattaaaaaaaaatgtatatatatataatattagccaggtgtggtagcacatgcttgttaatcccagcttccaagctacttgggaggctatagcaggagtccaagagttccagcctgggtgacagagacagagtgagaccctgtctcaaaaaaaaaaaaaggcataaatcagccaaacattcaatccagctgagttgaggattttggtttttgtttctgttgggtatttataagtaaagactatcagaaaactggaaatgaaagttagttagtatctcagactacactctgcaccaagtagtttgcttaagaatcgacttca

SEQ ID NO: 256330 - DNA, 583 bp, Homo sapiens
cagcacaaactgaccttttgggggaataattagcaaaacttgaatatgaactagatattaagggcttaagtatgacatatgtaagagaatgtgtttacttttaggagagacataaacgaatatgacaaaaaagctaacaaccacaatatccaaatgaagtatacaggtgtttaccgtaatattctttcaatgtgtatgtctgaacattcttcagttgggagtgatgtgggagaatgaagtcactttaaaaagtgggtgaggacggtgaccaaaatgttcagttgtaaggaaccaaaaaacagtaatagccgattctactgacaggtgtaacaaagaaacacactgaacttaaaccaggttcctatgacacatatactggaagatggagccaaaaaagagagggcatcattttactaaacaattcctatcctcaaaaagtttaaaatatcaaccaaaactctgctgataaaaccttctgaaatacacccagtatctatcattttctcaagagaagaaggggctattaaagatataccatttttcctcaattataatgattaagatgtatggaaaactttgtaat

SEQ ID NO: 256331 - DNA, 546 bp, Homo sapiens
gacactgtggaaagttgatttctattaattgggatctgttcctagcacatactaggctatgtgtgcttgatggaacagttagctgtagagatgtgatttagcaaagttggttataaagtgggtttttgtaaattgtttccttattactgttctttgtagaattgaagatgtattctctcccagcaaaatagttcacctgcagatcattgaaaagtttggctgaagaaaggggttattttggtgtgggggtaggaggcttctgtgggctgggcatggtggcttacatttgtaatcccagcactttgggaggctgaggcaggaggatcacttgaggccgggagttcaagacttgcctgaccaacataatgaatctcccatctctacaaaaagaatcagccaggcgtggtggcgcacacctgtagtcccagccactcaggatgctgaggcgggatggtctcttgaacttgggagattgaggctgcagtggagcagtactcgtacccctacactccagccttggcaaaagagggagatcctgtctcaaaa

SEQ ID NO: 256332 - DNA, 395 bp, Homo sapiens
gaaattttattgtatagataagtaggaagttaaaacctaagaaaatcatcaaatattaggggtgcttctgaattgatttatctgcagtttaactacttagcatttatggaaggcagtttacaaaaagccatagaggtttatgataagctggtcaagtaattagttgaatagattttataattctttgcacttctcatctgataataactaccgtataggtagtagacttgacagtagttcagtattttctgttaacagagttgtgtttataacaattacagtcaactactgtggttcttcagttgcacagagtagcttttggcaaaagtgaaaaaacctacaaccaacctacatctttttacctaggagaggggccaaggagaggggctctcaaa

SEQ ID NO: 256333 - DNA, 881 bp, Homo sapiens
gaaattttattgtatagataagtaggaagttaaaacctaagaaaatcatcaaatattaggggtgcttctgaattgatttatctgcagtttaactacttagcatttatggaaggcagtttacaaaaagccatagaggtttatgataagctggtcaagtaattagttgaatagattttataattctttgcacttctcatctgataataactaccgtataggtagtagacttgacagtagttcagtattttctgttaacagagttgtgtttataacaattacagtcaactactgtggttcttcagttgcacagagtagcttttggcaaaagtgaaaaaacctacaaccaacctacatctttttacctaggaggaataatattgagttcttaataacagactatacttcattatagcctgtgtgtgtgactagctaggttgaaatgtactgtgcatgataagccttgtaaagcaagttatatgttgaaattagtatctttggaagtgtagatagatagctggagaaaaatgtaatgatttggagcttgtactccagaggggaaaatgtatttcccgtgtttatagagaatagaagaataatgggcaggggttgaatgtaaagggaattaagggatatcttagaatggagaagaaaaggaatagattttgaaggaaaatagcatacacattccgtactcagtcacatttggaaaatagggaatataaaatttactccaatattaactgttaaaagggtaaagaggatctttagttggaaaactgttctgattttgttgttctttcagttcagacttatttcagtactttggtttgttatgaactttagaactattgtggagcaattaataaataactcttaacaga

SEQ ID NO: 256334 - DNA, 845 bp, Homo sapiens
gaaattttattgtatagataagtaggaagttaaaacctaagaaaatcatcaaatattaggggtgcttctgaattgatttatctgcagtttaactacttagcatttatggaaggcagtttacaaaaagccatagaggtttatgataagctggtcaagtaattagttgaatagattttataattctttgcacttctcatctgataataactaccgtataggtagtagacttgacagtagttcagtattttctgttaacagagttgtgtttataacaattacagtcaactactgtggttcttcagttgcacagagtagcttttggcaaaagtgaaaaaacctacaaccaacctacatctttttacctaggaggaataatattgagttcttaataacagactatacttcattatagcctgtgtgtgtgactagctaggttgaaatgtactgtgcatgataagccttgtaaagcaagttatatgttgaaattagtatctttggaagtgtagatagatagctggagaaaaatgtatttcccgtgtttatagagaatagaagaataatgggcaggggttgaatgtaaagggaattaagggatatcttagaatggagaagaaaaggaatagattttgaaggaaaatagcatacacattccgtactcagtcacatttggaaaatagggaatataaaatttactccaatattaactgttaaaagggtaaagaggatctttagttggaaaactgttctgattttgttgttctttcagttcagacttatttcagtactttggtttgttatgaactttagaactattgtggagcaattaataaataactcttaacaga

SEQ ID NO: 256335 - DNA, 474 bp, Homo sapiens
ttgccaggggagctaacattcttccgagaaaaagcagaatgagagagagatatgcagctgcagtggaggacttggaagagaacaacgccaggtcctggatcctgcaagaatctcctctggaaaagcaggggagagaaaagcaaggaaggaagcagggtcaccgcaagtgtgggatttgtcttattaaaatctgatactgtgtggcagtttgcttcactcttggtataaaatgtctgagctccatgttaaagtaaatgtaagtaatataaatctgcctttcctgaggtgaaaatagatccatattatttaaaatatgaactgagatagatgacagttacaaacattatacttgttcttattataattcttactaagctcaaggaataaaaactgggatgatgaaaaagaagttctgaatgtaaaaattggtgttttggataaaatacaaaccaacccagaaatgatgaaaaaaat

SEQ ID NO: 256336 - DNA, 438 bp, Homo sapiens
cacaacatctttttgtcaagctgtcattctgtctggaaaacaaattaaaaaaaattgtcactatttaataggaagaaaaatgaaaccaaataatcagtgcctagcatatgatagagatacagcaaattctggaaaaaaagcaaacatatgctgggactacaaattttagtattaacaatatattaatttgcagaacagatagtggttggccttttacatttctgacgtttacaatatcttaatttctgatcacctcacataagctcatttgatctcttattgttgcagtggagtttagaagtttgaattttgagatgtggatgacatatgaagttatgagatagatgaatataggtgctggagctaaagaaataatagaaagcttggtgaactgtagttgactacaaatggacactggttctggggtgaataggaagt

SEQ ID NO: 256337 - DNA, 3132 bp, Homo sapiens
acgagatggaaggggatgttcaaagcccctcccttgactctgaacggacccccagggaacatgcgaccctctctctggcgacgcctcccacccaccactaatacttgctcctggaccggggggcgcggaggttggagagaggaggcaggtgtctgcatgctacccgggtctcggacaggcggcactgggaccacgaggcagggagccaggcttgaagcaggtgacatgtagacgtcccctggtccagcctcggaacctgagcgcccttctgcctggaaagtttgtggctaggcgccatggccaagagcagctccctgaatgttcgcgtggtggagggccgcgcgctgcctgccaaggacgtgtctgggagcagcgacccctactgcctagtgaaagtggacgacgaggtggtggccaggacagctactgtctggaggagcctgggccccttctggggggaggagtacacggtgcacctgcctctggatttccaccagctggccttctacgtgctggatgaggacactgtcgggcacgacgacatcatcggcaagatctcgctgagcagggaggcgattacagccgacccccgagggattgacagctggattaacttgagccgagtggacccagatgcagaagtgcagggtgagatctgcctgtcagtgcagatgctggaggatgggcagggccgctgccttcgctgccatgtgcttcaggccagggacctggctcccagagacatctctggcacatctgacccatttgcacgtgtgttttggggcagccagagcttggagacctcaaccatcaagaagactcgcttcccgcactgggatgaagtgctggagctgcgggagatgccaggtgccccgtccccactgcgggtggagctctgggactgggacatggtgggcaagaatgacttcttgggcatggtggagttctctccaaagaccctccagcagaagccacctaaaggctggttccgcctcctgccctttcccagagccgaggaggattctggggggaacctgggtgccctgcgagtgaaggtacgcctgattgaggaccgcgtcctgccctcccagtgctaccagcctctcatggagctgctcatggagtctgtgcaggggccagcagaggaggacactgctagccccttggctttgctggaagagctgaccttgggggactgccgccaggaccttgccaccaagctggtgaaactctttcttggccggggactggctgggcgctttctggactatctcacccggcgtgaggtggctcggaccatggaccccaacaccctcttccgttctaactccctggcatccaagtcgatggaacagtttatgaagctcgtgggcatgccctacctgcacgaggtcctgaagcctgtgattagccgtgtctttgaggagaagaagtacatggagctggatccctgcaagatggacctgggccgcacccggaggatctccttcaaaggcgcactctcggaggagcagatgcgggagaccagcctggggctgctgacgggctacctggggcccatcgtggacgccatcgtgggctccgtggggcgctgcccgcccgccatgcgcctcgccttcaagcagctgcaccggcgagtggaggagcgcttcccccaggccgagcaccaggatgtgaagtacctggccatcagtggatttctcttcttgcgattcttcgcacctgccatccttaccccaaagctgtttgaccttcgggaccaacacgcggacccccagactagccgctcactgctgttgcttgccaaggctgtgcagagcattggaaacctgggccagcagctgggccaaggcaaggaactgtggatggcccccctgcaccccttcctgctgcagtgtgtctcacgtgtgagagacttcctggaccggctggtggatgtggatggggatgaagctggtgtcccagccagggccctgttcccgccctcggccattgttcgagaaggctatctgctgaagcgcaaggaggagcctgccggcctggccacgcgctttgccttcaagaagcgctacgtctggctcagcggggagaccctctccttctccaagagtcctgagtggcagatgtgtcactccatccccgtgtctcacatccgcgccgtggagcgcgtagacgagggcgccttccaactgccccacgtgatgcaggtggtgacgcaggacggcacgggggcgctgcacaccacctacctccagtgcaagaatgtgaatgagctcaaccagtggctctcggccttgcgcaaggccagcgcccccaacccgaacaagctggccgcctgccaccccggtgccttccgcagcgcgcgctggacctgctgcctccaggctgagcgctcagccgccggctgcagccgtacacactcagctgtcaccctgggggactggagtgacccactggatcctgatgctgaggcccagacagtgtatcggcagctgctcctggggcgggaccagctcaggctgaaattactggaggattctaacatggatacaactctggaggcagacacaggggcctgtcctgaggtcctggcccggcaaagagcagcaactgcccgcctgctggaggtgctcgcagacctggatcgtgcccacgaggagttccagcagcaggagcgagggaaggcggccctgggcccccttggcccctaaggaaatgccagagctagcccggaaggaggagcaagagccagggggccctcttcagcgcatcctgccccgggagtctcctgtctccttggacctctttgattctgtggtttggaggctcccagagacgtgcctagtcctgtgtgccttgagtccagaactcagggcatggaagccctttggcaggggccagccttgcactgagtgaaacttgccctctggcttgattcagactggagtggataggataaggaacctgacttatttgactgagactggggtctctacttcaccaaactggcctctatccataccaaggaggccagcctggccctgagctgctggatacagctggacctgaattcctgatgcccatgtgatgttgttgccccagatgggcactaaatggcctcactccttcctg

SEQ ID NO: 256338 - DNA, 3038 bp, Homo sapiens
gtctggagctccagacgcctcggcaagagcccgctgcgccccctgcgcgctcctcctgctcggagcacggctcctacctgtagagtccggacgggcgctccctccccgggcacctacaccttctcctctttcggaaatctcccatccagctacccgggtctcggacaggcggcactgggaccacgaggcagggagccaggcttgaagcaggtgacatgtagacgtcccctggtccagcctcggaacctgagcgcccttctgcctggaaagtttgtggctaggcgccatggccaagagcagctccctgaatgttcgcgtggtggagggccgcgcgctgcctgccaaggacgtgtctgggagcagcgacccctactgcctagtgaaagtggacgacgaggtggtggccaggacagctactgtctggaggagcctgggccccttctggggggaggagtacacggtgcacctgcctctggatttccaccagctggccttctacgtgctggatgaggacactgtcgggcacgacgacatcatcggcaagatctcgctgagcagggaggcgattacagccgacccccgagggattgacagctggattaacttgagccgagtggacccagatgcagaagtgcagggtgagatctgcctgtcagtgcagatgctggaggatgggcagggccgctgccttcgctgccatgtgcttcaggccagggacctggctcccagagacatctctggcacatctgacccatttgcacgtgtgttttggggcagccagagcttggagacctcaaccatcaagaagactcgcttcccgcactgggatgaagtgctggagctgcgggagatgccaggtgccccgtccccactgcgggtggagctctgggactgggacatggtgggcaagaatgacttcttgggcatggtggagttctctccaaagaccctccagcagaagccacctaaaggctggttccgcctcctgccctttcccagagccgaggaggattctggggggaacctgggtgccctgcgagtgaaggtacgcctgattgaggaccgcgtcctgccctcccagtgctaccagcctctcatggagctgctcatggagtctgtgcaggggccagcagaggaggacactgctagccccttggctttgctggaagagctgaccttgggggactgccgccaggaccttgccaccaagctggtgaaactctttcttggccggggactggctgggcgctttctggactatctcacccggcgtgaggtggctcggaccatggaccccaacaccctcttccgttctaactccctggcatccaagtcgatggaacagtttatgaagctcgtgggcatgccctacctgcacgaggtcctgaagcctgtgattagccgtgtctttgaggagaagaagtacatggagctggatccctgcaagatggacctgggccgcacccggaggatctccttcaaaggcgcactctcggaggagcagatgcgggagaccagcctggggctgctgacgggctacctggggcccatcgtggacgccatcgtgggctccgtggggcgctgcccgcccgccatgcgcctcgccttcaagcagctgcaccggcgagtggaggagcgcttcccccaggccgagcaccaggatgtgaagtacctggccatcagtggatttctcttcttgcgattcttcgcacctgccatccttaccccaaagctgtttgaccttcgggaccaacacgcggacccccagactagccgctcactgctgttgcttgccaaggctgtgcagagcattggaaacctgggccagcagctgggccaaggcaaggaactgtggatggcccccctgcaccccttcctgctgcagtgtgtctcacgtgtgagagacttcctggaccggctggtggatgtggatggggatgaagctggtgtcccagccagggccctgttcccgccctcggccattgttcgagaaggctatctgctgaagcgcaaggaggagcctgccggcctggccacgcgctttgccttcaagaagcgctacgtctggctcagcggggagaccctctccttctccaagagtcctgagtggcaggtggtgacgcaggacggcacgggggcgctgcacaccacctacctccagtgcaagaatgtgaatgagctcaaccagtggctctcggccttgcgcaaggccagcgcccccaacccgaacaagctggccgcctgccaccccggtgccttccgcagcgcgcgctggacctgctgcctccaggctgagcgctcagccgccggctgcagccgtacacactcagctgtcaccctgggggactggagtgacccactggatcctgatgctgaggcccagacagtgtatcggcagctgctcctggggcgggaccagctcaggctgaaattactggaggattctaacatggatacaactctggaggcagacacaggggcctgtcctgaggtcctggcccggcaaagagcagcaactgcccgcctgctggaggtgctcgcagacctggatcgtgcccacgaggagttccagcagcaggagcgagggaaggcggccctgggcccccttggcccctaaggaaatgccagagctagcccggaaggaggagcaagagccagggggccctcttcagcgcatcctgccccgggagtctcctgtctccttggacctctttgattctgtggtttggaggctcccagagacgtgcctagtcctgtgtgccttgagtccagaactcagggcatggaagccctttggcaggggccagccttgcactgagtgaaacttgccctctggcttgattcagactggagtggataggataaggaacctgacttatttgactgagactggggtctctacttcaccaaactggcctctatccataccaaggaggccagcctggccctgagctgctggatacagctggacctgaattcctgatgcccatgtgatgttgttgccccagatgggcactaaatggcctcactccttcctg

SEQ ID NO: 256339 - DNA, 2585 bp, Homo sapiens
  misc_feature (2458)..(2458): n is a, c, g, or t
  misc_feature (2552)..(2552): n is a, c, g, or t
gtctggagctccagacgcctcggcaagagcccgctgcgccccctgcgcgctcctcctgctcggagcacggctcctacctgtagagtccggacgggcgctccctccccgggcacctacaccttctcctctttcggaaatctcccatccagctacccgggtctcggacaggcggcactgggaccacgaggcagggagccaggcttgaagcaggtgacatgtagacgtcccctggtccagcctcggaacctgagcgcccttctgcctggaaagtttgtggctaggcgccatggccaagagcagctccctgaatgttcgcgtggtggagggccgcgcgctgcctgccaaggacgtgtctgggagcagcgacccctactgcctagtgaaagtggacgacgaggtggtggccaggacagctactgtctggaggagcctgggccccttctggggggaggagtacacggtgcacctgcctctggatttccaccagctggccttctacgtgctggatgaggacactgtcgggcacgacgacatcatcggcaagatctcgctgagcagggaggcgattacagccgacccccgagggattgacagctggattaacttgagccgagtggacccagatgcagaagtgcagggtgagatctgcctgtcagtgcagatgctggaggatgggcagggccgctgccttcgctgccatgtgcttcaggccagggacctggctcccagagacatctctggcacatctgacccatttgcacgtgtgttttggggcagccagagcttggagacctcaaccatcaagaagactcgcttcccgcactgggatgaagtgctggagctgcgggagatgccaggtgccccgtccccactgcgggtggagctctgggactgggacatggtgggcaagaatgacttcttgggcatggtggagttctctccaaagaccctccagcagaagccacctaaaggctggttccgcctcctgccctttcccagagccgaggaggattctggggggaacctgggtgccctgcgagtgaaggtacgcctgattgaggaccgcgtcctgccctcccagtgctaccagcctctcatggagctgctcatggagtctgtgcaggggccagcagaggaggacactgctagccccttggctttgctggaagagctgaccttgggggactgccgccaggaccttgccaccaagctggtgaaactctttcttggccggggactggctgggcgctttctggactatctcacccggcgtgaggtggctcggaccatggaccccaacaccctcttccgttctaactccctggcatccaagtcgatggaacagtttatgaagctcgtgggcatgccctacctgcacgaggtcctgaagcctgtgattagccgtgtctttgaggagaagaagtacatggagctggatccctgcaagatggacctgggccgcacccggaggatctccttcaaaggcgcactctcggaggagcagatgcgggagaccagcctggggctgctgacgggctacctggggcccatcgtggacgccatcgtgggctccgtggggcgctgcccgcccgccatgcgcctcgccttcaagcagctgcaccggcgagtggaggagcgcttcccccaggccgagcaccaggatgtgaagtacctggccatcagtggatttctcttcttgcgattcttcgcacctgccatccttaccccaaagctgtttgaccttcgggaccaacacgcggacccccagactagccgctcactgctgttgcttgccaaggctgtgcagagcattggaaacctgggccagcagctgggccaaggcaaggaactgtggatggcccccctgcaccccttcctgctgcagtgtgtctcacgtgtgagagacttcctggaccggctggtggatgtggatggggatgaagctggtgtcccagccagggccctgttcccgccctcggccattgttcgagaaggctatctgctgaagcgcaaggaggagcctgccggcctggccacgcgctttgccttcaagaagcgctacgtctggctcagcggggagaccctctccttctccaagagtcctgagtggcagatgtgtcactccatccccgtgtctcacatccgcgccgtggagcgcgtagacgagggcgccttccaactgccccacgtgatgcaggtggtgacgcaggacggcacgggggcgctgcacaccacctacctccagtgcaagaatgtgaatgagctcaaccagtggctctcggccttgcgcaaggccagcgcccccaacccgaacaagctggccgcctgccaccccggtgccttccgcagcgcgcgctggacctgctgcctccaggctgagcgctcaggtgagggggcagggcggactgcaggctccgccctccccacccgtcaatcagcgggtgtcccacttccgccngggctggctgtgcaaccttgggcaagttactcaacctctctatgcctcagtctcctcaactgtgaaatgaggttgataacagtgcctatctcgnggagttgtgataattaaatgacttgatttacac

SEQ ID NO: 256340 - DNA, 821 bp, Homo sapiens
  misc_feature (31)..(31): n is a, c, g, or t
taagctatgtctaggtacgaggctgggtgtnaatcccttactgccgccaggaccttgccaccaagctggtgaaactctttcttggccggggactggctgggcgctttctggactatctcacccggcgtgaggtggctcggaccatggaccccaacaccctcttccgttctaactccctggcatccaagtcgatggaacagtttatgaagctcgtgggcatgccctacctgcacgaggtcctgaagcctgtgattagccgtgtctttgaggagaagaagtacatggagctggatccctgcaagatggacctgggccgcacccggaggatctccttcaaaggcgcactctcggaggagcagatgcgggagaccagcctggggctgctgacgggctacctggggcccatcgtggacgccatcgtgggctccgtggggcgctgcccgcccgccatgcgcctcgccttcaagcagctgcaccggcgagtggaggagcgcttcccccaggccgagcaccaggatgtgaagtacctggccatcagtggatttctcttcttgcgattcttcgcacctgccatccttaccccaaagctgtttgaccttcgggaccaacacgcggacccccagactagccgctcactgctgttgcttgccaaggctgtgcagagcattggaaacctgggccagcagctgggccaaggcaaggaactgtggatggcccccctgcaccccttcctgctgcagtgtgtctcacgtgtgagagacttcctggaccggctggtggatgtggatggggatgaaggtgagttcctgtggtccggccac

SEQ ID NO: 256341 - DNA, 3430 bp, Homo sapiens
gtctggagctccagacgcctcggcaagagcccgctgcgccccctgcgcgctcctcctgctcggagcacggctcctacctgtagagtccggacgggcgctccctccccgggcacctacaccttctcctctttcggaaatctcccatccagctacccgggtctcggacaggcggcactgggaccacgaggcagggagccaggcttgaagcaggtgacatgtagacgtcccctggtccagcctcggaacctgagcgcccttctgcctggaaagtttgtggctaggcgccatggccaagagcagctccctgaatgttcgcgtggtggagggccgcgcgctgcctgccaaggacgtgtctgggagcagcgacccctactgcctagtgaaagtggacgacgaggtggtggccaggacagctactgtctggaggagcctgggccccttctggggggaggagtacacggtgcacctgcctctggatttccaccagctggccttctacgtgctggatgaggacactgtcgggcacgacgacatcatcggcaagatctcgctgagcagggaggcgattacagccgacccccgagggattgacagctggattaacttgagccgagtggacccagatgcagaagtgcagggtgagatctgcctgtcagtgcagatgctggaggatgggcagggccgctgccttcgctgccatgtgcttcaggccagggacctggctcccagagacatctctggcacatctgacccatttgcacgtgtgttttggggcagccagagcttggagacctcaaccatcaagaagactcgcttcccgcactgggatgaagtgctggagctgcgggagatgccaggtgccccgtccccactgcgggtggagctctgggactgggacatggtgggcaagaatgacttcttgggcatggtggagttctctccaaagaccctccagcagaagccacctaaaggctggttccgcctcctgccctttcccagagccgaggaggattctggggggaacctgggtgccctgcgagtgaaggtacgcctgattgaggaccgcgtcctgccctcccagtgctaccagcctctcatggagctgctcatggagtctgtgcaggggccagcagaggaggacactgctagccccttggctttgctggaagagctgaccttgggggactgccgccaggaccttgccaccaagctggtgaaactctttcttggccggggactggctgggcgctttctggactatctcacccggcgtgaggtggctcggaccatggaccccaacaccctcttccgttctaactccctggcatccaagtcgatggaacagtttatgaagctcgtgggcatgccctacctgcacgaggtcctgaagcctgtgattagccgtgtctttgaggagaagaagtacatggagctggatccctgcaagatggacctgggccgcacccggaggatctccttcaaaggcgcactctcggaggagcagatgcgggagaccagcctggggctgctgacgggctacctggggcccatcgtggacgccatcgtgggctccgtggggcgctgcccgcccgccatgcgcctcgccttcaagcagctgcaccggcgagtggaggagcgcttcccccaggccgagcaccaggatgtgaagtacctggccatcagtggatttctcttcttgcgattcttcgcacctgccatccttaccccaaagctgtttgaccttcgggaccaacacgcggacccccagactagccgctcactgctgttgcttgccaaggctgtgcagagcattggaaacctgggccagcagctgggccaaggcaaggaactgtggatggcccccctgcaccccttcctgctgcagtgtgtctcacgtgtgagagacttcctggaccggctggtggatgtggatggggatgaagctggtgtcccagccagggccctgttcccgccctcggccattgttcgagaaggctatctgctgaagcgcaaggaggagcctgccggcctggccacgcgctttgccttcaagaagcgctacgtctggctcagcggggagaccctctccttctccaagagtcctgagtggcagatgtgtcactccatccccgtgtctcacatccgcgccgtggagcgcgtagacgagggcgccttccaactgccccacgtgatgcaggtggtgacgcaggacggcacgggggcgctgcacaccacctacctccagtgcaaggtgagaccccaccgcgatggggagcagggggcgtccctctgttcccacccgccccctgatcgcctcccacccgctgcagaatgtgaatgagctcaaccagtggctctcggccttgcgcaaggccagcgcccccaacccgaacaagctggccgcctgccaccccggtgccttccgcagcgcgcgctggacctgctgcctccaggctgagcgctcagccgccggctgcagccgtacacactcagctgtcaccctgggggactggagtgacccactggatcctgatgctgaggcccagacagtgtatcggcagctgctcctggggcgggaccagctcaggctgaaattactggaggattctaacatggatacaactctggaggcagacacaggggcctgtcctgaggtcctggcccggcaaagagcagcaactgcccgcctgctggaggtgctcgcagacctggatcgtgcccacgaggagttccagcagcaggagcgagggaaggcggccctgggcccccttggcccctaaggaaatgccagagctagcccggaaggaggagcaagagccagggggccctcttcagcgcatcctgccccgggagtctcctgtctccttggacctctttgattctgtggtttggaggctcccagagacgtgcctagtcctgtgtgccttgagtccagaactcagggcatggaagccctttggcaggggccagccttgcactgagtgaaacttgccctctggcttgattcagactggagtggataggataaggaacctgacttatttgactgagactggggtctctacttcaccaaactggcctctatccataccaaggaggccagcctggccctgagctgctggatacagctggacctgaattcctgatgcccatgtgatgttgttgccccagatgggcactaaatggcctcactccttcctgttttcatgtctgctaatccctataacctcactgattcttctgtaccctgcccttggcctaggactccaaccacaagcttccagaatcaggtaccctcaggaagaaccaaggctgggtgggggtccagtgtgccaaactcagacccttggagcctgggagaccttgggccaggctgtttatctctctttgggtctcagattaccctgtataaaaagaggagggaaagtct

SEQ ID NO: 256342 - DNA, 2285 bp, Homo sapiens
  misc_feature (31)..(31): n is a, c, g, or t
taagctatgtctaggtacgaggctgggtgtnaatcccttactgccgccaggaccttgccaccaagctggtgaaactctttcttggccggggactggctgggcgctttctggactatctcacccggcgtgaggtggctcggaccatggaccccaacaccctcttccgttctaactccctggcatccaagtcgatggaacagtttatgaagctcgtgggcatgccctacctgcacgaggtcctgaagcctgtgattagccgtgtctttgaggagaagaagtacatggagctggatccctgcaagatggacctgggccgcacccggaggatctccttcaaaggcgcactctcggaggagcagatgcgggagaccagcctggggctgctgacgggctacctggggcccatcgtggacgccatcgtgggctccgtggggcgctgcccgcccgccatgcgcctcgccttcaagcagctgcaccggcgagtggaggagcgcttcccccaggccgagcaccaggatgtgaagtacctggccatcagtggatttctcttcttgcgattcttcgcacctgccatccttaccccaaagctgtttgaccttcgggaccaacacgcggacccccagactagccgctcactgctgttgcttgccaaggctgtgcagagcattggaaacctgggccagcagctgggccaaggcaaggaactgtggatggcccccctgcaccccttcctgctgcagtgtgtctcacgtgtgagagacttcctggaccggctggtggatgtggatggggatgaagctggtgtcccagccagggccctgttcccgccctcggccattgttcgagaaggctatctgctgaagcgcaaggaggagcctgccggcctggccacgcgctttgccttcaagaagcgctacgtctggctcagcggggagaccctctccttctccaagagtcctgagtggcagatgtgtcactccatccccgtgtctcacatccgcgccgtggagcgcgtagacgagggcgccttccaactgccccacgtgatgcaggtggtgacgcaggacggcacgggggcgctgcacaccacctacctccagtgcaaggtgagaccccaccgcgatggggagcagggggcgtccctctgttcccacccgccccctgatcgcctcccacccgctgcagaatgtgaatgagctcaaccagtggctctcggccttgcgcaaggccagcgcccccaacccgaacaagctggccgcctgccaccccggtgccttccgcagcgcgcgctggacctgctgcctccaggctgagcgctcagccgccggctgcagccgtacacactcagctgtcaccctgggggactggagtgacccactggatcctgatgctgaggcccagacagtgtatcggcagctgctcctggggcgggaccagctcaggctgaaattactggaggattctaacatggatacaactctggaggcagacacaggggcctgtcctgaggtcctggcccggcaaagagcagcaactgcccgcctgctggaggtgctcgcagacctggatcgtgcccacgaggagttccagcagcaggagcgagggaaggcggccctgggcccccttggcccctaaggaaatgccagagctagcccggaaggaggagcaagagccagggggccctcttcagcgcatcctgccccgggagtctcctgtctccttggacctctttgattctgtggtttggaggctcccagagacgtgcctagtcctgtgtgccttgagtccagaactcagggcatggaagccctttggcaggggccagccttgcactgagtgaaacttgccctctggcttgattcagactggagtggataggataaggaacctgacttatttgactgagactggggtctctacttcaccaaactggcctctatccataccaaggaggccagcctggccctgagctgctggatacagctggacctgaattcctgatgcccatgtgatgttgttgccccagatgggcactaaatggcctcactccttcctgttttcatgtctgctaatccctataacctcactgattcttctgtaccctgcccttggcctaggactccaaccacaagcttccagaatcaggtaccctcaggaagaaccaaggctgggtgggggtccagtgtgccaaactcagacccttggagcctgggagaccttgggccaggctgtttatctctctttgggtctcagattaccctgtataaaaagaggagggaaagtct

SEQ ID NO: 256343 - DNA, 361 bp, Homo sapiens
gatggtgcctccctcttagggctgtgctcttggcatagtgcttggcacaaagccaactctgaggacatttggccaaatctgcttttgtaggattggttttgttattccattttccaggtgagaaaactgaggcccagagaggaaaaacttcctcggccagccggtgtggcttcctggtcaattccccatcctacttctctttgcaccacgaatttctagtccttgctgcctcagtttacgcagctgagaagtgggtttggggggctcctcttaccttctgctcctcccagcaggatgtgaagtacctggccatcagtggatttctcttcttgcgattcttcgcacctgccatccttacccc

SEQ ID NO: 256344 - DNA, 391 bp, Homo sapiens
aaaagattccctaccaagtaaagtttgaaaaccctagtataaattaatgtatataccaaaaagttagcatccttctccccaaaattacatattctcatttttggtgggaatatctttcaaactctttgctattatcttcccctctctaaatacagagctgaattatttagtctaattctgcaccaggaatgagacacactacactagtttgctaatttgtttcctagggctggcatgacaaagtaccatcatcatggtggcttcatcaacagaaatatgttattacctcacagttctggaggtaagaagtccaaaatcaagcaatctacagagttggtgcttctaaggggtatgagagaacaatttatttcaggcccatctccctctatgt

SEQ ID NO: 256345 - DNA, 568 bp, Homo sapiens
ctaatacatttggacctttaagtgacctagatcatcagtggaaacaaaggagagatactgattaaaattcaaggctccttgaagctagctggttgagtgtggaagccttaccttgacagtaaattctgttttctcaagttctctgagtagctcttttcttcttgttgcatcctccacactgagactggattggtcttcattaatagacccactggatttatcttccacaagcctgctttttatgttacctactttgttcctgaaaacattggagttggtgatgcagttcagatagtttccctttggctttaaagtatacagttctgggtatgtagaaagagtcaggataaggtttggtaaagtttgtcctctgcgtaggcagctgattttggacatgtttggactggaagcagtatctaggtgtggaaaatggggtcatatttaaatgaataacatcctgcttggaggttatggacaagtcttgagtgtgcgtgtgtggaaggaatttaggggtggttaaaatttggtataaaaaaaggtactgaagtctgcaactttgaaactcatc

SEQ ID NO: 256346 - DNA, 2174 bp, Homo sapiens
agaaattggagaagataaaactggacactggggagaccacaacttcatgctgcgtgggatctcccagctacctgcagtggccaccatgtcttgggtcctgctgcctgtactttggctcattgttcaaactcaagcaatagccataaagcaaacacctgaattaacgctccatgaaatagtttgtcctaaaaaacttcacattttacacaaaagagagatcaagaacaaccagacagaaaagcatggcaaagaggaaaggtatgaacctgaagttcaatatcagatgatcttaaatggagaagaaatcattctctccctacaaaaaaccaagcacctcctggggccagactacactgaaacattgtactcacccagaggagaggaaattaccacgaaacctgagaacatggaacactgttactataaaggaaacatcctaaatgaaaagaattctgttgccagcatcagtacttgtgacgggttgagaggatacttcacacatcatcaccaaagataccagataaaacctctgaaaagcacagacgagaaagaacatgccgtctttacatctaaccaggaggaacaagacccagctaaccacacatgtggtgtgaagagcactgacgggaaacaaggcccaattcgaatctctagatcactcaaaagcccagagaaagaagactttcttcgggcacagaaatacattgatctctatttggtgctggataatgccttttataagaactataatgagaatctaactctgataagaagctttgtgtttgatgtgatgaacctactcaatgtgatatataacaccatagatgttcaagtggccttggtaggtatggaaatctggtctgatggggataagataaaggtggtgcccagcgcaagcaccacgtttgacaacttcctgagatggcacagttctaacctggggaaaaagatccacgaccatgctcagcttctcagcgggattagcttcaacaatcgacgtgtgggactggcagcttcaaattccttgtgttccccatcttcggttgctgttattgaggctaaaaaaaagaataatgtggctcttgtaggagtgatgtcacatgagctgggccatgtccttggtatgcctgatgttccattcaacaccaagtgtccctctggcagttgtgtgatgaatcagtatctgagttcaaaattcccaaaggatttcagtacatcttgccgtgcacattttgaaagataccttttatctcagaaaccaaagtgcctgctgcaagcacctattcctacaaatataatgacaacaccagtgtgtgggaaccaccttctagaagtgggagaagactgtgattgtggctctcctaaggagtgtaccaatctctgctgtgaagccctaacgtgtaaactgaagcctggaactgattgcggaggagatgctccaaaccataccacagagtgaatccaaaagtctgcttcactgagatgctaccttgccaggacaagaaccaagaactctaactgtcccaggaatcttgtgaattttcacccataatggtctttcacttgtcattctactttctatattgttatcagtccaggaaacaggtaaacagatgtaattagagacattggctctttgtttaggcctaatctttctttttacttttttttttcttttttctttttttttaaagatcatgaatttgtgacttagttctgccctttggagaacaaaagaaagcagtcttccatcaaatcaccttaaaatgcacggctaaactattcagagttaacactccagaattgttaaattacaagtactatgctttaatgcttctttcatcttactagtatggcctataaaaaaaataataccacttgatgggtgaaggctttggcaatagaaagaagaatagaattcaggttttatgttattcctctgtgttcacttcgccttgctcttgaaagtgcagtatttttctacatcatgtcgagaatgattcaatgtaaatatttttcattttatcatgtatatcctatacacacatctccttcatcatcatatatgaagtttattttgagaagtctacattgcttacattttaattgagccagcaaagaaggcttaatgatttattgaaccataatgtcaataaaaacacaacttttgaggc

SEQ ID NO: 256347 - DNA, 981 bp, Homo sapiens
tatctgtgatgatcttatcccgaacctgaacttctgttgaaaaaaaaaaacttttatctcagaaaccaaagtgcctgctgcaagcacctattcctacaaatataatgacaacaccagtgtgtgggaaccaccttctagaagtgggagaagactgtgattgtggctctcctaaggagtgtaccaatctctgctgtgaagccctaacgtgtaaactgaagcctggaactgattgcggaggagatgctccaaaccataccacagagtgaatccaaaagtctgcttcactgagatgctaccttgccaggacaagaaccaagaactctaactgtcccaggaatcttgtgaattttcacccataatggtctttcacttgtcattctactttctatattgttatcagtccaggaaacaggtaaacagatgtaattagagacattggctctttgtttaggcctaatctttctttttacttttttttttcttttttctttttttttaaagatcatgaatttgtgacttagttctgccctttggagaacaaaagaaagcagtcttccatcaaatcaccttaaaatgcacggctaaactattcagagttaacactccagaattgttaaattacaagtactatgctttaatgcttctttcatcttactagtatggcctataaaaaaaataataccacttgatgggtgaaggctttggcaatagaaagaagaatagaattcaggttttatgttattcctctgtgttcacttcgccttgctcttgaaagtgcagtatttttctacatcatgtcgagaatgattcaatgtaaatatttttcattttatcatgtatatcctatacacacatctccttcatcatcatatatgaagtttattttgagaagtctacattgcttacattttaattgagccagcaaagaaggcttaatgatttattgaaccataatgtcaataaaaacacaacttttgaggc

SEQ ID NO: 256348 - DNA, 856 bp, Homo sapiens
ccctacacccctatgcggtatacttaaccaccacaaaagaaagattcagagtgtaccaatctctgctgtgaagccctaacgtgtaaactgaagcctggaactgattgcggaggagatgctccaaaccataccacagagtgaatccaaaagtctgcttcactgagatgctaccttgccaggacaagaaccaagaactctaactgtcccaggaatcttgtgaattttcacccataatggtctttcacttgtcattctactttctatattgttatcagtccaggaaacaggtaaacagatgtaattagagacattggctctttgtttaggcctaatctttctttttacttttttttttcttttttctttttttttaaagatcatgaatttgtgacttagttctgccctttggagaacaaaagaaagcagtcttccatcaaatcaccttaaaatgcacggctaaactattcagagttaacactccagaattgttaaattacaagtactatgctttaatgcttctttcatcttactagtatggcctataaaaaaaataataccacttgatgggtgaaggctttggcaatagaaagaagaatagaattcaggttttatgttattcctctgtgttcacttcgccttgctcttgaaagtgcagtatttttctacatcatgtcgagaatgattcaatgtaaatatttttcattttatcatgtatatcctatacacacatctccttcatcatcatatatgaagtttattttgagaagtctacattgcttacattttaattgagccagcaaagaaggcttaatgatttattgaaccataatgtcaataaaaacacaacttttgaggc

SEQ ID NO: 256349 - DNA, 2447 bp, Homo sapiens
agaaattggagaagataaaactggacactggggagaccacaacttcatgctgcgtgggatctcccagctacctgcagtggccaccatgtcttgggtcctgctgcctgtactttggctcattgttcaaactcaagcaatagccataaagcaaacacctgaattaacgctccatgaaatagtttgtcctaaaaaacttcacattttacacaaaagagagatcaagaacaaccagacagaaaagcatggcaaagaggaaaggtatgaacctgaagttcaatatcagatgatcttaaatggagaagaaatcattctctccctacaaaaaaccaagcacctcctggggccagactacactgaaacattgtactcacccagaggagaggaaattaccacgaaacctgagaacatggaacactgttactataaaggaaacatcctaaatgaaaagaattctgttgccagcatcagtacttgtgacgggttgagaggatacttcacacatcatcaccaaagataccagataaaacctctgaaaagcacagacgagaaagaacatgccgtctttacatctaaccaggaggaacaagacccagctaaccacacatgtggtgtgaagagcactgacgggaaacaaggcccaattcgaatctctagatcactcaaaagcccagagaaagaagactttcttcgggcacagaaatacattgatctctatttggtgctggataatgccttttataagaactataatgagaatctaactctgataagaagctttgtgtttgatgtgatgaacctactcaatgtgatatataacaccatagatgttcaagtggccttggtaggtatggaaatctggtctgatggggataagataaaggtggtgcccagcgcaagcaccacgtttgacaacttcctgagatggcacagttctaacctggggaaaaagatccacgaccatgctcagcttctcagcgggattagcttcaacaatcgacgtgtgggactggcagcttcaaattccttgtgttccccatcttcggttgctgttattgaggctaaaaaaaagaataatgtggctcttgtaggagtgatgtcacatgagctgggccatgtccttggtatgcctgatgttccattcaacaccaagtgtccctctggcagttgtgtgatgaatcagtatctgagttcaaaattcccaaaggatttcagtacatcttgccgtgcacattttgaaagataccttttatctcagaaaccaaagtgcctgctgcaagcacctattcctacaaatataatgacaacaccagtgtgtgggaaccaccttctagaagtgggagaagactgtgattgtggctctcctaaggagtgtaccaatctctgctgtgaagccctaacgtgtaaactgaagcctggaactgattgcggaggagatgctccaaaccataccacagagtgaatccaaaagtctgcttcactgagatgctaccttgccaggacaagaaccaagaactctaactgtcccaggaatcttgtgaattttcacccataatggtctttcacttgtcattctactttctatattgttatcagtccaggaaacaggtaaacagatgtaattagagacattggctctttgtttaggcctaatctttctttttacttttttttttcttttttctttttttttaaagatcatgaatttgtgacttagttctgccctttggagaacaaaagaaagcagtcttccatcaaatcaccttaaaatgcacggctaaactattcagagttaacactccagaattgttaaattacaagtactatgctttaatgcttctttcatcttactagtatggcctataaaaaaaataataccacttgatgggtgaaggctttggcaatagaaagaagaatagaattcaggttttatgttattcctctgtgttcacttcgccttgctcttgaaagtgcagtatttttctacatcatgtcgagaatgattcaatgtaaatatttttcattttatcatgtatatcctatacacacatctccttcatcatcatatatgaagtttattttgagaagtctacattgcttacattttaattgagccagcaaagaaggcttaatgatttattgaaccataatgtcaatattcttttatttatatctccttagggttatagttctcttccttactatagatactattctttattctcttttccctcttccttcctccctcttctttctccttctccttcctctttttttatctttttccttcttccttttttctctttcgctcttcgccgttctctcctttctttttctcttcttttcctattctcatctccctcctttttttcctccatctcattgtcccctcttcttccttcccattcctcttttttttttctttatttttttatcttacaatataactt

SEQ ID NO: 256350 - DNA, 530 bp, Homo sapiens
caggtgtgagccccctcgccctgcctgtatgttaactttatatattttactttactgaattttattgtttgagtcttactgttgattctctggggttttccaggcattctattatatatgtgtacaaatagagaaagttttacttctactttttcaattcttacgcctctaattgttgtcttttacttaactgcatcttttctgatcttaacagaaatgtctctggtgtttccacattaagtaagatgttggctttagggttaaggtttatatattataagataattatttaaaattagccacattaaaaaaatttaatgttaaaaaaaaatccagcgattcctcatctcttgagtgtttttcattaggaatgggtgttatgggtgttaaacttcaaaggttttctagcatctgtggagataaccatgatgtttctccttagatgtattaatacgatgttttacattatttgatttttaagtattgaactgaacttgaattcctggaataaagctcacttgattatggta

SEQ ID NO: 256351 - DNA, 395 bp, Homo sapiens
acagctagtaagcagtggagctgggatttagactcaggtttgtctggctccagaatctatgcttatccccctgcaccatgccaagctccggagagattgcttttagtagcctccggaaatggttctattatcctagcttcagataagggaaaacagacacagacaggtacagatacgcctagatggtctggggaacctgaaagagtttgatttaggtttcaagagctcaagttctctgtcctaaccttcctgccattctccatggtctgtgcaccaatgcacgtggttcccattctgtaaaatctcaaaagctgatgcttccttcccatgacacagccttggcctggcttctgacagaacaccctccttccatggcctggcaggctccggaactc

SEQ ID NO: 256352 - DNA, 762 bp, Homo sapiens
gagcccttaccccgactgcttggcctaagggacaactgtgaggagggagccatttcccctccatccaaatcccaccaacattatagctgctgccatgtgggtttttgcttatggacatgtttttggggggtgatgcccatttctgtgataaataagttttaagcagttcatggggctcttcaaggccactcttaagtacactgctgacctttctagggatgggaggactggagttagcaactcaacaggtacattcaccataatctccatgtaataaataagagcctatgaaaagattaaataaatctttcctaatgctttttgactggcttaatcaataattaatcatctttagatgaggctgtaacttgtggagtagatataattggattagctgaaaagcggcagttgcggagctttgaagagattaaaatggctgtcaatcccataattaaactgccacaaacaaaagcaatggtgttttttagaaaggaggaggaggaggaaagaaagagtgaaagagagagagagaaggaaagaaaagtcggggagagagttggggaaggccaactaatttgaaatgaatcaacatgtacttacatatcactagagactgaggcaaaatcaaaaccgacagatttattccattgaatgaagtgtatgcatatcaaatcagccatttaattgtatgctccaaccactggggcaggtgaaattttggcagcttcaacttgtctaaaacaaaaccaatccaccaaaaaa

SEQ ID NO: 256353 - DNA, 249 bp, Homo sapiens
aaaacacaggtaagtcagaaggaaaaaaaatcatcgcttggatataaacacagataatgtttggtttgcagccacccaaacagattatattccaaatattgtcttaaaatctgatttactgcataatttactaggaacatgcatccatgtcaataaatagacatctgcatcacttttaatatctgtatattatcccattgtttgaatttcttttttttttttttttttttttttgagacagagtctctc

SEQ ID NO: 256354 - DNA, 110 bp, Homo sapiens
aacaagagagagggccccacgttctggcaacatggcgaacctgtgaactagggaagccctcccagcacagaaagtgccaggaaaataaaaacaaacagaacattttaaaa

SEQ ID NO: 256355 - DNA, 425 bp, Homo sapiens
agatcaaaacatggtatgctattatggttgaactgtgctctccccctccaaagtatgttgaagtcttagcccccaacacctgtggatgtgactttatttagaaatacaatctctgcaaatgtatcaagttaacatgaggtcataatgaattagggtgaaccctaagccgatatgactggtgtccttctaagaaagagacatagacacacagacagaatgccatcatgtgatagcagaggcagaaattgaaatgatgcagctacagccaaggaacaccaaaggattgccggcaacaccagaagctaagcacagaacaggttcttccctagagccttcagagagggaatagctctactgacagcttgatttcagacttccggcctccacaacggtgacagaataaatctctgttgttttaagctaaa

SEQ ID NO: 256356 - DNA, 489 bp, Homo sapiens
accaggagaatgtcacataatgattggtttaagcccagattcttaaaccaagcacaggggattattgtgattggctaatcaatcttcccatcctgcccacaagaacctagaaatggggtcattgacccttggcccatgttagctattttgaggagtggtaaataattaaacaaagctgacgttctgttagaaagggaactgggggccagctgtggtggctcaagcctgtaatcccaacactttgggaggccacgttgggaggattgtttcaggccaggaattgagaccagcctgggcgacatagcaagaccccatttctacaaaaagttagaaaaaataagccagtatagtggcacacaccagtagtcccagttacctaggaggggatacgtggacatatcacttgaaaacaggaggtaaaggctgtagtgagctatgatcgtaccacagcactccagcctgggcaacagagcaagatcctgtttctaa

SEQ ID NO: 256357 - DNA, 410 bp, Homo sapiens
agatcctcatagctttatgttttgtcatcttactagcaacaacataaagaaattctgaaggctttcatatctttattttgcattgtgtccctttctatgttctatataatgaacatcatttattcttctagcaattaattgcctacattagagatttcatgtgaacattttatgggctataagtattgtgacagatatacaattgtaattttggcactgaatcacatgtctccttgaaatatcttgattattttataatcataattctgtatctggaatactcatagagtttgtacaaaatattcagttaaacatatattttatgtgtataaatgccaaataatagtttataattaaaatgaaagctgtcatttggttaaattaataaaaattctttcttagattttatt

SEQ ID NO: 256358 - DNA, 620 bp, Homo sapiens
tatacctgttacacagctgtcatgtcaatgtccccttcaccatctgcctttgttttcaatgtgcttctatttttttcttagattatatgtctgtgtttttcttggatcattcttatttgctcaccttctagtaacttcctgagaagggtaaacagtagtttaataatttgagagtttatatgtctgggaaatatattaaatttatttccctgttgttctaatacattttcctttctgttatatgtctaatttctaaaatctcgaggttatgtttgtctgcttgttctttcaatatttatttttaaatagcatattgttcttgtttcatggatgtaatacctgctgtgactgttcaaatggcctttttttcaccttatgattcctttttttctctttgtcctcaatgttttatgcttgtaaatgttttagttgtagctgtgtatagttatatataatctatgggagtggtaagctacctatatccatttaatgcatttaatttgtctcagtccatcttttcattgagttgataaaactgagaacatgaggtgtatccctatgtatcgacacagaagcttctatcaagtaattgatcacttttttcaatatgttcggatctt

SEQ ID NO: 256359 - DNA, 209 bp, Homo sapiens
tgccttccaaagtgctgggattacaggcgtgaaccaccgtgcccagcctttaaaatctttttaaagagttatgtcttgtttgatctgttaaagggatctgtactctacccagttttcatccagttgattcagaattttcaaacaattggtttcagaacaaaatcagtattaaaaatactgaaaaatattttttaaacgggagtcttttc

SEQ ID NO: 256360 - DNA, 502 bp, Homo sapiens
taatgtgctgggctcctggcacatcactctacactaactttcaggtagacagatgggataccgtcatagtttctaatttctgagaagatttttcgctataatgttgttatatctgttggatgtctttggggagacaataagaggatcagtgtgtgtgtgcttcaatcccttagtcctaaaagataccactagttttcaaattttcccttcataatgaagatgacatgttttaaaatcctatctttatattctatcaactaatgccttataacctttaaacacttatttttcagctgattaagaaagtgacacatttttatttggagacagggtcttgctgtcacccaggctggagtgtagcagtgtgataatggctcactgtaacctcaaaccctgggctcaagcaatcctcccgcctcagcctcctgaacagctgggactacagagtgcacaccaccatgccgtcgacgcggccgcgaatttagtagtagtaggcggccgc

SEQ ID NO: 256361 - DNA, 504 bp, Homo sapiens
aaattaaacatacagtttttcatagactgcctgaactcagggaccagacatcacataaagaacccctgactagaccccaatattggtgtgtttaaatgaggtaacgtaagtctaggcaggacgcataatctgtccaggataatgtaaagtgtaagtgacaatgccaagaccagaacctgaaattcctaaatgctggctctgcaggacattgatagacaaagaaaaaaaaatgatcttgatgttagtcaggagattaacctgaatgagccagagaagcaattttgggtgataaggggaggacgtttaagcctttggttcataaatgggcagtgatgcagtgaaaagttggcttggcagatcttaaaggaatgcttatagtccttgcagaccagtggagatcaccagttagtgcatcaagaatacttacaactgaatgaccccgtttgaattcctgtgcaatcttaggcataagaatttagtttgttgggagaaagttgtattttg

SEQ ID NO: 256362 - DNA, 427 bp, Homo sapiens
gagaaaattggaggagagagatttgggagagcaaaatcttaaagattttattttggacatgttaacagcttaagatgcatgtgagtcatcaaagtaaagatggtgcaggggcagttggttgtgtgaatctagggctcaaaaaaagagatctgaactaaaaatacaaatttatgtagctaaaagatgttatctgaagccatgagaatgggcaaaatcagcaaaggggatagaagaaatttccatgtgggtttgaaaccacatatatgaatgcaaactgattcatgcgcttccaggctctgaaagaagggtttatgagagtggaggcctcgtagagttgacagcagggattaaatggcagacctcgtggggcagagatatctaagagcctgatgggtgtgatgacccgagagaaggtgcaattgtcccc

SEQ ID NO: 256363 - DNA, 635 bp, Homo sapiens
aagtcatggaatcaacctaggtgtccatcaacggtggattggataaagaaaatgtggtaaatataactgtggaatacttacacagccataaaaatagcctgtcctttgcagcaacatggatgcaactggaggccattatgctaagtaaattaactcaggaagaggagaacaaatactgggtattcttacttacaagtgggagctaaatgtccagtactcatgtacgtagagacggcaacaataaacactggggactactggtggggagggacagaatgaggtaagggtttagaaattaagtgttatgtgcttactacttaggtgacgggaccattcgtgctccaacctcagtgtcacacaatatacccaggtagcagccctgcacatgtatctcctaaatctaaacaagaagttgaaaaagggggagaaagttattttaaaatttctgttaaggaatgaggaagagatacagaaacaaaaaatgtattcactcaagaagatcaagtgaaaaaattatttaatatggaataatgtacaagtaatttgtcaaatgtaatagctttttcttatgtcagcaataatcagttgatagctattgtgggcagagtttccatgctgataaaaataaataaata

SEQ ID NO: 256364 - DNA, 708 bp, Homo sapiens
actgttcatctcttctcatttatgcatgcccatgtttttacctctttcctagctctttgaaagtgtgcttacgtaagtgttattgctttcaaacagtcaagtcctatgccagtttggaggatatgggtgttttaatgaagaatatataatacttgaaattatgaggtttgtgttcaaattgtgacgaggtaatattaaaacaattattttatgctttttaaaagtatgtattttactacctgagtgtcaatttaaatcataactatggcatttattacatgtgtgcctttgaacatataattaaattttatagtctcaggttcctcatttgttaaatagggcaaaggacactcatcttaaataattgttaagtaattgaacatagaaatgtctagcatattgctggggcatgggaaacacagtaaatattaactaaatctgcaaaaaaagttttaaatctgaaaaagtgtcctgagacacttgaaaatagaaaataactttggaaaacaggaaataataattttattgttttttgtcccaaagagaagacaatggattccataaattattgatccatgagcttgatatctctcaagagcaaaattctgcagtggattaaatacatgctctgtgagcatttaccagaggaaatggttatgatcaagagctattgaatatttatagaacatatacattttaaattgacct

SEQ ID NO: 256365 - DNA, 442 bp, Homo sapiens
cttataggtggcgtgttctccttgggtatcatcacatcgcctgccttctgtgcatgtctgcatccacgtgtcccctttccaataaggatattagccctttaggctgggtcccgtcctagtagtctcatcttaactaattacatttgcgacagtcctatttccagatcaggccacattctgagatgctgggggttaggatttcaacacaggaatttggaggaatacaactcaatcaggcttatggaaaattctggtcttaagtcaagggtagtgttctccagtctgtatatggaggcgcacacctatggtcccagccacttgggaggctgaggccagagaactgtgtgagcccaggagttccataccagcctgggcaacatagcaagacctcctctcaaaaacagacagagtggtgtcttccagagtgattagtttgcttaaa

SEQ ID NO: 256366 - DNA, 349 bp, Homo sapiens
ggattggccatttgagatgtcttttcaggttttttaatgtctgaattgatggctccaccactccagtggcagcacccagaagcaactcagctcaagaggacagctttgactccctatgatttcatctccaacccaaccaatcagcagaaagcacccattgcctagccactgccaccctgtcccctgcttcccccaaactgatggcagtgacagcccgtgtggagcagccactgtgaggatgccagctgcagcaggggaggcacagctggggctgcacaatccacaaggccagagggagccctgcccctaccgagttggtggggcaggagcccacactcctgggcacagc

SEQ ID NO: 256367 - DNA, 725 bp, Homo sapiens
gtgacctattcatacctcccctatcctgaccaatggattttctaaaattgtggagcacagtggtgggtgtagcatgtgtgctatggtctaaaggtttgtgtccctccaaaatccatgtgttgaaattctaactcccaaggtgatgctattaggaggcagggggccttggggagttgattaggtcatgagggtagagccctcattaatggcattagtgccctgaaaaaggagctcaagagaaattcctcaccccttccaccatgtgaggacaaagaatgtgcccatctgtcaaccacgaagatagcacccccagacaaggaatctgctagtgccatgatcttggacttccaaacctccagaactgtgagaaataaatgtctatagtttataagctacccagtctaaggctttttgttacagcagcccaaatggactaacaccctgtggaaagaggagtaaatgggttccaaatatagtatactttaaactctggttgattatttcttcaaagaacatctgtttccctttgctattccccaaggacaatatatctaaaaaatattctggggtagaagggcaaacttacaaatcatattattatgcaaaaggtaaaattatagctgtttctcctaagcaaattgtaagggttaattatctaattcaacaatctaagaatgtctaaacaatgcttaaagcattattaagtatactgtataaatatttat

SEQ ID NO: 256368 - DNA, 686 bp, Homo sapiens
taattttcatgtttctctcccacccctgggagatattgtggtggtgtttttttctttaaatttactttatttgccttggggagagggtgagatgggtggacagtagcaattgctttcacttggtcttcctgcataagatggctcttaccccgcaggtcaagaacccaatataggggctgggccaactaccaattttgtctattctgactatacgttcaaggataaggtagatgaccacaaactggtctaataggagagctataatggttccaggtatcaatgtcaactcaagccctgtgtgcaataatttttgaattattgtacctcttttatcagtgcagttacctacgtaaataaacataggtcctcttggaggactggcagattcattactgtgcaaaccttccaagattttgtagcatcttcactcctggcaactggcttcatcttcaattaatgattaccaggctggctgtcctaggtttatatattgggcaaaggattgtgactttttattgggccaaatgctgttggtcccttgatcatccatccttaatttcttttgatggtacaaatgtgtatattggtgttggctgctcatctgttttcacccctaagaatgctatggtttaatcttcataactctcaggcacccctggttgctctctgaccttgcaattcattat

SEQ ID NO: 256369 - DNA, 192 bp, Homo sapiens
cttgaaaaataccaagaaagtgggtaagtgttctcaccacaaaaatgataaccatgtgaggtaatgcatgtttatcagctaaatttggtcattctgcaatgtatttatacttcaaaacatcacgctgtacatgataaatacaatcttatttatcaattaaaaaaataaaaacttctgagttctcaccatact

SEQ ID NO: 256370 - DNA, 682 bp, Homo sapiens
gtctatgctaagcgtgtataattaaaaaaaaagagagtaacttcaaaatgatttggaagaaaaaatatgtacatatgtgaatagtacttaattccaggtgatgggaatatggatgactggttatcttcttctttctgtatcttttatatttttaaatggaaaaactcaacgacctggaagtgaaagaacagatttggaagaggtgtggggcaggtgagaggaaaatgcagagtgaaactctgtctcaaaaaaaaaaaaagttacttgtaataaaactcaccaattttaaatctacgatgtaaccatttaaggaggtttgtagaattgtgcagtcatcagcagagtcacgttttagaatatttttgtcatttccccaaataccctaaagcctctgcacagtcatttcctaatctctggtgcccatgactgggccccaacaaaataaaaatttggaaatccgacatcattaaatttcaaattttcttagattgggattttttgtagtgaatcattgtcttacttttgtgacatttgaggaaatattgcattttagggacttttttgatgaacttaataatagtcctgttcattgctcttcgtgaattgtttcatttttgctgataactgatagttgctaccaaacctggtctggcaagcctaaatgaatgagctaaaaaagaaa

SEQ ID NO: 256371 - DNA, 619 bp, Homo sapiens
ggtgactggagaggtaggctgagagtatgctgtggatgggaatggtggcaggaacgtatgctgagtggaagtcagcagctcaggcacagaggcaaaatacacttcacttcgtgagggactggatgcccaggtaatggacaatataggaggaatgatttctcaatttctggttagcactgaactgaatagataatggtgccatccgtggagatagggatcaagaggcccagacttagaaagataaagaatttgctttgggatacgtatactgaacttaaaaccctctgaagcatggaataagcagacagatgacggaagtttgtcttttagagtaaaggtggctctgtacaaagaaatttgtgagcaactgacatatattaatagatggcaatggaattgccttggggccaggcgcggtggttcatgcctgtaattccagcattttgggaggccgaggcgggcggataacttgaggtctggtgttcgagatcagcctggccaacatgatgaaacccagtctctaataaacacagtagccgagtgtggtggcgcacacatgtagtcccagctactcgggaggctgagacaggagactcacttgcacccgggagacggggtt

SEQ ID NO: 256372 - DNA, 653 bp, Homo sapiens
  misc_feature (110)..(110): n is a, c, g, or t
gtgcggacccccgctggccaatggcaggaacgtatgctgagtggaagtcagcagctcaggcaaaaaaaaagacggtgccagtatggatggagagaagccagtgggcttgnatagatctaccagaggcaaaatacacttcacttcgtgagggactggatgcccaggtaatggacaatataggaggaatgatttctcaatttctggttagcactgaactgaatagataatggtgccatccgtggagatagggatcaagaggcccagacttagaaagataaagaatttgctttgggatacgtatactgaacttaaaaccctctgaagcatggaataagcagacagatgacggaagtttgtcttttagagtaaaggtggctctgtacaaagaaatttgtgagcaactgacatatattaatagatggcaatggaattgccttggggccaggcgcggtggttcatgcctgtaattccagcattttgggaggccgaggcgggcggataacttgaggtctggtgttcgagatcagcctggccaacatgatgaaacccagtctctaataaacacagtagccgagtgtggtggcgcacacatgtagtcccagctactcgggaggctgagacaggagactcacttgcacccgggagacggggtt

SEQ ID NO: 256373 - DNA, 499 bp, Homo sapiens
tgttttcagtacagtaggtcctcaatgtcatcagtaggttcttggaaactttaaacaaaacaacgtataataaaagcatttttttctcatcaacattgtaatgaaaaaatgtcgaaggaaacaatgttattcgagggcctgctgtacatcattttgctaaaagttgccattttcaagaacctatctacaatgttaagtgaggacttactgtactttaaagatactgctttgccatcttcttatttgcattacttccaatgagaaatttgctatcatttttatctttcttcctctcccatggatgtctcttttatatagttgcttttaagatatgtctggttatgacttgcttggtgtcattttcttaccaagactacgtttcatataggattatgctactcctattttgctgatgttaatctccaaaatcgtggtggataatcaggtaggattgacctaactgagtcataaataatagtaaaaaaaggaatatttttaa

SEQ ID NO: 256374 - DNA, 327 bp, Homo sapiens
ttttttttttgagatggagagtgtgggctgggagtggggcaggagtgtacaggagattttaaaggttctggacatgaagagcttgctcaatgaatacagtgtgagctctcctgtctcatctccctagaataaaactctttgtcactgatactcgcatcccgggtaggaaaggaaaggcaaagagtatgttgaaaacatctctcactcttttcacagctaaagtattacccaaaaagtcactattctccctcttcagtagagaatagtgactttttgggtaatactttagctgtgaaaatttttcttctaaatttttctactctgaac

SEQ ID NO: 256375 - DNA, 502 bp, Homo sapiens
tcagctcactgcaagctccgcctcccgggttcacgccattctcctgcctcagcctcccgagtagctgggactacaggtgcctgccaccacgcccggctaatttttttttttgtatttttagtagagatggagtttcactgtgttagccaggatggtcttgatctcctgacctcatgatctgcctgccttggcctcccaaagtgctgggatttattcttgattatttacagcaaccctgtgagctacatgtctattcctacataagacagcaaagttgccgagagctgaaacagtacagctaggagaaactgcaatcagcctctgctctggcttcaaagctcagtccatttcacagcaggggggtttctgagtggaggattcagctgctccattgtatgatgagacaatattgtggagtatttgtctatggtctttctcccacctccctctgtcccccatcacttcccagaacaatggcactagaaggtaaaaaaggtcatgt

SEQ ID NO: 256376 - DNA, 498 bp, Homo sapiens
ctataatagtacacctctttgttcttgctctttgtggaaagaaattaggctatttgtcctttagacttctccactctctagatcaggctagttgcttcctcgagtattttggtatcagggagtctctgtctcccataagccccatgaacttaaaagtttgatgtggtttttgttttgtggtaagactgccatagctgtcacttcctgttgcatcgtgtaagcaggtacataatgtctgatggtcctcctttctgtgatcttaagattggttggtgggtccaggggtggtcagcctaatccctccattatgcagtccctgggtgccttattcttgatctgtaaaatgtgactagattaagcacaggggtctctactccacagggatcttatgtgaatgaaatggtataacagattagaaagcactttgttttaaggagcccatagcaatcagaccaattctggacttctgctatagagtcagatctgaagggcacacct

SEQ ID NO: 256377 - DNA, 463 bp, Homo sapiens
agggaatgctatgttgctcccatcagactggtgtacatcaagggtgttgtgatacttccatcaaattggtggtttcccaggacattgtgtgtttccccagagggctatgtgacccttccccaggtactttctcaaagggtcttgagtctctcccatcagactgaggaatcctcaaagctaagaaaccattttaggctgggcgcggtggctcatgcctgtaatcccagcactttgggaggccgaggtgggcggatcacaaggtcaggagtccgagaccattctggccaacatggtgaaacctaacaatgcaaaaactagctgggtgtggtggcggtcgcctgtagtcccagctactctggaggctgaggcagaagaatcacttaaacccgggaggcggaggttgcagtgagctgagatcgcaccactgcactccagcctggagacagagcaagattccgtctca

SEQ ID NO: 256378 - DNA, 335 bp, Homo sapiens
agggaatgctatgttgctcccatcagactggtgtacatcaagggtgttgtgatacttccatcaaattggtggtttcccaggacattgtgtgtttccccagagggctatgtgacccttccccaggtactttctcaaagggtcttgagtctctcccatcagactgaggaatcctcaaagctaagaaaccattttaggctgggcgcggtggctcatgcctgtaatcccagcactttgggaggccgaggtgggcggatcacaaggtcaggagtccgagaccattctggccaacatggtgaactttcgcctcaaccaagacgctgggaccagcacaaccg

SEQ ID NO: 256379 - DNA, 358 bp, Homo sapiens
catgtggctaatgggtccggaataaggggaaaagtcatgtgagatgaagtagaagaaatagggaaataggccgggcgcggtggctcatgcgtgtaatcccagcactttgggaggccgaggcaggcggatcatgaggtcaagagatcaagaccatcctggccaacatggtgaaaccctgtctctactaaaaatacgaaacttagctgggtgtggtcaggcgtgcctgtagtcccagctactcgggacgctgaggtaggagaatcgcttgaagctgggaggcggaggttgcagtgagccgagattgcaccactgcactccagcctgggcgacagagggagattctgtctcaaaaaataag

SEQ ID NO: 256380 - DNA, 696 bp, Homo sapiens
tttgtctgcattttgacttgtcgcatgaggtgagatgtagaattttccatatgttggtgttcaaaaagtttgggattttagagaattttggatttttagattagggatgctccacctgtacatgaaaatagcaacagaaaagttgtgaaaccattttaaaataaacactaattacatttacaagctattttctgaaagcaagccaagatagaaacaagggtaggaaattcatccttgctttcctgtgagaaggcaaacagaaataacaacctatgaagtaatgtaaaaatgttcaaaggagtaaacaatcttcctttgatgtgatccaaaagcacaaacacaatgacaaatgaccttccaggtgtagaatgaacttaagtttctatctttcaagcactcatctatgccgtgctgcaacagacgttctcagtcttttcacaccttcaattagagattactttgttaattttaaaactttaattgcattttttactgaaatcaattgcttttaaaaaatctacgtatgatgtgagggcgatctggctgcaacatctgtcaccccattgatcaccagggttgattcggctgatctggctggctaggcaggtgtccccttcctccctcaccactccatgtgcatccctctcaaagctatgcactcggtcaaagaggatgaccattcctgatagaggagaa

SEQ ID NO: 256381 - DNA, 382 bp, Homo sapiens
gccaccccctcctggccaaggcccctcaggtggttgccgggctccgcgggtgcgggatctatagcgcctagctccgagtatacttctgcttgaaaaaaaaaagccagctgtcaaatagcctcaggatgatttccagaagaagattgtgttatcataggagatgacacttccatgcctgttattacccctggacatcttccagtgagataagatgtggaggtagaagacagtgatattgttaatcctgaccttgtgtaagcctatgctaatgtctgtgtttttgtcttagtttttaacaaaaaaaagttttaaaacattgaaaaatagaaagaagcttgtagaataaggatataaataaaatatttttgtatagctgtacaat

SEQ ID NO: 256382 - DNA, 814 bp, Homo sapiens
gcggccgcctcttaagcgccgcagagccccagagggtgtggattctgcaatgctgcacagaaacctactgcagcctcagaccaacagcagcagcagcagcggcggcggcggcagcagcagcagcagcattagcagcagcagcttctctcaatgctgagtattgaatacagataatcatgaggcccaagaccctaaggaacagtgcagccaggagtcggaaggagcctgggtttctgaatcatcacatggaggggagctgtcttcagctgggagagctgtcttcagttggatactggtggccgtttgggcatcctgggccagcccaaggacatcttccagtggccgtttgggcatcctgggtggtagcaggtatctccattgcactctatttgccacctcaccctgaaggaagacatgcgctctggaaccgtgagccatttgggaggtgcaagaggattccaggaaatggcagcaaggccttagaggagtttaagtatgtacttggccaggacaaaagtctgtcttcatctaggctctaggtgctgacttctgtaacaggggagctgttaacttcttcctgggaatccaccttctaccccacacccagaagcagagcaccatccactcaggcctccaagtgctccaggccttgtattccacctctgcctactttgagccagcaactgatttcagcaggaattcactgagactgacatcctctatgctcagcactgtgtgccaatagtatggccacacaagtagattttttcctatttctcttttcttaggctaatggttcagctctaaagataag

SEQ ID NO: 256383 - DNA, 1237 bp, Homo sapiens
  misc_feature (362)..(362): n is a, c, g, or t
gcggccgcctcttaagcgccgcagagccccagagggtgtggattctgcaatgctgcacagaaacctactgcagcctcagaccaacagcagcagcagcagcggcggcggcggcagcagcagcagcagcattagcagcagcagcttctctcaatgctgagtattgaatacagataatcatgaggcccaagaccctaaggaacagtgcagccaggagtcggaaggagcctgggtttctgaatcatcacatggaggggagctgtcttcagctgggagagctgtcttcagttggatactggatggagtctcactctgtcacccaggctggagtgcagtggtgcagtttcggctcactgcaacctccncctcccaggttcaagccattctcctgcctcagcctcccgagtagctgggattacaggaggaagaaagggagctggttaggaagcaaacttgagtttcccatgctctgtggctgagcaagtcacttcaccattctcaggatggaagtggggatggaggtggcatcggcctcatttgaaccacatggactaagaggggctatgggagtattccccaaaggaagactgaggggcgttactagaaaatgggagaatggaagcagagtgggcaaaaccaacagatgttccctatagtaaataaaaaatttggacaattattagtgagcaagtacttataacatatatggcacatgggattgtgactcaccagtgtgttagcacaatatggtcaaaaacctctgatccaattcaacctactcatcttaacgattttatcagcatttaataagtttgttttggccatcatgtgttatagttttgtttgtggttttgacacctcattagaggtttcatcagtgtaaggagccaacctaagagctcttctcacaagtttcccaagagagaaattgcccctccaaatgtgaggagtctcactttatatagatagcatccacacttcttgcagtggaaaacaaaccttataaaatgtaatacgtttggtttcctaactttttcatgaccctggggtggtagaaggaagtgcaagttttatcacttggatttagagacaaggaaattgaaatggagagagaattgggctcacatgcaggcagcatgtctagctgcctccatcgtgtgatctgaggcaccccatgaggcctatgattactgtaaacctctaaaataaataaaaaataaaacaatctctgccactgaaa

SEQ ID NO: 256384 - DNA, 1115 bp, Homo sapiens
gcggccgcctcttaagcgccgcagagccccagagggtgtggattctgcaatgctgcacagaaacctactgcagcctcagaccaacagcagcagcagcagcggcggcggcggcagcagcagcagcagcattagcagcagcagcttctctcaatgctgagtattgaatacagataatcatgaggcccaagaccctaaggaacagtgcagccaggagtcggaaggagcctgggtttctgaatcatcacatggaggggagctgtcttcagctgggagagctgtcttcagttggatactgggaggaagaaagggagctggttaggaagcaaacttgagtttcccatgctctgtggctgagcaagtcacttcaccattctcaggatggaagtggggatggaggtggcatcggcctcatttgaaccacatggactaagaggggctatgggagtattccccaaaggaagactgaggggcgttactagaaaatgggagaatggaagcagagtgggcaaaaccaacagatgttccctatagtaaataaaaaatttggacaattattagtgagcaagtacttataacatatatggcacatgggattgtgactcaccagtgtgttagcacaatatggtcaaaaacctctgatccaattcaacctactcatcttaacgattttatcagcatttaataagtttgttttggccatcatgtgttatagttttgtttgtggttttgacacctcattagaggtttcatcagtgtaaggagccaacctaagagctcttctcacaagtttcccaagagagaaattgcccctccaaatgtgaggagtctcactttatatagatagcatccacacttcttgcagtggaaaacaaaccttataaaatgtaatacgtttggtttcctaactttttcatgaccctggggtggtagaaggaagtgcaagttttatcacttggatttagagacaaggaaattgaaatggagagagaattgggctcacatgcaggcagcatgtctagctgcctccatcgtgtgatctgaggcaccccatgaggcctatgattactgtaaacctctaaaataaataaaaaataaaacaatctctgccactgaaa

SEQ ID NO: 256385 - DNA, 878 bp, Homo sapiens
gcggccgcctcttaagcgccgcagagccccagagggtgtggattctgcaatgctgcacagaaacctactgcagcctcagaccaacagcagcagcagcagcggcggcggcggcagcagcagcagcagcattagcagcagcagcttctctcaatgctgagtattgaatacagataatcatgaggcccaagaccctaaggaacagtgcagccaggagtcggaaggagcctgggtttctgaatcatcacatggaggggagctgtcttcagctgggagagctgtcttcagttggatactggtggccgtttgggcatcctgggccagcccaaggacatcttccagtggccgtttgggcatcctgggtggtagcaggtatctccattgcactctatttgccacctcaccctgaaggaaggtacgagggccccttcaaacgccatacaaagaccttccggagtgcccagtgtgcagattgcctgacatgcgctctggaaccgtgagccatttgggaggtgcaagaggattccaggaaatggcagcaaggccttagaggagtttaagtatgtacttggccaggacaaaagtctgtcttcatctaggctctaggtgctgacttctgtaacaggggagctgttaacttcttcctgggaatccaccttctaccccacacccagaagcagagcaccatccactcaggcctccaagtgctccaggccttgtattccacctctgcctactttgagccagcaactgatttcagcaggaattcactgagactgacatcctctatgctcagcactgtgtgccaatagtatggccacacaagtagattttttcctatttctcttttcttaggctaatggttcagctctaaagataag

SEQ ID NO: 256386 - DNA, 539 bp, Homo sapiens
gcggccgcctcttaagcgccgcagagccccagagggtgtggattctgcaatgctgcacagaaacctactgcagcctcagaccaacagcagcagcagcagcggcggcggcggcagcagcagcagcagcattagcagcagcagcttctctcaatgctgagtagtaagtgtttgacttagtaaactctacaattaccattaggcgcttgcttatgagaggaggcggaatctttcttaaaggaatgggttttgtttttcctctctagtattgcttcataagaggcagagaggatggaatcagggagttttgtggactgagtaaatgagtacagctgtgggaggtcaaggttaaaattaactgggtggttgaggaatggaggcaatgattttagtgtaagtcaatgaaatgctagaagcaccagttttaaagagccctgctaatttcaaacattggggtaatggcaaaataaagttgtatgccttgaaactgattagtaatttgtgctaatatttaatttaatttaatatttgtgctaatattc

SEQ ID NO: 256387 - DNA, 354 bp, Homo sapiens
ccttacccaccgaagatccaaagcttccttctaacaagggtagtagacgtacgtgtctgtgtcttctgttctctaggtgtggattctgcaatgctgcacagaaacctactgcagcctcagaccaacagcagcagcagcagcggcggcggcggcagcagcagcagcagcattagcagcagcagcttctctcaatgctgagtagtaagtgtttgacttagtaaactctacaattaccattaggcgcttgcttatgagaggaggcggaatctttcttaaaggaatgggttttgtttttcctctctagtattgcttcataagaggcagagaggatggaatcagggagttttgtggact

SEQ ID NO: 256388 - DNA, 425 bp, Homo sapiens
aagggccacccactgaggaaagggagggccgggcacataccccagttcagctcaagggcgggtcagtcagctagatcctgcctgtgtggtattggagagttaagttgtcagtggtttaggaaggggcttgtcaaaagtcctgtgccacgagatcacccggagagtttgtcaatatgcagattcccgggccccatccccagcactctgatttaggaggcccacagtgggctggggagttggcatttttaaaaagctccactgatgactctggcactagtggtctttagagcacatacatattgagaaccattagtaaagaacgattctacccagtagggtctgggtcttgctaaggagaatcctgaggattgaagttattcagatgtaaagaaatggctctttattaaagcattatatacacttca

SEQ ID NO: 256389 - DNA, 339 bp, Homo sapiens
attaacatcaagttagtatttactgactttgatcatttttatttcttaatttctaaaacattgtgactttctaggttgtttgttttaaatttttaagcttaattcaattttggctattgaaattcatctaaattatttcaatactttgacattttttgaggcaattaaatttggaaaatataccatgtgcattttcagataatatatagtctgtggcttcagtgttctatatgcaaaaggaggacaaacttgttaatcattcttttcagatcatccattcacttgctaatttttattggcttattttttaattattaaagaggtatgttaaaattttta

SEQ ID NO: 256390 - DNA, 575 bp, Homo sapiens
taccaatctgtggttctaaggcagcaggtccaacagctgggagtagctggggaaggcagactttgtcacaatggactggaaaatgctagattagagtttagaggccagttggaagccaactgcaatcttcaaggtgaaatggctgaggcagcgtttggacattagccgcaaaatgaaacgcaacacctcttgtatgtgaaagacaagattcttgggaacaacgactgtatcttagaatattctgatatccccaactttgttgaggtcaacactgggcacaaagcagggccttactaaatgcttgattgacaactaaagaacttactctaactgacttctagacagtgatctagaaactttgcatgcaataaatttaatccttaaagtgactctgtaatatagtcactttaacaagtaaaggagaaagaaaaccctctaagttaaagagttttaaataatttctcaaacaacttggatatagtgttggaaattgaacagtggttttcctgatgccaaaatccagaatttgttggtggaataaaaagtccctttgtaaaagacagtattcgtcattg

SEQ ID NO: 256391 - DNA, 476 bp, Homo sapiens
ggctctggagcctccctatgggttgcctcctacagcaaaggacatctcaccccgggccttcactcttgaggtggcccagggagccctcagtatgaaggctctgagtccattgcaggcttgtttcagaagattcaggttcagaagtgcaagagatgaagataaagaggttgggtgtgtacagtctatatccatcatagtttttcttttcttactttttcatttaagaaaaaaaattgtcttatttcttctggttctgtaagaatattttaccaaaatgacagagaggagaaaaaaggataattgtagtaaagcaggttattggagaccacttcttccattcttttaaagaaagattgttctctggaaattatcccaggtcgggagagggggcacaggaggaaggaaggaaggaaagaaggaaggaaggaaggaaggaaggagaaggggaaggggaaggggaaggggaagggaaaagg

SEQ ID NO: 256392 - DNA, 529 bp, Homo sapiens
atgatgattgtggcctaattctgaatacatgcctcattcttttaccccgcctcaggcctccagtcggatcctgcgtcattctggctgccttggcctttcctttcctcagttgagccaggtaccatagtttttggcatggctttgacatatctatcgctgtctcccatgcagatgcctccatcacaactccaagataactgttactcagcctttgggtcttagtttaatatcacttgattttagcatttagcaagcctttttttttttttttttttgagacaggatctcactgtgtggctcactatggagtgcagtggcgtgaacatggttccctacagccttgacttcccgggctgaagcgatcctcccacctcagactcctgggtggatgtgcctgtaatcccagctactcgggaggctgaggttggagaattgcttacctgggaggtggaggttacagtgagtcgagattgtgccactgcgttccagccacggtgacagagcaagactcagtctcaaaaaaacaaac

SEQ ID NO: 256393 - DNA, 438 bp, Homo sapiens
tgagaggcgcgggggcagctgagatgcaggccatgcagccccgaagctccgaatcctgggatgactcctgtccatgttggaagggaccctgccagtcctggcaaggttcaacggccttagggcaagaaatgttagtagagtcctggaagacgatgtggggaacgggtagcggccaccggatggtgatcgttcttctacaagaccttgacatggatggggagaaacagagaagaaccttccaagtttgtcccactggacatgcccaccacactttaccagccctttttagaaggcctgtgcgtaacacatgaaaaagctgctctcgacctttccctgaccttttaaaagaaaacatttgctgcatctaatccgcctagatgtaaggaggttcccaaatgtatgacagagtcagacaattacatgtcttgtaagttacca

SEQ ID NO: 256394 - DNA, 311 bp, Homo sapiens
ttcagagacaccgtctttctcattttgggtgttttggtaatttttcaattttctgagtagcatcagtatttctgcttgaaccaaggtgaaattttgcatctatttctcagttctctaggggcctctttcatgactgtctgcttgcttactggtattttccttactcccgttttatcatggtctgtgaatttaaccaacatgatgtttactcccgcttttgaattattaatgagaaaactgtgagatggtacttttatctttaatagttgatgctgaaaaagtgacaaatgcaataaaagcatctttctcta

SEQ ID NO: 256395 - DNA, 418 bp, Homo sapiens
aaaggccagatctcctgttaagtgaatttaagtatcaagagaacaagtagcagatgttggggtatgtatgtggaacaaagtgactttgacttcggctctaaaattctgtttaaggatatttgtgctaagagtagaaaggaaaggagtgatggaaagaatactatctttcagaatctaagtgtaggaagatgccctgggaatgagtcaatgttcttttttttttttttttcctttttctgttctagccaggtggacactggaatgtcatcttgccttttcttaagagagtagaccccagtgtctatcgttcccttctttgtgtccctgtgtacttactgtttagctcccacttataagtgagagcatgaagtatttatttagtttctattcctgcattaattcacttagcattatgacc

SEQ ID NO: 256396 - DNA, 819 bp, Homo sapiens
gaatttgtatttaattttagagttacatgtaccactggaatcacattcatatttctgttacagtgtagtgattctgggttaagaatcactgatttagttctacctcattttacatataccttttcctgcaaagatatataaaaataaaatcatatgaataagttatgtgtttaatagttccattcagtcatctcataagacaaaattactttctaagttaattttaattcagatctttatagaatattgaggttttaaatgtgaacacatatatataattttatgatacaaccttttcttctgaatacttaaagtgttttcacagttggaagtatcaaaaactttgttctctgtaaaccttcagcttccaaccttcttcagtcttatctgcagttatctcctgcacatgtaaatgatgtggtagaagatacggtttaagatgaattttagttatttaaagtgtgtcataacctgaacattttacagatatatttaaacaggtataggtatatttaaaatcactattttaatttaaaaaaaaaaaaaaaaaaaaaaaaaaaaaagtggggggagggcatgaggccctaaaaaaggttcttaaaccaatggattgggcgccagggggccacagaggcgtgagtcaccgtgggcacaaggggtcccaagaggaaaccggggacaagagacaaggggaggaagatctcaccccaatagaaaaagcgccggggggcacccgaccgcttcgagaccagccaagaggagtcaaggcggacaaaagggggatctaccaccagggagccaaaaagcacgaataaatac

SEQ ID NO: 256397 - DNA, 428 bp, Homo sapiens
catgaattgaaatgataccaagataagagagggtgcagattttgttggcagcattgtgtgtcaccaacagctgtgatttcagaggctgccaaagcctactgatgttgaatggcagagaactttgggtgccctataaaatatcgtaagtagatggctgccttcctagggaattgtagttaaaatattttatgaaaattaaaagtaaacaaaactatgagttgtcctataaatatttaaaaagacataaagtttgggcacggtggctcacgcctgtaatctcaacactttgggaggctgaggcaggcggattacctgaggtcaggagttcgagaccagcctggccaacatggtgaaactctgtctctactaaaaatacaaaaactagcccggtgtggtggcacacacctgtaattccagctactctagag

SEQ ID NO: 256398 - DNA, 379 bp, Homo sapiens
ctcccaaaagccttctaattcattactgttttgaaaactagcctaagttcagttgataaaaatatatattaaattgttaagattaagaacttgaggccaggcgcggtggctcatgcctgtaattctagcactttggggtgccaaggctgacagatcgcctgagctcaggagttcgagaccaccctgggcaacatggtgaaaccctgtctctactaaaatacaaaaaactagccacgcatggtggcacgcgcctgtagtcccagctactcgggaggctgaggcatgagaatcgcttgagctcggaaggcggaagtttcagtgagcgaagattgtgccactgcactccagcttgggctacagagtgagactccatctcaaa

SEQ ID NO: 256399 - DNA, 317 bp, Homo sapiens
aaaatataggagtcctcgttaacagaaatccacagggccagctttaccaccgctctgtgcaacctcttatgtgatgacgcacatcagagcttccacaagcattatctcagcacacaggtgggtgaacacaggccaaggaaccatcggctcaagtttgctacccctgctgtgccagtgggtctgcacagcctcaacaggggagaagtgagcgagagagtgtggatgtgagtgtagaagcagtgtgtgtccagagagggtgtggaatccatgtccgaatggtattcctatgtgaatgaagcagtgactctgaacccaat

SEQ ID NO: 256400 - DNA, 488 bp, Homo sapiens
actgttaataccaggtaaccctgtacatgcgtaccatttgcatcttcaaagccccatcccaggcttaccttacctggtcaccaacatagctgctatttccactctctctgttgctaagaccatatatagcttgtgtcttatctgtacctcaaatgaacccagaggtgaagtgttatgggactgacctggaatgcagcttcattttgcctacactagttccacatcaagaccactaagttcattagaatttggcccagtctctgtaagtgttgcttctgcatttatctgttaacaactctcaaatgccaactttgggcatccagagatatgtgaggcctaagaaatattcaggtgctcggtgactcacagcatgagttattggaatatagacctcactgtgtagaatgatgtgagtgtctttggtttctgtactatatttaagaaagatgtcaataaaatatttgtatattaaattatacttacataat

SEQ ID NO: 256401 - DNA, 408 bp, Homo sapiens
aatgaaactggattcatgagtttcccaaatgaatttcccaaggcttcataattcatgaggaactagaactcaaatcccattcatagttccgctaccctggccctagacctctggctcccaccccgttctgagagctacaactcacaattcagacactaacaacacatgttttaagtgtgtggcacaacttcttgctcagtatagcagctcaataaatgctaactgacataaaaattaagcacatttcttgacatctgatttgtatgaaccatatgttgtcacatggcaatataatggtttggaagtcttagagaaagaggttttccagcagaattgcaagaatatctcagtctgagaccactctgttgtaagttcctagacctttttctctgaattctgtagggggag

SEQ ID NO: 256402 - DNA, 193 bp, Homo sapiens
tagtcattaaccaaattctagttccttgatagactagagacaatataaacaacccccaaatttttcagagtgattaaaaaccttcaatattagtaatttacccttatgtccaaatacatcgtggtactgactttaaaacaaaatgtttgactaactcttttcgctttttataaaataaatgtgtttgaacaga

SEQ ID NO: 256403 - DNA, 399 bp, Homo sapiens
gtcaatgccaatttttgtgtactctctggtacacatataatagtttgtctggtactgtcatttcccttttacatgacattccaaaatgacaaaaaccattggtgatcatacacacacacacacacacacacacacacactgatgatcaagacatattgatctagatcagaaagaataaaaatgtaaaaatctaattcagtatactcaatgatcaaattatgcttaatgaagcttataattcatttaatttcccctaccctcaattctcctaaattgtgcttttgttgtaattagtttagaacatggaaatttgcaatgtatttttattttgaacatatcgtctaagttgaaacttcccaaaatctgtctagaatcaaaataaatagaaacatcttgtga

SEQ ID NO: 256404 - DNA, 696 bp, Homo sapiens
ggagactagagaagaaacagtatcaagagcctacattggggcttccaagtgatgccccaaggactcactaaaacatcagaaaagaacatttttaaaaaggaatccattacaggggtgctagaaaataagaaaagatgccatctatacagcaaaagtttcaagaaattccaagaagataaatttttgcttagaatctcaactttaaggccgagaactgttctctaaagcaaggttccccttgagcaaggattcttaacctcaggtccgtggggaagcaattgccaatcaagagaattctggaagttcatgaagctggggagggggtgatttacatatttatttgcatttacctttagatgaaatttagcatgttttcaaatacaaatgtaagcaacaaaccagagtattggtagcaataaccataacttgtcatcaatagaaattcatcattttcatatcatctaacagttactacagatatttggaaatatgtatactcgtccctagtttgaaatgataatagttactagactcaccattaaatcttgttatcaataaagaaacatagctttttttttttttttagagatgggatctagatatgttgctctgactggactcaaactcttgacctcaagcaatcctcttgcctaagcctcctgagaagttgggatacatatattatcataccacaaa

SEQ ID NO: 256405 - DNA, 517 bp, Homo sapiens
ttgcctgctgactgattccctggggttttctgtgtaactcttccatctccagtaacattgcacatgtgtacacatgtgtgcatacacacgcatgcaccctaaacccacaaatatttattgaatgcttgtgtaagacagtgaaggccttgtggaaagtgtacagtgtgatacctgccctcaagcaatgatgatcctgttggagagtgtgtaaatctatgaaaaaacaatttgcaaagcaagagttaaatattaccagccccaagggaagagaggacagcttaatctttaataaagctgtcacctctgacccactgcgttctcacaacagctccgagaaatgctcatggcaaaggctgcagagtgatgagggaaggaccggaggggttaagccatgtggattcgcaacacagaaggaagattggcctcgcaagccatcagcaggaatgaacaacaaccaagcgccgtctcatttgcagtcttggcagcttgtctgtaccaaataaacaacttaacaaag

SEQ ID NO: 256406 - DNA, 190 bp, Homo sapiens
  misc_feature (37)..(37): n is a, c, g, or t
aagaatacattcacctttatgcatactgggacatgtngttcaatgtatttctaaactgttattcataataaggggtatgaagtacagtgcactctgttgttccattccattctattaatctcattccatctaatcctatgttatttaatttcattcagttatatttcatcaaaactatttcatatctggg

SEQ ID NO: 256407 - DNA, 329 bp, Homo sapiens
taattgagacatggtctcactctgttgcccaggctggagtgcagtggtgcaatcttggctcactgcaacctccgcctcccgagttcaagcagtcctcctgcctcagctctcaagtagctaggactacaggcatgcgccaccaccacacctggctaatttttgtattttttgtagagatgggatctcaccatgttgcccaggctgggtggaaagtgttatgttcttcccaaagtactctcctcacatcctgccccaacagtcgccctgtggaatgagggaaggtattagcctcacctcccagtgaggaactcgaagatctcagaagtgtc

SEQ ID NO: 256408 - DNA, 821 bp, Homo sapiens
cctgcctcaataatactacattttaaaaagtggttgaagagagctcctcattgcagagggaaggcagcagtgcacaacaaggggaaatgggctagttaagaggagaggtcaagaaaagggtgaggtggaaaaaatagtggggggcctgcaacctgcagagtcctgcagttgatctgcaaagtgaaagaagcaggggctgactcccctcttctgccccgctcctcccgtctcacttccaaggctcacctgccctttcttcctcagctggtaaaaaatgggaccctgatttgtactctctgcttactttaccctgatttatttccctttcaagagtataagctgagggcagagacttgactttacttgagtttatatcttgcaccacacttatcacagtgctttgcacaagtaggcaatccacaccatttggtgaatttaatgatgaagatctggggtgccctgtgaatttaagattgtaaaggggttaagagtaaaaagacacagagaatattgagacattcatttgcatttgagagagaggagtgggaggaggatacagagagggaccgaattgggacaagaggtacaagtggggtacagtctgcagacccttgaaaagccccggataaatcacattaaagagctcgagcctgaatgactgcttttggtggacagatacctgtttgatcttaaaaaagaacatgggagagaagtttcctctggctccctgtgtaattgctctgcatttcagaaagaaagctctctaaattacaaggaaagaaatgaatgtgtagtaattaattgccccagcttctccaaaa

SEQ ID NO: 256409 - DNA, 1120 bp, Homo sapiens
atcaaggtaaaggaatggtgattattgcagattcttccagttgctggtatgtcttcaatcagcaagttgagaaacatttttactgtattgtattaagttgtatatttggaaaaggaaaatattacttgggatttttctttgttatgataaaagatggcatctgtatttccaaacatggaacaatattatcacatcttacctgatgtaagatttctcaaagtagaatcatgatcactttttaaaatgcatctttgtgataaaggggaaaaaacatagacaggaggagcagtagagtaagatttgtttggggagtgtactgtagtaggatttaaaaattatcccaagaaagaagagaaagtcatcagaaaaggtctctacagatgctgctggtctgcagtagtcaacagaagggaggttctcagctggcagcaaatagaatcgccattgaaacttttataaaaagtacagatgctatactttttacttttataaaaatacaaaccccaacccagacctattaaaccaagtccctaacaaaatatggccaagttctatgtttttaaaagttccacaaggtgttctgatgttcgcagagttaataattgctcaattcttcttaaagattttgattctgtaggcacacattatatgaccccaaacaattgcattgtgtaaaagtctggtttcatgtaattatattctattgtgggttatatatttgtttctttgccaactccagctttgtaaagaatttttctgtaaaccattcaaaaagatagaaaacataaatgggaacagctgttgtagctataattcactaattacccttcactaattagaattcagcagaaccctgcctgtgttccagagtaagagggcgatgtgaatctgctattttactggatcttagtacctcttgcttctcatagaacaccttatcataccagctgtgattccagtgtttaaagacgcagtatgtatacatttgcatttatattgtttattagatactctacactactgtatagttataagtatatccactattgtgcagaattttgtacataaagccctgcttacgcatttgatggtcaatttaaaagatttttcaaggttaatt

SEQ ID NO: 256410 - DNA, 497 bp, Homo sapiens
tttcagctggggactcagggaggagctgataatcttgattgagggtcatggagctggagacccagacaggatttgatgttctagttagtggatcttccagctgcagacccagggaggagctgatgttctagtttgagggtcgtgcagctgaagacccggggaggagctgatgttctagattgagggtcgtggagctgcagacccggagaggagctgatgttctagtttgagggtcatgcagctggagacctggagaggagctgatgttctagtttgaggttcttgtagctggagacctggagaggagctgatgttctagattgagagtcgtgcagctgtacacctggagaggagccaatgttctagattgagactcgtgcagctgcgcacttggagaggagctgatgttctagattgatggtcttgcagctgcagacctggagaggagctgaggaccatcgttgccacgggtcctcactttctgagtcactgatacg

SEQ ID NO: 256411 - DNA, 441 bp, Homo sapiens
ccatcactcactctccacccacaacaccatcaccacactcactctaccaactccaccatcaccactcactctccacctacaccaccatcactctctaactactacaccatcactgatcactctcctcactgctccacagtcatttcctacccactctgcaaacttttcagagtacctctctcctccctcgtgtgtagctccttgccatatagaccttcacacccactgcctgtcaactgctgttcaaagatgacacccccagaggactgacctcatcctcttctttctgcccctcactcacatggagccatttgtggccttttcccacccgcttgtctccctgtgccctacttgaggttggaagctccggagttgtttttctcttgtgttctctccagaaccttccagcctcaggtcttggatgtccttgtttctcctcct

SEQ ID NO: 256412 - DNA, 419 bp, Homo sapiens
ttctcataaagagcagcagcctgcagggtagcccttctggtaggctgggaagcatagcctctgatcagaagccgagaacagatacttggagataagggcaaagggaacaggaatttatgctgagcagagtggctgaatatgcctatttaataaactataagaggagtcatgaatatttatgaaaggagaaacacacgcatgtgcaattgagatttatgccccattcataggtcccatgtataaaatacagcagcattagcattattcgagggtggagttttctgccttccgatgtcaaaaggtgaggcagaggatatgaaaacccttactgtgcattatctgtagcacaactccatggtcagtggtctcttatcaggccaaaaggcaaggcactctcagatagttggttactgacagtg

SEQ ID NO: 256413 - DNA, 333 bp, Homo sapiens
tgagaccagcctggccaacatggtgaaactctatctctactaaaaatacaaaaattagctgggtgtggtggtgcatgcctgtaatcccagctactaggaaggctgaggcaggagagttgcttgaacctgggaggcaagaggttgcagtgagccgagatctcgccactgcactccagcctgggcgacagagtgagactccgtctcaaaaaaaaaaaaagaaaaaagaaatgataaactgctctagaacagagaaacttgggaaaaggaatgtttggcccaatggaaaattctggatatattcattatctataaataatgcattttattattttt

SEQ ID NO: 256414 - DNA, 977 bp, Homo sapiens
ttcagaatttatcatattttttcaataaatgtttataaatcaaagtatgtcagatgctttattccctatatgatctgtctttcctggactattctggactcttcctattgatctctcatttgctaccttgagaccatttctctcacagcagccagagaaatctgctcataatgtaaatctcatcatgctaattcctcaggtaaaaaacctcctgtggaggacatattcatctggtaatgttggaagaagaccctaccatatggctttctgcaaaaaagaccactatactacctgtttggaatacaaaaagtaactgactgaaattactggacaggaagaacagatgctagttgagaaagagaagaggggagctgggagcctgaggagaaggcttttagtctagggctaagtgcagtaggtatagggaaggacagtaaggtagggcagggatgtcagtgggaaaactatgggtctcttcaccaggaaaactggaaaattgaagctagggaaaccttggccactgaagagagtggaagaatcctgcaagggaaagagccaagaaagggtacccagattctgtctgaaatctgaataattcctgtgtgtcacagactcagagcagccaaatgaagggcacaagatctgaactgaaactggagttgctgcccaataaacagaacagttcaagttaagcaaagataattgcttcttacaacaaaaccattctcattttagaaaaataacagaatttaggatcttcacaatgtaacatttatgatgttcaggatacagttctaaaattatccagcatagaaagaaggtcaaagaaaccaaatgctggtttatagaataggagctttaggccaggtgtgtggtgcacacctaatcccagcattttgggaggctgaggtgggaggatcatttgagcccagaagttcaagaccagcctgggcaacaaagcaagaccccatctctta

SEQ ID NO: 256415 - DNA, 317 bp, Homo sapiens
acacagctatgtgactgagccacaggaggcgtcaccggggctgcactagaatgcggaaaaggggcgtggccttaatgctccaagcccattggtcaatgagaaagatgaaagggaaaggaggcggggccaggcagctgcgggtcatgaaggtcctgtgatgtcacaaggaaagcctcccatggaactgctgtccccgcccactctgggagaggggcggggctggctttcacttactttttttttttttttacatatataactttttattataatttaaggtatagtcgataatataatgtttttttttgttttaaaaa

SEQ ID NO: 256416 - DNA, 490 bp, Homo sapiens
aatgagacaaagatatgtaaagcacttggtatttcacccaccacgcaatacatgtttaatgaaggctgggcatatttttttctcagagactttatacataacaagtactcaaaatacaggtattgacaaggaataagatgaggtttaaataattattagaggctatatattaagccagagatctatctagtttttaaagtttaggttgggtccagtggctcatgcctgtaaccccggtactttgggaggctaaggcagaaggatcacttgagtccaggagtttaagaccagcctgggcaacatactgagatcctgtctctaccaaaaatttaaaaattagctgggcattgtggcatgcacccatagccccagctattcaggagattgagatgggaggattgcttgagcccaggaggctgagagtgcagtaagcagtgattgagccactgcactccagcctgggtaacactgtgagacccgcctcaaaaaa

SEQ ID NO: 256417 - DNA, 520 bp, Homo sapiens
gtagaattaggaacgtagcccagggctcttcccatgacactgtcggggagggagaaggaaaccggcactgagctggtctcccctaccggccaaccaagaggctggctgagtgagcaagggttgggaggccctgttggtgcaccatgcccagctaatctttgtatttttagtagagacagggtttcactatgttggccaggctggtctccaacccctgagccacctcgcccgacttcattctacagtcttaacagaaagcaatttcagaagtggtgattcccatcattagaagtctgcgttaggaatcagcaaggtatagtccacagagtggtttttatattttgtaatggttggagaaaagtcaaagaataataagattttatgacataaaattatataaaattcaaatttccatgtcaataaatgaagttttactgttatttattaaaatttctgatatagccacactcatttgttgacttgactttgcactacaaacttcaacagcagagttgcgtga

SEQ ID NO: 256418 - DNA, 419 bp, Homo sapiens
agagccagtgaggcttggtgcatttaaggaccctactgaaaacaagactgttgtttcagagaataaagagaaaggggagaatagagtgagaaaagactggggaagcttgatcactgaggtcttatgggccattcaaagtgtgtagtttagtcttgattctaagaatagtaagtcactgaaaggatttaagcacaagttttacctgatctgatttgcattactctggctataagaagatgcatttagatatgttactctggctataaaaaggataatttcagtagttgaagagagagatgatggcagcttggttttggacccaggatctttaaattcttaaaaaattattgaggaccccaaagtgcttttgtttatatggcttatatctattgatattcactatatttgtaataggaatt

SEQ ID NO: 256419 - DNA, 197 bp, Homo sapiens
  misc_feature (60)..(60): n is a, c, g, or t
  misc_feature (99)..(99): n is a, c, g, or t
cctgtacctaccgggcctgacccttctgctccaatacctctcaggcgagaaccaagaacnaaattgagcaaagattccaccagtacccaagagcttttntcattcaatggctggttgggaatccagcatttgggaagctggattcatacgaaatgactccaagacgcttagctatctctctgaaaactgaaaaaaaa

SEQ ID NO: 256420 - DNA, 342 bp, Homo sapiens
tacaaaaaaggtaagggtctggaataagtgggttttggattatttctgccagttttgtgtctcgatgtgagtaaattttatgtacattcctcccttttctctcctccatcgtcccagctgtccttctgctgggtctcatgcctcatcaaagtgaaaggatctcaaaacctatttcaggaggtactttattaaaacagatggattgggtttctgggttcctctcttgccaaactccgaagaaaaccccaccaaatctttgatcttgcagtgtgtacaggtatatgtgcaattaactcctgtttcccaaactacccaatgaggcaggtactaaaaggagggtcc

SEQ ID NO: 256421 - DNA, 498 bp, Homo sapiens
agacacacaaaacaaaagtactagaatacaaagcccagaaataaactcacacatatacaatcaactgatatttgacaagtgtgtcaagaatacataatggagaaaagatgctgtcttcagtaaatagtgctgggaaatctgtacacccaaatgcaaaagaatgaaactggatgcttatcttatgccacaaataaaaataaactcaaaactgactaaagactcaaggtaaatttactcaatttaccttgcgtctttagttttacctgaaattgtaaaactcctagaagaaaacatagggaaaatgttcttgacattatcttggcaatgatttcttggatataacaccaaaagcacaggcaagaaaaggaaaaatagaccagtgggactacatcaaaccaaaacacttgtgcataccaaaagaaacaaccaacagaacaaaaaggcaacttatggaatgggaaaatatttgcaaactatatatctgaaaaggggttaata

SEQ ID NO: 256422 - DNA, 476 bp, Homo sapiens
ccagctacttgggaggctgaggcaggagaatcgcttgaacctgggaggcagaggttgcagtgagccaagatcgtgccattgcactctagcctgggcaacaagagtgaaactccatctcaaaaaaaaaaaaaaaagaaaaaaagaaaaaactttccttcagctactatttagtacccaatgatatagtaaagaaacacaggaggctgggtgttttggctcacccctgtaatcctagcacttagggaggccaaggcgggtggattgcgtgagctcaggagtttaagaccagcctgggcaacacggccatctcaactaaaatacaaaaacttagccaggcttggcggtgtgtgcctgtagtcccagctactcaggaggctgagtcaggagaattacttgaacctgggaggcggaggttgcagtgagccgaaatcgcaccactgcactccagcctgggcgacagagtgagactccgtctc

SEQ ID NO: 256423 - DNA, 427 bp, Homo sapiens
catttgttcaagtctactcttggggctttcagaagtctttaaaaattttcctcacttaggttttgccatttctttttatgtttatctatattttattatctttgttgctattaaaaggaagttttccggttattatgtatgtacagtatttgaaggctatcagtttctgaatataattttatatcctgctacctcactgaatttttactgttgaaggatacatatatatatgcctgggtaacatggtgaaatcccatcttgacaaaaaatacaaaaattagctgcgcatagtggtgcatccttgtagtcccagctgcttgggaggctgaggtaagaggatcactgggtcccaggaggttgaggctgcagtgagccatgagtgtgccactgaacaccagcttgggtggcagagtgaaactctgtctca

SEQ ID NO: 256424 - DNA, 473 bp, Homo sapiens
cgccacctctgcttggccggtgcctggcctccatcacagtccagcgcaactgtcacctcctccaaggtgctccctgagcccctccctctctggagcagggcctctcttgcccgcacccacatggcctctgcaagcctctgcctgctcagtctcgttagtcctcagaggagggtccagtcttcccctgtgtctaccctctggaactccacacagcatctcgcttggagaaagcactggctggttccttgttgaattaatggccatcaaatgacacacggcacagtccaaccctgcacacccatcagccagaaacagctctgcctccgaggccccacgcacctcttcctctttaattaactcgacacctctactgagcacctgctacccgctggtcataagcatgcagcagtaaacgaagagaccttcctgcccccacagagcagagagtaaataaacacacccaaaacaataca

SEQ ID NO: 256425 - DNA, 392 bp, Homo sapiens
gatggtgaaaacctgacttatggaacactgtgaaagaaacgtagcttagttgttttcaataatgtccaggattggtctccaaccagagaagggggatggagtagtaagcaggcttctttttaagagagcgtatttaaactgggtgggacttgtattaagtatgctcatcactcagaatgattttccgaaagaatttgacacttctgaccctaatagtgttccatttgattttacaaactccattttccatctggttgcttctctggcctcttcttcctctttgttccacataggtgagagttcccgcaagtgtctgtctggctattttctgttttctttctctttttactcacagagttttctaacacatttttttccctcaaatactttaa

SEQ ID NO: 256426 - DNA, 185 bp, Homo sapiens
gaagtgtgtaataccctttaattagtgaatgagccatgattctagcagagtgagagaaggctgtctgcggagggtaaaagtcccagggaagccaggtgtgggatgctgactacaatgtaaacaggtgtgcttcatgctcatgcaagtacactcttagccctcaactaggacaatctgatttcaga

SEQ ID NO: 256427 - DNA, 142 bp, Homo sapiens
catgccggggagtggcattcacaaaggttatgagtgtgaagtgagaatagctaaggttagcaggttcgtaggtgtacactcctgaccgttgagagaatgatcctggatttactgctcgttaatgaatggttaggaatcctag

SEQ ID NO: 256428 - DNA, 389 bp, Homo sapiens
aaggcttaacacctgaaaattccagagtcagatgagctcggatctgactactgaggaattgacggcttcaatgtttataagagtgcgtagacccaaggaagtgggtggagacctaacaaggaagtgatggaagactttttttttggagaagtttggccttgaagaggtaatggccgtggctgagggagagagtgggtggatagaaagcaaggtctgaaatgtagaattggtttttctcttcacaggaaaaaatgttgatcatgtttataaattgaaaagattaaaaatatatgaaagggaagactgatgttaataattggacagcatcttgattatgactgagtaaacaatgtgaggatggactgcctttgagcagaagggtttttccc

SEQ ID NO: 256429 - DNA, 366 bp, Homo sapiens
ctggagtccagaatggtttgccagcaccaccttagacaacacagcgtacctgcaagccttgggtttctcatctcccaaatgaggatgctaaaaagtaagccaaatgcttttgcaattcaaaaatgttatacaaacattgccacttttttcaatatcctgaacatcctgaattgttaaatagatccttctagacaccaactcttaggaattctatttgaatcaggacagccttgcatgggccaccagactgcttgtaaatgcagaagatataattgaaacttcataaagacaacaggaaatttatttgaaagtgttgaattcacattgcagaatgatttatgcacagttacgatttatgcagttagc

SEQ ID NO: 256430 - DNA, 264 bp, Homo sapiens
acccctcttcctgtcaccagcacttcctcagcatccacaggtgacaccacccctcttcctgtcaccgacacttcctcagcatccacaggtcacgccacccctcttcctgtcaccgacacttcctcagcatccacaggtcacgccacccctcttcctgtcaccagcctttcctcagtatccacaggtcacgccacccctcttgctgtcagcagtgctacctcagcttccacagtatcctcggactcccctctgaagatggaaaca

SEQ ID NO: 256431 - DNA, 518 bp, Homo sapiens
cgcctgcgctgtctgcgcctgggtctcttcaaccgcagtgagcggtcgcacggctccacatcagggtcgccctgaggctcagccttccccggccccattccgagtgcgcacaggactgaacgagcacgcccggtccctgctccggagcggaggacacgacgcggacccgcacggtgcaccgcagtgacctgaggaaggagcgacgggcgctcgcgccaaaggcgtccgagtgcctggtaaactgtaaagcgcggtcctgcgtgagttgctatggctacagctgcgccaggcggacggcctgcaggaccgaggtgcagctgggacgagcggaaagctctgcgcgtgggcggggagcccggagcctcgccggggcaatgtcatctaggtgctcggcgctccactgatccggcccccgggggtgggcgggcacgtttgcctcggatggtctaacaggcgtcggggagagccaatggtgtggcttcatggctccacccccttccattcgattggccggcgcc

SEQ ID NO: 256432 - DNA, 255 bp, Homo sapiens
atgatcattccgttacctatacacaggttgggattacctgggcagtttctgaagtcaagatgctaaaatgaccctcaggacagagttcttaaaattttatgagcaatatgtttctcccaaaagcaatcttaccatttagatattttatattaatgaacaattcatctaagggccatttaagcaatgtaatagggcatacagtaatatttggcaacagtatttgcttactaaatgttgatcaaataaacgatttgg

SEQ ID NO: 256433 - DNA, 516 bp, Homo sapiens
ggagaatacactcttctcatattgaaaactaaagaaaattattcattggtgctctataattcagtgacttgagcattttccatgtgctacccgcagtaaacaaaacaagatgagtaaaagtctcatttttgatgtaataataatataattaatttagaaatcacttcagtatacttactgaaaaatatatttatatttagtttttaataagcgttttatttttagaataattttatatttacaggaaagttgcagaaataaaacagagttcacgtataagtataatccagcttccacttatgctaatagcttacatgactgtggaacatttgtcaaagctaagaacttgactttggttacattactattaaatatttctattgactactttcagacctcatttgtatttcaccagtttttccaccagttttccacttttctgttccaggatccagtccaagttagcacattgcactttctatgatgtcttcttaatctcttctggttcatttgttt

SEQ ID NO: 256434 - DNA, 458 bp, Homo sapiens
ttctgtaaaacacgtgtgcaatttggggacagtttgtcatcattgtggcttctggtttttacatgttttgctcttgtcatattgatgtacaaattcaaggttagtgctgacattcagaagaaagcaaggcataattgtgtgtcatgctctttattagacttgttccctgatggaactgagagcttattgctattgatttaaatgtgttcaggtattattgataacagggaatgaagatgcattcaggggcttcacttcctcgtagggtccatgttcccctagaagggcctctgtgagccatgtagggtgcctgtgggggctgttgccaggcaggggaggctggtatccaagtagaactaggtgacacgcagccccaggagaccagagagagagtgggaaggagagcctgaagtgggaagtagagcctgaattgccagcaagtaaagaagcaaactgga

SEQ ID NO: 256435 - DNA, 493 bp, Homo sapiens
actttcagccccatgccccatcctttggaaggggagagaggctgcagattgagttacaattgattatgcccatatgattaagtctccataaaaatccctgaactacaggatcctgagagcgtccgtgttacggaacatgtggagctgatgtgccctgagaggacacagaagccccgtgtccctgccccatgtctgtctcccatctagctgttctgataagtactttcataataaatggttaaatgtaaataagatgtttccctaagccattctagcaaaggattgaatccaaaagtgtgaggcagcagtggggagtgttgtgggaacctctgatttgcaactggttggtcagaataccaggttgaaccggggatttgtggttgggtctgaattaagggtagtcttgtgggactgagcccataacctccaggtaggtagagtcagagttgagttaaatttgcaagatcacctaccagagaattgatgtgtggga

SEQ ID NO: 256436 - DNA, 1336 bp, Homo sapiens
agtcttaacttcttccagcaccaactcaaaagtccaaaaaccagaatctcatctaaaccagacacagatgagactcaaaggtttgtttcatcctgaggcaaactgctctccagctgtgaacccatgaaatcaaacaagttaatgtgcttccaaaatacaatggtgggacatgtataggatagatgttcccattccaaaagggagaaataagaagaaaggggttgcaagtaagtccaaaacccaacaagaaaaacaacaagtcttgagattaatctttgcttgatgctgatcttgtgaacacagtgggggcagagtatttttagttttggggaaaactccatattattgatttctaaagtttctttagctaaggtcttcagcatattttttaagtacctgataatgtctctgtcttccccattaaactgtaagctccttgatgagtttattcacctttgtgcctctagctcagtgccaggtggtcaataatgtgtgttaaatgaataaatggctggtgctctgatttgaatatttgcccaagaatcagaaccgagctcttcactggaacctgatcttctacctaaaaccaagtcacgaatttttacttctctggccccacccccacttttttttttgagatggagtcttgctctgtcacccaggctggagtgcagtggcacgttcttggctcactgcaagctccgcctcccgggttcatgccattctcctgcctcagcctcccaagtagctgggactacaggcgcccgccaccacgcctggctaattttttgtatttttagtagagacagggtttcaccgtgttagccaggatggtctcgatctcctgaccttgcgatccacctgcctcggcctcccaaagtgctgggattacaggcgtgagccaccgcgtccggccgagcctttttattagggacataatattcactcctagattttttgcctgatcccacagtctttgagctcctcaggctgagactgctattgaaacactcaggattaaaatactaacatcttcatgttttcctccagaatctttcttgaatttacgaaattcgaaagctgctccattggaaaccattcaggaattgtcatgggtttaggttaaaaacaaaacaaaacaaaacaaaacaacacagcagttgtgccatggaaagcagatcacttgaaacaggtcttccttttctgttttcttgtagccgggtcctcctccctgaagcctccactcctgtcttctctgatgccggacttgtgtctttcctctactttttctccgtccttttctgagaccctaaattacagtatgtctgcctgtagt

SEQ ID NO: 256437 - DNA, 540 bp, Homo sapiens
tctgctctatcacttactataatagctgtgtaagttaacctgtctgaaatgtggagataatacttgccttacataattactatgagcatttgtgtatgtgcaggtgggcgtgggtgtgtatcagacatttattagagtatacagtaaacagttaatgaactaaggttactaatagtgtttactgtgggttggctatgtgcaaaagtgctttgtgaatgtaatttgatttaattacagtaacttagaatggccggtaccattattaatcccttttttataaataaggaaatggataaagaaaggttaggtaacttactcattattatacagctagttattgatagagccgagattcacactccagtggtgtaactccaaagcacttgccagtataatacattgctcccaggcagccagaaataaaaaaattgttccttttacgtacgacagacttctgaaatggtagtagtagtgcccttttttttttctctttttagcccaggaaagatttagaataaaatctagtttagatgagcacat

SEQ ID NO: 256438 - DNA, 345 bp, Homo sapiens
tatcaacaatatcatacaacttttaaatttcctgtaaatcttaaggtcataaagtagtacattattattgtttaaatttgcataatctgattactaacaaggttgagactatctaatatgcttattagtcattttaactttcattttgtgaactgcttctccctatcctttgtctgcttttctgttgggttttctgctctattttccgaagttctttatttttaactattgatttttgttggcaatatatactgcaaaaaatagatttcctatgtgtctgttatggatgacttttttgaacagaaatccttaaatttaatgtaatagattcatcacattttccct

SEQ ID NO: 256439 - DNA, 503 bp, Homo sapiens
ggggggatgcacatgtcagcagaaatcctggttgtatggtaatgttatcagctgcccttttggagctcagcttgaaagtgtgactaaagctcctctggctgctataaagctagtactttagacttaaagcattgtaaggcagatgcctcagagtggaaagttgcccgggcctggccgggagctagtggagcaagttacaggaagaactagtgcctagagctggggggtggagagagcacttgtgcctcaccctttgcctgtcagttgttcagcgtgtaacagttccctgcttcttaggttctttctgtacccttttataagggtgtatccccttttggtaacttactgtttgttaatttgtagtgttccctgccagtaagcttgtaacactctagtgactcaccttcgggtgggagggtaggaaagggagaggcctgcctcctaaacctgggaagatggggagagagtggtaaacctgagagcccaaaaaacaaaccaaaaca

SEQ ID NO: 256440 - DNA, 2725 bp, Homo sapiens
  misc_feature (1)..(2): n is a, c, g, or t
  misc_feature (943)..(943): n is a, c, g, or t
  misc_feature (1047)..(1047): n is a, c, g, or t
  misc_feature (1162)..(1162): n is a, c, g, or t
  misc_feature (1190)..(1190): n is a, c, g, or t
  misc_feature (1468)..(1468): n is a, c, g, or t
  misc_feature (1517)..(1517): n is a, c, g, or t
  misc_feature (1635)..(1635): n is a, c, g, or t
  misc_feature (1955)..(1955): n is a, c, g, or t
nncacaaggctatgttcatgcactacttcggtataatctcaaaataattgccagctccccagtggaacgcctgccttggtccatgtggaatgtgggcatatggtaggatttccttggaggaactagaagaggaacataaagaatgttaggcatataaattattgtttctttttcttcttgtttctttccactgagttatgtgtgagcccccacacccaccctaccttcctgtcctctaccttactgatgctattttcaggctgttgtagaattgggtgtgtaaaattaaattagcctttctcctcttaatatctgtaaaatgaacaaatttgacaaagaaactacctatctgatatataagaaggttattagcctgtaccacaagtgaaaaagtttcatcctgatatatcaaaatagtaccacttgaaggaaaacgttggggccatctgtttctctcattgtagttagagtacagatttttaaaatatgagcctcaggcataaaaatgcagtattagcaactcaacttgaagaagcagttactagtgtcctgggtgggccacagggaaaatagtaccaactgcctgttatatttaactgcaattaaaaatggcagtgctgggtatcttctgtctctgggtcatctcctaaagatcctgcagagggagccatagctagtgtagaggccagccataactagccatggcaaagaccacagggaacgctcttcaacatgctctgcactgatcctctaccctggtgtggagaaatgtcagattcatcactaacaaggttaaaggtgtaaattgagggaaaaaaatgagaaaagttatctttcacataagacttcagaaagaaattgcgtcgtcaggtttggaactggtttgtaatttcatccagttattttcattttaattactgtcactgttttcttcatccttganaaactatgagctctttgagattgtctttttcatatcctgatgtcagagcttcctgtattttctgatcatggtatgtgctaagtaaatgcaatttttagcatttngaatggtttatcaaatgattgaaggagtgggtaataatatagattacatatacagtcagccacatatgtgtatgtatgtgtatttgtgtgtgtgtgtgtatatgtatatactgtngaccctccgtatcaatgggtttcacatntgtggattcatccaatcatggatcaaaaatattctttaaaaatatggttgcatctgtactgaacaggcacaaactttttttcttatcattattccctaaacaatgcagtatgacaactatttatcatagcattgacactgcattagatatgataagtaatctagagattaaagtatataggaggatgcatgtggatcatatgcaaataatacactacatcttatataagggacttgaacatccatggagtttggtatgtggtgggtgatacctcctcnttgaggaggtgagtatcagagacgcaggtaaatatgatccagagggcanagaggcattgccagcctcacactggctgtcaacaccatgctgagttccacgaaagcagcgaggagagggtggtgttcttgtttctggtacaatacctggcatagagaagatgtcacancaatgttcgtctattgaataagtcaccaaaattgtgaatgactgaataaatgggcaaagggatttgttccctacttgctgtgggaagtttcttgtagttatgacctccatgaaagagagactcgtatctggagaaagttcatagctgaaaccatgagatttaacttttgaagttataatggatctatttttttaacatcataaatgaagattatgcaatactgtatgtgcttcaattgacacaaccccttcccattcagggctgatttatgttctgtactgaatgacaggcacagaagtaaatgtgataatcctgtcccntcgttaccctttattgtggtcttgctgtgtcccagccacacacttcatactgtatctgtgtcatcattctcatatacatctatataggtacacttccatagacttaggcccatttaatggaggagcaactccaacatttagagatcatgaaaggtacctcatgacatatattgacctagtggcagagctgcttagttctacagcctctgagtggaatcctcacgacagtaaaaacacaagcttggtttctcacacactctacctgctttttctcatcccctttagtctctattccttgctgagatgtgttaggcattaaatggttacagtctacttctgtgtgtagtctccaaacactcagaaacctcaaaatttaaaaaaatacagaacaatatgttattaaataatcagggacaagttaaaatggtaaagagaataggccactttgtgaaatcatatgcagggaagaaaaaaatactggagtgaaaacaatataaaaataatactagatgctgtttcgtagcaccaagtgtgttctagcttctgtggttgttgctttatatcattttatataatctttacacaaaacctacaagcagatattatttcccctatttcaaaaatgagaaaaccaaggcaaatagttggtaagtagtacatatatattatcctaactctgaacttctggattcaaagaccatgttctaggataccattttgtgtaccagcatggaatatgtttttagttcatctatttactctaaaaatgt

SEQ ID NO: 256441 - DNA, 466 bp, Homo sapiens
tttttcattctaacttctgaatttaaatctgaatcctctatagcaggggtccccaactcccaggccacacacagttccatgacctgttaggaagcaggctgcacagcaggaggtgagtggcaggcaagcgagtgaagcttcatctgtatttccagccactccctgttgctcacattatcacctgagctctgcctcctgtcagatcagcaaagccattagattctcacaggagtgaaaatcctactgtgaactgctcgttcaagggatctaggtcacatgctccttatgagactctaatgcctgatgatatgtcattgtctcctatctcttcacgatgggaccatctagttacagaaaaacaagctcaggactcccattgattctccattatgatgagttgtgtaattatttcattatgtattacaatgtagtcataataggaataaagtgcacaatagatgtaata

SEQ ID NO: 256442 - DNA, 363 bp, Homo sapiens
gaccttagggctttgaaggcccctggccctgcaaagcacgaactccttccctccatcccagaccccagcctgggggagttctccagatccccaagcaggctgagcccacttacccagagtccagagtaaacggtcactggaccaagcaaggacgtgtccctgccctcagctgggccgctttttcagtcctcagtcccctagagtccccgtctcctgtcagcctctcccactccgcagcccttactccctcctcccactgtctccctggtactcgcaacgccactactgggccagagatgggagggggacgggagtgctgggggtgccagactagcagcatagtcaataaaactggatcacagc

SEQ ID NO: 256443 - DNA, 350 bp, Homo sapiens
tagcagtgaaatttattatcatttgtattaagaagagatgactattagatgccatgccataaccaactcttctccagtagattaggaggaccaggcctgatactgaatattggaactgttggcaagaaaatgaaagttcgtgactgcttgagttatttttaaaactctagttgcatggctgttatgtctcaaatactatataattatccctagttactggtatctttagcatatttgaaaccatccatatgtgacctaaagccacacagctatattaagacatttttgaacaatcaaagcaaatgacactttaaattaaaacaaaactaatatgaagcaactactttaaa

SEQ ID NO: 256444 - DNA, 431 bp, Homo sapiens
gtgaatcctccactgcccacaccatgcttctctctgctagactccttatcacaccacgtgtcttgtttacctgtctgcctccctcattaatctgtgaactctgaagttttgaaggcacgaatggtctcagtaacacagtatctggcatatagaactgttgcttaataaatatttgtctgtttgatggatggagactggtgctaacaagtcttcattttgcaactctggtttctagcttttaccggcagattaagaacaaaagggattccatcacaaatcctgggagaatcatgacaaatgcttagcttcagttcagaaagaagcaagactatttatagctcagggactcaacattaaatgacccggacttaatttttccttgtgacctagatttgcacaactttagatggaaagtgcccttggagatcatt

SEQ ID NO: 256445 - DNA, 494 bp, Homo sapiens
gaaaaatgaaaaaataggctttataaaaggcactgtcttgatcccaacttcccatcatgatcaattttagaagagtatccatagaggattagaatctggaaaacaaccccctatctattgctgcatagcaaacaaccccaaacttagcctaaaatcatcactatcatttactctgctcacaattctataatttgggcagggctcagtgagcaaagcttgtccctgctccatgtggcgtcaggaagcaaggcttgaccaaggatggagagtctgactcagaggtggctccatctcacagatagcacattgttatctgctgccaactgggatctcagtcaggatggaggccagagactctgggccctgtgcagagaagaatgaaatagcaagtctgactgctatccttagaaagacctgtttgcaaaattggtctttagctggcatttgggaattagaatttggggagggttcccaccaccctatcaccaccctgt

SEQ ID NO: 256446 - DNA, 242 bp, Homo sapiens
gacagtgcagtggttcaccatcagaggaaatgtgataggaggtgtaggttctagacttgggcatattgtctctgtggtatctgaaggacaacaaacttagatggtcatgaagctcaggagaacttcatttaaacagcatcattgactgggcacagtggctcatgcttgcaatcccagcattttgagaggccgggttaggcagatcacctgagctcaggagtttgagaccagcctgggcaaca

SEQ ID NO: 256447 - DNA, 469 bp, Homo sapiens
aaggggcaagaggattcattcagctgccccaccactgctatagttcacatcatattcctaacctgtcttttacccccaaccactctagggtccattttgcttttcatcctagaagttcaactccaaaaaagaactgaccccaaaacagcattcatttgttcattactcaacaaatgcctgctgagcatctagtgtgtgttagatgctgaataaaacagacccctaacttcagagagctaagtcaggtattttaagaaatgtacattaaattttcctctgttaatttgtacactacacctctgtggtcccaaattttcttataggattgaagtaaaagactgagtataaaaggtcgggagaaagctgacatatggagtaggtaggaagaaccttagtactggaaatataggaaataaggtgttcaggactcttggggacaaaggcaaagatgtgactacccggcagaggg

SEQ ID NO: 256448 - DNA, 419 bp, Homo sapiens
ttggtgacgccccttggccatgctgggcttctttcctccgagggcaaaagagaagatgaacacctgcccagcctcgaggttcatgtgtgaaagggtttggatcaggccaaggtggacaggaaggctcaggagggaggagggtggtgaggaggggaggggagctatagccccggagctgcaggcttgggtttgaatcccagatctgtgactcgcagctgtggccttggtcttaactgctcagcctcactcttgtcaggaagacaatcaggaataggagtttctcttggagcaaatcaataaaagcttcaggtaaggcatttggcccagatctggcagtagtagcaagcacgtaataaatgtcaccaccgttgtttctttatctttctaggttaagctgctggcctgagtattttaaattt

SEQ ID NO: 256449 - DNA, 247 bp, Homo sapiens
atcacttgaacctgggaggcagaggtttcaatgagccgagatgatgcccctgcactccagcctgggtgacagagcgatattctgtctcaaaaaaaaaaaaaaaaaaaaaagagggtgtaattcactgaatctgattagaaaagctacacatctttatcacataagctgaaatataaaatgtgaccaaatttgaaggaagtaaaatacctgatatacgccatcttagagaatttcacggtgtctaaga

SEQ ID NO: 256450 - DNA, 588 bp, Homo sapiens
agtgttattacttccactgccaattatgcagtgggtctcttagcaggagaagataaagaagaaagaataaagtatttaacagtaagtggtgtttaattacataagagatgacaagttattttggtattaggaaatttctctgcatttccttcgacagaattttaagtaggattggtcttctgtcagcagctttttagtgactccaaatgaaaatttcctcttaagtgacttataaacccctataaagtctcagtctggttaataaaacagttattaaaatataggaaaggaaatttgaaacatgagagctgaaaactggaaattggtaataaaggaattacttgggttcctagaaccaccaatcatagacctctttctggtcacatgtttcaattaagagaatatacaattcttggttgtttgtcatgtatcattgaaaaaggaagagccatattcattcctccagtggaacaacccatggatatgcgatctcactttgctaacaggaaagaggagagcggttattcttttgggtaggttgattttataatggtttcagaatgctgtcatctctgtctagctggagag

SEQ ID NO: 256451 - DNA, 391 bp, Homo sapiens
ctacacagccacagggggccaggaagtgcaattctattatgcatgtgtctggaagaagaaggaaccaagaatccttggtgatttctaaacatgaatgatcatcgcagccacctgcttcctagccatgtgaccctcagcagcatcttgtcttgatccttggggcacagctgccgaggtagtgggtactatggagcaggagggtcaggaggagatgtgggtggggaaatggagtcccttgtcccttccctgatgcagagaacttggaggtgctcttctagcaaggaggagaaagtgaaaagactgtgatctttcaaaaaccaattggcctctccgaacacacactcaataaatactcgctgaatgaataaatactcgctgaatgcatgaagaa

SEQ ID NO: 256452 - DNA, 1420 bp, Homo sapiens
gcggacgtgggcaggagggctggaaaagccggcgctggagcggaacgggagtagctgcctgggcgccaaaggccgcggcactcccacgtggaccccgaagtcccgaacccggggatgggcccgcggctgcgaggggatcttctctggatcaagcaatggtggtgaaaaatgtttcgcaagggcaaaaaacgacacagtagtagcagttcccaaagtagcgaaatcagtactaagagcaagtctgtggattctagccttgggggtctttcacgatccagcactgtggccagcctcgacacagattccaccaaaagctcaggacaaagcaacaataattcagatacctgtgcagaatttcgaataaaatatgttggtgccattgagaaactgaaactctccgagggaaaaggccttgaagggccattagacctgataaattatatagacgttgcccagcaagatggaaagttgccttttgttcctccggaggaagaatttattatgggagtttccaagtatggcataaaagtatcaacatcagatcaatatgatgttttgcacaggcatgctctctacttaataatccggatggtgtgttacgatgacggtctgggggcgggaaaaagcttactggctctgaagaccacagatgcaagcaatgaggaatacagcctgtgggtttatcagtgcaacagcctggaacaagcacaagccatttgcaaggttttatccaccgcttttgactctgtattaacatctgagaaaccctgaatcctgcaatcaagtagaagtcaacttcatctgaaagttcagctgttttcaaactgcaatgctgaaatgttatgcaaataatgaagttatcccttgctctagattttctgaagaaaatggattgtgtaaaatgctgatcatttgtttattaaaatgtgtcctattacacagtgagttaactctcaatgaagtcatctattttctgggctaaaaaacttcatttgtctttttcaacttctaataagcttaacctaagtgtcacgaagacgagatgtcacagaggtccactcagtgacacacactgaaggcctgagggaagactgaggacatgggctcagtggtggcttcccagtcatggtatcactggcatggacctctgtccggcagaggtgtggactggagaccaggattcatgctggtctggaacaatgacattgccaacttaagacacacaaagcagattttcagaagtgtctggtcaagataacatgctggccaaccacaattcctagagttaagagaaccttaaaagattaccgctcatgctaaaagtatgtaaagatcccatgtacagtatgatagtgtactttttttaaaggactgtcaatatacaaaactttaaagattaaaaacattaaaaataaaaaaa

SEQ ID NO: 256453 - DNA, 1101 bp, Homo sapiens
gcggacgtgggcaggagggctggaaaagccggcgctggagcggaacgggagtagctgcctgggcgccaaaggccgcggcactcccacgtggaccccgaagtcccgaacccggggatgggcccgcggctgcgaggggatcttctctggatcaagcaatggtggtgaaaaatgtttcgcaagggcaaaaaacgacacagtagtagcagttcccaaagtagcgaaatcagtactaagagcaagtctgtggattctagccttgggggtctttcacgatccagcactgtggccagcctcgacacagattccaccaaaagctcaggacaaagcaacaataattcagatacctgtgcagaatttcgaataaaatatgttggtgccattgagaaactgaaactctccgagggaaaaggccttgaagggccattagacctgataaattatatagacgttgcccagcaagatggaaagttgccttttgttcctccggaggaagaatttattatgggagtttccaagtatggcataaaagtatcaacatcagatcaatatgatgttttgcacaggcatgctctctacttaataatccggatggtgtgttacgatgacggtctgggggcgggaaaaagcttactggctctgaagaccacagatgcaagcaatgaggaatacagcctgtgggtttatcagtgcaacagcctggtgagacttcgttactttggttagctgcttgcccatcaagtcgcaacacccagggactactgtttttgaaggctgaagaaatacaatccattatatatggaatatcttggcctggggatagtgaatgaatattaggccggaggtcagccggctggcaagacagtgcaggtttgtgaaatatttgttagggccagtggcagcactcgcttgtgccgggatttaaaaggtaaacaaagcagctgaggaaaaatgtatcctccaggggccgaaggcttcttccatttccgaacgttgttgccctcctagactgcgtgatcagcctttgcaggctgcagtcgctgtttgctttcctctgaaggagggcagaaagggcccacgtgcagggaagctcatagtatgggt

SEQ ID NO: 256454 - DNA, 608 bp, Homo sapiens
aaaaattatccagtaaatacaggatggtcaagaatatttcacagaattgccttcagttacattcattattcacatagccatcattttttatcattagagacagcatttgagcagtaccatgaaagtacaatctgcaaaatgagaattaattatatgtaataacagttatgtagatataataaaattttaaaagtaaaatgattcaaatattaagatatttaaaatatcgaaacctttggtccttcaattattttcacataatttacttaaatcgtgagaggtggacttgggcttttactagtattggtaactttaatatattacttataatttgagatttcccaaactgcaataaatgaaatatctgttaataacttaattattgtttgcttatattgaaaagtttattgcataaaggaaatcccacagtctgctcttgaattgatggcaattatcataacattatgaaattactataacaagaatatacaattaatcagttctatatttcatactaacatgtgtgtgccctgatgcattgctttcagcaatatagcagctgctctttaatgcattttttatgtctccaagtaattctttcatgatga

SEQ ID NO: 256455 - DNA, 460 bp, Homo sapiens
atcagcaaatagtctttttgttgttgttgttatgtgtgtgtcagagccactacatttaggttgtagacattatatacccttggcaatgatttagctcttgaatgtttgtgttagcctaagtataaatagatcttttaaatagatcaattataaaccatagatcaattataaactatggagctaaacaaaatattaataaaagtttatctgaaacttttttgtttatttcagagcacattattagaatattatttgcaagaaatgcagacctaagcttatatgtgaacttatttctcagcttttctatgcctccatttggggatttgagggctttcttctccataagaaaaaaatttctctccagtttctaccataattaattgtgttttccagaatgaggtattatttaaggcagacactgcccctctcaaaaaaaaatcagttttcatttgcatagtga

SEQ ID NO: 256456 - DNA, 366 bp, Homo sapiens
caggtgctttcaagtttggcctcaactctctctttccctttggattttatctgcttcttctctgataaaagaattcttcagtgaaaaagtctgggccaggtgctgtggctcctgtaatcccaacactttgggaggccaaagcgggcggatcacaaggtcaagagatcaagtctatcctggtgaacacggtaaaaccccatctctaaaaaaatacaaaaattagctgagcgtggtggtgcgtgcctataatcccagctactcgggaggctgaggcagagaatagcttgaacctgggaggcggaggttgcagtgagctgagatcgtgccactgcattccagcctggtgacagagtgagactatctcaa

SEQ ID NO: 256457 - DNA, 142 bp, Homo sapiens
ggggaggaggaaatccccagtgaggctgaaagccagccacactgggcccgccacacacgctggctctcacacagggcgggccagctccaaagtcaccagggagccgggaagcactgctccaaatcatgtgctattttttact

SEQ ID NO: 256458 - DNA, 278 bp, Homo sapiens
cattactctcatgagctggaattgagtgcctgtggcttttccaggagcagagtggaagttgtcagtggatctactgttttggagtctggaggatggcggccctcttctcatagcttcactatgcagtgtcccagtgggaactctgtgtgggggcttcaacccctctgcacttccctagtagaggttctgcataatggctctgcccctgtagcagccttctgcctggacaatagggatttttcatacatcctctgaaacctaggtggaggattccaagc

SEQ ID NO: 256459 - DNA, 401 bp, Homo sapiens
aataaaaccggagatattacaactgataccatgtaaatacaaaacatcactcaaggctactatgaacatctttacatgcacaaaccaggaaatctggagggtatggataaatttctgatagtatacaaccctcctagattaaatcaggaaaaatagaaaccaacagaccaataataagcaatgaaatttgatccataattttaaaaattgccaacaacaaaggaggaagtccaggaccagacggattcacagctgaatgctatcagacattcaaagaagaactggtaccaatccgactgaaactattccaaaacatagattaaaaaaaaaggaatcctccctaaatcactctatgaagccagtatcactctaacaccaaaaccaggaaaggacataacaaa

SEQ ID NO: 256460 - DNA, 708 bp, Homo sapiens
  misc_feature (9)..(9): n is a, c, g, or t
  misc_feature (67)..(68): n is a, c, g, or t
tagtggatncccccgggcgtgtcaggaattcgtgttacgagaatttttgtatatgggattgtgttcnnctgatttggcttctttgggcttgatcttgtgtgttggtgaaatagcgaactgcttagttgtttatcagcttaaggagcttttgggccaagactgtggggttttctatagcaggctaatttatgctagaaaattttaggtaatttcttatattttaggtaattttccctgtattttacctaatattttgggtaatttcataaattttaggtaatttcttataacagggtaatttttgctagaaaaaatgttggtcctgatttttaaaatacacatccacacccaggtatatttacataaaaaatcaaataagaagtataccaaaacatcaactgtgagattatctctgggtggaaagatagcagttgattttttaaatgttactttaaatattttcttaggatttccagaactttctacaataagtatgttacctcatttacaattagaaaaataatacatattttaaaataagttccatcatataataccatcttcaaagaaaccaaagtgaaaaagagttaaaccggtttttagggggaagggctatttccaccttcccgaggggccatgtgggtagaaggcaaattaaaacctgaaagtttagccaatcagtttgtcttatgggccctagatggggga

SEQ ID NO: 256461 - DNA, 695 bp, Homo sapiens
aattatgaatgggattgtgttcctgatttggctcttggcttgactgttgttggtgaataggaatgctagtgatttttgcacattgattttatatcctgagactttgctgaagttgtttatcagcttaaggagcttttgggccaagactgtggggttttctatagcaggctaatttatgctagaaaattttaggtaatttcttatattttaggtaattttccctgtattttacctaatattttgggtaatttcataaattttaggtaatttcttataacagggtaatttttgctagaaaaaatgttggtcctgatttttaaaatacacatccacacccaggtatatttacataaaaaatcaaataagaagtataccaaaacatcaactgtgagattatctctgggtggaaagatagcagttgattttttaaatgttactttaaatattttcttaggatttccagaactttctacaataagtatgttacctcatttacaattagaaaaataatacatattttaaaataagttccatcatataataccatcttcaaagaaaccaaagtgaaaaagagttaaaccggtttttagggggaagggctatttccaccttcccgaggggccatgtgggtagaaggcaaattaaaacctgaaagtttagccaatcagtttgtcttatgggccctagatggggga

SEQ ID NO: 256462 - DNA, 288 bp, Homo sapiens
aatttttgtagtttttgtagagatggggttgcaccatatttcccacactggtcttgagctgctggcctcaagcaatccatctaccttgggccttcaaaatgctgcgattacaagtgtgagccactatggctggcctatttttacatggtatttttaatgtccttttatttttaatctttttatgttcttatgctttaggaatatatctttgtaaatagcattaattcaatattatttacctttttaaagtcagacataagtaaaataaaatttccaattgaaaatata

SEQ ID NO: 256463 - DNA, 260 bp, Homo sapiens
aacaagatggaccgaccatcaacaagagtactgtttaatatatattcaaaagagatcgagaatgaatgagcagaagactcccatcagctgttccaatggaaaatcacgacctctcagtttccagacttatactagctctaagaccttgaacatatcaactaaaggagaaacaagatcttcatgaggaaggatcctgaaacaccacatgtattagtctgttttcacactgctgataaagacataccagggctgggaagaaa

SEQ ID NO: 256464 - DNA, 446 bp, Homo sapiens
aagtgccaactccaacatgaacgagagccgtctgcctgcctgggtctctggccccaggctcccttcaccccacgagcaccacttctcttccctggccccttggacccagactgcctgccgctggctctcccccatgactcagttcttgttccaactcagagagcccctgggatttgtccacactaaaagctgagctccggctcgtacaatccgtgcagggactaaggagtggcagggatgtttgtgtgctgtttctggaaagaggatgagaaggtgatgtcaaaggtaggggaagaagaaaaaaggcaaaagaagaaaaataaaaggaaaggaagaaggaggagaaccacagggtagaaatgtgggaattgtgttctattattttttgacttcttaagcttgtccaagtgaagccaagcaaagaacataaagcactgtcatgttcc

SEQ ID NO: 256465 - DNA, 265 bp, Homo sapiens
gctttttatctgcttaccaattcagttattcaacaaatatctattgagttcttactatgtaccaggcactggtatcagcagttaaccaaagagagaaaactccttgtcttcatggagccagcattctggaacgtcaggttgcagatgcaatccagagacaccattcactcagctctaaaagatgattctagaaggaaagggagacaggaaaaggaaaaaagtacaaaataaatattttatcagatgttgataattgatacagaag

SEQ ID NO: 256466 - DNA, 331 bp, Homo sapiens
attacccagaagaatgtattatcaagtatatttctatttgcattgagttctaacaaatgattactgttgcagggaaaatgtgactggcacatcagagactttatctcttgtcaccattatcatttcccaagtcctcacctagaatcaaaaagctcacaaaatccaccaaatctgcatacaccatgtctttctttcgtcacatctgtaactatttccctgcatccgctggagataggtaactacgacaaaatgaagtcctacaacaaagtctaagggcaaacatttagaaaactaatagtgaataacaaaatatgcactgaatgtggtcgag

SEQ ID NO: 256467 - DNA, 437 bp, Homo sapiens
ccatccgaggtgccagacatcttaagtgaaggaaccatcttggacatccctaccctaatggaagcccatcaagcagaagaaccagccagctgaacccagtcctgattgcaaaatcaagagaaaaaatatactgccactgctttaacccacaaagttttgggggtggcatgttttattgcaatagataacatccacacgaaaactcaaaaccaacccatggctcccatctcacccacagcaaaacgaaacgtttttatcagagcagtagggccctgaatgcctcccattcctgcattgttcttttgactctccaatgggccaagctcccctaagtgccttagtacttactgcacactgtaccttgtctccccatgtcttgcccctcagttccttctgctctctgctcctgtgtcaccttctcactgagatcctctttg

SEQ ID NO: 256468 - DNA, 470 bp, Homo sapiens
gcaatctcgagaaagactcttagttagcttttgctgataatatataccaccattagatgcaatggggaagaccaaggcaaaagtttgtgtagaggaaaaatcaaaagctctgtttgggtcattttaggttagaattattgacagacatgtggagatgtcaagcaggtagcgggatatgcaaaagtctaaaggtcagaggaagtcagggatgaagatatatgaagatatgaatttggaagtcatccaaatatcgatttcagtgactatgccctcagtgcgtcatttgagaaccaatgccttagagaataatgacagagattcagcctttaaggggcccctggggaggaggcaaccttttatagaaagaggtgtgaatcattgccccaaaatatctcctgttaagctctccctatttctgaaggtacagcctttaaaagataacccattttcaccacccgggaaatgaggag

SEQ ID NO: 256469 - DNA, 455 bp, Homo sapiens
tcttggaagaggcaacagagcagtggactagtgtcaaatcatccatttgcttgtgttacctgagtgcaattcatcctttgaagagtgtaattctcctagtccttcctcatgcccatctgaatcatagaatattctgactatatttgtgtccctagggatagagaaagagccccaggctaggagtccaaatacttgtgctccaggcccagttatcagagtactttattaccttgactaaacccttaatttcttagtgtctccattgatgcatctgcaaatgagcaatttgaattcaatgatctctaagatgcgtttgagttccaatattttacttttctctccttgcctaatgctatttaccaaaatctccaagttcaccattcagtgagatctatttcaaaatggcttgagtccctcctggatacttataagcacatagcatttggcattagaaa

SEQ ID NO: 256470 - DNA, 1036 bp, Homo sapiens
atcactatctggtgcaatgtgagtggctaccagggaccttctgaacagaatttccagtggtccatttacctgccttcgtcgccagagcgagaggtgcagatcgtcagcaccatggactcttccttcccctatgccatctacacccagcgcgtccgcggagggaagatcttcatagaaagagtccaggggaacccaaccctattgcacatcacagatcttcaggcccgggatgccggggaatatgaatgccacacacccagcaccgagaagcaatactttgggagttacagtgcaaagatgaacctagtgggtaaggagaagctgtcttcacgttgccagcgtctggcctgactcagttctttagtagtgtaattttgctttatgccatgcatttgactttgaaaaaaatcccaaaactcccagcatattttaggggtcaacagatagcacaaggaaactaaatttctgtgttcacttctaaataataggtggttgagggtgaaactttaaaaagatctaatgcagatgttaagaatttcgtaagttaactaaccctgtaactggtgaaaagggatatgaaaatataaggcaaggacgtttgtggttgatgatctgaatgacaaggaagatgagacgtatgacatcagttgggagagaggagaaacctctcggaaggataggcctttgggtagctctgagacccacggggcactgctgaagcaggaagcacatgtggctgcgggtccttgctcagaccttgtacattgaaggtcctttggctccatgcgtaaggaactatgaactggctgtctcccttgttgctccttaatgctgaaggaaacatgaggaagagggatgcaggagcttccagtgtgggcagcactggtcacagtgtttgccagtgtcaaagggttaaccatatcaaggctgttctgtttttctgcctatattaatgtccagtttttattatcacaactaagcagtgggtgttgctagttcttttattaatacacatactatcatttgtttatttttc

SEQ ID NO: 256471 - DNA, 452 bp, Homo sapiens
atacttgctagctccagactttcgtattagacttaatctgagagtatataatttttcctatgagttctttggtatgactgccatctatactgcagcttctttttactatcatcctctttttcagtgtcccatgttcttttttggtttaataaaaagtagctagtggctgggcgcaatggcccacacccataatcccagcactttgggaggccaaggcacgcaggatcccttaagcccaggaattggagactagcctgggcaacatggcgaaaccccatctcgacaaaaaatagcaaaattagctgggtgtggtggcacgtgcttgtagtttcagctacttgggaggctgaggtgggagatctcttgaacccgggaggttaagagtgcagtaagtcatgatcacacacactgcactccagcatgggcaacaaggtgaaaccctgtctcaagag

SEQ ID NO: 256472 - DNA, 1004 bp, Homo sapiens
ggtctcactctttcactctggctggagtgcagtggtatcatctcagctcactgcaacctctgcctcccgagttcaagtgatccttccacctcagcctcccaagtagctgggaccacaggtgtgtgccaccatgcctgggtaattttttgtattttttgtagacctgggtttttgccatgttgcccaggctggcttgaacttctggcctcaagcagtctgcccaccttgacctcccaaagttctgggattacaggcgtgagacaccatgcccggctgtatataacaattataaatacctatgcatgcaacaccagagctcccaggtatataaggaaaacattaatagatctaaaaggagagttagactgcaatacaataatagtaggagattttaacaccccactctcagtaattgacacatcatccagacagaaagtcaacagagaaacgatggaattaaactacatgctagatctaataagcctaactgatatttactgaacatgtaacccaactgctacagaatgcacattcttttcatcagcacgtgggacataagaatagaccatatcttaggccacaaacaaatctgaacaaatttttaaaaaatataaatcatatcaagtatcttttctaatcacagtggaataaaactagaaagcaataacaagaaaaaccttggaaactacacaaacgcgtggaaattaaatagcatgcttctgaacaactaatttgtcagggaagaaattaagaaggaaatgtaaaaatgtcttgaaactaatgaaaatagaaaatgtgacatatcaaaatttgtgggatactgcaaaagcagtactaagaaggaaatttatagcaataaacacctatatcagaaaagtaaaaagacatcaaatgcacaacctaatgatacacctcaaggaactagaaaagcaagaacaaaccaaactgaaattagtagaaggaaacaaataaagattagaacagaaataactgaaattgagacc

SEQ ID NO: 256473 - DNA, 294 bp, Homo sapiens
ggaatgaagaagcgaacatagatttatctgtcagatgcatttaaataaagttatttctctacaatttccttggtcttttgtatactgttataataaactagtaggcagcagaaaattttttttgtgacagagtctcgctctattgtgcgagactgtgtggcacagtctcggctcactgcaacctctgcctcttgggttcaagagaattgcttgggcccaggaggtggaggttgcagtgagctgagatggtgccactgcactccagcctgggtgacagagtaagtccgtctcaaa

SEQ ID NO: 256474 - DNA, 125 bp, Homo sapiens
gccttttctgactggtgatttgtatttttgttttatttatttatttattttttaggttactacctttctgcttgtagaagaatccaagtagttgggtctttttttttttggtttataatgaacag

SEQ ID NO: 256475 - DNA, 176 bp, Homo sapiens
cacagacctaaatgtaagagctaaaactataaaactcagaagaaaatgcagaagttgtcttcatgaccttgagttaagcattggcttcttataaaagattccaaaagcacaagggaaaaacaaatacattggatttctttattgaaattaaaactttttgtgctacaaatgatgcc

SEQ ID NO: 256476 - DNA, 535 bp, Homo sapiens
  misc_feature (425)..(425): n is a, c, g, or t
  misc_feature (428)..(428): n is a, c, g, or t
cgctgctcgcgctgctgggaggctgcggcggcggcggcggcggcggcggcggcggcgccgcggcactgcccgcctgctgcaagcacgatgggcggccccgaggggctggcagggcggcgggcgccgccgagggcaaggtggtgtgcatcatcctggagctcgcgcaggtcctgcccccagatactctgcccaaccgcacggtcaccctgattctgagtaacaataagatatccgagctgcagaatggctcattttctgggttaactctccttgaaagattggacctccgaaacaatcttattagtcgtatagatccaggtgccttttggggactgtcatctctaaaaaggttggatctgacaaacaatcgaataggatgtctgaatgcaaacatatttcgaggactcaccaatctggctcggctnaanctttcggggaatttgttttcttcattacctcaaggaacttttgattatctttcctcattacggtctttggaattccagactgagtatcttttgtgtgactgtaacct

SEQ ID NO: 256477 - DNA, 507 bp, Homo sapiens
aaaagaggaaactgaagcctggtgatatgaagtgaattgtttcaggccagagaaccgacaattgagacatgatatgataccaggtcttccaaagaacatgattatttccacccataaaatgctgccacagctgcaaaaatgatatctaattaggccgccttcctaaatgattgaaagtccaatacatattcctgcatgaaagttcaaattcaaactttaagttgttgttttgttaatggtctaattgctttaattcattttaaggataaaaataattttcacttcctctaacagaagaaaatgtctgtacttgcagaatgtgtccaaatttgtgtgtatctcatgtcaaccaggcttatttggagttgatgtagatttattcaggaaacagcagagtttccaattctagctgctactctttggttctggttgtaagcggctgaatgaagaacaccggggtcatggagatcagattggcttggataattcatgtgaaatttagtggtt

SEQ ID NO: 256478 - DNA, 633 bp, Homo sapiens
aatgacagaaaagaagggacttcctgggaatggatggttaagctaaggccaaaggggaaatgaaacaggccaggtaaagcattgggagggcagctgggaatattctggaagaagggacagcacgggcaaaggacccgggggatgggaacctggcactctggaggaacccagagagaagggtggtgttactaggaaggaagggagacacaagtggccaccagagaggtcagtagccctgggcgacagaacgagactccatctaaaaaaattctggcactggccttagaggagtgggtggttgtggaggggtctaaagcagtattttttttttttttttttgagatggagtcttgctctgtctcccaggctggagtgcggtggcatgatctcggctcactaaagtggtatatttttaaaagcccccctctggttaagagaggttaagaatggaaacccagtgtgcagtcaggaagcaactgcactcgtccaggcaaaagataaaggtggcctggacaaggccgccaggcagtggtgtggagagaagggacaagttagaagtggattttggaggaagaatcaccaggcccaaggtagagccgagagacaaggtagagccgagggggatcctctaaa

SEQ ID NO: 256479 - DNA, 448 bp, Homo sapiens
aatgtttataccaaagggaattataggggagggaagggaagaaaggaaagagaatatttgtgtgtgtcaggggaatgaggggggcattgggagagtaaagatggtggcaaaaggtaacttaggttgccactttttaccacaacacttttctaggctattctcaataagaaaatgtgaattatatatattcaaaatacagataccattttgaattgctttaaatccactcctgcctttaatctcattacatctgtcaaaatatgtctcatttactaagtaaaaagtagaagctggtttccagcacctctttctttattatagcctgatccctgtgcaaatgcattttcctgtggttcatctttgaaagatctctcttctcttgtctggttaacttcctcaatgaccattgatatctttgtgctactttattgtccacttggaaacctga

SEQ ID NO: 256480 - DNA, 649 bp, Homo sapiens
ccaggtggcacttctagtggagccaactggtgagcacgggcccacagtgggtgtgaggcgggacaacgggggcacacttccctcctgcgtgtgtacctcacactgtgctaggatgattatggttctggcatacaaagtcacttatttttcatgcaacctggtccctaaacttaagaaaatgcctttatctggtaatcaactgggaaaaacattggctgaaccccatactttcaagtacttatgagattttcaaaggtggttcttacacactaacttaagagtccccagatggtgagtcccagctgcgccacttcataactaaatgatcttaagtagctaatgacttaaccttgtagagcttccattctcatgggcaaatgaaggataacatctctccctcatgggctcacagtgaggattaaacgaagggaaggtatgcacaacagttagcagactgcttggtacaaagtaagcgctcaataaaccaaagctattatttttagtggtggtaatagcactgcttttctttggcatttaaagctgtgtagctaatctgggcattccaccaggttgctgaagcaatagacggccccttaataaatagcttccagacagcatgtcatttaaaactgaatgcatttttgcttct

SEQ ID NO: 256481 - DNA, 361 bp, Homo sapiens
  misc_feature (298)..(298): n is a, c, g, or t
  misc_feature (343)..(343): n is a, c, g, or t
tgagtagaggaaaactagaaaaagagttgctagtaaattataattatggtttctgctaatcaaataaggacgccgatgcccaagagagcatgccatcttcttcatcatccctcattgccctcaccttgtgtgtccaggtttaaactggaaatatcatttggttaaaattctccctaaaactaaagaagtacacctgcagttctttgcttaaaatagcgatagccagctgggcactgtggctcatgcccgtaatcctagcactttgggaagccgaggtggggttcaccatgttggccangctggtcttgaactcctgacctcatgatctgcccacctcactganaaattcagtggactataa

SEQ ID NO: 256482 - DNA, 450 bp, Homo sapiens
aaaatagaacagtgttacatgtaagaaaagctcctcatcttggccatgttctcactgctatgtaaggcatttgaaggtgaatgatacattcaccgtcaaaatcagaaacagcaggggaggaagagctcccttaaaatccttgagggaatcattcaattcctacttattgccttttttttttccttcccaagtgcccaggagaggtaggacactggccatttatctacatagtgccatgaaactcacaaatattcaatctgctgcctcccctctccttccagatttccacagtggtatagagtgtgagactgactggcttcccattagagccaggagaagggaaaaggaatttccacactggcttaagaaaagtactgtctgatgaagagtcagcttattttattaactgatgaaatggcaaaaagtttataattaaacatactatgtttt

SEQ ID NO: 256483 - DNA, 466 bp, Homo sapiens
tttccttttttttttctttctttttttttagagatagggtcttgctctgtaacccaggctggagtgcagtggcacgatcatagctcactgcagtcttaaactcctaggctaaagctatcctcctacctcagcctcctgggtgctgggactacaggcacacgccgccacgcttgactaactgaatcatttttgccaaatacttaactctcctctcggatctcagttgaatcttcttttaatccctaaaaagtccccccaaggtatctgatatttgtcatgtcatgcctaggctaggcaaaaaatattgtctacatttacgaattgcaatttcaattcatgtcctcaagaccgtttttaaaactcactaatgaagttgcaaatgctaacaccaattgtggttaacctgcttaaaatccagaactttgtgcaagagaaagagattagtgtttaaggaaaatggtgcaaa

SEQ ID NO: 256484 - DNA, 600 bp, Homo sapiens
aatagtacaaccactatggaaaacactctttggcagtttctatccgatacaccgcagcaatcatactcttatacttttatcccagtgaaaactgggatgttcacagaaaaacctctacatgaatattcacagcaggtttatttctaatagccaaaaattgacaacaatccagatgaccttcaacatgaaatgattcaacaaattggtagcacatggatgccatggagtactactcaataaaaatgaacaaattatagctataagcaacaactctggaatcttccaagtaaaaagccaatcccaaaagtcatgtactatatgattccattcattcattcattcattcattcatttatgagactgagtcttgctctgtcacccaggctggagtgcagtggtgtaatctcagctcactgcagccttgacttcctgggatcaagcaatacctccatcttagcctcctgagtagctgagactacaggcacctgacaccatgcccagataatttaagtatatattagtagaggctgggtttcaggttggtttcgaactcctgacctcaggtgatccagccacctcggactcccaaagtgctgggat

SEQ ID NO: 256485 - DNA, 437 bp, Homo sapiens
agtactttagatattctggatacaaatattttgtcaggtatgtgtttagtacattttttctcgtagtctgtggcttgtgtttttatttttttaatggtgttttttgaagggtaaacatttttaatttttgaagttcaatgcatttttttcttttaagatatgtactgtacttttgctcttcaaaagacaccattaaaaaatgcaaagaaatctttgccaaagtcaaggtcaccataatttttttctacaagttttatagttttagtccttatatgtaggtttattgatctattctgagttagtttttgtctgttatgaggtgcagctgaggtatcagctgtatgtacacagtgtatagagaagattatcctttccccattgaatagccttagccctttaaaaaaaattaactggtcatgtatatatgggtctgtttc

SEQ ID NO: 256486 - DNA, 447 bp, Homo sapiens
  misc_feature (12)..(12): n is a, c, g, or t
  misc_feature (26)..(26): n is a, c, g, or t
  misc_feature (35)..(35): n is a, c, g, or t
  misc_feature (47)..(47): n is a, c, g, or t
  misc_feature (66)..(66): n is a, c, g, or t
ttttaggtttgngggggaatgctggnagattgtcnatgggtatgganaacatatcatataaagtantgctcgggtgagtggtaggaagtctaggatcaatgtgccagcaactggcatctggtgaggcccttcttgttgcatcctcacatgacagaagaaagaagggcaaacgagatgaactctgtgtcttcatatggcaggagagcagaagacaacaaatccactccttttttcctcttctttcaaacgaccaagaaagaccataatcaaaaaattaaaaaaagatagatgttggtgtggatgcattgaacagtgaacacttctacactgctgttgggaatgtaaactagtacaaccactatggaaaacagtgtggagattcctcagagaactaaaagtagatctaccattgatccagcaattacactactggatatctatctagag

SEQ ID NO: 256487 - DNA, 295 bp, Homo sapiens
caaattttgctcaaaatgtacttcaaaaaattttcctctttgctctttctctttccagtttttcctcttctttcaaacgaccaagaaagaccataatcaaaaaattaaaaaaagatagatgttggtgtggatgcattgaacagtgaacacttctacactgctgttgggaatgtaaactagtacaaccactatggaaaacagtgtggagattcctcagagaactaaaagtagatctaccattgatccagcaattacactactggatatctatctagaggaaaagaagtcattatgc

SEQ ID NO: 256488 - DNA, 336 bp, Homo sapiens
aggagcatgtcatagctgaaattggccaggtgcggtggctcacacatgtaatcccaatactttgaaaggctgaggcaggcaaatcacctgaggtcaggagttcaagtctggcctggccaacatggtgaaaccccatgctctacataggtagaaattccatcaatgttcatttcctctcttcctagactggtatatgccatttggtcatgtatcatcatattttcatgctgcagggatccattctcaaatgggggcaataactctatcagccccaaatgggcctatatttacctggagcacttgaatcctggaaaacagacataggaaaacctgagt

SEQ ID NO: 256489 - DNA, 337 bp, Homo sapiens
agtagagatggggtttcaccatgttggccaggccagacttgaactcctgacctcaggtgatctgcctgcctcagcctctcaaagtattgggattacatgtgtgagccaccgcacctggccaatttcagctatgacatgctctacataggtagaaattccatcaatgttcatttcctctcttcctagactggtatatgccatttggtcatgtatcatcatattttcatgctgcagggatccattctcaaatgggggcaataactctatcagccccaaatgggcctatatttacctggagcacttgaatcctggaaaacagacataggaaaacctgagt

SEQ ID NO: 256490 - DNA, 485 bp, Homo sapiens
atttttttatttttagtggagacggagtttcaccatgttggccaggctggtctcaaactcctggcatcaagtgatcgacccaactcggcctcacaaagtgctaggatttacacgtgtgagccaccgtgccagccgtgctgtgtaatttttgataaagaagacattgatattagtttagtgaaaataaccaaatcttgaattatgtggtaaaataaacatatatttaatgttaagtttcttacttaggtaaacacctgaaattcacagactataaaatggttgacagggaaataactttaaatgacgactatttgcagttttcataaataggtaaacgattaaaataaaataattagttaaatgtaatggaataaatacttatagacaaacttgtcataatttagaatgtaaagttaaatacatatttcattaaatgtttggatattttccaattaaaaaattatattgtaggaaaacattgtttc

SEQ ID NO: 256491 - DNA, 489 bp, Homo sapiens
tcatttgtcaaacccacagaatgtacaacaccaagactgagcctaatgtaaactattgcctttgggtgataatgatatgtcgaagtaggttcattgattgtagtacatgtactactctggtgtgggatattgacagtaggggaggtgttggggagataaatgagtaatgacatgcatctaccattataatattatagagagtagtttcagtgccctaaagatctccgtgttctacctattcatttcccatccccactagcccttggcaatcactgggctttttgctgtgtccttgcatttaccttttccagaactacattttaataatacatttcccgtggagtgctttgaaagcataaagaagccttgagccaggcatggtggctcatgcctctaatcccagtgctttgggaggccaaagtaggaagattggttatgcccaggagtttgagaccagcctggaaaacatagtgagactccgtctctaca

SEQ ID NO: 256492 - DNA, 503 bp, Homo sapiens
gaggccaggagtttgagactagtctggccaacatggtgaaaccccatcttactaaaaatacaaaaattagctaggtgtggtggcgggcatctgtaatcccagctacttgggaggctgaggcaggagaatcacctgaacctaggaggcggtggttgcagtgagctgacaccacaccactgctctccagtctgggcaacagagtgagactccatctcaaaaagaaaaaaagagaaaattatggaatatgtcctaaatatctgtagaaactgatcttttcatgctattagcatctttttttgccctttgatcttattggtcattgagaaatacttgtatccctttcttacaagtatgaagattattaaaaataccgaatatataagatgaataaatccaattgtccaattcacacctttaaaacattaggaccaaacttttttatcttgcagaaacactaagaatttgtttcattgtttattttcgacagtgtttctccttgacaa

SEQ ID NO: 256493 - DNA, 393 bp, Homo sapiens
ggacggcagtgcttctaagactgtgtcgggggcttccatcactttctctttcagcattttccccccacaaagctgggaccaagagggcggttttggtgaaagaagacatccatggctcactcagctcctcccagtcttcatagtcacaactgtgcggttcaccttaagggcatacgctttgggatgttttagccccaggacacttacttaggatgataatggttattcctagaaacaggtgaatgagaacttagggacactaaaaggcattttcaaactcatccatgaatgttttcagggactcatgtcagggttctaaatgtttgctgccgagatggaaaacgtcaggcttgtttctgataatacgaagattcttattaatagtgaaaccga

SEQ ID NO: 256494 - DNA, 457 bp, Homo sapiens
atttttgtagttaatataatttcagtggaatgcatatttctaccataaatgcatatagaacttgtttgctgacctactgtttggaaaacaaacaatcccattagaagaatgtctttgggatttatttttaccagaaaatcaatccttttttcagtcccttgcaaagtacagtgttacaagccaagactttgataatcaggtagaaaatggatttaaattgcagaaatgtatatgaaacacttttgttccttgccccttgaactttaggggaatgaaaatgtctagcactctccaccttcttttctctcctggaacttgaactgtaattcaaagcctgtttctcattaaagtacctggcagcctatctctttacagcttgagttacaaagctattcagagacctcgctggtctaaagagacagaacaaggatgtgtttaaatagagcataggctgttg

SEQ ID NO: 256495 - DNA, 369 bp, Homo sapiens
tgttcggcacaggatcttttgtttgtaaaaaaagaagttatgtggagctcttcgatttctagatgtgattgtacttttctctttttaggcacctgaaagtcagaaaaatgacttcttgagctagattgtaccagatactatgttgagcatttctactgagtgagaaaggccatatctaggaatataaagtaaactttgtaacagaggaaatgaatcaacagttttgactttgctactatcatgtgggaaaagctccactatatcttaattctaatacaggttaaagtgagttaaaattattgcactcaagtccaaaaaattaaacagttactaagatcagataaaggttttaggacttgattagatctg

SEQ ID NO: 256496 - DNA, 442 bp, Homo sapiens
gggagctaacaaatgagtacacatggacataaagatgtaaatgatagaaactgaggattctgaaaagggggagtatgggaggagcatgagggttgaaaaattacctattgggtacaatgttcactctttgggtgattggtatactagaaacccaaacctcaccattatgcattatatccacttaacaaacatgcacatatatcccctgaatctaaaatttaaaaagataaaaattaaaaatacattaactgaaggtggctaagaaaatggtttgtgaatatgtaatatataacagagcagctggtccaatctcatatcccttcttttccctttttttttgagacagtcttgttctgtggcccaggctggaattcggtggcttgatctcagctcactgcaacctccgcctgggtgacagagtgagactccgatctccaaaaca

SEQ ID NO: 256497 - DNA, 523 bp, Homo sapiens
atgatatgattagatacattctacatactctggatttagtgtggagaatgtctggaggatcctctgaatagcagcaaggagtttgcttattatttttttgttgaatgtaaagataaccagtggtgaaagtcatggcagcattactgaagaacaaagtcagagccagtgagtgtaagagcctgtgtgtcaggaagtctcccgttttcaggctcgtgctcaggttgatggccctgggaatcactggctccttgttgtgtttcagaccctctagtaacaatcccaaatgtccagggggctgaaaggcatatcgctacaataaatgaaagacttcattaaataggatagtttctccctcccaagggagcaaggggcatcagagtgtgaagtcaagttactcattctcaataagcacagaagtccctatctgttcatacacaaagggtgtaattttacagcaagtttccatctgctcccataatgcttactgttgtgtggcacacctgtgtttacttttcaactggct

SEQ ID NO: 256498 - DNA, 409 bp, Homo sapiens
gtgcacaccaccatgtccgactaattttttgtatttttagtagagacagggtttcaccatgttggtcaagctggtattgaactcctgaccttaggtgatccacccacctcggcctcccaaagtgctaggattacaggcttgagccaccgtgcctagccaacatgttgatttttaatggttagcaattcaagttttattaaatcattctggagatgaaagtatattcctggaacaaataaagcccatcaacaagagccaacctgtaactgctgatttagagttactctatttagtcatttctaggtggagacctatatttttagccccagagactttcttccttctaaggtgggacaggaaaaccacgtgaaaggcgacatgctatcagaggcccagagaatctggagat

SEQ ID NO: 256499 - DNA, 910 bp, Homo sapiens
  misc_feature (412)..(412): n is a, c, g, or t
  misc_feature (419)..(419): n is a, c, g, or t
  misc_feature (508)..(508): n is a, c, g, or t
  misc_feature (756)..(756): n is a, c, g, or t
  misc_feature (903)..(903): n is a, c, g, or t
gggaggaacggccaagccctggggccatgaatggcagcaggaggcatggagggcctgaagactgagggccgggctgccagtcccggaccagagtggggaatacttctgcctcttccgggcctgccccttcctgcccatgggccaatccacaggcacttcctcccttctgaggcctgtaaaagtcctgggcttagtcagacaaaggcagaggaccaccagaagttaagggaggcagagagagatgtctttggcagggacgaccagctgcagagagcagtaccttctctgctgatagctgggatgaccagctgcagagaggagtattcgaagagtacccactctgctgagaactgcagagacgatctgccagcagagaggagctaccctctctgatgagaacttcagagacctncagagangtaaaaatgacttgcctgcagagaagagccaccctctccggcctcctctgctaagagccgaacactcaactggacgacctgcctacagngaggagctacccagctctctgagctgttgtaacactaaataaaactcttcttgtggccggttgcgagggctcacgcctgtaatcccaggactttgggaagctgaggtgggtggatcacctgaggtcaggagttcaagaccagcctgaccaacatgatgaaacccggtctctactaaaaacacaaaaattatctgggcgtggtggcacaggccacatgtattatatacatgtgtgtgtgtgtgtttgtntatatatatatatatatatacagctgcaatcccagccacttgggaggctgagtcaggaaaattggttgaacttgggaggcgcaggttgtggtgagctgagatacaggtactgcactccaggctgggtggcagagtgagactctgacngaaaaaa

SEQ ID NO: 256500 - DNA, 641 bp, Homo sapiens
ggctaaagcaggataattgcttgaaccctgggaagtggaggttgcagtgagccgagatagcgccactgcactccagcctgggtgatggagcgagacttcatctctggttcaaaaggtattttagcttttagaattctgggagatagatcttcacagctattttaacttgcaaagcagcctgaggggatggggcaggtcccttctccccctccaactccccaccatcagaataccccatggctgcccagttggttcccaggtcagtctgagatccaaacaaaaggggaggaagcaacctcaggacgtttcccgtcaccctgtttcccatcacccccagctccgggaagtccccacgtggcaaccagttcccttgccaggctggcttcggatgccaccatccctgggagggggttgtggaggaaagaagggtggttgagggcccagctgggttctggcctctgtcccaccatgaggggccaatttccctttgtgtaggggacggcttcttgcctgctctgcctgcctgcctgtaggcctggcaactcagcagagggtcggatccacggttcagaatccccacctcctcacccacccaaggctctgttccagttcctcttctgtctggggtctctgaggcccct

SEQ ID NO: 256501 - DNA, 405 bp, Homo sapiens
caacccaattagctccatgagggccttgaaaagcacagaatgacttcctttaaggaaaaacagtgctattttagaaaactttaacagtgtgatggtcacagaaaataccatgatcttaaggtttgttctttcagatacatcctatggtctcaccgagaggacaaaaatatcagggaaataaaaaagacatagtacaaaagtaaagaaagggggagaacagaaattgaagcactgaaagaagattggatctggcaactgagactttatgttgggggaggaagaaactggtagagagagggctaaagaggtgaagcagcagctcctcgctggccggggtggaaaggaggcttgactgccacagatataggtggcgactaatgggctcaaggctcagtgctccacagt

SEQ ID NO: 256502 - DNA, 342 bp, Homo sapiens
ataattacaattagtttttcctgtctaaatgactaaaaggaaaagttcaaacaataaatgaattactgagactgtttcttgcctgcccctgttctggacgtgaccaattttagcctcaaagaattttgtgatccccaagggtctaggaagaagaaaagagctcaaggaattaaagtgttcagagatgaggagaatagacttgaaataagtagtgtaccaattaatggcagatctttactaaccagactgcaaacaatagatatttttgaaatgtcacaaaattaaagttacgaagtctatagaaaacaaattaaacaatggcacattggtaagaaccatata

SEQ ID NO: 256503 - DNA, 489 bp, Homo sapiens
accctccccaccttcctgtgtcctttgcatgaatcatgctgtggacgagctgagcccccgggcttctcctggttctagttctcgcttttccccgcagtttcctgaacctgtaagcatccccttcctcttttttaccctcactgcagttccagtgtagttcacatgctggccccagcaagactgcttggtgactttcttgtcccttgtttggattgaatatcgatcacgcgttttccttccccaatagtatgatttgcatgcagaattcatgtctggcccttcacagggctgcccctaatggccatgaccccagcgttaagcaattacaagtgccggtgagttttgagtttaatttcttaagaatttttagttttttaaaataaaaccgtattttaaaagcatgaaacagatttttaaatgtctaccaattttgagtttagaaaagttgccgccaataaaatggaacagaaaaaaatcaattgtattcct

SEQ ID NO: 256504 - DNA, 334 bp, Homo sapiens
acatttgcagactgaacaacaacaatctgccttggcaatgtttgacagtaaaaatcgctcacacacctatacagtaaagtcaagtccagaggaaggagacctttctcatctcgttaaaggtttatggttccaaggcgttttacaaaaattaagtctctaatttagtgcaaaactttaaagacagattattaaattatttgaagacatcataagctaaatggggtttcgagaatattaacagaggagtacaaataagccattcacaggaaaagaatgcagcttaactgtttgtttttgtttttttgtttttaatatagccgccttaaccccttcc

SEQ ID NO: 256505 - DNA, 686 bp, Homo sapiens
gtagaagaagatacaactcttgtcctgatctaactttgtagatgcactgccaacttaactgtatagaaattgtattaacaaattctatctcttcgcagaagaatcactgccatttctaaaacaaatttagaatatttccagaagtatcatcctaataaccccacgtaataataaaataataatcccaggtaatcattttttacagtgttcaaaaatcatttttactacttgtaggtgttttcttgtaaaaagaaaaaaatttttaaggtgatttttacccttgaattttggagctaatagccatctgagttttctaattgcaaagtgacaagtctattcaatatctgtaaatagaaattaatattttcaggaaagcaaccctgatttttttattaaagcatcttttatcatttacagttaatttcagctataaaagtgtgaccccaatgaactatagcagttccaaaataattgttgtaggtggtactttagagagaaagagagaaggaaaaagaatactacttcttattaggaataccttattagaattttttgttgaatcgcttttcaatcacataaaataagctgcacatataattgtagtcatagttgaggagttagacataaatggaagattctacatttcacaaacataaagctattctttaaaatctatttcaatacaa

SEQ ID NO: 256506 - DNA, 501 bp, Homo sapiens
atagtaataaatgcagtaaatatctcagaaatcaaacgaaaaaatgtttccaacaataggcagtgattatgattaatttattcaaatgctgctgagagcaagaataactgaatattctatttggtggtgtaggggttattggtgacattgagtggagcagaatagtatcgacaaagtcttgattgaagtggattttaagagagagagagagaattcatttctaaacaactctttcaaggtctacagaggaattctacttgagggtgctgccttgcacctctaatcctagctcctgtcgcctctggaaaactctgaatttttttcttttttggagaacaatcctcataattttcaactagaagaagtcagttggtctcctttgattttttcttcgtaggtatctctgtggatttccaggaaaaaaattttgctatctccaacactagtcttccatctagatgctatctccaaaggttctttcactttttatagatattattt

SEQ ID NO: 256507 - DNA, 462 bp, Homo sapiens
ctgagaaatttggttttctaaactgcatgttttaaaattcttgtccttcttaggcattattttgttgttcttggatttttttagattactaaatcattgggctataaataatgataatcttaacatttgtttttttcttagctatccatctatattcagttcttttacaaatgtccaggtctggtcccctggacataaataggggccctaactagctaactccaaaggtgtggggaaaacaaagttgtttgtgaactttgttctgacagcagaggaaaagaagcagacacttctccatggagcctcctaactcagtgctacatgcagtgttaggccaatagggatcaattaccccctgggaggagattttccctggcttccttcctggtgactagcatcttattatgaggacctcactttagcctattgtctttagaaagattaaaagctgcagcttcaaaa

SEQ ID NO: 256508 - DNA, 555 bp, Homo sapiens
gcaacctccttgaaacccatttcttttcatactccagagaaattatgtttgaaacaacagaggtggtagaactttgcaaaaagtgaaaatccattgatcttttaaagatccagaaagcaatgtttcttaaaatacagatcaatagcataagaccatattttaatattgtcatgtttacccactcatactatttataccttagtatgtgctattaggagtgaagaaaagcaaatagtcaaacttgtctaaagagaaatgacaatagattccggaatagcagtaaaaacaattaagattagtagctgatacaaatgaaaacatcttaggttacttaagaagggttcttttatataatcaaaggtagtaagaagagatggaattaagactccaaacagaaacaaattaggggaagcatgaaaaaaatggagcaagaatagttttgaatacataaagaggaggaagacataggagttcaacatgcctgttgagagagaactcaagtaaattttcataaaagtgggagaaatggcttgagaaatgaaattacttttttgt

SEQ ID NO: 256509 - DNA, 454 bp, Homo sapiens
ctctcgcggcactcacagttgaagagggggggcaaatgttaatcaaaggtaccacctctaggcccaattattaacttaggctatgacctagagaaaagggccccaattctccagaaagttgtaagatatgttcttgacatagattggaggtttggagagttttccatgacctagggatgctgtgctgagatctgccagggactaagcatttcatagaggctcccataaaggccctgcctgggtcaagggggaacataccatgttagaagggtcactatggctgaatttcagggagcaagtggggagtgtggcacaatgagactagagatgtaggctgtgataagaagacagagactggcaggtcatcttaaggatttgggggttttagtcaaagactgataggagatgattaaagcctttaaatgcattaaagcagaacaaaaagacatttaaa

SEQ ID NO: 256510 - DNA, 685 bp, Homo sapiens
cttgaatccagttgcccttttttttttattgtttctaaataagagagtcagcattttgataggcttaaatgaaacgtatgatttatgccttgacaacctggacaagagagcagagtttgagttaatctttgcatgtcagtcagtgcttcatcgctagtatattcccaatgactggtggttgaattgtatttaaaggtgttgaaagggaggtggaaaggccattaaaagacatactccaacagttctactatttttttccctgagtctacaaaccatgccagatccttaacaaaggtaggtattcttggaatttcatgaatggcaccatttgaaaagcagagtgtttagtaaatattgaaaaataataatgagataatttgtgtatttcccaccatctgggagttttcacactagtattcagctttcaggctcttattcatgctcttctatttaattatgctctttgtatgaacataaataattcttttcactgaagcaaattcttaaatattctcattctttatttttaatcttaaaaattaaaataggaattatataatttcatattcttgaagttattccttctccttttactttcaaatcattttattttatattaattactttgggggattaatgctaattatttgattccatgttagtaaatgataagatataatcacag

SEQ ID NO: 256511 - DNA, 709 bp, Homo sapiens
atgtgaaggcttgtaatgggattggaggagccatgcataaagctatcctaatggctcaagcaatgactggggttgctttaggaggacaagttagaacatttggggggaaatgttataattgtggccaaattggtcgtctaaaaaagaattccccggctggctcagtcagtggatcatgagactcttaatctcagggtcgtgggttcacgccccacactgggcgccaggtgaaggaggcctgccgctccacacctatggatatttctcgtcaggtggagatgagactgataaaagaaataagacacagagacaaagtatatagaaaacagtgggcccaggagatgggcactctatgtgcgaggacccgcactggcgctggtctctgagttccctcagtatttattgatgactatttttactatcttggcaaggggagtgtggcagggcaacagggtgatggtggggagaaggtcagcagggaaacatgtgagcaaaggaatctgtatcatgaagaagttcaaggaaaggtactgtgtctggatgtgcatgtaggccagatttgtgtttcacttcacacaaacatctcagtgtagcaaagagtaacagagcagtattgctgccagcgtatcttgcctccagccacagggtggttttctcctatctcagaatagaacgaatggtcggctttacactgacagggtaccgagtt

SEQ ID NO: 256512 - DNA, 408 bp, Homo sapiens
gtgatcatagggtaggaagggggatgtagagagatgagccaggagagggaagtgggctctaattatatgggacctaatagaccatgtcaggaattgggactttatctaaggagtaatagaaggctggacatggtggctcacatgtgtaatcccagcactttaagaggctgaggtgggagtattgcttgaagttaggtgttcaggaccagccagggcaacatagcaagacccagtctctaacaaaaaaaaatttttaattagctgggtgtggtggtacacactggtagtcccagctacttgagaggttgtgctaggaggattgctcgagcccaggttattgaggatgcagtgagctatgatcatgccacagcactccagcctgggtgacagaatgaaaccatgtcttta

SEQ ID NO: 256513 - DNA, 642 bp, Homo sapiens
aggagtaaaacacaccagaggaaggtgatgtgggtttatacttgggaacaacattaccttgccatcttagggccagaggcattaatcatggcttccccaatgcataatttcgatgttggcatttccttccccattcctttcagaatcctaccctgtcaggtattatctctgatgaaatattccctgggccaggcacagtggctcatgcctgtaatcccagcactatgggaggccaaggtgggtggatcacctgaggtcaggagttcaagaccagcctggccaacgtggcaaaaccctgtctctactgaaaaaaaaatacaaaaattagccgggcatggtggcagttgactgaaatcttagatactcgggaggctgaggcagggagaattgcttgaacctgggaggcggaagttgcagtgagccgagatcactgccattgtactccagcctaggcgacacagcgagactctgtctcgggggggaaaaaaaagttcatatcaatttctaatattctataattattgtttttggtcacatatactttttccatgtattgaggtgaacagattggtcttattctgtgttaagttatattgattgattcaaattataaataaacctttcattcctgttataaaccca

SEQ ID NO: 256514 - DNA, 670 bp, Homo sapiens
gatttaagcctgatcagtctaactaaaaaaccagagctctttactcttgtttacacttagatatgccgctcccctttattcagtaggaaggggacaaataggaagaaagaaaagattttattaattttgaaaacttaccaattcatgtgacacagggtgtggattagctctgcctttagggattccccccacctccccccgccccatggcgttagggggttataatggtttacggtccctctctctccatcttagcccttctttctgtacttttccctctttccctcctcaacagtcagctttatctcacagagcagactctcgtcccaaacttggtttgttatcccttgtggtgctggcttgaatttattttctgggtgaggtattcctcccagggctgaatctggatcttccccatgaattttccattcgaatatcgtgagctagtttgttttccagtctggaatttggacgtggtctgttagagggccagctggacagcgagcagctcagcgtagttgctgtgacagccctttcttttcttggccagcccccatatttttccctcaaccatggaaaggcatttttttattttttcaagcagggaaaggagaaggaatagatcacacccaccaactcctcctaggttactacatactctaggaaacgt

SEQ ID NO: 256515 - DNA, 588 bp, Homo sapiens
cttttcatgtcatgcctcactgatagaactcttgaactttttttctgaatagcccatctgtttatttcccatgattgtgatttctcaaggtcatggttagtccaaaggtccccaagaatgaacaagtaagacggtaatgctgtatgtcaggacccaggcaggacaggaatatctctgagaagccataagcttctgctcagttttaaatcttgatgggaaaacattcagaatagggaaattcaacatatttgccccaaggtaaggatgaaagccttgcttcagtactccagcggatgtctgggttccctgcagatttcccttgggtggtttggcactgccccctcactcctagtagcagatcttttgcctgtggtgggcgcgtcaggctgaagttatatctggtgctggctccgctgtcctccagcaggactggaggtgtggtaggctgcatcgcagcttccctgagtcatttcccagcctacagtagtggcttctaatgccttccagttgtcctgacaggaatggaggaattttatcaaatcgaagtttgtgagtaggtttttttttttttgagacggagtctcgctc

SEQ ID NO: 256516 - DNA, 478 bp, Homo sapiens
aattcttgcactatatgtatggtgagagaggtttcctgctttcaaggccaatgacagtgagtgttcaacttaagagttaagaacaagaagacaacaataagacagatgtcccaagaaggcatatgactcacaagttcagtggaaacatcgtaggaggtgaggcttgcaggatgtgataagatatggaaagttgaagaagggggtggacgggaaatgtttgagcagaggtgtataggaaagaatgtatgcagtactgaaatcattgcggatgaaacgatacatccaggatttgcttcaagacacctggcatgggtgtgatatgaattgatcattgttggagctgggtaaatggtatatgggggacccttataatattattcatacttctatatacattagaaaatttccatagtaagaattttttttaataaaaatggtatattatgtgttttttgaacaataggttaggctagcctat

SEQ ID NO: 256517 - DNA, 698 bp, Homo sapiens
tcagaaatgcccttctgcttttgtttccgtggaagaagttggcctggaactctctctgggcaccttctgcgccctctggcaaccagaaaagcaaagtcgttcatcaaaatctcagactggagcaactccttcagcttccacagttcttgcacatactcctttcttgatttgttgcatatcatttcaggcacctcttttaatgcagctattcaggctgcctaaggcagtggtccccaacctttttagcaccagggaccagttttgtggaagatagttcttccaccgatggggtgggggtggtggtttggagatgattcaagcacattacatttattgtgcactttatttctgttattattatattgtaatatataatgaaataattatataactcacaataatgtagaatcagtgggagccctgagcttgttttcctgcaactagatggtcccatctgggggtgatgggagacagtgccagatcatcaggcattagactctcataaggagcacgcaacttagatacctcgcatatgcagttcacaacagggttcgctcctatgagaatctaatgccaccactgatctgacaggaggtggagctcaggcggtaatgcaagtgaaggggagcagctgtaaatacagatgaagcttcgttcacttgcccacagctctcctcctgctgtgcagcaggttccta

SEQ ID NO: 256518 - DNA, 459 bp, Homo sapiens
cttacttttcatatcaaatatagatagatagatagtagcttaatttttcactgggttatattgcatggagatagacccaactggatctgttgtatttgcatgtatctgtgtgtgtgtgtgtgtgtgtgtgtgtgtgtgtgtgtgtgtgtgtacacatgtacatatatatacacatagtatatatattttgtatctgtaagaaatgatattaatatcaaccatgtcaatattaactgatttaaaactgtttcactaaattcatatttagtttcattactttaatcattttttattgacagtctttagtccaaatataatccttatcaatatgattttttgatagtgtttggagttaaataaaagacagtgaggtttataatttataactaaaatagctggcttgctagaaatattcttggaggaaaaaagtcttcaaaaagacaattttttgagagtgat

SEQ ID NO: 256519 - DNA, 399 bp, Homo sapiens
cgggtttctttgttttggttggtagcattctattgtagggatgtgccaaaattcatccattcaactgttgatggacactggggttgtttagttttttgctattacaaataaaactactataaatatttgtgtacaagtctttttgtagacatgttttcatttctcttaagtagatatataggagaggaatgactgagacatacggtaggtatgtttgacttaaattgttttgccctggcaccatagctcatgcctataatcccagcactttggaagacagaggcaagaggattgtttgagcccaggagatggagaccagcctaggtaacatagcaaaacctcatgtcaatttttaatttaaaaaacattagtaaataaactgctttacaattctatgtg

SEQ ID NO: 256520 - DNA, 316 bp, Homo sapiens
gcacttgctatcagatgtctggagggcagggttggctttggccatagatggacctcggttcaaatcctggctggccataccacttaccagctctagacctagagcaggttaacatcatgaatctaaactacttaccacttaacaaagtgagtgactatctataactgttgccgttgttacaagaaatccacttagtaactgcactgaaagcccctcatccccaaaaggcaagaaatggggaacaaccgggtgactaaggaaaactgcaagtgaaagcagctgtaatttctctcgctgtggtttgcggtgctcaaca

SEQ ID NO: 256521 - DNA, 277 bp, Homo sapiens
tgctatcagtgtctttgatttcacacccttcttaatactttacattattaccatacatttttgccccatcttgtttgcttttctttgctgtgctatgacttcacaagtgtttctcaaatttttacatgaaaatttctgggcattcagtattcttcttccaaaatttatctggcaatactgttcttcggctacttctatatcctagacctttcagaaagaatgaatttctagactgatggcacttaactgaaacatgataagtcaaaatgccaatatt

SEQ ID NO: 256522 - DNA, 245 bp, Homo sapiens
ccggagcccagtgcacacagtcagtagcagcaacactaactttaactcaggccccgacacccattctgtaaacttctctacgacggtgtcccctcactaggggggaacaggggactccacaggctctctgcctcatggctgctgcaaggtgccacccctggactttccgctggggctctgatgcccatgtcaccatggcctctccccaaagggaattcaggtcagagctgaaagggggacccagg

SEQ ID NO: 256523 - DNA, 410 bp, Homo sapiens
tatttattgagacggagtctcgctctgttgccaggctggagtgcagtggtgcaatctcggctcactgcaacctccacctcccaggttcaagtgattctcctgcctcagcctcctgagtagctaggactacaagcacgtgccaccacgcccagctaatttttgtatttttagtagagacagggtttcaccatgttggccaggctggtctcgatttcttgacctcgtgatccgccctcctcggcctcccaaagtgctgggattacaggcgtgagccaccgcgcccggcccagacatgacatctttttctcacctgtcttaagatacctgcagcctctgtaacttatttttaaaaggagacaataaagactatttttaaaagtcaatccttgcctctgaaaacctacctctgc

SEQ ID NO: 256524 - DNA, 824 bp, Homo sapiens
tcatcgagctcggccctggatgataaaatgaacacattgcgggggcttggctaatgcaatgccccaagttgactcagatactattaaaagcactcaagcatctacttagaagtggtatgccctgagatttaaaaaatacttgtttgaaaagattaggaaaagcccccgcaatgaaacagtgactaaagcccctttttgagattgtattgctagctacctgtgatctggccctgagctaaaagcataactaacaaacatttaacaacagactaagttcgggtatgtagtgaagctgacatatgatatcataaagcttttccatactctctacttatagagattctcctagagtttatggttaaaactacaataatattttcaggtctactgtagtatctgtttctgcctttttgttgcatgcgttcgtaatgtgttacccatttctgactaatacatgctaagttgacagtttcttctaagagtcctttgctgtgttatgttgcttgaggctgtgattaagtgtgatcatcatatttgtctcttcttgcctatgtacctctggtaatcccagttaagtgatagtagctcatgagttctggttttattcaacctctgtgtgcatctggctcagttgacttctctgtattaaacatgtacaaatgggttacgttcctggatcttactgatcttattaatcatgtttgtttttccattaaatactaagcaataacaacttccttattacatgtacctctaacttgaaaatactgtgaattctacacatccaagacctttgtagaaggaagcaaaaaaaaaaaaaaaaa

SEQ ID NO: 256525 - DNA, 218 bp, Homo sapiens
cacctcgatcgaagtgtgggacagcacgcgctaacaacagactaagttcgggtatgtagtgaagctgacatatgatatcataaagcttttccatactctctacttatagagattctcctagagtttatggttaaaactacaataatattttcaggtctactgtagtatctgtttctgcctttttgttagcgcgtgctgtccggtacagcacgcgctaa

SEQ ID NO: 256526 - DNA, 596 bp, Homo sapiens
cacctcgatcgaagtgtgggacagcacgcgctaacaacagactaagttcgggtatgtagtgaagctgacatatgatatcataaagcttttccatactctctacttatagagattctcctagagtttatggttaaaactacaataatattttcaggtctactgtagtatctgtttctgcctttttgttgcatgcgttcgtaatgtgttacccatttctgactaatacatgctaagttgacagtttcttctaagagtcctttgctgtgttatgttgcttgaggctgtgattaagtgtgatcatcatatttgtctcttcttgcctatgtacctctggtaatcccagttaagtgatagtagctcatgagttctggttttattcaacctctgtgtgcatctggctcagttgacttctctgtattaaacatgtacaaatgggttacgttcctggatcttactgatcttattaatcatgtttgtttttccattaaatactaagcaataacaacttccttattacatgtacctctaacttgaaaatactgtgaattctacacatccaagacctttgtagaaggaagcaaaaaaaaaaaaaaaaa

SEQ ID NO: 256527 - DNA, 127 bp, Homo sapiens
taaaaataccacctccagtgaattcgtttggaaaagaaactcaaagcaaggccagacaaaggaaacaaaaagaaaagaaacgaaagggaaaggacagggaagaaaaggcaagaaaaaacaagacaga

SEQ ID NO: 256528 - DNA, 574 bp, Homo sapiens
cattcaacctagggtaagccacactgataacaataaagtacctcacgttggatgatagaaagcagtcagtgtggccgggcacaatggctcacacctgtaatcccagcactttgggagaccaaggcaggtggattgcttgaggtcaggagtttgagaccagcctggccaacatggtgaaaccccgtctctattaaaaattaaaaaattagccgggcatggtggtacacgcctgtagtcctagctactctggtggctgaggcaggagaatcgcttgaacctgggaggcagaggttgcagtgagctgagatcgcaccactgcactgcagcctgggcgacagagagagactccgtctcaaaaaaaaaaaacagaaaaagaaaaaaaaaaaaaaaaaaaacccgcggggcgttttttgtgtggggggggggaaaaaggggccatgaaaggggcccggggccacaggggttccccggaacccattttggggtaccaagggggaaaacccggggggccccacaaaggggggggcaaaataattggaaaaagcccgggggtaaccggtagatgggcggaaaa

SEQ ID NO: 256529 - DNA, 451 bp, Homo sapiens
ggaagggtcagacattggtgccgtgtgcaggccctgtgtgggggaaagtatcttctctagggagaagatctcataatataggctggagggagacttaatattgttctttacattcttttatgccatttaaaaaatattcgttttaccgtgtgcatatattactttttcaatgaaaaattagtttattaaaaaggagaaattaggaaaattatacttccttaacactaatgggcttgcatacttttcatatattgtcagtctcttttaatttccttttattttatcgatatgctagagagttgggcaaaattttgtagtaagaagtttttgataattttcttgttatatttctaatgtattcctgtaccttatccttttattagttgaacatttttatcataagattaatttcattaaataatttttttccccccggaagatttttttccct

SEQ ID NO: 256530 - DNA, 428 bp, Homo sapiens
ttcataacccatccactagtaaattccgaggtctgtgctttgcactgcttcccagagcttccccatggggtaacgccccagcagccaactgcgggcactggccttaaagctccccctgtatctggctgccttgcatcattcctgtattccttgtatcagcccttccgtgtattattttacccgtgtcccttgtgcttcccaactctttggctcagagtttgcttctgggagaacccaagcgaagatagaaagatgaatacaagcagaggtgtatgagaaaagcagacgttttctctactacattcaacatgaagggatttctccccacaccaaccgattctccagctctctgaacaccaaagtgggtgtcctacaattcaatcatgatgctaactacctggggttagtgcaccccccacaggacaagg

SEQ ID NO: 256531 - DNA, 193 bp, Homo sapiens
tatggttgtggctgtcccattagagaacatggtccccccaacagtgactgtcctaaaccacatttagtttcttagtcctgtaacagtgtttttcatgtatatatttctttagttctgttcatatatctatttacaaaatataacttatttcccaaggtttttagtaagagggaaattctttaggcatggattt

SEQ ID NO: 256532 - DNA, 442 bp, Homo sapiens
tccaggctaccccaataaagcaaatattgcaataaagcagtaaatcaaatatttcaataaagcgagtcacatgaactttttggtttcccagtgcgtataaaagttatgtttacactatgctgtagtctattaagtgtgaaatagcattatgtctaaaaacaatgtacataccttaattaaaacatacttcattgctaaaaaatgctaacgatcatctgaaccttcagcaagccatatctttttgctggtggagggtcttgcctccatgtcagtggctgctgactgatcagattggtggttactgcaggttggagtgattgtgacaatttcttaaaataagacaacatgaagtttgacatatcagttgactcttctttcgtgaatgattctctgtatcatgcgatgctgtttgatagcattttacccagagtagaacttcttt

SEQ ID NO: 256533 - DNA, 132 bp, Homo sapiens
ctgcattaaaattaggatacaaattatgtgcacagcagaagccagaaggctgggatgtgactccatgcatgcttagctctaaggcttctgtgtgttctctgagtgggtttctttgtctctgccataactatc

SEQ ID NO: 256534 - DNA, 471 bp, Homo sapiens
ccctggtcccacaggttcctctgatctccagaagatgtgcttgcccctgcagaagggcagagagtcaggagggagcagggaagcccagggaagcccagggagggatcccctctagcagagctgagagatgcctggcctcccctcaaccccactagatttaacattcagagcagcacgtggatcaggcaggatgacttgctcggagccctcgccagcccaaggcatgtcaaatgcagctgctatttccagcagctattctaccagagaagccctgtcacatctgatatggctgaatccatgattttggaggatggatgtgcagtcagcaatggctatacaacagatactagaacagttgctgggagctggggaggaaggggaatgaggggaccccttaggagcttaacacttgatacaattatccatcttcaaccccatggactgacggtgggaaaggtggagagacaggtg

SEQ ID NO: 256535 - DNA, 342 bp, Homo sapiens
tctcatggtgacaaggaagtggtggggtcttgtctgtattcctaaacttccttgaagtttacacctgcttctcactttgtccttttcttttgcctacttttgggtggaatgaagtggtttatcctattttaggctactaacttttgaggtgtttatcctgagcagcctgagtcttggttagcatttctacttggctgagatccacccatccacactccttaacttgtttccctgtcattgcacactggaaactgaagcacctgtagtcatgctataaaacaaatgtgataatatgtgtgaagcagtggtaaaaaataaaaactcaaggttcaagataaaaaa

SEQ ID NO: 256536 - DNA, 627 bp, Homo sapiens
tgtcttcagttgtttagacgaacgatttggatgatcctaaatttctttgaaacttttacatttagagttccaaaaatttgtttttctccaagattaaagcaattctagcatagtagcagcatgctgcatcaacaagttgatttttttttaaagtgtatgtcttctattgaagagctcgatgaagttcttaactgttgtctctttaattaaacagagaacagcaaagcttgtttttttgccaatcgcaaatttatactcaatttaaaccatggcttttaacaaaattcctatactaaaataactcttcacacaagaatcttagtggattttttataggttcttggttaaccagcaaaactcaacaaaatttgttggcattagtaacaaatactttttaaatatgcttctatttctcccatcagaactttgatttctcttcaaagaagcctcatcatagacttactcacacatttgtgagagttattagaattgccataatcaatggatactgaagaaaagggaagatttgagggttggtttttgtttttaatttttaaaaaactcgtatcatgattctggagctaaaagcagctcacatgggccttatatgagctttgcctctctttg

SEQ ID NO: 256537 - DNA, 1368 bp, Homo sapiens
atggccacagcaggaaatccctggggctggttcctggggtacctcatccttggtgtcgcaggatcgctcgtctctggtagctgcagccaaatcataaacggcgaggactgcagcccgcactcgcagccctggcaggcggcactggtcatggaaaacgaattgttctgctcgggcgtcctggtgcatccgcagtgggtgctgtcagccgcacactgtttccagaactcctacaccatcgggctgggcctgcacagtcttgaggccgaccaagagccagggagccagatggtggaggccagcctctccgtacggcacccagagtacaacagacccttgctcgctaacgacctcatgctcatcaagttggacgaatccgtgtccgagtctgacaccatccggagcatcagcattgcttcgcagtgccctaccgcggggaactcttgcctcgtttctggctggggtctgctggcgaacggcagaatgcctaccgtgctgcagtgcgtgaacgtgtcggtggtgtctgaggaggtctgcagtaagctctatgacccgctgtaccaccccagcatgttctgcgccggcggagggcacgaccagaaggactcctgcaacggtgactctggggggcccctgatctgcaacgggtacttgcagggccttgtgtctttcggaaaagccccgtgtggccaagttggcgtgccaggtgtctacaccaacctctgcaaattcactgagtggatagagaaaaccgtccaggccagttaactctggggactgggaacccatgaaattgacccccaaatacatcctgcggaaggaattcaggaatatctgttcccagcccctcctccctcaggcccaggagtccaggcccccagcccctcctccctcaaaccaagggtacagatccccagcccctcctccctcagacccaggagtccagaccccccagcccctcctccctcagacccaggagtccagcccctcctccctcagacccaggagtccagaccccccagcccctcctccctcagacccaggagtccagcccctcctccctcagacccaggagtccagaccccccagcccctcctccctcagacccaggggtccaggcccccaacccctcctccctcagactcagaggtccaggcccccaacccctccttccccagacccagaggtccaggtcccagcccctcctccctcagacccagcggtccaatgccacctagactctccctgtacacagtgcccccttgtggcacgttgacccaaccttaccagttggtttttcattttttgtccctttcccctagatccagaaataaatcccctagatccagaaataaagtctaagagaagcgc

SEQ ID NO: 256538 - DNA, 563 bp, Homo sapiens
aactcaagttctccatgggagatccatgcagagatatgaaaataggacggacgtctcttccttcttaaaagttgctccagattttggcttcaagtgcttcctgttttttgccctcccttatccctgggagttccctctatttactttcacaaggactcttggtataaaagatatttgtatacctgggtgtgtgggaaggaattgaaggcaaaggtagcagtcatttcaagctgaacatgttaagtggtaatcgagcacttggtttttgtagtacctcctgtggccatctccacagtgtcatatttgaaagaaatcttgtgtaagcattggtctaagggtcactgactgtgaataatgaatgcggtgacagcatggccatcttagagacaggcaggccagatattggttactttgattttagttgacaaagtttatttgcttttaagttttaaagcaatacagcagtgtgaacttcaagttgtaaactttcatttagaaagtttaaaatttagttgaaatataaaatattctgaatttgaataaaaagttttaaaacttaaact

SEQ ID NO: 256539 - DNA, 4486 bp, Homo sapiens
gtagacagatccaggctcaccagtcctgtgccactgggcttttggcgttctgcacaaggcctacccgcagatgccatgcctgctcccccagcctaatgggctttgatgggggaagagggtggttcagcctctcacgatgaggaggaaagagcaagtgtcctcctcggacattctccgggttgtgaaatgtgctcgcaggaggcttttcaggcacagaggagccagctggtcgagctgctggtctcagggtccctggaaggcttcgagagtgtcctggactggctgctgtcctgggaggtcctctcctgggaggactacgagggcttccacctcctgggccagcctctctcccacttggccaggcgccttctggacaccgtctggaataagggtacttgggcctgtcagaagctcatcgcggctgcccaagaagcccaggccgacagccagtcccccaagctgcatggctgctgggacccccactcgctccacccagcccgagacctgcagagtcaccggccagccattgtcaggaggctccacagccatgtggagaacatgctggacctggcatgggagcggggtttcgtcagccagtatgaatgtgatgaaatcaggttgccgatcttcacaccgtcccagagggcaagaaggctgcttgatcttgccacggtgaaagcgaatggattggctgccttccttctacaacatgttcaggaattaccagtcccattggccctgcctttggaagctgccacatgcaagaagtatatggccaagctgaggaccacggtgtctgctcagtctcgcttcctcagtacctatgatggagcagagacgctctgcctggaggacatatacacagagaatgtcctggaggtctgggcagatgtgggcatggctggacccccgcagaagagcccagccaccctgggcctggaggagctcttcagcacccctggccacctcaatgacgatgcggacactgtgctggtggtgggtgaggcgggcagtggcaagagcacgctcctgcagcggctgcacttgctgtgggctgcagggcaagacttccaggaatttctctttgtcttcccattcagctgccggcagctgcagtgcatggccaaaccactctctgtgcggactctactctttgagcactgctgttggcctgatgttggtcaagaagacatcttccagttactccttgaccaccctgaccgtgtcctgttaacctttgatggctttgacgagttcaagttcaggttcacggatcgtgaacgccactgctccccgaccgaccccacctctgtccagaccctgctcttcaaccttctgcagggcaacctgctgaagaatgcccgcaaggtggtgaccagccgtccggccgctgtgtcggcgttcctcaggaagtacatccgcaccgagttcaacctcaagggcttctctgaacagggcatcgagctgtacctgaggaagcgccatcatgagcccggggtggcggaccgcctcatccgcctgctccaagagacctcagccctgcacggtttgtgccacctgcctgtcttctcatggatggtgtccaaatgccaccaggaactgttgctgcaggagggggggtccccaaagaccactacagatatgtacctgctgattctgcagcattttctgctgcatgccacccccccagactcagcttcccaaggtctgggacccagtcttcttcggggccgcctccccaccctcctgcacctgggcagactggctctgtggggcctgggcatgtgctgctacgtgttctcagcccagcagctccaggcagcacaggtcagccctgatgacatttctcttggcttcctggtgcgtgccaaaggtgtcgtgccagggagtacggcgcccctggaattccttcacatcactttccagtgcttctttgccgcgttctacctggcactcagtgctgatgtgccaccagctttgctcagacacctcttcaattgtggcaggccaggcaactcaccaatggccaggctcctgcccacgatgtgcatccaggcctcggagggaaaggacagcagcgtggcagctttgctgcagaaggccgagccgcacaaccttcagatcacagcagccttcctggcagggctgttgtcccgggagcactggggcctgctggctgagtgccagacatctgagaaggccctgctccggcgccaggcctgtgcccgctggtgtctggcccgcagcctccgcaagcacttccactccatcccgccagctgcaccgggtgaggccaagagcgtgcatgccatgcccgggttcatctggctcatccggagcctgtacgagatgcaggaggagcggctggctcggaaggctgcacgtggcctgaatgttgggcacctcaagttgacattttgcagtgtgggccccactgagtgtgctgccctggcctttgtgctgcagcacctccggcggcccgtggccctgcagctggactacaactctgtgggtgacattggcgtggagcagctgctgccttgccttggtgtctgcaaggctctgtatttgcgcgataacaatatctcagaccgaggcatctgcaagctcattgaatgtgctcttcactgcgagcaattgcagaagttagctctattcaacaacaaattgactgacggctgtgcacactccatggctaagctccttgcatgcaggcagaacttcttggcattgaggctggggaataactacatcactgccgcgggagcccaagtgctggccgaggggctccgaggcaacacctccttgcagttcctgggattctggggcaacagagtgggtgacgagggggcccaggccctggctgaagccttgggtgatcaccagagcttgaggtggctcagcctggtggggaacaacattggcagtgtgggtgcccaagccttggcactgatgctggcaaagaacgtcatgctagaagaactctgcctggaggagaaccatctccaggatgaaggtgtatgttctctcgcagaaggactgaagaaaaattcaagtttgaaaatcctgaagttgtccaataactgcatcacctacctaggggcagaagccctcctgcaggcccttgaaaggaatgacaccatcctggaagtctggctccgagggaacactttctctctagaggaggttgacaagctcggctgcagggacaccagactcttgctttgaagtctccgggaggatgttcgtctcagtttgtttgtgagcaggctgtgagtttgggccccagaggctgggtgacatgtgttggcagcctcttcaaaatgagccctgtcctgcctaaggctgaacttgttttctgggaacaccataggtcacctttattctggcagaggagggagcatcagtgccctccaggatagacttttcccaagcctacttttgccattgacttcttcccaagattcaatcccaggatgtacaaggacagcccctcctccatagtatgggactggcctctgctgatcctcccaggcttccgtgtgggtcagtggggcccatggatgtgcttgttaactgagtgccttttggtggagaggcccggcctctcacaaaagaccccttaccactgctctgatgaagaggagtacacagaacacataattcaggaagcagctttccccatgtctcgactcatccatccaggccattccccgtctctggttcctcccctcctcctggactcctgcacacgctccttcctctgaggctgaaattcagaatattagtgacctcagctttgatatttcacttacagcacccccaaccctggcacccagggtgggaagggctacaccttagcctgccctcctttccggtgtttaagacatttttggaaggggacacgtgacagccgtttgttccccaagacattctaggtttgcaagaaaaatatgaccacactccagctgggatcacatgtggacttttatttccagtgaaatcagttactcttcagttaagcctttggaaacagctcgactttaaaaagctccaaatgcagctttaaaaaattaatctgggccagaatttcaaacggcctcactaggcttctggttgatgcctgtgaactgaactctgacaacagacttctgaaatagacccacaagaggcagttccatttcatttgtgccagaatgctttaggatgtacagttatggattgaaagtttacaggaaaaaaaattaggccgttccttcaaagcaaatgtcttcctggattattcaaaatgatgtatgttgaagcctttgtaaattgtcagatgctgtgcaaatgttattattttaaacattatgatgtgtgaaaactggttaatatttataggtcactttgttttactgtcttaagtttatactcttatagacaacatggccgtgaactttatgctgtaaataatcagaggggaataaactgttgagtcaaaaca

SEQ ID NO: 256540 - DNA, 4419 bp, Homo sapiens
gtagacagatccaggctcaccagtcctgtgccactgggcttttggcgttctgcacaaggcctacccgcagatgccatgcctgctcccccagcctaatgggctttgatgggggaagagggtggttcagcctctcacgatgaggaggaaagagcaagtgtcctcctcggacattctccgggttgtgaaatgtgctcgcaggaggcttttcaggcacagaggagccagctggtcgagctgctggtctcagggtccctggaaggcttcgagagtgtcctggactggctgctgtcctgggaggtcctctcctgggaggactacgagggcttccacctcctgggccagcctctctcccacttggccaggcgccttctggacaccgtctggaataagggtacttgggcctgtcagaagctcatcgcggctgcccaagaagcccaggccgacagccagtcccccaagctgcatggctgctgggacccccactcgctccacccagcccgagacctgcagagtcaccggccagccattgtcaggaggctccacagccatgtggagaacatgctggacctggcatgggagcggggtttcgtcagccagtatgaatgtgatgaaatcaggttgccgatcttcacaccgtcccagagggcaagaaggctgcttgatcttgccacggtgaaagcgaatggattggctgccttccttctacaacatgttcaggaattaccagtcccattggccctgcctttggaagctgccacatgcaagaagtatatggccaagctgaggaccacggtgtctgctcagtctcgcttcctcagtacctatgatggagcagagacgctctgcctggaggacatatacacagagaatgtcctggaggtctgggcagatgtgggcatggctggacccccgcagaagagcccagccaccctgggcctggaggagctcttcagcacccctggccacctcaatgacgatgcggacactgtgctggtggtgggtgaggcgggcagtggcaagagcacgctcctgcagcggctgcacttgctgtgggctgcagggcaagacttccaggaatttctctttgtcttcccattcagctgccggcagctgcagtgcatggccaaaccactctctgtgcggactctactctttgagcactgctgttggcctgatgttggtcaagaagacatcttccagttactccttgaccaccctgaccgtgtcctgttaacctttgatggctttgacgagttcaagttcaggttcacggatcgtgaacgccactgctccccgaccgaccccacctctgtccagaccctgctcttcaaccttctgcagggcaacctgctgaagaatgcccgcaaggtggtgaccagccgtccggccgctgtgtcggcgttcctcaggaagtacatccgcaccgagttcaacctcaagggcttctctgaacagggcatcgagctgtacctgaggaagcgccatcatgagcccggggtggcggaccgcctcatccgcctgctccaagagacctcagccctgcacggtttgtgccacctgcctgtcttctcatggatggtgtccaaatgccaccaggaactgttgctgcaggagggggggtccccaaagaccactacagatatgtacctgctgattctgcagcattttctgctgcatgccacccccccagactcagcttcccaaggtctgggacccagtcttcttcggggccgcctccccaccctcctgcacctgggcagactggctctgtggggcctgggcatgtgctgctacgtgttctcagcccagcagctccaggcagcacaggtcagccctgatgacatttctcttggcttcctggtgcgtgccaaaggtgtcgtgccagggagtacggcgcccctggaattccttcacatcactttccagtgcttctttgccgcgttctacctggcactcagtgctgatgtgccaccagctttgctcagacacctcttcaattgtggcaggccaggcaactcaccaatggccaggctcctgcccacgatgtgcatccaggcctcggagggaaaggacagcagcgtggcagctttgctgcagaaggccgagccgcacaaccttcagatcacagcagccttcctggcagggctgttgtcccgggagcactggggcctgctggctgagtgccagacatctgagaaggccctgctccggcgccaggcctgtgcccgctggtgtctggcccgcagcctccgcaagcacttccactccatcccgccagctgcaccgggtgaggccaagagcgtgcatgccatgcccgggttcatctggctcatccggagcctgtacgagatgcaggaggagcggctggctcggaaggctgcacgtggcctgaatgttgggcacctcaagttgacattttgcagtgtgggccccactgagtgtgctgccctggcctttgtgctgcagcacctccggcggcccgtggccctgcagctggactacaactctgtgggtgacattggcgtggagcagctgctgccttgccttggtgtctgcaaggctctgtatttgcgcgataacaatatctcagaccgaggcatctgcaagctcattgaatgtgctcttcactgcgagcaattgcagaagttagctctattcaacaacaaattgactgacggctgtgcacactccatggctaagctccttgcatgcaggcagaacttcttggcattgaggctggggaataactacatcactgccgcgggagcccaagtgctggccgaggggctccgaggcaacacctccttgcagttcctgggattctggggcaacagagtgggtgacgagggggcccaggccctggctgaagccttgggtgatcaccagagcttgaggtggctcagcctggtggggaacaacattggcagtgtgggtgcccaagccttggcactgatgctggcaaagaacgtcatgctagaagaactctgcctggaggagaaccatctccaggatgaaggtgtatgttctctcgcagaaggactgaagaaaaattcaagtttgaaaatcctgaagttgtccaataactgcatcacctacctaggggcagaagccctcctgcaggcccttgaaaggaatgacaccatcctggaagtctggctccgagggaacactttctctctagaggaggttgacaagctcggctgcagggacaccagactcttgctttgaagtctccgggaggatgttcgtctcagtttgtttgtgagcaggctgtgagtttgggccccagaggctgggtgacatgtgttggcagcctcttcaaaatgagccctgtcctgcctaaggctgaacttgttttctgggaacaccataggtcaccattgacttcttcccaagattcaatcccaggatgtacaaggacagcccctcctccatagtatgggactggcctctgctgatcctcccaggcttccgtgtgggtcagtggggcccatggatgtgcttgttaactgagtgccttttggtggagaggcccggcctctcacaaaagaccccttaccactgctctgatgaagaggagtacacagaacacataattcaggaagcagctttccccatgtctcgactcatccatccaggccattccccgtctctggttcctcccctcctcctggactcctgcacacgctccttcctctgaggctgaaattcagaatattagtgacctcagctttgatatttcacttacagcacccccaaccctggcacccagggtgggaagggctacaccttagcctgccctcctttccggtgtttaagacatttttggaaggggacacgtgacagccgtttgttccccaagacattctaggtttgcaagaaaaatatgaccacactccagctgggatcacatgtggacttttatttccagtgaaatcagttactcttcagttaagcctttggaaacagctcgactttaaaaagctccaaatgcagctttaaaaaattaatctgggccagaatttcaaacggcctcactaggcttctggttgatgcctgtgaactgaactctgacaacagacttctgaaatagacccacaagaggcagttccatttcatttgtgccagaatgctttaggatgtacagttatggattgaaagtttacaggaaaaaaaattaggccgttccttcaaagcaaatgtcttcctggattattcaaaatgatgtatgttgaagcctttgtaaattgtcagatgctgtgcaaatgttattattttaaacattatgatgtgtgaaaactggttaatatttataggtcactttgttttactgtcttaagtttatactcttatagacaacatggccgtgaactttatgctgtaaataatcagaggggaataaactgttgagtcaaaaca

SEQ ID NO: 256541 - DNA, 490 bp, Homo sapiens
taaaaatacaaaaattagctgggtgtggtggcatgtgcctgtagtctcagttgctggggaggctgagacaggagaatcgcttgaacccaggaggcagaggttgcagtgagccaagatcacaccactgcactccagcctggcaacagagcatgactctgcaaaaacaaaacaaaacaaaaacaaaaaaccttcatgcaataatatatcactaagaatttcttagagtgtttagtttcttctttgtgcagaaacagaaatatctaaaacatatagtgtggagtaaggaggattcaataacttggagttgagctcttggaagtgagaagtgcaaatggcataggggaaggcaggctttgagtgatcagccagctgagggatgcaaagtttttccaaataataaaccttcaataaatgattcacagctccagtaaatcttgaactatcttccaggtaaaataatttttcttactatgaatatttttaacaggag

SEQ ID NO: 256542 - DNA, 410 bp, Homo sapiens
caataattccatattttcttatattacctaaaatccacatactcttcaataaatttaccaccatagggttttcaaaccccatcaaaaaaaccacttctttcatgtaaatgcccagcagtttatctctttttactcctcagtaccctacacatcttcctaataaagtatataataaaagtaaatcttcccactagtgtgtttatagtgtgaaacacattgttattcccaccatggcagtggtggataaaatatacatatttctctgtctcccacaaccaccctttgatccccagccttttatcagcaaatccaaagtgctaccttctgcaaattagcactacctcctgagaaattgtgccaagttccattaaatgtaattagcattcctgttgtttccttcatattggaga

SEQ ID NO: 256543 - DNA, 539 bp, Homo sapiens
aaccttcagagagaccatggccctgctgacaccttaacttccagccttccagaacttacagaagagctttcggtcactttaagacaccatgtttgaggtactttgttaagcagcctgaagaaactaatatacacatggatacaatttaaattatacataagcacacacattcgcgtacccttcggagttttaattctatgtccctgcagtcaaatgttcaaatgctggtccatcacttcttagctagagattgaggatccctaatctgaaaacctgaaatccaaaatgctataaaactcaaagctttttgagcatcaaaattatactcaaaggaaaaactcagtggagcactgtggatttcccactagggatactcaacctgtgggttatttatttaacatttacttaacatctctatggctgtttctcaaactgtaaaattgggacaaagaattgggcagattaagaataaacatgtaaaatgcctggaactatcaagtacttaataaatattagctctgaggttgttgtcaaagtca

SEQ ID NO: 256544 - DNA, 454 bp, Homo sapiens
ttcttatggctttttcctctataagaactcaaagggggagagaaaaagacgaaaaatatcttcaaagaggagaagaaatctgatctttctctacgtctgcttagttggcgtaactttaggatgtccataagttgtagctttcctgggaaaatttgattttacactggttatcccaacataatattaatggtatcctcttagactctcaatagtgtccggtttggatgacaaattctgtggtctttttagccaactgctactgaagtggtcagatttattgcacaaaatatatttttaaaaataagtagcacaagatgaaatatggcctcaaatttcttggttagtttccactagaaagttttaaacattaaaaagtacaaaattcattacatttattgaatgataaagtataacattgtatgaagttgatgactattaaaactatttgagtgtt

SEQ ID NO: 256545 - DNA, 504 bp, Homo sapiens
aacgttaccttaagctgctgccctgggcacggagagacacagatggacagcaaggatgcagagggatgcctggtgttcccgacacttcgtggatggtcccagcgaaaggaggcttgtgcaaagtgttttatgatgcttatgcatccgggaagcttcagggacaaagtgattttggagaaaatcagttaaagatttttaaagaggggatttaattggagggaggcagaagaggtgccaacttgatttctgaaaattgtaatccctactgctctcagagccactgcctggtacggaaagtgtatcttctcccactggctttgcacaccatttaacaggaaattcaagtcgaaatatcagggggaaaaaaagcctcctagccttattactagaagaagacccctccctcccaccatttgtaatagaaccctcttcaggacgaggcctccggaattgctgtttatctcttattcgtgctctaataaaatcaatatgtgtgtcctacta

SEQ ID NO: 256546 - DNA, 427 bp, Homo sapiens
tatagtttgcctatagattaaaacatgcatagttttaaaactcacatgtgcacagtatttgagataagttatttatatttttctttcaaaatcaatttatgaaacctacgtttctgaaaatagaaatattggaaactaaagtacttacaaactaataaatccttatagaaaattttagaattattatttttttcaatagaatccctttaacccttttattttgcatattgagcttcatgaataacatcatgctgcagaagcagcgaccaggaaaagttatctcctacgaagcatagcaacagaggaagatgttatacagtgttttcattttcaattttcctactgagctttaagattttcatgtaattttcttcaataaactgaagagtctttctttaacataagattcttaaataatttattttca

SEQ ID NO: 256547 - DNA, 601 bp, Homo sapiens
tagatcgagctcggtacctacttttcacagggggaaagccggcattaataaggaccaggaaaactttgcataaaataaataggagatggaatagattgaatttgtatatgctgcttccatttcttcctccattttgtgttgtcttcctaagtcgagttactggcaaagtgggatttgatttgccacaaggactcataccttctgcagcctaggtgatgggcctttcttctttgtgggacgtttgtgtgaccattgatgtttccaggaaggaagaatctgatggaggggctgttaccatgaaatgttgatgattacttggtacaagtagtgcgtgggagacagaatcccaaagtgttgggattacaggcgtgagccaccacactcagctgatttttattctttaataagagcaacccatttcttttatcaacagacttgttttcttagcaaaaagggaggacgtattgatgtcactgctttccattcaactaagttggtatttgtgttcagatttagggattcctgcttgcccgaaccgttcatttatcttttaccttgtaattgtcccaacagcctgtggaaaagtagtccgagctcgatc

SEQ ID NO: 256548 - DNA, 1357 bp, Homo sapiens
agtacttccaccagctcaccttcccagagtcctcctgggccctctgaagacgtcacttaacaatggagttgttagtaggagaaaataaagcctttttctccctagatgtagttcagtgggaactgaaagtgtaccagaaatcatggttcaagcttgtgccagtgggtgcaaggggtggttcttatggaggagaaagcgcagttcatttagacttggcattgaaatcgaactctgttgttcggtggagtgaacattgatatggagattcccacccgccccccacctccgtaggatacccccttacacaggtcctgtatgcttttctttttcttccattttctttctttattttcttcttttgtcctcttagaaatagtctctctgtagaccggccagatttgtcaagttaccaccctctaaatttttacagctccgtatattcagacttggtatttgtgaattagctaaaagtgggctgccaatctgtactttatttacattcgaagccatattagtgagagccccagaaaaaaatgttaatatgcaggaagaggcaaaagggttgagtttctgactgttgctaacctcaccactgcctttaaaaccaatcatgaggcacacggctgatatttaatagcttttagctgattatttttcttctcctcctctttcttttctatccaagttgacctgggtgtacttgagtggaaatgaagtcatccaaatgctgaattagaataatcacaggcctctaagaatgaaatggaagcagagattaaatggcggagggaaagccggcattaataaggaccaggaaaactttgcataaaataaataggagatggaatagattgaatttgtatatgctgcttccatttcttcctccattttgtgttgtcttcctaagtcgagttactggcaaagtgggatttgatttgccacaaggactcataccttctgcagcctaggtgatgggcctttcttctttgtgggacgtttgtgtgaccattgatgtttccaggaaggaagaatctgatggaggggctgttaccatgaaatgttgatgattacttggtacaagtagtgcgtgggagacagaatcccaaagtgttgggattacaggcgtgagccaccacactcagctgatttttattctttaataagagcaacccatttcttttatcaacagacttgttttcttagcaaaaagggaggacgtattgatgtcactgctttccattcaactaagttggtatttgtgttcagatttagggattcctgcttgcccgaaccgttcatttatcttttaccttgtaattgtcccaacagcctgtggaaaagtagtccgagctcgatc

SEQ ID NO: 256549 - DNA, 1232 bp, Homo sapiens
agtacttccaccagctcaccttcccagagtcctcctgggccctctgaagacgtcacttaacaatggagttgttagtaggagaaaataaagcctttttctccctagatgtagttcagtgggaactgaaagtgtaccagaaatcatggttcaagcttgtgccagtgggtgcaaggggtggttcttatggaggagaaagcgcagttcatttagacttggcattgaaatcgaactctgttgttcggtggagtgaacattgatatggagattcccacccgccccccacctccgtaggatacccccttacacaggtcctgtatgcttttctttttcttccattttctttctttattttcttcttttgtcctcttagaaatagtctctctgtagaccggccagatttgtcaagttaccaccctctaaatttttacagctccgtatattcagacttggtatttgtgaattagctaaaagtgggctgccaatctgtactttatttacattcgaagccatattagtgagagccccagaaaaaaatgttaatatgcaggaagaggcaaaagggttgagtttctgactgttgctaacctcaccactgcctttaaaaccaatcatgaggcacacggctgatatttaatagcttttagctgattatttttcttctcctcctctttcttttctatccaagttgacctgggtgtacttgagtggaaatgaagtcatccaaatgctgaattagaataatcacaggcctctaagaatgaaatggaagcagagattaaatggcggagggaaagccggcattaataaggaccaggaaaactttgcataaaataaataggagatggaatagattgaatttgtatatgctgcttccatttcttcctccattttgtgttgtcttcctaagtcgagttactggcaaagtgggatttgatttgccacaaggactcataccttctgcagcctaggtgatgggcctttcttctttgtgggacgtttgtgtgaccattgatgtttccaggaaggaagaatctgatggaggggctgttaccatgaaatgttgatgattacttggtacaagtagtgcgtgggagacagaatcccaaagtgttgggaagaaatggaagcagcatatacaaattcatctattccatctcctatttattttatgcaagttttctggtccttattaatgccgcttccccctgtggaaaagtagtccgagctcgatc

SEQ ID NO: 256550 - DNA, 859 bp, Homo sapiens
ttatttacattcgaagccatattagtgagagccccagaaaaaaatgttaatatgcaggaagaggcaaaagggttgagtttctgactgttgctaacctcaccactgcctttaaaaccaatcatgaggcacacggctgatatttaatagcttttagctgattatttttcttctcctcctctttcttttctatccaagttgacctgggtgtacttgagtggaaatgaagtcatccaaatgctgaattagaataatcacaggcctctaagaatgaaatggaagcagagattaaatggcggagggaaagccggcattaataaggaccaggaaaactttgcataaaataaataggagatggaatagattgaatttgtatatgctgcttccatttcttcctccattttgtgttgtcttcctaagtcgagttactggcaaagtgggatttgatttgccacaaggactcataccttctgcagcctaggtgatgggcctttcttctttgtgggacgtttgtgtgaccattgatgtttccaggaaggaagaatctgatggaggggctgttaccatgaaatgttgatgattacttggtacaagtagtgcgtgggagacagatgaaagagtgtggggcacaggcacagtggctcacgcctgtaatcccagcactttggggggccaaggcgggcgaatcatgaggtcaggagttcgagaccagcctggccaacatggtgaaaccctgtctctactaaaaatacaaaaaattaactgagcgtggtggtgggcacctgtaatcccagctactcgggaggttgaggcaggagaatctcttgaacccaggaggtggaggttgcagtgagccgagatc

SEQ ID NO: 256551 - DNA, 216 bp, Homo sapiens
gtatttttagtagagacagggtttcaccatgttgcccaggctggtctcgaattcctgagctcaagcaacccacccaccttggcctcccaaagtgctgggattccaggcatgagccatgcgcctggcctgttgggttactttttaaatcttccggttctctcttcatactatcctgttactgcatgttgatctctcttccccttctgtcgtcttctc

SEQ ID NO: 256552 - DNA, 257 bp, Homo sapiens
acacgtgcatctattttcaacataaatacacaggccctcgtatgtctgtacacgtctagatttcaaagtcaactggtaactgtcccccagaagcccagttatcgtgtgaccctgcagttccacgctgcaactccactcctagctgtacacccaagagactgaaacttacgtccacacgcaggcctgcatacgagcgtccagggcagcacgactcagtggccaaaaggcaggagcaccctgagcgcccatcggcagac

SEQ ID NO: 256553 - DNA, 681 bp, Homo sapiens
aatatataattaatgttatattaattacatattgatacaatatataattaatgttatattaattacatattgatacaatatataattaatgttatattaattacatattgatacaatatatgttatatataattatatattaatataatatataacataataatataacatatattatatagtatattattatattatatactctctctctctctctctctctctctctctctctctctctatatatatatatatatatatatatacttttttttttgagacagaatcttgctctgtcacccaggctggagtgcagtggtgtgatctcagctcactgcaacctctgccttctgggtttgagcgattctcccgcctcagcctcccaagtagctggtgcccgccatcatgcccggctattttttgtatttttagtagagacagggtttcgccacgttggccaggctggtctccaactcctgacctcaggtgatctgcccgccttggcctcccaaaatgctgggattacagccatgagctactgtgcccggtctgtattatgtttatatatagaatattataattatacatttacattatataaatattatctatattatataaatattacatattatataagtaatattattcccatttcagagaagaggaaactgaggctta

SEQ ID NO: 256554 - DNA, 215 bp, Homo sapiens
agaattctaaatataaactaggaacctctggtctgcagtgcttctcaaattggttcctagactgggtagtatcactaggaacatgacaaaaatgtttttgggccaggcacggtggcttacacctgtaatcgcagcaatttgggagaccaaggcaggcaggtcacttgaggtcaggagtttgggaccagcctggccaacatggcaaaactccatct

SEQ ID NO: 256555 - DNA, 308 bp, Homo sapiens
cactggaacctctctaggtagccttatctgttagtggcccatggctggattaggtacagttgggtacctcatgcaaatccactctgtcataatcaactctttacctagttctcctcctctgaattcttaagctcactgagaacagggatgaagcctttcttatctctgtataacatgtctgacatctagtagatacccaataaatactggttagataagtaaatgactagatgaataaaaagtaaagcaagtgccaatttaaaatgtagcattttggctgggcacaggggctcatgcctgtaatccca

SEQ ID NO: 256556 - DNA, 819 bp, Homo sapiens
atttgtattaatgttattcaaaggcagtaatttcagcgaataaacttgttaaatgggcctaaatgtttataatgttgactaagcattaagaacaaacaaaaaggtataaggcagttatacctttttgctccagaaatacaagtaaagacagctaccattatacttcttgaaaaacgtctcaggtattgctaaattaatacttgcttaaattcttgggctttaaatgaatagcgtgatttcacactctagtgtgagtgagtgtacagatgatgtctattcgttggtttgattagggtatctagaatcagccttttctaattgctcagtaaagtatgaattaaaaccacatagaaaataatgtggtaaattctttcttacaatagtgtcattcctttcaattataattctttttcctgggatgattggtgtaactcactgaaagaaaacaaaacatttttttttcttttttttttggtgaaaatgttaccctctggtacctcagtttcttttatatagtggcaatttgaatagaggcagtcacataagatttacttcagctgaatggctaaaatttgagaaatactattgaaaaatctcattaaaaaatagtatgcaaataaaaactatcaaatgtccaaagcaatcatacaatgtagaaactaagagcaccatgaaaggtttcctggaacttaatgattctatctgtgcttttcaaaggagggatctgggttaagaatcaaaaaataaaaacaatcaaatattgtaactgacctcaaatgagtttcaatttattgggctcttctttgacattctaagctt

SEQ ID NO: 256557 - DNA, 415 bp, Homo sapiens
ttgggtcagcttgttaaaggaggcgagaaggcaggggagggaatatgcctgggcatgtaaggctcatcgggacctcggttaccatttcacctgtgcaaattttcaggactgagtcttttctctatactgccccacgaggggactgacattacttaaggcctctctccaggaccccgagctcaggcctagcccgatggagcagaaccatctctggagcagaaccacccctgaccagaagtccaaagatgtgagactggggtcaaatctaggtttactcctagtcgagaaaatgggaaggacaatgtcatatctcctctggtctgtgaggtcgatggctgtaaaagttgcccagtggtgaactcagttaggtcttatctgttgcagattatgtcactccacccctctgagacttcag

SEQ ID NO: 256558 - DNA, 295 bp, Homo sapiens
ccttagagaagccatccttgtttgctccatctaaagtagggcatcctcctccccttttctattatataactctgcttatgtgctcaatagcactgtttataatataaaattattattattgtattattattactttttaaattgtttcttgtttccctgcctcctcctgtatcttctcaagctccttcaatatcttgattgctttgtccaaatctatagctcctagcacaatgcttggaacatagtagagaatcaatacatgtaagttggatgaataaacaaatgaatacctaat

SEQ ID NO: 256559 - DNA, 516 bp, Homo sapiens
cagccaaaccatatcaatatgtggtagaatgtttaaattttgtccataaacaaatctgccactttgtggtttttgctactgggaaaatgttttaaaatagtattcacattccaatatttaaaaaatatattctcctctgatcccttatagttttttaaaacattgttaatggacttcagatattaaaaaaatggattaatgataatcgatggttcttgacacagtattattggtctatttatgtcatttcctttttaaataatataacaaatacatgtgaacccatcacccaacccaaaacctagtacattaccaataactcatatctacctgtggtatcttttctatcccattctcctacctccctaacagaagtatcctgagattatatcaatacttcccttgccttaaaaagttttatcttatatgtatgtatgaacagacaatatactgtttacttctgcttgtttttgaactttataaattgatattaaaccatatactgtcttttaagaa

SEQ ID NO: 256560 - DNA, 446 bp, Homo sapiens
atacatacttctggccaggaaagatggagagagaaacccagttctcttcctgttcagcaagtataaaaaagtgctagacattttatgtgtgtctagtaaagacggaccgccgccggccccagaattagctatgtctgaatggaacatttttgctctatatgaatgaggcaaccccaagacacataatgatggcaggcagtacagttggcagttaagggcatgagctttagcactgggcagctatagtgtcaaatcccagctctgccacttactaactatgggatctaccaaattattcaatctttcaaatattttgtatcctcccttacaaaatgggggtagtaaaagtatccacctcactgggtttttgtggggatgtaaaaaggtaagacatgaaagtattaacacaatgttattcatctaataaacattcaataaactcatta

SEQ ID NO: 256561 - DNA, 832 bp, Homo sapiens
aaagaaaagaagtatggaaggcaggggtagcaaggcggagctgtgccctgtcacggcacacagagaatgcccatggattttcacaaatgctgttaaaatgtgaaaagaaggtgtttcttttttcttcaatctgagcttcaagctaatatgggcattcagctaaatccctcctgggtcctgaaacagtatgtggttttggatttcaaagataatccctacaacttctgggagaggtgcaagtatcaaccagttggagacacagggaaagggtgatataatgcagaaagtgacttgaacaaatttacacagaaggcagtgaagtgtgattcaaattcaagcagtctagactgtgccccacacaactctgcagcataaccttgcagtatgaaaataatgcctctcatgcagatacaagtctgacaggaaaaccactgctgcttctgctgccaatttgttaagcatcgtgacaagaggagtgaccgagaagatggaaaagcccggtctgcctagtgccccttcagttggcaggattgctggcacagggccgtctaactgtgctggaaggtgttttagaagggacaagtggcactttggggagaggagtcacggatctcctggcttggccatgattcagcttttggagatttcatttagaatctgtgatctttcccatattcttcctaaaaggtattgcccttcctggcccctgcaatatagcaaggatggattttcaacaaagcaaataaaggactgattttcacaagatctgaaccccgaggagcagattgtcaacctttcttctctgctgaggacaaagacaagatcacagacc

SEQ ID NO: 256562 - DNA, 643 bp, Homo sapiens
aaagaaaagaagtatggaaggcaggggtagcaaggcggagctgtgccctgtcacggcacacagagaatgcccatggattttcacaaatgctgttaaaatgtgaaaagaaggtgtttcttttttcttcaatctgagcttcaagctaatatgggcattcagctaaatccctcctgggtcctgaaacagtatgtggttttggatttcaaagataatccctacaacttctgggagaggtgcaagtatcaaccagttggagacacagggaaagggtgatataatgcagaaagtgacttgaacaaatttacacagaaggcagtgaagtgtgattcaaattcaagcagtctagactgtgccccacacaactctgcagcataaccttgcagtatgaaaataatgcctctcatgcagatcagggatatgagatccagtgacttacccaaagtttcaaaggaaagatgtaacagagccatctctgaacttctgctcttgggaatctacacactctttccactagttctgaccttagcaggtgtttgacccaggacttgcccaacttggtttccatttgtatagaactaatgccaaatttcaaaagaaaatattacataccataatcaataaaaacaaaatatcaaacatgtat

SEQ ID NO: 256563 - DNA, 684 bp, Homo sapiens
taaaaacaaaaatcaaggaaacaaaaaaatttaaacagttttttagtgagatgagaacattgtgtttataacacctaagccacatttattactttccccaataatcagttatttaattgtgataaaaaattatagattcaatttacatgaaaaaaattgatgagtagcgtgtttcttataaacagttactacaataatggataattgtctcaaatgcatgctcctaaataatgttagctctcaccatcttcactgactggtagggtataagagagatggtaaaagtaagatattaaataaataacaaaaataatccaaaatagccttggcttcacccacacacacacagtactacttaaagtactggctcaaagatgctgatattaactctttacttaaatgtcaaagccaaagccacatttaacagcaaagccacatgcaacagcaaagccacttggctttactctttcaatgcatctttacaaaaatacatgttcttatctatcatcctctccttttgttttatttattgtttcttttcaaatctttctaaagttcttatactctttttccttaaaattttctcctaaaacttctctctgctgtttacaagattcctctgaaattcagttattagattaatttgtccctaactttctgtgttgtagtatgtattattgagat

SEQ ID NO: 256564 - DNA, 405 bp, Homo sapiens
gtcccagccccagccaagggaatattgagtgagcgtgctgttgtgtgcgcaccccagaaactttacggctctgtcactaaagggagccactccagtggttcttcccaaagaagtcagcttcaagatgactcagtgtccccatgccagaaatagaaatggctggcaactttcacatgtcagtttcttctgctaacaacaattccacaccctgttacatgcccattgaatttaacaacgggaggtccttagcgattttggacacagcagatggattttcagtccaaagcattcaggaagcactgaaatccgtgaccccatccccacctccgttgtggggctttgtaatgcatatcagcatattgaagaccgtggaaagcagtctccaacattttgtttaattcaaac

SEQ ID NO: 256565 - DNA, 421 bp, Homo sapiens
ctgtggagaggaccagtgcagacatggccaagtctaagaaccacaccacacacagccagtcccgaaatggcacagaaatggtatcaagaaaccccgatcacaaagatatgaatcctatttttttttctttgagacggagtctcgctctgtggcccaggcgggagtgcagtggcgccatctcggctcactgcaagctccacctcccaggttcacgccattctcctgcctcagcctcccgagtagctgggaccacaggcgcccaccaccatgccggctaattttttgtatttttagtagagacggggtttcaccatgttagccaggatggtctcgatctcctgacctcgtgatccgcccgcctcagcctcccaaagtgctgggattacaggcatgagccaccgcgcctggccgataagaatct

SEQ ID NO: 256566 - DNA, 426 bp, Homo sapiens
taatgtaattttgtgtgcatctttcataatttttcctttgaaaatataaataattataaattaatgtgtatattttttgaaactggaattatagaacaaatagcagccattctataattttttgttggtgtttaaattgtattgcagatattcttacaagtcaatatgtatcaatatggattgatcttataatggttgtatattatttcatagcaatatgtataccagaacttattatttattcaaccaggtttctgtggattgacattcagatttcttttttcctattacaagcaatgcagcaatgtgcatgtccatattatggtaccataaattctctcagataagtttccagaaataaaattattgagtaagggggtttgtgtattttttaattttaataaattataccatattattttgcaa

SEQ ID NO: 256567 - DNA, 367 bp, Homo sapiens
cacaccacaggcgccaggcaggctatggggtggcagcttaggcaggtgcctgagtacactgccaggtcgttcttccttgtccctagtccccaagggattagaagggtttctggcacttctgtgcttcctgagatgactccctgttctgtggttttggtgccagtaattgataaacctccaaaatgctgctgattggagcatgtcctcgctcctaacactcagaccttcaactcgggcctttgcctcttcaataagaccctccacggcccctccacacgtgtctccacctgttgcccaggacggggagtttacgtttgctaacaccatggttattaaagagcttttccgggctgcctgacttcaaaat

SEQ ID NO: 256568 - DNA, 348 bp, Homo sapiens
  misc_feature (331)..(331): n is a, c, g, or t
gtgcagaagaaaacatgatcttgtcattccactgtgcaaacccttttgaggatttcgatagcccttagaacacagcctaaacattttaacattgcctactggtcgtatttggtacatgccttttctcctgcagctgatatttaccacacacacacacacacacacacacacacacacacacacaagctaattgcaaatatacattttaacattgcctgctggtcatacttggtacatgccttttctcctccacctgacgtccaccacacacacacacacacacacacacacacacacacacacccccacctcctgctattaaacagtagcntcgcctcactgagaatc

SEQ ID NO: 256569 - DNA, 407 bp, Homo sapiens
agctggcaggacagaatcaaaagcaggggggtgtgggtgtggaataagtcagtgcagacccaggtccttgccgtcgctggagatctctgaactttgccgcctccctctttgctgaggtccctcaggtggcctcattgtttctattaccttggtagaaagcctgtgtgaagtccctgcctgcctggcagtctcgttgccatggaaacttccattccgcacacctgattcacacatcacgcttggctaagtccagacagaggtcacagactggcatttgccctttgtttccccttcttgtgttttccaggcacttaaaaatggatatagaaagatgagagggtgggcagtgttgtgtgtaagaacgctttgttgtcaactgtagaagtgtgtgaggaaaaaaaaaacca

SEQ ID NO: 256570 - DNA, 441 bp, Homo sapiens
tttcttttaataatttgctgagaatctgcaatgctgtaagtactttataatcattacttaatttaatcctcacaattgtcctctgtagtgagatgaagaaaattgtagtcactaaatttccacctaggaagagaattgcacttatttagaaatcatgccttgaaaactgcttgggttagaaggtagatccctgaactctccaagagtaagaacagtggaccttctgcaggtgaaactggagaaaaggtagatgagaaagaaagagagcgagagtaagacagagagcgagcacaagagaacacagaaggccccttccaccaccccaaatcttcagcaaattctacataaatcatgaaactcttaatgcgagtagatttctgtttttcttttttaattcaaaactgtcagggggctgggttctgtagtcagagtcttgtgata

SEQ ID NO: 256571 - DNA, 231 bp, Homo sapiens
ctcccctctgccatgatactcagggcctcgtgacataagctgagaaggagaattgggatagagccatcttaggggccaaaacaaggggtttgaaaaataaaaggagccacatggcagggtgagggcaagagacatgcagatgcataatcgtccatgggatttggaaattacaaggtcacctttgagcagtttcagtaacatgctgagaagagaaaccccatttctgggagt

SEQ ID NO: 256572 - DNA, 443 bp, Homo sapiens
ccccggtaccacctatgtgggagaggaggctttgtagcagtcagcaagggtggaagcaggtaggggctgctccaagcgatgatctgagaggggaagtccagcccaacctcagggggctctccccgcagcccagcacatgttcattggagggtaaagtattctgtagtaagtcctgctgtctttcctgctgtactttggccttaaggcaaacctcaggtctccaaagataagccgccctctggtgatactgggtctcaagtccttcatgcctaggacttcagggttaaaatcttcctttgctccatcaggggctggcaggcagggcaagcagccctagccacagaagtcaccttaggctgagcccgactagtctcagggataaccaccccaggctacaccagctgtgaatgctcgctagacctagcctcataaaggcagggcaa

SEQ ID NO: 256573 - DNA, 625 bp, Homo sapiens
gcctagagagtgaaagatactttggtgtggctcgatttttattatttttagccttatgatgatcctttaatttcatcctaacctgcttcattttactttagtaagaatcatcatatgatataaagagtaatgatgaaaagtaggtttctcaaacaaaatagaccatttctaatccctgacaatactatctccagacaggcatcaagtaaacaaataagcaactcttctatttttcaggatctagttctgaattatttgatttcttttatgttcgtttccttctaattatttgtgtccaatttcttgtcatctcatttatggcacatccctctcagatcactgggttgtcattccaggggaagtgagtactattatcccccattttacagatgaggatactgaatgtgaatcattagttcgttcaggatagctctactattaagtggtagaggcagaactgtctgggttgagaggccaagcatttaacttgaccctaggcacactgtaagatcaaattaacccattttggagcttgcaagctagtcttataatttaaacaaaattaaatattgattagatgagatgatcacatctagatatatgaagttattgagattttttaaat

SEQ ID NO: 256574 - DNA, 382 bp, Homo sapiens
gaattcactggatttaacccaactaaagagctttcacaaataggaaggttagatcggagttttgctggtcaagtgtggagcagggcataaacgattaatggatcagagaccatggagcctcctgtactcaagagatagctgctgctgaagacctggccccaggtgaataacataggcaaaggaacaacaaagccagaatggggaagagtgagcagagcatccagaaatggcggttgccagcaaaatagaactgctgaaaaagggcatggcaacttgaacagaaaaagtaattagtgcaattgaggagcttcaattacagcgttaaactggaactcaagaacatgattttttaagtttaaaaatatagcagatgtactgaaaa

SEQ ID NO: 256575 - DNA, 466 bp, Homo sapiens
cctgtttctacagtttgagcaggctctaaaggctacattctacatgcagctccttcttgctgccaagaaagaagaccaggccctgacttcatctagagatcctcagggaacattctttcctaatcatcctgagaatctttctgatcatcacagcacccaccattcaccatgccaaatgagataacttagttattctctcttacaaaccctatgcttttgtgtaccctcatttattcattctaccattgaacatttccctagaatctcttgggtgccagacactgtgcctagttactgaagaaacatatctcctatctgaggcaccaggcatataagtaaagaagaaaccatcttggacagtcaagcacacaccagatagagcggaagaaccacccagctaagcccaatccaaaatgctgaatcatgagaaaaaaaataataaactgttgttttaggcaactaagat

SEQ ID NO: 256576 - DNA, 370 bp, Homo sapiens
agggttcaagtgattctcctgcctcagcctcctgagtagctgggattacagaagcccaccaccacgcccagctaatttttgtatttttagtagagaaagagattcaccatgttggccaggctggtctcaaactcctgacctcatgatctgcccgcctcagcctcccacgttgccgagattaaaggcgtgagccaccacgcccggcccttccttctaaaattttaatagatatttactctcctttctccaaagattacccctccgtgtatgttctcagtcacatcccttcctaatttctgtggaccttagaactcatattttaccacttatgtccacggcatctttcctgcactgctggattcctatatgt

SEQ ID NO: 256577 - DNA, 370 bp, Homo sapiens
ctgcttgtccacattggaaactggcttaataatgtacctcttttagctgccttcccttcctctgtcatttcttttctctccattttacgtattttgaatgactaaactcccctgaatatttcttatattcacacctgtgtcttagagactgcttgcaaagaagccaaatagagacaagaaaaactaatgaaaacagaaaaatcagaaaatattgagctacagaaagaagaaaatgaaaatcatcaataatctaaacaccatttgtaatcactactaatgttttaatctctatccttccagacatttttttttaatgcagtcacttttttttttaaatggaaataaaatgataatgacaagtaaattatga

SEQ ID NO: 256578 - DNA, 416 bp, Homo sapiens
gtagttctctgagtgtggttcctggatcaggagccttggtatcactgggaatgtgttaggaatgcagattcttgggttctaccccggattgaattcagatttgggagcggggcccagttatctgtgttttaatcaccccctcccccaggtgaatctgatatgctaaagcctgagcctcactcccctggaaagtgacgcctgattcatctgcccagcccatgggcacccattaggaaggtgcttatgggagctttgacctgggctaggtgccggctcttgatccatctttttctaaggctgagggtgtccatagaaggagaagtaggtgcatccgcttagatgttatttaaccaaataaaggtttacagcttacagaaaagaggcaagattaactaataccttccaaaccataatgt

SEQ ID NO: 256579 - DNA, 167 bp, Homo sapiens
  misc_feature (6)..(6): n is a, c, g, or t
  misc_feature (9)..(9): n is a, c, g, or t
ggtttnggngagccctttactgcaccactcatgcctaactacctgctgtatcaccttccccaaccccttgggcctgagtcctccacatcattcagcagatggtgggtggttggagagttgagtgatgtacctgcttttcagctgccttgggctagaagtgaccgtat

SEQ ID NO: 256580 - DNA, 445 bp, Homo sapiens
tttacctctacctggtctcagtttattggattaaggttgaacacctaaaccaaagagacccaattaataagctgaagtaaagagcatcatgttctctttggacactggacaggtggatgttgatgagcttgtgtgcagcagttctactggaagtatgtacaaggggctcagccagccaatttggacggtgtatgtgataagcagagaaaggcagcagtctgcagagactgcagaatgaaaaaaaaaaaaaaaaaaaaaagcagaaacccagagagaaatcagacaaaagaccaggtggtgggcaggggtctggggattatccaagcttaaaattcagggtctctaaacttgaacaggctgatttcaaagctgtgggcctagcaatgtgttcacatagcaatttggctttgtaaaatttataaaagtaagatattttaaccacaaa

SEQ ID NO: 256581 - DNA, 1012 bp, Homo sapiens
actcttatgtttaccggaagcctccaagtacatgagctttaatgattgtagaattactagcttcataccttagagaagtaagcactacatgctaaaagagccaatagtttgtcagattatttcttgacaagttaccaggaagaacctttaatgctatgaatatgggcttataagttatgtcagatatttaatctccagtcattggcttgtattttatgatgaagaatatataacccaccctttttaattgatagcttgagttaaagtaatcttatcttttaagaaaactggcagaaaactaaaagatatattaaaagcataatcttttctggcaaggtgtgatttcatgcaaaagctaaagtgattaaaaactttttgtggacttcattaagattctcagaatactgagtttctgtttctgagtaatactgatgaaaggaagatgagcatttttccaaggacaagtatattctagacagcttttgtgaaagtaaatagttttgtctatatatctgacagtcatgacatgaccagggaagattccagatgatcatgcaattctgtacattctgtttcgtacaaatgtaattttaataaacaatttttaaaaatatcttgatagagaaaaacaaagagccgtgtctcctgttagccccattgtcagttagtgactgcaagtcagttaactgagcgaagcctgtgttcttttatttaagcaagaaaaataaatcagctgtgtatttataatgaaaaatccattcacccagcatgctctgggccatacaaattattaattgtactgaaattttatattttgttaccacgaaacatggtagtaatttaaataactggcataataaaagtatattccagcaacactatattgtaaatacattaaaatgtatcagtgtacggtatctgaagatgcatgtgtataagtaaattttccttagtttaaaagataactacctttctgttaagcactgagaggaccaaaaaaaaaaaaaaaaag

SEQ ID NO: 256582 - DNA, 454 bp, Homo sapiens
ccctcttaccccttaggaattcaaatctcctctgtgcctttgcaaagcaacatccatcttgaacataaatgaggttctggcttgatttctgggcttgggcatcagacatctcccttttgcggacacctacagctctgttcttgaattttgtgattgcggataagcacccgctccttctttttaagtcctttggcagatagtcattcatgcttacaggatgacccaggcaaagctaaacacagatctgggctccaatcccaccatggctgtgtgacctagtggaagttccttaacctctctgagcctcagctttcttttccacagattgctgattaaaacacttactttagtgttaacacaagggaaagctgggcgtggaggtctatgagaattctctatactatttttgcaactcttttgtgaatatgaaataatctaaactagaagatttaaa

SEQ ID NO: 256583 - DNA, 449 bp, Homo sapiens
ctgtgcagttctgttctcaacatctgcttagggtcagatacacacacacacacacacacacacacacacacacacacacacacagctcatgggtggtctcaggaacttgtaaacaactttaaagggtcacttttctgagttttcccttctccatcatctccctggtattttcaagttccttaaaacacccatttcagtcctctagcccaacatcttgggttttagttcccttgtttggctgcatactcaccttgactatgtccacgtctcagaaaaacagttgaggacacagagagaaaaaacagcaatggagtttgaccacctcttgagaccccagctcctccaattgcagaattaagttatctctcagggttttaagctactgcagttacttgttgccacctccaccatcactggatggggactggagtgcaagagaatgaagaaaa

SEQ ID NO: 256584 - DNA, 329 bp, Homo sapiens
ttgttgcctctttttctccatgcctttagtggcttccttaaatagcttaatctaaaatacatgtgttttggaaatattctctattccagtgcctcatttatttttccagttcaccatcctcgaaaaaattgggacctgggatgagttcaacccttcatctttgcagctacatttgggttgctcaatgctcttaggaaaacacacaatttctttcagtttcctttttccctcacagagcaatgtagcaggcataggttagaaactccctcagctctccgccaccctagttcgaaacgttacacattcacatgcatttccaactccatttc

SEQ ID NO: 256585 - DNA, 378 bp, Homo sapiens
  misc_feature (176)..(176): n is a, c, g, or t
tgaatggacttgggcagtctggtcagtgtcagcatggggcatagctaaggtgtgtgtaacatggctgaaggaataggcagatagctgtcgccttagaggtgacagtatgtaactgtgggaggtgaccagatggtcaggtgagacaggacaaagaaagtcagggcaccatagggagnggagggaccagaggagatcaagctagagttttccaaaggagtggtagccaggcaatagtgaccttgtaggtgtcaagaaggcagattggacgttgaaagaaacactgcagttgacgttaacatgatgtttacaattaatttggctttcaaatttttctccatttgaaatttttagtgtcatttgatttaaatgaaatctggt

SEQ ID NO: 256586 - DNA, 357 bp, Homo sapiens
ctagatgatttcacaggctattagacaagagaaaaggaagatcgtctgcccccttcgttttacagatgaaaagatctgcctgacccgttctggctctgcaattccatgaattatctaaaatgtctgtcattcacagatctttcccctcaaggggcccacacctttcttcttatctcccttttcttttttttttttttaacttctctaatagaagtgctacttccaaaagtagagtgttcttgtcaccagaggaatcgaacagcggctgaacagcctctctgagctgcgatggccttatctggaccgcatcccgcattccaaaggctggcaatgcaatatatacctatgtctctcaaa

SEQ ID NO: 256587 - DNA, 273 bp, Homo sapiens
ggctatgtggccgcctcagcacagctggggctgggactctgtctgtggggatagtccggcctcacggccacagcttcaggccaccatgaccctggacgtgaaggcagagtggtggcccctggcctggtgggtcctgcgagtgaggtcttcacaggcggctttggtggcacaagtggtgttaaaaaaaaaacacctggccaaagtccctcatgcagacaggagaccgaggcccaggcagcaccgagcagatgggggcactgcagaacccagcag

SEQ ID NO: 256588 - DNA, 147 bp, Homo sapiens
accctgtctccacccttcctccatctagctgcttgaaaggcagctgtgatggctggagctccttgggccgtgaggatacatccttcatctagggatggtggagtggaaagccaggttttggacaactgtggagttcctgcaacacct

SEQ ID NO: 256589 - DNA, 475 bp, Homo sapiens
agccccccaggtgtgccccaggccccagcagagtgagcagggcctgggcccatggtccccatagactccgtagctgtcagtgagattagcaggcaggccgggaggggagaccaaggacaaggacccagaatgttcccacactcagcaggccttgccagtgagccctcacacctccagccagccccaggcccaggctactgaactcacccggtgagatgctgtgggttaggagcacttcgggtgtcctggcaggttcctgcccccctggagaggctcccaggagccctctgggtgacttaagagaggacactctcctctcctactggagggaggagggtgtcctcaaggcccggggctctggattaaataagaagggagacaactcaagcgccatgtgactattgggcaaatatcacgttcatgtattatttcaaattaatatggtgacatgtttcagacatgcaaaaaaaaaaaa

SEQ ID NO: 256590 - DNA, 497 bp, Homo sapiens
aggtgctgtcaccctcaggccttgtttgattcccagaacaaacctgtgaagaacagaacctggaagcatgtcaccattttatagatgaagaagcagaagctcaaaagacagggacttgtccaagcctgtacaaccagcaagtgactcagcaacggaaagaatgcaggtttcctagttggccacactgagaatttggtgctttgacaactatacttcatctattgtaaattttccagcttcacacaatttcttttatttacaaaagtactaattattatagctaatctctccctaaggaatcacccactgagggaaaaacaagaacaccaatgtaggcacatctaatggccttatattttgttgctcacttatttcctgtatacttagttttatttgaaacttaatgttgattggatttgagaagactgttccccacaggatattttcaattgttagaaaaaaataaaataaagaacaccaccactgaacagttaaaa

SEQ ID NO: 256591 - DNA, 241 bp, Homo sapiens
agctcaaattttctttccagctggatcaacatttatttgtctggattaggtaccaccaaagttgaagtgaagtagatttcagtgtagacactgcttttgaaaacagtcttgaagtccttgattcatttatgtaatctgatttatttgtggcctaaaggctttatatttgtctttgtataatgagattgtatattataaaggtcatataattagcagaaataaaagatgtttaaaagttatt

SEQ ID NO: 256592 - DNA, 421 bp, Homo sapiens
tagtctacaaacagctattgtatattttgttcacgttaacatttctatcacctagacccatttctgacctacatcagggaatcaccattattgaccaaactgtccttttccattccagactctttaccaatgctcagggccttcaggaaacgggaaatacctccttttcaccctgtttctttacattaaaacctctacatctctgcctcttttacctgttggctattagttccaagtcctaccgctatccaccacctactcttttctgagaagttaggattaaggttccaaaaattacattttccagactcccattttcagccatctctgggtagattttgccagtaggaaatgtggacaggaggtggaagttggaagaaggattcttttctgacttccaggttgggtctccctctccatt

SEQ ID NO: 256593 - DNA, 282 bp, Homo sapiens
  misc_feature (31)..(31): n is a, c, g, or t
cgccgatgattccgaagatataacagcaggnacaggtatttcatgacaaaaatgaaggtgaatatgatgtgcgaaaatacaaagatggaagcaacaagctaaggatgctggggcagaaagatggaacctgggttactcatgacatcttgaaactgctgcagccatcctagactggctgcctctagacttaatatgtttagaaagtaaatcccaattttattaaactgttatctgttatgtatatatgaacacattcttagctaataaactatcatgtctcct

SEQ ID NO: 256594 - DNA, 670 bp, Homo sapiens
tcactggccaaagcaagtctcatggccaagctcagcgtcagtgtggggaggaactacacaagattgtgaatattgggaggtgtgacatattggtagtcatttagactagggacagaccaccttaatccaatcaagagaataattaaaagttacttccagggtatagcccagttccaacttaaaatctttcctccttaggtcctgaactcaatatttttacccacccaatcccacacccactccccttgaggcagttgaaaactctggctagtttctcagcctctctccattactgctttctgaatgttaattgcctcgaagggaaaagtggcaccaaattctggactcaaaatcttggatttaggcccctcagactgttgaagttctactgctccagaaaagagtaataacaggatggagatggagtttcatgacaaaaatgaaggtgaatatgatgtgcgaaaatacaaagatggaagcaacaagctaaggatgctggggcagaaagatggaacctgggttactcatgacatcttgaaactgctgcagccatcctagactggctgcctctagacttaatatgtttagaaagtaaatcccaattttattaaactgttatctgttatgtatatatgaacacattcttagctaataaactatcatgtctcct

SEQ ID NO: 256595 - DNA, 397 bp, Homo sapiens
acttatgggacactttcaagaaaaccaatgtacacatgtgtgtgtcccagaaggatagagaaagtcagaggcaaagagcttattaaaaacaaaacacacacacacacacacacaatggaaaacccccaaattcagagaagggaatgttcattgagcccaggagttccagatttatgaagcccaaagaaccccaaatagattaaatgtaaagagatcttcaccaagacacattataatcaaattctcaaaagtcaaagaaggagaggattttgaaagcatgaagagaaaaagcaacttgtcacatgtaaaagaacccacataagcgttcagcagcttcctcagcagaaaccttgcaggccgggagagaataggatgatatattcaaagtgctgcaagg

SEQ ID NO: 256596 - DNA, 430 bp, Homo sapiens
gttttctgtctctctatatttgctttttttggagatttcctgtaaaaggaatcatgcaatatgtgttctcctgaatggcttcttccactgaagcagctcttgaggttcacccgtgttgtagcatatatccatacttagttactttttattccctaatagaatgccattgcatgaatagacattttatttacccattcaccaattaatgtatgtttgagttgcttccactatttggctattatgaataatgctgctatgaacactcacatacaaatctttgcatatacccttttttgtatgtgatatggtttggttccctgtccccgttccaatctcatgttgaatttgtaatccccaatgttggagatggagccagatgggaggtgactgaatcatgggggtggatttccccttagtgccattcttgcaa

SEQ ID NO: 256597 - DNA, 793 bp, Homo sapiens
tacaaggtctttgtatttcaaagctcatgttgactctgttacccttgtgttacccaagtgacattagactgaaacatctagtttcacctatattacaatttgcttatttaaaaaaatttactcactctttataaataaatttattttaataaactctacatggttagcaagagaaaaatcatacatcgttttaaatatcatagcaatattactgaccacaaatggaaaggagcaatgaaaatgaagctgaattgttgggttttggttagataagaggcattttcaagggcttgagcctgaagtctgttctcactgttataaagggaaactagcaagtggtacccagaggtattagaaacatattgacacacagctgagacttttcccccctattatttaaatgaggaagaataaaagagaattcaaagggcaatgagttctcaacaggcgttagcgaccttccttttgtgcaccttctaaaaccacccccatatcactgtcaaagaactgcggctgtgtacggtgtttcttctctcaagagtgccttgaaagatcttgaagagacagacaaaatccagacaaatgccatgcagtatgaaaagtataatgtcatcatgctctccaaactttttgttcacgaactcttgtaataaatttttgaacctatgctctctacatacatttatagtcccccttttaaaatgaatatatgtgcaagggcatgccagtattttacgcatcttgtaaagcgaacaaaagtataatttttttacaataaatatttttttttccc

SEQ ID NO: 256598 - DNA, 446 bp, Homo sapiens
tgtaataaatcttcatttgagtaactctagtctcatccttcaattttgcttttgtttaattaacaacaaaattccaataccatttggattgcttcttgggcaaagggagagagccagctataacatttataatcgggggagcacttgttctgctcatcataaaagtgcattggccagatgtcacgcggcagcggagtactgaaaggaaatgtaagacgttcatcagtttcagtagatgatatacccctttgcttcatatgagtgctcagcctgtgtttgtgcaaatggagttataagagcacagggaggcttaaagggaatttctggcccgtagattcttcgtccggcctgattcatgtgcaaatgcaagactcctcaccactttgaaaatactgtatgtgttggtagtatgtccaactgtaataaatacgattctgtagttttga

SEQ ID NO: 256599 - DNA, 429 bp, Homo sapiens
ctctgggtcccctcttcggtccgggaaggagggacaggtgcgcgcagtggcgcagcctcgccttcctgccggcagtagattctccacttctccaactcccgcactgacctctcctaaggaacacccgcccctttttcttgaagttccaggcctgaggccgccctgcggcaagttcagcgttggggtcacgtcccagcggcgagcagggctgatgcctcctttcgggttgggcggcggcgcgatcttgattgaaatttggcagtgtcgagatagatatacctaatgtaaatgacaagttaatgggtgcagcacaccaacatggcacatgtatacatatgtaacaaacctgcacgttgtgcacatgtatcctagaacttaaagtattaaaaaaaaaatttggcagtatcggccaagatgttccgcagttgc

SEQ ID NO: 256600 - DNA, 455 bp, Homo sapiens
cagcctatcagctgtggaagacattttgtaagcttcaaagggccatctcttatacaataccagacacttagtagatgtcttttaaaaaccatattattccagtaaagaatgagtgaacatttgccttctggaatctgtggcattgtatctgagtgtattctgggaaagaaagcaattctgctttggagcccggtcaatctgtttcagggcacacattgccatactgcccatagatatagaatgtaacttctctgagcctcagtttactcattctctatatgaaaaataataatactgaacttaaagtaggggcttgtagcctggagtccatggatccttaagggtaccttaagatgcccttaaaattgaatataattgtctatatatatgaatttttatgagggaaagaattttagatttcatcagattcgttaactaggtcagtaacttctttt

SEQ ID NO: 256601 - DNA, 332 bp, Homo sapiens
cttagaaacctgctcgatatagaagagccgtaagttatgacagtaaagagtactacatgcgactggcctctggcaatcccgccattgtccaagacgccattgtggagagttcagaaggtgaagctgctcagcaagaaccagagcatggggaagacactattgctaaagtcaaaggtttggtcaagcctcctctaaaacgctcccgatctgcacctgatggaggagatgaggagaaccaggagcagctacaagaccagattgctgagggcagctccatagaagaggaggagaaaacagataatgctaccttactgcgcctgttagaggaagga

SEQ ID NO: 256602 - DNA, 3177 bp, Homo sapiens
accggtcccgcctcccttgacgccccgccccgcccctcctccctgctctcttagaaagagccaatcgctccgtctcattggcggccccgactcgtccagctgggtcgcgttagagtgcccgccccactcctcccagccacagccccgccccacctcccccaggccaatcagtttggttcctctcccctaagccacgcccccgctacctcgctcctcctcccacccaatcccgtcggtctctccccccgtgtccccgcccctgcgtccccgcccctcccgccccgccccccgtccaatgctgagctcagtctgcgtctcgtccttccgcgggcgccagggggccagcaagcagcagccggcgccaccgccgcagccgcccgagtccccgccgccgccaccgctgccgccgcagcagcagcagcctgcgcagcccggccccgccgcgtccccggcgggccccccggcaccccgcgggcccgggggccggcgcgccgagccatgccccgggctgccggcggcggccatggggcggcacggcggcggcggtggcgacagcggcaagatcgtgatcaacgtgggcggcgtgcgccatgagacgtaccgctcgacgctgcgcaccctgccggggacgcggctggccggcctgacggagcccgaggcggcggcacgcttcgactacgacccgggcgccgacgagttcttctttgaccggcacccgggagtcttcgcgtacgtgctcaactactaccgcaccggcaagctgcactgcccagccgacgtgtgcgggcccctgtttgaggaggagctcggcttctggggcatcgacgagaccgacgtggaggcctgctgctggatgacctaccggcagcatcgcgacgctgaggaggcgctcgactccttcgaggcgcccgaccccgcgggcgccgccaacgccgccaacgccgcaggcgcccacgacggaggcctggacgacgaggcgggcgcgggcggcggcggcctggacggagcgggcggcgagctcaagcgcctctgcttccaggacgcgggcggcggcgccggggggccgccagggggcgcgggcggcgcgggcggcacatggtggcgccgctggcagccccgcgtgtgggcgctcttcgaggacccctactcgtcgcgggctgccaggtatgtggccttcgcctccctcttcttcatcctcatctccatcaccaccttctgcctggaaacccatgagggcttcatccatattagcaacaagacggtgacccaggcctccccgatccccggggcacctccggagaacatcaccaacgtggaggtggagacggagcccttcctgacctacgtggagggggtgtgcgtggtctggttcaccttcgagttcctcatgcgcatcaccttctgcccagacaaggtggagtttcttaaaagcagcctcaacatcatcgactgtgtggccatcctgcccttctatctcgaggtgggcctctcgggcctcagctccaaggccgccaaagacgtgctgggcttcctgcgggtggtccgcttcgtccgcatcctgcgcatcttcaagctgacccggcacttcgtggggctgcgcgtgctgggacacacgctccgcgccagcaccaacgagttcctgctgctcatcatcttcctggccctgggggtgctcatcttcgccaccatgatttactacgctgagcgcattggcgccgaccccgatgacatcctgggctccaaccacacctacttcaagaacatccccattggcttctggtgggctgtggtcaccatgacgaccctgggctatggagacatgtaccccaagacgtggtcggggatgctggtcggggcgctgtgtgccctggcgggggtgctgaccatcgccatgcctgtgcccgtcattgtcaacaactttggcatgtactattcgctggccatggccaagcagaagctgcccaagaagaagaacaaacacatcccccggcccccgcaaccgggctcgcccaactactgcaagcctgacccacccccgccacccccgccccacccgcaccacggcagcgggggcatcagcccgccgccacccatcaccccaccctccatgggggtgactgtggccggggcctacccagcggggccccacacgcaccccgggctgctcagggggggagcgggtgggctggggatcatggggctgcctcctctgccagcccccggcgagccttgcccgttggctcaggaggaggtgattgagatcaaccgggcagatcctcgccccaatggggatccggcagcagctgcgcttgcccacgaggactgcccagccattgaccagcctgccatgtccccggaagacaagagccccatcacgcctggaagccgtggccgctatagccgggaccgagcctgcttcctcctcaccgactatgccccttcccctgatggctccatccgaaaagccactggtgctcccccactgcccccccaagactggcgtaagccaggccccccaagcttcttgcccgacctcaacgccaacgccgcggcctggatatccccctagtggacgaaccccctccccccgggctcttgtcaccgcctgagacctcgcgagactttcggtcccccccgccccttccccccaggttagcaattgggaatggctgggagggggtgtccccaagacactgggcttcaaatctccccccaagccctccctcctacgatcaagacaccttttgtccagacagctcccttagcgttgcctggaaaagccacagagctccctgcgggggtgcagaaccctgcaggcagccccaggctttgcagaaaccacacacactgttgctggatcttgagtcccattagctgtgagatgcctgtgagagccttcccgcacccgtcagaagctcagagccttcttggaccctttaaagatgtccctctccccagccctccgcctcaccgccccccacccccgaccccgtccttagaatcttctggaggagcctccctccccccccaccccccccccactgctcctggagttctcatctgattccccaagggcactgccagcttcgctccactcagcccccttgcagaccccaccccctgcctgctctctttccctacaactaggtcagcccccagccccgccacggcggccgc

SEQ ID NO: 256603 - DNA, 468 bp, Homo sapiens
gagaactagtctcgattggagtttcttagagttctctgcctggatatggattcccccatcatattccatgagacagcccaacctgagtgtcttccagacctgaggtacagaaacccaagtcagcttttccattttatacccatctgtctctctctcacatactcaccaaaacctcatcctgggctccttacagcccggatacttgaaggcagcccaatgcttgcctttgtcgtagagctgcagtcatctccttattagtcccaggctcagggcccaacccgggagcagagattctatttgagttgagttgtgcagacagatcgcaaaacttcttttcactcctccctacacttcctttctcaccttgggttcttcttactcattcccagacattcagatttatttgctaattcattcattctttgtattgatttcttagggcagccaaaacaaactaccacaaacttg

SEQ ID NO: 256604 - DNA, 550 bp, Homo sapiens
acattatatagaaggtaatggtaagaatgtcatgggacacatatataggtcacaatttccatgcatcagtcactgtgttaaccacttcctaaggattatgcagttcttctcatttgaatatgtattagcttacaagtgtacaatacaagatcccattagaatcccattcaacagatgaggatattaagacagaaattttgtgatttgctcaaggcctaacagctggggtcagtgtttagaaatccatccctgtttggcctgactgtacagcaggacttctcaaccctggcactgttgacatttggggctgggtcattctttgtcctatacattgtaggatgtttcatgcaaaacatccttacttttacccactagatgctagtgggacagccaaaactatctctgtacaccgccaaatatgctctgttgggcaaaatcacctgggttgagacctgctttgtctttcattcattcattgaatactcattgactgcatggcctgtatcaggcactgtgcgtgtaccagacattgatggacaaaacagacatg

SEQ ID NO: 256605 - DNA, 953 bp, Homo sapiens
gcgggaagctagaatcacataacccacaagagtggaccctcccgctggggaagggcggggaggaccgggaacccacgagagtggaccctcctgctggggaagttcagggaggaccaggaacccacaagagtggaccctccctctggggaagttcagggaggactgggaacccacaagagtggaccctcccgctgcggaagggcagggaggaccagaggactcggggatgatgaagacgttccagctcctgacgctggcgagactcacgctgctgacacctgtcacagtgcacgggctcacacttaacttttgtgtgtttcacgttgttttcatattctggtgtaagtttgttttatttctctagaaagaagcaagggctgtgaatggtgattaaacgttccttctcaggtttgcctgtgcgtggggtagaggtggaccacgcagaccctccctgctgtgagctccgtggagggtcaatgcagatgcagggagactgtggggcccggtatccgcgacgctggacaagggggttcccgctctggaaggaggagtcaaggtctccagtggtgtcggattagaatatgaggaatccgtctgagctcattctccacaggatcccacgagggaaagcctggcttttccctgtgcagatgccaggcctctacaggttccagaaggttcctctgctcctctgagagggcagggcacttgcacagggaacaggcagccgaaggcagccacagccctactggaaccagggtttctctgcctcctgggaagaggtcagtggatgggttggggagggggacaggcggccttcctgtgggagtcaaagagcctggggcctcccctccttggaggcgaccagacaccttccctaactggaggaaattctgaaccccagacctggaaagttcaaagctgaaataaaatcgccccttgttttgcgaaaa

SEQ ID NO: 256606 - DNA, 410 bp, Homo sapiens
actctcagggccactccttccatcccttgacagcccctgctcaccctgatgtgatccatgcaggtgagagctgactcaggctctctctgccacccggaaactggcttcctgtggctcttgatggggcctgactggtttgacttggtgaggcagctgtgatttcccaatacctcctctctggggatcttcaggcacacaccatctggctctgtgaggacttaggaactatctgggtgcagagaggtggtattctcctcgctgtcatcaggctgtccttttctgggtttcccaccctcctctgtaaaatgttgttttcactaatctctatgcctagcaagagcatctagcaaacatatgtatgcaagatttgttgaaagaataaaagttgtaaagttccttccaactcctaa

SEQ ID NO: 256607 - DNA, 404 bp, Homo sapiens
ggcactttttggctaacggtgctgccattagccaaaaagtgactgccggtacataaacagattttgtgctggtggttgatggcttttatattgatcttattctcttgatgtgccactggaataaacatttaatagagtgtttggaaacatgtatctagttcaaaagaaggatctgggctgaggtataaatttagggcagtttacattgtgtagggaacaactaaattcatggaagtaaatgatgtatctgttcctaagtcaccctatctgctgagttacttgtgacaaattgtttaaacagtaaaagaatttaatatgaaaagatacacgttaagatgattctaggattaattcattcaggcatgacagcatcaccaaggacccaggttctttctatcttttaa

SEQ ID NO: 256608 - DNA, 336 bp, Homo sapiens
tagcagcacttacaatctaaggatctgacccaagtccatctgcatctctccctcttcgacagacagatggtatgtcggaaagtgttgagtgtggtaagctggagtttctattctggctctgctttgggttatacaacctctctgaacctcagtttcctcatctctataatgtgggttccagaatgcctaactctatagagctaagaccatatgctgtttatagaaatgcttattatgaaacctggcaccaaatagctccttgaaaaacataagcccctcttccttcgttccgtctttatgcctctggtccccctccctcttagagtataggatgag

SEQ ID NO: 256609 - DNA, 308 bp, Homo sapiens
gaacaaagggctcctttcttgagtgctactctgatcccatgaattcaaaaatgtttaaggaagctctatctccacaccagcacctgaggagatggagacttttagaatagaattttaaaatgttctcattgagccctccattctagaaatggctataagtaaatgaaactcggaagtgtctggagcctactgagctctacctagcaacactgtgtgttccttggcacacaagacagaaactcaaggcagacccatcacttcctcagataccatcttgtcccattttccttaagataaggtgtcctggt

SEQ ID NO: 256610 - DNA, 543 bp, Homo sapiens
cagcatagtaggatggaacttgactctgtggggtgggagtgaggactggcatgaaggtattttccttggggtgtagggagggcctcttcagtaaggggaaagtggaatagagacccaaaccaggtgagggagggagccaggctgatatctgggagaagagtatgccagacagagggaatagctgatgcaaatgatccagtgaggagtgcacttacttgggcagagcaaagcagtgtgtgggaggagtgagggaggtggtggagtgctagcagatgaggtcagaaaggcagctggggtaggtgatccaggcttttaaggggcttggattgaattctagagtaggataggaagccactgaaggatggggagtgatgtgacaggtttgtattttaaaaggaccatcctggatgccatgtgacagaggctaggagcagaagcagggatacacgttaggaggctcttacaggaagtgttgtgtgaagacgaaagcggtgatggggaggatggggcaggaacttgaacacccccatttcccatctctga

SEQ ID NO: 256611 - DNA, 538 bp, Homo sapiens
gagaaacaatgtttccagaggcatttaaaaagcatttccagtctctctgtctctctttttgtttttctttaaatcttctcccagaatgtaccatataatgacattgatgcctggttttcattttgttttttaatagaggacatggaccttgtatagtttgtggccatgaccttaacatttttgtatttccatgagtatcttgcaaggcaatttagaaaaatagagggatgggtgcagtggttcatgcctgtaatcccaggactttgggaggcagaagcaggaggattgcttgagcccaagagtttgaggccagcccgggcaacatagtgagactccattcctacaaaaaaagaaaaagccaggtatggtggtgagtgcttgtagtccaagctacttgggaggctgaggtgggaggatggcttgagcctgggaagtggaggctgcagtgagccgtgatcattgcactccagcctgggcaacagagcaagaccctgcctcaaaaaaaatagaaaccactttttatagaatttcttttgga

SEQ ID NO: 256612 - DNA, 695 bp, Homo sapiens
atgaactgataggagctacggaaagagcgtgcagcagactcccccagatcgagtcccggcttgacccctgacccccactgcatgccagctctggggaaaaacctttccaggcccaagtccaaaatagtattgtcttctgtttgtgtccccttcacttcccttcagaggaactcaccctgctgacactctgatcttagagttctggcttccggaactgtgagaaaatacatttcattgattgagctgcccagcttgtggtactttgcatggcagccccagcaaattaaaaccgagctgcttccaagagaagggccccagagaggcttggaggctccgactggggctgctgggggaacccctagtcctcctgcacactccagctttgacaacactttctcctgccacaaatattgctagagcttctatcatgtgccaggacctgttttagactctggggatttggcagagaaccaaagtccctttctcagagcttaaagctgagtgagtaaagatgggaaacaatgagtaggtaacatggctgatggtgaaatgcactgtgtggaagctgtaagggaagtggacagagacagaggccgatgctattttggtcttggttctggaaggcttttcccctaaggtgacattcagtggaagccaggcatcaatcctggtctctatttgggagactgtcttgt

SEQ ID NO: 256613 - DNA, 335 bp, Homo sapiens
tggtcaactagaatcagaatattatatctctttttaactactaaattgctgggaaagtgtttataaatactgaaaaggtatgggtggctcggcactaaactttactgtaacccaatagaggaggcagaaaggctaatactggagaatcagagtctaaggaacacacaatggaaatctgaaattatttgaagaactgcgatgtggatgagatgtagcttctatagctatatgtaagattgaagagtcagagtcacaaaagaaatataattttagttcaataaaataaaaaaatcaataattaatgtctgaaattaaatcacctttcttaaaagaga

SEQ ID NO: 256614 - DNA, 241 bp, Homo sapiens
tcgctaaactgtagacaactcctagccacagtcatttctgtatccctcagcagaggatctacaggctggtcccctaggacacaacttagtaggtgctcaagaaaagtctgcagattactgaatgctgggtgtgggtcagagcagggcagccatttctgtggcacagatcaacaaggacaggtgaaggccagggaagcaacagcaaatgaaatctccctttcctttcaccaaggagtgaatt

SEQ ID NO: 256615 - DNA, 405 bp, Homo sapiens
gtagattctctggaatttcctatgtagacagtcatgtcatctgtgaacaaagacagctttacttcttttcaaatatgtgtacattttctttttcttgtctcattgcaatagctaggactttcagtacaatgttgaacaggagtggtgagagaagacatccttgccttgtttccagttatctaggaaaaacatctagtttcttgctataaagtaggatatttgttgtaggttttttgtagatgttctttgtcaattgaggaagttctgctgtatttctagtttgctgagagctattacttgggaggctgaggcaggagaattgcttgaacccaggaagtggaggttgcggtgagctgagattgtgccattgcactccagcctgggcaacgagtgaaactctgtctc

SEQ ID NO: 256616 - DNA, 447 bp, Homo sapiens
caacagcccaacactcctttccaacgcataggcctgttttccgcagaaggcacacaactcacacatgctccgtttccattttgcaacctcacatccgtaggtttttctaacattgttatttcccacaaattgcatcttttgcggcacatgataaaacgaactaggttaagctgaaatcgtgtagccacttcccatggcctggtgaggaaatcagagtgtgttttgctttgtattctattcccacctcaaaggcaggattaaagtagcactgcttgtcacgtctcattatggaaatcggtgtggccctcacaggggcgcagtcagttcgggactaggagctgctctgaaggtgtgacctgcctgcagtccaagaccacaacctgtcatttcagagcagggaagaccagccaaatctcccagcagtcttaatcgtattcacaaaaaaaa

SEQ ID NO: 256617 - DNA, 154 bp, Homo sapiens
tctctttacaacctgttccagcctttgagagcctgtgttccaggtcaggactcagagatggaggttacagagacatggaagaactcaggaagattaataaactttgataacttttttggtattataaataaaaacattttacaattaattataa

SEQ ID NO: 256618 - DNA, 772 bp, Homo sapiens
atgaatgagggaatgccgtagcagttcaatcagctttcttcaaacaagttccctgctttgttctcttcaacttcaatccttttattcaattaaggtggatgtcaaactgtgggactgaaaacaaggtttcagtcatctgcttttcatgtctagcacctcactgaaagtgaggggtgtatgccatctattgtcccttgttcttggctgaaatggaaacagaaagagtactattttagcacccttttccatgtacttggaagtggtgcagagaagacagaaaactagtttccaaattcaagatactgcaatagaccttgaatggaacgcaaagttatatgagatattttcccaatctttcagggacttggaatctcaaactggtagaaaacatgttcacaaaacacattcacagcaaaacaggttttgaaataaaagaagtgtacaatcccacagactttcaaataggggaaaattcttttttgattgagaggattcaacagtatttaatgaaagaggtaatatgtgatatgagttttcattcaattaaaataaattctttaaaatatggatgagatgagataatgactgagaatgctttaaaataattcagtgagtgggagaaagagggtcatattatatttgaagtgaagttttctgagtgagtaatcattgaagctgtttgatgggaacggagtgttatactatattttctgtatatttgtattcacttaaaattctgtaatacataaatacaaaaatatagtaacacaat

SEQ ID NO: 256619 - DNA, 440 bp, Homo sapiens
tcaccaacaagactgtgagataaagttggcaaaaatatatttcatcaaagttaacttgaagaatagtttgggcttttttttaagactttgagaagggtgatcccttatatttgtatatagctttacattttcaaagaggttttattatattttgccaagtttgaacctcacaattactggtgaagttagaataggtaatgttgccctcattctatacaagagaaaacaaaatttagagtggacacatggcaagatatacagggttacgtggctgggaagttgctggccctaaggcctcctacttctctatctagttgtctttacactctactgaagctcaaagtttatcttgttaatgataaaataaaaagctgtagcttcatctgtcagaaacctactgtgagttagttgacccagcctctgttttaacgtgtaaatgt

SEQ ID NO: 256620 - DNA, 539 bp, Homo sapiens
  misc_feature (43)..(43): n is a, c, g, or t
  misc_feature (100)..(100): n is a, c, g, or t
  misc_feature (104)..(104): n is a, c, g, or t
  misc_feature (114)..(114): n is a, c, g, or t
cccatatctaaccttaattctggcaccttgacttcccatcaanaggacctctgttaagtccacccaccacacgccactgcagcaagcattaccatgcttnctanatgatttgcnagccatggccagttacaaagttacaaacacagcgaaaagaaaatgtcatgggtcaaaacacaaattagattaaaaaatgaatactagctagttgttttcttctttctttgttaaacaaaattatttctgctcaaccaggtgtgatttatatgacaagtcacagaacctaagccttaaaatgtatataataaatgaatatgctaggaaacattgcagaagagagatgcaatattcacttcaccaagcagttggcttccaggaaaataaataccatgtgactaaataaataatgagcaataccaatgtgatccaattccttgcattttgagtcccctatcttctaagaagtaggggaacagaacttgactaataagggtttatagattattggctacctggcttttaaatgtcagactgtgggcgtt

SEQ ID NO: 256621 - DNA, 493 bp, Homo sapiens
cgatgaacgcatcagtcagggtacctttggagatcactgacagtgacttaaacaataaggaacgttacaagaaatccagaggcagagtggccagtgagcagggtcccttgttcaacaattcaccaggggtctcagtgctgtctcccacctctctgtcgtgtcaccctcatcctcagttgttggtgatagctgcccaagtcacctgacacagctgcaggtgtcccctacagatgaggggatggccagtagaagggaacagtttacccaagcatctcctttaatcagggaggaaaaccctccgcagaacccctggggactcttcctttattcccctaggttgaggtcagggctcagacaaatcctggcaaacggggtgcagccgccacaagagtgcaggcctgccatggttcccacctgacggtgtggaagatgagctcccaagctgagggcttccatgcatggcaggggaagagtggggactgccaaaaaaaaa

SEQ ID NO: 256622 - DNA, 564 bp, Homo sapiens
tctaaggcaaatttcatttgccagtattctgtttgagctaccccacttgctgattaccagttcgtattgtactcaagattatcgcagcttccagacctggattgagattagggtttgactggtaggacaggactgaccagagactatcattctaaactttagtcaaagagtactgtgcccccaggatgggcatggagactgtggaataggaatatgggattgttggatgagggagttaaggacaatttggggcacatgagaaccaagctgatttggggatgtggatcacagtagagacagattaaactggcaagccaaggctgaaggttgggcagaagttagatggggcttataaacaggagaattccaagtatttgactagaaggtaagcccagaaggcagaatagccatggagggcatagagaggtagccagttaggagagatcaacgcaggttaacaagcgggtgagttagagccatcagcccagtaggcatttgagcattctagaagataaggagccactgggatgtattcaaccatcaagaaactcaggtttaagaaga

SEQ ID NO: 256623 - DNA, 628 bp, Homo sapiens
catagagtagcacaattaaaacaacagaaacgcttaacatttaattttctgaacatcagatataatgctacaaatgggtgggaaatgcaaacttgggaaaacaaataaattaataaggacatgaatgactgtactcaataccaaatatattattctcattttacagaggaagaaactaaaatcgagagaggttaataattgtgcccgaggctacacagctactaagcaaaccagatctatgctcaaagcccatgcaggactgtaaccacggtgcaagatcaatcctcctgcttggagaactgatccaactccacacctgtatcttcaggttggactcgcttcttcaacccatgtacatgtccagtattccttcatcattgacaaataccttcctttgactttactgattctctgactaccaccttttcaatgaaggtattttttcagtcaaccattttaacaaattcatctttgcttggtctccaattcctctccttgaagttgctcttcacatcactataaaccagcttttgatctcattgcttcttagagagttagtaaaaaaaatggatagaataatagttgcagctgttgtatatggcggtaaacaataaaaactaccatcaaa

SEQ ID NO: 256624 - DNA, 366 bp, Homo sapiens
catagagtagcacaattaaaacaacagaaacgcttaacatttaattttctgaacatcagatataatgctacaaatgggtgggaaatgcaaacttgggaaaacaaataaattaataaggacatgaatgactgtactcaataccaaatatattattctcattttacagaggaagaaactaaaatcgagagaggttaataattgtgcccgaggctacacagctactaagcaaaccagatctatgctcaaagcccatgcaggactgtaaccacggtactccacttccttcttagctttatactaagctatgccatttgccccagggctggcttaaaggccagccacattccctacacttcaccactaata

SEQ ID NO: 256625 - DNA, 320 bp, Homo sapiens
gcatgtatttatatttaaagtcaattaatttgttgttgaggactatgttattttgatttctaaccaattttaactggtgtcatgattcttttctagagtgtataaatgccttcttaggacattttttttttctgtgaagtatttttgatggacatttttttgtgtgtgagcatttaactttagttttatgaatctgagttttctaaaattcaaaatacaacggatggcctacatgtttttgaaagtaacttcaaaactctaaaatctgaagtttgtaatcttggcattaaaactcaataataaatccttttctataagca

SEQ ID NO: 256626 - DNA, 4688 bp, Homo sapiens
gggacgattattaggaactagtcagttgcaaagctcattatgatggtattactatgaagaagattattacaaatgcatgggctgtgacgataacgttgtagatgtggtcgttacccagaaggttgcctggctggcccagctcggctcgaataaggaggcttagggctgtgcctaggactccagctcatgcgccgaataataggtatagtgttccaatgtctttgtggtttgtagagaatagtcaacggtcgcgaacatctcctcggagcgcagctgggccagcggttcccacagccctggagcccaacgtgcgcagaagcgcctcttggagctcctctcccacagatctctcgtcctcttcctgggctaggccgccccaggcgcggcccctgcgactcctggcacggccccgtgctcggctgccgccctggcgcgcgccacactgtcgtccccggacgggcgcggaccggctcggccggggcgccggcggctggggaggggtcgctggccccggggccgcgcatgcgccgccaccaacttggggctgtcagtggagggcgagtgctggttctcaggggaggcgacgccttcgggccaacgggcctcgagccgaggcagcagtgggaacgactcatcctttttccagccctggggcgtggctggggtcggggtcggggtcggggccggtgggggccccgcccccgtctcctggcctgcccccttcatgggccgcgatgatggcggccctgtacccgagcacggacctctcgggcgcctcctcctcctccctgccttcctctccatcctcttcctcgccgaacgaggtgatggcgctgaaggatgtgcgggaggtgaaggaggagaatacgctgaatgagaagcttttcttgctggcgtgcgacaagggtgactattatatggttaaaaagattttggaggaaaacagttcaggtgacttgaacataaattgcgtagatgtgcttgggagaaatgctgttaccataactattgaaaacgaaaacttggatatactgcagcttcttttggactacggttgtcagaaactaatggaacgaattcagaatcctgagtattcaacaactatggatgttgcacctgtcattttagctgctcatcgtaacaactatgaaattcttacaatgctcttaaaacaggatgtatctctacccaagccccatgcagttggctgtgaatgcacattgtgttctgcaaaaaacaaaaaggatagcctccggcattccaggtttcgtcttgatatatatcgatgtttggccagtccagctctaataatgttaacagaggaggatccaattctgagagcatttgaacttagtgctgatttaaaagaactaagtcttgtggaggtggaattcaggaatgattatgaggaactagcccggcaatgtaaaatgtttgctaaggatttacttgcacaagcccggaattctcgtgaattggaagttattctaaaccatacgtctagtgacgagcctcttgacaaacggggattattagaagaaagaatgaatttaagtcgtctaaaacttgctatcaaatataaccagaaagagtttgtctcccagtctaactgccagcagttcctgaacactgtttggtttggacagatgtcgggttaccgacgcaagcccacctgtaagaagataatgactgttttgacagtaggcatcttttggccagttttgtcactttgttatttgatagctcccaaatctcagtttggcagaatcattcacacaccttttatgaaatttatcattcatggagcatcatatttcacatttctgctgttgcttaatctatactctcttgtctacaatgaggataagaaaaacacaatggggccagcccttgaaagaatagactatcttcttattctgtggattattgggatgatttggtcagacattaaaagactctggtatgaagggttggaagactttttagaagaatctcgtaatcaactcagttttgtcatgaattctctttatttggcaacctttgccctcaaagtggttgctcacaacaagtttcatgattttgctgatcggaaggattgggatgcattccatcctacactggtggcagaagggctttttgcatttgcaaatgttctaagttatcttcgtctcttttttatgtatacaaccagctctatcttgggtccattacagatttcaatgggacagatgttacaagattttggaaaatttcttgggatgtttcttcttgttttgttttctttcacaattggactgacacaactgtatgataaaggatatacttcaaaggagcagaaggactgtgtaggcatcttctgtgaacagcaaagcaatgataccttccattcgttcattggcacctgctttgctttgttctggtatattttctccttagcgcatgtggcaatctttgtcacaagatttagctatggagaagaactgcagtcctttgtgggagctgtcattgttggtacatacaatgtcgtggttgtgattgtgcttaccaaactgctggtggcaatgcttcataaaagctttcagttgatagcaaatcatgaagacaaagaatggaagtttgctcgagcaaaattatggcttagctactttgatgacaaatgtacgttacctccacctttcaacatcattccctcaccaaagactatctgctatatgattagtagcctcagtaagtggatttgctctcatacatcaaaaggcaaggtcaaacggcaaaacagtttaaaggaatggaggaatttgaaacagaagagagatgaaaactatcaaaaagtgatgtgctgcctagtgcatcgttacttgacttccatgagacagaagatgcaaagtacagatcaggcaactgtggaaaatctaaacgaactgcgccaagatctgtcaaaattccgaaatgaaataagggatttacttggctttcggacttctaaatatgctatgttttatccaagaaattaaccattttctaaatcatggagcgaataattttcaataacagatccaaaagactatattgcataacttgcaatgaaattaatgagatatatattgaaataaagaattatgtaaaagccattctttaaaatatttatagcataaatatatgttatgtaaagtgtgtatatagaattagttttttaaaccttctgttagtggctttttgcagaagcaaaacagattaagtagatagattttgttagcatgctgcttggttttcttacttagtgctttaaaatgtttttttttatgtttaagaggggcagttataaatggacacattgcccagaatgttttgtaaaatgaagaccagcaaatgtaggctgatctccttcacaggatacacttgaaatatagaagttatgttttaaatatctctgttttaggagttcacatatagttcagcatttattgtttaggagtataattttattttatctaaaataatagtctattttttcttttgtattttgttataatcttaagcaacaaagaaaaaaccctaatatttgaatctatttatgtctttcaatttaaattcacttcagtttttgttattgtaatatatttacttttacatggttataatcactttatatttttaatgtttttttcacttaatattttatatatacatttccatgtattgatgtagttagtccacatttaaatttttatagaattatatagtttttgaaaaatacagtcagtagatgttttattttttagctattcagttatgtttataagtttgcatagctacttctcgacatttggtttgttttaatttttttgtatcataatagtcctatttttttttcaagttggagtgaatgtttttagttttaagatagataggagacacttttttatcacatgtagtcacaacctgttttgtttttgtaaaacataggaagtctctttaatgcaatgatttgttttatatttggactaaggttcttgagcttatctcccaaggtactttccataatttaacacagcttctataaaagtgacttcatgcttacttgtggatcattcttgctgcttaagatgaaaagcattggttttttaaaattagagaataaaatatgtatttaaatttttggtgtgttcacataaagggatgtagctaaaatgttttcataggctattatatattctcgcagcatttccagttaagaggatattaggtatataattctcttcttaaccgaatgtcagatggtcttacgccacagggtgcaggtaacccttggtctgtaagcaccaccgatccagggatcattgtctaaataggttactattgtttgtttcatcttgcttttgcatttttattttttaatttccaaattttaagtgttccctctttggggcaaattcttataaaaatgtttattgtaaagttatatattttgtctacgatgggattatgcacttcccaattgggattttacatctggatttttagtcattctaaaaaacacctaattattaaaacatttatagagtgcctactgtatgcatgagttgagttgcttctgaggtacattttgaatgacagcatattgtaagaaaaaaaaaggtgaataaaatttgacattagattataaaaaaaaacccacgcgtccgccc

SEQ ID NO: 256627 - DNA, 5891 bp, Homo sapiens
gggacgattattaggaactagtcagttgcaaagctcattatgatggtattactatgaagaagattattacaaatgcatgggctgtgacgataacgttgtagatgtggtcgttacccagaaggttgcctggctggcccagctcggctcgaataaggaggcttagggctgtgcctaggactccagctcatgcgccgaataataggtatagtgttccaatgtctttgtggtttgtagagaatagtcaacggtcgcgaacatctcctcggagcgcagctgggccagcggttcccacagccctggagcccaacgtgcgcagaagcgcctcttggagctcctctcccacagatctctcgtcctcttcctgggctaggccgccccaggcgcggcccctgcgactcctggcacggccccgtgctcggctgccgccctggcgcgcgccacactgtcgtccccggacgggcgcggaccggctcggccggggcgccggcggctggggaggggtcgctggccccggggccgcgcatgcgccgccaccaacttggggctgtcagtggagggcgagtgctggttctcaggggaggcgacgccttcgggccaacgggcctcgagccgaggcagcagtgggaacgactcatcctttttccagccctggggcgtggctggggtcggggtcggggtcggggccggtgggggccccgcccccgtctcctggcctgcccccttcatgggccgcgatgatggcggccctgtacccgagcacggacctctcgggcgcctcctcctcctccctgccttcctctccatcctcttcctcgccgaacgaggtgatggcgctgaaggatgtgcgggaggtgaaggaggagaatacgctgaatgagaagcttttcttgctggcgtgcgacaagggtgactattatatggttaaaaagattttggaggaaaacagttcaggtgacttgaacataaattgcgtagatgtgcttgggagaaatgctgttaccataactattgaaaacgaaaacttggatatactgcagcttcttttggactacggttgtcagaaactaatggaacgaattcagaatcctgagtattcaacaactatggatgttgcacctgtcattttagctgctcatcgtaacaactatgaaattcttacaatgctcttaaaacaggatgtatctctacccaagccccatgcagttggctgtgaatgcacattgtgttctgcaaaaaacaaaaaggatagcctccggcattccaggtttcgtcttgatatatatcgatgtttggccagtccagctctaataatgttaacagaggaggatccaattctgagagcatttgaacttagtgctgatttaaaagaactaagtcttgtggaggtggaattcaggaatgattatgaggaactagcccggcaatgtaaaatgtttgctaaggatttacttgcacaagcccggaattctcgtgaattggaagttattctaaaccatacgtctagtgacgagcctcttgacaaacggggattattagaagaaagaatgaatttaagtcgtctaaaacttgctatcaaatataaccagaaagagtttgtctcccagtctaactgccagcagttcctgaacactgtttggtttggacagatgtcgggttaccgacgcaagcccacctgtaagaagataatgactgttttgacagtaggcatcttttggccagttttgtcactttgttatttgatagctcccaaatctcagtttggcagaatcattcacacaccttttatgaaatttatcattcatggagcatcatatttcacatttctgctgttgcttaatctatactctcttgtctacaatgaggataagaaaaacacaatggggccagcccttgaaagaatagactatcttcttattctgtggattattgggatgatttggtcagacattaaaagactctggtatgaagggttggaagactttttagaagaatctcgtaatcaactcagttttgtcatgaattctctttatttggcaacctttgccctcaaagtggttgctcacaacaagtttcatgattttgctgatcggaaggattgggatgcattccatcctacactggtggcagaagggctttttgcatttgcaaatgttctaagttatcttcgtctcttttttatgtatacaaccagctctatcttgggtccattacagatttcaatgggacagatgttacaagattttggaaaatttcttgggatgtttcttcttgttttgttttctttcacaattggactgacacaactgtatgataaaggatatacttcaaaggagcagaaggactgtgtaggcatcttctgtgaacagcaaagcaatgataccttccattcgttcattggcacctgctttgctttgttctggtatattttctccttagcgcatgtggcaatctttgtcacaagatttagctatggagaagaactgcagtcctttgtgggagctgtcattgttggtacatacaatgtcgtggttgtgattgtgcttaccaaactgctggtggcaatgcttcataaaagctttcagttgatagcaaatcatgaagacaaagaatggaagtttgctcgagcaaaattatggcttagctactttgatgacaaatgtacgttacctccacctttcaacatcattccctcaccaaagactatctgctatatgattagtagcctcagtaagtggatttgctctcatacatcaaaaggcaaggtcaaacggcaaaacagtttaaaggaatggaggaatttgaaacagaagagagatgaaaactatcaaaaagtgatgtgctgcctagtgcatcgttacttgacttccatgagacagaagatgcaaagtacagatcaggcaactgtggaaaatctaaacgaactgcgccaagatctgtcaaaattccgaaatgaaataagggatttacttggctttcggacttctaaatatgctatgttttatccaagaaattaaccattttctaaatcatggagcgaataattttcaataacagatccaaaagactatattgcataacttgcaatgaaattaatgagatatatattgaaataaagaattatgtaaaagccattctttaaaatatttatagcataaatatatgttatgtaaagtgtgtatatagaattagttttttaaaccttctgttagtggctttttgcagaagcaaaacagattaagtagatagattttgttagcatgctgcttggttttcttacttagtgctttaaaatgtttttttttatgtttaagaggggcagttataaatggacacattgcccagaatgttttgtaaaatgaagaccagcaaatgtaggctgatctccttcacaggatacacttgaaatatagaagttatgttttaaatatctctgttttaggagttcacatatagttcagcatttattgtttaggagtataattttattttatctaaaataatagtctattttttcttttgtattttgttataatcttaagcaacaaagaaaaaaccctaatatttgaatctatttatgtctttcaatttaaattcacttcagtttttgttattgtaatatatttacttttacatggttataatcactttatatttttaatgtttttttcacttaatattttatatatacatttccatgtattgatgtagttagtccacatttaaatttttatagaattatatagtttttgaaaaatacagtcagtagatgttttattttttagctattcagttatgtttataagtttgcatagctacttctcgacatttggtttgttttaatttttttgtatcataatagtcctatttttttttcaagttggagtgaatgtttttagttttaagatagataggagacacttttttatcacatgtagtcacaacctgttttgtttttgtaaaacataggaagtctctttaatgcaatgatttgttttatatttggactaaggttcttgagcttatctcccaaggtactttccataatttaacacagcttctataaaagtgacttcatgcttacttgtggatcattcttgctgcttaagatgaaaagcattggttttttaaaattagagaataaaatatgtatttaaatttttggtgtgttcacataaagggatgtagctaaaatgttttcataggctattatatattctcgcagcatttccagttaagaggatattaggtatataattctcttcttaaccgaatgtcagatggtcttacgccacagggtgcaggtaacccttggtctgtaagcaccaccgatccagggatcattgtctaaataggttactattgtttgtttcatctggaattccgagggtgcacaaattaccagcagcctgagggaggtcttattggaaggcttcctgcaggaggtggcatctgatccgggcctagacatgggagttggaattttccagacagggaagggcactgtgggtggaaaacaaagcacgaacaaacgtatggtgtgggaccaagcctcacatggtgcataaatgatcagaggtgaggctgaagcctaggtgtgtgtcaggggaagagctagaaaggaaggtggggcagggaagctcagtgagtgtctgctacatgtgaggcttcattctgagcaccaactctgcgcgctaatgccacgaagtggagtcatgattcttccattttccaggtgaagaaaccaaagcacggggagaattagcttgtccaagggctcatggccagtcggtggtgccactgggatttaaccagggattccagctgtggaagctgcatgctgccagctgagcactccgtctgtccaccctggcaaatgacatgctgagggctgggggcagtcatctttccagcagttgtcgaccagaaataatgataatgcatcagccaggtgggcaagaactcagactttgtggtcagacctcgctgtggcagggagcttagaaaagtcacttttcctccacagctgtgtaacatggggaaagggggatgctcagctcacctctcatggcccttgtgtggggatttcaagggtaaatgctggaaaagcactgaatatacagcacttagtagaggctttgcaagcggctgtcctcacccaaacggatccttccccaggaaagctctgcaaatggagccacttggctttttgcctgatgccatattccgttgtttaaaacggcgatcccaaacttaagagtatgaaaggggtgttttgcagacaatgcataattaaccacttctaaacacagggtgtgccaggctccctcaaagctgttaattattcttcattagtgatcttaagttaatgtaaaataatcctggagctctgccagaggctcgggcaggggaaggagcagagccgcttatttcaactagcaaacggaaagaaatcttcacggggcgcctctgcgttctgccttggttgtggggagatgcctctatagactctttagctctgcccaaaggccattgtgggaggcggcaagccctctcccaagttcccagagcccagccgacctcagggtactttggttaatgaaatagttcaggtgggaagaaaatatggaggagagtagtatacccatcgcccagcttccaaaataagctgttaatggtgtggtggactgcccctgtgggccaccccacaaatcttatccctttcctgcttccccagagctaagcctaaacagtccctcttgtttggtgtgtagatttcccatgcacatttttttaaattgctgtaggtacatagtaagtgtatatatttatggggtacgtgagatgttttgacacaggcacgcaatgtgaaatacacacttcatggagaattc

SEQ ID NO: 256628 - DNA, 4769 bp, Homo sapiens
gggacgattattaggaactagtcagttgcaaagctcattatgatggtattactatgaagaagattattacaaatgcatgggctgtgacgataacgttgtagatgtggtcgttacccagaaggttgcctggctggcccagctcggctcgaataaggaggcttagggctgtgcctaggactccagctcatgcgccgaataataggtatagtgttccaatgtctttgtggtttgtagagaatagtcaacggtcgcgaacatctcctcggagcgcagctgggccagcggttcccacagccctggagcccaacgtgcgcagaagcgcctcttggagctcctctcccacagatctctcgtcctcttcctgggctaggccgccccaggcgcggcccctgcgactcctggcacggccccgtgctcggctgccgccctggcgcgcgccacactgtcgtccccggacgggcgcggaccggctcggccggggcgccggcggctggggaggggtcgctggccccggggccgcgcatgcgccgccaccaacttggggctgtcagtggagggcgagtgctggttctcaggggaggcgacgccttcgggccaacgggcctcgagccgaggcagcagtgggaacgactcatcctttttccagccctggggcgtggctggggtcggggtcggggtcggggccggtgggggccccgcccccgtctcctggcctgcccccttcatgggccgcgatgatggcggccctgtacccgagcacggacctctcgggcgcctcctcctcctccctgccttcctctccatcctcttcctcgccgaacgaggtgatggcgctgaaggatgtgcgggaggtgaaggaggagaatacgctgaatgagaagcttttcttgctggcgtgcgacaagggtgactattatatggttaaaaagattttggaggaaaacagttcaggtgacttgaacataaattgcgtagatgtgcttgggagaaatgctgttaccataactattgaaaacgaaaacttggatatactgcagcttcttttggactacggttgtcagtctgcagatgcacttttggtggcaatcgactctgaagtagtgggagctgttgatatactacttaatcatcgaccaaaacgatcatcaagaccaactatagtaaaactaatggaacgaattcagaatcctgagtattcaacaactatggatgttgcacctgtcattttagctgctcatcgtaacaactatgaaattcttacaatgctcttaaaacaggatgtatctctacccaagccccatgcagttggctgtgaatgcacattgtgttctgcaaaaaacaaaaaggatagcctccggcattccaggtttcgtcttgatatatatcgatgtttggccagtccagctctaataatgttaacagaggaggatccaattctgagagcatttgaacttagtgctgatttaaaagaactaagtcttgtggaggtggaattcaggaatgattatgaggaactagcccggcaatgtaaaatgtttgctaaggatttacttgcacaagcccggaattctcgtgaattggaagttattctaaaccatacgtctagtgacgagcctcttgacaaacggggattattagaagaaagaatgaatttaagtcgtctaaaacttgctatcaaatataaccagaaagagtttgtctcccagtctaactgccagcagttcctgaacactgtttggtttggacagatgtcgggttaccgacgcaagcccacctgtaagaagataatgactgttttgacagtaggcatcttttggccagttttgtcactttgttatttgatagctcccaaatctcagtttggcagaatcattcacacaccttttatgaaatttatcattcatggagcatcatatttcacatttctgctgttgcttaatctatactctcttgtctacaatgaggataagaaaaacacaatggggccagcccttgaaagaatagactatcttcttattctgtggattattgggatgatttggtcagacattaaaagactctggtatgaagggttggaagactttttagaagaatctcgtaatcaactcagttttgtcatgaattctctttatttggcaacctttgccctcaaagtggttgctcacaacaagtttcatgattttgctgatcggaaggattgggatgcattccatcctacactggtggcagaagggctttttgcatttgcaaatgttctaagttatcttcgtctcttttttatgtatacaaccagctctatcttgggtccattacagatttcaatgggacagatgttacaagattttggaaaatttcttgggatgtttcttcttgttttgttttctttcacaattggactgacacaactgtatgataaaggatatacttcaaaggagcagaaggactgtgtaggcatcttctgtgaacagcaaagcaatgataccttccattcgttcattggcacctgctttgctttgttctggtatattttctccttagcgcatgtggcaatctttgtcacaagatttagctatggagaagaactgcagtcctttgtgggagctgtcattgttggtacatacaatgtcgtggttgtgattgtgcttaccaaactgctggtggcaatgcttcataaaagctttcagttgatagcaaatcatgaagacaaagaatggaagtttgctcgagcaaaattatggcttagctactttgatgacaaatgtacgttacctccacctttcaacatcattccctcaccaaagactatctgctatatgattagtagcctcagtaagtggatttgctctcatacatcaaaaggcaaggtcaaacggcaaaacagtttaaaggaatggaggaatttgaaacagaagagagatgaaaactatcaaaaagtgatgtgctgcctagtgcatcgttacttgacttccatgagacagaagatgcaaagtacagatcaggcaactgtggaaaatctaaacgaactgcgccaagatctgtcaaaattccgaaatgaaataagggatttacttggctttcggacttctaaatatgctatgttttatccaagaaattaaccattttctaaatcatggagcgaataattttcaataacagatccaaaagactatattgcataacttgcaatgaaattaatgagatatatattgaaataaagaattatgtaaaagccattctttaaaatatttatagcataaatatatgttatgtaaagtgtgtatatagaattagttttttaaaccttctgttagtggctttttgcagaagcaaaacagattaagtagatagattttgttagcatgctgcttggttttcttacttagtgctttaaaatgtttttttttatgtttaagaggggcagttataaatggacacattgcccagaatgttttgtaaaatgaagaccagcaaatgtaggctgatctccttcacaggatacacttgaaatatagaagttatgttttaaatatctctgttttaggagttcacatatagttcagcatttattgtttaggagtataattttattttatctaaaataatagtctattttttcttttgtattttgttataatcttaagcaacaaagaaaaaaccctaatatttgaatctatttatgtctttcaatttaaattcacttcagtttttgttattgtaatatatttacttttacatggttataatcactttatatttttaatgtttttttcacttaatattttatatatacatttccatgtattgatgtagttagtccacatttaaatttttatagaattatatagtttttgaaaaatacagtcagtagatgttttattttttagctattcagttatgtttataagtttgcatagctacttctcgacatttggtttgttttaatttttttgtatcataatagtcctatttttttttcaagttggagtgaatgtttttagttttaagatagataggagacacttttttatcacatgtagtcacaacctgttttgtttttgtaaaacataggaagtctctttaatgcaatgatttgttttatatttggactaaggttcttgagcttatctcccaaggtactttccataatttaacacagcttctataaaagtgacttcatgcttacttgtggatcattcttgctgcttaagatgaaaagcattggttttttaaaattagagaataaaatatgtatttaaatttttggtgtgttcacataaagggatgtagctaaaatgttttcataggctattatatattctcgcagcatttccagttaagaggatattaggtatataattctcttcttaaccgaatgtcagatggtcttacgccacagggtgcaggtaacccttggtctgtaagcaccaccgatccagggatcattgtctaaataggttactattgtttgtttcatcttgcttttgcatttttattttttaatttccaaattttaagtgttccctctttggggcaaattcttataaaaatgtttattgtaaagttatatattttgtctacgatgggattatgcacttcccaattgggattttacatctggatttttagtcattctaaaaaacacctaattattaaaacatttatagagtgcctactgtatgcatgagttgagttgcttctgaggtacattttgaatgacagcatattgtaagaaaaaaaaaggtgaataaaatttgacattagattataaa

SEQ ID NO: 256629 - DNA, 2965 bp, Homo sapiens
cgggatcagtcaaaaaagaaattagggcagtcccataggaggaaatgctgattttaggaattggtttagaattggtttcaaaaatcaggtgaaatactttgcctcataatgattttatgtttgtaaaatttaagaagccatgtaaatataagcatttatttctctttaagtttgagcagggtattttccttttatcccttgcaaattaggccttttcttaaatctccatatctctgcctctatctccataacaacaatgtcctctgaaaccctgatccaggttctaggaacgtgccatctaacactgatagtgttggtatgattagaatgactttttgttaggcagctggattttcgatgtttttaaaatgatctgtctcaaccagatgcaatagaagggatggcctgtggattatgtgtttgtcttcttccttttgttgctgggtcatttatatttaatattttgtttttctgataatcttaatgaacacctgtgtaatatattccacagatttcaatgggacagatgttacaagattttggaaaatttcttgggatgtttcttcttgttttgttttctttcacaattggactgacacaactgtatgataaaggatatacttcaaaggagcagaaggactgtgtaggcatcttctgtgaacagcaaagcaatgataccttccattcgttcattggcacctgctttgctttgttctggtatattttctccttagcgcatgtggcaatctttgtcacaagatttagctatggagaagaactgcagtcctttgtgggagctgtcattgttggtacatacaatgtcgtggttgtgattgtgcttaccaaactgctggtggcaatgcttcataaaagctttcagttgatagcaaatcatgaagacaaagaatggaagtttgctcgagcaaaattatggcttagctactttgatgacaaatgtacgttacctccacctttcaacatcattccctcaccaaagactatctgctatatgattagtagcctcagtaagtggatttgctctcatacatcaaaaggcaaggtcaaacggcaaaacagtttaaaggaatggaggaatttgaaacagaagagagatgaaaactatcaaaaagtgatgtgctgcctagtgcatcgttacttgacttccatgagacagaagatgcaaagtacagatcaggcaactgtggaaaatctaaacgaactgcgccaagatctgtcaaaattccgaaatgaaataagggatttacttggctttcggacttctaaatatgctatgttttatccaagaaattaaccattttctaaatcatggagcgaataattttcaataacagatccaaaagactatattgcataacttgcaatgaaattaatgagatatatattgaaataaagaattatgtaaaagccattctttaaaatatttatagcataaatatatgttatgtaaagtgtgtatatagaattagttttttaaaccttctgttagtggctttttgcagaagcaaaacagattaagtagatagattttgttagcatgctgcttggttttcttacttagtgctttaaaatgtttttttttatgtttaagaggggcagttataaatggacacattgcccagaatgttttgtaaaatgaagaccagcaaatgtaggctgatctccttcacaggatacacttgaaatatagaagttatgttttaaatatctctgttttaggagttcacatatagttcagcatttattgtttaggagtataattttattttatctaaaataatagtctattttttcttttgtattttgttataatcttaagcaacaaagaaaaaaccctaatatttgaatctatttatgtctttcaatttaaattcacttcagtttttgttattgtaatatatttacttttacatggttataatcactttatatttttaatgtttttttcacttaatattttatatatacatttccatgtattgatgtagttagtccacatttaaatttttatagaattatatagtttttgaaaaatacagtcagtagatgttttattttttagctattcagttatgtttataagtttgcatagctacttctcgacatttggtttgttttaatttttttgtatcataatagtcctatttttttttcaagttggagtgaatgtttttagttttaagatagataggagacacttttttatcacatgtagtcacaacctgttttgtttttgtaaaacataggaagtctctttaatgcaatgatttgttttatatttggactaaggttcttgagcttatctcccaaggtactttccataatttaacacagcttctataaaagtgacttcatgcttacttgtggatcattcttgctgcttaagatgaaaagcattggttttttaaaattagagaataaaatatgtatttaaatttttggtgtgttcacataaagggatgtagctaaaatgttttcataggctattatatattctcgcagcatttccagttaagaggatattaggtatataattctcttcttaaccgaatgtcagatggtcttacgccacagggtgcaggtaacccttggtctgtaagcaccaccgatccagggatcattgtctaaataggttactattgtttgtttcatcttgcttttgcatttttattttttaatttccaaattttaagtgttccctctttggggcaaattcttataaaaatgtttattgtaaagttatatattttgtctacgatgggattatgcacttcccaattgggattttacatctggatttttagtcattctaaaaaacacctaattattaaaacatttatagagtgcctactgtatgcatgagttgagttgcttctgaggtacattttgaatgacagcatattgtaagaaaaaaaaaggtgaataaaatttgacattagattataaa

SEQ ID NO: 256630 - DNA, 428 bp, Homo sapiens
cttcagattttgtgtaacactgtcagaattaaaatgttgctgagtaaaaacgtttttagtgaatatagcttaattagaagatggaaacgacgtttctgataatagaatgctgcattttataggaatgattatgaggaactagcccggcaatgtaaaatgtttgctaaggatttacttgcacaagcccggaattctcgtgaattggaagttattctaaaccatacgtctagtgacgagcctcttgacaaacggggattattagaagaaagaatgaatttaagtcgtctaaaacttgctatcaaatataaccagaaagaggtatgaggctttctgtaatatatttaaattattttctctacagtagtctagtggctcagggcaaaggctttggagtaactcatctgggttaagatcctagttctgcttcc

SEQ ID NO: 256631 - DNA, 302 bp, Homo sapiens
gagggtagaagagaaacaggaaaagagggtaaacatcttgaggtgatttgaaggtgggcgattacaacaaaaaatagtttaaatgctttcatgttgttgtaatcaaattttatttttaaggccaaatccttgttcatgttgaagttgttttgttgtgatataatccaatttcctattatgttctatttctaaaaatcatagtagaagtccgttctgccatattccataatatctattacactacacaataccttctgtaaaagggacattttaagggatctgggaaatggaattcatttgat

SEQ ID NO: 256632 - DNA, 1327 bp, Homo sapiens
agagattatataatgatcaaaggtttaatccatgaagaagacagcaattttaaaagtgtattcaccaaaaaataaagcttcaaaatatgtgatgtgaaaactgccagaactaaggcgggccgggctcagaccagcgctgcctcaggatgtgaagtgtaacaagagggccaggggaggtggtgggggacaacatgggcctgtgaggcctgtgggtgcccgcgttccccagctccccccgcagcccgctccacagtggtccgctccggttggttgtcacgtgcgcattcgggttccagacccaaggctgcgtgttctccaccgcttgttgtggccagtgttactgcggtgaccgccagagcagcctcgacgctatggaggagcctggtgctacccctcagccctacctggggctggtcctggaggagctacgcagagttgtggcagcactacctgagagtatgagaccagatgagaatccttatggttttccatcggaactggtggtatgtgcagctgttattggattttttgttgttctcctttttttgtggagaagttttagatcggttaggagtcggctttacgtgggaagagagcaaaaacttggtgcaacgctttctggactaattgaagaaaaatgtaaactacttgaaaagtttagccttattcaaaaagagtatgaaggctatgaagtagagtcatctttagaggatgccagctttgagaaggcggcagcagaagaagcacgaagtttggaggcaacctgtgaaaagctgaacaggtccaattctgaacttgaggatgaaatcctctgtctagaaaaagacttaaaagaagagaaatctaaacattctcaacaagatgaattgatggcggatatttcaaaaagtatacagtctctagaagatgagtcaaaatccctcaaatcacaaatagctgaagccaaaatcatctgcaagacatttaaaatgagtgaagaacgacgggctatagcaataaaagatgctttgaatgaaaattctcaacttcagacaagccataaacagctttttcagcaagaagctgaagtatggaaaggagaagtgagtgaacttaataaacagaaaataacatttgaagactccaaagtgcacgcagaacaagttctgaatgataaagaaaatcacatcaagaccctgactggacacttgccaatgatgaaagatcaggctgctgtgcttgaagaagacacaacggatgatgataacctggaattagaagtgaacagtcaatgggaaaatggtgctaacttagatgatcctctgaaaggagctttgaagaaactgat

SEQ ID NO: 256633 - DNA, 729 bp, Homo sapiens
tgaactagagagagtaacttagttggcaggcagggtagtccttgcccaaaacagtagcccagaaagtaatggatagctataatctgaaccaaaatataaacagtcttaatgaaacgtaattctaaaacaaaatgtaagacccaatattcaatactactcactaggttcagaatctagtgtaattttggacagatgctgaaatcaaacaagtggcataatctgggagaattgactaacgacataaacttggatatgacagtagcatatcttgagaagcagagttgtatctagataagtttatccaagataaggcaggaaaatgtggaacctagaactcagttctgggaaacaaagctagttatttaaaggcagaaaatcaggcaccaatcaataagtcaggatagagggctttgcccctctcatgctctaaaaacctgagacccaaaagataggtaggtaagccgttagtgtctcagaggcaaatccaggggattattagattccagtgtcatcaaggtgttgttactaggatcaattgcttgctagtcatttcagtccgtatctccatcctcttaccggcacccccaggttgctgaggactattataagccttctctattgcccttctaccaggaatttgggggaattgcttaatgttttctgtctagactgcccttaatacgaggtcaaggggaagaagcctacagatcacaggaagatcaatttctt

SEQ ID NO: 256634 - DNA, 440 bp, Homo sapiens
gcagtggagtaaggtcttgctaggaccttaattttgctttctgagataagctcccttgtcatttgtccttcatagtccctgaccttgctctttgggaattactcttggtctatgattctttgtgactgtatctaacatgggtgttagtgtactcttattggagacaccactgcattctcaccctgctttctattggtgcagatttggctcccagggatagtctttgttaggcttatggtagtatttcctagtcgagttccctccgaaatgtaggtttccattctctttttcttcctgtcagttatatgtgaaaataccacagccaaagatctcattttgtcatagttgttaagcctatgcacttattaatttactagttattttcctcagactatccacctctccctcaatttgataactgccttagtgtagtggctact

SEQ ID NO: 256635 - DNA, 190 bp, Homo sapiens
aaaataaagtctgaacttttcttccccatctcagtgatgctgaattgaccctcctcctctccaaatggagagatggcagctcctgccttgtggcacacggtagccttcaggaacctgaaaccatcactgaaaagtgcaggaggagggaaggcacccagagaatggaaggtagctctgcccttcctcaggc

SEQ ID NO: 256636 - DNA, 646 bp, Homo sapiens
gggaaactagatgtttctgccttttgaacggggtagggtggtttacctggttttatggccaggaatagtatctattatgtttgcttttaaataggcatgatgtggaaataccatcctggtttgagaggcatttgaggattttaatttatggaaagcacaacatatgcaattatatttattgaatacctagatgcagtatagatatttaaattgttaaaactttatgaaaacttgaaaaacattgttcaggttcataaatagctttagtgatgcctcccctctttaaatacctgtcacaccgtatgaatatggtgagatcagactccctaagactcttttcaggctcattttcataatgtttactttttagggcaaaacagtagctaaattaaagtaatagccagttcttactgattgagacagagtggaaagaaagacatcattgtacatcactgtcattccaaaggtacagtggaactccggatggatgaagaacttacctatcactacaacacttataaatgagaatttctcagaatttcattctagacaagttccacgcaacaccagaccaagcaattctatctatttacaatattagcctagttttctcatacaatcatcacaagcataggaagatacttca

SEQ ID NO: 256637 - DNA, 379 bp, Homo sapiens
agtgaaacttagcctcagaaaaagaattttaactgtcccttccccttctttcaggtgattatggaatccgtgatcttggaaaagtcactgcatccctcccccagcctctgccacaaccccccagcatgctgatgaacatctcttttaggtttaagaccaccagcaccctggaaaaggaaccaccatacccctcccaggtgttatgaagcaacgaaatgtactctcccttgtctgctctgccctgccttggcagttgggtcctaacttgaaatccatcttcgttgccaccctgtctgctgaagatctccgaggttgcccatgctgactactgatctccttgctacctcctggagataatggacttcacttgtccaccagg

SEQ ID NO: 256638 - DNA, 562 bp, Homo sapiens
tccattcaggttatatttaaaaagaaagtttctcttttgaatattgccacaagaataacgggcggtgggaaatctggaacagtgtcttctcagaaacaaccaccctcaaaggctacaagtgacaagacagattctgctttgaatatagctacagaaataaaggatggactacaatgtgggacagtgtcttctcagaaacaaccagccttgaaggctacaactgacgaggaagattctgtttcgaatatagccacagaaataaaggatggagaaaaatctgggacagtgtcttctcagaaacaaccagccttgaaggctacaactgacgaggaagattctgttttgaatatagccacagaaataaaggatggagaaaaatctgagacagtgtcttctcagaaacaaccagccttgaaggctacaactgacgaggaagattctgtttcgattatagccacagaaataaaggacggagaaaaatctgggacagtgtcttctcggaaaaaaccagccttgaaggctacaagtgatgagaaagattctttttcgaatataaccagag

SEQ ID NO: 256639 - DNA, 265 bp, Homo sapiens
actccaaaccccacatgtactgactcttggcttctttctccttcccaccccagtccctctcacagtcctgggggatcctctcttggtatgggaaagcctggatgaagttgaaggctggtctccctgtggaggtggtggagtttcccccaggtttgctgtggggacaggtggaggccactcctggctaaggcgctcagggaacagccacagccgtggaaagagcatacactttgtcgacgcggccgcgaatttagtagtagtaggc

SEQ ID NO: 256640 - DNA, 488 bp, Homo sapiens
taaccctgtagaataatttttgaaattctgccccccacccccaaccttttttaagtagaaatggagtcttgctatgttgtccaggctggtctcaaactcttgagctcaagcattcctctcgctttggcctcccaaagtgccgagattacaggtgtgagctaccacacctggccccattgttttacactgactttgttataagatgtcatagtgtatataattttttttaaaaaataagttttattgtgtaaagtataatgatgttataggatacgtagtaataaaaaggttattatagtgaagcaaattgacatctgtcatctcacatagttacctttttttagtggcaatagcagctaaaatcatttagcaagaattttataaatgtatgtgaattttcatattaatataatttgcactgattacacctaatttttcatgcaagggtggtgggtatttagaagaaacttagaaggtcttgttaatta

SEQ ID NO: 256641 - DNA, 383 bp, Homo sapiens
ctgggaggcagaggtggcagtgagccaagatcacaccactgcactccagcctgggtgacagagggagactccgtctcaaaaaaaaaaaaaaaagtgtggagagagcatgactatgctgataagcattttataaaaacactggcgttcaggctactgttagttacagtgctctgatttgctctaatttgactgaattacttttttgccatttaaaatcaattttacaaactttagcatgaagaaatttttactacaaaaagcggaaaaatggccaggtgcagcggctcacacctataatcccagcactttgggagatctaggcaggaagactgcttgatcccaggagtttgagactagcctagcgagatcttgtcgctcctacc

SEQ ID NO: 256642 - DNA, 330 bp, Homo sapiens
  misc_feature (39)..(39): n is a, c, g, or t
  misc_feature (54)..(54): n is a, c, g, or t
  misc_feature (267)..(267): n is a, c, g, or t
gatccccaaagagagcgaattttctggggcaaaggactntgtgggtcttatttnggtctgtgacttctagcccaatgcctggccccaattacactgtggcctatggtggcccctagctcttgctgtgggtttaattgtgggtggatgctcatagctgtgacttttcccagactcatctgtttctttcctggtgagactttgccccaagggctgctgtgagccaagcgtcttccgcagtcttccctccctgtgttttgagctgttccncagcctctcatgacagtgctgcatttatctcactgttagtcagtattctgaatctgcaatcac

SEQ ID NO: 256643 - DNA, 869 bp, Homo sapiens
ctgcaggaacgggtcggcagagtccgagagtcatcaaggacagctccagttggatgcacaagtttaactcttttactgccacttaaatcaagctatttaactgcatgttcaaaaccggttagctggttgcaagaagattctcatttctttccagaaccatctgtgatggaaggtggtcccgactttgaatgccttccgcagcatgctgggttgcccgtgacctgagcgccatctagtgaccacataaacatctttcttaccttcccaccaacacactcatgcggacacagagaaaggtgagggctcacacagcatagaaatgaagacaggtcgggggatgttaactctccatcagggggctggtggtaggcacggctgcagcgtcatgaaacacaactgtcggaaaacagtcagaaatgccacagtgtgcccccaccactgtctgcccctggattgagagatgagagacagtgccagtcagaaaactgaagacgaggttccttccataccaagagtactgacctgtgaggtgaccctctgtctgcattaccacccccaaatctctctacctgtgcaggagacagccctccttagaaactatctgaacagcaattagtgaaggggccacatcccggaacagattgttcccccagcgaggaagggaggggctggggcaggaagaggaagttcgcagtgccttcaggaaggtcgtttctgggactagtccaaagttccaacaaggaaatcagaaggcagagagcagctagatgtggaagctcagggagggtatctgggagtttactgtacaattctctacctttgcgtgtacttgaaattttctataattaaaagttgccctttaaatgttt

SEQ ID NO: 256644 - DNA, 478 bp, Homo sapiens
aacatagtgttttagaattaatggaaggatttatgtaatacttctgattgggttgagtttttttgaatttcttgctactcactaataacaagaagagggaaaaagaaatttggttttcttaagggaagggccacgttaaggtatcaaactttggtatttctataaaggaatattacagaagaattctactgaacattagtgtgccaactcagaatcaatcaaagttttataataattcttatttctgtcatagtcctcaccgtcttacaagcttagcacatcccctcaaagttcagtagtggctcctgctgaactttcacccatttaccttctttctagttaatgtgaatgggaagactgccctaaaggagttggtgtgaccactgcataagggatatgatctagggcttcccagcttttagaaaacactctttatttaataaaacacagctctttagtgttgtgtcttggttggtaa

SEQ ID NO: 256645 - DNA, 701 bp, Homo sapiens
gaggctactaagcctcagtaagaaattttgattgtacaaaccaaccaaccttcttccctagtgcaacattagagagagttctcagcaaatgacaaattgcttcttgccatggacttttggagttagatgggtctagtgcaaattagggccattaaattcctgagaatgtagaaggtccataagagtaaagtcatcacagagaaatgcaattcgctaggggagcaacggggtgggatgcacccaacaaactgtcttgtgacaaacttggaaattccagctttgcctaagttcctaggtgagaaggtagttgtctggggcttcaggagctgcgctggggttacgagttgttggctgacccaaacctaaggtgtatgttgtggggtggcaggcggggagagagagagagagggaaggagaaagtgggagggagagaggcaaagtgagtgagcattttgatggtgggcctgtggacttcttggtcaacagggaggtaactcataaggatgtcgagccaattcagacaaactctactacagattcaatcacagactgtatggaataacttccttagctcttattattaatctgaaaagttcagatagccgcctagagtaggacagtgaagccacatttttgtgaggctgaattagaccattagactgtctggcattctatgatgctctgtagacacttcccgttct

SEQ ID NO: 256646 - DNA, 467 bp, Homo sapiens
gcaatgtcaaagtgttttgtgacactcacattctgtactcttatacagaatggtaactaatggtttaggacactggtctgtggaccatactttggtagcaccagaagaccttactaacacataggcttacttttgtcccagtgtacttagttttattaatactaagtttctgctagattttgttgtcgttgttataggaaaatactttgcttataatgtttacaaagaattttaatatttttaaagaaagtggcaattttaggatttctgcaaatagagacatggactcagagaagaggaatgtaaaaatgttggagtaaaaccatattatctatccaagtcaaaaaattatacaaactaggaaatttatatcacaattactgcatatgagaatcataaatatggactagtaaaatgtaacaagtcaaacatataattactgtcaaaacaatggttaatacacaaac

SEQ ID NO: 256647 - DNA, 497 bp, Homo sapiens
cagtaacttagcatatacagctaaggaactgaattatgcagggaagaaacatactggtaggaagagactaaaagacattgaaaatagaacaaaacgatctaaatatatctcattaatttcaaaggaaagggtagataaaatgtagtggaggctatattaaagaaatattgctgacatttttccaaacctaataaaagacaccaaacttcataatcaggaatcccaccaaaatattaataggataaatgttttaaaatacacatttagggggcaggtgtggtgactcgtacctataatcccaacactttgggaggccaaggcgggcagatcacttgagcacaggagtttgagagcaactgaactacatggcgaaacccggtctctacaaaaaaacaaagtgagagatcaatggagcctgggagtttgaggctgcagtgagctatgatcccaacagtgcactgtgtgtcaccctaagtgacagaaccagactctgcgac

SEQ ID NO: 256648 - DNA, 673 bp, Homo sapiens
gctgaataaagagtttgagttgacaataattttctttactttcttttagcactttaaatatgtggtcccacttctttatggcctgtcatgtgtctgacgagaaattacagaaagtcaaatcattgttcctctataagtaatggatcatttttgtctggattattttaataatttttctttgtctttagctttcatcagcttgattatgatgtgtctggtcatggatttatttggcttcatcatgcttgaggttgcctaaatttaagtctctaagtttatgtcatttgccaaacttgataattttttagacattattttcaaaaagtttttttcagtactgcactttttctctctttggcactctgatagcatgaattttagatattttatcattgctccacaggttcctggggctgctcttagtttttaaaaatatctttttcctctgttgttctacttatataattcctattgacccattttcaagtccacttactctcatctgtcatctttattctgctcttgaccccattcagtgagaatttggtttggtttgttgttgttgctactcttttctcagctcttaaatttctaatacgttctcctgtatatcttctatttcttttgtaaaatcttctatttttacattcattgcagaagtgtttgcaattgc

SEQ ID NO: 256649 - DNA, 3964 bp, Homo sapiens
  misc_feature (193)..(193): n is a, c, g, or t
  misc_feature (299)..(299): n is a, c, g, or t
  misc_feature (310)..(310): n is a, c, g, or t
  misc_feature (674)..(674): n is a, c, g, or t
  misc_feature (677)..(677): n is a, c, g, or t
  misc_feature (764)..(764): n is a, c, g, or t
  misc_feature (1176)..(1177): n is a, c, g, or t
  misc_feature (1214)..(1214): n is a, c, g, or t
  misc_feature (1398)..(1398): n is a, c, g, or t
  misc_feature (1402)..(1402): n is a, c, g, or t
  misc_feature (1409)..(1409): n is a, c, g, or t
  misc_feature (1531)..(1531): n is a, c, g, or t
  misc_feature (1892)..(1892): n is a, c, g, or t
  misc_feature (2249)..(2249): n is a, c, g, or t
  misc_feature (2430)..(2430): n is a, c, g, or t
  misc_feature (2444)..(2447): n is a, c, g, or t
  misc_feature (2452)..(2452): n is a, c, g, or t
  misc_feature (2573)..(2573): n is a, c, g, or t
  misc_feature (2578)..(2578): n is a, c, g, or t
  misc_feature (2595)..(2595): n is a, c, g, or t
  misc_feature (2612)..(2612): n is a, c, g, or t
  misc_feature (2646)..(2646): n is a, c, g, or t
  misc_feature (2797)..(2797): n is a, c, g, or t
  misc_feature (3057)..(3057): n is a, c, g, or t
  misc_feature (3242)..(3242): n is a, c, g, or t
  misc_feature (3370)..(3370): n is a, c, g, or t
  misc_feature (3581)..(3581): n is a, c, g, or t
  misc_feature (3583)..(3583): n is a, c, g, or t
  misc_feature (3964)..(3964): n is a, c, g, or t
atgggtgccccgagcgcgtgccggacgctggtgttggctctggcggccatgctcgtggtgccgcaggcagagacccagggccctgtggagccgagctgggagaatgcagggcacaccatggatggcggtgccccgacgtcctcgcccacccggcgcgtgagctttgttccacccgtcactgtcttccccagcntgagccccctgaacccggcgcacaatgggcgggtgtgcagcacctggggtgacttccactacaagaccttcgacggcgacgtcttccgcttccctgcctttgcaantacgtgttctntgagcactgccgcgccgcctacgaggacttcaacgtccagctacgccgaggcctagtgggctccaggcctgtggtcacccgtgttgtcatcaaggcccaggggctggtgctggaggcgtccaacggctccgtcctcatcaatgggcagcgggaggagctgccttacagccgcactggcctcctggtggagcagagcggggactacatcaaggtcagcatccggctggtgctgacattcctgtggaacggagaggacagtgccctgctggagctggatcccaaatacgccaaccagacctgtggcctgtgtggggacttcaacggcctcccggccttcaacgagttctatgcccacaacgccagnctnaccccgctccagtttgggaacctgcagaagttggatgggcccacggagcagtgcccggacccgctgcccttgccggccggcaactgnacggacgaggagggcatctgccaccgcaccctgctggggccggcctttgcggagtgccacgcactggtggacagcactgcgtacctggccgcctgcgcccaggacctgtgccgctgccccacctgcccgtgtgccacctttgtggaatactcacgccagtgcgcccacgcggggggccagccgcggaactggaggtgccctgagctctgcccccggacctgccccctcaacatgcagcaccaggagtgtggctcaccctgcacggacacctgctccaacccccagcgcgcgcagctctgcgaggaccactgtgtggacggctgcttctgccccccaggcacggtgctggatgacatcacgcactctggctgcctgcccctcgggcagtgcccctgcacccacggcggccgcnnctacagcccgggcacctccttcaacaccacctgcagntcctgcacctgctccggggggctatggcagtgccaggacctgccgtgccctggcacctgctctgtgcagggcggggcccacatctccacctatgatgagaaactctacgacctgcatggtgactgcagctacgttctgtccaagaaatgtgccgacagcagcttcaccgtgctggctgagctgnggangtgcggnctgacggacaacgagaactgcctgaaagcggtgacgctcagcctggacggcggggacacggccatccgggtccaagcggacggcggcgtgttcctcaactccatctacacgcagctgccccngtcggcagccaacatcaccctgttcacaccctcgagcttcttcatcgtggtgcagacaggcctggggctgcagctgctggtgcagctggtgccactcatgcaggtgtttgtcaggctggaccccgcccaccagggccagatgtgcggcctgtgtgggaacttcaaccagaaccaggctgacgacttcacggccctcagcggggtggtggaggccacgggcgcagccttcgccaacacctggaaggcccaggctgcctgtgccaatgccaggaacagctttgaggacccctgctccctcagtgtggagaatgagaactacgcccggcactggtgctcgcgcctgaccgatccaacagtgccntctcgcgctgccactccatcatcaaccccaagcccttccactcgaactgcatgtttgacacctgcaactgtgagcggagcgaggactgcctgtgcgccgcgctgtcctcctatgtgcacgcctgtgccgccaagggcgtacagctcagcgactggagggacggcgtctgcaccaagtacatgcagaactgccccaagtcccagcgctacgcctacgtggtggatgcctgccagcccacttgccgcggcctgagtgaggccgacgtcacctgcagcgtttccttcgtgcctgtggacggctgcacctgccccgcgggcaccttcctcaatgacgcgggcgcctgtgtgcccgcccagnagtgcccctgctacgctcacggcaccgtgctggctcctggagaggtggtgcacgacgagggcgccgtgtgttcatgtacgggtgggaagctaagctgcctgggagcctctctgcagaaaagcacagggtgtgcagcccccatggtgtacctggactgcagcaacagctcggcgggcacccntggggccgagtgcnnnnggagntgccacacgctggacgtgggctgtttcagcacacactgcgtgtccggctgtgtctgtcccccggggctggtgtcggatgggagtgggggctgcattgccgaggaggactgcccctgtgtgnacaangaggccacctacaagcntggagagaccatcaggntcgactgcaacacctgcacctgcaggaaccggangtgggagtgcagccaccggctctgcctgggcacctgcgtggcctacggggatggccacttcatcacctttgatggcgatcgctacagctttgaaggcagctgcgagtacatcttggcccaggactactgtggggacaacaccacccacggnaccttccgcatcgtcaccgagaacatcccctgtgggaccaccggcaccacctgctccaaggccatcaagctcttcgtggagagctacgagctgatcctccaagaggggacctttaaggcggtggcgagagggccgggtggggacccaccctacaagatacgctacatggggatcttcctggtcatcgagacccacgggatggccgtgtcctgggaccggaagaccagcgtgttcatccgactgcaccaggactacaaggncagggtctgcggcctgtgcgggaacttcgacgacaatgccatcaatgactttgccacgcgtagccggtccgtggtgggggacgcactggagtttgggaacagctggaagctctccccctcctgcccggacgccctggcacccaaggacccctgcacggccaaccccttccgcaagtcctgggccnagaagcagtgcagcatcctccacggccccaccttcgccgcctgccgctcccaggttgactccaccaagtactacgaggcctgcgtgaacgacgcgtgtgcctgcgactcgggtggcgactgcgagtgnttctgcacggctgtggctgcctacgcccaggcctgccacgacgcgggcctgtgtgtgtcctggcggactccggacacctgccccttgttctgtgacttctacaacccacatgggggctgtgagtggcactaccagccctgcggggcaccctgcctaaaaacctgccggaaccccagtgggcactgcctggtggacctgcctggcctggaangntgctacccgaagtgcccacccagccagcccttcaatgaggaccagatgaagtgcgtggcccagtgtggctgctacgacaaggacggaaactactatgacgtcggtgcaagggtccccacagcggagaactgccagagctgtaactgcacacccagtggcatccagtgcgctcacagccttgaggcctgcacctgcacctatgaggacaggacctacagctaccaggacgtcatctacaacaccaccgatgggcttggcgcctgcttgatcgccatctgcggaagcaacggcaccatcatcaggaaggctgtggcatgtcctggaactccagccacaacgccattcaccttcaccaccgccgtcccccactccacgacaagn

SEQ ID NO: 256650 - DNA, 293 bp, Homo sapiens
  misc_feature (9)..(9): n is a, c, g, or t
accctctanagatcccctgattgccggtgctcgtactgaccgatgccgacggcccctttttccggtgcttttctgccgtgaagccgggaacgtactactcgaactgcatgtttgacacctgcaactgtgagcggagcgaggactgcctgtgcgccgcgctgtcctcctatgtgcacgcctgtgccgccaagggcgtacagctcagcgactggagggacggcgtctgcaccaagcctatgaccacttgccccaagtcaatgacgtaccactaccatgccagcaccaccaataca

SEQ ID NO: 256651 - DNA, 1399 bp, Homo sapiens
  misc_feature (447)..(448): n is a, c, g, or t
  misc_feature (485)..(485): n is a, c, g, or t
  misc_feature (669)..(669): n is a, c, g, or t
  misc_feature (673)..(673): n is a, c, g, or t
  misc_feature (680)..(680): n is a, c, g, or t
  misc_feature (802)..(802): n is a, c, g, or t
  misc_feature (1163)..(1163): n is a, c, g, or t
catggatggcaggggtgcccagcctggcccactgtgctccccaggagggcatctgccaccgcaccctgctggggccggcctttgcggagtgccacgcactggtggacagcactgcgtacctggccgcctgcgcccaggacctgtgccgctgccccacctgcccgtgtgccacctttgtggaatactcacgccagtgcgcccacgcggggggccagccgcggaactggaggtgccctgagctctgcccccggacctgccccctcaacatgcagcaccaggagtgtggctcaccctgcacggacacctgctccaacccccagcgcgcgcagctctgcgaggaccactgtgtggacggctgcttctgccccccaggcacggtgctggatgacatcacgcactctggctgcctgcccctcgggcagtgcccctgcacccacggcggccgcnnctacagcccgggcacctccttcaacaccacctgcagntcctgcacctgctccggggggctatggcagtgccaggacctgccgtgccctggcacctgctctgtgcagggcggggcccacatctccacctatgatgagaaactctacgacctgcatggtgactgcagctacgttctgtccaagaaatgtgccgacagcagcttcaccgtgctggctgagctgnggangtgcggnctgacggacaacgagaactgcctgaaagcggtgacgctcagcctggacggcggggacacggccatccgggtccaagcggacggcggcgtgttcctcaactccatctacacgcagctgccccngtcggcagccaacatcaccctgttcacaccctcgagcttcttcatcgtggtgcagacaggcctggggctgcagctgctggtgcagctggtgccactcatgcaggtgtttgtcaggctggaccccgcccaccagggccagatgtgcggcctgtgtgggaacttcaaccagaaccaggctgacgacttcacggccctcagcggggtggtggaggccacgggcgcagccttcgccaacacctggaaggcccaggctgcctgtgccaatgccaggaacagctttgaggacccctgctccctcagtgtggagaatgagaactacgcccggcactggtgctcgcgcctgaccgatccaacagtgccntctcgcgctgccactccatcatcaaccccaagcccttccactcgaactgcatgtttgacacctgcaactgtgagcggagcgaggactgcctgtgcgccgcgctgtcctcctatgtgcacgcctgtgccgccaagggcgtacagctcagcgactggagggacggcgtctgcaccaagcctatgaccacttgccccaagtcaatgacgtaccactaccatgccagcaccaccaataca

SEQ ID NO: 256652 - DNA, 269 bp, Homo sapiens
tccaagagttgtctcaggttgtaggaataggcatggcctgataatatagaaagagggaggcagagaagtaaagaggaactgccatgttgctgaggatataagtgcctttctggtgtgcattacttggtgcgtgaagccctcccatttccaggctcagagcaggtgaggttttgtactaagatgaatggaagcccgatgccttgtccccgcacacacggcaatccagtgaagcgtgccgaaagagacgcgtcttcaaagggatcctctaa

SEQ ID NO: 256653 - DNA, 2278 bp, Homo sapiens
tccaagagttgtctcaggttgtaggaataggcatggcctgataatatagaaagagggaggcagagaagtaaagaggaactgccatgttgctgaggatataagtgcctttctggtgtgcattacttggtgcgtgaagccctcccatttccaggctcagagcaggtgaggttttgtactaagatgaatggaagccccacaatactgtcgccccacaccctacacgctgcagagaggcctctgggttgcttcatgaagggatcctatttataccatctttccatttccctccaatggtaaaaacctctcttctgtctgacctgtaaagacctagaatgtccctgagcgttgactcctcattcaatccagttaacccctagtttgatgtcccagggccagcctcctccatagattcagcagcagctttgcctgggttcttaaccctccaacttggaggacctaaattaaacttggtggacaatagcaggtttttacctgctcaccaagatctgccttgacatcaattaagaagcctagtggtctatgccttccgtactgtggaactcatttgcaggtctcataagccatggaataaatggttgaaggatgtgtatttgtatgtatgtatgcatggtgtgacaggaaaggaagggagaaaggagaagccagaccctgaaggcataaattaagaagcatggtcaccgtttggctttccaagagacgcaaaacggctggcagagaggaatcagaaagttatcctaggctgggcgcggtggctcatgcctgtaatcccagcactttgggagactgaggcgggtggatcacctgaggtcaagagttcaagaccagcccgggcaacatggtgaaaccccatctctactaaaaatacaaaaattagctgggcgcggtggcgcatgcctgtaatcccagctacttgggaggccgaggcagaattgcttgaacctgggaggcggaggttgcagtaggccgagatagcaccattacactccagcctgggtgacagagcgagactccatctcaaaaaaaaaaaaaaaaaaaaagaaagaaagaaagaaagttatcctagcttctggtggagaattaggatagtcagagttgattaaagcagttttcatggtgcttcctgggaagtacagagacactcatactaaatgaccatttcccttgtttggaagcagccattttgcatctttacagtggccctccttgacccagaaagacaaaggtagccagacactctacccacaaggaccatgatgttggctaatggttgtcagggaatctagctgtgtcattggctacctactgctatggccgttttggctgatgaatgctactgatgggagggcagggagtcagactcctttatttagtgttgagtctcctgggggagcagtagcctaggacagtcacctagaaatgaacctgagctgttctgtgagttaccaggagagttagaaaaaaaaaaaaaaaagaaatgaacctgaggactcagttggtagcctttgattgattgggactacagctttgggggaactagagtgagaaaacagaaaataattttataggcaacacttggattaagggcagaatgtgtgcaggctttgggcttgggcatggacttgattcttcttccatttgattctttcttccttctgaaaaacagtagttgaggaagctaagcttgaagtcaacttcaaagggaagtgaccagagccaggcaaatatctgatgccttctgtcttattcttggctcccacagctttgtctctggcctcgggaccctgagtcagcccatccccaggtggtatgtcctggtcctcttccatgtgtacaccaggggataacaggatgaagacagggaaaagatggaggttttccctacttggggtagagaatcactgaccagttccattggcctctataatcatgaggtccacactgactccatggagaggcatagggatagcaagattggtttagcaaacataggtctctctcctttctgctccatcaaatccccagaattactttcctacacatcagatgcctctgcgcaattaccctggattaccacagccaagggctctaggtggccagtggtggcatagagacagatcagatgctccagcactcaaggttcatgagattcaaaaccgattttcttccactccaaacatacactcttttctcttgggcagctataaatagggttttgctaatagaggaagaagaaacaaaaacaaaaaacaaacccaga

SEQ ID NO: 256654 - DNA, 2225 bp, Homo sapiens
tccaagagttgtctcaggttgtaggaataggcatggcctgataatatagaaagagggaggcagagaagtaaagaggaactgccatgttgctgaggatataagtgcctttctggtgtgcattacttggtgcgtgaagccctcccatttccaggctcagagcaggtgaggttttgtactaagatgaatggaagccccacaatactgtcgccccacaccctacacgctgcagagaggcctctgggttgcttcatgaagggatcctatttataccatctttccatttccctccaatggtaaaaacctctcttctgtctgacctgtaaagacctagaatgtccctgagcgttgactcctcattcaatccagttaacccctagtttgatgtcccagggccagcctcctccatagattcagcagcagctttgcctgggttcttaaccctccaacttggaggacctaaattaaacttggtggacaatagcaggtttttacctgctcaccaagatctgccttgacatcaattaagaagcctagtggtctatgccttccgtactgtggaactcatttgcaggtctcataagccatggaataaatggttgaaggatgtgtatttgtatgtatgtatgcatggtgtgacaggaaaggaagggagaaaggagaagccagaccctgaaggcataaattaagaagcatggtcaccgtttggctttccaagagacgcaaaacggctggcagagaggaatcagaaagttatcctaggctgggcgcggtggctcatgcctgtaatcccagcactttgggagactgaggcgggtggatcacctgaggtcaagagttcaagaccagcccgggcaacatggtgaaaccccatctctactaaaaatacaaaaattagctgggcgcggtggcgcatgcctgtaatcccagctacttgggaggccgaggcagaattgcttgaacctgggaggcggaggttgcagtaggccgagatagcaccattacactccagcctgggtgacagagcgagactccatctcaaaaaaaaaaaaaaaaatcagagttgattaaagcagttttcatggtgcttcctgggaagtacagagacactcatactaaatgaccatttcccttgtttggaagcagccattttgcatctttacagtggccctccttgacccagaaagacaaaggtagccagacactctacccacaaggaccatgatgttggctaatggttgtcagggaatctagctgtgtcattggctacctactgctatggccgttttggctgatgaatgctactgatgggagggcagggagtcagactcctttatttagtgttgagtctcctgggggagcagtagcctaggacagtcacctagaaatgaacctgagctgttctgtgagttaccaggagagttagaaaaaaaaaaaaaaaagaaatgaacctgaggactcagttggtagcctttgattgattgggactacagctttgggggaactagagtgagaaaacagaaaataattttataggcaacacttggattaagggcagaatgtgtgcaggctttgggcttgggcatggacttgattcttcttccatttgattctttcttccttctgaaaaacagtagttgaggaagctaagcttgaagtcaacttcaaagggaagtgaccagagccaggcaaatatctgatgccttctgtcttattcttggctcccacagctttgtctctggcctcgggaccctgagtcagcccatccccaggtggtatgtcctggtcctcttccatgtgtacaccaggggataacaggatgaagacagggaaaagatggaggttttccctacttggggtagagaatcactgaccagttccattggcctctataatcatgaggtccacactgactccatggagaggcatagggatagcaagattggtttagcaaacataggtctctctcctttctgctccatcaaatccccagaattactttcctacacatcagatgcctctgcgcaattaccctggattaccacagccaagggctctaggtggccagtggtggcatagagacagatcagatgctccagcactcaaggttcatgagattcaaaaccgattttcttccactccaaacatacactcttttctcttgggcagctataaatagggttttgctaatagaggaagaagaaacaaaaacaaaaaacaaacccaga

SEQ ID NO: 256655 - DNA, 239 bp, Homo sapiens
actacagtgctgtagatactgaggcataattctgaggtttaaatcctagtttctatttctcaagagaagaaagaagggctgcgaacaggtagatttgaagaactgtgtatgaagagatatgggttatatcctgatattagcacctgaaaaaattattctaaacccatcaactaaagaggcaagaattcttgacttgcctaagcaggaatgtgggtttgtggagttttttctgtaattcc

SEQ ID NO: 256656 - DNA, 365 bp, Homo sapiens
ggtcttgaactcctgacctcaggtgatccgcccgcctcagcctcccaaaatgctaggattacagctgtgaaccacagtgcccggccatctcctgcattattcttaataacgcattgtggtttttttgtaaataaaaatagttttattattttgttggatcataaattaacatatctacaggcttaccatggagatggtgcgggtttagttccaggcaacctagttaaagtgaatgtcgcaataaagggaatcatgtaaattctttagtttcccactgcacatacaagttttctttatactctactgtagtttaatgtgcaatagcattatgtctttaaaaagcaacataggccaggcacggtggc

SEQ ID NO: 256657 - DNA, 445 bp, Homo sapiens
gtgttggctagggtaattgatctaaactaccattggaaaatcatactactgttccacaatggaagtaagaaagggtgtgtctggaatacaggagatatcttagcgtgtctgttactatccatgctctgtggttaaggtcaatggaaaacaccaccaccacaacctaggcaggactacaaatgacccagattcttcaagaataaaggtttttttcaccccaccagattcttttggattgacaatacacaattattgattctactgtcatgcagaatctttcagaagccaatggaagtttataggagcagcactggtgcaacaatggtgggtcacatgggaatctgttcctcttttttcacgcagcttactagggccatttcatcctactgagggctgattcctgatatgctgctttaactgtataataaattattattggtcctgc

SEQ ID NO: 256658 - DNA, 404 bp, Homo sapiens
tacgattacgcacataataaataggaatgtctcctgactctgttccaatgacaacccagatgaataagacaaaagacataacctttgtgttcacgcagttttagaattcagatacaaagacactggcatgaagatacgtgacaaatgccaactgagtatacacaagctgtacaggtcccaaaaagggaacaacctcttgaagccatgaataaaaagcctatggaacatttaaaaacccattctgtataaaacactcagttcacaaataagaaacagcatgtgaaagggctctgtaggtcataaatgttatacaaatgttacttgttaataaaagtaataacagctactacttacttagcatttgctatgggtcaggcaccatgctcaatatttcacatacattt

SEQ ID NO: 256659 - DNA, 368 bp, Homo sapiens
aggcaaggatctcctcaccttactagttgtgcgacctcaggcaggttatcctcccagagccctgttttcatcatctgtaaagtagggctggtgtaataacttgctcaattgtatgaagattaaatgataagtatgtaaagcatttgcatagtattttacactatgttcaaaatgatgggcattatcaatattaattgatgttaatattaatattcatggactaatgaacagaggacccgctgcccggttcctttatggctgttctggcacacactgagggtcagcaaattacggcctgtgtatcaaatccaggttgttggccatgtggcccatgagctaaaagtggtttttacatttgtaaatggttg

SEQ ID NO: 256660 - DNA, 448 bp, Homo sapiens
gcacgagaaaaaaaggttggaacacgaagctggtgaagaaggccagttatttatttttcctttttttcatttgagttttttaaaactcctaaatcagtcttcttctctagaattcacttttctgttttattactcatctcttcaaaatactcaagtagtccttttttctttactgagtgtatcataccctgggatcagtaggacctcacaatgctagaattcctgttagtataataaaggaaaatttctttctgaaataatcttgttttttgcttgattgattggttggctttttcatggtaagtggaaagcgtaccttttttgcatcctttgctgagataaacttatataatgatgatgagagtttgtattgcttgctactacctttatggatggaatatgttaatatctattaaaattaaaagatgtgcttatctcttaattcagt

SEQ ID NO: 256661 - DNA, 110 bp, Homo sapiens
ccctcaggggtggggctgtggcccatattcatgctcgtcaaccccagttcctgtgttctttctattctgtgaccactgtctttccagggggtggggaatgtggaggaggt

SEQ ID NO: 256662 - DNA, 425 bp, Homo sapiens
cctccccaatataaccactagccccccaacactacacacattgctaatgaccttgacaccaacgcaaatagaagctaccttccaataaagcagacacgcctacactccacctcaaccccatctatctttaaatagagatgcttttccactctgggtacatggaaacataccctacctgcaaacacacagacacacacacaaaccaaacccatggactgaatcgactgaataggcagattcttgagccaaacagacataggtgggatcttggccccaccttttccttaccataggaccagagccagtcatatcaactcacgagcctcagtttcttcatctgtaaaatggacccaataagatcttctcttacaaaataaaataaagtaaaacaaaataggaagagtataaataagctcttcgaagga

SEQ ID NO: 256663 - DNA, 365 bp, Homo sapiens
gttgctaaatttagaattaggggtaatgactggagtgctgttgaggtgatcagtgttataagccaaatgacctgtcagtctaaaccctcctgcctttctatctgaaatgtggatatgtcctttattaggaaaccacattacaagagaagcaacttggctttgcagctcaaatacccatgacttgtgtgatactaagtattcccatgtcatatattcaactgaaattggctgtggaataagtaatgcttcttggttcttggcaaaagcaaaggagaatcatctctggagaaagcacttttattctaggctcaagcttttatttatctctagaaaatattggtaaggtcagtttagtacgtggtaaa

SEQ ID NO: 256664 - DNA, 263 bp, Homo sapiens
gatcgaatgagattaagatgtcaacgccttatataaaaatgaattactctgattatcaagtagcacaggtaacattaggactcaagcagtggaaagaggctgggctcttccatatataaaggggctaggctctcctcaactcacctgtgtggccctgggcaagtccaggtctcagttttccaaagctcctgccaactctaagactgtgatattttgtgggctatgcctctggtgcaagaattctggtgctggccgccctgatc

SEQ ID NO: 256665 - DNA, 161 bp, Homo sapiens
actagcagagagctgcttgcaattgagatctgtcaaatgaggacttctcagacagctatgaggattctttgactcctgttgttaaaacacattttgtagatttaaaatatattcatagaaccaagtcttctgagttttcatcttctaggactagctttcgc

SEQ ID NO: 256666 - DNA, 478 bp, Homo sapiens
gactttcttctgagcagtcggggccctgtcactcccccccacctaccacacagcagcatctctatttccattcaggcccaactttaaaaaaaagaacccagatgagagatctggctgtggcacactgcgatctgggatatgttccatgaaggttcaggcgccacatacacaaaatgaatagctgatactcctccttcatcagagaacttgtgaggcagaaagcggggaaagcccatctgagtccagcagagctcctctgggggacatcaggtcaggccccagtatctgggccagatgcagtactcatcaaaattgcctctcagtccaggttggaagagggaagctgcagcaccccgtggctagaaacaggagaaagatatcccctacaattctctagatgataaatctcaagagagttgttccctaaagcattagttaactaaaaaataatataaaataagcaaacatgggctctaag

SEQ ID NO: 256667 - DNA, 329 bp, Homo sapiens
ttagctgagtggagacgtgaggtgttcatttttgagaatgttcccttgtgttcttacttactctgctcaaggatgagcaagaagtggccaagtagtaaagccatggaggttgtatgtgaaaacagctggttctgtagaaccacagtcagctctagctctgaaaagcaaaaagaagtgatactttaatagcgtgttttttttttttttttttttttttgacagggtatatagcacttttggtctttagtaatgtgagactgaggggaaaatggcttgtgtgattctgggattcattggctagaggagctctgttttatgaggactctagg

SEQ ID NO: 256668 - DNA, 555 bp, Homo sapiens
caggcctgcaggagactgaggaaggggattttcagagcctagtggttgacagaatggaggagggaggagggagagggaggagctgagtttggcacccagatttctgggtggatgactaagccaatggagcccacactaagtggtgaacccaggaccaggagcaggttgtggggcaggggatgagttcaatatgggcatggtaagcttgagggactgtgcagcaagctagtggagatatccacagggcagttggctgccgctgtggtctgaatgctgtgtccctgcaaattcatatgaaatccgaacccccaaggtcattatattaggaggtgggggcctttgagaggtgattagggattagtgaatgggattagtgcccttataaaaaagagccttcagagagctccctcactactcacaccatgggaggacactgagaagatggcatctgtgaaccagaaagcaggccctcaccagacaccgaatctgccaggccttgatctcggacttcccagcctccacaactgtgagaaataaatgtttgctgtttacaca

SEQ ID NO: 256669 - DNA, 298 bp, Homo sapiens
gcagtggcgtgatctcggctcactgcaacctccacctccctggttcaagtgattctcctgcctcagcctcccaagtaggtaggattacaggtgcacaccaccatgctgggctaattttttacttttagtaaaatggggtttcgccaccttgaccaggctggtcttgaactcctgacctcaggtgatctgcccacctcggcctcccaaagtgctgggattacaggcatgagccaccatgcccagacactaaggacaatcttgagtgccaaaataagacattcataattgattggataaa

SEQ ID NO: 256670 - DNA, 518 bp, Homo sapiens
tgctttcactggaggaggatggttatgaagaaggtttccattaaatgaaatgccagttttcttgagggaattcagagggcagagcattttatgaaaattgcttattgtctttgcttatccatagtatccaggagatttgagaagaataacctcagtgtgatcctttatttcatgccttatatttcatcccaagaagctaagttttgtattatatgaggaaaatcacatgatgaaccacaaaaataaaacatggattagagtaggatcactgaaaagtttacagtaatgatacagtcatatctgcatggcaatgaccagtatttcttacagcaaagaagcccataagtttgtagatgatattctttttcaaatacattttagattgtctaaaagtttctaaatcaatggtttcattctgtttcttttcgttatttttttacaaatatcgagtgcttaccatgttataggcccaaacttgaacaatttaaaagatcagtggagatgtccttgctttctca

SEQ ID NO: 256671 - DNA, 388 bp, Homo sapiens
ggaatgactttgcatcaatcacacaggtgatgtgactcttctgttacctgctgtctgctcacaggaaggattttgacctttcacagcatatagctgatgtgactcttcttttatttcttagtttttcctgaaaaacagactgtggaatattgctgaacctagcaccaaatggatattactctttttttttcttggtcctgcccatgtaagacattgtgacgtattgctgggccctacacctagatgatgttggattgtgacatacactttagcacagctcatggttgtgatgatgacacttacgccacaaaacagccaataggagagatactgccacttgtagctagacttacagaaatgaataaactcctgagtcttctgtagtaaa

SEQ ID NO: 256672 - DNA, 729 bp, Homo sapiens
acatatcgctgctgtcccctacaagttatgtgactctcttgcctgtgctctgccaacatgggccattgtgacatgttgctgggtccaaaacctaggttctgcctgcagaagagattgtaacatgttgctgggcaccttgggcctgccctcagaaggcattatgacatattcctgggtccaacaccaaggtgatgtgcgtctcctggctggaccctgcccacagtgggcactgtgacatatctcttggcccatcagattgttcatgttatccccttccctttttttcctggtgtttgcccatgagagacattgtgatgcatttctggacctagcacctaggtgatatcttcctgggacctgtctatatgggttattgtgatacatcatgtacgtggcccagtacttacttgatgtgactctcctctcatgcctagaccctgctcacaggtgatgctactctctacttatgcctgggccttgacaaaaagagggattgggacatatccctggacgctgaacctaagaggtggaggttgccgtggtgacagagtgagacttcgccaaaacaaaacaaaaaaaacaacaacaaaaaaggcagggtttcaccgtgttagtcaggatggtctcaatctcctgacctcgtgatctgcccgccttggcctcccaaagtgctgcaattacaggcgtaagccatcgcacctggccaggttggtaactctttaaccaaga

SEQ ID NO: 256673 - DNA, 427 bp, Homo sapiens
gtgactctttagcaccagcacagcctacagataggattgtgccacactgctggacccagcacctaggtgacgtaactctattctcctgctttggtgctacccaaaaaggacattgtaacatatctcagagccttgctcccaggtgatgctactctctacttatgcctgggccttgacaaaaagagggattgggacatatccctggacgctgaacctaagaggtggaggttgccgtggtgacagagtgagacttcgccaaaacaaaacaaaaaaaacaacaacaaaaagttggattgtgacatacactttagcacagctcatggttgtgatgatgacacttacgccacaaaacagccaataggagagatactgccacttgtagctagacttacagaaatgaataaactcctgagtcttctgtagtaaa

SEQ ID NO: 256674 - DNA, 198 bp, Homo sapiens
ttccagccttggtgctgcccacagggtggattatgacatactgctaagccctgcactcgttggattgtgacatacactttagcacagctcatggttgtgatgatgacacttacgccacaaaacagccaataggagagatactgccacttgtagctagacttacagaaatgaataaactcctgagtcttctgtagtaaa

SEQ ID NO: 256675 - DNA, 434 bp, Homo sapiens
cagggagcttgaatatcaagagattgcccctggaatgactgagtccgagatcatcggccaaggtaatgctagtgcaaataagatccaagatcaagtagctggtatctgggaatcactggcaccacagcaaatgccccttaccacccacaaatctggagagactggacaccagaccacttcagggatttgtgaggaactccatcctctggctatatctgacatcagaaaacagtcaagagagcaagagaaaaatgctgcaacctcatttctaccttccagtttccaatgaagcatctcattgtcaggacctaatttgcatccagaaccttacctgcaggaaagtatcaaaatatagtttgtttatgtgttgtaaagctttccaatttctgccatactggaaggtgcactaaaatgaagaggcaatgactactgag

SEQ ID NO: 256676 - DNA, 784 bp, Homo sapiens
tctgtgtgccagagatagacccacatggccaacatgggaagaaatgggattttcacacctaagctagctaaggttgaccactaagctgtgatttctattttacttttgagagaaaaagaaaatttctcccacactttaaaaaacaactgtatttgcttaggataattttttggactcggggtaaaatgctactttacttttcactttgcctgaacaagtatctgcaagcttttctgcatctgtaactaaatggcacttccacatacaatctatgtattgttatagagaggctgaaatgccaaataaaaatgtaaacactcgggcaggctgaaaacaagctttccaacttctattcacagaacacaaacaaataaaaaggaaggacttgggtagcaaagcattagtcaacaaaagctaaaaatgaactgaaaatgctatacactagaatgtgcaataactgcctcctggaagagtacaatgaacacctctcaaggtcagtgcttttttttctctagtgcgttattataggtatttaaatggacactagtaccctttatgtaacttttaaaacacagtatcagtattctagcagttaaaaggtaacctcgttagttttctgcaaagtcaaaatttcatcatttctaataccagcaacataaaatggcagaaaaagattcaggtcctaactcaacagtgagaaatgcaaagaaaatatgtataaggagtttaaaactaagagaaacagtaaagattcagtttagacctcacataaagtcacttatgt

SEQ ID NO: 256677 - DNA, 577 bp, Homo sapiens
cttaagtgacttcacacacacacacaattgtaacgatgtgtgattattaatatctgaatataatgtaatcattacacaatggattcatgtacagaatcatcacattgcacgttttgaatatattcaatttttatatgccaattatgcctcagtgaagctggaagaatgagagtgctctcgtgcaaatttcatgacctctttacaattttcagtaaatggaaatgataaaggaacctatttcacagagttcattgaagagttaggtgaattaataaatgaaaatcacttagtacaaggccaaacacttggaaagcactcagcatacttagtagttatttttagtgaacaagattatagcgactacatctctgctatagcaatttcttctgtaacctcaaaagcttgccactcaatttgatatagtaaaatgtaaaattatgtcacttaacagtttgcagattccaacaaagctcttatgataaatatgaagcttataaacctcagccataaatttggggagaaatgctggactcacttcaaaatggatggaaactatagtttaatgcaatgactacta

SEQ ID NO: 256678 - DNA, 292 bp, Homo sapiens
tgtgtgtgtgtgtgtgtgtgtgtgtgtgtgtgtgtgattctccatccaagtgtttacttcctttctcatttcatgactttgggttattgactcctgtccctccccaacctctgccctccccagttgggtgacctgggaccaactccccaacctccacatctgtctccttattagtgaaatggagctatgacagaacccatgatgtagggatgctctaagatttaaataaagtaatccaggtaaaatgcctagtcaattgtctggcacctaataagcattcagtcagtggtag

SEQ ID NO: 256679 - DNA, 318 bp, Homo sapiens
ctagtttacagagagattgtatcatgaatgggattaaagcttgtcaaatacttttttctgcatcaaacagtataatcacgtgcctttgcttgttttgatttttaatttgtagaatacttcgatttttaaaatatggattaagccttgcattagtggaataagggaataaagtccacttagttttagtgtattactcttcttatatgttgttagatttgatttgctagtactgtattgggaatgtttgtgtctatgctcatgggggatattgttctgtacttttcctacggtaactgtctttggttttggtatcagagt

SEQ ID NO: 256680 - DNA, 400 bp, Homo sapiens
gcaatcaccagcaactgtacaaccaccagcttggcgctgctgtcccagaaacagctccagagcgctgcacacgcatcacccaccccactgccaacagccccccacaggcaggtactattattatctcccttttatggaaaatagtaactgagccagaaagggtgctgcctaaattcagcagcaagccagtgagtagcagagccaggactagacccagaggaaggctgcactctcccaggggaatgtcccctcactgaggccctaggctgaatgtgacgcaagacagaaggtaggagcctggtctggcatttggcaaaggagcccagagccacgactgtcactcaccagcatgcctcatccccattgcccttcctggcccatcagccccacacactgctcc

SEQ ID NO: 256681 - DNA, 347 bp, Homo sapiens
tctgtaatcccagcactttgggagccgaagcaggtggatcacctgaggtcaggagtttgagaccagcctggccaacatttcaaaaccccgtctctactaaaaatacaaaaattagctgagcatggtggcgggcgcctgtaatcccagctactcgggaggcctgagacaggagaatggtgtgaacccgggaggcggagcttgcagtgagccgagattgtgccactgcagcctgggcgacagagcgagactctgtctcaaaaaaaaaaaaacacaaatggaaggaaggctggggctggggttgtggggcccaccccgtgtacactccacgtggcccagctgagagctcc

SEQ ID NO: 256682 - DNA, 783 bp, Homo sapiens
tattgtcccttcacgaagatatttctgggtagacatctgggttcgtgtgtgtgtttctccctgtgtctgtgttcatgagcgacacctgggcgtgcagtggaaggagcacaggctctggactgcacacttgggtgaggcactttcagctctgaagacacagaaactcagcttgctcatctgtgaaactgacagcaattcccacctcccaagctcgttgtgcttcagtttatataaagcccctcacacaggttctgcaaagtgggcactcagttaatagtacttattacatatgagcctttcataaaatattgtgttaattataaatgtttctacttgcatcaaattatgtgagtccatggaaatgtcctaagtgtccgtcagcacataaatgaatacatgtgatatattaatataatttggcgaaaaagatgaactttttctatatgtgtgacatggctgacacttaagaaataaaacgaagtgaaataagccagacgcaaaaggacaaatgtggtatggtttcacttatatgagttacccagaataagcaactaactctataaaacaaaagtagaagagaggttacaagggggcagggcagagcctggggagttatttcttgatgggtacagaatttttgtttgaaatgatgaaaaagttttggacatcgatagtggtgatggtggcacaacattgagaatttacttaatgccactgaactttacacttaaagttaaaatgatttaacttcatgctatgtatattttaccagagtaaaaaaaa

SEQ ID NO: 256683 - DNA, 196 bp, Homo sapiens
acaactggttctggaggtggggtgaggtgggaggctctgagttgtagcattttcaggtgtccaggaagtaaatatccccaccatggccaatttcatcctgtttaagtgatgtcactgaacgttgtccccaagctttagcattctgctttacattctcattttaatcctcaagcaactctgaattagttgctgttat

SEQ ID NO: 256684 - DNA, 496 bp, Homo sapiens
actggcttcccccactttgaagtgaatcatcacatccgtattagaccctagctgttgctcaggcaaaaatgatgatttagaagaagatggagagaagaggagagttaatttaaaagcacttatatttggccgggcacatgctgggattacaggtgtgagccacgatgcccggcctgcaataagtatttctaaataagatcacattctcagctactagaatttaggatttcaacatcttttgaggaggactcaatttaacccataagaatactatgtgggccacacatggtgcttcacatctgttatcccagtatttcgggaagttgaagcaggaggatcattgctcagggcctatggggacaccgggtgcataagaccacagtgttgactggtgtggggactcacacctgtaagtttgggaacctaaggcagggcaatcgcttgagctcaggagtttgaggccagcctgggtgacatactgagatctcatttctta

SEQ ID NO: 256685 - DNA, 329 bp, Homo sapiens
atttccattttttctccatccatttcctcttctcaaaataacacatttcccctccctccctccctatctctctctctttttctttccttcccttccttccttctttccttccttcctttccctcccttccttccttcttttcttttttcttttcttctcttttctttcgtcttgctctgttgcccaggctgcagtgcagtgctgcgatctcagctcactgcaacctcagcctcccaggagaattgcttgagcctgggaggcagaggttgcagtgagccgagatcataccactgcactccagcctggatgacaagagtgaaactctgtct

SEQ ID NO: 256686 - DNA, 687 bp, Homo sapiens
ctgggcactagaaacagccctgggaaggggccacggggaattctagatctgggcagcatttcatggcccgggggatggtgtgctcttgcctaagcctagcttgctgatgccccacattcccctggccctggctcgcccacacagagaaaagactttgctggtcttagcacatactccaaacactcttaggcacacaggccaccttggcctctcagctgggtgtgtctggtctgagttgggcaactactcagcttctctggcttctgagggaacactcagggaacctcagaagggataagggacaaaagaattgtggggcataggttgtcagctggtgagaacagttcttcctttctcccccccacttccatctgagtgcctgctggtacccactgagaccccagagctccagcatgtggactcttctgagaccctgatgctcatatatgtgcatgcgtgtgagtacgtgtctgccttcaggtataggcatccaccagcatgtgaacagccagtgttacccatagggggcgtatgcagctgcatgtgctctggggcttcacacccccactcccggccccctggccccagcatgaggttatctgtttgcacagacactggttctctaattttagcatgtgttagaatcacctggagggcggttaaagcagatttctggaccccacaccc

SEQ ID NO: 256687 - DNA, 334 bp, Homo sapiens
cactgcagcctcaacctcctgggatcacataattctcccatctccctggccctgaagcctttcataatctgatcccacccagtctcacaagcctttgctctctggccactaatgtccctcctcctccccattacccacaccaaacttcctcctagaacatactgtctttgatagttctactgtttctcctactacctagaatgttctcttttccctggcgggtaacattaatcctggcactcaaaaaaaaatagcctctgttgtaaataatttttattatttaagatacaactgaggctgagtgccgtagctcagttggaagaagaaagaaaga

SEQ ID NO: 256688 - DNA, 428 bp, Homo sapiens
tgagatatgtttctcaacttttgagatctaacaacattttcacttaaaccaataatgagggcaaattaaattcatcaattattttccaggaaacagaatgagttgggaaaaggtattgggaggcattgaaccaaacagaaatacgcacatatgcttgattgcaaatgatctctgggactgttttcaacccatacagaatggtatctttcagaactgtatggatgcactatacatctttaacaacaggctaaagaactgccatccttgaaatctggattccaagggtgtgtcacagaaagtgtatcttcttaatacccacaagatccaaagctagatgaagttttccatgatagggtcaggatagctccagctgtagcccatttgggaagcctggctccagctacatgtccacagaatgcgtgcattag

SEQ ID NO: 256689 - DNA, 343 bp, Homo sapiens
  misc_feature (4)..(4): n is a, c, g, or t
gacngaagctcaggcccttcctggccccttgatctcctgcactgagctgtggtgagcacatccgggtcccgctggatgtatgtgtgggcagggggggtgccctgggttgggtcaatgatgagaaccctatattgtgttgaagagaggtgatgacttaaaattaccatgctcaatgattacgctgaggcccaacctaggtgagaaatttggaggaggatgctgggatcccgagatttccggcagggccactgtattttgggctggagccctggaggccctgaaagtatctggaggaggcccaactctgtctctgcactcctctgtgagcagcccaggctcctgt

SEQ ID NO: 256690 - DNA, 211 bp, Homo sapiens
acctgccactaaacacaattaactaccagcccaaacattaatatcttcattccagctttcttgtgactaaattcacattacttttttacttacttaactcaatggtttcttctcaatcgttctgagtctctcagctatatactttgttgctaaccaccacctctttaaaactctatcccaggtttctctaaacagtgtattcctcagtatc

SEQ ID NO: 256691 - DNA, 382 bp, Homo sapiens
agacaggtaaagaagtacgaatgttgtttatatttgttagaaaagagacaggatgaagtctcatggacacaggacacaggtaggtcaggtcctacaagggcgccatcaagaaagagttttgaaagctatatgactcaatatacttgaaaatcaatttgtttcagagattcacaaaatatcacttagcatacaaaaagaggacaaaaaagataactgaattaaaataagtacaataacccatcaaaaataaatctgcccctaaaatgcacagacaatatattaaacaagtaaaatgcttgtggtttgaatgctcctttttgtaaaatgtctctttgaaagtaacaatactagcatgctattaaatccaaaatatgtgttcaac

SEQ ID NO: 256692 - DNA, 312 bp, Homo sapiens
atgtgcatccagttttgtttttttcaatgaacaaatacaaaatcacgttaacctacctttttctcattctgtattctaatgcctttatatgaaaattttaatattttacaattggtgattaatgccctttcctgaaatttggaaaaatgtatatagaaaactataaagaagaaaaatgacctattattttaccacccagagataatggctatcaatatattttagttcctttccatttttaatgcatccatgtttttcctcaaaattatcatgctatatacacacaaatatatgatgtttactgaatattca

SEQ ID NO: 256693 - DNA, 364 bp, Homo sapiens
cagcagtaggaaatatgttaatgtaattcactacttaaccgattaaaggggaaaccctatatgataatttcattaaatgtatggggaaaaaaaagttgtccagtatgattctacacccatatttatgataaaacttttagcaaacagaacagtaggaaatcttccttaaccttctttagggtttaaaaaaaaatcccatagattacttttccctgtgatcatgctatgaggtctggtctacactcacaggcagggactgcgccttgaatatgccagtagttgcataggagtgtgaggtttccatctctgaactctaccatagtaaacaagagcctgggacatgagctgactttcaggtactgga

SEQ ID NO: 256694 - DNA, 399 bp, Homo sapiens
tggactattggaataatttccttgttccagtgtcagtacatccaattcacccatcccctccttgcttctggagtgctctttctaaatacaaataggctaatgacattttgcttttaaacttgtttagcacgctatttcacaccttcaagatgaaagtcaaattcattagattggtggataaagtccttcccaatccagtcatttcttcatctccagccacgccacactacctgccacttcttgcacagagcaatctgccttagcctcttggtcttgcactcttgtatgttcgggtacttctgcctggaatgcctctttcttattcaatcaggaaactctcataacaggtgtgtgtgtctgacattaagtgtcacctccttagcatacatcttggattta

SEQ ID NO: 256695 - DNA, 1872 bp, Homo sapiens
tccccaggctatctccagccgtggccgatggccgtgccgggggcagagcccgctcccctccgcgcgttgctacgtgcggggatgacatggatccagacgccgtcaactacgggaaggaggaggcgagagttggagcgcgtgggagcgcagaggccggaggagggagggggggacaccgagcgcggagagcgcggagagcgcggagggaggcgcgcgcgggagcgaacaccctcccggatccagagcccggcggcggcgaagcagcagctgcggccgcgcccttgccagagccggtgcgtccgcctagccccgctccgcctgaggccgtcagggctcccgaggatggaagattcccaggagacatcgccgtcctccaacaactcctcggaggagctcagctctgctctgcacctgtccaagggcatgtcgatcttcctcgacatactgaggagagcagacaaaaatgatgatggaaaattatcctttgaagaattcaaagcatattttgcagatggtgttctcagtggagaagaattacacgagcttttccataccattgatacacataatactaataatcttgacacagaagagctatgtgaatatttttctcagcacttgggcgagtatgagaatgtactagcagcacttgaagacctgaatctttccatcctgaaggcaatgggcaaaacaaagaaagactaccaagaagcctccaatttggaacaattcgtaactagatttttattgaaggaaaccctgaatcagctgcagtctctccagaattccctggaatgtgccatggaaactactgaggagcaaacccgtcaagaaaggcaagggccagccaagccagaagtcctgtcgattcaatggcctggaaaacgatcaagccgccgagtccagagacacaacagcttctccccaaacagccctcagtttaatgtcagcggtccaggcttattagaagaagacaaccagtggatgacccagataaatagactccagaaattaattgatagactggaaaagaaggatctcaaactcgaaccaccagaagaagaaatattgaagggaatactaaatctcacatcatgcttgtgcagcggcagatgtctgtgatagaagaggacctggaagaattccagctcgctctgaaacactacgtggagagtgcttcctcccaaagtggatgcttgcgtatttctatacagaagctttcaaatgaatctcgctacatgatctatgagttctgggagaatagtagtgtatggaatagccaccttcagacaaattatagcaagacattccaaagaagtaatgtggatttcttggaaactccagaactcacatctacaatgctagttcctgcttcgtggtggatcctgaacaactagatgttcctagacattttctttatggttccaagtgcaaaacaggtgttcttatctaaaacgtcaattagaaaattatctgcggttgttaatctactgtatatttttgtttggtatatttactaagtgcactctttcaaaacttattctataactttatcaattcatgtgaattttagctcaattttcaaagttcactaatattctcaatatttaatgctaaatgctttgctacattgtaactcacctaaaaccttttagtgacaaaatcctaatatgtggaaaaaagcatatgcataaaggaataatattgtgaaaatgaatctgttatgataaagaaaaaataaagtggaaacttttagagtattacttcatagggcagattttgtaaactgtcgtatactgtaaagggttaaatcagcgttttgtgatttttaagtaactgtgagtgaagtttattcttcaacaatctcgtgcc

SEQ ID NO: 256696 - DNA, 1895 bp, Homo sapiens
tccccaggctatctccagccgtggccgatggccgtgccgggggcagagcccgctcccctccgcgcgttgctacgtgcggggatgacatggatccagacgccgtcaactacgggaaggaggaggcgagagttggagcgcgtgggagcgcagaggccggaggagggagggggggacaccgagcgcggagagcgcggagagcgcggagggaggcgcgcgcgggagcgaacaccctcccggatccagagcccggcggcggcgaagcagcagctgcggccgcgcccttgccagagccggtgcgtccgcctagccccgctccgcctgaggccgtcagggctcccgaggatggaagattcccaggagacatcgccgtcctccaacaactcctcggaggagctcagctctgctctgcacctgtccaagggcatgtcgatcttcctcgacactacctgacggacgacgcagaccaacaactgactgactggacacacacttactccttcgacacgaccttcaaacgcacctacttttggcacgacctgggtgattacatcagtggacgaccgccccttacaccgacggctatttccaataccacacttgactaccccacttcactaccttacctacactgcttggacccagcacggaccacgaggcctacttgctggaacctaccttaacgcctacaacgagcgcctatgagcgccgacggtacttgaacgaccacttggtacgctacgacccagacaagcttttgcaccccgaacccacttggacactttccttatatccacactaccccgttggacaacggggacgaacgtggtcgaggacacacgcagccaccacacaggacaaaacgacaccttaacgcgcaacaaacggcacaacggaccccattcgccgacaaaattgatatggaggacaacaccaacgcaatgtaccggagataacgaaccattacagcgcaagttgccaagtggacacgttttcgggaaccacggaggcacacacgaagatgccgccattgtcaaacgattccgaaaccgagttgtccgaaggaaatccagttcctgttccactcaacaacaaacaaattagtccccgcacatgcgggcacacaacttggatctgcgcccccacagtgatagcacacgaaaacaagtcaacggtgggcacgggtgacaagaccgcaaaagaatacaccaccccagagattcagcaagagggtataccaagcgtgcgccccaacacaggaggagagccacccaaaggaagcccagaaatacgagaccgccacaaatagcccgcaacgggatccccccggtgggaagacacggaaccagattgcacccaacacaccacctgggtggcaccccccgctggggggaaccaaacacaccacgaggacagctccgcaacaagaacccccgtgcacaccgggaaacaatctcacgaaagaaacagcagaacacgagccgacaaaaaacaacaagcagacattatcaccagtcgcaaccaccggaagaaagaccacaccggaggcgcgcacattacaaaagagaaagaatgctacaccagatggatatcacctgacgacaggagagaacccacccatgagaggaagattaaacagattagcaagaccccaaaggacacaagggacacacaacagaccccaaaagacaggggcgacacattgcgcaaaccgccccaagagaaacgtacacaacaataaaaacacaccaatctccgcacagacccacaacacaccacccaccatgggaaaactctagcgaaacacaggatggcacacaacagacagaaccaacggaggaacaaacacgtccacacacaaacccagcacgaaacgcacaccaagacacgacaaagga

SEQ ID NO: 256697 - DNA, 1828 bp, Homo sapiens
tccccaggctatctccagccgtggccgatggccgtgccgggggcagagcccgctcccctccgcgcgttgctacgtgcggggatgacatggatccagacgccgtcaactacgggaaggaggaggcgagagttggagcgcgtgggagcgcagaggccggaggagggagggggggacaccgagcgcggagagcgcggagagcgcggagggaggcgcgcgcgggagcgaacaccctcccggatccagagcccggcggcggcgaagcagcagctgcggccgcgcccttgccagagccggtgcgtccgcctagccccgctccgcctgaggccgtcagggctcccgaggatggaagattcccaggagacatcgccgtcctccaacaactcctcggaggagctcagctctgctctgcacctgtccaagggcatgtcgatcttcctcgacatactgaggagagcagacaaaaatgatgatggaaaattatcctttgaagaattcaaagcatattttgcagatggtgttctcagtggagaagaattacacgagcttttccataccattgatacacataatactaataatcttgacacagaagagctatgtgaatatttttctcagcacttgggcgagtatgagaatgtactagcagcacttgaagacctgaatctttccatcctgaaggcaatgggcaaaacaaagaaagactaccaagaagcctccaatttggaacaattcgtaactagatttttattgaaggaaaccctgaatcagctgcagtctctccagaattccctggaatgtgccatggaaactactgaggagcaaacccgtcaagaaaggcaagggccagccaagccagaagtcctgtcgattcaatggcctggaaaacgatcaagccgccgagtccagagacacaacagcttctccccaaacagccctcagtttaatgtcagcggtccaggcttattagaagaagacaaccagtggatgacccagataaatagactccagaaattaattgatagactggaaaagaaggctaaatctcacatcatgcttgtgcagcggcagatgtctgtgatagaagaggacctggaagaattccagctcgctctgaaacactacgtggagagtgcttcctcccaaagtggatgcttgcgtatttctatacagaagctttcaaatgaatctcgctacatgatctatgagttctgggagaatagtagtgtatggaatagccaccttcagacaaattatagcaagacattccaaagaagtaatgtggatttcttggaaactccagaactcacatctacaatgctagttcctgcttcgtggtggatcctgaacaactagatgttcctagacattttctttatggttccaagtgcaaaacaggtgttcttatctaaaacgtcaattagaaaattatctgcggttgttaatctactgtatatttttgtttggtatatttactaagtgcactctttcaaaacttattctataactttatcaattcatgtgaattttagctcaattttcaaagttcactaatattctcaatatttaatgctaaatgctttgctacattgtaactcacctaaaaccttttagtgacaaaatcctaatatgtggaaaaaagcatatgcataaaggaataatattgtgaaaatgaatctgttatgataaagaaaaaataaagtggaaacttttagagtattacttcatagggcagattttgtaaactgtcgtatactgtaaagggttaaatcagcgttttgtgatttttaagtaactgtgagtgaagtttattcttcaacaatctcgtgcc

SEQ ID NO: 256698 - DNA, 3681 bp, Homo sapiens
ggaagccagacagctggctcgagcctctcctgctcagcaccatggctaagacccctagtgaccatctgctgtccaccctggaggagctggtgccctatgacttcgagaagttcaagttcaagctgcagaacaccagtgtgcagaaggagcactccaggatcccccggagccagatccagagagccaggccggtgaagatggccactctgctggtcacctactatggggaagagtacgccgtgcagctcaccctgcaggtcctgcgggccatcaaccagcgcctgctggccgaggagctccacagggcagccattcaggaatattccacacaagaaaacggcacagatgattccgcagcgtccagctccctgggggagaacaagcccaggagcctgaagactccagaccaccccgaggggaacgaggggaacggccctcggccgtacgggggcggagctgccagcctgcggtgcagccagcccgaggccgggagggggctgtcgaggaagcccctgagcaaacgcagagagaaggcctcggagggcctggacgcgcagggcaagcctcggacccggagcccggccctgccgggcgggagaagccccggcccctgcagggcgctagaggggggccaggccgaggtccggctgcgcagaaacgccagctccgcggggaggctgcaggggctggcggggggcgccccggggcagaaggagtgcaggcccttcgaagtgtacctgccctcgggaaagatgcgacctagaagccttgaggtcaccatttctacaggggagaaggcgcccgcaaatccagaaattctcctgactctagaggaaaagacagctgcgaatctggactcggcaacagaaccccgggcaaggcccactccggatggaggggcatctgcggacctgaaggaaggccctggaaatccagaacattcggtcaccggaaggccaccagacacggctgcgagtccccgctgccacgcccaggaaggagacccagttgacggtacctgtgtgcgtgattcctgcagcttccccgaggcagtttctgggcacccccaggcctcaggcagccgctcacctggctgcccccggtgccaggactcccatgaaaggaagagcccgggaagcctaagcccccagcccctgccacagtgtaagcgccacctgaagcaggtccagctgctcttctgtgaggatcacgatgagcccatctgcctcatctgcagtctgagtcaggagcaccaaggccaccgggtgcgccccattgaggaggtcgccctggaacacaagaagaaaattcagaagcagctggagcatctgaagaagctgagaaaatcaggggaggagcagcgatcctatggggaggagaaggcagtgagctttctgaaacaaactgaagcgctgaagcagcgggtgcagaggaagctggagcaggtgtactacttcctggagcagcaagagcatttctttgtggcctcactggaggacgtgggccagatggttgggcagatcaggaaggcatatgacacccgcgtatcccaggacatcgccctgctcgatgcgctgattggggaactggaggccaaggagtgccagtcagaatgggaacttctgcaggacattggagacatcttgcacagggctaagacagtgcctgtccctgaaaagtggaccactcctcaagagataaaacaaaagatccaactcctccaccagaagtcagagtttgtggagaagagcacaaagtacttctcagaaaccctgcgttcagaaatggaaatgttcaatgttccagagctgattggcgctcaggcacatgctgttaatgtgattctggatgcagaaaccgcttaccccaacctcatcttctctgatgatctgaagagtgttagacttggaaacaagtgggagaggctgcctgatggcccgcaaagatttgacagctgtatcattgttctgggctctccgagtttcctctctggccgccgttactgggaggtggaggttggagacaagacagcatggatcctgggagcctgcaagacatccataagcaggaaagggaacatgactctgtcgccagagaatggctactgggtggtgataatgatgaaggaaaatgagtaccaggcgtccagcgttcccccgacccgcctgctaataaaggagcctcccaagcgtgtgggcatcttcgtggactacagagttggaagcatctccttttacaatgtgacagccagatcccacatctatacattcgccagctgctctttctctgggccccttcaacctatcttcagccctgggacacgtgatggagggaagaacacagctcctctgactatctgtccagtgggtggtcaggggcctgactgaatgcccaacactgcatctctcttcctgcttctggccttgtatcttgcattcacactcaatagtcacggaatgccgactaggtgctagctgctatgggaaatgcaaaaataacaaaatagttactgtgcccacggagcctacccgattatagcagaggtaagttaggaacgaacatgttagtcaatccgggtgaagacatgtactgatgacacaccatggatttcagaggaggaagtacggagtcgttgcataatccgcccctggtgggtggcactctcaggtgctcctgaacagaagatttggccctcattttccctcagaaccccacggcaaggatatatgtccccttgttctctctgcttctgtcttgaggatatgggaagcctagagaaacgcaagcagactggattgggatagaagtatttgtgtacctggattaatgaactatgattttttttttttttttttgagaccaaatcttgctctgtggcccaggctggagtgcagtggcacgatctcagctcactgcaacctccacctcccaggttcaagcgattctcctgcctcagcctcctgagcagctgggattacaggtgcgtgccaccacaccaggctggttttcttgtatttttagtagagacgggggtttcaccatgttagccaggctggtctcgaactcctgacctcaggtgatccacccgcctcagcctcccaaagtgctgggattacaggcatgagccactgtgcccggcctatgattcttttttttttttttttttgagacaaagttttgctcttgtcacccaggctggagtgcagtggtgcaatcttggctcactgcaacctccgcctcccaggttcaagagattctcctgcctcagcctccgaagtagctgggattacaggcgcccgccaccatgcccggctaattttttgcatttttagtagacatgaggtttcatcatgttggccaggccggtctcaaactcctgacctcaggtgatgcacccacctcagcctcccaaagtgcagggattacaggcatgagccaccatgcctggccatgattcttaagagaattgactgggcctcatgaataaaaaaattagaaaatctggtcatttgcatttgtcactcaatcactgtggaatcccatttcccgactgcatttcaggaagcagatgggactactgtatggaaaaacatttggcatgtattccaagtgtcagattattctgtcttggtttgtatgggaaaatctgcgggttgtggaatattaggttctacttcacac

SEQ ID NO: 256699 - DNA, 2269 bp, Homo sapiens
gccaaattcaagcttttcaacaagtgctgtttttccagaagaaaattcagaagcagctggagcatctgaagaagctgagaaaatcaggggaggagcagcgatcctatggggaggagaaggcagtgagctttctgaaacaaactgaagcgctgaagcagcgggtgcagaggaagctggagcaggtgtactacttcctggagcagcaagagcatttctttgtggcctcactggaggacgtgggccagatggttgggcagatcaggaaggcatatgacacccgcgtatcccaggacatcgccctgctcgatgcgctgattggggaactggaggccaaggagtgccagtcagaatgggaacttctgcaggacattggagacatcttgcacagttccagagctgattggcgctcaggcacatgctgttaatgtgattctggatgcagaaaccgcttaccccaacctcatcttctctgatgatctgaagagtgttagacttggaaacaagtgggagaggctgcctgatggcccgcaaagatttgacagctgtatcattgttctgggctctccgagtttcctctctggccgccgttactgggaggtggaggttggagacaagacagcatggatcctgggagcctgcaagacatccataagcaggaaagggaacatgactctgtcgccagagaatggctactgggtggtgataatgatgaaggaaaatgagtaccaggcgtccagcgttcccccgacccgcctgctaataaaggagcctcccaagcgtgtgggcatcttcgtggactacagagttggaagcatctccttttacaatgtgacagccagatcccacatctatacattcgccagctgctctttctctgggccccttcaacctatcttcagccctgggacacgtgatggagggaagaacacagctcctctgactatctgtccagtgggtggtcaggggcctgactgaatgcccaacactgcatctctcttcctgcttctggccttgtatcttgcattcacactcaatagtcacggaatgccgactaggtgctagctgctatgggaaatgcaaaaataacaaaatagttactgtgcccacggagcctacccgattatagcagaggtaagttaggaacgaacatgttagtcaatccgggtgaagacatgtactgatgacacaccatggatttcagaggaggaagtacggagtcgttgcataatccgcccctggtgggtggcactctcaggtgctcctgaacagaagatttggccctcattttccctcagaaccccacggcaaggatatatgtccccttgttctctctgcttctgtcttgaggatatgggaagcctagagaaacgcaagcagactggattgggatagaagtatttgtgtacctggattaatgaactatgattttttttttttttttttgagaccaaatcttgctctgtggcccaggctggagtgcagtggcacgatctcagctcactgcaacctccacctcccaggttcaagcgattctcctgcctcagcctcctgagcagctgggattacaggtgcgtgccaccacaccaggctggttttcttgtatttttagtagagacgggggtttcaccatgttagccaggctggtctcgaactcctgacctcaggtgatccacccgcctcagcctcccaaagtgctgggattacaggcatgagccactgtgcccggcctatgattcttttttttttttttttttgagacaaagttttgctcttgtcacccaggctggagtgcagtggtgcaatcttggctcactgcaacctccgcctcccaggttcaagagattctcctgcctcagcctccgaagtagctgggattacaggcgcccgccaccatgcccggctaattttttgcatttttagtagacatgaggtttcatcatgttggccaggccggtctcaaactcctgacctcaggtgatgcacccacctcagcctcccaaagtgcagggattacaggcatgagccaccatgcctggccatgattcttaagagaattgactgggcctcatgaataaaaaaattagaaaatctggtcatttgcatttgtcactcaatcactgtggaatcccatttcccgactgcatttcaggaagcagatgggactactgtatggaaaaacatttggcatgtattccaagtgtcagattattctgtcttggtttgtatgggaaaatctgcgggttgtggaatattaggttctacttcacac

SEQ ID NO: 256700 - DNA, 344 bp, Homo sapiens
gttggctaggctggtcttgaactcctgacctcaagcaatccgcctgccttggcctcccaaagtgctgggattacaggtgtgagccactgcacccggctggaataaagtctttttgaaatgcgtccaataggacttaaaacaaagggactttttaaattttcttcctagcactagaatttctattatcttttgtcctctgtactaaagctccagtgccattcctttgctttgaaaattaagtactgcagtactatctcctggccacttgtgggtccttgttagactaccgactcttctgttcatttttattcatccccttactgtttctgttttaaaccctggcc

SEQ ID NO: 256701 - DNA, 341 bp, Homo sapiens
gttggctaggctggtcttgaactcctgacctcaagcaatccgcctgccttggcctcccaaagtgctgggattacaggtgtgagccactgcacccggctggaataaagtctttttgaaatgcgtccaataggacttaaaacaaagggactttttaaattttcttcctagcactagaatttctattatcttttgtcctctgtactaaagctccagtgccattcctttgctttgaaaattaagtactgcagtactatctcctggccacttgtgggtccttgttagactaccgactcttctgttcatctaaaacgtgaaagtcacagatatcccaggtagaggaa

SEQ ID NO: 256702 - DNA, 527 bp, Homo sapiens
atcttggggttctgatcaagtcacaaaagggcaaaaagcacacactccagcctgggtgaatgcacagagaactgtccacaaggaaagattaaataattactgttaaatagctcatcaaagctttgggggtgggggtaaaaagttaagcttctttaaggagagtcctgctgcaaacaagaaatgcaagcttctcctgaaagcttttggattggggtgagtagggaggggttaggatagaggtcagggcctggggagttagagctgcaggttggggagacagccggagagccacggtaagaacaggaggaggattttctggattcggggtggtggagtagctggagctgacataggcccctgccctttggatattaccgtggtcctgccagtgacctcccccaacagggccataccccaaggtttcaagtcctttgtaagagtcaggcaagtcgatcccaaatgatacaacacagcaaagcagcattggctccccaggcatcatgaccagacccagaggaggtcgacgc

SEQ ID NO: 256703 - DNA, 175 bp, Homo sapiens
ggcccccctttccccacatccctcctgcctcccccaggcggacagacccctcggcctccacagccgctcagcggctgccctggggaaagccttccatggccttcgtcctggtgagcccttatttgtcaaataaatatttgcccagggtggggcttgccactcagggtcaggcatt

SEQ ID NO: 256704 - DNA, 331 bp, Homo sapiens
cttcttttaaatattcaaaatttgaaggggtttaggcctcttattaaggcctgtttcatggcagaatgtacttagtccttgcttaatgttgcacatcttgcctttgcttccactttgcaagagttttgagggtggtaaagagtgtgtgtctgaaatttgttttttacagctttagatacgtggtgaaaattttgttccataaaatagaagctttggtctgatttcatattaagaggaattttccagtgaaaaaatgtattcctgaagcattaaaagaaaaaatcagtaatagcactatcctcctattgcagaggaaagccttgggccatcc

SEQ ID NO: 256705 - DNA, 614 bp, Homo sapiens
gtgagactctgtctcaaaaaaagaaaaaaaaaaaaattagccaggcgtggtggcatgtgcctgtaatcccagctacttgggaggctgacaaaggagaatcacttgaacccaggaggcagagattgcagtgagccaagatggcgccaccgcactccagcctgggcaacaagagtgaaactccatctcaaaaaataaataaataaataaataaataaataaataaataaatatagcaccactgccattgctgccatttccatgtcttcctcctgggcccagccctgccttgcactcctatgccctttatttttctccatagctcttctcaccattccataccacacattgttaattgtctttcacatgagggcactgacttgctctgttttgttcaaagctgtattctcagtgtcttgaacatgtcttgcacctaataaatgcttagcaagtatctgttgagtgaattagaatttaacagctatatgataaggaaaaaggagttactttccccattctcacttaactctccaaccccactcttccgcccccacatgccaaaaccaagcttatgtcaagaaattaagcttggcaagcatctgcctgggggtttacat

SEQ ID NO: 256706 - DNA, 389 bp, Homo sapiens
gctccgggttatcaagggctggaattcaggggctttctcaaagtcaggagctgagtggagacttgtccccagggccagggccaccttcagtaggaaggatggtctcagtgctgtcttctggggataagggggacagctgtggcccagtggctggcaggtgtgttcctctgtccttggccccagtagaggagcacgggccctgagggttgccattggttttccccgtgctgctggcactaagcctcatagatgtgagggcccaacaaacagattgcagtcctgctgagcgtttgtcagcgagggctcaggcccctcggaacacatccctaactccttgtctttcctggcagctgtgagagaaacgtgcattttacccaaggtagaaatac

SEQ ID NO: 256707 - DNA, 603 bp, Homo sapiens
tagggggaaaaacaaccacagacaaaccatacttccctgagaagcaggagcatagtgctggctagtgaattgctttcacaaaccgacctcataactctgtgccttagaaaaattagaaatgggaacatttggagatcacttgggaaaacttgaaattatgaatgttaatctgtgattgctaagggaacgtggtatttcctgcctattttgtctgtagtttgtctctttctcttctaattcatttttaaaactctgctagattaattttgctaaaataacgttttgcactcctcatttcctgtttaaaaacatgtagtgactcaccatcagttttagaaatcgatttaaaggacttcatgaaactggtttcaggccacccacagtttggcccatacctatctcctgttctccttcataaacctttcaaatctagccaaattgctttgttctttgtccctggagtatggctttctctttcttctttctttcttttttttttgagacacagtttcgcttgaacccaggaggtggaggttgcagtgagccgagattgcaccactgcactccagcttgggtgacagagtgagactccatcacaaaaaa

SEQ ID NO: 256708 - DNA, 389 bp, Homo sapiens
ccaaggcgagaggatcgcttgaactcaggagtttaagacctgcctgggcaacataatgaaaccctgtctcttaaaaagaaatctgtgagaatccagttaagttccttttacagataccatccaggggcctgacttatttatctatctattcctttagggttggggatttgttttgtttttacccttaaagccttaatgtggaaaagtgcctgaagtgctgattgtagggaatgaaacttgattcaaggtttaaacaccttatcccagccactcgggaggctgaggcaggagaatggcgtgaacccgggaggcggagcttgcagtgagccgagattgcgccactgcactccagcctgggcaacagaacgagactccgtctcaaaaaaaaa

SEQ ID NO: 256709 - DNA, 621 bp, Homo sapiens
ataacccatctagcctctgttacatacatttctctagtttcacagcaagaattagtcctcaggaaaaaaaaaaaagtatacatgtaacaaaatatcacagggtaccctgtaaatatgtatgtgtcaactaaaaataacaacaatactattaaaatcttgttgctggaagatatttaaggagccctcagagtcagaggcttagcaccaattcagcctcattctgtccaactctcaccttctaagccattcctagtatctagactctttctttattcctagtaatctaacctctctctcttgaaactcacttcccagaaatcagatgctttgccatttactgtacaaggtaacaaagtttctctaggaacaagacactcaccgtaaacctccggcctattttcccagggcctaaaaatactggccctgaaacttgtttctactttataatgtgggctgctatccattaggtcaactctgccattttgccaacatgctgaaatggccgtcttgcacgcatggctggatctcctacacgccaaataccatcatctacttattgcctgtttccatattcccctaacattcaacctgcctgtccacatttcttcctcagacccacta

SEQ ID NO: 256710 - DNA, 435 bp, Homo sapiens
gtacatctggaactagaaccagggcctccggtacgcaccttgtgtatttaaggggtaggcagcatcgtgggcttcttggatgcctgggccaatcctaagagaggactgcacacacagaatttagggtccacacaggcaaccgcctgagcatggtttctgcacaccatgatttcctgctgctcctctggtaccaggggagtattcatcccttgaaacctacccctggtattagagctcctcacctttgtcctgccacttgaatgtatcccttcccagtgttagttgcaatgcagtatgcagcatctgccgtgaaactaaacaaccgtttaaaaactgttcggcagcaatggaattacaaattgtatatccagtttgggtaattttaaaaaatttaataaattatttcatttttattattgtgagaccccaggtctc

SEQ ID NO: 256711 - DNA, 456 bp, Homo sapiens
ccttttctaagaaacactccatccaatgcatggttgtagccagagcagtcatgaagatagaaaggcatgaagaaaaactgagccctggccatagctgtgtgcaccagattgggcacctgacttgagctttaccaatcaaagccttttcccaggagtatgcaattgagagagagattggcctttgtctgagtgactgaactataagtgaggaataacattggcaactatggttagtaagatttcaccagtagaagggaagtgctcatcttcagagaaagagaaaagtgaaaagacacaaggagaggagcacagggaaagaagagggaagatccggatagtacctgtatcctcaatcttgttcatgtctgatgtccaactgtaatcctgtcctcagttccttgtacaacctccccgccaataaacttataataaattctcctctttgcctaacctaat

SEQ ID NO: 256712 - DNA, 328 bp, Homo sapiens
tagtagcaatgggatttcaccatgttggccaggctggtcttgaacgcctggcctcaagtggtctgttcatcttggcctcccaaagtgctggcattacaggcgtgagccacaatgctcgactttcttttttttaaagcttctcttatattcttatcaggggaatatgtgcagatagtataaagagccaaatagtattaaaagaaaggaaaataagcagcctcctagtcctttcctcctccctctctgtctcctgtcctcggaggcagccattgtcaactccttgtttcttgttgtatttaccagcattaaaaagacaatgtttccagtc

SEQ ID NO: 256713 - DNA, 322 bp, Homo sapiens
atctctttgtatacacattgcaaaagaaaaataaaatctcaggaccccgaattcaccaagctaaagggaaagttaagcttaacaaccaagttacgcaaaagaaaagctgccttcttttctttcccagataaagtaatttacgtgcttatttatcgcaggtaaaatgcagatttactgtgcggagaaggcgtatgtgactctgccccactcccttcttttcacatgtaaaatgtagattcactgaatggtactaaaagcctcacaaaaatgtgaccactggcctcattgcctactccacctccttttcttcccctcttcccct

SEQ ID NO: 256714 - DNA, 589 bp, Homo sapiens
tagttcaaccactgtggaaagaagtctggtgatttttcaaataatttaaaacacaagtactatttgacctaacgattccattattgggtatatacctaaaagaaaataaatcagtttaccataaaggcacaggcacatgtttgttacctcccacagggtctgtcccacaacacgtggtgactatgggagctataattcaagacaagatttggctggggacacagacaaagcatatcattccaccactggcccctcccaaatcttatattctcacatttcaaaaccaatcatgccttcccaatagtcccccaaagtctcaactcatttcagctcaactcaaaatccaagtccaaagtctcatctgagacaaggcaaggtccttccacctatgagcctgtcaaaccaaaagcgagttagttacttcctagatataatggggatacaggcattgggtaaatacattcattccaaatgggataaattagccaaaacaaagaggctacaggccccatgcaagtctgaaatctaatagggcagtcattaaagcttaaggtttcaaaatgatctcctttgacttcatgcctcccat

SEQ ID NO: 256715 - DNA, 169 bp, Homo sapiens
gccaccacgcccagcctcacatttttattttaaaaacctctccaggctgggcgcagtggctcacgcctataatcccagctgttagggaggcagaggtgggaggacagctcgagcccaggagttccagatcttctgcctgggcaatataatatagcatgaccctgttcta

SEQ ID NO: 256716 - DNA, 448 bp, Homo sapiens
tacgaagtaattgaaatctggagaagtaagcaagctttgttgagatctcagagctagtgactaacacagcctgaactgcattttctgacttaagttacagtatttttttactgcttattgtatataattattcaagtgggatatttggttttgttcgcagaacctgggtttactttgaactttttctataaagtgacattctgtgtttgcagcttgtacaggataaacagggagcccttagaaaagttacagctgaaagatttcctgaaccctccaacattaaacattaaggccccctgggcagttcacagttgtccaggctccagcaattgtagtgccctggtgtttctaggaatacattatcttggacctaattgagatcaacataaccaatgtttcattttattattagtccttattggtggctgaaggtccgaggctactgctg

SEQ ID NO: 256717 - DNA, 5746 bp, Homo sapiens
cgcacaccgacttgcatgcaattatcatagcccgagtgctcctccgttgagagacttcgcccccgagaccgctgactgtgaatgacaaatcaaaagtcagggttgcagaatcagccggactttcctgctcatttgcagcagagggaggaagcagagaatgaaagattctgaaaataaaggtgcctcatctccagacatggagcccagctatgggggaggtctctttgacatggtaaaaggaggtgcagggaggctctttagtaacctaaaggacaacttgaaagacaccctcaaagacacatcttctagagtgatacaatctgtgaccagctacacaaagggagatttagacttcacttatgttacctccagaattattgtgatgtcctttcctctggacaatgttgacataggattcaggaatcaggttgatgacattcgaagctttttggattccagacatcttgaccactacacagtatacaatctgtcacctaagtcttatcgaactgccaagtttcacagccgggtctcagaatgcagttggcccattaggcaggctcccagtctgcacaacctttttgctgtgtgtcggaatatgtataactggctactgcagaatcccaaaaatgtctgtgttgtccactgcttgatggacgggcggcatcatcaattctggttggtgctatgttcattttctgtaatctctactctactcctggcccagccattcgattgctatatgcaaagcgaccaggaattggactttcaccatcccataggagatacctgggctatatgtgtgacctactggcagacaagccctaccgccctcacttcaagcctctcacaattaagtcgatcactgtcagtccaataccctttttcaacaaacagaggaatggatgtcgcccttactgtgatgtactcattggagaaaccaaaatatattcgacttgcacagattttgaacgaatgaaagaatatcgtgtccaagatggaaaaatcttcattcccttgaacatcactgtgcaaggagacgtggttgtttccatgtatcacttgaggtcaaccattgggagccggctacaggctaaggtgaccaacacacagatattccagcttcagtttcacactggattcataccactggacacaacagttttaaagttcaccaagcctgagttagatgcatgtgatgtaccagaaaaatatcctcagctatttcaggtgacactggatgtagaactacagccccatgacaaagtaatagacttaactccaccatgggaacattactgcacaaaagatgtcaatcccagcatcctcttctcttctcaccaggaacatcaagatacgctggccttaggaggacaggctccaatagatatccctccagacaaccccaggcattacggacaaagtggtttctttgcctctctctgttggcaagatcagaaatcggagaagtcattctgtgaggaagaccacgctgccctagtgaatcaggaaagtgagcaatcagatgatgaacttctgacactttccagtccgcatggcaatgccaatggtgacaagcctcatggagtcaagaagcccagcaaaaagcagcaggagccagcagcccctccaccccctgaggatgtggaccttttgggcctggaagggtctgcaatgagtaacagcttctctccgccagcggctcctcccaccaattctgaactactgagtgacctgtttgggggtggaggtgcagctggtcccacccaggctggacagtcaggagtggaagatgtgtttcatcctagtggacctgcgtctacccagtcaacaccacgccgctctgccacctccacctctgcgtctccaaccctaagagtgggagaaggtgccacctttgacccatttggagcaccttctaaaccatcaggtcaggatttgctgggttcttttctgaacacatccagtgcttccagtgacccctttctccagcccacaagaagtccttcgcccacagtacatgcttctagtacgcctgctgtgaacattcagccagatgtttctggaggttgggactggcatgctaaaccaggaggctttggaatgggaagcaagtcagctgccaccagcccaaccggatcctcgcatggtactcccacccatcaaagcaaaccccagactctggatccttttgccgaccttgggacactaggtagttcttcctttgccagcaaacccaccacaccaactggattgggtggaggattcccgcctctcagctcgccacagaaggcgtctccccagcctatgggtggcgggtggcagcagggaggtgcctacaactggcagcagccacagcctaagcctcagcccagcatgccccactcctctccccagaaccgacccaactacaacgtgagcttctcagccatgcctgggggccagaacgaacgtgggaaaggatcaagtaatttggaagggaaacaaaaagcagctgattttgaagacctactctctggtcaaggtttcaatgctcacaaagacaaaaaggggcctcggacaatagctgagatgagaaaggaggaaatggccaaggaaatggatcctgagaaattaaagattctggaatggattgaaggcaaagaaagaaatatcagagcccttctttccacgatgcataccgtactatgggctggggagaccaagtggaaaccagttggcatggcagacctggtaacaccagagcaggtgaagaaggtgtacaggaaggctgtcctggtggtgcacccagataaagctactgggcaaccctatgaacaatacgcaaagatgattttcatggagctcaatgatgcctggtctgaatttgaaaaccaaggccaaaagcccttatattaatttatgagcttttccatctctgctgcagacctgtgctaatgcttagtgtgtgtcacaattctgaggttttcgcagatgaaccaaaaactccagtaacatgttttcagtactaaaccgttaagttactcatgaattaatttctcattgataaggaatgtggatgtttggtttctccaaagttcccaccataaaagatccaaagcatgagaggaacttctagtcagatgaccttgcagaaccaccgcattccaccctgccctttggggagcctactcagcattctacctggggaaatggaaaacagaggccaccacccatgaaggcataacacccatcacattgtctgagaataggattaatgagcaaaagttatgataatagagttatatgatggtttaatggtttctagatttttcttggaaagatataatttgagcagtggctttatgcagactccaagaacaaaaccaccaggtatttttttttaagtaaaaatttactaaggcctttagcataatactgtaaatgtcttttggtcaagagaactaacaaatataaaggaacttgaaatgtggggagtgataatagtccagtgattaaactacagtccagtgattaccaccaactttctgactaagctaaaaatgaatgaaaatggtggctaaagaaaatagggactctgaagatgtcgaaatctttattcctggttaggaaggtgggccgctacccttctttccctttagaaaactgtgattaattaaataaaaagtcttactactataacaactctaaacctggtttaaatgaaacatctaattttgctgtaaggcttaatgctcttcttttgtttagccaagaaaacattcttagttggaaacaggtggtaaagtagtttggcctgttcacaacttatcaggaccaatatctagtgtggactcagtgttctctaggtttgtgagcagttgtggtaagagaatggaaggcaacactgaataggagttaagggaatggcacgatcacagtgagagagctgcactcacctgcagacccagtcagatggcttgtcagtatctgctctgaggaaccaggtcccacctccccacaaggcaaatctagacccattaaattattacagtgggcttttttgttttaaaagtggttggggatccacaggaacgacattcatacagggacatttgtgaaagcaaagcaagaatgaatgctttcccgatctcagactggctggattcagatcagtgtgttggctggttctcattttaaggggtaagcagtttgctattctgtgactttagtagatctcttttgtgtgcacatatacaatgtgcattatacatatatattaaatatatccacaaagcagatgggcaaaaagattttcatgctaatcttcaaaggttcatgctcaatattgtgaaaagcttttaaaagttgttttgaaaagacaatcattttttgtttttgttttaactttcttgtggcaagctataccggaaaagcggcatgtcaaaaatactttaggttctacatagatctctttctctcttttgttttgtttgtttgtttgttaaagttcattatttattttaccttttactgacaatgtgaaactcgaagaaaatgttctctttttaaatatacagtcataaactgttcaaggtaaccataacaaactaggtgttatttattaacgtattataaaataatgtttgatccagtatgtgcttgtcttatttaaaattggaatgtgagacatgttgctgtgacctgtttttctttctcattcacatttgtagatattgtgtgaactacagtatataatgataacaattaaaaggatattctgtggatgtcacgtattttgaaatgatagaactacattagctttgtatcatgtttggataattcatcaatgttcacagtttaaaacatcattaaacattatgtaattacaatgagaaagaatcttacttaaatttggagattttcccccacatctcttttccggatacattataattctggacccctatttatctcaaaactcttaatatatgcagaccaacaggtctttgcattccttttaaataactggttgtgacaaagcttgttgttgatcagattcactgtttcatcatatttattgtaatatattttttgttttgtaaatatgttacaacaaaatgtgattggtctaaaatatttgtaatgtatattaaaaggttcaaaaatatttgtataaatctaagttatttgggtacttgtaggaatacaatgaggagcttgaatgccaccttctgacatgatttacttttaaggaaagttatgaggagagaatacaaaaagcatgcaccaaaatgtaatctgacaggatttctggatttatacgtaatcactcctgccccaacacacacacacacacacacacacacacacacacacacacatgcacgcacacatgattttgattatgctacatgatatatgtttcaaaaagaattagcatagaaatcctggtctcctagccaaaaaaatcaaaggattttcaaaaaaacgaatctgtatgttgaggcaaaaggattgaacctggaagtctgggactttatcatagaaacaaagtctcagatattttagttctttggaaacaaatgctgtaattcaaaagcatttgacctgtcactgtactatctacatgtggaagaatgttcaagttgaatcctaatgccgtgaatgaaacacagtctgtgtagggaatgagcaaaaaagttgaattccaattgctttttggccttttggctaaaataaatgtagcatctaattttatcagttt

SEQ ID NO: 256718 - DNA, 664 bp, Homo sapiens
agaggatttctcctctctctgtctcttaattgcaaattctgccatttgcaatggagaatggctgatttgatcatgttcataatgattttatgcattttctttgacaggatggacgggcggcatcatcaattctggttggtgctatgttcattttctgtaatctctactctactcctggcccagccattcgattgctatatgcaaagcgaccaggaattggactttcaccatcccataggagatacctgggctatatgtgtgacctactggcagacaagccctaccgccctcacttcaagcctctcacaattaagtcgatcactgtcagtccaataccctttttcaacaaacagaggaatggatgtcgcccttactgtgatgtactcattggagaaaccaaaatatattcgacttgcacagattttgaacgaatgaaagaatatcgtgtccaagatggaaaaatcttcattcccttgaacatcactgtgcaaggagacgtggttgtttccatgtatcacttgaggtcaaccattgggagccggctacaggctaaggtgaccaacacacagatattccagcttcagtttcacactggattcataccactggacacaacagttttaaagttcaccaacctgagtagatgcatgtgatgtaccagatt

SEQ ID NO: 256719 - DNA, 284 bp, Homo sapiens
acctggcagacgcgcggcggcggcggcgagcggtggcgctcggctcgggcgaccgcggcgggggagggcgcggcgcaccgatgggcgccactgagaagggaggccagaagagccggaagctgttttccttgcggcggccgtggaaggcgacccggcggctgtggaggccacgctcagctcgccaggcggcgcagggtgagtgtgggcgcggccggtcgggacctgttaccctgaggcaggggcgcagcggcggcggggccgtccccggcggtctctcgggtcgc

SEQ ID NO: 256720 - DNA, 5763 bp, Homo sapiens
acctggcagacgcgcggcggcggcggcgagcggtggcgctcggctcgggcgaccgcggcgggggagggcgcggcgcaccgatgggcgccactgagaagggaggccagaagagccggaagctgttttccttgcggcggccgtggaaggcgacccggcggctgtggaggccacgctcagctcgccaggcggcgcagggtgcctcatctccagacatggagcccagctatgggggaggtctctttgacatggtaaaaggaggtgcagggaggctctttagtaacctaaaggacaacttgaaagacaccctcaaagacacatcttctagagtgatacaatctgtgaccagctacacaaagggagatttagacttcacttatgttacctccagaattattgtgatgtcctttcctctggacaatgttgacataggattcaggaatcaggttgatgacattcgaagctttttggattccagacatcttgaccactacacagtatacaatctgtcacctaagtcttatcgaactgccaagtttcacagccgggtctcagaatgcagttggcccattaggcaggctcccagtctgcacaacctttttgctgtgtgtcggaatatgtataactggctactgcagaatcccaaaaatgtctgtgttgtccactgcttggatggacgggcggcatcatcaattctggttggtgctatgttcattttctgtaatctctactctactcctggcccagccattcgattgctatatgcaaagcgaccaggaattggactttcaccatcccataggagatacctgggctatatgtgtgacctactggcagacaagccctaccgccctcacttcaagcctctcacaattaagtcgatcactgtcagtccaataccctttttcaacaaacagaggaatggatgtcgcccttactgtgatgtactcattggagaaaccaaaatatattcgacttgcacagattttgaacgaatgaaagaatatcgtgtccaagatggaaaaatcttcattcccttgaacatcactgtgcaaggagacgtggttgtttccatgtatcacttgaggtcaaccattgggagccggctacaggctaaggtgaccaacacacagatattccagcttcagtttcacactggattcataccactggacacaacagttttaaagttcaccaagcctgagttagatgcatgtgatgtaccagaaaaatatcctcagctatttcaggtgacactggatgtagaactacagccccatgacaaagtaatagacttaactccaccatgggaacattactgcacaaaagatgtcaatcccagcatcctcttctcttctcaccaggaacatcaagatacgctggccttaggaggacaggctccaatagatatccctccagacaaccccaggcattacggacaaagtggtttctttgcctctctctgttggcaagatcagaaatcggagaagtcattctgtgaggaagaccacgctgccctagtgaatcaggaaagtgagcaatcagatgatgaacttctgacactttccagtccgcatggcaatgccaatggtgacaagcctcatggagtcaagaagcccagcaaaaagcagcaggagccagcagcccctccaccccctgaggatgtggaccttttgggcctggaagggtctgcaatgagtaacagcttctctccgccagcggctcctcccaccaattctgaactactgagtgacctgtttgggggtggaggtgcagctggtcccacccaggctggacagtcaggagtggaagatgtgtttcatcctagtggacctgcgtctacccagtcaacaccacgccgctctgccacctccacctctgcgtctccaaccctaagagtgggagaaggtgccacctttgacccatttggagcaccttctaaaccatcaggtcaggatttgctgggttcttttctgaacacatccagtgcttccagtgacccctttctccagcccacaagaagtccttcgcccacagtacatgcttctagtacgcctgctgtgaacattcagccagatgtttctggaggttgggactggcatgctaaaccaggaggctttggaatgggaagcaagtcagctgccaccagcccaaccggatcctcgcatggtactcccacccatcaaagcaaaccccagactctggatccttttgccgaccttgggacactaggtagttcttcctttgccagcaaacccaccacaccaactggattgggtggaggattcccgcctctcagctcgccacagaaggcgtctccccagcctatgggtggcgggtggcagcagggaggtgcctacaactggcagcagccacagcctaagcctcagcccagcatgccccactcctctccccagaaccgacccaactacaacgtgagcttctcagccatgcctgggggccagaacgaacgtgggaaaggatcaagtaatttggaagggaaacaaaaagcagctgattttgaagacctactctctggtcaaggtttcaatgctcacaaagacaaaaaggggcctcggacaatagctgagatgagaaaggaggaaatggccaaggaaatggatcctgagaaattaaagattctggaatggattgaaggcaaagaaagaaatatcagagcccttctttccacgatgcataccgtactatgggctggggagaccaagtggaaaccagttggcatggcagacctggtaacaccagagcaggtgaagaaggtgtacaggaaggctgtcctggtggtgcacccagataaagctactgggcaaccctatgaacaatacgcaaagatgattttcatggagctcaatgatgcctggtctgaatttgaaaaccaaggccaaaagcccttatattaatttatgagcttttccatctctgctgcagacctgtgctaatgcttagtgtgtgtcacaattctgaggttttcgcagatgaaccaaaaactccagtaacatgttttcagtactaaaccgttaagttactcatgaattaatttctcattgataaggaatgtggatgtttggtttctccaaagttcccaccataaaagatccaaagcatgagaggaacttctagtcagatgaccttgcagaaccaccgcattccaccctgccctttggggagcctactcagcattctacctggggaaatggaaaacagaggccaccacccatgaaggcataacacccatcacattgtctgagaataggattaatgagcaaaagttatgataatagagttatatgatggtttaatggtttctagatttttcttggaaagatataatttgagcagtggctttatgcagactccaagaacaaaaccaccaggtatttttttttaagtaaaaatttactaaggcctttagcataatactgtaaatgtcttttggtcaagagaactaacaaatataaaggaacttgaaatgtggggagtgataatagtccagtgattaaactacagtccagtgattaccaccaactttctgactaagctaaaaatgaatgaaaatggtggctaaagaaaatagggactctgaagatgtcgaaatctttattcctggttaggaaggtgggccgctacccttctttccctttagaaaactgtgattaattaaataaaaagtcttactactataacaactctaaacctggtttaaatgaaacatctaattttgctgtaaggcttaatgctcttcttttgtttagccaagaaaacattcttagttggaaacaggtggtaaagtagtttggcctgttcacaacttatcaggaccaatatctagtgtggactcagtgttctctaggtttgtgagcagttgtggtaagagaatggaaggcaacactgaataggagttaagggaatggcacgatcacagtgagagagctgcactcacctgcagacccagtcagatggcttgtcagtatctgctctgaggaaccaggtcccacctccccacaaggcaaatctagacccattaaattattacagtgggcttttttgttttaaaagtggttggggatccacaggaacgacattcatacagggacatttgtgaaagcaaagcaagaatgaatgctttcccgatctcagactggctggattcagatcagtgtgttggctggttctcattttaaggggtaagcagtttgctattctgtgactttagtagatctcttttgtgtgcacatatacaatgtgcattatacatatatattaaatatatccacaaagcagatgggcaaaaagattttcatgctaatcttcaaaggttcatgctcaatattgtgaaaagcttttaaaagttgttttgaaaagacaatcattttttgtttttgttttaactttcttgtggcaagctataccggaaaagcggcatgtcaaaaatactttaggttctacatagatctctttctctcttttgttttgtttgtttgtttgttaaagttcattatttattttaccttttactgacaatgtgaaactcgaagaaaatgttctctttttaaatatacagtcataaactgttcaaggtaaccataacaaactaggtgttatttattaacgtattataaaataatgtttgatccagtatgtgcttgtcttatttaaaattggaatgtgagacatgttgctgtgacctgtttttctttctcattcacatttgtagatattgtgtgaactacagtatataatgataacaattaaaaggatattctgtggatgtcacgtattttgaaatgatagaactacattagctttgtatcatgtttggataattcatcaatgttcacagtttaaaacatcattaaacattatgtaattacaatgagaaagaatcttacttaaatttggagattttcccccacatctcttttccggatacattataattctggacccctatttatctcaaaactcttaatatatgcagaccaacaggtctttgcattccttttaaataactggttgtgacaaagcttgttgttgatcagattcactgtttcatcatatttattgtaatatattttttgttttgtaaatatgttacaacaaaatgtgattggtctaaaatatttgtaatgtatattaaaaggttcaaaaatatttgtataaatctaagttatttgggtacttgtaggaatacaatgaggagcttgaatgccaccttctgacatgatttacttttaaggaaagttatgaggagagaatacaaaaagcatgcaccaaaatgtaatctgacaggatttctggatttatacgtaatcactcctgccccaacacacacacacacacacacacacacacacacacacacacatgcacgcacacatgattttgattatgctacatgatatatgtttcaaaaagaattagcatagaaatcctggtctcctagccaaaaaaatcaaaggattttcaaaaaaacgaatctgtatgttgaggcaaaaggattgaacctggaagtctgggactttatcatagaaacaaagtctcagatattttagttctttggaaacaaatgctgtaattcaaaagcatttgacctgtcactgtactatctacatgtggaagaatgttcaagttgaatcctaatgccgtgaatgaaacacagtctgtgtagggaatgagcaaaaaagttgaattccaattgctttttggccttttggctaaaataaatgtagcatctaattttatcagttt

SEQ ID NO: 256721 - DNA, 5859 bp, Homo sapiens
cgcacaccgacttgcatgcaattatcatagcccgagtgctcctccgttgagagacttcgcccccgagaccgctgactgtgaatgacaaatcaaaagtcagggttgcagaatcagccggactttcctgctcatttgcagcagagggaggaagcagagaatgaaagattctgaaaataaaggagtggttattattgagtcgagaatttttgggaaaagtaacacgtggagagtcaatttttgagtggaaggagtctgaagagagggtaggaaccaacctcctactacccaccaggtgcctcatctccagacatggagcccagctatgggggaggtctctttgacatggtaaaaggaggtgcagggaggctctttagtaacctaaaggacaacttgaaagacaccctcaaagacacatcttctagagtgatacaatctgtgaccagctacacaaagggagatttagacttcacttatgttacctccagaattattgtgatgtcctttcctctggacaatgttgacataggattcaggaatcaggttgatgacattcgaagctttttggattccagacatcttgaccactacacagtatacaatctgtcacctaagtcttatcgaactgccaagtttcacagccgggtctcagaatgcagttggcccattaggcaggctcccagtctgcacaacctttttgctgtgtgtcggaatatgtataactggctactgcagaatcccaaaaatgtctgtgttgtccactgcttgatggacgggcggcatcatcaattctggttggtgctatgttcattttctgtaatctctactctactcctggcccagccattcgattgctatatgcaaagcgaccaggaattggactttcaccatcccataggagatacctgggctatatgtgtgacctactggcagacaagccctaccgccctcacttcaagcctctcacaattaagtcgatcactgtcagtccaataccctttttcaacaaacagaggaatggatgtcgcccttactgtgatgtactcattggagaaaccaaaatatattcgacttgcacagattttgaacgaatgaaagaatatcgtgtccaagatggaaaaatcttcattcccttgaacatcactgtgcaaggagacgtggttgtttccatgtatcacttgaggtcaaccattgggagccggctacaggctaaggtgaccaacacacagatattccagcttcagtttcacactggattcataccactggacacaacagttttaaagttcaccaagcctgagttagatgcatgtgatgtaccagaaaaatatcctcagctatttcaggtgacactggatgtagaactacagccccatgacaaagtaatagacttaactccaccatgggaacattactgcacaaaagatgtcaatcccagcatcctcttctcttctcaccaggaacatcaagatacgctggccttaggaggacaggctccaatagatatccctccagacaaccccaggcattacggacaaagtggtttctttgcctctctctgttggcaagatcagaaatcggagaagtcattctgtgaggaagaccacgctgccctagtgaatcaggaaagtgagcaatcagatgatgaacttctgacactttccagtccgcatggcaatgccaatggtgacaagcctcatggagtcaagaagcccagcaaaaagcagcaggagccagcagcccctccaccccctgaggatgtggaccttttgggcctggaagggtctgcaatgagtaacagcttctctccgccagcggctcctcccaccaattctgaactactgagtgacctgtttgggggtggaggtgcagctggtcccacccaggctggacagtcaggagtggaagatgtgtttcatcctagtggacctgcgtctacccagtcaacaccacgccgctctgccacctccacctctgcgtctccaaccctaagagtgggagaaggtgccacctttgacccatttggagcaccttctaaaccatcaggtcaggatttgctgggttcttttctgaacacatccagtgcttccagtgacccctttctccagcccacaagaagtccttcgcccacagtacatgcttctagtacgcctgctgtgaacattcagccagatgtttctggaggttgggactggcatgctaaaccaggaggctttggaatgggaagcaagtcagctgccaccagcccaaccggatcctcgcatggtactcccacccatcaaagcaaaccccagactctggatccttttgccgaccttgggacactaggtagttcttcctttgccagcaaacccaccacaccaactggattgggtggaggattcccgcctctcagctcgccacagaaggcgtctccccagcctatgggtggcgggtggcagcagggaggtgcctacaactggcagcagccacagcctaagcctcagcccagcatgccccactcctctccccagaaccgacccaactacaacgtgagcttctcagccatgcctgggggccagaacgaacgtgggaaaggatcaagtaatttggaagggaaacaaaaagcagctgattttgaagacctactctctggtcaaggtttcaatgctcacaaagacaaaaaggggcctcggacaatagctgagatgagaaaggaggaaatggccaaggaaatggatcctgagaaattaaagattctggaatggattgaaggcaaagaaagaaatatcagagcccttctttccacgatgcataccgtactatgggctggggagaccaagtggaaaccagttggcatggcagacctggtaacaccagagcaggtgaagaaggtgtacaggaaggctgtcctggtggtgcacccagataaagctactgggcaaccctatgaacaatacgcaaagatgattttcatggagctcaatgatgcctggtctgaatttgaaaaccaaggccaaaagcccttatattaatttatgagcttttccatctctgctgcagacctgtgctaatgcttagtgtgtgtcacaattctgaggttttcgcagatgaaccaaaaactccagtaacatgttttcagtactaaaccgttaagttactcatgaattaatttctcattgataaggaatgtggatgtttggtttctccaaagttcccaccataaaagatccaaagcatgagaggaacttctagtcagatgaccttgcagaaccaccgcattccaccctgccctttggggagcctactcagcattctacctggggaaatggaaaacagaggccaccacccatgaaggcataacacccatcacattgtctgagaataggattaatgagcaaaagttatgataatagagttatatgatggtttaatggtttctagatttttcttggaaagatataatttgagcagtggctttatgcagactccaagaacaaaaccaccaggtatttttttttaagtaaaaatttactaaggcctttagcataatactgtaaatgtcttttggtcaagagaactaacaaatataaaggaacttgaaatgtggggagtgataatagtccagtgattaaactacagtccagtgattaccaccaactttctgactaagctaaaaatgaatgaaaatggtggctaaagaaaatagggactctgaagatgtcgaaatctttattcctggttaggaaggtgggccgctacccttctttccctttagaaaactgtgattaattaaataaaaagtcttactactataacaactctaaacctggtttaaatgaaacatctaattttgctgtaaggcttaatgctcttcttttgtttagccaagaaaacattcttagttggaaacaggtggtaaagtagtttggcctgttcacaacttatcaggaccaatatctagtgtggactcagtgttctctaggtttgtgagcagttgtggtaagagaatggaaggcaacactgaataggagttaagggaatggcacgatcacagtgagagagctgcactcacctgcagacccagtcagatggcttgtcagtatctgctctgaggaaccaggtcccacctccccacaaggcaaatctagacccattaaattattacagtgggcttttttgttttaaaagtggttggggatccacaggaacgacattcatacagggacatttgtgaaagcaaagcaagaatgaatgctttcccgatctcagactggctggattcagatcagtgtgttggctggttctcattttaaggggtaagcagtttgctattctgtgactttagtagatctcttttgtgtgcacatatacaatgtgcattatacatatatattaaatatatccacaaagcagatgggcaaaaagattttcatgctaatcttcaaaggttcatgctcaatattgtgaaaagcttttaaaagttgttttgaaaagacaatcattttttgtttttgttttaactttcttgtggcaagctataccggaaaagcggcatgtcaaaaatactttaggttctacatagatctctttctctcttttgttttgtttgtttgtttgttaaagttcattatttattttaccttttactgacaatgtgaaactcgaagaaaatgttctctttttaaatatacagtcataaactgttcaaggtaaccataacaaactaggtgttatttattaacgtattataaaataatgtttgatccagtatgtgcttgtcttatttaaaattggaatgtgagacatgttgctgtgacctgtttttctttctcattcacatttgtagatattgtgtgaactacagtatataatgataacaattaaaaggatattctgtggatgtcacgtattttgaaatgatagaactacattagctttgtatcatgtttggataattcatcaatgttcacagtttaaaacatcattaaacattatgtaattacaatgagaaagaatcttacttaaatttggagattttcccccacatctcttttccggatacattataattctggacccctatttatctcaaaactcttaatatatgcagaccaacaggtctttgcattccttttaaataactggttgtgacaaagcttgttgttgatcagattcactgtttcatcatatttattgtaatatattttttgttttgtaaatatgttacaacaaaatgtgattggtctaaaatatttgtaatgtatattaaaaggttcaaaaatatttgtataaatctaagttatttgggtacttgtaggaatacaatgaggagcttgaatgccaccttctgacatgatttacttttaaggaaagttatgaggagagaatacaaaaagcatgcaccaaaatgtaatctgacaggatttctggatttatacgtaatcactcctgccccaacacacacacacacacacacacacacacacacacacacacatgcacgcacacatgattttgattatgctacatgatatatgtttcaaaaagaattagcatagaaatcctggtctcctagccaaaaaaatcaaaggattttcaaaaaaacgaatctgtatgttgaggcaaaaggattgaacctggaagtctgggactttatcatagaaacaaagtctcagatattttagttctttggaaacaaatgctgtaattcaaaagcatttgacctgtcactgtactatctacatgtggaagaatgttcaagttgaatcctaatgccgtgaatgaaacacagtctgtgtagggaatgagcaaaaaagttgaattccaattgctttttggccttttggctaaaataaatgtagcatctaattttatcagttt

SEQ ID NO: 256722 - DNA, 3703 bp, Homo sapiens
gaataaggcaagacgaggccgggtttaatcggcacaggccgctgtcaacattcagccagatgtttctggaggttgggactggcatgctaaaccaggaggctttggaatgggaagcgtggacacacgtctcgcatgctccatcacaaccgctctactgccgcggcactaggtagttcttcctttgccagcaaacccaccacaccaactggattgggtggaggattcccgcctctcagctcgccacagaaggcgtctccccagcctatgggtggcgggtggcagcagggaggtgcctacaactggcagcagccacagcctaagcctcagcccagcatgccccactcctctccccagaaccgacccaactacaacgtgagcttctcagccatgcctgggggccagaacgaacgtgggaaaggatcaagtaatttggaagggaaacaaaaagcagctgattttgaagacctactctctggtcaaggtttcaatgctcacaaagacaaaaaggggcctcggacaatagctgagatgagaaaggaggaaatggccaaggaaatggatcctgagaaattaaagattctggaatggattgaaggcaaagaaagaaatatcagagcccttctttccacgatgcataccgtactatgggctggggagaccaagtggaaaccagttggcatggcagacctggtaacaccagagcaggtgaagaaggtgtacaggaaggctgtcctggtggtgcacccagataaagctactgggcaaccctatgaacaatacgcaaagatgattttcatggagctcaatgatgcctggtctgaatttgaaaaccaaggccaaaagcccttatattaatttatgagcttttccatctctgctgcagacctgtgctaatgcttagtgtgtgtcacaattctgaggttttcgcagatgaaccaaaaactccagtaacatgttttcagtactaaaccgttaagttactcatgaattaatttctcattgataaggaatgtggatgtttggtttctccaaagttcccaccataaaagatccaaagcatgagaggaacttctagtcagatgaccttgcagaaccaccgcattccaccctgccctttggggagcctactcagcattctacctggggaaatggaaaacagaggccaccacccatgaaggcataacacccatcacattgtctgagaataggattaatgagcaaaagttatgataatagagttatatgatggtttaatggtttctagatttttcttggaaagatataatttgagcagtggctttatgcagactccaagaacaaaaccaccaggtatttttttttaagtaaaaatttactaaggcctttagcataatactgtaaatgtcttttggtcaagagaactaacaaatataaaggaacttgaaatgtggggagtgataatagtccagtgattaaactacagtccagtgattaccaccaactttctgactaagctaaaaatgaatgaaaatggtggctaaagaaaatagggactctgaagatgtcgaaatctttattcctggttaggaaggtgggccgctacccttctttccctttagaaaactgtgattaattaaataaaaagtcttactactataacaactctaaacctggtttaaatgaaacatctaattttgctgtaaggcttaatgctcttcttttgtttagccaagaaaacattcttagttggaaacaggtggtaaagtagtttggcctgttcacaacttatcaggaccaatatctagtgtggactcagtgttctctaggtttgtgagcagttgtggtaagagaatggaaggcaacactgaataggagttaagggaatggcacgatcacagtgagagagctgcactcacctgcagacccagtcagatggcttgtcagtatctgctctgaggaaccaggtcccacctccccacaaggcaaatctagacccattaaattattacagtgggcttttttgttttaaaagtggttggggatccacaggaacgacattcatacagggacatttgtgaaagcaaagcaagaatgaatgctttcccgatctcagactggctggattcagatcagtgtgttggctggttctcattttaaggggtaagcagtttgctattctgtgactttagtagatctcttttgtgtgcacatatacaatgtgcattatacatatatattaaatatatccacaaagcagatgggcaaaaagattttcatgctaatcttcaaaggttcatgctcaatattgtgaaaagcttttaaaagttgttttgaaaagacaatcattttttgtttttgttttaactttcttgtggcaagctataccggaaaagcggcatgtcaaaaatactttaggttctacatagatctctttctctcttttgttttgtttgtttgtttgttaaagttcattatttattttaccttttactgacaatgtgaaactcgaagaaaatgttctctttttaaatatacagtcataaactgttcaaggtaaccataacaaactaggtgttatttattaacgtattataaaataatgtttgatccagtatgtgcttgtcttatttaaaattggaatgtgagacatgttgctgtgacctgtttttctttctcattcacatttgtagatattgtgtgaactacagtatataatgataacaattaaaaggatattctgtggatgtcacgtattttgaaatgatagaactacattagctttgtatcatgtttggataattcatcaatgttcacagtttaaaacatcattaaacattatgtaattacaatgagaaagaatcttacttaaatttggagattttcccccacatctcttttccggatacattataattctggacccctatttatctcaaaactcttaatatatgcagaccaacaggtctttgcattccttttaaataactggttgtgacaaagcttgttgttgatcagattcactgtttcatcatatttattgtaatatattttttgttttgtaaatatgttacaacaaaatgtgattggtctaaaatatttgtaatgtatattaaaaggttcaaaaatatttgtataaatctaagttatttgggtacttgtaggaatacaatgaggagcttgaatgccaccttctgacatgatttacttttaaggaaagttatgaggagagaatacaaaaagcatgcaccaaaatgtaatctgacaggatttctggatttatacgtaatcactcctgccccaacacacacacacacacacacacacacacacacacacacacatgcacgcacacatgattttgattatgctacatgatatatgtttcaaaaagaattagcatagaaatcctggtctcctagccaaaaaaatcaaaggattttcaaaaaaacgaatctgtatgttgaggcaaaaggattgaacctggaagtctgggactttatcatagaaacaaagtctcagatattttagttctttggaaacaaatgctgtaattcaaaagcatttgacctgtcactgtactatctacatgtggaagaatgttcaagttgaatcctaatgccgtgaatgaaacacagtctgtgtagggaatgagcaaaaaagttgaattccaattgctttttggccttttggctaaaataaatgtagcatctaattttatcagttt

SEQ ID NO: 256723 - DNA, 5710 bp, Homo sapiens
acctggcagacgcgcggcggcggcggcgagcggtggcgctcggctcgggcgaccgcggcgggggagggcgcggcgcaccgatgggcgccactgagaagggaggccagaagagccggaagctgttttccttgcggcggccgtggaaggcgacccggcggctgtggaggccacgctcagctcgccaggcggcgcagggtgcctcatctccagacatggagcccagctatgggggaggtctctttgacatggtaaaaggaggtgcagggaggctctttagtaacctaaaggacaacttgaaagacaccctcaaagacacatcttctagagtgatacaatctgtgaccagctacacaaagggagatttagacttcacttatgttacctccagaattattgtgatgtcctttcctctggacaatgttgacataggattcaggaatcaggttgatgacattcgaagctttttggattccagacatcttgaccactacacagtatacaatctgtcacctaagtcttatcgaactgccaagtttcacagccgggtctcagaatgcagttggcccattaggcaggctcccagtctgcacaacctttttgctgtgtgtcggaatatgtataactggctactgcagaatcccaaaaatgtctgtgttgtccactgcttggatggacgggcggcatcatcaattctggttggtgctatgttcattttctgtaatctctactctactcctggcccagccattcgattgctatatgcaaagcgaccaggaattggactttcaccatcccataggagatacctgggctatatgtgtgacctactggcagacaagccctaccgccctcacttcaagcctctcacaattaagtcgatcactgtcagtccaataccctttttcaacaaacagaggaatggatgtcgcccttactgtgatgtactcattggagaaaccaaaatatattcgacttgcacagattttgaacgaatgaaagaatatcgtgtccaagatggaaaaatcttcattcccttgaacatcactgtgcaaggagacgtggttgtttccatgtatcacttgaggtcaaccattgggagccggctacaggctaaggtgaccaacacacagatattccagcttcagtttcacactggattcataccactggacacaacagttttaaagttcaccaagcctgagttagatgcatgtgatgtaccagaaaaatatcctcagctatttcaggtgacactggatgtagaactacagccccatgacaaagtaatagacttaactccaccatgggaacattactgcacaaaagatgtcaatcccagcatcctcttctcttctcaccaggaacatcaagatacgctggccttaggaggacaggctccaatagatatccctccagacaaccccaggcattacggacaaagtggtttctttgcctctctctgttggcaagatcagaaatcggagaagtcattctgtgaggaagaccacgctgccctagtgaatcaggaaagtgagcaatcagatgatgaacttctgacactttccagtccgcatggcaatgccaatggtgacaagcctcatggagtcaagaagcccagcaaaaagcagcaggagccagcagcccctccaccccctgaggatgtggaccttttgggcctggaagggtctgcaatgagtaacagcttctctccgccagcggctcctcccaccaattctgaactactgagtgacctgtttgggggtggaggtgcagctggtcccacccaggctggacagtcaggagtggaagatgtgtttcatcctagtggacctgcgtctacccagtcaacaccacgccgctctgccacctccacctctgcgtctccaaccctaagagtgggagaaggtgccacctttgacccatttggagcaccttctaaaccatcaggtcaggatttgctgggttcttttctgaacacatccagtgcttccagtgacccctttctccagcccacaagaagtccttcgcccacagtacatgcttctagtacgcctgctgtgaacattcagccagatgtttctggaggttgggactggcatgctaaaccaggaggctttggaatgggaagcaagtcagctgccaccagcccaaccggatcctcgcatggtactcccacccatcaaagcaaaccccagactctggatccttttgccgaccttgggacactaggtagttcttcctttgccagcaaacccaccacaccaactggattgggtggaggattcccgcctctcagctcgccacagaaggcgtctccccagcctatgggtggcgggtggcagcagggaggtgcctacaactggcagcagccacagcctaagcctcagcccagcatgccccactcctctccccagaaccgacccaactacaacgtgagcttctcagccatgcctgggggccagaacgaacgtgggaaaggatcaagtaatttggaagggaaacaaaaagcagctgattttgaagacctactctctggtcaaggtttcaatgctcacaaagacaaaaaggggcctcggacaatagctgagatgagaaaggaggaaatggccaaggaaatggatcctgagaaattaaagattctggaatggattgaaggcaaagaaagaaatatcagagcccttctttccacgatgcataccgtactatgggctggggagaccaagtggaaaccagttggcatggcagacctggtaacaccagagcaggtgaagaaggtgtacaggaaggctgtcctggtggtgcacccagataaagctactgggcaaccctatgaacaatacgcaaagatgattttcatggagctcaatgatgcctggtctgaatttgaaaaccaaggccaaaagcccttatattaatttatgagcttttccatctctgctgcagacctgtgctaatgcttagtgtgtgtcacaattctgaggttttcgcagatgaaccaaaaactccagtaacatgttttcagtactaaaccgttaagttactcatgaattaatttctcattgataaggaatgtggatgtttggtttctccaaagttcccaccataaaagatccaaagcatgagaggaacttctagtcagatgaccttgcagaaccaccgcattccaccctgccctttggggagcctactcagcattctacctggggaaatggaaaacagaggccaccacccatgaaggcataacacccatcacattgtctgagaataggattaatgagcaaaagttatgataatagagttatatgatggtttaatggtttctagatttttcttggaaagatataatttgagcagtggctttatgcagactccaagaacaaaaccaccaggtatttttttttaagtaaaaatttactaaggcctttagcataatactgtaaatgtcttttggtcaagagaactaacaaatataaaggaacttgaaatgtggggagtgataatagtccagtgattaaactacagtccagtgattaccaccaactttctgactaagctaaaaatgaatgaaaatggtggctaaagaaaatagggactctgaagatgtcgaaatctttattcctggttaggaaggtgggccgctacccttctttccctttagaaaactgtgattaattaaataaaaagtcttactactataacaactctaaacctggtttaaatgaaacatctaattttgctgtaaggcttaatgctcttcttttgtttagccaagaaaacattcttagttggaaacaggtggtaaagtagtttggcctgttcacaacttatcaggaccaatatctagtgtggactcagtgttctctaggtttgtgagcagttgtggtaagagaatggaaggcaacactgaataggagttaagggaatggcacgatcacagtgagagagctgcactcacctgcagacccagtcagatggcttgtcagtatctgctctgaggaaccaggtcccacctccccacaaggcaaatctagacccattaaattattacagtgggcttttttgttttaaaagtggttggggatccacaggaacgacattcatacagggacatttgtgaaagcaaagcaagaatgaatgctttcccgatctcagactggctggattcagatcagtgtgttggctggttctcattttaaggggtaagcagtttgctattctgtgactttagtagatctcttttgtgtgcacatatacaatgtgcattatacatatatattaaatatatccacaaagcagatgggcaaaaagattttcatgctaatcttcaaaggttcatgctcaatattgtgaaaagcttttaaaagttgttttgaaaagacaatcattttttgtttttgttttaactttcttgtggcaagctataccggaaaagcggcatgtcagtttgttaaagttcattatttattttaccttttactgacaatgtgaaactcgaagaaaatgttctctttttaaatatacagtcataaactgttcaaggtaaccataacaaactaggtgttatttattaacgtattataaaataatgtttgatccagtatgtgcttgtcttatttaaaattggaatgtgagacatgttgctgtgacctgtttttctttctcattcacatttgtagatattgtgtgaactacagtatataatgataacaattaaaaggatattctgtggatgtcacgtattttgaaatgatagaactacattagctttgtatcatgtttggataattcatcaatgttcacagtttaaaacatcattaaacattatgtaattacaatgagaaagaatcttacttaaatttggagattttcccccacatctcttttccggatacattataattctggacccctatttatctcaaaactcttaatatatgcagaccaacaggtctttgcattccttttaaataactggttgtgacaaagcttgttgttgatcagattcactgtttcatcatatttattgtaatatattttttgttttgtaaatatgttacaacaaaatgtgattggtctaaaatatttgtaatgtatattaaaaggttcaaaaatatttgtataaatctaagttatttgggtacttgtaggaatacaatgaggagcttgaatgccaccttctgacatgatttacttttaaggaaagttatgaggagagaatacaaaaagcatgcaccaaaatgtaatctgacaggatttctggatttatacgtaatcactcctgccccaacacacacacacacacacacacacacacacacacacacacatgcacgcacacatgattttgattatgctacatgatatatgtttcaaaaagaattagcatagaaatcctggtctcctagccaaaaaaatcaaaggattttcaaaaaaacgaatctgtatgttgaggcaaaaggattgaacctggaagtctgggactttatcatagaaacaaagtctcagatattttagttctttggaaacaaatgctgtaattcaaaagcatttgacctgtcactgtactatctacatgtggaagaatgttcaagttgaatcctaatgccgtgaatgaaacacagtctgtgtagggaatgagcaaaaaagttgaattccaattgctttttggccttttggctaaaataaatgtagcatctaattttatcagttt

SEQ ID NO: 256724 - DNA, 4798 bp, Homo sapiens
acctggcagacgcgcggcggcggcggcgagcggtggcgctcggctcgggcgaccgcggcgggggagggcgcggcgcaccgatgggcgccactgagaagggaggccagaagagccggaagctgttttccttgcggcggccgtggaaggcgacccggcggctgtggaggccacgctcagctcgccaggcggcgcagggtgcctcatctccagacatggagcccagctatgggggaggtctctttgacatggtaaaaggaggtgcagggaggctctttagtaacctaaaggacaacttgaaagacaccctcaaagacacatcttctagagtgatacaatctgtgaccagctacacaaagggagatttagacttcacttatgttacctccagaattattgtgatgtcctttcctctggacaatgttgacataggattcaggaatcaggttgatgacattcgaagctttttggattccagacatcttgaccactacacagtatacaatctgtcacctaagtcttatcgaactgccaagtttcacagccgggtctcagaatgcagttggcccattaggcaggctcccagtctgcacaacctttttgctgtgtgtcggaatatgtataactggctactgcagaatcccaaaaatgtctgtgttgtccactgcttggatggacgggcggcatcatcaattctggttggtgctatgttcattttctgtaatctctactctactcctggcccagccattcgattgctatatgcaaagcgaccaggaattggactttcaccatcccataggagatacctgggctatatgtgtgacctactggcagacaagccctaccgccctcacttcaagcctctcacaattaagtcgatcactgtcagtccaataccctttttcaacaaacagaggaatggatgtcgcccttactgtgatgtactcattggagaaaccaaaatatattcgacttgcacagattttgaacgaatgaaagaatatcgtgtccaagatggaaaaatcttcattcccttgaacatcactgtgcaaggagacgtggttgtttccatgtatcacttgaggtcaaccattgggagccggctacaggctaaggtgaccaacacacagatattccagcttcagtttcacactggattcataccactggacacaacagttttaaagttcaccaagcctgagttagatgcatgtgatgtaccagaaaaatatcctcagctatttcaggtgacactggatgtagaactacagccccatgacaaagtaatagacttaactccaccatgggaacattactgcacaaaagatgtcaatcccagcatcctcttctcttctcaccaggaacatcaagatacgctggccttaggaggacaggctccaatagatatccctccagacaaccccaggcattacggacaaagtggtttctttgcctctctctgttggcaagatcagaaatcggagaagtcattctgtgaggaagaccacgctgccctagtgaatcaggaaagtgagcaatcagatgatgaacttctgacactttccagtccgcatggcaatgccaatggtgacaagcctcatggagtcaagaagcccagcaaaaagcagcaggagccagcagcccctccaccccctgaggatgtggaccttttgggcctggaagggtctgcaatgagtaacagcttctctccgccagcggctcctcccaccaattctgaactactgagtgacctgtttgggggtggaggtgcagctggtcccacccaggctggacagtcaggagtggaagatgtgtttcatcctagtggacctgcgtctacccagtcaacaccacgccgctctgccacctccacctctgcgtctccaaccctaagagtgggagaaggtgccacctttgacccatttggagcaccttctaaaccatcaggtcaggatttgctgggttcttttctgaacacatccagtgcttccagtgacccctttctccagcccacaagaagtccttcgcccacagtacatgcttctagtacgcctgctgtgaacattcagccagatgtttctggaggttgggactggcatgctaaaccaggaggctttggaatgggaagcaagtcagctgccaccagcccaaccggatcctcgcatggtactcccacccatcaaagcaaaccccagactctggatccttttgccgaccttgggacactaggtagttcttcctttgccagcaaacccaccacaccaactggattgggtggaggattcccgcctctcagctcgccacagaaggcgtctccccagcctatgggtggcgggtggcagcagggaggtgcctacaactggcagcagccacagcctaagcctcagcccagcatgccccactcctctccccagaaccgacccaactacaacgtgagcttctcagccatgcctgggggccagaacgaacgtgggaaaggatcaagtaatttggaagggaaacaaaaagcagctgattttgaagacctactctctggtcaaggtttcaatgctcacaaagacaaaaaggggcctcggacaatagctgagatgagaaaggaggaaatggccaaggaaatggatcctgagaaattaaagattctggaatggattgaaggcaaagaaagaaatatcagagcccttctttccacgatgcataccgtactatgggctggggagaccaagtggaaaccagttggcatggcagacctggtaacaccagagcaggtgaagaaggtgtacaggaaggctgtcctggtggtgcacccagataaagctactgggcaaccctatgaacaatacgcaaagatgattttcatggagctcaatgatgcctggtctgaatttgaaaaccaaggccaaaagcccttatattaatttatgagcttttccatctctgctgcagacctgtgctaatgcttagtgtgtgtcacaattctgaggttttcgcagatgaaccaaaaactccagtaacatgttttcagtactaaaccgttaagttactcatgaattaatttctcattgataaggaatgtggatgtttggtttctccaaagttcccaccataaaagatccaaagcatgagaggaacttctagtcagatgaccttgcagaaccaccgcattccaccctgccctttggggagcctactcagcattctacctggggaaatggaaaacagaggccaccacccatgaaggcataacacccatcacattgtctgagaataggattaatgagcaaaagttatgataatagagttatatgatggtttaatggtttctagatttttcttggaaagatataatttgagcagtggctttatgcagactccaagaacaaaaccaccaggtatttttttttaagtaaaaatttactaaggcctttagcataatactgtaaatgtcttttggtcaagagaactaacaaatataaaggaacttgaaatgtggggagtgataatagtccagtgattaaactacagtccagtgattaccaccaactttctgactaagctaaaaatgaatgaaaatggtggctaaagaaaatagggactctgaagatgtcgaaatctttattcctggttaggaaggtgggccgctacccttctttccctttagaaaactgtgattaattaaataaaaagtcttactactataacaactctaaacctggtttaaatgaaacatctaattttgctgtaaggcttaatgctcttcttttgtttagccaagaaaacattcttagttggaaacaggtggtaaagtagtttggcctgttcacaacttatcaggaccaatatctagtgtggactcagtgttctctaggtttgtgagcagttgtggtaagagaatggaaggcaacactgaataggagttaagggaatggcacgatcacagtgagagagctgcactcacctgcagacccagtcagatggcttgtcagtatctgctctgaggaaccaggtcccacctccccacaaggcaaatctagacccattaaattattacagtgggcttttttgttttaaaagtggttggggatccacaggaacgacattcatacagggacatttgtgaaagcaaagcaagaatgaatgctttcccgatctcagactggctggattcagatcagtgtgttggctggttctcattttaaggggtaagcagtttgctattctgtgactttagtagatctcttttgtgtgcacatatacaatgtgcattatacatatatattaaatatatccacaaagcagatgggcaaaaagattttcatgctaatcttcaaaggttcatgctcaatattgtgaaaagcttttaaaagttgttttgaaaagacaatcattttttgtttttgttttaactttcttgtggcaagctataccggaaaagcggcatgtcaaaaatactttaggttctacatagatctctttctctcttttgttttgtttgtttgtttgttaaagttcattatttattttaccttttactgacaatgtgaaactcgaagaaaatgttctctttttaaatatacagtcataaactgttcaaggtaaccataacaaactaggtgttatttattaacgtattataaaataatgtttgatccagtatgtgcttgtcttatttaaaattggaatgtgagacatgttgctgtgacctgtttttctttctcattcacatttgtagatattgtgtgaactacagtatataatgataacaatttttgatcatggttggataatcatcaatgttact

SEQ ID NO: 256725 - DNA, 4547 bp, Homo sapiens
acctggcagacgcgcggcggcggcggcgagcggtggcgctcggctcgggcgaccgcggcgggggagggcgcggcgcaccgatgggcgccactgagaagggaggccagaagagccggaagctgttttccttgcggcggccgtggaaggcgacccggcggctgtggaggccacgctcagctcgccaggcggcgcagggtgcctcatctccagacatggagcccagctatgggggaggtctctttgacatggtaaaaggaggtgcagggaggctctttagtaacctaaaggacaacttgaaagacaccctcaaagacacatcttctagagtgatacaatctgtgaccagctacacaaagggagatttagacttcacttatgttacctccagaattattgtgatgtcctttcctctggacaatgttgacataggattcaggaatcaggttgatgacattcgaagctttttggattccagacatcttgaccactacacagtatacaatctgtcacctaagtcttatcgaactgccaagtttcacagccgggtctcagaatgcagttggcccattaggcaggctcccagtctgcacaacctttttgctgtgtgtcggaatatgtataactggctactgcagaatcccaaaaatgtctgtgttgtccactgcttggatggacgggcggcatcatcaattctggttggtgctatgttcattttctgtaatctctactctactcctggcccagccattcgattgctatatgcaaagcgaccaggaattggactttcaccatcccataggagatacctgggctatatgtgtgacctactggcagacaagccctaccgccctcacttcaagcctctcacaattaagtcgatcactgtcagtccaataccctttttcaacaaacagaggaatggatgtcgcccttactgtgatgtactcattggagaaaccaaaatatattcgacttgcacagattttgaacgaatgaaagaatatcgtgtccaagatggaaaaatcttcattcccttgaacatcactgtgcaaggagacgtggttgtttccatgtatcacttgaggtcaaccattgggagccggctacaggctaaggtgaccaacacacagatattccagcttcagtttcacactggattcataccactggacacaacagttttaaagttcaccaagcctgagttagatgcatgtgatgtaccagaaaaatatcctcagctatttcaggtgacactggatgtagaactacagccccatgacaaagtaatagacttaactccaccatgggaacattactgcacaaaagatgtcaatcccagcatcctcttctcttctcaccaggaacatcaagatacgctggccttaggaggacaggctccaatagatatccctccagacaaccccaggcattacggacaaagtggtttctttgcctctctctgttggcaagatcagaaatcggagaagtcattctgtgaggaagaccacgctgccctagtgaatcaggaaagtgagcaatcagatgatgaacttctgacactttccagtccgcatggcaatgccaatggtgacaagcctcatggagtcaagaagcccagcaaaaagcagcaggagccagcagcccctccaccccctgaggatgtggaccttttgggcctggaagggtctgcaatgagtaacagcttctctccgccagcggctcctcccaccaattctgaactactgagtgacctgtttgggggtggaggtgcagctggtcccacccaggctggacagtcaggagtggaagatgtgtttcatcctagtggacctgcgtctacccagtcaacaccacgccgctctgccacctccacctctgcgtctccaaccctaagagtgggagaaggtgccacctttgacccatttggagcaccttctaaaccatcaggtcaggatttgctgggttcttttctgaacacatccagtgcttccagtgacccctttctccagcccacaagaagtccttcgcccacagtacatgcttctagtacgcctgctgtgaacattcagccagatgtttctggaggttgggactggcatgctaaaccaggaggctttggaatgggaagcaagtcagctgccaccagcccaaccggatcctcgcatggtactcccacccatcaaagcaaaccccagactctggatccttttgccgaccttgggacactaggtagttcttcctttgccagcaaacccaccacaccaactggattgggtggaggattcccgcctctcagctcgccacagaaggcgtctccccagcctatgggtggcgggtggcagcagggaggtgcctacaactggcagcagccacagcctaagcctcagcccagcatgccccactcctctccccagaaccgacccaactacaacgtgagcttctcagccatgcctgggggccagaacgaacgtgggaaaggatcaagtaatttggaagggaaacaaaaagcagctgattttgaagacctactctctggtcaaggtttcaatgctcacaaagacaaaaaggggcctcggacaatagctgagatgagaaaggaggaaatggccaaggaaatggatcctgagaaattaaagattctggaatggattgaaggcaaagaaagaaatatcagagcccttctttccacgatgcataccgtactatgggctggggagaccaagtggaaaccagttggcatggcagacccagtcagatggcttgtcagtatctgctctgaggaaccaggtcccacctccccacaaggcaaatctagacccattaaattattacagtgggcttttttgttttaaaagtggttggggatccacaggaacgacattcatacagggacatttgtgaaagcaaagcaagaatgaatgctttcccgatctcagactggctggattcagatcagtgtgttggctggttctcattttaaggggtaagcagtttgctattctgtgactttagtagatctcttttgtgtgcacatatacaatgtgcattatacatatatattaaatatatccacaaagcagatgggcaaaaagattttcatgctaatcttcaaaggttcatgctcaatattgtgaaaagcttttaaaagttgttttgaaaagacaatcattttttgtttttgttttaactttcttgtggcaagctataccggaaaagcggcatgtcaaaaatactttaggttctacatagatctctttctctcttttgttttgtttgtttgtttgttaaagttcattatttattttaccttttactgacaatgtgaaactcgaagaaaatgttctctttttaaatatacagtcataaactgttcaaggtaaccataacaaactaggtgttatttattaacgtattataaaataatgtttgatccagtatgtgcttgtcttatttaaaattggaatgtgagacatgttgctgtgacctgtttttctttctcattcacatttgtagatattgtgtgaactacagtatataatgataacaattaaaaggatattctgtggatgtcacgtattttgaaatgatagaactacattagctttgtatcatgtttggataattcatcaatgttcacagtttaaaacatcattaaacattatgtaattacaatgagaaagaatcttacttaaatttggagattttcccccacatctcttttccggatacattataattctggacccctatttatctcaaaactcttaatatatgcagaccaacaggtctttgcattccttttaaataactggttgtgacaaagcttgttgttgatcagattcactgtttcatcatatttattgtaatatattttttgttttgtaaatatgttacaacaaaatgtgattggtctaaaatatttgtaatgtatattaaaaggttcaaaaatatttgtataaatctaagttatttgggtacttgtaggaatacaatgaggagcttgaatgccaccttctgacatgatttacttttaaggaaagttatgaggagagaatacaaaaagcatgcaccaaaatgtaatctgacaggatttctggatttatacgtaatcactcctgccccaacacacacacacacacacacacacacacacacacacacacatgcacgcacacatgattttgattatgctacatgatatatgtttcaaaaagaattagcatagaaatcctggtctcctagccaaaaaaatcaaaggattttcaaaaaaacgaatctgtatgttgaggcaaaaggattgaacctggaagtctgggactttatcatagaaacaaagtctcagatattttagttctttggaaacaaatgctgtaattcaaaagcatttgacctgtcactgtactatctacatgtggaagaatgttcaagttgaatcctaatgccgtgaatgaaacacagtctgtgtagggaatgagcaaaaaagttgaattccaattgctttttggccttttggctaaaataaatgtagcatctaattttatcagttt

SEQ ID NO: 256726 - DNA, 1049 bp, Homo sapiens
acctggcagacgcgcggcggcggcggcgagcggtggcgctcggctcgggcgaccgcggcgggggagggcgcggcgcaccgatgggcgccactgagaagggaggccagaagagccggaagctgttttccttgcggcggccgtggaaggcgacccggcggctgtggaggccacgctcagctcgccaggcggcgcagggtgcctcatctccagacatggagcccagctatgggggaggtctctttgacatggtaaaaggaggtgcagggaggctctttagtaacctaaaggacaacttgaaagacaccctcaaagacacatcttctagagtgatacaatctgtgaccagctacacaaagggagatttagacttcacttatgttacctccagaattattgtgatgtcctttcctctggacaatgttgacataggattcaggaatcaggttgatgacattcgaagctttttggattccagacatcttgaccactacacagtatacaatctgtcacctaagtcttatcgaactgccaagtttcacagccgggtctcagaatgcagttggcccattaggcaggctcccagtctgcacaacctttttgctgtgtgtcggaatatgtataactggctactgcagaatcccaaaaatgtctgtgttgtccactgcttggtgagtaaccttttgttgttggtggtgatggtttggtttggtcaaatatggatgagcctgtacacaatggtagacaggtaacatttgagttcaataggatttactgagcccatatttaggaattgggtaatgtgagagttgtaaaaataagaaagggatttattattcttgacttaaagcttgactactagtgggaaaggcagatgtatacacaactcacatagtgtggggactctagaatgtgctaagtattataaaggaggtagaaacaggagtagtgtgtgcacagctaaaaatgccattgacttttgtgtgaataaagttaacattaacatattggcgtatttattttttcttcctgtttgtgtttgaataaaaata

SEQ ID NO: 256727 - DNA, 448 bp, Homo sapiens
ccgacttgcatgcaattatcatagcccgagtgctcctccgttgagagacttcgcccccgagaccgctgactgtgaatgacaaatcaaaagtcagggttgcagaatcagccggactttcctgctcatttgcagcagagggaggaagcagagaatgaaagattctgaaaataaaggtaaggggcggactgcagaaagatggctaagagagggctaaaggctaaaagatgctagggatgcgatgtcactccacagacatatttagtttgtattaatggctagtttaaaattaccatacctatattaacattctagttatataataaacatgatgactttaaaaaatgactagcttctagtttccaaatattgtgtcattcagctttccatttttatagtcctaaatataactctatttttgcgttcttaatcttggctgagtaacacagct

SEQ ID NO: 256728 - DNA, 292 bp, Homo sapiens
gtccactgaattctcagtgaggtcagggagactgaggatgagcaatgaggacattaaggaaatgaggacatgagctgtgccctgcatacatctaggggaagagcatctaagcagaataaaggcaaaggccttgaggcaggaccatgcttggcctgccaaggaacaacaaaaaggctggtgttgctggtcaaagtgggtggagaagagtggtaagagaccacgtcagaggtagctgtgtgtgtgtgtgtgtgtgtgtgtgtgtgtgtgtgtgtgtgtgtgtgtgtgtgtgtgt

SEQ ID NO: 256729 - DNA, 410 bp, Homo sapiens
aggaaaggaaatggagaaacacaagttagtctagtagagattgaaatagaaacttcaactaaaactcttggctttagaaggagagagatttgcttgtttatttcagttttgcagaaagttatttctctactctgatccctccatgcttgtggtgtgtccctaaggacccccttttctttcatattctgtcttctttgctttcttttaccttcccttttggtttgtttcttttttaattgctggcttcatggcacctcctttgaattaacctcaaatgtttgatttcttgaagcttgtgtgagcctgaatataaattatatcttctctttacacctttatccttccgttgcaaatgttgccctggatggggtgggagggactaataaagttctatttgttttgtacctaaa

SEQ ID NO: 256730 - DNA, 493 bp, Homo sapiens
ctcccagcccttgggtcaggacagcaggaggccctgagggagcttgagctgactcctgcttctgcttctgcttctgctctgtccggagtctcaggctgcctttagcaagtattccgcatgagcgtcatccctgcggcttcaggagaagcagagtgaaccttggagaaaagagaggcacccaaggtggggacctgcgggcttgcctcattcatccctggacaagcctcccagaaacgaaatgggctgctcacctctgtgatcctcagagttagcaaaactgcttgctatgtcatttagacctcttacaaaatgatattcatctatcactggtgatgacattcattctgaattccactcataggcttcaggatacttgccctcatttttttttcccttcatttcaacagttttcactgagtgtcttgtggacatgagtcatcaaatgttttgctgcctttatgatccaatcccaaataaaaagtaaaacatttgt

SEQ ID NO: 256731 - DNA, 1049 bp, Homo sapiens
  misc_feature (4)..(4): n is a, c, g, or t
gggngaacgggccaagttccaggaaccgtagagatggcttctgccggaaaaggaggacaggatgctctggtccttttcaagctactcagctatgggatggtattattcactctcttcaggcccaagtggaaataaaaagaaggaggcatcatttacagacatacaaagactgtttcactggttctgatgctgtcgatgtggtcttaagtcatcttatgcaaaacacgtgcctaagtagcaatgacatctcttgtcttaaaggggttcatctttgccaagttctaatgaatcacaaagtatttgaaccagtaggaatgaagaagcttttcaaaaaagaaaaggaattagaatttgaagattccaacattagtctctacaggtttctaggcaataaatcatcttacgattgttgcaaaagacaaaaggatgctgagaatgagttcaatgaaaccttgagaccaggatatgaaatgatttcaaatcctctagcacaggagattggtgaggaaagaattgaggaacttattcatacaataaatgggaatccagctttatgtccaaatatcacagttcagaaaccttttctccggctttcaaaagaagatgtttggaaagaacaaacattattatgtcttcttcaattgattcaccttccattcttggacaatattttggagcctccagttaaaacacaaaatcttcaactaaacaaagaggaagatcttgttatcactaacacttgcctagacagagaacttattccaagcttatgtctacctgaaaaatgagaaaagagcagaagcacttgaagcaacacaactatatctaagattgctgttgctgaacattagagaagaattacgacggctacttacttttatggcaatggcatcagagcccaatgcctacaagttgcaaaaacaggtgaaaaattttgcaataagttttgccattttttttgctatttttttcctctaaaaaccatttatgctaatgttaatctttctgtttacagtatgataataaaacagtggtcctgaaaactcttg

SEQ ID NO: 256732 - DNA, 1585 bp, Homo sapiens
  misc_feature (4)..(4): n is a, c, g, or t
gggngaacgggccaagttccaggaaccgtagagatggcttctgccggaaaaggaggacaggatgctctggtccttttcaagctactcagctatgggatggtattattcactctcttcaggcccaagtggaaataaaaagaaggaggcatcatttacagacatacaaagactgtttcactggttctgatgctgtcgatgtggtcttaagtcatcttatgcaaaacacgtgcctaagtagcaatgacatctcttgtcttaaaggggttcatctttgccaagttctaatgaatcacaaagtatttgaaccagtaggaatgaagaagcttttcaaaaaagaaaaggaattagaatttgaagattccaacattagtctctacaggtttctaggcaataaatcatcttacgattgttgcaaaagacaaaaggatgctgagaatgagttcaatgaaaccttgagaccaggatatgaaatgatttcaaatcctctagcacaggagattggtgaggaaagaattgaggaacttattcatacaataaatgggaatccagctttatgtccaaatatcacagttcagaaaccttttctccggctttcaaaagaagatgtttggaaagaacaaacattattatgtcttcttcaattgattcaccttccattcttggacaatattttggagcctccagttaaaacacaaaatcttcaactaaacaaagaggaagatcttgttatcactaacacttgcctagacagagaacttattccaagcttatgtctacctgaaaaatgagaaaagagcagaagcacttgaagcaacacaactatatctaagattgctgttgctgaacattagagaagaattacgacggctacttacttttatggcaatggcatcagagcccaatgcctacaagttgcaaaaacaggtgaaaaattttgcaataagttttgccattttttttgctatttttttcctctaaaaaccatttatgctaatgttaatctttctgtttacagtatgataataaaacagtggtcctgaaaactcttgccaaatcagttttgcaagccaaatcattattaaaagtgcgggcagaacaactggtctggtttccactggagtaccactctgagctcttcaagacaccagttactttattggatctggttagtaagaaacttaagaagcttctacatggagaagatgcagatgccatatcagttggggaggaagttagtatacttccagtggaagacctgagagggtacctgaagagataccgggaaaatattggaaacatgccaccaagccctcttcgatagaagtctccttatttggaaagttgccattttaatgttcagtgtgaatcaggtagggatttgctagtcatcactatgaatggtggatactttgacaaatgctttaaggatattaccatgttgttgcgtctgctgttcagaaaattataaccttagacaaatatctttgcactgagcctcagttttttaaaaatctctaaaataaaaatacacatgcacagatttgtatttttaagatcgagctattcctttaatagtttaaggttg

SEQ ID NO: 256733 - DNA, 1335 bp, Homo sapiens
  misc_feature (4)..(4): n is a, c, g, or t
gggngaacgggccaagttccaggaaccgtagagatggcttctgccggaaaaggaggacaggatgctctggtccttttcaagctactcagctatgggatggtattattcactctcttcaggcccaagtggaaataaaaagaaggaggcatcatttacagacatacaaagactgtttcactggttctgatgctgtcgatgtggtcttaagtcatcttatgcaaaacacgtgcctaagtagcaatgacatctcttgtcttaaaggggttcatctttgccaagttctaatgaatcacaaagtatttgaaccagtaggaatgaagaagcttttcaaaaaagaaaaggaattagaatttgaagattccaacattagtctctacaggtttctaggcaataaatcatcttacgattgttgcaaaagacaaaaggatgctgagaatgagttcaatgaaaccttgagaccaggatatgaaatgatttcaaatcctctagcacaggagattggtgaggaaagaattgaggaacttattcatacaataaatgggaatccagctttatgtccaaatatcacagttcagaaaccttttctccggctttcaaaagaagatgtttggaaagaacaaacattattatgtcttcttcaattgattcaccttccattcttggacaatattttggagcctccagttaaaacacaaaatcttcaactaaacaaagaggaagatcttgttatcactaacacttgcctagacagagaacttattccaagcttatgtctacctgaaaaatgagaaaagagcagaagcacttgaagcaacacaactatatctaagattgctgttgctgaacattagagaagaattacgacggctacttacttttatggcaatggcatcagagcccaatgcctacaagttgcaaaaacaggtgaaaaattttgcaataagttttgccattttttttgctatttttttcctctaaaaaccatttatgctaatgttaatctttctgtttacagtatgataataaaacagtggtcctgaaaactcttgccaaatcagttttgcaagccaaatcattattaaaagtgcgggcagaacaactggtctggtttccactggagtaccactctgagctcttcaagacaccagttactttattggatctggttagtaagaaacttaagaagcttctacatggagaagatgcagatgccatatcaggctttacgttttgccaacccttgacatacaaggagtttgaaaagcagaagggaaggacaattcagtatctacaccagttggctcttgagattaatagtaaccccagcatctctct

SEQ ID NO: 256734 - DNA, 242 bp, Homo sapiens
ggccataattgcacctattttattgagtggtgagagtcaaatgaagtatgtggtaatggacttagcacagtgcttggcacgtttaaaccatccttaaatggtggtgcttcatagattaagataaacaacaaatgaggaaaattcagcaaggtcaaatcgacatttccatgctaaatgttaattttactatgcttaaaattaagcttcaacccaaaaaagagtttcacagacatacagatgag

SEQ ID NO: 256735 - DNA, 462 bp, Homo sapiens
  misc_feature (35)..(35): n is a, c, g, or t
ctgtcaccatctgtcatctgtctccaagaccatanttagaggaggggcccaatagcagcactcctcaaatgccagcagcatccctcaaatgccaacagcacccctcaaatgccaacagcacccctcagatgccaacagcacccctcaaatgcgctttcctagatgttacagaggaccatgtgtgaaccttttctggcaggaagctctggtgttcttgtttagtctcgcattgccagagagtaggcagctctgaagggtagatagtttttaaaaaaaaaaaaaaaaggcggcccactacactaaaggataatcatcaaggatagccaagagcacagttcataaatcaaaatcactgccttaaaaatgttgagaatgctttcattaagtgcttaaattggataacagacttgtgcctcaatgctcaatcagaaataataaaattctcttacagtgactatctta

SEQ ID NO: 256736 - DNA, 2250 bp, Homo sapiens
ccctttccccactgtggtgtgataagaggctgccctcacagtcacaatgctcccgggtcacagaggtgctgggccccaggccagcctctgcctgggaagttctctctgggaacatctggtgggtactacaggccctattccaggccctatggcctgtggaacctcaccacgggggggagggctgggccagacggagacatcacctgtggtgtcagccccatggatgagacagagtggatacacagacatcccaaggctgaggacctaagggttgggctcatcagctgggcaggaacctacctcacctttgaggcatgcaagaatacagtcactgcaactgcgaagagtttgggcaggagacagacctgggagatcttggtgagcaatgagcatgagacacaggccgtggtgcgactaaagagcgtgcagggcctctacctgctgtgtgagtgtgatggcaccgtgtgttatggccgcccaaggaccagccaccatgggtgctttctactgcgtttccaccggaacagcaagtggaccctccagtgcctaatctctggtcgttatttggagtccaatggcaaggacgtgttttgcacttcccacgtcctctcagcttaccacatgtggaccccccgaccagccctccatgtccacgtgatcctctacagccccatccaccgctgctatgcccgggctgaccccactatgggccgcatctgggtggacgcagcagttccctgcctggaggagtgtggcttcctgttgcatttccgagatggatgctaccacctggagacctctacacaccacttcttgtcccatgtagaccggctgttctcccaaccctcatcacagacagcttttcacatgcaagtgcggcctggagggcttgtggcactgtgtgatggagaaggaggcatgttatatccacagggcacgcatctgctcttgggcatgggctgcaaccccatgaggggtgaggagtggttcatcctacagcactgcccaacctgggtcagcctcaggtcaaagactgggcggttcatctcagtcatctacgatggtgaggtgcgtgctgcttctgagcgcttaaaccgaatgtccttgttccagtttgaatgtgacagtgagagccccactgtgcagcttcgttcagccaatggctactacctatcccagaggcgccacagggcagtaatggctgatgggcaccccctggagtctgacacgttcttccgaatgcactggaactgtggcaggatcatcctgcagtcctgcagggggcgcttcctgggcattgcacccaacagcctgctgatggccaatgtcatccttccaggcccaaatgaggaatttgggattttatttgccaatcgctccttccttgtattgcgaggtcgttatggctatgtgggctcctcatcgggccatgacctcatacagtgcaaccaggatcagcccgaccgcattcatctactaccctgccgaccgggtatctaccacttccaggcacaggggggatccttctggtcaataacatcctttggcacctttcgcccttggggcaagtttgccctcaacttctgtatcgagcttcaggggagcaacttactcactgtactggcccccaatggcttctacatgcgagccgaccaaagtggcaccctgttggcagacagtgaagacattaccagagagtgtatctgggaattttaggtcaatgggatgtcacctaccaaaatccaaatcctccaggaaaaactactacactaaatggaccaggaacctcagagtcaagatccaagagaagaacatctgttacaacttttcctacccagtttagcaaaacacctgttttatgcaacaatacatcacaacaggccacccccaagatccttgtgtgcatctgactcaatatagaataggggtctggatgagggttgaaacagacaccccaggctgctctaagttctatacaggagagaccaaatggcaagcagttcttccactgatcttccccgtccccatccagaactgctagactttttccagtgaacccatgagcagccagcattgccctgaagggtttagaatccagttatgactttaaatatctttttggtttagaaaaaaggaaagattgttaatctcgtgagcacaggataatggtaataacaccttatgcctgtataggccactttacctcctcctaccacgatttatttaacttccccacccttactaacatta

SEQ ID NO: 256737 - DNA, 1337 bp, Homo sapiens
ccctttccccactgtggtgtgataagaggctgccctcacagtcacaatgctcccgggtcacagaggtgctgggccccaggccagcctctgcctgggaagttctctctgggaacatctggtgggtactacaggccctattccaggccctatggcctgtggaacctcaccacgggggggagggctgggccagacggagacatcacctgtggtgtcagccccatggatgagacagagtggatacacagacatcccaaggctgaggacctaagggttgggctcatcagctgggcaggaacctacctcacctttgaggcatgcaagaatacagtcactgcaactgcgaagagtttgggcaggagacagacctgggagatcttggtgagcaatgagcatgagacacaggccgtggtgcgactaaagagcgtgcagggcctctacctgctgtgtgagtgtgatggcaccgtgtgttatggccgcccaaggaccagccaccatgggtgctttctactgcgtttccaccggaacagcaagtggaccctccagtgcctaatctctggtcgttatttggagtccaatggcaaggacgtgttttgcacttcccacgtcctctcagcttaccacatgtggaccccccgaccagccctccatgtccacgtgatcctctacagccccatccaccgctgctatgcccgggctgaccccactatgggccgcatctgggtggacgcagcagttccctgcctggaggagtgtggcttcctgttgcatttccgagatggatgctaccacctggagacctctacacaccacttcttgtcccatgtagaccggctgttctcccaaccctcatcacagacagcttttcacatgcaagtgcggcctggagggcttgtggcactgtgtgatggagaaggaggcatgttatatccacagggcacgcatctgctcttgggcatgggctgcaaccccatgaggggtgaggagtggttcatcctacagcactgcccaacctgggtcagcctcaggtcaaagactgggcggttcatctcagtcatctacgatggtgaggtgcgtgctgcttctgagcgcttaaaccgaatgtccttgttccagtttgaatgtgacagtgagagccccactgtgcagcttcgttcagccaatggctactacctatcccaggtgagaccttggcttcctgagcaagagaaaccttaagctctgagctctccctccctagacttccttctcctttttcaaggcaaatgatgagaggatgatgtgggctgtggaggcacttgttgataaacattcattttcacccaatgggggctccttta

SEQ ID NO: 256738 - DNA, 2005 bp, Homo sapiens
ccctttccccactgtggtgtgataagaggctgccctcacagtcacaatgctcccgggtcacagaggtgctgggccccaggccagcctctgcctgggaagttctctctgggaacatctgacctgggagatcttggtgagcaatgagcatgagacacaggccgtggtgcgactaaagagcgtgcagggcctctacctgctgtgtgagtgtgatggcaccgtgtgttatggccgcccaaggaccagccaccatgggtgctttctactgcgtttccaccggaacagcaagtggaccctccagtgcctaatctctggtcgttatttggagtccaatggcaaggacgtgttttgcacttcccacgtcctctcagcttaccacatgtggaccccccgaccagccctccatgtccacgtgatcctctacagccccatccaccgctgctatgcccgggctgaccccactatgggccgcatctgggtggacgcagcagttccctgcctggaggagtgtggcttcctgttgcatttccgagatggatgctaccacctggagacctctacacaccacttcttgtcccatgtagaccggctgttctcccaaccctcatcacagacagcttttcacatgcaagtgcggcctggagggcttgtggcactgtgtgatggagaaggaggcatgttatatccacagggcacgcatctgctcttgggcatgggctgcaaccccatgaggggtgaggagtggttcatcctacagcactgcccaacctgggtcagcctcaggtcaaagactgggcggttcatctcagtcatctacgatggtgaggtgcgtgctgcttctgagcgcttaaaccgaatgtccttgttccagtttgaatgtgacagtgagagccccactgtgcagcttcgttcagccaatggctactacctatcccagaggcgccacagggcagtaatggctgatgggcaccccctggagtctgacacgttcttccgaatgcactggaactgtggcaggatcatcctgcagtcctgcagggggcgcttcctgggcattgcacccaacagcctgctgatggccaatgtcatccttccaggcccaaatgaggaatttgggattttatttgccaatcgctccttccttgtattgcgaggtcgttatggctatgtgggctcctcatcgggccatgacctcatacagtgcaaccaggatcagcccgaccgcattcatctactaccctgccgaccgggtatctaccacttccaggcacaggggggatccttctggtcaataacatcctttggcacctttcgcccttggggcaagtttgccctcaacttctgtatcgagcttcaggggagcaacttactcactgtactggcccccaatggcttctacatgcgagccgaccaaagtggcaccctgttggcagacagtgaagacattaccagagagtgtatctgggaattttaggtcaatgggatgtcacctaccaaaatccaaatcctccaggaaaaactactacactaaatggaccaggaacctcagagtcaagatccaagagaagaacatctgttacaacttttcctacccagtttagcaaaacacctgttttatgcaacaatacatcacaacaggccacccccaagatccttgtgtgcatctgactcaatatagaataggggtctggatgagggttgaaacagacaccccaggctgctctaagttctatacaggagagaccaaatggcaagcagttcttccactgatcttccccgtccccatccagaactgctagactttttccagtgaacccatgagcagccagcattgccctgaagggtttagaatccagttatgactttaaatatctttttggtttagaaaaaaggaaagattgttaatctcgtgagcacaggataatggtaataacaccttatgcctgtataggccactttacctcctcctaccacgatttatttaacttccccacccttactaacatta

SEQ ID NO: 256739 - DNA, 2510 bp, Homo sapiens
ccctttccccactgtggtgtgataagaggctgccctcacagtcacaatgctcccgggtcacagaggtgctgggccccaggccagcctctgcctgggaagttctctctgggaacatctggtgggtactacaggccctattccaggccctatggcctgtggaacctcaccacgggggggagggctgggccagacggagacatcacctgtggtgtcagccccatggatgagacagagtggatacacagacatcccaaggctgaggacctaagggttgggctcatcagctgggcaggaacctacctcacctttgaggcatgcaagaatacagtcactgcaactgcgaagagtttgggcaggagacagcacagggtggttgtgtcagaaagaagagaagtggagagcacagggtggttgtgtcagaaagaggagaagtggagagcccaggttgatcacagctgaaccaggcagttgcatctgaactgttcatgctcccatcttcatccctggagccaggcctgcctataagagcttttgcttctgtcttgccatgctggaaggcaacctttggggatggaggtattggctaagtgtgctctctgcggacaacagtgaggaagaaaaaaacctgggagatcttggtgagcaatgagcatgagacacaggccgtggtgcgactaaagagcgtgcagggcctctacctgctgtgtgagtgtgatggcaccgtgtgttatggccgcccaaggaccagccaccatgggtgctttctactgcgtttccaccggaacagcaagtggaccctccagtgcctaatctctggtcgttatttggagtccaatggcaaggacgtgttttgcacttcccacgtcctctcagcttaccacatgtggaccccccgaccagccctccatgtccacgtgatcctctacagccccatccaccgctgctatgcccgggctgaccccactatgggccgcatctgggtggacgcagcagttccctgcctggaggagtgtggcttcctgttgcatttccgagatggatgctaccacctggagacctctacacaccacttcttgtcccatgtagaccggctgttctcccaaccctcatcacagacagcttttcacatgcaagtgcggcctggagggcttgtggcactgtgtgatggagaaggaggcatgttatatccacagggcacgcatctgctcttgggcatgggctgcaaccccatgaggggtgaggagtggttcatcctacagcactgcccaacctgggtcagcctcaggtcaaagactgggcggttcatctcagtcatctacgatggtgaggtgcgtgctgcttctgagcgcttaaaccgaatgtccttgttccagtttgaatgtgacagtgagagccccactgtgcagcttcgttcagccaatggctactacctatcccagaggcgccacagggcagtaatggctgatgggcaccccctggagtctgacacgttcttccgaatgcactggaactgtggcaggatcatcctgcagtcctgcagggggcgcttcctgggcattgcacccaacagcctgctgatggccaatgtcatccttccaggcccaaatgaggaatttgggattttatttgccaatcgctccttccttgtattgcgaggtcgttatggctatgtgggctcctcatcgggccatgacctcatacagtgcaaccaggatcagcccgaccgcattcatctactaccctgccgaccgggtatctaccacttccaggcacaggggggatccttctggtcaataacatcctttggcacctttcgcccttggggcaagtttgccctcaacttctgtatcgagcttcaggggagcaacttactcactgtactggcccccaatggcttctacatgcgagccgaccaaagtggcaccctgttggcagacagtgaagacattaccagagagtgtatctgggaattttaggtcaatgggatgtcacctaccaaaatccaaatcctccaggaaaaactactacactaaatggaccaggaacctcagagtcaagatccaagagaagaacatctgttacaacttttcctacccagtttagcaaaacacctgttttatgcaacaatacatcacaacaggccacccccaagatccttgtgtgcatctgactcaatatagaataggggtctggatgagggttgaaacagacaccccaggctgctctaagttctatacaggagagaccaaatggcaagcagttcttccactgatcttccccgtccccatccagaactgctagactttttccagtgaacccatgagcagccagcattgccctgaagggtttagaatccagttatgactttaaatatctttttggtttagaaaaaaggaaagattgttaatctcgtgagcacaggataatggtaataacaccttatgcctgtataggccactttacctcctcctaccacgatttatttaacttccccacccttactaacatta

SEQ ID NO: 256740 - DNA, 628 bp, Homo sapiens
tgtcagaaagaagagaagtggagagcacagggtggttgtgtcagaaagaggagaagtggagagcccaggtgggaaagcagaattgtgggcatccaggggaagttggaccagtggagttattgcaaagcctatgtttctgttctggttgtggtttgagaatggggaactccagaagccctagcagtgtcggtcttcattctagagaggaatgtaggcacctctgggatgggtgccagactgaggcaggggcaaagttcttcctcttataacaaggttgatcacagctgaaccaggcagttgcatctgaactgttcatgctcccatcttcatccctggagccaggcctgcctataagagcttttgcttctgtcttgccatgctggaaggcaacctttggggatggaggtattggctaagtgtgctctctgcggacaacagtgaggaagaaaaaagtaagacttacaccaaagcgtttctttaaaaattaggtattgaagagtgggattaagaaaggagggagggtttaccttctgttagctgaaggaggtagacatctagaacttctctttggatagtgccatctggctgcaggggtggaagggcccagagatctcttgatgaggggata

SEQ ID NO: 256741 - DNA, 418 bp, Homo sapiens
gggcacctgtagccctagctacttaggaggctgaggcaggagaatggcatgaacccaggagacggagcttgcagtgagccgagatcgtgccactgcactccagcctgggcgacagagcgaggagaccccacctcaagaaaaaaacaaaacaaaaaacaacaaaaaaacacatagattccattctgattcagctaggtgttgtatttatgatacaggaaatttgggaaacagtcttaatactgtgggaactcttacaagaatttacctctgaggccttagcctagcagtatatgaaatcccctctattagtttgttctcagttttttaattgttactttgttctcgggcctgttattagttctgctaatctgttaatccctcatccccacccccatcccacaagagtaaaatatctacc

SEQ ID NO: 256742 - DNA, 405 bp, Homo sapiens
caccacacccagccttcttttcttttttgtagagacaaggtcttgctatgttgcccaggctggtctcagacccccaagctcaagtgatcctcttgccacagcctcccaggaatatacttcattcaatagactatacccacaattatatataatgcataatcatatgtgattatattttgcatataatgtaaggagattcatggatcctctgaaattcatctatggatgctctaaaactatgttgctggaacccagattaagaacccttgtctcagcctcccgagtagctgggactacaggcgcacaccactacaccctgctagtttttgtatttttagtagaggtggggtttcaccatgttgtgcaggctggtcttgaactcctgacctcaggtgatccacccac

SEQ ID NO: 256743 - DNA, 286 bp, Homo sapiens
ttctccattcctccttcaagtatctgagcagttcctgtgtgccagctgctggtctacaagatggatcggtccttggagatcacgctgtagcagaggaggcaggctgtagcccacaggccacaaccagccccctgcctgttcacacatataaagttttattggaacacagccacacccatttcagtgcatattgtctgtggctgctttcctgctacaatggagagttgagtagttgggacagagacctatggcctgcaaagctgaactatttaccatctggctctca

SEQ ID NO: 256744 - DNA, 491 bp, Homo sapiens
catctcaaaaaaataaaaataaaagcttttgagttgatctaaaaagctaactggtttattagtcaaccgttgctgtgtaagaaacaatctgagaacctcagtggtataacacaatgaacatttatttctaataagtttctgggttaggtggggcatttctgcttcagtttgcagcagctggggcctctctcattgccactgtggatcagcaggggtggctgtgttcccagggctgcccattctcctcctgggaccaataagctagtcacagcatacttttcacgtggtaggagggaagaaggcaagcccagttccctaaagaggaaagggactctagacagagcagtactattcaaagcatgtctgcagtgagtgagataggtacagaaattaacaacaagcatttagaaactaaacaattgccacaatattcaagcggtgtttttgctgaattttactaaagtattggtccaggacacgttggaaattta

SEQ ID NO: 256745 - DNA, 341 bp, Homo sapiens
gaacctttgaatttgattttccagttgtttgctgtcagtatgtagatatacaattgatttttgtatagtgactttgtagtctaagtctgtttcacttattacttctagtggtttgcttatatagaaaactaagaaatttgcaattatgtttcctgtgactatcgttttacttctttctttctaatccttttgtcttgtctttctttttattggtttattatactgtccaggacttctatagcattgaacagaagtcatgagaatgggcataattgcattgctctcaagcttaggcagaaagctttcagtagtccaccatatggtatgacgtctgtaggatc

SEQ ID NO: 256746 - DNA, 428 bp, Homo sapiens
acttctgaataccattaaccccctctcctggcagctatgacctggttagagtcttattaggttcccaagggtaatgaggttatcaccatttttttgccccttttcttctcccagaatagcgggtcttctaaagatgctgttctcggctgggcgcggtggctcacgcctgtaatcccagcactttgggaggccgagatgggcggatcatgaggttaggagatcgagaccatcctggctaacacagtgaaaccccgtctctactaaaaatacaaaaaattggccgggcgtggtggtgggcgcctgtagtcccagctactcgggaggctgaggcaggagcatggtgtgaacctgggaggcggagcttgcagtgagccgagatcgcaccactgcactccagcctgggacagagcgagactccgtctcagaaa

SEQ ID NO: 256747 - DNA, 757 bp, Homo sapiens
tctcatctgtcagttaaggctttgcctttaaatgctaacatagagctacattttaagagcccataattcaatatggaaacaaactccctggcacactctatttcttgaaagattatcaaagagaatcaacaattggaaggaagtgttgccgagaagctagttgcatcaaatggtttctctacaggaacttttgtagaaattgcacttgcttgtaatgccactggtctaccctgagagactttttaagaaaaaagagatcctaaacctttgaagatattcactccattacacagcatcttctttttgagaacccttaggacacaactttttttctgatactaatattagaaatactgtcactttactgtatttggtgtttgtcttaagggctatgtgaaagacatgatttactagattttcttccctgagttttctgttaaacagcttagaggcaaaattgtggtcagtttatggcaaatgtatagaattgtataatataaaattttgactagcctcatttgtgggtggattttcatgttttatcttgtatttgcttacttttcttaccttactcaatttattctatttaggtgtattgtacatttcttataaagccacctgaatttgcttttggaacaatgtgacttagtatttaataactatgtcacttatagtgaaaattataagcctcttcataattttataaagtaccatggtatgtaactaataaaaaagtaataattaaaatataaaaaat

SEQ ID NO: 256748 - DNA, 223 bp, Homo sapiens
ggcagaggttgcagtgagatgagatcgcatcatggcacttcagcctgggtgacagagactccgtttcaaaaaaaaaaaaaagtttacttaatattttcattttggctgggcgtggtggctcacgcctgtaatcccaacactttgagaggccgagacgggtggatcacctgaggtcaggagtttgagaccagtctggccaacatgtcgaaaccctgtctctact

SEQ ID NO: 256749 - DNA, 605 bp, Homo sapiens
agagttgccctaagggagccagggactatagtcaaaagccttagaagtctacctggtatcctgttatactgacctggtgtcctgttgtactgtggctgagctggcactcaaaccatgagatgcagtccttcccacgttttcctctcctttccacaggcaaaggagcctcacctcatggccaccaccaccacagacccacagggagtactgccatgctactgtccatgttctcctcaggccccaggaacctccagtcagcttgttgctacctcacttgggactctcctttcatagcagtaagcgtccctctgaatgtccaagacccaaggcctggaataaggaactccaagagcccacttggtgctatacctgtggccaagctggtacctaacgtgcaagagtcctcattgcttttccccctgcttttctcaagcagaaggaactcacctcatagccaccacagctgggaatatgctgagtctcacaagaagccagcgagtcttagagtctcacccaaggtccacagtttactacttaggtattgatgctggctattcagggcctaagagctccctagtcagcaggtaatggctcctgtctgaaat

SEQ ID NO: 256750 - DNA, 683 bp, Homo sapiens
gcctaaacttgctagcagcctacaagaatggagaaaagaagcatgtgaataactagaatccagagaattttaaggcctggggcagatgccttctggggtgccatcccagccccccagtcatttccctttctctagaacctgttccacccaccccagggtagggaccagccgcagtagatggcaggcagaaagagattctgctataaaacaccatacacataaaagaaagaacagcaacaaatggacaaagatggagtatggttttgtgcccaaagaatttacaaccccaaaatgagtttcgtgatatgcctgctttgatttctcatttattccaagttatcatttatattgttaatctatacagttttctccccccacgtattagacagcttttaaaaatggttttcaaggctgggtactgtggctcttgcctataatcccagcattttgagaggctgaggcaggtggatcattcgaggttaggagttcgagaccagcctggccaacatggtgaaaccccacctctactaaaaatacaaaaattagccaggcgtgatggcatgtgcctgtaatcccagctactcgggaggctgaagcaggagaatcgcttgaacccaggaggttagagtgagcagagattgcaccactgcactccagcctgggtgacagagagagactgtctc

SEQ ID NO: 256751 - DNA, 703 bp, Homo sapiens
aaataatcaggaaaattacccatgttcaattgcccggttgctccagaacccttggagtgcctaatcacagttaataattaaaacaaagcaagaagattcaaatgttggatttaagtattatcaagagggaaagaaaccatttgagggggaaaatatgaggagtcttttgtggtaggtagattttatggacagaaacatgggctctaaagagagaatgatttttttttttttttttgagacagattctcactctgtcacccagactggagtgcagtggcgcgatctcggctcactgcaacctccgccttccaggttcaagcaattctcctgcctcagcctcccgaataggaaagagtgatcttttaaaatggatgtggattatggtagatggataacttagtatctatgaagctcctatagtgtccccagctccgtgttagaccatatgtctaacctagccaaaattgtgtccacaggatacaactagcaaattatatgtgacagaaacaaaaactggaacctgcagtttaaaatggtatggaatatttgaaataagaacattgacagaaatttaagacgtggtcatagttttaagtaatatgagttaggatgggctgagttatgctgcagtgacaaataacccccaaatcgtagtagtttatacgaacaagtccttttctaggtcttcttgctctgggaccca

SEQ ID NO: 256752 - DNA, 334 bp, Homo sapiens
cagagatggatggctgttttatccctcagtcactgcagcagctgggggctgtccataggtaccagtggttcgccggccgtgggaaacctccaaagtgatatgcactttttgtgttcctctgtgttttttctgggaagccgcaccacactttctacttcttaaaggggactgcggccatcaaccaccttgatgagaacttcctttatacactgaagtgacaggtcctggcctagacgaagactctacacctggcaaagggttggtttcagaagtgctgatcaagctgctgagcctctgtttccttgtctatgaaattacaagaatcttgcctgta

SEQ ID NO: 256753 - DNA, 714 bp, Homo sapiens
gactttggaatgggtccttcactacctggaaagattattttgagaaatgaatgatttatggagtaagaatccacctggtaaaccactaaggaccatgtaaatctaaaatcaattaatctataaactagagaaagaaattaggccaaaacccagcactattctgaccaaagaagtcaagaccaggcagtgagttcctttacttaggagctggggacagaatataaataaatgggcctttgggtttgtgggaaaaggagataataaagataaaggcaacaatgaatggcttggaatggaaaaagaaccatcagaattgatcattacaattaggagctatttctttgggaaaaaataaggaaaacccaagagggaataaggagaatgatataatcaggctggcagccctgtgtcttccactcccccacaagtctggctccagctgctgtcagccacaccacctacatcttctcagcagcgtatcctagatttgcaccctgacagctacccctgaccccctacgcaaaaattatcttttgatcagtgacagtggccatttgtttgatgctgggaggtttccagtgccatgctcatttcggaatggttgaaatggttctcttttcgtgagtaaacagaggaagaagattatgacacaggtggttaactggttcctaatgtacctgtaaaactcctgcatagaaagcccagcagaaggac

SEQ ID NO: 256754 - DNA, 254 bp, Homo sapiens
aaatgaggaagcaatttctgttttatcttggtcactgatttagagcatggactgtgctcatcattcatttctaggaagaaattagagtattcatttcacagagagctacatattgttttcttcaccaccctcttggaggaaaggtagggttgataattacggtttgccctggccacatgctttcactcatgggtaggtgagctaaaacattcatatcaccatgatgcttccttttctttccgtcttaaatagac

SEQ ID NO: 256755 - DNA, 328 bp, Homo sapiens
gggcagcagaggcttcctggggtggcacttctgtgttcaccccatgaaggcactttctctctgaagtttacacacaaggaagacccgtttgaggccatgaaatgtgcactgtgacagtgacgagcctagggtcacacggattcatcgtcccgtggagccacattccagcatcttttgggggaggacacctctgccgggcaatgaggagccagtagcaggtctcccctccctgaagacgggctggacacaaatcacctcattttccactctgtccacacctgaggctgcatctcagctggaaaattacactggaattctaaataataaa

SEQ ID NO: 256756 - DNA, 470 bp, Homo sapiens
gatacagtatacaataggattctggagttaaattgttttttgactcaattcagagacttctgatgggcacccctcatcgccccagtgagttgattctaggagtcagaggagaaacaatgaccatcaggcgaagagtctcacaaagtcaaacgcaggatttccctgatacccatcagggcactttcccataagagacagctgcgctcaggcttactccaggctttactttaaaacctactagaataatagtaggaaaaacaaggaagaatgggtgaaaggaaacagcctatttatttcctcaaatcctttcagcttcgcttcaccttagagaacaatgaggcttattaaatagggccagcagcaatcttgtgtaattgttcagccatcttctctgttgactcctcagcctattctgcgaccctcaagttacccacagcttggctaaaataaaagacttcttcttgcaggtt

SEQ ID NO: 256757 - DNA, 1142 bp, Homo sapiens
ccagaggcccccttccgtcccggggccggggctaggccaaggcgggcaccaggactgcccagcctcccggcccttcgcactggtaaccggttccggggcggatgctttttgcatctgacccggcgcgcccggtgacgccttcgcgtccagacggaagtgcgggcggaggatccccagccgggtcccaagcctgtgcctgagcctgagcctgagcctgagcccgagccgggagccggtcgcgggggctccgggctgtgggaccgctgggcccccagcgatggcgaccctgtggggaggccttcttcggcttggctccttgctcagcctgtcgtgcctggcgctttccgtgctgctgctggcgcagctgtcagacgccgccaagaatttcgaggatgtcagatgtaaatgtatctgccctccctataaagaaaattctgggcatatttataataagaacatatctcagaaagattgtgattgccttcatgttgtggagcccatgcctgtgcgggggcctgatgtagaagcatactgtctacgctgtgaatgcaaatatgaagaaagaagctctgtcacaatcaaggttaccattataatttatctctccattttgggccttctacttctgtacatggtatatcttactctggttgagcccatactgaagaggcgcctctttggacatgcacagttgatacagagtgatgatgatattggggatcaccagccttttgcaaatgcacacgatgtgctagcccgctcccgcagtcgagccaacgtgctgaacaaggtagaatatgcacagcagcgctggaagcttcaagtccaagagcagcgaaagtctgtctttgaccggcatgttgtcctcagctaattgggaattgaattcaaggtgactagaaagaaacaggcagacaactggaaagaactgactgggttttgctgggtttcattttaataccttgttgatttcaccaactgttgctggaagattcaaaactggaagcaaaaacttgcttgatttttttttcttgttaacgtaataatagagacatttttaaaagcacacagctcaaagtcagccaataagtcttttcctatttgtgacttttactaataaaaataaatctgcctgtaaatta

SEQ ID NO: 256758 - DNA, 2002 bp, Homo sapiens
ccagaggcccccttccgtcccggggccggggctaggccaaggcgggcaccaggactgcccagcctcccggcccttcgcactggtaaccggttccggggcggatgctttttgcatctgacccggcgcgcccggtgacgccttcgcgtccagacggaagtgcgggcggaggatccccagccgggtcccaagcctgtgcctgagcctgagcctgagcctgagcccgagccgggagccggtcgcgggggctccgggctgtgggaccgctgggcccccagcgatggcgaccctgtggggaggccttcttcggcttggctccttgctcagcctgtcgtgcctggcgctttccgtgctgctgctggcgcagctgtcagacgccgccaagaatttcgaggatgtcagatgtaaatgtatctgccctccctataaagaaaattctgggcatatttataataagaacatatctcagaaagattgtgattgccttcatgttgtggagcccatgcctgtgcgggggcctgatgtagaagcatactgtctacgctgtgaatgcaaatatgaagaaagaagctctgtcacaatcaaggttaccattataatttatctctccattttgggccttctacttctgtacatggtatatcttactctggttgagcccatactgaagaggcgcctctttggacatgcacagttgatacagagtgatgatgatattggggatcaccagccttttgcaaatgcacacgatgtgctagcccgctcccgcagtcgagccaacgtgctgaacaaggtagaatatgcacagcagcgctggaagcttcaagtccaagagcagcgaaagtctgtctttgaccggcatgttgtcctcagctaattgggaattgaattcaaggtgactagaaagaaacaggcagacaactggaaagaactgactgggttttgctgggtttcattttaataccttgttgatttcaccaactgttgctggaagattcaaaactggaagcaaaaacttgcttgatttttttttcttgttaacgtaataatagagacatttttaaaagcacacagctcaaagtcagccaataagtcttttcctatttgtgacttttactaataaaaataaatctgcctgtaaattatcttgaagtcctttacctggaacaagcactctctttttcaccacatagttttaacttgactttcaagataattttcagggtttttgttgttgttgttttttgtttgtttgttttggtgggagaggggagggatgcctgggaagtggttaacaacttttttcaagtcactttactaaacaaacttttgtaaatagaccttaccttctattttcgagtttcatttatattttgcagtgtagccagcctcatcaaagagctgacttactcatttgacttttgcactgactgtattatctgggtatctgctgtgtctgcacttcatggtaaacgggatctaaaatgcctggtggcttttcacaaaaagcagattttcttcatgtactgtgatgtctgatgcaatgcatcctagaacaaactggccatttgctagtttactctaaagactaaacatagtcttggtgtgtgtggtcttactcatcttctagtacctttaaggacaaatcctaaggacttggacacttgcaataaagaaattttattttaaacccaagcctccctggattgataatatatacacatttgtcagcatttccggtcgtggtgagaggcagctgtttgagctccaatgtgtgcagctttgaactagggctggggttgtgggtgcctcttctgaaaggtctaaccattattggataactggcttttttcttccttgtcctctttggaatgtaacaataaaaataatttttgaaacatccatcagtgtatctatctatgtctcctagttttttcctcctccctcttttgctgtataatgagattgaagatataaagacattttgtaccctgtaaaaaaaata

SEQ ID NO: 256759 - DNA, 2108 bp, Homo sapiens
ccagaggcccccttccgtcccggggccggggctaggccaaggcgggcaccaggactgcccagcctcccggcccttcgcactggtaaccggttccggggcggatgctttttgcatctgacccggcgcgcccggtgacgccttcgcgtccagacggaagtgcgggcggaggatccccagccgggtcccaagcctgtgcctgagcctgagcctgagcctgagcccgagccgggagccggtcgcgggggctccgggctgtgggaccgctgggcccccagcgatggcgaccctgtggggaggccttcttcggcttggctccttgctcagcctgtcgtgcctggcgctttccgtgctgctgctggcgcagctgtcagacgccgccaagtgattgccttcatgttgtggagcccatgcctgtgcgggggcctgatgtagaagcatactgtctacgctgtgaatgcaaatatgaagaaagaagctctgtcacaatcaaggttaccattataatttatctctccattttgggccttctacttctgtacatggtatatcttactctggttgagcccatactgaagaggcgcctctttggacatgcacagttgatacagagtgatgatgatattggggatcaccagccttttgcaaatgcacacgatgtgctagcccgctcccgcagtcgagccaacgtgctgaacaaggtagaatatgcacagcagcgctggaagcttcaagtccaagagcagcgaaagtctgtctttgaccggcatgttgtcctcagctaattgggaattgaattcaaggtgactagaaagaaacaggcagacaactggaaagaactgactgggttttgctgggtttcattttaataccttgttgatttcaccaactgttgctggaagattcaaaactggaagcaaaaacttgcttgatttttttttcttgttaacgtaataatagagacatttttaaaagcacacagctcaaagtcagccaataagtcttttcctatttgtgacttttactaataaaaataaatctgcctgtaaattatcttgaagtcctttacctggaacaagcactctctttttcaccacatagttttaacttgactttcaagataattttcagggtttttgttgttgttgttttttgtttgtttgttttggtgggagaggggagggatgcctgggaagtggttaacaacttttttcaagtcactttactaaacaaacttttgtaaatagaccttaccttctattttcgagtttcatttatattttgcagtgtagccagcctcatcaaagagctgacttactcatttgacttttgcactgactgtattatctgggtatctgctgtgtctgcacttcatggtaaacgggatctaaaatgcctggtggcttttcacaaaaagcagattttcttcatgtactgtgatgtctgatgcaatgcatcctagaacaaactggccatttgctagtttactctaaagactaaacatagtcttggtgtgtgtggtcttactcatcttctagtacctttaaggacaaatcctaaggacttggacacttgcaataaagaaattttattttaaacccaagcctccctggattgataatatatacacatttgtcagcatttccggtcgtggtgagaggcagctgtttgagctccaatgtgtgcagctttgaactagggctggggttgtgggtgcctcttctgaaaggtctaaccattattggataactggcttttttcttccttgtcctctttggaatgtaacaataaaaataatttttgaaacatcaaaaaaacagaacaaagaaaaaaaacccaaaaacaaaaacaaccaaaacaacaaaaaacaaccggttggcggcgccatcgagcgcccgtgaagaaaggtcttctaaaacccactgcggtggggggcgcgacgcccccaattcgatatcagtaacagttggccccaaccggggtccacaagaagacacccggggggccaaagaaaccgcgggtggactccccccagaaaaagaccgcgggggggaaccacagcgcgctgagacacaacccaaaggggactcggaggcaacacgcggcgcaag

SEQ ID NO: 256760 - DNA, 2168 bp, Homo sapiens
acggaagctcctcccctaccaccggccttgcggaaactgggtctgccaacctgctccttggcccattcctgacagccatacgcctggcctcacagctccggcagacccccgccgccaccagccccgcccctcccgactgcccggcggcactctcgccctcagccccgacagcctggcaggcagcgccccacgatacttagtcacctgttcctccacctcttgaaacttgttttgttggtagttgttctgtctgtcaaccaggaattagaagcaaagtttcctgggaagagtatactaaactgatctcagagtcaggctacttcctgtgtgtacttcctttctagttgtagaatttcgaggatgtcagatgtaaatgtatctgccctccctataaagaaaattctgggcatatttataataagaacatatctcagaaagattgtgattgccttcatgttgtggagcccatgcctgtgcgggggcctgatgtagaagcatactgtctacgctgtgaatgcaaatatgaagaaagaagctctgtcacaatcaaggttaccattataatttatctctccattttgggccttctacttctgtacatggtatatcttactctggttgagcccatactgaagaggcgcctctttggacatgcacagttgatacagagtgatgatgatattggggatcaccagccttttgcaaatgcacacgatgtgctagcccgctcccgcagtcgagccaacgtgctgaacaaggtagaatatgcacagcagcgctggaagcttcaagtccaagagcagcgaaagtctgtctttgaccggcatgttgtcctcagctaattgggaattgaattcaaggtgactagaaagaaacaggcagacaactggaaagaactgactgggttttgctgggtttcattttaataccttgttgatttcaccaactgttgctggaagattcaaaactggaagcaaaaacttgcttgatttttttttcttgttaacgtaataatagagacatttttaaaagcacacagctcaaagtcagccaataagtcttttcctatttgtgacttttactaataaaaataaatctgcctgtaaattatcttgaagtcctttacctggaacaagcactctctttttcaccacatagttttaacttgactttcaagataattttcagggtttttgttgttgttgttttttgtttgtttgttttggtgggagaggggagggatgcctgggaagtggttaacaacttttttcaagtcactttactaaacaaacttttgtaaatagaccttaccttctattttcgagtttcatttatattttgcagtgtagccagcctcatcaaagagctgacttactcatttgacttttgcactgactgtattatctgggtatctgctgtgtctgcacttcatggtaaacgggatctaaaatgcctggtggcttttcacaaaaagcagattttcttcatgtactgtgatgtctgatgcaatgcatcctagaacaaactggccatttgctagtttactctaaagactaaacatagtcttggtgtgtgtggtcttactcatcttctagtacctttaaggacaaatcctaaggacttggacacttgcaataaagaaattttattttaaacccaagcctccctggattgataatatatacacatttgtcagcatttccggtcgtggtgagaggcagctgtttgagctccaatgtgtgcagctttgaactagggctggggttgtgggtgcctcttctgaaaggtctaaccattattggataactggcttttttcttccttgtcctctttggaatgtaacaataaaaataatttttgaaacatcaaaaaaacagaacaaagaaaaaaaacccaaaaacaaaaacaaccaaaacaacaaaaaacaaccggttggcggcgccatcgagcgcccgtgaagaaaggtcttctaaaacccactgcggtggggggcgcgacgcccccaattcgatatcagtaacagttggccccaaccggggtccacaagaagacacccggggggccaaagaaaccgcgggtggactccccccagaaaaagaccgcgggggggaaccacagcgcgctgagacacaacccaaaggggactcggaggcaacacgcggcgcaag

SEQ ID NO: 256761 - DNA, 1850 bp, Homo sapiens
agctgcgaaaggtctgtctttgacggcatgttgtcctcagctaattgggaattgaattcaaggtgactagaaagaaacaggcagacaactggaaagaactgactgggttttgctgggtttcattttaataccttgttgattttcaccaactgttgctggaagggcctgatgtagaagcatactgtctacgctgtgaatgcaaatatgaagaaagaagctctgtcacaatcaaggttaccattataatttatctctccattttgggccttctacttctgtacatggtatatcttactctggttgagcccatactgaagaggcgcctctttggacatgcacagttgatacagagtgatgatgatattggggatcaccagccttttgcaaatgcacacgatgtgctagcccgctcccgcagtcgagccaacgtgctgaacaaggtagaatatgcacagcagcgctggaagcttcaagtccaagagcagcgaaagtctgtctttgaccggcatgttgtcctcagctaattgggaattgaattcaaggtgactagaaagaaacaggcagacaactggaaagaactgactgggttttgctgggtttcattttaataccttgttgatttcaccaactgttgctggaagattcaaaactggaagcaaaaacttgcttgatttttttttcttgttaacgtaataatagagacatttttaaaagcacacagctcaaagtcagccaataagtcttttcctatttgtgacttttactaataaaaataaatctgcctgtaaattatcttgaagtcctttacctggaacaagcactctctttttcaccacatagttttaacttgactttcaagataattttcagggtttttgttgttgttgttttttgtttgtttgttttggtgggagaggggagggatgcctgggaagtggttaacaacttttttcaagtcactttactaaacaaacttttgtaaatagaccttaccttctattttcgagtttcatttatattttgcagtgtagccagcctcatcaaagagctgacttactcatttgacttttgcactgactgtattatctgggtatctgctgtgtctgcacttcatggtaaacgggatctaaaatgcctggtggcttttcacaaaaagcagattttcttcatgtactgtgatgtctgatgcaatgcatcctagaacaaactggccatttgctagtttactctaaagactaaacatagtcttggtgtgtgtggtcttactcatcttctagtacctttaaggacaaatcctaaggacttggacacttgcaataaagaaattttattttaaacccaagcctccctggattgataatatatacacatttgtcagcatttccggtcgtggtgagaggcagctgtttgagctccaatgtgtgcagctttgaactagggctggggttgtgggtgcctcttctgaaaggtctaaccattattggataactggcttttttcttccttgtcctctttggaatgtaacaataaaaataatttttgaaacatcaaaaaaacagaacaaagaaaaaaaacccaaaaacaaaaacaaccaaaacaacaaaaaacaaccggttggcggcgccatcgagcgcccgtgaagaaaggtcttctaaaacccactgcggtggggggcgcgacgcccccaattcgatatcagtaacagttggccccaaccggggtccacaagaagacacccggggggccaaagaaaccgcgggtggactccccccagaaaaagaccgcgggggggaaccacagcgcgctgagacacaacccaaaggggactcggaggcaacacgcggcgcaag

SEQ ID NO: 256762 - DNA, 1672 bp, Homo sapiens
atggtctccacctgaaccttcaaccacttcccctcaattcaccaaacactagccatcttgacctcctttcagttatttgtacactccattctcctttctgcatcaacaccctcaaacatgctatttcctctctctaaagcagtctccccatccccactactttttgatacagagtgatgatgatattggggatcaccagccttttgcaaatgcacacgatgtgctagcccgctcccgcagtcgagccaacgtgctgaacaaggtagaatatgcacagcagcgctggaagcttcaagtccaagagcagcgaaagtctgtctttgaccggcatgttgtcctcagctaattgggaattgaattcaaggtgactagaaagaaacaggcagacaactggaaagaactgactgggttttgctgggtttcattttaataccttgttgatttcaccaactgttgctggaagattcaaaactggaagcaaaaacttgcttgatttttttttcttgttaacgtaataatagagacatttttaaaagcacacagctcaaagtcagccaataagtcttttcctatttgtgacttttactaataaaaataaatctgcctgtaaattatcttgaagtcctttacctggaacaagcactctctttttcaccacatagttttaacttgactttcaagataattttcagggtttttgttgttgttgttttttgtttgtttgttttggtgggagaggggagggatgcctgggaagtggttaacaacttttttcaagtcactttactaaacaaacttttgtaaatagaccttaccttctattttcgagtttcatttatattttgcagtgtagccagcctcatcaaagagctgacttactcatttgacttttgcactgactgtattatctgggtatctgctgtgtctgcacttcatggtaaacgggatctaaaatgcctggtggcttttcacaaaaagcagattttcttcatgtactgtgatgtctgatgcaatgcatcctagaacaaactggccatttgctagtttactctaaagactaaacatagtcttggtgtgtgtggtcttactcatcttctagtacctttaaggacaaatcctaaggacttggacacttgcaataaagaaattttattttaaacccaagcctccctggattgataatatatacacatttgtcagcatttccggtcgtggtgagaggcagctgtttgagctccaatgtgtgcagctttgaactagggctggggttgtgggtgcctcttctgaaaggtctaaccattattggataactggcttttttcttccttgtcctctttggaatgtaacaataaaaataatttttgaaacatcaaaaaaacagaacaaagaaaaaaaacccaaaaacaaaaacaaccaaaacaacaaaaaacaaccggttggcggcgccatcgagcgcccgtgaagaaaggtcttctaaaacccactgcggtggggggcgcgacgcccccaattcgatatcagtaacagttggccccaaccggggtccacaagaagacacccggggggccaaagaaaccgcgggtggactccccccagaaaaagaccgcgggggggaaccacagcgcgctgagacacaacccaaaggggactcggaggcaacacgcggcgcaag

SEQ ID NO: 256763 - DNA, 1838 bp, Homo sapiens
ccagaggcccccttccgtcccggggccggggctaggccaaggcgggcaccaggactgcccagcctcccggcccttcgcactggtaaccggttccggggcggatgctttttgcatctgacccggcgcgcccggtgacgccttcgcgtccagacggaagtgcgggcggaggatccccagccgggtcccaagcctgtgcctgagcctgagcctgagcctgagcccgagccgggagccggtcgcgggggctccgggctgtgggaccgctgggcccccagcgatggcgaccctgtggggaggccttcttcggcttggctccttgctcagcctgtcgtgcctggcgctttccgtgctgctgctggcgcagctgtcagacgccgccaagaatttcgaggatgtcagatgtaaatgtatctgccctccctataaagaaaattctgggcatatttataataagaacatatctcagaaagattgtgattgccttcatgttgtggagcccatgcctgtgcgggggcctgatgtagaagcatactgtctacgctgtgaatgcaaatatgaagaaagaagctctgtcacaatcaaggttaccattataatttatctctccattttgggccttctacttctgtacatggtatatcttactctggttgagcccatactgaagaggcgcctctttggacatgcacagttgatacagagtgatgatgatattggggatcaccagccttttgcaaatgcacacgatgtgctagcccgctcccgcagtcgagccaacgtgctgaacaaggtagaatatgcacagcagcgctggaagcttcaagtccaagagcagcgaaagtctgtctttgaccggcatgttgtcctcagctaattgggaattgaattcaaggtgactagaaagaaacaggcagacaactggaaagaactgactgggttttgctgggtttcattttaataccttgttgatttcaccaactgttgctggaagattcaaaactggaagcaaaaacttgcttgatttttttttcttgttaacgtaataatagagacatttttaaaagcacacagctcaaagtcagccaataagtcttttcctatttgtgacttttactaataaaaataaatctgcctgtaaattatcttgaagtcctttacctggaacaagcactctctttttcaccacatagttttaacttgactttcaagataattttcagggtttttgttgttgttgttttttgtttgtttgttttggtgggagaggggagggatgcctgggaagtggttaacaacttttttcaagtcactttactaaacaaacttttgtaaatagaccttaccttctattttcgagtttcatttatattttgcagtgtagccagcctcatcaaagagctgacttactcatttgacttttgcactgactgtattatctgggtatctgctgtgtctgcacttcatggtaaacgggatctaaaatgcctggtggcttttcacaaaaagcagattttcttcatgtactgtgatgtctgatgcaatgcatcctagaacaaactggccatttgctagtttactctaaagactaaacatagtcttggtgtgtgtggtcttactcatcttctagtacctttaaggacaaatcctaaggacttggacacttgcaataaagaaattttattttaaacccaagcctccctggattgataatatatacacatttgtcagcatttccggtcgtggtgagaggcagctgtttgagctccaatgtgtgcagctttgaactagggctggggttgtgggtgccgatgaatagcgaggggatacctctagaggcg

SEQ ID NO: 256764 - DNA, 1721 bp, Homo sapiens
ccagaggcccccttccgtcccggggccggggctaggccaaggcgggcaccaggactgcccagcctcccggcccttcgcactggtaaccggttccggggcggatgctttttgcatctgacccggcgcgcccggtgacgccttcgcgtccagacggaagtgcgggcggaggatccccagccgggtcccaagcctgtgcctgagcctgagcctgagcctgagcccgagccgggagccggtcgcgggggctccgggctgtgggaccgctgggcccccagcgatggcgaccctgtggggaggccttcttcggcttggctccttgctcagcctgtcgtgcctggcgctttccgtgctgctgctggcgcagctgtcagacgccgccaagaatttcgaggatgtcagatgtaaatgtatctgccctccctataaagaaaattctgggcatatttataataagaacatatctcagaaagattgtgattgccttcatgttgtggagcccatgcctgtgcgggggcctgatgtagaagcatactgtctacgctgtgaatgcaaatatgaagaaagaagctctgtcacaatcaaggttaccattataatttatctctccattttgggccttctacttctgtacatggtatatcttactctggttgagcccatactgaagaggcgcctctttggacatgcacagttgatacagagtgatgatgatattggggatcaccagccttttgcaaatgcacacgatgtgctagcccgctcccgcagtcgagccaacgtgctgaacaaggtagaatatgcacagcagcgctggaagcttcaagtccaagagcagcgaaagtctgtctttgaccggcatgttgtcctcagctaattgggaattgaattcaaggtgactagaaagaaacaggcagacaactggaaagaactgactgggttttgctgggtttcattttaataccttgttgatttcaccaactgttgctggaagattcaaaactggaagcaaaaacttgcttgatttttttttcttgttaacgtaataatagagacatttttaaaagcacacagctcaaagtcagccaataagtcttttcctatttgtgacttttactaataaaaataaatctgcctgtaaattatcttgaagtcctttacctggaacaagcactctctttttcaccacatagttttaacttgactttcaagataattttcagggtttttgttgttgttgttttttgtttgtttgttttggtgggagaggggagggatgcctgggaagtggttaacaacttttttcaagtcactttactaaacaaacttttgtaaatagaccttaccttctattttcgagtttcatttatattttgcagtgtagccagcctcatcaaagagctgacttactcatttgacttttgcactgactgtattatctgggtatctgctgtgtctgcacttcatggtaaacgggatctaaaatgcctggtggcttttcacaaaaagcagattttcttcatgtactgtgatgtctgatgcaatgcatcctagaacaaactggccatttgctagtttactctaaagactaaacatagtcttggtgtgtgtggtcttactcatcttctagtacctttaaggacaaatcctaaggacttggacttacatggtctagcatgtcatctaagccaagttatgaaggatctggctcccctgtgtaagta

SEQ ID NO: 256765 - DNA, 1391 bp, Homo sapiens
ccagaggcccccttccgtcccggggccggggctaggccaaggcgggcaccaggactgcccagcctcccggcccttcgcactggtaaccggttccggggcggatgctttttgcatctgacccggcgcgcccggtgacgccttcgcgtccagacggaagtgcgggcggaggatccccagccgggtcccaagcctgtgcctgagcctgagcctgagcctgagcccgagccgggagccggtcgcgggggctccgggctgtgggaccgctgggcccccagcgatggcgaccctgtggggaggccttcttcggcttggctccttgctcagcctgtcgtgcctggcgctttccgtgctgctgctggcgcagctgtcagacgccgccaagaatttcgaggatgtcagatgtaaatgtatctgccctccctataaagaaaattctgggcatatttataataagaacatatctcagaaagattgtgattgccttcatgttgtggagcccatgcctgtgcgggggcctgatgtagaagcatactgtctacgctgtgaatgcaaatatgaagaaagaagctctgtcacaatcaaggttaccattataatttatctctccattttgggccttctacttctgtacatggtatatcttactctggttgagcccatactgaagaggcgcctctttggacatgcacagttgatacagagtgatgatgatattggggatcaccagccttttgcaaatgcacacgatgtgctagcccgctcccgcagtcgagccaacgtgctgaacaaggtagaatatgcacagcagcgctggaagcttcaagtccaagagcagcgaaagtctgtctttgaccggcatgttgtcctcagctaattgggaattgaattcaaggtgactagaaagaaacaggcagacaactggaaagaactgactgggttttgctgggtttcattttaataccttgttgatttcaccaactgttgctggaagattcaaaactggaagcaaaaacttgcttgatttttttttcttgttaacgtaataatagagacatttttaaaagcacacagctcaaagtcagccaataagtcttttcctatttgtgacttttactaataaaaataaatctgcctgtaaattaaaaaaaaaaaaaaaaaaaaaaaaaaaagaaaaaaataaaatatagaaatgaaaaatgaaaaaaaaaaaaccgggggggataatattagggggggggagaaacaggaggtaaaaaaggagcaggtgtataatagtgtgtacacgaagacgcatttttgtagagagaggggaaaatgcagggggcccacatatgaggggggggataatatattaaaggaggtgtactctttttttttctgtggagagatgt

SEQ ID NO: 256766 - DNA, 1002 bp, Homo sapiens
ccagaggcccccttccgtcccggggccggggctaggccaaggcgggcaccaggactgcccagcctcccggcccttcgcactggtaaccggttccggggcggatgctttttgcatctgacccggcgcgcccggtgacgccttcgcgtccagacggaagtgcgggcggaggatccccagccgggtcccaagcctgtgcctgagcctgagcctgagcctgagcccgagccgggagccggtcgcgggggctccgggctgtgggaccgctgggcccccagcgatggcgaccctgtggggaggccttcttcggcttggctccttgctcagcctgtcgtgcctggcgctttccgtgctgctgctggcgcagctgtcagacgccgccaagaatttcgaggatgtcagatgtaaatgtatctgccctccctataaagaaaattctgggcatatttataataagaacatatctcagaaagattgtgattgccttcatgttgtggagcccatgcctgtgcgggggcctgatgtagaagcatactgtctacgctgtgaatgcaaatatgaagaaagaagctctgtcacaatcaaggttaccattataatttatctctccattttgggccttctacttctgtacatggtatatcttactctggttgagcccatactgaagaggcgcctctttggacatgcacagttgatacagagtgatgatgatattggggatcaccagccttttgcaaatgcacacgatgtgctagcccgctcccgcagtcgagccaacgtgctgaacaaggtagaatatgcacagcagcgctggaagcttcaagtccaagagcagcgaaagtctgtctttgaccggcatgttgtcctcagctaattgggaattgaattcaaggtgactagaaagaaacaggcagacaactggaaagaactgactgggttttgctgggtttcattttaataccttgttgatttcaccaactgtgacaaagtgcatggggaccc

SEQ ID NO: 256767 - DNA, 666 bp, Homo sapiens
gcggccgcctactactgctcgaattcaagcttctaacgatgtacggggagactaaacatagtcttggtgtgtgtggtcttactcatcttctagtacctttaaggacaaatcctaaggacttggacacttgcaataaagaaattttattttaaacccaagcctccctggattgataatatatacacatttgtcagcatttccggtcgtggtgagaggcagctgtttgagctccaatgtgtgcagctttgaactagggctggggttgtgggtgcctcttctgaaaggtctaaccattattggataactggcttttttcttccttgtcctctttggaatgtaacaataaaaataatttttgaaacatcaaaaaaacagaacaaagaaaaaaaacccaaaaacaaaaacaaccaaaacaacaaaaaacaaccggttggcggcgccatcgagcgcccgtgaagaaaggtcttctaaaacccactgcggtggggggcgcgacgcccccaattcgatatcagtaacagttggccccaaccggggtccacaagaagacacccggggggccaaagaaaccgcgggtggactccccccagaaaaagaccgcgggggggaaccacagcgcgctgagacacaacccaaaggggactcggaggcaacacgcggcgcaag

SEQ ID NO: 256768 - DNA, 2200 bp, Homo sapiens
ccagaggcccccttccgtcccggggccggggctaggccaaggcgggcaccaggactgcccagcctcccggcccttcgcactggtaaccggttccggggcggatgctttttgcatctgacccggcgcgcccggtgacgccttcgcgtccagacggaagtgcgggcggaggatccccagccgggtcccaagcctgtgcctgagcctgagcctgagcctgagcccgagccgggagccggtcgcgggggctccgggctgtgggaccgctgggcccccagcgatggcgaccctgtggggaggccttcttcggcttggctccttgctcagcctgtcgtgcctggcgctttccgtgctgctgctggcgcagctgtcagacgccgccaagaatttcgaggatgtcagatgtaaatgtatctgccctccctataaagaaaattctgggcatatttataataagaacatatctcagaaagattgtgattgccttcatgttgtggagcccatgcctgtgcgggggcctgatgtagaagcatactgtctacgctgtgaatgcaaatatgaagaaagaagctctgtcacaatcaaggttaccattataatttatctctccattttgggccttctacttctgtacatggtatatcttactctggttgagcccatactgaagaggcgcctctttggacatgcacagttgatacagagtgatgatgatattggggatcaccagccttttgcaaatgcacacgatgtgctagcccgctcccgcagtcgagccaacgtgctgaacaaggtagaatatgcacagcagcgctggaagcttcaagtccaagagcagcgaaagtctgtctttgaccggcatgttgtcctcagctaattgggaattgaattcaaggtgactagaaagaaacaggcagacaactggaaagaactgactgggttttgctgggtttcattttaataccttgttgatttcaccaactgttgctggaagattcaaaactggaagcaaaaacttgcttgatttttttttcttgttaacgtaataatagagacatttttaaaagcacacagctcaaagtcagccaataagtcttttcctatttgtgacttttactaataaaaataaatctgcctgtaaattatcttgaagtcctttacctggaacaagcactctctttttcaccacatagttttaacttgactttcaagataattttcagggtttttgttgttgttgttttttgtttgtttgttttggtgggagaggggagggatgcctgggaagtggttaacaacttttttcaagtcactttactaaacaaacttttgtaaatagaccttaccttctattttcgagtttcatttatattttgcagtgtagccagcctcatcaaagagctgacttactcatttgacttttgcactgactgtattatctgggtatctgctgtgtctgcacttcatggtaaacgggatctaaaatgcctggtggcttttcacaaaaagcagattttcttcatgtactgtgatgtctgatgcaatgcatcctagaacaaactggccatttgctagtttactctaaagactaaacatagtcttggtgtgtgtggtcttactcatcttctagtacctttaaggacaaatcctaaggacttggacacttgcaataaagaaattttattttaaacccaagcctccctggattgataatatatacacatttgtcagcatttccggtcgtggtgagaggcagctgtttgagctccaatgtgtgcagctttgaactagggctggggttgtgggtgcctcttctgaaaggtctaaccattattggataactggcttttttcttccttgtcctctttggaatgtaacaataaaaataatttttgaaacatcaaaaaaacagaacaaagaaaaaaaacccaaaaacaaaaacaaccaaaacaacaaaaaacaaccggttggcggcgccatcgagcgcccgtgaagaaaggtcttctaaaacccactgcggtggggggcgcgacgcccccaattcgatatcagtaacagttggccccaaccggggtccacaagaagacacccggggggccaaagaaaccgcgggtggactccccccagaaaaagaccgcgggggggaaccacagcgcgctgagacacaacccaaaggggactcggaggcaacacgcggcgcaag

SEQ ID NO: 256769 - DNA, 1876 bp, Homo sapiens
agctcagagaattagaaagccgacggggtgctgtggtcaggaggcgcgtgggcggcagaatttcgaggatgtcagatgtaaatgtatctgccctccctataaagaaaattctgggcatatttataataagaacatatctcagaaagattgtgattgccttcatgttgtggagcccatgcctgtgcgggggcctgatgtagaagcatactgtctacgctgtgaatgcaaatatgaagaaagaagctctgtcacaatcaaggttaccattataatttatctctccattttgggccttctacttctgtacatggtatatcttactctggttgagcccatactgaagaggcgcctctttggacatgcacagttgatacagagtgatgatgatattggggatcaccagccttttgcaaatgcacacgatgtgctagcccgctcccgcagtcgagccaacgtgctgaacaaggtagaatatgcacagcagcgctggaagcttcaagtccaagagcagcgaaagtctgtctttgaccggcatgttgtcctcagctaattgggaattgaattcaaggtgactagaaagaaacaggcagacaactggaaagaactgactgggttttgctgggtttcattttaataccttgttgatttcaccaactgttgctggaagattcaaaactggaagcaaaaacttgcttgatttttttttcttgttaacgtaataatagagacatttttaaaagcacacagctcaaagtcagccaataagtcttttcctatttgtgacttttactaataaaaataaatctgcctgtaaattatcttgaagtcctttacctggaacaagcactctctttttcaccacatagttttaacttgactttcaagataattttcagggtttttgttgttgttgttttttgtttgtttgttttggtgggagaggggagggatgcctgggaagtggttaacaacttttttcaagtcactttactaaacaaacttttgtaaatagaccttaccttctattttcgagtttcatttatattttgcagtgtagccagcctcatcaaagagctgacttactcatttgacttttgcactgactgtattatctgggtatctgctgtgtctgcacttcatggtaaacgggatctaaaatgcctggtggcttttcacaaaaagcagattttcttcatgtactgtgatgtctgatgcaatgcatcctagaacaaactggccatttgctagtttactctaaagactaaacatagtcttggtgtgtgtggtcttactcatcttctagtacctttaaggacaaatcctaaggacttggacacttgcaataaagaaattttattttaaacccaagcctccctggattgataatatatacacatttgtcagcatttccggtcgtggtgagaggcagctgtttgagctccaatgtgtgcagctttgaactagggctggggttgtgggtgcctcttctgaaaggtctaaccattattggataactggcttttttcttccttgtcctctttggaatgtaacaataaaaataatttttgaaacatcaaaaaaacagaacaaagaaaaaaaacccaaaaacaaaaacaaccaaaacaacaaaaaacaaccggttggcggcgccatcgagcgcccgtgaagaaaggtcttctaaaacccactgcggtggggggcgcgacgcccccaattcgatatcagtaacagttggccccaaccggggtccacaagaagacacccggggggccaaagaaaccgcgggtggactccccccagaaaaagaccgcgggggggaaccacagcgcgctgagacacaacccaaaggggactcggaggcaacacgcggcgcaag

SEQ ID NO: 256770 - DNA, 510 bp, Homo sapiens
ttttcaaataactatacttttagtttcagaaaaaattacaaaaataatagttcaaaattgttacaggttaagagtttatatgtgtatatatttgtgcacacaaattatatatgtatacccatgtacatgctcagttatatatacatatatacataagcaatttaaatatttaattttgtatactattgtatatacatatacacacacatgtaaaaagtataattggataaataggatctttatagatgagtacgaagttttagggtggataaatcaatgtcatgagggaggacgcaaatcacagagtcatgacattgatatgtttggggataggtatattcatctgatgaagatatgaatatctctcagtcaatcgagcaatcccttttccttgtgagagcgttgatcttgatttcttaattcttttttattggggaaaacacagaaagttaacctagaacaagaatcttatttttattttaatttagggttgcttggctatatttcaga

SEQ ID NO: 256771 - DNA, 495 bp, Homo sapiens
cccatggctgcccatgggccgcaggtactccagcctgaggacacgctttgctctcaagacgtttttgagatggcagagttgacattttgcttttatttcatcctcacaagatgtgaaaaattcacaaatgggacttcttgaaagaatcaaaacttgagaagtaactgagaagtagaagcagctcttaacaagcatcaggggctcagaagaggtagctcttcccagggcatccagcgggcgagctgttccatgtgcctctgaacccagcttcccacttagcagcaggtcttgagtgcacctggcatacagtaagtgctcagtaaatgcatatgaattagaattcgtagtgttcacagtcattagagtgtcccttataagaatgaaaaatgcatttattttcccactgagagggaattcttgttacttctggaatgagtgcccagggcgaatggtggtgagtgtgcagccctcactggtgttttgctctgattctgt

SEQ ID NO: 256772 - DNA, 672 bp, Homo sapiens
  misc_feature (20)..(20): n is a, c, g, or t
gctgcccgctactactacgntccttcatacattccatacatacttaaaaccaagcaaagggtggagttccatctttaaaaactaaacggcatttacacttaaaaaatggaatgaggtgggatccctccttctcaaaaatgtttctagagctactaaaaaacttgcatttacaaaatagttgataaaaatattcccggaggccgggcgcagtggctcacgcctgtaatcccaacactttgggaggccaagatgtgaaaaattcacaaatgggacttcttgaaagaatcaaaacttgagaagtaactgagaagtagaagcagctcttaacaagcatcaggggctcagaagaggtagctcttcccagggcatccagcgggcgagctgttccatgtgcctctgaacccagcttcccacttagcagcaggtcttgagtgcacctggcatacacctgtgcaattctcgtcaacacagaacacctgcctgcccacccccggtgctgaagaccgaccagtcaaggagaggatggctgcattttgtgctcagagttggttgaaatggctacgaagtgtggagaataaccactgaatcccaaaaagtcactgcgcttgatctgatccaagtaacagtgactgcagttagggtcgagagcttctccgaagcagcggtcatgca

SEQ ID NO: 256773 - DNA, 527 bp, Homo sapiens
gaacagaatgaaacataagaaaacagaaacaaacaagtagaagctcaaatatccacacaactaaaagtggcgatgataataaaatctggctctggtgacataagcggaagttgttgtgtggaacgtgcaggaggactccttcaaaaggaatatggacagggagtgcacacttttccagccttcttgtctcattccttcttgctgccaggaacaatgacatgagaactggagcgctaacagccattcagatcatgaggcaacattaaggatgaaaaccacacactgaggatgatggagcagaaaaaacggagagaaggagattttctgaccatcccatggtgccagttgacacacctggactgcctacttctgactctcttgtatttgaaataatacattttgttgtgtttaatcactactattttggattttctgttgtatgcagctgaatttagttctaattgatgtagacaagtctgtctgtaactagatgcatgtggaaaataaaacttttatgggaaaaatac

SEQ ID NO: 256774 - DNA, 373 bp, Homo sapiens
catgggatgccctgcagatacctggggatgtgggtgaccaggcactaatgagcaccctgggcctagcaccctgagctggtgccccatgccccaagacaactgtaggtgctaactaggcagcagtgaggcctgggctggagccacccctgcatagcccgacccctgcaattcactgtttgggaaaattaagctactccgtcaaaaggcaaagacgcccagtctggtgagttaaaagccccctacctgaagccatttcagggtcaacctactgtctacctttaggctgtgcagtgctcatttgcactctacttcttctggggggtgggaaatgattctttacccatcctttggttctttttaaaaagcagctctg

SEQ ID NO: 256775 - DNA, 401 bp, Homo sapiens
ggcaccaccgcttacaggctggatgaattaagacaattttcatagattcccagggcctcagtgttcctatttccaaaccaataatagtcatctttttattgcagggctgttgtataaatttacatatgtaaaaatcaggtgtcaaataagagctattgtgatattagctatagcactaggaaaataaacagtatgttacactgatgaaaattctttgctcatcttacacaggggcaagaaataaaaacttctggcaattgttggtgttgccaatggtgcaacataccatgaagattaaggaaacttagcaacagtgaacttggaccttctaatagctgtctaaccccgagctcatcacttgaaaatgaaaatatcaaataaaaaaaggaaagtataattta

SEQ ID NO: 256776 - DNA, 398 bp, Homo sapiens
aggttttcatcaaattttcaaagggatctgaaattaaacaaacagccaaacaactgattcagagcaagcttctgctgttgcagcagctctagctcactgtttagacctcctcagaatagcgacagcatacagggagcctattagttgtgtaccccaatctttggtgagcctggagggaggtaattgagagggaggcaggggccctgaaaatggagtaggtgttgatgagtgcccataactctccaggcccagccagggcaccattaaccatcttctgctttggcaagaatagtccagatccacctggagaggcttttgggctagggaggactttatatgcagcaggactgcattaatgactttcaggcccttttcctttgtaggctccttcctccata

SEQ ID NO: 256777 - DNA, 717 bp, Homo sapiens
  misc_feature (26)..(26): n is a, c, g, or t
  misc_feature (80)..(80): n is a, c, g, or t
ccgggcgctcctagcggtctcccggnccctgccgccctgccactatgtcccgccgctctatgctgcttgcctgggctctncccagcctccttcgactcggagcggctcaggagacagaagacccggcctgctgcagccccatagtgccccggaacgagtggaaggccctggcatcagagtgcgcccagcacctgagcctgcccttacgctatgtggtggtatcgcacacggcgggcagcagctgcaacacccccgcctcgtgccagcagcaggcccggaatgtgcagcactaccacatgaagacactgggctggtgcgacgtgggctacaacttcctgattggagaagacgggctcgtatacgagggccgtggctggaacttcacgggtgcccactcaggtcacttatggaaccccatgtccattggcatcagcttcatgggcaactacatggatcgggtgcccacaccccaggccatccgggcagcccagggtctactggcctgcggtgtggctcagggagccctgaggtccaactatgtgctcaaaggacaccgggatgtgcagcgtacactctctccaggcaaccagctctaccacctcatccagaattggccacactaccgctccccctgaggccctgctgatccgcaccccattcctcccctcccatggccaaaaaccccactgtctccttctccaataaagatgtagctca

SEQ ID NO: 256778 - DNA, 506 bp, Homo sapiens
aaaactgtggtggcagcctcactttagagaatgaggtattaaaaacttgaccaaggtagtcatgccagacttttgaatatttttccaaataagatggcttcaaattgaaaaattttatccacttgatatttttcaaaactataaagctgtgttctatttctacctaaaatataaaattgttagtatggtatgatttgtcatttgagatgatcttggctaatacattactgggcataataatggctattacacattgagaggatagaggctgtttccgtgtctcaagcatcattaactgcagataaaaaaaagttaacagttattctaaaaatatttcttataggggagaaaatgtaatcagtatattgtatgttttagtctggtgtggtggtgcaagcttgtaatcccagcctcccaagtagcagtgactgcaggcacgtgctgccacacctggctaacttctttactttatttctgaagagactggctcgccaaatgagactgcc

SEQ ID NO: 256779 - DNA, 427 bp, Homo sapiens
tcatgtgagcaggttttattttaagaaattggctcgtgattatagaggctgacaagttcgaaatctgtaagacagaccagcaggcaagaaacaggtaaaagctcaagttgcagtcttgagtttgaaataagtatagcaggtcagcagtcaagacactcaagcaggatttctgtgttccagttttgaggcagaattccttcttctgggaaactttagttttgttcttaaggccttcaactggctggatgagctccacccacattattgagggtaatctcttttgtaaggtcaactgattataaatgttaatcacatctttacaaaataccctcacagcaacatctaaacagtgtttgaccaaataactgggtactaaggcctagccatattaactgtcacacatatatctttaatgacattcccacat

SEQ ID NO: 256780 - DNA, 135 bp, Homo sapiens
acaaacactgtaattgaacaccagagcataggctgggagaaccttccattagctgtcacactgactgggtgttcaaaactgcacagtaggccgggtgtggtggctcacgcctgtaaacctagcactttgggaggc

SEQ ID NO: 256781 - DNA, 463 bp, Homo sapiens
tcagaacaaggattgaaatactggtctagaaataagaagttgaaagttaagcattggtatttaaaaatcagtctcaatcaagtagtaaatttgaatggcccagagcttaatatgagctgactgtatgctgatactgctcaaaagctaatgcaaatttaggccagatcatggaacacaaagctcccactgtactctgcactgtccactcattatgtatgtacttatttctgtcttgtttttaaaacatctaatgtgaggcttgtatacctttaacatagcaagtaattttaatttaaaaatatgtaggaaaaattaagaaacactaacatggagtaaattgttggggggacaaaatgaatgctgtgaaatgccatacatatgctggaagtggaccacaaattaagctctaaggtttaggaagaaaatgacaatcagtaaccaagacccagggtgtctgtaagta

SEQ ID NO: 256782 - DNA, 436 bp, Homo sapiens
gatatgctgttaagtaaaaaatgcaaatcaatatctatagtgttgtcctttccatgcaagaaagaagaggaaataagcatatatagaagtatctgcttatttgtataaaacctatacacaagtacacatgggaaggataaaccagaaactaatgaatttgattacctatcctgaaagaatgggggaatggaaatggaatagaaagggtaggagaaactggcacttctgtaagtacatcttttggtatagttctaacttcatacttgaaaaataactaactagacaactgggatgtgagatgggcccaaagctgaatagaaactataacaagtgagtcttaactgtattacaaatgaataacaaaaccaatggggagggtagcccacattactttagcaaacagtaattcgactatatcctcttaaagaataaagtc

SEQ ID NO: 256783 - DNA, 652 bp, Homo sapiens
cctatgacataattttctatggttgtatagcattttatgtggttgtactgtagtttaattagttgatctattattggtcatttaggccttttctaattcttgctgttacaaataacaccacggaatacatttttgtgaatatagtattgtccatgattatttccctggtaggttaatttcttttggggctgtgtgtgtgtgtgtgtgcgtgtgtgtattcagatagccttcataaacggttgtaccagtttacactccaactcacagtaaaaagaaccatccaatctcttttccaaaaaatataaaaatatacaaaatgtaagtcttctgtgtttcagtttcctaaaaatcttaacaaatgccacacattcatatggcacccactgaatgcctgccattgtgcctaggagacagaaatgagtgcatagaattgtaacttgtgcagtgtttccacttggagtagtcaatgccaagttgtccaacagtgtatgatgctacccttttctctgtatccttgctaatacttattagtttcagatattttcatttttgttaatcttggccaaagatacatatgacagaagtctttgttttccacgcccttaaggcattgggatagggtatggaaagggaggtaatccagatggacaac

SEQ ID NO: 256784 - DNA, 408 bp, Homo sapiens
tgagaatataaaggtgcagcacaagggatttcttttgtggtgatggaacagcttcgtatgttgattgtggtagaggttacatctatctatacatgggataaaaatgcatagaatggaggcagggcatggtggctcatgcctgtaatcccagcactttgggtggtcagctaaggcaggaggattacttgaggccaggagttcaagaccagcctgggtaacatagtgagacccccatctctattaaaaaaatacaaaaaaaaaaaagccagacatagtacctggctatgtagtcccagctacttggaaggctgaggtggaaggatcatctgaacccaggaggttgtggctgcagtgagctgtgattgcaccacagcactccagtctggatgacagagtgagactatgtct

SEQ ID NO: 256785 - DNA, 460 bp, Homo sapiens
ttctttgtgtgtgtgaaggaaggcaggtttatttgcaagatgggtttgagggaattaaggataaagtctgctgaaagtagcaccagcctctggattaaaagggatgtttggatgaagcttcaatctcaagaagaggcaagagaaaactaaagaaaaagagacaagaaggtagttgacaagctgtgaacctgcattgcattctagtgatgggacacgtggaaggggaagctgaagttgaagggtggatggtagcagccacagggagtgagatgggctcgtttctggagctgttgggagagaaaaagggagtcaaacgggaattcacacagggttgtgcattatatccaagtgtgtattcagatacaagcctttatctcaataccttccttacccccattccgcacatatctcataccaaagtacaaataaaaccattcccaattgttctaataaaaaaaat

SEQ ID NO: 256786 - DNA, 443 bp, Homo sapiens
atttacattatgatgcaatatgaaaataaaataaataccactctaacattttcaggacatatggcaattctccctgtgctgattttttttaaatgtatctctgcagtattaacatcctctaaatcattctctttgttttagagacaagaaggtagttgacaagctgtgaacctgcattgcattctagtgatgggacacgtggaaggggaagctgaagttgaagggtggatggtagcagccacagggagtgagatgggctcgtttctggagctgttgggagagaaaaagggagtcaaacgggaattcacacagggttgtgcattatatccaagtgtgtattcagatacaagcctttatctcaataccttccttacccccattccgcacatatctcataccaaagtacaaataaaaccattcccaattgttctaataaaaaaaat

SEQ ID NO: 256787 - DNA, 594 bp, Homo sapiens
cttagtattttaaaaacagaaaagtaagtaggaaagtattatttgtaaatgtcataaaaccagatggaggcatattctttactgataaagaaacaggactagaacacgcatgtggtatctccttttacttttgaggaaactgtggttaaagaacattctattctatttgatctaagagcaaagcaaatgatggataatcctgaaatggtaaaagtatttttgtcttaaaaattattcatttgggcaaagtcatttacaacaaaataaaaagtcatacagcacacctatggaagaattaaagaatacataaatgtgctggatacatttagcatcctccagtgagttgtatgtaaggagagtaaactaataaaccaaaatacatatcagatcaactagctatcacttttctaaaacttgtagaattctgaaaaatatttaaagatgggagaaacgaaactgtgctaagacaatgagattggcatagcacagtgaagttggcacaaactgtgatcctggcctgggtttacatgaaactctgctgtgtggccttaagaaaattacttagccagcctgtatcctggtttcttcaactgg

SEQ ID NO: 256788 - DNA, 737 bp, Homo sapiens
tttggtcctatgaacaaaagggagggatccaagagagaagtgaggcatctgggagacgctggggaactaaactactaacctgttgctcagccctgggctgggccatttaacaaatctgcaacttccccctgaattagccttctggattcatagaaatgagccctattttatggcttgctaaatgggaatctcttctggaagaattctaagaatcaagtcaatttatgacctaataacctagtttctactcaaagctacagggtaggaaacgtaagtgacctgaggccaagtgaagctgctttttgcccacttctgctaagatgacacaactttgtgaggaagtgctaagctgaaaaggataatctacagaccattggaaacccctaaagtcaggaaaaagaacaaacccaagatcagccttaaatttcaacagggatatgcgtttgctttaaaagcttttcttactcaatccttagactcccttcccctatatactcttcatttgaaagtaaaacacaataagaatatgttctgctggagtccaaacatttttcagcactgataacttattctagctaatttattagactagattcttaaaaatgtacttaaaaatggctcttcaagacaaggggcaagagttgtgatgccttgttctgagtctgtgtaaggtcactaaccaagttcagcatatttgtccgggagcccagtgattttatgcacgacttcctaaaaag

SEQ ID NO: 256789 - DNA, 409 bp, Homo sapiens
tattattattattgtatttgttggtgtttccatgcttgtactttttcatgcttgtcctatacctcacttttccaatcagagtttaggttttatttctgtttatcatccatacagcatagaatgcctacttcagtattttacagtaaaatgggggctcagtaaatacttaaaactgagactggtcctctcagagagtgaggctccaagctgaagtcttccttcatgttgtattctgtctcacttcttgttttatgggccctgcctgggatgcaggtcaggacaatgtaataggcatgccagggtccaggacagaaagaagaaggcagacactgtccttgacaagttcaggtgaggtgggtgcagtgagggcaagggcagacacgagaagatcaagaagcagtttcactgc

SEQ ID NO: 256790 - DNA, 1035 bp, Homo sapiens
cttcgctgactcctacggccagcggccccgccgggcagacggcaacagtcacgaggcgcggggcgggagccgcttcgagcgctcggagtcgcgggcgcacagcggcttctaccaggacgactccttggaggagtactacggtcagcgcagccgcagccgcgagcccctgaccgatgctgaccgcggctgggccttcagccccgcgcgccgcagacccgccgaggacgcgcacctgccgcggctggtgagccgcacgccaggcaccgcacccaaatacgaccactcgtacctgggcagcgcgcgggagcgccaggcgcggcccgagggcgccagccgcggtggcagcctggagacgccatccaagcggagcgcgcagctcggcccgcgcagcgcctcctactacgcttggtcgccgcccggcacctacaaggccggctcgtcgcaggacgaccaggaggacgcgtccgacgacgcgctgccgccctacagcgagctggagctgacccgcggcccgtcctaccgcggccgcgacctgccctaccacagcaactcggagaagaagaggaaaaaggagcccgccaagaaaaccgtgagactgcgtctgcctcccctcctccgaggggactgagcgggagcctccaggcagggcgagcagtgtcgctgtctgggggccggggaggtggcgaggcgggagggtccttgccggagaggccgcaggggcctgcctgggcgagttcgtccgcggatgctaggccgggggctttttcagcctcactctgtccaaggccagatgaaggaaggaagcaagggctgggagagttgaaaaacaggcagaaagttgaaggcgtgtatatggttttacagggagcattaggtatttaaccaactcagaagcctttagcatcagggatctcgggagccatcaccaccaccggcctttagtgggcttctgaggtctgtgtgcagaatcttcgatgcatccttctatgtgcattcctccccagccctgcttggggcgagggtttgtaacttgca

SEQ ID NO: 256791 - DNA, 239 bp, Homo sapiens
ctattttgtagatgaaagactttttctttagccaataagaaaatgtcaatttctttaaaagccccaataaattctttttcatttatattcagagtgcctattcctagaaaaaggaacacagtgagggatgttagccagagcttccaactacgtaggacatttgccacctgaaaccaagtttaatatggaacttccaatttcatgcctagtttgcccagttctccttcctctaatcctga

SEQ ID NO: 256792 - DNA, 635 bp, Homo sapiens
tatgtgatatgtggaaaactcactgcatctcagtgggccttctgggaggggccagagatgtggtattctgagctgtagatcctgactgtgatacggggctctgtagggaaatcctgtcagcctgtgcccgagttcaaagcctgaactccagtggaatggcgcatatttgagatttcagattcctgggaaacacgaacactcggcaaaggagaagttatgacaacctaactaaaaatggttagaattttatgtctttgtaagaaacttgatgtttccaagtgggttggcaatggtagacacaaggaacaaggactacacttttccataggagcttctaaagtgtgtgaactggcagagattaattatcatcaccagagtcacagctaccgtcctgaggctcgagtctacttttggaaatctaaagagaaccttgcataatgatccggtaccttctatttctaagtaagcaaagtacatataaagaagctgtctccatgccctattttaggatttgacaaggccctccatgtgtatgacaaacacatataaaataaaagatccagggctggatgcagggacagaggatgaattaaatgagtgaagtcaccgaagtctgacagtaaaagctctcatcc

SEQ ID NO: 256793 - DNA, 346 bp, Homo sapiens
cctccttcttctaattaaagaatagggacattctctttcctgctattgattggctgtggtacctcaattttggtccacatattaccatatgtctaaacaagtatgttttaatgtttgtttagggaggtttatttctgttactaaaatttattgggctttgtgcgtgggtttatttttactttaaaacatattttaagacaaagttttattttaagagtgtactggatgacagcttggttggtccatgggtcatttctgtccatgccagaagacatttctttctacctagatcactttcataaagaaataactgctatgacactgtaatacatttacgtacagatgc

SEQ ID NO: 256794 - DNA, 153 bp, Homo sapiens
accacactagtaagatggcactactgatagaaaatgataaggtcacaattattgtttaaaaaaaacctcttctggttcaactcaatttaaataacatctgtattcaactctagaaatataagaaggatgaaatcactgaagactgactgaact

SEQ ID NO: 256795 - DNA, 142 bp, Homo sapiens
caccgccacagccgcttttggggcccgcgacagtggggagttccggagggcaccggcgcccccacccctgccacctgctgagcctctggccaaggagaagccaggcacgccacccggcccgccgccccccgacaccaacagc

SEQ ID NO: 256796 - DNA, 483 bp, Homo sapiens
attaaagccaggcccctaccttcaggaacctcccccaaaaaagcagaacttacagctctcaccagagccctaaccctttccaaaggcaaacaagtcaacatttatacaaactccaaagatgcctatcacatccttcattcccacgctgccatctggcaaaagaggattccttactgccaaaggaaccctcatcactaacagctccccttatttaccagctacttcaggctgcacaccttccaaccaaagcaggacatcaaacaggttcaaataaaatctcaaaaagaagcacgaaagctgataaggcagcaaagaagctctccctttcttctccccctggctctctcctcctcattacccctacaatccaaccccagaattccccactaaaaaaagggctcactactacaacaaggaacctccttcgaaagcaactagataatcaaaaactcatcctccaccaaaaacaaaccaagaaaaaaa

SEQ ID NO: 256797 - DNA, 365 bp, Homo sapiens
ccccgcacattggaaggggggacatacacctatttctgctttaccattctgcctgtcagccattctgatcttcatgaagacacttggcctgctcattcctcagtggttatagtaccagctgcatttctggaagctcactgctggctacaaaatgaccttcaacctccaagtgatccaggcttttcctagcagcttccatcaatgtgcaggggttgaggaaatttgtcgaatagcgacattgaggatatgagtcaaagagagggggagatgatagattcatatcttgaagcatgtggaagtaatctggtttttgtttttgcttttttttctgaagcagatccaggtgtctaaatgtaaccattgcc

SEQ ID NO: 256798 - DNA, 467 bp, Homo sapiens
cacatgtgggaagcaggaaccagcaacgcccctgctgtgtagacgggaaacaggggctgcagagttgaggtgaccgggcagatgtcgaggagctgctcagggcagcgcccgcactcgagtctgggcctcctgactccaggagtgtgctccggcaggacagaggcctccgggtggatgcctcggcaggaagaagacacacgccaggcccttccacccgggacttgcacctgaaccccggccaggactctctccacggccaagctccctccggccgtgtgggctccagcaaagctgggcggcttcccgttggcagctcccgcaagaaccgtgaaaggcggttagtcgccggccgccccgcctctggctcgcagagcaaagactgcactggtgttgacacaaacccttgcgctctcaaccgggagtaggataatatttatttattttttgcattaaaaaaatcagcttgg

SEQ ID NO: 256799 - DNA, 624 bp, Homo sapiens
ccccctacgttattctctttggatccatctctccctgcacttcttgtgatgaggggttctaattctatagagggcagagcagaatgggtgacatggggtctctttgattcctgctcttagtattgtctctatgttatgcttgactaaagagaaccaaaatagatctgggttatttgtccagcccaaggctgagtagctgtcaaactacctcaagacaataacccaaaggagcatcaaacctgagctttgtcagcacctgtacctgccaacaaccaagacaaaagacaccatcaatgcatattaacagagggcagggtaaggccatcaaatcactggattccctggggcctatacaaatgtacaatacaaatcagtaacaaaaaacaggctgatgtgagaatgtagtgaacgtggcagaggcatcaccaaggttccctctcagaggacctctttaacatacacaagttttcaaagacattttttaaagttttaagtaccatatttagttagaagatatatctaattttgcttcccagagttttttcccctaagggatcaatacacatgggataagaatctgctatgtactgtggcagaatacaaaacaggaacacaggccaggcg

SEQ ID NO: 256800 - DNA, 123 bp, Homo sapiens
ttgcttcgggtaacaactagagtagtatttagctaatttgacttttcagaagataagtaaaatgaaataatctttaatcagggtaatatggtaagaacctgtctctacaaaaaaaaaaattaa

SEQ ID NO: 256801 - DNA, 457 bp, Homo sapiens
aacccagatctgctcgatgcccatggcaaagagagcccattacagatggtcaaaaacctcccctcaggcacctcagagcctgcagcacccacccgccaactctaagctgctatttggtgctcagagccccagccttgcccacagaagcatcttttaagcagatagaggaggcctgtccttcctccttgccaccacactgcaccactgtgacgatttctgccatgcccccaaggaacagaacgtagtacagcaagcctgggcagagagtcagaaacacatggcttgggatccccgctccatcccagctctgggattacagggccagtggctccatctccttgggtcacagctttctcttctgtaatagttagcagaacaatatggcacccacctcacagagtagctgagactacagaaatgtataatttatacccccatatgaaggcattcttttaaa

SEQ ID NO: 256802 - DNA, 430 bp, Homo sapiens
aacccagatctgctcgatgcccatggcaaagagagcccattacagatggtcaaaaacctcccctcaggcacctcagagcctgcagcacccacccgccaactctaagctgctatttggtgctcagagccccagccttgcccacagaagcatcttttaagcagatagaggaggcctgtccttcctccttgccaccacactgcaccactgtgacgatttctgccatgcccccaaggaacagaacgtagtacagcaagcctgggcagagagtcagaaacacatggcttgggatccccgctccatcccagctctgggattacagggccagtggctccatctccttgggtcacagctttctcttctgtaatagttagcagaacaatatggcacccacctcacagagtagctgaggggattaaatgacactgatgta

SEQ ID NO: 256803 - DNA, 1050 bp, Homo sapiens
ccacagcacttcagtgttttggagctctcagcatctcaaatgtccaatgggatcaattcgaagttttctatttttaaaggaaaaaacaacaacgacgacaagaagaaacaacaaagcttgttatgaacaacaaaatatcacatggatgactttcacagggatcttggattcccagcctcagagtctatcaggaaagcttttgacagggtttcagaatatactgtgcttagtaaaatgaatttaatctatccatccagtaaattacataacctcttttgttccaagtgcagtttacttacagagacttgctacaccctccagtctcctctcactgaatccggtcaaaccctcctctactgtttaaaaggctgctagtccatcaacaaagattattgaacatccaggggcacattctcatgccagcaaagaatgcatcttcagcgttgtgggttgaaattgtggcccctcaaatgatactcctgtgtcttaatcccttgaacctgtgactgtgaccttatttggacaaataagatccaaattgaattaagctaaggagattgaattaagctaaggagctcagaaatcatcctggacttaacgtgggctctaaatccagtggcagatgtccttataagaaaaaggcagagggagagttcagacactgagacacacaggtcagacagccatgtagacatggaggcagagattaggattatgcagccttcagccaaggaatgtctggaattactgggaactgaaagagacaaggaaggattctcccttgaaggacttcagggagaagaatgtggtgcagaaacaccttgaattcacactttggtctccaaaactgtgagaaaagaaatttctgttgtttttaagccacagatttgttacatcagctctagggaaggaaagccatcaggtaccaagttcaacacctcatgcttggagacatgtctgagatttgactctcctgggtttattggaatcttttttgttttgaaaatcaactctccgactccaaccatcatcaccctaccatgccctgcc

SEQ ID NO: 256804 - DNA, 160 bp, Homo sapiens
tttttttctgtctgacatacccaagcctccttttttcctctttcctctataaacacctactcattgttgagatttcagttcaaactatgctcagtaagttttctaagcaactccccaagtttaggtcagggttccttattaaacctttatacagaactac

SEQ ID NO: 256805 - DNA, 435 bp, Homo sapiens
gcttatgccaattatcttgatttggtcattacacgtcatatatgtaacaaaatatactctatctcataaatatgtccaatcatgtcatgtcagttaaaaaatttttaagaagtaatgaagacctgctccctcaacatctatgaaagccattcaaaacatatctttaagataaatatgaccaatagatcttaaaagtgtatacctgatttcagtacctactcattttgagggtaagactaaagaaaagaatcaggatttttattgtttttttttgtttttgtttttgtttttgtttttcttagagatcttcttgactgttacacaaattgctgtacctcttccctaatagccttactaccctagtgtggttatgaataggggagtgcattgtcaaatattgtcacattcttcccttagaataattgatttctattc

SEQ ID NO: 256806 - DNA, 707 bp, Homo sapiens
aacggaaattataaaactttagtgacatttaaaaataccttcatagaccaggcatggtggctcacatctgtaatcccaacactttgggaggccaaggcgggcggatcacttgctcctgggagtttcagaccagcctaggcaacataatgaaacttctcctcttcaaaaaatacaaaaaattagctgggcatggtggagtgcacctgcagtgttagccactttggaggccgaagtgggaggatcgcttaagccccagaggttgaggctgcagtgagctgagatcgtgccactgcactccagcctgggcaacagagtgagaccttgtctcaaaaaaatagcaataataacagagagctatgtcatgttcatgtattttaaacaatataataatatcataaagatataaattccccccaaattgatctataaatttgtttcttttcctatcagaatcacagcagggtttttcatgaaacttaagattctaaaatttatatggagaagtaaaaagccaagaatagccagaaaaaggaagagcagggcagggaactgactctatgccaggatgtattgtaaatctataatagttaagatgatgtggtattgatgtaaggatagaaaaattaactgatgagacaatatatagcctataagtcaggcctttatgcatatgttatgcatataaaaatttggtatatgatggaggt

SEQ ID NO: 256807 - DNA, 481 bp, Homo sapiens
  misc_feature (10)..(10): n is a, c, g, or t
  misc_feature (31)..(31): n is a, c, g, or t
aaaaaagagnaaaagaaaaaaaaaaaagaangagagaaggaagatgacaaaagaaaagagaagagctaggggtttcgctgctgaattctggactaacagtcggtgcctggggagaaccaaaggactgcataccacactcaagggggcaaagaaagattcatctccatgccaggagcttgaccctggagacagaaccaaatccctctctatgggactggaataacacaccatccaaactctgttcccgtggataagtagaaggcaagcatgccctgtctacttcatcaaagccagttctgctgggcagcaggagagagaagtggaagagggggcggagtttactttagtagcctttaaaaattaaagattattagatgtattaaattattcaaaagtattacaaattaaaaataattcagaattaaaaatctgtatttgtaatgagctttaaatattaaaaaccacagacctccaaatgtca

SEQ ID NO: 256808 - DNA, 487 bp, Homo sapiens
  misc_feature (49)..(49): n is a, c, g, or t
aagatggaatatatgaaataaaaaaaattaaagaaaaatgggagtggangagtgggtatctggggtaaagactgagggtttcgctgctgaattctggactaacagtcggtgcctggggagaaccaaaggactgcataccacactcaagggggcaaagaaagattcatctccatgccaggagcttgaccctggagacagaaccaaatccctctctatgggactggaataacacaccatccaaactctgttcccgtggataagtagaaggcaagcatgccctgtctacttcatcaaagccagttctgctgggcagcaggagagagaagtggaagagggggcggagtttactttagtagcctttaaaaattaaagattattagatgtattaaattattcaaaagtattacaaattaaaaataattcagaattaaaaatctgtatttgtaatgagctttaaatattaaaaaccacagacctccaaatgtca

SEQ ID NO: 256809 - DNA, 390 bp, Homo sapiens
ggagggatggggtgggcccctggaaaggtgaaggccccagatcggaggcagaggcttctcagagcgtgactttcagaagtttgctgctgggtgatacctggtcgtcactttgtggctgtagatactgggtcctcaatattcacatgtaagacagacaccacattccttacgtccctcttatcacctagcctagctccaaatacctacacacttgacttctctgaaagaaaaaatgttcaaggaggattctgtaacctgttgtttccctaatattttgcttctgtatggatgttccaacagatttcacccggtggcatttccactcatctgtatgggagagccctctgtatatgcgggactccccttcctcttccttcaattctgtatttt

SEQ ID NO: 256810 - DNA, 462 bp, Homo sapiens
tactttctgagctggagaaggcaggagcctgaggtatagtggctgggaagagggggtggtggctggtcttcctctgctggaagctcaggaatgctgggccaagtttccaggcctgcccgtcttaggggctgggagatatgtgctgtgttgtggacgctggttcaggggatcagtctctctctgccggtaaggagggactcacagcagcagaagcctgttctttccacagcccaagacactatctttcgtatatgttttgtgaagatttttccctgcttctctattttctgatttttaaaagtgaatcttataagcatttttctttatttaaatacatacaaattatacatttaaaatagaacatggcatgatggaaaagtataaagatttgctaatttatgtctatactcttggacttgtatgacatttctaaatctttataaatatatgttgcaatgaaca

SEQ ID NO: 256811 - DNA, 426 bp, Homo sapiens
tcacaaactttttaacttactctcacagggctggaaaaccccagtgaaggcttttaaaactcatcagacatagaaaaaaagaagcagctttaattgtaggatctcactgacacaaacataaggaaattctgagttatagatacctcacattaagctttttccactgacattgtaacttctgtcaacattcaaagaaaattcaaccctggtcaaaggtgacagttgacaatcctggaagctaacatcctctgtttatttgaacaagtttatactctgcacagggaattgaagttcttcttgtctgtgacttgatctcccaaagttaaagcactacgctttagggttgtgaattctgtttccaagacttaacttcacaatccactcccaaggaaaagtgctgagagaaagtaagcatcataaatgaaa

SEQ ID NO: 256812 - DNA, 444 bp, Homo sapiens
  misc_feature (2)..(2): n is a, c, g, or t
gntcacgcccacaggactggaccctcgcgccgcccgcgactgtggcgtcctggagttgatgggagctgcagcaccaagccgggccagcctccctcccagccagtgacaacaccgcagcacctggaccccgcccacccgcttgagtcctctgcctggggccccagggatgcgcctcctcctgaaagtcccctccatcctcccttagaggaacaggctgccgccgcgcccccatcagcctccattgccctgaccttatttccacctgatggtgccagaggctgcttcccagctggtatcctgagatcctcgttcccttggtggcttggttgtttaagcctccattattgattgggggcggtggtctgggtgtgattcctgtgggggaaaccagcccgaggtgccttggctcaggcttgcctgcctgagtccttgtggcgtaccgtc

SEQ ID NO: 256813 - DNA, 301 bp, Homo sapiens
cggcttgtcatgggctgctggctcagctggggctgatggcctttcctcctcagcaccctggttgaacccgcttcctcttctttcccagactgtggcgtcctggagttgatgggagctgcagcaccaagccgggccagcctccctcccagccagtgacaacaccgcagcacctggaccccgcccacccgcttgagtcctctgcctggggccccagggatgcgcctcctcctgaaagtcccctccatcctcccttagaggaacaggctgccgccgcgcccccatcagcctccattgccctgac

SEQ ID NO: 256814 - DNA, 590 bp, Homo sapiens
taaggaagactcgatttgttcaggtagggggtaactatcaagaagaatatataagaaaagtgagccaaaatgtagaaatactgtgagccattatttggtcttttgtccattattctgtctcctctctttctgggattccgatagctagataggtagatatgcttaatgatatcccaaaggttgctgaggttctgttcatttatcttcatttattttgtttctgttctttagaatggataatttcaattgatttatctatatgttttctattctttttttctacctgctcaaaagtgctgtagaaaccttctagagatttttttatttcagtattatacttgtacatttcagctccagaatttgtttcctttatatcatttctgccttctttatttggtgagacattggtttcatatattcctttggttctttgtctatggctttaaacatatttaagacagttgatttaatctctttgtctagtaaatctagtgtctaggattcctcagggacagttcacattcatttctttttttccctgtaaatgggccacactttattattttttttggaagtctaatatctttttg

SEQ ID NO: 256815 - DNA, 434 bp, Homo sapiens
agagatgtgcagcctgttcaggaacgaacaccaggtggaacaaaagcggggcagaacaagagcatgtgcatcctcttaccaccatgacattaaggccatgtctgcacccggaccaagatgggaagggagcacagagctgtgacttcagggaataggaaggatggcaacagacatggggttctctatgactttccattttatcttccattttcacagtaagttttaaaactctacgtctccagattcagcatgagaaggagaagttccttgaatcctctgggcactggggacagccagtccacccaccctgggtaacaaagggatgtggtcagtcctcacgtgaggagggactgagtgtcctccatggacctgcgacgtcccgtctgtgaggccctcgctactttctgcaaatttctacatggatcagagacagg

SEQ ID NO: 256816 - DNA, 388 bp, Homo sapiens
atcatgcttggttttacagttttatccaggcattttttttcccctaaatattaaaactgccttgattagatgggtgagtcttctgcatttgaatatttgtttgagatggaatttagttgcagtttggctgtgagatttggagaattggctgggtgcagtggctcatgcctataatcccagcactttgggaagccaaggtgggtggattgcttgagtccaggggttcaaaaccagcctaaacaacatgacaaaaccctgactgtacaaaaattagctgggcatgggggacatgtagtcttagatgttcaggaggttgaggctgtaagtgagccaggattgtgtcactgcactccatcctgggcaacagagcaagaccctgtctcacaaa

SEQ ID NO: 256817 - DNA, 407 bp, Homo sapiens
tgagcatcagttcagttagaggaaagagctttaagggccccaaggtgaaaagaagcatggtgcattctctttgccagtggttctcaaactgaacattagaatcttctggaggaggctgggcgcggtctctcaagcctgtaatcccagcactttgggaggccgaggtgggtggatcacttgaggtcaggagtttgagaccaggctggccaacatggtaaaccctgtttctactaaaaatacaaaaaaaagttagccaggcatggtggtgcaggcctgtaatcccagctattcaggaggctgaggcacgagaatcacttgaacctgggaggctgaggttgcagtgagccggaatcatgccacttccctccagcctgggcgacagagcaagactctgtctcaatagaaaa

SEQ ID NO: 256818 - DNA, 599 bp, Homo sapiens
gggagttctgacccgctccctttctgacctgggccagttcagccatccttaggcaacttggtggccccccgctcccaggaggacatcatattgatgccaaacttagtgcgggcacccggtcggcatagggaccagctgttctaaaggtctcttccaacctttgcctttttctttgctgcggccaatttgctctgttgagtttcttctgccattgcggggtggggagggaggcggggttggggccacgtgagcaaaatcccagtgagcactgatgaacacctccacttgcctaccaggcagctgtgtgactgagcccgaggaggcacaactagggcccccatagaatgcagaacaggggcgtggccttaatgctccaagcccattggtcaatgacaaagatgaaagggaaagggggtgtggccaggcagcagtatgtccagagggacctgtggctcacaaggaaagctgtccatgcaactgctgtccccgcctactctgaggggaggggccgccccctctgggagaggggaggggccggcttttgctttaaaagctttaaaactttaaaaaatatatgtgtgtatactttaaatatatgt

SEQ ID NO: 256819 - DNA, 745 bp, Homo sapiens
tggattttgggattgtggctgggcatggtagctcacgtctgtaatcccagcactttgggaggccaaggcgggtggatcacctgaggtcaggagtttgagaccagcctggccaacatggcgaaaccccatctctactacaaatacaaaaattagccaggcatggtgcatgcgcctgtaatcccagctacttgggaggctgagacaggagaatcgcttgaacttgggaagcagaggttgcagtgagccaaaattggccattgcactccagcctgggcaacagagcgagactaagtctcaaaaaaaaaaaaaaaaggattttaggattttttgttctgtgaaaaatgatagtattttgatgggaattacactggacttgtagattgcttttggcagtatggtcattttcacaatattgattctacccatccatgagcatgggatgtgtttccatttgtttgtgtcatctatgatttctttcagcagtgttttgtagttttccttgtagcagtctttcacctccttggttaggtatattcctgagtattttattttatttttttgcagctgttgtaaaaggggttgagttcttgatttgaatctcagcttggtcattgttggtgtatagcagtgctactgtttgtgtacattgattttgtatcctgaaactctactgaattcattcatcagacctaggagctttttggatgagtctttagggttttctaggtgtacaatcatatcatca

SEQ ID NO: 256820 - DNA, 605 bp, Homo sapiens
cctctcctttcattctctctccaactcagtgaggctttccccacaaactccaccaaattgtttctgataagggtcaccaaagactttcattttgctaaactgatgggtaggtcttggttctctcctcacttgctatattagtagcatgttacacaaaaggtcactccttcctttgacacctcacatccaaacagctagagaatccttttgactgtaccttaacaatatcctaaaaatttctcaaggcctccactgctacctccccttcatctctgccaccctcacctctcaccaggatcattgcattatcctcccagctggcttcctgtttctgacctagccactccaacccagtttcctctcatcacagcagtcagaatgatcctctttaaacctaagttagatcactcctttgctcaaagctttccaagagctcctcaattcactcaagcaaaagccaaagtgcttatgtcgtgtaagactctctaggaggtggctctccatgacctttctgacttcagggccaattctttgccttcctcctcctactacagacaaacttgcctccctgcagatcctcaaacagacctgggtgccactgcacc

SEQ ID NO: 256821 - DNA, 654 bp, Homo sapiens
ttggcaaaatgtgtcctgcatttcccacactttctgagctggagcacaggttctggagttagaccacttggctcaaaccttggcctcgttcatggctagttgcctgtccctggacaagttaattccctggtctcatttttcctatctgtaaaatggagtatgcaataatagtactcttaacctcataggttgtggaagaattcacagacacaatggaaataaaaggcctggctcattgcctggcatgtagtaaggacctgataaatgtcagccatcatattattactacatggtattactgcctccccttagatgggagccaagtcttgctcaccagctcattgtctgatgttagtaggcattcaataaaagtatcatgaatgaataagaacatttgagaaagacagcattccagcctttccaggcaatactcgtgtgtgtgtgtgtgtgtgtgtgtgagagagagagagagagagagagagagaaagagaaagaaagaaaagaaagaaagaaagaaagaaaacaaagaaaggaaagaaagaaaaaaaaagaaagaaagaaggaaagaaagaaagagggagggagggagagagggagagagggaaggaaggaaggagagagagagagagacagaaagaaagaaagaaagaaaga

SEQ ID NO: 256822 - DNA, 428 bp, Homo sapiens
agagggggtgtgacccggcctgctgtctgtcatgcactcagcccatgcctctgcatgcatcctctcatgtaatattaggagtgtgggggagtctggagggaggaaagctttcctatgaggatagtggaaggaaaatagtacaaagtggctgggcttggtggctcacgcctgtaatcccagcactttgggaggccgaggcggccagatcacctgaggtcaggagtttgagaccagcctggccaacatggcgaaaccccatctttactaaaaatacaaaaattagccaggtgtggtggcacaagcctgcagtcctagctactcgggaggctgaggcaagagaatcacttgaacccaggatggggaagttgcagtaagccaagattgtgccactgtactccagcctgggtgacagagcgagactccatctc

SEQ ID NO: 256823 - DNA, 362 bp, Homo sapiens
caacaagagaaccccagaacatcctgtgccctacgggacaatcccagagcctcctctcccagcagaaccatccaacaagagaaccccagaacatcctgtgcccaacgggacgatcccagagcctcctctcctaacagaaccacccaacaagagaaccccagaacatcctgtgcccgacgggacaatcccagagcctcctctcgcaacagaaccatccagcgagacaaccccagaacatcctgtgcccagcgggacaatcccagagcctcctctcctaacagaaccatccaacaagagaacctcagaacatcctgtacccgacaggacaatcccaggacctcctctcccaatagagccacacg

SEQ ID NO: 256824 - DNA, 407 bp, Homo sapiens
gctgggtctaatgcagtcatctgagccctttataagggaggactgaacccccctgtgattacgctcccctgtgggagattccccagcactggctgtgcacacccagggagcctcacggcccagacctgggcagcacgggtaggagctgagagcatcctcacggcagcaggcagaacaaacaagtgggcctggggctcacaaccctgaggcattgttgaattctgccaccaactcgaatcggatcgaagccagacccttctcaggtggaggcaacgaccgcacagccagacccatcctggaggtccctcgtgggactctgagcaggaggcagtcacttggcctagcagaacttctgacctgtgagctggtgtttgttttaaataccccaaattggtgagaattcgttc

SEQ ID NO: 256825 - DNA, 425 bp, Homo sapiens
gtttaatgaatgtagggccatcaaaatcctgatgagctatatagaatattttgaatgacccagggtgatatacctgactgagttggaagatttagtcttaattaagaattagtttcaatttagtcagatttttatctgatacgatgccctcataggggagtttgttttttagacatcatttgcaagaaaattgggtgcaagatctcacccacagattttcctatgataggccccacaatgcagaagcaacttgtataagagggtctgttctctctgtgtgcgtccacacaattggattgaattgttaagatgaaatgggattcggccgggcgcagtggctcacgcctgtaatcccaggtaatcccagcactttgggaggcggaggcaggtggatcacgaggtcaggagatcgagaccatcctggc

SEQ ID NO: 256826 - DNA, 523 bp, Homo sapiens
cactaaggtctcaggtttatatgggcacataattgggggcatggcatgccagatgggtcttggaaaatgcaacatttgggtacaaaaacaggagggcctgttctcacttagatctgcgagcacaggcctgaagatgaagccctaacaagggaccctattattctctaccaagcacttccttgtcccctcccgtatcattttcccctctgaagaggcacatctaatcgccgttagaatatacatgaccactggtattagctacttcctgccaatagggggcattgttttgagaaaaacagcagtcagattcgtcccagatgtctacctaagggttcctggcaaaggggagtcattgtccgagacctcagttgcttgcctttttggaatttgatggcctctaggtgtgagaaagaaaaaaaacttccataaggttagatacgcaggggtaaaacatgtattatactagtaaagaatttagtgccaaagatttcagaaataaaaagtgaaatatactaattattct

SEQ ID NO: 256827 - DNA, 402 bp, Homo sapiens
ttgtataatcacttaacagcaatataactaatagaggaaacatcaaaattattttcatcttgtgggtgaaaagcctcttgctgtggttctagaccttcagaaggatgcttgttaaaggagaatgaacttggaaggtggcttacttttttcaagtgggaaggttgaaactaaagaaggttgcaagtgtctgccagcgcatggagccccgggaagtgctttggagtgcccttgcagaggatgaaggtggtccgatgaaggaatcctgcctgagagtccttaccccatcagggtggcatctggttcacgtgggatgctggacctgacttcctgtgccatcacaaccagatgctcctttttccttgaggacctggccacccagaggattccctggtggttctcaca

SEQ ID NO: 256828 - DNA, 444 bp, Homo sapiens
atttatagctgaagggtttttttttttccttcttattgattgttcttgctttttcacacggctccttaaggtggtgaatttgtaaccgaaaggcccaggtgagatgtgcaaatatcactggattggaggagctcacttggaaagccagtattcctcctgagctaatgaaaagaaaggctgtcgtcttatgccaaaagcaataccaaccttgttcacgggctggtaagtttcaaatccaaggaccacggatttcaactccaccctcattgcgtccctcagatctgatatttgccacttgatttctgcttttcaaacgccttttctgcctgtgttacctaaattacacagtaaaggatattggcaagtgtttagccaaatgccccaccctgaggaaataatttttctgcccatatctcccaataaagatgtctatgcctttatagc

SEQ ID NO: 256829 - DNA, 335 bp, Homo sapiens
ctgatttggaatttgaaattatagtgttacatgtatacctatcaaattaaaattaaggaaatacaatagcaatatatagaatgaatgtagtaacagaaattaactctttactgcatcattgaacttattgttagttacaggtttaaaagaagttcatttaacatccagtgtgtctaattcttctggaagtggtgtagtaccattgttcttctggcatttttaaatattaaacctttttggatagatggaagccttatacaaaatctactttattttagcaaggattctctgtccttttgtatagttgtaccttactgttaactatacatgatcaa

SEQ ID NO: 256830 - DNA, 550 bp, Homo sapiens
gctactcccagctgtttttaggtggtggggaaatgggtgatttttatgttattttctcctctatacttatctataatttcaaattttctctttacatattacaagtgtagtttcaacaaggaaaaaaaagtatcatgattgggccgtttagtaaagatcacggagatgctggaggcaggtgagagaccatggctgagggggtccagcaaagaccagaacaggcaaagtgctgcccttttctaatcaaggtaataaatcaagatgcaaaagcctaggggaggtctggtcatgagacgctcagctgagagccgagtttgggaaggcaagggcttcagaagcctcaccttggtggtggcacacctgtcttcctggctccttcctctgccaaactcaccagccctgttgccaggaggaaccttggctccacatgtcctatttcccagcccagctcttccctgtcatccagcagagggcttgtttctgatcttgacatttgcagcaaaaggagaaatgttttcattcctaattgagctgtttacccagagagcct

SEQ ID NO: 256831 - DNA, 275 bp, Homo sapiens
ggtctcagacacttcagtgatgaaggcttgggtcatattactagtagaagcagcagctgggggtgaggggaatttagaaagtatagtagaggagacaatggacaccagctgcagtcctgcgagctgtcgtagtgatgcagttgtagttcattccacaaacctgtcattccaccggatccctggaggagctgctcctggaacatacatggaggatccatgcctggcaaggagtggactgtggcagacaccaagatgtgctactttacccaccttca

SEQ ID NO: 256832 - DNA, 193 bp, Homo sapiens
ccggccgtagcgcgctcctgcctggccagccgcctactccgcccgccccgctccactcggcccagctggcgcgaaggaaactttcctgcagccgcccggcgacaccgcgactccgccgcttcgcaaccctggccctgggccgctcaggctccggagcctttgggatggcagcgcccagcggcccggcccgcgc

SEQ ID NO: 256833 - DNA, 478 bp, Homo sapiens
aacagaggcgccaaatcctccagggtgcttctctgaccccatccacaccctcctccactgcaagtgaggggtaagagcctttcctccgtgtttgatgagcatcttgcatgcatttttatcacacccctaccacactgtatggataatttctgtttatgcatgtctttcctactggactgaacttgaatccaaaaactgcatcttagtccagaatcatattttcgagacaacatttagtagagtgctgcatatttagtaggtactcaaagtttactgaactgtattatccactaataagtataatatgaaaaacatctgatttcacagctgtctgtgaagtggggatgagtaaaacatgggatttgggctgatcctagcgcaagtctcaacagaagtgcaaagcatagactgtgcataaagtgttatgtccaattttgaagtcaggttttaaatgacctgtaactctgcaaaagagggt

SEQ ID NO: 256834 - DNA, 506 bp, Homo sapiens
atacatacttagtggtaactatggttgcagagaaagagaaaacttaaaacaatatgaacatatgtggtcatatagactgaaaacccaccgtgtcataaaaccccaggacacagaacgcatcagcgtagacagcagctgtacagacaatgctggggcggttgtggagtgggattagaagacaggaggcgccatcgagtcagctccaaggccattagccttgtgacgccagcaaaatgtgtgagtggggagcctctacgttctctcctgtgaaatggggatgacagtacttccttgtagggttgtggtaacgaagttattcagcacagagcttggcatgtggtcataacaaggagtggcggataatgataatatggtaacagtaggcatcattgtgagacgggacagagactcaatgtgaaaagtatagaaagggctcttacaaatctccaagcacataaaagtccctaaaagacaaatggcgaagggttcacagttcacagaaacgg

SEQ ID NO: 256835 - DNA, 2536 bp, Homo sapiens
  misc_feature (154)..(154): n is a, c, g, or t
  misc_feature (298)..(298): n is a, c, g, or t
  misc_feature (852)..(852): n is a, c, g, or t
  misc_feature (1067)..(1067): n is a, c, g, or t
  misc_feature (1076)..(1076): n is a, c, g, or t
  misc_feature (1093)..(1093): n is a, c, g, or t
  misc_feature (1099)..(1099): n is a, c, g, or t
  misc_feature (1132)..(1132): n is a, c, g, or t
  misc_feature (1149)..(1149): n is a, c, g, or t
  misc_feature (1152)..(1152): n is a, c, g, or t
  misc_feature (1157)..(1157): n is a, c, g, or t
  misc_feature (1160)..(1160): n is a, c, g, or t
  misc_feature (1168)..(1168): n is a, c, g, or t
  misc_feature (1192)..(1192): n is a, c, g, or t
  misc_feature (1293)..(1293): n is a, c, g, or t
  misc_feature (1364)..(1364): n is a, c, g, or t
  misc_feature (1816)..(1816): n is a, c, g, or t
  misc_feature (1834)..(1834): n is a, c, g, or t
  misc_feature (1836)..(1837): n is a, c, g, or t
  misc_feature (1923)..(1923): n is a, c, g, or t
  misc_feature (1938)..(1938): n is a, c, g, or t
  misc_feature (1955)..(1956): n is a, c, g, or t
  misc_feature (1984)..(1984): n is a, c, g, or t
  misc_feature (1986)..(1986): n is a, c, g, or t
tactcactataaggctcgagcggccgcccgggcaggtgtttccttaaagtgtgtatcaggatctcttttcataaaaatagtattagtcactaacatgttttgagtgcctgtgtgcgccaagcacagtgctaagccctcttttaaatgcataatntcatttaattcccacaactcctagtagggatactgtgataatcgccattctacagatgaggaatttgagggtctgaaagcttcagtaacgtgtccaaagttacacagtggggtaattggtggagacgggaaatgggccgggtgntctggccccacagtctgtgctcttaaccctggtcctttacgtgcatgcagaagtcttgacacactcctgtcttctttcatggacatatgtgaattcttcattaaaccacatatgtgtgaaggagaatgtggggaaggctggtttgtgctaagaactcttctaagtgctggaatgaagtgcacagaagagacccgttccttccattagggagcttaaattctaataaggggattaagaaaataaatacatttttggattcatgatgatgaatccaaaaataaaagagaaagagccaaacatggtggctcacgcctataatcccagcactttgggtggccaaggcagatggatcacttgaggtcagaagttcgagaccagcctggccaagatggtgaaaccccatctctactaaacatacaaaaattagctgggtttggtggccggtgcctgtggtctcagctacttgggaggctgaggcaggagaatctcttgaacctgggaggtggaggttgcagctagctgaggtcgcaccactgcactccagcctgggtganagagcaagaccccatctcaaaaaaaacaagcaaaaaaaaataaaataaaaataaagcagtgaaggagattagatttttaaacggttggtcaagaaaggcctcactgagagggcgacatttgggcaaacacctgaaaggaagggaggagggaggcatttgggtgtcaggcgggaggactttccaggcacagggaccagccgtgcagagaccccgangtgaggcanggtgtagggtgcgtgangaacantgaaccacctactgtgtgtggtgggggctggangacatggatgggcggangangtcangancaaccaancagggccatgcaggtgcctgcgangcacatgtcctcttttcatcctcacggacatcatcacttgtaaatgcttgatcttttccaggcgtttcacacaattcttacttggcagtattatggagaanattgctttgtggaatgactcatgagtaggcttaatatgtcacagtgcaggcttgcccattcattcaagaantgcttagagtcgctgctctgtgttgggcagtgtactagattctgagactacaaacaggattaagcaaatatgccctcttaaggagcttactggttggagggtgaggggataagggggtgtctaagcaaatcgttccaatgaaaactcttggctcttcagattccacctcagctgtcctggcctctctgctgctttgcatttatagtgctgtatgctcattatttccttacatgtctgtctccttctagacggtgaaatccataaggatagagttcagctcttagttattttcatattttccagtgcccagcacagtgtactggttgcacaacaggtgtttaaaaacattccttggcttgatttgaatggagacctgtgcgaagcactgtgtatccacagtaaaggagcaacactaacttgttgtgagggagaactggaggagaggcggtganatttgaactgtttggaangnncctgcaggagttgccagcagaggaggctgctggggttgctgagggtgcagatgtggccttgtcaaaggataccatgtgcttggggnacgtcaaggccagantcagcatgcctggagcnnacgtgtcccggggtcaatgacagatgancntctgcctcgagggaggtagaggctgattagttctaataatgtagacacaaacttgcacgagtgctacatattttttgggaacggatagtagaatgcatgtttaaaataattaggagacagagtgtctggccacttctgttggtgtgaacagtcctaagtgtctccccaaccgccgccttcagaggctggataggtggtgggccatgaagtgaaatgtggaatagagtagcaagaagttttccggaggagaatagtgagtttaattcggggcatgtgaaattggaggaggctacagactgggaagcacctcagaggggtatgtgcatgcctgaggtttaagagtaaaaatatgtagagactaaggaaaccatcagaaaagagctgacataaagatataagagacaggcccagtggctcccgcctgtggtctcagctactagctactcgggagcctgagacaggaggatctcttgagcccaaatttgagtctacagtgagctatgattgcaccactgtgctcctgccagggtgacagagcgagaccctctga

SEQ ID NO: 256836 - DNA, 910 bp, Homo sapiens
aattcaaggtacagataaagaaggtggagcaaaaggagaacaacaacccattagttccccttgggatgtagtttttggaacacaggttcagaggtccaaagaggtgacattttatggatagccatggcagggactcatcagatatgggcactcctgctggactctggcaaactgccaaagaaaaatgagttaacaaaaggaacctgccttaggtttgctggaagtggaaatgaagagaatcgaaacaatgcctatcctcacaaggcaggttttgcccaaccttcaggcctttccttggcctctgaagatccctggagctgcttgtttgtagcagatagtgagagcagtacagtgagaaccgtttcactgaaagatggagcagtgaagcacctcgtaggaggagaaagagaccccatgaatttatttgcttttggtgatgttgatggagtaggaatcaatgcaaagcttcaacacccccttggagtaacatgggacaaaaaaaggaatttactttatgttgcagactcctacaatcacaagattaaagttgtggatccaaaaacaaaaaactgtacaacattagcaggaactggagacacaaataatgttaccagttccagttttacagagtcaacttttaatgaaccaggaggcttgtgtattggagagaatggagaattattatatgtagcagacaccaataatcatcaaattaaagtgatggatttagaaactaaaatggtatctgtgctccccatcttcagatctgaaaatgctgtggtagatggcccgttcctagtagaaaaacagaagacattacccaaactacctaaatctgctccaagcattaggctttcccccgtgactgcgtgtgctggccagactcttcagttcaaactcagattagacc

SEQ ID NO: 256837 - DNA, 622 bp, Homo sapiens
gtggatttaaaatctcgtctgtcccatttgacaggaagcttcttggtgatgtgaaccatgtttacaaggacagggccctacatgtaacagacactccataagtgcttctagaatttaactagaattgaagagttgaaacttgtaccaccagtagtaagttaaagagtggggatgtgtaataatacaaacatgaataacacagagtatgaacattctaaaaattccccttttccctttccacgaaggctcagagacagacaagcagcacgtggaggagataaaattagagagagttacaaagcatgagtgcacaggtgcttgtttgtattatttcaatttgcacatgccatctttgtgtttgtcaactcctgtgagatttaaccaggcatgatgctgaaaacaatggctgatggtgaaaccactcatttccatggagcttccattgaaagaagcctctgtttttttctttcaaagtagtcacattagggagacagtgcatattttaaggatgcagagattatttcacacatatttgagactataaaaaataccagtttatagactacacaaataccattccttgccctgtagttccctcttgctgctgatttaaagttttttt

SEQ ID NO: 256838 - DNA, 1242 bp, Homo sapiens
  misc_feature (822)..(822): n is a, c, g, or t
ggataaggagtggatgcctgtcacaaagctgggccgctttgtcaaggacatgaagatcaagtccctggaggagatctatgtcttctccctgcccattaaggaatcagagatcattgattctttcctgggggcctctctcaaggatgaggttttgaagattatgccagtgcagaagcagacccgtgtcggccagcgcaccaggttcaaggcatttgttgctatcggggactacaatggccacgtcggtctgggtgttaagtgctccaaggaggtggccaccgccatccgtggggccatcatcctggccaagctctccatcgtccccgtgcgcagaggctactgggggaacaagatcggcaagccccacactgtcccttgcaaggtgacaggccgctgcggctctgtgctggtacgcctcatccctgcacccaggggcactggcatcgtctccgcacctgtgcctaagaagctgctcatgatggctggtatcgatgactgctacacctcagcccggggctgcactgccaccctgggcaacttcgccaaggccacctttgatgccatttctaagacctacagctacctgacccccgacctctggaaggagactgtattcaccaagtctccctatcaggagttcactgaccacctcgtcaagacccacaccagagtctccgtgcagcggactcaggctccagctgtggctacaacatagggtttttatacaagaaaaataaagtgaattaagcgtgttaaaaacacaaaaaaaaaacggccgaattcgggctcactggccaattggctatatggagccgataccantaatggccgcgttaacaacgcggatgggaaaacctggtgtaccaactaatcgcttggagaaatccccttgcccagttgcgaataacaaaggccccgaccgatggccttccaacagtggccaccctaaggccaagggaattgaggcgaaatattttaaaatcggtaaatttgttaacccgtatattaaccaaggcgaaaggaaaacccttaatcaaggatccccgtatagttcgggtttcaatggcaagggccttttaaacggcttcagccacggggaaacccttttagcgaggccatctgaccaccctctcaagttttggcagggccaagattaggggcctagggcccctttaaattccgctaacccgcaccctaagcggcgggggcctctcctcctcgggagcctcgtcacccccgccc

SEQ ID NO: 256839 - DNA, 710 bp, Homo sapiens
tatccatgtgaggtgttccagactgcagaccggctgggaaatgctaatggatgctctcaggacgattttgcccaggctaggaagttgttctattgttctgtgaactgccatggctaagtcaagctgagctggttctagttccagaaaaactcagggtcctcggcaatggactcacagcctgtaaccctggactccttcctcagcaactggaacctgtcttggtggaagctcagggccaggagggacatggcagcgaagaggtcctgtttgggcagagattggcaggtccccaccctggcaccacagagtgtctggagctgtggtctgcccaagccctcagcctgagctgtgcagatggggagaagccggagctcatcttctctccttgcctcagactcaccctcatgcccagaaccagcagagaggaaataagatcatttcaatctacacaaagaagagcgttcagacacagcagatatcattctgatctatacacttcatgcagtttaacctcctagctttaagttaaaaaaaaatctgaacaggcagctttcccagaaatggtctgcatttcaggggaagaggcaggttaagtgtaatggacgggcaccatttagtgttctcctctttttctgtggttttggatgagtgacatttttggagagagatgagaaatggccatgcttccttattagtgcacttcacgtgaa

SEQ ID NO: 256840 - DNA, 255 bp, Homo sapiens
ccctgcttgtggagggaggcgtagcactgcctatgtgtatatacagccatgcctccagtatggcagccaccaggcacacgtggctactgagcacttgaaatgtggctggtccaaactgaaatgtgctgttaaatacacatgagatatcaaagaccagatatcaaagaatcagtacaagagattaaaacagctcatgaatacattttgtactgattacatgtttaaacaataatatcttatacagtcatgcaccaa

SEQ ID NO: 256841 - DNA, 420 bp, Homo sapiens
cagggaaccataaagatgatagagtttaatgaataacagaagcatcaatcatttttgtaattcatactgtgataaacctttgatattgtaattggaggatttaagtcattagtataactagattttgaaaggtgtcctctaggctgggtgcggtggctcacgcctgtaatcccagcactttgggaggccaaggcaggtggatcatgaggtcacgagttcaagaccagcctggccaagattgtgaaacgctgtctctactaaaaatacaaaaattagccgggcgcagtggcaggcgcctgtaatcccagctactcgggaggctgaggcaagagaatcacttaaactcggagggcagaggttgcagtgagccgagatcgggccactgcactccagcctaggcaacagagtgagacctcaaaa

SEQ ID NO: 256842 - DNA, 485 bp, Homo sapiens
aaatgaacatgtgtcaaagtttaattcagcagttaataaaggaaatagtaaaatgttacaactggttcccataacctgagtctaatcatgagaaaacattagacaaatgcatatggagagaccacgtatgaaattactggcatatgattttttaaatgtccaaattatgaaatgcaaggtaatactgaagaacagcttcagtctaaaagagactaaagagataggtcaactaagtgcaatatgctgtcctgaattaaaaacattcttaggtgaatgctgaactcggagtggtgctgaggagtgaatgttgataatctggtttggatggttgtgtggcagttgtgtgggagactgtccttgtggaaaacacacattgaagcattcggggcagtggggtgttgagtcggtcacttaccctcagtgcttcaggaaagaagttatatactctccatcctctgtaagtttatgattgcttaaaaaaaaaa

SEQ ID NO: 256843 - DNA, 361 bp, Homo sapiens
tgagacagagtctcgctctgtcgccaggctggagtgcagtggctggatctcagctcactgcaagctctgccttctgggttcaagcgattcttctgcctcagcctcccaggtagctgggactacaggtgcgtgccacaacaccgggctaatttttgtatttttagtagagatgtggtttcaccatgttggccaggatggtctccatctcctgacctcgagatccacccaccttggcctcccaaagttgctgggattacaggcatgagccactgcgcctggactagtttttcaaagaattttggactttgttgatcctctctatgtttgtttgtttttattaatttctgttcttattgtttcc

SEQ ID NO: 256844 - DNA, 243 bp, Homo sapiens
tggtttccaatgacaataagtagatttttctgtatccttagattgaccaatccagagcatttggtatagttaaccacttcttgagggggctgctacagttgacctcctttgaaatgcttctgggaactctttgattcttcttttctctcagcttttcctaggtttgtttaggtgattatgatgggatgttggtgttgcttcttggcctgcttcctactctgtatgctgtatttggattcatat

SEQ ID NO: 256845 - DNA, 410 bp, Homo sapiens
aaagttttaaaatttctgccttatacttgaagtgtttagttgatttatatctgatgtagttattgatatgattgtttcagatatgatattttgttattgtattatatttatcagttttctctgcagcttctttcctgtcttctctgtgttaatcaactttttaaaaaatccatcatttcagttcctttattggctttctagctacatctctgttgagggaattacaatatgtatctgctgtggtctaaatgtttgtgtcccctcaaaattcacatgatgaaattctaacccccaaagagatggtattaagtggtggggcaactggaaaattattcgatcatgagagcagagtcctgataaatggtaatagcacccatgcaaaagaggcatgaggcagcttgtttgctccc

SEQ ID NO: 256846 - DNA, 624 bp, Homo sapiens
aggagattaattttggcaactgtattttccccagaatattgcattaaattatcttctacagatatagttgtgggtgtttatgatgacaatgtctattttttaacactgttctgccaatacgacaaaaaacttactttgaaaaatcttatttaggtactaaccagttccaattaactccttcctatatattccatttattctgacaataaaagtgtgtagctcgagcttgttatcataggcaagtccaggatttagtagtatcattcctgtcttagaattgaccttcatgtcattttaatttttaaactattgggtgttctcaaaagcaaataaaggaccaatgtaatatttaaaacacttgacaaatgtaacaaacaagtgacaaattcaaaacagaaaaatctatgtttcattagggtaaaagaagagagcaacatataattagtctgcttaggaaaacacatccacagaatatatgctgcaggagaaatgtaacaggagactcactcatctactgcaaggctttgaaaaatgttggtatctgtaaacaataaagaaagaaaagatattcttctctaattattaaagagatgttcaaccatctgcaaactatttttttaagtt

SEQ ID NO: 256847 - DNA, 420 bp, Homo sapiens
gagtgggcaggagtctggcctggggagggcttaggcctgtgaggattcttcccgaaggcgcccttggaaacagactaattctcagggaaatcagattgcggtaaaatgggatggaaacagacaacattcagatctgcgatttcctgtccttgaaggcccctttcagattacaagttggcaccctctgcccatctaggtgccacagcttcccccaaggacaatagatggtagggccagagaagagaagagaaactgggggagggaggcccagtggagggccatggcacatgacctggttctgccctgccagtgggctcagcccctctccatcctcagccaagcgcctctgagggcacttgtttccccttctcacccatgtttttttgggcgacagagccagactccatctcaaaaaaaaaa

SEQ ID NO: 256848 - DNA, 396 bp, Homo sapiens
caggcaagccgtgggcgtgggctgtggccctgcactttgatggctggctgggtctgggtggcctgcactcattcgcctcctgtctcaccccaccaccacccaagatgaagccatcttttctggctcctccttctttttggtagaaatggtaccagcttgtgtggtctggagggaaaggacttaagggtatgaacctctcagcagccatgatccttataggacttagtgagctatttagaggtatctgagggaatcagagccttgagagcccagtagagacatcactgttgactattcaaaaaggcattatttagagcagggttcacaagctatggcctgtgggccaaatctagctggccaactgtttctgtaaataaagttttattggaacacagt

SEQ ID NO: 256849 - DNA, 412 bp, Homo sapiens
tgcatttctttgaaatgtttgttattttccagcagatgtctgaggctctgttgttatgattagtttttctctgtgttatttgaaatgaaatgattaaactcttttgaagtttattgatttttttttttgtgtccgccctttcaaatctactactgaaccattttggtaagcttttaatttatgcaaaattactttttagatacaaaattgccatttattttttatagtttgcatcttttttgtattgattttttctttttctttagtcactattaatccgttttcctttaacatatttacagtagttgctctgtagtctttatctgtgaaaaccaaatatctagacctgcttgaagtcagcttactttacagtcttttcatctctaagcataaataaaactttgggtttttt

SEQ ID NO: 256850 - DNA, 413 bp, Homo sapiens
tgcgacggagtctcgttctgttgcccaggctagagtgcagtggcgtgatctcagctcactgcaagcttcgccttctgggttcaggagccattctcctgcctcagcctcctgagtagctgggactacaggcgtccaccaccacgtccagctaattttttgtatttttagtagagacggggtttcaccgtgttagccaggatggtctcgatctcctggccttgtgatccacccacctcagcctcccaaagtgctgggattacaggcatgaaccaccaaaagctttcaatttttcacgattaagcatgatattagctatgggcttgccatacatagtctttactgtgttgagatgcattccttcaatgcctaatttgttaacggtttttatcttgaaaagatgttaaacattgttg

SEQ ID NO: 256851 - DNA, 460 bp, Homo sapiens
ggtgaaacatataaacccccaaatgtataatgaaacaaaaaagagggcaatttcttgcttgtataaggtctaaaatgggtttttctcattgacggctggctctcttttcagcaggaattcagatccttttcatctgtgactctgtcattttcaacatgtggcttcaaaagtctgcttcaagccagtgaaaagaaaacaaatatgaagaatagacttttccaggcctggaagtggcacttatgactttcactcacatcccaacagccagaactcagttatatgggaaatgtaatctaactatgtgtccatgaagaacaggacatccgggaagcaattagcagttttttctacaatggtatagcaactggatcagtgtggagaatttacagggcatcaaagaagaaccactcttctttacccaacatggtggtgtaggtacactagaaactcttggtggagg

SEQ ID NO: 256852 - DNA, 472 bp, Homo sapiens
actaattaggtttgaacttgccagagagaaagtggacattggcagcctattgtataagagtgaaacaaagtttgaactagagtgaacttaatttcctttgcactgaaaggaaagaaagattaatgaaatatccccaaatccatcctgttagtttttattaaatcagcaaatgaaatttaacctccaattctgctataacgtcctttcctgcagattgggtttcagcaagcctaagtgaaatagacacactccctctagaacaacatttcgatatgaaaattgcattattgccgtcaacatcaggttacctgaggaacaagccacttggaaaacaattaattccacaaagagcagaatgacacatacattgcctcaaatttacaagaagcacaatgttctgattacagcatttgtgtaagttcatttcttacctctttgctaatgctaataaaaaaccagttgaaatttatgt

SEQ ID NO: 256853 - DNA, 340 bp, Homo sapiens
catgaggagggtgctctcctgggatgacagcgtcaggaatggacctgaggggcctcttgagctgggcacaatccacagtgctgctatcccacttcacagccctgtgacaattcacaagtcagttagttattcctaaactgttactttttgaattaaaatacacacataaaagagtgataaaaacatttttcagaaaaatggcatttttccaagtggcttacctaaaaatgcccttagcctgaattgcatatactgtgttataactcagaattttctcattttgacatggtcccttcttattttataaagataataaaagtgatcattttatatcatcaaa

SEQ ID NO: 256854 - DNA, 288 bp, Homo sapiens
ccatttcccaatcacaggccctaatcaccctatggcccggtaccagataattcaggacatttccattccccatgaggattaaaagcctgctgaaaccattcaagctagccactcgtaagcctgcttcccctcctttgtccttttcttcccatagaaactgtaataaaaaggctcttacccacatttcctcctcactccctctgcccctgacccaccgtgccatgcctggcatgtggtacctccagtttctatctagctatgagtaaaacaaacttctttcttcatgac

SEQ ID NO: 256855 - DNA, 404 bp, Homo sapiens
tgcggatgaaatggatgatttaatgggtcatctctcctgtagttaatttctctagatctcttgtgctatattgattttgtaaatagctattgtcacatctgccccttctgcctgtgggaactagtgggtcttaaaaaattgaattgggtgagagtgtagattaatcaataccaagatttattgactcgggacatttatattaactgttgtgaagtcaagaataatttgaaccttttcaatacttcattaagtggcatagtgtattatctatggtgtattttgaaagtatccttcctggatttggtacagctctcacctcgacttcctaaaacggctccctttatttgtcaagctattaggatttatattataataggaatcacatcaaggtacttttcaaaggc

SEQ ID NO: 256856 - DNA, 242 bp, Homo sapiens
ttccgttcaaggatcttttcacggtctttgtccagttttagcctagtgataaccaccttgctggggtgaatgcctacgtggacagttgtgccattagccttttcccgctgcacccgttcaatgtagataacatatttcttcctgtaaacctggactactttgccaatttgctgacctttatagtgtccacgtacaacctgaacttcatcatcctttcggatgggcatggatcacacgttgta

SEQ ID NO: 256857 - DNA, 347 bp, Homo sapiens
tttttatttaaaattttaaaataattaagatgggggggaggatttcaggtgaagaccggaaatcccatacagtgctgaaaaggtggaaatcaccaagaaaacaggccacatgtaatgccaccacccattgctatgtcgataaacatgcttccaaggaagttcatctcagtattatttgtaattagcaacaacaacaaaagaaaagaagctaaatattgacattgcagggttggctattaataagatgagacatggatgctgttgtgtaactgggctttccataatgggtttccattgtgattggatattcccctttaagaccaaatctgaattgttctgttctgctc

SEQ ID NO: 256858 - DNA, 497 bp, Homo sapiens
ttaaataaagatgcatggctaagcaaatagaagacctaagtgtcagaacattgcaataattttcacatatgcacacatactcccagaaaccaaggcggctctttaatgggaagcattctttatgcaaatgaagaaactaaaaataaaatggaaagttgccaaacttttaccacaaacttcacaccacgtttcagagactgagaagcaggcaattttccttgctgtttttccctccctcttttggctctttttttaaaacataaactgcatctttttgcagtgaatttgaaaagtataatgagcaggctcattttttccctctgttcatggaatctggtggaaatatactaaataaggcatgaaattaaatgaagtattggtgagtttctttatatgttgtaaattatctgggagaattaagtttcaatctctaatgtttaaaagccatgaaatagaaagtgttgtgtatgggagaagcccaagaacctttctctatt

SEQ ID NO: 256859 - DNA, 673 bp, Homo sapiens
tcccccgggctgcaggattcggcacgagaaaattcttaaatattatactggaaaatatttcccagcgtctctcaactaattcattacaatcattaggaagtaaaattgcaatagcaactagtttattttgactgaatcagttggtgaattcagtcatgcaatccataatcatggttaattaaattttaaaatattcaaattgggtttatatgctcctgtggccaatgcttactttaagtctccctttgttcagttccaacttccgctctgggaagtttctagtaataggcacagagctgtaacagagcatgctgcagacatctcattaggtcttagacggacctgctgagccaaataggaacccaggttattacacttcttttaagaactggggccaggtgtggtggctcacgcttgtaatcccaacactttgggaggctgaagcaggtggatcacttgagtttaggagttggagaccagcctgaccaatatggtgaaaccctttctctactaaaaatacacaaattaactgggcatggtgttgggtgcctgtagtcccagctactcgggaggctgaggcaggagaatggcgtgaaccccggaggcggagcttgcaatgagccgagatcgagcactccagcctgggcgaaagaacgagactccgtctcaaaaa

SEQ ID NO: 256860 - DNA, 506 bp, Homo sapiens
agcccccgccccagctgcgcgggcccccgcctggcccatggactgcacagccgagcgggcgccttgagcgcggtgcgggtcctcggagcacccccgaggtgagcgcaagcaaggtccggcatcatgtgctaggttattcccagtgcgaggccacacttgggccgtcggagcagcccctcctcacttcaggggtcaccctccccaagacccattgccccatcatggccggggaccggctccccaggaaggtgatggacgccaagaagctggccagcctgctgcggggcgggcctgggggggcctggtcatcgacagtcactccttcctggagtacaacagctggcatgtgctcagctccgtcaacatctgctgctccaagctggtgaagtggcggttgcagaagggcaaggtgaccattgtggagttcatccagccggccgcacgcagccaggtggaggccactgagccacaggacgtggtggtctatgaccagagcacgcggccgc

SEQ ID NO: 256861 - DNA, 391 bp, Homo sapiens
gtaccttgatcttggacttcctagcctccaaaactgtgagaaaaaaatgtctgttgctgcaagccacccacctcacagtattttgttatagcagcttgaacgatgatcattgacttaaatattttagaacacaagccttcatgagcggggaacagaaaaaagaatcgcatgctccactcctaatgctccctctcagaatgattctgtaaacaaatctgactcgactttcttaagtcacattgaagttttcaaataatattggattttaaaggccaagagtccacatcactttgaaggacttatttaatagctattagtattactatttcacttaaaatgtaacctttcacatgcaattatgacttatttcctaaaattgagcatttgtatt

SEQ ID NO: 256862 - DNA, 300 bp, Homo sapiens
ccataaccccatggccaggcctcctcctccctcaggcatttggtttattcagagcatcccaggcctgagactgcctgcccccagcacccccctctccctgcagcatggccctctctctctcatctcactgctgtttctacccggcctgttcctggcctccagactgaacatcccactgtcccctcagtgcccacagaccctccctatcctaaacctgctcagttgcagctctcactcctgctctttgacctcattctcatctcagaaaatggcatcgtcccctcagcacgtgcgcgtgta

SEQ ID NO: 256863 - DNA, 363 bp, Homo sapiens
gcacagtgtacctccaccttcctccttctgcttctgtttttgggagttcagtcaaagctgacatgttgcccaagactagaggggagagtttggaggccggagaggatggccaggtcctgggtgtggaggttgcttcctgcccctcctcctcccccaccacaggggcctggagaagactgacagcagcaatcacagtcacattccacagcctctccagcacccagccagctctccgcgggggcagcagggactggtccacccaacaacagcagccatgtcctcacctcttgctacagcagcaactttatttgatttgatgtatatgaagaaataaaactcagaagtcaattgacttaaacatgg

SEQ ID NO: 256864 - DNA, 2500 bp, Homo sapiens
cccagacacctgctcactcaccaccagctgggctccgctgggcctgcccggcacccaccccggccaccaagggcagcagcttttccagaatttggctggcaggcctagtcaccccacctcgccacctcaccactgcacctcggaggccagccctgtccactccactctgtgcctggcttctcttgcctgccttgggccttcgtgtggccctccacggtgtctgggactgagtgcccctcttgcctcctgaagagcagccatggccacctacaaagtcagggtggccacaggcaccgacctcttgtcgggaacacgggactccatctcactgaccattgtggggacacaaggagagagccataagcagctgctgaaccactttgggagagactttgcaactggggcggtgggccagtacaccgtgcagtgccctcaggacctgggtgagctcatcatcatccgcctgcacaaagagcggtacgccttcttccccaaggacccttggtactgcaactatgtgcagatctgtgcccccaacggccgtatctaccacttccccgcctaccagtggatggatggctacgagaccctggcactccgggaggccacaggaaagacaacagcagatgactcgctccccgtcctcctggagcacagaaaagaggagatcagagccaagcaggacttctaccactggcgagtctttcttcctggcctgcccagctatgtgcacattcccagttaccgccctccggtgcggaggcatcgcaaccccaaccggcctgagtggaatggctatattccgggattcccaattctcatcaactttaaggccaccaagttcctgaacttaaatctccgctactccttcctcaagacggcctccttcttcgtccgcctggggcccatggcactggctttcaaagtccgcggcctgttggactgcaaacattcgtggaagaggctgaaggacattaggaaaattttccctggcaagaaatctgtcgtctccgagtacgtggccgagcactgggcagaggacaccttctttgggtaccagtacctcaacggcgtcaaccccggcctgatccgccgctgcacgcggatcccagacaagttccccgtcacagacgacatggtggctccgttcctgggcgagggaacgtgcttgcaagcggagctggagaaggggaacatttacctggccgactaccgcatcatggagggcatccccaccgtggagctcagcggccggaagcagcaccactgcgcccccctctgcctgctgcactttggacccgagggcaagatgatgcccatcgccatccagctcagccagacccctgggccagattgccccatcttcctgcccagtgattctgagtgggactggctgctagccaagacgtgggtacgctatgcggagttctacagccacgaggccatcgcccacctgctggagacacacctcattgctgaggccttctgcctggccttgctgaggaacctgcccatgtgccaccccctctacaagctcctcatcccccatacccgatacaccgtccagatcaacagcattggccgggccgttctcctcaatgagggggggctctctgccaagggcatgtccctgggcgtggaaggctttgctggggtgatggtacgggctctgtcggagctcacctatgacagcctctacctccccaatgactttgtggagcgtggggtccaggacctgcctggatattactaccgcgatgacagcttggcggtgtggaatgcactggagaagtatgtgacggagatcatcacctattattacccgagtgacgcagccgtggagggtgatccggaattgcagtcttgggtgcaggaaatatttaaagagtgcctcctggggcgggagagctcaggcttccctaggtgcttgcgaaccgtgcctgagctgatccgatatgtcactatagtcatctacacctgctctgccaagcacgctgctgtcaacacaggccagatggagttcaccgcctggatgcccaacttcccagcgtccatgcggaatccaccgattcagactaaggggctgaccactctggagaccttcatggacacgttgccggatgtgaagaccacgtgcatcacgctgctggtgctctggaccctcagccgagagcctgacgacaggcggcccctgggacacttcccggacattcacttcgtggaggaggccccgcggaggagcatagaggcgttccgccagcgcctgaaccagatctcacacgacatccgccagcgcaacaagtgccttcccatcccctactactacctggacccggtgctgattgagaacagcatttctatttaggagcgcgcttcccgtctctcctctccccattctgtgccctactattttcaacaaaacaaaacaaacaagcaaaaaacacaaaaacctcagagaccaaaacaccaaacaaacaaaaaaacaaaaaaccttcctttc

SEQ ID NO: 256865 - DNA, 428 bp, Homo sapiens
tgctgctgcggtgattctagaggatcccggcacatctggcccagagcaggattgttcctggaggtggggtgggctgggtcaggggttacaggggcacttactgggatcctagaggacctgaaggggttccagggatgcctgtccggctccaggatctgcctccttcctcacagggcatgtccctgggcgtggaaggctttgctggggtgatggtacgggctctgtcggagctcacctatgacagcctctacctccccaatgactttgtggagcgtggggtccaggacctgcctggatattactaccgcgatgacagcttggcggtgtggaatgcactggagaagtgagctcaggacagcagtgggtggctcttagggtggacaacctgggatgttggagagggtgtggggagcttctagagaactgag

SEQ ID NO: 256866 - DNA, 2356 bp, Homo sapiens
cccagacacctgctcactcaccaccagctgggctccgctgggcctgcccggcacccaccccggccaccaagggcagcagcttttccagaatttggctggcaggcctagtcaccccacctcgccacctcaccactgcacctcggaggccagccctgtccactccactctgtgcctggcttctcttgcctgccttgggccttcgtgtggccctccacggtgtctgggactgagtgcccctcttgcctcctgaagagcagccatggccacctacaaagtcagggtggccacaggcaccgacctcttgtcgggaacacgggactccatctcactgaccattgtggggacacaaggagagagccataagcagctgctgaaccactttgggagagactttgcaactggggcggtgggccagtacaccgtgcagtgccctcaggacctgggtgagctcatcatcatccgcctgcacaaagagcggtacgccttcttccccaaggacccttggtactgcaactatgtgcagatctgtgcccccaacggccgtatctaccacttccccgcctaccagtggatggatggctacgagaccctggcactccgggaggccacaggaaagacaacagcagatgactcgctccccgtcctcctggagcacagaaaagaggagatcagagccaagcaggacttctaccactggcgagtctttcttcctggcctgcccagctatgtgcacattcccagttaccgccctccggtgcggaggcatcgcaaccccaaccggcctgagtggaatggctatattccgggattcccaattctcatcaactttaaggccaccaagttcctgaacttaaatctccgctactccttcctcaagacggcctccttcttcgtccgcctggggcccatggcactggctttcaaagtccgcggcctgttggactgcaaacattcgtggaagaggctgaaggacattaggaaaattttccctggcaagaaatctgtcgtctccgagtacgtggccgagcactgggcagaggacaccttctttgggtaccagtacctcaacggcgtcaaccccggcctgatccgccgctgcacgcggatcccagacaagttccccgtcacagacgacatggtggctccgttcctgggcgagggaacgtgcttgcaagcggagctggagctcagccagacccctgggccagattgccccatcttcctgcccagtgattctgagtgggactggctgctagccaagacgtgggtacgctatgcggagttctacagccacgaggccatcgcccacctgctggagacacacctcattgctgaggccttctgcctggccttgctgaggaacctgcccatgtgccaccccctctacaagctcctcatcccccatacccgatacaccgtccagatcaacagcattggccgggccgttctcctcaatgagggggggctctctgccaagggcatgtccctgggcgtggaaggctttgctggggtgatggtacgggctctgtcggagctcacctatgacagcctctacctccccaatgactttgtggagcgtggggtccaggacctgcctggatattactaccgcgatgacagcttggcggtgtggaatgcactggagaagtatgtgacggagatcatcacctattattacccgagtgacgcagccgtggagggtgatccggaattgcagtcttgggtgcaggaaatatttaaagagtgcctcctggggcgggagagctcaggcttccctaggtgcttgcgaaccgtgcctgagctgatccgatatgtcactatagtcatctacacctgctctgccaagcacgctgctgtcaacacaggccagatggagttcaccgcctggatgcccaacttcccagcgtccatgcggaatccaccgattcagactaaggggctgaccactctggagaccttcatggacacgttgccggatgtgaagaccacgtgcatcacgctgctggtgctctggaccctcagccgagagcctgacgacaggcggcccctgggacacttcccggacattcacttcgtggaggaggccccgcggaggagcatagaggcgttccgccagcgcctgaaccagatctcacacgacatccgccagcgcaacaagtgccttcccatcccctactactacctggacccggtgctgattgagaacagcatttctatttaggagcgcgcttcccgtctctcctctccccattctgtgccctactattttcaacaaaacaaaacaaacaagcaaaaaacacaaaaacctcagagaccaaaacaccaaacaaacaaaaaaacaaaaaaccttcctttc

SEQ ID NO: 256867 - DNA, 419 bp, Homo sapiens
cacacagaagtctcagagtcttattcaagatccactttagaacagctttaaatttcctgcattccaagtctgagatatccaatgaggtccagaatctaagaccactgtgcccagccgtggcttcattttctatagaatgagagcagttgctaagtttttaatacattttcattaaaactacattttttcaacttatgaatagtggttatggagaaagatagaatcaacttctgttaatttttatgcaaaaatctgccattgaattgtccataatatgtttctcaaaatatcatttataatttattatgtgatttagacccaagctaaatataaattaacttcattaactatgtacattatcatgacactgttgaattactttcacagactgacaaagcaaaattaaaaataaactctgt

SEQ ID NO: 256868 - DNA, 335 bp, Homo sapiens
gcagaaaatgttaaattaaacaacaaccaaagtgtctgcaaagctcagcaagagatcaagtggagaagacgatgggtcgctttcacttttgcatgtgatgaaattctcatctcagccctcagccctgaggccctctcatcgctgctatgtctgggctgcacgcttccccaagccccaagtcaagctgcctgcctgcccaggcttctttgaattccatcagaattcagaaacacctcgctaaatcaggaacagtcaggggcacagagacaccacgccaaaaggcaggcagatagcaagtcccggaatcggggcaaggataacttcagagtctcatc

SEQ ID NO: 256869 - DNA, 673 bp, Homo sapiens
caggtctcctagccccttgctctaattggcctcctcaccattcccctctctacacacagctcattttcctgcctgcttcaaatgccattacatagccctctgtacacgtggaacaatttttgtcttccatctacatattatatatccttcaaggcccatctcctctgcagaccttctctgactgctcctacatacatgggttcctctgttttctttgatttttgttgaattgcgggtagcatcttaccaatcctgtcttaattatgtttgtgtttgtttcatgattgtgcatcttgtctcctctagctgaagggtgaggattctaaatcagtggtatggtccatggttcattggtgtgactcattttttaagctgtaacaaacagtttgaaggggcatagttcatgtgtctcagcaaagagtgatctatgctctaagcttcttactataaaaccaggggaatcccagcctcaggtacctctctctcgtcgcagggtcccaggtgttcccctttgctgctagaagcatgtcagatcagtgccccaagatcatctctgcagtgcttggtctttgctgctgtaggttgtaggccttactgcaataggtctttgacgttgatcagtgctcagtaaacacctttcaactttctttctgggaattgttcatttccatgg

SEQ ID NO: 256870 - DNA, 559 bp, Homo sapiens
ttcagtttaccacacaagctgttgttccttgattaactgttatgaaaatgatagctatgttctatgactttaattttactaaaattctgagatgcaaaataatattcagtctatattatttgcaggagaatgattagctctgcagagtagtaggaagtaacaaaagaaatagagggcattggaactgtcttatatagcaaggcacatgtatggattggggcaggtttgtcctgtgccagctttttgtactacttaatcaagtggcctgaaatcaactgtgtatgcctgtacaagttatgacttctgacacatggaggtcacttgaaatcaaatagaggtacaatcaagttctggttttaccttgtactagtgctgtgatatatgcttagttgctttactttcctgagttttaatttcttcatctgtaaaatggtggtaataacagtcaatgtgaatgtaaacgagaacatatatgtaaaggggcctctcagtttatacaacaaagtcattgtttagtaaatgtgaatacttgccccaccaataaatatctgttacatgg

SEQ ID NO: 256871 - DNA, 479 bp, Homo sapiens
ctttggcaactgcaccccctcttccttctccttttttttcaatctaatatgtgggacataccaagtgatgagatcctttctggcatcctaagaaaatgccaactatagaacaacagatgtagtctccttattaagtctgaagaccaaacttcttagtgcaaagcagtcaagtcttttctcaacatgaccccaatcaagcttttgaacttaacatcaaaatataacttcagaagaacgtttggaatagagctcagttcaaactcttcctattgcaaacgaggaaatggctacagaagcagagtgcccaaagaatgcgaatgcaactggcttcatcttgaaagcgacactctgaagaaattacccataatttctccctcttggacatgcagaattatcctgttcttgtatttttctggccagcttctccaactttccctttcttgtttgcaactaattaaactttatggataagaaaaaaa

SEQ ID NO: 256872 - DNA, 183 bp, Homo sapiens
ctaaagacacactttaagctaaagagagtgcagtggtctggttaagaagtaacaaaggtataaaccagtgatgccagtggaaatgaaatgaagtaaatttaagtaaatgtaagaaggcagactgttaaaaactgattattaattagaataaaaaaatttatttcccaagaagcctcttgcttc

SEQ ID NO: 256873 - DNA, 440 bp, Homo sapiens
attcttctctttcctctggactcacagctggaccacataaccttcccagctttccttcccaccttttccaaacgtgattgggttttggccaatggaatgagggtggaagagagggtcccactatcaggtctagcccataaaaatctcacagaaaattctcctccatactctttttccttccacgaactgaatggaaacgacttcggcgaacttggaagtaatgtattgaaaatcggaaactctctatcagcctgaatcttttatccctcttcaccatcctatctacccagaaacccttgcaaatgttaggtaaccacaaaataaatgtgtatgtgtttaagcaaaaacaaaacaaaacaaaaagcacagccaatgttgttaatagaaaaataatttaaaaataaataaaaaatgtccacttaaggacagacttgatgaaa

SEQ ID NO: 256874 - DNA, 340 bp, Homo sapiens
cttgatttttttaggaggcatttgtaaagtgcagctaagtagattatttccagcttgctgctgctgctcattttcttgaggttttttttcatccatgcattcatgaaaattttcagagtagttgaattcaattgactcctgctgacagcaaggggacaaactactaacaattttatacttcataaaattgaaaactactcctctgagtactctagaagggctgtatactagagaaattggaagtgacttggccaaatctcccagtaattgtgacttaaattcaggtttgccagattctaccattgtgctttcctgtaataatacattgagtcagaatgat

SEQ ID NO: 256875 - DNA, 317 bp, Homo sapiens
actacagaaatgactatgagccttttcacattatttatcctgcagtttcattctgtcccaggtatatgacgtctatatattttaactttacttgagatgttattatatatattttgtgtctttctatgtatatattttgagacagagtctcactctgtcccaggctggagtgcagtggcatgatcttggctcactgcaacctccgcctcccaggttcaagcaattctcctgcctcagcactttgggaggccgaggcaggacaactgaacccaggtaattgagaccagtctgggcaatgtagcaaaccccaactctag

SEQ ID NO: 256876 - DNA, 1811 bp, Homo sapiens
gtccccggggaggccggggcgcggcgtgcacgctcctccgcgcagctggcgagccgcaccgcccccgcggcacctccatgcgcccctggcctgctcgctagtcgctgtcctccagaggattcagcaggaccgttcctcttcctcagccgcgagcacgtgcgcgggggtgcgcgcggaggtcacggtcactgcggggctcagggaaggaggcgccgtgcctgcaggacttcccttcgcttgggcgcaagccggcgattagcctggtcccctaggacatctccagggctccggggaacctctcctgcgcaggcttggccctgcctcctccaagcgtccgagtctttttcggcttttcgtgagcctcagagagggacgtttcctgccaacgctgctgcgaaggaaagtttgggcggcgttatcctgactgccttcctcgccagcgccggcgagcagcttggggacacagccgacgcccgggcatcctccccgacgaccccccggagcgctcccagttcagactcctttccgagaagcgcgcagaagtgacagccccggagcttcgttccggtgtaggtgtggggatgcgccgcaaggcaggaggggaaggcgctccagttgaagggggcaccccggggcccgcgccgactcctcccggcgcagccttggctcgccggagtcgcgggtcggaggctggcgccgctgcccgccgaccagcaccctggcgccaggcgcccggctccacgccgcacccttggcgacgctgtgcgaggggctctagcgcccgccgcggcgcagtctcgtgaacccccgctccaattttttcctacggaggcgcagaggagggtgaattcgcgctctccttcccgacgccccggcttctgggagcgtcagagcaacggaagtacgtacaggaggaccgagagcagcagggaagtttggcggtgggctgggtcggcggcgaagattccctgccgtgcgctgccccctcgtggccgctttgcgttcccgtcgggaagggctgggttccagtccagggcccagcacaaaccaggattggttggacgctgcacagcgagttcagtcagggctaacatcagaagagtcgtggggggcctgcctatcggccagcctgtccttgtggtttgtgaagttgtatgatctttctgttattattaaggaaaaaagtagtatttgttgaggctaaaaggccaagagcgtgctatatattatttaatcctctaaacagctctgccagataattattttatttatttatatttacttccatagctttagacaggatctcgttctgtccggcaggctagagcgcggggtgctatcacggctcactgcagcctcaaactcttgggctcaagccatcctttcacctcagcctcctgaatagttgaaactacaggtgcgccaccacgcctggctaaatttttaatttaaattttttgtagcgacagggtctccttatgttgcccaggctagtctcaaactcctgggctcaagagatcctccaacctcatcttcacaaagtgctgggagtacaggcgccagccacggtgcccaacctgtgataattattttaaactcattttacaaatgaggaaagtgatattcatacttgtaaagccattggggctgaattttcatttttgtatccacagaactaacacataaagtttacatgccattagaatgtaagctctctgtaagctacagatcttttctactgtaatatccttagtgcctagggcagtgactagcatatagtaggtgttcaataaatatttgtagaattaatg

SEQ ID NO: 256877 - DNA, 304 bp, Homo sapiens
gaaataatcccgtccatagtgttcattactccttgccacacacttgacttttcaatcccgttaccctagttgtttctaggacatggcagttcctcccctcctttctgctgcctttaccacctccgcagcttaaacaatgactgaacattcccttgtctccagtggcagttatagatactacgctgtgctgtagtgatcgatgcagatgtcttctttcccttactgaactaagctcattgaaacatccaccctagctggtctttgccatttatagagtaggcacatggtaaatatctgttgagta

SEQ ID NO: 256878 - DNA, 333 bp, Homo sapiens
tgtaaatatgtggtggacccatatgataaaccccaagaaggcaactgatactatggcttacactatacccatatacccaaatggttcctttttccagagtaatatgttatgatatgggaaattatcccgaagcccggtaggatgagctcacacacaaatatgtcacttaggcaaatactacctgaaaaatgtttgaaagctatgacccaaagtgttctttactcagaccagctgccagtgaaatcatggttataccctccaattaatcaaatgacaattctatgtttttttaactgggtaagatgtgtcaatggtaaaaactccagacagaac

SEQ ID NO: 256879 - DNA, 972 bp, Homo sapiens
gctaatttaggagtacttgtaaagcatccaggtaaggaggatcctagtccaagctcaatttatctagtgagcctatctagtcagcctatcctacactaaggttatgggggtaggggagaggcactttttatcaaatgtaccttgacttcttcaacagaattccaccaaatgcaaaactcacttttgaagtggaattagtggatattgattgaaatagcagtgcttcagctctaaggatattagcaacaatgataaaacttggccttgaagaaatttacacaactagttagaacttgttactattgtaaaggaagagtcaactggaaaattcaaggagttaataaaatttgtttacttggtcccagcttttgagagataaatcccttatgaatccctggtctaaaatactttcctacagctgtgtaaaatactggtcaaggagaactttttccttttacctcatgttgtaaacttaagtggctcaataaaaattgatccactgtcttgatctgactgtgatttgtttggtgttaatatattattgttctgattagggaattggaactaaggacctcatcaaaccagggagtaactcccagtaaaattatctggacagattgcctgtataatgagaaggcaaaagcataaggcttgaggggaaacaaaatgctaaaagcagaaaaatcttggcaggaagatcaagacctgaatttagaaaaggtgtacttcaaaaccaatgagccactaataaaggtgaacataaggttaatattactaattgatccccccaaaataaattcataaacaattactggatgagtcttccgttttattacaaaaatgaagatcagtttgatcaaaatgaaagcttgttcacaagttttacatgaatattctaaatacaaagtctcctgaaacaacatacttttgatatgattttcatttttaaagggatgcaaacattccattttc

SEQ ID NO: 256880 - DNA, 408 bp, Homo sapiens
  misc_feature (30)..(30): n is a, c, g, or t
  misc_feature (35)..(35): n is a, c, g, or t
atctagaggatccggtcgacggttgacagnaagtnttacggaaagaaaggacagcctgatgccaaaattccaccaaatgcaaaactcacttttgaagtggaattagtggatattgattgaaatagcagtgcttcagctctaaggatattagcaacaatgataaaacttggccttgaagaaatttacacaactagttagaacttgttactattgtaaaggaagagtcaactggaaaattcaaggagttaataaaatttgtttacttggtcccagcttttgagagataaatcccttatgaatccctggtctaaaatactttcctacagctgtgtaaaatactggtcaaggagaactttttccttttacctcatgttgtaaacttaagtggctcaataaaaattgatccac

SEQ ID NO: 256881 - DNA, 1826 bp, Homo sapiens
gtaaggagtcctgatgttcaactattaaatctttattataggttatagactggactttaaaggcatagctgccttaaatgtgggtaatggttgataaatgtcgctaccatcagaggtcgcttcacaaggtgtctaattcagaatcgaagatctctagcggtcttctactcagtcgactgcagagacgaccgcggtaggtttttcaacccggactcaacaaagaagccctcatagcacagccttgacgtcactcaaagacaggccccaatcccgactgctagagcagaggcccgcccctcgacctccgtgagtggccccgccccgccctagggggcggggcgatgccgaactgcggcgggctggctcagtaaagcggaggcagcgggggaagatggcggcggccgttccacagcgggcgtggaccgtggagcagctgcgcagtgagcagctgcccaagaaggacattatcaagtttctgcaggaacacggttcagattcgtttcttgcagaacataaattattaggaaacattaaaaatgtggccaagacagctaacaaggaccacttggttacagcctataaccatctttttgaaactaagcgttttaagggtactgaaagtataagtaaagtgtctgagcaagtaaaaaatgtgaagcttaatgaagataaacccaaagaaaccaagtctgaagagaccctggatgagggtccaccaaaatatactaaatctgttctgaaaaagggagataaaaccaactttcccaaaaagggagatgttgttcactgctggtatacaggaacactacaagatgggactgtttttgatactaatattcaaacaagtgcaaagaagaagaaaaatgccaagcctttaagttttaaggtcggagtaggcaaagttatcagaggatgggatgaagctctcttgactatgagtaaaggagaaaaggctcgactggagattgaaccagaatgggcttacggaaagaaaggacagcctgatgccaaaattccaccaaatgcaaaactcacttttgaagtggaattagtggatattgattgaaatagcagtgcttcagctctaaggatattagcaacaatgataaaacttggccttgaagaaatttacacaactagttagaacttgttactattgtaaaggaagagtcaactggaaaattcaaggagttaataaaatttgtttacttggtcccagcttttgagagataaatcccttatgaatccctggtctaaaatactttcctacagctgtgtaaaatactggtcaaggagaactttttccttttacctcatgttgtaaacttaagtggctcaataaaaattgatccactgtcttgatctgactgtgatttgtttggtgttaatatattattgttctgattagggaattggaactaaggacctcatcaaaccagggagtaactcccagtaaaattatctggacagattgcctgtataatgagaaggcaaaagcataaggcttgaggggaaacaaaatgctaaaagcagaaaaatcttggcaggaagatcaagacctgaatttagaaaaggtgtacttcaaaaccaatgagccactaataaaggtgaacataaggttaatattactaattgatccccccaaaataaattcataaacaattactggatgagtcttccgttttattacaaaaatgaagatcagtttgatcaaaatgaaagcttgttcacaagttttacatgaatattctaaatacaaagtctcctgaaacaacatacttttgatatgattttcatttttaaagggatgcaaacattccattttc

SEQ ID NO: 256882 - DNA, 2196 bp, Homo sapiens
gtaaggagtcctgatgttcaactattaaatctttattataggttatagactggactttaaaggcatagctgccttaaatgtgggtaatggttgataaatgtcgctaccatcagaggtcgcttcacaaggtgtctaattcagaatcgaagatctctagcggtcttctactcagtcgactgcagagacgaccgcggtaggtttttcaacccggactcaacaaagaagccctcatagcacagccttgacgtcactcaaagacaggccccaatcccgactgctagagcagaggcccgcccctcgacctccgtgagtggccccgccccgccctagggggcggggcgatgccgaactgcggcgggctggctcagtaaagcggaggcagcgggggaagatggcggcggccgttccacagcgggcgtggaccgtggagcagctgcgcagtgagcagctgcccaagaaggacattatcaagtttctgcaggaacacggttcagattcgtttcttgcagaacataaattattaggaaacattaaaaatgtggccaagacagctaacaaggaccacttggttacagcctataaccatctttttgaaactaagcgttttaagggtactgaaagtataagtaaagtgtctgagcaagtaaaaaatgtgaagcttaatgaagataaacccaaagaaaccaagtctgaagagaccctggatgagggtccaccaaaatatactaaatctgttctgaaaaagggagataaaaccaactttcccaaaaagggagatgttgttcactgctggtatacaggaacactacaagatgggactgtttttgatactaatattcaaacaagtgcaaagaagaagaaaaatgccaagcctttaagttttaaggtcggagtaggcaaagttatcagaggatgggatgaagctctcttgactatgagtaaaggagaaaaggctcgactggagattgaaccagaatgggcttacggaaagaaaggacagcctgatgccaaaattccaccaaatgcaaaactcacttttgaagtggaattagtggatattgattgaaatagcagtgcttcagctctaaggatattagcaacaatgataaaacttggccttgaagaaatttacacaactagttagaacttgttactattgtaaaggaagagtcaactggaaaattcaaggagttaataaaatttgtttacttggtcccagcttttgagagataaatcccttatgaatccctggtctaaaatactttcctacagctgtgtaaaatactggtcaaggagaactttttccttttacctcatgttgtaaacttaagaaaagacggggtgtggcgggggtaggtgggcgaggaacctgggatgcaaaccagtgtttggggccaggagtggctgtatggtttcagaggcgcccaccactctgggtttgagggacacagcaccctcgtctcggcgctttggattgtcacgcaccagaccacggggcggaggaatggagtggcatccctggggggagttaagacacacgaggtttgcagtttcattttgtttcagaatcagtttggccataaaaatggactgggttggggacaggcggagcgattgaaccaccggagatgaggaggaggtggcaggcgcctctcctggggtggggactgagggctgtggagacagtaccatggtgaaggaccccatggcaatgggagtattgcactgagccaggtttcgggggaacggggacgtgtcgggatggcgtagggggacagagcctggcaggagacacatggaagtttccgccttgtcagtctcagagcaaacgccttttagtctttacagtacaggaatttggacactgcccacgttctcagtggacagcagccatcagaggtgacccaggagggaagtgggcattggtcaccaaggtatttacagacttctatcatgggggacagcggggtgggtccagcagcctccctcgcgggggatctgagggagaccgagttcgctaaatattataaataggtcttgccgtcctcctgcccccgcccctcggcacagtcagtggagcacgtcagcctcggtttacagttctctgaaaaggaaccaaaaaacacaaccaacaccaagtatatctccaaaggggccttggagacaacacaagaatggaaatgaaatgctcgtgcc

SEQ ID NO: 256883 - DNA, 1354 bp, Homo sapiens
gtaaggagtcctgatgttcaactattaaatctttattataggttatagactggactttaaaggcatagctgccttaaatgtgggtaatggttgataaatgtcgctaccatcagaggtcgcttcacaaggtgtctaattcagaatcgaagatctctagcggtcttctactcagtcgactgcagagacgaccgcggtaggtttttcaacccggactcaacaaagaagccctcatagcacagccttgacgtcactcaaagacaggccccaatcccgactgctagagcagaggcccgcccctcgacctccgtgagtggccccgccccgccctagggggcggggcgatgccgaactgcggcgggctggctcagtaaagcggaggcagcgggggaagatggcggcggccgttccacagcgggcgtggaccgtggagcagctgcgcagtgagcagctgcccaagaaggacattatcaagtttctgcaggaacacggttcagattcgtttcttgcagaacataaattattaggaaacattaaaaatgtggccaagacagctaacaaggaccacttggttacagcctataaccatctttttgaaactaagcgttttaagggtactgaaagtataagtaaagtgtctgagcaagtaaaaaatgtgaagcttaatgaagataaacccaaagaaaccaagtctgaagagaccctggatgagggtccaccaaaatatactaaatctgttctgaaaaagggagataaaaccaactttcccaaaaagggagatgttgttcactgctggtatacaggaacactacaagatgggactgtttttgatactaatattcaaacaagtgcaaagaagaagaaaaatgccaagcctttaagttttaaggtcggagtaggcaaagttatcagaggatgggatgaagctctcttgactatgagtaaaggagaaaaggctcgactggagattgaaccagaatgggcttacggaaagaaaggacagcctgatgccaaaattccaccaaatgcaaaactcacttttgaagtggaattagtggatattgattgaaatagcagtgcttcagctctaaggatattagcaacaatgataaaacttggccttgaagaaatttacacaactagttagaacttgttactattgtaaaggaagagtcaactggaaaattcaaggagttaataaaatttgtttacttggtcccagcttttgagagataaatcccttatgaatccctggtctaaaatactttcctacagctgtgtaaaatactggtcaaggagaactttttccttttacctcatgttgtaaacttaagtggctcaataaaaattgatccac

SEQ ID NO: 256884 - DNA, 1510 bp, Homo sapiens
gtaaggagtcctgatgttcaactattaaatctttattataggttatagactggactttaaaggcatagctgccttaaatgtgggtaatggttgataaatgtcgctaccatcagaggtcgcttcacaaggtgtctaattcagaatcgaagatctctagcggtcttctactcagtcgactgcagagacgaccgcggtaggtttttcaacccggactcaacaaagaagccctcatagcacagccttgacgtcactcaaagacaggccccaatcccgactgctagagcagaggcccgcccctcgacctccgtgagtggccccgccccgccctagggggcggggcgatgccgaactgcggcgggctggctcagtaaagcggaggcagcgggggaagatggcggcggccgttccacagcgggcgtggaccgtggagcagctgcgcagtgagcagctgcccaagaaggacattatcaagtttctgcaggaacacggttcagattcgtttcttgcagaacataaattattaggaaacattaaaaatgtggccaagacagctaacaaggaccacttggttacagcctataaccatctttttgaaactaagcgttttaagggtactgaaagtataagtaaagtgtctgagcaagtaaaaaatgtgaagcttaatgaagataaacccaaagaaaccaagtctgaagagaccctggatgagggtccaccaaaatatactaaatctgttctgaaaaagggagataaaaccaactttcccaaaaagggagatgttgttcactgctggtatacaggaacactacaagatgggactgtttttgatactaatattcaaacaagtgcaaagaagaagaaaaatgccaagcctttaagttttaaggtcggagtaggcaaagttatcagaggatgggatgaagctctcttgactatgagtaaaggagaaaaggctcgactggagattgaaccagaatgggcttacggaaagaaaggacagcctgatgccaaaattccaccaaatgcaaaactcacttttgaagtggaattagtggatattgattgaaatagcagtgcttcagctctaaggatattagcaacaatgataaaacttggccttgaagaaatttacacaactagttagaacttgttactattgtaaaggaagagtcaactggaaaattcaaggagttaataaaatttgtttacttggtcccagcttttgagagataaatcccttatgaatccctggtctaaaatactttcctacagctgtgtaaaatactggtcaaggagaactttttccttttacctcatgttgtaaacttaagtggctcaataaaaattgatccaccgtgacggcaggatggcggggaatataagcgcaaggaaggacaggccctcaacagggatccccaattgggatggctttggaggagctggggggcatccccaatgggaacacttaggtccccacagaagtttgccccaaaaacgcccgggtggcgag

SEQ ID NO: 256885 - DNA, 1484 bp, Homo sapiens
gtaaggagtcctgatgttcaactattaaatctttattataggttatagactggactttaaaggcatagctgccttaaatgtgggtaatggttgataaatgtcgctaccatcagaggtcgcttcacaaggtgtctaattcagaatcgaagatctctagcggtcttctactcagtcgactgcagagacgaccgcggtaggtttttcaacccggactcaacaaagaagccctcatagcacagccttgacgtcactcaaagacaggccccaatcccgactgctagagcagaggcccgcccctcgacctccgtgagtggccccgccccgccctagggggcggggcgatgccgaactgcggcgggctggctcagtaaagcggaggcagcgggggaagatggcggcggccgttccacagcgggcgtggaccgtggagcagctgcgcagtgagcagctgcccaagaaggacattatcaagtttctgcaggaacacggttcagattcgtttcttgcagaacataaattattaggaaacattaaaaatgtggccaagacagctaacaaggaccacttggttacagcctataaccatctttttgaaactaagcgttttaagggtactgaaagtataagtaaagtgtctgagcaagtaaaaaatgtgaagcttaatgaagataaacccaaagaaaccaagtctgaagagaccctggatgagggtccaccaaaatatactaaatctgttctgaaaaagggagataaaaccaactttcccaaaaagggagatgttgttcactgctggtatacaggaacactacaagatgggactgtttttgatactaatattcaaacaagtgcaaagaagaagaaaaatgccaagcctttaagttttaaggtcggagtaggcaaagttatcagaggatgggatgaagctctcttgactatgagtaaaggagaaaaggctcgactggagattgaaccagaatgggcttacggaaagaaaggacagcctgatgccaaaattccaccaaatgcaaaactcacttttgaagtggaattagtggatattgattgaaatagcagtgcttcagctctaaggatattagcaacaatgataaaacttggccttgaagaaatttacacaactagttagaacttgttactattgtaaaggaagagtcaactggaaaattcaaggagttaataaaatttgtttacttggtcccagcttttgagagataaatcccttatgaatccctggtctaaaatactttcctacagctgtgtaaaatactggtcaaggagaactttttccttttacctcatgttgtaaacttaagtggctcaataaaaattgatccacaaaaaaaaaaaaagaaaaaccccggggctttttgcgggggggggaaaaggggtttcagggcctggcatcggttcccggcccattctggcaggggatcgcggtccaaagggggaaataaacgcgaaaaagc

SEQ ID NO: 256886 - DNA, 1716 bp, Homo sapiens
tgtgtttgcagctgcattgtgtgtttgcagctgcattgtgtgtttgcagctgcattgtgtgtttgcagctgactcaagtcaccacagtgtgcttgctgtataaatgttattttttgtgagtgttgacaggaaaaagtttaggatgaaacactgtgttcagtacataacactacagttgcagtcttgtcactaattcttgtaaataccgaatttttaaaaaatctcttactttttttgtaacaaagagtataaactataggctttatttcttcttcagtactagtactactgaaaacacaactgctaacataaaaggatcgttttctaattttagacacttcttactcgggagaagttatcttgattacccagcttttttccttatagtttttcttgcagaacataaattattaggaaacattaaaaatgtggccaagacagctaacaaggaccacttggttacagcctataaccatctttttgaaactaagcgttttaagggtactgaaagtataagtaaagtgtctgagcaagtaaaaaatgtgaagcttaatgaagataaacccaaagaaaccaagtctgaagagaccctggatgagggtccaccaaaatatactaaatctgttctgaaaaagggagataaaaccaactttcccaaaaagggagatgttgttcactgctggtatacaggaacactacaagatgggactgtttttgatactaatattcaaacaagtgcaaagaagaagaaaaatgccaagcctttaagttttaaggtcggagtaggcaaagttatcagaggatgggatgaagctctcttgactatgagtaaaggagaaaaggctcgactggagattgaaccagaatgggcttacggaaagaaaggacagcctgatgccaaaattccaccaaatgcaaaactcacttttgaagtggaattagtggatattgattgaaatagcagtgcttcagctctaaggatattagcaacaatgataaaacttggccttgaagaaatttacacaactagttagaacttgttactattgtaaaggaagagtcaactggaaaattcaaggagttaataaaatttgtttacttggtcccagcttttgagagataaatcccttatgaatccctggtctaaaatactttcctacagctgtgtaaaatactggtcaaggagaactttttccttttacctcatgttgtaaacttaagtggctcaataaaaattgatccactgtcttgatctgactgtgatttgtttggtgttaatatattattgttctgattagggaattggaactaaggacctcatcaaaccagggagtaactcccagtaaaattatctggacagattgcctgtataatgagaaggcaaaagcataaggcttgaggggaaacaaaatgctaaaagcagaaaaatcttggcaggaagatcaagacctgaatttagaaaaggtgtacttcaaaaccaatgagccactaataaaggtgaacataaggttaatattactaattgatccccccaaaataaattcataaacaattactggatgagtcttccgttttattacaaaaatgaagatcagtttgatcaaaatgaaagcttgttcacaagttttacatgaatattctaaatacaaagtctcctgaaacaacatacttttgatatgattttcatttttaaagggatgcaaacattccattttc

SEQ ID NO: 256887 - DNA, 1787 bp, Homo sapiens
gtaaggagtcctgatgttcaactattaaatctttattataggttatagactggactttaaaggcatagctgccttaaatgtgggtaatggttgataaatgtcgctaccatcagaggtcgcttcacaaggtgtctaattcagaatcgaagatctctagcggtcttctactcagtcgactgcagagacgaccgcggtaggtttttcaacccggactcaacaaagaagccctcatagcacagccttgacgtcactcaaagacaggccccaatcccgactgctagagcagaggcccgcccctcgacctccgtgagtggccccgccccgccctagggggcggggcgatgccgaactgcggcgggctggctcagtaaagcggaggcagcgggggaagatggcggcggccgttccacagcgggcgtggaccgtggagcagctgcgcagtgagcagctgcccaagaagtttcttgcagaacataaattattaggaaacattaaaaatgtggccaagacagctaacaaggaccacttggttacagcctataaccatctttttgaaactaagcgttttaagggtactgaaagtataagtaaagtgtctgagcaagtaaaaaatgtgaagcttaatgaagataaacccaaagaaaccaagtctgaagagaccctggatgagggtccaccaaaatatactaaatctgttctgaaaaagggagataaaaccaactttcccaaaaagggagatgttgttcactgctggtatacaggaacactacaagatgggactgtttttgatactaatattcaaacaagtgcaaagaagaagaaaaatgccaagcctttaagttttaaggtcggagtaggcaaagttatcagaggatgggatgaagctctcttgactatgagtaaaggagaaaaggctcgactggagattgaaccagaatgggcttacggaaagaaaggacagcctgatgccaaaattccaccaaatgcaaaactcacttttgaagtggaattagtggatattgattgaaatagcagtgcttcagctctaaggatattagcaacaatgataaaacttggccttgaagaaatttacacaactagttagaacttgttactattgtaaaggaagagtcaactggaaaattcaaggagttaataaaatttgtttacttggtcccagcttttgagagataaatcccttatgaatccctggtctaaaatactttcctacagctgtgtaaaatactggtcaaggagaactttttccttttacctcatgttgtaaacttaagtggctcaataaaaattgatccactgtcttgatctgactgtgatttgtttggtgttaatatattattgttctgattagggaattggaactaaggacctcatcaaaccagggagtaactcccagtaaaattatctggacagattgcctgtataatgagaaggcaaaagcataaggcttgaggggaaacaaaatgctaaaagcagaaaaatcttggcaggaagatcaagacctgaatttagaaaaggtgtacttcaaaaccaatgagccactaataaaggtgaacataaggttaatattactaattgatccccccaaaataaattcataaacaattactggatgagtcttccgttttattacaaaaatgaagatcagtttgatcaaaatgaaagcttgttcacaagttttacatgaatattctaaatacaaagtctcctgaaacaacatacttttgatatgattttcatttttaaagggatgcaaacattccattttc

SEQ ID NO: 256888 - DNA, 1773 bp, Homo sapiens
gtaaggagtcctgatgttcaactattaaatctttattataggttatagactggactttaaaggcatagctgccttaaatgtgggtaatggttgataaatgtcgctaccatcagaggtcgcttcacaaggtgtctaattcagaatcgaagatctctagcggtcttctactcagtcgactgcagagacgaccgcggtaggtttttcaacccggactcaacaaagaagccctcatagcacagccttgacgtcactcaaagacaggccccaatcccgactgctagagcagaggcccgcccctcgacctccgtgagtggccccgccccgccctagggggcggggcgatgccgaactgcggcgggctggctcagtaaagcggaggcagcgggggaagatggcggcggccgttccacagcgggcgtggaccgtggagcagctgcgcagtgagcagctgcccaagaaggacattatcaagtttctgcaggaacacggttcagattcgtttcttgcagaacataaattattaggaaacattaaaaatgtggccaagacagctaacaaggaccacttggttacagcctataaccatctttttgaaactaagcgttttaagggtactgaaagtataagtaaagtgtctgagcaagtaaaaaatgtgaagcttaatgaagataaacccaaagaaaccaagtctgaagagaccctggatgagggtccaccaaaatatactaaatctgttctgaaaaagggagataaaaccaactttcccaaaaagggagatgttgttcactgctggtatacaggaacactacaagatgggactgtttttgatactaatattcaaacaagtgcaaagaagaagaaaaatgccaagcctttaagttttaaggtcggagtaggcaaagttatcagaggatgggatgaagctctcttgactatgagtaaaggagaaaaggctcgaaattccaccaaatgcaaaactcacttttgaagtggaattagtggatattgattgaaatagcagtgcttcagctctaaggatattagcaacaatgataaaacttggccttgaagaaatttacacaactagttagaacttgttactattgtaaaggaagagtcaactggaaaattcaaggagttaataaaatttgtttacttggtcccagcttttgagagataaatcccttatgaatccctggtctaaaatactttcctacagctgtgtaaaatactggtcaaggagaactttttccttttacctcatgttgtaaacttaagtggctcaataaaaattgatccactgtcttgatctgactgtgatttgtttggtgttaatatattattgttctgattagggaattggaactaaggacctcatcaaaccagggagtaactcccagtaaaattatctggacagattgcctgtataatgagaaggcaaaagcataaggcttgaggggaaacaaaatgctaaaagcagaaaaatcttggcaggaagatcaagacctgaatttagaaaaggtgtacttcaaaaccaatgagccactaataaaggtgaacataaggttaatattactaattgatccccccaaaataaattcataaacaattactggatgagtcttccgttttattacaaaaatgaagatcagtttgatcaaaatgaaagcttgttcacaagttttacatgaatattctaaatacaaagtctcctgaaacaacatacttttgatatgattttcatttttaaagggatgcaaacattccattttc

SEQ ID NO: 256889 - DNA, 1914 bp, Homo sapiens
gtaaggagtcctgatgttcaactattaaatctttattataggttatagactggactttaaaggcatagctgccttaaatgtgggtaatggttgataaatgtcgctaccatcagaggtcgcttcacaaggtgtctaattcagaatcgaagatctctagcggtcttctactcagtcgactgcagagacgaccgcggtaggtttttcaacccggactcaacaaagaagccctcatagcacagccttgacgtcactcaaagacaggccccaatcccgactgctagagcagaggcccgcccctcgacctccgtgagtggccccgccccgccctagggggcggggcgatgccgaactgcggcgggctggctcagtaaagcggaggcagcgggggaagatggcggcggccgttccacagcgggcgtggaccgtggagcagctgcgcagtgagcagctgcccaagaaggacattatcaagtttctgcaggaacacggttcagattcgtttcttgcagaacataaattattaggaaacattaaaaatgtggccaagacagctaacaaggaccacttggttacagcctataaccatctttttgaaactaagcgttttaagggtactgaaagtataagtaaagtgtctgagcaagtaaaaaatgtgaagcttaatgaagataaacccaaagaaaccaagtctgaagagaccctggatgagggtccaccaaaatatactaaatctgttctgaaaaagggagataaaaccaactttcccaaaaagggagatgttgttcactgctggtatacaggaacactacaagatgggactgtttttgatactaatattcaaacaagtgcaaagaagaagaaaaatgccaagcctttaagttttaaggtcggagtaggcaaagttatcagaggatgggatgaagctctcttgactatgagtaaaggagaaaaggctcgactggagattgaaccagaatgggcttacggaaagaaaggacagcctgatgccaagtatccttttttccccttcataattaaagttgaaaaaaaaaaacaaaaaaaacaaccacaacacaaaaccaaaaaaaaacacacaaccacaaaacaaaacaacaacaacagcgccacacccaccaccaacacgaccgagcggcccccaaagcagagagcaaacacagagagaagagcgaaacggagggagacacaaagaagagaagaccaacttgtatagacgaaggaggcggacgaaagcaaaacagcgggcagaaagaggagaaagcacgaggaaaaaggggacaaaaatacaggaaaagagagcgcctgaaagaagacgaagcacaaacataatgaggagcgaccaaccaacgctgcaaaacaatacagacgcgagccaaaagaaaaaatatagaaacacaggtcaacgagtgtaacttaaggagaaaccaaaagagaggaagagatagcaacgcagcaagaacagaacatgaggaacagaagagagagacgaaaacagacacgatataaaagccaggggacacagaagaagaaaaaaagacgagaaaccaaaacgacgaagagcagaaaaacagagaaaacaacgagaaagtagagacaccacacaagagacaagccagccaaaagaaccagccgagaagaaagaagagggtaagacaataaaccacgaggcaagcgacgaaagaaagacgaggggtaaagacgcagacaaagcagaaggagaagagaggaaccgcgaaacgagaggagagaggaggaagaggcgagaagcagaaacgaggagaaaagagaagaaagaccaacgcaagagaacgggaacagagaagacgcagaaacgaagcgacaaaaccaagaagcgaaacagacgagaagaagaataaagcgacggcaaaagcagca

SEQ ID NO: 256890 - DNA, 1114 bp, Homo sapiens
gtaaggagtcctgatgttcaactattaaatctttattataggttatagactggactttaaaggcatagctgccttaaatgtgggtaatggttgataaatgtcgctaccatcagaggtcgcttcacaaggtgtctaattcagaatcgaagatctctagcggtcttctactcagtcgactgcagagacgaccgcggtaggtttttcaacccggactcaacaaagaagccctcatagcacagccttgacgtcactcaaagacaggccccaatcccgactgctagagcagaggcccgcccctcgacctccgtgagtggccccgccccgccctagggggcggggcgatgccgaactgcggcgggctggctcagtaaagcggaggcagcgggggaagatggcggcggccgttccacagcgggcgtggaccgtggagcagctgcgcagtgagcagctgcccaagaaggacattatcaagtttctgcaggaacacggttcagattcgtttcttgcagaacataaattattaggaaacattaaaaatgtggccaagacagctaacaaggaccacttggttacagcctataaccatctttttgaaactaagcgttttaagggtactgaaagtataagtaaagtgtctgagcaagtaaaaaatgtgaagcttaatgaagataaacccaaagaaaccaagtctgaagagaccctggatgagggtccaccaaaatatactaaatctgttctgaaaaagggagataaaaccaactttcccaaaaagggagatgttgttcactgctggtatacaggaacactacaagatgggactgtttttgatactaatattcaaacaagtgcaaagaagaagaaaaatgccaagcctttaagttttaaggtcggagtaggcaaagttatcagaggatgggatgaagctctcttgactatgagtaaaggagaaaaggctcgactggagattgaaccagaatgggcttacggaaagaaaggacagcctgatgccaagtctaaaatactttcctacagctgtgtaaaatactggtcaaggagaactttttccttttacctcatgttgtaaacttaagtggctcaataaaaattgatccac

SEQ ID NO: 256891 - DNA, 1301 bp, Homo sapiens
gtaaggagtcctgatgttcaactattaaatctttattataggttatagactggactttaaaggcatagctgccttaaatgtgggtaatggttgataaatgtcgctaccatcagaggtcgcttcacaaggtgtctaattcagaatcgaagatctctagcggtcttctactcagtcgactgcagagacgaccgcggtaggtttttcaacccggactcaacaaagaagccctcatagcacagccttgacgtcactcaaagacaggccccaatcccgactgctagagcagaggcccgcccctcgacctccgtgagtggccccgccccgccctagggggcggggcgatgccgaactgcggcgggctggctcagtaaagcggaggcagcgggggaagatggcggcggccgttccacagcgggcgtggaccgtggagcagctgcgcagtgagcagctgcccaagaaggacattatcaagtttctgcaggaacacggttcagattcgtttcttgcagaacataaattattaggaaacattaaaaatgtggccaagacagctaacaaggaccacttggttacagcctataaccatctttttgaaactaagcgttttaagggtactgaaagtataagtaaagtgtctgagcaagtaaaaaatgtgaagcttaatgaagataaacccaaagaaaccaagtctgaagagaccctggatgagggtccaccaaaatatactaaatctgttctgaaaaagggagataaaaccaactttcccaaaaagggagatgttgttcactgctggtatacaggaacactacaagatgggactgtttttgatactaatattcaaacaagtgcaaagaagaagaaaaatgccaagcctttaagttttaaggtcggagtaggcaaagttatcagaggatgggatgaagctctcttgactatgagtaaaggagaaaaggctcgaaattccaccaaatgcaaaactcacttttgaagtggaattagtggatattgattgaaatagcagtgcttcagctctaaggatattagcaacaatgataaaacttggccttgaagaaatttacacaactagttagaacttgttactattgtaaaggaagagtcaactggaaaattcaaggagttaataaaatttgtttacttggtcccagcttttgagagataaatcccttatgaatccctggtctaaaatactttcctacagctgtgtaaaatactggtcaaggagaactttttccttttacctcatgttgtaaacttaagtggctcaataaaaattgatccac

SEQ ID NO: 256892 - DNA, 880 bp, Homo sapiens
  misc_feature (30)..(30): n is a, c, g, or t
  misc_feature (35)..(35): n is a, c, g, or t
atctagaggatccggtcgacggttgacagnaagtnttacggaaagaaaggacagcctgatgccaaaattccaccaaatgcaaaactcacttttgaagtggaattagtggatattgattgaaatagcagtgcttcagctctaaggatattagcaacaatgataaaacttggccttgaagaaatttacacaactagttagaacttgttactattgtaaaggaagagtcaactggaaaattcaaggagttaataaaatttgtttacttggtcccagcttttgagagataaatcccttatgaatccctggtctaaaatactttcctacagctgtgtaaaatactggtcaaggagaactttttccttttacctcatgttgtaaacttaagtggctcaataaaaattgatccactgtcttgatctgactgtgatttgtttggtgttaatatattattgttctgattagggaattggaactaaggacctcatcaaaccagggagtaactcccagtaaaattatctggacagattgcctgtataatgagaaggcaaaagcataaggcttgaggggaaacaaaatgctaaaagcagaaaaatcttggcaggaagatcaagacctgaatttagaaaaggtgtacttcaaaaccaatgagccactaataaaggtgaacataaggttaatattactaattgatccccccaaaataaattcataaacaattactggatgagtcttccgttttattacaaaaatgaagatcagtttgatcaaaatgaaagcttgttcacaagttttacatgaatattctaaatacaaagtctcctgaaacaacatacttttgatatgattttcatttttaaagggatgcaaacattccattttc

SEQ ID NO: 256893 - DNA, 829 bp, Homo sapiens
ggctcagtaaagcggaggcagcgggggaagatggcggcggccgttccacagcgggcgtggaccgtggagcagctgcgcagtgagcagctgcccaagaaggacattatcaagtttctgcaggaacacggttcagattcggtaccagaggcgtaggggcggccgggctggtgcggctgagggacgcctcacccccctggagatgcccatacattccgtattcctctgtgcccccgccctcgtcttcccgcggccggtggcctggaaggccggagaggcccagcttgtgctttggtgcctcgctcccgcctctcgggcgttctctactggggcaggggagcagctttatttcttggggcacacaggctgcaattgtagagttagaacctcattgggatccttgagtgggggtggaggccagaaaaataggaacccgaggatattgggggctagggcggagaggccgaggaatagtggtgtggatgagactcctgggagcggggcgccggctactagggaaatgggaagggatgtgaagatttctgtgggaacggtgtatccaacttgcttttctcaacagtttactaaatactgaacattaatgcgtgtgatttttaaaaaatccgtaggttgtggtttaagttttgatttaacatatcgaccctttaaatgaccttttcacctttatactttaagggagctacatgcacatttctcttgtgcagtggtctgtcattgttataaacagactaagaaatttatttgaaatgctttatactgtaggctctccatttgtcagcatagtctccatcttaaccatccgtctatagtc

SEQ ID NO: 256894 - DNA, 1650 bp, Homo sapiens
agtgtgttatcattgggcagaactggatcctgaaaaattcaagatgctaagcacctacactactttaagaatttggaactgaaacatgaagaggaagacagaaataagaatttgggaacctgaatagctctgcaaaaaacaccaaaggaccgttttatcgttttctgttgttgctgtggtggagtgatgcagtgggcactgccggtgggccagggggcgggtgcgcatgtggtagaaggtgtgcgctcgtgcctcccccacagaaaggctttgttggtttctaccacatcttggcttgcttttggaacaggctggcccagcatcatttgtcatcaagtccactgtggtgtattctgcgtgtccatggcgggggttctccaatacactcacactgtccatgttctttttattgccagggcccgagttgaagtgtcaagagagcaatcatcaatgataatgtattgtgtgagacctttgcatcttgtaaattttctcttttttctaaaaataaataataataaaatccggaagatggcggcggccgttccacagcgggcgtggaccgtggagcagctgcgcagtgagcagctgcccaagaaggacattatcaagtttctgcaggaacacggttcagattcgtttcttgcagaacataaattattaggaaacattaaaaatgtggccaagacagctaacaaggaccacttggttacagcctataaccatctttttgaaactaagcgttttaagggtactgaaagtataagtaaagtgtctgagcaagtaaaaaatgtgaagcttaatgaagataaacccaaagaaaccaagtctgaagagaccctggatgagggtccaccaaaatatactaaatctgttctgaaaaagggagataaaaccaactttcccaaaaagggagatgttgttcactgctggtatacaggaacactacaagatgggactgtttttgatactaatattcaaacaagtgcaaagaagaagaaaaatgccaagcctttaagttttaaggtcggagtaggcaaagttatcagaggatgggatgaagctctcttgactatgagtaaaggagaaaaggctcgactggagattgaaccagaatgggcttacggaaagaaaggacagcctgatgccaaaattccaccaaatgcaaaactcacttttgaagtggaattagtggatattgattgaaatagcagtgcttcagctctaaggatattagcaacaatgataaaacttggccttgaagaaatttacacaactagttagaacttgttactattgtaaaggaagagtcaactggaaaattcaaggagttaataaaatttgtttacttggtcccagcttttgagagataaatcccttatgaatccctggtctaaaatactttcctacagctgtgtaaaatactggtcaaggagaactttttccttttacctcatgttgtaaacttaagtggctcaataaaaattgatccaccgtgacggcaggatggcggggaatataagcgcaaggaaggacaggccctcaacagggatccccaattgggatggctttggaggagctggggggcatccccaatgggaacacttaggtccccacagaagtttgccccaaaaacgcccgggtggcgag

SEQ ID NO: 256895 - DNA, 457 bp, Homo sapiens
atcctcctatatggatgaatttcttgtgacaggcagatcagatctaaacagaaatccggcaaggtattttatttttaccattgtggcattgagatttatttcaaaaataagtgagatcaactatgcctatatttttaaagtttactttcataattaatccttttttgaacacttagaaacactcttctggctcttgtagcaaagtgtttccctgacgactgctgccaaagcagacggaagcagagactatcaggtatatcttaaaccttcaaaaatccagctgcactgtctcaaagaatcctcactgccaaaccatacttagttaaaagtaccaataatctgaagttagagcaatatattttgacaaacaatttatctagacagctaatgttaaaggttaagtatgtttgaggtcgacgcggccgcgaatttagtagtagtagtagtaggcggccgc

SEQ ID NO: 256896 - DNA, 693 bp, Homo sapiens
aaactttagatagagcatctacaaagtcttcctctggtttttatttaagccttcctttattatgtttacttcattgggttataattatctgttcctttattcatctcccgaactctcccaactgaagtgtgacatttcttagtttcaaggataaaatacagtgtctggtgcaaattaggccatcaataatttttccctggattacattttttagggacacacatggaaaaaaacttttttttttccctgggaaagaaatggggttgaaaccaggaaaagcttcagaaagtgggtaaggaaatgcatagaagcagaaaattacatgccacatttgggggtagcatgacaggaagtaaccagaaagttaaagtaaaggctggttgtggccaggtaatgaaaaaccaccaatgtcctgccaagaagcttggactttctcccttatgcaatgtgggagccatcagagattttacaacaaaggaggcaaaaacaaggtctggaaggcagaaaaatcactctagtagctggtaaagaaatggaagaaagaggaaaggcatcaggaaggggtatcaagtcaaaagcagctacaatggtatgattgagaaaagaggaaagaggctgagctggttatgacagcatagacagagagacacaatgtggattcaagagacattaatgagaaaaagtcagtaggac

SEQ ID NO: 256897 - DNA, 678 bp, Homo sapiens
agtgatgcatgtggggtttggtgctgggtggaggggaagatgcagtaggccaagaaaagcctctaccttccaatcttttccttttgggctgacaggtacgtttcaagggaaattgaatctgcacatttcagcttcatttgcacttaacacatctggctggcagtgggcaggaggcttttgatgtctgcgtttcggtgcccaagcctttttaagcctcttttctttgaagccagggagacttgtgtttctgccaaggagtaaacagacttgtacaccctccagcaatttagtctttggagacctggctcccaaaggccctgggggctggaggccccacttcttcatttgttcagcctacaaacacttattcaagacttactgtgcaaaagcttccccaaaactgcctttcataggaagggtatagagagaaactctggcagatttcacaatcaaactcaccaagctcatttgtctaagaagcaagggaagggagtctatgtcccaccaatattttctagagtgactttagctccccgataatttcatcagcctctctaccttcccacccacctctaaagtcatcccttgctgttcttatttgtaatgtgggcaaattgatgatttctcaatgtcatatgaagtgtgaataaagcacttgagaaagtgtggctgttttta

SEQ ID NO: 256898 - DNA, 444 bp, Homo sapiens
ttttagaaagctcgaatggccatattaatatacaataaaatagacttcaggatgatattaccagaggtaaaagggacaattgtccaggaacatataaggcataaaactgtgtatgtccagtaatagagcttaaaatacgtgaagaaatattgacaggccaggcaccatggttcgcatctataatccctgcactttgagaagtcaaggcgggaggatcgcttaagcctaggagtttaagatcagcctgggcaacatagtgagaccctgttgctacaaaaaactaaaaactagctgggcgtggcaacacgctccggtagtcccagctgttcagaaggctggggcaggaggatctcttgagcccaggaggttgaggctgtagtgatctatgactgtgccactgcactccagcctgggcaacagagtgagagcctgtcttaaaaaaaa

SEQ ID NO: 256899 - DNA, 994 bp, Homo sapiens
gcccgtgaggaccgcagaagtgatgtgatgtgacttcagagactaggtcatcacaggcgatacagcttccacctggttttctggagatgctcttgcttggatgtcagctgccatgctgtgaggaagcccaagccgcccagggagaggttctcgtggagaaaaacaagagcccagaaccaacttggcagccacgtggactgccatgatggtgtgtgacttccacggtgaggtcataaaagacattgcaacttcctccttgctctctcttggaacacttgctcttggggaagccagccaccatgttacgaggatgctcaagcagcctgtggagcagctcacgtgggtgaggaatcaaggcctctagccaacagccacaagggagcctcctcagcagtggagcctccagccccagtccagccatcagatgagactgcagccccggctgacatcttggatgtaacatcatgatcgaccctgagccagaaccacccagataagccactcctcaattcctgacccacagaaactctgagataataaaggtttgatgtttaagccacaaagttttggcatagtttgttatgcagtgatagattactgacagtcagcaaatctttccctgacccagtaggaagggatggcaggtgcacagtggggatctcatacccggctgtggggaaatcacaggaggcttctcagggtaacctttgttcacccaaggggtgttcctctgagaggcaggttacacctgggctgtcagggatgatctgtttgaatccacaaaagcatgtacacctagaggacctggagccatgccattcaggccaaattcttggttcacctgcagcttgaccaaggctgcaggctcagaaaaactgaaagcagtaggcacactggctttggaatcaggccaccagctgtgtgaccctgcgtgcactgcacctcctctctgggccctttgtgcagtaaataatttaatcttgcctaaaaagag

SEQ ID NO: 256900 - DNA, 433 bp, Homo sapiens
aggggttgggggaatatttttcctactgttctcaggcctcccttgaccaccattaggacaatgttcctaagtgaccattgtagggtcagtgtgggggttctgaaatatggctctgagaggcagagtctaagcccttgagtgtggatggacttagtgacttgcttccaacaaataggactgccatgatggtgtgtgacttccacggtgaggtcataaaagacattgcaacttcctccttgctctctcttggaacacttgctcttggggaagccagccaccatgttacgaggatgctcaagcagcctgtggagcagctcacgtgggtgaggaatcaaggcctctagccaacagccacaagggagcctcctcagcagtggagcctccagccccagtccagccatcagatgagactgcagccccggctgacatcttg

SEQ ID NO: 256901 - DNA, 423 bp, Homo sapiens
agctgaatgtgcactgggaccgcctgttctctgtcttttctttctctcttgagttctgagccccagagagcaggctccctttcccgcgcgccctggcgcctactggagcacccgggcccagcgtgtcctcgccccttgtctccggcagggggcagtctttcaaaagcattgattcagatgctgggggagtgagggtagacaggcccgagaaagagaaggggtggggaaggggcgaggagccgaagtaggccgaggcttgagggcagggccagggcgggggacaggctggaaggggcctgtgagaaggagaccctgagctgagaaagctcagccgggtaagctgagacgggcaggtggcagtaccccagcccccgccacctcctgctcttaccttcattggacagggatcagatacctggccct

SEQ ID NO: 256902 - DNA, 505 bp, Homo sapiens
cctgcaggaaggaagtcttcagttaactaaagaagagttaatgtcctagaagagtattctaggcagagattacagcaaatgcaaaagctctcaagtgggagagtacttggggtgtttgaggactatcaaggattgaagaggctgttgtggctggagggaccagggcagagtgaggattctgagaggtgaggtcagagtgcaaagggccttagggctgggcgaaggttgtcacgcctgtaatcccagcactttgggaggcagaggcgggtggatcatctgaggtcagaagtttgagaccaccctggccaacatggtgaaaccccgtctctattaaaaatacaaaaaattagccaggcatggtggtgcacacctgtagtcccagctactcaggaggctgaggcaagagaattgcttgaaccagggaggcagagttgcagtgagccgagatccgagatcatgccactacaccccagcttgggcgacagagcaagactctgtctccaaa

SEQ ID NO: 256903 - DNA, 350 bp, Homo sapiens
ctctgagacagagtcttgctctgtcgctcaggctggagtgcagtggcatgatctcagttcaccgcagcctccatctcccaggttcaagcgactttcctgcctcagccttccgagtagctgggattacaggtacccaccatgacgtccggctaatttttgaatttttgttggtagagatggggttacactgtgttggccaggctgatcttaaactcctgacctcaaatgatccgcctgccttggcctcccaaagtgctgggattacaggtatgagccaccatgcccagcccatagatattctttatcaagttgaggaatttcctctcctactttatcaagagggttttctt

SEQ ID NO: 256904 - DNA, 190 bp, Homo sapiens
tgttcataactgtgtgctcacatgcatagtctgttcacgaatagagggaacactgttaggacctggctcttcagccttggttctcaaacctcagcgtgcctgagaaccacctgaggagcctgtagaaacattaccggggcccagccccagagtttctaattcagaaggtctgggggaggagggaagaatt

SEQ ID NO: 256905 - DNA, 440 bp, Homo sapiens
agaccatctttaaaaagaaaaaataatcaggatatatcaatcctctcaaagacagtgcagaattgttagaagacaaagtgatgtttttaaaaatttgagagacaatatttccaaccagctgaatcataaacatatagtaaacatgaaagaataacttcaggtaagtaaaggcttgtaagtactacttcccatatatttgcttagtaagctattaggagatacactcctataaggttgaaggactaaatatgaaagtgggagtaataagatccgtgaaacacatcttccattttagaaaaatctcataacgaagttttacagttataatggaaggaagttctagatggatcattttatataaggctcagggaacaaacttccaaatggagcaaaagaacaaggtaagaggtctggcacgtggagttaaaaaaataacaaca

SEQ ID NO: 256906 - DNA, 440 bp, Homo sapiens
aaaacttacatgtaaccatgctcactatttttaaattttttcaaattttcaaactatatgtgggtaacctcatgctattaccataaaagtatctgctgaccttacttcttcttatttcctgaggatattcatatattaccttaaaaattgaatggtaagccaggcgtggtggctcatgcctgtagtcccagcactttgggaggccaaggcgggcagatcatgaggtcaagagattgagaccatgctggccaacatggtgaaaccccgtctctactaaaaatagaaaaatcagctgggcatggtggtatgtgcctgtaatcccagctactcaggaggctgaggcaggagaatggcttgaacccaggaggcggagattgcagtgagccaggattgcaccactgcactccagcctggcaacagtaagaatccgtctcaaaaga

SEQ ID NO: 256907 - DNA, 480 bp, Homo sapiens
ttttgtttttgccctccctcttttgcaattctaattgaacgtagacctttttactccctttcatgtcttttaacctcttttttctgttttccttttctttgcctctctgtgctgccttcagattatttcattagaactatctgtcagtttcctaattctctttttggctttgtctcatctgtcattagaaatatctactaggggccaggtgcggtggctcaagcctgtaatcccagcactttgggaggccaagaggggggatcacaaagtcaggagatcgagaccatggccaatatgatgaaaccccgtctctactaaaaatacaaaaagtagctgggtgtggtggtgcgtgcctgtaatcctagctactcgggaagctaaggcagagagaattgcttgaaccagggagttggagcttgcagtgagctgagattgcgccactgcactccagcctggagacagagcgagactccctctcaa

SEQ ID NO: 256908 - DNA, 444 bp, Homo sapiens
cctgtgtggctggcccaactgcttaggagcccgtctacctgcccgtaaactggagtaaagccagctccttgttctggatccagaatcccccaagacgtggccatttgtctcaatgtcaccaagcttcatcttccaacttattcacgggccggctccaacaggtcccaacaatctagacacaggctggtaagccattcccggctgctagaggcgccagggctgggagttggaaaaatgggtcacaggggcagccttcattccgctaagtggggccggcccttggtggaataatattaaacagatgcaattcagacctaagttgtgaagcccacagattgctaggctaacttgaaacaagatggtttttgaggataagtgttatggaaaagccagtttgtttttcaaacttgatgctaaaataaacgtgaaggccttcacatgaac

SEQ ID NO: 256909 - DNA, 454 bp, Homo sapiens
aaatcaaataaatgtaaagatccaacttcgtttatctctttcctctctttgaccatagtccctcgagaccgtagtctgctgcctagtccttctccttcaggaatccagtcaggtatttgtcaacctataccttctgaaaaataaaagcacctttagaaggcttagaggcacagaccttcaaatattgtctctgtagcaaagtctccaaacttttaaagtccgaaaataccaccctttgaatttctatcacttctttagtttcattcaatcagttgcagaaatatttcctttttttattttttttgaagacagagttctactctgtctcccagaatgtcatggcaggatcatacctcactgtaaccttgcatgcacgggctcgagcaatcctgcctatgagtcccagttgagtcccaagtagttgggactacaggcatgccaccatgactggcta

SEQ ID NO: 256910 - DNA, 428 bp, Homo sapiens
atgttgccttctcattttataaatgtttggatgaccccatctacattgatgatttaagtatcatctattagcccacgactcccagatatatatctctaactcacactctccatatggccaactgcccttgaataatgtccacttccgactcactgttacacagttccctgtgttgggagatggcactttcatctatccactcacccaaacgcctgggaatctacctagattatccattctccttcaagtctccttcaacccctggaagtaagtgataatattaattttgcaccccagatatctctcatacctgcctctttctttctatgcttgctatcactgctagcatgatttattcctgagcatctcttatgtcttagatagttttaccttttatggaagtggctctcaattatcactgtaaagca

SEQ ID NO: 256911 - DNA, 543 bp, Homo sapiens
tgtcttcactggctttcttccctgtgcatctgcatctctgcatctctgtatctctacgtggacttctcataaggacagcagtcattggatttttgctgattgtaatccagcatgacttcctcttaatttgattacatctgcaaagactatttgcaaatgaaggcacattcactggattcactggtgctgggggttaggacttaataatagctcttggagggacacaattcaacccatgatgggtctaaacaatgttttataattgatataaaagctaaaccatgttttcttaaaacaactagaaacttctaacccagtggcaactttgggtgtgcaagagagctcaaagcaaactctcagtttcctggcaagagaggaggcctccactctgtcaccccatggagactcctccttgatactgacattattgcaatacatgcaaaacacacaaaaaaatcaccttagagtttgggaaggatgaggatatttaatggcagcaatataagtaattttttttgcctctgcatatactcttttttaatt

SEQ ID NO: 256912 - DNA, 546 bp, Homo sapiens
gttctgggaagaccattgagttctgcctccccaccggctctgccccatcaaagaaggaagggctggcagtgtccaagggcagggaatgtctgctaggttgacggctccagctggtgctgccagcccaaagctcgctgggccacgcaagccgagagagtgagctctagggtagcagtctgcagactttttctgtaaagggccagattgtaaatacttcaggttttgcaaaccttgtggtctctgttgtaactactcaactctgctgttgtagcatggaaggagcaatagacaatgtgcaaatgagtatgtctgtgctccagtaaaactgtatttacataaagaggtgacacgtcagatttgacccacatgccatagtgtgcagactcctgccccagaaactgaatcaaagggcccctgggatcctacctgggctctaccacttaccttctggagttgtaggtgggtagtttcagcttcttcctctgttaaatgcgtttcttaagagcacatacctgctggttctcatgagtcttagtgagataatat

SEQ ID NO: 256913 - DNA, 133 bp, Homo sapiens
gtgataggaataattgagtgttgaaagcagagtcttgacatgatctgatttctaaattcaaaaggatttctctatgttcttcaaagtttatgaaaataattcatattgtatccttaatataaacatatgacag

SEQ ID NO: 256914 - DNA, 677 bp, Homo sapiens
gcgaccaagagctagggacccaggagagagaaaaatgcacacccaagagatggcaaaggggccccttctgatgacgagctaggggctctactatcctactggggtctggcccaccctcgttactatgggtttctggttgcaggagaccttagaggggctgatcctgcccccatcttccccacccacacaccaaggaaggctggttgtggataactgaaatcccagagtctgcttctgccatgctcttgaggctgaggaatgggctcagacaggtgggatccctgttactacatcagcactaagacaaagggacaagctctggaccaagaattaggaggctggctcagggctagttatttttctgggtcttggattccccatctgggaaacatggaaccaacagtatctatctgcttggactaccatgcaagtctgcacatgatctaactccaaaggagttggtcacccagatgttccttttggggctcctgggggcttccggtgcgctcttgcactcgcgcgctctctctctctgtctctctccctgaggtgaagacataagaggcagcagatggccaggacctttgctgtggtcccaggagccctcactgggtaaataacactgactcccagtaagcctggaaatttccattctttagggagaacattagtgagca

SEQ ID NO: 256915 - DNA, 638 bp, Homo sapiens
ggcctttcaaaagacatagaatatccaaaacaaccttgtcaatacaatatttcattaaatatttcaattaaatagtaattgaattaaataaataattatttaattaattatttcattagagagtgcataatcttgattatcgcagcttatcataagccttaaaatcaggtaatgtagtaatatcttgattatggtaacattataagccttaaaaccaggtaaaatcgactcgcgtcacttttaaggacgcatacactgaaaatgatggaataaaaaaagagatttcaaataaattgaaaccaaaagagaggaaagctggctacatttatgtcagacaaaatatcctttaagtcaaaaactgtaaaaagagacaattagggcattttataatgataaaggggtcaatttattaagaggctttaacaattataaatatacatatacccaataatagagattctaaatatatttttaaaatttaaggactctgaagggcgagaaagattgcaacacaataatagtggggaatttaataccccattttcaacaatgaacatatcattcaaacagaaaattaagaaaactgtggacttgaactacactttaaatggaactaacagacatatgaagaactttcc

SEQ ID NO: 256916 - DNA, 286 bp, Homo sapiens
cagcagaggggaggggaagctagttggtagagtggatagatagtacactagatccaagtctgtatcttgaatctctctcataacaccagcgtgtggctgtaaacccaggcctccggtttcctctgtaaaataaaggagatgcactaagatgctttctatgcctttcagtactatccttcagtttgctctgatcaagaattgaagagatccccatattcccgtggtttaattttccctgaagaccttggactgaccactttcgtaagtaatcaggtagacttctaat

SEQ ID NO: 256917 - DNA, 334 bp, Homo sapiens
gccaagtgccctgttctccaggcacaggggatgacttggggctccctgcttcttgcagctgttctgcacacctgggaagagtggcttccccttcgatccagatcaaaccctgcatatcaaattggtatgagagggtgggctttagtgatgtcaggaaaaatttaaaatgcacataccctctaagccagaatggcttctacacatcaagcctgtagctctacctgccaaaatgtgtatccatcgagatgttccagactacagtctgggggagaaaaatctggaaacctcttaactgttcaagtagagcaagggtgaaataaattatgaaacagcc

SEQ ID NO: 256918 - DNA, 685 bp, Homo sapiens
ccgctccccaagcactctgaatgacagttacaagattttgtagcaatgaggaaaacaggcatgatataataagttcaaaatacgttctggcacctgaatgaagaccgagagctgttgggttagtgtgggaggaatgtggggagcagttcttttttccctttttcaaattttatataatgcggttgctgtattatttttatgatttaaaaaaattaagggagaaaatgtgttcaaaccaaaccaatggctgagtgaggggaggcaacgaaaaagatcagtttcccttcctcatgatacaactcccaccagggtttcgggttttctcaccactgtttgctggaacccagccagcccacggagtgctacgcccgggcgaggagggtcccgcttctcctatccagccccagaggggccacatggcttctcgggaacaggagactgtgttccctaaacagccttctcgcccaaagcctagctggacatctagagtaggcagtggaggtggggatggcggctgttacttttcttgtttttatccttatatctgcttcacctcctatgcttccctccctctcttctctcttctttctttcgtattccctttcgcgctcttctctgtttttttcctcttctctctctctccctttcctttctcctcgcttgtctccccttgctctttttttct

SEQ ID NO: 256919 - DNA, 307 bp, Homo sapiens
  misc_feature (278)..(278): n is a, c, g, or t
cgcctgtagtctcagctactcaggaggctgaggcaggagaatcacttgaacccaggaggcagaggttgcagtgagctgagattatgccattgcactccagcctgggtgacagagtgaaactccgcctcaaaaaaaaaaaacaattatgataactatgcactcagcatttgggcagggacagggcagggacagggcaggggagggcatgctcggaggccagctcccccaacccccaacacttttggggatcctaaacacttcctgggcctcagtaatgntccccaaagcctcaggctttcttcccgca

SEQ ID NO: 256920 - DNA, 715 bp, Homo sapiens
ccagagagagaaggctttttgagattccagcgttcactgtaacatttcttgtatcaagaatgtagaatcgattgttcacatttattttcagaaaaggagatagagttgtaatgtacttacaagtttctaaccagtttttaaaagaccaaacaatactgaaaggtaaattaattgcaagcataggaggcaaaacattagttagaaaaattagtcaaaacaccctctcatttcaattcccaatgtgcaagagaaagaagcaaatcaaaatacccacatctcacatttaggttacagaaactattgcctaattattcaaataaacacctaacatttctttattctttgatgtggatattggtttctgtcctcaggtttgtttcctcacaattgattgctgcttttctaagaatctcattctcacaaaacatgcaaacacagaaataatggagactgttttcttttagacaccctttttaagatgaaagaaaacggttcccatgtacttccaaaacacttgctctcacgtgttttttttttttttttttttgccataattgtttcacatgcctgttcctaaaccagtcaaaaatgaaggtaaaggaactaccatgactgacttaagttaatcaagtttcacctcttggagtctggagggactttgcattccctaaagcacttgaccacttttacaccactagggttctgctagcaaaaa

SEQ ID NO: 256921 - DNA, 472 bp, Homo sapiens
gggacttaccaggtggactttattgaaagaattatgttttcgccattgagaaactccatgcaggactgaaaatctagttcctagaattccaagggttttaaaaaatcgatttcttgagaatgattaagaatgtcagtgaattggacacattttaattttctaatgtttaatttttttttcaagctactacagcttaggttcccaggtacagtaaactagaaggaataaaaatgtctaacatagtatttcatacaggagaagagcaaggacacaccttctaccccaccctgtcgccatcttcctttctcggaagcaaagttgtataatctgaaaaacctgacattccatattgagggtttattgtaaggtagtaaaaccagattttatatctcatttattcctacaacttctgatgtgcttccaaaaatggtattaaggcagcagctgaggaaattttatgagataatgaagc

SEQ ID NO: 256922 - DNA, 472 bp, Homo sapiens
tatttcccatcagccttagattaagacagaaagaaaatggggccctggcgtcaggaaagaaggtggctttgtccagggagggacagctgctgtggcagtttctgaagaaagtggaaaggcatgaatgggccctgccatgtgttgggtggccacaggcatgagctctcctggtctcggctttccaaggcccgggccacggtggcccacgaggacacccctgcacccccacatggcctcacccaccaattgccaatgtcctcaccttgaacccactcatcacaggctgatccagaaacttgctgagttttgttttgttgcaaacactgatttgctttgttgttttttttacttcactgggatgtaggatgccaggttaagatggactggtttctcctgccagaagcagctttgaatttaggatgcccagagggtgctgtctttttcttttgacagagtcgtggtctgttgccca

SEQ ID NO: 256923 - DNA, 786 bp, Homo sapiens
cgcccaacggggaagagcgaagatgcagggacacgcgcgaggagccgccgcagccgccgccgccgcgctgtggagcccgagtgagcgcggcgccagcccgtccggccgctggacaacatggaggctgcactgcccgggccgccgtggccgctgctgctggcgctgtgcggctgcccggcccccgccgcaggtacatgtactgggcagattggggtgagacgccctggatcgagcaggtggggatggacgacagcacccagaagatcattgtggacttggacatttactggcccaatagactgaccatcgacctgggggagaagaagctctactgggctgacactaagctcggcttcatccaccgtgccaacctggacggctcgttccggcagaaggtggtgaagggcagcctgacgcaccccttcaccctgacactctccggggacactctgcactggatggactggctgacgtgctccatccatgcctgcaacaggaacactgcggggaagaggaacgagatcttgagcgccctctactcagcatggatatccaggtgctgagccaggagcagcagcctttctgtacatgtactgggcagattggggtgagacgcctggatcgagcaggtggggatggacgacaaggacacagaagatccattgtggcacttggacctccaatggcacaatagacttgaccatgcactgggggcgaagaagtgtaatgggctgaccataaaataagctcgtccacgtccaactggaggtcatgccggaaaggtga

SEQ ID NO: 256924 - DNA, 795 bp, Homo sapiens
cgcccaacggggaagagcgaagatgcagggacacgcgcgaggagccgccgcagccgccgccgccgcgctgtggagcccgagtgagcgcggcgccagcccgtccggccgctggacaacatggaggctgcactgcccgggccgccgtggccgctgctgctggcgctgtgcggctgcccggcccccgccgcaggtacatgtactgggcagattggggtgagacgccctggatcgagcaggtggggatggacgacagcacccagaagatcattgtggacttggacatttactggcccaatagactgaccatcgacctgggggagaagaagctctactgggctgacactaagctcggcttcatccaccgtgccaacctggacggctcgttccggcagaaggtggtgaagggcagcctgacgcaccccttcaccctgacactctccggggacactctgcactggatggactggctgacgtgctccatccatgcctgcaacaggaacactgcggggaagaggaacgagatcttgagcgccctctactcagcatggatatccaggtgctgagccaggagcagcagcctttctgagccaaggaggtcctgcttgctggcccggtagacggaccaatggagggtctcgctggaccacaccggacttcacggaaatcgttgctgcagttggaagaatccacattgcatacgcataatataaccatggggcacgtctctgactgtacagtgtggcacgagggaacggatggtggccaacgaacaccaaatagcgaaaacgcagggcc

SEQ ID NO: 256925 - DNA, 412 bp, Homo sapiens
ctgatctataaacaaggttcaatatagaatgatataactgctgcgaccggcgctgccacaactacctgtgcgcattgtccaggggcctgaggattgatagcccccacccctgtgccactgcatctagcgcccatgtgcaccattggggggcctgagaataggcccactctgcctgcactggcacatgtgcacatcatctgagggtctggagatcaatatatgccactcactggcatctgcaggcaccgtctgcagaccagaggtcaggccagccccacctgccacaagtgcactggcacctctgcacatcatatgggggcctagggaatgacccaccctgctccctgccactggcgcctgtgcacaccattgggaggcctcaagagaagcccaccctgcctgttgcctccac

SEQ ID NO: 256926 - DNA, 534 bp, Homo sapiens
taaagggccacttatgccagaatttcccattgatatgttttgttgtgtgtgtgtgtgcacacatatatatatatattcacatatataatacgcatataaaagtcatgttatatacttaccactaagaaaaatgacaaaatgttggacaataaaaagaacataaaaacatttttcctatagataaaaattttaaatcagtctacttttgtatgtatttgagatgtatatatatgtacatgatactgttaattaattaatttttttttttttttggcagagccggggtctcactgtgttgcccaggctggtctgaaactccttggcttaagtgatcttccttcctcagcctccccaaagtgttgggattataggcttgttaatttttttagctaccattaaaatttgttttctgaattgactaaaaaatctctgtagtgtgatttttaatgactgtgtacagtattcctccttgtggatattacagcattttcataaaaagataaataaaattgaacttttacttatattacacat

SEQ ID NO: 256927 - DNA, 318 bp, Homo sapiens
attttgaaatacaagctaatctgagggggcttggtgggaagatttttttttcagccctaaggtttaagacaggacctttcttgtggtgtcctggagtatggagggtttattttttggttaacctttactgagagtacaaccctttggggttctacccttgtggggtggagtgtgtgtctcttatgtcacttctatcttaggctttgcccttgaagaccaagctcaagttcatctggtttggcagctttggggctttcctgctgattcagagtctggatttatttattgtcaaacatattaaaatgtagatgaggcaaa

SEQ ID NO: 256928 - DNA, 407 bp, Homo sapiens
gttaataacaaacttaagttaataacaatgtattgatattgattcattaatgttaacaaatgtactatagtagttgtggtggtcaattttgtgtcaacctgactgagacactgggtgtcagttatttggtcaaacattgttccgggtgtatctctgaaggtgctctagatgagaacatatgtgttgatagactgaataaagcacattgccctcccctctgtgggtgaccctcatccaatcaattgaagatctgaatagaacaaaaagactgagcaagaggagattcctcctgcctggctgcctcagccaggacattggtctcttcctgacttaaactgaaacatgggttccttttaggtttgaggcataggcttttggactacaacttataccctcacctcctctgg

SEQ ID NO: 256929 - DNA, 352 bp, Homo sapiens
atcctcccacctcagtcctccaagcagctgggactacaggcacgcgccaccatgcttggctaatttttgtatgttttatagagacagggttttgccatgttctccaggctggtctcgaactcctaggctcaagtgatttacccacctcagactcccagatttctgggattatagatgtgagccacagtgcccagctgacattgacatcttaaagattcacttttaggccttaacgcgtgcctctgtgattattattggtggtgatattggccttatttctaaaaaaaagttattggaaattaaaattattttgtggaaataattattttgtggaaagctaaacaggtcttcc

SEQ ID NO: 256930 - DNA, 321 bp, Homo sapiens
ataactctttgctgaagaataccaaaatcatctcatttttaaatgtgcatacattttgacccaatagttttattagaaaacaattctagggaaatattacatgtgtataaaactatgtataaggtttcgctgcagtgaaactgtttgtaactgtgaaaatttggcagtatcctaaatatccatcagtagggaatgatttaaataatggtaagttatactgtggaataccattgagttattaaataaaaaaagaagaaaagcctcttggttagacatatatatacactgacataggagttccaaagtatgctgttaagcagg

SEQ ID NO: 256931 - DNA, 344 bp, Homo sapiens
aaccaaaggcttgaatggtttaaaaggtactgcaaggatttttggtctttgtcttcctcaactgccagatgtcacacaaacctgacttctcctttaaaaaaataccatcatggagagaaacaaaggactgaatttaagaaacagtgctttgacataaaagagaggaatccatgaaaaagtaaccattgagactgggaggcactaaaatcttatatatttcaaaatttgactgattgtatttgtttctctgataaatagccaagtgctggcctatgagtaatcaacatagctatgagaatttttaaaaaagtggtatttattttatatacctcagtatagcgtga

SEQ ID NO: 256932 - DNA, 405 bp, Homo sapiens
aatgtgggaaagggaaaaatccagaactggcttactcctaagaaatgtggacccagttaggacacagcagttgacttttctaagcagccaggagtatccaagaaccaatttcacctcttagccaattgtgcctcacaattaattatttctgaatctttaattgctttgaaatggcaatgccactgatacactagactttctagtttgaggaattgtttttatgttgtaattcactgacttcgcttgcttgtttgctgttaaatccacatgtgacatacttaaaatagaagtgtatcataatcatatgaaaatgctcaacttggcattttatgagtatgtgtcactaaagactgagtaattgcagccttcaggcaatttaggctgaataactttgtttctgttcaa

SEQ ID NO: 256933 - DNA, 497 bp, Homo sapiens
ctcttcctgtcaaatggaaatttgaggttactggatacttttatattacataaagagcaatcagccagtgtagaaatgatgcttatccttattaataatcaaagaaatgcaaaataaaacaacagagtacatttcacaccctcagaagtggcccacttttagaagctagcattatcaattgctgaccagtatgtggaggaaatgaaactcactgctagaaggagtcaacatattcatctgctctgggcaacaatttgtcttaacttacaaagttaaatatgttattctacttgtacatgtgcaccaggaggcatattccttataagaggaaagccattgcagatgagcagtctggattaatttaaaaaaagagcaaagtcaactggaaacagtccaaatgtccatcaacaatagaacagattaataaattgaggtatatttccagcagtcaaagtgattgaactacagctagaagaatcaacatctatcaagatata

SEQ ID NO: 256934 - DNA, 479 bp, Homo sapiens
ggaatttgagaccaacctgggcattatagtgagtcctcatctctaccaaaaaagaaaaaaatgccaggcatggtggtgcatgcctgtagtcctaactactcaggaggctgaggtgggaagatcgcttgagcccaagagtttgaaagtgcagtaagctgtgatcatgccactccactacagcctgggtgacagagcaagaccctgtctctacaaaaaatgtttacaaagtttacaaagaaaaatacaaagttactgacatgggaatgtaacttatactatatgctataaaattaactgagatgattccaaattttatgttgatataacattaactatgtaaaatacgttaaaaataaatatattagcattaattatgggtaggagaattatggatgattgttttctatgctttgtatttttaaggttttcaacatgtatttttaacagcaatgtaaataaacattatttaatatatgtaa

SEQ ID NO: 256935 - DNA, 231 bp, Homo sapiens
tgtagagattatgtaatttccttcttgaaagatgttagatgacattaacatgaattgctttgagcttgtcataaatcctagctatcaagcctttaagtcaaagaaatacacattccctgtcattacttgggccaagttgctccttttaaaaagtacatctccagataaatcttgctagtgtcaagttttgtcttgattatcaagtaagccaagtcacaatgtgtcctctat

SEQ ID NO: 256936 - DNA, 318 bp, Homo sapiens
cctttcctccttcacctggtcaagttcacattcttcagtcccccgttttcttaaaactcaaatgagacccgattagacaataacaggaatggaaaagcctctcgtgaagatactctcatgaactgctctcaatttccccccttctgaggaatcttcaagccggctagccacatgtcagggcactgtgacacatcatttgagaatctctaatggagcaacgtccaggggaacatgggccaagcaatgactgcctggcaagtccttctcacgtggcagactagcgatcaataaatatctgttgatttggaaatatcagaa

SEQ ID NO: 256937 - DNA, 416 bp, Homo sapiens
ggataggacagaaggcctttcttctttctccagggagaagagatacacttaaaccagggtcccacaggctcaatgggtctccttccaaaatcagcttccagtgagccctcagattctccaaatactgggcagctggatttcccagacaccttctgcaatctgctgacatctaatatacctgtagactgttctcctgctgacaaggttgttcttgctcttatcctataaagaagagaggtggcagagagttggaggggagggcctccttccctggcatgtccatccgagggtctccaagaacatcctggctgtggcccacacctttctgtgtggttaggaggagtatcggatgccttctctttccaaccttggcttgtaagtttcccccaataaagtctgttccttcacccatacca

SEQ ID NO: 256938 - DNA, 697 bp, Homo sapiens
gtccacgtattctatactcaggcacttaaagtaaattatctcattcaattcttaaaacaaccctatgcataaggcattattgtactgttttacaaatgagtaaacaatttcagagaaggggcaaagacttatctgacagctaaatttggaaacaattaaatgggtgtattagtccattttcacattgctatatagaactgcctgagactgggtaattgataaaggaaataagtttaattgactcagttcagcacggttgggaaggcctccggaaacttacaaacatggtggaaggtgaaggggaagcaaggtaccttctttacaaggcggcaggaatgagtagtgccgaataaagcgggaagaaccccttataaaaccatcagatctagtgagaagtcactcactctcacaagaacagcatgggggaaactgcccccatgattcaattacctctacctcttctctcccttgacacatggggattacggggcttagggagattgcaattcaaaatgagatttgagtggggacccaaagcctaatcatatcaaagggcatgctctgtctagcttcaagtcacatatttttggaatctgggatgctttgagttctgtaaatcattattactttagcctccactgtactgttattgccactctagcacaacctccaaataattttctaattgtatgcacta

SEQ ID NO: 256939 - DNA, 396 bp, Homo sapiens
ttagcttcattcatttatgttatttaactgaccccataagcatttgtgttttgtgaccaccatcttaggttctaaacattacctctaccaaactgtaaaaagtaggaattctacacctgtttcccacacccaagatccatctcccctcctgtgataattgcctttcactcatgggcagtgtatattgggtaaaccagccaccttggccaagaatgatttgacacaagccaagcagggtcattcacgtgctttctcttaggaactttaaacttggacttagaagagctatgtaatctctgcatgcagctacaaccctgtcaatttggaaagtgtagggtagccatattcagccattttgactgcacaagcagagagatcttatttggagaaaaagaa

SEQ ID NO: 256940 - DNA, 611 bp, Homo sapiens
taaggcattctccgtcacccaggctggagtgcagtggcacaaccttggcttactgcaacctctgcctccttggttcaagtgattcttgtgcctcagctcccaagtagctggaattaacaggcgcttgccatcatgaccagctaattcagctaatttttgtatttttagtagaggcaggtttcgccatgttggccaggctggtcttgaactccggaccttaagtgatccatctgcttctgctgtccaaagtgcttgaattacaggtgtgagccgccgtgcctggccttgctcttagctttttgaagggactgcctcatctcataaagatttgtttactgtgacccttgcctttaaaaatttccccaattttgaactgttgagtcagaagccttgaaacctaggtaatttttgctctcaggttcaaagctacatttatctttaggttttttttttttttgtttgtttgagaccgagtgtcactctatcaccaggctggagtgcagtggtgcgatctcagctcactgcaacctccgcctccgggcctgcgatgtcctgccttacctcccgcgtcgccgcaccacacaccgccgcctacctcagccctttcttcg

SEQ ID NO: 256941 - DNA, 611 bp, Homo sapiens
taaggcattctccgtcacccaggctggagtgcagtggcacaaccttggcttactgcaacctctgcctccttggttcaagtgattcttgtgcctcagctcccaagtagctggaattaacaggcgcttgccatcatgaccagctaattcagctaatttttgtatttttagtagaggcaggtttcgccatgttggccaggctggtcttgaactccggaccttaagtgatccatctgcttctgctgtccaaagtgcttgaattacaggtgtgagccgccgtgcctggccttgctcttagctttttgaagggactgcctcatctcataaagatttgtttactgtgacccttgcctttaaaaatttccccaattttgaactgttgagtcagaagccttgaaacctaggtaatttttgctctcaggttcaaagctacatttatctttaggttttttttttttttgtttgtttgagaccgagtgtcactctatcaccaggctggagtgcagtggtgcgatctcagctcactgcaacctccgcctcctgggttcaagtgattctcctgcctcagcctcccgagtagctgggactacagatgcgcatcaccacacccagct

SEQ ID NO: 256942 - DNA, 653 bp, Homo sapiens
gcatcaaggggaaggtttgcaggtagatgaataactaagattttatgagttttgcagggttgtctgtatctaagatggaatacatcagggttttcctagttcattctctctattcctgttctacttttaaggatgggaactggaaaaaatgaagtatttaccatgggcatgcccccacccacatgcacacacctgtcatcaaaattagagccaaattagaaacagctggacagaaactgctacttaggttagtcatttggtgggcattttgttcaagtgattcagcaaaattctgcttacaaggaaaggctcagcaagtgtttgaaaggaggtgatgggaagagtgaagtagatggagggggattttcacaataggcacactggagcagacatgcatgccatcatttaaataaacatgaaggtgacctttctttagcccaggatttcataggctctaatttgtgttttggaaaactggggtaagtgagcagctattcagcacactggaacttgaatctttgtgtcaactagtctcaatcaaaacaggatgccttggtgttatttgatgtctaggtgaagtgagtgataagccttgtctttgtcttctattgtcaggtaaaccctcagaaatgtccagcatggccaggagcacc

SEQ ID NO: 256943 - DNA, 671 bp, Homo sapiens
gatgaaggaagattcagtctcaggattggggctcctccatgctgggtcggatcaaagaccaaatgtccatgaggtccctccagtcactggttcccctgggcaccctggagagacctgggatggggaatggggactgtgaagtggtcctttctggggtgaagggggcgggccttgtctgtcctggaactcttggcttagggcgccctcttcctggtgcaggacacaaattctagacccctcacctccagagcattgcggcagaaccaggtcaccaggcctgcctcactacctgctcccagcacacgaaaatctcgctccctctctccatttccctccagaaccagcaacagctttcctcgcaagctcaggtgtgaccaacgtgtagttctcctgttctgtgggagtaaaactggctgggcacacggccacaaagcctgagacccggagacctcgctcccccttcccttgcttctgctggaatgtgaatggaagtgtccacacctgcttcacgggcttctccctctccccctttctgagagctggaatgtgggtctggttttaacactgcttcaaccacgccatgaggaccatatccaggcgggatggacgactcgcatggccggcctggcctccacatcattgttctgccactccttctcggctccccctgc

SEQ ID NO: 256944 - DNA, 802 bp, Homo sapiens
tcttagtggaaggctcatctctgacaagagaaggggcccttgagaatggagctttctgtgtggcaatgaacatggacttgaaacctgctagactaggtcaggggcatatgaaggcatctgggctggccagactccagtggatggacagcggtctcctctcttaaattttaagaacttaaatgccagggcttccttaaacattgagcaatgcttacatgctctgagtcagcttggatcgtgatggctagaaggagtcatagaggctgactccctccatgttcagtccaggagagggaaggtgacttccctgagccgacgtggctggtcagtgtcaaggctgggcactgagtccagtgcagccctctccctatgggttcctccctccaacctgctcctgcccagagctgctccttccgctctttctccccttcctctgtctctggggatctggctgatgatgctctttgtgttgtcaggaaatgtgcccagcagccaagcataccctgtcattaaaccgaatctggtggtaaggatgtctttatgaagacacctcatcctgtcatctgcctgtgaccatcaacttggtctcggcccttttttttttttaaatctatgatattgggaaggtcaaattagctgatcgctaaggtgcattcccatactaaaaaaaatgttcagccaggcgtggttgctcacgcctgtaatcccagcactttgggaggctgagacgggcgtatcaccaggtcaggagatcaagaccattctggctaacatggtaaaaccccgtctctactaaaaatgc

SEQ ID NO: 256945 - DNA, 266 bp, Homo sapiens
  misc_feature (4)..(4): n is a, c, g, or t
aggnaggagtccacctcgcctcgtcgggcccggcctggccgtcgccccatcttctcgtccacgaacttgttctcgtcatattcatggaaggtcaaattagctgatcgctaaggtgcattcccatactaaaaaaaatgttcagccaggcgtggttgctcacgcctgtaatcccagcactttgggaggctgagacgggcgtatcaccaggtcaggagatcaagaccattctggctaacatggtaaaaccccgtctctactaaaaatgc

SEQ ID NO: 256946 - DNA, 2490 bp, Homo sapiens
  misc_feature (493)..(493): n is a, c, g, or t
  misc_feature (2114)..(2114): n is a, c, g, or t
  misc_feature (2146)..(2146): n is a, c, g, or t
taaaccatgacctggctgcagaccttgactggcttattggaacagatgcaggttcacagagatgctgagtcacagctggttttgcaggagtggaaaaaggaaaggaaggagatgcgagaaatgaccaagagtttcttcaatgcccagtttggaagcctgttccgcacagaccagaacccaacctacttcctaaggcgcctgtcgcgcttcgctgacatctacatggcgtctctgagctgcctcctgaactatgacgtcagccacactttctacccccggaggactccactgcagcacgaactgcccgcctggtcagaaaggccccccaccttcggaacccctctcctgcaggaggcccaggccaagtagccaagggcaaaaactagaaactgtaactgcccctgattgggcaggcatgatggggttgacttcatgtgggtctgagtgttgcttttggaaaagatacagataagccttttgatatttattttgnaccttacggagaataattctcccaatgattaagacaggagctagcagcccacccctccagcctttccccccatgcagggctgaaaggcaagcttcacattggaactctgattttgcctttttgtttactgaggtcctggaacatcaggtttcctgggataggtgagaccacttgatgccatgtctgtattctagcaggtcaagcttgaaaccgttcttgactcctccatggaacatttcctgaacatttacgggctatgcattgggaactgcaggggcacagtgatgggcaaagattagctgcttccagaaggctgatttcgtgggctccacaatggtaaaacgctgctgtgagtggcagagaggttccccaggtgatggccagttcccaaatcatttggtactaaggctttgacattctggcacatcacatcaaatagaacacagcctccctggaaggacttaagtgagaaagaacaagagaagctgcaactcctggacccttttgtcctcagtgtgtggttcctgcgtccttccccagggcaggagagaggagatgagagctctggtcaaaacctgccagctagtggaacagccttctatagagccttctgcaagaaacgagtgggtttgaagaaccaaaacatttgtggtgttttcgccatcagggtgtattggaggctgacacttaatgggtgtgtgttagcgcccagaactgctcggtgtcggggttctaaaagaatgcgctggtgttcttggcttcaagtttctgctttggagaagcagattcaggaagaatgcagctatatgtaaaccaaaggaagattttgacttcatcttattcagagctttataaggaattgttcgtcatttcagaagagcacatcctccacaggaggccactcctggtatttgagtcgtgaatcacacccgtgtcagtctgcatttctactggtcatttccatgaagattatatagacacacgtatgtaagactgtacttactgtctgagtccattcatgctgctataacaaaataccatatgctgatttagcttataaacaacagaaatttacttctcactgcccaggaggctggcaagtccaagatcaaggtgccggcagatttggtgtctggtgaggcctgtttcctggttcacagatggtgacttctacatggtagataggttgagggagctctctgaggcctctattataagggcactaatccctttcaggatgcccctcccccttaatcacctcccaaaggcttacaggctcacttaccaccctcctagtgttatcaccttgggggtaaagatttcaacacaggaattttgggggtcacaaacattcagaccatagcacttaacctttattttaaaatgtcagccaggtgcagtggctcatgcttgtaatcctagcacttagggaggccaaggtgggaggattgcttgagctcaggaatttgagaccagcctgggtaacatagtgaaaccccatctctacaaaaaataaaccacattagttgggtttggtgatgggtgcctatagcagcacctacttgggaggctgaggctggaggatcacttgagcccagaaggttgaggcttcagtgagccntgattgagctactgcaatccagtctgggtganagagtgagaccctgtctcaaaaaaaaaaaaagtcaattatttaaaaactcattagtcaaatattttctaagatccaaatttgttttaagcaattataattgtcttcattgtgtcttctattggaattgtagctgagattttaccaagtatgtattttattgtaagttactttgtctttctgttatagaacattatatatacatttctaattcttcactcatttattttttaatgacaggtttacatgtatagctttaaaaggcaaatctaagcatacttccttaaagatgcattataaactgttttctttcagtgaatggaagtgtagaatattacactgatta

SEQ ID NO: 256947 - DNA, 1366 bp, Homo sapiens
  misc_feature (493)..(493): n is a, c, g, or t
taaaccatgacctggctgcagaccttgactggcttattggaacagatgcaggttcacagagatgctgagtcacagctggttttgcaggagtggaaaaaggaaaggaaggagatgcgagaaatgaccaagagtttcttcaatgcccagtttggaagcctgttccgcacagaccagaacccaacctacttcctaaggcgcctgtcgcgcttcgctgacatctacatggcgtctctgagctgcctcctgaactatgacgtcagccacactttctacccccggaggactccactgcagcacgaactgcccgcctggtcagaaaggccccccaccttcggaacccctctcctgcaggaggcccaggccaagtagccaagggcaaaaactagaaactgtaactgcccctgattgggcaggcatgatggggttgacttcatgtgggtctgagtgttgcttttggaaaagatacagataagccttttgatatttattttgnaccttacggagaataattctcccaatgattaagacaggagctagcagcccacccctccagcctttccccccatgcagggctgaaaggcaagcttcacattggaactctgattttgcctttttgtttactgaggtcctggaacatcaggtttcctgggataggtgagaccacttgatgccatgtctgtattctagcaggtcaagcttgaaaccgttcttgactcctccatggaacatttcctgaacatttacgggctatgcattgggaactgcaggggcacagtgatgggcaaagattagctgcttccagaaggctgatttcgtgggctccacaatggtaaaacgctgctgtgagtggcagagaggttccccaggtgatggccagttcccaaatcatttggtactaaggctttgacattctggcacatcacatcaaatagaacacagcctccctggaaggacttaagtgagaaagaacaagagaagctgcaactcctggacccttttgtcctcagtgtgtggttcctgcgtccttccccagggcaggagagaggagatgagagctctggtcaaaacctgccagctagtggaacagccttctatagagccttctgcaagaaacgagtgggtttgaagaaccaaaacatttgtggtaggtctcccaggagcttgttaaacctggaaacaccacctgagttggtttcatctgctcattggaagaaagaaaatgaaccaggaaaaagcatctttgtcatgaaatgctatgccatgccacccacccagttgaattggaatcctgttaaaacatgagatttaccagaaacagtcctttgtctagatggaaacaaacaagatcctggcttctctctaatga

SEQ ID NO: 256948 - DNA, 425 bp, Homo sapiens
taaaccatgacctggctgcagaccttgactggcttattggaacagatgcaggttcacagagatgctgagtcacagctggttttgcaggagtggaaaaaggaaaggaaggagatgcgagaaatgaccaagagtttcttcaatgcccagtttggaagcctgttccgcacagaccagaacccaacctacttcctaaggcgcctgtcgcgcttcgctgacatctacatggcgtctctgagctgcctcctgaactatgacgtcagccacactttctacccccggaggactccactgcagcacgaactgcccgcctggtcagaaaggccccccaccttcggaacccctctcctgcaggaggcccaggccaagtagccaaccgtggactagtattccattccagcgtactactagccaagccgtggactagt

SEQ ID NO: 256949 - DNA, 295 bp, Homo sapiens
ttaaaaaaagaagtgattttgatttcagtagtttaaaaacaaggatttttgaatcattctctgttgctttgcttttttattgcctcttcagagaaatgaccaagagtttcttcaatgcccagtttggaagcctgttccgcacagaccagaacccaacctacttcctaaggcgcctgtcgcgcttcgctgacatctacatggcgtctctgagctgcctcctgaactatgacgtcagccacactttctacccccggaggactccactgcagcacgaactgcccgcctggtcagaaag

SEQ ID NO: 256950 - DNA, 463 bp, Homo sapiens
ataaatgtatgtaaccatctattgatgaaatccaagtctggcattccatgggctccttgccagatggcagaaacttaatgagttatatagcatcctttgtaatgctgcttgttatagttggaatgtacttgtgatatttggctgtatttaactataatggtgaaggtgaccctttagatccaataaggcttctccccatcttctacattttgttatgaacacagtaaggcacagtagtatgttctttttttggaacagggtaggcattttgtttattgtttgcttgcttctaggtgttttcgccatcagggtgtattggaggctgacacttaatgggtgtgtgttagcgcccagaactgctcggtgtcggggttctaaaagaatgcgctggtgttcttggcttcaagtttctgctttggagaagcagattcaggaagtaggtgttgcttaaaaataattcttg

SEQ ID NO: 256951 - DNA, 563 bp, Homo sapiens
gacaagtgtatttccccatctgtagagaaaggatactcatttatatctcacagcattgtcgtaagcatcaaacccaatattgtatacacaatgctcattagagtattcaataattggtagctattctctctcattgtttagcacatcaccttatacctgcgtagcactttgcagagcacttaggaaacaggcagcacttaggaaactataactatggagcaacatactatattgctacagtgggcaactataactgggcaacatagcaagaccctgtctctacaaaaaattaaaaaaaaaaaaaaaaaaaaaaaaaaaaccaagctaggagtagtggtgcatacctttagtcccaactactcaggaggctgtggcaggaggatcccttgagtccaggcattcaaggctgcagtgagctatgattgcaccactgcactgcagcttgggcaacagaaagagactctgtctctaataaataaatagaaacatgtaatgtgaaattaaacctaccactgaggtagggaagttggctttatgaaatgtcattactttacatacaacac

SEQ ID NO: 256952 - DNA, 95 bp, Homo sapiens
aatacttaacgaggctatcagcaaacaaagagaagaggcccaggtgggctcaatagccaggtcacaaatggttgcccaaagaaaaaaacggtgca

SEQ ID NO: 256953 - DNA, 363 bp, Homo sapiens
gattagagagagtccacagaggagtagtataaacttttcaacgtaaaggttacttatgagctgacaaaaaccaatgctagctgtgccaagatctaacacaaacagaaattcctacaatcagaggaaagggtagaggctgtgtttgtttaaaaagctgattatacacacatgtaattggtgtgtactttaaagtaatgagttacatattgactgtcaacttatccaaatatggagagattctccaatcttaatctatcttgacatttaggcttagtttggaactgctaggaaattgcaaaactgataattttttattgttgcctgaaagcatatctgatgtgctacagaaattggcaccacctg

SEQ ID NO: 256954 - DNA, 325 bp, Homo sapiens
agagaggtgatctatcacagcatcgaacttcagcacatgatgcatctgagagccgagaacttagtgtttcccatctctccacctgggctttgagaagccatcctgaaagagaggacatttggctttctcagagcctcagctctggaactagaccagaggttggcaaactctatctgtaattgtccagatagtaaatattttaggttttgtgggccatagggtctctattccaactactcaactctgctgatgcagcatgaaagtagccatagatgttaagtcaacaaatggtcatggcagtgtttcaataaacttcatttacaaa

SEQ ID NO: 256955 - DNA, 372 bp, Homo sapiens
aaccaatcccagtgacttcctttaactatgggaaataatctcctaaaaacagagagatcagattccccacattctagctagccaaatgaccgttacggcaagcccacaatatttttgctggtcagacagctgcagtgtctgttagcacctgatgcaacccaatgggctgtctaatgagctctggtgtgtatctttctgtggaaaataatgtgtatgcatggtcacccaagttcaacacggccaggggtggggccgggggtcagcacgggtgtgtcttgtaaggcagtctgtgttgcctgttaggatataaaacaattggtatcagcaatgaaacatgcccagtgtgacctgctatttaaagaggaaaaaggc

SEQ ID NO: 256956 - DNA, 471 bp, Homo sapiens
agagagggctcttaagagtactgcattcatattcatagggttttatggagactacataagatcgtgcacgttaatgtactcagcacagtgcctggtatgtagacaaaactcaagacatattcgttattagattttaatgccaaggcagaatcaaagcctgggctgggttgagggtggggtccgctgaagcctctggagaaggtccagcctgtgccccaacacagcaggaagccactggtctctggtcgagtctaagcttgctggcctagccacagactgttccgggaagctgcgagcaggcacttgtctggggtggggcctcatgctccttggctcctcaggcccagaaagagacctgcatctgagtgaatgtgcacatttacaagagggcacacatgcatactcagtagtcaattttttgaataattgtgtgggtacattagttctgtgtctacctggccatgaatggac

SEQ ID NO: 256957 - DNA, 1055 bp, Homo sapiens
ctgggatgtccagaggcggccccactacatccattctgccctctgtgggcacaccttgctctcccgcagagactagaaagccaaacacgtttcccaaactcctttcagcagagtgtctggaagtggcttcggtgctgtcgagcgatgctaggtttatggtttggaaggagggcgctcctgtctctgtcggcgtgcgacacatccccaacttacagctgaaaacagccatcttattttggtcatattttagggtgaggaattcggggaggggtctttggggcaattctttcctgagtctgtcatatgagtgtgttcagaagtcactgggctgtgagtccaagatgggacacccatgaggctggagctctggcggggctgttgcctggacgccacacatggtgtctgcagagtggcgctcacagggtgctgggcttttccgcatggggttggtctcctctcgtggagcctccgaagatgtcaggtgggagttgcagggcgtttcttacgtggccgcaggagccctgtgcctccactcccttctcagacctcacctctccgtgggacagccccacagaacttgcagagctgttaaaggctgttgcagagggaggtggcaccctgggggccgcagcagcccggggagtgtggctcccccgcaggcgtggagactgggctctaggtgtttttggggcaactcaagcggagattctggagacgctcacatctgctggaatgcaggcttttcgttcgtagaaacagcaagcggccatgagtgtgattaattgggaattggaggtgagtaaagggtttcccggtctcctaaaccaacctgaggaaacaggtggtcattgttggcatttaactgtgagtatttccaaagcccgccgtagattgaaactccctgccgtagctgtgcagggtgtggacaggatggggatgggggttggtctcagtagggaggcagggtccccgtttttactaacatcagatttacaggatcagctcgacaaacagactgcttttttctggctggctgaaaataaatgggagagaga

SEQ ID NO: 256958 - DNA, 556 bp, Homo sapiens
gcttctggctaaaaatgggatcctgttgtcactgaccttactccccgtcttttctttaagaaactcttgagtatttgtaagaaaatcaaatctatcttcaaataaccaagttttcttatctttgagaatcttgagtgcaatgtgtcatgggctctgaaggtcttacgttgaggaatggcaatattatcagaattacgtgtccagcttcccaagcttactactttgaaggaacacatatttacacaattctgatgtgtttattaaacaaacagctttaccacttcgcagtcacgcttctctaagtctgcagtctcgtctggcctgactttctccttgtgccaagaattccttcaccttttctctttagcctttggccccaggaaaatgggaaagtaagatattttactcctggccaatgcctgatttttagaagccttcctcactccctggcaaggcacattttcctgttacctcagagtaaagagactcggttctggggttctgcatagtgatgctacatgcctgacccttgctagggtttgagggtccttgggaa

SEQ ID NO: 256959 - DNA, 619 bp, Homo sapiens
ctgtaatcctagaactttgggaggccaagatgggcagatcgcttgagtccaggagtttgagaccagcctggacagcatggcaaaactccatctctactaaatatacaaaaattagccatggtggcacacgcctgtaatcccagctactcggcaggatgagggcgcgagaaccacctgaacccaggaggtggcggctgcagtaagtggagatcatgccactgcactccagcctgggctacagtgcaagactctgtctttttttaaaaaaaataaaaaataaaaagaatgcattagatactcgccttttcaaacctcaaaggctgcaacatccccatcatctgtgacgggaaagcagcacccaaaccttcaacctatctgggtggtctataagcctgtgtggttgtatctgactcaactcagggttactgattttcaaaacaacagcaaaaagaaaagatccccccaatcttctcctgacctacaaaatcagaatctctagacggtaaggcccaggaatctgggtgtggtttttttgttgttgttgttgtttttggaaacagattctcactctgtcgccagtatggagtgcagtggtgggatctcactcaccgcaacctcc

SEQ ID NO: 256960 - DNA, 285 bp, Homo sapiens
acatactcttaaataaccaatggatcaaaggagaaacatcaagggaaattagaaaatactttgagatgaatgaaaatgaaaacacaaaagcaaaactgtgcttaaaatacatagttgtaaaagcctacaataaaaataaagatcttcaattgagaacatgtattttttttttacattaaggaagtagaacaaaaaagcacaaactaaacccaaagccatcagaaggaaggaaataataaagatcacagttaagatacacaaaatagaaaaacaatagagaaaaat

SEQ ID NO: 256961 - DNA, 639 bp, Homo sapiens
ggagaaataggaacacttttacactgttggtgggactgtaaactagttcaacccttgtggaagtcagtgtggcgattcctcagggatctagaactagaaataccatttgacccagccatcccattactgggtatatacccaaaggactataaatcatgctgctataaagtcacatgcaatttcttaacaaaagtcaccaggcttccaagctccaatatttatatcccctccacctctactgagtcaatgccacattttagatttttttattttttgcgttccacttctatcaaattttggtagttaatacaaataataaacaaagatcaatgccaattttgttagttttcaaagaaattttttaaataatgaaacaataatgaaaataaaataataaaacaggtaaaaattcaatgataaataacaataaatgtgaagtaaaatggtactcatacatgaatattggcaaaactatattttcacttgattgagcaacatagatcaagattaataatgtattttgatttgcagtaacattgatacaaaccttttaaagaaataataaactttatataaaaacaatgtgtatgatttgcttcctgtcatcaataaaaataggaagctatttgccttagtctg

SEQ ID NO: 256962 - DNA, 537 bp, Homo sapiens
caaatcctgtataccaagaatacgatacccagcaaaactgttcttcagaaatggagaggtaaagattgtcctagataaatgaaaactgagggaataccttattatcagaactgctttataaaaattctaaaggtaattattcaacttgaaataaaaggatgctgaagtgcaacacagaagcatataaaagtgtaaaattcacttgtagagttaagtatataaacaaacagaataatactgtaatgatggtgtgtaaattgattttaattttagtacacaagttaaaagtcaaaaaatattaagaataactttacaaaaattcgttaatgaagttacagtataaacagatacaaattttgacatcaataatataaattgtgtagcggggagtaaaagtatagagatatttgcatgcaattaaagcatacttaatacttctaagttgttatcagcttaaaatggatggttttagtaataaaatattttacatatgccttatggtaaccacacacaaaaatacatacagaagatacaaaa

SEQ ID NO: 256963 - DNA, 205 bp, Homo sapiens
caggtttaatcctgtcactgtgtgactttggaaaaatgattcccactttgcacctcaattttctcatctgtaaaatggggatatttatatacatatcccttcttgtttgtgaggatgaaataaactaatacatgcgatctttttttttttttttttttgagagtctcgctctgttgcccaggctggagtgcagtagtgcgatctc

SEQ ID NO: 256964 - DNA, 1014 bp, Homo sapiens
atgagagctgtcttcatccaaggtgctgaagagcaccctgcggcattctgctaccaggtgaatgggtcttgccccaggacagtacatactctgggcatccagttggtcatctacctgacctgtgcagcaggcatgctgattatcgtgctagggaatgtatttgtggcatttgctgtgtcctacttcaaagcgcttcacacgcccaccaacttcctgctgctctccctggccctggctgacatgtttctgggtctgctggtgctgcccctcagcaccattcgctcagtggagagctgctggttcttcggggacttcctctgccgcctgcacacctacctggacaccctcttctgcctcacctccatcttccatctctgtttcatttccattgaccgccactgtgccatctgtgaccccctgctctatccctccaagttcacagtgagggtggctctcaggtacatcctggcaggatggggggtgcccgcagcatacacttcgttattcctctacacagatgtggtagagacaaggctcagccagtggctggaagagatgccttgtgtgggcagttgccagctgctgctcaataaattttggggctggttaaacttccctttgttctttgtcccctgcctcattatgatcagcttgtatgtgaagatctttgtggttgctaccagacaggctcagcagattaccacattgagcaaaagcctggctggggctgccaagcatgagagaaaagctgccaagaccctgggcattgttgtgggcatatacctcttgtgctggctgcccttcaccatagacacgatggtcgacagcctccttcactttatcacacccccactggtctttgacatctttatctggtttgcttacttcaactcagcctgcaaccccatcatctatgtcttttcctaccagtggtttcggaaggcactgaaactcacactgagccagaaggtcttctcaccgcagacacgcactgttgatttgtaccaagaatga

SEQ ID NO: 256965 - DNA, 157 bp, Homo sapiens
tatcatattattttgtaatataaactacacagactaaaggtctataaaatcacctggccttgagcataaattaggagaggaaaagagagagaaggaaaagtcatttataaatgaattattaacattccaatttagtcaacaaagagaaaactcaaaa

SEQ ID NO: 256966 - DNA, 1535 bp, Homo sapiens
ccgctttttattttatttttattttgagacagtgtctcactttgtcacccaggctctggagtgcaatggcgggaggcactgcagcctcaacttcctgggcctcaagctgtgctcccatctcagcctctcaagtagctgagactacagaaaagcaccaccacgcccagctgatttttatattttttgtagagatggggttttgccatgttgctcaggctggtcttgaactcctgagctcaagcagtccatctgcctcggcctcccaaagtgctaggattataggcatgagccactgtgcctgccctcactgtagttttgatttgcatttccgtaacgatagtgatggtgagcatcttttcaggtgcttgctggccacatgtacaccttctttagggaaacatctcaaggcctttgccactctcattttttagagatggggttttgctgtgtcgcccaggctagtcccaaactcctgggctcaagcgatcctcctgcctcagcctcccacattgctggaactacaggtgcacatcaccattcctagctaaaagttttaaagtttgatgaagtttactttatctatgttttctcttgttgcctgtgcttttgtccaagaaattattgccaaatccaatgtcatgaagcttgctatgtcttttcctgagagttgaagttttagctcttatgattaggtctttgatccattttgagttgatttttatatatggtgtaatataagcaaaaaacttctttttttttttattttagacagagtttcgctcttggtgcctgggctggagtgcagtggcgcgatcttggcttactgcaacctccgcctcctgggttcaagcgattctcctgcttcagcctctcaagtagctgtgattacaggcatgcgccactatgcccagctagttttgtatttttagtagcgacggggtttctccacataggtcaggctggtcttgaactcccgacctcaggtgatccacccactttggcctcctgaagtgctgggattacaggcgtgagccaccgcacctggccaaactttgttcttttgtttgtgattatccagatgtcccagcgttatttgttgaaaaaactgtcatttccccatctaatggtcttagcatccttgttgaaatcagttgactatacatgtgagggtttatttctgggatctctattctattccttggactgtaggtctgtctttatgcgagtcttaaactgatttattattgtagctttgtagtaagttttgaaatcagaaagtgtaagccctccaactttgttctttttaagattgttttgactgtttctgtcccttgagattccatatggatttttctatttctgtggaaaacatcattgggattttgatagggatggccttgaatctgtatatcactttgggtagtattgacatcttaacaatagtgagtcttctaatcagtgaacagaggatgtctttccatttatttgtgtctgtaatttccttcatcaacattttatagtttttagtgtctttc

SEQ ID NO: 256967 - DNA, 752 bp, Homo sapiens
cccgggctgcatgtgattcgtcacgagatatttatataatgtcttcaaaaaataaatgaaccttaactttgtctttctctctcaaattgggttggctattactatccatattgccataatcatttataaacagtaatcacaatctctactgagcccatgtctctaatcatacaagtctctgtatctttatgattaacatagcaaaaatgttctgaaattataactttaatgagacataaaagtaaaatcttgttttaatttgtagaaaaattcagttcttttaatgccacactcagaaaccaatgacatttcagtgaccatgagaagaaaaggaagggtgactatggtggatgtaagcactgctgcggttctttacatacctaccctgctctcagcatccacactaatttccatacttctcatcacactgatattggttttggccatgcgacttgctttagctaatttaatgtaggtgaaattgacagtatgcctgttctagtccatattcttgagaggtattacatgtttctcttgtcttcttgttattgaccatgagacgactatgccctaggaagatgctgccctttagcctgagcctcagaaggacttggcctgtacttgaatccaatctacagcatgaatccaagccttgcttaggtcaagctccagacaactcaccaaccttattagcaacaacaaatgtctcaaggcagtgagttttagtttaacttgttatacagcagtatggt

SEQ ID NO: 256968 - DNA, 423 bp, Homo sapiens
cctgtgattcccaggtcctgctcagctgggattgaccatgtgactcaggcctgatcagtggggtgtgagatcagtgggtgaaattcttcttaggaaagctttgctcttgtgaaagagcactagattcatgaggcccttttctccttgaatatgggagtgatagctggagctgcagcagccaccctgaggtcacacatcagcagggatgaaaataaagccaatatcatagggatggtgggacaaaaagtgagaaagaccctggtgtcttcgtgaaagtggtgggtattattgcagcgagaaatacacccttagctgtttgtgtctgttttttatgtgtgattctgtggtaaaaaagcatccatgaccaattaagtaaatatttaacaccaatcaattaataaaattaacaataggcaaagattc

SEQ ID NO: 256969 - DNA, 356 bp, Homo sapiens
tgagacagagtcttgctctgtcacccaagctggagtgcagtggtgcgatctccactcactgcaacctcctcctcctgagttcaagcgattctcatgcctcagcctcccaagtagctgggattacggcacatgtcaccatgcctggctaatttttatatttttagtagagacggggtttcaccatgttggccaggctggtctcaaactcttgttctcaagtgatccacccgcctcagcctcccaaagtgctgggattacaagcatgagccactacgcgcagcccaatctaccaatctaccgtctttaactggaagcctaccattgttattcaaacttgagaattcagactcccaaga

SEQ ID NO: 256970 - DNA, 521 bp, Homo sapiens
ggcaccctgactttcgcccccttcttacctgagtatcagcttacttccatctggggactgaatatggggcagattccagaaaaaggaggttggggcaccaaaaccaacaccaactctgccaacggagccagcacagctatttgtctccaaccacaggccgcaagggaagttcacgggctcggcacccccaggtcccggatgtaaggatattgcccgttagacaaaggaaaggccccaagtccacaactcatgtttgtgagcttaaccttgtcctataaagcactttggaacaggcccaggttctcccaccatgtacagctgccattgacctggacagtcccgcaaggtccttcagtggaaacccagaagggagagtcactgcatgtgaaccctaagggttctggaggtcaaagttgctgtgggtgacaggcaaccaagactaagggcaaacttgaaacataaatgagttaaaacccacaaaaataagacagttttaaataactaaactgttttctcattct

SEQ ID NO: 256971 - DNA, 233 bp, Homo sapiens
gctggtccaaggtcacttcttattggttttacaacacctataagacataaatgttgactattttcactatcgtgggcggggggtgggggtaggtatataaactggacatatatcccagtagaagtgacaagtgacagccaaagaggcccaagggcatagccttgagatgaccaagaaacatccctatgagttatggacagagttagggaggacaaagcccccatggaagccgg

SEQ ID NO: 256972 - DNA, 435 bp, Homo sapiens
tgtaattagtcagcccctaattctgtctatagcttagactaatacttcaaaactgttttccaaaagatactcattcattcaacgtatatttagtgaaggcaaactatgccagtcactgggctaggagaggcatacagaaataaataaagtaaatatggatcctgcactctgagagcttacagttggggaaaaaaattaacaagtaaacaaatcgtgcaaaattctgtgaaagaagtgaatacggtgttataattttatatattaaatacgtatatatgattttaggtggataaatcccaaaaactaagagtgaataaggcaaaatgcaaacaataagaagtgtataatacaccatgtggtaaaaatcttgtactttaacatggcagagtctcagttacctattgtgtataataaacgacctcaaaattcaatgtc

SEQ ID NO: 256973 - DNA, 998 bp, Homo sapiens
acaattaattggtgttgacaccaggattggtatgcatatgtatgtttagaattttatttttatttttctggatataaatgattatataaagtaaaaggctggatgaacctaggttatactgtactacagctttccctctttgcccattgactctgtgcttctcaccttgagcatcactggaccaggatgttccttagtcatagtgatgcatcctctggcatttcttgaataattttcctgtcagaactcttactataagatgatcatttgaccttctaaaatgaagttttgtataggctaagtgcttgtggaagttctactgcaaacaccagctacaactgtaggcaatacaatcgaatacgaggtgtacaatgaagtaaaaaccattggctacttgtagtgggtttgttttcaaggagaaaatgaaaagtgataaaaaatagagatgtaagagagcagaagcaattaatagagtttcccttatttttggctctgatcaactatgacaaaattgttatttagaaatatgaaacttttaaatctttcatttttctaaaactctacatatatactgatatatataacataaaatatattctaaaagtctgaacacaaggcagaaactcactagttatacttaactgttaaaaataatttataagtttctagtgtttcagattataccaatgaattgcttattttcataacatgaggattttatcactttatcttacgaagattctcagtggtttaaagaccctaaaaatgaatgcttctgctattgtcttttcttcacggtttacagacatggtttaaagtgacaggattgttctctaatagagtatagagaacggccacgatttattgagctttgcaaggtgaaagagaaaattggcatcagcaagcataaattcccaagtagtaaattcccgcaaagtagtatagcatcaaaatggtgtagccacatttatattctgcccactctgaagtgaaatttt

SEQ ID NO: 256974 - DNA, 431 bp, Homo sapiens
atatactggtctctgaccctggttcctgacatggagctcctaaaacccttgtaatttctgaagtgaaagggtactaggagcatctttgttctaataaaatgactctcggtgggctcttagatgggggctgttctcgaggaagaccaagccatgattagaagcttggaacttctggagattgagttaataatgaatcatgcctacatgatgaagcctccataaaagtccctgaagtacagggtttggagaacttctgggtgggtgaacacatccgcgtgatgggagggtggtgcaccccaactccacagggacagaagttcctatgcctgttctgctttcggaccttgccctatgtacctcttcctctggctgtccatctgtatccttatcatatcctttattatataataaactggtaaacgtaagtgttt

SEQ ID NO: 256975 - DNA, 674 bp, Homo sapiens
gccagcgggttcgagtgaagatgagaaacaatcagatacacctgtttcctccaggaaagaaaatgtggccagggaaagagatgggaggaaggctggtcattgcctattccactgtgcacagtttgaatttggagccatgaaaagtattgcttggttaaattaaaatcattcaaaagataaaacataaacatttaacaccagcacaatatgctgggaaacaaaatgaaaggatttctggtctcggtgctgtaggtcacatagccactctttcctggattgaggctttccagcaaaggggctgggacgtaaggctggcctgctggtgtggacagagattccagcaacatgcatgacctgggggtacaaggattgcttcctaaacaatgataagcacacagccacctaatagtctggatcggctgagaccatcctgatttcaaacacccagtccccttgccttcctaagaacccctgtgtttctcagactgaaaatgtgttttgaactttgttcacgaagtgaggccgctgttgaaattcgtcaagactgggaaagagccaaagtgggaaggagcatgggttgattggcacaaaagtaggtctgctgataaagaatggaagtaaaggggccatcaggtagaagcttttgctgtgagtcagaaggacaatttaaaagt

SEQ ID NO: 256976 - DNA, 136 bp, Homo sapiens
attagaaacatgtacacttaaaatatttccataaatgggaaattgtttaattaatactttttgtttattatacacacacatagccatagaaatatctttaaagataacccaatgtctgtgaatgcttaattttttc

SEQ ID NO: 256977 - DNA, 1306 bp, Homo sapiens
  misc_feature (1294)..(1294): n is a, c, g, or t
  misc_feature (1300)..(1301): n is a, c, g, or t
  misc_feature (1306)..(1306): n is a, c, g, or t
attttgacagggaacaaagtgctaatgccatgtgatgccgttctgattgaaggcagctgtgtggtggatgaaggcatgctgacaggagaaagtattccagtcaccaaaactccgttacccaagatggatagctctgtgccctggaaaacacagagtgaagcggattacaagcggcatgtcctcttctgtggaacagaggttatccaggccaaggcagcttgctctgggaccgtgagagccgtggtactgcagactggattcaacactgcaaagggagaccttgtgagatccattctctaccctaagccagtgaattttcagttgtacagggatgccatcaggttcctcctgtgccttgtaggaacagccaccattgggatgatctatactctgtgtgtctatgtgcttagtggggaacctccagaggaggtggtgaggaaagcccttgacgtcatcacaattgcggttcctccggctctacctgctgctctgaccacaggcattatctatgcccagaggaggctgaagaagagaggcatcttctgcattagcccccagaggatcaacgtatgtggacagttaaaccttgtctgctttgacaagacaggcaccttaacaagggacggcttggacctctggggagtcgtgtcctgtgataggaatggctttcaggaagttcacagctttgcctcaggccaggctttgccatggggcccactgtgtgcagcgatggccagctgccactctctgatccttcttgatgggaccatccagggagaccctctggacctcaaaatgtttgaagccaccacctgggtaagcctctgctcttcagagaatctgagaagcttcttcaatgccagagcaacataggcaatatcagagctatctaattcttataaaaggtgaggtttccaatgtggagtacatttggtagtgaagggcaaaccaatctaaggctggtttcctcatctgtgcaatgaagctaataatagcatctacataatgagattgtgaggattaaatgagatgatgcagtaagaaaatccttggcactatgcctggcaaatattaaaggttcgatcatattaatataattgtacttattatgcagttatttcttgtctctctgtactgttctccgagcattgtctggtttcgaagattttccagaatatggggatcagaaaacattgctttctccagtgctcaggataactcatagattcacggggactataagtcttatttctattaatttcatattgattttatttccaagactagaaagaanaaaaannaaaan

SEQ ID NO: 256978 - DNA, 1395 bp, Homo sapiens
attttgacagggaacaaagtgctaatgccatgtgatgccgttctgattgaaggcagctgtgtggtggatgaaggcatgctgacaggagaaagtattccagtcaccaaaactccgttacccaagatggatagctctgtgccctggaaaacacagagtgaagcggattacaagcggcatgtcctcttctgtggaacagaggttatccaggccaaggcagcttgctctgggaccgtgagagccgtggtactgcagactggattcaacactgcaaagggagaccttgtgagatccattctctaccctaagccagtgaattttcagttgtacagggatgccatcaggttcctcctgtgccttgtaggaacagccaccattgggatgatctatactctgtgtgtctatgtgcttagtggggaacctccagaggaggtggtgaggaaagcccttgacgtcatcacaattgcggttcctccggctctacctgctgctctgaccacaggcattatctatgcccagaggaggctgaagaagagaggcatcttctgcattagcccccagaggatcaacgtatgtggacagttaaaccttgtctgctttgacaagacaggcaccttaacaagggacggcttggacctctggggagtcgtgtcctgtgataggaatggctttcaggaagttcacagctttgcctcaggccaggctttgccatggggcccactgtgtgcagcgatggccagctgccactctctgatccttcttgatgggaccatccagggagaccctctggacctcaaaatgtttgaagccaccacctgggaaatggctttttctggggacgatttccacatcaagggagtgccggcacatgccatggtagttaagccctgcagaacagccagccaggtcccagtggaaggaattgcaatcctgcatcagttcccattctcatcggcactgcaaagaatgacagtcattgtccaagagatgggaggtgaccgactggcattcatgaaaggtgcaccagagagggtggccagcttttgccaacctgagacagtacccactagttttgttagcgaacttcagatttacacgacacagggcttccgagtcatagcactggcctacaagaagctggaaaatgaccatcacgctactaccttgacgagggagacggtagaatcagacctgatatttctggggctgctgatcttggagaatcgattgaaggaagagacaaaacctgtcttggaagagctcatctcagcccggataaggactgtaatgatcacaggtgacaatcttcagactgcaataacagtggccagaaaatctggaatggtttctgaaagccagaaagtcattctcattgaggcaaatgaaaccaccgggtcc

SEQ ID NO: 256979 - DNA, 330 bp, Homo sapiens
agtctcagcaaattgcatgtgatgtgcatcccattctgatttaattcttattcagtcataaatctattttcattctctaaagaaaaaaataaattaaaaaaattctttaccatgactttagaggaaatctagaacaactgtcataatttcctaggtattattcttaggtaataataggccatatggctactttaaattagcaaaattcagttttaattatgtaatttaaatattcaaagcttctattaatgtgaagtttctctcttcccacagctaactcttattccagggagaaatcaacagttgcagagagaggtacagtcaattttt

SEQ ID NO: 256980 - DNA, 229 bp, Homo sapiens
agcacctccaacccaggaagggtggagtaagctaagccaggtagaagccttcctgatacctcgatttcccacggtgtgattgagatcccatttcctctgttccatgtccatcctgggcctgccaggtccagctttctgggtggccaactcagaataagactgcagcctccctgcccgctcctggattatttggagtctaagcagaggacatttgtgtgctcctagactc

SEQ ID NO: 256981 - DNA, 364 bp, Homo sapiens
gctttgtttctgtcactgcaaatcaaagagcccagcctaaaatcctctgtagccttcttatttcccccacggcatgtggccactctctaccctctcgcaagccttgccagagatgccatcctccacttccactgggcacctggagcctgaacctggaatcttccaagaccccagatcagcctctgctgacagttctcttgtaaagatactgaggataggattacaggtagtggctcacgcctgtaatcccaacactttgggaggctgaggcgggtggatcacttgagctcatgagttcaagaccagcctgggcaacatggcaaaactctgtctctacaaaaaatacaaaataatacaaaaataa

SEQ ID NO: 256982 - DNA, 298 bp, Homo sapiens
gcttgggaggggcctgaacaccaagcacctcacctcctagggcagctgacctggggctccgggtactctgagccctgctgcccattttactttttattttacagacaggaaacaattatacataaatgataaaagttcagagttcagggaaagataagtcgacccacccaaggtgatccctagctagtccttttctctaaggttaacagagcttcaagtttcttccatgctgttggtgaaaatgtgtatgtatcataacaacacacatatatacatgactgaagagtcatcctattta

SEQ ID NO: 256983 - DNA, 349 bp, Homo sapiens
cggcacgaggaaactataggtaaagaagaccctgaggttgaggtggaagagtgaagaatgggggaaccaaaggcacttcactctgccatagcagcccctagctgggatgccaaatactgcttggaatgtgaagctgggactatggggttgaggcaggccatggaggttgtagtggttatatgtgctatgcttactggatctgggctttgctaatcaagttctgtaccaggcagtgccttatacagcaccctgtactctacaccagccagcacagcgcctgcttcctctgcagcaatgagaaaagactgcccacactctcttctctccagtaaacacggttctccctgca

SEQ ID NO: 256984 - DNA, 705 bp, Homo sapiens
gccaatgatgactttccatttacaaagaaatgaacaaattaaataacatctgagtatgcatgtttaacattctctgtatttattaaaacacaactaaagctaaatatcattttgatgaagtttatctgcattttttctttttctagtctgactgtggcttttctcttagactgtaacagtttttgcaaaagttccatcagaagatttaataaactcttcatgcatcttttggagagttctaatctataaggctgaaaagttaaaaagtaacgcattggattttgttcaacctgtttaacaaatttattggatgagtaaactcctccctaatcctctctccctaccactgtaatatctgttcagatcccaagtgtccgtaggacatattttagagcaaagtttgactgacattttagaagaatgttcgaccaagaattttcaattggaaagaagttgacgtgagtctgaagttgaacagtcttggtgctggggagcttcagatcagcctagcaaaaagactctcagaagaccgtttgtcttgtgaaagggatttttagctacctacgtaaaacttcctctggaaagatctgatttgcactctgtgatagaaaaggcgtaggtttgggtgtcagaaagacctaatttgaatctacaaccaagctattaggtgagtgaccatggaggatgtgtccttacccttaattt

SEQ ID NO: 256985 - DNA, 427 bp, Homo sapiens
attctttgcaaaagcaattggattttatcttgtagtcaatggggagcaaattaaaagattttaagtggtgtgtattctaaaaagatcactgtgggatgggtggctggcaggggatgggaggatgaagaaaagttgggtaatgggggccgggcacggtggctcactcctgtaatcccagcactttgggaggccgaggcgggcggatcacgaggtcaggagatcgagaccatcctggctaacatggtgaaaccccatgtctactaaaaatacaaaaaattagccaggcgtggtggcaggcgcctatagtcccagctactcgggaggctgaggcaggagaatggcatgaacccgggaggtggagcttgcagtgagccgagatcgagccactgcactccagcctgggtgacagagcaagactcttgtctca

SEQ ID NO: 256986 - DNA, 360 bp, Homo sapiens
tattctttgataaatttagcacctggctcattggggcttttttcattattattctgatgttattctcactcacttccttctttctgacttcaatgcccactcaaatattacatctaataccttagactccagtttccagatcctcctgccttggactcccaaagtgctgagattacagacatgagccatcacacctggccctgtgccatcagactttggcacctattccccttccttgttgctgtcatctagagaattcagttaactttattctttgataaatttagcacctggctcattggggcttttttcattattattctgatgttattctcactcacttccttctttctgacttca

SEQ ID NO: 256987 - DNA, 192 bp, Homo sapiens
cagttttttatactaacttgatatgtgacatgagaaattgtgtaagctttacttgctgttgtttcttcagtgtaaaatgtcttagataataaaactaaatgataaagtagatacagggttaaaggatatgtatcttgtcccttttacattgtaagcattcaaaataaaacaaaacaattaatgaagaaaaga

SEQ ID NO: 256988 - DNA, 427 bp, Homo sapiens
tccaatccctgcttttggtgctaattttttcttctttaggtctttcatggggttttgttcatctgtctattatagaatttagagcataatgtttccttacacacctgcctgtccacaccaaatgtgaccagtttagaaatagtccctttatggttttcttaaatttgtctactttgcatatattgtgagaagatccctttttacaataaatatggtgatggatacttctgcttctgccaaaaaaaaaaaaaaaaaaatgtaaaaaggcgggttgaatattgtgctgctcaactgaaaagttaatcttgtctacacccatactaccccgaacgcacccaatctcgtttgaatattatactgcctcgtattgactctagataacatgaaattgatgacatttcaccctgactcttttctgctttgctgc

SEQ ID NO: 256989 - DNA, 483 bp, Homo sapiens
ggttgggtggaacttgagctggaggtggaggaggatttgggttggtggagggcagagaggagggccgtgcagagcaggggcgtgttgtaggagaggtgctccctggagctcattggatggggatcttagaggacaggagcttttatgttcatttttgtattgcctgaactcacacagggcctggcactttgggagtattctataaatgactgctgaatggaacgatggtttgtaacctattaacttgtcctgatgtgttagaaagtgggcaaaagtgaagcccattagcagaaagaaaatcttactgaaaaatggtcccatgtatgcatagagcctggtgcggccactttacttacttatgctgctgagttctgcatcagtccacaccgaggccaccgcaggggttgggagcaactcctcagacctccctccgggtgcctcagtctctttaccccctgttcttccaggtcctgctccctgtca

SEQ ID NO: 256990 - DNA, 361 bp, Homo sapiens
atcacctgctccccaaaaactattgaaataaaaataaaataaaatagtttaatagtttctttaaaaagttaaacaaacacctatcatgtgatctagctattccactacaggtatttacccaagagacaggaaaacacatgtccatacaaaaactagaacagaaatgaccatagcacctttatctgtaatagccaaaaaagggaaacaacctaaatgtccatcaacaggcaaatggataaacaaactgcgatatacctgcacaatgaaaaacaactcaataataagaagcaataaactactgatacagcttacaatgtgaatgaatctcaaataaatacatcgaggcaaaaaagccagacat

SEQ ID NO: 256991 - DNA, 280 bp, Homo sapiens
tttgcagtgacaaggtctccctatgtgttgctcatgctggtcttgaactcccggcctcaggcaatcctcctgtctctgcttcccaaagtgctggaattacaggcgtaagccactgtacctggcctctcccatccaatctttatccctctccttcctttttcttctcctggcttttgacccagctaccaaggatccactgggggaactccaaggaactggtggataatggagccccaagctggaaggcgcttggtttccaaataactgcagcctctacacc

SEQ ID NO: 256992 - DNA, 395 bp, Homo sapiens
tctgttgcaggggtcaccggccaaggaggcggtctactctgtgggtcctccccgctgcagggcacacagagtggcgcccgtggggctgagcacgaggcagtggctcctgaccctcctacagcatcagcaccgcctctgccggccgctgccgggagtccaggaccgggcggacaggagaagccccacctttggctcagcacaaagcccacagcacagccccggtgcacagacgcggtcacatgcacgcccgtccacacacacccagagatggctacagggctagtggatttttccccagactgggcacccaggagtttttaactctcaagcaattcatcactgtcaccatttaagtatttctgccagtttattaaaagttatagaatcctttagta

SEQ ID NO: 256993 - DNA, 701 bp, Homo sapiens
gtacattgggtgcctaattgtagacagtgctctgaaggagatttccatggtattatggaggtgtgtgacagagggaccagtttgatccaaggggtagtcaaggaaggtttcctggaggtggggacacttgagtcgaagcctgaagaacatttggcagttaactgggcagaagagaggggatgggatagagatagaacattccaggctgaaggaagtctcctgtgcaaagctcctgagataggaagatgtttgaggcacttgaagatagctgatgtggctgtagttgggggtgcaggggagagagggattggggaaaggagagaagtccacacagagccgcgaagaccatactggattctcatcatggtctggagggcaggacccaggggtcagcaagccctgcagcttctacagattcccactatggcacccattaccctctatgatggcccgtctcccgtccagccccatcctcacaccctggagtaactgatgtcattgacgtgccacatgaccttcaacccatggcttattcacagccttccaaccaactttagtatcactctgggatgccctttctccatcttgaccagctgggtgcatgcccagttctttttgtaacatttaccataacaataatgttctctctttctattatagttgtccttattatcctgttactttttcattcattttcctcg

SEQ ID NO: 256994 - DNA, 393 bp, Homo sapiens
ttttagaaagatcttggcccggcgtggtggctcacgcctgtaatcccagcactctgggaggctggggtgggcgaatcacttgagctcaagagttcgagaccagcctagacaacatagcaagacccctgctctacaaaataataataattacatatatgtatgtgtgtgtgtgtgtgtgtgtgtatgtgcatatatgtgtatatgtatatatatagtatatgtgtatatatatgtgtatatatatgtgtgtatacacacacagaaaaaacattagccaaccatagtggcgcacacctgtagtcccagcttcttagaaggctgaggtaggagcattgcttgagcccgatcacaccactgcactccacctgggtgataaagtgagaccctgtctca

SEQ ID NO: 256995 - DNA, 496 bp, Homo sapiens
cttaggattgggctcaggtgaagggaacccagaagcccaacatgccggcaaaacagtaaagtttttttaaccagtcaggcttttggctttcctctccctgtgcaaactggtaaaaaggcctcggaatttttgatctgtccttacccctccccttgttttgttttgatacttgttttctaataaaccggtttgtctgttctttccttcaggccatcaaactccaaacagtcatgcaattggagcctctgatgatggccccatctgccgggaacccttagataagcccctgagggacctcagactgccgtttccacaaaacggcgtcccctgtcagcaggaagcagttcttcgtccttaactgcagttagatgtacttctttagagggaggaaggagacagtcaggtgggagggggtccctggggaaactctagccagcctgcgcactgagttggagcctcgggaagttcatgtttgtagcagagagaactaaagagc

SEQ ID NO: 256996 - DNA, 405 bp, Homo sapiens
ataaaaaaccaaacatcgtatgttctcactcataggtgggaattgaacaatgagaacacatggacacaggaaggggaacatcacacacctgggactgttgtggggtggggggcggggggagggatagcattaggagatatacctaatgctaaatgacgagttaatgggttcagcacaccaacatggcacatgtatacatatgtaacaaacctgcacgttgtgcacatgtaccctaaaacttaaagtgtaataataataaaattaaaaaaaaaagtttaggaaaaaaaaaataaactgcatatatggaacgtaataaaaaaaaaccccacaatgagataccatcttataccagtcaaaaatggcaattattaaaaagtcaaaaaacaacagatgttggcagagttg

SEQ ID NO: 256997 - DNA, 318 bp, Homo sapiens
tcagatatgaggatgggattcttacaaaactgacttaacaggattcttgctcttgaggacaaggcccaagtaccgggcctagtagagaatgggctcaaaggaacctgactaaattttgcttaaggagagtctttgtcagtagtcatcatacttaaattgtttatttttgccaagtacctcttaccaaagctttataagcatttaattgtgcttctcattatgagaacagataaaagaaaaggctattaaaagaaaaggaattgttattagccaattcataaagtaggagagagttgttagacccaagatttcagagta

SEQ ID NO: 256998 - DNA, 406 bp, Homo sapiens
acccagtcagaggtcattgttatcagtcctgttgttgttgctgtcactattattttcaaaagaatttctgcagcatttataaaactgaactgatttatcaaatcatgtactcaggcttgagtttcttcattttctacatattttgtgtatcttgtttcagaagcatttgctaatgcttgcgggaccatctcagcattcagcaatacatattaaagaatggcatgtaggtctgagtctaccttgtgaataaatccctcctaataaaagaaaatgagatttcatgattaaggggtttagaaataatcaagagagggttaaaaataaaactagcggaggccgagtagaccaaagaatagctactggcatgccttccaaaataatgtcccagattatgatttcacatgaa

SEQ ID NO: 256999 - DNA, 171 bp, Homo sapiens
aacaggtgctatctatgtattacttgtgtaatttaacaaatgttccagctgggcctggtggctcacgcctgtaatcccagccctttgggagcctgaggtgggtggatcacctgaggccgggagttcaagaccatcctggccaacatggtgaaaccccatctctactaaaaa

SEQ ID NO: 257000 - DNA, 472 bp, Homo sapiens
aattttggaatcttctttgtggaaaccgtcaggaaacactgacatgtgttttcacccagcagcaggcgaaagggcttggatgtggaataagaatagctggcagatgattgagctataggctccagaggaaaggtacactccagaccagctccagagaacgagagaagacttcccggaggagacggtgctaaatccgaagggaccattaaggatgactagcgggatattgatgaagcttaaggtctcatgcccaggatgctttcttataggccaaatggtatcactccattctactggtgtcagctgcttgaaatagtgtagacacagagaattctgggacccgtgtcgctcagaaacaatgtcaaagtcctggctgaaggtatctacattacccacgaattgctgtatatgagtggaatgtacaagcatggatgcaacagcaagagaactaaatttgttttgtgcttcaaaa

SEQ ID NO: 257001 - DNA, 459 bp, Homo sapiens
accccatctctactgaaaatacaaaaattagccaggtgtggtggtgggcgcctctagccccagctccttgggaagctgaggcatgagaatcgcttaaacccgggaggcagaggttgcagtgagccgagattacatcactgcactccagcctgggcaacagagtgaggctctgtctcaaaaaaataaataaaaaggtgtcagcaacaattcccatggtggctcagcccccaacgtgctgtgtgacacaaaacaactaagagtacaaagtcacaagaagcagctcttctttttcgcattgtttttaagttcagcaagggcaattcaaaatatcactctccaaaaatctcttaagcaatgaaacatcttacagcctgggtgtatagtccccaagtggctcagcgtcatcctcttttggggacagtgccaagatacttactggcaatacattatcaagtaatg

SEQ ID NO: 257002 - DNA, 446 bp, Homo sapiens
cagtggcctatgagaagatctgagtgtgcctactggatagttacctgctggaatgcaagttgtcactgcaagattgatttctagtgacaataacaagcagaagctgactaacagcacactgcccaccatctgctcaagatacccaataaagtgtatttgttcctcattttctcggaaaagtctccacctgaaggtcacagtgagatagaccaccacagtgaaaggacatttgaggtttcttcctgcctgcactggtgatgacatcaggaaacttgtgaaaccacggtcttttgtttacattagaaaatgcatgtgagatgacaggtcaacatcagcaaggcataacttaacagagataaaggtaatgctttctgttggttagaaaaagcaaaagttttgaaaaacacctgagcaaagaaatcttgagaataattgctagccaaaaa

SEQ ID NO: 257003 - DNA, 254 bp, Homo sapiens
aaaataccctgaaacgtaatgccaaatgtacagtttataggttcgtgttatttctgataagaatttaattgcattgtgctaatagttgtttattgctattaactttctgtgtatgtattattgcgatgcagacccaatagggttattttaagcacactaattagtcatctggatttttatagataaaatcacatgttgatcagaaatcatttttctacttatttttttgtagagtatttttccacacttgaaaa

SEQ ID NO: 257004 - DNA, 783 bp, Homo sapiens
  misc_feature (3)..(3): n is a, c, g, or t
  misc_feature (10)..(10): n is a, c, g, or t
cantgatacntcacgtagcggcccacccacccacataaactgtagggaaccccgttcaccaacggggaaccccattccaagggaatgtgttcaccggcagagctgggattacgtctaagatttgtccagggggcgagaactgcagcgacaccatgatgatttatcatctccagacaacacaaaaaaaaaggcctagacacataaaaatggcttctctgtagagtgagctcaacgagctcaatgtgattccagttaaggaattgggccttaagccaaatgcgcctaaacgcaacttgcctctctattatttatccagaggatgaatttaattcctacgtacatgcgcccacatctcgtcagctggtgcctcagagaaatgcgctgacaaatcttaaaggtggggcttcatgacaaaagtccgcccgttattgctgctcaacagacccatcaagtcacgctgttggacaggcctcgtggcgcaacggtagcgcgtctgactccagatcagaaggttgcgtgttcaaatcacgtcggggtcaaacaaaacattgttttccctaatcaaatagacctacggtgacatttttcaggataggaaaaaaaaaaagcctcctcagtagaaggataggaggggaatgagacaaatatgaacgttattcagaagttgggtgcagactttcaacattatgtgatatatccctgtggcaaaactgcgcatgtatccctaaggtctataaaagtaaaaataaatttaaaaataaaaaaattccctgttgtatggaa

SEQ ID NO: 257005 - DNA, 755 bp, Homo sapiens
taatggctgccgtcgtctgcccagcgcgcaattgtgagtgaccttcaccgctagcgcgcgccacccaccccacatgaacctgtagggttatgcccagtctacagacgaggaaaccaagatccagggaagctgagtcaccggcagagctgggattacgtctaagatttgtccagggggcgagaactgcagcgacaccatgatgatttatcatctccagacaacacaaaaaaaaaggcctagacacataaaaatggcttctctgtagagtgagctcaacgagctcaatgtgattccagttaaggaattgggccttaagccaaatgcgcctaaacgcaacttgcctctctattatttatccagaggatgaatttaattcctacgtacatgcgcccacatctcgtcagctggtgcctcagagaaatgcgctgacaaatcttaaaggtggggcttcatgacaaaagtccgcccgttattgctgctcaacagacccatcaagtcacgctgttggacaggcctcgtggcgcaacggtagcgcgtctgactccagatcagaaggttgcgtgttcaaatcacgtcggggtcaaacaaaacattgttttccctaatcaaatagacctacggtgacatttttcaggataggaaaaaaaaaaagcctcctcagtagaaggataggaggggaatgagacaaatatgaacgttattcagaagttgggtgcagactttcaacattatgtgatatatccctgtggcaaaac

SEQ ID NO: 257006 - DNA, 310 bp, Homo sapiens
atcctcttaagtctccataggccaatgcacaaatgatttagccgttccaagacgccattagattatggaggaagggtgttaactgtggtttctcttatctttaaataacaacttcctgtattagcctggcatgaagatggcgccaggcaaaccaaactgtgattctgctagtcccaccaaacaagacagggcaggggacaagggggatgggagcctctccatatttggaatgttcctttctgcttgcaagcaggcaccagtgtaccagcttggtaactcatttaaatatacatatatttaaaacaatagt

SEQ ID NO: 257007 - DNA, 285 bp, Homo sapiens
tcattgtttgaaggctggtgagagaaggggttacctgctgcacaccagtggggagtgacatactcctaacacatgccagaaacaaaaagtttggtcataaaacagttctaataagaaatctgcctggcctgctcacacctgtaaccccagcactttgggaggcagagggatcagagcccaggaatttgagaccagcctgggcaacatgaggataccccatctctacaaaaaataaaaaattagccaagcatagcgatgtacgcctctagtcccagctacttggga

SEQ ID NO: 257008 - DNA, 482 bp, Homo sapiens
acaggttctcgctgtgtcacccagcgtggagtgcagtggtgcaatcttggctcactgcagcctcgacctcctgggctcaagcagtcctcccacctcagctccttagtagctggaattacagatgctcactgccacacccagctaatttttgtattttttgtagagacagggttttgccacgttgctcaggctgatcttgaactcctggactcaagtgattctctttgccttgggctcccaaagtgctgggattataggcaggcgccgcgacatctaattatttttttttaaattgtggcaaaatataaaatttaccatgttaactatttttaaatgtaaagttcagtggtattaagtacattcatactgtgctaccatcaccactattcatctgtagaaattttctgtcttcctcagctgaaactctgtacccattaaatactaacctcccattccaccacacccccagcccctggcaacca

SEQ ID NO: 257009 - DNA, 683 bp, Homo sapiens
cataagcacaatcaaaggacagaggacagacttgaaacaatactggcaacacatgtcacaaaaacaaacagactttctgtgcaaaagcttcattacattgataagaagtacacaaacgacctaacattcatgagatttcagctcagctagcactttcctaaggccagaaaaatgtacagccctaagaatatgcattccctctgaccagcaattactcctctgggaattgacactgaggacatatcctaaacctagatagagtcttatgcataaaatgttgatctcaacattcatagattataaaaactggggccaagcatggtggctcacgcctgtaatcccagcactttgggaggcggaggtaggcgatcgcttgaggccaggagttccagaccagccagcctgtccaacatggtgaaaccccgtctctattaaaaatacaaaagttagccggtgtggtggcacgcacctgtagtcccagctcctccgaggctaaggcaggagaattggttgaacctgggaggcagaggttgcagtgaggcgagatcgtgccactgcactccagcctgggccaacagagcaagactccgtctcaaaacaaagcaaaaaaactcatcaagctgaatacttaagatctgcattctactgaatgttaattatatctcaataaaaaataaacacac

SEQ ID NO: 257010 - DNA, 334 bp, Homo sapiens
acactcttaaaaatggtagtgttttaaaggatatatttatcttcttttatcttttctttttttgcttttttctttttgaaatggaatctcactctgtcgcccagactggagtctagtggcatgatcttggttcactgcaacctccacctaccaggttcaagtgattcccatgccttagcctcctgagtagctggaattacaggcatgcaccaccatgcctggctgatttttgtatttttattagagacagggtttcaccatgttggccatgctggtcttgagctcctggcctcaagtcatctgcctccctcagcctcccaaagtgctaggatta

SEQ ID NO: 257011 - DNA, 201 bp, Homo sapiens
gcccatgtaattttagagtttaagagaatgggaagttgtatgagttgttaaagtttgaattgggggcagccaccgtgcctggccaattgttgcttctttgtgtaagtttttatttgaagaaaaaggccatttttttgtgatatgtgcagtcatcctaaaagacctatgggcaatacagcaagactccatctcaaaaaaaaa

SEQ ID NO: 257012 - DNA, 338 bp, Homo sapiens
accagggtctgatagatagacagacagacagacagacagacagatagatagaacacagcaactttcacccagcaccgtccaggagaaagaaagagacacagatgctggtggccacacctactcgggtcattccaagggcatcctgtggagcagggagaattcacccctcatcaggggctgtatgacatttctgtaacctgtcttggctctgtacttcctgattacaatttggcttcccatgtggatgtgccaacagggacaaagtgtatatgtcaactgtgtccatctgtactggagaattattgctagccataaatgaacagttctgaatgaaaaaa

SEQ ID NO: 257013 - DNA, 440 bp, Homo sapiens
tacatctatattctaggtagataaagcaacattatcaagcacaaagaagcatagattctccaagcataaactaaagtgtaccagtaatgaataaagtggcttagacagcaaaagatatgattctcttagaataagaaagccaaacattcttaaacagccttagaaactacgtgaagttttaacaattgtttatatgggctagtcatagaaagaaacagtctgaaaaactcataaaagattcaaatcagatgtagaaatcaagcttatgaaagatgtagtgttaagattcggcattaacatttaagagaaaactaccaaatttgtatttatattcatttaaatagtgctaaatatgtgtatcttctcattccactttgtacttcagtttctctaagtaaaatggggtatgaatatcaaattaaaaatatatttaaagcatt

SEQ ID NO: 257014 - DNA, 383 bp, Homo sapiens
caagattgcaccactgcactccagcctgggtgacagagcaagactccatctcaaaaaaaaaaaaaaaaaaagaaaagaaaaaagaaagtgaagacttcaaccttaatcaagaaggagtttaagatgcctctagcacttccaggtagaattggtagaaaaggagagatgtctatctagagataagttctataactctgtctatatagatacacagtatacatctatctatgtatttgttgatactataatctatatggtgggtgaaatcgggatgaataacatcatatacagagaatatgtaaagtaagcaaagcagaggacctaagacaaaaaccctgagggaccccaccatataagggagggacagaggaggagaaacctgt

SEQ ID NO: 257015 - DNA, 608 bp, Homo sapiens
tggactgggaggggcaggttcaccctcagtctgtgtgggcactgtctaatcagctgccagtgcagctagaataaagcaggcagaagaagttggaaagagcagacttgctgagtcttctggccttcatctttctcctgtgcaggatgcttcctgccctcaaacttcagactccaagttctccagcttttggtttcttggacttacaccagtgatttgccagggactctcgggcctactaccacagactgaaggctgcactgttggcttccctacttttgaagtttgggggctggcttcctagttcctcagcttgtggatgacctactgtgggacttcacctcgtgataggtgagtcaattctcctaataaacttaagtcaactctccctgtcatttatacttatatcctattagttctatcccttttgagaaccctaatacacctagacatgtacagccccatccaattcacccagtgtactccacctctctttcaatggcacaaaactttcaaattccaccaatttttagcaagatatcttagactcctagaagtctgtggtgatatgacaaaagggaggtgactgaaatctgcacaagatcttcttt

SEQ ID NO: 257016 - DNA, 667 bp, Homo sapiens
caataggattttttcagctttattataatctttattattattatgcagagacagggtctcgctatattgtccaggctggtttcaaactcctggcctcaaggaatcctcccaccttggccttccaaagcactgggattataggtatgagccaccgccatcgtacgcttatggaactactgccttataatgtggtctattgttgattaaactgtctttatgcggggcatgctgtaccagccataaacaaacataaaacgaaattttaaagcaatactatttataagagtatgcataaacatcaaatacctaaaaacaaatctaacaaaaaagagttgtaagatctctataacgaaaactgcaaaacatgatggaggaaatttaaagtcctaaataaatggagacatatactatgttcacgtatttaaagacttctgtaaagataccaattaccatcaagctgatctatagatcaaattcaatcaatagattaaattccaaacactctcagtggaaattgatgaattaattttttgcactttattttaaagaataaggggccaaaaataaccaagacaatgttaaaaaacaaagctagaggtccttaaacttgaagttttttagtacgtcagaattattttactatcatatttattttatcagtatgttc

SEQ ID NO: 257017 - DNA, 420 bp, Homo sapiens
agccgacaccaacagactcttagctcctgtgccctgtgcatcctggtgttcgtgcacgtgctgcacggatcatttgctctggagaaagccagcaggcatgagaggcccatgtggtgaggaactgaagcctcctgcccacagccacatgtgtgaacttagaaattagaagatcttctagcccagtcaatggctgtacaatggctacaaccctggctaataccttgacttcaacctcacgaaacactgagctagaaccacccaactaagctgttcctagattcctcaccatcaggaactgtgtgctgtaaaaatgcttgttattataagccactaaattttgaagtgttgtgtgacacaacaatctgtaaataattcagaatagtaaaatatgaatgggaacacaaatgtacagacatggta

SEQ ID NO: 257018 - DNA, 310 bp, Homo sapiens
aagcttatcagttgctaacccaatacaaggaaagtgaagatgcagagtaactgtggcgtttggcacgggcatcacgtgatgtagctaagcttaccaggttataaaattgtcagatttgaggaagccttttgaaatagaggtggaattggatctgggaggtacatttttcagaatatttggggatagttgatgagtagatgaaataatgtgcttagtataatacatatctgtcaaactagtgaagaataaaaaaaattaataaattaaatacataccagtataaaactgtcaattggcatatccaagaaaa

SEQ ID NO: 257019 - DNA, 420 bp, Homo sapiens
gacttcgtgaggaattcataggggaagaagatgcaagtggctggtcatggagaggactttttgacgagcgccggcaaaagagcacagcgaagaaatcctaggatacggaaagccctctgtacttgcaacaagagtctcactgtgtcagccaggctggagtggcatgatctcggctcactgcaacctccgtctcccgggctcaagcaattctcctgcctcagcctccagagtagctgggattacaggttctgcatgcgcagcacttcgtatgtccaactctgctctggaggacccacagggctcagggcgtctgcctgctccaagaggctgcataggtcaaagcatagccaccataacacaagatgcaacatcttccctggccccttgactatcttttcgataaaagccattataactagg

SEQ ID NO: 257020 - DNA, 338 bp, Homo sapiens
gacttcgtgaggaattcataggggaagaagatgcaagtggctggtcatggagaggactttttgacgagcgccggcaaaagagcacagcgaagaaatcctaggatacggaaagccctctgtacttgcaacaagagtctcactgtgtcagccaggctggagtggcatgatctcggctcactgcaacctccgtctcccgggctcaagcaattctcctgcctcagctactggggaggctgaggcaggggaatcgcttggacccgggaggtggagattgcagtgagccaagatggtcctgctgcactccagcctgaccacagagcgagactctgtctcaaaaa

SEQ ID NO: 257021 - DNA, 479 bp, Homo sapiens
cagggactggtgaaatatataaatgaaaatactactcttgtttcttggcatggagaggactatatttgccaacctccctgccatttggcctaagggatgtaggcagacatggtgggcaactccttattaaagatccggtcataatcatctctgccgtctcttctttttcttgaaaagacaggaggccacatgttgaaggcagcagggtcacaagatggaagaaccagggtcccagtatcatcgctccctgcttcaagctgccaggggcagcctaacccacatggcattatgacataagaaacaaagtaactattgttttattaaatcaatgagatattgggcttcttgttatagcaactagtataaattgccctgactgatacattatggatttagagtgcactgtactacaactgtttgttgtattttcaaaattgtggtataactgacttacaataaacttcatatatttaaagagt

SEQ ID NO: 257022 - DNA, 343 bp, Homo sapiens
  misc_feature (88)..(88): n is a, c, g, or t
  misc_feature (215)..(215): n is a, c, g, or t
ttctagacctccctcagggttcagccacttgaagatcatttccacttgaagaacactttctatggaaagtattcctcacctaatggcnttactttgtgccccaaaaacaagggctaaagaaatcacgctagactttatccactttgccatgcctgtttggcaatgttgtttaggtcttaacacttcatgcctatattctaagtccttgcaaggcnaggacctcatttgccacactagttaattattttgtatctccccaagcaataaatccaatcccatgaacacagcaggacttgctaaatgcacccactgcttctgcatctactgtgtgcatgacaacttt

SEQ ID NO: 257023 - DNA, 326 bp, Homo sapiens
cggtatgtccagtgcctagaaaagtacctggtaagtgttgtgaggtatttcctgaatagaggttgaatgttgtgataagtttcactgtgactcctcatcttgtacctgcacttgcaagtttcttcttgtctgcctggggcgttgcgctcagcaccttcagcccccaccactcaaggttcctgtctgcatgagtgtaatcaccatcgagtgtcaacagcaccatccctttccccactctcattcagaagctcctcatctgctctgggatgggacaaactcactcttgtgtcatcattctgccaagtttattaaaactcaaaatgtga

SEQ ID NO: 257024 - DNA, 668 bp, Homo sapiens
aagaaggtaaggaaggtagtcaaaattaacctaaaagaaatgagtagagaattagtttgaaaatggtcctaataataacaaaattaattggatctgcaagaaggaaaatatcaatttagactgatgagagaacagatttattggaagatactaggacttgctacaaacacaatctcatttttttcaatgcatgtttccgtgtgtgtgcctaccatgtggtaggttcttgatactgacaaagatgaacataacaaagtatctactcttaagagccaacctggaaagcacaaattagtaaacaggcaattatacaatctgggaatctaaattagactgagggataaaagaagggctgggagtacctctttctaatctaggatagaggaggaaggacaaagctagaagaatttagggatggattgaaggccattccaaaagaaggggagtttgtaagaatatggatgtataaaagagcaagtagaaatggccatcagttggtgtgaaaaagtgacaattaggctaaaaaggtaagcatgggtagaccatgagggtttttcttagctaaacagggaaaattattattattattattattattattattatttttggagacagagttttgctctggttgcccaggctggaatgcaatggtgcgatcttagctc

SEQ ID NO: 257025 - DNA, 331 bp, Homo sapiens
gcccccacccccccccttgcagaatcctctgggacagctccggccccactcttgactcccaggtgggacaggaaggcccattctgaggaaatgggtcagggaagcacctagttaaagacctgggctcaccagtctgaggggagagagagccctgcactgagagtctcctgactccagctctgcccttcccgttcgctgaatcactccccacaggcacttaggctctctgagcctcagttttttcatttgcaaagagggctgagaaaaggagtgtctctcttctgctcccaaacttccagtagcttccattaaaatccaaatgctttgcaat

SEQ ID NO: 257026 - DNA, 173 bp, Homo sapiens
  misc_feature (53)..(53): n is a, c, g, or t
  misc_feature (93)..(93): n is a, c, g, or t
agttgatggtaaggccccaagaagagagtgaggtttagacattctgtgttttnccctcaggggaaatcctggtgcttttgtttctaggtgtcnagataggaaaattgatattcaattataaaattcaaggcatttggttttcagtttcttactatgtatctacaacatggtga

SEQ ID NO: 257027 - DNA, 247 bp, Homo sapiens
tcacagaaattgataccaatacctgttattactcacaacaatgcgtcatcctttattaggctcctagtgccttttggccattttacactaagacaaaaccactaactgctttaaaaggcgttggtcacaacttttatgatttgagattaatcaaaggcaccgaatgtcagagtctcctacagaactcagccaacttttagggcaaggctctgtacttctccatctttagaaggaaagcagggaaaac

SEQ ID NO: 257028 - DNA, 423 bp, Homo sapiens
cagaacagcggaacagctaaatattggagcacctcctgtgtgttgaccgttccacaacatggaggaaactggtcttcccttggaagagcctcccccctattcaggtagtaagagaaataacatacccagggctaggcataacgcagacagtgtcataaaggaggcattgaacaaaggagagagtaactgaaggaggtggcatttcgagtgaccttggggctgattagggtggttacaggttgatgtttatatatatggcatatatgttgggggattgggtggcggagaggggtgcaggcagtcagaatagagcaaagagaggagtaagtatagaatggtgtatcaaatgtttatccaaaagcaggatatggaactagtaaacattttattcacagtgtgtattttttctgagagggagtctcg

SEQ ID NO: 257029 - DNA, 409 bp, Homo sapiens
acacattgagtccagaatcttggcttaacgtttctatatcaagatttcatccttgtccaatattatattcctttcctcctgatcagacccttaggatccatttccatgcatgttcctcgggtttctgtctatataaattgataaactcttgcaatatttagatgtaacttgcatcctctcatggttcacactttgtaactcacactctggggcctggtgagacttgaatctggttacaaatgtagaaacaagaggcactgaaggttttcaggaaggttggcaatcctttgcaagacaattaccttgaaagaagttatcacaatctttaaggcaaaggaatactaactttaatcttggagaaagggtttccatctgcaaaaggggctctgaagaatttagagattcatgg

SEQ ID NO: 257030 - DNA, 347 bp, Homo sapiens
tgggttgcttcactggttttgcttcttagctctccagttacgtgttacaaattccctaattaatttcctctgcttaaaatacctagagaggagaggtttctgcttcctggctgggtcttgattgattcactgatcacaggtatggagtaagacttggacagtcagagcataggttgtcaactgttccagatattaaccaaggtcaagtgaagcactctcctctccaagaaatttcagcatggagagaaagaaagttttaccaccaatttgtgcctgaaacacaagatgaacagacgtcttctgcattaaaaaaggacataggcatgcattaaatcccttatgtctta

SEQ ID NO: 257031 - DNA, 235 bp, Homo sapiens
gagccacctcccccggcctttttggtttttttttcaaattttagtttaagttctgggatacatgtgctgaaggtgcaggtttgttacataacccgttttgttgttgttgttgttgttgttgtttgttttttaccacaaatggggaggtaggaaccgcaaagaaacactagtttcttagtggaccgccagctcttggttcactgatcaatcgcacccaaactccttcactaactta

SEQ ID NO: 257032 - DNA, 582 bp, Homo sapiens
acaaatttggattaggcagcatactgccaacctacgttggcatactacaagacaagaaaaataaatattaacttaaaaagtgaccagaaaataactgaagacaaccaaaacacaggaaagataaaaagaccaattcggatcatctgtctcaacagcagcaggcttacgattcaattttttttaagttaatacaaatattcagttacagtttagtaactcctttcaaaaattcattcctcaagcagctgatgtcagagaaatgtgttgctgcactaagaggcttccccaagactttaacacttaaaactgatggaagaaactaacagaggattctgcctgtttctaacagccttccctctactctacaaacggcaatggtgaacatttacacaggctaaagtgcctgtaggctgcttcaacttggaatatctgctcctatcagatctagcactcagaaatgagagatgaaaaggctaattcacaaagtagccaaaaatacctcacatattctatgctgctatcaagcaatacaaaagacacatgaagttccaaattattttttaacaatttttaagggagact

SEQ ID NO: 257033 - DNA, 141 bp, Homo sapiens
gcaacagagagaacaagtttggatgtaaatatctgggatgtccactcttctttcaggctgctaaacaaggtagcaaagttttttctgccaactgagctgccacttaccatcttaaccctacatttttaggaattcatctca

SEQ ID NO: 257034 - DNA, 437 bp, Homo sapiens
tcacaatttttttttttggacagcactaatttatgaaatgtttcatattgggcagatatctttatctcattaagtctttgttttatcatctctacaagagtgatgattgtatttatagatgcattacaaattattatgagtcttcaaagaatgagaacattgatataaagttatggctgaatatagttatcattgtttttacagggtgtcagttgaatattgccaacaaaacagaaaagaaacaatattttattgttataagtatgtgcatgtgataggacatatagtataaaatatttttcttcgttaatttatgattaacacataattgtacatatttatgggatacaatattatgtttgatatatgtacacattatgtaatgatcaaatcaggataattagcatatccattatcttaaacatttatcatttttt

SEQ ID NO: 257035 - DNA, 641 bp, Homo sapiens
ccgtgatgcgagagaaccttgcttggccacccctcactttcagacacgaaacaaggaagccatgtaagcagttgtttcgttaatcccaaataaggaatagcaagttgtcagtaaaaaatagaaatgatggagtataggtaggatattataaaaatattcccatttgctcaaatcataaatgcacattctagacgtgtcaagtggaaattaacagcatataaatgcatttttaatggtttgagtctcagcttattacctaagtctatagaaagttatcacttctgtcaataagagtcttttgaatttgatacaaaatacttcaaacctacagagagggacattacatatagagacattaacatagagacatcaatatagagagggacgttgcaaacaccagtatactcatccccagatataacaaatcttactatttaccatatttgcgttaggttctttttttagtagatcaagacatccagaaatttcatggaaattcttatgtggcattgctaaggccctgtgaatcaagagtaatcaaccattacatttcttgaaaaccctacggatacataggtctcaaggctcctcatgttactctcaaccaaaagctaaaaccaaaatgtgtgcctcagaaacta

SEQ ID NO: 257036 - DNA, 326 bp, Homo sapiens
tccctgatctatatttgacacaatatgatgtcttctactgcaagacttcataaacagaacaatgtaagtttctatctactgctacctaaattcagctattagaattatttggaaagttttcaaagtatagatttctaggccctataggtggtattctgaattgaaatctctagggggttagctatagaaatctgattcttagagactctcaggtgactctgatgcaggtgtcagctgaccagcatttgatgactactgcttcagccaaaggactcagtcttgtgaatagagaagcattggttttcatcagaattctgcagctaact

SEQ ID NO: 257037 - DNA, 311 bp, Homo sapiens
tttcagtaacttatggggaggtttcttaatcttattttaacatggtattgcaatattaatttgaatttttttgatggtggagggattttaagaaacaattttaaaacaaataggtctattcatcaaaatgttcaggctaaaacagttgtgaatatcgtgggaataacttataagggagacgacatcttcattattagttcagtggtgtctagttgaaaatgtctatattacagagaagttggcaggagctgctaaagaatgcttcagcttgtccacaagtaagaattaatcctaactgattactgaaaacc

SEQ ID NO: 257038 - DNA, 290 bp, Homo sapiens
ggtacgtacagaacttggctctaaacaaaattaggggaaagaaaagagaagaatgaggaggaaaaatgagcctctgaatgctgcattttttgtggcagaccttgggcaggcaagggaaaagtatattttgccactgagtccctttattgaactatctttctctcatacacacaagttccttcagcccccaaggtcatcctgaccttccctttgagaaatgctgctttacgttttaaagttactaaagtgtggagcactaacacagactcttctagataatgtagcctctc

SEQ ID NO: 257039 - DNA, 268 bp, Homo sapiens
cacagtctacagcaagctttatggcgatcacatgtaaacatcatcaagagcaaacactaggacagagctacaacgagatggttgccaatggcagctgctccctctgggttactcctcaatttggtgggaaagagaccaaggttcactcgtttttctgaatagaccttggagttgccctaaataatacacagcaccgaatgagtccttcgggatagaggttgtctgcagggtcggtaaattttagaacttgtagcattttatgtacggg

SEQ ID NO: 257040 - DNA, 222 bp, Homo sapiens
acaaatgtgaaatattcccacattttttcatattttatgagaactgtttatacagttgaaagtttctatagaagaattacattatcttcatatgaaccatattgtattttcttccttttttgacaatttttaccaaagctatatctatggatgctttgttatgcatttacttacctagcaattcatgtttctaaagtgtataaagcaacaacattgagaagt

SEQ ID NO: 257041 - DNA, 834 bp, Homo sapiens
agaggggtccatacggcgttgttctggattcccgtcgtaacttaaagggaaactttcacaatgtccggagcccttgatgtcctgcaaatgaaggaggaggatgtccttaagttccttgcagcaggaacccacttaggtggcaccaatcttgacttccagatggaacagtacatctataaaaggaaaagtgatggcatctatatcataaatctcaagaggacctgggagaagcttctgctggcagctcgtgcaattgttgccattgaaaaccctgctgatgtcagtgttatatcctccaggaatactggccagagggctgtgctgaagtttgctgctgccactggagccactccaattgctggccgcttcactcctggaaccttcactaaccagatccaggcagccttccgggagccacggcttcttgtggttactgaccccagggctgaccaccagcctctcacggaggcatcttatgttaacctacctaccattgctctgtaacacagattctccttgtgctatgtggacattgccatcgcatgcaacaacaagggagctcactcggtgggtttgatgtggtggacaccggctcgggaagttctgcgcatgcgtggcaccatttcctgcgaacacccgtgggaggtcatgcctgatctctacttctacagagatcctgaagagattgaaaaagaagagcaggctgctgctaaaaaagctgtgaccaagaaagaatttcagggtgaatggactgcttcagctcctgagttcactgctactcagcctgaggttgcagactggtctgaaggcatgcaggtgccctctgtgactatt

SEQ ID NO: 257042 - DNA, 492 bp, Homo sapiens
taggccctcctacacactgctattagagtgacctttctacagcacatgtattatgagggcctccagtcagaaagcctacaacacccccatttcagagaaacactttcaggcaaaccttgaagactgctgggagaggataagtcatttcttgtaggcaggtagcccagaaacctgggagtgatgtcatccagactccacttactttggatactcaaagttattgaggcccctcagggtgaacttgatggttttgaccaggtccagtggtgggagaggcaaccactgggaccgtaagagacagtccccttggccaagcagcttgagcagcagcgcctcttcagtaattgcggagtcttcaacctcaagccctccctccagagaaggagtgatttcaacacacacccgaaagtcataccatgacccttcctcatcagttgtagccctctaagtaacattgcaaagactcatacttaataaaaactccgttcttgc

SEQ ID NO: 257043 - DNA, 466 bp, Homo sapiens
tatgctataatctgtccacttagaatgtaagcttcatgaaagcagggacttagtttacccacatcctatagccctagcatctagaacagtgcctggcataattagacacagtaaatatgtgttgaataaacatctaaaaaccatcagagtagaagatgaaaagtcagacttttggtaggggttttgttgtggccttgggcaagttccttagtagtttttatgcacatgatgtttcccatctgcagaattaagaggttggattagattggtggttttaaaactgctccagggaattctaagggttcttcagtgccatctgttgctagaagaggatgagagaaatgctaaggaagccaggcttcagaacgcccgactgcaccctctcactccttccaggattttattaataacctgctttaactgtttcatattgggctttcataaagacatggggttcagctactca

SEQ ID NO: 257044 - DNA, 324 bp, Homo sapiens
ctgagcagatgcatagattttttttatacagtcttctatcttcagcagtaggagagacgttgggttaacttttgtacattctcacaatggagggctatgtagctgtcacagaggatgaagatctctgtgaactaatatagcaataattccaagatatattggtatctgaaaaaaaccaatgcatgaagaacagttttaagaaaagattccaactggaagcccctacaacatgtactgccacacagttctttccctacccctgtttttgtccaaaattctttcactggaggattatcttcttaggctttcatgccatcccctgca

SEQ ID NO: 257045 - DNA, 444 bp, Homo sapiens
tattcccattctattttggggttttacatttcaagggggcaggctttatccacactgaaatcactctccatattttcccagcagtctaacaaccaggtagagaggaatcaaggcggggcggggcgggggggggattgccaagtgttggcaaggcaggtgctgtgatgaaaagttaacttcttccatgtgcatgaacccctcagcaaatctttccaccttcctgggcctgggcttccttgactgtaaagtgaaggagggaagtacattgatttctaggttctgcctcaaacgttaaagactgtaacaaatcttaactcccatctgatggactgcttgctcaggtagcaagatcaagggtatgaagaaagtccaagctggacaggaggaggagaggagaaggaaaagaaggtggcgtgtggggaattagaaacaagctttggcatt

SEQ ID NO: 257046 - DNA, 462 bp, Homo sapiens
actaggtctgagtatcatgtttgagaaggcagcatttaaaatgaatttgacatttataagtatttttttttttggtacttaagctgtgcgtagtgttatttttgtgtatgaggaggtaaattttaccttggattgttaaatatagtgtcttatatcatctgtaatcataaaggacagattttctcagtaacattttgtcagtgacacaatttttcatgaccagtgaatgctagctgaagaaactgaaaattttctgaaattgtcagtataaatcatttatttcagtagaccttgctatgctttgctgttggaagtaaatataacttttcctaagattagtcaaaattcactgagtttgtgtcatgctttgttagatgctgagaatagatcaaagtttgatctctatattttatttaattgatatcaaatgaacataattaatgatgatgttgaatttttttt

SEQ ID NO: 257047 - DNA, 155 bp, Homo sapiens
agaacaagaagtggtggctttatttcacacacctctatatttaataagcaggaccatgacgaggtttggtgacctcagggcccaaatggactgtctgctggcataagtggtgcttgagtcatttcccagggatgagcactgggcaggcttccagg

SEQ ID NO: 257048 - DNA, 379 bp, Homo sapiens
gggcagaatctgctttaagcctttgaattcttggctcttaaagccaggttgagggttatgtgtttttattcttttatatctccttttcacttaggcttggcaactagttcattgaaacagagccaacaagaatgagtgagtcactcagtgatatgaagcaagctgtggtcatttatctactaccttccatacctacttcctaggtttgataagtagtgtttgtagtgtagttgtcagtaacttttctcagcttacataagtttatgtggaattcatttacaaatgtgtgattattacgatagatgttattttataaatttcaaggttctttaatacagcatggacatgtttctaaatcaataaatatagcttacccaca

SEQ ID NO: 257049 - DNA, 1116 bp, Homo sapiens
agactgtgttattacaatgatttgaccttaggttgaggtttctgttgcaaaaccagctgaggaggtcctaaatgtggaaagcagatgtttctcttctggcatgtcttgcagaattatctggcaagagaatatcttctgtgaaaagaatgcgtgagaaatgtcatgcatttggcaatgattaagaaagaaaggtaaaccttcaactccttgttcttaaaagaatttggcttgttatttactgggaagacaactaagatgcaaagagcttttctgctctttgcaacaaatttcttaaaatttgttttcttttctactcttttgttcttcataaggccagaatatattatctcggggagagctgatgaaaacatgacttagtggctcttagagatttagcatagacgtaaacaacactgtatttctgtcacccagttctggtggctggaatttgatatctgggtgccagcatagtccagttcttgatgaggactcccttccttatttgcagatggctaccttcttgccctaccctcaaatgggggagagagaaatcatctctcatgtctctgcttataaggacacaaatactatcacgagggcctgaccctaccttcatgacctaattatctcccaacgcccaacgaccccacctccaaataccattgcaacgaggatgaggtttcagcatattaatggcgggggcaccaatatttgatccgtaactatgcgagtgccaactagctagtttcttgtcttttttcagtgccatatggaggctctgctgtacatcttctgagatcccatagttactatattaaaaagtaccattctgatgagaatgtgaatagcttttattatattacctttgatctggtgtgaagatgccttcaaatagatttaagaaattactcattaaaaggatatttttcaaaaggaattgccagttgattaaataatactaggtattaaattttacctcatggaagaacaaacttgtttgacaaaaaaacatttcttaattaaagccatatattttcatattagtaatgttgctatataattataatatttttaattttgtaatgtttttataattaaaggacttagtaaaatcca

SEQ ID NO: 257050 - DNA, 126 bp, Homo sapiens
  misc_feature (7)..(7): n is a, c, g, or t
  misc_feature (118)..(118): n is a, c, g, or t
  misc_feature (123)..(123): n is a, c, g, or t
gggaagncgtgtgtggtgcagcatttcaagtctggagtctacactgagacacagcagaacacgattggagtggactttaccgtgcgttcccttgatattgacggcaaaaaagtgaagntcagnggg

SEQ ID NO: 257051 - DNA, 554 bp, Homo sapiens
agaaatctcctttcccaccctgtaaggaattccaggacaccgtctatgaagagggaaatcataacttggctatttgttcaggacacccctaccctcttccagaccagcagctcattgagacacctgccctcgagataccacttgactactgccgccagtcgacaattattgatcaagtactgtgtcaggtcctctgctaggccgtttgagacatgttatctcaattaatccttacaacaacccaagaggtagacatgattattagcccatttcaaaaacaagaaaactgaggcacagattatttgcctaacttcactagctaataaattactgagatgagacttaaactcagtttgtctcaagaaccccatggtcttatccagtatgccctattgcctgttacgggcctttgtcaaacaagtcttctctcttggtgcactccaggccaactttctgtgttccagcttgagagtcctctttgcagccatgtgaatccagtgtcttcctctcgttaatcctctaggacacctctgcccagctttcttccatccccc

SEQ ID NO: 257052 - DNA, 2681 bp, Homo sapiens
ctctctggataggaagaaatatagtagaaccctttgaaaatggatattttcacatattttcgttcagatacaaaagctggcagttactgaaataaggacttgaagttccttcctctttttttatgtcttaagagcaggaaataaagagacagctgaaggtgtagccttgaccaactgaaagggaaatcttcatcctctgaaaaaacatatgtgattctcaaaaaacgcatctggaaaattgataaagaagcgattctgtagattctcccagcgctgttgggctctcaattccttctgtgaaggacaacatatggtgatggggaaatcagaagctttgagaccctctacacctggatatgaatcccccttctaatacttaccagaaatgaaggggatactcagggcagagttctgaatctcaaaacactctactctggcaaaggaatgaagttattggagtgatgacaggaacacgggagaacaatgctctgtttgggctggatatttctttggcttgttgcaggagagcgaattaaaggatttaatatttcaggttgttccacaaaaaaactcctttggacatattctacaaggagtgaagaggaatttgtcttattttgtgatttaccagagccacagaaatcacatttctgccacagaaatcgactctcaccaaaacaagtccctgagcacctgcccttcatgggtagtaacgacctatctgatgtccaatggtaccaacaaccttcgaatggagatccattagaggacattaggaaaagctatcctcacatcattcaggacaaatgtacccttcactttttgaccccaggggtgaataattctgggtcatatatttgtagacccaagatgattaagagcccctatgatgtagcctgttgtgtcaagatgattttagaagttaagccccagacaaatgcatcctgtgagtattccgcatcacataagcaagacctacttcttgggagcactggctctatttcttgccccagtctcagctgccaaagtgatgcacaaagtccagcggtaacctggtacaagaatggaaaactcctctctgtggaaaggagcaaccgaatcgtagtggatgaagtttatgactatcaccagggcacatatgtatgtgattacactcagtcggatactgtgagttcgtggacagtcagagctgttgttcaagtgagaaccattgtgggagacactaaactcaaaccagatattctggatcctgtcgaggacacactggaagtagaacttggaaagcctttaactattagctgcaaagcacgatttggctttgaaagggtctttaaccctgtcataaaatggtacatcaaagattctgacctagagtgggaagtctcagtacctgaggcgaaaagtattaaatccactttaaaggatgaaatcattgagcgtaatatcatcttggaaaaagtcactcagcgtgatcttcgcaggaagtttgtttgctttgtccagaactccattggaaacacaacccagtccgtccaactgaaagaaaagagaggagtggtgctcctgtacatcctgcttggcaccatcgggaccctggtggccgtgctggcggcgagtgccctcctctacaggcactggattgaaatagtgctgctgtaccggacctaccagagcaaggatcagacgcttggggataaaaaggattttgatgctttcgtatcctatgcaaaatggagctcttttccaagtgaggccacttcatctctgagtgaagaacacttggccctgagcctatttcctgatgttttagaaaacaaatatggatatagcctgtgtttgcttgaaagagatgtggctccaggaggagtgtatgcagaagacattgtgagcattattaagagaagcagaagaggaatatttatcttgagccccaactatgtcaatggacccagtatctttgaactacaagcagcagtgaatcttgccttggatgatcaaacactgaaactcattttaattaagttctgttacttccaagagccagagtctctacctcatctcgtgaaaaaagctctcagggttttgcccacagttacttggagaggcttaaaatcagttcctcccaattctaggttctgggccaaaatgcgctaccacatgcctgtgaaaaactctcagggattcacgtggaaccagctcagaattacctctaggatttttcagtggaaaggactcagtagaacagaaaccactgggaggagctcccagcctaaggaatggtgaaatgagccctggagccccctccagtccagtccctgggatagagatgttgctggacagaactcacagctctgtgtgtgtgtgttcaggctgataggaaattcaaagagtctcctgccagcaccaagcaagcttgatggacaatggaatgggattgagactgtggtttagagcctttgatttcctggactggacagacggcgagtgaattctctagaccttgggtactttcagtacacaacacccctaagatttcccagtggtccgagcagaatcagaaaatacagctacttctgccttatggctagggaactgtcatgtctaccatgtattgtacatatgactttatgtatacttgcaatcaaataaatattattttattagaaaaaaaaccggaattc

SEQ ID NO: 257053 - DNA, 2356 bp, Homo sapiens
ctctctggataggaagaaatatagtagaaccctttgaaaatggatattttcacatattttcgttcagatacaaaagctggcagttactgaaataaggacttgaagttccttcctctttttttatgtcttaagagcaggaaataaagagacagctgaaggtgtagccttgaccaactgaaagggaaatcttcatcctctgaaaaaacatatgtgattctcaaaaaacgcatctggaaaattgataaagaagcgattctgtagattctcccagcgctgttgggctctcaattccttctgtgaaggacaacatatggtgatggggaaatcagaagctttgagaccctctacacctggatatgaatcccccttctaatacttaccagaaatgaaggggatactcagggcagagttctgaatctcaaaacactctactctggcaaaggaatgaagttattggagtgatgacaggaacacgggagaacaatgctctgtttgggctggatatttctttggcttgttgcaggagagcgaattaaaggatttaatatttcaggagcccctatgatgtagcctgttgtgtcaagatgattttagaagttaagccccagacaaatgcatcctgtgagtattccgcatcacataagcaagacctacttcttgggagcactggctctatttcttgccccagtctcagctgccaaagtgatgcacaaagtccagcggtaacctggtacaagaatggaaaactcctctctgtggaaaggagcaaccgaatcgtagtggatgaagtttatgactatcaccagggcacatatgtatgtgattacactcagtcggatactgtgagttcgtggacagtcagagctgttgttcaagtgagaaccattgtgggagacactaaactcaaaccagatattctggatcctgtcgaggacacactggaagtagaacttggaaagcctttaactattagctgcaaagcacgatttggctttgaaagggtctttaaccctgtcataaaatggtacatcaaagattctgacctagagtgggaagtctcagtacctgaggcgaaaagtattaaatccactttaaaggatgaaatcattgagcgtaatatcatcttggaaaaagtcactcagcgtgatcttcgcaggaagtttgtttgctttgtccagaactccattggaaacacaacccagtccgtccaactgaaagaaaagagaggagtggtgctcctgtacatcctgcttggcaccatcgggaccctggtggccgtgctggcggcgagtgccctcctctacaggcactggattgaaatagtgctgctgtaccggacctaccagagcaaggatcagacgcttggggataaaaaggattttgatgctttcgtatcctatgcaaaatggagctcttttccaagtgaggccacttcatctctgagtgaagaacacttggccctgagcctatttcctgatgttttagaaaacaaatatggatatagcctgtgtttgcttgaaagagatgtggctccaggaggagtgtatgcagaagacattgtgagcattattaagagaagcagaagaggaatatttatcttgagccccaactatgtcaatggacccagtatctttgaactacaagcagcagtgaatcttgccttggatgatcaaacactgaaactcattttaattaagttctgttacttccaagagccagagtctctacctcatctcgtgaaaaaagctctcagggttttgcccacagttacttggagaggcttaaaatcagttcctcccaattctaggttctgggccaaaatgcgctaccacatgcctgtgaaaaactctcagggattcacgtggaaccagctcagaattacctctaggatttttcagtggaaaggactcagtagaacagaaaccactgggaggagctcccagcctaaggaatggtgaaatgagccctggagccccctccagtccagtccctgggatagagatgttgctggacagaactcacagctctgtgtgtgtgtgttcaggctgataggaaattcaaagagtctcctgccagcaccaagcaagcttgatggacaatggaatgggattgagactgtggtttagagcctttgatttcctggactggacagacggcgagtgaattctctagaccttgggtactttcagtacacaacacccctaagatttcccagtggtccgagcagaatcagaaaatacagctacttctgccttatggctagggaactgtcatgtctaccatgtattgtacatatgactttatgtatacttgcaatcaaataaatattattttattagaaaaaaaaccggaattc

SEQ ID NO: 257054 - DNA, 941 bp, Homo sapiens
cactcccagccctttggtcaaatggctacaggactacaatcccagcatgcgccagtctccggggtaaggcatagccctggaagaaggggcaaagttgtacatgccccacctaatatgctgggagctgtagtccgttaactgctctcagcctatttgtcggtgggcttcagaaccataatctcagcatataccgggatccggggtgcatagacctggagggagggacagagcggtgtggacttcccagtgtccaaagcattgctgagttcttatgctatgccgactctttgccacagagagtgagtacagaggtggacctggaggacaggtctgggctgagcattgaggagggtattaccctatgtaggcaccttacctttgcccaaatcaggcgggttatcctcacccgattggccctatgcttctcaggttcctctttcagctgcacccagggttccttccagagcattgcaccttctgcagctcagggcactgccttttttcctaaactactgtggaaactgtcctgatgtctgagacactgtccattgtgcagcagccctcttttttctctagccagagcgcgtgctcaatggcttttgagagaaatcttccacatggcctgcttgtgaacagcttcagagctctgcaggggctgacaagggctgagccttcctggaaacgtcactctcaatggcgcctttttcacgaatgtgaaagtcgaggcatcaggaagttagtttaatgggttgcagaaaatctaagagcaagggagaaaacccgctttccaaggcgtgagttttgtgagccattttcatcaacccatttaagtggacaagctccaaaatgtaacctgaagctgctgactatttaggcattttacaattaaaatcatcggtctcatcccaagtcgtgcctcacttgccagtgtctcagagaca

SEQ ID NO: 257055 - DNA, 745 bp, Homo sapiens
aaagcattggaggtcgttgctgaaggacaagtcattagaaactgtgtctatgagacctttgggagcaggcagagaagtggctgatttggtagggccagccccgggcatccctgggttcaagtcttcttcctccagtgataacttgcacaggggttctaccaggtcagcctgctctgtggctgctgctgataagaagtacagttgtgctgggacgacatgttccagagtgcactaaagaaatggccaaaccctccatttccctttcacagaaagatgctactcagtatcatggagctttacttctccaagtgtggcccctgaaccatcagcagaatcacaccaggagcttgttagaaatgcagattctgaatcagagactccgggacagtggagtccaggagtctgcatcataacaagccctcttgattctggtgtgtgttcaagcttgaaaaccactgcgattgattaaggtaagtcagcatgtgccaaagtagatgacatttttcctgactgttggaaattgggagccccgaattatctttgatcaaacacctggagtgaaagcagggcattttacctgaatgccctgctctcaggattttccagggaaccatattctttccattagaggaatttaagggagatgtcccaaatatccccaaacaggtgtcctctgtcaggaagtccccaaatcaggcccagataaagattttactggagccatgattatcactcaattccacta

SEQ ID NO: 257056 - DNA, 580 bp, Homo sapiens
tgctgggattacaggcatgagccactgtgcccggcccaaaatatacatttttaacttgataacaatcttatgtcttagagaagagggttgattatgttcaatatgtgatgtttactaaggcaggacatgtaaatatagatgagaaagatgctcagtattaaaatgtaaaggaatggacttcatggtttaacttgcaattctctggctttttttttttttttcctgagtacttgcttaccaagagtttatattggtttggctagcagtgagctgtctaacaagatgcaatctcatggaatacatccttatgccaattatgaataaaagtagttcagacggccaggccctaacttaaatatagtgcctttggtggttaagggtgatcaggtgagtggttaaatagatcaagaaaaggaaagaaaaatccaactaccttattaaaaaacaaggataaaatgtcaaaacagtgggtaggcagtaggaagaatgtcactaaattatgtattctttgggttattaacaattagaacataatgttacaatgtaagcactgtgcctcgtgccgggggatcctgctaga

SEQ ID NO: 257057 - DNA, 402 bp, Homo sapiens
agaaatcctgatgcctaaatctgaccccttgaaatgctgatgagcttcatctgagctgtgtgatctctcatgtgcagctaaggttgagaaccactaacataaaataattcacattaaaatcaccaggaagctttaataacatttcaaatacttggacccaacccctaaagattctaatttaattggcctgggactcaggtactgatatttttcaaaagctcacaaggtaattctgaaattcagcaaaagttgagaaccactattcagactaagtgacttgtccaatgtctctgggtgcatcagactttacggccttccttacacaggggttgtgaatgaaatatggctatggaaagcaattgttgagtaatatgttataaagtatggtggtgatgatgatga

SEQ ID NO: 257058 - DNA, 495 bp, Homo sapiens
ccagtcccagaggcgttttctcaaaagctggcactgatctgggcacacaccccagctcagaagcatgtaggggctccccactgtggattacagctaacgcttattgttttacaaaatgcctggccctgtccttagctgtttgtacacattaactcatttaattctgataacacccctgaggggtaggtgctgttattttctccattttacagaaaggaagcagaagtacagagaaattaagcaactttcccaaggctatccagcattaattgctagactcaggattccgatcttggcagcctggctcagaatctgtgctttcagcactataatttagtcctctctccatactgaaatatacaatgtgatgagtagagacagcgaacaaagcagtctagaatattagttctgccatttacttgctatatgaccttaggcaagtcttttatttatttttatttatttatttagagacagtctccctctgtcacccag

SEQ ID NO: 257059 - DNA, 403 bp, Homo sapiens
aatactctataagcactcatggaaacttctgacaaaataatttgcactcattatccctcagctttgccacgagcattttacgttgtacgctaccacacagtaaagggtctcaaatgggggcaacgtgccccccaagggacaatgggcactgtctagagacatctgtggttatcacgacttgggggagctcctggcatggagtgggtggaggcctcggacactgctcagcaccctgcagtgcccagggcagccccaccccagagaccaacccggaccaatgtgcacagggccccggggagacctgttgtacgtaacggagaggcccatctgaggcgtgaacagcacattttagccgccgcgggagaggcggcacggcagccggagccccgtccagctctagggc

SEQ ID NO: 257060 - DNA, 429 bp, Homo sapiens
attcaattttttctttctccctcttccccatccaaacctccaatccctctctttcccctcattcattccattgcactgaacatttcctgcaggctagagtccaggacagggaggaaatctgctccctactctaaaagagctgcagtcaagatttagtagaatatgctctaatgagggcagcacagggcacactaggagcccagagcaagggaggactattatagaattgcctagagagatgggtagccagagagggctctgcaagaaagctccattggatctggatcttaaagagtaagcaggaggctgagcgcggtggctcatgcctgtaatcccagcactttgagaggccgaggtgggcggatcgcaaggtcaagagatagagaccatcctggccaacatggtgaaaccctgtcactactaaaaata

SEQ ID NO: 257061 - DNA, 455 bp, Homo sapiens
tgtgcctgagatagtgacctatttcttttaaatgtgggcattatttgaaatgatttttaaacaggtagagagtgtcataaaatttttatatgagggaacattttttacttcattctcattgcttttatttaatgtgcccatatgtgaatgcatagccactggttattaattttctaaatgtagaaaataagggaaaagtaactgaagcattatcttgaaccaatttgaggaagtgaaatgtgcttgcccaacttttcttaaaatgggctaagtcaggttaaaaatctagaagcattttcctgtgtgtgaaatatgcttttaatgttggaatttagtagtttcacatagccggacaataaagatgttagaaaaaaatcatgaagagtatgttaagataaaaggcaagagagaaataatgtataatttatataaatcatgacatttaaaaaattagg

SEQ ID NO: 257062 - DNA, 605 bp, Homo sapiens
aatatagggctcagtgaggaagggaaatcccataagcaaaggtggctcacagtgcattgagtaacaatttgatagtaactacacctcctggaactgaagaatttctttatgagataatttctagagcactgaattccagatgtttaaagagatggagatttaccctttgaacactggggagtcactggggtagcttcttgaatggggatgattcaaagaatgggacatgattttcaaggccatagtttgggaatattaatctaggagccgtgtgtagcattcatccacactttctcatttggacctggggtaaacagtaacatggatttcatgagagctgactaatcaagactgtagtctctggacttggaacatagtaaagctaattcaaaatggaagattgactattacctcccttcaatgacttcagaagaggaataaaataaaacctacaagatagaactattctattttagtcttctttttgtaatatgtaaacttctgaaccaaaaagtgacctcaggtgctccttcctcctaagagctgtcttgttccttttatataatttatttgatcattatttcgcctaaattgtcttacacctg

SEQ ID NO: 257063 - DNA, 252 bp, Homo sapiens
gagactccttctcaaaaaaaaaaaaaagtttgtaacctatttatgttattttgagcaattgtatactaaaaataatccaaaagaaatatttaatacctagggttttgtggtcaccagaaaaaaaaaaaaaaactatattaggttttatagttttaggccgcaccgggcctatgttaagttttcatttgtagtatatacatatttttgttgcagagaaataagatagcatgatcaataagactgttaggcaaa

SEQ ID NO: 257064 - DNA, 365 bp, Homo sapiens
gtcatgccgacagggatgtggtaagtgcacctgctttaggaaccagttctgtagtgtccaagaatccagagcgatcatctatgcaaaatgcctgcaaggttataagttcccaataattagtctctgcctagtgctgaataatgatccccaaagatgttcatgtcctggtctccagagcccgtgaataagttaccttacagaagggactctgcagatgtgattaagactcttgagatgggccgggtgtggtggttcatgcctgtaatcccagcactttggaaggctgaggttggaggatcgcttgagcccaggagttcaaaaccagcctgggcaacatggcgaaaccccctctctacaaaaaatac

SEQ ID NO: 257065 - DNA, 302 bp, Homo sapiens
gatcttaggcacaatctaccatcacatgccagtcctcagacaaaaagaagaaagttttcagttcattctagaagccatctcccagatagccagctttcacatggatacagttgttgtcaaccttttacagaagcctctgccttttgacagggacacaaagacattgtggaaggcgctggctgaaaagccagcctccagtgggaaactcttgcaagccttaatagacaaactggagactgagttagaagatgacatcgccagggttgaggcaatttcagtgagttggacagcctgaacccatc

SEQ ID NO: 257066 - DNA, 496 bp, Homo sapiens
aggctcctgagttcaacatggaaatgcagttaagtgtgatgaagatgatgacaaagaagaagacgatgatgatgattttacttcatgccaggcagcttgctaaggactgtacctagattacctcctttagcctcagaatcaccctaggaggttggcaatgcagccccacctccctgaggaagaaactgagtgtcagagctgtgcccctccctctctgtgttctctctctgcaggtgccctcttggggtcctgttctcttcactgctcaaaattctgaccagcctgcacccagccctgcacttccattccaagctccgtctgggacagcgtgacatcatcaaattcaacctgtgacatcatcaaactcaacccacaacatcaaactcaactcatgacatcatcaaacccagcccatgacatcatcaaacccaacctgcgacatcatcaaacacaacccacgacatcatcaaactcaacccacgacatcatcaaaccc

SEQ ID NO: 257067 - DNA, 644 bp, Homo sapiens
ttttaagatggagtttcgctcttgttgtctaggctggagtgcaatggcgcgatcttggcttactgcaacctccgcctcctgggttcaagcgattctcctgcctcagccttccgagtggctgggattacaggcatgcgccaccacacctggctaattttgtagttttagtagagatggggtttcaccatgttggtcaggctggtctcaaactcccgacctgaggtgatccgcccaccttagcctaccaaagtgctgggattacaggcatgagccaccgggcccggcctggtatttccgtatttcatttgaaactgcatagttttgatccttttaaaataatttttcggccaggtgcggaaactatgcctagctagtgattaggatgctaataactattagcattagaatgctagtaactatgcctagctagtgattagaatgctattttttaactcttctcattggttttataaatcatatttataatatagtacatccaatcaaaatgtagatttttgtttcgatttcaataagttacatttcatataatgacaattgtatgactgtttcatccaaagagtcttgaattcttttgttttcccagtaccaaatttactttagttttatctatgaaatggtgataa

SEQ ID NO: 257068 - DNA, 467 bp, Homo sapiens
aatgtcaaaacagagcctagtgcaagagctcaagaaaactttatcatgaacatcagctactctcttagtttggtttgttgctttgaagatgaaagtgaagagtgatgccagcgtcctgtgtgtgaatgtcccgtccagaactttactgcacagtagaagggaacatgcagagttacaggcatatccagtgcagctcataggaacactgcaaaaggtgtcttctggagtcttctggagtcagacatagcagcaaatagctctttaaatcccctcatgcctcctgaggtttctactcaggtaggaatatttgcataatagggcttatccaagggaactttaaaaatagatggataggccgggtgcagtggctcacgcctgtaatcctagcactttcggaggccgtggcgggcagatcacgaggtcaggagatcgagaccatcctggctaacatggtgaaaccccgtctc

SEQ ID NO: 257069 - DNA, 368 bp, Homo sapiens
  misc_feature (368)..(368): n is a, c, g, or t
tggacacccgcagaaggagaaggcctaggtagacagaggggaaggctattccaggcagagggagctgcatgttgaaaggagtgtgatttaagaaagtttgcagcagccaaaggactgaaaatgctggatctggctaatgtccattccacagtcactggtatgcattgatgggaattttacaaactatcccttctgcaacgtggagaatggattgcagcaaggagcgatcagacgcaaggagaccactacagtggcgacatttacagtggtgataggggagtgggagggaaataggtccacttaaaagatatttaggaggcttgatgtacacgattcggtgactactggatgcggtggtggtgggggcn

SEQ ID NO: 257070 - DNA, 270 bp, Homo sapiens
ccccagcaagcagacgtttccggttcttctctctctctccttcccacatcaaccgcaaaagccaccaacctcctctgggttcccgtgacagaggtcacagtccaggtcccccttgcatcacttgaatccactgtcaaatgctccctgctggggtctcctggagtctctccccaagccaaggggcttcctagtgcagcctgaacatctttccaaagcacgacaacctcactgcccacctgaacaacttccttagctgatgtctttctctat

SEQ ID NO: 257071 - DNA, 108 bp, Homo sapiens
cccggctccctcctttcccaattcacccacttcttaatttgagtttcttaatgtgcaagcgccagggccggctgtggtcaggcgggctattttctggcaagtgtggcg

SEQ ID NO: 257072 - DNA, 642 bp, Homo sapiens
gcacagcacacacgcacacacagcacacacacgagcacacagcacacatgaaagttacatttctttattcatgtctaaattggtctgtttaacaatagtagggagaaaatcaacaactgcattttctctgggcctctattctgtgataaaatggtaactccaagctgtatttattctgcctggaaaagaggaagaaagcgttcttttcctccaattatggtggaacgcggcccttgagaaaataccgtggagccttttgagcaggcttcactggtgtgagaacacattccaagttaaatcagcagagctactggaaggaatgcaaggtgggagagggggaagtttatatgtttctctcttcagtggtgactttagcttcatgtgacatgtcctcaaaccttctgggccagtgactttcaaccctggtggctgtggcggtgctgcagtcacactaggttggagactggatgcgccatgagtcctgtacttacgtatgaggcacagctgctttccagtgtaggaatttactgtaatggtcagtacattaggatttcatttaaaaccttcatattaactagttatccttgggatatgctggttaacagcatgttaatcagtcagataaagcccaactgtgccata

SEQ ID NO: 257073 - DNA, 264 bp, Homo sapiens
ctatggcttccccaacttcacaagccattctgctaagacacatggcgtatgcatgtgaggaatgaatgctgtcccatggcatcctacaaccagtgatgggagttggtgttttgtaaacttccaaaactcctttacccctcaaatgaaataaactctccctagaatttcccaggctactttttgagctgtttcccttctctttctcactcttctgttcccctattggtttcctgaagttttcaaataaatgatttgcacttaaat

SEQ ID NO: 257074 - DNA, 332 bp, Homo sapiens
catggcaaagagggattaaggtggcaggtggagtgaaggttgctaatcagccaaccttaaagtagggagatgatcctgaatgagacaaaagagagaaccagtcatggtgtcatgagaaggactcaaaatgcaactgctgactttgaagattaaggggctacaaaccaaggaacgtggtagtctctggaaaagacaaggaatagacgctgccttggggccaccagaaggaaccagccctgtcaacaccctaattttagcccagtgaggcctgtgctggacttctgacctccagaactgtaaactaataaatgtgtgttgtttctgccactaga

SEQ ID NO: 257075 - DNA, 378 bp, Homo sapiens
taataaagattacatttaagattaacagagaataggaaaacagtagaatgaatgaaacccaaaagttgggtcctttggtaagatcaacaaaattgacaaatttttaacgactggtcaagaaaaaaagagaagactcaaattaccaaaattaggaagaaaaatgatgacattactgttattacagaattaagaaggattatagacaaatactatgaacaattttaatgccaacagattagataatttagatgaaatgtaccagttcctagagtgaatgtaatgaaatgcaccaattcctagaaactcgtaaagtacctgaggaagttgaaaatctgaattgacctatatcaagtaaagaggttgaacccataataaaaa

SEQ ID NO: 257076 - DNA, 294 bp, Homo sapiens
cggcacgaggcggcacgaggcagacctcaaattagtctccctctgcttctccaacagtgtggcctcttctatgaagctgtctacccatgggtttccccaacatcccatcccccagccctcaggtttctcctccccatcatcttcacttcagaaagagaaatgaaaaagaaattcaagtgactcatcggtccacataggcaggagtgggagaggctgagagagtgaatttgtgggtccagatgaatatttccgcaggcctcttgactgcttcacacgatctgctgtgcttcatga

SEQ ID NO: 257077 - DNA, 983 bp, Homo sapiens
cagctcctgggatggcctcacctgaggagactcttgggccttggcagaaacattccctaaagttctccaaataaggcttcttccaacaagatcccaccctgggctgcccacacaggggcaggccaatcaggtgctcctctagggcagggtcttccctggggtaaaatggagtacacgccaagtcaattcagagctcatggagttgctgaaataaaggttgccaaggctgggcgtggtagctcacgcctgtaatcccagcactatgaaaggcggaggcaggaattgagctcaggagtttaagaccagcccgggcaacatagtgagaccccatctataaaaaaaaatcttaaaaattagccggccacggtggtgcgtgtctgtagtcccaactacttaggaggctgaaatgggaggatcacttgagcctggaagtttgaggctgcaccaagccatgattctgccactgtactccatcctggtgacagagcaagaccttgtctcaaaaaaataataataaaaacaaagtttgccaaaaaaaaaaaaaaaaaaaaaaaaaaaacaagaaaaaaaaaaaataaacaaaaacaaaaaagaagaaaaacaaacacaagtacaacagccacaaacacacagaccacgaggggcgccccgccacaaaacacaacgcgaagggcgccgccacaaacaacaccagcagccgccagagaaacaagggcaccacagagcagagcatcacacttacgacagacaccgcactcggggcgcgacatatgaaacacacaacaggtggaggataggacgaaacagcgcagacgcgcgggctggtcagggagaggtgccaggccacccactattagtgggtgggtggggggacaacaccatagccgagcgagaccccacccccagcccgcgcgagcgagtaacccggcgctgaggccggatcacatcaaccagttgcggcagtggtaaggcggtgagcaacc

SEQ ID NO: 257078 - DNA, 307 bp, Homo sapiens
  misc_feature (296)..(296): n is a, c, g, or t
  misc_feature (301)..(301): n is a, c, g, or t
tgggattctaacgtgttttcgggcctccttagagccttcagcgaattcactcatatgcatcacacacatcacgtggcatttcccaaaccacctggtccacgggaccctttctgcccagagctcctggaggggccagcattccttgggttaggtccctgcaggtgcacagcagggctcagggtcccatcgttcagccagaggcccgatctcgcagtggacggatgcagagcccgggacggtctcacgaattccgctgaggtctcacgaattccgctgaggtctcacgaattccgctnagtantagtag

SEQ ID NO: 257079 - DNA, 725 bp, Homo sapiens
caaaactatgaaccatctcacagacttttttaagtgaccatctaatctgtatttatcatagacataaggcgtttcaaatgatgtaatttttggcatattataaaggtcacataaaattgtcatattacttatttaaatgtagctaaatactaaagactttttattgcctggcagaggagcagacagactgggaaaggaagagggagcaactaagttaagcatgcccaatcctttatcccaaattcaccaatcagataagacactgaattaggggtggagagaggctggggcattaaactaatgtttccttcacaggaaaatatgaaatcacaggcaaagagctttctgcctctccaccctcatgtgcacatcctaggtaattgctcccaaattgaactggtctcatcagagtcacacgaaggcatttttaaacaatagagatgccaggagattctcacttggagatggatgaaagggacttgaaatctgttaagcagacatctcttgttagtgcagtactatcaggggtctggagtgttctagaaaacccacagtcatacaagtggtaccttggtccaaagccatagccctgagtatgaacaaatcattttctttatcagaaaacaaagataaggatgcccgtctcctagacttgtttgaggagtaaatgagatggcacattcattcactcattaaatatttatgaaatgtttgctatgtgcaag

SEQ ID NO: 257080 - DNA, 341 bp, Homo sapiens
acataaattttaagatgatttggttgatgaagaaaatactgaaaacttgtgggttgcagttaaagttgtgcttcgaggttatagctgtaaatctgtggctctccaccttagctgcacctagaatcacttgcggagcttttgatgtccaagccactcttcagaccatttgactcagaacctctaggggtgcaccccaaacatttgaaaactctccaggtgattccaatgtgcagctaaggttgagaatcactgctttaaaagcacatattagaaaagaaaaaacattcctctcaataactcagaactgctaattaaacctaaagaagtagaagaaagaaaaa

SEQ ID NO: 257081 - DNA, 262 bp, Homo sapiens
cttagagggcaaagtagaaccacctttaactcaacgttttgtgccttgtattgtgtacactgactcaggattgaaattctcctgatttcattgttaccaacaatttatttaacgagctgttcattgtctcaacggtgaatgatcagcaaacaactatgcctgctcatttatctactctagtttaacttttttttaagagacagggtcttgctctgtcacccaggctggaatgccacggtatgatcatgactcactgcagcct

SEQ ID NO: 257082 - DNA, 821 bp, Homo sapiens
ttttggacagattagctagagttttgagacatgtcttttcacaaacaacatcgtaattcacccgagtttccatttttgttcctctaaagcagaacaaaaatctgaaggcagtttcaaatctgagagcagaattatcatcaatgttaaacatttttccccaatgtcatacccagttaagtactttgcaaatatagcctttttatgaatccaaagcattctatttatttttcataaaaataataatgctatttttaaaaaatgactatgttcaccttcttatttcattcatttatgtaacatttaaaattgcataaacctatcccaggcagtgaacagagatttctgagctacccagatgacttaggcagaaatgtcttaaaatacaaataaaacagcattttgtttttggtttttttttttttaaagaaatatttcttgcacacctgagatctgcaccagctgcagaggtaaacatggataaaaatatttctgaaatgagtctggagttgtcgtgtgtgtatttctcaaactgagtgtggcgtggcagtgtggtaagaactaacaaaacccacaatcctcataaaacatatttttcaactgcctgacaaaagagacatcaacttaatttgaaaaataataataataaggaaagacaatagaaaggcatttggttttctgaataagacaatctaaattttccgtccagcagtagggaaacaattgaggagcaatgacaaaacaatggccgaatgcataaaaagaccacactaattcagtgtcagttcctccacacaacactactaattttcaattttcccctt

SEQ ID NO: 257083 - DNA, 152 bp, Homo sapiens
tgcagtgagccatagtcatgccactgcatgccagcctgggtgacagagatgctgtccccctttaaaaaaaaagccaaaatgtaaaaacttttaaatcaatttggttaaaaaagaaaactgtaaaaacttttaaatcgatttggttaaaaagc

SEQ ID NO: 257084 - DNA, 633 bp, Homo sapiens
agaaaattaatttacaatgaaggtacagggttgacctgataatgttagtggcttgcttggagcctcataacattggtggtgctttcaagattcattacccttatttttaaacaggataaggaagagcttggaaacctatttctagcaggtaccagagttaaatcaacagcataagctttgaatttcaattaattttgttaacttttttattttctagtataatatttagaacaaataaacaaatgaagaataaatatggatcttatgagaatatgcaacttattacaaactctaaagtttttttttttcattttaagagttacaggagcatagtattgtcagaatcccttgaatataatatcctttatttgtttattatattcatttatgggtaaatacccaaagtaagtgtcagtaggatagataataaaatttatcaatgacatcctgtccaagatagaagcaacatcccattcagcatggatagacacatgttcaaggatacatttatctggcctgagtctaggtgcatctacctcagatttcaaaacatcctgaaacactatgagtcacggattaaataattatttttaagactttatatcaaatacttggaaaaggattcaagaataa

SEQ ID NO: 257085 - DNA, 250 bp, Homo sapiens
tatcattttgggggtgggtgaaaacaaaaacaatggtttttaatggatttaaagtcaacaatggattgcttgaagagaatgtaaggttgaggggaggagatgtttgaaattttcaagtcatatagaattatattcccttaatttacctgactaaaaatatataagtagtatgttagagtcagatgatgctgggagttaattctccaactttacagatggaggcttatgacctggagctcatactggtata

SEQ ID NO: 257086 - DNA, 311 bp, Homo sapiens
tgaaagataaacatggttaatgctatggccagaggaatgaacttgagatacagacaggcaaaccctcatcttttatgcggtctacttctgtgaggttgacattcatttatttattttttttgcaagtctattttcatgtattatttaaaattcagtaaaattattgttaaagttttcagtagtatctgtacatgtagagctctggaccaatgtctaaatgcatcttatagacacatagcagagatgttttaaaatttgtttcctccagaatatttaacttgtagccaaaactttaggggaagagggtagta

SEQ ID NO: 257087 - DNA, 618 bp, Homo sapiens
ccattggccagaattgagccaaatgcaaactctagaacaagggttgtagggaggggctaggaaagcagcctttattctggccatcaatgtgctgaaatgaaagagctctgttactaaggaaaaagggaagaatggttattgagaggcaactgttgttctctatcacagtcatacaccactttggggagactggtgtgaaagcacaatggggtcttgataaatgctatggacacatttcatcattaacaggcagcatgagttgccagtctcctttcaggctgctttcaccagcagaacaaacctttgtggccaaattcttgcctttgatacctctgcttccaagaaatgatgtggtgtgcacatgttctcacttgtaagtgggagctgaacaatgagaacacatggacacagggaggggaacaacacacactggggcctgtccaagggattggaggggagggagagcatcagcttaaatagctaatgcatgtggggcttaatacctaggtgatgggttgataagtgcaacaaaccaccatggcacacgtttacctacataacaaacctgtacgtcctgcacctgtatcctggaacttaaaatcaaataaatttttttta

SEQ ID NO: 257088 - DNA, 113 bp, Homo sapiens
accatttttaataataattttctaacttattttgaactgtatcggtatatgttgtcagttggtattgttgtatttaattactacattttccctgttgcattgagttaaccttc

SEQ ID NO: 257089 - DNA, 418 bp, Homo sapiens
tactcgaaaataaatgtttgtttttaattctcagcaaggcaaggtacttctatagaagggtgcacccttacagatggagcaacgatgagcgcacacttggacaagggaggggaaggggttcttatccctgacgcacgtggcccccgttgttgtgtctttctgctattggccagggttagaccgtgcaggctaaactaattctgattggctaatttaaagagatcgacggggtgagtggtgtggcgggaaaaatggttatgacagagcaagtaattggaatgagtcagggtgcatcaggtaatcggaatgacttacggcggagccggtaattggaatgaatcagggtggagcaggtaatcggaatgagtcagggtgcgtcaggtaatcggaatgagtcagggtggagtaggtaattgga

SEQ ID NO: 257090 - DNA, 1643 bp, Homo sapiens
aaacccattggcagggctaagtaaaggacagtcaatagataaatctgtgtgtagcaaagaatctgacacttttccctagactcatggtatagctttgacaaagtgcttttcttcaggtgtaataaaagtgtattcattgtgtaagcagctgataactactttacaacgtagaatagagagcagggggtagccgtgtctgtctacacgcacctgttgcagcagggcatattagggtgacacctgattcatctaaaaataactcacacatattcatccttaaaccaggatcccctttgtctgcacaaggcgctaaacaaaaccctcttctgtcggaggcagagtgagaagggagaagcagccccgcctctctgtattttccccttcagccaggcatagctcagtaggttccatccttaaccccagtactaattctctaggtctttatctgaactacttttaaattaaatttaagcaactatttgctccattaatccatgcaacccattaggacactgtgtgcacttactgtacagtatttcaaatgaagtaaaacttcaaagccgtctgataggtatgggaaaaggggggctgatatagccagaaggaagtaataatctcccaaggatttcagcaggagagctaaacttagtggcagacttcacttttcgtttaactttaaatgtatagtgacttggagaggcttgggaccctgccttgtgttgcagataaagccttaggagtaaggaggagaatggatctagctggtcagaatgaatatttctgatcatcttaaattctctttccctgcccgagttaccagggaaaccgagttcttgatatctcacttgaaaataagtatttttaccttgaagcaggagtcttatgtcgggggagggtttggtattatggggagactccgagggctggcaggagaggggcagggtcaaaggacaaaagccactgcccctggagttagtccagcaacttgggtctgacttcagggagattttatggatccaaaggaacaaggccgttttgttccctctccttgtgagaactgaaatacataaaagatgggtgcatttctccactttgattttctctcccagttatgaagtggactggactgaactaggtctttccaggcaaattggaaatagatcagcatggatcagtcttctgaagcctacctctggcatccagtcccataaagcacacacacacacacacacacacacacacacacacacacacacaaccttcgacggtatagtttcattttctccatgcacagctcatatttatctgaccctaaggatcttcaaatacatgaatacctacagtttctacagtatggtacagggggcacacatccaaatccatgtgaaggaaaaacttttgtcgcaactccctctcagcaaatagccttttatcgaaaaactagagaaactctcatcaatgacttctcttcccattttaatacaatattaattcaacaagaatctatcataccagaacctccctaaaaagactaaaagcacccccaaaacaattattcctgaaaacgaagaaaacaatactagataatggataatgaaatgctgaatggaatacactcagatgcaaaaaaaaaaaaaaaaaaa

SEQ ID NO: 257091 - DNA, 1056 bp, Homo sapiens
atccttatgccttatccattcttcttctagacaggtcaatgagccccacagattatttaaaatgaatctccaacatctacagattggtgcttaaaaataaagtgtctgagtttctatgtaaaatgacctaatgattaagaccttggaattcaagtttattctcccaacagcttttgggtatttgggaaagcagactacactaaaagaaatgactgcaggaattaatgtcaaggttttattttaaccgccaaacaaacctagacatggatctttgcatctcccaagtgttttctgaatgtttggggaaggaatagcataaatattcatgaaactctaacaaattcacatattttggtagctgtgatagccacgtggtcccaggatattactttagataatatatgtatcctttcagttacaaaggcattttctgttcttgccttagtctcattctctttatcactgtggcttcctcagagacagaatgagacagaagctcaattctctgcccctagaagaataacagtggttgggttcttcatgtctctatggaaatcatgctggtgcaagtgaagcctattttctcatgcgtcacacaaagctctcatgataattggaaggtactctgtggaggtgatgacttaataacaccttcccttctcaaaagcacttgaagaagcaagatccttccttggcatttctcagatgggcagcagagttcccagcaccatcagtaaactcagccacactgtagaaatgtttgccttttctatatgaagattatctaggttcttacacagcagtcatctctagacacctggatttcctaactgcctttgtgagttctggtcaaatataatttaaggtcattttcattgcttgtttgcttttaccgtcacactttaatatcatgcaaaagtacatttctactctcttaatgctcaaattttgctcaccaatagttttagataataggataatatgactaaaatatattaatagatatcagcatattatctatcagtatattaatatattaaagcaatcaatatgtta

SEQ ID NO: 257092 - DNA, 428 bp, Homo sapiens
aacagagtatgatccagaatctggtacaattctaattgagaattctctgctcttaacgactgactgacctatgtactactgtgcctgatcttagagacacataaatctagcagggccatcctcacagtatggacttaacgaccatctgaacggcatggaatgactgtaggcagaaaggacagggtatcatactgtgagctgatacatcctaccaataatatccaatacaatggatcaccctcagacataagagacagactagctcaagaatgaaggctcacaaccggtgatcctcacatgatctggttttctaatatttgaatcaataaagagattgatatcattctaacatgcctgatatccagctataactatttccctttccaaacacaaacactgctttaaataatccaagatttggtctaatt

SEQ ID NO: 257093 - DNA, 427 bp, Homo sapiens
cgaccatctcagatgcttctgcctctgaaaaggcacctccaggtgcccattcagactgtgccctgtcatttatctggctgttgcacctcaaaaccaataaacaatgatttggagggggaaaaaaaggaaaatatcttggtctccttctagctcctcccttatcttgatccactcatagccagtttcttctcttttttaaaaatcttaatagctttgagagtacaagttgtttctggttacacggatgaattctgtagtggtgaagtctgggactgagaacacccatcacttgagcggtgtacactgtacccgatgtgtactcttttgtccctcacctgcctcccacctgccccggagtccacaaagtccattaaatcactctgtatgtctttatgcataacaaatttcttaaaaacatcctgacccc

SEQ ID NO: 257094 - DNA, 403 bp, Homo sapiens
cagaaccgttgggtatcccaaacaattgttaagtgggtggagattacccttgtctgggtattccaaaaggcttcccagaggcaccctggtcttagagtggaaattgtgctgtcagggacctctgtccaaaattaactcccataaatagttctttatgggcagtgtcagtgtggttggtgctggataggtgcatccagctgcaagcacagggcaggtggttatttagcaggccatgctatggcagtttacacaggaggtagctagatttttcccattataaccgggcaattgtctcaactgatcatccctaatatctattgttatgcaacagtctacctggttagacccctcagtagtcgttctgaggcattgttatgagtcctttgtctaaatagtactcaat

SEQ ID NO: 257095 - DNA, 618 bp, Homo sapiens
gtggttactaagacacagctagaaagacaatgttgagggaataaaaagacacttttgtgagacgtgaggaatgggaaaaaaatatagtaggaaaggaatgaataaaggtttgaagagccaaggaagcctaacagtgaaagtcagtctctgaataaaacatgtcagaatctgaaccacaccagttcacaattttacttctttgaagcatattattaaagataaggaaagaagttttgacttcatgtgtttatattaatgaaatgaatccacttagaattgatatgcaaataataaaatattatgtagaaaattagcatgttccatctaggtcctttttattttttctgattattgagaaacttttggtttctgacagagctgtctttatttttgctttaggtagccaaatatatgtctatagctagaaaattttaggagcaggaaaaagaatgcaaaaatgacattagtcaataaagttttagaaagggcactgactgactgacaaccatttacaggctgatttaaagtctcaaggcaggccaggtgcagtggctcatgcctgtaatcccagcacttttggaggccaaagcaggtggatcacctgaggtcaggagttca

SEQ ID NO: 257096 - DNA, 368 bp, Homo sapiens
ataactcaatgatctcagccctatttagtgcagtcagtgactgcaaagaggttattccaccagcccacaaaactgaccactttgtaatatctcatggaaaaatacttgtcagcatcaatgctcccagacaaaatcagagtaagaacatctgcagtctgcttcttgactgtaaagaaataataagttggatgttctatttttttcttttcctaatgatgcttattcaccaaaagtcacttgccaggttgaaagatcaatgtaagtcaagagcaaagcagggattaacaggatttttttttccccataaaaataaattagtagccaacaatgagaaactattagttgcaaggagtgaggtggttaagacc

SEQ ID NO: 257097 - DNA, 275 bp, Homo sapiens
ccaagtccctattttccgaactttatatgaatagaagcattctgtacacattcctttgtggctggctttgttcactccacattttatttgagagagtcatctgtgttgaggtggagctggaatttgttttgttccattctatgaaaaaaaagtcatgattcctctgttgaaggatactcgtttggttttgctgcttgttcttgttcacatgtatacacgagttgctgggtcatgggtacctctgccttcaccaaggaatgctacaactatttcca

SEQ ID NO: 257098 - DNA, 379 bp, Homo sapiens
gaagactggtcttaaaatcttgggctcaatcagtctttctaccttcacttcctaaagtgttgggattgcaggcgtgagccaccgctcctggccatggccgttctcttgaaaggggctggtggagttagctgatggcacagtagtgggagggagttgggattgtctctgactgcctgaggagttagtaatctcaacccatgttggtggaggtttagtttgcagaccaagatagaaatgggcctgctttactctgaatggtcaggtgcaccatttcatgggtacagttggctctgggaaccatgttttagttacagctgatggtgagaggtaacaagaacctggagaaagacgaggaagaggggacaggcaattggtgaga

SEQ ID NO: 257099 - DNA, 437 bp, Homo sapiens
gcttcttcaaagattaagggaacatcagcctgcctagataagaaaatcagtgcaagaactctggcaacttgaaaagccagattgtctttgtattcagaatgaccacactagttctctagcaatggttgttaaccaggctgaaatggctgaaatgacagacatagaattcagaatatgaataggagcaaaaatcatcaagattcaggagaaagtcaaaacctagtccaaggaatctaagaaatacaataaaataatacaggagctgaaagagaggaaatggccattttaagaaggagtcacaatcatctgatagaggtgaaaaactcactacagaagttttatgatacaatttcaagtattaatagcacaaatagatcacactgaggaaagactctcagagctcaaatactggtactctgaattaactaattcaaaca

SEQ ID NO: 257100 - DNA, 259 bp, Homo sapiens
cctcaaactagatcctgttcagacacaaacaagttagtatgagtttgtttcagtgaaaaaaaaatttgaaattcatgcatagtttttcataatgtgaatttttcatgaacttttggaagaccttttgaatacttttttaattgcagcactcttttgcaccataaaactaattggtggctttaccattaagaagttgagccaagcaaacaataatgaaaatgctttatgtggaataaaaatttacacttaaatgcctttt

SEQ ID NO: 257101 - DNA, 279 bp, Homo sapiens
tgagtactgttctggtgatagtgagtgagctgtcgtcatgagatctggtcgtgtaaagggcctcactctgtcacccaggagtacagtggcacgatcacagctcactgcagccttgaactcctgtgctcaagggatcctccagcctccaccaccacagtagctgggactacaggtgcgagccaccacacctagctaatttttgtatttttacaaaacatggtctggctatgttgcccaggctggtctcaagctcctgggctcaagcgatcctcctgcctt

SEQ ID NO: 257102 - DNA, 315 bp, Homo sapiens
gattttctcctggattatctgatgtaaatgccccttctccttgtactggggtcggtagaggatattataatgatgggagaggatggtatttcagataaaagaagacaatggttgttatctttacggtaacattacataaaatacggtcttattttacttttatagccttttccttcaattcataaccagttctcttaatcgccaagaaaattaggtaccacatattttgattattcattctaatacattgacagtgtttatttagtattttattttacctatgagttatctcccattggaaatataataaaaagt

SEQ ID NO: 257103 - DNA, 525 bp, Homo sapiens
tagagatggggtttcgccatgttgcccggggtggtctccaactcctgggctcaagcaatcctcctgccttggtcttgaaagtgctgggattacaggcgtgacacttgcgcctggctgcctttcttccatcttctatgtttacttaaaatcagggaaatccaaggataatcacatggggttctgcttgtgcctctccatcactaggattgacaaattattcatcagaatttcaaactgcagaatccgtcagccttcttttatcacatttttgttcagtctctagccgtggactaacagacttagctctttcaatctttctaacgctggggtacttatctatcttccttttctgatttctacacttaatattagaacatagctaattacagcatctcactctgttgcccaggctggagtacagtgacatgatcatggctcactacaggccttgaccttccagaatcaagtgatcctcctgcctcagcctccctagtagctgagactacaagtatgcactaccatgcc

SEQ ID NO: 257104 - DNA, 379 bp, Homo sapiens
atcgaaaccatcctggctaacacggtgaaaccccgcctctactaaaaataacaaaaaaaattagctgggcgctgtggcgggcacctgtagtcccacctactcgggaggctgaggcaggagaatggcgtgaacccaggaggtggagcttgcagtgagctgagattgcgccactgcactccagcctgggcgacaaaacaagactctgtctcaaaaaaaaaaaaaaaaaaaaaggctgaaacgagccagtgtataaggagcagctatgtggtattttagagattaccatgtatagattgttgttaattgtgataagaggaactgtaaatgacggctcaaagttgaaatgcttggatgatagagagcatttacaggaaacagc

SEQ ID NO: 257105 - DNA, 348 bp, Homo sapiens
tggttggtctcaatgttctgagctcaagcagtctgcctgcctcaggctcccagagtgctgggattacaggtgtgaacaaacgcacctgacctctcctttcttctattggtatacatgtctggctttataccaatgccatactgttttgattaccatagcttttggaactggaacaagacaaggatgcccactctcaccactcctcttccacatagtactggaagtcctagccagagcagtcagacaagagaaagaaataaagagcatccaaattggtaatgaggaagtaaaactgtcgctgtttgctgatgctatgattgtttacctagaaaaccctaaagactcctc

SEQ ID NO: 257106 - DNA, 464 bp, Homo sapiens
tggtttgtcctgtttgtgaaacttgcctgctctcccttgtgaaacttgctggccccacacatcccaagtgtcacccaaaggaatttggagacaaaatcattctggagaagttaccagatggggcatatctcacctgcctgttttttcctggggagaggggggcaagtggaggcagggagactccactggctcgctggagttgccattgcgggaggacagagaactcagatgtacctgccagcttacctttcctgaccagcacgaaaggcccccagcccaaaagtaccagccttggccctattcagccagggctgtcaccccaacacaaccatttgggagatttcctgagtattttagggaaaaggaactttcaggcagttcacttctacaaagagctgaataaatgggtgtagttatccccataacaacattctctgcactcacacccccatgagttttcttga

SEQ ID NO: 257107 - DNA, 358 bp, Homo sapiens
gcccaggaaaaaatgtctaaaattctgaaggcatttctattatgaacttgagaagcattttggagaactaatttatgagtactcatttatttgtaagtcacttgctaccatgtagacagtataaaaacagacatgtatacgcatgtatacataaaagtacaaacattaagattgtatagctttgattttatttttagccatgaatcagataaaactcattagtttaaaagaacagttgagaccacgcatagtggctcatgcctgtaatcttagcaccttggggcgccaaggcaggaggatcccctgaagccaggagtttgaaaccagcctgggtaacatagtgagaccccatctctac

SEQ ID NO: 257108 - DNA, 198 bp, Homo sapiens
gagtagaggagtggtagagcatacagtcagacaccaacagatgccagcaggccatctaccgtgggacaacgaggaagccggttaggggcagccagactccaggggaagaccactttcccactgcctccccttctggctccccatccatctgctgacagctacctccactcaataaaaccttacactcattctccaaaa

SEQ ID NO: 257109 - DNA, 373 bp, Homo sapiens
caaaaattaaccgggcgtggtggtgggcacctgtaatcctagctactcaggaggctgaggcaggagaatcgcttgaacccaggaggtggaggttgctgtgagctgacatcgcaccactgcactccagcctgggcgacagagcaagtctccatctcaaaaaaaaaaaaaaaaaaaaaaaaaggaatcctttcggaaacttcaaaataattatagatgtggatgatgatggtgatgatgatgatattgacagaaatggaagagttataattgaactcatactttgtaacaggtatctaagatttgaaagaaatcaagtgagaggcggatagaaatcatctgaaatgcgctaatggaatatagaatggagtagaga

SEQ ID NO: 257110 - DNA, 1282 bp, Homo sapiens
tttgagacggagtttcactctatcgcccaggctggagtgcagtggcactaccttggctcactgcaacctcctcctcctggattcaagcggtgcctcaacctcacgagtagttgggattataggcactgccaccacacccagctaattttcgtatttttagtagagacagggttttgccgtgtcggctaggccagtcttgaacccccgacctcaagtgatctgcccatctcggcttcccaacatattaggattacaggcatgagccagcgtgcccggtcgcttggctttttcatgtcacccccgaggtggccccattctgggtgggggagttactcttgggtttgggtctccctgcccctgaacatagctgttgcacaagtagctgctcacactgaactctacagagccatcagtcaaccttgagggattgttatctgaccaaagactttctatctgtccattatttattgctgcaaacataccggaaagcaaggaagccataaaaagcaaacagtagggtcatgtcaaaatgaggcagagccagcaagaagaggctcctaaacatgggacattttgaacatcagtaagggtaataactgcagttgatggaaacacattgattatatttaagtacatgaattcataataatacctaaattcatgttatcagtattggaggatgtgggcaaaccaactctatttataaaactagttaatgaaaggaaagaagcatgtttcctgccttttctaaataaactgtaccattggtgttaaatatctggtttctaaaaaatgttattttaatatatagagataggatcttgctatgttggccaggctagtctcagattcctggcctcaagcagtcctcctgccttggcctcccaaaatgctgggattacaggcatgagtcagtgtgcccaaccagtcatttcaataaatgtgctggatcaattgtatattcatgtgaaaaattacctcacatcataacaacaacaacaacaaaaatccagatggatttttaaatccatctaaatgtgaaaggtaaagcaataaagcttttgaagaaaacataggagaccaccttcatgacctcagagtaggcaaagatttcttaaacacgacacaaaaaggctcactataaaagaaaaaaattgataaattagactaaagggccactgtattagataccttgagtgattgcaaaacctggttcttgtccttatgaagttcataataaagccgattgttttctttttctttctttttttgttaagagcag

SEQ ID NO: 257111 - DNA, 438 bp, Homo sapiens
gatctccagctgcaaccctcctattgctcctttgtttgttacccatatttctccaacttctaagaagttttgttactaccttggttcatcagaaaacttcagcacaaatgtattacatgaatgtcttgtaatacacaagtgtattacatgaatcactgtcgatctgtcttgcagaaagacctgggtagtgaagatgagagtgagacctcccactagtgaataaggttctcaaatgggggaatgaagagagaggttaaagattagcccccctctaatcacatatgctatctctgaatgtcaatctatcacaaccctttcacgtgaaccccttagagttgtaagttcttaaaagggccaggaactctttcttcagagagctcagttcttgacatgcaagtctgctgatgctcctggccaaataaagccacttccttctta

SEQ ID NO: 257112 - DNA, 576 bp, Homo sapiens
cagtctgcttgatggttatacgacttcagtgctctggtacagtgagaataaagagtttatttgggctctttggctcaggataggagtgtacagttataaccaactaagccttaaagttgagcagaaagaggagagttggtggaggttgctgatttctctctctagtgatctctgcttaatgcaaaaactgccatgaataaatagttgagacagaaaaatttagacctgaaaataaggtgttaaaaagtgtatgtactctttttttttttaacatttatttaagtaaatagtttgttctgtattttgcagtcctcccacaaacacattgtactgttaaaatgttttctcaaattgttttcaatagtgtctcagatgtgtggttacattaattgcattcactgggttatgatctactcctggctggatctactcagctgatgacggtctttacagcacacttctggttagactgctgtagttgaaaggtgattccatcccttctccaaagtataatggagaaggatttgaaaaagggcagaatgggaaaataaagatatttcgctattttttctctga

SEQ ID NO: 257113 - DNA, 409 bp, Homo sapiens
gcagggctcaggcacactgtattggtgaattatagcaacctgtagatgggaagctgtgtagtttttttatttcttcaagtagaaatgtgagtattagcacattcattcaaatagagttacatgttataaatttttaagcaaaataactgacctaagtatgttatacagctcaaatttccccccagaaaattttggactgttttactaagattttagtttttagtgtcaagtattaaggccaggatttttatgtggaagcaggtttttaaaaatttatatacacattgacttaattttaacatcctcttgatcatcaagagattaagtatttaaatgtttgtaggaaagtagcttttttttttttgagtctcgctctgttgcctaggctggagtgcagtggcgtgatctc

SEQ ID NO: 257114 - DNA, 2814 bp, Homo sapiens
agcggagtctcgcgggaagctccgttgtgggcgccccggctggtggctgagctcaggccttcaggcagaggggaggcgagggcggggcggtcacgtgagagcactgccgcggtgggttgtgggggtgctgcggcgccgtttgctttgccaaaccgacaaaagagagatgatggccaacgacgccaagcccgacgtgaagaccgtgcaggtgctgcgggacacagccaaccgcctgcggatccattccatcagggccacgtgtgcctctggttctggccagctcacgtcgtgctgcagtgcagcggaggtcgtgtctgtcctcttcttccacacgatgaagtataaacagacagacccagaacacccggacaacgaccggttcatcctctccaggggacatgctgctcctatcctctatgctgcttgggtggaggtgggtgacatcagtgaatctgacttgctgaacctgaggaaacttcacagcgacttggagagacaccctaccccccgattgccgtttgttgacgtggcaacagggtccctaggtcagggattaggtactgcatgtggaatggcttatactggcaagtaccttgacaaggccagctaccgggtgttctgccttatgggagatggcgaatcctcagaaggctctgtgtgggaggcttttgcttttgcctcccactacaacttggacaatctcgtggcggtcttcgacgtgaaccgcttgggacaaagtggccctgcaccccttgagcatggcgcagacatctaccagaattgctgtgaagcctttggatggaatacttacttagtggatggccatgatgtggaggccttgtgccaagcattttggcaagcaagtcaagtgaagaacaagcctactgctatagttgccaagaccttcaaaggtcggggtattccaaatattgaggatgcagaaaattggcatggaaagccagtgccaaaagaaagagcagatgcaattgtcaaattaattgagagtcagatacagaccaatgagaatctcataccaaaatcgcctgtggaagactcacctcaaataagcatcacagatataaaaatgacctccccacctgcttacaaagttggtgacaagatagctactcagaaaacatatggtttggctctggctaaactgggccgtgcaaatgaaagagttattgttctgagtggtgacacgatgaactccaccttttctgagatattcaggaaagaacaccctgagcgtttcatagagtgtattattgctgaacaaaacatggtaagtgtggcactaggctgtgctacacgtggtcgaaccattgcttttgctggtgcttttgctgccttttttactagagcattcgatcagctccgaatgggagccatttctcaagccaatatcaaccttattggttcccactgtggggtatccactggagaagatggagtctcccagatggccctggaggatctagccatgttccgaagcattcccaattgtactgttttctatccaagtgatgccatctcgacagagcatgctatttatctagccgccaataccaagggaatgtgcttcattcgaaccagccaaccagaaactgcagttatttataccccacaagaaaattttgagattggccaggccaaggtggtccgccacggtgtcaatgataaagtcacagtaattggagctggagttactctccatgaagccttagaagctgctgaccatctttctcaacaaggtatttctgtccgtgtcatcgacccatttaccattaaacccctggatgccgccaccatcatctccagtgcaaaagccacaggcggccgagttatcacagtggaggatcactacagggaaggtggcattggagaagctgtttgtgcagctgtctccagggagcctgatatccttgttcatcaactggcagtgtcaggagtgcctcaacgtgggaaaactagtgaattgctggatatgtttggaatcagtaccagacacattatagcagccgtaacacttactttaatgaagtaaactaggcttatttctaaaaagtcaagtctattggctttggcccaaaagcactggtatctttgtattaaattcatgtttattgtcacaaaaccattatttatacctatacagttgtactgtttcttttaaagcaaagccatttaacatctttcttcattcctaatttggaaattaaagtttacctttctgttaatctatgtataaatgttactctgagttattaatgtggattttaaaattgtaagcaatagaataggaaataaaacaactacctaatacaaatatttctgataagactacaaatatctgactgagctggggattaaagtagaggtaactgtatcttaaatgagtatgatttccttgtaagttaaaaaaattgaaatttaattgtagacttcaatagtccaagttttgaaggatgtttgagcttttgtataatgccatttatacctgcagttttacagataatgtttgactgcagttgccttggaaattcctccaaagtttgccttcatctctcctctacagtttggaggtgatggtgcagcagtggaacatctcttgatgcaccacactacttgtgttctgtgaagtgatgaaagtataactggttctagtttgcacactacacacatagttttgtgaagcttcagaaatgttttttcttttccttgtggccaaaccagtttgttaatctgattatattcatctgctaatgatactaaagttaatgtaataaagcatttaaaaatcaaaaaaaaaag

SEQ ID NO: 257115 - DNA, 488 bp, Homo sapiens
atctatttaatacttaatgttgctatcttttggatctcttgcgttggtactgtgcgtgcctggctttaaagaaaggtagagaatcttttcttcatttgatccttgatctataactcaaagctgtttttatgcattttgtgttttctgattttatatccttcatgttcttgtttttaagcagtattagtagtgaaaactggctgcgcgtggtggctcatgtctgtaatcctagaactttgggaggttgaggcaggcagatcacttgagcccaagagtacgagaccagcctggacaacatgacaaaacccagtctctacaaaaaaatacaaaaattagcgaggcgtggtgtcatgtgcctgtagttccacttcctctggaggctgagttgggagaatcatatgagcccaggaggtcgaggctgcagtgagctatgatcataccactgcactccagcctgagtaacagtgagaccctatctcaaaaaaaaa

SEQ ID NO: 257116 - DNA, 168 bp, Homo sapiens
tttaagttttaactttgtgtttggaatagtcagcttaaattccagaaacctaaataatcaagtttaactgtttcttcagttgagttaccatatatggagggaacataaatacactaataattatgcttgaatttgtctgcccttgatttaagcttcaaaaacaaaact

SEQ ID NO: 257117 - DNA, 1154 bp, Homo sapiens
  misc_feature (76)..(76): n is a, c, g, or t
  misc_feature (438)..(438): n is a, c, g, or t
  misc_feature (694)..(694): n is a, c, g, or t
  misc_feature (927)..(927): n is a, c, g, or t
  misc_feature (934)..(934): n is a, c, g, or t
  misc_feature (954)..(954): n is a, c, g, or t
  misc_feature (1143)..(1143): n is a, c, g, or t
tggcagaggagaccaccagcaagtagaacaatgaaggaccccagcattgccctgaacagaagaggcgaggatgttntgggtgagaggactcgtcttggggctctatgtgctttctacaatgctgagttgcacagtgagtgaaggtatgagtttcaagccaaactatctaggttccttcacttggtaactatgtgatcttggagaagttattagtctgtttgtgtctgaaattccatatgtgtgaatggaagtaattatatatagctgacttataaattattttgaggataagatgaaatatgtgcaaacacaagaatgtttggcacatagtaagcattcagtttattcagttacaatcaagtaaggcagtatgggtagtgcttaaggaaggactatgaagacacagagattgatatataagatcttggttctgttggnaggactttgctgagttctcctggacagtgcatgtaaagtgaggtttagggtaccagttacctgatccagcaatggtggtgagttgactcctttccagtgggggagcccatttgacccaaattgaatactgaccagttaataccataacctggggggaaaaattccattcttggagatctgaggtcattctggaacctatatccacttatacctggaaaacatcttggtacctgggctatgcttgtacaatccggangcaatgagcaaggccactcccgcattagctgccagtggaatgaagagggtcaggaatgaggaaataaacaagccagcaccaaccacatacttggctccaaatattccagccacatagccactgggattggagccaagaatgagcatagttgagggagctgaggatgattccctggatttcaggactccagtcatatgcaggggcctagatgacaaagagagttactgtttgtntttagtngaaggattgacagttttcantgtgaggacttgagaggcaaaaattaattggcagttatctttctgtttacatttctccagttcctccaatataccagtatcatgtattaaacctaatatatgccatatactctttccgctcaccctgacacaactaaccaaaaattaaatataagagagttcgtaaagaaacaaagactataaagaagnaagcatataag

SEQ ID NO: 257118 - DNA, 477 bp, Homo sapiens
ctgatgttaaggatggttttggtgcattagccagaatatatttagccttcaattttgtttaggtactgctgaaattgatgaaattgaagaacttcagtcatacctgtaattatatttttctgacaaaagggctgatgtggaaaataccccaactgtttggaaggccacagtattgcataactctacgcagtgcctcatcattaattcatatgcccaataaatatttggcgagtgcctattatgtatgttctaggcactgtcttgggtgctgggcttatagaagtgaacaaaacagacaaaaaccaaattctgctattgttgagcttatcttctattagagaaatcacaaaataacaagataaatgcccaggtggaaattaaatcaaagaaagggagaagaaatacagagtggttgcaactttagattaggtgggcagggtagttttcatggagaaagtgacatgtgagataagactt

SEQ ID NO: 257119 - DNA, 489 bp, Homo sapiens
agccttggctggtcttgcctttccttcctgttcccactgccgccatgttggttcagtctcctgtcactcacaacaagatgaacagcaatgttctcttctctgtctccttgatggaacagatgccttcctcgttgtttggacttgagtcagtcccggcaaatgtttaagtggcctggagagctaagagagtgctagaagggagactgctgtccccacaatggctgcagccccattcctttttccaagctgcctgggtgaacattccaggatcctgacattctgtggaaattgatgagtgcttgctcaaaggtcgatgatgtgctacagatggcatcacctgttagagacagagctttctcaagaggagctttgatttcctttacttcccgaactgctatttcacagtctctcagtagatgtcagcagcacagcaaacatctcactgcccatcatggaagcaggttggttcaaaaacttttccaattaaag

SEQ ID NO: 257120 - DNA, 1303 bp, Homo sapiens
agccttggctggtcttgcctttccttcctgttcccactgccgccatgttggttcagtctcctgtcactcacaacaagatgaacagcaatgttctcttctctgtctccttgatggaacagatgccttcctcgttgtttggacttgagtcagtcccggcaaatgtttaagtggcctggagagctaagagagtgctagaagggagactgctgtccccacaatggctgcagccccattcctttttccaagctgcctgggtgaacattccaggatcctgacattctgtggaaattgatgagtgcttgctcaaaggtcgatgatgtgctacagatggcatcacctgttagagacagagctttctcaagaggagctttgatttcctttacttcccgaactgctatttcacagtctctcagtagatgtcagcagcacagcaaacatctcactgcccatcatggaagcaggtaccagggctatatccacattgaaatgttggatgctccgaagaaatgccacatgtgtctgggcctctgatacttagcacacgctctgtacacttggaacatcttacaccattttctacctattggaattgtatttaccctttaaaactcagtaaatgctgtctcctacatgaagccctccagaatgccctaggtgcagctaatcactcattgcattttatatcgtcttatgaacatacgctgtaacaatgggactaatgtttctgtatttcttaccaatctgtgagccccttgagtctataaccatatttttttatctttgtacctcaattatctggcccacagaagacatactgttattgattgaatcattaaaacaaaatatctagaacatctttttaatatttaaaatgttttactctgacacatccttattttggcattgcttatgtattagaatacttgtagcaatttcagaaattctatctgcataaacttaagtcaaataagagacaagtattggttcacatgacttgctgtgaaaagggtagtgtaaagctgactttctgggcagctgaaaacaaggattcaaatatgctcagaactctctactccagattctaccctgcacgagggctttattccttccatggattttcttccagggaagttttgaatcaatattaacagcaacataacagagatgaaagagctttactcctaaatccagtgtgaaacattttggagaactcttattggctgcatttgggtcaaatgcttgcctctaaaccatctgggaaagtagagtcagctaagggaatgaacaaatatggctaaaatag

SEQ ID NO: 257121 - DNA, 190 bp, Homo sapiens
agacagagggtgcactgcccttcgtttttctcctcaaacataccaaacttttccctgcattacactactctgcactagttctttcttttgtccggaatgctattttctgtgtatgaaatactattgccccttattatcatgtaactgcctctttcatgcccctcaaatcttagcctcccctgcccaccca

SEQ ID NO: 257122 - DNA, 1113 bp, Homo sapiens
atgtcgtctggaactacagcaaaggtgtttgggcttagagatggtacttctagattgattagtgagccctggctgtaatttaaagccctgggagaggatggatgtagggagagtgtagaatgagaaggtgctcattgaaggactcctatagtgcattggtctcagacattagtgttcattgtaaacattcagaggatttggtaaaacagaagtgctgagcctggtccccaacttttgattatgtctgagtgaggcccactctttcagtgatacagatgctgccggttcaggaaccacgtcttgagtaccgagtaccactgatttcgagcgggcgaagaagactaagaagaaggtgctagagaggtatgaggaataccaggacactctgatacctggaaacttgagagtatttcaagaaggggagggagtgagcagttgtgttgctgcaaagtcatcttacttgatcacatttgtacgcctggcattcacagttattcatgctcacttcttatctttaaaagcttacctgtaattatttgctaggtgaatactctttgcgcctggtgcaatgtgctccactccctgttggtccgtgactgaatcttgtacttgcctagcactctgcctttgtctctgtaatccctgtttcctaagtactggttatgatcacttcctcctttctgtggacacttgtaactatttgcttttttccctcttgtcacatttaacctgtcttgagatggaattatgtaagcacctagaaacactaaggttgttaagtactgttcctctgtcatctccactaccagatagtaaaattcttaaggctagacagactctgttttaattgatgttgtatcacacaagttggccataccatgaacattcagctacttctcaaaggaaatggtgcttgatttttttatttttaatcagatgatgatcttcagtagaatttaaggcctaatttgcaaattgaagagcaccaatggagggctctttactggaccatcaaaggttttgtacttaggccagaggactctgtgttttctagtttggtgaagacaaacaactgttaaggcagtgtcatttcacttaacaacttgaaacagg

SEQ ID NO: 257123 - DNA, 292 bp, Homo sapiens
gacatcatttggggaaatgctcagggcttcctttttaggtgtgagaagtcagctgccagttgtcgttttcagctctataggattcctcagtactttggaaattccagtttagaaagagttagttttgggagagagtgctttgcttagagctaagaatcttactattctagtcatatcttagaaagtgacaaactttctttgtgtatcattcctctttttctgagtgctgtaaataaattttgctcaataataaaatgagatattagagctctcggaatgaatgccactttta

SEQ ID NO: 257124 - DNA, 393 bp, Homo sapiens
agcaaatatagagggctgtaggtggcattgctttgtttagcatgctcccagcccaccctacttggaattggggaagaactggattcccatgtcaggcaccatgggtaccacggagctgtagtcgcctatcaactgggcagctgattctggactgggtgtcttatatcaacgacaagtttaagaacagtgattaattaaactgcccctccatggttccctttggtatctggtggtattggctcctcccaattcactacctgctgtatctggaaccatagaagacctcaggatagacatctaggatatccacagttcaacttgagagtatatttctctgaaaaaaagctttgatgttttgatgcatatagtattaaacctcacactgaaacctga

SEQ ID NO: 257125 - DNA, 428 bp, Homo sapiens
aagaaaatgcaactgtaacaaatgaacatgggttatggaaaagaagtggggccgaggacgagcagtgtgtgacaagaatgacgataagcaatattctcttcttagaagtttggctcgcagaaacaatattctgttctgcagttattggtttgcattacatttattcaaaatacaatttgaaatgcaagaatcatgaactagacctacttttcctcttctcccttgctacctgtaagggagatttcaatcttacaaccactgaaaaccataatcaatgtgaagagggattgggatggctacagtaccagtcctaggaggaggctagaaagcacaaaacctcacaattccctgtcaggctggtatagggcatgttgaaccaacaatcacattcaaggtagacatttgatgggaagtatattaaatgtgtg

SEQ ID NO: 257126 - DNA, 386 bp, Homo sapiens
aactgtactttcttacctgttgcatcattcattcccagctcagagtcatctcatctatgtaatgacctcaaatcagtttcgagtatggaagaaatgccaagacaggtgaaaaaagtgagacttcaaatgtaatttttatttttaattaaaaagtttttgctctcacagtcatactaggtcaaactttgtggtaatcagcatatttttatattcctgcactgtatgtagaagctgtaaatattttccagttgatcttgaatacttctaagagcttgacaccaaggatcacaaaattaccataaattgcaacaatcccactactatctaagtatacccaaacacacacacacacacacacacacacacacacacacacacacaccctt

SEQ ID NO: 257127 - DNA, 317 bp, Homo sapiens
cctgcactcctgcttcctcccaagtaaactacctgccctcacgtccttattttaggctgtgctttcagggcaggtgatcacagaaaactctttttattaggttggtgcaaaagtcattgcatttttggccattactttcaatgacagaaaccgcagttacttttgcaccaacttaatcctttattagttatgtacctatgggttaaaatatgttaacatatatatgtttaacacatgcatatattaaaatataaacagcacagataatagcccaaaggtggaaacaacccaaatgtccatccttgatgaatgggtaa

SEQ ID NO: 257128 - DNA, 287 bp, Homo sapiens
aaactgatgtctttggacaacagccagcgaggatctgagacctgccaagaattacataaatgtgtttgtggaagtggatattcatctagcccagcctcgtatgattggtgctccagccaacaacttcatgacacccttgcaaagcatcttgatcctgagaaatccacttaaactttgccccgattcctgacccacagctttgggataatgaacgtctgatgttttcagccactaagttttggtaattttttgtgccctggaagctaacaagtatatttgttatcatt

SEQ ID NO: 257129 - DNA, 438 bp, Homo sapiens
actacaacctaggcaacaaaagcaaagctccatttcaaatatatatatatatatgtatacacacacacagacacatatacacatatatacatatatataaacacacatattttatatatatattatatatattatatatattatatatatatatatattatatatataatatatatataatatatatatatctcctcaggcaagaataaatgaatattgaattcagaagtgaaataaacttttatttaaatcaaacattctgttctactcttggaaattttagacaagaaaattgttttcagaaccataaaatttagcagatttccaaaatagaaaagaatgaatgaatgaactgagaacaaatcaaaacaaacaaataggtctttgaaaaaattgtgtcacacaatgaaagagaagagtattaagcaaagtatcaca

SEQ ID NO: 257130 - DNA, 343 bp, Homo sapiens
gctctggtgggcattttcacctttgttgtttctcataattaccctgttaacatttaggttattatcctagttttatagttgataaaaccaaggcccaaatatgtgaagtgacttatcaaggattaaacagatgaagaagtgtcatcattttctactaaatgataacctgtgatttatgaatcagatttcccattttatagatggtaaaactaaggctcagatacagatgctaagtgatagaaccaggataccgattcactcttttgctggcctacaaaccctttatactctattcttacctccccatcatgttctaccttttttcagatgagaaaactaaggc

SEQ ID NO: 257131 - DNA, 301 bp, Homo sapiens
atatcaccttttggcaacccctaatgaaataatggatcctggcaatgatcactagcggctgttaacgtcagaaagagagacagctagacaatgcgtgctgcctaatggggtactcccatcagacagcacaccgtttgtcttatcaagtattcttggagtaatgggggtggtgtgtatagatgaaacatgattgcctatgagttaacagttgttgaagttcaatgatgggtgtatggcattgcattatgctaatctctacttctgtatgtgtctgaagtttttcagaataaaacttttttta

SEQ ID NO: 257132 - DNA, 294 bp, Homo sapiens
gtgctgtgctgacctcaagagggacagcagaggaaatgggggtggaggtggagggacttcacagagcactgaatgaccactcacttttagccagtctgatctgagcccaaggagggatggagagaccctgccagaccttaaggagacctttagaattaaaataatcctgaaccccaaccccttcaaagagaaagtttctttatctgttattctgtaagcatcaaggaaccatgacctagagctgaaacttaaatttcctagctaaattctattctccaagctcttgcttctcaa

SEQ ID NO: 257133 - DNA, 273 bp, Homo sapiens
ccttagttttctaagacaatgcaatataataaaatgataggctgagcaacagaaaaatttggtggaaatcaagtctgatatatgctgagcatatgtgaaatcagtttcttaatctgagtgttagtcactgttagaatgtttgataatgtctggaatgagtcttttggttttatagttgacttgaggttttgcttaaaaagaataatttcatcctttgttagttgttttgctgttttctacttcataatataaaagtaaaagcactccaaattt

SEQ ID NO: 257134 - DNA, 295 bp, Homo sapiens
acaaaaatcagaaagcacactagcccagtgcccagccacaatggtgaggaaaccccactcaaaatcctgggttgtgcccctgatgccaaagatctgcaaaattgggactcacctgctgcaaccctagcccagacttgtgtacatttcaggggtggctggactcatggctgcctgggacgtcagggtggtacaaagtactcttaatctaagactgtcggggtacaaagataagcatttttttcccttttcttgagagccagatggtaaatagttcagctttgcaggccataggtct

SEQ ID NO: 257135 - DNA, 1306 bp, Homo sapiens
agagtggtaggcaggggccagattgtcaacaaacctgagtgggctccgccgtgagaatgatagtaagcacaaaccaggaacattcctctttgtctgctttccctgggccctcttacacccacttggttctctattaaatatgggcatctccggccaggcaccgtggctcacgcctgtaatcccagcactttgggaggccaaggcaggtggatcacgaggtcaggagatcgagaccatcctgggtaacatggtgaaaccccgtctctactaaaattacaaaaaattagccgggcatggtggcaggtgcctgtagtcctagctactcgggaggctgaggcagaagaattgcttgaaccaggcaccgagatcgcgccactgctctccagcctcagtgacagagtgagactccatctcaaaaaaaaaaaaaaaaaaaaagtgggggcatctcccaagcagaaagcaaagcctaagcctactcacttctttggggagagaggaagaaagtcttggacagtaattgagcatcctctttgggcacctgccccaacaacttcacacacattatcatctcatttaactgaggttggatctgcaaaggcagcttggcttggcagaaagagcgggagctttggaatgagggcctagatctcaccgtgggctctatcacttggtgctatttttagcaagcatgcagtaataatcataatactctcagcagttaagcttaattgggtgattatgatgtgccagacgtggttctaagcacttcatatctattagctcataattttaagagctgggtagtattataatttctctttgcaaatgagataactttgcccaaagtcaacaaagccaataattggaagaggtaggatttgaatctatacaggtatgattgacatttgtgaacttgtttagctgctaagtctctataccctgatttcctttggaagaattacctctgctccactgtatgtggtcctggtgggatagttaatgcacgtgcccattttctcataatgaaaagcaagcagggtccctcaaagctccttgcaccagatccttatttttacactaaagccaaccaacctttgtcctaagccaggctaatcagactgcttacctggcactttaaatctcgaattgagtaaagcaagagtggaagaagcagatttaatgcttttcaggtgagagtgttgagtggctcatgatacagaaatctcttggtttcccaggcttcactctttcccaaacccactctccagccttcactttaatcctttgaactccacccctttgccag

SEQ ID NO: 257136 - DNA, 309 bp, Homo sapiens
caaggactcaaatcttggatcttgaaaaaaaattaattgaaatgctacttgatttcaaaagacttagaataccactaatgatagaaataatggtaacttctaaataagtaaccaaaataggcctctattggtagctgagaaaagctcttccagctgcggaagacagcgtgcggcagcgtgggtgctggcggagacactgatttgattgtggccatgatcataccacgtatacgtacatcaaatcatcatgtggtacatcttgaattagtcaatctttatttgtcaattaaatattttttaattaaaaaa

SEQ ID NO: 257137 - DNA, 522 bp, Homo sapiens
cagtggattcccgaaaatctctgtgcaaataaatcccattataaaaccagaaatgattcatcttttctgattgatcttcaatataaatggttcttaacatttaacctttaagatcctttgtctgagccacatggggttcaacttccttctctatactactggctcctaaatattagttcttaatgaagtgttcaccatgctcttgtgaaataagaaaatgaagggaaatgaagtaacattttgggagataaatgtattcaaattaaatggccttgtttaattctgagattatgccattatgttttccctttttgatgttaaaaagaccttttcttttatgaaatcatgctaacagtagatgttcatttatagtgtgttgcttataattttactggtttctgaaatctaaaactatttgtatctcaatatgcaaccatacaaaacatctcaagccaacctctgccaagagttaatgcatttttcaacaaacgaataaatatagaacttactttataaagaaaa

SEQ ID NO: 257138 - DNA, 204 bp, Homo sapiens
attattgttatatgttctgtgattcaggcatttagttcaactcatgcatgaatcactatgggattctattaaaaagaactagccacgaggcataacggctcatgcctgtaatcccattactttgggaggctgaggcgggtagattatttgaggtcaggagtttgagaccagcttagccagcatgctgagaccctgtctctactt

SEQ ID NO: 257139 - DNA, 414 bp, Homo sapiens
gaaagagcttgtaggctatcatgaaaagttgaatattaacaaaatccaatgaaaaactaatgaaaagtttaagcaggtgcataacacaatcaaatttctgttttaaaaaccctactctggtacagagtaaagaacagatttgagtaggaggcaaggagaatgcagaagtcagtaagaaaaagtctcagtaagagataatagtggcaaagagaatggagtcaaaaataattagatttgctgtagaatagaaatgggatttgagagagaagaaatatcaaaaataatacaattaacaggttttaacaagcttgatggatggtagtgtcataaagtaaatgggggaaaactggggaggaatagttattttttgttgaaggaggaggagtttttgcatgttactacattaagttgcta

SEQ ID NO: 257140 - DNA, 650 bp, Homo sapiens
agcaatttggactccctttgtctcttattgtcctgtgacagttaccatgagtgcattctcccatttttgtttaccagatctgccccaggaactttttaaaagattgatttctttcttttgaaaataaaacaaatatgtgaaacatactgaaaatgctaaaacctacatgagagtattagaaagtaaagaatgtaattctataatcagctacatatggataggcagagagaggggtctgcttcttgtccagctgtagctctgtgctagtggaagcatgtcctggagttcacgatgtggccaagagaacagatgtagttaggcaatggaggtgggacagagagctgcaaagtgctgcacttgcccctcttactggacccaaaaggctctcaagtgtaacacctttctgtagtgctgtagatcattaatctgggtgtgtgatgaccatctgatctagcacatccagtggcattgtgcatattgggataggaatttgattttgtgaactcaagctattcagcagggcccatgaaaaatcaccagaagggtaggtgggtctttgccactgtctgatgtttcaaagatttcttgtattaaatgctgtgtccaaaattatagaatactctccagtttgtatttatgtaaaaaaaaaa

SEQ ID NO: 257141 - DNA, 987 bp, Homo sapiens
gtatcccataaatatacacacctactgtggtacccacaaaaattaagttttttaaaaagtgacaaaatgaaagcaacttgtacatttatattctctaatgttctccttgatttctcaatgatacaaccttgccctcacaagtgttaaagcagtaactttactatgctcaagtaaggtgtggcaggtgaattctaacagtgcctccatgatctctgttccctggtcttatgtctgtgactaggttacattatacggcaaagatgatggatttggttacattttatggcaatggtgaatgaattttgaaaatgcagttaaggtcccaaagcagctgaatttactcaaaaaggagatgatcctgagtgggcctcatttcatcatgtaagttctttgaaagcgagtctagatgtgagagacaatcttctactggcctcaaatcagaaaacagccacattatgttctgagtatggagaggggtggcctctgggaggtgagggcctcagcctcaaaaccacaggaggtgaattctgccaagaagcatatgagcttgaaagaggaccccaaagcctcagaagatacagtaaccccatctgacaccttggttacaacctgtgagatctcaaagagaggacccagctcatctgtgcacagacttctaacccatggaaactgtgaaataagaaatactgtgttttgagctgttaaattggtggcaatttgttacacagccacagacaactagtacgtaaagttatatccaatgcactataaaacttgtcaatttatgtagaaattatatacacatacacatgtaatttatacatatttgcacatacacacccccctccgtagttcagcagtagcatcactaacttagagttttaattgcaaaactttcattgaagctgtggagccactctacaaaagttatgagagaacatatttttaagaaaattgcccccctgccctccaacccccatcactaca

SEQ ID NO: 257142 - DNA, 760 bp, Homo sapiens
caggagagaagaaacgcaaatcccagaaccgtgccaacatataaaaccccacattaagggttgtacagtgcactgggatttctcaagtcacccgcttggtcctcttccaagtatactttacttcctttcattcctctctaaaacttttttaaaaactttcactcctgctctaaaagttatcttggtttcttactctaccttatgccccttgggcgaattttttcctctgaggagggaagaatagagttgctgctgcagacacatcagattccctactggtaacagctggagtgcgtcacctctgacaaaattctggggacgctgggaacactgaatcaacatgggcaatgagaacagcacctcggacaaccagaggactttatcagctcagactccaaggtccgcgcagccacccgggaacagtcagaatataaaaaggaagcagcaggacacgcccggaagccctgaccacagagacgcgtccaggtaggaggccagctctggaggactgatgcagcccaaggactgccccgctcattgcctgctccagcattagctttgccccatttgctttggaaactggacccttagacacatggtatcgtcctcagtggtgagatgttccaagcagtggttcacagacctctctgtgactggctaggcctgcatgattgaaaaattcatcctgattgcctgcccaaagatgaaattagtaattatagacttccattccagccacactccagagtatcttcattgt

SEQ ID NO: 257143 - DNA, 652 bp, Homo sapiens
caggagagaagaaacgcaaatcccagaaccgtgccaacatataaaaccccacattaagggttgtacagtgcactgggatttctcaagtcacccgcttggtcctcttccaagtatactttacttcctttcattcctctctaaaacttttttaaaaactttcactcctgctctaaaagttatcttggtttcttactctaccttatgccccttgggcgaattttttcctctgaggagggaagaatagagttgctgctgcagacacatcagattccctactggtaacagctggagtgcgtcacctctgacaaaattctggggacgctgggaacactgaatcaacatgggcaatgagaacagcacctcggacaaccagaggactttatcagctcagactccaaggtccgcgcagccacccgggaacagtcagaatataaaaaggaagcagcaggacacgcccggaagccctgaccacagagacgcgtccagatggtaacgacttcagccagcctgaagggaagccacatcctttcctaagttggcagttcctgtcagaggcgtggacaagaaagtggcttcgtttctttccagcttgataaagccgacataaataggagcacttcatttctgaattacacaccattactcttatcac

SEQ ID NO: 257144 - DNA, 438 bp, Homo sapiens
cgagggcggagacgcgctgcttgaggtgtgtcagggcctctgcttagaactcgcgcaattctgaacggaggaggagaaagtccagttgctgaagggcagaatttccatgcgcccgcagcttccaagtccagaccacccccgaattcacctctgacaaaattctggggacgctgggaacactgaatcaacatgggcaatgagaacagcacctcggacaaccaggtgggtgtcaggaagcttctctctcgagctacgtggtgctcttggcagaccttgactaggttctttttacagcgtctcatcttcacccaggaaggagcaaacaagacagcttctgcgtagatgtgtgcgggcatttatggatctatgcagccatttttcatttcattggaattctcttacgattaaggctagctctagttaaagccggaaacgcta

SEQ ID NO: 257145 - DNA, 508 bp, Homo sapiens
ctaactcatgatctccaccccattttgtacttacacagcctctctgtgaagtctgtaaaactaatgactttgaagtggagtaaaatattatttccccaatttttatcagcttctgagttagaaatgttcagagaatgggtcttctatattccaaatccccattgaaaatacttaaaacatttttttctttccctttgagtttcttttgtgtgtcagcttcaagcatgctttgagcattctctctttgttccctggggactagcagcagagctgactggtcccttgaactgaatgaggcccccacctccaccctgcatgtggtcttttgttgggcttaggtagaattggaaagatgaataattttcagagatttcccagtgtaacaggacagaaatagcttgtgtcttgtttgacagacaagttcctttcatgtggcttcagctttgcttagtggtccatcctagccccaccaggtttctcttgtttttttttttttttcttttctttt

SEQ ID NO: 257146 - DNA, 255 bp, Homo sapiens
gtcttttctggtagagatgggggatctccctgtgttgcccaggctggtctgaagctcctggcctcaagccatcctctcacctcagcctcccaaagtgctaggattacagatgtgagctaccatgcctggccctttaattgttttttatactttaaaaggtatatattctttactttattctacatcttaatttatatgtataatatattcttatatatctcacgtgcataatatattctactaaaagcttttttt

SEQ ID NO: 257147 - DNA, 394 bp, Homo sapiens
ttttgagatggagtctcgctctgttgcccaggctggagtgcaatggcacaatctcagctcactgcaacctctgcctccagggtttaagcaagtctcctgcctcagccccctgagtagctaggactacagatgtgcaccaccacacccggctaatttttagtagcgacagggttttaccatgttggccaggctggtcttgaactcctgacctcaggtgatctactcgcctcagcctctcaaaatgcagggattacaggcgtgagccaccgcgcctggccagcaaggcttttaaaatacagtgtttaattcttatgacataatttactgtgattttaaaataataacctgttatgtggggggtacttctttgttaatatttagagatttgtgaggc

SEQ ID NO: 257148 - DNA, 535 bp, Homo sapiens
acctagcataacaggtatttagtaactgttaatattctttctccattcctaatcctgttatttctttatcctcatgaaagttgatgcttttaaattttttctttacttgtctgtcactaccctagattatattctagttacagctaagaatagtgtctttcaccactgtggaagacactgatacttgtctactgtttggccattgctcttttattattcttagttttattcacccatattctctctgttgacattttagaccacacttctttgtgtgaaatagacaaatattttccagcatattggatagttttagctgtcatctattaaatgctggtggtggaccccagtctccatgacaaccaaaaatatcaccgtgcatttcagaaaacttctggcatgttaatgctactattaatctgatcatagtcatttccttcttaccaaatttttaatttatgcctgtgacaatgtcattgtggctaaaaagtatgagttctttgggggctcctgaaaaaagtttttcttgctaaaa

SEQ ID NO: 257149 - DNA, 195 bp, Homo sapiens
gcggccgcctactactactactactgctcgaattcaagcttctaacgatgtacggggacatgttaatgctactattaatctgatcatagtcatttccttcttaccaaatttttaatttatgcctgtgacaatgtcattgtggctaaaaagtatgagttctttgggggctcctgaaaaaagtttttcttgctaaaa

SEQ ID NO: 257150 - DNA, 499 bp, Homo sapiens
aagttcaacaatcggctctcgtgaacagctccaactcagcattagtcttatctgagaccccatcttggtccactggagacagagacgctcctgctggccttgcagaagcaaacagcatgttgtgaacagtccctggagaggaccccatggcaggggactatgagtagcctccaggacctgagggtggcctccagcagaaggccagaaagaagctgaggccatcagtcatatggccacaaggaaatgcgtgctgccagcaggctgagtgaccttgggagaggattcttgcccagttgagcctccggatgagaatgcagcccaactcaccctggattacagccatgagaggctctgagcagaggacccagctgagctgtgcccagactcctgccccagggagaccatgtggtgctagatggatgttggtttaagctgctgaacctgtggtcatttgttacacaggaatagcaaacaaatacataattattcaacataaaaa

SEQ ID NO: 257151 - DNA, 267 bp, Homo sapiens
cttagtttgacaatgtttaaatgagaaacggagccttcaccttggatctgaagacttgtgggctcacctgagaactccatttcactcaatttaatagcaagtttaaaacagacttatctaaatattaggtctccttaacttacagtgatgtgggtagtgattctaattataggaagaaacagtcagtagagattagaccagggcaatccaggcataattcacctgagatttggcacaagctgatatttaaaactcaccttttacttg

SEQ ID NO: 257152 - DNA, 469 bp, Homo sapiens
aattgcacttacgccctcacattgtttgatatcagtggtttatggtgatagtgctgagtagtattaaagcaagcagccccaggagaagagtcttctgtttcccttactttcatcccacacacgtttgcaccatttgaccaaatttctgctagttttcaggagaaagaaaagtgacttatggcagcctgtggacagtcaagggtaccggggccagggcttataggacctgccattctgaagggtttggggctggtaggggtgttcgtgactctgtgttgctggtgtcaacattcagagccaatttgagtaaaacggtaactgtttgttatgcagaaacagagttgttgcttcaaatgctcagggaatatattcattttaactatttgtgcctgatacattggaattacactcacatatctgtggtctggtgattcaggaacagatttggtcacagaaacttcaaagggca

SEQ ID NO: 257153 - DNA, 504 bp, Homo sapiens
aggcccaaactctaggcagcttctcccagggacttcacagacactttttatgtcttgaatacctgcattcccagacccaaacccacagttcccagttcaaacacctggttctagtgccttttccgctgcccagggatgccccaggtgccaccgctcccagtctctccaagtctttacgcaaatataaagaacttctcactggcagggaataattcttacaaggctgtgtggcaaatggaaagtttttttttttcagcaaaacaaaaacaaagattcttttaacatttgtagaaagtcattcaaggaactgtttctgaaggcactactttggagtttggactgagtgtgggagagtgcggggtgagggtgtgtggacaacagggtgtctttgcctgacatgaaaatttaaaaaacaaagaaataaagggggtacttgagggtgaaagataaactcacaaacaagtcaataaacttccttttcagagttactgagcacacaggtga

SEQ ID NO: 257154 - DNA, 428 bp, Homo sapiens
ggatgcgctgaggatgctggagcactaagagaaagtgcgagcatccttgaagactctgtggagctgtcagacaagctctgcaaggctgacttctgaactctcacagaagtcaatgatatttagggtttttgttatatatagctatacttaatccttaccgatacaacttctctatcaggtgctcctatacctaatcgatgagcaatcctattgattgactctaataggcccattctctctcaatccagctaatgcctttctgttcagttctatattgtaaacctatgcctagattatggcacaggtattcctaaactggtgtcctgcctatagtcttgccatctctgatctaccttctatgatgggtgatctttgtgaaatgtaaatttaatgattccattaaatttgaaaatctcttcctcattgta

SEQ ID NO: 257155 - DNA, 413 bp, Homo sapiens
ttcctccacaagataattttagtgtatctgtttaagaatataagagtggccagaagacagaaagcagtcgtcagtcacatttcaccaaaatttacatttgtctcaggtgcattatcgcagagctttattgtatttctagtattagctatccctgtcattgctgctacttttttatcatcttcaagtaaaatttaatgtcaacaaaaattaaggtagttaataatactatagtatactagtaaagttgtctgacacagacaactaggaaatgtgatttttactttaaaatgtattttagttttagaatgtctaaattttagttttagaattgtctaaattcgagaattcataaagctgtagcccggtggaaaaagttatttgacatctcagaaattaaaaattgcagagattta

SEQ ID NO: 257156 - DNA, 385 bp, Homo sapiens
gcaccagggagcagatgagtgagactctgcgcaggtcagtggtcacgttagggaggttagcatgtgtagcggatggcagtcctgctgggatgtgcagagacaggtgagctcagaaaagggaccttggccctgcctggggacaaggagctgtcagactgcttctcaacttcccaccttgtgcagacactgtatgcaaagacaggccacatgggtgtgtgtcatggggaactgattattagattgtaatgttaaattgcaggtgtgagccaccgtgcctggccttgcttgtgaattcttagtgttagagtgcttgtttctgttgagctatgcccaagttctatgaagcatatacttaggctgttaattattgatgtcagtctcccca

SEQ ID NO: 257157 - DNA, 351 bp, Homo sapiens
ttttatatatatatatatatatatatatatactttaagttctagggtacgtgtgcgtgtgcacaacgtgcaggttttttacacatgtatatatatgtaacaaacctgcacgttgtacacatgtaccctagaacttaaagtataatataaaaaaaaaaaagaaaaaagaaatatcacttctctatggaggattttcttggtcttccagcctggattagttccctattatatgctctaacaggacctaaatttctcattagttacatatacctacagttcaatcttacatgtatatatatgtaacaaacctgcacgttgtacacatgtaccctagaacttaaagtataatata

SEQ ID NO: 257158 - DNA, 269 bp, Homo sapiens
gctctcagtcttgtaaattttcattgaaacaactcaatagtcgaatttctgcattacacagtaggcgcaaggtttgatgtttaaaatgcctaaaactggacatgatgttccttccttaaactgagcctcttccccagtcagcaaaattgccgtataagactcacatagcttattcctacttttttcttatttcacttattaagatgcccagtgcatcaccttacatctcattgattctaatgagagtggaagaggatgacgggagtgtg

SEQ ID NO: 257159 - DNA, 405 bp, Homo sapiens
aaccgtttaaggtaggtgtttagcactatgaacttttttctaacactgtttttgctggatcccagctggtatgctgtgactgtgttttcatttatttcaaataattgttttatttttgtattaatttcattgttagcacaaaagtcattcaggagaaagttgtttaatttccatatagttgtgagatgtaatggttttgaaagatcttggtattgatgtctatgtttattccactgttgcacaaaagtatggttggtatgattgcaactttttttactttactgagacttgcttgtggcgatcttggagtatgttccctgtgcagacaggaagaatgtatattctgtgtttgatgggtggagcatcctccagatgtcttttaggtcttattggccaagtgctgag

SEQ ID NO: 257160 - DNA, 440 bp, Homo sapiens
cctgcaacaacacagtcagcacattgggtggcatcatagtgaaggaagaaaaatcttccttcacccagcactgtaccagcacggagcatgggagagagtctgtgcataaccccttacaaggcagacaccagcacagaggaccaggaagagaaagcatgggcagaaagaccttgttttaggaccacaaagtcttattttataatattatagtcttcatttattgatactaaatttgtcccaatctaaatccattttctgagaaaatgtttatattactcagtttgcatcagtggcagtttacatctctaggctcttattacacggtccccaagaaggcctactcgtttactaacaacaatggggaatgacaatgaaaaaaacctttaacattttaagtgtcttttttctttcattataaaagggaaaagccttcattatta

SEQ ID NO: 257161 - DNA, 333 bp, Homo sapiens
cgtggacgggacctggaggaaagtggtcacatttaagaaacactagggaggccaggtgcagtggctgacacctgtaatcacagcactttcggcggccaagggggggtggatcacctgaggtcaggagttcgagattagcctggccaacatggtgaaaccccacctctactaaaaatacaaaactcagccgggcatggtggtgggtgcctgtagtaccagctacttgggaggctgaggcaggagaatcacttgaaccggagaagcagaggttgcagtgggcagagattgcgccactgcactccagcctgggtgacaagagtgaaactctgtctc

SEQ ID NO: 257162 - DNA, 412 bp, Homo sapiens
ggcttctactcagtagatgccaatgttgaccctcctcccagtgtgacgatcaaacatttcttcagactttggcaaatttcatctgtggggggcaacattgtccccagttgagaaccactgaggtacaacatggactgaagaggagcatgtgttaaaaacgtgtgaattatttatcctgtagtatcttactgatgttcagataaagaaaaagcaaaacaaaagacctaaaactaggctcttcccccacggggtcaggttcatgtgtatagttgcatttaattgtattacgattctgggttgttgatgggctgatcatactgtgttttctccgaaaaaacaaagaattgttcatgagtacttactaaatgaataagtgaaatgacaaatgaataaagaaacacataaaggagaa

SEQ ID NO: 257163 - DNA, 337 bp, Homo sapiens
acttagatggtctagcctactacacacctagatggtctagcctactaaactcttaatggcgttgcctactacacacctagatggtctagcctactacacacttagatggtctagcctactacacacctagatggtctagcctactaaactcttaatggcgttgcctactacacacctagatggtctagcctactacacacctagatggtctagcctactacacacttagatggtctagcctactacacatctagatagcctaacctactacacacctagatggtctaggctactacacccttagatggtctagcctactacacacctagatagccta

SEQ ID NO: 257164 - DNA, 689 bp, Homo sapiens
gccagagcagggcagaggatggccagaggaacaaagaggggagagaaagagaggatgggacgaccagctgtagagaggagctattctctctgctgatagctgcagatgatgggatgaccagttgcagagaggagttatcctctctgctgagagctgcagagacgacttgctggcagagaggagccgtcatctccagggcctcctctctgggggagagctgcagagctgcagacatcaggatgaccagttgcagagaggagctatcctctccagggccacctctctgctgagaactgaaaactccatagatgacctgcctacagagaggagctacccactgcaggtctcctctgagctgttgtaacactcagtaaagctcatttttgtcttgttcacccttcacttgtctgcatacttcattcttcctggattcaggacaagagcttgggcaaaggtgctgtggccacagaggtttctggccagaaaattgacaccccaaagatcccataacaccaggacatgacttctgatgtttcttctgatccttgcacattttcattcctcaggaaggaggcacctgtccccttactctgacctgaagccttgtaagattatcagcatgcagccgggcgcagtggctcatgcctgtaatcctagcactttgggaggccaaggcgggcagatcacga

SEQ ID NO: 257165 - DNA, 586 bp, Homo sapiens
  misc_feature (110)..(110): n is a, c, g, or t
  misc_feature (299)..(299): n is a, c, g, or t
  misc_feature (308)..(308): n is a, c, g, or t
  misc_feature (426)..(426): n is a, c, g, or t
ctgacgtccaaaattctgcctccagccctgagatcccagtttgcagatcctgcttccttctctgtccctcttcggtaaccatatacgtccccatgaggcagtcctagttncactccctaaagctgcttccctccctcccattgttcctggctcagtgaaggggacctcaggcccctgtggttcacaccagaagcactgcggtaaggcttgattcctctttcccacaccaatagccatgccaccagcaaaccctccagtgtggataccagatctgcacgcttcccaccaccagcaccctncaagcctgngccatctctcctctgtccaggggagtgacctcccaagcagctttgctgtggctactcctccccaaactgtcctggacacccagagctttcctgtcttcctggcccctgctcacgcctnttcagtcccaggagcctgttctcacaccagcgaagccgttcccacccagggccttcacatctgttcttctgtgggctgggaagccaagatctgtgtcaccagggtctggttcaattgtcatctgcaggtccttctgcaacgttaaggctcccgacagcac

SEQ ID NO: 257166 - DNA, 347 bp, Homo sapiens
ccccacagggaggggcttcttctggggtgggagtagaggcatctctggccccagaggcccaggggaaagagtcaatgagcagatgctccctggtgcacatctgaaagagcctgcagcccggcagacagcctggcagatacagacacacacatgggcccccacagccttccagccacataccctactagaagcttcagcctcctcccagcactgtcccttcaccacccacacctggtccagcccctgctacctccccctttaggcctcttcagctctcacttctagtctggaccccttccactccaaacttaatctatgggtgtttcctaagaaaatcagtcatatga

SEQ ID NO: 257167 - DNA, 666 bp, Homo sapiens
gtgtggttgcccaccttgcatgtcatccactgaagtcatgatagatgactttacaacttttaacttctgcatggttttcctttgaataggtgaagttgaggtaatttgtaactgatcctaatgtaattcttagatgcagtagatacaacatataacatttatcagaaggcacagttaagattgtgtttttgggtgaaggatggatgctataaagtataaggattttatttccgagaggatgaaagagaatgaaggaaagaaaaaaatatataaaaggaaactgaggacagtgagtggtgatgaactggtcgggtaagaaaactgagaatgtcaagaaaatcaaacagattttggagaagaaacataaacgtagtttttgaagttgtacactactcatcaagagatgtttatatcatgaatatgtttacccatttacgttcctcccaggggtacttatgggtaagggcaaatcaaactagaattcatctctatccacagtcatgtggtattttttttttctttattatactttaagttcttggatacatgtgcaggttggttacataggtatacatgtgccacagtggtttgctgaacccatcaacccatcatctacattaggtatttctcctaatgttatccctccccttgcccccaaccccagaa

SEQ ID NO: 257168 - DNA, 704 bp, Homo sapiens
aagatgttaagtctttgtatttatctattgctgtatataacaaaccaccctaaaatttaggtgtttacatggcaaacgttgcatatttcatgtattggttgatcaggaactgggagctgatttgactgggtgattttggctcatgaggttacaacatgttgactggggctgcagtcatctgaggacttgatgagggttggatgatattctttccgagcttattcatatggcttttggcctcagttccttgccacacaggtctctccttagctggctgcttgagtgttgattttcaactcaagctggctgcttgagttatgattttcctcagagtgaatgatttaacagtagccagggataagcccccatttatgacctagtcttagaagttgcacatagtctcatcggctttattatatttggtagaagtgagtcattaagtgtagtccacacttaagaggaggagacttccacttcttgaaaaggagagaactattggggaatttgtaggcatattttgaaatcaccggtcttacaacctaaaatcaagaggagactccttgtgatgattagcctgtggccaaactcagagtggagtcttggcagaacaggctatgggtaaaagaggatttaggctgggtattagccccctaaaatgggatgtaaaatagcatgaagaatctatcagaaatttaggagatgat

SEQ ID NO: 257169 - DNA, 404 bp, Homo sapiens
gctttcagctgctagtcaggagaaaggcagaagatcatgtgagaaagaattttctgggccagttccagaaatggtttacacagtccactagacaaaagcgagtccaacagccacatctaactgcaaaggaagctgggaaatgtagtctaattttgtgcccaggaagaaaatgagaactggtaaatatagactgtctgggggtagattaaaagaatgcaaatattagtacaaatagattaaagactgcagaaatatggcacacgatttatgcaacttaattccaacatagatcagtatttataatagaaaacttattttaaagaattttatactatataaataataaaaaagaattttatactatataaataataaaattaatgtaataatgcaacagtgtgttc

SEQ ID NO: 257170 - DNA, 692 bp, Homo sapiens
ttgtactcatttggtaattttgatatttaagactattccttggacagaaaagtatatgactctctaaatgtcaggcaagtccataccactatgatgatattctcaaagatgagttatgttccatgcaagtatattcactaaacgtgtacggtaccaaatactctgactccaagtaataaaaaaaaatagcttttgggtcttttccatgcctttagacatgacgaacatagactatttaattgtataaagattttcctggcatatcttccttttggaaaaaaaaaaaaagtcctgaaagtccttctgttttatgaaatattctagtctctgttctgcattatattattttacatagaacttacagtcttaaaaaagaatgttcatttgttaaaaagctcccaaattgactaatattattgctattatagtttgtttttacatagtgtttaatagaacatttgttgtgattaagcaagattgcttctttgtcttcttttctcttttcttccaaatagttcaacgccattataactttcctgtaacagagatgggaatgttttccttcactgaatccccatctcatgaatctacagtcttgaaacccttattttaacagaacagtcatctgactcggtttggctgtctcataccaagatctcagggcagcaacagagtaacccttgctggtacct

SEQ ID NO: 257171 - DNA, 455 bp, Homo sapiens
aagtaatatagagaacagctgtaattgagacgtacaggttgagaaaattacatgaaaaaaacatgaccaggcaatgacaatctcttgaccggtgttaacaaaacaaaacccaaacaaaaataacaatcaaagagaaagagtgaagagcttctacaacatgtagtagttgtcctctttagctttcttggaaacacttttgtccatatgtgtttttgtgagccatgtttacaaaaattacatgagtagaaagttaaaagtattattagatctttaattactctattactcttgtttttgcactgtaaaaagttttctaaatagtttgaagtttttttacttaatctttactctcctctacaaccaaattcctcctgcttttgtgtaagaatgatagttggtgtagaatacgagacctgacaaaactttctaagtcaggagtcacaaaatgttgaagc

SEQ ID NO: 257172 - DNA, 348 bp, Homo sapiens
  misc_feature (1)..(1): n is a, c, g, or t
  misc_feature (256)..(257): n is a, c, g, or t
  misc_feature (293)..(293): n is a, c, g, or t
  misc_feature (342)..(342): n is a, c, g, or t
ntctgtccccatctctcaatctcatgctgagtctctctgtctccaactgcctgtcactgtctttgtgtctctgtgactctcatttctttttttctgtctcctgctgtctctgtgtgggattccttgtctctctgcccctgccctccctctcctatctgaaccctggtctctgtgtcccttagggcttatcacaccgttctccccagagtcaccgggaggagagccgggactggacacaagccagggctgggacaanngcagtgcctagtctgtggccctggggagcatgcctncctgtgatcttcctctccttgggatttggcctggatacagtagaggtgngcccca

SEQ ID NO: 257173 - DNA, 536 bp, Homo sapiens
caaggacattaatttctttcatgagggctccttcctcatgatctaatcaccttccagagatcctaccttttaataatattacactagggattagttgtcagcatatgaattttggaaaaatataaacattcactccatagcaactagtaaataaagatttatttattgttggcagttgctttttttacttttttttaaacccgagttatctttctctgagtttagctttattatatatttgttaaatgtattttaaaaatgttttcctaagatagtttgaattgaaggtacactctttggatttcttgcatatccttaaatatttttcactccgataggtgataaatttctagactacataatggattcttgagttgaagttcactcatttaacaagtctgactgtgcttatctaatgttttcccatttttcaaatgctttcccatttttcaggagcattcaatcaacctgtcatttaacaaatatttattgaccttataatttcaaaataaatgtgtattttaattatttattta

SEQ ID NO: 257174 - DNA, 191 bp, Homo sapiens
gcatgataaattttaattataggtaagcagacctggaccctaatttatgctaattaattttaagttcctagggtctttaaaattgtttttttaattaaaaatattttgtagagacagggtctttctatgttgcccaggctaggctagtcttgaactcctgggctgaagcagtcctcctgccgttggcctct

SEQ ID NO: 257175 - DNA, 374 bp, Homo sapiens
atatttacttcaagagcagaaatttatgggataaagaagtatattgcatccagaacacatacagacactggatttccttttaaatggtcagtattgccggtgcagtggctcatgcctgttatctcagtactttgggaggttgaagcatgcagattgcttgagcctgggagttcaagaacagcctaggcaacatggcaaaaccccatctctacaaaaaatagaaaaattacctgagtttggtggcatgcaattgtggtcccagttattgagggtgctgaggcaggaggattgcttgagcctgggagggcaaggctgcagttagcggtttggtgccactgtactccagcctgggcaacagagcatgacactatctc

SEQ ID NO: 257176 - DNA, 462 bp, Homo sapiens
tctgagtcaaacggactcttcctgttgtactgcgaggttctgcaaaccttgaagggcaaacacagtgagggtctctgacttgctgtgtggacagcccactctctgacagcccagatcatctgaagctatccctgggctgggagctggaagccattcttgtgaaccactccttataccttgagcgaagcctctttgggtcccagaagtctgaagctccagctgcctggcaagactgagtctagatgatttcttgggtaccagtagtttggcatttaaaaatactggattaactgcagtgtaaacttagattgcatttcagattgtaaacaataacccccgtgcttcatgtgatgttaaatcagaaatgagctattagccaagctagtcctcttatgaatgagcccctaaccctgatccagggatcgttgaatgaaaatcatcaaaatgatttatcttcacttt

SEQ ID NO: 257177 - DNA, 224 bp, Homo sapiens
gtcccagtcattttatgctaaggaattaggttgaatatgtgcagagcacctcagctcaggcaagccaataagctttagggtccctttagcctttaataacaagataatcacatagcccttccaatatatatgactgggagtccatgacgagcttccatctacaaatgcagttgtgtgtcatcaaagctggtttttccttatttaataaacaatgttgacagtga

SEQ ID NO: 257178 - DNA, 635 bp, Homo sapiens
gttttccaaagaatcagctccaggacttatcaattaattatataatttgttgaatgacaatggttttgtaaaatattttctgccttctttagatttgtttcctttttggattgtgggcttagttcattttttttgtttcctttttaatactaagagaattaaaatgtaaacttacctatctctagagttttgattatatattttaaaattttacacatttaaaaatactttgtttattggcttgttttaatttttaaatcaaaggttatttaggcatgtgtattattttctatataatggtttctctcctttaaatattatttatctgaaataatttttgcttcatatatttgatatgctattcaggaaaggtttattattatgtatgcattttaaattctatctttattgatataaattttcagtccctatactgttcagtattctacctgaaattccactttgtcagaaataaatattgctacactttcctatttttaaatccagttaaaaatttgtttaacaaatctttgttcatttaaaaaaagttttcctggtcattttattttcaaaatatctcttgaggacaaaatatatttgatttaaaaaattcaatctgatcatcttttaatgtt

SEQ ID NO: 257179 - DNA, 564 bp, Homo sapiens
caaacatctcaaattgaacatatccggaaaaatacacttctgaacttcgtagcattcagaataaaactcaaacctccagatggccggcagggcctccagtgatgggaatcctgtctcacctcacttggtgccactctcccctttactcattttcctggcctttccccggccccacttacccagaaatcttttactgtgcatctcctatgtgccaggcacctgataggtgctgggaatatagcagtggatgagaaagaaaaaagacccagtcctcatggagctgacttcctagtgacaggagcagcggataaagcaaatcactgaaggcagctggaaattactttccggttaagaggacaggctccttcccctcctcacatggctaccttcagatcacttgggtctcagcttaaacaccacctattgacagaggcctcgcatgttacctcattctttagccctactttgcatccttaaaaagcactcatcaaaatttgcaattatcttgtcgggtttttgttctttggtcttgattagtttcagtaaaaacttacataatgaaaa

SEQ ID NO: 257180 - DNA, 417 bp, Homo sapiens
gtgcttcgacagcacaaaccaatttcttgtgtgtgaatagcgaccgtgttatccgcgaccaagacatcgtatgtacaaacggggctgaggaattcccatttagtaattttacatcttcatatagtacattgtaatctgagtcacagggacttagacgtcatctagttcaagctcttccatttttcacgtgagaaaactgaagaatatgtagtggcataacttggagacacatctaagctctgtgagaaatgataaaattgaactcactctatttcaggaggactttcaagtagaggtactagtggaatatcctttacgttgtctggtgttggttgcccaggttgttgctgagatgtggcgaagaaatggactgtctcttattagccaggtacagcaaagtctattattcatatttat

SEQ ID NO: 257181 - DNA, 3458 bp, Homo sapiens
  misc_feature (411)..(411): n is a, c, g, or t
ccggccacaggtttccgcttgcctctggccgggggtcggcaactgcaggcgtcagtttccctcaagatggcggacgaggaggctggaggtactgagaggatggaaatcagcgcggagttaccccagacccctcagcgtctggcatctggattgtgcaattgatccaacatgtgtactctgtatggactgcttccaggacagtgttcataaaaatcatcgttacaagatgcatacttctactggaggagggttctgtgactgtggagacacagaggcatggaaaactggccctttttgtgtaaatcatgaacctggaagagcaggtactataaaagagaattcacgctgtccgttgaatgaagaggtaattgtccaagccaggaaaatatttccttcagtgataaaatatgncgtagaaatgactatatgggaagaggaaaaagaactgcctcctgaactccagataagggagaaaaatgaaagatactattgtgtccttttcaatgatgaacaccattcatatgaccacgtcatatacagcctacaaagagctcttgactgtgagctcgcagaggcccagttgcataccactgccattgacaaagagggtcgtcgggctgttaaagcgggagcttatgctgcttgccaggaagcaaaggaagatataaagagtcattcagaaaatgtctctcaacatccacttcatgtagaagtattacactcagagattatggctcatcagaaatttgctttgcgtcttggttcctggatgaacaaaattatgagctattcaagtgactttaggcagatcttttgccaagcatgccttagagaagaacctgactcggagaatccctgtctcataagcaggttaatgctttgggatgcaaagctttataaaggtgcccgtaagatccttcatgaattgatcttcagcagtttttttatggagatggaatacaaaaaactctttgctatggaatttgtgaagtattataaacaactgcagaaagaatatatcagtgatgatcatgacagaagtatctctataactgcactttcagttcagatgtttactgttcctactctggctcgacatcttattgaagagcagaatgttatctctgtcattactgaaactctgctagaagttttacctgagtacttggacaggaacaataaattcaacttccagggttatagccaggacaaattgggaagagtatatgcagtaatatgtgacctaaagtatatcctgatcagcaaacccacaatatggacagaaagattaagaatgcagttccttgaaggttttcgatcttttttgaagattcttacctgtatgcagggaatggaagaaatccgaagacaggttgggcaacacattgaagtggatcctgattgggaggctgccattgctatacagatgcaattgaagaatattttactcatgttccaagagtggtgtgcttgtgatgaagaactcttacttgtggcttataaagaatgtcacaaagctgtgatgaggtgcagtaccagtttcatatctagtagcaagacagtagtacaatcgtgtggacatagtttggaaacaaagtcctacagagtatctgaggatcttgtaagcatacatctgccactctctaggacccttgctggtcttcatgtacgtttaagcaggctgggtgctgtttcaagactgcatgaatttgtgtcttttgaggactttcaagtagaggtactagtggaatatcctttacgttgtctggtgttggttgcccaggttgttgctgagatgtggcgaagaaatggactgtctcttattagccaggtgttttattaccaagatgttaagtgcagagaagaaatgtatgataaagatatcatcatgcttcagattggtgcatctttaatggatcccaataagttcttgttactggtacttcagaggtatgaacttgccgaggcttttaacaagaccatatctacaaaagaccaggatttgattaaacaatataatacactaatagaagaaatgcttcaggtcctcatctatattgtgggtgagcgttatgtacctggagtgggaaatgtgaccaaagaagaggtcacaatgagagaaatcattcacttgctttgcattgaacccatgccacacagtgccattgccaaaaatttacctgagaatgaaaataatgaaactggcttagagaatgtcataaacaaagtggccacatttaagaaaccaggtgtatcaggccatggagtttatgaactaaaagatgaatcactgaaagacttcaatatgtacttttatcattactccaaaacccagcatagcaaggctgaacatatgcagaagaaaaggagaaaacaagaaaacaaagatgaagcattgccgccaccaccacctcctgaattctgccctgctttcagcaaagtgattaaccttctcaactgtgatatcatgatgtacattctcaggaccgtatttgagcgggcaatagacacagattctaacttgtggaccgaagggatgctccaaatggcttttcatattctggcattgggtttactagaagagaagcaacagcttcaaaaagctcctgaagaagaagtaacatttgacttttatcataaggcttcaagattgggaagttcagccatgaatatacaaatgcttttggaaaaactcaaaggaattccccagttagaaggccagaaggacatgataacgtggatacttcagatgtttgacacagtgaagcgattaagagaaaaatcttgtttaattgtagcaaccacatcaggatcggaatctattaagaatgatgagattactcatgataaagaaaaagcagaacgaaaaagaaaagctgaagctgctaggctacatcgccagaagatcatggctcagatgtctgccttacagaaaaacttcattgaaactcataaactcatgtatgacaatacatcagaaatgcctgggaaagaagattccattatggaggaagagagcaccccagcagtcagtgactactctagaattgctttgggtcctaaacggggtccatctgttactgaaaaggaggtgctgacgtgcatcctttgccaagaagaacaggaggtgaaaatagaaaataatgccatggtattatcggcctgtgtccagaaatctactgccttaacccagcacaggggaaaacccatagaactctcaggagaagccctagacccacttttcatggatccagacttggcatatggaacttatacaggaagctgtggtcatgtaatgcacgcagtgtgctggcagaactcctccggaggctgaggcaggagaatcgcttgaacccaggaggcagaggttccagtgagccaagattgcgccattgcactccagcttgggagacaagagcgaaacatcgtctcaaaaaaattaataaacacaacaaata

SEQ ID NO: 257182 - DNA, 2474 bp, Homo sapiens
ccggccacaggtttccgcttgcctctggccgggggtcggcaactgcaggcgtcagtttccctcaagatggcggacgaggaggctggaggtactgagaggatggaaatcagcgcggagttaccccagacccctcagcgtctggcatctggattgtgcaattgatccaacatgtgtactctgtatggactgcttccaggacagtgttcataaaaatcatcgttacaagatgcatacttctactggaggagggttctgtgactgtggagacacagaggcatggaaaactggccctttttgtgtaaatcatgaacctggaagagcaggtactataaaagagaattcacgctgtccgttgaatgaagagggaatggaagaaatccgaagacaggttgggcaacacattgaagtggatcctgattgggaggctgccattgctatacagatgcaattgaagaatattttactcatgttccaagagtggtgtgcttgtgatgaagaactcttacttgtggcttataaagaatgtcacaaagctgtgatgaggtgcagtaccagtttcatatctagtagcaagacagtagtacaatcgtgtggacatagtttggaaacaaagtcctacagagtatctgaggatcttgtaagcatacatctgccactctctaggacccttgctggtcttcatgtacgtttaagcaggctgggtgctgtttcaagactgcatgaatttgtgtcttttgaggactttcaagtagaggtactagtggaatatcctttacgttgtctggtgttggttgcccaggttgttgctgagatgtggcgaagaaatggactgtctcttattagccaggtgttttattaccaagatgttaagtgcagagaagaaatgtatgataaagatatcatcatgcttcagattggtgcatctttaatggatcccaataagttcttgttactggtacttcagaggtatgaacttgccgaggcttttaacaagaccatatctacaaaagaccaggatttgattaaacaatataatacactaatagaagaaatgcttcaggtcctcatctatattgtgggtgagcgttatgtacctggagtgggaaatgtgaccaaagaagaggtcacaatgagagaaatcattcacttgctttgcattgaacccatgccacacagtgccattgccaaaaatttacctgagaatgaaaataatgaaactggcttagagaatgtcataaacaaagtggccacatttaagaaaccaggtgtatcaggccatggagtttatgaactaaaagatgaatcactgaaagacttcaatatgtacttttatcattactccaaaacccagcatagcaaggctgaacatatgcagaagaaaaggagaaaacaagaaaacaaagatgaagcattgccgccaccaccacctcctgaattctgccctgctttcagcaaagtgattaaccttctcaactgtgatatcatgatgtacattctcaggaccgtatttgagcgggcaatagacacagattctaacttgtggaccgaagggatgctccaaatggcttttcatattctggcattgggtttactagaagagaagcaacagcttcaaaaagctcctgaagaagaagtaacatttgacttttatcataaggcttcaagattgggaagttcagccatgaatatacaaatgcttttggaaaaactcaaaggaattccccagttagaaggccagaaggacatgataacgtggatacttcagatgtttgacacagtgaagcgattaagagaaaaatcttgtttaattgtagcaaccacatcaggatcggaatctattaagaatgatgagattactcatgataaagaaaaagcagaacgaaaaagaaaagctgaagctgctaggctacatcgccagaagatcatggctcagatgtctgccttacagaaaaacttcattgaaactcataaactcatgtatgacaatacatcagaaatgcctgggaaagaagattccattatggaggaagagagcaccccagcagtcagtgactactctagaattgctttgggtcctaaacggggtccatctgttactgaaaaggaggtgctgacgtgcatcctttgccaagaagaacaggaggtgaaaatagaaaataatgccatggtattatcggcctgtgtccagaaatctactgccttaacccagcacaggggaaaacccatagaactctcaggagaagccctagacccacttttcatggatccagacttggcatatggaacttatacaggaagctgtggtcatgtaatgcacgcagtgtgctggcagaactcctccggaggctgaggcaggagaatcgcttgaacccaggaggcagaggttccagtgagccaagattgcgccattgcactccagcttgggagacaagagcgaaacatcgtctcaaaaaaattaataaacacaacaaata

SEQ ID NO: 257183 - DNA, 740 bp, Homo sapiens
tggttatcaatgtaaataacattaactagaaattgtaatttgtacataattatgaagacataattgaccctccatatctgtgggttccatatctagggattcatcccatcgcagtttgaaaatattcagggggaaaaaggaaaaaggatggttgtcactgtactgaacatgtacagacttttttttcttgtcattattccctaaacaatattatctaataactatttacatagcatttacattgtattaggcattataagtaatctagagatgatttaaagcatacagaagcatgtgtatagattttatgcaaatactacaccattttacataagggaattgagcattagtggactttgatgtccacaggggtcctgaaaccaattccctgaggataccaagagatgactttatgtatttatgatgtgtgattttgtgttttaaaaaaggattgggaagttcagccatgaatatacaaatgcttttggaaaaactcaaaggaattccccagttagaaggccagaaggacatgataacgtggatacttcaggtaaactaaaaaagtaaagtgatcatatcttggtttaaatatttaagaattctctgcttgcctccagtgttaaaccactgtaccattgtagacatttactactggttttcataatcacttatttttcatgttaataattctattttcctatattttattgtagttttaaaaataaactaagatttattca

SEQ ID NO: 257184 - DNA, 556 bp, Homo sapiens
tattatgactactttagatacttcgtatgagcagaatcatatagtatttgtccctctgtgactggctgggttctatttcttttcaatgtcattaatacctgttctgtcttagagagagccatgaggatctggggaaacaagctgtgagaaaagtctttgtaagctataagggataaacagttgttacgtgatatcatcgtaattagctactcagaaaggcaggtaggaacattcataagagagtatatcactaatggggagacttcatggttctgcctcctttctgtcatcagtaacaccaacttggccacaaggggttaagctaaactgatctaaatatatagcaaccctcttgagctcaacttgaattcattcctggacgatgttgtaatgaattcagcaaagtgattattttaacttaacattaccttccttatccatttatttgtatacaatcttgactagtatgtttttctcggcttttttatagaattcacgctgtccgttgaatgaagaggtaattgtccaagccaggaaaatatttccttcagtgata

SEQ ID NO: 257185 - DNA, 248 bp, Homo sapiens
tgtcatttcttaatacccagattactcatgataaagaaaaagcagaacgaaaaagaaaagctgaagctgctaggctacatcgccagaagatcatggctcagatgtctgccttacagaaaaacttcattgaaactcataaactcatgtatgacaatacatcagaaatgcctgggaaagaagattccattatggaggaagagaggtaaaataaagcaaaccaaaaattaccaactcaatttttttttttt

SEQ ID NO: 257186 - DNA, 396 bp, Homo sapiens
aggcatgagccaccacattactgatgataaacatttatctagataacctgtctaatgggcttggagtatccagataggtgttgtctagttactgaggagtagggaattttttcttttagaaaataacttcttagtagttgctattcagtgaaactaaggactgtgtttaacattcaataacaaacatttattaaaaatgacatactgactaaccaaatgaatgaataaattaagtccataccacaatgagttaatgctaaagaaaatattcttgaaatattccgcaggctcgacatcttattgaagagcagaatgttatctctgtcattactgaaactctgctagaagttttacctgagtacttggacaggaacaataaattcaacttccagggtt

SEQ ID NO: 257187 - DNA, 481 bp, Homo sapiens
ccattcagctaccaagagctacgcctgataaattagaggggaaaaaaaaaatctccagtcccttcacgtcgtgacgcttgcttccgggaagcgggccggaagccactcctcgagtctgcgtcaaacccgacttcaggggccgtcgtaaaagtgtcgtccctgtctctccgaccggccacaggtttccgcttgcctctggccgggggtcggcaactgcaggcgtcagtttccctcaagatggcggacgaggaggctggaggtactgagaggatggaaatcagcgcggagttaccccagacccctcagcgtctggcatctgtaagtccctataggcaagtctcttttgtcctccccccggtccctccctactgcgcttaggaggatgtggggcttcaccccttatggcggctctggggagggggagttatctggattgatctggaaggaagccaccgaataaaaagttagtcgcaacccacat

SEQ ID NO: 257188 - DNA, 277 bp, Homo sapiens
aaacaacatttaattggggctagctcacaggttcagaggttcagtccattatcatcaaggtgggagcatggcagcatccaggctgtcatggtgcaggcagagctgagagttctatgtcttcatccaaaggctattagtggaagactgacttccaggcaactagggtgaggatcttatacccacacccacagtgacacaccctttccaaccaggttactcctattccaacaaggccacacctccagatggtgccactccctggtccaaggatatacaa

SEQ ID NO: 257189 - DNA, 861 bp, Homo sapiens
agtctctaacgtcactatattaagagatagggcctttaagaagtgatgggggcatgggaactctgccctcatgaatggattaatctattcatggattaatggattaatgcattaatggattggtggtttatcatcgcaaggaaactggcagttttgtaagaagaggaagggagacagtggcagggaaactggcggctttgtagcaagaggaagtgagacttgagtcctctcaccacaggttgccctgcaccaaccaccacaggactctgtagagagtcctggctagcaagaggatcttcaccagatgtggcctcttgacctgagacttctcagcctccataactgttaagtttcctggagaattctgaaggatatgcccccttcctctcctacagctcagagttgttctgtgcacttggatcagcctccacaacttccccccgggacagggcacccatcaccatctcctacctggacagcagcaaacactgcccccgtgacttcctggtgccatccttggctccattacgtccattctccagtggctggcagagtgagcttgaagaacgtgtgacatgcccttcagaatgttctacttcctgttccagaaggacagcccctcatgccttcccgcgggccacacgccacctcttcctcagtgccccagcctggcatcctcttcctgcattcagccttcttttccgaggtagcgctgataccagttgtcactaaatacaacatgcataactgttcagcttctctctagtagaatagatcataagcctcatgagaccccagagcctctgtcttcttcaataccccccagcacccaccccagggcagggccacaaagagttgtgg

SEQ ID NO: 257190 - DNA, 973 bp, Homo sapiens
agtctctaacgtcactatattaagagatagggcctttaagaagtgatgggggcatgggaactctgccctcatgaatggattaatctattcatggattaatggattaatgcattaatggattggtggtttatcatcgcaaggaaactggcagttttgtaagaagaggaagggagacagtggcagggaaactggcggctttgtagcaagaggaagtgagacttgagtcctctcaccacaggttgccctgcaccaaccaccacaggactctgtagagagtcctggctagcaagaggatcttcaccagatgtggcctcttgacctgagacttctcagcctccataactgttaagtttcctggagaattctgaaggatatgcccccttcctctcctacagctcagagttgttctgtgcacttggatcagcctccacaacttccccccgggacagggcacccatcaccatctcctacctggacagcagcaaacactgcccccgtgacttcctggtgccatccttggctccattacgtccattctccagtggctggcagagtgagcttgaagaacgtgtgacatgcccttcagaatgttctacttcctgttccagaaggacagcccctcatgccttcccgcgggccacacgccacctcttcctcagtgccccagcctggcatcctcttcctgcattcagccttcttttccgagggtcaacatcttgtgagtatggggaccaggcaacgtgagctccagctctaactctgtcccaatcagctgtgtgaccttgggcaagatgcttaacttctctgggcctcagttttctcatctgtgaaatgaagtgtcatcttgctggagggcagaaggattccctggaacctgggggccagcaggacagaggaaacagaaagtacatgaccgatgatgtctttcgaccacagaaagggctggaagaagcaggggacctactgtttgaat

SEQ ID NO: 257191 - DNA, 638 bp, Homo sapiens
cagtcccctggggcagctagctgtgctgtggagatgcacacagcttgaactgactcgatattctttttttttcatcaggtgtcatcttgctggagggcagaaggattccctggaacctgggggccagcaggacagaggaaacagaaagtacatgaccgatgatgtctttcgaccacagaaagggctggaagaagcaggggacctactgtttgaataaacccagtggaaaaacagaagccccatttcatacttgactcagctcttcaagtttaaatcttgaatctcctcaactacacggaacagtgtctctcccaagtcatctgacacccactctgttctctggatcattccttcctagagaacgttgctcttggagggctgtgatctgctctcacccacttgcctttctgacccactgagtgcatctcaacagtcacttggggtgatccgatctgaccaggaagggttgggtggctcgtggagcttgggaagcactctcactgtggcggtccccattggtggtcatggggttgccacagtgagctacgtttctaccctcatctctctatatgttaccgtggaatctctgactgaggacccatgggctcacccaatgtgataaagtcctgaagctcagc

SEQ ID NO: 257192 - DNA, 687 bp, Homo sapiens
aggcaagggtcatgaccagggtccagcctcagtaatgcactcacccccaccctggggcactgctgcaggcccaccatcaagcagcctacatttgctcccctcctgccctctcttcccaggaagcccctcacctgtcacttcctgaagaatatggaagccaaggaggtcttcttcaggcattcctctccacccatgcacttcctccctccttgcaagcttcaaaggaattgatttccagagagacccttcccagttgccccacctttccgtcagcctcttccaggaactgtcctctgacatctctctgtctaggtctccttgtcactcttgtgcacaccaagactgttctccccctgtcagccactgagtccactcagatatcttctgcttcccaaaattaaaattacaaaccaaaacagagacagcttccatgaccttacacattgtagacacttggctacagcagtgaatgacataaacaaagtccctttcctcatgtagccctcatgctagtagagtgaaacagataataaataaactagtcaaatgttcagcatgtgagttggtgatgacagcacggtgcttcatgcctgtaatcctagtgctttgggaggccgagatgtgaggatggctaaggtcaggaatttgagaccagtctgggtaacatagtgagaccctgtatctaca

SEQ ID NO: 257193 - DNA, 647 bp, Homo sapiens
aaagaacaccctaacaatgaggcattattaaaggcccacataaaaaacctaatagacaccagctgccctctcttcccaggaagcccctcacctgtcacttcctgaagaatatggaagccaaggaggtcttcttcaggcattcctctccacccatgcacttcctccctccttgcaagcttcaaaggaattgatttccagagagacccttcccagttgccccacctttccgtcagcctcttccaggaactgtcctctgacatctctctgtctaggtctccttgtcactcttgtgcacaccaagactgttctccccctgtcagccactgagtccactcagatatcttctgcttcccaaaattaaaattacaaaccaaaacagagacagcttccatgaccttacacattgtagacacttggctacagcagtgaatgacataaacaaagtccctttcctcatgtagccctcatgctagtagagtgaaacagataataaataaactagtcaaatgttcagcatgtgagttggtgatgacagcacggtgcttcatgcctgtaatcctagtgctttgggaggccgagatgtgaggatggctaaggtcaggaatttgagaccagtctgggtaacatagtgagaccctgtatctaca

SEQ ID NO: 257194 - DNA, 731 bp, Homo sapiens
ctttaaaatccattcctgaccactgcttaccacttcctggtctggggaatggagttgagggggccaccctcagtcacctgaatttgactctccccacagaaacagcagaagaaacaagtggaacatcagctggaagaagtaacgtgatttctttgctcacaacatgactgctgggtttggggggcactcagatgtagaggcgccaatctcgtctcacccactcccagcctggggaagaaggctcacccctcagattccaccccatccccacagggtccctgataacctggtcccatgggtgggcctgtcctggggcattggtggcattctgggggcatgtctcttgctatgccatgtctgcctccctgtggtaagagccctgtcttcctcttcctataggaaaagaaagcaaataaggaaatacacaaagcacaaacggagcagttagaggtgagtggtgggtggggagttttctcctgtcctccggagaatgtttctttccttctctttcagcacttgcttggcttttctcccaaacattcaattccagacaatcaacatcctcacgttggaaaaggcagacttgaagaccaccctttaccatactaaacgtgctgcccgacacttcgaaggtgggaatctgggcatcccgtcatccttcaacctggcactttgacaggtctttagggggagtcttttggcccccatctcaacctctctcattacagaag

SEQ ID NO: 257195 - DNA, 435 bp, Homo sapiens
ccttcttaggagcaagtaaaaacgatggcgtaacacgaccacatttacacaactgttgcacggcggtagtaaaagaatcattaacacaaaaatcaaacgttttcaaataaactataaatcgccgaggctgggaaaggcctaggtctggggccagctggacccaacgcagggcactgggggaagggggtgtgtggacaggtggctcgggatcatcggccccacaggtcccaggggcaagactccgcgggttcccggccctcaatccgaccccgcagaccgccccctccccaagcccggacccgaggcctcgtccgccggcccctctgacccagggccccggacagaagcgcaatgcagcctgcgccccacctccttccctcgccccgccacctcgatcccggcccggagccgccgacacctctcacgcagcagggg

SEQ ID NO: 257196 - DNA, 430 bp, Homo sapiens
atcacactcatacattgcatttctgtgtgattatcatgtaatcaatcaatgaaaaatttgtccttggataaaatagcatgttagctttgttaggttaattttagtttttatttatttacaaccctaaactctatcttatatagccttgcccttcctggatagatagtgattgactgtatttatttggccacaactaaagcttactaggtagtgttggtctgacttatcatgtcggtgctttgctggggaacttcccagagagagttcacagccctgagagtgagtccaaaggaggaggcttcccctaccttctccacaacaagaacaaacatgcctatgtgaaaatagagtaggaagggcacctcatcccagcagaatgtggaggggacatatttctgggtgattctggtcaatgcttctaccattgtag

SEQ ID NO: 257197 - DNA, 544 bp, Homo sapiens
tgagttggcatcaagcctgtatccataatagctagcctgatgactagagctatggaagccagcttggtgttgcagcaggcctgaaacctggtgctctgagggttgatctagcactggtctggaatctggggccactggggctggcctggcagtggagaaaacacagagaccaagtcctctgtgcagactaaaagccagaggctgtgaaattctgcctggcagtaaatgggttgcaggctttgctcatgggtgttatcctggaatctgtggctgtggggggcctgtctagtgccttattttactgcaataagcctggtgttagagtctgaggcaatgtctggtgctcactaccctctactcgccccaagaggagggtatctctctccagcctgtactgcctgattttggaagaagagtgatggagatcctgtaagactttccctcctaccttctttgatacattttttcttatttttgtgctacatgtaggtgctataatttccttagttcttgtgaaggtattttcttgaatggatagttgtgc

SEQ ID NO: 257198 - DNA, 100 bp, Homo sapiens
atctgcttcctgtgatattgctaaatattaataattttaatgtaaaactgtaaaacttgtttatttcccaaattgcttgagcaaaataattatgatatag

SEQ ID NO: 257199 - DNA, 300 bp, Homo sapiens
gagtggataattccagtgtgctctggggtgtaggggctgtccttagttgtctggctgctggtgctggggtgatcaatacaggtggaagggctgggcacagtggctcacacctgtaatcccagcactttgggaggctgaggcgggtggatcaccagaggtcaggagttcgagaccggcctggccaacatggtgaaaccctgtctctactaaaaatacaaaaattagccgggcatggtggtgtgtgcctgtaatcccagctactccagaggctgaggtaggagaattgcatgaacccgggag

SEQ ID NO: 257200 - DNA, 680 bp, Homo sapiens
tagagattattttaacataatgtaggagagatatagttttaaatccaaattgaggaagtgttatattatttcaacacttttggaattagtggtgtctcacaattaggaactgttctctgatttcagtaatctctaatatcatacatagcaacatctctgtgggtttcctctgatctctccaaatggggttctgttgaatcaggaatcagcctggagagtggtggctagaatgatctccagatctattgttatatactgggcaaagtcccttaaaccatggttaaatgaggcccttttagaccagatactcatattgagtccatcagactatgattaattacagactcatctatttgtgaagatttcattcagttttcttttaagcaaagttttgacataaacaagtactttaaatagggacacaagtataatagaaaaacatctgaacatctgaccatttaaatttacatgaagagggggtgatagatctattgttttttcctgcccttctgctgaatcaagaaatttgctttgaatatctatattcttataacactttctggattgagaaaagtgctcgtattagcttacatataggttataagtccagaattcttgaaaactttgaatgcaaaggagtattaaaatacattaccacagtttctctgcattggataaaa

SEQ ID NO: 257201 - DNA, 379 bp, Homo sapiens
ctgtgggaggggtaggagtgacactgtctgccttatcccatttggaagtggatctggctccgtgtctctgcaggctcttggtcttctcctgacttctggctctagggggcgctcatagaggggcctagacacttcccatgatagtgtctggctctgcgaggcccacctctgttctgggacaggatccgagatttgaagccttcaagattgggacctaggccatatatggccagaatgacaggcagacaaagctggagtgaggtcacgcagaagcatggaggggggtctcggcaccatgccctagtccatcctccggcgagtgctaagagctccatcagggtaagcagctatgagattgcccagggccaagcaaatatag

SEQ ID NO: 257202 - DNA, 445 bp, Homo sapiens
tgtgctgctcatgtggagatggttagcggcacatggcattttaagcagatattggtaacacttgagctcactcaccacaatagcaacaggaggtagctacaaaattattacagtagtgcagtacatactacagttaattttatgcagttatgatttaatactacatctttatgtttgtttacatttctctccactaaatggtgccataaagatataagaatatcaatactgaaaaaaggctacttaaataaattcactatcaacaaggtatttcataaattccaattaaagttggaataagactttatcttaaaaaaactagttacaggccgggcgcggtggctcacgcttgtaatcccagcactttgggaggccgaggcgggtggatcacgaggtcaggagatcgagaccatcctggctaacacggtgaaaccccgtctctact

SEQ ID NO: 257203 - DNA, 1044 bp, Homo sapiens
accatggagtgcaggtgggttggagcacagatgaagccccggtccaacctgggcattcctgcagccatgtgcagtgacccttgtgtatgtgagtacctgtcatgtgcccacgtatcctggtggcacaaaaggtacttcatgtagattgtcaggaccaagacacagaacgttcttggggcacaccacaataattcccccactagcattcaccttaagatgaaagaatttttttctagttgatgtggattccccagatttatctcatttcatgatgtcttcggaattgcatgttgtgccaccatcacacttcacactctcagtaaggagctctcagttgtctcacctgttattgctcctctttattgtaaacgatgtcctataaagaagatatatgtctacaattgagctttgaaggaggaccatggagccagttccttttaaggggaatgaagtcaagcagtaaatttgctggtcactcttttcatatggaccgcatctcagccagcagttggtctttgatgttgtaacaatggcactgggacctgaggcagaggagcacccccataatactgaaaccagcctgcattcattctaatttggagaacaatctgtgggatagtacgcacatcagggagcccagagagtgaactccagggctgtgggtaatctttcccagtgaaaatcagccatctcttctacaccatgtaccctgcctgctgcattctttactcttttattaaaattgaagtatgatattcctacagaaatacacacatatataactctacaactcaatgagatttcacaaactgaagacacctaggcaaccaatgcctagatcaagaggcaaaacattaccagcaccctagctgccctccttggactcccttttcatcacttccctgacaaaggtaactctcttccaacagcacaggttcctttttcctggttttgaactttacctaaacagaattatccagcatgtactttactgtgcctggtttccttcactcaacattacatttgtgaaattgtgaaaaaaca

SEQ ID NO: 257204 - DNA, 426 bp, Homo sapiens
gcaacaacagccagaaggacccacccacaggagcttaaactggagcagtggcatgaggtggacagcaggacaaggtgaagaaagttccagttttctgactggaggattgaaatggggagctccagcacatttgaaaagtgccaggacatcatggaggaaaaggagctcagaacaccaggacattgtggaggaaaaggagctcagaacaccaggacatcgtggaggaaaaggagctcagaacaccaaatccatgaagctgtttatgaacgtctgggctcacctctgaactatgcatgcatagatctgacttgaaacatatgtacaattttcataagacttaaacaagacctcaaatactgtaccataatattcaaattgtccaacatacaatccaaaattacttaatataaggccaggcacagtagc

SEQ ID NO: 257205 - DNA, 402 bp, Homo sapiens
gtattcagacaggaatttggaagatttttggccaaagaaacgaaatagagttaaaaatctaaaatccagacctttgggtgtttcccagctcagtcttcaggttcttgtcaaatgatcagactcagctgggcgtgttgactcgtgcctgtaatccctgcactttgggaggccgaagtgggcggatcatgaggtcaggagttcaagaccagcctggaacatagtgaaaccccatctctactaaaaatacaaaaaattagctgggcgtggttgtgggtgcctgtaatcctagctactcgggaggctgaggcaggagaatcacttgaaccctggaggtggaggttgcaggcagccgagatcacaccactgcacaccagcccgggtgacagtgtgagatttcatctt

SEQ ID NO: 257206 - DNA, 717 bp, Homo sapiens
gcttttttagattaactcttaagtactccacgcttctgaaacgggcgtaggcacagcgtcagttctgtacagtgcggacgcagcaggacagaatctccctgggcatctttctggagcatcagttttactgcaagattttaagaaacaaatttaattgatttccaagttaagaaattaaaccttgaaaactagactaaaaagtcatctgcacctgacgtaacagactttctgcaggaagaaaactctaaggagagcatattgtccattattataaatagtgaaaatgagaaatcatagcaagtcccttgaaaaccctgccctgccagtcttctaatagggccttggtatggttttatgtgtattttctttttgaagtgtgctcaccttttgaatatacaaatttggggttttgaccaaattttgcaagttttcggctattgtttatttgcttttgtatcacatttaatttttctgtctctccctctccttctcggactcagtcattccacaggtctccaaggcgcttttcattttcttcaaacttgtttcactcttcagattggatgatttctattgctgtcttctgtttctactgtttataaactcaacggtctttttaatttttcatttcattatctctctattccattcttttcatcatttccatttctctgctgaggctccacatgagttaattcattatgaggatgttttcct

SEQ ID NO: 257207 - DNA, 396 bp, Homo sapiens
ccaagagagaaaagagaggttttgtgggtaccttggacttctgttggcatggtgggctgccctcccccaaatgctgctggaacatgggcactgccagcttgtggcttttgtattttgcttttctgtggcctgagacaggtttctattttgggcccatggctgaggtctgtgaagctgcatgctaaaattctgtttctgagcattttctagagagagggtaaaactataatgactctgaaaaatttaaaagccactcatctacgttcaccttggactttctgtttagtgttgattcacacaagatgtaactgattgattataatcagtaactaattgattagttatcccacatttaagattaagattattccaggtcactttggcattttggatgtt

SEQ ID NO: 257208 - DNA, 420 bp, Homo sapiens
ctcccgggtttaagtaattctcctgcctcagcctccctagtagctgtgtgtgtggagagagcacgccactgagagagagtgagcgagagtgagagagtgtgtgtgtgtgaatgtatcacactctatatgtgctgggattacaggcacgagccaccacgcctggcccatgactgttatatttttagtacagacagagtttcaccatgttggccaggctggtctcaaactcctgacctcaagtgattcggccgccttggccatccaaagtgggattacaggcgtgagccactgtgcccagccatagcttatatatatatatatatatatataattttatttttttttgaaacatagtgttgtgctgtctgccctgtcacccagctgagattgcgcctgggcaacagggcgagactccaactc

SEQ ID NO: 257209 - DNA, 387 bp, Homo sapiens
tcttctccatcttgtttttcattcttttttctggctggttcccctagcctttcttctttcctgcctctgatgttgttctctctctcaaagttgagtactgttccagttgtgccagtgtgaatgttcagttgcccaccagtggaacacctgcccagaatgaaccatgggtgagggctggccacattgccaaagggaagcttagagctcatgctggtgctgatttctccatctgctgcctgtggccttgccgtggttccccaggaagccaacatttacactccattgcttctcaagatctttgctaaacctttattcatagaaaacctgaaagtcagtcagcagctggaatagcatttagtcattacagaattgtgcctaaccacattt

SEQ ID NO: 257210 - DNA, 411 bp, Homo sapiens
ctattcaactagtttcatattttaatgcatctaaaagtttctaagaccagaattattctagaagacacaaatagtaactgacaatacattcagttcattgagcatttttttctgagacaagatctcactatgttgtccaggctgggctcaagcattcctcccacctcagcttcccaagtagctcagactataggtgtgtgccaccaggcccagcttaatttttaaaattttatcttagtagagatgaggtctcactgtgttgcccaggctagtctcgaactccagggctcaagtgatcctcctgccttggctgcacaaagtgctgggattacagacatgagccacctctcctggccactgagccaatatttattggctgataacatgtactatgttgagtgccgaagaccc

SEQ ID NO: 257211 - DNA, 261 bp, Homo sapiens
agaaggtttttttttttttcccataaactcttagattttccaatattttacaattgtttccaggagtttctcttctcctctatcaaaagtgaagccaagtggggagtgaacagagaggcccctgaaggagagaaggcaaagaacaaggcttaagtcttgaacagtggagttcaagttatcacagtagtggaccaagctgcacctagctgtaggacccgaggcagatcatcagttgccccatctttaaagagggggtgatgc

SEQ ID NO: 257212 - DNA, 522 bp, Homo sapiens
cctttggatcggagcagaaggaagttgtcccacatcttcctcctcccagggacccctgaggcataccctctggccagggcccccacccaggccctgggcatctgcctcgggggctgtgcccatctcccttctaccacccagctggtgtctgtgccaagaaaggggaagtaccatctttgctgaattcttgacttttgtgctgttaaaaaatcagctttaacagagttttgctcatttaatttcatttccattgcacagctaagcgcctttgttaaattttgtatattgatactttttgttgtcagcagtttattcttttttttttggatataaatccattagggtgagagaagattaaaaagatacattacaattaaaatgttaatgaaatccgtatcacacaacttttgaaaccctttaggcattaatcttgcctgtgtcatgtccattaactttggctattcttattccacactgacccctgctgagagatttgtgctataattggatttttttttaata

SEQ ID NO: 257213 - DNA, 524 bp, Homo sapiens
acatgagacctattcgtctaggaataaactgtcctagccacaaaagatcagacaaaacccaagaccagagagtcattttcttctaaaatgctttatctgaaagattttaaaaagaaaagtggggagaaatgtgaaaggaaaatagaaactcgggactccaattcactaggccaaatggaaaaatttaagctgaaagctgagtcatgcaagcaactgcctttcctttagttcctaagcagatagctacagataaaggtcaaatatctccactctatcaccttatcttgtgtacagcacagatttactgagcataagacgaatacataattcactattcccctatgtggttttatcttgcaacctgtggattcagtaatgtgaccctacacttcctatttcccctccagcctgctttgcccctttaaatattgaagccctcaaaatcatctttggagaaaggcacagatctgtctcctgggtgtgtcttcaatcgtggcacaataaacttctaaactgattgaaat

SEQ ID NO: 257214 - DNA, 449 bp, Homo sapiens
ccggagcgcagggaaggaaggttgggtctctggagtccgcgggggtggggggctccctcccaggtctcgcccttcagcttttctgtttcccacttcagggccacacgtccgtcgttccgaacctccaatcacattggtaaccaacatcatgggttcccagtggccccgttgtggggtcttttcctcctggggtctctgctggggcttctccctctcctcgcttccggccatccccttcgctggggagcagttggctgcttttccgcagccagtgcctttcgcgggtccagttgatcctatgagatgcaccatggaggggtaaatgcagcctgggctcctccagaagccagggtgcccactgctgcgtggagatgctaccaagcgttcaagttgtgcgggttgtggaagaagctggtgagccctggagtcaggcctggaactcagaaccg

SEQ ID NO: 257215 - DNA, 673 bp, Homo sapiens
aaagggccagattgcaaggagagtcccagaactttgtacagggggacagtttaggggtgggtgtccctggactttgtgcgtgtgtgtgtatgtgtgtgtgtagcatcacttgaggcatgctggaactgtggggatcacctagtttttttctagtggagaatggactatttggcccttggcacctagaagcagccaggagggaagtactgaccatttaaaagtggcagatctccgggccccatttctgcagccttcattctgcaactccagccacccacctgtgccaacgtcaagccagttgggattgccttgctcatgtgcctcctcccatctgcttttttcatgtgtgctacagccttagaaataaggactcttagacagctgtctttatgttcccaagaagtatctgtctttaagcaaatctagtctgcaaattttggatttattcaaaagcttaaattagggttttttttaaaaaaaccttgaatttcccaattgatttactgtaggattttttgagagaacaaattccccagagatttaaaactagtcagttcacagaaaatcagcttaactcaacaaatgctaaattgtgtactatgctcagagcactttgtaatgggaaatagaagagcaagacaaggcccttcccctcaagtcgccttgtctggct

SEQ ID NO: 257216 - DNA, 444 bp, Homo sapiens
gactccatctcaaaaaaaagaaaagaaaaagaaaattcatgaatctgtagctatagctatgccagtgtgtgagaaaactttgcaccttttgcaaaatccctttttacgtcgtattgaaaatccagctcttatgtgggcacaggaatgctataagaaaggcatatctatagaatatgatttgagaaaaaatgaagtcattatatgataacataaagcataaggaaggtaaaggatctaaagctggaaaatttaatgccagcaaaggatggtttgatgcttatagaaagaggtttgagtttaaaaatgtcaagatgacaggagaagccagctgttgctgaccaagaggtagcagacgagttcccaggcaccattaagaaaaccattgcagagaaaagatgtctgcctgaacagatttttaatgcagacgaaagtgccttattctgg

SEQ ID NO: 257217 - DNA, 1148 bp, Homo sapiens
aggaccgtcggtagtgatggtggtggatgcatggctggcggagtgcatggtggggagcgtgggtgtgcccagcagagcaggaagcaagctgcccaagaggtgtgcaccatgctcccactcttctacctgcttccagaccaagcacacacaaatctgggccaggctccctttcttcccacgagtgctacagatcagcctccacaaaaccagccactccccaggctcaagctcaagctcagagggacacaagccaaccaaggctacagttagagaccggtcctcagaggcctcgtgtagtgcgacgcccttgtgtggcagtaagaaaacgagggtcctggaaaggccccggacactgcttgtggacaccagtgcttctggcagacccacgcaggggccccgagaagggcgctgctccacgggactcaggtccacacggggagctcttgcctttctccggacccaagatctggcccgcaagcaaaaataccaaagaaaaacatgctagcacaaaaatattaaataacaactttgctaccttttaagtgcaggtttcaccaaataccacctagagactctgctacttttcaaagacatccacaaatagcagcattagtcaaacattaggcaatcaattaggcaaatgcaatctagcaatatggccaaagacaacctaccaaaccaagcagggattaccccagaaacgcaaggctggttaaacacaaagacaaaaacatcaatctaataacaacaacaaaaaagacaagaaatacaaggctccagattagagagaaatgtaactgtccacagaccacgtgattgtgacatataaaataaggatccacaaaacagtgggccgggcgcagtggctcacgcctgtaatcccagcactttgggaggccgaggcgggcggatcacgaggtcaggagatcgagaccatcctagctaacactgtgaaaccccatctctactaaaaatacaaaaaattagctgggtgaggtgtcgggcgcctgtggtcccagctactcgggaggctgaggcaggagaatggcgtgaacccaggaggcggagcttgcagtgaggcgagattgcgccactacactccagcctgggcgacagagcaagactccgtttccaaaaaaaaaaaaaaa

SEQ ID NO: 257218 - DNA, 156 bp, Homo sapiens
ggagggagcaatttacaaagcaaacacctgaaactgatttttaaaaaatatctttgactgggcacggtggctcacgcctgtaatcccagcactttgggaggccgaggtgggtggatcacgaggtcaggagatcgagaccatcctggctaacacggt

SEQ ID NO: 257219 - DNA, 621 bp, Homo sapiens
  misc_feature (464)..(464): n is a, c, g, or t
aggcacaattaggctgggcgaggtggctcatgcctgtaatcctagcactttgggaggacgagatatcggcctccagagattggaatgacttgaggtcaggagttcgaggccagcctggccaatatggtgaaaccacatctctaataaatatacaaaaattagccgggcatggtggcacatgcctgtaatcccagctactcaggaggctgaggctgaggcaagagaaacactggaagaggttgcagtgagctgagattgtgccattgcaccccagcctgggtgacagagcgagactgtctaagggggcaattaaggaaggctagtattaaggggaggggtggcttgctataattttaatttacaaaatatatgtgagtttgtccatttctgtgcattatcttcttttttttttttttttcctaagacagagtcgtgctctgtcgcccaggctggagtgcccgacncgaacttggaaactgcaatcattataggtagtttagcataacatttgagggaaaatcacgaactccagataggctccgaccagaagtgccccataaccaatcggtccacaggaatggccttcattttggtcccgcttgtacacctcgggttgccccc

SEQ ID NO: 257220 - DNA, 451 bp, Homo sapiens
caggaatgggcttacaagcccagttcccaaatggccaaattccacatatttgcagattggcaaagcacacaggggacctcgagatgagctggacccctggtttgcagacctcttcctgctactgcccttgagcaagcccatttcctgtccaagcctcagttttcccaaatgagaaaacaagagggggtttttaggtgaatctttctccttgctagtgttaacagcttaggtcatggattgaaaaacttgttctgtaaagggccatataagcaaatgttttagactttgcaggccacatggccctattgtggtgactcagccctgtctttgtagtgtgaaagtagccctagataatgcataaatgagtgggtatggctgtgttccaaccaactttatttatagatatgaaaacctgaattatatctaattttcacatcgcaaaatatgattc

SEQ ID NO: 257221 - DNA, 484 bp, Homo sapiens
gtgcccactccatgtgctctccgtccatctgatgggctggatgtagatttcaatggggttatgggagatagcagagccacagaaggaaagctgtatggccccctgaattgccacgtgaggaaagccacccaccgaagtgtgtttttggttgttacatgaacaagaagtcaacctgtgcatgtgcgagccacggtacatttgctggatctacttgtgatggcaggtggtccaattccacagtgacagaaccaggtcaagagcaagtatgctgcctcttgtgttgtaaagggatttatgcagcagatggcccagacagagacccgaaggtactccagaattccttttactcagaccaagtggcaaccccacccctgctgtacccagctgtgaaacccaggcttttttcagtccagaagaaccaccacaaatcatttctgaaaatgatatctgtagaataaataaataaatgcctcaagtgataata

SEQ ID NO: 257222 - DNA, 1672 bp, Homo sapiens
tgaagagatcacactgtactgaaacctacattattttccaaaatctctggatctgcttctgtcttgcaggcagagagctcatccagtagcccttagctcttcccagccccctcctttgatttgtgggtgccactgcggcagtgctgagtctcagtggtttctagtcttcaccaagttctgcccacccagatggtttttacctgtcctcaccagaaacctgcactgtctagattgctgaggctgcttctccttaaccgatctgctatctgtattccaggggcaccccagggttagaggtaaatggcacaggccttgaaatctccaactgctctgactccaggttggtgcacttcaatgccaagtactaaccacacaattacaggatgccaccaaaaccttgatatggggctgctgcatcctaattaaaaaaaaagttaatagacattattttttagaacagttctaggtttacagaaaacttgagtggataatacagagagttctcctaggctcccctgtcctccagcacacaattttccctactagtatgttgtattagtgtggtccattcattacaattgatgaaccactgttgatacgtcattatcaactaaagtccatagtttacattagagttcattctttgagtttcacggattatgggttttggcaattacataatgtcctaaatccccaatacagcgtcatgcgaaagagtttcactgctgaaaattccctgtgcttcaccatttcacgcgtcctcctctcctccacccctgacaaccactcaccattttactacttctatctttttgactttccaagaatgtcctagagttggagtggtacagtatgtgggtttccagactggcttctttctagcattatgtactttaagttccttcatgtcttttcatggcttgataacttgttttttaaaatcagtgaatcagatttccttgtatggctacaacagtttgtttattctttcgcttggtgaaagacatcttgggcacttccaagttttggcaatgatgaataaaattgctgtaagtatttctgtgcaggattgtgagtgaacttaagttttccaaagtgactgtacccttttgatttccactagcgatggaaagttctggttgctcctcatctttgacagcatttggtgtgttcacctttttgaattttagccattctaaacagcttatctgcccctactgtggaatgatgtgacagacatagaataacacttacagtgattctagttcaaaatgaggcaacatggaagggataaagaagtcactgaccccaaaatagtttggaaatggagctgggcaaaatccagcagaagtttccttaattaggatcgacagcctgggaccggcccgccgtcctgtgggtctttgcctctgggctgtctgctgggcatttcttggaaccattattatttatctttttttctcgcacttttttgggtatggcttctatcgcactccaaatgtttttgagattcatccttgttgttctgtgtgtcaccagtttgttcctttagccattccatggaatgagtgtatcacagtttattgatccattcttgtattgacagatacttgaatgttttcagttttttgtattatgaataaaactgctatgaacattcttgtataagtga

SEQ ID NO: 257223 - DNA, 1252 bp, Homo sapiens
ctacctcttcctaggcccacagccagtgcctttggagtactgaggcgcgcacagagtccttagcccggcgcagggcgcgcagcccaggctgagatccgctgcttctgtggaagtgagcatggttgggcagcgggtgctgcttctagtggccttccttctttctggggtcctgctctcagaggctgccaaaatcctgacaatatctacactgggtggaagccattacctactgttggaccgggtgtctcagattcttcaagagcatggtcataatgtgactatgcttcatcagagtggaaagtttttgatcccagatattaaagaggaggaaaaatcataccaagttatcaggtggttttcacctgaagatcatcaaaaaagaattaagaagcattttgatagctacatagaaacagcattggatggcagaaaagaatctgaagcccttgtaaagctaatggaaatatttgggactcaatgtagttatttgctaagcagaaaggatataatggattccttaaagaatgagaactatgatctggtatttgttgaagcatttgatttctgttctttcctgattgctgagaagcttgtgaaaccatttgtggccattcttcccaccacattcggctctttggattttgggctaccaagccccttgtcttatgttccagtattcccttccttgctgactgatcacatggacttctggggccgagtgaagaattttctgatgttctttagtttctccaggagccaatgggacatgcagtctacatttgacaacaccatcaaggagcatttcccagaaggctctaggccagttttgtctcatcttctactgaaagcagagttgtggtttgttaactctgattttgcctttgattttgcccggcccctgcttcccaacactgtttatattggaggcttgatggaaaaacctattaaaccagtaccacaagtaagtgaaccctcagcattcagtttgggattcacatagagtccttgggtgcatagttggtggctgccacctgccagtgggatcctgaggttgaagtagggattggcaaaggaggcacctagggcacgttcttaaaggaagtgctgactttcagggtttggcaagtacagtgtcaggccttgcaggatcctgagatagagatctccttaaattggctcctctcttgccatgccctggtcttagaatcagtgggatgagccctttaattaaagttgctattttcattttaat

SEQ ID NO: 257224 - DNA, 1192 bp, Homo sapiens
agggggatacccaccatggtagaccagagccactggaaagaggcatgagtccacatatccataaaggcaaatatccaaatattggctgtctggacctacaggaatactaaagaaggcactgcagagacccacaactgagaaatactggctgtgtggaagccattacctactgttggaccgggtgtctcagattcttcaagagcatggtcataatgtgactatgcttcatcagagtggaaagtttttgatcccagatattaaagaggaggaaaaatcataccaagttatcaggtggttttcacctgaagatcatcaaaaaagaattaagaagcattttgatagctacatagaaacagcattggatggcagaaaagaatctgaagcccttgtaaagctaatggaaatatttgggactcaatgtagttatttgctaagcagaaaggatataatggattccttaaagaatgagaactatgatctggtatttgttgaagcatttgatttctgttctttcctgattgctgagaagcttgtgaaaccatttgtggccattcttcccaccacattcggctctttggattttgggctaccaagccccttgtcttatgttccagtattcccttccttgctgactgatcacatggacttctggggccgagtgaagaattttctgatgttctttagtttctccaggagccaatgggacatgcagtctacatttgacaacaccatcaaggagcatttcccagaaggctctaggccagttttgtctcatcttctactgaaagcagagttgtggtttgttaactctgattttgcctttgattttgcccggcccctgcttcccaacactgtttatattggaggcttgatggaaaaacctattaaaccagtaccacaagtaagtgaaccctcagcattcagtttgggattcacatagagtccttgggtgcatagttggtggctgccacctgccagtgggatcctgaggttgaagtagggattggcaaaggaggcacctagggcacgttcttaaaggaagtgctgactttcagggtttggcaagtacagtgtcaggccttgcaggatcctgagatagagatctccttaaattggctcctctcttgccatgccctggtcttagaatcagtgggatgagccctttaattaaagttgctattttcattttaat

SEQ ID NO: 257225 - DNA, 1434 bp, Homo sapiens
ctacctcttcctaggcccacagccagtgcctttggagtactgaggcgcgcacagagtccttagcccggcgcagggcgcgcagcccaggctgagatccgctgcttctgtggaagtgagcatggttgggcagcgggtgctgcttctagtggccttccttctttctggggtcctgctctcagaggctgccaaaatcctgacaatatctacactgggtgagtgcttggccggagaattcccagacaggcgcgtcccggatccccgcactgccagggctccagcgaacggcgattgatcagagttatccaggcgattttccaggctgggcttgcggacctggctggaggagggagaagcccatctagccgtggggcagagaggggcctctattgctgaggtggaagccattacctactgttggaccgggtgtctcagattcttcaagagcatggtcataatgtgactatgcttcatcagagtggaaagtttttgatcccagatattaaagaggaggaaaaatcataccaagttatcaggtggttttcacctgaagatcatcaaaaaagaattaagaagcattttgatagctacatagaaacagcattggatggcagaaaagaatctgaagcccttgtaaagctaatggaaatatttgggactcaatgtagttatttgctaagcagaaaggatataatggattccttaaagaatgagaactatgatctggtatttgttgaagcatttgatttctgttctttcctgattgctgagaagcttgtgaaaccatttgtggccattcttcccaccacattcggctctttggattttgggctaccaagccccttgtcttatgttccagtattcccttccttgctgactgatcacatggacttctggggccgagtgaagaattttctgatgttctttagtttctccaggagccaatgggacatgcagtctacatttgacaacaccatcaaggagcatttcccagaaggctctaggccagttttgtctcatcttctactgaaagcagagttgtggtttgttaactctgattttgcctttgattttgcccggcccctgcttcccaacactgtttatattggaggcttgatggaaaaacctattaaaccagtaccacaagtaagtgaaccctcagcattcagtttgggattcacatagagtccttgggtgcatagttggtggctgccacctgccagtgggatcctgaggttgaagtagggattggcaaaggaggcacctagggcacgttcttaaaggaagtgctgactttcagggtttggcaagtacagtgtcaggccttgcaggatcctgagatagagatctccttaaattggctcctctcttgccatgccctggtcttagaatcagtgggatgagccctttaattaaagttgctattttcattttaat

SEQ ID NO: 257226 - DNA, 374 bp, Homo sapiens
gggatttaaagcgttgaaagaaaaaaaacccatcaacctagaattctgtattcaccaaatgttatccttcaaaggtgaaggagatactggaaatacaataaaggtttttttgtttttttttttaagtgaaggagaagtaaagactttatcagacaatcaaaaattgagagaatttgtcaccagtagacctgcctcgcaagaagtgttaaattcttcagaaggaaagggaaattatgtaggtcagaaactcagatctacataaagaaaggaagagtgttagagaagaaataaatgaaggtaaaataaaaatttagctttctcatttttaactaataggtaaagttttttcagttaatagtgattacagcttatgg

SEQ ID NO: 257227 - DNA, 268 bp, Homo sapiens
gtggcaggcaccctgtagtcccagctactcgggaggctgaggcaggagaatggtgtgaacccaggaggcggagcttgcagtgagccgagattgcaccactgcactccagcctgggtgacagagcaagactccatctcaggaaaaaaaaaaaaaaaaaaaaaaaaaaaatttgttctcatgaacttcctggcttagccaaccacatccacccttccatgtgtaggttaatattcccaatctgccacctgctcctccttctatgtgattt

SEQ ID NO: 257228 - DNA, 219 bp, Homo sapiens
  misc_feature (1)..(1): n is a, c, g, or t
  misc_feature (10)..(10): n is a, c, g, or t
  misc_feature (160)..(160): n is a, c, g, or t
  misc_feature (188)..(188): n is a, c, g, or t
  misc_feature (215)..(215): n is a, c, g, or t
  misc_feature (219)..(219): n is a, c, g, or t
ncaagcagtncaagggcatcgtggactgcatcgtccgcatccccaaagatcagggcgtgctgtccttctggaggggcaacctggccaatgtcatccgctactcccccacgcaagccctcaatttcgccttcaaggataagtacaagcagatcttcctggngggcgtggacaagcacacgcagttctgnaggtactttgcgggcaacctggcctcnggcn

SEQ ID NO: 257229 - DNA, 532 bp, Homo sapiens
gacacacaaagccactgttcccatagcaaccctgccaagtgatgtcagaaaccagggttcggccttgaaggctacaacacaagtgcggtgttgaccagctagcaatgacgacaaccccgaagacagcgccgtgcctccagcaacagaaatcagcagtgcacgtgtgtgcacacactgtcttgttttatgcttaaaaattgtgaataatccatttttaagtgtgtgtattctctagaagcctgtgtttctcctgatgtgtgttttatgcttaaaaattgtaaataatccatttttaagtgtgtatattctttagaagcccgtgtttctcctgatgtgtcatatcacttggaaaatcagatttccttttgctttcatgaagacctattttctgaaattgaagatgaaatgattcatttgctcaaacccttaaaatgtcctgactttattccttagggaggttcatcatgttcagaggagaagagagtgaaggattgtttaataaagaccaatcatgtaaattttatgatataca

SEQ ID NO: 257230 - DNA, 385 bp, Homo sapiens
cataacaatccttaatgtgtacgcactgaacagcagatcatcaaagtacatgaagctaaatctgatagaactgcatagagaaatagataaattcactcttagagttggaggcattggcatccctctatcagaaatggacaggtttagcaagcagaaaatcagtaagggcataacatgatcaatcatgatcaaaaacttgattcagtcaactatatgtaactgacatctatggaccactttacccaacaacagcagatgacacattttctcacacacacatgaaacattcagcagaatagaccacattctgggctagaaaatgcacctcaacaaatttaaaagaatagaaatcatacaaagtatgttctcagactacaatggaatg

SEQ ID NO: 257231 - DNA, 312 bp, Homo sapiens
aggcaaaagtaggaaacttagcaggaagtagagctaaatggacagttatgacaattctgtccccctctgcctgccagttcctcccaagcacccactccagggaaacactggaaagcctgcagaatcacagcagtggtttttattttgaatgagattaattttgtcggtgtcatttacaaataattttttttaacttccaaaactttagctaaattgaaactgtggtctgatggctgttaacaaagattaaaaatcaaaagggtccatgtccagttttcaatgttgtatagattttataaacgctcagaatca

SEQ ID NO: 257232 - DNA, 503 bp, Homo sapiens
aacctgagtatatgtctatctgtatagcgttcctctccctgtctttcaggaacattattagtaggatgtgattaatttctcccaaggatcccagaattccagttttactagtaattctttgtggattgtaattagaacaagagtagcaggtactctgatggtttattctacctcatgggacctttggggctatggcagagtttatattttgttctgaatgttgtgggaaacctttagagggttttgtgcaagggaaaactctggttgctctgtacagtttggattgtaggaaggcaggagagaaagagagtagcctgattagtccgtagcaatatcctaggaaagaaatgatggtagcttggaatggaaatagaatgaaggtagtgagtagtagtcagattcacatatgttttataatagagttgacagaacttgctgatgggttagatataggttggtattggtgaaggaaatagagtctgagaaaagaaaaaggtttgggg

SEQ ID NO: 257233 - DNA, 336 bp, Homo sapiens
ccatagcatgaggtataatatttagatttgatttagaattaacttattttcccacacttaaacagaaaagtgtctcattatctgatattagtatctatgaataatgtgtaattaaattgacaatatttctcttatctttcatcacattatgaaatactcccatacatggattctaccaggttaaacttaactatgaaatattttttatttaagggaccaagctgattaaaggagagagagtgagagagagagagagagagagagagagagagagaaagaaagagagaaagaattgttcagaaaattattcagaaaaatgtcaacagggcctcagga

SEQ ID NO: 257234 - DNA, 248 bp, Homo sapiens
aaactggcttaggtattttgtgtagaactgtcccacactttactggacaattaacatctctggtctggtccctgcccaccaatcatcattaacatgtccagtgattagacaaccataaactcctcacctgtcttcaaatgcccctcctagtgatgggtactgctcaagttgagaaataccgggctaaccacattcccttccgactctcattactgtccctcagcttttaatacagaggattatactgt

SEQ ID NO: 257235 - DNA, 545 bp, Homo sapiens
aaaactgaaaccttacacattacaggattgttatcttgttagttggacaccgttaaatgaccaaagctattcatggtctcctgatgagaacccaagtaaagagtcttcccttagttaattcacaggatcctcccttactcaactggaccagcactttacagttgcataaaaccctggttttgagtttttcttgtccctcaatattcactaaggctgtcatgaaaattattatgcttattaaaataaaactccatggattgcttaatgaaagatacttaagaatttgccaggtttaagttttattgctatttagagaacaagattttctaaacctattgccctgtgactcttcaaaaccatcagccaggaattctttttggatacactgatatttctctatgttatccttagtacagcttagcttaccaaaggatagatggacaaaagagtcttaaaagttaagtcttggaacaatataaaatgcagtctgcaaacacttgggggtgcatcataccagtcaattacacataccaatacttttttag

SEQ ID NO: 257236 - DNA, 460 bp, Homo sapiens
ttcagttgcaaatatatatgtacttctgaaataagtgacattatttaaaatatttttttcaaaagttttagcttttattacatgtatcttatttacactgtttgcttgctaaaccatttctttatagagtagtctgtttcaaatttctagtatggtatggctcgtaaaaatttactgagtgatctatatcctaattgagaatatggaatgaaacatggaaataaggcaggggagagaccttctctaatgaaggatgggggggggaaatttcttttgagcagtgataaaaatagcaaacaagaacaaacatttgactattattgctgaaaggagtgattaataattaactaaaaggaaaagcatctgcttcttgagttctgtaaaagtccagattgaaggccaagaagtattaaatcacaatagcaatcaaaagacaagaaagaaaaatgaaaacatggtg

SEQ ID NO: 257237 - DNA, 339 bp, Homo sapiens
  misc_feature (2)..(3): n is a, c, g, or t
tnncagctttgctctaacttacttaaaaatgcaattcaggagtacactctcaatcatgtagcaagccagaaagaacattgagatctttattgaatattatgtgtatatagggaagttcctctaaagccaatgggtgctatgtaaacgccgattgttattatcacaacaatgatggtggtggtggtggtagtgagggtgatggaggtgatggtgggatagcagaagtgaggatagtggtggtttgccactttcagtagtggtatgaataagtccccagccaagccaggtggaagccagtctttcacatattgatggggatattgagtttacaacccccac

SEQ ID NO: 257238 - DNA, 494 bp, Homo sapiens
tctgtctactgtcaagtttacttcagaaattcctatcgtcaaactttcagacaatagaggaaaagttgaaaacattcctatggaggaaaaaaagcactagttatctctatttacaaacagaaaaactgagcgtagaaaaattaatatctgatctatgttgtcagtagaagggtaacttatttcccaattacatagtgattattaggtgccaggtataattcaaccctgtcaggttagcattatttttattcccattttaagataaggaagctgaggctcagagaagttaagtaactatctcaagtcacaggagtctggctccatagactgtcctgttcaccattcagtaaggctaggacacgaaagaaaatcctgacttgtggggttaatcctctttccattaaaggtaagtgcacattcagttatctcatgaataatcaaagccatatttacatttctgtccaatgtattcttgaaaaaaaaaaaacaatctc

SEQ ID NO: 257239 - DNA, 630 bp, Homo sapiens
gggaaagaattgtttccttttcttgacaatagaaaaagtctgaagacattctgtcagaccaactgcatgatgtgtgaggcccagtgtaaaatgaaaatacagagtctcttgttcaaaaattattaacaatctccagatggtgatagcagagcattgaaccaattgtggggctcttctgggtgcagggccatttgcaactgtagaagttaacatgcccatgaagctagtctggacatctttagagtgatgataaaaatgtacatgagtaactcacactttagtgcctggactcttaagctatttgaaaattagcaattgtcatcattgagtcatcagtataattactgttttctaggagccctctaccttcgcaattcccggtgctgtggagctgtcagagttttaacatctcaaccaagccacatggatactatttcctcagaaaagacaaaattgatccaagcagaagagtgaactcaccgaagaggactctctacccataactggggatgcctcagccactcacacttactccaagattagtgtcactgattatggaaagaattgacttcttcccctggtcttgctcatttttctagagcccaggacaataaatgtgttttacggcag

SEQ ID NO: 257240 - DNA, 397 bp, Homo sapiens
  misc_feature (395)..(397): n is a, c, g, or t
gggaaagaattgtttccttttcttgacaatagaaaaagtctgaagacattctgtcagaccaactgcatgatgtgtgaggcccagtgtaaaatgaaaatacagagtctcttgttcaaaaattattaacaatctccagatggtgatagcagagcattgaaccaattgtggggctcttctgggtgcagggccatttgcaactgtagaagttaacatgcccatgaagctagtctggacatctttagagtgatgataaaaatgtacatgagtaactcacactttagtgcctggactcttaagctatttgaaaattagcaattgtcatcattggggccaccggaaaattactttttttttgtaagccctttccctcccggccaccccttaaaaaaaaaaannn

SEQ ID NO: 257241 - DNA, 360 bp, Homo sapiens
ctgagagtatttgggactgatagagaagctggtggtgggggtgttatttgcagagaaagcagctggcactaagtttacaggctaattagaaatggtcacgcctctaatcccagcactgtgagaggctgaggtgggcagatcacttgaggtcaggagttcaagaccagtctggtcaacatggcaaaaccccgtctctactaaaaatgcaaaaatcagctgggtgtagtggtgcgtgcctgtaatcccagctactgggagctgaggcgaaagaattgcttgaacctggaaggtggaggctgcagtgagccaagattgtgccacttcactccagcccgggcaacagagcaagactctgtgtca

SEQ ID NO: 257242 - DNA, 352 bp, Homo sapiens
gttgttctgagcctaaggggtctttgtgagatcttgcactacaaactgcagccaaggggatcccgaatgggcaagacttgatcctcatactggtgaaacctcctgagtccccagggaccctgtcagaccaggctccagcctccctgcggtctctgagagagaatgtggctagttctgccccacggctccctggcagtccagcggtcagaagtggccacgcagaacccaacattcagcctgggtgcagacactgcctctagcctcctccccaagcactctcctagtatggtaagagaataaactgaagtccctagaggccaagggtctcacctaagtggtcatatcctacagt

SEQ ID NO: 257243 - DNA, 1474 bp, Homo sapiens
cgagactccatctcaaaaacaaaacaaataaacgaacaaaaaaacccacaacgtattattttcttgtttacgaggtttcttgtctctctggctccaccagaagaggagcagggacccttcttgctgttgttcattgctgcatcccccacaccgagagcagagcctggcatgggcagaaagtcctcagtcgatatttggtggccccaagcgaatgaagcatccaagaagggaaagctgggggctccccactgcacttgccacctgagtcacattttcagaagcctctggaaagtcgtgcacagcccaggagtgttgagcaatttcggtttcctctgaggttgaaggacccaggcgtgtcagccctgctccagacaccttgggcatggaggagagtgtcgtacggccctcagtgtttgtggtggatggacagaccgacatcccattcacgaggctgggacgaagccaccggagacagtcgtgcagtgtggcccgggtgggtctgggtctcttgctgttgctgatgggggctgggctggccgtccaaggctggttcctcctgcagctgcactggcgtctaggagagatggtcacccgcctgcctgacggacctgcaggctcctgggagcagctgatacaagagcgaaggtctcacgaggtcaacccagcagcgcatctcacaggggccaactccagcttgaccggcagcggggggccgctgttatgggagactcagctgggcctggccttcctgaggggcctcagctaccacgatggggcccttgtggtcaccaaagctggctactactacatctactccaaggtgcagctgggcggtgtgggctgcccgctgggcctggccagcaccatcacccacggcctctacaagcgcacaccccgctaccccgaggagctggagctgttggtcagccagcagtcaccctgcggacgggccaccagcagctcccgggtctggtgggacagcagcttcctgggtggtgtggtacacctggaggctggggaggaggtggtcgtccgtgtgctggatgaacgcctggttcgactgcgtgatggtacccggtcttacttcggggctttcatggtgtgaaggaaggagcgtggtgcattggacatgggtctgacacgtggagaactcagagggtgcctcaggggaaagaaaactcacgaagcagaggctgggcgtggtggctctcgcctgtaatcccagcactttgggaggccaaggcaggcggatcacctgaggtcaggagttcgagaccagcctggctaacatggcaaaaccccatctctactaaaaatacaaaaattagccggacgtggtggtgcctgcctgtaatccagctactcaggaggctgaggcaggataattttgcttaaacccgggaggcggaggttgcagtgagccgagatcacaccactgcactccaacctgggaaacgcagtgagactgtgcctc

SEQ ID NO: 257244 - DNA, 184 bp, Homo sapiens
acttacacattattttggaaaaacagaattctcttatgatatgtcgtataactatatacaaatgtaccttatgattgttctgccttcacatcaatatttattggactagacctggaaatggtggtctgggagaactaagaaacaaatattattccacctgtggaaccacgaaggagttttgaag

SEQ ID NO: 257245 - DNA, 451 bp, Homo sapiens
aacagttaactttcccccaaagttaggaaataaaatttaaaaagtttaatttctataatactttaaaatgcattctatggcttggagtgattcacctaactgtcctgaattcacatttttaaaaagagaactgcttgggcaagtcacttcaccttttggggatttcaattcttcacctgaaaaatgaaggggtttgaagtagatgatctctgaagttccttttatcttcaagtctctataaatctgtgactctaaaatatgtgccttgcaggaatcctgcaagaattaatgcttttaaaataatttaagactcaaagatgaaaggttttatactagtgccaaaaactatttttatcaagcgaagcatgccagggaagtctgttgtgcctggggatagctgctgtcagtggcatccccagcactgcctgtgcccaacacagccccagatagt

SEQ ID NO: 257246 - DNA, 410 bp, Homo sapiens
catttcgctaacctccactgagccccaagctctgaagatcaaagtcaaagcacgaaatgaacgtgagagagctggaaagctaactacaaagcctctaaaagttacgtaacatgaagaaacacactcgattctgcctctcccattgaatagagcaataaaacatggacacaacacacaaagcagctatttgaggactctgagaaggaaatggcagcacacagattgggggagaagaccagaatttgaaatgctgctgaaccacagtagagtgatacaagatgtgaccgttgaagaatgctgggtgaaaggcgactgccttcatggaacccgtatggactccgtgtatattttttgggtaatttcctatgactcagtaattatttcaaaataaaaatgtttaaaaagtgaaa

SEQ ID NO: 257247 - DNA, 511 bp, Homo sapiens
ccttccccaaatgcccttttctaattctccagagcataaaatgctaattgtgaatattaaatttatgtgggtggcacatatcctgtttaacataattttattatttaattatttcttgagacagagtcttgctttgttgcccaggctggagcacggtaggcagtcataactcactgcagcctcaagctcctggaccatgcaaccctcccatctcagccttgtgagtagctaggaccacaggcatgagccaccacaccgagccttaaaatatgttttttaaataagcagaaccatgttttttcagagtagcatgcacaaagacaaagagacaattttagatgtcacacacagtaagtcaagctaatgattcagatagcctgttgtagtctcacctttccaatattataaatgatagtctgatccagaatttctcttttattcccaggcaaaaattaacttattcattttttattcaacaaatattttggggctaatatttattcaacagatg

SEQ ID NO: 257248 - DNA, 570 bp, Homo sapiens
tttcttaatttgggtatctattatgaataccttcacttaagtatttatgaatttagatatgaaaggtaaaactaaccactatccaaattaatatacagttcatttccagaaccctagtttcttccatgtgctcactcgcattcagtattacaacccccaaagataaacaccttactgactgccttctccataaatttgcctgttcttgaacgttatatacgtatacttttttgtatctgttttctttcagtgaagattatgtctgtattatttactcatgttgggtgtagttgtttttttcatcgtcgtataatactccattgtgtgaatgtataaagtatatcctttattatttattgtagataagcctttgggttttcagttttttactaacgggaacattcttgtgcatgtcttagtagacttaggcactcattgctgttgtgtgtgcataaagatataaaggtatttgagtttattttatttgatttctagtgaggttgaacatgtcttgtactcaataactgttcagatttcattaaagtcttttggtaatcttaatattttctg

SEQ ID NO: 257249 - DNA, 441 bp, Homo sapiens
aagacaggcatagaaaatcacaagggtattgattggggaagtgataagtgtccatgaaatcttcacaatttatgttcagagattgccgtaaagacaggcataagaaattataaaagtattaatttggggaactaataaatgtccatgaaatcttcacaatccacgttcttctgccatgggttcagccagtccctctgtttggggttcctgacttcctgcaacatttattcttaaatttttttgcagaatacattttttttcattaagagctttgaattttaatttggctcttgtatgaacttcctaggaggtcttaagaaaatcattacatctttttttgctggtttcctaatcttaaagttgatgatagtgttattgtttcaggaccagcaagacagaacgtaacttttatagagcactggaaacatgaagctaaaaata

SEQ ID NO: 257250 - DNA, 726 bp, Homo sapiens
gttttattgtgaccggaagataatgagcctagtgtcacgccaaggctgacgctaggtgacgtatatcacatgcaaaggattgaggatggccatgatgtcagactccacctcccgtcgtcaaccagctatgggagcacagagctcacggggacactccacttgtctgcccgcacatgtctgggtctttgtccaggtaacccaaatgctgctaagtggacgggcaatgcagggaagagcagtccttggagtcacagtctcggcttccaaccccaggattaccacttcctttctagaccggtggcggtggaaaaacctctccacgcctcggttctccttgctggcaaaatgggtgtgtgagtgcctaccttgtggggtggttgtggaggcagagggagcggagtatggagctggaatgttcaggcttcagcagctcagtgtacaatgtggtccgctgcttaatgcctctaatgtcccctgagggcagagatggggccctcagtcttccctgttcttgtggctattctgaagtccccagtgaggcctgagcttcccctccactttgtccaggctgcttcctgtgactctcattcttttgatgtggttttggtgtcttccttccagcctgctggccatcttttcactgaactcctctctccgtccagaaggaaatttttccccattatgaccagttctggtttggaggtgggcagaacccacagtggcagc

SEQ ID NO: 257251 - DNA, 415 bp, Homo sapiens
gatgcttgcaaaaccattcaaaacactgtgtgaaacatccatgattcttccctccaaactaaagtatctccctgccttcttatgcttctttgttctttgaatctcagaaattgtggcaataatttcttaagcaaacagccgaataattgcacagggacaacctctcatgctgaacatgcaagataacaagcaagaatcagtagagaaaagaaacacaggaacgtcaaccacaaagatgtgtttgccacaaattattctggtgaacttctatgggaggaagatgtgtcagtgaaggcccagaaatgtggctccaccacccatcactgacaaagcccaagcatggaggagccctagcctcagtactgtgtacaggtagggctgagagaagggggcgataggccggactttcctttgg

SEQ ID NO: 257252 - DNA, 342 bp, Homo sapiens
caactcaccccagccaactaatttattttctgtctctatagatttgcaatgcccactttatttttaacatttcccccactgatcatcttgacaactgtatcagtcctatccccctacttcttttactggcctagcacagttcaagctgggaatataaacgagaataagagaaagatcatgattaggtgtcaacagctcttaacccgaggtctatttaatggctttagggtgttcatgacagtactttatactccgtgtaaaatatacatggacatatggtcacttctgggaagaggagtccatgcattaaacaaacagattctcctggggggtatgtgatcc

SEQ ID NO: 257253 - DNA, 358 bp, Homo sapiens
ggacgggatggctccaagctcttgttctcctaacatctggacaggcgctctttgaagtgtatgaatatatttttaaaagattgggcagtaagcttgtcttccccgtgctttctcgaaagcttactgagctcgtggccctgagcgcgggccggcatagatttcctcttccacccgctgcggcttttctgagcacctggaagcatcggggtgtgaagtcaaaccagacgtgggtgaggagagtgtggcttgccttccctgccgggcagaatttcctgaaactgggctaattctttgtagaaatgtgaacgctgaatttattaaaaaataataataaaacacaggaaacaacttacatgta

SEQ ID NO: 257254 - DNA, 779 bp, Homo sapiens
cccagccctagtttgctaatattttacttaggatcttctatactcactactgaggttggccattaatttccccttcttaccctgtccttgtcctgtcttgataccaaagttagaatgagctgaagagcttgtcctctcttttctctggaacaggtatgtaataatagggatacttgtccttgaaagttgttagaagttgcttataagccatctagacatggtgccatggtgggttttgttgtgaccggggttattttgatttggttatgttttggtatgtttttaacagtctttacaattgattgggtgtgagggacaatggaaagatcatcccactcttccccaacagttggtgattctctggtcattttaacagcaagagaggaaacagtaattttaccagcaatatgaatgtgaagaagtagttttctgaaagcagatgatgaaaatggggtggggaacctaatcaggttctgcaggtgcctgcagtaattcagcgtatgagatggatatgagaaattcttagaagaatctaaaatccttattaaacctgaaggttgaattcatctccaatactgagctgctaatatagagcagtagggaatcactgtagattaacccctttagtttcttgctggctgaagaaaggtctaatgactcggaagcctttgaaaaccaaagcatacatccttctggaatttccttttctgctgaaagaaatactagcagtggcatgtgtgtggtccagcctgggtgacagagcaagacactgtctccag

SEQ ID NO: 257255 - DNA, 439 bp, Homo sapiens
cagaagacgtaaacaatccaaggaaaaataagccatcctgatactatagaactaatcagaaatcttttgcacaatccgagttttcaatatctttttctatttttatactacaaagggcctcaaaaactctagttataaaaaaatatagggctgggccaggcatggtgcctgatgcctgcaatcccagcactttgggagaccaagacaggtggatcacctgaggtccggaattcgagaccagcctgaccaacatggcaaaaccccgtctctactaaaaatacaaaaattagctgggtgtggtggtgggcacctgtaatcccaggtactggggaggctgaggcagaagaatcacttgaacccgggaggcggagattgcagtgagccaagattgtgccatcactccagcctggcaacagagcgagactccatgtcaaaaaaa

SEQ ID NO: 257256 - DNA, 529 bp, Homo sapiens
ttcatttaaaaaaagttgtatgaaattaatataaaggcattccaacttatttacttgtttcagatacaatctctttattccatgtctgcacgccctccagctcacaccgtggggcctctaaccttccaccatggtcctcccctggactctctgtgtgtgcagatcctcttctggagcagaactgggttgtcacaggcctggagcgtgtgtttggaaggttctgactttgctgtcttgggaatcagttgccaacaagggtgaccaagctcctcagctagagacaggccatgtccagaggccctgcaggaggacataccccctagagggagaggcaagggtaggagagccagcctcccgcccctagagggagaggcaagggtaggagagccagcctcccgctgacagtgagcaccaaggcctggatgcaggatgcctgcctggagaacatccggcccagcccagcccggctgcccgctgaacccagcctccttgtgaatggtgtgtatagcggaactgtccaggccaacgc

SEQ ID NO: 257257 - DNA, 704 bp, Homo sapiens
aacaaagccaaaattcaaaccagtctgtctccccagcagtggtacttagctctgtctgtgaatcagaatcactgacgaactatataaacaatgatgcctgggtcctagccccagagattctgatgccattggtctcgtatatcccgatttgctaaagctccccagctgtatcagtaatctgttgctgcaaaatgaattaccacagacttaatggattaaaataatggcagatctactatccaacagtttttgtgggctaggaatctgagcacagcctaatagagtcctctgcacaaggctgtgattcaattgtcagccagggctgtggtctcatcagagatttcgtagtgaaacgatctttgtttaagctccctcagggactaagttctccatttccttcatggccatcagcactctttactcctggaagctgcccacagttcccttaagaaggagtcttatacaacacaatgtaatcatagaagtgattcatgtcaacttcaccataaaatgtaacctaactaagggagtgacatctcaatgccttttccatattccactgggcatgactcattaggggtcaccttagagtgtatttgtcgcacaggtgattttaatgcaccatcaagattgagaatcacagctctaaagcattttgctctatttcttttccactagaaatagtgcaaatttgaaattcatag

SEQ ID NO: 257258 - DNA, 597 bp, Homo sapiens
tatctgagtaagagatgagagtaattcctatttatacagattgtttgtcatgtgtgaaataaggctcaaaaatatcttttattccaagtttttgtcttgcttgatacttgtttttataatgtagttatcaacagtctgcggctgccaatccattatggttactacaaaatagttagaatgtaattctggtctcatctatggaacaatcagattaatcttttctctgggtaattgttgagctgtagatggcattgccacatggttcatctgatttggtggttaaagggcctgaattaactgactgccaaacaatttgtctggcatttcaaccattctaatgacagggtgggattaactatggggcaatccacttgattgactgaaaatccagttagaacatgaagaaaattgcattttttggtgatttggtgtcataaagttacacgttactccattcatagtttacacttgtctgaagtggcattcctgcttagctatagttatttctaggagtaactaacagtgaatgttctttcattttgtggtaaatagaaaaaagagtggctatcttttctgttgactcagtgttaaaaattc

SEQ ID NO: 257259 - DNA, 1039 bp, Homo sapiens
agttccacctcttccacgaagccctccttgattgctgggccctggttgaactccttattagtaacacccaggttagtcctacttaattcttacctgcagccaaagtggacttagcatctccttgcatgcctggtaaagtcaagggttttcagccagggcctgtgtataaagcagaagcagcacagagtctggtttgaagcttagtgcttgggttcagacagttgtgggttacaatcccttctacacatgttctctgtggaaaccatttggttctctgtgcttggaactcgcctgcaacgggacaaagccatctcacctagactgttgttatgaagattgaattaggtgattctgagaggcatttatgcgtcctccctgagtaacaatccatgaaaagtgggcgtcattgctgaagctcaaggaagaaatatgaaatttgattatatccttattcacggcattgggtcaccaactcagcactttttatgaaagtagcatctgacctggcaaaggctgtgtcatcttattacctcagaaagacaaatttacggggtcagacgatggatggcttgtagatttctcaatgggctggaaggaaggagagaaaaagagagacaggagagagtacacatttaattctgcttcccctagggtgatatttccttcctccccttccagggttctcaaaaaggcattctaggaagtcctgtaaaatacatgctcataaaaatctcataatttccacaaattgttgagaatttaaaactcggttgggagtttgctgtttcagcctgagacaccggggtcacgtttcagtgcctgcagtcttgagacagtaccaggcatctgggatgaagctgaggaaagaagatgtgggggccctgctggcctgctccttctctcgaaagacgcttaccggctgctggtgtgtcacagggctttaggatttggaaaaacagagggatttaaaagaagatagaatggtcagaatttcgagaactgtgtgctgaagtgccatctttagggtgctcataacacg

SEQ ID NO: 257260 - DNA, 249 bp, Homo sapiens
atgaccctcctcctgcacaaattggagttcctgcagctggaaagaaatcggctcatgccatgttttatgatgcctcgcctgggccaggcggggccagtacagcctgatgtgctcacagctggcctggctgcccccgaaaccacagtgactgtccttgcttgcccgccctggccccgggcctccacgtccaggctggagaaacttggctcccctgcagctttcaaaataaagtggtttttatttcataaa

SEQ ID NO: 257261 - DNA, 753 bp, Homo sapiens
tttctgtatccaaaaagatatttattgtgcttattaaatatgtttggtctgtcttttccagcaactctacttccagtagtggatgctgtgcagcctactgtgtttcggtgggcattggactcttaagataggcagctgctccagtgcacgtgtgtgcattccctgggcttagcagctcctggtcaccctgtctgcactagcaaggctcccagtgagtcaacgaggagggtggccccagagcagagggccccaggcacgaagcacctcactcactctctcctgcatcctgccaccccacaagccactcctgcaggcgggcctgccggtgaaagccctggaggagatcacagtggaagaggcccatttccctggatagcaactgtcccacccaggggggtttcaggaggaggatggagggcacacaacaccggtggcttgtggggccctcacactggctgacacagccaccttgcaatcctgacacctgagcgggaccaggcagcatttgtcacgaggtgtgggaggcaagcaacaagagcagagtgtgaacagccttcttaagtctggctcctggctgccccatcctccattcccagctacagccgcccagggtaacttcagtttctccaagattttctcactgattttggttagtttctgaaatgcacactgccttctcgcctccacagctcacccagggtcgattttggagagggagccagtagcccgtgcagcacaacacatggaggcctg

SEQ ID NO: 257262 - DNA, 1043 bp, Homo sapiens
tgatataattcctgttgctgtagaaagactttctacagtcactaatatatcaagttatgttcactagaaaaaaagtttacttagtttatagaaatgggctgaaaaatcctaattacttatctgtgaggttattttcatgaaggttaatcatccagaaactattagagagcctcggaatatatttcttctaatctgctctacctatcccattcaaaggagggaatctgaagatttaaggacaaagagcagttgaaaactcagagctgtggttaatgggagaatttcaaggatggtgaaaaaaactaacatcattgcatccctgttttttgtattctggactttttagtttagctcttggtaaactacatcagaaattctttatgctaactctaacacacattttggggtattgctaatttaatctttgaatactgtttttgctgtttcatgattatatgttatgtcctaccagctagattgccaactcttgactactgactggaagtttattgtttattcagcaaataatgaattaagtcagtgaagtgagagatttcgtgtgtaaggattgttaacttgaacatttcaccagttacacacagttcagccctacttaaattttaaaaatcattgttggcacttgacattgttatgaggagttttgtattttcaacttgtattttgagagtgtcctcatgtgactgaagtatgtgctactcttcttaattgaataaccccagaatctccagaattgataattggaggaaattctactgttggaaagaagggatggattatacagccctgttttttgaccgttcattttgtccttggagtcactaccacttggcctcaaagtgtgaacatgtaaccctttccttaatactttgctacacagctgagcagaaactgtaaatttggatcctttgtcagtacaacttaaaatggaacaatttcaatggcttagggtaagataagtatgtaaagatacttttgtaatagaagaaaaaacattggatattaaaatcacacagtagtaaatg

SEQ ID NO: 257263 - DNA, 596 bp, Homo sapiens
gaacataaatatggcaaatacaggtgtgagcacagagccagggctatgcagtgccttccagttcctaaagaggaaaaaagctaggtgaacagaagtgaagggggttgagacagagacactcttggctgggtactaatgaaacatttggaggtttctttttttgatatttatattcttactgcttagatgctgagaataaatggcatgtcctgataagggataaagtactggcgtacatcaagaaaagctgctttagctgcaatacagagaacagaatggaggtagcaagcatgtgagcgggaagatccatcaaaggccattacaaccgtgcaggccagaactggagacttccagaagagaaaggattcatgctggatatagatgcctggagttcagaggtgagatctggggcgagtcatccatgaacaggtattatttgaagccaccaggatggattaggccaaccacagactgagtggagcttgaagataaattttaaaggaagcaaccaaatgtatctttagcatctctcttaaaatcataaaaccttaagctttatggacatgtcacaaatcaaataaatcattttcctgaaa

SEQ ID NO: 257264 - DNA, 320 bp, Homo sapiens
tacttggaaaggcactctgctctaaccacagcctgctaatgagtaacattcagtgcagtgttctagaattagccagtcgtcatccaaagctctgagttccatcctgcaaaaagggatgagacacaagaacctccaaatagacagctgtcaacctatctccaaggtctcaagtctagctttgtttctacttggatatttattttgtctctcccctaaaaacctgcctttgccctcaaacaatatggtttggctttgttcacctctgaactgggtcctgataccacagtcttactgtactaataaacttgtcaaaaactgac

SEQ ID NO: 257265 - DNA, 454 bp, Homo sapiens
taggctgggcacatcgattttgaaagcttgctagatttgtgttgtgtaccctccagtaaccaaaattatgtgagatatattactacatgggatggaaaatgtgttcagatttggcctttctaaaataaggaaaataagaaagaaaagtgctatgggagtattttctcctcctcctccttccctctcaaataagcatttctcaccagccaacatccctcttgcatcactgaatcataagatcccagggcagcgctttttctgaggggccaagtgaaacatcacaggtggaaacgtaccaagcaggtgcaaatgttatgacccaaaactgctactgagcagtgggagagagtttctctgttgttccagaaaagtttgagcagctaataatttgcttaatgtttgcaattgtttaggtatctttttatagtaaaaataaatccataaaatgttgcat

SEQ ID NO: 257266 - DNA, 433 bp, Homo sapiens
ttcagtgccaagatacagcttcaaagttaggatagtcgtatttctctgatttcccttttgctgcaagatatgtactgtaatgtggatttagcagctcattgacaggatgtcacctatcatttacccccacatgaaacttggaaacagaagtggttttatatatgtatatatttccatagttctatcctttttttttttttgtcccatccacctctgctgttttctttattgtaattcaattcttggttaggtttcagggattgttctcaagttttcttgttctttgtgctgtgcctcagggcagaatgtattgtcataagcaagataattgcagcattattagtttattcctcaccctaataaatacatatgttcagttagtcaaggaaagaagcatttgtatctgccaatgcttcatgtctttgataaaaaa

SEQ ID NO: 257267 - DNA, 443 bp, Homo sapiens
gaactggaaaggttgagtagcctgaattctaattctgaaatgtaatcccccctgggctagtaattcatcttcttgattttcttatttatgtagtagaaattatagtacttaccacacatgggctattggaaaattaattatctaatataatcttttgaagagaaaagtgacatttaagtacctgagtaatattagtaaatatttttcatttctaagaaaagataaacaggtgatctttacattagcaaaatggttatttgtagttacacaaaagcatatattggtgttaagagctaaaatataggttgtctatgtttgtaaggaaaagttgaagacaaaactgttgaaaggatgtgttatccagatagtaagcgtttatatttttcaggataatctacagagtgttttggttaatgaataaattacagttttatgtgtaagaa

SEQ ID NO: 257268 - DNA, 1030 bp, Homo sapiens
aagatacacaaatagtgaaatataaacccaagtgttaaatatgctctaagaaaagtaaaatgtggccaggcacacaggctcacacctgtaatcccagcaccttgggagactgaagcgggaggatcacttgagctcctgacctcaagtgatccacctgccttggcctcccaaagtgccagaattacaggcatcagccactgtggctggcaccccacctcccattttattttttctttagcagagacgaggtcttgctatgttgctcaggctggtcttaaactcctgagttctcccacctcagcctccaaaagtgctgggattacaggcgtcagctaccatgcctatccacattttgtttttttgttttggtttggtttgggtatgtcactttttgatattaggtgatccaaaataatttatcttggtatgcaagatgttcaaggaacaaacatctacaataaggtaccaaagttttgaattatttatctgtgtatatgtatgtatacccacacagaccattatgaggcattttagaaatcactttctcacatgcattccaatataatttcctgagagagaaaggagttccatgcagggagttatacataaaccacagcctacttttatggccattttgaattacttttgtatttcaaattcactttttaaaacttcacccatggggcgggaggattgcttgagcccaggagttcgggacagcagtgaggtatgatcatgccactgcactccagcatgggcaacaaagcaagacccccatctctaaaaaaatcaataaataaaggaaacttcacccatacccacagaagagaaaattgtgaatgagtgcatcaacatctacagtacacaaaaacagtagtctctgaacattgttagtagggtcctaacagttatgatagccaagtgaaaactctcaaaggaaagtgaaaatattccttatatcaataacatggagggaatctaccaattttatgtttttaacaataaattttatgccttttcaaaaaaaaaa

SEQ ID NO: 257269 - DNA, 1591 bp, Homo sapiens
ggatttctaactgcctcattttaatttagttacttccgaggccctttctccaaatgtagtcactttttgaggtactgggggttaggtcttcaacataagaatttgagggaaataaaactgagcccatagcagggtaataggaaaggctttaccaagttaaagctgggattggaaataccccatttctgtgattaaaaaatgtacctttgacatttctgaaatcagtatatttctgaccttcagggtacagtttaaaaaggcatactgccctggttttaccattagtggttgaaaggatggacagtacagacttctactgggaaagaggtcttagtgttagatgcatcagcttcttgggtcaggggcaagatttttctctaagttgcctatcggaattgaatctgccttgcctgagcctctcctttcagactttcttccctctccccagccatcagtgacctttcagtcttcatcccaggtcctctttcttcctctgcctcagagcctagttaattgcttctattcagtgaaattagagttcaagagtctgggactgggattccttctcagagaatgcaggagtagaaggcaaacacatctgacttcttgcttacgtcatagaacattacaggatgctgtggactgaattgtgtcccccacgaattcgtatgttgaaaccctaactcctagtgtgattgaatttggagtaagaaagtaattaaggttaaatgatgtcatatggcatgtgaaaacacagccagaagctggccatctgcatactaccaggaactgacttgccagcctccaggactgtgagaaaataaactgttgcttaagccatcagtctatggtgttttgttaaagcagtccaagctaactaacacacagaggtacgagtccctctgaaaattgtcagtgttccttcagttctctttgggtcaacttcagtctaagaataggtcttaggccagtcaagctgtacccctgacactgaggatggttccactaattcgccatcccctaattcaggagggggaaggatagatacgtgaacaaaattgagatccttttgagaaggaagaggaagggaatcagtgctgggcgcacatttagcaatgtccagatgcccatatgcgatatgaccatgatatgatcttaggtggcattaattgaatactatttagaaggagggaaatggcctttttctactcccagcagttgagaccaaacttgtagtaggcacaaggagaggcagcatagagggtagaggctaagcatgcagggccctggagattggctgcttgcattttaatactgtctttcacatcctagcattgtgactttgagcaggatacttctgtgtctcctcatctccaaaatggagaataataatagtaacctagctaatgggattactgaagattcaagtaatacaattgaaatgctttaaccagagcctggcacataaatactaaataaaaattggtgtttataattagtctgctctgggaaacattctttcaagaagcatacagactaagtgccacagatttagagaatgtgactgaagagggaaggggacaagccatgt

SEQ ID NO: 257270 - DNA, 1294 bp, Homo sapiens
ggatttctaactgcctcattttaatttagttacttccgaggccctttctccaaatgtagtcactttttgaggtactgggggttaggtcttcaacataagaatttgagggaaataaaactgagcccatagcagggtaataggaaaggctttaccaagttaaagctgggattggaaataccccatttctgtgattaaaaaatgtacctttgacatttctgaaatcagtatatttctgaccttcagggtacagtttaaaaaggcatactgccctggttttaccattagtggttgaaaggatggacagtacagacttctactgggaaagaggtcttagtgttagatgcatcagcttcttgggtcaggggcaagatttttctctaagttgcctatcggaattgaatctgccttgcctgagcctctcctttcagactttcttccctctccccagccatcagtgacctttcagtcttcatcccaggtcctctttcttcctctgcctcagagcctagttaattgcttctattcagtgaaattagagttcaagagtctgggactgggattccttctcagagaatgcaggagtagaaggcaaacacatctgacttcttgcttacgtcatagaacattacaggatgctgtggactgaattgtgtcccccacgaattcgtatgttgaaaccctaactcctagtgtgattgaatttggagtaagaaagtaattaaggttaaatgatgtcatatggcatgtgaaaacacagccagaagctggccatctgcatactaccaggaactgacttgccagcctccaggactgtgagaaaataaactgttgcttaagccatcagtctatggtgttttgttaaagcagtccaagctaactaacacacagaggtacgagtccctctgaaaattgtcagtgttccttcagttctctttgggtcaacttcagtctaagaataggtcttaggccagtcaagctgtacccctgacactgaggatggttccactaattcgccatcccctaattcaggagggggaaggatagatacgtgaacaaaattgagatccttttgagaaggaagaggaagggaatcagtgccacgctctgtttaaagcatttcaattgtattacttaaatcttcagtaatcccattagctagggtactattattattctccattttggagatgaggagacacacaagtttcctgctcaaagtcacaatgctaggatgtgaaagaccgtattaatatgcaagcagccaattcccagggccctgcatgcttaacctcta

SEQ ID NO: 257271 - DNA, 488 bp, Homo sapiens
gtgcacagacttagaagtaatgtaaaacactttgaattttacaacagtgattggtccattactgttggcagcttgggagttgtgagcatttcaacattctgagttgaaattcaacctgagaagcgaggtttctgggtgcaaacaatatatagtgcttgcccagaatacctgtttactcagtggagttgggttgttttctctacagaagacctaagagataaactaggtgtgaactggttttcttgccccagttggttccagaactgcctccagagttatttctaatatgtgaatctttgcctgtaagtgacttcttgttgtccacggtgtaaactccaaactatgtcatggcctacaagtcttctgggatgaaccatatgataggccttcctatatccatcccattcctctccctttgtgtagcagccacatggtttacaaagacaagccctccagcttcaaaggtagctcagattggtctaagccaa

SEQ ID NO: 257272 - DNA, 683 bp, Homo sapiens
agatcttcctgtggagatggggggaaatgtcattaggtgtggccattgggcttcagcctccacgcgcaccgcggttcaaaccgctttgctttgcactggggtattttgagttctgtgcatccccatctgttacatgcacagccaacaaaagaacactgtgcttgggcacacacttttttcccccttttaataattgtttttagagcttttagtcttggggcagattttgaagctgtgtgtgggagacagtcacagatgggacagtacagtttcctcacttaatgcttctgttccagcataaaaatatcagagggacttcagtttttgtttaactcaggatgaatttcctggctggatactatcctagaattttccgtataattaaaacattaaacagtttcatgccagtggaagaaatttgcctctgcgttggcatttcttcattgtgggtggttggaagcctgtttagaggcggggttctggaggtactggttgtcttttttagttgttcagcttgtgtgtggactggtgcccttattgctgaagagggggtggtacctggaaatggaggacaacctcacttcagctgcagggcagagacttggagtgctctcatccctttgggtgtttcccagtgcagtgatattgttttgaaaccgcgtgcggcgtggggatcacttttt

SEQ ID NO: 257273 - DNA, 611 bp, Homo sapiens
agatcttcctgtggagatggggggaaatgtcattaggtgtggccattgggcttcagcctccacgcgcaccgcggttcaaaccgctttgctttgcactggggtattttgagttctgtgcatccccatctgttacatgcacagccaacaaaagaacactgtgcttgggcacacacttttttcccccttttaataattgtttttagagcttttagtcttggggcagattttgaagctgtgtgtgggagacagtcacagatgggacagtacagtttcctcacttaatgcttctgttccagcataaaaatatcagagggacttcagtttttgtttaactcaggatgaatttcctggctggatactatcctagaattttccgtataattaaaacattaaacagtttcatgccagtggaagaaatttgcctctgcgttggcatttcttcattgtgggtggttggaagcctgtttagaggcggggttctggaggtactggttgtcttttttagttgttcagcttgtgtgtggactggtgcccactatgatgacaaacgggtcgcttgtgagcaactagaggccaacgattacgtaatcgacctcctaacacgagggaag

SEQ ID NO: 257274 - DNA, 796 bp, Homo sapiens
ttccattcttgtcttgcattacctttccaaaattcttctcaaaatatcaataacactctagttacattaataaagtagtgatagtagtatttttaagtggataattgccaggcactctcctaagtgctacatatgcattatctaatttggtgttcacagcaacattgctgaactatgtcccttactttaagattagccctccatctaaatggtctcaccacattttaaagattgcttggattaattgaattaccgaatatagtggaaaaggtcttaggcattagtgttagacgacacctagctttgaagccaaggtcaaccccttttttctttcattcaataaatgtttattgagcatctactattttccaactattgttctgagcactaggaatggcatcttttatctgcattttgaagggaagataatgtctgccttgaaggttgctaaagtctaagaaaaaggcacttaaaaaaaaaaggtttgcttccttgccctcctaactgatcttccttctctagtttttcattcctctgttgcaatctacagagtactcatagagctttcttttttctcttcaaactcttgctcaaaagccttagatggcttttctcatctgataggaaagtttcaagttcataggatgtcatagaggaacttttatagcctgctatttaaaaccatatatgggccaggcacggtggctcacgcctgtaatcccagcactttgggaggccacggagggtggatcacctgaggtcaggagttcaagacgagcctggccagcacggtaaa

SEQ ID NO: 257275 - DNA, 316 bp, Homo sapiens
acacacagaaccaacagctctttctgagatttgcttgatgaataacatatcctcctggcttccctttctaagacttatctatatttttaaacaagctaaagtgttatcagctgaggcagaatgtaaaatgaaattttgctgcacatacccagaaggacacaggcattgtaggaatacagttttactgtgggagagatttttacagcagatcaataacagaatactttatatggacacaacagaggattttagataacttttgactctagtttgttattcctacaattataccaacatatactttgtccttttacca

SEQ ID NO: 257276 - DNA, 482 bp, Homo sapiens
agatgacactgataccccaaaagtcattgtggcaccctgttagaaagggggcatgtgcgggccaggtagtaaatagagttctgaccaagatctactagtgagttcgcagtttctgcagacctaattggaattcatttactggcttgcaaatgtgtaactcggatatacatatagggacatatttgtggaccacccacactggtcagttgcctgtggtctaagatccatcataattggaaggggccagtgaagatgatgacaacaacgacgatgatgactacttcttctttcttcttcttcttcttcttcttcttcttcctcttcctcttcctcttcttccttcttcttcttcttcttcttcttcttcttcttcttcttcttcttcttctttcttcttctatcccttcaagcatttattctttgagttgcaaacaatacaattgcattccttaagttattttaaaatatacggttaagttata

SEQ ID NO: 257277 - DNA, 444 bp, Homo sapiens
caaaattcatgtgttagcaacttaagcctcaatcagcagaattgaagtgtgagacctttaagaggtgatgaggtcaggcgggctttgccctcctgaatggattgatgctgttatcttgggagggggttcctggtaaaaggatgagttcggcttccccttctctcacactctcttgcccctccaccttccgccatgggatgaggcagcaagaaggccctcgccagatgtgcccctcgatctttgacttctcagcctccagaactgtgagccaaataaaaagtttctgcttattgtaaattactataaaaaatatattttttaaaaaggccacacatggtggctcatgcctgtaatcccagcacttttggaggctgaggcggaaggattccttgagcccaggagttcaagactaacctgggcaacatagtgagaccttgtctctac

SEQ ID NO: 257278 - DNA, 428 bp, Homo sapiens
gagcgtcctcatttggaaggagagttagcatcatgctgtggctaaagaaactcagtttttatgcctaccaataatgtgaaaatcacctcactcctgtttggctgattgggttgaatttctcttaataccatactgaatgtaacttgacgagttagtagggaactggtaacaacttatttcacagagtatttctagttattgatgtagtttgggtgtttgtcccctccaaatctcatgtgaaaatttcatccccagtgtttgaggtggggcctactcggaggtgtttgggtcatggagacgaatccctcatgagtgacttggtgccatctcatggtaaagagttcaatgtgagatctggttgtgtaaaagagcctggcatctctctcttgctcttctttgtcttgcttcctctctcaccatgtgacact

SEQ ID NO: 257279 - DNA, 855 bp, Homo sapiens
ttgacaaggtcgggtcttaagaatagcctgtcgggggtacccgaagtggggcgcggttgccaaggccgggccggaagttccaacggtctttatattctcccgtgctagggccagcttgcgcattcttacctgtcggggtgcggcgagtgtctcacctctctgcacttccaaggactcttgtcatctgccttaggcgggaaatgctgttgctggattgcaaccccgaggtggatggtctgaagcatttgctggagacaggggcctcggtcaacgcacccccggatccctgcaagcagtcgcctgtccacttagccgcaggaagcggccttgcttgctttcttctctggcagctgcaaacgggcgctgacctcaaccagcaggatgttttaggagaagctccactacacaaggcagcaaaagttggaagcctggagtgcctaagcctgcttgtagccagtgatgcccaaattgatttatgtaataagaacgggcaaacagctgaagatctcgcttggtcatgtggatttccagactgtgccaagtttcttacaacaattaaatgtatgcagacaataaaagcaagtgaacaccctgacaggaatgattgtgttgccgtgctcagacagaaacggagtctcggaagtgtagaaaataccagtgggaaaaggaagtgctgagacgcggtctggcccatgctggtcttgaattcctggatgcaagctatcctcctgcctcagcctcccgaagtgctaggattacaggtgtgagccactatgcccagcttctacctccatttcttacacactagtctcaccttgccttctgtcatcacaggacaggtcttgttcttcaaag

SEQ ID NO: 257280 - DNA, 352 bp, Homo sapiens
tcttttgagacagtgtctcacttttgtaacccaggctggagagcagtggatctcttggctcactgcagcctcctgggctcaagcaatcctcccacctcagtctcctgaatagctggcactataggctcacactaccatgccagctaatttgtgtgtttttttttttttggtagagacgcggtctggcccatgctggtcttgaattcctggatgcaagctatcctcctgcctcagcctcccgaagtgctaggattacaggtgtgagccactatgcccagcttctacctccatttcttacacactagtctcaccttgccttctgtcatcacaggacaggtcttgttcttcaaag

SEQ ID NO: 257281 - DNA, 1013 bp, Homo sapiens
ttgacaaggtcgggtcttaagaatagcctgtcgggggtacccgaagtggggcgcggttgccaaggccgggccggaagttccaacggtctttatattctcccgtgctagggccagcttgcgcattcttacctgtcggggtgcggcgagtgtctcacctctctgcacttccaaggactcttgtcatctgccttaggcgggaaatgctgttgctggattgcaaccccgaggtggatggtctgaagcatttgctggagacaggggcctcggtcaacgcacccccggatccctgcaagcagtcgcctgtccacttagccgcaggaagcggccttgcttgctttcttctctggcagctgcaaacgggcgctgacctcaaccagcaggatgttttaggagaagctccactacacaaggcagcaaaagttggaagcctggagtgcctaagcctgcttgtagccagtgatgcccaaattgatttatgtaataagaacgggcaaacagctgaagatctcgcttggtcatgtggatttccagactgtgccaagtttcttacaacaattaaatgtatgcagacaataaaagcaagtgaacaccctgacaggaatgattgtgttgccgtgctcagacagaaacggagtctcggaagtgtagaaaataccagtgggaaaaggaagtgctgatgtcacgtgggttatgaagaagtctgaagaacgccttcatttcatgcaaatctataagctcctgcttttggctttaccatatgttgtgtctaatctccttctgagaaggacgaaaaactttcttccaagtgaagatccatttaagaacacatgtatttacatgcctataatatgctggttgtgtatgctttgtcttttaagttattaaaggaacgtctaaaaaatacattctccgtgcagtatttacaacctttgaaaaaggtcataatttaaatggtcaaactagaaccaggatttaatgtgaaaaattaaactgattctttattcacaaattta

SEQ ID NO: 257282 - DNA, 1553 bp, Homo sapiens
ttgacaaggtcgggtcttaagaatagcctgtcgggggtacccgaagtggggcgcggttgccaaggccgggccggaagttccaacggtctttatattctcccgtgctagggccagcttgcgcattcttacctgtcggggtgcggcgagtgtctcacctctctgcacttccaaggactcttgtcatctgccttaggcgggaaatgctgttgctggattgcaaccccgaggtggatggtctgaagcatttgctggagacaggggcctcggtcaacgcacccccggatccctgcaagcagtcgcctgtccacttagccgcaggaagcggccttgcttgctttcttctctggcagctgcaaacgggcgctgacctcaaccagcaggatgttttaggagaagctccactacacaaggcagcaaaagttggaagcctggagtgcctaagcctgcttgtagccagtgatgcccaaattgagtgagtatgaaaacagtggcttcacattttatgttttcttggattaaactaatcagactcctgaagcttagttacatgtgcttttaaaaataatgcttgcgtaattgataatttagtgttaatcatttaaatgttaacttaggttgttggtgctatcgaataatactcagttcgagtaagtaaaaagtcagatcctgagcaatcagaggtgcaattttgttcattatgactgtattctacttcagtttcggttcaggaaaacccattctatagttcccattgactacctttgggtactcatacactgtattaaacatcagataattctaacattcattcagaactggaatgcccgctctatgctggattctgttagttgctgaggatacaatagtgaccaaaaatgcaatttccttatgcatcctttacctcttctgttctgcaaccaacatttgtatgagcccaaaattcccttgtaagatataaaaaaaagacttaagttcaatgtttcatttcactccgtttttatcctgttttcagtttatgtaataagaacgggcaaacagctgaagatctcgcttggtcatgtggatttccagactgtgccaagtttcttacaacaattaaatgtatgcagacaataaaagcaagtgaacaccctgacaggaatgattgtgttgccgtgctcagacagaaacggagtctcggaagtgtagaaaataccagtgggaaaaggaagtgctgatgtcacgtgggttatgaagaagtctgaagaacgccttcatttcatgcaaatctataagctcctgcttttggctttaccatatgttgtgtctaatctccttctgagaaggacgaaaaactttcttccaagtgaagatccatttaagaacacatgtatttacatgcctataatatgctggttgtgtatgctttgtcttttaagttattaaaggaacgtctaaaaaatacattctccgtgcagtatttacaacctttgaaaaaggtcataatttaaatggtcaaactagaaccaggatttaatgtgaaaaattaaactgattctttattcacaaattta

SEQ ID NO: 257283 - DNA, 1396 bp, Homo sapiens
ttgacaaggtcgggtcttaagaatagcctgtcgggggtacccgaagtggggcgcggttgccaaggccgggccggaagttccaacggtctttatattctcccgtgctagggccagcttgcgcattcttacctgtcggggtgcggcgagtgtctcacctctctgcacttccaaggactcttgtcatctgccttaggcgggaaatgctgttgctggattgcaaccccgaggtggatggtctgaagcatttgctggagacaggggcctcggtcaacgcacccccggatccctgcaagcagtcgcctgtccacttagccgcaggaagcggccttgcttgctttcttctctggcagctgcaaacgggcgctgacctcaaccagcaggatgttttaggagaagctccactacacaaggcagcaaaagttggaagcctggagtgcctaagcctgcttgtagccagtgatgcccaaattgagtgagtatgaaaacagtggcttcacattttatgttttcttggattaaactaatcagactcctgaagcttagttacatgtgcttttaaaaataatgcttgcgtaattgataatttagtgttaatcatttaaatgttaacttaggttgttggtgctatcgaataatactcagttcgagtaagtaaaaagtcagatcctgagcaatcagaggtgcaattttgttcattatgactgtattctacttcagtttcggttcaggaaaacccattctatagttcccattgactacctttgggtactcatacactgtattaaacatcagataattctaacattcattcagaactggaatgcccgctctatgctggattctgttagttgctgaggatacaatagtgaccaaaaatgcaatttccttatgcatcctttacctcttctgttctgcaaccaacatttgtatgagcccaaaattcccttgtaagatataaaaaaaagacttaagttcaatgtttcatttcactccgtttttatcctgttttcagtttatgtaataagaacgggcaaacagctgaagatctcgcttggtcatgtggatttccagactgtgccaagtttcttacaacaattaaatgtatgcagacaataaaagcaagtgaacaccctgacaggaatgattgtgttgccgtgctcagacagaaacggagtctcggaagtgtagaaaataccagtgggaaaaggaagtgctggtaagtaactcagagctgctgcttttttcctcccgcagtgatctcttgtttgcatagcatttattattccatttaatactgacactcgtatttctagtagtattgtttcattctcattaacattttagtactggttatacttaccagagtctagagaccaaaaatgggactgcatggtgg

SEQ ID NO: 257284 - DNA, 412 bp, Homo sapiens
cattgcattgaacataaagcttactaacaaagtaatcttagtgaagggagagatgtgaaggattactttgttgacatcattaaaggaaagtgaagacatatcaagcttagatttcaatgtcatctttcatataagaatattagaacagcttcctattataattatctagtttatcattcatatattgcttctgcagctatttcttcatgaattattattctgttttacacgttagcttgtttctgtggaaaagacaatttttttttgtttaaaagtttacttcttaaacttcattgtaagaaaaacaaatttaagcccccccttgtttttgccattttattgttacacagaaaaatcccatttttcttaatcagtaggagcaaacactgaaagatgtttactatcttacata

SEQ ID NO: 257285 - DNA, 734 bp, Homo sapiens
gctgccccttccctatccccattcctttccatattcaatatttctctcctatatctgattctttaccccgtatcagggataaagggcttttcatttgactattttggaccctcatgctttctctctatctgtccccccggagctgctgtaagagttaaattcagcataaatggaagttctgactcctctggctacatgaggggaggcacctcctgcttcccagaggcttggctctctctgaggagggcagcaagtaaggagtgaggctgttgatcccagaaatcccagggttgatggtggaccctgtgggacactataatcagctggcagatcctggaccacaggttggagacccagcttcagatcagatcagccggtccaaggtgagaaaaatggagttcccgacctagaaagccaagttctctttgcgggtgtgcagtttgcagatgacagctcagcctggctgagtgctgtccccatgacgcccctcctgtcctttccaaagccttccttcctctgcaaggaaggctctgggaagcactcagccaggctgagctgccgtctgcctgcacacccgcaatggggacttgtctcaattgcaggtaacttcataggccccacgtcgcttcgagcgtccgcaccgatgatgggatttttcattccgtggcgccccagtggacatgctaccatgggatcccaattccattgggactaactcaattgggctggaggct

SEQ ID NO: 257286 - DNA, 883 bp, Homo sapiens
ccacatgctgatccccactacaatcagtgacctgaactcagagtccgagtaggacacgcaggtggacctggtgactgagatgacatcctctctaaagatttggggcatactcttggccctgctttgcatcctttgcaggctgtgtgtatacagtaacaacatttactggagagaattcataaaacttcattacttaagtccaagtcgagaattcaaagagtacaaatgtgatgtcctcatgagagaaaaagaggctctgaaaggcaagagctttcatatgttcatctatagcttatggttcaaaattcagcgtgcatgcatcaatgagaaggggagcgaccgatatagaaatgcatatgtatgggccccaggtgccctcaaagtactcgagtgtcactgggagaagtacaacaataggtacacagagagcagaagcttcagctacattgaattccattgtggcgtagatggatatgttgataacatagaagacctgaggattatagaacctatcagcaactagaaagtctatgcacatcctcagatattggtagagtattcagtgcttccaaagtggtgggccctgcctccatcaatagcccctgccactccccgcttacatttatgtgtcagtgttttccaactacttagagtttatgtacctcgtgatttcttgataccaaatctttgtgtggtttctgtatctgtaatacaattttgtcctaatttgcctaatttacacccacattttttccaagattcagctcatatggcatctgtcctcgactaacctaagactttcctgatattgactctctttatacctacccaagctgaatgaccctccttttcttaaataaaatatattattctaacgtaaaga

SEQ ID NO: 257287 - DNA, 474 bp, Homo sapiens
agtttgttcatctgtgaaatggagataaaaatagaacctccactgggaagtcttttgtaaaggataaaagacagtgcatgaaaagctcataggagacacgatgcatttgacttacgaaaaatgtgggcaccttcattacatttaaaggacaacatatggccgggcaaggtggctcacacctgtaatcccagcactttggaaggccaaggcagctggatcactggaggtcaggagttggagacaagcctggccaacgtggagaaccccgtctctactaaaaatacaaaaattagctgggcgtggtgatgggtgcctgtaatcacagctacttgggaggctgaggcaggagaaccgcttgaaccagggaggcagaggtcgcagtgagccaagatcacgccactgcactccatcctggtgacagagcgagactctgtctcaaagaaataaaaataaaaataaataaataaataaata

SEQ ID NO: 257288 - DNA, 384 bp, Homo sapiens
tctgtcattacatgaggctttttgcatgactgaaatacctgtaattactgtgtcatttttgtcatagttgacttaaaggtgtaactataataatcacgaactaaattcttggtgagcagctgtgtaaggccattttaacagctggggtaacccagctcagcctgtaagagttaagcttaatcatgagacaggttatgttaagtcattgaagacttcatactgggcatttctgaaatacttagaaaattcagtgggatagttggatttttgttttatcttaagtactttttaaaatgcttaatgaaaggatgaggaaaagtattttaacaactaaagttcttaggcacaaataatagaaataaaatccaaagtttactcattaaa

SEQ ID NO: 257289 - DNA, 327 bp, Homo sapiens
atgctgtatgccaccttttgaaaaaaggacaaataaataatatatacttgtattataaaaagaaacactggacggattcacagtaaacatgtttacctgtaaaagctagaaggtcaggggaaaactaggattgagaacaggataagatattcacaaatgtgcttttttgtacagctttaagttttgaatcgcatgactatgtgacctagtcaaactatttcagagtaaaaataaacagccagtagagtctctatcgccctaggagtggaggctgatcacagggtaatctaaggatgagatcataaaataaaacaaaccctccaagca

SEQ ID NO: 257290 - DNA, 457 bp, Homo sapiens
gaaataacttaataataatacaattcaataggaaatggcaatttaggagcaagcataagaaaaggggttgcaacaaaaaaagacaaacatctttgtttcaaccctttgagccatagatttctttctttcttttttaatttgtggaatagtagaattttttactttttatattataaaataattaaatggtagaacatttggtaatagatattcgtaggaaatctggaaaaacagataagagtaagaaaaaaagtgtgtaatctcttctaccatatatatattatatctccatggtttgctcttgctcccatttctagttgttgggcactcttctaatctgcagtgaaacttatggtggattaaatttgtgatgctctttggagtgtcaaaggacttccactaaatccctccttattcttattctttaccctctgtttctttgatcacccatagtgtg

SEQ ID NO: 257291 - DNA, 458 bp, Homo sapiens
ataagggacacaatacagtgatatactgccaagcaatgcaaagaaacagactactgatatatacccacagcataggtaaatctcaaaaacatgctgagtaagagaagctgtatgcaaaagagtacatactctatgttcccatttaggtgatactctagaatagtcaaaactaatctatgatggaaagaatatcagaccagcggttgcctctagagataattagggttgagattggctgggaagggcataaaaaaacccggagtaatgattctgttctctatcttaatagggatttgcgttccatagttgtatgcatttagcaaaagcttaattaatgtagacttaagatttgcacattttacttggtatggtggtacatgcctgtaatcccagctacttgggaggctgaggtaggatgattgcttgagtgctgggcaacatggcgaaatgcagtctta

SEQ ID NO: 257292 - DNA, 505 bp, Homo sapiens
atcttcacaaatgtaatttgtaatggctgcagaaaatttcagctctgaatgtactgcatcctaatcagtttcctattgttgagaattagtataatatccaggtgttttgtttttgttttgctattaataagtaaagctgagatgaatacttctgtatcaatcttgatccttattttagataatttccatttcattcctcccatttcttgcgtgcttcctatggtcaggtgctgtgctgtgtgctgagtatggaggaggtaggctgagatagacgtgacctttgctcttgcaaagctgatatcctaagggttggacagatgctaaatgtgcaaagaaacccaatacttgcagatggtgctgggtactaccaaggaaagaaatagggtatatgacagagtacctggaaagggcactggccaacttttatgggcagggaggtcaaagcaaacctgtctggagatgagacaggccaggaaaatcagggcaggggccagagtagggcaaa

SEQ ID NO: 257293 - DNA, 352 bp, Homo sapiens
atccccttaaggaagctcaaatgggaatttagagatgaaggatgaaatgaggcatcagactataatgggctatgctcagactttgattgagatcaatctgtggttataccccaattttaccacttgctagctgtctctccctggccaattaattgagcttctttgagcctcggtttcttcatgaataaaatgggattaataagacctaataggattaccatgagtagtaaagatgataaatgcacatgtacgtaatgtctaggaaatactcaaaatggaaatggaagctaatgttattaattaccattagcaacaatgcatacatgtgattatagtttggctctgtgtcccc

SEQ ID NO: 257294 - DNA, 280 bp, Homo sapiens
cttttcagtgaggcagctcaggctctggctgaaggtgggcgcaggacactacctgaagcttcaccccaagagatgagggccagctccactcttcccagtcaccgcctgtgggggagggaggctggacagggcatgaaggcagagcctggtggtctgcccctcccatctaggggtggcgcacagaaagggagactccaggccacagctcacttacaccccagaataaccttgccttgagggtgggatggcttgtctgccccaggcctgttggacatttagc

SEQ ID NO: 257295 - DNA, 451 bp, Homo sapiens
attcttatcccagttctttccttgacattcctcttccagtttgaggaaaacctctagacctctttatgtcatgcttcaaacctcagtaaagtagaacaccatctttactaattaattaatgattgcaaaaggcttggaaatttccaaaggctgaataattgccaagtgaagactattcagctttccactcgctttcatttatttttaattttttttagtcactgatggaaaacttaccctcatgtctgaaaacaattatactttattacattgagtgcttctggggagtttggcatttaacccattaaggaaaaagtttaaaagatgaaataaataaatctcccttatatttgagatgagctgctttagttttcctatatcaggatagtataaaaagaggaatatgatatagtaaaaaagaggagagacaggatggggaaaaggagaaagg

SEQ ID NO: 257296 - DNA, 352 bp, Homo sapiens
actcagctggcttaatgaaagacacgggtgtgggactttgtcagcagatgcaagcctggagccaccacacagcagagaggagtaggaaaccagagtatggaagccccttcctctcctgcaccaaatcactcacagcaccatgatgggcagcagtagaaggattagaaaccacaccgccctgataggagttgaacttttcttcaactggctcttaagctgacatgagattgcgctagttggaagataccaagatactcttaaaagagaagatgaagttctcatgtttcaacccctattactattgactgtcaacttcccaaaagaccccagaaaaacatgttactggaacaaa

SEQ ID NO: 257297 - DNA, 244 bp, Homo sapiens
aagagaaggtctcttttgtccgaggcaagcactcttgctgcacaatcatagctcattgcagcctcagaacaagtttggacttggttacaccaatttgcttctttaatctatcaatttacctttaactgccggcacatcaacgtagtgaaatatacctcatgtatttgcattgccattgtctcttctgtggagaggagggagcaggcagagatggttggtcatcaaaggggacttaagttttgcc

SEQ ID NO: 257298 - DNA, 394 bp, Homo sapiens
  misc_feature (348)..(348): n is a, c, g, or t
cagaatttagatgggcagaagcattttaggagattttcagattgagaaatggaggcatcgaggtcaaatcttttacctaaaccactgagcagcagagacagcttcctatcccatgtttcagtgctggagcagacccgtgtgtgtttgggagcaggggtagctggagctcttggaggcctcgcagagagatggccttgcccatgatgaagtcctctggtgactctgcaggactggcttcggtcttcaaattggatatttccactggcacataactaagcctcagtcaatggaactatacatccataagtctcagaaagcagaaggatggcttcctaaatgatttttccnttatgctatatgtgccaatagatatcactaatacaatcagtacaaa

SEQ ID NO: 257299 - DNA, 268 bp, Homo sapiens
attaagacagttaaactctcctgggttcctaggtgggagagaagtttaactgtctacaagtataaggggagaactggaaggcaaaagagggtagccttttggggcaaggtgtttctctttagagagactgtaattctcttgatccccacagggtggaggtaaacttggctggtttcctagttcagtgcatactaaacctctgaacttgcttgtgtgccactgaagagagggaagacacattgaggagaaatgcggagctgatacagac

SEQ ID NO: 257300 - DNA, 457 bp, Homo sapiens
tatacctgcaaacaacaacaatgacaaaaacataaaattctgacctcatgaagcttttatcctagtaatggaaatagacaataggccactctctcaacaccttctctgttgtctctgaagaatggaccttctactcttggtgctgtgtcccagggaagcaatggacatgaaatcctcctatgtaggctgagaacttatcccctagaaattatttccccagaaaagcaaatatacttttgacggagctctttaacactactatcattcagtaacattttcaatgaaaccatcttttgttaactctctggggtactgacaccatttaattcactgagaacagataataaacagaacatttaattcactgggagaaaataaacagaaagcctaattccacttggctgaatctgcctaagtccaacttttgcatataataaatgtttaaaataacgaacta

SEQ ID NO: 257301 - DNA, 451 bp, Homo sapiens
agcatatctttccttagttcagcctctgcatgagaacccagctttgcctgacaccttgattgcagccttgataagaccgccactctctcaacaccttctctgttgtctctgaagaatggaccttctactcttggtgctgtgtcccagggaagcaatggacatgaaatcctcctatgtaggctgagaacttatcccctagaaattatttccccagaaaagcaaatatacttttgacggagctctttaacactactatcattcagtaacattttcaatgaaaccatcttttgttaactctctggggtactgacaccatttaattcactgagaacagataataaacagaacatttaattcactgggagaaaataaacagaaagcctaattccacttggctgaatctgcctaagtccaacttttgcatataataaatgtttaaaataacgaacta

SEQ ID NO: 257302 - DNA, 494 bp, Homo sapiens
gaagggacccccccacaaaaaagtttataatgtattttcaggcagtcactgtacttttaaaaactgttgtatctgttaagctcatttggaaaaacgaactcatgatgtttgcttttaaaaatctgaatgaagcgtgtttcaacatatttgatagccatgcttttcttttatctacagaaatttcaatttatttaaaagcctggcgtttaatgcactacatgaccgcatgaattttagaggagccctcttgtatttctctgtaatcgtgtctaatgaaaacctgggattttccattattttttaaaaaagtgaaaatataatgcatcttcattaggaaaattgactgctgtgctcacgacagttcttaattgaaaaggcaacctattttaatggtgtggttgagaagaagattacatactttatccaaacacaaagacaattaataatgagaagcaggctgctgccattaactctaatgcagttgcatcaacgtc

SEQ ID NO: 257303 - DNA, 410 bp, Homo sapiens
  misc_feature (18)..(18): n is a, c, g, or t
  misc_feature (218)..(218): n is a, c, g, or t
  misc_feature (239)..(239): n is a, c, g, or t
  misc_feature (296)..(296): n is a, c, g, or t
  misc_feature (385)..(385): n is a, c, g, or t
gggagcgcctccgcgggngcccagccggtagcgagtggggggcaggcgcgcggcccaccctgcagcaagacgccggctccctcgtttccaggagctttgcagatagggggagggaaatccgcctcgattctccaggagaaaccccctctctcccccacttcgccaacactacccccgccaccaacaacaataaccgccgccgctgctcgtcctgctgncgccgccgccgccgcgcctgnccgccctgccgccgccgccgccgccgccgccgctgcccgggcaaaaccatggaaagngagacccccgcacctgtgcagctgagctcaagggcttacagaatactgggaagtctggtctgaaacgaaagcgccgagaccccccaagnaagagaactggcgaagcaaaggatt

SEQ ID NO: 257304 - DNA, 332 bp, Homo sapiens
taccgaatcagatgtttcattgtgacaagatccccaggtgattcatgtgcaggttaaagtttgagaagcaccaaagtaaaacatgaaactaaccatgtcttctcttatttaaaatgcatcaaagaccccccaccctaccccgcattgctttcatgatagagctcaagcttttgaaggtgatccacagtccacatgaccgggccgtgcctccttccctgccactctgtttatgggccccagaagcaccgctcataccaggccgctttttgcctccatgtcttcactcctctctcctctctcctctcttcctgaaactcctcttcctcactctt

SEQ ID NO: 257305 - DNA, 398 bp, Homo sapiens
gcttcaaagtcatttattttttcctgtattctctgcttccctgtagcatactctaaatggctttcccctcttatttctattcccaccagttcttttttcacactgttgtcagaccagctctccaaacatgtctttcttcatctgccgttctccagcagaaggcatccaattgacttccatatccagtaagaattctcttcccagcttatggagggccttgatttactttttgtatctaggcatttactttcctgaagttccctagcatacttcccctgctgcaagcatcataagtttattagccacatggtcatgcctcatctggtccccacctccatacatttgcactactttttctcttcactaggatattattccctgtatctttctattcatcc

SEQ ID NO: 257306 - DNA, 259 bp, Homo sapiens
ttcagccaccagtagccaaatcccttcccagttctttgctgctctcctggaacccacccaaaaaggcaaatggtattataactcagtactgtttatacatggatgggaggctgatctattcaggcagtgaggagaactacatagtcacagatcatgagtactttgagggcaggaactttatctttcatctttcatcctgaagacatggatcagcatatgtgtatagtaggagaacaataaatagttttcagaatgaagg

SEQ ID NO: 257307 - DNA, 491 bp, Homo sapiens
tacatgtgcatgctgtacatctaagccaagacacataaaaagaatcagtaggatgggtgcttagcttactcctctcactctctcttagttggttaagaaattaagttggtcctctgctcttagctggtcaagatttgtgtcaactggaaaaatgggaatctgcccactctgctgcaaaggtactgtgctttctaagatgggattttctttctgataacacagaacccacacatttcctctcccatccccagccttaggctagtctctcttacatctctctcctttctgatttgaaaggtattggcctctttttcttacctctctaaaattgttagcctgatcctagaatggatttagactttcacaggggatatagattcattgtttctgggtagattttgttttcagtcctgtagtacaaaccactcccaggacaaaagagcagagtttcttatttatcttcttaggaaggagggaaattacaggggaaa

SEQ ID NO: 257308 - DNA, 457 bp, Homo sapiens
acaacctttaaatcactgatatttgggggttgtttcagaaattagcaatagttggatacttccttaaaataaaagatacctattttagtctcaagcatcatgcataatggggaaatacaaagtattccatcaaagttagaagcaggggctgggtgtggtggctcatgcctgtaatcccagcactttgggaggccatggtgggtggatcacctgaggtcaggacttcgagaccagcctggccaacatggtgaaaccctgtctctactaaaaatgcaaaaattagccgagcatggtggcaggcgcctgtaatctcagctacttgggaggctgaggcaggagaattgcttgaacccaggaggcagaggttgcaatgagctgaaatcatgccactgcactccagcctgggtgagagtgagacaccatctcaaacaaaacaaaacaaaaacaaaaacaaaac

SEQ ID NO: 257309 - DNA, 706 bp, Homo sapiens
gggcgctcccactcctggagtacaggtcgtgcaaaaaagctcccgctacgtggagattgagcaagggcttggcaagcccaacggtgcgctcgaatcgcggtgcaagagcgtccccaccattctttacggccggaggtggaacagcagcagggcgagctgtctggagcccgaggcagccttagcttggtcagccaggcgctgtccagacctggcccaggctgctgccccacccaggcctcttgcccagcccacttcagtcggccttccaagactcggatcccgaaagctgtgccccctccagcaccaggcaaacaagctatatcttggtggagcagattccaccttcacagagccagagtgcaacagaatgccagaacagaagggtctccagagaccttacccgttatatagataacataacagaggctacgggttcaaggaagtgccttgtccacaggcaaccctgggaactcctgattattatctcaccactgttcccatccagcttcagtcctgagcccctgtgaccatccaccttgcctttctagaccaacaaagagagtgggtctttgccccagggactcagaccctcaagagccagagacccacgcctacggttccctaggatgcctacacctccagctggcctctgattccaccactccaggaagaagtgaggcacttggatatgcacacccaggttatg

SEQ ID NO: 257310 - DNA, 434 bp, Homo sapiens
tcaggatgtccttctgcctcatgcactgtggtcccacttacactggaaggaaggaggcagagggcactcaacggccaccactggaagctgtgagcagcatggcctcagcatctccatctgtaaaatgggttctggactagaggagagttcttgatatgacctaggagatagtgttccaaatgtatctgactctcgcaaggctaaatgcatggtagctcaaaataagactcatacaggatcggaagcaattaaagtgtaattttaacgaaagcaccaacaagcaaaagtgtgtcaagaaaaaatacagatgtatactaactctataatatagacaattatagtatatctggcccttgaccactttgcacctagtaaatctttcccctcccaccccatggcttagcacatttacacaaacacaccaaaaaaaaaaa

SEQ ID NO: 257311 - DNA, 339 bp, Homo sapiens
tctttttctcatctctttgcatagctgggtcatcctcatcctttaggtctcaactgaaaggtcaccttctcactgctactcccagctactcattctctttcccatgtttatctttgtcatagtccttcaaacaattggtaattaatttgcttattttaaaaaacttgtttgttagatgtgtttatcctgtttcctcctcccaactatgatctaagctctctgagaaggggcctcacttaccttcatgttcatcactgtagtgccacaatctagcaaattgcctggcatatggaggtgctcagcaaatacctgttaaataaatgaatgaatttttttgta

SEQ ID NO: 257312 - DNA, 261 bp, Homo sapiens
taaggcagatcctgtcaggctcattttaaagaagaaaacaatgttacacacagagagtaggtagctgtaccaacactgcacagataatattaggagggctcacagtctctttccaattggtgtaccatacagcaatgtgaatgagtgaaaaacaaactgcttctatgttttaattttttagcagtattacaatttgcaaagaccttgggtgaatatgatttgtaaaattaccgatttttgctgtgagaaatgcttgtctgt

SEQ ID NO: 257313 - DNA, 1226 bp, Homo sapiens
tcgtaagttaaagtcacaaggaaacaaggagagaagagagaagcaggtgcaggagaaggggctgaagacccatatagcgctagagagggatggatgacctctgttcccagtatggctgaatgcttaagagccagtctttcaagctgagcagatctgagtttgatttcccacctcttgtgctaactagctcagtgaccttgaacaagccacccaacttctctaagattgttctgttcatagacattaaagtatttatttctcggagttgttgtgagctttaaagagatgtgcgtgaataccaaagaagatattcacaacacaaaaccaccagagaactggtctccagacttttttaaaaaaacaaaagtctcttacaaatcagtaagaaaaaggcaggcagcccagtagataaacaggcaaaatacttgaacagacacttaacaaaagaggatagtaaaatggtcaaaaaaaatgaaaagatgatcaacatcattaataaagagaaaccagtgagatcatagcaacaatgtggacgaatcctatgaacacaacgttgagctaaagaagcaagatagagatgaatgcataaagtgattcaatgtatttaaagtttaaaagaaccaggcattaaaactccaattaaatattttatactctcatcagagaggcatatgtgaaaaatcggatgataccaactgtcggtgaggatacagtacaacaggaaatctgtatgctgctgatggaatgtaggttagtataaccattttggaaaacaccttggcattattgaataaaactaaaaacatgcatggtacacaacccagtaattttgttcttgggtgtatgtatataagaggaacttttcatatataccacgtatacatatacatatatgtgtatgtatgtgtatatacatatacacacatacaagcatgtccataattttattgctatcatggcctcagaaacagtgcaaatacccatcaactgtagaatgagtaagtagattgtgatatattcacataatggagtactatacggcactgagagggaattaactatgctatagagaacaatatgaatgaatcttataaacacgatgttgaacaaaagaaataatatgtattattttactttagaattcaaaaataagcaaaactaaactataaattatataatatagttatatattgatattatatagcatagactgttgaggaaactat

SEQ ID NO: 257314 - DNA, 511 bp, Homo sapiens
tccttcatgaagacatttccatttcattttgaggctgcaaaactcttaaagataaggaccacacttcctatcttaatctttgcatacagaaagagagattggaaaaatggaatcaacatcttaaggttcataatttcagggacttggcagaattagaccacagtaggttaacctaagttgaactaggatgattgcaaaatacaatgtttttataaaccatgtttaatctctcatctttacctctaaaaatgcagatgattttgatttttctaaagcccctttgtgtctgttttcctattattatttcactgtttattatcctgcatcaaaaaccttataaaacaacaaattgagttttaatttgaaaagttttgttatttcatatttcctttccattttctctgatcaagtttcaaaatgaaagcaaccaaagtgagagaaaggaaaaggaaaagactgaaaacaaatggctgctaatgcagctacatggaggagacgggcaataggagaa

SEQ ID NO: 257315 - DNA, 501 bp, Homo sapiens
gcagtccaactccatagtctgagctcttctacttgaaaacgcagtaaatggtataatggtggagttcctactgttactatgtaaaggatcaaagccacaggaccatgtaactgggcgaggtacaggaaaggtctgatccattctgagagaggtaatttccttgagtttgattttagctgaattctcaaagaagtgcaagagtcagaggaaaggctgggcaagagagttttagactgaaagaatgatacatgtagtggttctgaggcaggaaagagcaaattgagtccagagaatttaaaatggtatggctggattgtagaatagggagtaatgagtggcaggtgatgaacctgaagaattgtatttcttttttatttccacatcacaatttttggcataaagagtccgttttgagaaatcctaattaaagtaaaattgcactatgcagaaacttcagttgctcagagttttgggctatactcatttcaggaaaaaaaaaaa

SEQ ID NO: 257316 - DNA, 423 bp, Homo sapiens
  misc_feature (17)..(18): n is a, c, g, or t
  misc_feature (93)..(94): n is a, c, g, or t
  misc_feature (130)..(132): n is a, c, g, or t
  misc_feature (138)..(138): n is a, c, g, or t
  misc_feature (160)..(161): n is a, c, g, or t
  misc_feature (175)..(175): n is a, c, g, or t
  misc_feature (178)..(178): n is a, c, g, or t
  misc_feature (193)..(193): n is a, c, g, or t
ccccccgcccccccccnncccccccccccccaccctccctgccctgcgccgtccctcctcacacatactaccgcaccccctccctctcccctnntgggggggccgcccccccctgtatagggtgggggtnnnaaaaanaaaaaaaaagggggggaagggnnggcccgcaaaaaanaanttttgggcgaagggntttcccccccgaagagaagcaatttaaaatggtatggctggattgtagaatagggagtaatgagtggcaggtgatgaacctgaagaattgtatttcttttttatttccacatcacaatttttggcataaagagtccgttttgagaaatcctaattaaagtaaaattgcactatgcagaaacttcagttgctcagagttttgggctatactcatttcaggaaaaaaaaaaa

SEQ ID NO: 257317 - DNA, 420 bp, Homo sapiens
acagaatcacacataattagtagctaactatatatatcgttctttgagagtctaaagaatatcattcactctagagcttgtaaatatttcattcaattgatttgcttgatcagaccacaccaattaaaagcaaactgcatatgtctcccaaactcagttcaggggaaggggctcctctagttgcctcctgtgaggtttcctaatttaagtcagtccctgttttactacacatggtgaagtcgtgttatctctttggactataccatcatctaaactcacacaaaagcacgaggggctgtaatccctcattccacaaaaccccaagttaaccaaagttgtcacacatagatctggaaagatggcaaactctttaaagataatagcaactgtctaaaaggataacaaaacattgttttgagc

SEQ ID NO: 257318 - DNA, 6037 bp, Homo sapiens
ctccaaagctgggggaagagaggggggttgtgtgcagatggcccttcaatctcgaaagaaagatgtcggaatctgaaggcgggaaagacaccaccccagagcccagtccagccaatggggcaggccctggtcccgaatgggggctgtgccccgggcccccagctgtggaaggtgaaagcagtggggcatcaggcctagggacccctaagcgaagaaaccagcacagcaagcacaagacagtggcagtggccagtgcccagcggtcacctcgggcactcttctgcctcaccctggccaatcctctgcgacggtcctgcatcagcatcgtggagtggaagcccttcgacatcctcatcctgctgaccatctttgccaactgcgtggccctgggagtttacatccccttccctgaggacgactccaacactgccaaccacaacctggagcaggtggagtacgtattcctggtgattttcactgtggagacggtgctcaagatcgtggcctacgggctggtgctccaccccagcgcctacatccgcaatggctggaacctactcgacttcatcatcgtcgtggtcgggctgttcagcgttctgctggagcagggccccggacggccaggcgacgccccgcacaccgggggaaagccaggaggcttcgatgtgaaggcattgagggcgtttcgggtgctgcggccactgaggctggtgtctggggtcccgagcctgcacatagtgctcaattccatcatgaaggctctggtgccgctgctgcacattgcactgctcgtgctcttcgtcatcatcatttatgccatcattgggctcgagctgttccttggacgaatgcacaagacgtgctacttcctgggatccgacatggaagcggaggaggacccatcgccctgtgcgtcttcgggatcagggcgtgcgtgcacgctgaaccagactgagtgccgcgggcgctggccagggcccaatggaggcatcaccaactttgacaacttcttcttcgccatgctgacagtcttccagtgtgtcaccatggaaggctggaccgatgtgctctactggatgcaagatgccatggggtatgaactgccctgggtgtactttgtgagccttgtcatctttgggtccttcttcgtcctcaaccttgtgcttggcgtcctgagtggggagttctccaaggagagagagaaagcgaaagctcgcggggacttccagaagcagcgggagaagcagcagatggaggaagacctgcggggctacctggactggatcactcaagccgaagagctggacatggaggacccctccgccgatgacaaccttgggccacagctggccgagctgaccaataggaggcgtggacgtctgcgctggttcagtcattctactcgctccacacactccaccagcagccatgccagcctcccagccagtgacaccggttccatgacagagacccaaggcgatgaggatgaggaggagggggctctggccagctgtacacgctgcctaaacaagatcatgaaaaccagagtctgccgccgcctccgccgagccaaccgggtccttcgggcacgctgccgtcgggcagtgaagtccaatgcctgctactgggctgtgctgttgctcgtcttcctcaacacgttgaccatcgcctctgagcaccacgggcagcctgtgtggctcacccagatccaggagtatgccaacaaagtgttgctctgtctgttcacggtggagatgcttctcaaattgtacggtctgggcccctctgcctatgtgtcttccttcttcaaccgctttgactgctttgtggtctgtgggggcatcctagagaccaccttggtggaggtgggcgccatgcagcccttgggcatctcagtgctccgatgtgtgcgcctcctcaggatctttaaggtcaccagacactgggcttctctgagcaatctggtggcatccctgctcaattcaatgaaatccatcgcatccttgctgcttctcctcttcctcttcatcattatcttctccctgcttggcatgcagctgtttgggggcaagttcaactttgaccagacccacaccaagcgaagcacctttgacacgttcccccaggccctcctcactgtctttcagatcctgacaggtgaggactggaacgtggtcatgtatgatggtatcatggcatatggtggccccttcttcccaggaatgttggtgtgcatctatttcatcattctcttcatctgtggcaactacatcctgttgaacgtgtttcttgccattgctgtggacaacctggccagtggagatgcaggcactgccaaggacaagggcggggagaagagcaatgagaaggatctcccacaggagaatgaaggcctggtgcctggtgtggagaaagaggaagaggagggtgcaaggagggaaggagcagacatggaggaggaggaggaggaggaagaagaggaagaagaggaagaagaggaagagggtgcagggggtgtggaactcctgcaggaagttgtacccaaggagaaggtggtacccatccctgagggcagcgccttcttctgcctcagccaaaccaacccgctgaggaagggctgccacaccctcatccaccatcatgtcttcaccaatcttatcctggtgttcatcatcctcagcagtgtgtccctggccgctgaggaccccatccgagcccactccttccgcaaccatattctgggttacttcgattatgccttcacctccattttcactgtggagattctactaaagatgacagtgtttggggccttcctgcaccgcggctccttctgccgtagctggtttaatatgttggatctgctggtggtcagtgtgtccctcatctcctttggcatccactccagcgccatctcggtggtgaagattctgcgagtactccgagtactgcggcccctccgagccatcaacagggccaagggactcaagcatgtggtgcagtgtgtatttgtggccatccggaccatcggaaacatcatgattgtcaccacacttctgcaatttatgttcgcctgcatcggggtgcagctcttcaaggggaaattctacacctgcacggacgaggccaaacacacccctcaagaatgcaagggctccttcctggtatacccagatggagacgtgtcacggcccctggtccgggagcggctctgggtcaacagtgatttcaactttgacaatgtcctttcagccatgatggccctgttcactgtctccacctttgaaggctggcctgcactgctatacaaggccatcgatgcatatgcagaggaccatggccccatctataattaccgtgtggagatctcagtgttcttcattgtctacatcatcatcattgcgttcttcatgatgaacatcttcgtgggcttcgtcatcatcactttccgtgcccagggcgagcaggagtaccaaaactgtgagctggacaagaaccagcgtcaatgtgtggaatatgccctcaaggcccagccactccgccgttacatccccaagaacccgcatcagtatcgtgtgtgggccactgtgaactctgctgcctttgagtacctgatgttcctgctcatcctgctcaacacagttgccctagccatgcagcactatgagcagactgctcccttcaactatgccatggacatcctcaacatggtcttcactggcctcttcactattgagatggtgctcaaaatcatcgccttcaagcccaagcattacttcactgatgcctggaacacgtttgacgctcttattgtggtgggcagcatagtggatattgccgtcactgaagtcaataatggtggccaccttggcgagagctctgaggacagctcccgcatttccattaccttctttcgcctcttccgagttatgcggctggtcaagcttctcagtaagggtgaagggatccgcacattgctctggacattcatcaagtccttccaggccttgccctatgtggctcttctcatcgcaatgatattcttcatctatgccgtcattggcatgcagatgttcggcaaggtggctcttcaggatggcacacagataaaccgaaacaacaacttccagacctttccacaggctgtgctgcttctgttcaggtgtgccactggtgaggcatggcaggagataatgcttgccagccttcccggaaatcggtgtgatcctgagtctgacttcggccctggtgaagagtttacctgtggtagcaattttgccatcgcctatttcatcagcttcttcatgctctgtgccttcctgatcataaatctctttgtggctgtgatcatggacaactttgattatctcaccagagattggtccatcctgggcccccatcaccttgatgaattcaagaggatctggtctgaatatgaccctggggccaagggccgcatcaaacacttggatgtggttgccctgctgagacgtatccagccccctctgggatttgggaagctgtgcccacaccgagtggcctgcaagagacttgtggcaatgaacatgcccctcaactcagatgggacggtgacattcaacgccacactctttgccctggtccggacatccctgaagatcaaaacagaagggaacctggagcaagccaaccaggagctgcggattgtcatcaaaaagatctggaagcggatgaaacagaagctgctagatgaggtcatccccccaccagacgaggaggaggtcaccgtgggcaaattctacgccacatttctgatccaggactatttccgcaaattccggcggaggaaagaaaaagggctactaggcaacgacgccgcccctagcacctcttccgcccttcaggctggtctgcggagcctgcaggacttgggtcctgagatgcggcaggccctcacctgtgacacagaggaggaggaagaagaggggcaggagggagtggaggaggaagatgaaaaggacttggaaactaacaaagccacgatggtctcccagccctcagctcgccggggctccgggatttctgtgtctctgcctgtcggggacagacttccagattcactctcctttgggcccagtgatgatgacagggggactcccacctccagtcagcccagtgtgccccaggctggatccaacacccacaggagaggctctggggctctcattttcaccatcccagaagaaggaaattctcagcccaagggaaccaaagggcaaaacaagcaagatgaggatgaggaagtccctgatcggctttcctacctagatgagcaggcagggactcccccgtgctcagtccttttgccacctcacagagctcagagatacatggatgggcacctggtaccacgccgccgtctgctgccccccacacctgcaggtcggaagccctccttcaccatccagtgtctgcagcgccagggcagttgtgaggatttacccatcccaggcacctatcatcgtgggcgaaattcagggcccaatagggctcagggttcctgggcaacaccacctcagcggggtcggctcctgtatgccccgctgttgttggtggaagagggcgcagcgggggaggggtacctcggcagatccagtggcccactgcgcaccttcacctgtctgcacgtgcctggaacccactcggaccccagccatgggaagaggggcagtgccgacagcttggtggaggctgtgcttatctcagagggtctgggcctctttgctcgagacccacgtttcgtggccctggccaagcaggagattgcagatgcgtgtcgcctgacgctggatgagatggacaatgctgccagtgacctgctggcacagggaaccagctctctctatagcgacgaggagtccatcctctcccgcttcgatgaggaggacttgggagacgagatggcctgcgtccacgccctctgaattcccacccctccccaactgctcaataaacctcctgccctcccctccccagcaggaggcaggcatggaccaca

SEQ ID NO: 257319 - DNA, 6070 bp, Homo sapiens
ctccaaagctgggggaagagaggggggttgtgtgcagatggcccttcaatctcgaaagaaagatgtcggaatctgaaggcgggaaagacaccaccccagagcccagtccagccaatggggcaggccctggtcccgaatgggggctgtgccccgggcccccagctgtggaaggtgaaagcagtggggcatcaggcctagggacccctaagcgaagaaaccagcacagcaagcacaagacagtggcagtggccagtgcccagcggtcacctcgggcactcttctgcctcaccctggccaatcctctgcgacggtcctgcatcagcatcgtggagtggaagcccttcgacatcctcatcctgctgaccatctttgccaactgcgtggccctgggagtttacatccccttccctgaggacgactccaacactgccaaccacaacctggagcaggtggagtacgtattcctggtgattttcactgtggagacggtgctcaagatcgtggcctacgggctggtgctccaccccagcgcctacatccgcaatggctggaacctactcgacttcatcatcgtcgtggtcgggctgttcagcgttctgctggagcagggccccggacggccaggcgacgccccgcacaccgggggaaagccaggaggcttcgatgtgaaggcattgagggcgtttcgggtgctgcggccactgaggctggtgtctggggtcccgagcctgcacatagtgctcaattccatcatgaaggctctggtgccgctgctgcacattgcactgctcgtgctcttcgtcatcatcatttatgccatcattgggctcgagctgttccttggacgaatgcacaagacgtgctacttcctgggatccgacatggaagcggaggaggacccatcgccctgtgcgtcttcgggatcagggcgtgcgtgcacgctgaaccagactgagtgccgcgggcgctggccagggcccaatggaggcatcaccaactttgacaacttcttcttcgccatgctgacagtcttccagtgtgtcaccatggaaggctggaccgatgtgctctactggatgcaagatgccatggggtatgaactgccctgggtgtactttgtgagccttgtcatctttgggtccttcttcgtcctcaaccttgtgcttggcgtcctgagtggggagttctccaaggagagagagaaagcgaaagctcgcggggacttccagaagcagcgggagaagcagcagatggaggaagacctgcggggctacctggactggatcactcaagccgaagagctggacatggaggacccctccgccgatgacaaccttggttctatggctgaagagggccgggcgggccatcggccacagctggccgagctgaccaataggaggcgtggacgtctgcgctggttcagtcattctactcgctccacacactccaccagcagccatgccagcctcccagccagtgacaccggttccatgacagagacccaaggcgatgaggatgaggaggagggggctctggccagctgtacacgctgcctaaacaagatcatgaaaaccagagtctgccgccgcctccgccgagccaaccgggtccttcgggcacgctgccgtcgggcagtgaagtccaatgcctgctactgggctgtgctgttgctcgtcttcctcaacacgttgaccatcgcctctgagcaccacgggcagcctgtgtggctcacccagatccaggagtatgccaacaaagtgttgctctgtctgttcacggtggagatgcttctcaaattgtacggtctgggcccctctgcctatgtgtcttccttcttcaaccgctttgactgctttgtggtctgtgggggcatcctagagaccaccttggtggaggtgggcgccatgcagcccttgggcatctcagtgctccgatgtgtgcgcctcctcaggatctttaaggtcaccagacactgggcttctctgagcaatctggtggcatccctgctcaattcaatgaaatccatcgcatccttgctgcttctcctcttcctcttcatcattatcttctccctgcttggcatgcagctgtttgggggcaagttcaactttgaccagacccacaccaagcgaagcacctttgacacgttcccccaggccctcctcactgtctttcagatcctgacaggtgaggactggaacgtggtcatgtatgatggtatcatggcatatggtggccccttcttcccaggaatgttggtgtgcatctatttcatcattctcttcatctgtggcaactacatcctgttgaacgtgtttcttgccattgctgtggacaacctggccagtggagatgcaggcactgccaaggacaagggcggggagaagagcaatgagaaggatctcccacaggagaatgaaggcctggtgcctggtgtggagaaagaggaagaggagggtgcaaggagggaaggagcagacatggaggaggaggaggaggaggaagaagaggaagaagaggaagaagaggaagagggtgcagggggtgtggaactcctgcaggaagttgtacccaaggagaaggtggtacccatccctgagggcagcgccttcttctgcctcagccaaaccaacccgctgaggaagggctgccacaccctcatccaccatcatgtcttcaccaatcttatcctggtgttcatcatcctcagcagtgtgtccctggccgctgaggaccccatccgagcccactccttccgcaaccatattctgggttacttcgattatgccttcacctccattttcactgtggagattctactaaagatgacagtgtttggggccttcctgcaccgcggctccttctgccgtagctggtttaatatgttggatctgctggtggtcagtgtgtccctcatctcctttggcatccactccagcgccatctcggtggtgaagattctgcgagtactccgagtactgcggcccctccgagccatcaacagggccaagggactcaagcatgtggtgcagtgtgtatttgtggccatccggaccatcggaaacatcatgattgtcaccacacttctgcaatttatgttcgcctgcatcggggtgcagctcttcaaggggaaattctacacctgcacggacgaggccaaacacacccctcaagaatgcaagggctccttcctggtatacccagatggagacgtgtcacggcccctggtccgggagcggctctgggtcaacagtgatttcaactttgacaatgtcctttcagccatgatggccctgttcactgtctccacctttgaaggctggcctgcactgctatacaaggccatcgatgcatatgcagaggaccatggccccatctataattaccgtgtggagatctcagtgttcttcattgtctacatcatcatcattgcgttcttcatgatgaacatcttcgtgggcttcgtcatcatcactttccgtgcccagggcgagcaggagtaccaaaactgtgagctggacaagaaccagcgtcaatgtgtggaatatgccctcaaggcccagccactccgccgttacatccccaagaacccgcatcagtatcgtgtgtgggccactgtgaactctgctgcctttgagtacctgatgttcctgctcatcctgctcaacacagttgccctagccatgcagcactatgagcagactgctcccttcaactatgccatggacatcctcaacatggtcttcactggcctcttcactattgagatggtgctcaaaatcatcgccttcaagcccaagcattacttcactgatgcctggaacacgtttgacgctcttattgtggtgggcagcatagtggatattgccgtcactgaagtcaataatggtggccaccttggcgagagctctgaggacagctcccgcatttccattaccttctttcgcctcttccgagttatgcggctggtcaagcttctcagtaagggtgaagggatccgcacattgctctggacattcatcaagtccttccaggccttgccctatgtggctcttctcatcgcaatgatattcttcatctatgccgtcattggcatgcagatgttcggcaaggtggctcttcaggatggcacacagataaaccgaaacaacaacttccagacctttccacaggctgtgctgcttctgttcaggtgtgccactggtgaggcatggcaggagataatgcttgccagccttcccggaaatcggtgtgatcctgagtctgacttcggccctggtgaagagtttacctgtggtagcaattttgccatcgcctatttcatcagcttcttcatgctctgtgccttcctgatcataaatctctttgtggctgtgatcatggacaactttgattatctcaccagagattggtccatcctgggcccccatcaccttgatgaattcaagaggatctggtctgaatatgaccctggggccaagggccgcatcaaacacttggatgtggttgccctgctgagacgtatccagccccctctgggatttgggaagctgtgcccacaccgagtggcctgcaagagacttgtggcaatgaacatgcccctcaactcagatgggacggtgacattcaacgccacactctttgccctggtccggacatccctgaagatcaaaacagaagggaacctggagcaagccaaccaggagctgcggattgtcatcaaaaagatctggaagcggatgaaacagaagctgctagatgaggtcatccccccaccagacgaggaggaggtcaccgtgggcaaattctacgccacatttctgatccaggactatttccgcaaattccggcggaggaaagaaaaagggctactaggcaacgacgccgcccctagcacctcttccgcccttcaggctggtctgcggagcctgcaggacttgggtcctgagatgcggcaggccctcacctgtgacacagaggaggaggaagaagaggggcaggagggagtggaggaggaagatgaaaaggacttggaaactaacaaagccacgatggtctcccagccctcagctcgccggggctccgggatttctgtgtctctgcctgtcggggacagacttccagattcactctcctttgggcccagtgatgatgacagggggactcccacctccagtcagcccagtgtgccccaggctggatccaacacccacaggagaggctctggggctctcattttcaccatcccagaagaaggaaattctcagcccaagggaaccaaagggcaaaacaagcaagatgaggatgaggaagtccctgatcggctttcctacctagatgagcaggcagggactcccccgtgctcagtccttttgccacctcacagagctcagagatacatggatgggcacctggtaccacgccgccgtctgctgccccccacacctgcaggtcggaagccctccttcaccatccagtgtctgcagcgccagggcagttgtgaggatttacccatcccaggcacctatcatcgtgggcgaaattcagggcccaatagggctcagggttcctgggcaacaccacctcagcggggtcggctcctgtatgccccgctgttgttggtggaagagggcgcagcgggggaggggtacctcggcagatccagtggcccactgcgcaccttcacctgtctgcacgtgcctggaacccactcggaccccagccatgggaagaggggcagtgccgacagcttggtggaggctgtgcttatctcagagggtctgggcctctttgctcgagacccacgtttcgtggccctggccaagcaggagattgcagatgcgtgtcgcctgacgctggatgagatggacaatgctgccagtgacctgctggcacagggaaccagctctctctatagcgacgaggagtccatcctctcccgcttcgatgaggaggacttgggagacgagatggcctgcgtccacgccctctgaattcccacccctccccaactgctcaataaacctcctgccctcccctccccagcaggaggcaggcatggaccaca

SEQ ID NO: 257320 - DNA, 5860 bp, Homo sapiens
ctccaaagctgggggaagagaggggggttgtgtgcagatggcccttcaatctcgaaagaaagatgtcggaatctgaaggcgggaaaggtgagagaatccttccatccctgcagacccttggagcaaggcccttcgacatcctcatcctgctgaccatctttgccaactgcgtggccctgggagtttacatccccttccctgaggacgactccaacactgccaaccacaacctggagcaggtggagtacgtattcctggtgattttcactgtggagacggtgctcaagatcgtggcctacgggctggtgctccaccccagcgcctacatccgcaatggctggaacctactcgacttcatcatcgtcgtggtcgggctgttcagcgttctgctggagcagggccccggacggccaggcgacgccccgcacaccgggggaaagccaggaggcttcgatgtgaaggcattgagggcgtttcgggtgctgcggccactgaggctggtgtctggggtcccgagcctgcacatagtgctcaattccatcatgaaggctctggtgccgctgctgcacattgcactgctcgtgctcttcgtcatcatcatttatgccatcattgggctcgagctgttccttggacgaatgcacaagacgtgctacttcctgggatccgacatggaagcggaggaggacccatcgccctgtgcgtcttcgggatcagggcgtgcgtgcacgctgaaccagactgagtgccgcgggcgctggccagggcccaatggaggcatcaccaactttgacaacttcttcttcgccatgctgacagtcttccagtgtgtcaccatggaaggctggaccgatgtgctctactggatgcaagatgccatggggtatgaactgccctgggtgtactttgtgagccttgtcatctttgggtccttcttcgtcctcaaccttgtgcttggcgtcctgagtggggagttctccaaggagagagagaaagcgaaagctcgcggggacttccagaagcagcgggagaagcagcagatggaggaagacctgcggggctacctggactggatcactcaagccgaagagctggacatggaggacccctccgccgatgacaaccttggttctatggctgaagagggccgggcgggccatcggccacagctggccgagctgaccaataggaggcgtggacgtctgcgctggttcagtcattctactcgctccacacactccaccagcagccatgccagcctcccagccagtgacaccggttccatgacagagacccaaggcgatgaggatgaggaggagggggctctggccagctgtacacgctgcctaaacaagatcatgaaaaccagagtctgccgccgcctccgccgagccaaccgggtccttcgggcacgctgccgtcgggcagtgaagtccaatgcctgctactgggctgtgctgttgctcgtcttcctcaacacgttgaccatcgcctctgagcaccacgggcagcctgtgtggctcacccagatccaggagtatgccaacaaagtgttgctctgtctgttcacggtggagatgcttctcaaattgtacggtctgggcccctctgcctatgtgtcttccttcttcaaccgctttgactgctttgtggtctgtgggggcatcctagagaccaccttggtggaggtgggcgccatgcagcccttgggcatctcagtgctccgatgtgtgcgcctcctcaggatctttaaggtcaccagacactgggcttctctgagcaatctggtggcatccctgctcaattcaatgaaatccatcgcatccttgctgcttctcctcttcctcttcatcattatcttctccctgcttggcatgcagctgtttgggggcaagttcaactttgaccagacccacaccaagcgaagcacctttgacacgttcccccaggccctcctcactgtctttcagatcctgacaggtgaggactggaacgtggtcatgtatgatggtatcatggcatatggtggccccttcttcccaggaatgttggtgtgcatctatttcatcattctcttcatctgtggcaactacatcctgttgaacgtgtttcttgccattgctgtggacaacctggccagtggagatgcaggcactgccaaggacaagggcggggagaagagcaatgagaaggatctcccacaggagaatgaaggcctggtgcctggtgtggagaaagaggaagaggagggtgcaaggagggaaggagcagacatggaggaggaggaggaggaggaagaagaggaagaagaggaagaagaggaagagggtgcagggggtgtggaactcctgcaggaagttgtacccaaggagaaggtggtacccatccctgagggcagcgccttcttctgcctcagccaaaccaacccgctgaggaagggctgccacaccctcatccaccatcatgtcttcaccaatcttatcctggtgttcatcatcctcagcagtgtgtccctggccgctgaggaccccatccgagcccactccttccgcaaccatattctgggttacttcgattatgccttcacctccattttcactgtggagattctactaaagatgacagtgtttggggccttcctgcaccgcggctccttctgccgtagctggtttaatatgttggatctgctggtggtcagtgtgtccctcatctcctttggcatccactccagcgccatctcggtggtgaagattctgcgagtactccgagtactgcggcccctccgagccatcaacagggccaagggactcaagcatgtggtgcagtgtgtatttgtggccatccggaccatcggaaacatcatgattgtcaccacacttctgcaatttatgttcgcctgcatcggggtgcagctcttcaaggggaaattctacacctgcacggacgaggccaaacacacccctcaagaatgcaagggctccttcctggtatacccagatggagacgtgtcacggcccctggtccgggagcggctctgggtcaacagtgatttcaactttgacaatgtcctttcagccatgatggccctgttcactgtctccacctttgaaggctggcctgcactgctatacaaggccatcgatgcatatgcagaggaccatggccccatctataattaccgtgtggagatctcagtgttcttcattgtctacatcatcatcattgcgttcttcatgatgaacatcttcgtgggcttcgtcatcatcactttccgtgcccagggcgagcaggagtaccaaaactgtgagctggacaagaaccagcgtcaatgtgtggaatatgccctcaaggcccagccactccgccgttacatccccaagaacccgcatcagtatcgtgtgtgggccactgtgaactctgctgcctttgagtacctgatgttcctgctcatcctgctcaacacagttgccctagccatgcagcactatgagcagactgctcccttcaactatgccatggacatcctcaacatggtcttcactggcctcttcactattgagatggtgctcaaaatcatcgccttcaagcccaagcattacttcactgatgcctggaacacgtttgacgctcttattgtggtgggcagcatagtggatattgccgtcactgaagtcaataatggtggccaccttggcgagagctctgaggacagctcccgcatttccattaccttctttcgcctcttccgagttatgcggctggtcaagcttctcagtaagggtgaagggatccgcacattgctctggacattcatcaagtccttccaggccttgccctatgtggctcttctcatcgcaatgatattcttcatctatgccgtcattggcatgcagatgttcggcaaggtggctcttcaggatggcacacagataaaccgaaacaacaacttccagacctttccacaggctgtgctgcttctgttcaggtgtgccactggtgaggcatggcaggagataatgcttgccagccttcccggaaatcggtgtgatcctgagtctgacttcggccctggtgaagagtttacctgtggtagcaattttgccatcgcctatttcatcagcttcttcatgctctgtgccttcctgatcataaatctctttgtggctgtgatcatggacaactttgattatctcaccagagattggtccatcctgggcccccatcaccttgatgaattcaagaggatctggtctgaatatgaccctggggccaagggccgcatcaaacacttggatgtggttgccctgctgagacgtatccagccccctctgggatttgggaagctgtgcccacaccgagtggcctgcaagagacttgtggcaatgaacatgcccctcaactcagatgggacggtgacattcaacgccacactctttgccctggtccggacatccctgaagatcaaaacagaagggaacctggagcaagccaaccaggagctgcggattgtcatcaaaaagatctggaagcggatgaaacagaagctgctagatgaggtcatccccccaccagacgaggaggaggtcaccgtgggcaaattctacgccacatttctgatccaggactatttccgcaaattccggcggaggaaagaaaaagggctactaggcaacgacgccgcccctagcacctcttccgcccttcaggctggtctgcggagcctgcaggacttgggtcctgagatgcggcaggccctcacctgtgacacagaggaggaggaagaagaggggcaggagggagtggaggaggaagatgaaaaggacttggaaactaacaaagccacgatggtctcccagccctcagctcgccggggctccgggatttctgtgtctctgcctgtcggggacagacttccagattcactctcctttgggcccagtgatgatgacagggggactcccacctccagtcagcccagtgtgccccaggctggatccaacacccacaggagaggctctggggctctcattttcaccatcccagaagaaggaaattctcagcccaagggaaccaaagggcaaaacaagcaagatgaggatgaggaagtccctgatcggctttcctacctagatgagcaggcagggactcccccgtgctcagtccttttgccacctcacagagctcagagatacatggatgggcacctggtaccacgccgccgtctgctgccccccacacctgcaggtcggaagccctccttcaccatccagtgtctgcagcgccagggcagttgtgaggatttacccatcccaggcacctatcatcgtgggcgaaattcagggcccaatagggctcagggttcctgggcaacaccacctcagcggggtcggctcctgtatgccccgctgttgttggtggaagagggcgcagcgggggaggggtacctcggcagatccagtggcccactgcgcaccttcacctgtctgcacgtgcctggaacccactcggaccccagccatgggaagaggggcagtgccgacagcttggtggaggctgtgcttatctcagagggtctgggcctctttgctcgagacccacgtttcgtggccctggccaagcaggagattgcagatgcgtgtcgcctgacgctggatgagatggacaatgctgccagtgacctgctggcacagggaaccagctctctctatagcgacgaggagtccatcctctcccgcttcgatgaggaggacttgggagacgagatggcctgcgtccacgccctctgaattcccacccctccccaactgctcaataaacctcctgccctcccctccccagcaggaggcaggcatggaccaca

SEQ ID NO: 257321 - DNA, 6138 bp, Homo sapiens
ctccaaagctgggggaagagaggggggttgtgtgcagatggcccttcaatctcgaaagaaagatgtcggaatctgaaggcgggaaaggtgagagaatccttccatccctgcagacccttggagcaaggcccttcgacatcctcatcctgctgaccatctttgccaactgcgtggccctgggagtttacatccccttccctgaggacgactccaacactgccaaccacaacctggagcaggtggagtacgtattcctggtgattttcactgtggagacggtgctcaagatcgtggcctacgggctggtgctccaccccagcgcctacatccgcaatggctggaacctactcgacttcatcatcgtcgtggtcgggctgttcagcgttctgctggagcagggccccggacggccaggcgacgccccgcacaccgggggaaagccaggaggcttcgatgtgaaggcattgagggcgtttcgggtgctgcggccactgaggctggtgtctggggtcccgagcctgcacatagtgctcaattccatcatgaaggctctggtgccgctgctgcacattgcactgctcgtgctcttcgtcatcatcatttatgccatcattgggctcgagctgttccttggacgaatgcacaagacgtgctacttcctgggatccgacatggaagcggaggaggacccatcgccctgtgcgtcttcgggatcagggcgtgcgtgcacgctgaaccagactgagtgccgcgggcgctggccagggcccaatggaggcatcaccaactttgacaacttcttcttcgccatgctgacagtcttccagtgtgtcaccatggaaggctggaccgatgtgctctactggatgcaagatgccatggggtatgaactgccctgggtgtactttgtgagccttgtcatctttgggtccttcttcgtcctcaaccttgtgcttggcgtcctgagtggggagttctccaaggagagagagaaagcgaaagctcgcggggacttccagaagcagcgggagaagcagcagatggaggaagacctgcggggctacctggactggatcactcaagccgaagagctggacatggaggacccctccgccgatgacaaccttggttctatggctgaagagggccgggcgggccatcggccacagctggccgagctgaccaataggaggcgtggacgtctgcgctggttcagtcattctactcgctccacacactccaccagcagccatgccagcctcccagccagtgacaccggttccatgacagagacccaaggcgatgaggatgaggaggagggggctctggccagctgtacacgctgcctaaacaagatcatgaaaaccagagtctgccgccgcctccgccgagccaaccgggtccttcgggcacgctgccgtcgggcagtgaagtccaatgcctgctactgggctgtgctgttgctcgtcttcctcaacacgttgaccatcgcctctgagcaccacgggcagcctgtgtggctcacccagatccaggagtatgccaacaaagtgttgctctgtctgttcacggtggagatgcttctcaaattgtacggtctgggcccctctgcctatgtgtcttccttcttcaaccgctttgactgctttgtggtctgtgggggcatcctagagaccaccttggtggaggtgggcgccatgcagcccttgggcatctcagtgctccgatgtgtgcgcctcctcaggatctttaaggtcaccagacactgggcttctctgagcaatctggtggcatccctgctcaattcaatgaaatccatcgcatccttgctgcttctcctcttcctcttcatcattatcttctccctgcttggcatgcagctgtttgggggcaagttcaactttgaccagacccacaccaagcgaagcacctttgacacgttcccccaggccctcctcactgtctttcagatcctgacaggtgaggactggaacgtggtcatgtatgatggtatcatggcatatggtggccccttcttcccaggaatgttggtgtgcatctatttcatcattctcttcatctgtggcaactacatcctgttgaacgtgtttcttgccattgctgtggacaacctggccagtggagatgcaggcactgccaaggacaagggcggggagaagagcaatgagaaggatctcccacaggagaatgaaggcctggtgcctggtgtggagaaagaggaagaggagggtgcaaggagggaaggagcagacatggaggaggaggaggaggaggaagaagaggaagaagaggaagaagaggaagagggtgcagggggtgtggaactcctgcaggaagttgtacccaaggagaaggtggtacccatccctgagggcagcgccttcttctgcctcagccaaaccaacccgctgaggaagggctgccacaccctcatccaccatcatgtcttcaccaatcttatcctggtgttcatcatcctcagcagtgtgtccctggccgctgaggaccccatccgagcccactccttccgcaaccatattctgggttacttcgattatgccttcacctccattttcactgtggagattctactaaagatgacagtgtttggggccttcctgcaccgcggctccttctgccgtagctggtttaatatgttggatctgctggtggtcagtgtgtccctcatctcctttggcatccactccagcgccatctcggtggtgaagattctgcgagtactccgagtactgcggcccctccgagccatcaacagggccaagggactcaagcatgtggtgcagtgtgtatttgtggccatccggaccatcggaaacatcatgattgtcaccacacttctgcaatttatgttcgcctgcatcggggtgcagctcttcaaggggaaattctacacctgcacggacgaggccaaacacacccctcaagaatgcaagggctccttcctggtatacccagatggagacgtgtcacggcccctggtccgggagcggctctgggtcaacagtgatttcaactttgacaatgtcctttcagccatgatggccctgttcactgtctccacctttgaaggctggcctgcactgctatacaaggccatcgatgcatatgcagaggaccatggccccatctataattaccgtgtggagatctcagtgttcttcattgtctacatcatcatcattgcgttcttcatgatgaacatcttcgtgggcttcgtcatcatcactttccgtgcccagggcgagcaggagtaccaaaactgtgagctggacaagaaccagcgtcaatgtgtggaatatgccctcaaggcccagccactccgccgttacatccccaagaacccgcatcagtatcgtgtgtgggccactgtgaactctgctgcctttgagtacctgatgttcctgctcatcctgctcaacacagttgccctagccatgcagcactatgagcagactgctcccttcaactatgccatggacatcctcaacatggtcttcactggcctcttcactattgagatggtgctcaaaatcatcgccttcaagcccaagcattacttcactgatgcctggaacacgtttgacgctcttattgtggtgggcagcatagtggatattgccgtcactgaagtcaataatggtggccaccttggcgagagctctgaggacagctcccgcatttccattaccttctttcgcctcttccgagttatgcggctggtcaagcttctcagtaagggtgaagggatccgcacattgctctggacattcatcaagtccttccaggccttgccctatgtggctcttctcatcgcaatgatattcttcatctatgccgtcattggcatgcagatgttcggcaaggtggctcttcaggatggcacacagataaaccgaaacaacaacttccagacctttccacaggctgtgctgcttctgttcaggtgtgccactggtgaggcatggcaggagataatgcttgccagccttcccggaaatcggtgtgatcctgagtctgacttcggccctggtgaagagtttacctgtggtagcaattttgccatcgcctatttcatcagcttcttcatgctctgtgccttcctgatcataaatctctttgtggctgtgatcatggacaactttgattatctcaccagagattggtccatcctgggcccccatcaccttgatgaattcaagaggatctggtctgaatatgaccctggggccaagtatgccctctatacccttacctagaatccaggggacaatgtattgccctacacagtcccctagcccccaaacctccgactgctgcatctcattacccagtcaatagatgccccaaagtttccactgccccatcctctgccctctctgactgccctccagttcttccctggcaagctctggggtattggtaggaggaggtagtgatgagctggtggggccttgagaaagggctagtgggggcatcgccaatccagtggtacctccccaactcctccaggggccgcatcaaacacttggatgtggttgccctgctgagacgtatccagccccctctgggatttgggaagctgtgcccacaccgagtggcctgcaagagacttgtggcaatgaacatgcccctcaactcagatgggacggtgacattcaacgccacactctttgccctggtccggacatccctgaagatcaaaacagaagggaacctggagcaagccaaccaggagctgcggattgtcatcaaaaagatctggaagcggatgaaacagaagctgctagatgaggtcatccccccaccagacgaggaggaggtcaccgtgggcaaattctacgccacatttctgatccaggactatttccgcaaattccggcggaggaaagaaaaagggctactaggcaacgacgccgcccctagcacctcttccgcccttcaggctggtctgcggagcctgcaggacttgggtcctgagatgcggcaggccctcacctgtgacacagaggaggaggaagaagaggggcaggagggagtggaggaggaagatgaaaaggacttggaaactaacaaagccacgatggtctcccagccctcagctcgccggggctccgggatttctgtgtctctgcctgtcggggacagacttccagattcactctcctttgggcccagtgatgatgacagggggactcccacctccagtcagcccagtgtgccccaggctggatccaacacccacaggagaggctctggggctctcattttcaccatcccagaagaaggaaattctcagcccaagggaaccaaagggcaaaacaagcaagatgaggatgaggaagtccctgatcggctttcctacctagatgagcaggcagggactcccccgtgctcagtccttttgccacctcacagagctcagagatacatggatgggcacctggtaccacgccgccgtctgctgccccccacacctgcaggtcggaagccctccttcaccatccagtgtctgcagcgccagggcagttgtgaggatttacccatcccaggcacctatcatcgtgggcgaaattcagggcccaatagggctcagggttcctgggcaacaccacctcagcggggtcggctcctgtatgccccgctgttgttggtggaagagggcgcagcgggggaggggtacctcggcagatccagtggcccactgcgcaccttcacctgtctgcacgtgcctggaacccactcggaccccagccatgggaagaggggcagtgccgacagcttggtggaggctgtgcttatctcagagggtctgggcctctttgctcgagacccacgtttcgtggccctggccaagcaggagattgcagatgcgtgtcgcctgacgctggatgagatggacaatgctgccagtgacctgctggcacagggaaccagctctctctatagcgacgaggagtccatcctctcccgcttcgatgaggaggacttgggagacgagatggcctgcgtccacgccctctgaattcccacccctccccaactgctcaataaacctcctgccctcccctccccagcaggaggcaggcatggaccaca

SEQ ID NO: 257322 - DNA, 618 bp, Homo sapiens
gacattaataccgggtaaagatttaagaataacatactaaatataacaaacaacatcacaaaattataagggggtcaattcatccagagcgcattctcccaaaggtgcatatacctgcaaagagaccttcaaaaccacgaagcaaagctgagagaactaaagggagacaaggtaagtcaccatcacggatggagatttccacagaactattcaataagtaaccaacaggtacataaaaatcagtaaagacacggaagattcaaacaacactattatccaagttgacctaatgggcatttattgagcagtccaacaacaacggaatacacattatttacaagtgtacacaaaaccttcaccaagacagactcttctctggacaataaagcaaacctcaatacatttaaaagaaccaaaatcaaagaatggtttctgacaaaggaactgaataaaacttcagcaatacaataatatctgaaaaaatccaaactattttcaaataaataacacttttatattacacgcagtatcaaagaaaaaacacacaaaagtaaagcaaatttaatcccaaagtaagcagcaagaaaaaaacaataaagatgtgaaatcaatgaaata

SEQ ID NO: 257323 - DNA, 640 bp, Homo sapiens
gctgactactatagtattctatcaacagaagcaagattgaggtagagtttacagaggttcacagtgaccatgcttctaggtgtcatgagatggaaggaacctcaagcagtttctgttctaggatttggtcattttcctgccatgctcatgttccattaccctcgtagtatgcctggtctgaaaaattcaatctgccttaaccatttgaatctctaaacaaaccttgcaaattaatacaagtctcaaggaccaggctgaagagaacgagacgggacctggagaatataaaaaagcgggtatcagctgggcgccatagctcatgcctgtattctcaacattttgggaggccaaggcaagaggatcgcttgaggccagtaattgggaagaccagcctgggaaaaataatgagaccctgtcttaacaagaaatttaaaaattagccgggcgtcatggcaggcacctgtagttccagctactcaggaggctaaagcaggagggtaagtttagcccaggagtttgaggctgccgtgagctatgattgggcaactgtagtctagcctggatgacagagtgagaccttatctctttccagtcttgataaacaaggttccaaattgagttaattttgcccctagcaaat

SEQ ID NO: 257324 - DNA, 501 bp, Homo sapiens
ttcttccctctccagctaatgactatatatcagatggataatgaaaaagtcctgacgttcaggagatggctgagaagacacatatccaccagacagaagtattttgaagtatataatttttccagatcgtggggaatctgggatatatttaattaactatttctgaactgttatctaagtgttttatttatttctatgtagaaaatgaactaaaatgggggcacgctatgttttataagaaagttaaaaattttgttttaactcagatactagacaaacttggaaaatcatctaagaagtgagaaagtaaaaataaccattggggataattacaataaagagtactaaatttatagtggtattttcttcattgcatttagatctataatctctctggagaacaagtttctattacagaggaattgagttcatctgtatacattaaataagcccatctttcaaataacacttcccaaacactgtatcattttaccactgatt

SEQ ID NO: 257325 - DNA, 128 bp, Homo sapiens
cccaaagtgctagaattacaggcatgagccactgcatctggccaggagttaaaaaaaaaaaaaggtaactttcagtcaaatcacactaaaacaaacgtcctaggaccagccaaagttctttatatttc

SEQ ID NO: 257326 - DNA, 672 bp, Homo sapiens
gtatgggagacctattcgtgggccagggaaagagcttatttgacctgtgaagggaagatccccctctaaatttaagcacatacccatgaccatgtaaggctaaataacccttcccctgttacttttgggagagaatgaagacactgaggatgacttcatttcccttattttcttctgctaacaacagttttgagataagcagtactatagagcagggatctgcaaacggggccaaatcccattcatacctgttttgtttgtttgtttttgtgtttgtttgtttgtttgagacaatgccccaccctgtcaatcaggctggagtgcagtggtacaatcatggctcactacaacctcgacctcctgggttcaagtaattctcccacctcagcctcctgagtagctgggactacagtttcacacaaccacatctggctaatttttgcttttttgttttgttttgttttgctttgtttatttttgtttctttatttattttttttttgtaatgacagcatttcaccatgttgctcaggctggtttcaaactcctgagttcaagccatccacctgcctcagcctcctgagtagctggaactacaggcatgagccactgcgccggaccgcatacctgtttttgtaaatagagctttattggaacacagccatgcccatt

SEQ ID NO: 257327 - DNA, 678 bp, Homo sapiens
gcagccaaagaggtaggaaaaaaacaggaaagggagttaaagaggccaaagtaaaaaaataaaatggctttaggaatgagggaatgataaacaatgtcaaggattgcaaagtaagataaatgaaatgcaaaatataccttggatttttggataaggaagccgtcggtaaccctggaaggtggttgttttgttttgttttgcctgcttgctttatgatgatgatgatgatgattattattatactttaagttctagggtacatgtgcacaatgtgcaggtttgttacatatgtatacacgttccatgttggtgtgctgcacccgttaacttgtcatttacattaggtatatctcctaatgctatccctccccctttcccccaccccacgacaggccccagtgtgtgatgttcccccccgcctgtgtccaagtgttctcattgttcaattcccacctatgagtgagaacatgtggtgtttggttttctgtctttgtgatagtttgctcagaatgatggtttctagcttcatccatgtccctacaaaggacatgaactcatccttttttatgacctgcatagtattcaatggtgtatatgtgccacattttcttaatccagtctatcattgatggacatttgggttggttccaagtctttgctattgtgaatagtgccaca

SEQ ID NO: 257328 - DNA, 422 bp, Homo sapiens
agtggaaatagtctagtcaccagtccctaagtgctgatttgtggaccagttgctgcaggtctcaattcccaggaggtcccgtcgctggagattctgatcaagtagattgcacagcactcaggaatcagtcattgtataaggaaatccccaggagactctgatgcatgactacctttgggaataggctctctgggttttacaaagccattttgtgtaaaactataatttgaactcattttcgttggatgtggaatgcagtttggggattgataagggcttagttcacattggaagaaaatcagaattatagagtaattataaagagatgtaattaaaatacaaataccaatctcactaatgtaaactaaggttaatgttgccaaatacgactgttttaatgaataaattagcacgtgaattat

SEQ ID NO: 257329 - DNA, 235 bp, Homo sapiens
gcatagcctgttcagaggaccttacaaaattgtgcatcatgaaatttatcaactacttatagtaaaggaatgacaaaaataaatttaaaaggaggggttagcttccaccacctagactactatcatatgcttttatattcctatatgcacagcatatgcttctatatatgttagacatcttaatatacctgggttagcggcagcgtaagatggttttaagaagaaaggctctgca

SEQ ID NO: 257330 - DNA, 412 bp, Homo sapiens
gggagtgggtgctgattggtttgtgagtatgggaagaaaggctaaagcaaaggcactactcaaaagtgagcatggcagtgtataaaaccaattaggaaagggtaggtatatgtattataaaataagtgaagtatagagatcactcagaggaaagcacaccaaacaggaagacaggttctcaatctggtttacccaggactatctttggcttgaaggtcaggtttcaccagagtcctgcccctatgtgcctaggcatttgactgcctcttgtcactatcattaattcatagaagtaactgtactaagtaaaaatatatgcatgaatagcacccagaaaaagtctgaaagggtgtaccgggactatttttgtttcaaatttggagaaaaccaactgaagtcaacttaagcaaaa

SEQ ID NO: 257331 - DNA, 294 bp, Homo sapiens
tggaggagggggtgcagggggcttagcagccttccagggaaccagcgctattcttccatccagtttggacttccagagcagcgggagcacacgccaggccccatcttagtcgatttctgctgctttgttcaggggactttgtaggtacctggagaaacataaagaggaccccgggcctagaagcagcgtggcacagagaatggctccaacaccgagtgggctgcgccgggctgctctctttctgtagcccttagagtgatcccgaggctggtggggaggttcgtggtgcagggg

SEQ ID NO: 257332 - DNA, 346 bp, Homo sapiens
ttcatataaatggaaccagacagtatgtacttttatgtctgactttttttgctcagcatgaaaaactatattcttccattaaaggttgaataacttaaacaaaaaaaaaatttttttttttttttaatggactcaagcgatcctccttcagccttcccagtagctgggactacaggcacatgccacggcacctggcagctaggctgaataacataaaagattggtttttctgatattaatatcaagttcaaaattttaaaatttcacatgaaaattcaactaggaatatttttggaattttacaaattgttttttatcagaataaataagaatgattgagaaactt

SEQ ID NO: 257333 - DNA, 512 bp, Homo sapiens
gtgagttcttactcttgcaagactggattagttcttgcagagatggattagttccctcaagagtaggttggtataaaacatgtcaccctccttggtcccttccttttcacacatgcctaccccagttttgaccttctgttatgttatgacacagcaggaaagccctggccagaagccagcgccatgcccttgaaatttcccacctgcagaaccatgagctcaatagacctcatttctttctaaacgacccagtctcagatactctgttatagcaacactaaattgactaagacagtgttattttgtagaagtaatgtaatccctctgaaaagaacatgggattcagagaaaaatgccacagctcttagtccagttttgccatgacctagtagaatgagattgctgatgctaaaaatgttgaaataaaatcatagtataaaggtcctaaaaccacacctggcacgaagtaggccctgcacgaatgtttgctttagctatgtgttttctcacaa

SEQ ID NO: 257334 - DNA, 323 bp, Homo sapiens
gattctctagtagccctaattctacccatctggctactaattcaaactttcttccttcacatctgtttgtggacttctccaatataactagtatgcctgggctcattctgcttcttctcttctggaatagtttatttcatgaccatgtgcagagggggtgatggggcaagcctcacaagccccggaggtctgtggctgaggtgtaccttggctttgttgcctggaactgctctgactctgctcttcgctctttcctgggctgtgtcactacagctctgactcctttccaccttggagtttagcttcctaaaaaagaataaata

SEQ ID NO: 257335 - DNA, 254 bp, Homo sapiens
cccagctcagaccagcagatggaggaggggattctgagcactctgcggaccctctaggacctactcacccccattctatggacattttcccataaactgtgaaggaatggagggaaagagaactggaactgggaccatctgcaaacttccccctttttcgaccctcgcacctatcaccccatccccataccagacacaggtggcccttacctgggtcccgcagagaagggaataaaagccagaggtgacctctc

SEQ ID NO: 257336 - DNA, 601 bp, Homo sapiens
ggctgatgcttgtaatttaatgtggatactaatccattaagcttgtttattcatttccttaatttacatgtggccactagctagacagactttaggagttgctatggtaacttttcccttttttgctaaccatttggaaaccttacatttttcaaatctgcatgctttgaaaaggcctgcttgattctactttgtttttcaagctttgctttgatttactgtatttaatttgcttcaccttctaatttgttaaatgacatgttattaaaattccccagggggccagcaggaatctgtgccgctgagagacagcatgcattctggaagtcggtgattcacatctgagcactcagaggagattttggaaacccattaggttagcagagccgctctgggcagaatcagcgctggcagggacgctgcatttgacaactcaagtctttaggtgatgctgaaaagcctgccctagcttctcatttcctccgtcccccagcgaatcgttctttgctgctgctgtcctcggtgtgaaaaggtgacccccccactgcccatcgcacctgcttgctatctctcgtcggtcaccccctacaagaccggaaaa

SEQ ID NO: 257337 - DNA, 381 bp, Homo sapiens
tggatgggagactgcctgggaatacaaggtgctgcaggctttaaacaaacaaacaacccattccagataacttttggaaaaccgtttcacggatcattacacagaagcaaatgtcaataaaacatgtgatatattgcttcttaatattgtattattgctttgcgaaatatcaacatgatatgaaaataaatatgaacaggattgttcatgcacctaaaaaacaggcaaacaagatagagtcttatctgaagagaaaatattggcttggcacagtggctcatgcctgtaatcccagcacttcaggaggctgaggtgggtggattgtttgagcccaggagatccagaccagcctagacaacatggcaaaaccctgtctctaca

SEQ ID NO: 257338 - DNA, 420 bp, Homo sapiens
ctggcgaatggtttagagttctttcaagacgccaccattacaaggtagttatcttaactccttgtttaatcctgactccagtgtttactagagttgtgactaaatgacatgagcatcactcttttcacctttgaaaataaatacgtctgctccacctttcacgtgtaaagttgttaagaaaaattcaagtattttaccattattctgaacagagaaatttctcatttttctaccagaagaatgttgctgtaagcatcaaataaacactagtttcctttgtatagtgtcctggagataaagctatcagggcttttatacggctgagcaggatcatggaaagaattcagcatcacatcctcaccacagaaaacaccctactcctgattccctaaagcttacatgaaggaagcccttgtggtg

SEQ ID NO: 257339 - DNA, 996 bp, Homo sapiens
cagccctgggtaactggccaccacgccccgggcctgtctatcctcttcttttcccagaggttccccagccttcctagtccaccaggaggcggccaagagcctcttcctatcatgacacaaccacttccccttccaggtgcttggtgctgatggcaactgctgccacctgctctgctcatgccaggctggcagagggcacagatccttgagagagtgcaaggcccgccaggctccagggtctgtgcctgggcagactctattcatggggctccatgcccctcctttccctgactcaggcagagtagccatggccccttccactttgggtggagcaggttgctacctggcaaacccctggggtgctgcatgtcacccagtccctgcaggtcctgcaaattaatattctggagtcgcctgtgcttcctgtttgcatgggaacgaggctgcatggcagagccctctgcctgccctgccacctgcataccaatagggctgtggttcccgctgcagctccgggcctaacatctctgctgctgcagtggcagtgacaggctggtgggagattccccttgcctgagcccatgtgctctctgcagggctcctgcaagggaagccagtactgctggcgacagttccagccctaggcagggttatctgctgggagccaggagtgcttggacctctgcccttccctgggcaggcaggctggaatctggctcctacaaccctggcattgccgggagcagcaggttgacggctgtccattgcttggctgagtgatcagagtgccacgggccaagccaagcttgactaagaacagataaccctccggccagctcagggccttgctgagcacttcacgggctggggagacctgagctggctgccatttccttgccaccatcgtgggctgtggctagttacctccaggaaggccttctgcagtttccaaggaccctttctcctggtgctgggggcaggacatgggttgggaat

SEQ ID NO: 257340 - DNA, 569 bp, Homo sapiens
acccacggctctcgctcttttctgggaccttggcctctcgcactctcctgtctgttgatctttccaccatgctgccattccctacctctcggaaatagactttttttggatgtctttttgttttccttctgtgtgacctatttgtaggatccctttactagactgactttccaggagtgttcctcagcccccgcacagatcagtagggaggagcctgcctgctgcttgctcatgctaaaccagcgtgctgcccagcctgtgaagtttggaactggaacactagagttggccccaaattacagctttctcttctggctcctgggactcccagtttcttcagcaacaacaacaaaacctggaaaaacgtatccttgccagaggtgggagaatgaggctcacaaaaggaaaacacggacctttcttgtctcccccagtgagaggttgcaagatcaggttgtaaaaccccattaaggaggaccttagaggaagaactgagcaaggagccttctcaggtgcctgcaaacatctccaagagcaaaagtataaatcctcatattgtggaggaggta

SEQ ID NO: 257341 - DNA, 394 bp, Homo sapiens
gatatatatataaggtagttagaacagtgtctggcacataataagttgtatgtaaatgttatctatgattattaccaacatcaattgttatttctcatgaggaatattaagaacttcactattaattggctatttaaaaatgtaataggttggccaggcacggtggctcacgcctgtaatctcagcactttgggacgccaaggctgatggatcacttgaagtcaggagttcaagaccagcctggccaatatggtgaaactcccatctctactaaaaatacaaaaattagtcgggtgttgtagagggcccctgtaatcccagctactcgggaggttgaggcaagagaattgcttgaacctgggaggcagaggttgcagtgatccaagatcgcacc

SEQ ID NO: 257342 - DNA, 123 bp, Homo sapiens
aattatgtagtttttacaaatgcctttgctattgacccaggagtgcatgtaattataaactgactcatcaaagtgttctaattccaaggctagaatccattaacttataagactctccaataa

SEQ ID NO: 257343 - DNA, 391 bp, Homo sapiens
caatatctaagagcatatcaaatggatcatacaccataatcaagtggttttcataccaggatgcagggatggtttaacatctgcaagtcaataaatgtgatacaggttgggtgtggaggctcacgcctgtaatcccagcactttgagaggctgagagggtggatcatgaggtcaggagttcaagatcagcctggccaacatggcaaaaccctgtcactacaaaaaacatatacaaaaaaattagccgggcattgtggtgcacatctgtagtcccagctactccagaggctgaggcaggagaatagcttgaacctgggaggcagaggttgcagtgagccaagatcatgccactgcactccagcctgggtgacagagtgagactccatcttag

SEQ ID NO: 257344 - DNA, 393 bp, Homo sapiens
cactgagacggaatgaatacatttttcatgtgagaaggacttgaattttggggaaccagaggtggaatgctatggtctgaatacattttcctaaaatatgtatgtttgaacctaatctgcagtgtgacagtatgaagacataaggcctttcagaagtgatttgagtcatgaggatggagctcttacagaattagtgcactcagaaaagattcttgaagtagccctcagcttcttccaccatgtgagagcactgagaaggtgccacctatgaggaacaggttcacagacataagatctccccatgctttcatcatggactttgcagtctccagaaccaggagaaataaatttctattgtttatgttaaaacaaactaaataaagcccgagaagc

SEQ ID NO: 257345 - DNA, 412 bp, Homo sapiens
atcatcctcattatttttatggatacctaattctccatcatgtggaggtaccacagtttattgaaccattcctctactggcgaacatttgagctgtttccttttttttttctagtacaaatatgcctcatgaataactttgtgcatgtatcatgttgcattggtacagttatatctttagaattctagaagtgggatttctggccaaataataaacacagctgtgatcttgatagatattgacatactctcctccaagggagtggtatcattttgcattcctaacaacaatatatggtggtacttgtttatctgcggccttaccaatagaatatattgttaaaattttgatttttgcctgtttggtggggaggtagcatggtgtagtcttgatgctcgtctctctatgactg

SEQ ID NO: 257346 - DNA, 425 bp, Homo sapiens
acagcttttcagcaccatgtatgttaaataggctcttgtgaactggcctaggaacctaattactgttatagtacagtttctgtgggaaaatgagatctagatgcaataagctttgggaaatatacccaatatgtaagttagggattatctgatcagttatctaaaaaagtcaggatcttcattctctggagtgtggctgtgttagggaagtgagaaagggtgaattgggagattaactctgaagaaaaggaaataaagatgtcaaaggcaaactttgcttgttctgtgttttatccaagtctctcatggtgtaattaccattgacttcttaaaatgatctcagattctcctttaggttactgttgtaagttaccatcatctggcatatttcatattaataaatattttcatttttaatgatgtta

SEQ ID NO: 257347 - DNA, 873 bp, Homo sapiens
tgtcatccatgaacacccagatagaattgttgctgttttgcagaatcatcaacacaggctcctggggcgtcaaaggtgtcacagcaccctgactgcaagagtagattgggagatgctgttgtgtctcgaaatcatccttggcgaatctccatcacacttggccattttatcttcctgttcactttcagtgcccaaggaagagaattgtgggaccaatagcaaaaccttccccacttgccttccagccatggtgagaatttggaggaaatgaaaaatagcctaattctcatacaccaaaaaatatcaagagttcctgttctaatgagttgtttttacattccacttgacaggaggctgacgatttgtggtttgcagtgtgagtgaccttcttgaaaagcattctgtatcttcattgactttgaacagaccttaactgctgggtgaatttgggcacagttcattccctcggcagatgggcgtgccagatatcacgtgtactgtcttgggcctgtaatccaaatgcacagtagatattaccaccctccgactttgttttgggaaatccccggatgtagaaacattggagttgtcaatttcatgtgcgtgggtctttccctaaactgtgaatccttcctccccaaaatatcattcattaattgatcttaaaaatcagctgggagttaggctccttatttaacactgccatttgcacctctcgcttatataacacatttgatattctctttatctgctttgtccccacctttgaatatctcatggaggctgagctttgccaaacagacagataggaagcaaaattagaagcttttttctgtgctgacttctaagggccttcctggttttctgtgaagc

SEQ ID NO: 257348 - DNA, 433 bp, Homo sapiens
gaaacaagttacccagcgatactgctggcttagtaaccaggtacctaataaattcttccatggcgaccatatgaccttattctttaggtttagacacaagggatttccttggtttggtgacagaaaggtaagagttatattaccatcaaggtcaccatttgacttttaagaaaaacccattcccgccgagcatggtcactcatgcctgtaatcccagaacttttgggaggctgaggcaggaggattgcttgagctcaggagctcaaaaccagcctgggcaatatagcaagacctcatctctactaaaattccaaaaacctagctggggttggtagcgtgtatttgtagtctcagctacttgggagggtgaggtgagaggatcacttgggcccacaaggtcgaggctgcagtgagccctgattgtgccactata

SEQ ID NO: 257349 - DNA, 453 bp, Homo sapiens
ctctctctctttctctctccatctataaagcccaaaacatttttggtcccgagcattttgtataaagggtactcaaactgtagaaggcaaacatgaaaaggctaattcagcttctctaaccttcaagttctaattctaaatgaatgtctcattctacgacagtacactaagtttatactgtatgattgctttttttcacccactccaatggttcaaagttatttctaatatgaaaatactttagttttctcaaaacttttctctgcaaaactaaattccagctgtcagcccttgagtgtataacaagtggtaaagaaagactaaatgtaaatgttagcaaaattgatggttgctgtcacagagccatagcttgatctatagagtgcctacagcttgtgaggtaagcaacacatttgaaacttataaatatgaagtttctcttctgatgttaaa

SEQ ID NO: 257350 - DNA, 421 bp, Homo sapiens
ccttcagcaacatacaaaaaaagaatgtatcttcttttaaattttgtctcttaatgaagatggaataaagtatatactactctctgagctattggagagtatcacatggtgacttttataaagaaatatacaattaaatttcaggattaagcaaacattttttcctggccttttagaaaaaataatctttactgtccatatccttggacttgtcagatatactcaagcattagctattatttctacatcagcaaccactggtattatgagcaatctctgcctttttcaacctacatgttatctcacatgtgaaaacatgttgaatcgatatgaaggagcactactaagcattgatcattttgggaacaaatagaaattattattagttatcacaataaaatttatctaatagaaaaatgta

SEQ ID NO: 257351 - DNA, 1157 bp, Homo sapiens
tcccaggtgcccgtctgatggggagatggctgatgcccagaacatttcactggacagcccagggagtgtgggggccgtggcagtgcctgtggtctttgccctaatcttcctgctgggcacagtgggcaatgggctggtgctggcagtgctcctgcagcctggcccgagtgcctggcaggagcctggcagcaccacggacctgttcatcctcaacctggcggtggctgacctctgcttcatcctgtgctgcgtgcccttccaggccaccatctacacgctggatgcctggctctttggggccctcgtctgcaaggccgtgcacctgctcatctacctcaccatgtacgccagcagctttacgctggctgctgtctccgtggacaggtacctggccgtgcggcacccgctgcgctcgcgcgccctgcgcacgccgcgtaacgcccgcgccgcagtggggctggtgtggctgctggcggcgctcttctcggcgccctacctcagctactacggcaccgtgcgctacggcgcgctggagctctgcgtgcccgcctgggaggacgcgcgccgccgcgccctggacgtggccaccttcgctgccggctacctgctgcccgtggctgtggtgagcctggcctacgggcgcacgctgcgcttcctgtgggccgccgtgggtcccgcgggcgcggcggcggccgaggcgcggcggagggcgacgggccgcgcggggcgcgccatgctggcggtggccgcgctctacgcgctctgctggggtccgcaccacgcgctcatcctgtgcttctggtacggccgcttcgccttcagcccggccacctacgcctgccgcctggcctcacactgcctggcctacgccaactcctgcctcaacccgctcgtctacgcgctcgcctcgcgccacttccgcgcgcgcttccgccgcctgtggccgtgcggccgccgacgccgccaccgtgcccgccgcgccttgcgtcgcgtccgccccgcgtcctcgggcccacccggctgccccggagacgcccggcctagcgggaggctgctggctggtggcggccagggcccggagcccagggagggacccgtccacggcggagaggctgcccgaggaccggaataaaccctgccgcctggactccgcctgt

SEQ ID NO: 257352 - DNA, 486 bp, Homo sapiens
tgttatctcctagaatttttatagtttcaggtcttaagtttaagtccttaatccatcttgagctgattttttgtatagggctggacgttcgcttaggcaaggatttcatgaccaacaacctgaaaggaaatgcaataaaaacaaagataaatagctggaacctagttaaactaaagagcttttgcatggcaaaaagaagagtcagcagagcaaacagataacaaacagagtgggagaaaaccttcataatctgtacatctgacaaagtgctaatatccagaatctacaatgaactcaaacaaatcagtaagaaaaaaacaattccatcagaaagtggctaaggatatgaataggcaattctcaaaagaagatatacaaatggccaacaagcataggaaaaaacgctcaacatcacaaatgatcagggaaatgcaaatcaaaaccacaatgcgataccacctcactcctgcaagaatggccataatt

SEQ ID NO: 257353 - DNA, 352 bp, Homo sapiens
ggctcatgctggggtctccctatccagccactgccctgccctgatttgtcctctgcacatctggtaccaactctatgcctcaagatgtgggcactggcctggcagacttcacgtggcctggctttgtatctgatgtgccgggagattcgggggatcgcgttggtgggctcctagaacgggtcttgtgcatggcccctgccaggtggcttgaattcccactgcagtcccgaggttgaggggctcatgtggtgtgtgtgccctgcaggcccgggggggctctgagtctggggctcgggctggcagtggcccaggtggctgcgggtcagcagcaccacctttccccacgcctagc

SEQ ID NO: 257354 - DNA, 400 bp, Homo sapiens
gaaacaccacagtgagcgaggcaaaaagtgtcctcctcacaggatgttcaccttacagagggagacacagttgataaacaagtaagcaaatacattaatgagaggtttcatgtgataaaggctgtgaagacaataaagtaggtaataatgcaggagatgagtagagcaaactacttaaatagaggagccgggttaatctctcattcacagtgaggatgcagtggccagaagaggcagcccagggaagatctgaggtgaaccctctggttggaaagccttggcaaattggaggaatgaaaagaaaaaagagtaaatctacaacaaggatcagcaaactccagtctacaggccaaatccagcctgctgcctgtttatgtcaataaagttttattggaacata

SEQ ID NO: 257355 - DNA, 468 bp, Homo sapiens
ggcagctaaggggacctcacttgtatggttatagaactggtcaataaacatggcatccctggaggcaaaacaggtgggcagctaagaagggtactactcagctggcaaaaaaaaaaaaaaaaaaaaaaaaaatccatccaggcacggtggcctgtgcctgtaatcccacctgagcctcctaagtaactgggactacaggtatgtgtcaccacacctggatacattttttattacttgtagaggcaaggtcttgctatgttgcccgggcttgtctcaaacttctaggctccagtgagccatcacacctggcctgccttgaacctgaagcctgccggggtggctcacctctcctattaacctgacactactcctcctccctccacttactgctcagtagatgtataattatggttgtttcttttgcattattcagctggaaacaatgagatagaaaagagaatatagctc

SEQ ID NO: 257356 - DNA, 393 bp, Homo sapiens
gtgagacactaggaaaaggaagaagcaggcaaattgataccagtgcagggcgggaaaggcagatggatgtgtggcgctcgagaagcatgtcctcaacaatttcttctgcagttgttgcccagtaatggagtgaatggggaaatgataagacagcatgacagaaggacagcacaagtcactagacagctcacaggcagaagggagagggaagccccagtttttccgcctttacccctaggttgaatttccatttagaaaatggaaatttaaaaaatttaactggtacacaatgtatacatgcattgaaacatcacacggtaccccataaatatgtacaagtattatgtgtccattataaagaaaacttcagagaagctaaagggatggcatagg

SEQ ID NO: 257357 - DNA, 626 bp, Homo sapiens
ggttctagtaggagggatgtctttcctgcgtggctgtacacaggagaacactgtaaagagcaaggactggcattaaattctgcattaaacgtgaggcctgtttttacatttacacatacagatttcagtttgcgtagtgaaccgtgggaggctgtctcagtcgtgccttcctggggtcaaaccagttggcctgttttcaagaatgaaaaatgctttgcccgaaagtggggcgaatggtaatcacagacacacacgtctcggtgccagagttgtagctttatacatagtgccttcctgacaagtaaattactggattcctttgccaaatcattagataacttttaagagcaacaaacattcatgcaaaaggagattcagcattatcttgttagaaaaatagtcatgatttttgaaaagcaaggacattctgtgaagtttgaccaactgtgaaaattacagcctttcttccccgtacttcccccgtgcttttcaatcaatcagtttctaatggatgaagcattccctacatttgtcactagatggatgtgccggtcaattaaaatattctgacttcgcagggttgagataatagccagcctggatccatccgttactgtgaaatagaa

SEQ ID NO: 257358 - DNA, 370 bp, Homo sapiens
ctgagtgtgtgtgttttaattactgctttgtccattattgtttctgccctcatgcaggaagcaaatgaactacaaaggtgaataagccacagtctaaccttaggtctgatgtgggagatagacctaatacaactctgataaaggatagaatgacacaggagttcatgagtaatgattaaatccaatgggaagtacagagcaatggagaagactttgtggaaaggggaggatttgagctggaccctgatagtggagtggagtttttaagaacagaggtagggatgcatgtaagtcacatactcaccaaagagccatctgtgtcactgggtagtaatgggatgctgatggaatttttatacctttgcatgtc

SEQ ID NO: 257359 - DNA, 448 bp, Homo sapiens
agcagaacgcgggctctcgggtgggtccaatgcgctatggcacaccaggcgctatcgggtccctagccctctgctccggcggtggggaccccgcactcaagttccctataacctccatggacaaacacggtgagcgcgaggctaggaacagagtgagcgttatccacggccaagggacacctctagggagcaatgggaaacaaaatttcaaccaggtcggaaggcggtttgcctttctcacactgccaagccccccctgggaagccgaagccttgggggtggggggagtaggtgtcctccaaagtcctctggcccctgctccagaggggagagggacagatgtgacaaggatgaggctttgccctacaccaagtgtgccgggcaagtttgggaaggtgaagcaatctgtgacttaaataaatatcttcttagccagaaaaatgcctgc

SEQ ID NO: 257360 - DNA, 274 bp, Homo sapiens
ggagaaaaagaaaagttaggcatcaatgtaagggagtagatgatatagaagggtggaagggtagggtcctgtagggaaagtggaggggaataaaagaaatgggcgtgtggagggagagggcttgcagtttttaatcagggagacagactgtgcctcattgagaaggagacatgtgaacaaaggcttttgggaggtgaggagtccgccatgtagattgccagaggaagagcatcctgggctggcacggacctggagtttccaaagcaccacaggg

SEQ ID NO: 257361 - DNA, 689 bp, Homo sapiens
cagattttttttatatttcctcagcttaactctgctacttgatttacagtgacccataacctactcatccttggtttatagtgacacataatcttatctctttatagaaccttaaattttatcattattttcgcttagaatacagcatttctttgcttctgttgctggtttgacttaagaaataaggcagtaactctgatcaatcaattatccataaggaaggtcttttcatggtttctattaatttgttagtaccctaagtatatctgaaaaatatgtctattgagagaagattttggcattccagatggtatagtctatatatatttaaagttttgaatttgcttatatatactcagctttctttttctagcatttttgcatttacctgttaattgaagtataccccaccacatataaaagttcctcttaaagacactggactcttcctgggggttctaaaataagccaaaaagtttgatgtataaaattttttattggcctctgatgttctgtttagatcactatcctataagtaaataaatttgaaatagattcaaaatgtcctctggttgaaatctaagagttggaatgttgaggaagtgtttgatacattcttgcatggaaaagaacagtttgaaataatgtgtaatacataatacattacatgtgttttgaaaaaatcagaa

SEQ ID NO: 257362 - DNA, 387 bp, Homo sapiens
gacctgtgactttcttactgatagctcaagggggaagggaggatgtgcttacccatattctcaagccaaacattttggtcctaggaggaaaacagaagacaggtagcatgctcagctgggatttttgaagaggttttttaaggaaggaactacttacagagttgtatgcaggggttaaggaaacgaactgggtatactggggtactatgtcctacttggaagtaaatcagatatgccatactcctacagtgggatacacagccccattggcccaaggcttctcccctccccaggcttgggctaactattttgctctttcttatcttcatatttttggctcatgcttttgcctcttcttataataccttttctccctcccctttcttt

SEQ ID NO: 257363 - DNA, 480 bp, Homo sapiens
cagcacaaaggcccttgccagatgtgagccccttgatattggatttcccagtcttcagaactgtcgaaaagcccaggaatgttctagaatatatgattggcgaggaccctcactggtgccatccacatcttctcttcaggactgggaacgttggcagctgatgatcctctgggaagttccttgatacctgatgccaagtcctgaggtttttggaagtgctgcagtggaaattaggttcttcttggctttcccagtttagcatttggccttctcagattcacaagatcaattatcattacgtagacactcacattctctttgtccttgtgagtttatctctttactgtaattttagcagcatagagaggaagtaagaatgaatctatgttgagaatttacaagaacctcttaattttttacttcagaagggtgagctttatggtacatgagttatatctcaataaaaaacattttaaaaat

SEQ ID NO: 257364 - DNA, 300 bp, Homo sapiens
gggtgggggcaggtgactgggatcacgaaatcaccatcacctggagaaggcagggtaagatgtggagaagagacagatgtgggaccctgggcagatcctgaatgtctgtggagacatctagaatgccatcgtggctgggataatgaactcgaatgccctcactgtttctttatctcttaaccagagctcctgaaggagattctcaagaggacagctagacgggggaggattgcagaaagcttgacatctacagaatgctggagaaatgtgaggttgcttaccctgaagaaatacgggatg

SEQ ID NO: 257365 - DNA, 291 bp, Homo sapiens
cctcaccaccctctgatgtcccctcattactctctggtgtcacctcaatactcaccagtgtcccctcactgccctttggtgtcccctcattactctctggtgtcccctcaccgccctctggtgtcccctcaatactccccggtgtaccttcaccaccctctggtgtcccctgctctctggtgtcccaatactctctgatgtcccaatactctctggtgtcccctcattactctctggtgtcccctcactgccctctggtgtccccgcaatactctctggtgtcccctcacc

SEQ ID NO: 257366 - DNA, 208 bp, Homo sapiens
ccccccccttctttggaatccaggttttcgttccaggaagtgcattaacttgcgggataatttgctgatcacactggtacagaaaccattgagaggctttagactcctactcatagggatcaagacctggagacaaaggagtcaagggaagccccatggcctaaccacagccctaggaatatccccaatgcctaaggaaacccattca

SEQ ID NO: 257367 - DNA, 361 bp, Homo sapiens
aaaattccaattaacttatcaggtacagaaaatttatttgcattaagcatgttatttttcctcaatctctcctgtttatgactaactgcataccattcaactaacataaaagtgtttactaaaagatcagagaagttatccaccttcatagccatttggaagagaaaaaaaatctttctactctttccaaaatgggttataaacacatccctagagaaatttcaaatgaatgtattcctctgcaatttgattctgcaaaaaaatgtatgcaactgaaaattacacacagagaatatttaagtcatgactatggaaaaacaattactatatttggatacacaaattaggcaactaattattt

SEQ ID NO: 257368 - DNA, 352 bp, Homo sapiens
ttgataaagccattccaattgactgaggtgatatctcattgtggttttggcttacattttcctgatgatcagttatattggtcattttttcatgtacctgctggccatttctatgtcttcttttgagaaatgtctattattttgccaatattaaaatcaggtttgttttttttttttgctgttaatttccttatatattctggatattatccctttatcagatgtatagtttacaaatattcccttctattctgtaggttgtttctttactctgttaattctttcctctgctgtgcagaagctttttagcttgatgtaattaatttgtctatttttggtatattgttgactg

SEQ ID NO: 257369 - DNA, 361 bp, Homo sapiens
tggaattatccatcagggtattctaatcagccgccacaaatatctcttaggtattaggggctgcaggagggacccttctccagaggcatgacccatagacaaggcaatgcttaatgcagagggaccccaaacggtggcaggtcaggagagcactaggctctccaggacacatggcatggaggcagaggcctgcacctctgcgtgagctctgagctctcccaaactctgcctcttgccagctataggagagggggctgcacctggctaatttggatgggttctcttctcccaggggttgtggtcaagcaagttatcccaatgggcttgtaccttttcttggtttttattttctacactgatg

SEQ ID NO: 257370 - DNA, 110 bp, Homo sapiens
ctgaacttcagactcatatatccaactgcctactgaacatcaccatttagttgtcatcacaaatacatcatgtcctaaactaaactcttgattttctaccccaccacacc

SEQ ID NO: 257371 - DNA, 387 bp, Homo sapiens
tcctccaggctccaaacttccttccagggtcaaataagacttaccaaggggagagggtggatgtgagcaggctctcctacagtaggaagggtggcccaagtacctgaagttagaactggctctctaacaatgagagtgagactccccactctaggtctcactgggtgctttccacttctgagtcactgaagtgctttgacggaagtgaccttggtgatcacctgtgacctaaccccgcatttcacacatgaaaagagcaagtgaattctcaagattaatgtttctgtagcacagctggaaccagaaagcctcattgtttcaagagtcacttttaaaaactcacttgtctgcctggaaaataaaggatccagtgggcaactgaacaaa

SEQ ID NO: 257372 - DNA, 294 bp, Homo sapiens
atccagtgtatgcacttagcatggtacctggtatatgcacttagcataacatttagtgtgtggactcggcacagtacccagtatatgcacttggcatagtaccaggtgtatccactatttccagtgttcccatcagtccagtggcagaagtagtgaaggagttgagtgtcttgtcactggaggagtttaagcccaggtcacctgacaactcacacagatatttcactgtttacactacatgaacttttggggccctctgacaatctacaattaatctgggagcctgaaaatgat

SEQ ID NO: 257373 - DNA, 297 bp, Homo sapiens
ggtcgacggcaggcactggtggctcacacctgtgaatccagcacttcgggaggccaaggtgggtggatcactgaggtcaggagttcgagatcagcctggccaacatggtgaaatcccatctctactagaaatacaaaaattgcctggcctaatctaactttttaaatgttaatgttttctatcccttcagagtcataaactggaataaatgttccaaaagtttttctttttgttttgaattttatgttgactgattaaggtagttttaacaacattcattattagtcaccggagagg

SEQ ID NO: 257374 - DNA, 704 bp, Homo sapiens
gttggctcttgatttcaaatttatcatcttttttctcttaaatattcttctctgtataagcaaagattacctttgttgtaattatattaaaaaaatcagtgaaagcagcactttaaaaaaataataaaataaaaagtccaggtttgtttggtttggttggttttttgcccttggcatctgtcttcacatgagtcacatatttttgattcttttcatcatttaatagtaaataaacatggatatctggatattgtatgaaacaaggacaaaactacaatgcagagttcaaaagtatcctcagaattatattttcactttatcctgtttgtctcttattctgatatcctgcttacttagttaccatttctaaaaatccatatattcatttatggagatgggaacatatctcatttactgttgtattgtcagagcctaccacactcatttactattgtattgtcagagtctaccacagtactttatatgtggtaaaagtccaataaatattggataaatataatcataattagttaataagggaaaacagttgccaagagaatattatttactttctatttcaaaggacaggtagtataaagaaaattaaaatgagattcatctagagtgtgttacaggtaaaagctgttcaattaattaagaactttaataacttccagtttatggtgctataacaatttctggta

SEQ ID NO: 257375 - DNA, 680 bp, Homo sapiens
gctcatgcctgtaatcccagcactctgggaggccaaggcaggtggatcatgaagtcaggagttcgagaccagcctggccaacatggggaaaccctgtctctactaaaaatacaaaaaattagccgggcatggtgatgtgcgcctgtaatcccagctactcaggaggctgaggcaggagaatcgctggaacccaggaggcggaggttgtagtgagccgagatcgcgccactgcactccaacttgggcgacagagcgagactctgactcaaaaaaaaaaaattaaaaaaaagggaatgcacagcctctgtgtaaagtcctctctggtacccactgcacagatggggaaactgaggctaaaaagagggtgacgcccccccaaggtgtgcagccaagcagctctgtccgcattctctaacctgccgtggtacagtgagggtgggtgcttggagaattcattctcccaggcctggccttcagaggaagaggagttaggaaactcccccagggacccctgtgtgtgtatcaatggtacctcggaactgggaggacacaggtgcgacagccccatccccaggggaagccagggaccttgaggctatggatgggatgcccctgggccctgggcattggggatttagccggccccgcactcctcctaagcaggacgtggagggtgagcg

SEQ ID NO: 257376 - DNA, 359 bp, Homo sapiens
ctttgaggcaggaattgaatataaccacactagttatttatagcagctagtgatgaatgcttgaaaagtctgcttaaggccaggttcggtcgctcatgcctgtaatcccagcaatttgggaggccgaggcgggtggatcacttgaggtcaggagtttgagaccagcctggccgatgtggtgaaacctcgtctctactaaaaatgaaaaattagtggggcatgatggtggacatctgtaatcccagctactggggaggctgaggcatgagaattgcctgaacccgggagacaagaggttgcagtgagctgagatcaccccactgtactccagcctgggcaatagagtgagattcagtctc

SEQ ID NO: 257377 - DNA, 2177 bp, Homo sapiens
agctggaaggagggaggttagagccacccatgggttcagaagctgataagcaggttattgactctgaatttgcctcatcgtatgtaaattggggacaaatttggggatttaatgatataatgtaagaagcagacatgtcacagccctggttatacagtcagtgtataataagtggtaagccgtcagaggaggcagccggtgagaatgggagcatctcagcagccctccgccccctgctcctggttgcagatgtacctgttcttggctatttgtgccccagctccgtgtcctccggtgtgtgtgaggccaagctcctggggtggggacttgggggtgtgtctgcagctcctgaggccaagaccaaggctgaggccgaggctgaggctgaggccaccttggtgaggaggaaattgcaggtggagaagctcgttgaccgtgaccttgatctgaccgtaattttgatggtgccgatgccgtcagcacgcaggcctcctgccctcgccacgactggctcctgcagcccacctggctgagaggtgtgctggctctcgcaggttgcaaaatggggacatcaccgtccgcctgggctacagcgtgctcgccgattgcatttggggagggactgagggctgattgtgttgtggggatgttggcagagaatcagagagggcatccaaaaaggccaacagttcggtggggagaggaggcgcaaggctggttcctgttttctgggctttgatcgaaagggaacaggggacacatctggggacagtctccttcctggaggaagaagggcttagggtgctggtgtggagtttgcacagatggggataatgagctggagggtgctgggcaggagctggccagtaataggctgacgagggaggccctgctggctgggcctggttttcaagtgagcatcctgagctgcggggacccagggggtcttagagacctcagagctgagactcgggaccacagaggggtgggctgtgctcagggcaacacagcggatggggcagatgttgcgaaacctgtctctctgcctctctttctcctgctacagaactggatcctcccagctcatggctgtcaaatcctttagatgcttctgggttccatgggcgccttacactggcttccctgtaggacagcagaccctgggggttggctctgatggtattcaccatggggtaccccatgcaagcacagtgctttcacgcccagcctcccagcctgtggagtaggcctgtgtctggccagcctcgctttgtggccagaggagggagacagtggttctggagacaggagctggcctggggctgccctcccagcccctgttctcccagctcatctccttgccttgcgggtgctggccaccctccccccgccagctccatccccagctttctctgcccgagccgtgacctgtcagtagggggcagtggaggccttgaaagtccttggagaggactttgaagcagtttttacaaatctgtccctggaaagtctctcctgtcacacccccagcggctccctccctcctaacatttttcctggggttgtcatgcagcggggggtggaggaacccactaggccgtggatagagcagagccatgttgacacaaaccctggctgaacccacatgctccctacagccagcggccgatcactggaaccagggaagtgacctcatagcaagggcccgcagagcagccatcacgcattcccgatcttggtttctggacccagctctggaaaagaagccagatcctagccacttggagctgcctagggaagaccccagcctggtgccggctgacagctcactggaacttttcatctgcttggccaggtgatgccaaggggcagaggttagaagtgctaagaagcaggccgagggtggtggctcacgcatgtaatcccaacactttgggaggccaaggcgggtgaatcccttaaggtcaggagttcaagaccaggctggtcaacatggcgaaaccccatctctactgaaaatacaaaaattagccaggtatggtggtgcacgcttgtaatcccagctactctggaggctgaggcaggagaatctcttgaacccgggaggcagaggttgcagtgagccgagactgtgctactgcactccagcctgggcaacagagcaatactccgtatca

SEQ ID NO: 257378 - DNA, 401 bp, Homo sapiens
aattcggcacgaggtcgaaattctattaactgaaatatgaaacacctaaagccctcaaaatgggcaaacgttgcgtggtgcagtcccagacccaagcttctgggagtgaaaggtgcacccgcgaccttgccttgctggctggctctgggactctgcgataagccgccctccggttgtctgcgatagctcctgaagcaggagagtgtctttcccaccctccgcctaacaggcggtatctgacccttccaggcagcagctccccagcctccggctgcgctggggcccggaaggacgaagcttcccggcagagaacctgggcagaggcgtccgttgggtaggcggccgcgacccgctcgctgcttctcccctagtcttcgggtcccttgaacgcaggtcgcttg

SEQ ID NO: 257379 - DNA, 437 bp, Homo sapiens
gccactgcactccagtttgggcaacaaaagtgaaactccatctcaaaaaaaaaaaagagtgggggatggacaggttttagagacataacagcccctggtaagcagagtgacccaaaaggggaagcaggggcaagttcggcaagttagagtgagagtaatttttgacctaacgcaggtggggaagaaaatgaaaacctgaataggtttgaatttgatcatatcgtgctggctgtgacaaccctaaatgatttacaaatggctcattaaaaaaaaaaaaaaaaaaaaaaagtgtatcatccgaatcctcaacaagaaaaaaaaggagcaagaaaaaagaattctcttttgtccctcctacccacatctttgcatgcctgtcacccctcatggatgccatcctcactgttcagcgtctagttctagatcgcgagcggccg

SEQ ID NO: 257380 - DNA, 485 bp, Homo sapiens
acaggagtctaccatcccacggccaagcgtgtgaggcctccggcgggcgggggtcccccccggggcagggcagggggagagtcaggcatgtctctaacgggctccctagtagaaccgctaggaaagtggccttcaaccctaggcacctttgtggctttcaggtagttgggcgactaaaaattcacttttgcctgctgtgaaatgggacaggtggttgtcaggttagagactgtgcccacgaagtctcgtttggcgggccgggactgacgtggacccgggccctcctcggaagcttgggaacctgtgagcccctcagctcctcgcctcactttgcctgtttgaaaaaaggagttgtttgagaggaagagttaaggctcaaaaggttctaaacgaagagcatgcggcctgacgcggagcgcaaagaagcgagcagtgaactgaatctggtgggactgagaccagaggcgtctgtatgcggcggccgc

SEQ ID NO: 257381 - DNA, 437 bp, Homo sapiens
cattacttaaacatcagtttcgccaaaaaaaaaagtgcatataaaaagtacctcatgactctgttttaattagttctgttgtcattgtcattgtgcaattggaaatggtgtacactatctgggaaaacttttgtagaacatacaggcatttatattagatttagaatgtagtccttcttcgaggccctgggaaagaaatagagatgggtccttgtaaattaaaaccttacgcctcatgtgtttaaagaggcctctctgattggctaagatgtggggtgctgagtttgcaatcatttcagtgcagacattttaggagaataagtaagacttgtgcttctgtaagtcaacatttctgttctcccttctagatgatttgtttgtgtatgagggaaataatgttatgcatctgttaaaattacagtctgatcaaatcgttt

SEQ ID NO: 257382 - DNA, 252 bp, Homo sapiens
tttacaccacagaaattggctgatgctacaacccagagcttttctcctgaagctgggagtggaacattcagcagcacaccactacctgggccccatccaccttcaacccaggcagctccatgtcatctgttttatgcattgggtctggggaagatttcatttgagggagggtttaaaaaatttttaaaaaatcatttatttgttttaatcaatcctgggtataccaagtaaacctatgcattatggactaac

SEQ ID NO: 257383 - DNA, 372 bp, Homo sapiens
gtatcatttcccactggtcactaacaggagtaaagaaaaaataatcagtggagattttataaaaatggttgtttctggactcaatagactagaaagaacaagtaatactgtggtaagagtctttgttatatttgaaaaatataatgaagaaaagtaaatcttccttaaggataataggcaaacatatattttttaaattttttatgtttatatatttagtgagtacaaatgcagacttcttacatgcatatattgcgtaatggtgaagtctgggcttttagtgtacccatcacccaaatagtgaatattgtaactaataggtaactttccacctctcatcttcctcccatgctcccaccttatgagatttct

SEQ ID NO: 257384 - DNA, 513 bp, Homo sapiens
accaaaaagtttggcaatactggtgcccaggttaatgtgaaaaatagacaagggaactttccagacaaaatacagaaaatgccaaccggtttcttgcagcaacttataagaacatataaggagactaaaatacaaaaactaaagcaggaactgttaagattctaagtggaatttagaggaaatttaaaaaggccaggacttgcttgatttgaaaacagaatagttttccaaccttagtctctcttagcaaaaattctccaaagtagaaaatggcttcagcacaaagataaaacttaggatgccaccattaaagtatgggctcagagataaactgaaggttgtgactataaaccatttgttaagacttcagacagatgtaagggtatacttagccgggcttctaaatatctcatgggcacatcttgtgaaccctctcagttaaacaacaagggttttagaaatattaacatcctacaagaaccacacagggggtctaacgtagaaaagggcctg

SEQ ID NO: 257385 - DNA, 335 bp, Homo sapiens
acatacgataatattataggtagtttctgagtctgaagaggctcacaaagcctctctatccagaggactggcacatcctgcctaccacccaagtcaagctcttattcataggatggaaagtggactatagtaaaccacgtgcacaagcaaacagtaattttgaaatacagactcaataagcatttgtgacaaagcgacaagatgaaagaagtatcacattcaattaaataatgaatatccaaggaagcaaagttgataaagaaaataaagtttatagtaaatatatggatattgtcagtcttttcattatacagaaaaaaattaaacttttggct

SEQ ID NO: 257386 - DNA, 482 bp, Homo sapiens
actcactacccaggagagcagagtgataaagcacagtgcctggggtggggctgcaggctctatgacctcctggggaacgtgtgggagtggacagcatcaccgtaccaggctgctgagcaggacatgcgcgtcctccggggggcatcctggatcgacacagctgatggctctgccaatcaccgggcccgggtcaccaccaggtaaggggcttggtcccaggcaacacggggccttgtagctgggggctgatgtctgaatcccggtcccagagtgtccctaccttcacaccaccaaccgtctgtgtgtgatgagctggtcccagcacctccctgagcctgtgcccagttgtgggtacaaaaaagaaagccagcagcacttgctatgaaaagcaaagggacccaggacaccttgtgactctcctgccagctcttggtacccagggagactgtgtgtggcatcttaattatggggtttctcctctt

SEQ ID NO: 257387 - DNA, 766 bp, Homo sapiens
  misc_feature (760)..(760): n is a, c, g, or t
tactctcgggccctggcctgctgtttttggcggggaaaacgactgcccacggaggaagagtgggagtttgccgcccgagggggcttgaagggtcaagtttacccatgggggaactggttccagccaaaccgcaccaacctgtggcagggaaagttccccaagggagacaaagctgaggatggcttccatggagtctccccagtgaatgctttccccgcccagaacaactacgggctctatgacctcctggggaacgtgtgggagtggacagcatcaccgtaccaggctgctgagcaggacatgcgcgtcctccggggggcatcctggatcgacacagctgatggctctgccaatcaccgggcccgggtcaccaccaggatgggcaacactccagattcagcctcagacaacctcggtttccgctgtgctgcagacgcaggccggccgccaggggagctgtaagcagccgggtggtgacaaggagaaaagccttctagggtcactgtcattccctggccatgttgcaaacagcgcaattccaagctcgagagcttcagcctcaggaaagaacttccccttccctgtctcccatccctctgtggcaggcgcctctcaccagggcaggagaggactcagcccccttctccatatgcctccaaaaacatgtccctggagagtagcctgctcccacactgtcactggatgtcatggggccaataaaatctcctgcaattgtgaaaaaaaaataaagtcgagcgcncgtgaa

SEQ ID NO: 257388 - DNA, 1544 bp, Homo sapiens
  misc_feature (1538)..(1538): n is a, c, g, or t
tactctcgggccctggcctgctgtttttggcggggaaaacgactgcccacggaggaagagtgggagtttgccgcccgagggggcttgaagggtcaagtttacccatgggggaactggttccagccaaaccgcaccaacctgtggcagggaaagttccccaagggagacaaagctgaggatggcttccatggagtctccccagtgaatgctttccccgcccagaacaactacgggctctatgacctcctggggaacgtgtgggagtggacagcatcaccgtaccaggctgctgagcaggacatgcgcgtcctccggggggcatcctggatcgacacagctgatggctctgccaatcaccgggcccgggtcaccaccaggatgggcaacactccagattcagcctcagacaacctcggtttccgctgtgctgcagacgcaggccggccgccaggggagctgtaagcagccgggtggtgacaaggagaaaagccttctagggtcactgtcattccctggccatgttgcaaacagcgcaattccaagctcgagagcttcagcctcaggaaagaacttccccttccctgtctcccatccctctgtggcaggcgcctctcaccagggcaggagaggactcagcctcctgtgttttggagaaggggcccaatgtgtgttgacgatggctgggggccaggtgtttctgttagaggccaagtattattgacacaggattgcaaacacacaaacaattggaacagagcactctgaaaggccattttttaagcattttaaaatctattctctccccctttctccctggatgattcaggaagctgacattgtttcctcaaggcagaattttcctggttctgttttctcagccagttgctgtggaaggagaatgctttctttgtggcctcatctgtggtttcgtgtccctctgaaggaaactagtttccactgtgtaacaggcagacatgtaactatttaaagcacagttcagtcctaaaagggtctgggagaaccagatgatgtactaggtgaagcattgcattgtgggaatcacaaagcaaatagtactccagaaagacaaatatcagaagcttcctattctttttttttttttttttttttttgagacagggtctttctctgttgcccaggctagagtgcactgggtgatcacggctcactctagccttgaattcctggggcccaagcaattttcccacctcagcctcctgagtagctgggactacaagtgtgcaccaccatgcctggctaattttttgaatttttgtagtgatgggatctcgctctgttgcccagggtggtctcgaactcctggcctcaagcgatcctcccacctcgacctcccaaagtgctgggattacaggtgtgagccacctcgcctgggcccccttctccatatgcctccaaaaacatgtccctggagagtagcctgctcccacactgtcactggatgtcatggggccaataaaatctcctgcaattgtgaaaaaaaaataaagtcgagcgcncgtgaa

SEQ ID NO: 257389 - DNA, 360 bp, Homo sapiens
tttgctttgagagcctaatgattctaagatattgaagggttttgggtgctatgctcaggagtttggatattattgttttcaggaatttaagaatgataatatgtattgagcactaactacatgttgggagtttttttgtttgagacacagtttcacttttgttgcccgggctggggtgcaatggcatgacctcggcttaccgcaagctccgcctcccgggttcaagcaattctcctgcctcagctactcgggagccagaggcaggagaatggcgtgaacccaggaggcagagcttgcagtgagccgagattgcaccactgcactccagcctgggcgacagagcgagattccatctcaaaa

SEQ ID NO: 257390 - DNA, 105 bp, Homo sapiens
  misc_feature (7)..(12): n is a, c, g, or t
  misc_feature (16)..(16): n is a, c, g, or t
  misc_feature (23)..(23): n is a, c, g, or t
agaggannnnnngaantgttggntggatggatggatggatggatggatggatggatggatggatggactatccaatctagtgaattccatgaaatgctcaatgga
